(19) United States
(12) Patent Application Publication
(10) Pub. No.: US 2025/0327064 A1
(43) Pub. Date: Oct. 23, 2025

(54) PREPARATION OF LONG READ NUCLEIC ACID LIBRARIES

(71) Applicant: Illumina, Inc., San Diego, CA (US)

(72) Inventors: Heather Meinholz, Cottage Grove, WI (US); Daniel Gerhardt, Madison, WI (US); Joshua Burgess, Sun Prairie, WI (US); Leigh Graham Monahan, Stanmore (AU); Jennifer Dennin, Mt. Horeb, WI (US); Stephen Paul Bruinsma, Madison, WI (US); M. Maggie O'Meara, Madison, WI (US); Aaron Earl Darling, Hornsby (AU); Johnathan Parker, Dane, WI (US); Stewart MacArthur, Cambridge (GB); Denise Raterman, Madison, WI (US); Feng Chen, Castro Valley, CA (US); Tina Huang, Los Altos, CA (US); Tiffany Truong, San Francisco, CA (US); Brian Hawks, San Diego, CA (US); Esther Musgrave-Brown, Cambridge (GB); Susan C. Verity, Cambridge (GB); Andrew Slatter, Cambridge (GB); David Tse, San Diego, CA (US)

(21) Appl. No.: 18/867,284

(22) PCT Filed: May 25, 2023
(86) PCT No.: PCT/US2023/067471

§ 371 Date: Nov. 19, 2024

Related U.S. Application Data
(60) Provisional application No. 63/365,361, filed on May 26, 2022.
(60) Provisional application No. 63/366,222, filed on Jun. 10, 2022.
(60) Provisional application No. 63/366,516, filed on Jun. 16, 2022.
(60) Provisional application No. 63/366,896, filed on Jun. 23, 2022.
(60) Provisional application No. 63/373,685, filed on Aug. 26, 2022.
(60) Provisional application No. 63/483,213, filed on Feb. 3, 2023.

(51) Int. Cl. C12N 15/10; C12Q 1/6806; C12Q 1/6853; C12Q 1/686; C12Q 1/6874

(52) U.S. Cl. CPC C12N 15/1031; C12N 15/1093; C12Q 1/6806; C12Q 1/6853; C12Q 1/686; C12Q 1/6874

(57) ABSTRACT

Some embodiments of the methods and compositions provided herein relate to obtaining long read information from short reads of a target nucleic acid. Some embodiments include steps to selectively generate, mark, and amplify long nucleic acid fragments. Some embodiments include enriching for certain sequences in the long fragments with selection probes directed to major histocompatibility complex (MHC) genes. Some embodiments also include fragmenting the long nucleic acid fragments into shorter fragments for sequencing, and informatically reconstructing a sequence of the target nucleic acid.

### RELATED APPLICATIONS

[0001] This application claims priority to U.S. Prov. App. No. 63/483,213 filed Feb. 3, 2023; U.S. Prov. App. No. 63/373,685 filed Aug. 26, 2022; U.S. Prov. App. No. 63/366,896 filed Jun. 23, 2022; U.S. Prov. App. No. 63/366,516 filed Jun. 16, 2022; U.S. Prov. App. No. 63/366,222 filed Jun. 10, 2022; and U.S. Prov. App. No. 63/365,361 filed May 26, 2022, which are each entitled “PREPARATION OF LONG READ NUCLEIC ACID LIBRARIES” and which are each incorporated by reference herein in its entirety.

### REFERENCE TO SEQUENCE LISTING

[0002] The present application is being filed along with a Sequence Listing in electronic format. The Sequence Listing is provided as a file entitled ILLINC736WO4, created May 18, 2023, which is approximately 56,599,384 bytes in size. The information in the electronic format of the Sequence Listing is incorporated herein by reference in its entirety.

### FIELD OF THE INVENTION

[0003] Some embodiments of the methods and compositions provided herein relate to obtaining long read information from short reads of a target nucleic acid. Some embodiments include steps to selectively generate, mark, and amplify long nucleic acid fragments. Some embodiments include enriching for certain sequences in the long fragments with selection probes directed to major histocompatibility complex (MHC) genes. Some embodiments also include fragmenting the long nucleic acid fragments into shorter fragments for sequencing, and informatically reconstructing a sequence of the target nucleic acid.

### BACKGROUND OF THE INVENTION

[0004] Current protocols for next-generation sequencing (NGS) of nucleic acid samples routinely employ a sample preparation process that converts DNA or RNA into a library of fragmented, sequenceable templates. Sample preparation methods often require multiple steps, material transfers, and expensive instruments to effect fragmentation, and therefore are often difficult, tedious, expensive, and inefficient.

[0005] In one approach, nucleic acid fragment libraries may be prepared using a transposome-based method where two transposon end sequences, one linked to a tag sequence, and a transposase form a transposome complex. The transposome complexes are used to fragment and tag target nucleic acids in solution to generate a sequencer-ready tagmented library. The transposome complexes may be immobilized on a solid surface, such as through a biotin molecule appended at the 5′ end of one of the two end sequences. Use of immobilized transposomes can provide advantages over solution-phase approaches by reducing hands-on and overall library preparation time, cost, and reagent requirements, lowering sample input requirements, and enabling the use of unpurified or degraded samples as a starting point for library preparation. However, certain portions of a genome may be underrepresented in libraries prepared using such transposomes.

### SUMMARY OF THE INVENTION

[0006] Some embodiments of the methods and compositions provided herein a method for preparing a nucleic acid library, comprising: (a) obtaining a plurality of transposomes comprising transposon adaptors, wherein the plurality of transposomes is immobilized on a solid support; (b) contacting a plurality of nucleic acid fragments with the plurality of transposomes to obtain a plurality of polynucleotides; (c) amplifying the plurality of polynucleotides to obtain amplified polynucleotides; and (d) adding library adapters to each end of the amplified polynucleotides, thereby obtaining the nucleic acid library.

[0007] In some embodiments, the solid support comprises a bead. In some embodiments, the plurality of the transposomes is immobilized on the bead at a density such that an average length of the plurality of polynucleotides is greater than about 1 kbp, 2 kbp, 5 kbp, 10 kbp, 15 kbp, 20 kbp, or 40 kbp; and/or wherein the average length of the plurality of polynucleotides is in a range from about 1 kbp to about 40 kbp, 1 kbp to about 30 kbp, 1 kbp to about 20 kbp, 5 kbp to about 20 kbp, 5 kbp to about 15 kbp, or 7 kbp to about 12 kbp. In some embodiments, the number of transposomes immobilized on the bead is no more than about 100 transposomes, 50 transposomes, 40 transposomes, 30 transposomes, 20 transposomes, or 10 transposomes. In some embodiments, the number of transposomes immobilized on the bead is no more than about 30 transposomes. In some embodiments, the plurality of the transposomes immobilized on the bead comprise a total activity such that an average length of the plurality of polynucleotides greater than about 1 kbp, 2 kbp, 5 kbp, 10 kbp, 15 kbp, 20 kbp, or 40 kbp; and/or wherein the average length of the plurality of polynucleotides is in a range from about 1 kbp to about 40 kbp, 1 kbp to about 30 kbp, 1 kbp to about 20 kbp, 5 kbp to about 20 kbp, 5 kbp to about 15 kbp, or 7 kbp to about 12 kbp. In some embodiments, the plurality of the transposomes immobilized on the bead comprise an activity in a range from about 0.05 AU/μl to about 0.25 0.05 AU/μl. In some embodiments, the plurality of the transposomes immobilized on the bead comprise an activity of about 0.075 AU/μl. In some embodiments, the transposon adapters comprise the same sequence. In some embodiments, the transposomes of the plurality of transposomes are the same. In some embodiments, the transposomes of the plurality of transposomes are B15 transposomes. In some embodiments, the transposon adapters comprise the nucleotide sequence: SEQ ID NO:01 (GTCTCGTGGGCTCGG).

[0008] In some embodiments, the step (c) comprises a mutagenesis PCR, such that mutations are introduced into amplified polynucleotides. In some embodiments, the mutagenesis PCR comprises amplifying the plurality of polynucleotides with a low bias DNA polymerase, and/or with a nucleotide analogue. In some embodiments, the nucleotide analogue comprises dPTP, and/or 8-oxo-dGTP. In some embodiments, the low bias DNA polymerase is a Thermococcal polymerase, or a functional derivative thereof. In some embodiments, the Thermococcal polymerase is derived from a Thermococcal strain selected from the group consisting of T. kodakarensis, T. siculi, T. celer and T. sp KS-1. In some embodiments, the mutagenesis PCR comprises no more than 12 cycles, 10 cycles, 9 cycles, 8 cycles, 7 cycles, 6 cycles, 5 cycles, 4 cycles, 3 cycles, or 2 cycles. In some embodiments, the mutagenesis PCR comprises no more than 6 cycles.

[0009] In some embodiments, a first end of a polynucleotide of the plurality of polynucleotides is capable of annealing to a second end of the polynucleotide of the plurality of polynucleotides; and/or, wherein a first end of an amplified polynucleotide is capable of annealing to a second end of the amplified polynucleotide. In some embodiments, step (c) further comprises a suppression PCR. In some embodiments, the suppression PCR comprises use of a single amplification primer. In some embodiments, the amplified polynucleotides have an average length greater than about 1 kbp, 2 kbp, 3 kbp, 4 kbp, 5 kbp, 10 kbp, 15 kbp, or 20 kbp. In some embodiments, the suppression PCR comprises no more than 16 cycles, 14 cycles, 10 cycles, 9 cycles, 8 cycles, 7 cycles, 6 cycles, 5 cycles, 4 cycles, 3 cycles, or 2 cycles. In some embodiments, the suppression PCR comprises no more than 6 cycles.

[0010] Some embodiments also include enriching for target nucleic acids in the amplified polynucleotides. Some embodiments also include enriching for target nucleic acids in the plurality of polynucleotides. In some embodiments, the enriching for target nucleic acids in the amplified polynucleotides is performed after performing the mutagenesis PCR, and before performing the suppression PCR. In some embodiments, the enriching for target nucleic acids in the amplified polynucleotides is performed after performing the suppression PCR. Some embodiments also include amplifying the target nucleic acids.

[0011] In some embodiments, step (d) comprises contacting the amplified polynucleotides with an additional plurality of transposomes comprising the library adapters. In some embodiments, the library adapters comprise (i) indexes, (ii) bridge amplification primer binding sites, and/or (iii) sequencing primer binding sites. Some embodiments also include enriching for target polynucleotides in the nucleic acid library.

[0012] In some embodiments, the enriching comprises hybridizing a plurality of selection probes with the amplified polynucleotides, the plurality of polynucleotides, and/or the nucleic acid library, wherein the selection probes of the plurality of selection probes comprise different nucleotide sequences from one another. In some embodiments, an average distance between two adjacent nucleotide sequences of the selection probes on a reference sequence of a genome is in a range from about 300 consecutive nucleotides to about 7,000 consecutive nucleotides; optionally, wherein the range is from about 500 consecutive nucleotides to about 5,000 consecutive nucleotides; optionally, wherein the range is from about 750 consecutive nucleotides to about 2,500 consecutive nucleotides; optionally, wherein the range is from about 750 consecutive nucleotides to about 1,500 consecutive nucleotides; and optionally, wherein the range is from about 900 consecutive nucleotides to about 1,200 consecutive nucleotides. In some embodiments, an average distance between two adjacent nucleotide sequences of the selection probes on a reference sequence of a genome is about 750, 1000, 1500, or 2000 consecutive nucleotides. In some embodiments, an average number of sites in a genome that each selection probe of the plurality of selection probes is capable of hybridizing to is no more than 50 different sites in the genome, to no more than 40 different sites in the genome, to no more than 30 different sites in the genome, to no more than 20 different sites in the genome. In some embodiments, each selection probe of the plurality of selection probes is capable of hybridizing to no more than 50 different sites in a genome, to no more than 40 different sites in a genome, to no more than 30 different sites in a genome, to no more than 20 different sites in a genome. In some embodiments, a selection probe capable of hybridizing to a site in the genome comprises at least 50, 60, 70, or 80 consecutive nucleotides complementary to at least 90% of a nucleotide sequence at the site in the genome.

[0013] In some embodiments, the plurality of selection probes comprise at least 50, 100, 200, 500, 1000, 5000 different selection probes. In some embodiments, each selection probe of the plurality of selection probes comprises a nucleotide sequence capable of hybridizing to a nucleotide sequence within human chromosome 6p21.1-6p21.3; to a nucleotide sequence between nucleotide sequences encoding MOG and COL11A2 in a human genome; and/or to a site in a major histocompatibility complex (MHC) locus of a human genome. In some embodiments, each selection probe of the plurality of selection probes comprises a nucleotide sequence having at least 90%, 95%, or 100% sequence identity to any one of SEQ ID NOs:02-58491. In some embodiments, each selection probe of the plurality of selection probes comprises a nucleotide sequence having at least 90%, 95%, or 100% sequence identity to any one of SEQ ID NOs:02-10120. In some embodiments, each selection probe of the plurality of selection probes comprises a nucleotide sequence having at least 90%, 95%, or 100% sequence identity to any one of SEQ ID NOs:02-4967. In some embodiments, the plurality of selection probes is attached to a substrate. In some embodiments, the substrate comprises a plurality of beads; optionally wherein the beads are magnetic.

[0014] Some embodiments also include amplifying the target polynucleotides. In some embodiments, an amount of the plurality of nucleic acid fragments is less than about 100 ng, 50 ng, 30 ng, 20 ng, 10 ng, 5 ng, or 1 ng. In some embodiments, the plurality of nucleic acid fragments is mammalian. In some embodiments, the plurality of nucleic acid fragments is human. In some embodiments, a plurality of nucleic acid fragments comprises genomic DNA.

[0015] Some embodiments of the methods and compositions provided herein a method for preparing a nucleic acid library, comprising: (a) obtaining a plurality of transposomes comprising transposon adaptors, wherein the plurality of transposomes is immobilized on a bead, wherein the transposomes of the plurality of transposomes are the same, (b) contacting a plurality of nucleic acid fragments with the plurality of transposomes to obtain a plurality of polynucleotides, wherein the plurality of the transposomes immobilized on the bead comprise a total activity such that an average length of the plurality of polynucleotides greater than about 1 kbp, 2 kbp, 5 kbp, 10 kbp, 15 kbp, 20 kbp, or 40 kbp; (c) amplifying the plurality of polynucleotides to obtain amplified polynucleotides by: (i) performing a mutagenesis PCR, such that mutations are introduced into amplified polynucleotides, and (ii) performing a suppression PCR; and (d) adding library adapters to each end of the amplified polynucleotides by contacting the amplified polynucleotides with an additional plurality of transposomes, thereby obtaining the nucleic acid library.

[0016] Some embodiments also include enriching for target nucleic acids in the amplified polynucleotides, and/or enriching for target nucleic acids in the nucleic acid library. In some embodiments, enriching for target nucleic acids in the amplified polynucleotides is performed prior to performing the suppression PCR. In some embodiments, enriching for target nucleic acids in the amplified polynucleotides is performed after performing the suppression PCR. In some embodiments, the enriching comprises hybridizing a plurality of selection probes with the amplified polynucleotides and/or the nucleic acid library.

[0017] In some embodiments, the enriching comprises hybridizing a plurality of selection probes with the amplified polynucleotides, the plurality of polynucleotides, and/or the nucleic acid library, wherein the selection probes of the plurality of selection probes comprise different nucleotide sequences from one another. In some embodiments, an average distance between two adjacent nucleotide sequences of the selection probes on a reference sequence of a genome is in a range from about 300 consecutive nucleotides to about 7,000 consecutive nucleotides; optionally, wherein the range is from about 500 consecutive nucleotides to about 5,000 consecutive nucleotides; optionally, wherein the range is from about 750 consecutive nucleotides to about 2,500 consecutive nucleotides; optionally, wherein the range is from about 750 consecutive nucleotides to about 1,500 consecutive nucleotides; and optionally, wherein the range is from about 900 consecutive nucleotides to about 1,200 consecutive nucleotides. In some embodiments, an average distance between two adjacent nucleotide sequences of the selection probes on a reference sequence of a genome is about 750, 1000, 1500, or 2000 consecutive nucleotides. In some embodiments, an average number of sites in a genome that each selection probe of the plurality of selection probes is capable of hybridizing to is no more than 50 different sites in the genome, to no more than 40 different sites in the genome, to no more than 30 different sites in the genome, to no more than 20 different sites in the genome. In some embodiments, each selection probe of the plurality of selection probes is capable of hybridizing to no more than 50 different sites in a genome, to no more than 40 different sites in a genome, to no more than 30 different sites in a genome, to no more than 20 different sites in a genome. In some embodiments, a selection probe capable of hybridizing to a site in the genome comprises at least 50, 60, 70, or 80 consecutive nucleotides complementary to at least 90%/6 of a nucleotide sequence at the site in the genome.

[0018] In some embodiments, the plurality of selection probes comprise at least 50, 100, 200, 500, 1000, 5000 different selection probes. In some embodiments, each selection probe of the plurality of selection probes comprises a nucleotide sequence capable of hybridizing to a nucleotide sequence within human chromosome 6p21.1-6p21.3; to a nucleotide sequence between nucleotide sequences encoding MOG and COL11A2 in a human genome; and/or to a site in a major histocompatibility complex (MIC) locus of a human genome. In some embodiments, each selection probe of the plurality of selection probes comprises a nucleotide sequence having at least 90%, 95%, or 100% sequence identity to any one of SEQ ID NOs:02-58491. In some embodiments, each selection probe of the plurality of selection probes comprises a nucleotide sequence having at least 90%, 95%, or 100% sequence identity to any one of SEQ ID NOs:02-10120. In some embodiments, each selection probe of the plurality of selection probes comprises a nucleotide sequence having at least 90%, 95%, or 100% sequence identity to any one of SEQ ID NOs:02-4967. In some embodiments, the plurality of selection probes is attached to a substrate; optionally, wherein the substrate comprises a plurality of beads; optionally wherein the beads are magnetic.

[0019] Some embodiments of the methods and compositions provided herein a method for determining a sequence of a target nucleic acid, comprising: performing any one of the foregoing methods; sequencing the nucleic acid library to obtain sequence reads; and assembling sequence reads to obtain the sequence of a target nucleic acid. In some embodiments, the assembling comprises comparing the sequence reads to a reference sequence. In some embodiments, the comparing comprises determining mutations introduced into the amplified polynucleotides during the mutagenesis PCR. In some embodiments, the reference sequence is obtained from the same nucleic acid sample as the plurality of nucleic acid fragments.

[0020] Some embodiments of the methods and compositions provided herein a kit comprising: a first bead-linked transposomes (BLT-1) reagent, wherein the BLT-1 transposomes comprises a first adaptor sequence; a mutagenesis reagent comprising a first primer, dPTPs, dNTPs, and a polymerase; a second bead-linked transposomes (BLT-2) reagent, wherein the BLT-2 transposomes comprise the first adaptor and a second adaptor; an amplification reagent comprising a first primer, a second primer, dNTPs, and a polymerase; wherein BLT-1 has a lower transposome density as compared to BLT-2; and wherein the first primer hybridizes to the first adaptor sequence and the second primer hybridizes to the second adaptor sequence. In some embodiments, BLT-2 has more than 10, 20, 50, 100, or 1000 times the transposome density as compared to BLT-1. In some embodiments, the first adaptor is B15 and the second adaptor is A14.

[0021] Some embodiments of the methods and compositions provided herein a system for preparing a nucleic acid library, comprising: (a) a first plurality of transposomes comprising transposon adaptors for tagmenting a plurality of nucleic acid fragments, wherein the first plurality of transposomes is immobilized on a first plurality of beads at a first density; (b) reagents for amplifying the plurality of polynucleotides to obtain amplified polynucleotides, wherein the amplifying comprising a mutagenesis PCR and/or a suppression PCR, wherein: (i) the first reagent for performing mutagenesis PCR comprise a low bias DNA polymerase and/or a nucleotide analogue; optionally, wherein the nucleotide analogue comprises dPTP, and/or 8-oxo-dGTP; and/or the low bias DNA polymerase is a Thermococcal polymerase, or a functional derivative thereof, optionally, wherein the Thermococcal polymerase is derived from a Thermococcal strain selected from the group consisting of T. kodakarensis, T. siculi, T. celer and T. sp KS-1, and (ii) the first reagents for performing suppression PCR comprise amplification primers having the same nucleotide sequence capable of hybridizing to the transposon adaptors; (c) a plurality of selection probes for enriching for target polynucleotides in the amplified polynucleotides; and (d) a second plurality of transposomes comprising library adaptors for adding library adaptors to each end of the amplified polynucleotides, wherein the second plurality of transposomes is immobilized on a second plurality of beads at a second density, wherein the first density is less than the second density.

[0022] Some embodiments of the methods and compositions provided herein a system for preparing a nucleic acid library, comprising: (a) a first plurality of transposomes for tagmenting a plurality of nucleic acid fragments to obtain a plurality of polynucleotides, wherein the first plurality of transposomes comprises transposon adaptors, wherein the first plurality of transposomes is immobilized on a solid support, optionally, wherein the solid support comprises a first plurality of beads; wherein: the first plurality of the transposomes is immobilized on the first plurality of beads at a density such that on contacting the first plurality of transposomes with the plurality of nucleic acid fragments the plurality of polynucleotides has an average length of the plurality of polynucleotides is greater than about 1 kbp, 2 kbp, 5 kbp, 10 kbp, 15 kbp, 20 kbp, or 40 kbp; and/or wherein the average length of the plurality of polynucleotides is in a range from about 1 kbp to about 40 kbp, 1 kbp to about 30 kbp, 1 kbp to about 20 kbp, 5 kbp to about 20 kbp, 5 kbp to about 15 kbp, or 7 kbp to about 12 kbp; the number of transposomes immobilized on the bead is no more than about 100 transposomes, 50 transposomes, 40 transposomes, 30 transposomes, 20 transposomes, or 10 transposomes, optionally, wherein the number of transposomes immobilized on the bead is no more than about 30 transposomes; the plurality of the transposomes immobilized on the bead comprise a total activity such that on contacting the first plurality of transposomes with the plurality of nucleic acid fragments the plurality of polynucleotides has an average length greater than about 1 kbp, 2 kbp, 5 kbp, 10 kbp, 15 kbp, 20 kbp, or 40 kbp; and/or wherein the average length of the plurality of polynucleotides is in a range from about 1 kbp to about 40 kbp, 1 kbp to about 30 kbp, 1 kbp to about 20 kbp, 5 kbp to about 20 kbp, 5 kbp to about 15 kbp, or 7 kbp to about 12 kbp; and/or the plurality of the transposomes immobilized on the bead comprise an activity in a range from about 0.05 AU/μl to about 0.25 0.05 AU/μl, optionally, wherein the plurality of the transposomes immobilized on the bead comprise an activity of about 0.075 AU/μl; (b) first reagents for amplifying the plurality of polynucleotides to obtain amplified polynucleotides; and (c) second reagents for adding library adaptors to each end of the amplified polynucleotides. In some embodiments, the transposon adapters comprise the same sequence, optionally, wherein the transposon adapters comprise the nucleotide sequence: SEQ ID NO:01 (GTCTCGTGGGCTCGG); and/or wherein the transposomes of the plurality of transposomes are the same, optionally, wherein the transposomes of the plurality of transposomes are B15 transposomes.

[0023] In some embodiments, the first reagents comprise reagents for performing mutagenesis PCR comprising a low bias DNA polymerase and/or a nucleotide analogue; optionally, wherein: the nucleotide analogue comprises dPTP, and/or 8-oxo-dGTP; and/or the low bias DNA polymerase is a Thermococcal polymerase, or a functional derivative thereof, optionally, wherein the Thermococcal polymerase is derived from a Thermococcal strain selected from the group consisting of T. kodakarensis, T. siculi, T. celer and T. sp KS-1. In some embodiments, the first reagents comprise reagents for performing suppression PCR comprising amplification primers having the same nucleotide sequence; optionally, wherein the amplification primers are capable of hybridizing to the transposon adaptors.

[0024] In some embodiments, the second reagents comprise a second plurality of transposomes comprising the library adaptors; and optionally, wherein the second plurality of transposomes has an activity such that on contacting the second plurality of transposomes with the amplified polynucleotides a library of nucleic acids is obtained and comprises the library adaptors and having an average length less than about 1 kb, 900 bp, 800, bp, 700 bp, 600 bp, 500 bp, 400 bp, 300 bp, 200 bp, or 100 bp. In some embodiments, the first plurality of the transposomes is immobilized on the beads at a density less than a density at which the second plurality of transposomes are immobilized on the second plurality of beads.

[0025] Some embodiments also include third reagents for enriching for target polynucleotides in the amplified polynucleotides, comprising a plurality of selection probes; optionally, wherein the plurality of selection probes is attached to a third plurality of beads. In some embodiments, an average distance between two adjacent nucleotide sequences of the selection probes on a reference sequence of a genome is in a range from about 300 consecutive nucleotides to about 7,000 consecutive nucleotides; optionally, wherein the range is from about 500 consecutive nucleotides to about 5,000 consecutive nucleotides; optionally, wherein the range is from about 750 consecutive nucleotides to about 2,500 consecutive nucleotides; optionally, wherein the range is from about 750 consecutive nucleotides to about 1,500 consecutive nucleotides; and optionally, wherein the range is from about 900 consecutive nucleotides to about 1,200 consecutive nucleotides; and optionally, wherein an average distance between two adjacent nucleotide sequences of the selection probes on a reference sequence of a genome is about 750, 1000, 1500, or 2000 consecutive nucleotides. In some embodiments, an average number of sites in a genome that each selection probe of the plurality of selection probes is capable of hybridizing to is no more than 50 different sites in the genome, to no more than 40 different sites in the genome, to no more than 30 different sites in the genome, to no more than 20 different sites in the genome. In some embodiments, each selection probe of the plurality of selection probes is capable of hybridizing to no more than 50 different sites in a genome, to no more than 40 different sites in a genome, to no more than 30 different sites in a genome, to no more than 20 different sites in a genome; and optionally, wherein a selection probe capable of hybridizing to a site in the genome comprises at least 50, 60, 70, or 80 consecutive nucleotides complementary to at least 90% of a nucleotide sequence at the site in the genome. In some embodiments, the plurality of selection probes comprise at least 50, 100, 200, 500, 1000, 5000 different selection probes. In some embodiments, each selection probe of the plurality of selection probes comprises a nucleotide sequence capable of hybridizing to a nucleotide sequence within human chromosome 6p21.1-6p21.3; to a nucleotide sequence between nucleotide sequences encoding MOG and COL11A2 in a human genome; and/or to a site in a major histocompatibility complex (MHC) locus of a human genome. In some embodiments, each selection probe of the plurality of selection probes comprises a nucleotide sequence having at least 90%, 95%, or 100% sequence identity to any one of SEQ ID NOs:02-58491. In some embodiments, each selection probe of the plurality of selection probes comprises a nucleotide sequence having at least 90%, 95%, or 100% sequence identity to any one of SEQ ID NOs:02-10120. In some embodiments, each selection probe of the plurality of selection probes comprises a nucleotide sequence having at least 90%, 95%, or 100% sequence identity to any one of SEQ ID NOs:02-4967.

[0026] In some embodiments, the plurality of nucleic acid fragments is mammalian. In some embodiments, the plurality of nucleic acid fragments is human. In some embodiments, the plurality of nucleic acid fragments comprises genomic DNA.

[0027] Some embodiments of the methods and compositions provided herein a kit comprising: a plurality of at least 50, 100, 1000, 2000, 3000, 4000, 5000, 10000, 20000, 30000, 40000 selection probes, wherein the selection probes are different from one another, and comprise a nucleotide sequence having at least 90%, 95%, or 100% sequence identity to any one of SEQ ID NOs:02-58491; and optionally: (i) a first plurality of transposomes comprising transposon adaptors for tagmenting a plurality of nucleic acid fragments, wherein the first plurality of transposomes is immobilized on a first plurality of beads at a first density; and (ii) a second plurality of transposomes comprising library adaptors for adding library adaptors to each end of the amplified polynucleotides, wherein the second plurality of transposomes is immobilized on a second plurality of beads at a second density, wherein the first density is less than the second density. In some embodiments, each selection probe of the plurality of selection probes comprises a nucleotide sequence having at least 90%, 95%, or 100% sequence identity to any one of SEQ ID NOs:02-10120, or to any one of SEQ ID NOs:02-4967.

### BRIEF DESCRIPTION OF THE DRAWINGS

[0028] FIG. 1 depicts an example embodiment of a workflow which includes: fragmenting long input DNA by high molecular weight (HMW) fragmentation and adding adapters, such as by tagmentation using low density bead linked transposomes (BLTs); long range PCR mutagenesis to introduce a signature into long fragments; further library preparation steps, such as additional tagmentation to obtain small fragments with adapters; sequencing and assembly of sequencing reads.

[0029] FIG. 2 depicts an example embodiment of a workflow which includes a long-read (iLR) pathway, and a reference pathway. The long-read pathway includes steps for: tagmentation; mutagenesis; bottlenecking (suppression) PCR. Both the long-read pathway and reference pathway share steps including: standard library preparation, such as tagmentation; sequencing; and assembly of sequencing reads.

[0030] FIG. 3A is a graph which relates to a purified bottlenecking PCR product run on an Agilent Bioanalyzer using a High Sensitivity DNA Kit.

[0031] FIG. 3B is a graph which relates to a purified final library prep product run on an Agilent Bioanalyzer using a High Sensitivity DNA Kit.

[0032] FIG. 4A depicts a graph of results using transposomes in solution at various concentration.

[0033] FIG. 4B depicts a graph of results for size distribution using BLTs.

[0034] FIG. 4C depicts graphs for a Staphylococcus aureus 4 Mb genome view, with samples at 4 million reads, GC content: 32.9%, size; 2.8 Mb. A; Nextera XT (soluble transposomes); B: Flex (BLT): 1 ng; C: Flex (BLT): 100 ng; D: Flex (BLT): colony direct.

[0035] FIG. 5 depicts a schematic for workflow steps including HMW fragmentation; and mutagenesis and suppression PCR in which smaller products form hairpins.

[0036] FIGS. 6A-6C depict graphs related to activity and fragment length. FIG. 6A is a graph of actual activity units (AU)/μl and median AU/μl versus build AU/μl for soluble transposomes (TSM), and BLTs having various densities/activities of transposomes: BLT at low density (BLT-LR) at 0.075 AU/μl, and TDER-BLT comprising A14 and B15 TSMs at 0.1 AU/pd, 0.2 AU/μl, and 0.5 AU/μl. In FIG. 6A, “TDER-BLR” is “TDER-BLT”. FIG. 6B is a graph of fragment size. FIG. 6C is a graph for average size for soluble TSM, and BLTs containing A14 and B15 TSMs, or B15 TSM only.

[0037] FIGS. 7A-7C depict graphs related to mutagenesis PCR for soluble TSM, and BLTs containing A14 and B15 TSMs, or B15 TSM only. FIG. 7A is a graph of mean yield (ng/μl). FIG. 7B is a graph for average size. FIG. 7C is a graph for mean average size.

[0038] FIGS. 8A-8C depict graphs related to bottleneck (suppression) PCR for soluble TSM, and BLTs containing A14 and B15 TSMs, or B15 TSM only. FIG. 8A is a graph of mean yield (ng/μl). FIG. 8B is a graph for size distribution. FIG. 8C is a graph for mean average size.

[0039] FIG. 9 depicts a graph for a sequencing metric (GC coverage) for soluble TSM, and BLTs containing A14 and B15 TSMs, or B15 TSM only.

[0040] FIGS. 10A and 10B depict graphs for a N50 sequencing metric for soluble TSM, and BLTs containing A14 and B15 TSMs, or B15 TSM only. N50 is the length of the shortest contig for which longer and equal length contigs cover at least 50% of the assembly. FIG. 10A depicts a graph for N50. FIG. 10B depicts a graph for N50 by regions.

[0041] FIG. 11 depicts a graph for a sequencing metric (fraction of bases with no coverage, left panel, and fraction of bases with <10× coverage, right panel) for soluble TSM, and BLTs containing A14 and B15 TSMs, or B15 TSM only.

[0042] FIG. 12 depict graphs of various BLT activities (Build AU/μl), and product average size (lower panel), total yield (middle panel), or fluorescent resonance energy transfer (FRET) (upper panel).

[0043] FIG. 13 depicts graphs of various BLT activities (Build AU/μl), and sequencing metrics including SLR coverage depth (lower panels), total bases (middle panels), or N50 (upper panels).

[0044] FIG. 14 depicts graphs of various BLT activities (Build AU/μl), and sequencing metrics including percent duplicated reads (lower panels), fraction of bases with <10× coverage (middle panels), or fraction of bases with no coverage (upper panels).

[0045] FIG. 15 depicts graphs of various BLT activities (AU/μl), and sequencing metrics including SLR coverage depth (lower panel), total bases (lower middle panel), redundancy (upper middle panel), or N50 (upper panel) with three different operators.

[0046] FIG. 16 depicts graphs of tagmentation yield (left panel) or tagmentation fragment length (right panel) for various amounts of input DNA.

[0047] FIG. 17 depicts graphs for various amounts of input DNA and mutagenesis yield (upper left panel), bottleneck yield (middle left panel), library yield (lower left panel), mutagenesis fragment length (upper right panel), bottleneck fragment length (middle right panel), and library fragment length (lower right panel).

[0048] FIG. 18 depicts graphs for various amounts of input DNA and sequencing metrics including: total bases (upper left panel), insert size (middle left panel), percent duplicated reads (lower left panel), total bases (upper right panel), insert size (middle right panel), and library fragment length (lower right panel). The right panels show the same data as the left panels, but without the 1000 ng data point.

[0049] FIG. 19 depicts graphs for various amounts of input DNA and sequencing metrics including: number of MQ0 reads (upper left panel), error rate (upper middle left panel), redundancy (lower middle left panel), N50 (lower left panel), number of MQ0 reads (upper right panel), error rate (upper middle right panel), redundancy (lower middle right panel), N50 (lower right panel). The right panels show the same data as the left panels, but without the 1000 ng data point.

[0050] FIG. 20 depicts graphs for various amounts of input DNA and sequencing metrics including: mode coverage (upper left panel), fraction of bases with no coverage (middle left panel), fraction of bases with <10× coverage (lower left panel), mode coverage (upper right panel), fraction of bases with no coverage (middle right panel), fraction of bases with <10× coverage (lower right panel). The right panels show the same data as the left panels, but without the 1000 ng data point.

[0051] FIG. 21 depicts a graph for various amounts of input DNA and sequencing metric (GC bias).

[0052] FIG. 22 depicts graphs for various input DNAs subjected to shearing for different periods of time, control input DNA, and HMW input DNA, and fragment size.

[0053] FIG. 23 depicts graphs for various input DNAs subjected to shearing for different periods of time, control input DNA, and HMW input DNA, and tagmentation yield (left panel) or tagmentation fragment length (right panel).

[0054] FIG. 24A depicts graphs for various input DNAs subjected to shearing for different periods of time, control input DNA, and HMW input DNA, and mutagenesis yield (left panel) or normalization yield (right panel).

[0055] FIG. 24B depicts graphs for various input DNAs subjected to shearing for different periods of time, control input DNA, and HMW input DNA, and bottleneck PCR yield (left panel) or post-bottleneck fragment length (right panel).

[0056] FIG. 25 depicts graphs for various input DNAs subjected to shearing for different periods of time, and HMW input DNA, and sequencing metrics: N50 (left panels) or redundancy (right panels).

[0057] FIG. 26 depicts graphs for various input DNAs subjected to shearing for different periods of time, and HMW input DNA, and sequencing metrics: SLR coverage (upper left panel), fraction with no coverage (middle left panel), fraction with <10× coverage (lower left panel), insert size (upper right panel), percent duplicated reads (upper middle right panel), insertion per 100 kb (lower middle right panel), or MQ0 (lower right panel).

[0058] FIG. 27 depicts graphs for various input DNAs subjected to shearing for different periods of time, and HMW input DNA, and a sequencing metric (GC bias).

[0059] FIG. 28 depicts an example overview for enrichment of ‘long fragments’ or ‘short fragments’ in a workflow.

[0060] FIG. 29 depicts an example timeline for enrichment of ‘long fragments’ or ‘short fragments’ in a workflow.

[0061] FIG. 30 depicts selection of probes with higher specificity in long fragments.

[0062] FIG. 31 depicts design of probes in regions adjacent to problematic regions of the genome.

[0063] FIG. 32 depicts embodiments including an example work flow for whole genome sequencing (WGS) with optional enrichment steps, and parallel standard short read (SR) library preparation.

[0064] FIG. 33 depicts use of 80mer probes with long fragments in problematic target regions, compared to use of probes with short fragments (upper panel); use of 80mer probes with flanked long difficult regions, compared to use of probes with short fragments (middle panel); and use of 80mer probes with long fragments in regions with infrequent probe coverage, compared to use of probes with short fragments (lower panel).

[0065] FIG. 34 depicts results of sequencing coverage for a targeted region using a method with long fragments and enrichment (ICLR with enrichment).

[0066] FIG. 35 depicts results of sequencing coverage for a targeted a 722 kb region in the MHC locus using a method with long fragments and enrichment.

[0067] FIG. 36 depicts results of sequencing coverage for a targeted a 426 kb region in the MHC locus that covered HLA-A, HLA-G, HLA-F using a method with long fragments and enrichment.

[0068] FIG. 37A depicts a graph for SNV precision and recall for methods which included (i) on market long reads; (ii) PCR free (tagmentation to provide short fragments); (iii) long fragments with enrichment using an MHC selection probe panel (ICLR-MHC enrichment); and (iv) long fragments without enrichment (ICLR-WGS).

[0069] FIG. 37B depicts a graph for Indel precision and recall for methods which included (i) on market long reads; (ii) PCR free (tagmentation to provide short fragments); (iii) long fragments with enrichment using an MHC selection probe panel (ICLR-MHC enrichment); and (iv) long fragments without enrichment (ICLR-WGS).

[0070] FIG. 38 depicts a graph for coverage in ACMG genes using methods which included long fragments with enrichment using an ACMG selection probe panel (enrichment) or long fragments without enrichment (WGS).

[0071] FIG. 39 depicts results of sequencing coverage for a TNNT2, a 22 kb gene which was fully phased in one phase block, using a method with long fragments and enrichment with an ACMG panel of selection probes.

[0072] FIG. 40A depicts results of sequencing coverage for APOB which was fully phased in one phase block, using a method with long fragments and enrichment with an ACMG panel of selection probes.

[0073] FIG. 40B depicts results of sequencing coverage for TMEM127 which was fully phased in one phase block, using a method with long fragments and enrichment with an ACMG panel of selection probes.

[0074] FIG. 41 depicts results of sequencing coverage for MSH6 using a method with long fragments and enrichment with an ACMG panel of selection probes (ICLR with enrichment), and a method with long fragments without enrichment (ICLR WGS).

[0075] FIG. 42A depicts a graph for SNV precision and recall for methods which included (i) on market long reads; (ii) PCR free (tagmentation to provide short fragments); (iii) long fragments with enrichment using an ACMG selection probe panel (ICLR-ACMG enrichment); and (iv) long fragments without enrichment (ICLR-WGS).

[0076] FIG. 42B depicts a graph for Indel precision and recall for methods which included (i) on market long reads; (ii) PCR free (tagmentation to provide short fragments); (iii) long fragments with enrichment using an ACMG selection probe panel (ICLR-ACMG enrichment); and (iv) long fragments without enrichment (ICLR-WGS).

[0077] FIG. 43A depicts a graph for SNV precision and recall for methods which included (i) on market long reads; (ii) PCR free (tagmentation to provide short fragments); (iii) long fragments with enrichment using a PGX selection probe panel (ICLR-PGX enrichment); and (iv) long fragments without enrichment (ICLR-WGS).

[0078] FIG. 43B depicts a graph for Indel precision and recall for methods which included (i) on market long reads; (ii) PCR free (tagmentation to provide short fragments); (iii) long fragments with enrichment using a PGX selection probe panel (ICLR-PGX enrichment); and (iv) long fragments without enrichment (ICLR-WGS).

[0079] FIG. 44A depicts three graphs comparing use of a first selection probe panel (SYD-C2-CMRG-230 bp) and a second selection probe panel (SYD-C2-CMRG-1 kb) for (i) total mutations in bases in region (upper left panel); (ii) percentage DUP mutant reads (upper right panel); and (iii) percentage on target unique mapped reads (lower panel).

[0080] FIG. 44B depicts a graph of normalized coverage between use of a first selection probe panel (SYD-C2-CMRG-230 bp) and a second selection probe panel (SYD-C2-CMRG-1 kb).

[0081] FIG. 44C depicts a comparison between results of sequencing coverage for HBG1 using a method (i) with long fragments and enrichment with an CMRG panel of selection probes (ICLR with enrichment); (ii) with long fragments without enrichment (ICLR WGS); and (iii) tagmentation with short reads (PCR free short read).

[0082] FIG. 45A depicts a graph for SNV precision and recall for methods which included (i) on market long reads; (ii) PCR free (tagmentation to provide short fragments); (iii) long fragments with enrichment using a CMRG selection probe panel (ICLR-CMRG enrichment); and (iv) long fragments without enrichment (ICLR-WGS).

[0083] FIG. 45B depicts a graph for Indel precision and recall for methods which included (i) on market long reads; (ii) PCR free (tagmentation to provide short fragments); (iii) long fragments with enrichment using a CMRG selection probe panel (ICLR-CMRG enrichment); and (iv) long fragments without enrichment (ICLR-WGS).

### DETAILED DESCRIPTION

[0084] Some embodiments of the methods and compositions provided herein relate to obtaining long read information from short reads of a target nucleic acid. Some embodiments include steps to selectively generate, mark, and amplify long nucleic acid fragments. Some embodiments include enriching for certain sequences in the long fragments with selection probes directed to major histocompatibility complex (MHC) genes. Some embodiments also include fragmenting the long nucleic acid fragments into shorter fragments for sequencing, and informatically reconstructing a sequence of the target nucleic acid.

[0085] Prior fragmentation methods typically generated a very wide distribution of fragment sizes such that even when aiming for large fragments, inevitably short fragments were included. Such short fragments are ‘wasted’ space, giving very little new information. Some embodiments provided herein preserve long (about 2,000-40,000 bp) fragments, mark them, and carry them through into a short-read portion of a workflow so they can then be reconstructed into their parent long fragments informatically. Shorter fragments are generally much less desirable, and may take up valuable sequencing space and informatics volume if they are included. Use of long fragments enables the use of a smaller number of selection probes to enrich for target sequences in the long fragments.

[0086] In prior short read library preps, most size selection was done by a combination of (1) initial fragmentation and (2) Solid-Phase Reversible Immobilization (SPRI)-based size selection. However, SPRI size selection primarily works on fragments smaller than about 60 Gbp in length. In contrast, suppression (“bottlenecking” or “bottleneck”) PCR acts on larger fragments. Suppression PCR entails appending complementary sequences on 5′ and 3′ ends of the same DNA molecule, such that during a PCR annealing step, there is a direct competition between annealing of a primer and annealing of opposite ends of the same DNA fragment. When the PCR primer anneals, extension proceeds as normal, and the fragment is amplified. When opposite ends anneal, for example by forming a hairpin, there is no templated 3′ hydroxyl to extend, and so amplification does not occur. A key to suppression PCR and size selection is that for shorter fragments, the opposite ends of the same fragment are closer together and therefore more likely to find each other and anneal. Under optimized conditions, this leads to preferential amplification of longer fragments. Aspects of suppression PCR useful with embodiments provided herein are described in Dai, Z-M, et al (2006) J. of Biotech 128:435-443; and Rand K. N. et al., (2005) N.A. Res. 33:e127 which are incorporated by reference in their entireties.

[0087] In some embodiments provided herein, complementary 5′ and 3′ ends are achieved by an initial tagmentation step with B15 transposomes only. Typically, tagmentation would be performed with a combination of A14 and B15 transposomes so that the different sequences can be used for read 1 and read 2 primers during subsequent sequencing. However, because the initial tagmentation in certain embodiments provided herein is used to provide a landing spot for PCR, different sequences for read 1 and read 2 primers do not need to be added at this stage. In contrast to SPRI size selection, it was observed that by adding cycles of suppression PCR, the number of smaller fragments under 2000 bp in length can be dramatically reduced.

[0088] In some embodiments provided herein a workflow includes: fragmenting long input DNA by high molecular weight (HMW) fragmentation and adding adapters, such as by tagmentation using low density bead linked transposomes (BLTs); long range PCR mutagenesis to introduce a signature into long fragments; further library preparation steps, such as additional tagmentation to obtain small fragments with adapters; sequencing and assembly of sequencing reads (FIG. 1). In some embodiments provided herein a workflow includes a long-read (“iLR” or “ILR”) pathway, and a reference pathway. The long-read pathway includes steps for: tagmentation; mutagenesis; bottlenecking (suppression) PCR. Both the long-read pathway and reference pathway share steps including: standard library preparation, such as tagmentation; sequencing; and assembly of sequencing reads (FIG. 2).

[0089] Certain aspects useful with embodiments of the methods and compositions provided herein are disclosed in U.S. Pat. Nos. 9,040,256; 9,683,230; and U.S. 2021/0010008 which are each incorporated by reference in its entirety.

### Definitions

[0090] As used herein, the term “nucleic acid” refers to a polynucleotide sequence, or fragment thereof. A nucleic acid can comprise nucleotides. A nucleic acid can be exogenous or endogenous to a cell. A nucleic acid can exist in a cell-free environment. A nucleic acid can be a gene or fragment thereof. A nucleic acid can be DNA. A nucleic acid can be RNA. A nucleic acid can comprise one or more analogs (e.g., altered backbone, sugar, or nucleobase). Some non-limiting examples of analogs include: 5-bromouracil, peptide nucleic acid, xeno nucleic acid, morpholinos, locked nucleic acids, glycol nucleic acids, threose nucleic acids, dideoxynucleotides, cordycepin, 7-deaza-GTP, fluorophores (e.g., rhodamine or fluorescein linked to the sugar), thiol containing nucleotides, biotin linked nucleotides, fluorescent base analogs, CpG islands, methyl-7-guanosine, methylated nucleotides, inosine, thiouridine, pseudouridine, dihydrouridine, queuosine, and wyosine. “Nucleic acid”, “polynucleotide, “target polynucleotide”, and “target nucleic acid” can be used interchangeably. As used herein, “kbp” can refer to kilobase pairs and relates to a length of a double-stranded nucleic acid. The length of a nucleic acid may also be referred to in terms of a number of nucleotides, such as consecutive nucleotides.

[0091] As used herein “transposome” includes a complex comprising of at least one transposase enzyme and a transposon recognition sequence, such as a transposon adapter. In some such systems, the transposase binds to a transposon recognition sequence to form a functional complex that is capable of catalyzing a transposition reaction. In some aspects, the transposon recognition sequence is a double-stranded transposon end sequence. The transposase, or integrase, binds to a transposase recognition site in a target nucleic acid and inserts the transposon recognition sequence into a target nucleic acid. In some such insertion events, one strand of the transposon recognition sequence (or end sequence) is transferred into the target nucleic acid, resulting also in a cleavage event. Exemplary transposition procedures and systems that can be readily adapted for use with the transposases of the present disclosure are described, for example, in WO10/048605, U.S. 2012/0301925, U.S. 2012/13470087, or U.S. 2013/0143774, each of which is incorporated herein by reference in its entirety.

[0092] In some embodiments, the transposome complex is a dimer of two molecules of a transposase. In some embodiments, the transposome complex is a homodimer, wherein two molecules of a transposase are each bound to first and second transposons of the same type (e.g., the sequences of the two transposons bound to each monomer are the same, forming a “homodimer”). In some embodiments, the compositions and methods described herein employ two populations of transposome complexes. In some embodiments, the transposases in each population are the same. In some embodiments, the transposome complexes in each population are homodimers, wherein the first population has a first adaptor sequence in each monomer and the second population has a different adaptor sequence in each monomer.

[0093] As used herein “solid surface,” “solid support,” and other grammatical equivalents refer to any material that is appropriate for or can be modified to be appropriate for the attachment of the transposome complexes. As will be appreciated by those in the art, the number of possible substrates is multitude. Possible substrates include, but are not limited to, glass and modified or functionalized glass, plastics (including acrylics, polystyrene and copolymers of styrene and other materials, polypropylene, polyethylene, polybutylene, polyurethanes, TEFLON, etc.), polysaccharides, nylon or nitrocellulose, ceramics, resins, silica or silica-based materials including silicon and modified silicon, carbon, metals, inorganic glasses, plastics, optical fiber bundles, beads, paramagnetic beads, and a variety of other polymers. In some such embodiments, the transposome complex is immobilized on the solid support via the linker. In some further embodiments, the solid support comprises or is a tube, a well of a plate, a slide, a bead, or a flowcell, or a combination thereof. In some further embodiment, the solid support comprises or is a bead. In one embodiment, the bead is a paramagnetic bead. In some of the methods and compositions presented herein, transposome complexes are immobilized to a solid support. In one embodiment, the solid support is a bead. Suitable bead compositions include, but are not limited to, plastics, ceramics, glass, polystyrene, methylstyrene, acrylic polymers, paramagnetic materials, thoria sol, carbon graphite, titanium dioxide, latex or cross-linked dextrans such as Sepharose, cellulose, nylon, cross-linked micelles and TEFLON, as well as any other materials outlined herein for solid supports.

[0094] As used herein, “tagmentation: includes to the modification of DNA by a transposome complex comprising transposase enzyme complexed with adaptors comprising transposon end sequence. Tagmentation results in the simultaneous fragmentation of the DNA and ligation of the adaptors to the 5′ ends of both strands of duplex fragments. Following a purification step to remove the transposase enzyme, additional sequences can be added to the ends of the adapted fragments, for example by PCR, ligation, or any other suitable methodology known to those of skill in the art.

### Certain Methods for Preparing Nucleic Acid Libraries

[0095] Some embodiments of the methods and compositions providing herein include preparing a nucleic acid library. Some such embodiments include (a) obtaining a plurality of transposomes comprising transposon adaptors, wherein the plurality of transposomes is immobilized on a solid support; (b) contacting a plurality of nucleic acid fragments with the plurality of transposomes to obtain a plurality of polynucleotides; (c) amplifying the plurality of polynucleotides to obtain amplified polynucleotides; and (d) adding library adapters to each end of the amplified polynucleotides, thereby obtaining the nucleic acid library. In some embodiments, an amount of the plurality of nucleic acid fragments is less than about 100 ng, 50 ng, 30 ng, 20 ng, 10 ng, 5 ng, or 1 ng.

[0096] Some embodiments include an initial tagmentation step which fragments the plurality of nucleic acids fragments and adds an adaptor to each end of the products of the tagmentation. The initial tagmentation is limited such that the products of the tagmentation are longer than a tagmentation where the activity of transposomes is not limited.

[0097] Certain aspects useful with embodiments of the methods and compositions provided herein are disclosed in U.S. Pat. Nos. 9,115,396; 9,080,211; 9,040,256. U.S. patent application publication 2014/0194324, each of which is incorporated herein by reference in its entirety.

[0098] In some embodiments, the solid support comprises a bead. In some such embodiments, the transposomes are bead-linked transposomes (BLTs). In some embodiments, the activity of the transposomes on the beads is such that a tagmentation reaction with the BLTs and the plurality of nucleic acid fragments results in long polynucleotides, such as polynucleotides an having average length of the plurality of polynucleotides greater than about 1 kbp, 2 kbp, 5 kbp, 10 kbp, 15 kbp, 20 kbp, or 40 kbp; and/or wherein the average length of the plurality of polynucleotides is in a range from about 1 kbp to about 40 kbp, 1 kbp to about 30 kbp, 1 kbp to about 20 kbp, 5 kbp to about 20 kbp, 5 kbp to about 15 kbp, or 7 kbp to about 12 kbp. For example, the transposomes can be bound at a low density on the beads; and/or have a low tagmentation activity. In some embodiments, the number of transposomes immobilized on the bead is no more than about 100 transposomes, 50 transposomes, 40 transposomes, 30 transposomes, 20 transposomes, or 10 transposomes. In some embodiments, the number of transposomes immobilized on the bead is no more than about 30 transposomes. In some embodiments, the plurality of the transposomes immobilized on the bead comprise a total activity such that an average length of the plurality of polynucleotides greater than about 1 kbp, 2 kbp, 5 kbp, 10 kbp, 15 kbp, 20 kbp, or 40 kbp; and/or wherein the average length of the plurality of polynucleotides is in a range from about 1 kbp to about 40 kbp, 1 kbp to about 30 kbp, 1 kbp to about 20 kbp, 5 kbp to about 20 kbp, 5 kbp to about 15 kbp, or 7 kbp to about 12 kbp. In some embodiments, the plurality of the transposomes immobilized on the bead comprise a tagmentation activity in a range from about 0.05 AU/μl to about 0.25 AU/μl. In some embodiments, the plurality of the transposomes immobilized on the bead comprise a tagmentation activity of about 0.075 AU/μl.

[0099] In some embodiments, the transposomes on the beads are the same. For example, in some embodiments, the transposon adapters comprise the same sequence. In some embodiments, the transposomes of the plurality of transposomes are B15 transposomes. In some embodiments, the transposon adapters comprise the nucleotide sequence. SEQ ID NO:01 (GTCTCGTGGGCTCGG).

[0100] Some embodiments also include steps to add a signature to the products of the initial tagmentation. For example, a signature can be added into the sequence of the library products by steps that include limited mutagenesis. In some embodiments, step (c) comprises a mutagenesis PCR, such that mutations are introduced into amplified polynucleotides. In some embodiments, the mutagenesis PCR comprises amplifying the plurality of polynucleotides with a low bias DNA polymerase, and/or with a nucleotide analogue. In some embodiments, the nucleotide analogue comprises dPTP (such as, 6H,8H-3,4-Dihydro-pyrimido(4,5-c)(1,2)oxazin-7-one-8-β-D-2′-deoxy-ribofuranoside-5′-triphosphate), and/or 8-oxo-dGTP. dP contains the bicyclic pyrimidine analog 3,4-dihydro-8H-pyrimido-[4,5-C][1,2]oxazin-7-one. In some embodiments, the low bias DNA polymerase is a Thermococcal polymerase, or a functional derivative thereof. In some embodiments, the Thermococcal polymerase is derived from a Thermococcal strain selected from the group consisting of T. kodakarensis, T. siculi, T. celer and T. sp KS-1. In some embodiments, the mutagenesis PCR comprises no more than 12 cycles, 10 cycles, 9 cycles, 8 cycles, 7 cycles, 6 cycles, 5 cycles, 4 cycles, 3 cycles, or 2 cycles. In some embodiments, the mutagenesis PCR comprises no more than 6 cycles.

[0101] Some embodiments also include a bottlenecking or suppression PCR step to enrich for longer polynucleotides. For example, shorter amplified polynucleotides form hairpins, while longer amplified polynucleotides may be further amplified. In other words, the bottlenecking or suppression PCR can be biased against the amplification of shorter nucleic acids in a mixture of nucleic acids of different lengths. Some such embodiments can enrich for longer fragments. In some such embodiments, a first end of a polynucleotide of the plurality of polynucleotides is capable of annealing to a second end of the polynucleotide of the plurality of polynucleotides; and/or, wherein a first end of an amplified polynucleotide is capable of annealing to a second end of the amplified polynucleotide. In some embodiments, the suppression PCR comprises use of a single amplification primer. In some embodiments, the amplified polynucleotides have an average length greater than about 1 kbp, 2 kbp, 3 kbp, 4 kbp, 5 kbp, 10 kbp, 15 kbp, or 20 kbp. In some embodiments, the suppression PCR comprises no more than 16 cycles, 14 cycles, 10 cycles, 9 cycles, 8 cycles, 7 cycles, 6 cycles, 5 cycles, 4 cycles, 3 cycles, or 2 cycles. In some embodiments, the suppression PCR comprises no more than 6 cycles.

[0102] Detailed descriptions of certain embodiments of suppression PCR are found in, e.g., U.S. Pat. No. 5,565,340 and Siebert et al., Nucleic Acids Res., 23(6):1087-1088 (1995). Briefly, the inverted repeat sequences function as suppression tails by competing with the suppression PCR primer for complementary binding. The inverted repeats tend to anneal each other, thereby preventing PCR primer binding. Since shorter amplicons undergo inverted repeat annealing more often than longer amplicons, the suppression PCR favors generating long amplicons.

[0103] Some embodiments also include enriching for target nucleic acids in the amplified polynucleotides, such as products of the suppression PCR. In some embodiments, the enriching comprises hybridizing a plurality of selection probes with the amplified polynucleotides. In some embodiments, the plurality of selection probes lack sequences capable of hybridizing to a repetitive genomic DNA element. In some embodiments, the repetitive genomic DNA element is selected from a tandem repeat, an Alu repeat, a short interspersed nuclear element (SINE), a long interspersed nuclear element (LINE), an integrated viral sequence, a viral long terminal repeat (LTR), and a transposon. Some embodiments also include amplifying the target nucleic acids.

[0104] Some embodiments also include preparing a library of shorter fragments from the products of the suppression PCR, and/or the enrichment. For example, the products of the suppression PCR, and/or the enrichment can undergo an additional tagmentation. In some embodiments, step (d) comprises contacting the amplified polynucleotides with an additional plurality of transposomes. In some embodiments, the additional plurality of transposomes comprise transposon adapters comprising (i) indexes, (ii) bridge amplification primer binding sites, and/or (iii) sequencing primer binding sites. An example of a bridge amplification primer binding site includes a sequence capable of binding a capture probe on a surface, wherein the capture probe comprises a primer extended during bridge amplification on the surface.

[0105] Some embodiments also include enriching for target polynucleotides in the library of nucleic acids. In some embodiments, the enriching comprises hybridizing a plurality of selection probes with the library of nucleic acids, wherein the plurality of selection probes is capable of specifically hybridizing with the target polynucleotides. Some embodiments also include amplifying the target polynucleotides.

[0106] Some embodiments include methods for preparing a nucleic acid library, comprising: (a) obtaining a plurality of transposomes comprising transposon adaptors, wherein the plurality of transposomes is immobilized on a bead, and wherein the transposomes of the plurality of transposomes are the same; (b) contacting a plurality of nucleic acid fragments with the plurality of transposomes to obtain a plurality of polynucleotides, wherein the plurality of the transposomes immobilized on the bead comprise a total activity such that an average length of the plurality of polynucleotides greater than about 1 kbp, 2 kbp, 5 kbp, 10 kbp, 15 kbp, 20 kbp, or 40 kbp; and/or wherein the average length of the plurality of polynucleotides is in a range from about 1 kbp to about 40 kbp, 1 kbp to about 30 kbp, 1 kbp to about 20 kbp, 5 kbp to about 20 kbp, 5 kbp to about 15 kbp, or 7 kbp to about 12 kbp; (c) amplifying the plurality of polynucleotides to obtain amplified polynucleotides by: (i) performing a mutagenesis PCR, such that mutations are introduced into amplified polynucleotides, and (ii) performing a suppression PCR; and (d) adding library adapters to each end of the amplified polynucleotides by contacting the amplified polynucleotides with an additional plurality of transposomes, thereby obtaining the nucleic acid library. An example embodiment of a workflow is depicted in FIG. 32 which includes whole genome sequencing (WGS) which includes: fragmenting genomic DNA into long fragments by limited tagmentation; land-marking or adding a signature to the long fragments; amplifying the long fragments with a bias against shorter fragments; tagmenting products prior to sequencing. Optional steps include enrichment of the amplified long fragments with a panel of selection probes, such as capture probes with certain sequences. A parallel workflow includes tagmenting the genomic DNA to form a library of short fragments, such as a standard short read (SR) library, and sequencing the library of short fragments.

[0107] Some embodiments also include enriching for target nucleic acids in the amplified polynucleotides. In some embodiments, the enriching comprises hybridizing a plurality of selection probes with the amplified polynucleotides, wherein the plurality of selection probes is capable of specifically hybridizing with the target nucleic acids. In some embodiments, the plurality of selection probes lack sequences capable of hybridizing to a repetitive genomic DNA element. In some embodiments, the repetitive genomic DNA element is selected from a tandem repeat, an Alu repeat, a short interspersed nuclear element (SINE), a long interspersed nuclear element (LINE), an integrated viral sequence, a viral long terminal repeat (LTR), and a transposon. Some embodiments also include amplifying the target nucleic acids.

[0108] Some embodiments also include enriching for target polynucleotides in the library of nucleic acids. In some embodiments, the enriching comprises hybridizing a plurality of selection probes with the library of nucleic acids, wherein the plurality of selection probes is capable of specifically hybridizing with the target polynucleotides. Some embodiments also include amplifying the target polynucleotides.

[0109] Some embodiments also include methods for determining a sequence of a target nucleic acid, comprising preparing a nucleic acid library by any one of the embodiments above, sequencing the library of nucleic acids to obtain sequence reads; and assembling sequence reads to obtain the sequence of a target nucleic acid. In some embodiments, the assembling comprises comparing the sequence reads to a reference sequence. In some embodiments, the reference sequence is obtained from the same nucleic acid sample as the plurality of nucleic acid fragments.

### Target Enrichment

[0110] Certain embodiments provided herein include enriching for target nucleic acids during preparation of a nucleic acid library, such as major histocompatibility complex (MHC) genes. FIG. 32 shows an example work flow which includes steps for whole genome sequencing (WGS) with additional enrichment steps. In some embodiments, the nucleic acid library is prepared from a nucleic acids sample with bead-linked transposomes to generate long tagmented polynucleotides. The polynucleotides are marked with methods, such as mutagenesis amplification. In an optional step, suppression/bottlenecking PCR is performed where amplification is biased against shorter self-annealing nucleic acids. Target nucleic acids can then be enriched for in the amplified nucleic acids using selection probes. Additional steps can include a further tagmentation step to generate shorter library nucleic, sequencing the library nucleic acids, and comparing the generated sequence with a reference sequence obtained from the same nucleic acid sample.

[0111] Enrichment efficiency is increased compared to conventional library preparation methods because hybridization of selection probes is to long tagmented polynucleotides. For example, specificity, such as percentage hybridization to target, directly affects the amount of sequencing needed to achieve target coverage depth. High specificity hybridization to target can be difficult to achieve in long repetitive regions and pseudogenes. However, long fragment hybridization has several advantages over short fragment. As shown in FIG. 33, long fragment hybridization allows removal of ineffective probes; allows strategic placement of probes, such as adjacent to problematic genomic regions; and allows the use of fewer probes to cover a region previously covered by many probes. Targeted enrichments can achieve cost-effective human whole genome coverage. For example, genomic regions that may have been typically underrepresented in conventional nucleic acid libraries can be targeted with selection probes. Some embodiments provided herein include the use of certain panels of selection probes, such panels a Major Histocompatibility Complex (MHC) panel directed to the MHC region; an American College of Medical Genetics and Genomics (ACMG) panel directed to genes for which specific mutations are known to be causative of disorders that are clinically actionable; a pharmacogenetic (PGX) panel directed to genes commonly targeted by pharmacogenetic testing assays; a challenging medically relevant gene (CMRG) panel directed to medically relevant autosomal genes that may be under-represented in certain tests due to repeats or polymorphic complexities; and a comprehensive genome wide (dark) panel directed to genomic regions typically underrepresented in sequencing reads.

### Major Histocompatibility Complex (MHC) Panel

[0112] Some embodiments provided herein relate to targeting the MHC region of the human genome. Some such embodiments include generation and/or use of a selection probe panel to target the MHC region. The MHC region is a large locus located on the short arm of human chromosome 6 (6p21.1-6p21.3), and contains highly polymorphic genes that code for cell surface proteins essential for the adaptive immune system. The region is challenging to obtain sequence information due to the presence of a high level of repetitive sequences, sequence homology, pseudogenes, and a wide variety of alleles in the population. Precise genotyping and phasing of the MHC region is challenging but highly clinically desirable for applications such as organ transplantation and drug discovery.

### American College of Medical Genetics (ACMG) Panel

[0113] Some embodiments provided herein relate to targeting a panel of genes, such as an American College of Medical Genetics (ACMG) panel of genes. Some such embodiments include generation and/or use of a selection probe panel to target the ACMG genes. A selection probe panel was generated from a list of genes compiled by ACMG for which specific mutations are known to be causative of disorders that are clinically actionable. Miller D. T., et al., Genet Med. 2022 July; 24(7):1407-1414. doi: 10.1016/j.gim.2022.04.006.

[0114] A selection probe panel was designed to precisely call variants and phase in these genes. The panel included 78 unique genes in ACMG SF v3.1, and targeted full genes. The panel size was about 6.8 Mbp. The ACMG genes include those listed in TABLE 1A.

TABLE 1A
ACMG genes

ACTA2, ACTC1, ACVRL1, APC, APOB, ATP7B, BAG3, BMPR1A, BRCA1, BRCA2,
BTD, CACNA1S, CASQ2, COL3A1, DES, DSC2, DSG2, DSP, ENG, FBN1, FLNC, GAA,
GLA, HFE, HNF1A, KCNH2, KCNQ1, LDLR, LMNA, MAX, MEN1, MLH1, MSH2,
MSH6, MUTYH, MYBPC3, MYH11, MYH7, MYL2, MYL3, NF2, OTC, PALB2, PCSK9,
PKP2, PMS2, PRKAG2, PTEN, RB1, RBM20, RET, RPE65, RYR1, RYR2, SCN5A,
SDHAF2, SDHB, SDHC, SDHD, SMAD3, SMAD4, STK11, TGFBR1, TGFBR2,
TMEM127, TMEM43, TNNC1, TNNI3, TNNT2, TP53, TPM1, TRDN, TSC1, TSC2, TTN,
TTR, VHL, WT1

### Pharmacogenetic (PGX) Panel

[0115] Some embodiments provided herein relate to targeting a panel of genes, such as a panel of pharmacogenetic (PGX) genes. Some such embodiments include generation and/or use of a selection probe panel to target the PGX genes. A selection probe panel was generated for genes commonly targeted by pharmacogenetic testing assays. Kalman L. V. et al., Clin Pharmacol Ther. 2016 February; 99(2): 172-185. doi:10.1002/cpt.280. Genetic variation is known to influence the way individual respond to therapeutics. Accurately detecting functional haplotypes, such as haplotypes associated with protein activity levels (“star alleles”) in clinically actionable pharmacogenetic genes is crucial to implementation of personalized medicine. The panel was generated to achieve highly accurate genotyping and star allele calling in such genes. The panel included 98 genes that are important in pharmacogenetics, targeting full genes. The panel size was about 8.1 Mbp. The genes include those listed in TABLE 1B.

TABLE 1B
PGX genes

ABCB1, ABCG2, ABL1, ACE, ADH1A, ADH1B, ADH1C, ADRA2A, ADRB1, ADRB2,
AHR, ALDH1A1, ALK, ALOX5, ANKK1, ASL, BCHE, BCR, BRAF, BRCA1,
CACNA1S, CFTR, COMT, CYP1A1, CYP1A2, CYP2A13, CYP2A6, CYP2B6,
CYP2C18, CYP2C19, CYP2C8, CYP2C9, CYP2D6, CYP2E1, CYP2J2, CYP3A4,
CYP3A5, CYP3A7, CYP4F2, DPYD, DRD2, EGFR, ERBB2, F2, F5, G6PD, GRIK4,
GRK4, GRK5, GSTM1, GSTP1, HLA-A, HLA-B, HLA-C, HLA-DPB1, HLA-DQA1,
HLA-DQB1, HLA-DRA, HLA-DRB1, HMGCR, HTR2A, HTR2C, IFNL3, IFNL4,
KCNH2, KCNJ11, KIT, KRAS, MTHFR, NAT1, NAT2, NQO1, NR1I2, NRAS, NUDT15,
OPRM1, P2RY1, P2RY12, PTGIS, PTGS2, RYR1, SCN5A, SLC15A2, SLC19A1,
SLC22A1, SLC22A2, SLCO1B1, SLCO2B1, SULT1A1, TPMT, TYMS, UGT1A1,
UGT1A4, UGT2B15, UGT2B17, UGT2B7, VDR, VKORC1

### Challenging Medically Relevant Gene (CMRG) Panel

[0116] Some embodiments provided herein relate to targeting a panel of genes, such as a panel of challenging medically relevant genes (CMRG). Some such embodiments include generation and/or use of a selection probe panel to target the CMRG. The repetitive nature and complexity of some medically relevant genes poses a challenge for their accurate analysis in a clinical setting (Wagner J., et al., (2022) Nat Biotechnol. 40:672-680). The Genome in a Bottle (GIAB) Consortium has provided variant benchmark sets, but these exclude nearly four hundred medically relevant genes due to their repetitiveness or polymorphic complexity. Multiple regions of the genome are not fully resolved in existing benchmarks due to repetitive sequence, segmental duplications, and complex variants, such as multiple nearby SNVs, INDELs, and/or SVs. Goldfeder R L et al. Genome Med. 8, 1-12 (2016).

[0117] About 5175 gene symbols have been previously identified from the following sources: (1) 4,773 potentially medically-relevant genes from the databases OMIM, HGMD, and ClinVar which includes both commonly tested and rarely tested genes (Mandelker D et al. Genet. Med 18, 1282-1289 (2016). (2) The COSMIC gene census contains 723 gene symbols found in tumors (Tate J G et al. Nucleic Acids Res. 47, D941-D947 (2019)). (3) A focused list of “High Priority Clinical Genes” that are commonly tested for clinical inherited diseases (Wagner J., et al., (2022) Nat Biotechnol. 40:672-680).

[0118] 5,027 have unique coordinates on the primary assembly of GRCh38 and valid ENSEMBL annotations, and 4,697 are autosomal. 70% of these genes are specific to the list from OMIM, HGMD, and ClinVar, which includes genes associated with disease in a small number of studies and are currently tested more frequently in research studies than in high-throughput clinical laboratories. 395 genes included 90% or less on GRCh37 or GRCh38. Many of the 395 medically relevant genes were not covered well by the v4.2.1 small variant benchmark due to SVs, complex variants, and segmental duplications. A CMRG benchmark for 273 of the 395 genes has been previously created. (Wagner J., et al., (2022) Nat Biotechnol. 40672-680). To be included in the CMRG benchmark, the entire gene including 20 kb flanking sequence on each side and any overlapping segmental duplications needed to have exactly one fully aligned contig from each haplotype with no breaks on GRCh37 and GRCh38. The total size of 391 of the CMRG gene panel is about 22.5 Mbp. The smallest gene is about 66 bp (SNORD64), the largest gene is about 1 Mbp (PTPRN2). CMRG genes include those listed in TABLE 1C.

TABLE 1C
CMRG genes

A4GALT, ABCG8, ABO, ABR, ADAMTS10, ADAMTSL2, AFP, AGL, AGRN,
ALOXE3, ANKRD11, ANO7, APOBEC1, APOBEC3H, APOC1, APOC2, APOC4,
ARHGEF10, ASIP, ATPAF2, AXIN1, B3GAT3, BAX, BFSP2, BLOC1S3, BRAF, BSG,
BTRC, C1R, C3, CABIN1, CALR3, CANT1, CASP10, CBR3, CBS, CCL3L1, CD247,
CD320, CD4, CD55, CDH15, CDH17, CEL, CFC1, CFC1B, CFD, CFHR1, CFHR3, CHL1,
CHMP1A, CHRNA4, CLCN7, CLIP2, CNR2, COL18A1, COL6A1, COL6A2, COX14,
COX6B1, CR1, CREB3L3, CRYAA, CTDP1, CYB5R3, CYP2G1P, CYP4F12, CYP4F3,
D2HGDH, DAXX, DAZL, DCLRE1C, DEAF1, DGCR6, DIP2C, DLGAP2, DMPK,
DNAAF4, DNMT3L, DOK7, DPP6, DPY19L2, DRD4, DSPP, DUX4, DUX4L1, ECHS1,
EEF1A2, EHMT1, EIF2B5, EIF4E, ELANE, ELOA3, ENO3, ESPN, ESRRA, ETFB,
ETHE1, EXTL2, F7, FAM20C, FAT1, FCGR1A, FCGR2B, FCGR3A, FGF3, FGFRL1,
FKBP8, FLAD1, FLG, FLT4, FOXN1, FSCN2, FTCD, FUT1, FUT3, FXN, G6PC3, GAK,
GALNT9, GALR1, GALT, GCGR, GCSH, GDF3, GIP, GIPC3, GNPTG, GOLGA3,
GP1BA, GP6, GPI, GPIHBP1, GRIN1, GRK1, GSTM1, GTF2I, GTF2IRD2, GUSB,
GYPA, GYPB, GYPE, H19, HBG1, HBM, HCN2, HCN3, HEATR2, HES7, HLA-B, HLA-
DQB1, HLA-DRB1, HMGCL, HMX1, HNF1A, HOMER2, HOXB8, HPD, HSD11B2,
HYAL1, HYDIN, IFITM3, IFNL3, IGHA1, IGHG1, IGHG2, IGHM, IGHV3-21, IGKC,
IGKV1-5, IKBKB, IKZF1, IMPA1, INPP5D, INPP5E, INSL3, INSR, JAG2, KANSL1,
KATNAL2, KCNE1, KCNJ18, KCNV2, KDM2B, KIR2DL1, KIR2DL3, KIR3DL1,
KISS1, KISS1R, KLF11, KLF14, KLK4, KMT2C, KNG1, KRTAP1-1, LAMB1, LBR,
LCE3B, LHFPL5, LIPN, LIX1, LMF1, LMNB2, LPA, LRIG2, LRPAP1, LZTFL1, MAFA,
MAN1B1, MAP2K3, MARVELD2, MASP2, MBOAT7, MC1R, MDK, MEST, MLC1,
MLPH, MOGS, MPG, MRC1, MST1R, MUC1, MUC16, MUC3A, MUC4, MUC5B,
MUSK, MYO9B, MYOT, MYT1, NACA, NAIP, NAPRT, NBEAP1, NCF1, NCF1C,
NCR3, NDUFA6, NDUFAF1, NDUFB1, NDUFV3, NFKBIL1, NLRP12, NLRP2, NLRP7,
NOD1, NOTCH2, NPM1, NPPA, NSMF, NUTM2B, NUTM2D, OCLN, OPRL1, OR12D2,
OR4F5, OR51A2, ORC6, P2RX2, P2RX5, PADI4, PAPSS2, PCBP1, PCCB, PCDHA10,
PCMT1, PDE4DIP, PDE6B, PDLIM3, PDPK1, PDSS1, PEX5, PGAM5, PGAP6, PHKG2,
PIGV, PKD1, PKN3, PLA2G10, PLTP, PMS2, PNKP, POLG2, PPIA, PPIP5K1, PRG4,
PRKCG, PRODH, PROZ, PRSS2, PSPH, PTEN, PTK6, PTPRC, PTPRN2, PTPRQ, PXDN,
RFX2, RGPD3, RHCE, RHOA, RNF212, RNF213, RPIA, RPL22, RPN1, RPS17,
RXYLT1, SAR1B, SBK3, SDHA, SEC63, SEMG1, SERPINF2, SH2B1, SHANK2,
SHANK3, SIGLEC16, SIRT3, SLC17A5, SLC22A1, SLC22A12, SLC26A9, SLC27A4,
SLC27A5, SLC29A4, SLC5A11, SLC6A18, SLC6A3, SMG1, SMN1, SMN2, SMOC2,
SNORD64, SNTG2, SOHLH1, SPATA31C1, SPI1, SPRN, SRGAP2, SRR, SSTR5,
STK11, STXBP2, SULT1A1, SUZ12, TAPBP, TAS2R46, TBXA2R, TCF3, TERT, TFPT,
THBS2, TJP2, TM4SF19, TMC6, TMEM114, TNNI3, TNNT1, TNNT3, TPCN2, TPO,
TRAPPC10, TRBV9, TRMT1, TRPM4, TTC37, TTLL1, TUBGCP6, TWIST2, TYK2,
TYMS, U2AF1, UGT2A1, UGT2A2, UGT2B17, UGT2B28, UNKL, USP8, UTP4,
UVSSA, VANGL1, VKORC1, VPS53, ZAN, ZNF141, ZNF407, ZNF419, ZNF469,
ZNF479

### Certain Selection Probes

[0119] Some embodiments include enriching for target nucleic acids in the amplified polynucleotides, such as products of mutagenesis PCR, and/or products of suppression PCR. In some such embodiments, the enriching comprises hybridizing a plurality of selection probes with the amplified polynucleotides, wherein the selection probes of the plurality of selection probes comprise different nucleotide sequences from one another. In some embodiments, the plurality of selection probes comprise at least 50, 100, 200, 500, 1000, 5000, or 10000 different selection probes.

[0120] In some embodiments, the selection probes are designed such that an average distance between two adjacent nucleotide sequences of the selection probes on a reference sequence of a genome, such as a human genome, is in a range from about 300 consecutive nucleotides to about 7,000 consecutive nucleotides; a range from about 500 consecutive nucleotides to about 5,000 consecutive nucleotides; a range from about 750 consecutive nucleotides to about 2,500 consecutive nucleotides; a range from about 750 consecutive nucleotides to about 1,500 consecutive nucleotides; a range from about 900 consecutive nucleotides to about 1,200 consecutive nucleotides. In some embodiments, an average distance between two adjacent nucleotide sequences of the selection probes on a reference sequence of a genome is about 750, 1000, 1500, or 2000 consecutive nucleotides.

[0121] In some embodiments, the selection probes are designed such that an average number of sites in a genome, such as a human genome, that each selection probe of the plurality of selection probes is capable of hybridizing to is no more than 100 different sites in the genome, no more than 50 different sites in the genome, no more than 40 different sites in the genome, no more than 30 different sites in the genome, no more than 20 different sites in the genome, no more than 10 different sites in the genome, or no more than 5 different sites in the genome, or any number between any of the foregoing number of different sites. In some embodiments, each selection probe of the plurality of selection probes is capable of hybridizing to no more than 100 different sites in the genome, no more than 50 different sites in a genome, no more than 40 different sites in a genome, no more than 30 different sites in a genome, no more than 20 different sites in a genome, or no more than 10 different sites in a genome, or any number between any of the foregoing number of different sites. In some embodiments, a selection probe capable of hybridizing to a site in the genome comprises at least 50, 60, 70, or 80 consecutive nucleotides complementary to at least 80%, 90%, 95%, 96%, 98%, or 100% of a nucleotide sequence at the site in the genome. In some embodiments, a selection probe capable of hybridizing to a site in the genome comprises at least 50 consecutive nucleotides complementary to at least 90% of a nucleotide sequence at the site in the genome.

[0122] In some embodiments, the plurality of selection probes lack sequences capable of hybridizing to a repetitive genomic DNA element. In some embodiments, the repetitive genomic DNA element is selected from a tandem repeat, an Alu repeat, a short interspersed nuclear element (SINE), a long interspersed nuclear element (LINE), an integrated viral sequence, a viral long terminal repeat (LTR), and a transposon.

[0123] In some embodiments, the selection probes target the MHC region of a genome, such as a human genome. In some such embodiments, each selection probe of the plurality of selection probes comprises a nucleotide sequence capable of hybridizing to a nucleotide sequence within human chromosome 6p21.1-6p21.3; to a nucleotide sequence between nucleotide sequences encoding MOG and COL11A2 in a human genome; and/or to a site in a major histocompatibility complex (MHC) locus of a human genome. In some embodiments, each selection probe of the plurality of selection probes comprises a nucleotide sequence having at least 90%, 95%, or 100% sequence identity to any one of SEQ ID NOs:02-58491. In some embodiments, each selection probe of the plurality of selection probes comprises a nucleotide sequence having at least 90%, 95%, or 100% sequence identity to any one of SEQ ID NOs:02-10120. In some embodiments, each selection probe of the plurality of selection probes comprises a nucleotide sequence having at least 90%, 95%, or 100% sequence identity to any one of SEQ ID NOs:02-4967.

### Certain Compositions, Kits and Systems

[0124] Some embodiments of the methods and composition provided herein include kits and systems for preparing a nucleic acid library. Some embodiments include a kit comprising: a first bead-linked transposomes (BLT-1) reagent, wherein the BLT-1 transposomes comprises a first adaptor sequence; a mutagenesis reagent comprising a first primer, dPTPs, dNTPs, and a polymerase; a second bead-linked transposomes (BLT-2) reagent, wherein the BLT-2 transposomes comprise the first adaptor and a second adaptor; an amplification reagent comprising a first primer, a second primer, dNTPs, and a polymerase; wherein BLT-1 has a lower transposome density as compared to BLT-2; and wherein the first primer hybridizes to the first adaptor sequence and the second primer hybridizes to the second adaptor sequence. In some embodiments, BLT-2 has more than 10, 20, 50, 100, or 1000 times the transposome density as compared to BLT-1. In some embodiments, the first adaptor is B15 and the second adaptor is A14. Some embodiments include population of oligonucleotides, wherein the oligonucleotides comprise at least 10, 100, 1000, 10000 different nucleotide sequences selected from any one of SEQ ID NOs. 02-58491.

[0125] Some embodiments include system for preparing a nucleic acid library, comprising: (a) a first plurality of transposomes comprising transposon adaptors for tagmenting a plurality of nucleic acid fragments, wherein the first plurality of transposomes is immobilized on a first plurality of beads at a first density; (b) reagents for amplifying the plurality of polynucleotides to obtain amplified polynucleotides, wherein the amplifying comprising a mutagenesis PCR and/or a suppression PCR, wherein: (i) the first reagent for performing mutagenesis PCR comprise a low bias DNA polymerase and/or a nucleotide analogue; optionally, wherein the nucleotide analogue comprises dPTP, and/or 8-oxo-dGTP; and/or the low bias DNA polymerase is a Thermococcal polymerase, or a functional derivative thereof, optionally, wherein the Thermococcal polymerase is derived from a Thermococcal strain selected from the group consisting of T. kodakarensis, T. siculi, T. celer and T. sp KS-1, and (ii) the first reagents for performing suppression PCR comprise amplification primers having the same nucleotide sequence capable of hybridizing to the transposon adaptors; (c) a plurality of selection probes for enriching for target polynucleotides in the amplified polynucleotides; and (d) a second plurality of transposomes comprising library adaptors for adding library adaptors to each end of the amplified polynucleotides, wherein the second plurality of transposomes is immobilized on a second plurality of beads at a second density, wherein the first density is less than the second density.

[0126] Some embodiments include a system for preparing a nucleic acid library, comprising: (a) a first plurality of transposomes for tagmenting a plurality of nucleic acid fragments to obtain a plurality of polynucleotides; (b) first reagents for amplifying the plurality of polynucleotides to obtain amplified polynucleotides; and (c) second reagents for adding library adaptors to each end of the amplified polynucleotides. In some embodiments, the first plurality of transposomes comprises transposon adaptors, wherein the first plurality of transposomes is immobilized on a solid support. In some embodiments, the solid support comprises a first plurality of beads.

[0127] In some embodiments, the first plurality of the transposomes is immobilized on the first plurality of beads at a density such that on contacting the first plurality of transposomes with the plurality of nucleic acid fragments the plurality of polynucleotides has an average length of the plurality of polynucleotides is greater than about 1 kbp, 2 kbp, 5 kbp, 10 kbp, 15 kbp, 20 kbp, or 40 kbp. In some embodiments, the average length of the plurality of polynucleotides is in a range from about 1 kbp to about 40 kbp, 1 kbp to about 30 kbp, 1 kbp to about 20 kbp, 5 kbp to about 20 kbp, 5 kbp to about 15 kbp, or 7 kbp to about 12 kbp.

[0128] In some embodiments, the number of transposomes immobilized on the bead is no more than about 100 transposomes, 50 transposomes, 40 transposomes, 30 transposomes, 20 transposomes, or 10 transposomes. In some embodiments, the number of transposomes immobilized on the bead is no more than about 30 transposomes.

[0129] In some embodiments, the first plurality of the transposomes immobilized on the bead comprise a total activity such that on contacting the first plurality of transposomes with the plurality of nucleic acid fragments the plurality of polynucleotides has an average length greater than about 1 kbp, 2 kbp, 5 kbp, 10 kbp, 15 kbp, 20 kbp, or 40 kbp. In some embodiments, the average length of the plurality of polynucleotides is in a range from about 1 kbp to about 40 kbp, 1 kbp to about 30 kbp, 1 kbp to about 20 kbp, 5 kbp to about 20 kbp, 5 kbp to about 15 kbp, or 7 kbp to about 12 kbp.

[0130] In some embodiments, the first plurality of the transposomes immobilized on the bead comprise an activity in a range from about 0.05 AU/μl to about 0.25 0.05 AU/μl. In some embodiments, the first plurality of the transposomes immobilized on the bead comprise an activity of about 0.075 AU/μl.

[0131] In some embodiments, the transposon adapters comprise the same sequence. In some embodiments, the transposon adapters comprise the nucleotide sequence:

SEQ ID NO: 01
(GTCTCGTGGGCTCGG)

[0132] In some embodiments, the transposomes of the plurality of transposomes are the same. In some embodiments, the transposomes of the plurality of transposomes are B15 transposomes.

[0133] In some embodiments, the first reagents comprise reagents for performing mutagenesis PCR comprising a low bias DNA polymerase and/or a nucleotide analogue. In some embodiments, the nucleotide analogue comprises dPTP, and/or 8-oxo-dGTP. In some embodiments, the low bias DNA polymerase is a Thermococcal polymerase, or a functional derivative thereof. In some embodiments, the Thermococcal polymerase is derived from a Thermococcal strain selected from the group consisting of T. kodakarensis, T. siculi, T. celer and T. sp KS-1.

[0134] In some embodiments, the first reagents comprise reagents for performing suppression PCR comprising amplification primers having the same nucleotide sequence. In some embodiments, the amplification primers are capable of hybridizing to the transposon adaptors.

[0135] In some embodiments, the second reagents comprise a second plurality of transposomes comprising the library adaptors. In some embodiments, the second plurality of transposomes has an activity such that on contacting the second plurality of transposomes with the amplified polynucleotides a library of nucleic acids is obtained and comprises the library adaptors and having an average length less than about 1 kb, 900 bp, 800, bp, 700 bp, 600 bp, 500 bp, 400 bp, 300 bp, 200 bp, or 100 bp.

[0136] In some embodiments, the first plurality of the transposomes is immobilized on the beads at a density less than a density at which the second plurality of transposomes are immobilized on the second plurality of beads.

[0137] Some embodiments also include third reagents for enriching for target polynucleotides in the amplified polynucleotides, comprising a plurality of selection probes. In some embodiments, the plurality of selection probes is attached to a third plurality of beads.

[0138] In some embodiments, an average distance between two adjacent nucleotide sequences of the selection probes on a reference sequence of a genome is in a range from about 300 consecutive nucleotides to about 7,000 consecutive nucleotides. In some embodiments, the range is from about 500 consecutive nucleotides to about 5,000 consecutive nucleotides. In some embodiments, the range is from about 750 consecutive nucleotides to about 2,500 consecutive nucleotides. In some embodiments, the range is from about 750 consecutive nucleotides to about 1,500 consecutive nucleotides. In some embodiments, the range is from about 900 consecutive nucleotides to about 1,200 consecutive nucleotides. In some embodiments, an average distance between two adjacent nucleotide sequences of the selection probes on a reference sequence of a genome is about 750, 1000, 1500, or 2000 consecutive nucleotides.

[0139] In some embodiments, an average number of sites in a genome that each selection probe of the plurality of selection probes is capable of hybridizing to is no more than 50 different sites in the genome, to no more than 40 different sites in the genome, to no more than 30 different sites in the genome, to no more than 20 different sites in the genome. In some embodiments, each selection probe of the plurality of selection probes is capable of hybridizing to no more than 50 different sites in a genome, to no more than 40 different sites in a genome, to no more than 30 different sites in a genome, to no more than 20 different sites in a genome. In some embodiments, a selection probe capable of hybridizing to a site in the genome comprises at least 50, 60, 70, or 80 consecutive nucleotides complementary to at least 90% of a nucleotide sequence at the site in the genome.

[0140] In some embodiments, the plurality of selection probes lack sequences capable of hybridizing to a repetitive genomic DNA element; In some embodiments, the repetitive genomic DNA element is selected from a tandem repeat, an Alu repeat, a short interspersed nuclear element (SINE), a long interspersed nuclear element (LINE), an integrated viral sequence, a viral long terminal repeat (LTR), and a transposon.

[0141] In some embodiments, the plurality of selection probes comprise at least 50, 100, 200, 500, 1000, 5000 different selection probes.

[0142] In some embodiments, each selection probe of the plurality of selection probes comprises a nucleotide sequence capable of hybridizing to a nucleotide sequence within human chromosome 6p21.1-6p21.3; to a nucleotide sequence between nucleotide sequences encoding MOG and COL11A2 in a human genome; and/or to a site in a major histocompatibility complex (MHC) locus of a human genome. In some embodiments, each selection probe of the plurality of selection probes comprises a nucleotide sequence having at least 90%, 95%, or 100% sequence identity to any one of SEQ ID NOs:02-58491. In some embodiments, each selection probe of the plurality of selection probes comprises a nucleotide sequence having at least 90%, 95%, or 100% sequence identity to any one of SEQ ID NOs:02-10120. In some embodiments, each selection probe of the plurality of selection probes comprises a nucleotide sequence having at least 90% c, 95%, or 100% sequence identity to any one of SEQ ID NOs:02-4967.

[0143] In some embodiments, the plurality of nucleic acid fragments is mammalian. In some embodiments, the plurality of nucleic acid fragments is human. In some embodiments, the plurality of nucleic acid fragments comprises genomic DNA.

[0144] Some embodiments include a kit comprising a plurality of selection probes. In some embodiments the plurality of selection probes comprise at least 50, 100, 1000, 2000, 3000, 4000, 5000, 10000, 20000, 30000, 40000 or any number between any one of the foregoing numbers of different nucleotide sequences.

[0145] In some embodiments, each selection probe of the plurality of selection probes comprises a nucleotide sequence capable of hybridizing to a nucleotide sequence within human chromosome 6p21.1-6p21.3; to a nucleotide sequence between nucleotide sequences encoding MOG and COL11A2 in a human genome; and/or to a site in a major histocompatibility complex (MHC) locus of a human genome. In some embodiments, each selection probe of the plurality of selection probes comprises a nucleotide sequence having at least 90%, 95%, or 100% sequence identity to any one of SEQ ID NOs:02-58491. In some embodiments, each selection probe of the plurality of selection probes comprises a nucleotide sequence having at least 90%, 95%, or 100% sequence identity to any one of SEQ ID NOs:02-10120. In some embodiments, each selection probe of the plurality of selection probes comprises a nucleotide sequence having at least 90%, 95%, or 100% sequence identity to any one of SEQ ID NOs:02-4967.

### EXAMPLES

### Example 1—Generation of Nucleic Acid Library

[0146] The following describes the preparation of human genome libraries for sequencing with (1) low-density bead-linked transposomes; (2) random mutagenesis; and (3) bottlenecking (suppression) amplification. The workflow included uniquely encoding long DNA templates with steps including highly uniform random mutagenesis and amplification. The long DNA templates were then fragmented and sequenced on a standard short-read (SR) platform. Reads from prepared libraries were used to accurately reconstruct and decode the original long template sequences using an unmutated reference data set which was generated in parallel.

[0147] Unmutated reference data: to reconstruct accurate long read sequences from mutated short reads, an additional unmutated reference data set was used. This was generated from the same genomic starting material as the sample to be mutated, using standard methods for short-read library preparation and sequencing. Paired end reads were generated at a minimum length of 2×150 nucleotides for the unmutated data set, with a recommended 60× genome coverage for isolated bacterial genomes and 40× for pure human cell cultures.

[0148] Input DNA requirements: the workflow was found to be compatible with genomic DNA samples of relatively poor quality, containing unwanted low molecular weight fragments. These low molecular weight fragments were actively excluded by certain steps in the workflow; and the presence of some higher molecular weight material (>20 kb) was included to generate long templates for sequencing. To quantify input DNA for library preparation, a fluorometric-based method such as the Qubit dsDNA HS Assay Kit (Thermo Scientific) was used. Concentrations of input DNA between 12.5 and 50 ng/μl was used.

[0149] The following outlines a workflow which included: high molecular weight tagmentation; mutagenesis PCR; library normalization; bottlenecking (suppression) PCR; library preparation; fragment analysis of products; and sequencing.

### Reagents, Materials and Thermocycler Parameters

| | |
|---|---|
| BLT Long Range | BLT-LR |
| Long Range PCR Mix | LPM |
| Long Range Marking Mix | LMM |
| Long Range Primer Mix 1 | LRP1 |
| Long Range Primer Mix 2 | LRP2 |
| Library Reducing Beads | LRB |
| Binding Buffer | IBB |
| Wash Buffer 1 | IWB1 |
| Stop Tagment Buffer 2 | ST2 |
| Illumina Purification Bead | IPB |
| PW1 (water) | |
| Resuspension Buffer | RSB |
| Ethyl Alcohol, Pure | |
| Enrich BL Transposome, Lg-LT | eBLT-L |
| Enhanced PCR Mix | EPM |
| Tagmentation Buffer 1 | TB1 |
| Tagmentation Wash Buffer | TWB |
| Nextera DNA UD Index Plate | |

Tagmentation parameters

| Step | Temperature | Time |
|---|---|---|
| 1 | 55° C. | 5 minutes |
| 2 | 10° C. | hold |

Mutagenesis PCR parameters

| Step | Temperature | Time | |
|---|---|---|---|
| 1 | 68° C. | 3 | minutes |

| | |
|---|---|
| 2 | PCR cycles (12 cycles) |

| | | |
|---|---|---|
| 98° C. | 10 | seconds |
| 68° C. | 10 | minutes |

| | | |
|---|---|---|
| 3 | 4° C. | hold |

Bottlenecking PCR parameters

| | | |
|---|---|---|
| Step | Temperature | Time |

| | |
|---|---|
| 1 | PCR cycles (14 or 16 cycles) |

| | | |
|---|---|---|
| 98° C. | 10 | seconds |
| 68° C. | 10 | minutes |

| | | |
|---|---|---|
| 3 | 4° C. | hold |

Index PCR parameters

| | | |
|---|---|---|
| Step | Temperature | Time |

| 1 | 68° | C. | 3 | minutes |
|---|---|---|---|---|
| 2 | 98° | C. | 3 | minutes |
| 3 | PCR cycles (6 cycles) | | | |
| | 98° | C. | 45 | seconds |
| | 62° | C. | 30 | seconds |
| | 68° | C. | 2 | minute |
| 4 | 68° | C. | 1 | minutes |

| | | | |
|---|---|---|---|
| 5 | 4° | C. | hold |

### High Molecular Weight Tagmentation

[0150] This step used low density bead-linked transposomes (BLT-LR) to generate long DNA fragments tagged with adapter sequences.

| | |
|---|---|
| 1 | Label a Biorad PCR plate. |
| 2 | Label a 1.7 ml tube and add the following components in order: BLT-LR; and |
| | TB1. |
| 3 | Vortex to mix thoroughly, then briefly pulse centrifuge. |
| 4 | Add 20 μl of mastermix to wells. |
| 5 | Add 30 μl input DNA (50 ng total). |
| 6 | Use a pipette to gently mix then briefly pulse centrifuge. |
| 7 | Place tubes in a thermocycler with a heated lid set to 80° C. and run the Tagment. |
| 8 | Remove from the thermocycler and add 10 μl of ST2. |
| 9 | Use a pipette set at half of the total rxn volume to gently mix. |
| 10 | Incubate at room temperature for 2 min. |
| 11 | Place the tubes on a magnetic stand or plate for 3 min or until the solution is |
| | clear. Remove and discard the clear supernatant. Note: If beads become |
| | disturbed during aspiration, redisperse solution into the tube. Maintain tube on |
| | the magnet to let the beads settle. |
| 12 | Remove tubes from the magnet and add 100 μl TWB. Gently pipette mix until |
| | beads are fully resuspended. |
| 13 | Place the tubes on a magnetic stand or plate and incubate for at least 2 min, or |
| | until clear. While samples are incubating, proceed to the next step. Note: Keep |
| | pellets in TWB to help prevent any chance of over-drying the beads. |

### Mutagenesis PCR

[0151] In this step, long templates were uniquely encoded via random incorporation of the mutagenic nucleotide analogue dPTP during PCR.

| | |
|---|---|
| 14 | Label a 1.7 ml tube and combine the following to prepare mutagenesis master |
| | mix: LMM; LPM; LRP1; and RSB. |
| 15 | Use a pipette to mix thoroughly, then briefly pulse centrifuge. |
| 16 | Remove TWB from each well. |
| 17 | Add 50 μl of master mix to beads. |
| 18 | Gently pipette mix to resuspend beads |
| 19 | Place in preprogrammed thermal cycler and run the Mutagenesis PCR program. |
| 20 | Remove from thermocycler. |
| 21 | Vortex IPB to resuspend the beads. |
| 22 | Add 30 μl of IPB beads to each well. |
| 23 | Mix the total reaction volume by gently pipetting at least 10 times and incubate |
| | for 2 minutes at room temperature. |
| 24 | Place on the magnetic stand and wait until the liquid is clear (~5 minutes). |
| 25 | Remove and discard all supernatant. |
| 26 | Wash beads as follows: a. keep on the magnetic stand and add 180 μl fresh 80% |
| | EtOH to each well; b. wait 30 seconds; and c. remove and discard all supernatant |
| 27 | Briefly spin for 10 seconds and return plate to magnet. |
| 28 | With a 20 μl pipette, remove all residual EtOH. |
| 29 | Dry on magnet for 2 minutes. |
| 30 | Remove from the magnetic stand and add 25 μl RSB to each well. |
| 31 | Pipette mix and incubate at room temperature for 2 minutes. |
| 32 | Place on the magnetic stand and wait until the liquid is clear (~2 minutes). |
| 33 | Transfer 10 μl supernatant to a new plate and leave remaining supernatant with |
| | SPRI beads |

### Library Normalization

| | |
|---|---|
| 34 | In a new 2 ml tube, combine the following to prepare normalization master mix: |
| | Binding Buffer (IBB); and LRB |
| 35 | Vortex normalization master mix until homogenous immediately prior to use. |
| 36 | Pipette 10 μL of prepared mastermix into each well containing 10 μL of DNA. |
| 37 | Seal plate with microseal and put on bioshake for 30 minutes at 1800 rpm. |
| 38 | Remove plate from bioshake and place on plate magnet for 1 minute. Removing |
| | and replacing plate on magnet may help to condense beads. |
| 39 | Gently remove supernatant, taking care not to disturb beads. |
| 40 | Remove plate from magnet. |
| 41 | Immediately add 150 μL of IWB1 to each well. |
| 42 | Using a p200 pipette set to 140 μL, pipette mix each well at least 10 times. |
| 43 | Place on plate magnet for 1 minute. |
| 44 | Gently remove supernatant, taking care not to disturb beads. |
| 45 | Repeat steps 41-44 for a total of two washes. Remove plate from magnet. |
| 46 | Immediately add 150 μL of 80% EtOH to each well. |
| 47 | Using a p200 pipette set to 140 μL, pipette mix each well at least 10 times. |
| 48 | Place on plate magnet for 1 minute. |
| 49 | Gently remove supernatant, taking care not to disturb beads. |
| 50 | Briefly spin down plate and use a p20 to remove excess liquid. |
| 51 | Allow to dry for 2 minutes. |
| 52 | Add 80 μL of RSB to each sample well. |
| 53 | Using a pipette set to 50 μL, pipette mix each sample at least 10 times. |
| 54 | Allow to incubate for 10 minutes. |
| 55 | Place on plate magnet for 1 minute. |
| 56 | Transfer 70 μL of supernatant to new well. |
| 57 | If performing 165 pg input, go to step 62 for next |
| | If performing 55 pg input, dilute 20 ul of eluted material in 40 μl of RSB in |
| | adjacent well. Mix well, then use 2 μl as stated in step 62. |
| | [Optional] Measure DNA on Qubit using 10 μL of DNA diluted in 190 μL of |
| | Qubit buffer. |

### Bottlenecking (Suppression) PCR

[0152] In this step a defined quantity of the purified mutagenesis product was amplified to create many copies of each unique template. The amount of starting material in the bottlenecking PCR determined the number of long templates available for sequencing, and was controlled through careful dilution of the mutagenesis sample. The following protocol was used to generate between about 10× to about 30× long-read coverage of the human genome (see below). For arbitrary samples, a simple calculator or look up table was provided to guide users on sample dilution and indicate the number of enrichment cycles required for a particular genome size or sample type.

| | |
|---|---|
| 58 | Combine the following volumes to prepare enrichment master mix: LPM; and |
| | LRP2. |
| 59 | Use a pipette to mix thoroughly, then briefly pulse centrifuge. |
| 60 | Add 48 μl of master mix to a new Bio-Rad plate. Place tubes on ice. |
| 61 | Add 2 μl of DNA to each well. |
| 62 | Gently pipette mix the 50 μl reaction and briefly pulse centrifuge. |
| 63 | Place in preprogrammed thermal cycler and run the Bottlenecking PCR program. |
| 64 | Note: Perform 16 enrichment cycles for 10x genome coverage or 14 cycles for |
| | 30x. |
| 65 | Remove from thermocycler. |
| 66 | Vortex IPB to resuspend the beads. |
| 67 | Add 30 ul of IPB beads to each well. |
| 68 | Mix the total reaction volume by gently pipetting at least 10 times and incubate |
| | for 2 minutes at room temperature. |
| 69 | Place on the magnetic stand and wait until the liquid is clear (~5 minutes). |
| 70 | Remove and discard all supernatant. |
| 71 | Wash beads as follows: a. keep on the magnetic stand and add 180 μl fresh 80% |
| | EtOH to each well; b. wait 30 seconds; and c. remove and discard all supernatant. |
| 72 | Briefly spin for 10 seconds and return plate to magnet. |
| 73 | With a 20 μl pipette, remove all residual EtOH. |
| 74 | Dry on magnet for 2 minutes. |
| 75 | Remove from the magnetic stand and add 25 μl RSB to each well. |
| 76 | Pipette mix and Incubate at room temperature for 2 minutes. |
| 77 | Place on the magnetic stand and wait until the liquid is clear (~2 minutes). |
| 78 | Transfer 24 μl supernatant to a new plate. |
| 79 | Keep on ice for same day use or store at −20° C. (safe stopping point). |
| 80 | Determine the concentration of each purified bottlenecking PCR product with the |
| | Qubit dsDNA HS Assay Kit. Use 1-2 μl of sample DNA per measurement. |

### Library Preparation

[0153] In this step the long, mutated DNA templates were fragmented and adapters were attached to create a library of short, overlapping fragments that are ready for sequencing. 50 ng of each purified enrichment product can be used as input DNA for internal library preparation. A small amount of bottlenecking PCR product was reserved for subsequent analysis of template size.

| | |
|---|---|
| 81 | Bring TB1 and eBLT-L to room temperature and vortex to mix. |
| 82 | Make a dilution using RSB and 50 ng worth of purified bottlenecking product |
| | into each well with a final volume of 30 μl. |
| 83 | Vortex eBLT-L vigorously for 10 seconds, then visually check the beads for |
| | complete resuspension. Repeat as necessary. |
| 84 | Prepare a tagmentation master mix: eBLT-L; TB1. |
| 85 | Vortex the tagmentation master mix thoroughly to make sure the eBLT-L |
| | beads are evenly resuspended in the buffer. |
| 86 | Using fresh tips, transfer 20 μl of tagmentation master mix to each tube |
| | containing 30 μl of DNA. |
| 87 | Pipette mix the 50 μl reaction mix to resuspend. |
| 88 | Place in preprogrammed thermal cycler and run the Tagment program. |
| 89 | Remove from thermocycler and add 10 μl of ST2 to each tagmentation |
| | reaction. |
| 90 | Use a pipette set at half of the total rxn volume to gently mix. |
| 91 | Incubate at RT for 5 minutes. |
| 92 | Place the tubes on a magnetic stand or plate for 3 min or until the solution is |
| | clear. Remove and discard the clear supernatant. Note: If beads become |
| | disturbed during aspiration, redisperse solution into the tube. Maintain tube on |
| | the magnet to let the beads settle. |
| 93 | Remove tubes from the magnet and add 100 μl TWB. Gently pipette mix until |
| | beads are fully resuspended. |
| 94 | Place the tubes on a magnetic stand or plate for 3 min or until the solution is |
| | clear. Remove and discard the clear supernatant. |
| 95 | Remove tubes from the magnet and add 100 μl TWB. Gently pipette mix until |
| | beads are fully resuspended (total of 2 washes). |
| 96 | Place the tubes on a magnetic stand or plate and incubate for at least 3 min, or |
| | until clear. While samples are incubating, proceed to the next step. Note: Keep |
| | pellets in TWB to help prevent any chance of over drying the beads. |
| 97 | Prepare a index PCR master mix: EPM; RSB. |
| 98 | Use a pipette to mix thoroughly, then briefly pulse centrifuge. |
| 99 | Carefully remove the second TWB wash from the samples while on the |
| | magnet. Use a pipette with P10 or P20 tips to remove excess liquid from the |
| | tube. Any remaining foam on the tube walls does not adversely affect the |
| | library. |
| 100 | Remove tubes from the magnet and proceed immediately to the next step to |
| | prevent excessive drying of the beads. |
| 101 | Add 46 μl of the PCR master mix to each sample. Gently pipette mix to ensure |
| | the beads are thoroughly resuspended. |
| 102 | To each sample, add 4 μl Nextera DNA UD Index. Use a unique combination |
| | of indexes for each sample. |
| 103 | Using a pipette set to 40 μl, pipette mix a minimum of 10 times to mix the |
| | entire reaction volume. |
| 104 | Place in preprogrammed thermal cycler and run the Index PCR program. |
| 105 | Clean up PCR reaction using IPB beads as follows: |
| 106 | Place plate on the magnetic stand and wait until the liquid is clear (~5 |
| | minutes) |
| 107 | Transfer 45 μL of supernatant to a new plate. |
| 108 | Add 55 μL RSB to bring volume to 100 uL. |
| 109 | Perform a double-sided bead purification as follows: |
| 110 | Add 30 μL of IPB beads to the sample. |
| 111 | Mix the total reaction volume by gently pipetting at least 10 times and |
| | incubate for 2 minutes at room temperature. |
| 112 | Place on the magnetic stand and wait until the liquid is clear (~5 minutes). |
| 113 | Transfer 127 μl of the clear supernatant in new wells. Discard the remaining |
| | beads. |
| 114 | Add 20 μl of IPB beads to the sample. |
| 115 | Mix the total reaction volume by gently pipetting at least 10 times and |
| | incubate for 2 minutes at room temperature. |
| 116 | Place on the magnetic stand and wait until the liquid is clear (~5 minutes). |
| 117 | Remove and discard all supernatant. |
| 118 | Wash beads as follows: a. keep on the magnetic stand and add 180 μl fresh |
| | 80% EtOH to each well; b. wait 30 seconds; and c. remove and discard all |
| | supernatant. |
| 119 | Briefly spin for 10 seconds and return plate to magnet. |
| 120 | With a 20 μl pipette, remove all residual EtOH. |
| 121 | Dry on magnet for 2 minutes. |
| 122 | Remove from the magnetic stand and add 30 μl RSB to each well. |
| 123 | Pipette mix and incubate at room temperature for 2 minutes. |
| 124 | Place on the magnetic stand and wait until the liquid is clear (~2 minutes). |
| 125 | Transfer 28 μl to a new plate. |
| 126 | Determine the concentration of each purified enrichment product with the |
| | Qubit dsDNA HS Assay Kit. Use 1-2 μl of sample DNA per measurement. |
| 127 | Keep on ice for same day use or store at −20° c. (SAFE STOPPING POINT). |

[0154] Libraries were quantified, normalized and sequenced using standard workflows for libraries. Example additional considerations for quality control, sample index selection and sequencing are provided below.

### Fragment Analysis of Products

| | |
|---|---|
| 128 | Run purified library prep product on appropriate instrument |
| | for fragment analysis. |
| 129 | Record the average fragment length for the purified library |
| | prep product. |

[0155] DNA fragment length: assessing the fragment length profile of the purified bottlenecking PCR product was performed to evaluate the size distribution of long templates as well as to evaluate the final short-read library. To assess the fragment size of the purified bottlenecking PCR product, the following products from Agilent Technologies® were used: Bioanalyzer 2100, TapeStation 4200, and Fragment Analyzer 5300; or equivalent technologies from other providers.

Purified Bottlenecking Product

| | | | Expected |
|---|---|---|---|
| | | | average |
| | | Recommended | fragment |
| Instrumentation | Kit | Region (bp) | length (bp) |
| Bioanalyzer 2100 | High Sensitivity | 3,000-10,000 | 7,000-8,000 |
| | DNA | | |
| Fragment Analyzer | DNF-464 HS Large | 3,000-49,000 | 7,000-8,000 |
| 5300 | Fragment | | |

[0156] The peak template length after bottlenecking PCR was expected to be around 7,000-8,000 bp, with virtually no products below ˜3,000 bp. FIG. 3A illustrates purified bottlenecking PCR product run on an Agilent® Bioanalyzer using a High Sensitivity DNA Kit.

Final Library

| | | | Expected |
|---|---|---|---|
| | | | average |
| | | Region | fragment |
| Instrumentation | Kit | (bp) | length (bp) |
| TapeStation | High Sensitivity | 150-1,500 | 800-900 |
| 4200 | D5000 | | |
| Bioanalyzer | High Sensitivity | 150-1,500 | 800-900 |
| 2100 | DNA | | |

[0157] The peak template length after bottlenecking PCR was expected to be around 800-900 bp. FIG. 3B illustrates purified final library prep product run on an Agilent® Bioanalyzer using a High Sensitivity DNA Kit.

### Sequencing

[0158] The final library or library pool was sequenced on a NGS instrument, generating 2×150 nt paired end reads. The aim was to produce at least 400 Gbp of sequence data for mutated samples targeting 10× long-read coverage of the human genome, or at least 1200 Gbp for 30× coverage. This was in addition to the unmutated reference data that was also required for long read reconstruction.

### Example 2—Effects of Immobilizing Transposomes on Beads at Low Densities

[0159] This example illustrates improved long read coverage by changing initial tagmentation from soluble transposomes to low density bead-linked transposomes (BLT-LR); and changing from an A14/B15 mixture of BLT-LRs to B15 BLT-LR only. Nucleic acid libraries were generated and sequenced with a protocol substantially similar to that of Example 1. Different amounts of input DNA were tested. A protocol using bead-linked transposomes was compared with a protocol using transposomes in solution. As shown in FIGS. 4A-4C, a switch from low concentration soluble transposomes to low-density BLT (BLT-LR) provided increased robustness to changes in transposome:input DNA ratio; and a more uniform coverage with BLT vs. soluble.

[0160] FIG. 5 outlines steps of high molecular weight tagmentation followed by mutagenesis and suppression PCR to enrich for longer fragments.

[0161] Protocols were compared that included (i) soluble transposome (TSM) (0.4 AU/ul); (2) BLT-LR made with A14/B15 (0.1 AU/ul build); or (3) BLT-LR made with B15 only (0.075 AU/ul build). Quality control and sequencing metrics were compared for each protocol.

[0162] As shown in FIGS. 6A-6C, soluble TSM had a greater activity than BLT-LR and soluble TSM created longer fragments than BLT-LRs. A14/B15 could not be melted off of the beads due to 5′ attachment of TDE1. In mutagenesis PCR, A14/B15 BLT provided a lower yield than B15 only (FIGS. 7A-7C). The yield with soluble (MTE) yield was also lower and may have been accounted for because only 50% tag product was taken into PCR; 100% used for BLTs. Fragment sizes of BLT-LR were smaller than with soluble TSM. Average sizes of products were 1-48 kb (FIG. 7B). There were larger fragment lengths with soluble TSM (FIGS. 7B and 7C). In bottleneck (suppression) PCR, yields and fragment sizes were more similar, while BLT-LRs still produced smallest products of ˜8 kb in length (FIG. 8A). Average sizes were 1-48 kb (FIGS. 8B and 8C).

[0163] In a sequencing metrics comparison, GC bias was comparable between soluble and BLT-LR with A14/B15 BLT slightly worse (FIG. 9) A higher N50 was achieved with soluble TSM, slightly higher N50 with B15-only compared to A14/B15, slightly higher N50 (350) with eBLT-L compared to BLT (FIGS. 10A and 10B). Sequencing redundancy, SLR depth, and error rate achieved using with A14/B15 BLT or B15 only BLT were measured. Fraction of bases with no coverage achieved using with A14/B15 BLT or B15 only BLT is depicted in FIG. 11.

[0164] BLT-LRs had better coverage than soluble transposomes (fraction of bases with <0/10× coverage). BLT-LRs created shorter fragments, which generated lower N50s in workflow. N50s were still above 5 kb mark so this decrease in performance was acceptable when paired with better coverage metrics and a more robust tagmentation reaction. B15-only TSM BLTs gave a better yield and lower redundancy than A14/B15 BLTs. The change to B15 BLT-LRs created a more efficient mutagenesis suppression PCR.

### Example 3—Effects of BLT Activity on Fragment Size

[0165] BLT-LR activity was investigated for high molecular weight tagmentation. BLT-LR activity should provide: tagment large fragments to provide for mutagenesis PCR; maximize fragment size, ideally >8 kb; yield>4 ng post-high molecular weight (HMW) tagmentation; reproducibility; ease in QC tested; and good sequence quality. A goal was to maximize fragment size while maintaining good yield and downstream sequencing metrics.

[0166] BLT-LRs having different levels of activity were compared. As transposome activity (AU/ul) decreased, yield decreased and average fragment size increased (FIG. 12).

[0167] BLT-LRs were compared with builds/activities of 0.0025, 0.005, 0.025, 0.05, 0.1, 0.15 AU/ul. N50s were compared. “N50” was the length of the shortest contig for which longer and equal length contigs cover at least 50% of the assembly. Lower build activity maximized N50s but sequencing metrics started to drop at 0.025 AU/ul (FIGS. 13 and 14). There was no apparent cliff-edge on high activity side, but N50s continued to decline, and at 0.075 AU/ul, were well above cliff edge while maximizing N50.

[0168] Results were compared from studies with three different operators testing activities from 0.05 AU/ul to 0.25 AU/ul. Consistent performance between operators was found for BLT-LR activities from 0.05 AU/ul to 0.25 AU/ul (FIG. 15). A BLT-LR activity of 0.075 AU/ul was chosen for BLT-LR which balanced fragment size and yield. It was found that a fluctuation of +/−100% in activity would still provide good sequencing metrics.

### Example 4—Effects of Quantity of Input DNA

[0169] Changing the amount of input DNA used in the initial HMW tagmentation reaction could impact any of the following: amount of DNA tagmented (test BLT-LR saturation); fragment sizes after initial HMW tagmentation (and downstream); biases in what is tagmented/amplified; sequencing metrics including percent duplicates, redundancy, N50, GC bias. Effects of input DNA quantity were tested for a protocol substantially similar to the workflow of Example 1 for amounts: 1 ng, 3, ng, 5 ng, 10 ng, 20 ng, 30 ng, 50 ng, 100 ng, 300 ng, and 1000 ng. Yield and fragment size plateaued after 20-30 ng of input DNA (FIG. 16). Yields reached maximum around 20 ng of DNA input, fragment sizes were unaffected by increased DNA input (FIG. 17).

[0170] Sequencing was performed for input DNAs of 1 ng, 10 ng, 20 ng and 1000 ng to determine cliff edges for metrics. A workflow with 1 ng input DNA provided slightly higher insert sizes and percent duplicated reads compared to workflows performed with higher amounts of input DNA (FIG. 18). Minimal differences were observed in error rates, read quality, redundancy, or N50s (FIG. 19). Similar coverage across all DNA input amounts were observed with all points within normal variation with a slight decrease in mode coverage as fraction with <0/10× increased (FIG. 20). A very slight increase in GC bias between 60-80% was observed in higher inputs, but well within normal variation (FIG. 21).

[0171] In sum, similar sequencing metrics were observed for input DNA amounts of 1 ng to 1000 ng. Inputs as low as 1 ng were found to work within the workflow. BLT-LR saturated at about 30 ng input; input above 30 ng did not bias coverage. DNA input amounts less than 10 ng resulted in low yields in the workflow. There was a slight increase in percent duplicated reads for 1 ng DNA input.

### Example 5—Effects of Quality of Input DNA

[0172] Effects of input DNA quality was tested for a protocol substantially similar to the workflow of Example 1. Preliminary data indicated that vortexing and up to 3 freeze/thaw cycles for input DNA were tolerated; and FFPE DNA was not suitable, or was too degraded, to be used as input DNA. Input DNA was prepared by shearing for 1, 3, 10, 30 and 60 seconds, and compared to control BLT-LR tagmented DNA and HMW DNA.

[0173] Input DNA was sheared for 1, 3, 10, 30 and 60 seconds. There was a noticeable change in size distribution profile after even 1 second, while Control BLT-LR and HMW DNA gave similar size profiles (FIG. 22). In the tagmentation step of the workflow, 1 second sheared DNA had similar fragment size and yield to control, and >1 second shearing quickly reduced size and yield (FIG. 23). In the mutagenesis step of the workflow, mutagenesis PCR yield sharply reduced at >1 second shearing (FIG. 24A). In the bottlenecking PCR step of the workflow, yield also sharply reduced at >1 second shearing (FIG. 24B). For sequencing metrics, N50s declined and redundancy increased at >3 seconds shearing (FIG. 25). Coverage metrics declined>3 seconds shearing (FIG. 26). GC bias correlated with post-tagmentation sizes (FIG. 27).

[0174] In sum, HMW DNA gave better yields and larger fragment lengths coming out of initial Tagmentation but did not result in final higher N50. Highly sheared DNA (30s or longer) did not amplify well in either PCR step which resulted in not enough DNA to continue with library prep. N50s and coverage/redundancy metrics worsened with DNA sheared>3 seconds. GC bias was impacted by fragment sizes. PCR steps were not suitable for highly degraded DNA, but tolerated mild shearing (1-3 sec) reasonably well.

[0175] BLT-LRs were investigated to create large fragment sizes suitable for the workflow outlined in Example 1. B15-only transposomes improved mutagenesis PCR small fragment suppression and overall yield The workflow gave improved coverage of low MapQ regions of the genome. The workflow was robust to changes in DNA input amount. The workflow tolerated mildly sheared DNA, DNA that has been through freeze/thaw, and DNA that had been vortexed.

### Example 6—Enriching for Long Fragments

[0176] A workflow was performed, as described in Example 1, with an added enrichment step. The workflow included: high molecular weight tagmentation; mutagenesis PCR; library normalization; bottlenecking (suppression) PCR; library preparation; fragment analysis of products; and sequencing. FIG. 32 depicts an example workflow which includes enrichment for long fragments. The additional enrichment step for long fragment enrichment of certain fragments was performed on the products of the bottlenecking (suppression) PCR, and prior to the library preparation step. The fragments that were products of the suppression PCR, are referred to as ‘long fragments’ to differentiate them from fragments that are the products of the library preparation step and referred to in Example 7 as ‘short fragments’.

[0177] An example overview and timeline for long fragment enrichment in the workflow is depicted in FIG. 28 and FIG. 29, respectively. The enrichment step included hybridizing the products with selection probes, capturing the products hybridized to the selection probes with bead-linked capture probes, and amplifying the captured products. An example protocol is described below in the following. However, it should be realized that other protocols using similar enrichment for long fragments are contemplated.

### Hybridization

Bring DNA libraries (HYB Plate), EHB2, and probes to RT.
Vortex and briefly spin down EHB2 and probes before use.
NOTE: Vortex EHB2 thoroughly and allow enough time to bring up to RT.
Ensure that crystals are fully dissolved. Heat tube in hands if needed.
Preheat NHB2 to 50° C. for 5 m and vortex for 30 sec, ensure solution is clear and free from
precipitate.
NOTE: Vortex NHB2 thoroughly and allow enough time to thaw to RT and get up to 50° C.
prior to use.
Ensure that crystals are fully dissolved. Use while warm to avoid precipitates from reforming.
Prepare Hyb Master Mix and add 17.5 uL to HYB plate wells. (or add components
individually in order: Library, NHB2, Probes, EHB2)
Pipette mix. Seal HYB plate with Microseal ‘B’.
Centrifuge HYB plate briefly at 280 × g for 30 sec.
Place plate on a thermal cycler and run the LCE HYB program overnight. (holds at 58° C.)

| | | |
|---|---|---|
| Program name: LCE HYB | Rnx volume: 25μ | Lid: 100° C. |

| Step | Temp | Duration | | Cycles |
|---|---|---|---|---|
| Heat denature | 98° C. | 5 | min | 1 |
| Ramp down | 96° C. | −2° | C./min | 19 |
| | 58° C. | | | |
| Hybridize | 58° C. | 30 | min | 1 |

### Capture

Bring SMB3, EEW, EE1, HP3, ET2, and RSB to RT.
Vortex and briefly spin down ET2, EE1 and HP3 before use.
Vortex EEW and SMB3 thoroughly.
Leave the thermal cycler running at 58 C.
Remove the HYB plate from the thermal cycler.
Centrifuge HYB plate at 280 × g for 30 sec.
Vortex SMB3 thoroughly for 1 min before use.
Add 75 μL of SMB3 to each sample.
Pipette mix 20x
Seal HYB wash plate with Microseal ‘B’
Incubate plate on thermal cycler running at 58° C. for 15 min.
Centrifuge HYB wash plate briefly at 280 × g for 30 sec.
Place on a magnetic stand for 2 min.
While on the magnetic stand, use a pipettor set to 100 μL to
carefully remove and discard the supernatant.

### Post-Hybridization Wash

| Vortex EEW thoroughly for 1 min before use. | |
|---|---|
| Vortex and briefly spin down EE1 and HP3 before use. | |
| PERFORM | Remove the HYB plate from the magnetic stand and add |
| 2X | 100 μL of EEW to each sample. |
| | Pipette mix to fully resuspend the beads. |
| | Seal HYB wash plate with Microseal ‘B’ |
| | Incubate in a thermal cycler at 58° C. for 10 min. |
| | Place HYB plate on a magnetic stand for 2 min. |
| | While on the magnetic stand, use a pipettor to carefully |
| | remove and discard the supernatant. |

Use a P20 pipettor to remove any residual supernatant from the final pellet.
Remove HYB plate from magnet.
Add 100 μL EEW to each well.
Pipette mix to fully resuspend the beads.
Transfer 100 μl of resuspended bead solution to a new PCR plate.
Seal HYB wash plate with Microseal ‘B’
Place on the thermal cycler at 58° C. for 5 min.
Turn off thermal cycler at 58° C.
Remove from thermalcycler and place on magnetic stand for 2 min or
until the solution is clear.
Prepare EE1 + HP3 Elution Mix.
Set pipette to 100 μL and discard all supernatant from each well.
Centrifuge at 280 × g for 30 sec then return to magnet for 10 sec.
Use a P20 pipettor to remove any residual supernatant.
Immediately proceed to Elution to prevent excessive drying of beads.

### Elution

Vortex and briefly spin down ET2 before use.
Vortex EE1 + HP3 Elution Mix to mix well.
Remove the HYB plate from the magnetic stand and add 23 μL of
EE1 + HP3 Elution Mix.
Pipette mix to fully resuspend the beads.
Incubate at RT for 2 min.
Centrifuge at 280 × g for 30 sec.
Place on a magnetic stand for 2 min.
Add 4 μL of ET2 to a new 96-well PCR plate to wells corresponding
to sample layout.
Label the plate, “ELU plate”.
Carefully transfer 21 μL of eluate from the HYB wash plate to
corresponding wells of ET2 in the ELU plate.
Set pipette to 20 μL and gently pipette mix each well 10 times.
Centrifuge at 280 × g for 30 sec.

### Enriched Library PCR

Bring MM reagents to RT.
Prepare RED Master Mix. Mix and spin.
Briefly spin down ELU plate to collect condensation if
needed.
Pipette mix.
Seal ELU plate with Microseal ‘B’
Briefly spin down plate to collect droplets.
Place plate on a thermal cycler and run the SYD_EN PCR
program.
(# cycles depends on Probe Panel used)
(same PCR conditions as Bottleneck PCR)

Enrichment PCR

| | | |
|---|---|---|
| Step | Temperature | Time |

| | |
|---|---|
| 1 | PCR cycles (depend on panel) |

| | | |
|---|---|---|
| 98° C. | 10 | s |
| 68° C. | 10 | min |

| | | |
|---|---|---|
| 3 | 4° C. | Hold |

### PCR Clean Up

Bring IPB and RSB to RT for at least 30 min.
Prepare fresh 80% EtOH wash solution as follows. Vortex to mix well.
Remove ELU plate from thermocycler. Briefly spin down PCR plate to collect droplets.
Vortex IPB to resuspend the beads.
Add 30 ul of IPB beads to each well.
Mix the total reaction volume by gently pipetting at least 10 times and incubate for 2 minutes at
room temperature.
Place on the magnetic stand and wait until the liquid is clear (~5 minutes)
Remove and discard all supernatant
Wash beads as follows: a. Keep on the magnetic stand and add 180 μl fresh 80% EtOH to each
well; b. Wait 30 seconds; and c. Remove and discard all supernatant
Repeat wash for a total of 2 washes.
Briefly spin for 10 seconds and return plate to magnet.
With a 20 μl pipette, remove all residual EtOH.
Dry on magnet for 2 minutes.
Remove from the magnetic stand and add 25 μl RSB to each well.
Pipette mix and incubate at room temperature for 2 minutes.
Place on the magnetic stand and wait until the liquid is clear (~2 minutes).
Transfer 24 μl supernatant to a new plate.
Keep on ice for same day use or store at −20° c. (SAFE STOPPING POINT).
Determine the concentration of each purified recovery product with the Qubit dsDNA HS Assay
Kit. Use 1-2 μl of sample DNA per measurement.
Proceed with 50 ng to BLT prep (next tab)

### Example 7—Enriching for Short Fragments

[0178] A workflow was performed as described in Example 1, and included an enrichment step for short fragments. The workflow included: high molecular weight tagmentation; mutagenesis PCR; library normalization; bottlenecking (suppression) PCR; library preparation; fragment analysis of products; and sequencing. The additional enrichment step for short fragment enrichment of certain fragments was performed on the products of the library preparation step. An example overview and timeline for short fragment enrichment in the workflow are depicted in FIG. 28 and FIG. 29, respectively. Of course, other workflows for such short fragment enrichment are also contemplated.

[0179] The enrichment step included hybridizing the products with selection probes, capturing the products hybridized to the selection probes with bead-linked capture probes, and amplifying the captured products. The enrichment step was substantially the same as that performed in Example 6.

### Example 8—Selection of Probes for Under-Represented Genomic Regions

[0180] This example relates to the generation and use of selection probes to enrich for regions of the genome including those which are typically under-represented in whole genome sequencing methods. Such regions of the genome may provide sequencing data that are systematically impacted by lower quality—such as elevated error rates, low mapping quality or depth anomalies—may fail to deliver consistently accurate variant calls even for SNVs and indels. Many of the reference characteristics that cause these systematic errors are well known, such as, highly repetitive regions have poor mapping quality and homopolymers are known to result in low base accuracy. This knowledge has been used to classify the genome into ‘easy’ and ‘difficult’ regions (Krusche P, et al. Nat Biotechnol. 2019; 37:555-560). Though these classifications can be helpful, they are not a perfect representation of the actual performance within these regions. For example, a large segmental duplication may be comprised of regions of high and low similarity, leading to very different variant calling accuracy.

[0181] Selection probes for use to enrich for targets in long fragments were identified by methods which included: selecting target regions of the genome; designing a probe set within the target regions; and identifying suitable probes within the probe set to generate a panel of selection probes. Briefly, for a panel that was focused on under-represented regions of the genome, target regions included those with low mappability (non-unique) portions of protein-coding regions, including introns and untranslated regions (UTRs). Such regions included those having a low mapping quality score (MAPQ) score, less than 50, in the HG38 reference sequence of the human genome; and those represented in the RefSeq database which includes non-redundant, well-annotated set of sequences, including genomic DNA and transcripts. MAPQ scores quantify the probability that a sequencing read is misplaced in a reference sequence (Li H, et al. (2008) Genome Research 18:1851-8). More regions of interest included certain groups of genes and regions of the genome. Examples included: (i) protein coding regions with low mappability, e.g., low mappability RefSeq sequences; (ii) CMRG genes, e.g., Wagner J., et al., (2022) Nat Biotechnol. 40: 672-680; (iii) deCODE Icelandic dark matter regions; (iv) regions with short tandem repeats (STR), e.g., Stevanovski I., et al., Sci Adv. 2022 March; 8(9): eabm5386; (v) MHC locus; (vi) ACMG genes; (vii) regions reported in Wenger A. M., et al., (2019) Nat Biotechnol. 37:1155-1162; and (viii) PGX genes.

[0182] Probe sets were designed to hybridize within such target regions using software tools including DESIGNSTUDIO (Illumina, Inc., San Diego). Probes were designed to hybridize to target regions having about 1 kb+/−0.2 kb between corresponding sequences in the linear reference sequence. A 400 bp window centered around the 1 kb target spacing was searched. Within the 400 bp window, probes were identified using several parameters including GC bias (e.g. <25% to <75%) and uniqueness or hits in the genome. Suitable probes were predicted to hybridize or to hit less than 20 other regions of the reference genome. A hit was at least 80 consecutive bps of the 120 bp probes match>90/c. 198,451 probes were identified. As depicted in FIG. 30, selection probes were identified having increased specificity for a target fragment.

[0183] In an example selection process for a fixed panel, probes were selected using the following steps: (1) Target regions were selected based on several inputs, including focusing on low mappability (non-unique) portions of protein-coding regions (including introns and UTRs), and certain identified groups of genes and genomic regions including: ACMG genes, CMRG genes, PGX genes, MHC locus, deCODE Icelandic dark matter regions. (2) Probes were designed to capture the above regions, aiming for about 1000 bp spacing between probes with the following sub-steps (2A)-(2D). (2A) To select better probes, 500 bp spacing was initially used. This provided two opportunities to find good probes for each region, which was useful to maximize the power of the data in a limited time. (2B) To achieve 1000 bp spacing, the algorithm jumped from one probe to the next in 1000 bp increments, but allowed a window of +/−200 bp to find the ‘best’ probe. (2C) There were multiple parameters within that window to find the ‘best’ probe. Mostly these were typical parameters such as GC content. However, a primary parameter for the panel was number of hits in the genome (minimize this number), and requirements on this parameter were relaxed to permit selection of probes in all regions. (2D) Probes were manufactured as double stranded DNA 80-mers or 120-mers. (3) At least 2 probes were selected per region, even for ‘small’ regions (e.g. 1000 bp, where 1 probe may target based on the above). (4) After probe selection was complete, additional rounds of selection were performed, based on the following sub-steps (4A)-(4D). (4A) Discarding region types that did not belong in the panel, for example, regions that were not low mappability portions of protein-coding regions. (4B) Discarding regions that were identified as “failed to cover” using the following sub-steps. (4B)(i). Regions that “failed to cover” included those that neither of the two panel designs covered at least half of the region 5×. This was calculated from the median of many samples, each with mean coverage in the 30× range. (4B)(ii) There were two designs for this panel which provided a choice of which probes to keep. ‘Panel A’ was kept as a default, because it had more replicates and typically saw better coverage overall, and slightly more probes were in this panel. ‘Panel B’ was kept if panel B gave at least 20% better coverage (calculated by fraction of bases covered>10×). (4C) To be even more rigorous about probes that hit multiple times in the genome, all probes were discarded that hit at least 20 times elsewhere in the genome. A hit included at least 50 consecutive bps of the 120 bp probes match>90%. This resulted in some gaps larger than desired. If there was a gap>1.5 kb or a region with a single probe, the other panel was examined probes from the other panel were added to cover those gaps. (4D) Any corrections that were needed were then made to align probes with coordinates of genomic sequences.

[0184] Additional “spike in” probes were identified in target regions using the following steps. Gaps between probes were identified in the remaining target regions that were larger than 1.5 kb, and target regions were identified that had gaps of larger than 1.5 kb between the first or last remaining probe and the target region start or stop location on the chromosome. For each identified 1.5 kb gap, unselected probes which targeted the region from panel A or panel B were identified and selected to fill the gap, making sure that such selected probes did not bind excessively (more than 20 times) in other parts of the genome. Separately, target regions were identified that were left with a single probe after going through the previous selection criteria. Targets could be left with a single probe because all the other probes assigned to that target region were liable to bind to >20 other places in the genome and had been removed, or because many target regions only had one probe from each uber panel A and uber panel B and only one of the panel batches to use for those targets had been picked. For these single-probe targets, unpicked probes were added that hit that same target from the non-picked panel, provided that those probes were also not labeled to bind excessively in other parts of the genome and that those probes had also met the same coverage criteria in the previous steps. Initial probe panels including ‘Uber A’ and ‘Uber B’ were generated. Probes within these panels were excluded with criteria that included having at least 20 hits in the genome, to generate a ‘final’ panel. TABLE 2A summarizes steps used to generate different batches of selections probes using steps described above.

TABLE 2A

| Step included | Batch | | | | |
|---|---|---|---|---|---|
| in batch | | | Uber A and | | Second |
| generation | Final | Spike-in | Uber B | First order | order |
| (1) | Yes | Yes | Yes | Yes | Yes |
| (2A) | Yes | Yes | Yes | Yes | Yes |
| (2B) | Yes | Yes | Yes | Yes | Yes |
| (2C) | Yes | Yes | Yes | Yes | Yes |
| (2D) | Yes | Yes | Yes | Yes | Yes |
| (3) | Yes | Yes | Yes | Yes | Yes |
| (4A) | Yes | Yes | No | No | No |
| (4B)(i) | Yes | Yes | No | No | No |
| (4B)(ii) | Yes | Yes | No | No | No |
| (4C) | Yes | No | No | No | No |
| (4D) | Yes | Yes | No | No | No |

[0185] TABLE 2B lists certain probes generated by the foregoing methods.

TABLE 2B

| | Characteristic | | |
|---|---|---|---|
| | | Approx spacing | |
| Batch | Size (bases) | in genome (kb) | No of probes |
| Final | 120 | 1 kb | 39953 |
| Uber A | 120 | 1 kb | 81325 |
| Spike-in | 120 | 1 kb | 1491 |

[0186] A series of selection probe panels were developed using methods substantially similar to the foregoing methods. Panels included: (1a) uber A; (1b) uber B; (2) intermediate/dev; and (3) final. Panels (1)-(3) were progressive iterations of a selection probe panel. The panels were used to prepare libraries with a method with long fragments with enrichment, and substantially similar to the WGS with enrichment workflow depicted in FIG. 32. A control included a library prepared with a method with long fragments, without enrichment, substantially similar to the WGS workflow depicted in FIG. 32. TABLE 2C lists certain metrics for data obtained using each method/panel which show that in methods that included enrichment, compared to methods without enrichment, median coverage levels and N50 values were much greater despite a smaller number of paired end reads.

TABLE 2C

| | With enrichment | | | | | Without |
|---|---|---|---|---|---|---|
| | Panel | Panel | Panel | Panel | Panel | enrichment |
| Metric | (1a) | (1a) | (1b) | (2) | (3) | None |
| Level of input reads | Low | High | High | Low | Low | High |
| (# paired end reads) | 1.0E+09 | ~5E+09 | ~3E+09 | 6.0E+08 | 5.9E+08 | 5.4E+09 |
| target region size (Mbp) | 76 | 76 | | 40 | 40 | N/A |
| median coverage | 32.2 | 72.2 | 67.5 | 34.4 | 41.9 | 27.3 |
| percent bases with no | 5.2% | 2.3% | 3.7% | 2.3% | 2.4% | 2.0% |
| coverage | | | | | | |
| percent bases with less | 20.1% | | | 15.3% | 12.3% | 11.5% |
| than 10× coverage | | | | | | |
| N50 (bp) | 6089 | 4198 | 4192 | 6677 | 7116 | 7054 |
| percent reads on target | 72% | | | 85% | 85% | N/A |
| f-measure non-SNP type | 0.737 | 0.784 | 0.732 | 0.841 | 0.841 | 0.881 |
| 2 | | | | | | |
| f-measure SNP type 2 | 0.885 | 0.902 | 0.882 | 0.905 | 0.911 | 0.947 |
| precision non-SNP type | 0.841 | 0.878 | 0.847 | 0.848 | 0.869 | 0.889 |
| 2 | | | | | | |
| precision SNP type 2 | 0.923 | 0.92 | 0.892 | 0.952 | 0.947 | 0.96 |
| sensitivity non-SNP | 0.656 | 0.709 | 0.644 | 0.834 | 0.814 | 0.874 |
| type 2 | | | | | | |
| sensitivity SNP type 2 | 0.849 | 0.884 | 0.872 | 0.863 | 0.879 | 0.934 |

[0187] The data in TABLE 2C show that in methods that included enrichment, compared to methods without enrichment, median coverage levels and N50 values were much greater despite a smaller number of input paired end reads.

### Example 9—Major Histocompatibility Complex (MHC) Panel

[0188] The MHC region is a large locus located on the short arm of human chromosome 6 (6p21.1-6p21.3), and contains highly polymorphic genes that code for cell surface proteins essential for the adaptive immune system. The region is challenging to obtain sequence information due to presence of high level of repetitive sequences, sequence homology, pseudogenes, and a wide variety of alleles in the population. Precise genotyping and phasing of the MHC region is challenging but highly clinically desirable for applications like organ transplantation and drug discovery.

[0189] Panels of selection probes were prepared which targeted approximately 5 Mbp of the MHC region. A first panel of selection probes was designed such that probes were spaced about 230 bp from one another on the HG38 reference sequence of the MHC region. Probe sequences were designed to hybridize within the target region using software tools, DESIGNSTUDIO (Illumina, Inc., San Diego). Potential probe sequences were evaluated by several criteria including number of hits within the genome, and percentage GC content. Probes having more than about 20 hits within the genome were discarded. A second panel of selection probes was prepared such that probes would be spaced about 1 kb from one another on a reference sequence of the MHC. The second panel was prepared by removing probes from the first panel. Probes included 80-mers and 120-mers. A batch of clinical probes was designed by a method including: targeting a 1 kb window in a reference sequence; identifying potential probes within the 1 kb using software tools, DESIGNSTUDIO (Illumina, Inc., San Diego); selecting a probe within the 1 kb based on criteria including less than 20 hits within the reference genome, and GC content. A hit included probes having at least 90% sequence identity along the full length of the probe with a target complement in the reference sequence. TABLE 3A lists probes generated by the foregoing methods.

TABLE 3A

| | Oligo characteristic | | | | |
|---|---|---|---|---|---|
| | Size | Approx spacing | | No of | SEQ ID |
| Batch | (bases) | in genome | | probes | NOs. |
| Clinical | 120 | 1 | kb | 4966 | 02-4967 |
| Final design | 120 | 1 | kb | 5153 | 4968-10120 |
| Final design | 80 | 1 | kb | 5155 | 10121-15275 |
| Input4_120_designs | 120 | 230 | bp | 21608 | 15276-36883 |
| Input4_120_designs | 80 | 230 | bp | 21608 | 36884-58491 |

[0190] The panels were used to prepare libraries with a method with long fragments and enrichment, and substantially similar to the WGS with enrichment workflow depicted in FIG. 32. Use of the MHC probe panel generated highly specific and efficient enrichment over the target region, with 98.3% long-reads on-target. FIG. 34 depicts an example of coverage for the targeted region. TABLE 3B lists certain sequencing metrics.

TABLE 3B

| Parameter | MHC panel |
|---|---|
| Read N50 | 5932 |
| Error Rate | 0.71% |
| Mean Coverage | 43.05 |
| %0 Coverage | 1.06% |
| % Low Coverage (1-3X) | 0.64% |
| % On Target Reads | 98.3% |

[0191] Use of the MHC selection probe panel resolved haplotype in polymorphic genes. Phasing worked well with use of the MHC probe panel in methods with long fragments and enrichment (e.g. WGS with enrichment workflow depicted in FIG. 32), and was comparable to such methods without enrichment (e.g. WGS without workflow depicted in FIG. 32). TABLE 3C lists certain sequencing metrics. As depicted in FIG. 35, a 722 kb region in the MHC locus was analyzed, and a 580 kb region was encapsulated in one phase block. As depicted in FIG. 36, a 426 kb region in the MHC locus that covered HLA-A, HLA-G, HLA-F, was fully phased.

TABLE 3C

| Parameter | MHC panel |
|---|---|
| % Biallelic Het SNVs Phased | 95.88% |
| Block N50 | 274,215 |
| Switch Error Rate | 0.14% |

[0192] Use of the MHC selection probe panel achieved accurate variant calling in the MHC region. FIG. 37A depicts a graph for SNV precision vs SNV recall for sequence information obtained from nucleic acid libraries prepared by (1) on market long read kits; (2) short read (SR) PCR-free sequencing methods, such as those including simple tagmentation of gDNA; (3) method with long fragments and enrichment, such as the WGS with enrichment workflow depicted in FIG. 32 (ICLR-MHC enrichment); and (4) method with long fragments without enrichment, such as the WGS workflow depicted in FIG. 32 (ICLR-WGS). Use of the MHC panel with long fragment with enrichment methods achieved levels of SNV precision greater than methods without enrichment.

[0193] FIG. 37B depicts a graph for INDEL precision vs INDEL recall for sequence information obtained from nucleic acid libraries prepared by (1) on market long read kits; (2) PCR-free methods; (3) method with long fragments and enrichment, such as the WGS with enrichment workflow depicted in FIG. 32 (ICLR-MHC enrichment); and (4) method with long fragments without enrichment, such as the WGS workflow depicted in FIG. 32 (ICLR-WGS). Use of the MHC panel with long fragment with enrichment methods achieved levels of indel precision greater than methods without enrichment.

### Example 10—American College of Medical Genetics (ACMG) Panel

[0194] A selection probe panel was generated from a list of genes compiled by ACMG for which specific mutations are known to be causative of disorders that are clinically actionable. The panel was designed to precisely call variants and phase in these genes. The panel included 78 unique genes in ACMG SF v3.1, and targeted full genes. The panel size was about 6.8 Mbp. The ACMG genes included those listed in TABLE 1A.

[0195] Panels of selection probes were prepared which targeted the ACMG genes. A first panel of selection probes was designed such that probes were spaced about 230 bp from one another on the HG38 reference sequence of the ACMG genes. Probe sequences were designed to hybridize within the target region using software tools, DESIGNSTUDIO (Illumina, Inc., San Diego). Potential probe sequences were evaluated by several criteria including number of hits within the genome, and percentage GC content. Probes having more than about 20 hits within the genome were discarded. A second panel of selection probes was prepared such that probes would be spaced about 1 kb from one another on a reference sequence of the ACMG genes. The second panel was prepared by removing probes from the first panel. Probes included 80-mers and 120-mers. A batch of clinical probes was designed by a method including: targeting a 1 kb window in a reference sequence; identifying potential probes within the 1 kb using software tools, DESIGNSTUDIO (Illumina, Inc., San Diego); selecting a probe within the 1 kb based on criteria including less than 20 hits within the reference genome, and GC content. A hit included probes having at least 90% sequence identity along the full length of the probe with a target complement in the reference sequence. TABLE 4A lists probes generated by the foregoing methods.

TABLE 4A

| | Characteristic | | | |
|---|---|---|---|---|
| | | Approx | | |
| | | spacing in | | No of |
| Batch | Size (bases) | genome | | probes |
| Clinical 1 kb | 120 | 1 | kb | 6935 |
| 120 mer_1 kb_Optimized- | 120 | 1 | kb | 7513 |
| Final | | | | |
| 80 mer_1 kb_Optimized- | 80 | 1 | kb | 7520 |
| Final | | | | |
| Clinical 230 bp | 120 | 230 | bp | 29954 |
| ACMG_120 mer_designs | 120 | 230 | bp | 29954 |
| ACMG_80 mer_designs | 80 | 230 | bp | 29954 |

[0196] Use of the ACMG selection probe panel was highly effective and achieved comparable coverage performance with long read whole genome sequencing methods without the use of the panel (FIG. 38). TABLE 4B lists certain sequencing metrics.

TABLE 4B

| Parameter | ACMG panel |
|---|---|
| Read N50 | 7497 |
| Error Rate | 0.26% |
| Mean Coverage | 59.47 |
| %0 Coverage | 0.04% |
| % Low Coverage (1-3X) | 0.22% |
| % On Target Reads | 87.4% |

[0197] 99.5% of heterozygous SNVs were phased using the ACMG panel. For example, as depicted in FIG. 39, TNNT2, a 22 kb gene was fully phased in one phase block. TABLE 4C lists certain sequencing metrics. Phasing metrics were in target genes only, hence a shorter block N50.

TABLE 4C

| Parameter | ACMG panel |
|---|---|
| % Biallelic Het SNVs Phased | 99.5% |
| Block N50 | 85841 |
| Switch Error Rate | 0.17% |

[0198] 99% of heterozygous SNVs were phased using the ACMG panel. For example, as depicted in FIG. 40A for APOB and in FIG. 40B for TMEM127, genes were fully phased in one phase block.

[0199] Use of the ACMG panel covered and phased highly repetitive MSH6 (70.76% contains repeat elements), and enrichment achieved comparable coverage and phasing compared to long read whole genome sequencing methods without the use of the panel (FIG. 41). 27 kb was fully encapsulated in one phase block. Use of the ACMG panel covered and phased highly repetitive NF2 (45% contains repeat elements), and enrichment achieved comparable coverage and phasing compared to long read whole genome sequencing methods without the use of the panel. 99 kb was fully encapsulated in one phase block.

[0200] Use of the ACMG selection probe panel achieved highly accurate variant calling in the ACMG. FIG. 42A depicts a graph for SNV precision vs SNV recall for sequence information obtained from nucleic acid libraries prepared by (1) on market long read kits; (2) PCR-free methods; (3) method with long fragments and enrichment, such as the WGS with enrichment workflow depicted in FIG. 32 (ICLR-ACMG enrichment); and (4) method with long fragments without enrichment, such as the WGS workflow depicted in FIG. 32 (ICLR-WGS). Use of the ACMG panel with long fragment with enrichment methods achieved levels of SNV precision greater than methods without enrichment. FIG. 42B depicts a graph for INDEL precision vs INDEL recall for sequence information obtained from nucleic acid libraries prepared by (1) on market long read kits; (2) PCR-free methods; (3) method with long fragments and enrichment, such as the WGS with enrichment workflow depicted in FIG. 32 (ICLR-ACMG enrichment); and (4) method with long fragments without enrichment, such as the WGS workflow depicted in FIG. 32 (ICLR-WGS). Use of the ACMG panel with long fragment with enrichment methods achieved levels of indel precision and indel recall greater than methods without enrichment.

### Example 11—Pharmacogenetic (PGX) Panel

[0201] A selection probe panel was generated for genes commonly targeted by pharmacogenetic testing assays. Genetic variation is known to influence the way individual respond to therapeutics. Accurately detecting functional haplotypes (“star alleles”) in clinically actionable pharmacogenetic genes is crucial to implementation of personalized medicine. The panel was generated to achieve highly accurate genotyping and star allele calling in such genes. The panel included 98 genes that are important in pharmacogenetics, targeting full genes. The panel size was about 8.1 Mbp. The genes included those listed in TABLE 1B.

[0202] Panels of selection probes were prepared which targeted the PGX genes. A first panel of selection probes was designed such that probes were spaced about 230 bp from one another on the HG38 reference sequence of the PGX genes. Probe sequences were designed to hybridize within the target region using software tools, DESIGNSTUDIO (Illumina, Inc., San Diego). Potential probe sequences were evaluated by several criteria including number of hits within the genome, and percentage GC content. Probes having more than about 20 hits within the genome were discarded. A second panel of selection probes was prepared such that probes would be spaced about 1 kb from one another on a reference sequence of the PGX genes. The second panel was prepared by removing probes from the first panel. Probes included 80-mers and 120-mers. A batch of clinical probes was designed by a method including: targeting a 1 kb window in a reference sequence; identifying potential probes within the 1 kb using software tools, DESIGNSTUDIO (Illumina, Inc., San Diego); selecting a probe within the 1 kb based on criteria including less than 20 hits within the reference genome, and GC content. A hit included probes having at least 90% sequence identity along the full length of the probe with a target complement in the reference sequence. TABLE 5A lists probes generated by the foregoing methods.

TABLE 5A

| | Characteristic | | | |
|---|---|---|---|---|
| | | Approx spacing | | No of |
| Batch | Size (bases) | in genome | | probes |
| Clinical 1 kb | 120 | 1 | kb | 8153 |
| PGX_80 mer_1 kb | 80 | 1 | kb | 8693 |
| PGX_80 mer_230 bp | 80 | 230 | bp | 35205 |
| PGX_80 mer_230 bp_v1 | 80 | 230 | bp | 33089 |

[0203] TABLE 5B lists certain sequencing metrics for methods with long fragments and enrichment with the PGX panel, and shows highly effective target region coverage.

TABLE 5B

| Parameter | PGx panel |
|---|---|
| Read N50 | 7279 |
| Mean Coverage | 57.17 |
| %0 Coverage | 0.12% |
| % Low Coverage (1-3X) | 0.32% |
| % On Target Reads | 88.3% |

[0204] Star Alleles are a nomenclature system used to describe allelic variation. In the case of PGX genes, star alleles describe haplotype patterns associated with protein-level interactions, with *1 usually referring to the wild-type or “fully-functional” haplotype. TABLE 5C lists star alleles called by methods which include long fragments, and enrichment (ICLR PGX enrichment) which were 100% concordant with on market long read methods.

TABLE 5C

| Gene | ICLR PGx Enrichment | On-market Long Reads |
|---|---|---|
| CYP2C19 | *1.002, *1.002 | *1.002, *1.002 |
| CYP2C8 | *1.001, *1.004 | *1.001, *1.004 |
| CYP2C9 | *1.001, *1.001 | *1.001, *1.001 |
| CYP2E1 | *1.002, *7.002 | |
| CYP2J2 | *1.001, *1.001 | *1.001, *1.001 |
| CYP3A4 | *1.002, *1.002 | *1.002, *1.002 |
| CYP3A5 | *3.001, *3.001 | *3.001, *3.001 |
| CYP3A7 | *1.001, *1.001 | *1.001, *1.001 |
| CYP4F2 | *1.001, *4.1001 or *2.001, | *1.001, *4.1001 or *2.001, |
| | *3.001 | *3.001 |
| NUDT15 | *1.001, *1.001 | *1.001, *1.001 |
| SLCO1B1 | *1.002, *1.002 | *1.002, *1.002 |
| TPMT | *1.001, *1.001 | *1.001, *1.001 |
| UGT1A1 | *1, *1 | *1, *1 |

[0205] Use of the PGX selection probe panel achieved highly accurate variant calling in the PGX genes. FIG. 43A depicts a graph for SNV precision vs SNV recall for sequence information obtained from nucleic acid libraries prepared by (1) on market long read kits; (2) PCR-free methods; (3) method with long fragments and enrichment, such as the WGS with enrichment workflow depicted in FIG. 32 (ICLR-PGX enrichment); and (4) method with long fragments without enrichment, such as the WGS workflow depicted in FIG. 32 (ICLR-WGS). Use of the PGX panel with long fragment with enrichment methods achieved levels of SNV precision and indel recall greater than methods without enrichment. FIG. 43B depicts a graph for INDEL precision vs INDEL recall for sequence information obtained from nucleic acid libraries prepared by (1) on market long read kits; (2) PCR-free methods; (3) method with long fragments and enrichment, such as the WGS with enrichment workflow depicted in FIG. 32 (ICLR-PGX enrichment); and (4) method with long fragments without enrichment, such as the WGS workflow depicted in FIG. 32 (ICLR-WGS). Use of the PGX panel with long fragment with enrichment methods achieved levels of indel precision and indel recall greater than methods without enrichment.

### Example 12—Challenging Medically Relevant Genes (CMRG) Panel

[0206] A selection probe panel was generated for genes that are medically relevant autosomal genes that are excluded from the GiaB v4.2.1 variant benchmark due to repeats or polymorphic complexities (Wagner J., et al., (2022) Nat Biotechnol. 40: 672-680). These genes have <90% bases included in the benchmark and pose a challenge for their accurate analysis in a clinical setting. The selection probe panel was generated to rescue coverage gap in these genes. The panel targeted 389 genes, with a panel size of 22.5 Mbp. The average overlap with repeat: 36.6%, and the average overlap with segdup was 19.7%. The genes include those listed in TABLE 1C.

[0207] Panels of selection probes were prepared which targeted the CMRG genes. A first panel of selection probes was designed such that probes were spaced about 230 bp from one another on the HG38 reference sequence of the CMRG genes. Probe sequences were designed to hybridize within the target region using software tools, DESIGNSTUDIO (Illumina, Inc., San Diego). Potential probe sequences were evaluated by several criteria including number of hits within the genome, and percentage GC content. Probes having more than about 20 hits within the genome were discarded. A second panel of selection probes was prepared such that probes would be spaced about 1 kb from one another on a reference sequence of the CMRG genes. The second panel was prepared by removing probes from the first panel. Probes included 80-mers and 120-mers. A batch of clinical probes was designed by a method including: targeting a 1 kb window in a reference sequence; identifying potential probes within the 1 kb using software tools, DESIGNSTUDIO (Illumina, Inc., San Diego); selecting a probe within the 1 kb based on criteria including less than 20 hits within the reference genome, and GC content. A hit included probes having at least 90% sequence identity along the full length of the probe with a target complement in the reference sequence. TABLE 6A lists probes generated by the foregoing methods.

TABLE 6A

| | Characteristic | | | |
|---|---|---|---|---|
| | | Approx spacing | | No of |
| Batch | Size (bases) | in genome | | probes |
| Clinical | 120 | 1 | kb | 22545 |
| CMG_80 mer_1 kb | 80 | 1 | kb | 21333 |
| CMG_80 mer_230 bp | 80 | 230 | bp | 96721 |

[0208] Methods using long fragments with enrichment with either the first selection panel (230 bp spacing), or the second selection panel were compared. As depicted in FIG. 44A, use of the second selection probe panel (SYD-C2-CMRG-1 kb) compared to use of the first selection probe panel (SYD-C2-CMRG-230 bp), resulted in increased identification in sequence data for (i) total mutations in bases in region; (ii) percentage DUP mutant reads; and (iii) percentage on target unique mapped reads. FIG. 44B compares normalized coverage between use of the first selection probe panel (SYD-C2-CMRG-230 bp) and the second selection probe panel (SYD-C2-CMRG-1 kb).

[0209] Coverage of certain genes, including CFC1, HBG1, OR51A2, RGPD3, and CYP4F3 was compared using methods with long fragment and enrichment (ICLR with enrichment), methods with long fragments without enrichment (ICLR WGS), and PCR free short reads (SR). FIG. 44C depicts an example with respect to HBG1 and shows that enrichment with the CMRG panel rescued a SR coverage dip in the gene. With regard to other genes, for CFC1, enrichment with the CMRG panel increased coverage in the gene. For HBG1, enrichment with the CMRG panel rescued a SR coverage dip in the gene. For OR51A2, enrichment with the CMRG panel rescued a SR coverage gap in the gene. For the RGPD3 gene, enrichment with the CMRG panel rescued an SR coverage dip in the gene. For the CYP4F3 gene, enrichment with the CMRG panel resolved SVs missed by SR in the gene.

[0210] TABLE 6B lists certain metrics which shows that methods with long fragments and enrichment with the CMRG panel achieved highly effective target region coverage.

TABLE 6B

| Parameter | CMRG panel |
|---|---|
| Read N50 | 6432 |
| Mean Coverage | 47.68 |
| %0 Coverage | 2.74% |
| % Low Coverage (1-3X) | 0.92% |
| % On Target Reads | 80.5% |

[0211] Use of the CMRG selection probe panel achieved highly accurate variant calling in the CMRG genes. FIG. 45A depicts a graph for SNV precision vs SNV recall for sequence information obtained from nucleic acid libraries prepared by (1) on market long read kits; (2) PCR-free methods; (3) method with long fragments and enrichment, such as the WGS with enrichment workflow depicted in FIG. 32 (ICLR-CMRG enrichment); and (4) method with long fragments without enrichment, such as the WGS workflow depicted in FIG. 32 (ICLR-WGS). FIG. 45B depicts a graph for INDEL precision vs INDEL recall for sequence information obtained from nucleic acid libraries prepared by (1) on market long read kits; (2) PCR-free methods; (3) method with long fragments and enrichment, such as the WGS with enrichment workflow depicted in FIG. 32 (ICLR-CMRG enrichment); and (4) method with long fragments without enrichment, such as the WGS workflow depicted in FIG. 32 (ICLR-WGS).

[0212] The term “comprising” as used herein is synonymous with “including,” “containing,” or “characterized by,” and is inclusive or open-ended and does not exclude additional, unrecited elements or method steps.

[0213] The above description discloses several methods and materials of the present invention. This invention is susceptible to modifications in the methods and materials, as well as alterations in the fabrication methods and equipment. Such modifications will become apparent to those skilled in the art from a consideration of this disclosure or practice of the invention disclosed herein. Consequently, it is not intended that this invention be limited to the specific embodiments disclosed herein, but that it cover all modifications and alternatives coming within the true scope and spirit of the invention.

[0214] All references cited herein, including but not limited to published and unpublished applications, patents, and literature references, are incorporated herein by reference in their entirety and are hereby made a part of this specification. To the extent publications and patents or patent applications incorporated by reference contradict the disclosure contained in the specification, the specification is intended to supersede and/or take precedence over any such contradictory material.

1.-101. (canceled)

102. A method for preparing a nucleic acid library, comprising:
(a) obtaining a plurality of transposomes comprising transposon adaptors, wherein the plurality of transposomes is immobilized on a plurality of beads;
(b) contacting a plurality of nucleic acid fragments with the plurality of transposomes to obtain a plurality of polynucleotides;
(c) amplifying the plurality of polynucleotides to obtain amplified polynucleotides by:
(i) performing a mutagenesis PCR, such that mutations are introduced into amplified polynucleotides, and
(ii) performing a suppression PCR; and
(d) adding library adapters to each end of the amplified polynucleotides, thereby obtaining the nucleic acid library;
further comprising enriching for target polynucleotides in (i) the plurality of polynucleotide, (ii) the amplified polynucleotides, and/or (iii) nucleic acids of the nucleic acid library by hybridizing a plurality of selection probes to the target polynucleotide; wherein the selection probes of the plurality of selection probes comprise at least 50 different nucleotide sequences;
wherein each selection probe of the plurality of selection probes comprises a nucleotide sequence capable of hybridizing to a nucleotide sequence within human chromosome 6p21.1-6p21.3; to a nucleotide sequence between nucleotide sequences encoding MOG and COL11A2 in a human genome; and/or to a site in a major histocompatibility complex (MHC) locus of a human genome.

103. The method of claim 102, wherein each selection probe of the plurality of selection probes comprises a nucleotide sequence having at least 90% sequence identity to any one of SEQ ID NOs:02-58491.

104. The method of claim 102, wherein the plurality of selection probes is attached to a substrate.

105. The method of claim 102, further comprising amplifying the target polynucleotides.

106. The method of claim 102, wherein the plurality of the transposomes is immobilized on the plurality of beads:
(i) at a density such that an average length of the plurality of polynucleotides is greater than about 1 kbp, and/or the average length of the plurality of polynucleotides is in a range from about 1 kbp to about 40 kbp;
(ii) such that the number of transposomes immobilized on the plurality of beads is no more than about 100 transposomes per bead;
(iii) comprise a total activity such that an average length of the plurality of polynucleotides is greater than about 1 kbp, and/or wherein the average length of the plurality of polynucleotides is in a range from about 1 kbp to about 40 kbp; and/or
(iv) comprise an activity in a range from about 0.05 AU/μl to about 0.25 AU/μl.

107. The method of claim 102, wherein the transposomes of the plurality of transposomes are the same.

108. The method of claim 102, wherein the mutagenesis PCR comprises: (i) amplifying the plurality of polynucleotides with a low bias DNA polymerase; (ii) amplifying the plurality of polynucleotides with a nucleotide analogue; and/or (iii) no more than 6 cycles.

109. The method of claim 102, wherein a first end of a polynucleotide of the plurality of polynucleotides is capable of annealing to a second end of the polynucleotide of the plurality of polynucleotides; and/or, wherein a first end of an amplified polynucleotide is capable of annealing to a second end of the amplified polynucleotide.

110. The method of claim 102, wherein the suppression PCR comprises (i) use of a single amplification primer; and/or (ii) no more than 6 cycles.

111. The method of claim 102, wherein step (d) comprises contacting the amplified polynucleotides with an additional plurality of transposomes comprising the library adapters.

112. A method for determining a sequence of a target nucleic acid, comprising:
performing the method of claim 102;
sequencing the nucleic acid library to obtain sequence reads; and
assembling sequence reads to obtain the sequence of a target nucleic acid.

113. The method of claim 112, wherein the assembling comprises determining mutations introduced into the amplified polynucleotides during the mutagenesis PCR and comparing the sequence reads to a reference sequence.

114. A kit comprising:
a first bead-linked transposomes (BLT-1) reagent, wherein the BLT-1 transposomes reagent comprises a first adaptor sequence;
a mutagenesis reagent comprising a first primer, dPTPs, dNTPs, and a polymerase;
a second bead-linked transposomes (BLT-2) reagent, wherein the BLT-2 transposomes reagent comprise the first adaptor and a second adaptor;
an amplification reagent comprising a first primer, a second primer, dNTPs, and a polymerase; and
a plurality of selection probes, wherein the selection probes are different from one another, wherein each selection probe of the plurality of selection probes comprises a nucleotide sequence capable of hybridizing to a nucleotide sequence within human chromosome 6p21.1-6p21.3; to a nucleotide sequence between nucleotide sequences encoding MOG and COL11A2 in a human genome; and/or to a site in a major histocompatibility complex (MHC) locus of a human genome;
wherein BLT-1 has a lower transposome density as compared to BLT-2; and
wherein the first primer hybridizes to the first adaptor sequence and the second primer hybridizes to the second adaptor sequence.

115. The kit of claim 114, wherein BLT-2 has more than 10 times the transposome density as compared to BLT-1; and/or the first adaptor is B15 and the second adaptor is A14.

116. The kit of claim 114, comprising a plurality of at least 50 selection probes, wherein the selection probes are different from one another, wherein each selection probe of the plurality of selection probes comprises a nucleotide sequence having at least 90% sequence identity to any one of SEQ ID NOs:02-58491.

117. A system for preparing a nucleic acid library, comprising:
(a) a first plurality of transposomes comprising transposon adaptors for tagmenting a plurality of nucleic acid fragments, wherein the first plurality of transposomes is immobilized on a first plurality of beads at a first density;
(b) reagents for amplifying the plurality of polynucleotides to obtain amplified polynucleotides, wherein the amplifying comprising a mutagenesis PCR and/or a suppression PCR, wherein:
(i) the first reagent for performing mutagenesis PCR comprise a low bias DNA polymerase and/or a nucleotide analogue, and
(ii) the first reagents for performing suppression PCR comprise amplification primers having the same nucleotide sequence capable of hybridizing to the transposon adaptors;
(c) a plurality of selection probes for enriching for target polynucleotides in the amplified polynucleotides, wherein each selection probe of the plurality of selection probes comprises a nucleotide sequence capable of hybridizing to a nucleotide sequence within human chromosome 6p21.1-6p21.3; to a nucleotide sequence between nucleotide sequences encoding MOG and COL11A2 in a human genome; and/or to a site in a major histocompatibility complex (MHC) locus of a human genome; and
(d) a second plurality of transposomes comprising library adaptors for adding library adaptors to each end of the amplified polynucleotides, wherein the second plurality of transposomes is immobilized on a second plurality of beads at a second density, wherein the first density is less than the second density.

118. The system of claim 117, wherein the first plurality of the transposomes is immobilized on the first plurality of beads:
(i) at a density such that an average length of the plurality of polynucleotides is greater than about 1 kbp, and/or the average length of the plurality of polynucleotides is in a range from about 1 kbp to about 40 kbp;
(ii) such that the number of transposomes immobilized on the first plurality of beads is no more than about 100 transposomes per bead;
(iii) comprise a total activity such that an average length of the plurality of polynucleotides is greater than about 1 kbp, and/or wherein the average length of the plurality of polynucleotides is in a range from about 1 kbp to about 40 kbp; and/or
(iv) comprise an activity in a range from about 0.05 AU/μl to about 0.25 AU/μl.

119. The system of claim 117, wherein:
(i) an average distance between two adjacent nucleotide sequences of the selection probes on a reference sequence of a genome is in a range from about 300 consecutive nucleotides to about 7,000 consecutive nucleotides;
(ii) an average number of sites in a genome that each selection probe of the plurality of selection probes is capable of hybridizing to is no more than 50 different sites in the genome;
(iii) each selection probe of the plurality of selection probes is capable of hybridizing to no more than 50 different sites in a genome;
(iv) the plurality of selection probes lacks sequences capable of hybridizing to a repetitive genomic DNA element;
(v) the plurality of selection probes comprises at least 50 different selection probes; and/or
(vi) each selection probe of the plurality of selection probes comprises a nucleotide sequence having at least 90% sequence identity to any one of SEQ ID NOs:02-58491.

The application's sequence listing, which the Patent Office published only in electronic form, follows.

SEQUENCE LISTING (58491 sequences)

SEQ ID NO: 1 - DNA, 15 bp, synthetic construct
  source 1..15: mol_type = other DNA
gtctcgtgggctcgg

SEQ ID NO: 2 - DNA, 120 bp, synthetic construct
  source 1..120: mol_type = other DNA
cttcagggtaccgagtaacacattcaacttgttcaactgcaagtgtgctcctggtggtctttaagtctttgggaaggtcttagttctcaaatctggaaataattatcctgatattctaag

SEQ ID NO: 3 - DNA, 120 bp, synthetic construct
  source 1..120: mol_type = other DNA
agagaggagtataattaagctcacatacctgttacccactgcatctataatcaatacaactctccgctaatttcattttacctacatctgaaaaagcttgttaccacagcccccaccctt

SEQ ID NO: 4 - DNA, 120 bp, synthetic construct
  source 1..120: mol_type = other DNA
cacatccaggtcacaattggcaatggctgctataaccatgaggtgaaattggatgaaggactctagaatggttggattaggctgatgtcacctaaaaccaaagctaaattttatatcatc

SEQ ID NO: 5 - DNA, 120 bp, synthetic construct
  source 1..120: mol_type = other DNA
cccacctgctgggctcttccattttatcacaattattccgcctgttcacgtgcagagagaacacttggggcagattttaagaccttagagagtaacttgtttacaaataaaatatctctt

SEQ ID NO: 6 - DNA, 120 bp, synthetic construct
  source 1..120: mol_type = other DNA
acgaaagacagaggtgagaaggctcagagaagtggatatgctggggtggatacactctgtaaatccagaaaaatctacctgctgcctatttttcaattgttcaatttgcctgttaaatca

SEQ ID NO: 7 - DNA, 120 bp, synthetic construct
  source 1..120: mol_type = other DNA
aaccttggtctttcctcaactgtcaactctgagtgctaagaacctaaaagatatctctgctttactgcacagcaaggtctttgttgtgagttgggttgtgtcctctcaaaatttgtatat

SEQ ID NO: 8 - DNA, 120 bp, synthetic construct
  source 1..120: mol_type = other DNA
aatagcttccaccttccaccctgcagagcaattgtaaacttcataacacatgcgaagcgcttgactcaaaaaacaggaagcactaaggactgttaatttaactggcatctcattactttt

SEQ ID NO: 9 - DNA, 120 bp, synthetic construct
  source 1..120: mol_type = other DNA
aaaattcaatagaataaaacaaaatgaacgacatgaagcccaacacctcactggaacatgcaaaacccttcctttattctctggtggatcccatttctcgccattgttcagtgctctcta

SEQ ID NO: 10 - DNA, 120 bp, synthetic construct
  source 1..120: mol_type = other DNA
tccaaagtgctgttccaaaagagctcaccgagacaaggtgatattggagaagtgatagacacatagatctatggaagacattgggaagcttgggaataaacccacacaattatagctaat

SEQ ID NO: 11 - DNA, 120 bp, synthetic construct
  source 1..120: mol_type = other DNA
cttatgtccacacagacacccgtacacaaactgttataaaagctccagtcataataggcaaaacccagaagcaaactaaatgtcctttaacaggtgaacgtgtaaacaaactatggtgca

SEQ ID NO: 12 - DNA, 120 bp, synthetic construct
  source 1..120: mol_type = other DNA
aaggtttctgaggagatggaagggctgcaggtataggttcccaatatgtccccaccccagttcaatttcaatgaccaagggagatagcagaggtaaagaaaacagataagagggggtcac

SEQ ID NO: 13 - DNA, 120 bp, synthetic construct
  source 1..120: mol_type = other DNA
ctcagtccaagtctgtgcaagaaaaagttccccagaggcagggatcttatccattcagactttaagtgtgggctctgatggttactgtgggacccaccaggcactggagttttccagttt

SEQ ID NO: 14 - DNA, 120 bp, synthetic construct
  source 1..120: mol_type = other DNA
gagtaaagatttgagtggaacagaacactcatgagatttcttctttcctatagaaaactgggcatcttcatggtgtctgaacaatagcaggaggctgatcatatagagatttctggttcc

SEQ ID NO: 15 - DNA, 120 bp, synthetic construct
  source 1..120: mol_type = other DNA
acacaagaaacaaagaacaaagtcatccacaatcacaagtagtttatactttgatgtgtccttctaggtcctgtgtgtgtagacataacatccagttatatgggattgagattctacagt

SEQ ID NO: 16 - DNA, 120 bp, synthetic construct
  source 1..120: mol_type = other DNA
aaaaaaaaaaaaaaaaaatcgtctttccttccagaagtgctgaatgattgctgtttgtggtagtgagccttttgtctgttataaggctggttccttcctgaggaaccagccctttagccc

SEQ ID NO: 17 - DNA, 120 bp, synthetic construct
  source 1..120: mol_type = other DNA
agacgttgacctagctgacttgaaaatgtatgtacacctaaaacctacatgtcacattcactgccttattcattatcactaaaacctagaagctactgagatgaccttcaacacaggtcc

SEQ ID NO: 18 - DNA, 120 bp, synthetic construct
  source 1..120: mol_type = other DNA
ccaagataaaaccaattttatctttcaaaataggctcttacaatcgcatgtacccacatcttccacaatagcccctggactttgaggggtaagatagtttcaatttctggccctgtgttt

SEQ ID NO: 19 - DNA, 120 bp, synthetic construct
  source 1..120: mol_type = other DNA
tctcataaagtctctttttacaaaccttactatgacttacacaagccacttatgacatgcctagacttcctgttttatcctaaacagcttctttcctaaataaccaatcattttatcttc

SEQ ID NO: 20 - DNA, 120 bp, synthetic construct
  source 1..120: mol_type = other DNA
ccctacagtgcaagttcatctaactacacgctcaaactggaaagtcaacttgagaattaacagttgatttataaaccaatcatgcccactgtggaactctcactctttaggaggttgtct

SEQ ID NO: 21 - DNA, 120 bp, synthetic construct
  source 1..120: mol_type = other DNA
ggttgaagattgctctctatcatcctagaagcaggaaaaaaactcaaaactcatcttccctgttggaagcaagctgaaactctggaaaggagttgcctgctttccattatcatggattca

SEQ ID NO: 22 - DNA, 120 bp, synthetic construct
  source 1..120: mol_type = other DNA
tcaaggccagacatggtggttcatgcctgtaatccccgctctttgggaggccttgcaaggccagaggatttcttgagcccaggagttcaagaccagcctgggcaacaaggcaaaaccctg

SEQ ID NO: 23 - DNA, 120 bp, synthetic construct
  source 1..120: mol_type = other DNA
acctcaaaccccacaagctttgcgttgttgcagattgtccctctcagaatattttacaagatggtgaagtgcctaatgaacatttcttttgtcataaagtgagtttggatcctgaagaag

SEQ ID NO: 24 - DNA, 120 bp, synthetic construct
  source 1..120: mol_type = other DNA
tgaagtctttccatgatgactttggcttttgccagaggtaggctactgcgggggcataagccatatcatgccatgagccactatcctgctcatgttccagaatgaggagacatctgggtg

SEQ ID NO: 25 - DNA, 120 bp, synthetic construct
  source 1..120: mol_type = other DNA
aggagtctacatcccaagatgttctaacttccagagtctccaagcccatcaagagcaagttttgctaaaagtgttctgagagcttatgaagcacatggtgagtggtcagtccctcagctc

SEQ ID NO: 26 - DNA, 120 bp, synthetic construct
  source 1..120: mol_type = other DNA
ccccacaacttgccactacccagtgaaaagtcagtgtactctccaaaacctcaagtttaacaattccattcccaaatacaaccactcctagacaattttggtgaaaggtgttactttagt

SEQ ID NO: 27 - DNA, 120 bp, synthetic construct
  source 1..120: mol_type = other DNA
cacctgctgttcccacagacttccttcatgctcatcctgtggctctgggatgtctacctactgggaggtgagtgtgtggtgacaactatggtatacatggccttcacagccacagaatta

SEQ ID NO: 28 - DNA, 120 bp, synthetic construct
  source 1..120: mol_type = other DNA
agatcccccagaggagtggagggtgtctcatccactgtggagataagcccccatattgcgtggcaaaggggctaggtaacagttaaggcctcatccatctgagctctgaatcaaggctaa

SEQ ID NO: 29 - DNA, 120 bp, synthetic construct
  source 1..120: mol_type = other DNA
tcagaggcctgtggttttcacagtagagcttggagcagagatgctaggcccctatcacttccatatgtgtcctggacacctctaagatcataggactggcctagcccccaataccagaca

SEQ ID NO: 30 - DNA, 120 bp, synthetic construct
  source 1..120: mol_type = other DNA
cttccagcatagattcaacaatgcctaagaatgcctcttcttggggaaaaggaccccttccttggcctcaaagcccccacttattttgattaaagcacaataaagtctttgttgttatgt

SEQ ID NO: 31 - DNA, 120 bp, synthetic construct
  source 1..120: mol_type = other DNA
tcctgttttctttccattgattcttttaccacctttctcctcttactgattttgaatgaagggggtttttcatgagggtaaggtaactggcaagaaatgaaataacagccagatgcagtg

SEQ ID NO: 32 - DNA, 120 bp, synthetic construct
  source 1..120: mol_type = other DNA
tgcatatgagtccatcagaggtgagatttgcaaatacttcctccagcctgggacttgtcttttcattctcctcacagggtctttcagagtgcacacatcattttgatgaagtccaattga

SEQ ID NO: 33 - DNA, 120 bp, synthetic construct
  source 1..120: mol_type = other DNA
gggctccttcctttagtagactcagatttccatctggagtcattattctcctgctagatggatgtcctttaccatttctcaatctgtacatctcctggtgatgatttctttcatcttttg

SEQ ID NO: 34 - DNA, 120 bp, synthetic construct
  source 1..120: mol_type = other DNA
tgaaaccccttgtttcctccaccttccatctcattcaacaaagctcttgggagaacaactttaaggactccctatgcctcttccttcaaaggtagccagccaagaagtagatggctggtt

SEQ ID NO: 35 - DNA, 120 bp, synthetic construct
  source 1..120: mol_type = other DNA
tcaggtattcttgatgctgtgcccaacaccaggtgtgtatccatgcacctaggtgcccataaaggaaagaggtgcatttctttacctttgttctccaactctctcattgacacagacagt

SEQ ID NO: 36 - DNA, 120 bp, synthetic construct
  source 1..120: mol_type = other DNA
gctcagttacacttggggaagtgctggtgacctcttcataaaagcaaactttgcttctgaatcacagaagcttctggaacaaagcttgttccgcaaactgatttaaaaaaaaaggcttct

SEQ ID NO: 37 - DNA, 120 bp, synthetic construct
  source 1..120: mol_type = other DNA
ttctattctagaatccttaatttcttcccactcctctccaccacaaactcagtggatataggcacttgtgtcacttagctgatgttatcatttcacttccaaaagtccttttcaggagac

SEQ ID NO: 38 - DNA, 120 bp, synthetic construct
  source 1..120: mol_type = other DNA
ctgaactgatgatcacatttatgatgaaaagtttacagacggaattatggaaagtctcagaacagtgagatctacctggttctacaaccctgagctgctgaagctttgcttctgaatcac

SEQ ID NO: 39 - DNA, 120 bp, synthetic construct
  source 1..120: mol_type = other DNA
atgaatatagaagctgtgaaatcagaagacccaaaaggattttcctagaagtcatagactacacctcagtaatacagtggctcaaatcctacctttaacagaataacacaccctctgccc

SEQ ID NO: 40 - DNA, 120 bp, synthetic construct
  source 1..120: mol_type = other DNA
ggcaggagagggaactctggtgggcattttgtcaataaacttgagcatgccaggaactcaaatgtgctcctttcattttgctgtcaattgaattgcatttttttttttttgcaaaagatg

SEQ ID NO: 41 - DNA, 120 bp, synthetic construct
  source 1..120: mol_type = other DNA
aaatgggaacatgggtgtaggaaatatgtgcttctcacactcccaaaggatcacaaatggggccctgtgtctcttaacttccttatgtacaaaagtacatactcactagaatatgatttt

SEQ ID NO: 42 - DNA, 120 bp, synthetic construct
  source 1..120: mol_type = other DNA
tttcatgcatattctttttaatttcccctgtgtttttttttctttcacttgttatttgtggattcctgaagtttccaactgttggtgattactcattcaattccattgtggttggaatac

SEQ ID NO: 43 - DNA, 120 bp, synthetic construct
  source 1..120: mol_type = other DNA
tgggacacaatccagtgtaccaaaacacataaacgagaattttcaggagaggatagaataaaaggaacagaaggaatatttaaagaaatactagctgaaaaactccaaattcaatgaaaa

SEQ ID NO: 44 - DNA, 120 bp, synthetic construct
  source 1..120: mol_type = other DNA
aactgagagaagctgtaattaccagacctgtcttatgggaaattataaaagcagtcttgcaggttgacatgaaaggacactacatagcaactcgaatccacatgaagaaatgaagaactc

SEQ ID NO: 45 - DNA, 120 bp, synthetic construct
  source 1..120: mol_type = other DNA
caaaggatgatccagtcaaaatcgtcagtagtactgaggtggagggcactgatctttagatcttgtgactaggctttttctttctgagtaacatggaaactgctgaaagattttgagata

SEQ ID NO: 46 - DNA, 120 bp, synthetic construct
  source 1..120: mol_type = other DNA
agtccatagcagaagtgaaaggcatgttccaaaaaggaaagctaagtccactctattgaaaagcttctaacaggtcaagtaacatgaggactgaaaactactatatcaatgtggaggtca

SEQ ID NO: 47 - DNA, 120 bp, synthetic construct
  source 1..120: mol_type = other DNA
tttccttcggccacagtcagctgaacaaatatagggagagagtaggactatagttggatttaaataggaaagcaatttagctgaaagagtgtaacaagtgaaaagggcaggaacattgat

SEQ ID NO: 48 - DNA, 120 bp, synthetic construct
  source 1..120: mol_type = other DNA
ccaaatatgatcattttagtcttgaaccattccctcctcacttccttctctctgccttcaattcagtggacatgtacaggcacatgtaatgcttagagatggttgaacaaattagtatcc

SEQ ID NO: 49 - DNA, 120 bp, synthetic construct
  source 1..120: mol_type = other DNA
attacaaggttctccaggaacagacatcaccacctctgcctagatcctgaaatttcacaaatgtaggttctttcttacccgttctttttattcctctatttacaagcacaatgacaccca

SEQ ID NO: 50 - DNA, 120 bp, synthetic construct
  source 1..120: mol_type = other DNA
gtcctttcatactccacagtctctagcacagtggatcctggttgatcaaacaggaaggacctcgaagttagtcaaatataagtggaaaacctattaagcatttacaaataatgtggcctt

SEQ ID NO: 51 - DNA, 120 bp, synthetic construct
  source 1..120: mol_type = other DNA
ttaagagtttatttgagcagtgatccagaagtggctagggagctccccagagagaacatgaggaggaggctttttaggacaaatagataaaagcaaagataatatttcattggttacagt

SEQ ID NO: 52 - DNA, 120 bp, synthetic construct
  source 1..120: mol_type = other DNA
gctgcgctatgcggggctcgtctccccgcgcctatgtcgcacgctggccagcgcctcctggctaagcggcctcaccaactcggttgcgcaaaccgcgctcctggctgagcggccgctgtg

SEQ ID NO: 53 - DNA, 120 bp, synthetic construct
  source 1..120: mol_type = other DNA
aataccccttagtgagtcagtttagacttcaggctgttcatttttgtatgataatctgcaagatttgtcctaaggagtccaatgggggatatgttttcctcccgtgaggaaatgtttagt

SEQ ID NO: 54 - DNA, 120 bp, synthetic construct
  source 1..120: mol_type = other DNA
cccatcccacccaaatcttactctactcatctcattctcattaattttgggaaatcatcagaagatgtgttcgttgagtaagagattaaaagaaataagctttttgacccctgccaacac

SEQ ID NO: 55 - DNA, 120 bp, synthetic construct
  source 1..120: mol_type = other DNA
ctccccctcttccactatctatctggtcctctagctcctattcagtagccagtgtccctctctttcttggaacttcttttttggaattaccaagttacaacacaaataagataatttgtc

SEQ ID NO: 56 - DNA, 120 bp, synthetic construct
  source 1..120: mol_type = other DNA
aatattcattgcctctgctataacctattggatatgtatacttagcaaaccccttcagcataaattcctgtgtcacctttcctcctgcaaagtgcttgcttttggttttcaatcagaagc

SEQ ID NO: 57 - DNA, 120 bp, synthetic construct
  source 1..120: mol_type = other DNA
ccccctggtaacactaatatagaatgtgatctcctttgataagactagggcctcactcacagaaggtagggactatatctaagtcttacttcaatagctggaaaatcctaaaagatggga

SEQ ID NO: 58 - DNA, 120 bp, synthetic construct
  source 1..120: mol_type = other DNA
cccccactttttcttctaccatttatccctaagagtagctagtccaatgttttatttaaaaaagaacacagaagccagataaccagcttctcttcagacaatccctcttcccattctgca

SEQ ID NO: 59 - DNA, 120 bp, synthetic construct
  source 1..120: mol_type = other DNA
cgtgctggtcctgcaaagcagtcttgaataaactgtacacatgtaacaatagttaaaatctgaaagaatcttccaaataaaaatattccagcctagaacccttcccatctcagtcaaccc

SEQ ID NO: 60 - DNA, 120 bp, synthetic construct
  source 1..120: mol_type = other DNA
catcgtctgcttgtctgtaatctttagaaaagagtaggaatcttgggggtcgtgattgtgtcttaattaacttgtatctttagcactgttccagcatgctgtcaggcacaggaaataatt

SEQ ID NO: 61 - DNA, 120 bp, synthetic construct
  source 1..120: mol_type = other DNA
gacctgacctccttgcttcttacccagtgtcaatctgacttttttctgtctctctctatgtcacaataagttctttcagagacagatctcttttcatttgctgttttagtctcttttgca

SEQ ID NO: 62 - DNA, 120 bp, synthetic construct
  source 1..120: mol_type = other DNA
tgtcactgcccccattgaagcctacttgaagcctacttggaacagatgtctctttctagtctctttaataacgtccatgaaagagtttctaaactgctttgagatctagaatattgcttc

SEQ ID NO: 63 - DNA, 120 bp, synthetic construct
  source 1..120: mol_type = other DNA
gaggaactacttgaaattcaggatatgtctgctttttaacaaaaatgaagcccaatctaaattttgatataagctacttgaaggagattttcaacaggaagtaagagggcattagaagcc

SEQ ID NO: 64 - DNA, 120 bp, synthetic construct
  source 1..120: mol_type = other DNA
aggaagaaaatatacacatatgctaaaatgtgcatacaacatctctgtgaggagacactgactctgcaagttgcctgaggagcaggaatgagaggtggactattcattatatgtcttatc

SEQ ID NO: 65 - DNA, 120 bp, synthetic construct
  source 1..120: mol_type = other DNA
accccaaaaggaccagatcttagaagtcaaaatgacaaccaaggcttaaggagttcaccctagaaccaagaaaaaactgcaatgatccattccagcaaaatgtaaagccagtttttcaga

SEQ ID NO: 66 - DNA, 120 bp, synthetic construct
  source 1..120: mol_type = other DNA
gttgggagtatgggattaaaatgtcatgtaatactaatcattcccacgtaagcagttcgtcttctctttaggaaaaagtgatgtctcacggttcttgcggttgtcctgtttttgttttgt

SEQ ID NO: 67 - DNA, 120 bp, synthetic construct
  source 1..120: mol_type = other DNA
gaaccaggagtccttggagagatggttgatcccagacagaggaaagagaacatacaagataaccctggaatactgtatgatgccagaaactaaagaagtcattaaaaaaaaaaatgagga

SEQ ID NO: 68 - DNA, 120 bp, synthetic construct
  source 1..120: mol_type = other DNA
atactattagcaataaaaaggagcaaattactaatatatgaaacactatgaatgaatttccataacaagccagataacagaagccagaaataaggcatgaagctaggcatggtggctcat

SEQ ID NO: 69 - DNA, 120 bp, synthetic construct
  source 1..120: mol_type = other DNA
tatgccctgtcccagacaaccaatcatctgatttctatcttgctagatttgcttttcctgttgtaggaaagttatgtcaatgaaatcaggtggtatgaatgtatgaatgcttgcttgctt

SEQ ID NO: 70 - DNA, 120 bp, synthetic construct
  source 1..120: mol_type = other DNA
tagtgaggaataaaatgcacacggaagacaacgattataatatgtaaacgtcttctaaatatgaccagtctggcataggaccttcttctcgtccttctcagatcttctccatgtcctagt

SEQ ID NO: 71 - DNA, 120 bp, synthetic construct
  source 1..120: mol_type = other DNA
tatagaatatagaaatattatccaggtcatacagaggttgtgaagtgctttgaaaggtgtggcagcagcattagaagtcaacattactacctgagccctaatccaccaccctttcaaagg

SEQ ID NO: 72 - DNA, 120 bp, synthetic construct
  source 1..120: mol_type = other DNA
ttagcatggtgcctggtgtataggaagcacacaacagatggtagctgccaaagtattaacgtggttttcactaatgaattggagaaaagaattgatatttcattcccttgtagcacctag

SEQ ID NO: 73 - DNA, 120 bp, synthetic construct
  source 1..120: mol_type = other DNA
ccataagctcctccgccttgaatgaccacattgttcaataatttgaagtagactccttacttcagtgacttaggataggctactaaagaggataaagtcagacctgacatctaagtacaa

SEQ ID NO: 74 - DNA, 120 bp, synthetic construct
  source 1..120: mol_type = other DNA
ttaataaaaactaactagttagctgatctatgcttcacatcagacgttttgcattcaaccaggaagtcagaggcaccagtgtgaggctcaatccgttgttgagcacattaatggtttcct

SEQ ID NO: 75 - DNA, 120 bp, synthetic construct
  source 1..120: mol_type = other DNA
caaggaggtaaccagggcattcaggagattgctggcgaaggaaatggggctcatacaaagttgagggagagctgtttaatgtgctttctaaattaagaagaaattatttatccttttgtg

SEQ ID NO: 76 - DNA, 120 bp, synthetic construct
  source 1..120: mol_type = other DNA
acttgcttgaggtggactgacaggaagctgacactcagagaatttagtaatttcacccaagaacacacagcaatttgttagacctaaattgagatgcatatctgttaacttaccaagtgc

SEQ ID NO: 77 - DNA, 120 bp, synthetic construct
  source 1..120: mol_type = other DNA
gggaaataaaccaatcatgtggcaggaaagggaaccagaaatatttggtggatgatatgaatgactactaactggctctttgcctccagtcttgaccgattgaaattgattatccatgtt

SEQ ID NO: 78 - DNA, 120 bp, synthetic construct
  source 1..120: mol_type = other DNA
cagaagaagctgtttctggagctagtgagccctatgacatcatcgacagcagtaacttgaagaagagcagacatggaagagaaatctgcttttcactttatatttttgcctgtcttttaa

SEQ ID NO: 79 - DNA, 120 bp, synthetic construct
  source 1..120: mol_type = other DNA
actttcagctctaccctcatcttccagaaaatcgagagtggctagacattgagttaataatcaactatatctatttgatgaagcctccacaaaaatccctgaactacagagctccgagaa

SEQ ID NO: 80 - DNA, 120 bp, synthetic construct
  source 1..120: mol_type = other DNA
aacatgttttggtgactagaagtgttgaatgttgagaatatagtaggagaaaatggtcagtttgggggttttctacaaatacacagagccctttcgcattgcgcagcatccaatttgaat

SEQ ID NO: 81 - DNA, 120 bp, synthetic construct
  source 1..120: mol_type = other DNA
agactgtaaatcgattgattgttcaacattccttcccaaagtgggacactcggcaaccttggttgtctcctaaggtcagttcctggaattcttttaaatgcatagttctaacattatggc

SEQ ID NO: 82 - DNA, 120 bp, synthetic construct
  source 1..120: mol_type = other DNA
aatacttccaagggatcccagctgatgcaacatggaatataaggaaacccagccaatttcgttccaaattcttggcccacaacatgtgagatacaataaggtttgtgttcatttaagcca

SEQ ID NO: 83 - DNA, 120 bp, synthetic construct
  source 1..120: mol_type = other DNA
tccaattctgcattactggtgttaagtgtgaaatgcaataatgtgttcttactttagagggatgtcctggcacaaagtctaaaaacttcaaagatgtggaggatgctgaatcttcacagg

SEQ ID NO: 84 - DNA, 120 bp, synthetic construct
  source 1..120: mol_type = other DNA
gaagaaacagcttatgaggctacagaaataggtggaaaagaacatgaaaaagaaaactgacaaatacacacaggtctcctcaagatccatggacttctggtctgagcctaataaagactg

SEQ ID NO: 85 - DNA, 120 bp, synthetic construct
  source 1..120: mol_type = other DNA
cagattaatagccatataacatggacctgaaaccgtgctaatcaggcacaacagctgtaattacagctatttcttggttgagtttgtgctagtctggtcatctttcaagttgcatctgat

SEQ ID NO: 86 - DNA, 120 bp, synthetic construct
  source 1..120: mol_type = other DNA
agagatttggtgggctttggttggtgcaaaccctctacagttagcagatttgggttcaaacatcagctctggtgcttactaactatactgccttgggaaagttatttatatttctttgtt

SEQ ID NO: 87 - DNA, 120 bp, synthetic construct
  source 1..120: mol_type = other DNA
gctcctaacacaatgctggcactttggggctcaagaaatgaataaatgcgtagaccaatgcatgaatatttcagaaggaaaaggagtaggagaaaaataatgagagtggaaaagacagag

SEQ ID NO: 88 - DNA, 120 bp, synthetic construct
  source 1..120: mol_type = other DNA
ttttaagtgagaaaagaataatgggaaaaacaggaagaagacagagacaatggcagagagtcctggcaaaaagggagatgtgatagagcttaatacaagatggggaccctgtaagaggaa

SEQ ID NO: 89 - DNA, 120 bp, synthetic construct
  source 1..120: mol_type = other DNA
attcagaacatagtggcactcaataaatttcccctgaatgaatgaattaatgaattagtgcatattttaatcagcctcctttgccctcacccaggaagtcagaggcaccagtgtgagtat

SEQ ID NO: 90 - DNA, 120 bp, synthetic construct
  source 1..120: mol_type = other DNA
aatgtgctttaaaagagaggagattctatgtgcttttatcagaaagtttgagttccctgcccctctgccttcttcacacccattacattgtgggaatggatgaaagccacatgtctgtgt

SEQ ID NO: 91 - DNA, 120 bp, synthetic construct
  source 1..120: mol_type = other DNA
tctaccggccaaatatggtattgcatgtgacatcccagacttctgctccagggtcatccgaactgtactttgctcaaagacatagatatggttatgatactataagcatttatgtaattg

SEQ ID NO: 92 - DNA, 120 bp, synthetic construct
  source 1..120: mol_type = other DNA
ggattacaggcatgagccacgggcgctccgcctatttgttccttttaaaaaatctaattttccctttcttgtctcagatttctcccataatttgaatgtatttaatgtgcctttttattt

SEQ ID NO: 93 - DNA, 120 bp, synthetic construct
  source 1..120: mol_type = other DNA
tcccacatacgctgtctcccagcttttccctggcaagggcagcaataccaaattcccttttgagtacacgccgataaaataagaaaaaggaaaatcttagttttatttctagttccaaca

SEQ ID NO: 94 - DNA, 120 bp, synthetic construct
  source 1..120: mol_type = other DNA
gtgaaaatagggatggtcaggcacatagtgccagcatacatgacagttacacaactgaattggagcaaataagagtctacaggaatacagaattaaagaataatgtgtgtgagtgcttgg

SEQ ID NO: 95 - DNA, 120 bp, synthetic construct
  source 1..120: mol_type = other DNA
gattcaagatatcccacccttttagatcaaaaccaatgtggaggccgggcacggtggctcacagctgtaatcccagccctttgggaagcaatgtgggcggatcatgaggtcagatcaaga

SEQ ID NO: 96 - DNA, 120 bp, synthetic construct
  source 1..120: mol_type = other DNA
ttgctgcagacctgtacagattcgcagctgctaacatattttcatgccatgtaactctgatacattctgccgctaatacccttgcctgcaagacatcagggaggccaggacttgagtgtt

SEQ ID NO: 97 - DNA, 120 bp, synthetic construct
  source 1..120: mol_type = other DNA
cagatgtttcaaacctacatgatttaggtctcctgagggcaggcacttaactattcattctaacatgacatgtgagttggaagccttaaaggaacattattcaagaacctcgtctctact

SEQ ID NO: 98 - DNA, 120 bp, synthetic construct
  source 1..120: mol_type = other DNA
agccccaaactccttttcctttacctagccaagatgttatacagttgctaagaacaacacgatttgaactccatggattcactcacacatgatttttttcagtaagtatattgaaaattt

SEQ ID NO: 99 - DNA, 120 bp, synthetic construct
  source 1..120: mol_type = other DNA
cttcgagatgtcccgcctttctgagctgaaccaatatataccttacatgtattgatttatgtctttgtcagcaacttctggctccctaaaatgtatgaaaccaagctgtaacccaaccac

SEQ ID NO: 100 - DNA, 120 bp, synthetic construct
  source 1..120: mol_type = other DNA
agtagctaagtttggagagagtcaacagttatgtgcagattttcgtttgtgtgtggggtcagtaaccctaaaccccaagttgttcaaggggcaactatatgagctccaaattcttttttt

SEQ ID NO: 101 - DNA, 120 bp, synthetic construct
  source 1..120: mol_type = other DNA
cttaacatgaagcctaccttttggtaagcttcatgtcaagtgatagcttccctcaagggcaaagtcacagaattatctgtttcaaaagcctgagtggataaacaaactgttgcctatcca

SEQ ID NO: 102 - DNA, 120 bp, synthetic construct
  source 1..120: mol_type = other DNA
gttgtctgaagccatttagggtaacaggttttgtggcaatagataataatatatgcagtttgaatactggctttgctccttagttttgtgaccccagaaaatgaacacacagtccccttg

SEQ ID NO: 103 - DNA, 120 bp, synthetic construct
  source 1..120: mol_type = other DNA
gtactgaaacagttgtgatacaggcctgagttggtgaaacctggcctgccacatagtggatgcagagtagttcacgtgtaggtctaccactatgatattttgaaataagaaatacagacc

SEQ ID NO: 104 - DNA, 120 bp, synthetic construct
  source 1..120: mol_type = other DNA
cctttggccacagtagaacttttcaccctttgtttataatttacagcccacttaagtgcaatgcaagtttgagatgataatttgggtcttttaggttctacccagggctgttctatagct

SEQ ID NO: 105 - DNA, 120 bp, synthetic construct
  source 1..120: mol_type = other DNA
ctaacattcacgcaacatataccatggcccaagggccaacctaggcacctgaatgcacaatttataatagtctttgtacccaacctatggaggaatgtattactgttattctcattttca

SEQ ID NO: 106 - DNA, 120 bp, synthetic construct
  source 1..120: mol_type = other DNA
aagaataccatgatttaagggaagaaagtacacaaggtacatggagggtacacagggaaagtacatggataaacatggacgtgtgcaaataggaaagacatgactcagcatgctagacaa

SEQ ID NO: 107 - DNA, 120 bp, synthetic construct
  source 1..120: mol_type = other DNA
gaaagagaggaagggcacagaaaaatgtagggggaggacgtagggtaagtggacagaataaattaaaaggagaaatcaaaacagaacaagaaaagccagagaacataaggataccgatag

SEQ ID NO: 108 - DNA, 120 bp, synthetic construct
  source 1..120: mol_type = other DNA
agacaagatccagagtttacttcccatgggagggagtctatgcagacagtttcctggtgaactttccctttgaaaaggatccaaattcaggatcatcctcaaatatagattgagaaaaat

SEQ ID NO: 109 - DNA, 120 bp, synthetic construct
  source 1..120: mol_type = other DNA
taaactgtaaagtgctttatagacctgaagaattaacaaactttttaagacttctaagcaaccgatcccagatctagcattgattcttcctagtcctctatatctgggctgctgtggtca

SEQ ID NO: 110 - DNA, 120 bp, synthetic construct
  source 1..120: mol_type = other DNA
aactgttttcctatgagaccctcaatgctgatgccaaatctcattctaggcctaagaatgttttcctgaacccttggaggtgcttgttccccactttccctgatgcctggaagttctaca

SEQ ID NO: 111 - DNA, 120 bp, synthetic construct
  source 1..120: mol_type = other DNA
actttctcttcatctactctctttcatgtattttctagccacacgatgctccctatgcccctgaagtagccttcctctatttctctagctgataaaatcctatttgtccttcagtattca

SEQ ID NO: 112 - DNA, 120 bp, synthetic construct
  source 1..120: mol_type = other DNA
ttctcttcttttcttttttcctcccgttagctactttggagtaggagtgggggttatatctggtttccctgttttcattctcaacaagtcagaatgaaaaactccatgatacatggccat

SEQ ID NO: 113 - DNA, 120 bp, synthetic construct
  source 1..120: mol_type = other DNA
tatccataggttgggaaatgctgaggcatgtccccaaagttgtagtctttgtttttgtttgttctttaagtttttctgtctttcttacagcaaaggaaaatgggaggagaaagaagggga

SEQ ID NO: 114 - DNA, 120 bp, synthetic construct
  source 1..120: mol_type = other DNA
tgatgagaatctctgaaaagctgagaaaataaactgtctgccttaaaagggaatttggtgatttttctgatccaactcccgctttgtgcaaataggtaaattcaggcctgtagaggagcg

SEQ ID NO: 115 - DNA, 120 bp, synthetic construct
  source 1..120: mol_type = other DNA
agatagagtttaatgtgcaggatgtttattacgcagtttctttgagatccacatctgtggaaggcagagagtagactcaagattgagaagaagtcaagctaggatgcatgcaaggtagga

SEQ ID NO: 116 - DNA, 120 bp, synthetic construct
  source 1..120: mol_type = other DNA
catataaaaataaaaagcacattttggcagatgacaattacatgaggttttccctcctcctccatagtttaagcaaccgttttcctgacagagacagacaaagagacagctctgggcttg

SEQ ID NO: 117 - DNA, 120 bp, synthetic construct
  source 1..120: mol_type = other DNA
tagctctcttggccatgccgtaaaagactgagagccgagtggagcagaaaaattaactcctagaagttctgcaaatacctgtgtgctaagtttcaagaaaatacaatctacaaaagccaa

SEQ ID NO: 118 - DNA, 120 bp, synthetic construct
  source 1..120: mol_type = other DNA
agtgaaagagaacatcagggactctttaaatccttctgtttttgatgtaattgagcctctgaatgaatgctatttatggcatttgcctgcatataggacataccccagatgcccataccc

SEQ ID NO: 119 - DNA, 120 bp, synthetic construct
  source 1..120: mol_type = other DNA
tgccttagatcggaagctactagactagagtaggtattagctgtgtctgatggtgttagtgtgtacagttgctagctcagaactgcaaacagagaattttgacaaacactctggataatt

SEQ ID NO: 120 - DNA, 120 bp, synthetic construct
  source 1..120: mol_type = other DNA
tagatgaatgaagaataaataaataactttgttcctcatgccttgctcacttttctctccaactttctagagagatagaggagtgagatacgcaaagggcacaggcaaggtacagcagtt

SEQ ID NO: 121 - DNA, 120 bp, synthetic construct
  source 1..120: mol_type = other DNA
caacattttcattttcagaggccaacgcaggaggattccttgagcccaggagtttgagacaagactgggcaaaacagagaggacccaactctacaaaatttttttaaaaattagccagac

SEQ ID NO: 122 - DNA, 120 bp, synthetic construct
  source 1..120: mol_type = other DNA
aaagtctgttggatagataaatggatgaattcatattctaatcattttacctgctatgaaatctcaaacaagttattaaacctcactagttggttattcagctttaaaatgagaataata

SEQ ID NO: 123 - DNA, 120 bp, synthetic construct
  source 1..120: mol_type = other DNA
gctcccagtaaatgagactgaagccttggaattacatcagaccctttcaaatcactgagtcctcttaactcttttgttgaaatgtttcattgatatcgatccctccttacacaggatgat

SEQ ID NO: 124 - DNA, 120 bp, synthetic construct
  source 1..120: mol_type = other DNA
tagcccacagctacatttctctaaaaccactctaacccactctccatttccacatattgcccctaaagatgttttctctaaactagggtttctcattctctgcactattaacattttgag

SEQ ID NO: 125 - DNA, 120 bp, synthetic construct
  source 1..120: mol_type = other DNA
actaacataccttaaaacatagagtccatttagaatgtcccaaaacagtgtgtatcatcagagtccatgtggcagcagatctttcatcacaacacaccaccagagtcaacttcctaaatc

SEQ ID NO: 126 - DNA, 120 bp, synthetic construct
  source 1..120: mol_type = other DNA
agtccttccttgcaggtagatttgggcagagcatctgtgtctattacatttggtcatagagaatgtgttaacatgattgcctaaatactagccgatttctctaaggatggctgtgtatta

SEQ ID NO: 127 - DNA, 120 bp, synthetic construct
  source 1..120: mol_type = other DNA
ctaaaacactaacataaatcaccaagaaaatgaaatgcaattctgcccagacacagtgctcctgtaaaggtgtgcttgagtatacaagcatccatattatcattaatgccggttcctcct

SEQ ID NO: 128 - DNA, 120 bp, synthetic construct
  source 1..120: mol_type = other DNA
aaacacaaagcagtagaaaaatgagatctgaagaaagtatcatgtgtgtgcagacaagggatgcagtcagagccaacagacagagacatcctatgaatcgtcacctcagatcatatgcta

SEQ ID NO: 129 - DNA, 120 bp, synthetic construct
  source 1..120: mol_type = other DNA
ttaacagaactgagtcattctgggtctatatgtctggggaacagggcatcaaacaggggaaaaaaatcataaaatcataaagacagagaggatcccaaaaactcaactcattctttcccc

SEQ ID NO: 130 - DNA, 120 bp, synthetic construct
  source 1..120: mol_type = other DNA
gctctcctggggcccctcccctgtctgcaattcctgctcttatctttctcgaacaaattagttcctttctcaattactcactttcatcattaattaccgttttcttctcctttctggcat

SEQ ID NO: 131 - DNA, 120 bp, synthetic construct
  source 1..120: mol_type = other DNA
cattagaaaaaaagacactggggggtggaagtagggaagaatgtaggatgaggaaagaacagagagaatgaatagaatggaactctcaagaaaccagacaatttgagaggtgccttaaag

SEQ ID NO: 132 - DNA, 120 bp, synthetic construct
  source 1..120: mol_type = other DNA
gtaccctaatacctaattattttcctgtaccctgctgctcttcccataggcattctggggttagcttacagctcaggaatccaccaagataggatgtctattagtaaaaatacagataaa

SEQ ID NO: 133 - DNA, 120 bp, synthetic construct
  source 1..120: mol_type = other DNA
ggttgggaatagaaggatgagaaggagtcaggtagggctcaccactaccttgctgttttgttaagataaataaactagagctctcaagtctctcaaaattttcctcattctgtccctatt

SEQ ID NO: 134 - DNA, 120 bp, synthetic construct
  source 1..120: mol_type = other DNA
tgaggccgcgggagatggggggagtgggaggcccacaccggagccacccctgccgccatcacaaccagaagcggcagtggccaccccacccgggcaaaaggggccccgggccccatggcg

SEQ ID NO: 135 - DNA, 120 bp, synthetic construct
  source 1..120: mol_type = other DNA
acatggaattgagaaaagacgagggaaggggtacacggaaggaaaagatgtggggaagagcgcgagaggcctggccagggttgggatgggtgggacaggctgagaaagtccattaggtga

SEQ ID NO: 136 - DNA, 120 bp, synthetic construct
  source 1..120: mol_type = other DNA
ataaaatggtaaactagaagcagaataactgagttatgtgaggaaagtaaagcccaaggatcttgaaagaatctaccagggtagaggaagtatgaggcatacaaatgggatgactgcatc

SEQ ID NO: 137 - DNA, 120 bp, synthetic construct
  source 1..120: mol_type = other DNA
ggcgcccgccattgcccaggcttgcttaggtaaacaaagcagccgggaagctccaactgggtggagcccaccacagctcaaggaggcctgcctccctctgtaggctccacctctgggggc

SEQ ID NO: 138 - DNA, 120 bp, synthetic construct
  source 1..120: mol_type = other DNA
tcacatgtgaaaaggatttgcctacctatcttccaatcctcccttacctgtgcaagcatccacacattcccaaaagaaaaaaaaaattaccattttaggaacccaagatggggctataag

SEQ ID NO: 139 - DNA, 120 bp, synthetic construct
  source 1..120: mol_type = other DNA
ttaaagctgatgagagaacccacaagtggggagggaagggtgctgggtggaggtaagaaagaaaagtaattaagaaatcatgaagggtatgatatgtgggtggagcttttctttaaaaaa

SEQ ID NO: 140 - DNA, 120 bp, synthetic construct
  source 1..120: mol_type = other DNA
cccacgctcccggcatcggccgcctcagcgctccccgattccatccccgcggttcctcctctcccccagccccgcttcccccagctgggccctgcgcccactgccccctcccccaccacg

SEQ ID NO: 141 - DNA, 120 bp, synthetic construct
  source 1..120: mol_type = other DNA
caaaaaacaaaacagggagggggacatcaaggagagaaattgaagtacgaagggagtaaaaggacaagagaaaagaacctcagggtggtttagaagccagtattacctgatgtactccag

SEQ ID NO: 142 - DNA, 120 bp, synthetic construct
  source 1..120: mol_type = other DNA
cgtaaaggggaaatgaaagaaaagtaacttgcaataaaataacataaacagtattttaatgtgtgagtgccaaggcccgactaccctagaagtcctgatggagtaagcagatgcttccac

SEQ ID NO: 143 - DNA, 120 bp, synthetic construct
  source 1..120: mol_type = other DNA
gcatgccactaatggagaaagggggtattttcacagaatcagtatttttccgccccgtctccacttgatgtcaatcaaaacataccattggctgtttagttttaaaaaaaaaaagtaata

SEQ ID NO: 144 - DNA, 120 bp, synthetic construct
  source 1..120: mol_type = other DNA
caattatgttcattatacaaaccactcacctttttccaccagtagctacaacttccccctttcacatcttttcatattccaatgtcactgccaggattcctggccatatttttcaggata

SEQ ID NO: 145 - DNA, 120 bp, synthetic construct
  source 1..120: mol_type = other DNA
cccagaatttaacactctgggagccctgaaaacatattaaccaacgtagttcacttgattgatgatcaggtagatgctaggtacattttgggagtatctcattaaattctcacctaacca

SEQ ID NO: 146 - DNA, 120 bp, synthetic construct
  source 1..120: mol_type = other DNA
tttaatatcactaaaataggatatttttgtgaaactgtttgatccttcccctcagtttccatttgtgtgttctctttcttcccgtcttgataggcacaggcactcagaatcactgggcca

SEQ ID NO: 147 - DNA, 120 bp, synthetic construct
  source 1..120: mol_type = other DNA
ggccttggtttattgtgccaataaaagtaagctcatgaagctatttctatcatgtctttacaggcatgtacaggtgagcccagtttgggagtcacaaaacttcagtgaaattaaaaagcc

SEQ ID NO: 148 - DNA, 120 bp, synthetic construct
  source 1..120: mol_type = other DNA
aaaaaagaataaaaagaaacaaacaaagcctccaagaaatatgggactatgtgaaaagaccaaatctacgtctgattggtgcacctgaaagtgactgggagaatggaaccaagttggaaa

SEQ ID NO: 149 - DNA, 120 bp, synthetic construct
  source 1..120: mol_type = other DNA
gcttcacatctcgttttgtcacagaatgaatgcaagtcaggccaggctttgccgccaaatgagttacaaaattttggttttcagagtattgtgaattttggaattgcagaaaaggatatg

SEQ ID NO: 150 - DNA, 120 bp, synthetic construct
  source 1..120: mol_type = other DNA
tgtctttctaagccatcactctgaagacctaaaaagcagacatgactcatacacaccttcagatgctttcagtatttgttacacctagatctgtgcagaaactgaataccttattggtgc

SEQ ID NO: 151 - DNA, 120 bp, synthetic construct
  source 1..120: mol_type = other DNA
ctccaggagggcagggattttgactatgtggctcattttatcccactaaaagagctacatattttctgactcagagatgagtttcattccattgtacagaatgatcacaccagtttccaa

SEQ ID NO: 152 - DNA, 120 bp, synthetic construct
  source 1..120: mol_type = other DNA
agggggccttggctgagccataggcagaatcactctccaaaaagacttaccagtgtttatctgaatattttcttttagcaataactttacttacttgcgttatttgtaggtgctgccatt

SEQ ID NO: 153 - DNA, 120 bp, synthetic construct
  source 1..120: mol_type = other DNA
gaatttgttaacttcttaccaacattttacaaagaagattgaaggtaatgtgggttctaagactgaagagtacaaggtaagctggtggttaatggggaggagggatgatggatgaactgg

SEQ ID NO: 154 - DNA, 120 bp, synthetic construct
  source 1..120: mol_type = other DNA
ggactacagcactcacaactgtgcctgacccttctcttaattttaactcctgagtgattttcttctctggaccccaaggagtcatgatatctctaaattatatcctgaagttatttcaac

SEQ ID NO: 155 - DNA, 120 bp, synthetic construct
  source 1..120: mol_type = other DNA
cctggttgtaagatttttttctcatttagtcaataaatatttatggaatagggcagtttgggatcacacacatgagctaagcatgatgtcagccttcatagctcctacaatgtggtatgg

SEQ ID NO: 156 - DNA, 120 bp, synthetic construct
  source 1..120: mol_type = other DNA
cacgtttcccaataaagcatcttttatatttataaaagttaagcctgcatatctctgcccccaattgcagcagaaacacctgaaaaagaatgccagtctggtcttgctctgacaatggtt

SEQ ID NO: 157 - DNA, 120 bp, synthetic construct
  source 1..120: mol_type = other DNA
tagttaacagattgctgtgacctagagcaagtaaaggtgtaattatcagcctataggggttagagtggcaagaagatgcctgagggtgagcctacagcctaaaagataatagaatacaaa

SEQ ID NO: 158 - DNA, 120 bp, synthetic construct
  source 1..120: mol_type = other DNA
tcctgaaacaactctagaaattctaggctacataattatccctccataacgtgttctctgccagaataataatgaaaaaaaagtactgtggtggccagaccccaagatgattggcgaagt

SEQ ID NO: 159 - DNA, 120 bp, synthetic construct
  source 1..120: mol_type = other DNA
agctaactatcctaaatatatatgcacccaatacaggagcacccagattcataaagcaagtcctgagtgacctacaaagagacttagactcccacacaataataatgggagactttaaca

SEQ ID NO: 160 - DNA, 120 bp, synthetic construct
  source 1..120: mol_type = other DNA
ggaggggcaagcctcagtgcctgactcacttgactcacaagaagctgaatgtttttccttttgaaagataaaaatattggtgaatctcagactaacaatagggaatacacaaaaatggaa

SEQ ID NO: 161 - DNA, 120 bp, synthetic construct
  source 1..120: mol_type = other DNA
cattgattcggatcagtgttctcatttctccgacctacctaggaagcatctggctaaattgatgtaaattagacattttatagtctatcggtcattgagcctcagtggaatatctagacc

SEQ ID NO: 162 - DNA, 120 bp, synthetic construct
  source 1..120: mol_type = other DNA
tgagccactgcacctggtcttttcctgctattaaacaaggagctccatagtttcattttgcccctcaaaatatgtagctggccttagtagactgatattcattgccaaattatatgtaag

SEQ ID NO: 163 - DNA, 120 bp, synthetic construct
  source 1..120: mol_type = other DNA
ctcacaggcagtgactttcgtggagcgccctctagtggtatatatatacaaacggaaggatttagagaaaatacagatcggctttagctggctgagatttattttcaaagcatgttactt

SEQ ID NO: 164 - DNA, 120 bp, synthetic construct
  source 1..120: mol_type = other DNA
aattaaaataatatttaaatgctgaaagaaatgagcagctcccagggtgatacagggtggtttcacttcttggacacatctacactgagctctattcctggcaatacctgatgttcccat

SEQ ID NO: 165 - DNA, 120 bp, synthetic construct
  source 1..120: mol_type = other DNA
aatgtccttctagctccttacgcccatctcggacaaaagcagaaatgtatgtctcagttgtgtttctaccccttgctgcccaatataaatttttgtgttgcccaatataattttttgtga

SEQ ID NO: 166 - DNA, 120 bp, synthetic construct
  source 1..120: mol_type = other DNA
ctttttttaagaaccaataataatttctctcttttgactagtcagtagggctggggtggattggaggaagcttacatattccatgaacaagcctcttcctaaggtcctgtaagtgatcct

SEQ ID NO: 167 - DNA, 120 bp, synthetic construct
  source 1..120: mol_type = other DNA
gttgctatattatctttctaaaacatagacctactgacatgcctcccttcctcagaaaccttccgtgggtggttcttacagccttcaagatggagtccagactcttttttttttttgaga

SEQ ID NO: 168 - DNA, 120 bp, synthetic construct
  source 1..120: mol_type = other DNA
agctggcaaaaagatgggcagatgctgagaggagatgattgctaaaatgttctgtccaggacattcacagtatctctataaccagagtcttttttgtcgttgttgttctcaagaaggaaa

SEQ ID NO: 169 - DNA, 120 bp, synthetic construct
  source 1..120: mol_type = other DNA
ctgttgggtggccaagaacaattattctctcaactgagatgagatccctcaacccaaacatctcagtcctgggaatgatttccataaaaatgtacacatcaataaacagaaactcatgct

SEQ ID NO: 170 - DNA, 120 bp, synthetic construct
  source 1..120: mol_type = other DNA
aaccaggaagaagttgaatctctgaatagaccaataacaggagctgaaattgtggcaataatcaatagcttaccaaccaaaaagagtccaggaccagatggattcacagctgaattttac

SEQ ID NO: 171 - DNA, 120 bp, synthetic construct
  source 1..120: mol_type = other DNA
tcagaatttcattttcaacatgttttgcatgatgggtgattttggagaatattttttgctctatcgcaggatgattaagatgtggacaaggtgaagccgatggagggggagctttgaaag

SEQ ID NO: 172 - DNA, 120 bp, synthetic construct
  source 1..120: mol_type = other DNA
ccacctcttcgtctgcatgcctaagaaactgttttacaagtaaataagggacgctttgtctaggctttggagccaggaagttgagacaaatttaggaatgagatgaagtaatggtattat

SEQ ID NO: 173 - DNA, 120 bp, synthetic construct
  source 1..120: mol_type = other DNA
ctcaaaaaaaaaaaaccacatacaaaccagagataatattataatgagcctccaagtgcctaccaccttgctgcagcacttgtcaatccagggaccacccacctcaccggctccccactc

SEQ ID NO: 174 - DNA, 120 bp, synthetic construct
  source 1..120: mol_type = other DNA
aaaatgtggggggttgggagaaaaaaacccttaagtacatactcgctaaatcacattgctacaggtaacttccattaagaacttgaaagtaaaggtagctgcattttcccctagggaaca

SEQ ID NO: 175 - DNA, 120 bp, synthetic construct
  source 1..120: mol_type = other DNA
gctgtaaactaccttcttaaaagctctagaagagggctcttaaccttttgttgtgtgtcatgcaccttccgcaagctgatgaagttgatagacccatctcagaatttttttttttttttt

SEQ ID NO: 176 - DNA, 120 bp, synthetic construct
  source 1..120: mol_type = other DNA
atgttctccagtcctgtaggtgctaaatctgacgtggtcacttctcagcttggaatccttcagtgcaccaccacagccttgaactacatatttgaaatacatatttattttcagtaaact

SEQ ID NO: 177 - DNA, 120 bp, synthetic construct
  source 1..120: mol_type = other DNA
taggctattaggagttttgaataaagatactgaagtgaaagtctctaccacacagtaggcgttcgaaaattgtttcctctttctccattcaacactgaggactcaggttcagctgctgat

SEQ ID NO: 178 - DNA, 120 bp, synthetic construct
  source 1..120: mol_type = other DNA
ctccctctcaataccctgttttcccctcagtttccctttctctacagtgggtgtgtcgtgcctagaacaagttttaagtaattaaataacaaagactcaggataaaagatcctttttgag

SEQ ID NO: 179 - DNA, 120 bp, synthetic construct
  source 1..120: mol_type = other DNA
acacacacatctttacacacccaaagaggaggaatagtatctttgttttggaggacttgactatgaaaggtcttaactcctttttgtaccatgaatctctctggcactccagtgaagtct

SEQ ID NO: 180 - DNA, 120 bp, synthetic construct
  source 1..120: mol_type = other DNA
taaatccagttattgaaaataaggaggcagtacttttctcatccaagttcatggactttctgaattttgtccccagagtcctttggtgttctaggaccccaggttaaggaaccaaaaaag

SEQ ID NO: 181 - DNA, 120 bp, synthetic construct
  source 1..120: mol_type = other DNA
gatgtgaaggacctcttcaagtagaactacaaaccactgctcaatgaaatgaaagaggatacaaagaaatggaagaacattccatgctcatgggtaggaagaatcaatatcatgaaaagg

SEQ ID NO: 182 - DNA, 120 bp, synthetic construct
  source 1..120: mol_type = other DNA
atttgtttctttttgttttcagggcaattccttgaagagctacgtaagttctcttctctctgttataagcagagaataaaaagccaggaaagggagacagaagcaacaagaggaagaggc

SEQ ID NO: 183 - DNA, 120 bp, synthetic construct
  source 1..120: mol_type = other DNA
aaaaacgaaagctgggcaacatgcctgctttagaatgttttccttctacttacacatcttccacaggtctcagaatctttccttcctctcatccttttctcctatcttcatatctatcag

SEQ ID NO: 184 - DNA, 120 bp, synthetic construct
  source 1..120: mol_type = other DNA
aataaaaaataataatacaagttttcataagcacacttctaaccccttgtcttttatgtatttccttccttatccacgcacctgtctccctctactccagcctcattaccccagaggtca

SEQ ID NO: 185 - DNA, 120 bp, synthetic construct
  source 1..120: mol_type = other DNA
ttgtcatcactagtcccctcatctctcagactgggatgttgttctcgaagctctttcttcttgccttctacagtgaatgaggaagaataacacaaaattcactgtaagaactccaacaga

SEQ ID NO: 186 - DNA, 120 bp, synthetic construct
  source 1..120: mol_type = other DNA
ctcccttactccaacccagcatgaaacctatctcctttgcttctcttttctcttggaaagaacattttaatcagagcactatcatggacataagcaactttcatgtcatctctcaatctc

SEQ ID NO: 187 - DNA, 120 bp, synthetic construct
  source 1..120: mol_type = other DNA
catattttgagaacactgtcatcatgttacaagtgttatctttgccttcatgcaggctatcatttcttctctttaccactgagcttagtgactcagatctttcacacctggaaagcatag

SEQ ID NO: 188 - DNA, 120 bp, synthetic construct
  source 1..120: mol_type = other DNA
atgaagagaaagggagaaagataagatgtgggggagaggaaagaggatatgcagatatgcagaatataaacaggaaagcaaagcgaaggaaaaaatgctgccactctaacaaatttcagg

SEQ ID NO: 189 - DNA, 120 bp, synthetic construct
  source 1..120: mol_type = other DNA
accaggctaggatctgtcacagatcacctcgagtgagtctctttattctttctgacttggtttcatcagaaatgtgagaataaaggagacactctctaagatctcttccatgaccaaaat

SEQ ID NO: 190 - DNA, 120 bp, synthetic construct
  source 1..120: mol_type = other DNA
ctgcagacaatacctgcccattagttccttagtagctagccatctcagttaccaggttgactactgtagtatagcagttgcctgtgctcaagaatgccttattttacttaataatgaccc

SEQ ID NO: 191 - DNA, 120 bp, synthetic construct
  source 1..120: mol_type = other DNA
aactgaaaataccagcaaggaaaaacgccctcgaggaatagagttaattggatctccaaaatgttgtcatgaaaggtgcattcctgggatatgaatttgatttccttcctttcttcctct

SEQ ID NO: 192 - DNA, 120 bp, synthetic construct
  source 1..120: mol_type = other DNA
tgagataccatctcacaccagttagaatggcaatcattaaaaagtcaggaaacaacaggtgctggagaggatgtggagaaataggaacacttttacactgttggtgggactgtaaactag

SEQ ID NO: 193 - DNA, 120 bp, synthetic construct
  source 1..120: mol_type = other DNA
cacagcaattctgagaatgatgagaatccccctcacccctcacaccgcaaacagttgcaatgcttagtgggattcacccttgtcgtcaccaaccctgctactccagccacgtgagttttc

SEQ ID NO: 194 - DNA, 120 bp, synthetic construct
  source 1..120: mol_type = other DNA
cccagctacttgggagacattgccgttactgggcaagtgttctttcaagagcatcttatctgaattactatagtactaaagaatgtctaggctgggcccccgtggctcactcctggaatg

SEQ ID NO: 195 - DNA, 120 bp, synthetic construct
  source 1..120: mol_type = other DNA
gcacaacatgccggttagttacatatgtatacatgtgccatgttggtgtgctgcacccataactcatcatttaacattagatatatctcctaatgctatccctccccactccctagaaaa

SEQ ID NO: 196 - DNA, 120 bp, synthetic construct
  source 1..120: mol_type = other DNA
aaattacagagacgcacagtgaatgtgaaaggagggaaattaacaatagctattggcagagccaaacaaatcattacactttagctggatcatctgggagttgagaccttgagggtataa

SEQ ID NO: 197 - DNA, 120 bp, synthetic construct
  source 1..120: mol_type = other DNA
gtaattgaagtcccaagacaattgaccataaaacaggttatctggttgggcctgatctaaccacatgaactccttaaggggcagaaaaaacaaagatcaaagagaagttgggaagattca

SEQ ID NO: 198 - DNA, 120 bp, synthetic construct
  source 1..120: mol_type = other DNA
tgtagttttctgatcgcttgtaaaactgacacagctataattatcatccatgttaaaaacaccatcccagttagaaacctgtgagcctctccccaagcagaacccatttatcctacacag

SEQ ID NO: 199 - DNA, 120 bp, synthetic construct
  source 1..120: mol_type = other DNA
ctgtgacaatttctcagacctcgtttttgataatttggtatttcttgaggagtactagtgaggcatattgtaaaatgtcccttaatttgagtgtggttgacagggctataggtttggggg

SEQ ID NO: 200 - DNA, 120 bp, synthetic construct
  source 1..120: mol_type = other DNA
gaggttccaatcttttctccctcttcccagccccttgataggaaaccctgggaaaactaaaaagtatactgttttttctttaactccctattcctttcctcttctgagggttgttgttgt

SEQ ID NO: 201 - DNA, 120 bp, synthetic construct
  source 1..120: mol_type = other DNA
gtgcaaaaacatcacatggggagacagggaagcaagagagagtctaggaaaccaaacttgcttttataacaacctgctttttggtaactaacctagccccaacagagtaataaattactc

SEQ ID NO: 202 - DNA, 120 bp, synthetic construct
  source 1..120: mol_type = other DNA
cgcccccctccccccacaaaaaataaacagcagaacaccttaactatgaagagaatacaatatcattcatttgctctctttttttctagtatcatttatcacacacacacaccctcacac

SEQ ID NO: 203 - DNA, 120 bp, synthetic construct
  source 1..120: mol_type = other DNA
tgttaagatgacagctctcactttaaatgtttgtaccacatacaaaaaataaagacgaaacaaaaccaaaaaaacccaaagagacataaggaaactttggttggtggatatgtctattac

SEQ ID NO: 204 - DNA, 120 bp, synthetic construct
  source 1..120: mol_type = other DNA
cagcctggtttaatactttttatttagtggcacaatgcccaggaatgaattaaagtcattaaatgaggactaggttgctatgcacttggctgtttctggacttcctgtgctgttccattg

SEQ ID NO: 205 - DNA, 120 bp, synthetic construct
  source 1..120: mol_type = other DNA
gtgagacaccgcacccggcccgatttgttcatatctaatttttaaatttcagatgtgttttaatgttttcatttaaagtttgcacacttcttagtaattttttcattaaaaacctttttg

SEQ ID NO: 206 - DNA, 120 bp, synthetic construct
  source 1..120: mol_type = other DNA
tttttttttttttgagaaggagtctggctcttgttgcccaggctagagtgcaatggcgccatattgtagcaggacgagccgcagacaaaactcctcagacaccgagttaaagaaggaatg

SEQ ID NO: 207 - DNA, 120 bp, synthetic construct
  source 1..120: mol_type = other DNA
ctcaattatttcctcaagtagattttccacactttttacccttcattctcccttaggaatacctatgattcatgggtacagatgttttacataaccccatacttcctgaaggctttgttc

SEQ ID NO: 208 - DNA, 120 bp, synthetic construct
  source 1..120: mol_type = other DNA
ggcagaggtttaagaagtttatctcatttcctcttttggaagagatgagaagtttatttccactcatgtgcccttttgtcaactgatttgtattgaggtgcgtggttcagcctccagaac

SEQ ID NO: 209 - DNA, 120 bp, synthetic construct
  source 1..120: mol_type = other DNA
cacaaacaaggagctcttggacacagatgagtacatggtctggcctcctttgtcccaactggtactttttttgtgtactgcagtctccctttccttaggagcagcaatccctgatggcta

SEQ ID NO: 210 - DNA, 120 bp, synthetic construct
  source 1..120: mol_type = other DNA
tctcaaggttcctagctgatttctgccagcttcttactttcttctttttttctgtctcagcttttccccatgagttctgaaacattctgatgtgattctgacagctatttccacactcag

SEQ ID NO: 211 - DNA, 120 bp, synthetic construct
  source 1..120: mol_type = other DNA
tttccatgcatttgttattttatgaattggtctgaatgatgaggccaggcaagtgtatacatcttttcactggtagaaaaatctgtagcaaagcctgtgccctttttacaacaatgactt

SEQ ID NO: 212 - DNA, 120 bp, synthetic construct
  source 1..120: mol_type = other DNA
gtccccatagatctgctttttccagaatggtatatgaattgagtcagataaaatgaagccttttgtgtctgacatttttttcacctggtaaaacgcatttaagattaattgatgtatgga

SEQ ID NO: 213 - DNA, 120 bp, synthetic construct
  source 1..120: mol_type = other DNA
gctttaccgttttccattcccattagcagtgagtgggaattcttgttgctctgtatattttcagcattttttattgtaagtttaaaaaattttagctactctaatagtgtagcagtactt

SEQ ID NO: 214 - DNA, 120 bp, synthetic construct
  source 1..120: mol_type = other DNA
tggagacccaaaaaagctagtgttgtatttggaaggcctaagagctggagggtgggtggcatagattcttatcaaatctaagggcctgagaaccaggagcatcaagggcagagtgtgagt

SEQ ID NO: 215 - DNA, 120 bp, synthetic construct
  source 1..120: mol_type = other DNA
cccagcctcccaaagtagatggatgccaattgtttcagcatcattattgaaaggagattcccttcttcattggatgacctttgtacttgtattcaaaatcaagtgactctatttttgtcc

SEQ ID NO: 216 - DNA, 120 bp, synthetic construct
  source 1..120: mol_type = other DNA
ggcatttccagtgttggtcactcctatctgaagactcaagttaccatctggtatgacttctttcaacctgggaaactccttcagtatttttcttgcagtagagttatgtttgcaacaaat

SEQ ID NO: 217 - DNA, 120 bp, synthetic construct
  source 1..120: mol_type = other DNA
gaatccacaggactcaggttagatttgtttgtcttgcaacgtgaggcaattgtggtgtagcaagatctggctctagaattcttatggcaaaatagctgtcatagaatccaactagaatga

SEQ ID NO: 218 - DNA, 120 bp, synthetic construct
  source 1..120: mol_type = other DNA
ccacctttctatctccttgcaaggtaggttcatcaacacttttacatttatgccccagcaaaaatctttttttggctcacacctgccctccttcatccagccaactgacatatttgctga

SEQ ID NO: 219 - DNA, 120 bp, synthetic construct
  source 1..120: mol_type = other DNA
gaaaagggaacctttctaaattcagttatgatttcctgaaacatcgaagaaggcaaatgtgggtgcccttaaagacaagagaattctctgacctcaaatttcatgtagcagctgtaaggt

SEQ ID NO: 220 - DNA, 120 bp, synthetic construct
  source 1..120: mol_type = other DNA
gttaaaacgggactcaagggttcctgcattgtcctctgccttaattgcatttgaaaatatattttgtcagttcaatccttctcctgcccgtctctgtttctctttttaaagaagctgaac

SEQ ID NO: 221 - DNA, 120 bp, synthetic construct
  source 1..120: mol_type = other DNA
agataataatttgaagtcaaaccacagggacaaaatgtttttagatgtctccaaattcctcacttccctcctctaaattcaggtgggtcacttcatactttctcccaaccgcaggttccc

SEQ ID NO: 222 - DNA, 120 bp, synthetic construct
  source 1..120: mol_type = other DNA
gcacaaatggaccctgaagattcaggcattgttctgctctggagtaggacatctgtggctccagcaaactgtacaaaggcttttttttttttttaatgtatcttccgtgatacttcaatt

SEQ ID NO: 223 - DNA, 120 bp, synthetic construct
  source 1..120: mol_type = other DNA
taatgagacgtaagatgtgtgtgctgatatgtacaaccacagtgcatgcacgttcaagagaccacagaacatgcttaaaacaataccccttcccacctattcatgaataatcatgtaaga

SEQ ID NO: 224 - DNA, 120 bp, synthetic construct
  source 1..120: mol_type = other DNA
agaaatacctgagcttttcaatgagaatgaacagggccttttaccctctggcaactgtgtatttcccattgacatgtttcttgtcctcagaatggtttttcctttttgcaggtggtttat

SEQ ID NO: 225 - DNA, 120 bp, synthetic construct
  source 1..120: mol_type = other DNA
attaagtcattaccagaaactaggacagggagtctgaaagccctcatttcaatttgtaaactgccactcactaactacgtgaccttgggcagaaaacttattctcataagaatacgacct

SEQ ID NO: 226 - DNA, 120 bp, synthetic construct
  source 1..120: mol_type = other DNA
agggactgtgcttgttagcgtgtggcatgccaatggataataatgataatgaaaactatgatgatgacaaaaatgataatgatgatagcaggtaatttactgtgtgcataatagggaaga

SEQ ID NO: 227 - DNA, 120 bp, synthetic construct
  source 1..120: mol_type = other DNA
aggagcagttctgggattggaatttaagggtgtttgatcaaagggccagaatcaagctggataaattaaaaaaaaacacctttggcttgggagcactttctcagggtatgggtttatcaa

SEQ ID NO: 228 - DNA, 120 bp, synthetic construct
  source 1..120: mol_type = other DNA
ttgacatctgtgatgagaaagcaagaattgatgagcagggggctgagggtgtttaactcaatacaaagtcatgatcccattctcaattcctaaacgtcaaccaagtttcagattcagatc

SEQ ID NO: 229 - DNA, 120 bp, synthetic construct
  source 1..120: mol_type = other DNA
gcctcagggttattgtaactgacctgccctctatagtatagtcttaagagatctgaagaacctggcatcctatagaatggtaaatcagcttatttcatcaacaacatcatgttgactagg

SEQ ID NO: 230 - DNA, 120 bp, synthetic construct
  source 1..120: mol_type = other DNA
atccatcatgagatagaaatggtccatctggattgagcatgaatcctatgttgacacctccagaaaacatccaaacctgaagtggcactaaacaaccaagcagacaaattgaagttagcc

SEQ ID NO: 231 - DNA, 120 bp, synthetic construct
  source 1..120: mol_type = other DNA
tgtctctcccagggtttcctggatcttttcccatattttctggcaggtgagtcctctaataaaatactgcaactttaatctcatgtcatctgcttcttggagaacatggaccaacaaaat

SEQ ID NO: 232 - DNA, 120 bp, synthetic construct
  source 1..120: mol_type = other DNA
tatgaaagtggccttgaccagaaataggtcatttgatccttggctcattgacatctccatagattttcggtgtacaatgttcggtctgatgtgcaaggtaattccatcttgcaaaggatt

SEQ ID NO: 233 - DNA, 120 bp, synthetic construct
  source 1..120: mol_type = other DNA
attttgcttttaacatatatgcaaattctttgatactctccactttgcagaggtgcaggttcattccctccctgtgagtgtggcctggacttaatgattcacttctatctgatggagtga

SEQ ID NO: 234 - DNA, 120 bp, synthetic construct
  source 1..120: mol_type = other DNA
ccatggctaaataggatgtattttattatcattcacaattattgctttatttgaacttcaatttccacctgtgtcccaattaaactcaaaagaaagacccaagcctccctctcccgtctc

SEQ ID NO: 235 - DNA, 120 bp, synthetic construct
  source 1..120: mol_type = other DNA
gggggtcagccccccgcccggccagccgccccgtccgggaggtgaggggctcctctgcccggccgcccctactgggaagtgaggagcccctctgcccggccagccgccccgtccgggagg

SEQ ID NO: 236 - DNA, 120 bp, synthetic construct
  source 1..120: mol_type = other DNA
ggctcattggggatgggccatgatgacaatggcggttttgtggaatagaagggcgggaagggtggggaaaaaattgagaaatcggatggttgcggggtctgtgtggatagaagtagacat

SEQ ID NO: 237 - DNA, 120 bp, synthetic construct
  source 1..120: mol_type = other DNA
aaaagcagttggctataatgggaaaccaggaagaggagaaactagagtaaatgacatagtggcaacaatcatagtgttactggaagacaaatggctgagtgggatacatacccatgcact

SEQ ID NO: 238 - DNA, 120 bp, synthetic construct
  source 1..120: mol_type = other DNA
gcctctgtataagcctgaaggaggccctcaaaatgaaaacacagttttgggaaaccctaaacagagaaccctccaatcatgctcagatttctgactaaggaactgtaaataaataaataa

SEQ ID NO: 239 - DNA, 120 bp, synthetic construct
  source 1..120: mol_type = other DNA
ctttttttcaggtttaaaaaaatactaagtgttccaataaaacatgcacaccacttagatgcggatacttcctaaaaacaggaagtgcatgagcactggtgaggggcattgtgactgcgt

SEQ ID NO: 240 - DNA, 120 bp, synthetic construct
  source 1..120: mol_type = other DNA
aaaggaagaagaagaaactgtctctacaccttcattctcaggacaagttcattgtctggcaccaagctccttggggtgaattttcttccaaaagagtccggggagtccaggtatggaatg

SEQ ID NO: 241 - DNA, 120 bp, synthetic construct
  source 1..120: mol_type = other DNA
acgccgcgattccgaggatggagccgcgggagccgtgggtggagcaagaggggccgcagtattgggagtggaccacagggtacgccaaggccaacgcacagactgaccgagtggccctga

SEQ ID NO: 242 - DNA, 120 bp, synthetic construct
  source 1..120: mol_type = other DNA
aatcttcctggctttcgagatccggtaccagagagtgactgtgagagtccgccctgctctctgggacaattaagggatgaaatttctgagggaatggagggaagacagtccctggaatac

SEQ ID NO: 243 - DNA, 120 bp, synthetic construct
  source 1..120: mol_type = other DNA
gttggtccaggacccacatctgctttcttcatatttcttgatcctgccctggatctacagttacacttttctggaaacttctctgggatcaaagactaggggtttgctctaggaccttat

SEQ ID NO: 244 - DNA, 120 bp, synthetic construct
  source 1..120: mol_type = other DNA
cgttcttggcaccatcttatgaaaagggtccagattaagatttttgactgagtcattctaaagtaagttgcaagacccatgatactagaccactaaatacttcatcacacacctcctaag

SEQ ID NO: 245 - DNA, 120 bp, synthetic construct
  source 1..120: mol_type = other DNA
ccacactgaatttatcatattatttcccctgatgcctttaacttttttcctctaactgctatgcctcctaaggacctatgtagctctgggttaaacatttggcagcaatgtttacaggag

SEQ ID NO: 246 - DNA, 120 bp, synthetic construct
  source 1..120: mol_type = other DNA
cctctcccttcagcgacgcattgtgaggccatttctaggtaaaaaggtagaatttccttggattcctgaggtttattttacacttactgcttattctttgactttatagaagccaacttc

SEQ ID NO: 247 - DNA, 120 bp, synthetic construct
  source 1..120: mol_type = other DNA
tcttaggaacattggatgtggcaatggcttcttggctggtgagcaaaagcacaaccaataaaagaaaaacaataaattagactatcaaaatttaaaaaccttttttatatatcaagggac

SEQ ID NO: 248 - DNA, 120 bp, synthetic construct
  source 1..120: mol_type = other DNA
aacacaagaactcacaggcatacagcgtcagtgtgataccagtaatttgacaagttctcatcccttaggtcatcagccggtacaccagagcaagtgtgctatattgaaaataaaataata

SEQ ID NO: 249 - DNA, 120 bp, synthetic construct
  source 1..120: mol_type = other DNA
aatctattccctgccattcccgccactcccaccaatcttctagcctaggtgtattttttatcagtggcaattatcactgatactgtgacagattctatttgtttattgtctgttggtgta

SEQ ID NO: 250 - DNA, 120 bp, synthetic construct
  source 1..120: mol_type = other DNA
aaaattaaccattacagtcagtatcactgaaatgtatgttctttgataaagggatctggtctgtttccttaccattgtttctcaccatcataatcagtaaatagctctcagtaagtattt

SEQ ID NO: 251 - DNA, 120 bp, synthetic construct
  source 1..120: mol_type = other DNA
caaaaagcaacattcaagataacccatgacatatgaatgcaaccttgtacaataaagatacctataaaaatatatacatagagaacaacaaaatgggccaggcgccttggctcattcctg

SEQ ID NO: 252 - DNA, 120 bp, synthetic construct
  source 1..120: mol_type = other DNA
aatgccgattatggcacctccagagagtagaaaaatattcttcctccactccatgactcatcctttggttacagcgtttagctgagcaatgaagtcaatgctaagaataccatcaattta

SEQ ID NO: 253 - DNA, 120 bp, synthetic construct
  source 1..120: mol_type = other DNA
ttcctcctgccaccagaccctgtcaccacaagtctgctttctttctctatagattggtctcttctgaagatttcacaaaaatgggttcatgaaatatgtatccttttgtagctgatttcc

SEQ ID NO: 254 - DNA, 120 bp, synthetic construct
  source 1..120: mol_type = other DNA
tttttatctggtctctttgtaaaatttctacctttttattgatgttctctatttggggaaacctgcaaccaccatcttctgaagctctgcccatgtcaagaggtctgtgcatacctctct

SEQ ID NO: 255 - DNA, 120 bp, synthetic construct
  source 1..120: mol_type = other DNA
tcccgtggcagtcaggtgctcagctttataaatagctcacacttcttgtctctccactgttgatagacatttgtgttgtattcagagtctacaaatcgtgctgctataaataatattttc

SEQ ID NO: 256 - DNA, 120 bp, synthetic construct
  source 1..120: mol_type = other DNA
cttttatggtacccgtggggttttttatgacaaaaacactaataaagaataaaatagtatgtgacatatggttcttgttctgcatcaagcctccttcccaccctccgctccagacactga

SEQ ID NO: 257 - DNA, 120 bp, synthetic construct
  source 1..120: mol_type = other DNA
ttgcaggatgatgagacccagcactggtgagttatactgtctctttcttccctattaaattctgtgccaaacagcaccttcatatatttatctcctcttcctggagagaataaaaacaat

SEQ ID NO: 258 - DNA, 120 bp, synthetic construct
  source 1..120: mol_type = other DNA
agtccagatgggagcagccagaagggcccaggagggacatttccaagaagataaaattaacagaatgtccaaagtgtccaacgtcttgaaagaatcatacaaacaaaagagatatcaaac

SEQ ID NO: 259 - DNA, 120 bp, synthetic construct
  source 1..120: mol_type = other DNA
ataccaaggatcgaactgggaaccctaggcatgcaaattgtaagctctagcacttatatccttgcaaccatctctgttctctccccaatcttgagtccaaaaaattttcgtaaacacaat

SEQ ID NO: 260 - DNA, 120 bp, synthetic construct
  source 1..120: mol_type = other DNA
tgctgatacttgctttactcatcctcattcccagttcatttattcttcattaattcagtccaatctccccaggggtcacttaaccccagaagcagactgatctctattcttcttaatcag

SEQ ID NO: 261 - DNA, 120 bp, synthetic construct
  source 1..120: mol_type = other DNA
gacctcaaggtgccaggaaagctggtcctgggctccccagaaggagccgtaaccaggacactcactcataaatctcatttataataataatacaatgaccgcatatgtaatatattaaaa

SEQ ID NO: 262 - DNA, 120 bp, synthetic construct
  source 1..120: mol_type = other DNA
agccaccatctcccacatggacccttctagagagagagtttcaaatttgaattcctgttccattcaatatgctttacagcatcggtattggaggaaatcctattaagaatatccagctga

SEQ ID NO: 263 - DNA, 120 bp, synthetic construct
  source 1..120: mol_type = other DNA
ctactaatactaataataatgacagtagcaatagcagcatacagaatggctgccattgactctgaagcaccagggccttctctaaaaaaagggccttgtgacacactgagcacgcaaagc

SEQ ID NO: 264 - DNA, 120 bp, synthetic construct
  source 1..120: mol_type = other DNA
tttttctgatacctccagaatttcagatatcaccatagcttttgcatgtagtctgcctgcacagggcaatagtgtgtcttggtctgcatggcattttcctcccagaaatttgtgacattc

SEQ ID NO: 265 - DNA, 120 bp, synthetic construct
  source 1..120: mol_type = other DNA
cacagatgaaacttcttcctggaagtaacttcacatcaatgtttaacacacaggtctgctgtcccgaccttcctgaggaggcaggaaatgcacacgggcaaagggacaagaatgaggatt

SEQ ID NO: 266 - DNA, 120 bp, synthetic construct
  source 1..120: mol_type = other DNA
acacacacacacacagaaatatcaagtttggcaaacaggttgcgaaactggaacctttgtgtaatgcatttggaaatacaaaatagggcacctgttatggaaaacagtgtgttgattcct

SEQ ID NO: 267 - DNA, 120 bp, synthetic construct
  source 1..120: mol_type = other DNA
aaaaaaaaaaagaagcagttggacacacggcctgtgttgggtctgggtagaggaggacagatgtgcagggcaaggactggaggatggggtgagcatggtgtgggggtgaccctgggggaa

SEQ ID NO: 268 - DNA, 120 bp, synthetic construct
  source 1..120: mol_type = other DNA
aaagactggtttgtccgaaaagtgagaggagacggaggagaggagaggagagaaagtgcaggacaagaccagaaaatgcagggggcgggtgatgagcgatcccgaggaggactgaaaaga

SEQ ID NO: 269 - DNA, 120 bp, synthetic construct
  source 1..120: mol_type = other DNA
tgatccgctaagacgacaaatctcttagacgtttcagctttacaatctccttctcctcccttttactcaaagctaggtcccctttcttatggtcacttcctgtaagtgtgtgaggtctcc

SEQ ID NO: 270 - DNA, 120 bp, synthetic construct
  source 1..120: mol_type = other DNA
gcctcaaaactaactcttaagatgatcctcgtggctgagagagggtagaatcatcttcaactgtgctccaaataactgtatttctggttacaaatcatgtaccttcagtcataacaatgt

SEQ ID NO: 271 - DNA, 120 bp, synthetic construct
  source 1..120: mol_type = other DNA
tgctaaaagccactgaccagtacatttttttttttttaaccaggaacacatgcactttattgaatgccattgtagaagagtgtgtgaggataaagcgctgatacagaactcagctctggg

SEQ ID NO: 272 - DNA, 120 bp, synthetic construct
  source 1..120: mol_type = other DNA
tgcccagctgtcatctaccatcttgtaccatccctcactacacgatgaacagtccatgatctggaactgtgttcattctatctttgtcactcttacaaacattttttaaaactgaactat

SEQ ID NO: 273 - DNA, 120 bp, synthetic construct
  source 1..120: mol_type = other DNA
acaactaaggggccaggagaaagcctctcagggtcccgccccttcagtgaggatcctaaatttacatcccgagtgtggccccatcaaagactggagcgacgttcactgaaatgatacaag

SEQ ID NO: 274 - DNA, 120 bp, synthetic construct
  source 1..120: mol_type = other DNA
gctgttgtacacacccacatctccactaccacaatgaagatgtagaacatttccatcggactccaaagagctgctatgcaatacaattttatagggtcaataaaagaggtaagatcagtt

SEQ ID NO: 275 - DNA, 120 bp, synthetic construct
  source 1..120: mol_type = other DNA
cttggtgattttcactttctctgaaatgttggaattttatattacagtattaacttggatttggcttggcccggtggtttgtacctgtaatttcagctctggaaggtgaggcagaattgc

SEQ ID NO: 276 - DNA, 120 bp, synthetic construct
  source 1..120: mol_type = other DNA
tactactgatgagttcaaactaggaggacactaagacgtgtcttttgcaaggtagactccttatctcgcactctgtctggttttctaagtccatcctaatgaaacacaaaaaccaagagc

SEQ ID NO: 277 - DNA, 120 bp, synthetic construct
  source 1..120: mol_type = other DNA
tgcacagtgaggccatttctggggaagaaatgtagactctccttgggggaggttttatacttagttactgactttgcattcgttgacttcatctttgaacatcttacagttacgtaattt

SEQ ID NO: 278 - DNA, 120 bp, synthetic construct
  source 1..120: mol_type = other DNA
tttctgggctctgtactctcctgatcctccatgaggattttaaacagtgagataaggtatccagggccccagaaatctgaattacctttaccaaagagatcatccttccatttcatttct

SEQ ID NO: 279 - DNA, 120 bp, synthetic construct
  source 1..120: mol_type = other DNA
aaacagatgtacaggagggtgactgcaggatcccatgctgtctctttctcctctcctgaatcctgggtttaccttcctaatttcagctaagtagctatattaaccagttatttaagactc

SEQ ID NO: 280 - DNA, 120 bp, synthetic construct
  source 1..120: mol_type = other DNA
catggggcttctcagatgacacagattgatcgttcccacctctgccttctttcctgttccatttccagaatgcttctattgtttcccttttattgtagtaagtcaaatttttgaattaag

SEQ ID NO: 281 - DNA, 120 bp, synthetic construct
  source 1..120: mol_type = other DNA
ctttcttgatcaaaaattgacgactccaggaattttgaaagacttgaccaaataaataaaggccgagagttacgcatgagaaccaacatgggttgtgcttctcggattcaggccaaagtt

SEQ ID NO: 282 - DNA, 120 bp, synthetic construct
  source 1..120: mol_type = other DNA
ggcaggatggaagagagtggatgatggctctgtgaggagatggaagctgagaataatgcacttgcttacagtgttcacattcttcatggaatttacttaaatacactagcatttgctcta

SEQ ID NO: 283 - DNA, 120 bp, synthetic construct
  source 1..120: mol_type = other DNA
gatgagtctttcaagttcccatggacccatggacatcatgagatcaacctaattgccctcattccattttcctttactttgcagaaaagaaacaaattcctttccacccaaaatatgaca

SEQ ID NO: 284 - DNA, 120 bp, synthetic construct
  source 1..120: mol_type = other DNA
caaatgttatattgaagcctttgtttctcttacactgaggtaacactactgcagcagagcaaaccttattgtatcagtgcaccaaccccaagttcatgttcattacagcaggaaaaacta

SEQ ID NO: 285 - DNA, 120 bp, synthetic construct
  source 1..120: mol_type = other DNA
ctagctggtggaaaggcctgaagggttcatattcaggtccacttgacttgaaaactcatattgaccttacttatgtactaattcccactttacaatccatgccacaaactttgttgtctt

SEQ ID NO: 286 - DNA, 120 bp, synthetic construct
  source 1..120: mol_type = other DNA
aaaaagaacccagaacctttgcaaaattttaggagagaaggactttccctcttgtctcttagtgccagggttatgcatgactcatacttgaattgcaatgtgtacacagcttaaagtctt

SEQ ID NO: 287 - DNA, 120 bp, synthetic construct
  source 1..120: mol_type = other DNA
attctttctgacttcaacatatgcagatgtgctgggctgagtactagtccccaaagagatccagtcttagtccttggagtcggtgaacaggttgcattgcatggcaaaagggacattact

SEQ ID NO: 288 - DNA, 120 bp, synthetic construct
  source 1..120: mol_type = other DNA
gctataatttgatcatatgctataatgtaacatcagtgaaccactcattgcatgtgtgcctgctttccaggcatggagtccattctgtagtacatctattccaataatttttccaccccc

SEQ ID NO: 289 - DNA, 120 bp, synthetic construct
  source 1..120: mol_type = other DNA
ttcatcaattaataccttttttttccctctattgtcatcccttttccttttattccagtggatcattgtggcactcatgaggatgcacatcccaggccctcaggtagaggaagaataatt

SEQ ID NO: 290 - DNA, 120 bp, synthetic construct
  source 1..120: mol_type = other DNA
gtgcacttctgggattggaatttgagggcatttgatcaataaactagaatttcagtctggatgaataaaaatcctttggcttggaggcactttctcaggacatgggtttatcaaagaacc

SEQ ID NO: 291 - DNA, 120 bp, synthetic construct
  source 1..120: mol_type = other DNA
cttgatatatatgataagaaagcaagaattgaggagcaggagactgagggtgttcgaccaaatacaaagccatgatccccttctcaatgcctagacctcaatcaagattcagactcagat

SEQ ID NO: 292 - DNA, 120 bp, synthetic construct
  source 1..120: mol_type = other DNA
acccctctgtccgcagccgtgttgtggagggaaagggagaatagaaaaccaatgtgaaaaaaaaaaggcaaaagctaagatgaaagcttttgaatcaagtaaaagaggccccaaaataaa

SEQ ID NO: 293 - DNA, 120 bp, synthetic construct
  source 1..120: mol_type = other DNA
tcctaggtaaattacaaagtgttgcattttgcatccttactgcaaaaaaagaaagcacactctccggtgagcctcttggagttctgacgacagcacattccacatgtagaaatgttgctt

SEQ ID NO: 294 - DNA, 120 bp, synthetic construct
  source 1..120: mol_type = other DNA
ttctttaggtgactaactagccactatgtaacaagttgactacatttagctacttccatcctagaagggcctgaggttcatcttcacaggggtaggctcatattccatgggtgagttttc

SEQ ID NO: 295 - DNA, 120 bp, synthetic construct
  source 1..120: mol_type = other DNA
ttgctatatctctgacaggtgtgtcccctaataaaatcctgtaactttaatcccatgatggcacttggaatgcaaaatcattttcatctgcacaccagtgacctcttacttactccaatt

SEQ ID NO: 296 - DNA, 120 bp, synthetic construct
  source 1..120: mol_type = other DNA
aattactttggaaatcatattatcattatttagtatggttaaaggccatacaacatatcatccaaccatcccactcctaatcatacactctggcggctttctcgcctatgtgcccaggag

SEQ ID NO: 297 - DNA, 120 bp, synthetic construct
  source 1..120: mol_type = other DNA
aatacccttggctaaagggccatatgatccttggctcacaggcatctctctagattttcaggtatacaagattcaatctgatgtgcaaggtaattccattttgcaaaggatttgatttgt

SEQ ID NO: 298 - DNA, 120 bp, synthetic construct
  source 1..120: mol_type = other DNA
ttgaagagaatattgttattaaaggtatttgcaagaaaaactcagacatactattgtatcctctttctctgtctcaaacagttttcgccacaacacccaaggctctgtgatgtctcaaac

SEQ ID NO: 299 - DNA, 120 bp, synthetic construct
  source 1..120: mol_type = other DNA
agaagcttaaagcattaaagaaaaataatcacatgaaagaagcatttgatttacaaaatcctgaaataataattttaattttgctttcaacatgtatgcaaatcccttgatactcctccc

SEQ ID NO: 300 - DNA, 120 bp, synthetic construct
  source 1..120: mol_type = other DNA
tgtgagaacagacaaatacaacttctaactgatagagtagtgctgatataacagtttttgactctgggtgtagaacataaaactcactgcagcttctctctctctgtctctgggatcatg

SEQ ID NO: 301 - DNA, 120 bp, synthetic construct
  source 1..120: mol_type = other DNA
atgatcgctttacttgaacttcaatttccaactgtgtcacaattaaacacaaaaggaaaatccaacccttgctaggctgattctataatagtcccaacaaccacctcctggtcatccacc

SEQ ID NO: 302 - DNA, 120 bp, synthetic construct
  source 1..120: mol_type = other DNA
tgggtattgtttaaagccaatatttgtgataatttgttatgcagtcataaaattcgtacagtctcaacagacaaatggaatgaatttatgaattgatatgcacactagttacataaaata

SEQ ID NO: 303 - DNA, 120 bp, synthetic construct
  source 1..120: mol_type = other DNA
ctggcttgtatgataaatgtatgtttagttttgtaagaaactgctaaagtcttccaaagacatcataccattttgtatttccatcaacaatgaattagagttcctattttttgacatcct

SEQ ID NO: 304 - DNA, 120 bp, synthetic construct
  source 1..120: mol_type = other DNA
aaaaatcagagtgcctctcctcctccaaaggaatgcagctactcactagcaatggaacaaagctggaaggagaatgactctgatgagttgagagaagaaggcttcagacgatcaaacttc

SEQ ID NO: 305 - DNA, 120 bp, synthetic construct
  source 1..120: mol_type = other DNA
aaactgcatcaactaatgagcaaaataaccagctaacatcataatgacaggatcaaattcacacataacaatattaaccttaaatgtaaatgggctaaatgctccaattaaaagacacag

SEQ ID NO: 306 - DNA, 120 bp, synthetic construct
  source 1..120: mol_type = other DNA
aattaaaagaactagagaagcaagagcaatcacattcaaaagctagcagaaggcaagaaataaccaagatcagggcagaactgaaggagatagagacacaaaaaacccttcaaaaaatca

SEQ ID NO: 307 - DNA, 120 bp, synthetic construct
  source 1..120: mol_type = other DNA
caagacagggatgccctctctcatcactcctattcaacatagtgttggaagttctggccagggcaattaggcaggagaaggaaataaagggtattcaattaggaaaagaggaagtaaaat

SEQ ID NO: 308 - DNA, 120 bp, synthetic construct
  source 1..120: mol_type = other DNA
gatttcgtgactaaaacaccaaaagcaatggcaacaaaagccaaattagacaaatgggatctaattaaactaaaaagcttctgcacagcaaaagaaactaccatcagagtgaacaggcaa

SEQ ID NO: 309 - DNA, 120 bp, synthetic construct
  source 1..120: mol_type = other DNA
gcaaggatccttaataagaactacttacattggaagcaaaccacagagaattgtaaggagtcatgtgacagagaggaccaggatgccatgaaaatggacttggctaaaaataggtcattt

SEQ ID NO: 310 - DNA, 120 bp, synthetic construct
  source 1..120: mol_type = other DNA
aaattcagagttactgttgcatatcctttctctgtttcaaactgttttctcctaagcacccaaggctctgtgatgtctgaaacagttaatcattaattttaaaagataagcttatcgtgg

SEQ ID NO: 311 - DNA, 120 bp, synthetic construct
  source 1..120: mol_type = other DNA
gcttttacactgttgctggaaatgtaaattggttgaaccattgtggaagacagtttggtgattcctcaaagatttagaaccagaaataccatttgacccagcaatcccattacagggtat

SEQ ID NO: 312 - DNA, 120 bp, synthetic construct
  source 1..120: mol_type = other DNA
ttttaatatatattcaaatcctttaatactgttcccttccagagatgctgcttaatttcctctcttgagtgtggctgggacttaatgatgcatttctgatatggtctggctctgagttcc

SEQ ID NO: 313 - DNA, 120 bp, synthetic construct
  source 1..120: mol_type = other DNA
ctcaattagttgactttaggctgggtttatcctgctttgactgtcctaataaggtgagtccttgaaaggtctgtgttctttctgagcatagagatttgcagtgtgagagggattcagcat

SEQ ID NO: 314 - DNA, 120 bp, synthetic construct
  source 1..120: mol_type = other DNA
agcctccagcagttcattgattagaattcaggttttcttatctatgcaatggttcccacagatatttctgctcgtgtgctgtgattttcaatgtctatctgtctgtctctccaatttggg

SEQ ID NO: 315 - DNA, 120 bp, synthetic construct
  source 1..120: mol_type = other DNA
gaggaaatggagcagagggaaagaattcgaaagcagcagaactcaggtttaaacacattgttttatatattttaatacatcaatctacagagccttgcagggtgatctttgcagttggcc

SEQ ID NO: 316 - DNA, 120 bp, synthetic construct
  source 1..120: mol_type = other DNA
gagctttgtgattcctgttgtaatgcttttagacacatttatatgtcaagggaccaaagtcacatttttggccgattagattcctgatcattaggagttaccaagattctgctacccact

SEQ ID NO: 317 - DNA, 120 bp, synthetic construct
  source 1..120: mol_type = other DNA
atcctcacagggataggcacctattagatgtggtgtggttttcctctctactcttagaccctcagccagtatcactattggcattcctgagccactggctcagaatttcagtacattatc

SEQ ID NO: 318 - DNA, 120 bp, synthetic construct
  source 1..120: mol_type = other DNA
tggtgcatgtattgaatcaaagatgtctctatagtgctgtgtttacagaaggaagaatacgtgggtccaaaaaccaagaagtagaagcaggtgtggctccatatctaaacccttatattc

SEQ ID NO: 319 - DNA, 120 bp, synthetic construct
  source 1..120: mol_type = other DNA
atgcctagggtgattctatagccaagacagtaccttttaacatttaatttctgcctccaactgaatgttttcagaacacatgagcaacacaagctctttcccattcttggtacaagcact

SEQ ID NO: 320 - DNA, 120 bp, synthetic construct
  source 1..120: mol_type = other DNA
aaataccaaagttcatctcaaggatccttagcaataactacacacgttaaaacaaagccacagccaattgtaaagagtcatgtgacagagaggaccaggatctcatgaaaaatagccttg

SEQ ID NO: 321 - DNA, 120 bp, synthetic construct
  source 1..120: mol_type = other DNA
ttggagtaaacaatttctgcctaccctagccaaacaaattattgtcatgatgctaagctagtgtatagacagaggtgtgagattcacatttttctaactgcaaagcaccctgattaggca

SEQ ID NO: 322 - DNA, 120 bp, synthetic construct
  source 1..120: mol_type = other DNA
ctattttttgatcttcaacttgtatgttctatttaaacatgaaaggaagatccaggctagctaggctgattctatgatgacaccccaataaccacccttggtttctcaggttaccccagt

SEQ ID NO: 323 - DNA, 120 bp, synthetic construct
  source 1..120: mol_type = other DNA
cagatatacttttatattctgtagatacaactttgatcaaagcaacccaaagcccctgtgcttgtgccttccattctagaggcttcttgagagtaagatggagccattagaggcttttaa

SEQ ID NO: 324 - DNA, 120 bp, synthetic construct
  source 1..120: mol_type = other DNA
aattaataataaagggagtgcatgagcactggcgaagggcactttggctgcattaagcacttgcaattctgaggtaattaaattctgtacaggctcctggttgcaatatacggtaataca

SEQ ID NO: 325 - DNA, 120 bp, synthetic construct
  source 1..120: mol_type = other DNA
acaaagggctaaagggctatggggaaatagtggtatttgtatatattcagaaatgtggttaagagaataaatctgacagcccctgaaaatttcagcataacactgggtccggaattggcg

SEQ ID NO: 326 - DNA, 120 bp, synthetic construct
  source 1..120: mol_type = other DNA
tgagccaccttccaaaagaaggggaggaaaatgggaccaacgctaaaatatccctctccctcttgtcctgaggcagaagagtcctcctgggtttctaaatcctataccagagagtgactg

SEQ ID NO: 327 - DNA, 120 bp, synthetic construct
  source 1..120: mol_type = other DNA
atatcttgcctagttgtgaggcaccatctccacacacatttaccctgttcagaggccctgtctatcaacgcttactcttttgtaaagcacttgtgaaaatgaaggacaaatttatcacct

SEQ ID NO: 328 - DNA, 120 bp, synthetic construct
  source 1..120: mol_type = other DNA
ctttgatttggaatttttcaaggtgtggtgggctgttcagtgtcacaacttactatgactgacctggattagtttatgactatgttttttctaagattgccttgtgagggactgagatgc

SEQ ID NO: 329 - DNA, 120 bp, synthetic construct
  source 1..120: mol_type = other DNA
ggctggatatcctgtccagtgccaaaattcttaggccttttctcaaacaagggatttaccactttcttggcctcctgcttcttcacgacagcaggggctggagccaccttcttctccttg

SEQ ID NO: 330 - DNA, 120 bp, synthetic construct
  source 1..120: mol_type = other DNA
gagctttaagttttaatgtctgccatgatgagtttcaaccttgtgaggacactgcattcatttcttttggtccacttatttcttttggaatggaaatgtataggaaatgtctctaccact

SEQ ID NO: 331 - DNA, 120 bp, synthetic construct
  source 1..120: mol_type = other DNA
cagtttatcatcctcttgtatgaatatgtctcccagaatgacatcactcagctttgcagacaccattcaatcttatcaggttccaaaaacaagaatggtctcagggacatacagcttcac

SEQ ID NO: 332 - DNA, 120 bp, synthetic construct
  source 1..120: mol_type = other DNA
gtgcctggtcagccatttcaatattctatcaaagtttcccctgaatagtacatttccctgtgcactgttggctttttaaggctgtaaagtgtgttttcttgtgtaaagaaatgtgactca

SEQ ID NO: 333 - DNA, 120 bp, synthetic construct
  source 1..120: mol_type = other DNA
tttcagacaagaagagaggaggcaagactttctagctcatttacagaactgacattaccctaatatcaaagtcagagcaagactgacaagaaaagaataccatagaccagtgtcaccaat

SEQ ID NO: 334 - DNA, 120 bp, synthetic construct
  source 1..120: mol_type = other DNA
aatgcagaggatgcagaaaagccaacgcaaatttgaaaaaaaatggaatgtcatataaaactacaataatccagacagtgtgaaagcgagagacacagagattaatgaacagaagtgaga

SEQ ID NO: 335 - DNA, 120 bp, synthetic construct
  source 1..120: mol_type = other DNA
tacagccgctctggaaatgagtattgtagttttcttcaaaccgaacatgcaatttaccttatgactagcaattgccctcctaggcacttatttcaaacgagggaatactttatgttcacg

SEQ ID NO: 336 - DNA, 120 bp, synthetic construct
  source 1..120: mol_type = other DNA
ctttttagggggaaagatatcagataggtgtttagagtttccagtggcaatagggtaaaggaaaaactgtagaaaggaagagtctggaagagagaagacaagtaggagatgatttcagca

SEQ ID NO: 337 - DNA, 120 bp, synthetic construct
  source 1..120: mol_type = other DNA
ccgcacaagactgaggagcccagctggcttcacccagtgaatcccgcaccagggatgcaggtggagctgcctgccagtcccgcgccctgcgcccgcactcctcagcccttgggtggtcga

SEQ ID NO: 338 - DNA, 120 bp, synthetic construct
  source 1..120: mol_type = other DNA
gttaatatctctttatatacataaaaggagagtgtgaaatgatggaccatggagacccagaagggtaagggggttggcagttggtgtataatagaggggtttcttgataggtacaatgtg

SEQ ID NO: 339 - DNA, 120 bp, synthetic construct
  source 1..120: mol_type = other DNA
ccagaaatgtctatttaagagttaaatatctatagtataaaatatgaagacagagtagaatggggtaatgcaggagagcatgacagagatgacaggacctcaaggtgccaggaaagctgg

SEQ ID NO: 340 - DNA, 120 bp, synthetic construct
  source 1..120: mol_type = other DNA
aagagagaaaccaataaatgctcccctgggtgcagagtgctgctttttattccctgaggagttctccctcctcagtcactcccaaatcagatttaccctttctctgacggaagatgacgt

SEQ ID NO: 341 - DNA, 120 bp, synthetic construct
  source 1..120: mol_type = other DNA
attatgttgatggacaccaatacttaaagcaggaattttgagaaactaacatgtaattttcatgcctttttctggccaatgtcccagtgacctacgagaaaacctttcctgcctacaggg

SEQ ID NO: 342 - DNA, 120 bp, synthetic construct
  source 1..120: mol_type = other DNA
ataacctacatgtgatggttcattttcaattctatgtgccttagtataggtttaagcaggccacatggtcataaagagataaagaaggaaaatgtactaagccaccatcccccctacttc

SEQ ID NO: 343 - DNA, 120 bp, synthetic construct
  source 1..120: mol_type = other DNA
gtccctgagggagcctgatgatgcctaaagaatgaatgagattactctaggtatggccaagtaggagttataattgcagcttttatgttgtctggatatcactggtagagcagattaata

SEQ ID NO: 344 - DNA, 120 bp, synthetic construct
  source 1..120: mol_type = other DNA
agatcatgtcatccacagcagagacatatgccccctgttagaagcaacatttagtgttacttgtcctgatttgatagaatgcttgaccatgggacaccaaacaacaatgtggttccaagt

SEQ ID NO: 345 - DNA, 120 bp, synthetic construct
  source 1..120: mol_type = other DNA
gttctcaatggaagaacatgtaggtccagaaatcaaaaggtggaagcaggtatggctccatgtccaatctcttagattcatccactaaggtattttgccttttttatctcccaacaatgg

SEQ ID NO: 346 - DNA, 120 bp, synthetic construct
  source 1..120: mol_type = other DNA
caatatcgtctgacaggtatgtcccctaataaaatgctgtaactttaaccccatgatggcacttgctttttggaggatttggactacaaaatcattttcatctacacaccagtgtcctct

SEQ ID NO: 347 - DNA, 120 bp, synthetic construct
  source 1..120: mol_type = other DNA
tcactttggaaatcatattattattatctagtatggttaaaggccatataacatatcatccaatcatcccactcctaatcatacactctgcgggctttcttgcctatgtgcccaggagac

SEQ ID NO: 348 - DNA, 120 bp, synthetic construct
  source 1..120: mol_type = other DNA
aatatagattatgtacatgtggctcagctgtgaacagaaaaaaaggtaaatagtgtacagtttgctgatacaaagcacttcattgcagtgccagcagactgatctcaaatgaggtgtccc

SEQ ID NO: 349 - DNA, 120 bp, synthetic construct
  source 1..120: mol_type = other DNA
atgaaagagaaaagaataccaaagttcattgcaagcatccttaacaagaactacttacattggaacaaaaccacacagaattgtaaggagccatgtgacagagaggaccacgaggccatg

SEQ ID NO: 350 - DNA, 120 bp, synthetic construct
  source 1..120: mol_type = other DNA
aagagaacattgctgttattaaagatattggcaagaaaaactcagagatactgttgtatctcctttctctgcctcaaactgttttcccctcaacacctaaggctctgtgatgtctcaaac

SEQ ID NO: 351 - DNA, 120 bp, synthetic construct
  source 1..120: mol_type = other DNA
aaggcttttacactgttggtggaaatgtaaattggttcaaccattgtggaagacagtgtggcaattcctcaaagatttagaaccagaaataccatttgacccagcaatcccattaaaggt

SEQ ID NO: 352 - DNA, 120 bp, synthetic construct
  source 1..120: mol_type = other DNA
attttgcttttaacatatacgtaagtcctttagtacagctctctttcagaggtgcagcttaattccctctcttaagtgtggcttggacttaatgatgcacttctgatatggcctgtctct

SEQ ID NO: 353 - DNA, 120 bp, synthetic construct
  source 1..120: mol_type = other DNA
aatttccaactgtgtccaaattaaacacaaaaggaagatccagcccttcctgggctgattctatcatggctcccaacaaccagctcctggtcattcaccttcccccagttattcaaccaa

SEQ ID NO: 354 - DNA, 120 bp, synthetic construct
  source 1..120: mol_type = other DNA
gaggattcaaaatgaaaacacaggtttaggaagaccggaacagagattccatccacatcatgcccagatttctgattaagaaactataaacaacaaatgagtgttatttggccaggcgtg

SEQ ID NO: 355 - DNA, 120 bp, synthetic construct
  source 1..120: mol_type = other DNA
gtttaaaaaatactaagtattcctaaaaaatatacactccactcacatgtggatacttcctaaaaacaggcagtgcgtgagcactagtgaggggcattgtgactgcactgaacacttaca

SEQ ID NO: 356 - DNA, 120 bp, synthetic construct
  source 1..120: mol_type = other DNA
ccgcgttggggattctctcctccttctcctaacctgtgtcgggtccttcttcctggatactcaccgggcggccccagttctcactcccattaggtgacaggtttttagagaagccaatca

SEQ ID NO: 357 - DNA, 120 bp, synthetic construct
  source 1..120: mol_type = other DNA
ttccagatcctgtaccagagagtgattctgagggtccgtcctgctctctgggacaattaagggatgaagtctctgagggagtggaggggaagacaatccctggaagactgatcaggggtt

SEQ ID NO: 358 - DNA, 120 bp, synthetic construct
  source 1..120: mol_type = other DNA
cttctcttttgtaaagcacctgtgacaatgaaggacagatttattaccttgatgattgtagtgatggggacctgatcccagtaatcacaggtcaggagaaggtccctggctaaggacaga

SEQ ID NO: 359 - DNA, 120 bp, synthetic construct
  source 1..120: mol_type = other DNA
aaatattttgtggttgctaaacccatgtactactgcataaactcagccatggacagcacattaaagaaacaaaagtttaaactctctaggaagccagctggtggacatcctctctaaagc

SEQ ID NO: 360 - DNA, 120 bp, synthetic construct
  source 1..120: mol_type = other DNA
ttccttccccaatcacctttcctgttccagaaaaggggctgggatgtctccgtctctgtctcaaatttgtggtccactgagctataacttacttctgtattaaaattagaatctgagtat

SEQ ID NO: 361 - DNA, 120 bp, synthetic construct
  source 1..120: mol_type = other DNA
accaaactcatggatttgtaaagcagagtctaatttagattcatatgtggttggataattggagccataagccttgggttatctttcctcaagagacaaatatggttgtgtgctgcagtg

SEQ ID NO: 362 - DNA, 120 bp, synthetic construct
  source 1..120: mol_type = other DNA
ggggaaatagtgggaagtgatgggattctggatgaattcacagcacttgctaatggatttatctgtggtgtgagaaagaagaatcaaggacacccacagtattggactgagtgagcagaa

SEQ ID NO: 363 - DNA, 120 bp, synthetic construct
  source 1..120: mol_type = other DNA
cattcatgaaagaccacatggagatgccatttagaaaaattacagcacatgagtctcctgagacatagagtacatgtagacagctcacagtgtctttttcctttttttcagagacagggt

SEQ ID NO: 364 - DNA, 120 bp, synthetic construct
  source 1..120: mol_type = other DNA
atggttagaatctttaaagaaacaacatctttttaaagtggccttatgtggaccaaagcagagatgagctcaaatgtcaggtgggaaaatgcttgactaaatgcagctctagacccaagg

SEQ ID NO: 365 - DNA, 120 bp, synthetic construct
  source 1..120: mol_type = other DNA
ggaccttctcccttcagcagtgcatagtgaggccatttctgtgtaaaaagatagaatctccttggattcctgatgtttacatttactactcacttctttgactttgtagatgccaacttc

SEQ ID NO: 366 - DNA, 120 bp, synthetic construct
  source 1..120: mol_type = other DNA
taaaactcttaaaagaaaatactgagggaaagtcttatggtcattagaattggtagtggtttcttggctggtgaccaaaagtacaagcaataaaaggaaaatgacaaataagacttcatc

SEQ ID NO: 367 - DNA, 120 bp, synthetic construct
  source 1..120: mol_type = other DNA
tgtgttttaccacaattttaaaaatatatatcaacaccaaatccaatcacttctcactcctctgccacctccaccccagaaccatcctcactaggatagaaaaccggaagggccttccag

SEQ ID NO: 368 - DNA, 120 bp, synthetic construct
  source 1..120: mol_type = other DNA
agtccacccactcacatcccttccagaaaaactctcacagacactggtttaatacttacaatttgagtagtctataatttatttttttgagattgggcttgctggctggagtgcagtgtt

SEQ ID NO: 369 - DNA, 120 bp, synthetic construct
  source 1..120: mol_type = other DNA
tatatacatagaaaacaaaagaatggaagtcagcatcactgcagaagatagctccagggatgaccattcacactgcagtccaggaagtttcaataatatgatagcagtggttctttggag

SEQ ID NO: 370 - DNA, 120 bp, synthetic construct
  source 1..120: mol_type = other DNA
taagcgtgtaccagaatcaccctcagggcttactaaaacacagattattgagccctacttccacagtccctgactcataggtctggagtagtcctagagaatttgtatttttagtaagat

SEQ ID NO: 371 - DNA, 120 bp, synthetic construct
  source 1..120: mol_type = other DNA
taatatatataattaccatcacacctgagagagtgagatggattcttttcttccacagatgaaaatctgagtccctgagaacctagggttttggtatgggttcactgaaaatgttggcct

SEQ ID NO: 372 - DNA, 120 bp, synthetic construct
  source 1..120: mol_type = other DNA
cacttctttctctatcgacttgcctcttatgaatatttcacaaaaatgggctcataagttacgtagcctcctgtgactggcttccttcacttgtcttgttttcaagattcagcaatgttt

SEQ ID NO: 373 - DNA, 120 bp, synthetic construct
  source 1..120: mol_type = other DNA
ttcctgaaacatcttcagccaaaaagaaataagaaaagaaaattcaatctttttatctgggctctctgtgtgttttggggcatgccctcaacactctgctgggcagtttacaatactgct

SEQ ID NO: 374 - DNA, 120 bp, synthetic construct
  source 1..120: mol_type = other DNA
taagatatggtgccacaaagctctgctcctgagttccagttgatttttctggacttgctaggttgcaataaacctttgatgatttttcagggttccaatgcagttgattctttatcaacc

SEQ ID NO: 375 - DNA, 120 bp, synthetic construct
  source 1..120: mol_type = other DNA
ggtactgtgctctatggagttgagcctcagataaaagactcaaacttccttggacttcatagaagtcaaaggtgggggtgggaagataaataaagaaattatagcacagcatgttatgta

SEQ ID NO: 376 - DNA, 120 bp, synthetic construct
  source 1..120: mol_type = other DNA
aagagcatggacctttagatgtggagattattttgtattatttgagtggccccaatctgattgcatgatttctttaacctggagatgactggagaaatatgggtcagatggagtgctgaa

SEQ ID NO: 377 - DNA, 120 bp, synthetic construct
  source 1..120: mol_type = other DNA
gaaatggaagactgagactacaactctttgccatccgtaatgaatgaacagatctagccactgaacagcaatgacaattttcatcaccaaagggaaataaccagtattaaactcttcccc

SEQ ID NO: 378 - DNA, 120 bp, synthetic construct
  source 1..120: mol_type = other DNA
cacggtgacagggatctctccacaggtagagatgacaccattcctcctgtaacatggtccaatctcacgcttgttctgctttacaagaaagttgacccacgctggtgtcccctgaagaaa

SEQ ID NO: 379 - DNA, 120 bp, synthetic construct
  source 1..120: mol_type = other DNA
gttacaccgtctcttcttcaccattaaatactgtgccaaacagcaccttcatacatttccatcctcttccaggagagaatcaaaacaacaatggacacattgatgcatgcaaaaatactt

SEQ ID NO: 380 - DNA, 120 bp, synthetic construct
  source 1..120: mol_type = other DNA
ccagtccagatgggagcagccagaagggcccaagagggacatttccaagaaagtaaaattaatagaaagttcaaagtctctaatttcttaacagagtcacagaaatggaacagatatcaa

SEQ ID NO: 381 - DNA, 120 bp, synthetic construct
  source 1..120: mol_type = other DNA
gaggggtaagaaaggaggttaggcagaaaaaaggatttgtttgtttccacctctgccctttgttttttcaacatctctttcatcttttcacagtgcttctaggtttccaggcgaaaacca

SEQ ID NO: 382 - DNA, 120 bp, synthetic construct
  source 1..120: mol_type = other DNA
cctagaaaggcagaaatagagaagagaggactctccctagaaaggcagagaagactctcatttttctcagaaagtcctgcacaaatatttactctttccattatgtgcaattgtaacttc

SEQ ID NO: 383 - DNA, 120 bp, synthetic construct
  source 1..120: mol_type = other DNA
gatttctttgtgctatgtcaacgcatctagacagagctctcattctcccttgaacctcaactctatccgttcccagacacttgaaataaaacacagaccagaaatgtctatttaaaagct

SEQ ID NO: 384 - DNA, 120 bp, synthetic construct
  source 1..120: mol_type = other DNA
gtgctgctttttactccctgacgacttctccctcctcagtcagtcccaaatcagattcaccctttctccgagggaagatgatgtctgcacttttttctccctcccatggcacttttccca

SEQ ID NO: 385 - DNA, 120 bp, synthetic construct
  source 1..120: mol_type = other DNA
aaacaacctgactgtgcgggaaatcatcctgaccatctctcactccaaactcatcaggcagtgcttattctttcaaaggtattttgtgactgtgcaagcaaatataaatgtatatgtgta

SEQ ID NO: 386 - DNA, 120 bp, synthetic construct
  source 1..120: mol_type = other DNA
gtaagaatataggggcatacagcaaattcaagacacacattcaccaacagttcttgctttgctcagtacagtattgactgaaacacatgcataacagaactgtggaaaatcagggctatc

SEQ ID NO: 387 - DNA, 120 bp, synthetic construct
  source 1..120: mol_type = other DNA
actgatacgtgcaccaacatggattgatcacataggtattacaacaagcgcaaaaagccagatacaagggaggccatatgggatgagtagatttgtatgaagttttaaaacaggaagaac

SEQ ID NO: 388 - DNA, 120 bp, synthetic construct
  source 1..120: mol_type = other DNA
cgggcgcctgtagtcccagctactcaggaggctgagacaggagaatggcgtgaacccaggaggtggagcttgcagtgagccgagatcgcgccactgcactccagcctggatgacagagcg

SEQ ID NO: 389 - DNA, 120 bp, synthetic construct
  source 1..120: mol_type = other DNA
actcatttttggtaaagaatatacaatggagaaagaacaaaagcaacaatggagaataaatggagctgggaaaatgctaccagatgcagaagaataccactagaaccctgtctcccacca

SEQ ID NO: 390 - DNA, 120 bp, synthetic construct
  source 1..120: mol_type = other DNA
aggttaatcttagggaggtagagagagtagaatgacagttcccagaaactgggaagaatgtaggggtgggaaaatatagagatgcaggttaatggatgcaaatgtccaattatatagaga

SEQ ID NO: 391 - DNA, 120 bp, synthetic construct
  source 1..120: mol_type = other DNA
cagacttagggaggaggcctcaccttccgggaagaactaaactttggttctctttcttgttttttctattgcaagaccaaaattttagaaaaccaagagaaagatttcagccaaagggtt

SEQ ID NO: 392 - DNA, 120 bp, synthetic construct
  source 1..120: mol_type = other DNA
tcataaccaggtgaccaaaattaataccactggtaatgggacaactgccattaaatatctcctggtaaaatgcactgaaaagggcacaatgtcagctctctggtattcctacccaaaata

SEQ ID NO: 393 - DNA, 120 bp, synthetic construct
  source 1..120: mol_type = other DNA
ggagtaaatgtcatcactttgctttttttcctcccaattgaatcacttgttcctccctgcatttcagtaatgttgctagcatggaggtgtttgtccatgattcacagatgattcaaagag

SEQ ID NO: 394 - DNA, 120 bp, synthetic construct
  source 1..120: mol_type = other DNA
tggatttctgcctcttcctggttcctggccaagcaaatcttcactgctttgctagcccatctataaattcaaccagacttttcaaatatgtattttcctcccatttttctagttgtactc

SEQ ID NO: 395 - DNA, 120 bp, synthetic construct
  source 1..120: mol_type = other DNA
caaatcacattggacttataatgtgtgggatgtgtctttattaaaatggaggtaatcctaggtatgtggtcttttttacatgaaccgtactgtcactggctcactagctgtcacttcacc

SEQ ID NO: 396 - DNA, 120 bp, synthetic construct
  source 1..120: mol_type = other DNA
tcttccaggagagaagacaaaaattatgtcaccatcaaggaaagtatccaaaatctctggcttaaacctgggcgtctccagctctgggacaggtggctgggcagggaagacaaactaagc

SEQ ID NO: 397 - DNA, 120 bp, synthetic construct
  source 1..120: mol_type = other DNA
tgtgtctgaatttcttggcactgtgtcttttctcacttattcttctgcaaggaaggaattatatcactggttggatgagacaattggctcagatgggttcattgagcactcacccactgg

SEQ ID NO: 398 - DNA, 120 bp, synthetic construct
  source 1..120: mol_type = other DNA
attcccctcttgtctcttagtgctagggttatgcatgactcgtgcttgaattacagtgtgtacacagctgaaagtcttaattattagaatataagaggcccaaactactgctgttacaga

SEQ ID NO: 399 - DNA, 120 bp, synthetic construct
  source 1..120: mol_type = other DNA
atggcaaaagggacattactcatgtaatgaagattaaggaccttaaaatagggagattctgctggaatctctgtgtgggcccaatcaaatcacaagagctattaaaagcagagagcctgc

SEQ ID NO: 400 - DNA, 120 bp, synthetic construct
  source 1..120: mol_type = other DNA
gaggacacagatactatcattttatcatatgctgtgatgtaatatcagtggaccactcatcgcatatgtgcttgctttccacgcttggagtctaccctgtagtacatcaattccaacaat

SEQ ID NO: 401 - DNA, 120 bp, synthetic construct
  source 1..120: mol_type = other DNA
ctacatcactgaggctcagagttgctttgtggtccagtggctttcccagcattttctatctcatgaatttctctcacaagtatttcccctaataaatccttacatgtttactactgtatt

SEQ ID NO: 402 - DNA, 120 bp, synthetic construct
  source 1..120: mol_type = other DNA
taagtggaataaacccactgctgggatgtatccacatagtctagaaaaaaacatgcccaactctcaacaaggtagacatgtcttagttgccctggaacatgtagagaatggaataacaag

SEQ ID NO: 403 - DNA, 120 bp, synthetic construct
  source 1..120: mol_type = other DNA
cactttattgccagccttttctctgcatttatatgtgaacagatttttctctggtgtgacttgatccattgaatgagcattgctctcactagagggaggaaagcatctttggattgagtt

SEQ ID NO: 404 - DNA, 120 bp, synthetic construct
  source 1..120: mol_type = other DNA
gcagctgtggatttggtgactgcatttctttccactccaattagaaagtggatatggagtgattcacattcatgtgggatcctcaaaacattgatttatcatttgtctcagggctattgt

SEQ ID NO: 405 - DNA, 120 bp, synthetic construct
  source 1..120: mol_type = other DNA
aaaagaaaaaaatagtgggcattgaagtaaagttttatgggtgaacaatggccaagtgtttaggggaatgcaggtgtgtcccctccaaggtaacagacaaactgtttcatcttgcatcct

SEQ ID NO: 406 - DNA, 120 bp, synthetic construct
  source 1..120: mol_type = other DNA
tgtttgaatcagagatgtctctagagtgctgtgttctcaataggaagaacatgtgtgtccaggaatcaaaagatggaagcaggtttggctccacgtccaatcccttagattcacccaatg

SEQ ID NO: 407 - DNA, 120 bp, synthetic construct
  source 1..120: mol_type = other DNA
aacctacctcccttgccatatcgcctgacaggtgtgtcccctaataaaatgctataactttaatcccatgatggaacttgctttttggagcatttggactataaaatcattttcatctgc

SEQ ID NO: 408 - DNA, 120 bp, synthetic construct
  source 1..120: mol_type = other DNA
tttggaaatcatattatcattatctagtatggttaaagtccatacaatgtatcatgcaaccaacccattcctaatcatccactctgggagctttggggctttcttgcctatgtgcacagg

SEQ ID NO: 409 - DNA, 120 bp, synthetic construct
  source 1..120: mol_type = other DNA
caggaacacacccttaagacacagatcgctcatgctattgtttgtggcttaagaatgcctttaagcagttttccgccctgggcaggacaggtgttccttgccctcattcccgtaaacctg

SEQ ID NO: 410 - DNA, 120 bp, synthetic construct
  source 1..120: mol_type = other DNA
catagctgccattaaattattcattgtgactggttgtcctgctttcctcaggttttcttctgccatctgtgacagcttcttcatctgtccccaggtaggtggctgtgtttgacaggtgtt

SEQ ID NO: 411 - DNA, 120 bp, synthetic construct
  source 1..120: mol_type = other DNA
gaaagtgtctagcattaaatattgcagtagcaactaagcaatcagccatttgattcccttcagtcaaaggtcctggaagaggtgtatgagccctaatatgagtgatgtaaaaaggatgca

SEQ ID NO: 412 - DNA, 120 bp, synthetic construct
  source 1..120: mol_type = other DNA
ctacgtatggttactgtctgtggcacaatggtagtgtcatttactaaggtccccaagtaggagtagggagtagtggtctgaattttgtcaggagctataattaaatcagcatgagaaatc

SEQ ID NO: 413 - DNA, 120 bp, synthetic construct
  source 1..120: mol_type = other DNA
tacttcagcagctttaccaactccaactatgttaaattgagcgggttgaattggccacatggacggccagtgctgtagagaaatgattgaaatgtctgctcctgtatctaccaaaccttt

SEQ ID NO: 414 - DNA, 120 bp, synthetic construct
  source 1..120: mol_type = other DNA
ctgtcctctttctttgcaactgaagactctcttcttatctccctgatgaaaccaaatcccatcggtgtgttctaaatcacagtcattctttttttgcagcacttatcatagccacaatgt

SEQ ID NO: 415 - DNA, 120 bp, synthetic construct
  source 1..120: mol_type = other DNA
tactttttgcccagtgtcctccagaaaagaaagatgtggggggtcatcttcatcaaaataataaggagggggtgcagaagggtagggatgaatctctccttcctttgctgctttagcttt

SEQ ID NO: 416 - DNA, 120 bp, synthetic construct
  source 1..120: mol_type = other DNA
ctgggtagcagcccagggtagctttacaggtttgtgttttacaccagtgctgggcaccctggtagatacttgattataattccttaaacagagttttccaaattaaaatatacctgtttt

SEQ ID NO: 417 - DNA, 120 bp, synthetic construct
  source 1..120: mol_type = other DNA
caggctacagcatcaagccaaaattattggcatcatgctaagctaggtgtgtttactgaagtatgagattcacatttttgtaaatgaaaagcaatttgattaggcatttttttctgcaca

SEQ ID NO: 418 - DNA, 120 bp, synthetic construct
  source 1..120: mol_type = other DNA
attttgcttttaacatatattcaaaacatttgatactgttcccttccagaggtgcatcttaattccctctcctgagtgtggcttggacttaatgaggcacttctgatatggcctggttct

SEQ ID NO: 419 - DNA, 120 bp, synthetic construct
  source 1..120: mol_type = other DNA
tatgaccattcacaatgatcactttacttgaacttcaatttccaactgtgtccgaagtaaacacaaaaggaagatccaacccttgctaggctgattctattatgccctcaacaaccagct

SEQ ID NO: 420 - DNA, 120 bp, synthetic construct
  source 1..120: mol_type = other DNA
gattccatccacattttgcccagatttctgatcaaggaactataagcagataaatgggtgttgtttcgccaggcgtggtagtgcacgaatgaattgatgaattgatatgcacactagtta

SEQ ID NO: 421 - DNA, 120 bp, synthetic construct
  source 1..120: mol_type = other DNA
aatttaaaatatgacaagcgggagtcacaggtacactgcaaaagtgaaacttagaagctttgtgagtcctgttgtaacgcttttgggcacatttatacatcatggggccaaagtcacatt

SEQ ID NO: 422 - DNA, 120 bp, synthetic construct
  source 1..120: mol_type = other DNA
cctccgcagtttctcttcttctcacaacctgcgacgggtccttcttccttgatactcacgaagcggacacagttctcattcccactaggtgtcgggtttctagagaagccaatcggtgcc

SEQ ID NO: 423 - DNA, 120 bp, synthetic construct
  source 1..120: mol_type = other DNA
tgacacaattaagggatgaaatctgtgaggaaatgaagggaagacaatccctggaatactgatgagtggttccctttgacactggcagcagccttgggccccgtgacttttcctctcagg

SEQ ID NO: 424 - DNA, 120 bp, synthetic construct
  source 1..120: mol_type = other DNA
tacccagcctgggccgtgtgtgccagcacttactcttttgtaaagcacctgttacaatgagggacagatttatcaccttgatgactgtggtgatgggacctgatcccagcagtcacaagt

SEQ ID NO: 425 - DNA, 120 bp, synthetic construct
  source 1..120: mol_type = other DNA
ccctgagtttggtgaaattccaatataactgtctgggagatcatcagaaactaatagtctttgaggatgcaggtgtaatgaagagagattggagagattaaagctctatgcagtggactt

SEQ ID NO: 426 - DNA, 120 bp, synthetic construct
  source 1..120: mol_type = other DNA
tttgaatttgatgttttgagcatgcgatgggctgccaaagtgtcatccattactgggacagatatgaatttgttcatgaatattttttctatagtgtgagacagctgccttgtgtgggac

SEQ ID NO: 427 - DNA, 120 bp, synthetic construct
  source 1..120: mol_type = other DNA
atgactgcttttgcatttagaaagcatcattaaggtgaaaatagaaaaatttctggcgttgtggtacatatgttctagatgctagcttgtccaacccatagctcgcaggctgaatgtggc

SEQ ID NO: 428 - DNA, 120 bp, synthetic construct
  source 1..120: mol_type = other DNA
tggggagattaataaggcctcaggcacatggcaaacagccatgcatttggtgagtgcattctttcccattccatttagaaaatggatatggaatgattcacattcacatgggatttataa

SEQ ID NO: 429 - DNA, 120 bp, synthetic construct
  source 1..120: mol_type = other DNA
taggttccttttaggggataggattggacaacagcctagggtggcttcataggttctgtttcttatgccaggaggggatatccaggtagttagttacttgatcataaaactttatttatt

SEQ ID NO: 430 - DNA, 120 bp, synthetic construct
  source 1..120: mol_type = other DNA
cagccttggctacaaataggtcatttgatccttggctagttggcgactctctacattttctgatacacagtgttcaatctgataggcaaggcaatagtatcttgcaaagaatttgagaat

SEQ ID NO: 431 - DNA, 120 bp, synthetic construct
  source 1..120: mol_type = other DNA
cagactgggcggctgctgggtggaggggctcctcacctctcagacggggcggccggggagagacgctccttacctcccagacggggtcgcggccgggcagaggcgctcctcacatcccag

SEQ ID NO: 432 - DNA, 120 bp, synthetic construct
  source 1..120: mol_type = other DNA
tttcctgcctagttgtgagacactatctccacacacatttaccctgttcagatgccatgtcaactctcactcttttgtaaagcacctgtgaaattgaaggacaaatttatcaccttgatt

SEQ ID NO: 433 - DNA, 120 bp, synthetic construct
  source 1..120: mol_type = other DNA
ctaggctctagagagtctttgatttggaatttttcaatgtgtggtgggctgttcagtgtcaccacttaccatgactgacttgaatttgttcatgactattttctttctaagactgccttg

SEQ ID NO: 434 - DNA, 120 bp, synthetic construct
  source 1..120: mol_type = other DNA
gcctaatggccaccatttgggtcatggtgaccaatcttttatgaatagagagatactgccctctcttgggaatgaatgaattgttgctttattattttccaagagagctagttgttaaaa

SEQ ID NO: 435 - DNA, 120 bp, synthetic construct
  source 1..120: mol_type = other DNA
cagctttgctgacaacactcaatcttaccaggttccaaaaacaagaatggtctcagggacatacagcttcactcttttaggcatccagtataattgacctaagtgacaatatcttctctt

SEQ ID NO: 436 - DNA, 120 bp, synthetic construct
  source 1..120: mol_type = other DNA
atcattcagaattttcatcacattaatggcttttctggccaattagaagatagcacacggatgcgctgaaaaacaaaaactgttaacgcgttcagactctccaaacagctgccagatcac

SEQ ID NO: 437 - DNA, 120 bp, synthetic construct
  source 1..120: mol_type = other DNA
cattctggcttgccaggtattatgatcaaagccttcccactagagaatctgtcacatctccatctgctgcctctgtctgttttcttgaccaacagtgaaaaaagagattatgagaaataa

SEQ ID NO: 438 - DNA, 120 bp, synthetic construct
  source 1..120: mol_type = other DNA
tccagataaaaaggaaaacatacaattctattcacagataacatgaccctgtctgtagaattcacaagcagataaaaactggctagcactaataaatgaatccagaagggcccataggat

SEQ ID NO: 439 - DNA, 120 bp, synthetic construct
  source 1..120: mol_type = other DNA
aattcaatgaaggaaggagagctttcccaacaaacggtgctggagcaactggacaaccacagtggaaaaaaaataagctgagcccaaacctcacgctttatacaaaaaaaaaaaaaaaaa

SEQ ID NO: 440 - DNA, 120 bp, synthetic construct
  source 1..120: mol_type = other DNA
attacttccataaactggaaataatgcaattgtctttcagtgggtgaaggagatctgctggttgaactcataactgagtctacacaagtgccctttctcaagactactatcctgcttctc

SEQ ID NO: 441 - DNA, 120 bp, synthetic construct
  source 1..120: mol_type = other DNA
acaacaaacctgaatataaacatgaaagaatatgtctataaacatatctctggctagataacctatgaaagaattccctaccccagctcccttactggttaccctgtgaacacaggcagg

SEQ ID NO: 442 - DNA, 120 bp, synthetic construct
  source 1..120: mol_type = other DNA
aatttcttggtgctgtgtcaaagcatcaagacagacctctccttctctcctgaacctcacactctatcccttcccagacacttgaaataaaacacagaccagaaatgtttatttaagagt

SEQ ID NO: 443 - DNA, 120 bp, synthetic construct
  source 1..120: mol_type = other DNA
gttcatgcaccctggtctttgatgctgtgttgggatgtttttctgactgttatgtggggtatctgttttctttcatcatattacatctctttccccactcccaagtctgtcctctaaatc

SEQ ID NO: 444 - DNA, 120 bp, synthetic construct
  source 1..120: mol_type = other DNA
ccagggtagaggggttgaggcccttggaacctgtgttgcaagatctcatggtaagtgaggaattcgacgttgttttctctttttccagcccattagcttaagtccacctgtactgagaat

SEQ ID NO: 445 - DNA, 120 bp, synthetic construct
  source 1..120: mol_type = other DNA
gatgtgtccaaggctctatagctagttggtggaaaggcctggagggttcatattcaggtccacctaacttgaaaacttatattgaccttacttaagtactgattccccctttataatcca

SEQ ID NO: 446 - DNA, 120 bp, synthetic construct
  source 1..120: mol_type = other DNA
agtgcttctgaagcacctttaaatgaggccaaagacctcatgttcatgattagctgacttgttcccactcagtggaaaaaaaacccagaacttttgcaaaattttaggagagagggattt

SEQ ID NO: 447 - DNA, 120 bp, synthetic construct
  source 1..120: mol_type = other DNA
gtgtgggaagagcagtgagggaaacaaccctgagccttttcactaatccacagatttttcagcatttctttatctcattagagcccattaagttcctgaattcactcctttcttgtagtt

SEQ ID NO: 448 - DNA, 120 bp, synthetic construct
  source 1..120: mol_type = other DNA
tctgtagacacaactaggcacaaggtagccagatgataaaaatcaaacaagaaacagtatcacaataaaagaagtacaatgtgatagttgagtgcctagcaggtcccagtaatcaagttc

SEQ ID NO: 449 - DNA, 120 bp, synthetic construct
  source 1..120: mol_type = other DNA
tgagtaatggtcccgaaagaggtccagtcttagtccttggaacctgtgaacaggttgcattacatggtaaaagggactttactcatgtaatgatgattaaggaccttaaaatagggagat

SEQ ID NO: 450 - DNA, 120 bp, synthetic construct
  source 1..120: mol_type = other DNA
cacagactctatcactttatcatatgctgtgaggtaatatcagtgactactcattgcatatgtgcctgcattccaggcttgaagtccaccctttagcacatcaattccaacaatccttcg

SEQ ID NO: 451 - DNA, 120 bp, synthetic construct
  source 1..120: mol_type = other DNA
tgtttacctcactggggttcagagttgctttgtggtctgatgacattcccagcattttccgtctgtgtcctgaatttctctcataactatttcctccaataaatccttgcacattgaata

SEQ ID NO: 452 - DNA, 120 bp, synthetic construct
  source 1..120: mol_type = other DNA
tttgagggtgtttgatcaaggaaccagaatttcaatctggaagaataaaaatcctttggcttggaggcactttctcaaggcatgggtttatcaaacaccccaggactttgataagcgggg

SEQ ID NO: 453 - DNA, 120 bp, synthetic construct
  source 1..120: mol_type = other DNA
gaggaaccctgatgaggactaaagaatgaatgagattactccaggtctggccaagcaggaattataattgcagcttttatgttgtctggatatcactgcagagcagaataataaagcctc

SEQ ID NO: 454 - DNA, 120 bp, synthetic construct
  source 1..120: mol_type = other DNA
actagacatactggatattctataggatattaaatcagctcatttcactgacaacttcatgttgactgcggtgaatgagcagcaggtagaaagtgcactggagtcattggcaaaacacac

SEQ ID NO: 455 - DNA, 120 bp, synthetic construct
  source 1..120: mol_type = other DNA
agttctgtgttcgcaagaggaagaacatgtgggtccagaaatcaaacggtggaagcaagtatggctccatgtctaatgttttagattcacgtaatggggtatttgacatgttttatctca

SEQ ID NO: 456 - DNA, 120 bp, synthetic construct
  source 1..120: mol_type = other DNA
ggtgtgtcccctaataaaatgctgtaactttaatcctatgatggcacttgctttttggagcatttggactacaaaatcattttcgtctgcacaccagtgacctcttacttattccaacgt

SEQ ID NO: 457 - DNA, 120 bp, synthetic construct
  source 1..120: mol_type = other DNA
agttgacacaatcaccttggaaatcatattatcattatctagtatggttaaagtccatacaacatatcgtccaaccctcccactcctaaccatacactctagcgggctttcttgcctatg

SEQ ID NO: 458 - DNA, 120 bp, synthetic construct
  source 1..120: mol_type = other DNA
ttcagaagcacataatagcagtgctatttagaactgtagtagtgtccaaatcacttctaccacatctcatgcaataccacacccaaaaatgttaagtttacaatagaatgcccctgagcc

SEQ ID NO: 459 - DNA, 120 bp, synthetic construct
  source 1..120: mol_type = other DNA
aagacagctgactgagggatatgaatatcaatactggagcgtggggatttgtcacaactgcagtgacttcatattaccctcagttatgctttctttgttgagaatagggtgatttactat

SEQ ID NO: 460 - DNA, 120 bp, synthetic construct
  source 1..120: mol_type = other DNA
gatactgttgtttctcctttctctgtctcaaactgttttctctgcagcacccaaggctctgtcatgtctcaaacatttaatcattaatttaaaaagagaagcttatcacagaattagaaa

SEQ ID NO: 461 - DNA, 120 bp, synthetic construct
  source 1..120: mol_type = other DNA
aatagtttgaattttgcttttaacatatatgcaaatcctttaatactgctcccttccagaggtgcagctgaattccctctcttgagtgtggcttggacttaatgatgcacttctgatatg

SEQ ID NO: 462 - DNA, 120 bp, synthetic construct
  source 1..120: mol_type = other DNA
accttgtgagaggcccttagcaagaagcactcagggaaacttctcctggattcctgacaactggaaactgtgggagatgatcaatatttgttattttgaaatggtacattttacataatt

SEQ ID NO: 463 - DNA, 120 bp, synthetic construct
  source 1..120: mol_type = other DNA
tataagcctgaaggaggattcaaaatgaaaacacagctttgggaagcccggaacagagattccatccacatcatgcccagatttctgactaaggtactataaacagataaatgggtgttg

SEQ ID NO: 464 - DNA, 120 bp, synthetic construct
  source 1..120: mol_type = other DNA
ggaagggctggagaagcaggaggttaggaaaaggagcagagggaaggaattggaaagcagtagaattcttaggtttaaacacattgttttatagatttttattacatccatctacagagc

SEQ ID NO: 465 - DNA, 120 bp, synthetic construct
  source 1..120: mol_type = other DNA
gtagttaataaacaaagagaaaacttgtctctatgctgtctcatgtactcaggcacaacttttccggatttaaagaaaaaaaaaacaaaaacctgtctctacgcctccattcccagggcg

SEQ ID NO: 466 - DNA, 120 bp, synthetic construct
  source 1..120: mol_type = other DNA
cagggtctaacaccctccagataatgtatggctgcgacttggggctggaagggcgcctcctccgcgggtatgaacagcacgccaacgatggcaaggattacatagcccggaactaggacc

SEQ ID NO: 467 - DNA, 120 bp, synthetic construct
  source 1..120: mol_type = other DNA
gatcctgtacaagagagtgactctgagggtctgccctgctctctgatacaattaagggatgaaatctctgaggaaatgaagggaagacaatccctggaatactgatgaggggttcccttt

SEQ ID NO: 468 - DNA, 120 bp, synthetic construct
  source 1..120: mol_type = other DNA
tagtggacgcagctgtgctatggggtttctttgaattggatgtattgagcatgtgatgggctgtttaaagtgtcacccctcactgtgacggatatgaatttgttcatgaatattttattt

SEQ ID NO: 469 - DNA, 120 bp, synthetic construct
  source 1..120: mol_type = other DNA
ttccgtctccaataattaatcattcctgctccatagaggtgaggctgagatgtctccatctctgtctcaactttatgtgcactgagctgtaacttcttacttccctattaaaattagaat

SEQ ID NO: 470 - DNA, 120 bp, synthetic construct
  source 1..120: mol_type = other DNA
aacaaaaatttgagttcaaagatagaagaaaataaaaggcacaaggaaaagtatgtgtcagcttagctatcccagtccatagtttctgagaacaaccagaggtggggataagcaaggacc

SEQ ID NO: 471 - DNA, 120 bp, synthetic construct
  source 1..120: mol_type = other DNA
cccagggctctttcctcattgtattttccatcttttctgcaatctttttaaaggaaccagattctgaaatttgccaagaggcagggtcccatagtttctcatcataggtaactttctgtt

SEQ ID NO: 472 - DNA, 120 bp, synthetic construct
  source 1..120: mol_type = other DNA
atgctttaggaaccctccttttcagtgacctgaaaaagatagagggcacacttactgtgataacccagagtatcagtcaagggggcttgaccttcaaggagttatgggaaagcttaataa

SEQ ID NO: 473 - DNA, 120 bp, synthetic construct
  source 1..120: mol_type = other DNA
aggtgaggggcgcctctgcccggccgcccctactgggaagtgaggagcccctctgcccggccagccgccccgtccgggagggaggtggggggggtcagccccccgcctggccagccgctc

SEQ ID NO: 474 - DNA, 120 bp, synthetic construct
  source 1..120: mol_type = other DNA
aaaaaaaaaagaattgaggagcaagcttcacattcagaatccagtggctgaggaagtatccatatccctaagagaaagaaccttgggacaccatgactgttacatgctgggacaattcca

SEQ ID NO: 475 - DNA, 120 bp, synthetic construct
  source 1..120: mol_type = other DNA
tgttacacagcaatggataactaatgaagccctcttacatttccattattctctagaggttaactacatctgttttattttctcctattttgataatattagccacacataggtttctag

SEQ ID NO: 476 - DNA, 120 bp, synthetic construct
  source 1..120: mol_type = other DNA
aatgaatgaatgacagtctcccacaccacagataactcctacacataatgtgcatcatgggaaaataaaggcagtaggaacttgctgtacaggaagcttaaaaaccagcaaaacaaactg

SEQ ID NO: 477 - DNA, 120 bp, synthetic construct
  source 1..120: mol_type = other DNA
gatgccatgaaaacggccttggctacatataggtcattcgatccttggctcactggcatctctctagattttcaataatacaatgttcaatatgctatgcaaggtaatttcatcttgcaa

SEQ ID NO: 478 - DNA, 120 bp, synthetic construct
  source 1..120: mol_type = other DNA
ggtatatacccaaaggaatataaatcattctattataaagacatatgcatgtttacattcatggcagcactattcacaatagcaaagacatggaatcaacccaaatgcccatcaatgatg

SEQ ID NO: 479 - DNA, 120 bp, synthetic construct
  source 1..120: mol_type = other DNA
taatacaacttctaacttatagaatagtgccaacataacagtttgtgactctgggtgtagaacataaaactaactgcggcttccaccttctctctctctgaatctgggatcatgagctct

SEQ ID NO: 480 - DNA, 120 bp, synthetic construct
  source 1..120: mol_type = other DNA
atgtattttatgaccattcacaatgatcacgttacttgaacttcactttccaactgtgtcccaattaaacacaaaaggaagatccaacccttgctaggctgattctatgatggcctcaac

SEQ ID NO: 481 - DNA, 120 bp, synthetic construct
  source 1..120: mol_type = other DNA
tgtggtccttttccagcctgaaaaggctatgtttgagtgtggatttcaccacaatgaggcaagagaaagtaaaagtacttactaacagttaagcacagtagaattgctagtcctatatca

SEQ ID NO: 482 - DNA, 120 bp, synthetic construct
  source 1..120: mol_type = other DNA
tttaatacactcatatttcattcattaagtcaacaaaaattaacttagtccctacaatgaacgaggtatcccctcatatgctcaagtgcctgacactccagaagcttcacaagaccgagg

SEQ ID NO: 483 - DNA, 120 bp, synthetic construct
  source 1..120: mol_type = other DNA
agattcctgatcattcaggggttaccaagattctgctacccactgtagttaataaacaaagagcaaattggtctctattctgtctcatgcactcaggcacaacttttccggattaaaaac

SEQ ID NO: 484 - DNA, 120 bp, synthetic construct
  source 1..120: mol_type = other DNA
ggaccctgcgcggctactacaaccagagcgaggccggtgagtgaccccggccgggggcgcaggtcaggacccctcatcccccacggacgggccaggtcgcccacagtctccgggtccgag

SEQ ID NO: 485 - DNA, 120 bp, synthetic construct
  source 1..120: mol_type = other DNA
gtaccagagagtgactctgaggttccgccctgctctctgacacaattaagggataaaatctctgaaggagtgacgggaagacgatccctcgaatactgatgagtggttccctttgacacc

SEQ ID NO: 486 - DNA, 120 bp, synthetic construct
  source 1..120: mol_type = other DNA
ctatggggtttctttgcattggatgtattgagcatgcgatgggctgtttaaggtgtgacccctcactgtgatggatatgaatttgttcatgaatatttttttctatagtgtgagacagct

SEQ ID NO: 487 - DNA, 120 bp, synthetic construct
  source 1..120: mol_type = other DNA
cctgcatacaaatctccttgtggtatcaagagacaaattttcagacctgtccaggtcttgccttcctcccagggctttttccttaatggtattttcgatttttctccaatctttttaaag

SEQ ID NO: 488 - DNA, 120 bp, synthetic construct
  source 1..120: mol_type = other DNA
tgcttgatatctatgataagcatgtggaattgaggagcaagcttcagattcagaatccagtgactaaggacatatctatatccctaagagaaagaaccttgggacacgatgatggttata

SEQ ID NO: 489 - DNA, 120 bp, synthetic construct
  source 1..120: mol_type = other DNA
ccacagaatactaaatctcttcatttcattggcaatatcacataaattgggaaggatgaacaacagcaggaaagtacgctgaattccctggcaaaacatgtgcactacagaaggtgaaga

SEQ ID NO: 490 - DNA, 120 bp, synthetic construct
  source 1..120: mol_type = other DNA
tgagacgaaaacggtccatgtcggttgagcctcaattccatgttaacacccacagaaaacacccagtcctgatgtggccctgaataaccaaacaaattgaagacaaattgaagttagcca

SEQ ID NO: 491 - DNA, 120 bp, synthetic construct
  source 1..120: mol_type = other DNA
atgccgtagactttaagctcatcttggcatctgctccttggaggacttggactaaaaagcattgccatgtgcacaccaataactcttacttattccaacctgtaaaatccatctctttaa

SEQ ID NO: 492 - DNA, 120 bp, synthetic construct
  source 1..120: mol_type = other DNA
gttaaaaaaaaaaaaaaagcttttcaatagaaaaaagctaatggaatatagatataaagaaaaaatgttttttgtacagctttacaggtgtttgtggtcttttggattttttgtctgttt

SEQ ID NO: 493 - DNA, 120 bp, synthetic construct
  source 1..120: mol_type = other DNA
ccattcttggtacaagcacttgggaaatcaaattagccttatcttgtatgattaatgtccatacactgtataatcccaccatctgctcctgatcatacactctggggatatctttggcta

SEQ ID NO: 494 - DNA, 120 bp, synthetic construct
  source 1..120: mol_type = other DNA
ttgcaaggatccttagcaataactacatgagttaaaacaaagccacagccaattgtaaggagccatgtgacagagagtaccaggatgccatgaaaaaatagcctttgatagaaataggtc

SEQ ID NO: 495 - DNA, 120 bp, synthetic construct
  source 1..120: mol_type = other DNA
gcacgagccctggtgaagggcactttggctgcattgagcacttgcagatttgaggtgattacattctgtacgttacttaacatgcatactgtacatacttaacatgcatataaattcttt

SEQ ID NO: 496 - DNA, 120 bp, synthetic construct
  source 1..120: mol_type = other DNA
acaattagaccgcaattttgtgagtggccctgagccagaagaactttgagaaaactttcctggattcctgaccactagaaactgtgggacatgataaatatttgttgattttagttgcta

SEQ ID NO: 497 - DNA, 120 bp, synthetic construct
  source 1..120: mol_type = other DNA
tctatataagcttgggggagaatcccaatcttaagatgaggatacagctttgcgaaaccctgaacaaagaatctctgacactaggcctggatttctgatgaaggaaatgcagaaaaataa

SEQ ID NO: 498 - DNA, 120 bp, synthetic construct
  source 1..120: mol_type = other DNA
actaactaaataaatgataaataaaggcggtgcatgagcactggtgaagggcactttggctgcattgagcacttgcaaatttgaggtgattaaattctgtacaggctcctggttgcaata

SEQ ID NO: 499 - DNA, 120 bp, synthetic construct
  source 1..120: mol_type = other DNA
cactcaatgtgtatttgtgggtctgattccagcttttttgacctcggcctccgctcaggtcaggaccagaaatctctgttccggcctcagacactaaaactttctaaggaatagaagatt

SEQ ID NO: 500 - DNA, 120 bp, synthetic construct
  source 1..120: mol_type = other DNA
agttggcttgtatcctgcctagtcatgaggcaccatctctgtctatcaacacttactcttttgtaaagaacttgtgaaaatgaaggacaaatttatcaccttcattggagtcatgggaac

SEQ ID NO: 501 - DNA, 120 bp, synthetic construct
  source 1..120: mol_type = other DNA
ctctggagattctttgatttggaatttttcagggtgtggtgggctgttcagtgtcacaacttactatgactgatctgaatttgttcatgactattttttttctaagactgccttgtgagg

SEQ ID NO: 502 - DNA, 120 bp, synthetic construct
  source 1..120: mol_type = other DNA
tggaacaacctagcacatttgggacaattgggaaattatcatattttgcaatgggagaaaaacatgagctctggctggctagggacagaatgtaatgatataaatatttacccccgatac

SEQ ID NO: 503 - DNA, 120 bp, synthetic construct
  source 1..120: mol_type = other DNA
aaaaaagaagatttttatcttatgaatatctattattggagatatctctgagaaaaatttacccacttgaacaacaacaatagatccaatatgattttaaatgacaacaatataaatgta

SEQ ID NO: 504 - DNA, 120 bp, synthetic construct
  source 1..120: mol_type = other DNA
tattggcgtattatcagagtctcattcagtcattcaaaattagaacagttcaccatcctctcgtatgaatatgtctcccagaatgaagtcactcaggtttgcagacaccactcaacctta

SEQ ID NO: 505 - DNA, 120 bp, synthetic construct
  source 1..120: mol_type = other DNA
tttcaattttctatcaaagttttcttctgaggaggacatctccctgtgcattgttagccatttgaggctgtaaagtgtgttttcttgcgtaaagaaatgggactcagcagtccacattgg

SEQ ID NO: 506 - DNA, 120 bp, synthetic construct
  source 1..120: mol_type = other DNA
tatgtgaatgataaaaccccatcttcacaagaggagatgggttatgctgtttgttggattagtgaattaagccccgtgttcccccttaaagagaaataaaaagagcatagtaaagagccc

SEQ ID NO: 507 - DNA, 120 bp, synthetic construct
  source 1..120: mol_type = other DNA
aaatttttatacttgggctgagataattcaatcatgaatattctgtttactgggaaaaagacgggaataattagaagggcagccataatcatttgggagagacagcagcatcctcctggg

SEQ ID NO: 508 - DNA, 120 bp, synthetic construct
  source 1..120: mol_type = other DNA
aaagaggaagaagctgagtgtgagacagaaaggaaatgggatggcagagagagaatagaagaggaaaattagcaagagagactaaaagagacagagatcaaagagaaacacagaaggtaa

SEQ ID NO: 509 - DNA, 120 bp, synthetic construct
  source 1..120: mol_type = other DNA
cctcgggaggtgactaaactaacaccagccagtttcttatgaaaaggagaggagaataagaaggcgtcagagtataactgtttagatatcacagagtatcaaactaaagttagtaccaaa

SEQ ID NO: 510 - DNA, 120 bp, synthetic construct
  source 1..120: mol_type = other DNA
aggtgatattaaaaccccaattttcaaaagaggaggaaaagctaggcaagataggagccacttaaactaagaatggaaggtgagtgctccctgatgggagagaaataataaacaaaccca

SEQ ID NO: 511 - DNA, 120 bp, synthetic construct
  source 1..120: mol_type = other DNA
agaaatcttgaaggtataaattaaaaataaatatctcagaaaggaatcccgtgggacggttagcttttaggttagtcaccaactctaccccaagcccacccagaattactagaactcctg

SEQ ID NO: 512 - DNA, 120 bp, synthetic construct
  source 1..120: mol_type = other DNA
aaatggcttgggaaaacagaattacactggacataatattagcagagaaaggtgatatatgtgatatgctgggtggaaaatgtgacacttccattcacaacaatgctgccccaaatggaa

SEQ ID NO: 513 - DNA, 120 bp, synthetic construct
  source 1..120: mol_type = other DNA
tgctcagagtcttgagacagttgccatgtattatgggtggctgcaacaaaatgcagcaaaaaatgcagcaaaaagaccctaaagaacatacctgaagtcttaatacaactaccaataggt

SEQ ID NO: 514 - DNA, 120 bp, synthetic construct
  source 1..120: mol_type = other DNA
cttctgggatagaagaaatagacccttaaactctgttcccccataaaatttgaggttatttgccagtggtctgagatggctctgacctcatcttaaagcaagggaagacaattgaaataa

SEQ ID NO: 515 - DNA, 120 bp, synthetic construct
  source 1..120: mol_type = other DNA
atcccattggacagaacaccccaagactgctgggcatcctggctcaaagacgccccatcctgtcaccaggtcagagagatattctggagatacaagccagagcccagcatatcagggtga

SEQ ID NO: 516 - DNA, 120 bp, synthetic construct
  source 1..120: mol_type = other DNA
tcttccttctagaaatttgtgatgttcatagcaaaggtctgagttctggaggactgggatactgtccattcctgagtctccaggttgagagagaggaagagctacccataagagtaggaa

SEQ ID NO: 517 - DNA, 120 bp, synthetic construct
  source 1..120: mol_type = other DNA
atgggagtaagggaggatcagtgcatcttttccagaaacagtgccaggaaaacgacattcacatgcaaaaagaaatgaagttggactcctgacttacaccacatatacaagttaactcta

SEQ ID NO: 518 - DNA, 120 bp, synthetic construct
  source 1..120: mol_type = other DNA
caacaattaaacaacaaaaaagaaattgtcaccgcgtaccaaacaataatatagaattagaaagaggctggggtcctggtcagagagaaaaaaaccaaggcctgaggaagggccttcaga

SEQ ID NO: 519 - DNA, 120 bp, synthetic construct
  source 1..120: mol_type = other DNA
atgagaaaggaagctgaggaagtaggagggaacttggtgtccttagatcattggagtccacagtagctgggagggttgacagagaggaaagaaccctgggaacgggaggcgaagggataa

SEQ ID NO: 520 - DNA, 120 bp, synthetic construct
  source 1..120: mol_type = other DNA
ttacttagttttcccatccacattcactgattatttatttcgagcattatcatttattgagcacagcagggactggggtcttgtccccaccttagagggattatttacactgctaaaggt

SEQ ID NO: 521 - DNA, 120 bp, synthetic construct
  source 1..120: mol_type = other DNA
atggggatcaaatgcagagaatggagaaaggagggaaggatggggggacatttcgaggaaaggaagggagagggagaaaaggggagagaaaaggtgaaggtgagaataatatctgaaaga

SEQ ID NO: 522 - DNA, 120 bp, synthetic construct
  source 1..120: mol_type = other DNA
cagtaataccacttacataatatatattttaagtaggggaaaacatggaggattattccccaaaattttgacagggaccccagggactgggataacgttgtgactttcaccttctctgaa

SEQ ID NO: 523 - DNA, 120 bp, synthetic construct
  source 1..120: mol_type = other DNA
gtcgaggaaaatcttgttcctggagtactgatttcctttttcccagggccaaagtctaaaactcagaagcaagtctaaaaactcaggctgactttcagatctgaagaaatctcaagaata

SEQ ID NO: 524 - DNA, 120 bp, synthetic construct
  source 1..120: mol_type = other DNA
cccaaaggactataaatcatgctgctataaagacacatgcacacgtatgtttattgcggcactattcacaatagcaaagacttgaaaccaacccaaatgtccaacaatgatagactggat

SEQ ID NO: 525 - DNA, 120 bp, synthetic construct
  source 1..120: mol_type = other DNA
tgcatagctttaacctgtgggtagctgaagtattaaatcaatgaaatgtgtaacttctccaggtctcttatatgaaataaatttagggaactgatgggggaaagagtggcactgagggcc

SEQ ID NO: 526 - DNA, 120 bp, synthetic construct
  source 1..120: mol_type = other DNA
tagactccatatcttgcacttcggctggtttactaaatccatcttaataaaacacaaaaacaaagaaccaaattctgcgtgtgatatttctgacctctagaaggtcctccctctccccat

SEQ ID NO: 527 - DNA, 120 bp, synthetic construct
  source 1..120: mol_type = other DNA
gtcacagttttaagcctgcacaatgactcaaatagaaccaataccaaaaaaacaaattcctagctcaggtgaggtcagtgaagttggctgtcaggtgtaaaggaaactgcaggtataaag

SEQ ID NO: 528 - DNA, 120 bp, synthetic construct
  source 1..120: mol_type = other DNA
aatcaactgtggaaataaatgaatggttctctattaaataactgctgagaccatctgaaaaatgtattaaccccaaaaccaatcacttcacactcgtctactgcctcctccccagagcca

SEQ ID NO: 529 - DNA, 120 bp, synthetic construct
  source 1..120: mol_type = other DNA
gcttattgataataataaaatttgaaaagcaagattcaaaataactcatacagtgtgactgcactaagtcatcctgcacagacaccacatgcacagaaaccaggggtggaaactcagggg

SEQ ID NO: 530 - DNA, 120 bp, synthetic construct
  source 1..120: mol_type = other DNA
tttaattccaccacacctgagagagtgggatggattctttcttttattatgatttgagcatctgagtcccttccatcctgaacatctgacatgggtgcttcaaaaatgtaggtcttgaga

SEQ ID NO: 531 - DNA, 120 bp, synthetic construct
  source 1..120: mol_type = other DNA
ggatttggaagaccttttcccacccacttttggcttgtgagcttttattccaccttcttgtctcctaggtcattgcaggaaatcccttcatttggtaaacatttatcaaacacctaccat

SEQ ID NO: 532 - DNA, 120 bp, synthetic construct
  source 1..120: mol_type = other DNA
gatccaaatacagggtgacctcatatgacacatacttagaatgggctcataatgagaaccttccaaattcagcaaatggattcaatcgtgtgttttccaggagaattaccaagtgttctc

SEQ ID NO: 533 - DNA, 120 bp, synthetic construct
  source 1..120: mol_type = other DNA
ttgagtgcggtgctttttaatcagccccctcttgataggcatttggattatttctttcagagaacaattttgcatcatgtaacatcatatggaaaagctgtagtgaccccactcctatat

SEQ ID NO: 534 - DNA, 120 bp, synthetic construct
  source 1..120: mol_type = other DNA
agctggaactactttgaattaatgtttgtgaagtgaatccacaggaactgagcaaaataagaaaagagttattgagtgtgaggaaagctgcacagaggtacagacagatggagagatgac

SEQ ID NO: 535 - DNA, 120 bp, synthetic construct
  source 1..120: mol_type = other DNA
gctgctggggaaagggggctaatttgaaggcagaaaaatagagaacttcgtgtatcttcatagtggcatgggtgctatggctgtatttgtcaaaattcattgatgaatttgatacagatc

SEQ ID NO: 536 - DNA, 120 bp, synthetic construct
  source 1..120: mol_type = other DNA
tccatttaggatttttattgataattgtccttttattggtaaatgttccttccagcaccgccctaatggaacagggtccaaagtcactcatcatatgtaaatgcggctgagaatggagag

SEQ ID NO: 537 - DNA, 120 bp, synthetic construct
  source 1..120: mol_type = other DNA
aacatccaacagaatgaagcaataacctgttgaatcgtgaaaatatttactaagtattcaaccaaccagtatattcatccaattagtatattctagactaatatctagaatatacaagga

SEQ ID NO: 538 - DNA, 120 bp, synthetic construct
  source 1..120: mol_type = other DNA
gtctggggttacccagatgtagggagggttcaccttctgggaaaaactaaacgttggttcttgttcttttttgttcttattgcaagaccaaaaattgagaaaaccaagagaaagcaccaa

SEQ ID NO: 539 - DNA, 120 bp, synthetic construct
  source 1..120: mol_type = other DNA
tgagaattacagcctttggttccttttacatgtagttcatttctgaacctgagaaggagaatgcacctcaggtgactaacagtttttgctcttctgtacttgtctgagaatgaccccaaa

SEQ ID NO: 540 - DNA, 120 bp, synthetic construct
  source 1..120: mol_type = other DNA
atcagcaccactcccgaaccatcattcctgatcgtcagaatttttaatgtaactaaacatgaaacacaagtgcatctgcattatgtgtgggtgctctctccctttattgtatttggggta

SEQ ID NO: 541 - DNA, 120 bp, synthetic construct
  source 1..120: mol_type = other DNA
agggagtataactggataccttgaacaaggatatggggtcactggaaagagaggaccggctgtccctctccgctaagaaataattaactgttagatgagggggaatttctgttcaagggc

SEQ ID NO: 542 - DNA, 120 bp, synthetic construct
  source 1..120: mol_type = other DNA
tccacctgacttgaaaactcatattgaccttacttaagtactgattcccgatttacaatccatgccacaaactttattgtcatatctaaagaagttgccacagcagcctttagcaaccac

SEQ ID NO: 543 - DNA, 120 bp, synthetic construct
  source 1..120: mol_type = other DNA
atgacacagacactatcattttatcatatgctgtgatgtaatatcaatgaaccactcatttcctatgtgcctgcattccaggcttggagtccaccctgtggtacatcaattccaacaatc

SEQ ID NO: 544 - DNA, 120 bp, synthetic construct
  source 1..120: mol_type = other DNA
acaattctgctcccagtcagagccagtccctcttctggtgccccaaacatcatcccttctcatctacttaaagttgtcagttcatcaactagtatctttttttatctttatcatcaactt

SEQ ID NO: 545 - DNA, 120 bp, synthetic construct
  source 1..120: mol_type = other DNA
aataaaaatcctttggcttggaggcactttctcaaggcatgggtttgtcaaacaccccaggactttgataagtggagctaaacccaccgctggggtgaatccatatagattggaaaaaaa

SEQ ID NO: 546 - DNA, 120 bp, synthetic construct
  source 1..120: mol_type = other DNA
tgtggaagtatatgctggcacaattccctcaatcatttggcaaaggaacctatagacatttacttgggtggttgtacactggggaaaggaaacacgcagaactggagggattattgacac

SEQ ID NO: 547 - DNA, 120 bp, synthetic construct
  source 1..120: mol_type = other DNA
gaaaccgctacacgccttttcttagaaaacaaggaggtagtgaaggaatttctgttataaaaataaactcgttccactccgttagcaactgggacggttaaaggctaaagatgttggatt

SEQ ID NO: 548 - DNA, 120 bp, synthetic construct
  source 1..120: mol_type = other DNA
taggcttaagactgtactggacatactgcatatcctttaggatattaaatcagcacatttcattgacaacttcatgttgactggagtagatgagcagcaggaagaaagtgcactgtagtc

SEQ ID NO: 549 - DNA, 120 bp, synthetic construct
  source 1..120: mol_type = other DNA
tatttctttacatgactacccactaagtaacaagttgactacatttagctacttccaacctggaagggccagagtttcatcttcacagggttaggtaccgattctatgggtgggttttcc

SEQ ID NO: 550 - DNA, 120 bp, synthetic construct
  source 1..120: mol_type = other DNA
gccagaagcactcagggaaacctctcctggatttctgatcattggaaactgtgggagatgaggaatatttgttgttctgagctgctaagttttacataatttgttatgcatagtaaataa

SEQ ID NO: 551 - DNA, 120 bp, synthetic construct
  source 1..120: mol_type = other DNA
aaaggaggattcaaaatgaagactcagatttgggaagcctggaacagagattccatctacatcatgcccagatttctgactaaggtactataaacagataaatgggtgttttttggccag

SEQ ID NO: 552 - DNA, 120 bp, synthetic construct
  source 1..120: mol_type = other DNA
tcatatttcattcattcagtcaacaaaaattaatttagtccctacaatgaaccaggtatcccctcatatgctcacgtgcctgacattctagaagcttcacaagaccaaggtggagccact

SEQ ID NO: 553 - DNA, 120 bp, synthetic construct
  source 1..120: mol_type = other DNA
acttaggagctttgtgagtcctgttgtaatgcttttagacactttatatatcaaggggccaaagtcacatgtttttaccgattagattcctgatcattcaggggttaccaagattctgct

SEQ ID NO: 554 - DNA, 120 bp, synthetic construct
  source 1..120: mol_type = other DNA
accagagcgaggcgggtgagtgaccccggcccggggcgcagatcacttactccccgctccatgcctcacggacggccctggtcccctgagtctccgggtccaagatcgaccccgaggctg

SEQ ID NO: 555 - DNA, 120 bp, synthetic construct
  source 1..120: mol_type = other DNA
ctgggtttccagatcctgtatcagagattgactctgagggcccaccctgctcttcctgggacaattaagggatgaagtctctgagggagtggaggggaagacaatccctggaagactgat

SEQ ID NO: 556 - DNA, 120 bp, synthetic construct
  source 1..120: mol_type = other DNA
gctatggggtttctttgacttggatgtattcagcacatgatgggctgttgaaggtgtgacccctcactgtgagtgatatgaatttgttcatgaatattttttctatagtgtgagacagct

SEQ ID NO: 557 - DNA, 120 bp, synthetic construct
  source 1..120: mol_type = other DNA
agttgtagtaatcccagtgctggctccaatccaaactcatgcatttataaagcagagtctgatttagatttatatggggttggaaaattggacccacaaggctaggattatctttcctga

SEQ ID NO: 558 - DNA, 120 bp, synthetic construct
  source 1..120: mol_type = other DNA
cagttgaaaggcaaagcaactttatttttagagggacttgtgtctcatttccatgattcttcttgggctctgggcttccaggctattaagagtagtacttgccactatctattcacaata

SEQ ID NO: 559 - DNA, 120 bp, synthetic construct
  source 1..120: mol_type = other DNA
accccagtacacacctggaaggtaaggaacatatctaacaaaagactcagacaaccattaacacctctgcttggaaacaagatttttttggaatcatagtgtgtcttcttgtttcttcca

SEQ ID NO: 560 - DNA, 120 bp, synthetic construct
  source 1..120: mol_type = other DNA
ccgggacagctttgaatgtaagaagtttttttgcttatctgtggtagcaaatatcatgaaaattatgcacgcacatgtttttcttttttctattctttctgctcatcagctgtcattagt

SEQ ID NO: 561 - DNA, 120 bp, synthetic construct
  source 1..120: mol_type = other DNA
tgattctcccctgggctgtgggcacaggtaggtgaaagtcagggaagttgtggtctgctattggttataataagtcacagatcattatgctttctcagataattaaagaaataataagag

SEQ ID NO: 562 - DNA, 120 bp, synthetic construct
  source 1..120: mol_type = other DNA
ctttaaagaaacaacatttttttaaagtggccttatgtggaccaaagcagagatgaactcaagtgtcaggtgggaaaatgcctaagtgcagcttctagacccaagggagacctaaaaatc

SEQ ID NO: 563 - DNA, 120 bp, synthetic construct
  source 1..120: mol_type = other DNA
tgctctggggatacagcaggaaagcagagtgtttacggatttcacattccatcaaagaaaatccattttgacaaaatatccaagtcacttttctaagccccaggcagcagttcaaacaaa

SEQ ID NO: 564 - DNA, 120 bp, synthetic construct
  source 1..120: mol_type = other DNA
cttctcaaaacaactgtgaagtaaagacaggtaaataaatgcatggtgctcccatgtattaatgctcactgcatcttacaaatgtgtcagccccactgcaacagatggtgcatcaacaaa

SEQ ID NO: 565 - DNA, 120 bp, synthetic construct
  source 1..120: mol_type = other DNA
gcatgttttaccacaatttacaaaaaatatatcaacactaaatccaatcacagctctcatcgagtttttttatactggtgtttcaacaagcacattgccgctgtggaggggaggggtcct

SEQ ID NO: 566 - DNA, 120 bp, synthetic construct
  source 1..120: mol_type = other DNA
ttcctttagaattttagtcacaattaatggaagggtactgaaacctgctatttcccagttgaataacaggtcctggggatatagaaggtcttgccacaagttgaatccataactgctgct

SEQ ID NO: 567 - DNA, 120 bp, synthetic construct
  source 1..120: mol_type = other DNA
acaatttggcttgcccaaagggcctgagatgattggtatataatttaaaaatccttatggggagctgatatgtggaaagacatttggaaaagtctacaggaacccactgtggacctaatt

SEQ ID NO: 568 - DNA, 120 bp, synthetic construct
  source 1..120: mol_type = other DNA
ggagctaccagtaattctgtttaatggggaagaactgccccaccaaatacctactaaacatttttaattccacccatagtcttctgttcctattgttgttctgctctatacctcttggtt

SEQ ID NO: 569 - DNA, 120 bp, synthetic construct
  source 1..120: mol_type = other DNA
tctgtctgtaagttccccaataaaacactctttactgacaactagatttgtctgtcttgttccttggtttattggctcctttggcatttggggggcactttgcatagatggccctttcat

SEQ ID NO: 570 - DNA, 120 bp, synthetic construct
  source 1..120: mol_type = other DNA
ctccctttaccacaatcacttgaaataattgtatgggataaccagaattccctatctcagagagcaaaaagcaggaccttagagtgcactgagaatactgatgatgtgagttgtttcaag

SEQ ID NO: 571 - DNA, 120 bp, synthetic construct
  source 1..120: mol_type = other DNA
tagaggtctcagaatgtccactgactgtggctttagtggtccttgaacagaaatttggtaacatgaagagtagcagatgctggcatggtaagattacaaatgtgtatcagaagaattatt

SEQ ID NO: 572 - DNA, 120 bp, synthetic construct
  source 1..120: mol_type = other DNA
gataaataaatcaatggaggagaggaggcaaaatctctcctgcagaagaactccaaataaggtaggtagatactttgtccttaaaggaacagcattaactccctcttctggaagtgtgaa

SEQ ID NO: 573 - DNA, 120 bp, synthetic construct
  source 1..120: mol_type = other DNA
tggattcatacaatatttttccttttcagtctgatttatttaatctagcttcatgtcttcaaggttcatacataatacaggaaaataatttccttccttcttctgaaaaatattccactg

SEQ ID NO: 574 - DNA, 120 bp, synthetic construct
  source 1..120: mol_type = other DNA
atgacattctgagttggagaattggaagattaaacttggaatgatgtcagcactgagattctgggatcatattgtacaactggccccatctcagcactaacactgtgaaatcttaccttt

SEQ ID NO: 575 - DNA, 120 bp, synthetic construct
  source 1..120: mol_type = other DNA
ttcaacatgtaaatttatctggaaaggccaggggtgaggctgcctagagacatgattagattcggagatacatttgtcatcagatctctctgtacttctaaagaagatagccaatatcag

SEQ ID NO: 576 - DNA, 120 bp, synthetic construct
  source 1..120: mol_type = other DNA
caaactgtcactgtttgctgatatgattgtatacctaggaaactctaaagactcctccaaaaagctcctaaaactgatacaaaaattctgcaatatttctggatacaaaattaatgtaca

SEQ ID NO: 577 - DNA, 120 bp, synthetic construct
  source 1..120: mol_type = other DNA
cagagtaaacagacaacccacagagtgggagaaaatcttcacaatctatgcatctgacaaaggactaatatccagaatctacaacaaactcatacaaattagcaagaaaaagaacaaaca

SEQ ID NO: 578 - DNA, 120 bp, synthetic construct
  source 1..120: mol_type = other DNA
aaaactatgaggatacaaaggcataagaatgacacaatggactctggggactcggggaaagggagggaagaaggtgagggacaaaaagctacaatttgggtgcagtgtgtactgcgtggg

SEQ ID NO: 579 - DNA, 120 bp, synthetic construct
  source 1..120: mol_type = other DNA
ttttcattacatacttggttaaatttattcccatgcttttttatagttactgtgaatgagatttctttcttgatttttcatcattttgagtttgcctctatggcctttattgtgtttagg

SEQ ID NO: 580 - DNA, 120 bp, synthetic construct
  source 1..120: mol_type = other DNA
gctctgggtcggaccagtactatgtgtttttgttgttgtcattgctgtaatcttttaaaattttctatccatttccataggaatcagtctagtactatgttaaatttggtaaaagcaggc

SEQ ID NO: 581 - DNA, 120 bp, synthetic construct
  source 1..120: mol_type = other DNA
taattgtcttcagagggtgatgtgcctcatcacaggggatgaatcataatgtaattagggcatggttcttaaccttaactgaaccaatactctctctttacaacaagttttttgcagcac

SEQ ID NO: 582 - DNA, 120 bp, synthetic construct
  source 1..120: mol_type = other DNA
aaaggtgtctaggtggttgattaccatggagctattgtaatctgtaaagccattaatttcaaagcctttaaggctgttttctttccttgactgaaatgccataagcagtgagttttatct

SEQ ID NO: 583 - DNA, 120 bp, synthetic construct
  source 1..120: mol_type = other DNA
attgtatttgtgtgacaacaaattccatacagaagctcttacagcactactttcagatgaaagcaagtctggattcatcgtaatagatggtagtggtgcactttttggcaccctccaagg

SEQ ID NO: 584 - DNA, 120 bp, synthetic construct
  source 1..120: mol_type = other DNA
catactcatgatggaatccaaacagatccctgccttacaattggaacatttccagaacttaatccatgagcactggatattgaaaagaaaacagaaacaaaaccagacccaaccctacac

SEQ ID NO: 585 - DNA, 120 bp, synthetic construct
  source 1..120: mol_type = other DNA
gaacacagatgtccccaatctttcatgtacaccatttcctgaatcctagaggcaatctactttattctgcctaattttttgatcgttacatctgtgcctccaaatagtgtgttatagtgc

SEQ ID NO: 586 - DNA, 120 bp, synthetic construct
  source 1..120: mol_type = other DNA
gtttttgtttctcatttcatctgtgttcctaagggaacatggaaagtaaaatctgaaagcctaagcttctgaaaatgtcttcgggctaccctagcacttattccaacctggacttggtat

SEQ ID NO: 587 - DNA, 120 bp, synthetic construct
  source 1..120: mol_type = other DNA
ttcactgtatcttcagggtctagtagatcacatgattcatcagaggacttgaaatacatgctgaatgaggaaatataagtgtggttaggcagggaaatcagacttccttgatcaattgcc

SEQ ID NO: 588 - DNA, 120 bp, synthetic construct
  source 1..120: mol_type = other DNA
tctattgggatgacttaaaaatgttgaatttgactaagaaaaaaagcagctcttgacttctgacactgacagtaggtttcagtactgttagaagctgtcctactgctcaacactaggcca

SEQ ID NO: 589 - DNA, 120 bp, synthetic construct
  source 1..120: mol_type = other DNA
caattgtaaaacttaacatctattttcatctaggtacagatgatatgaagagagggaagtcccagagtgaagagaaacacacagatatgtttgatttggggagaaagctggggggaatga

SEQ ID NO: 590 - DNA, 120 bp, synthetic construct
  source 1..120: mol_type = other DNA
tatttggaagtgggtttgttttagaggaagtgattatgtcatgaggtcagaactcccatgaattgaacttgtacccttataaaagagattctagaaagctgtcttggcccttctgccatg

SEQ ID NO: 591 - DNA, 120 bp, synthetic construct
  source 1..120: mol_type = other DNA
gaactctccacagcttacccagaacaggatttctcaaagtgcaatctgtggaacccttgtgggctgctgaaaccccttcatagatccacaaggttaaaagtatttttataatacaatgaa

SEQ ID NO: 592 - DNA, 120 bp, synthetic construct
  source 1..120: mol_type = other DNA
aattgctgtgtttatttgtaagatactcttacccctttccattagatgtctgtagcagccactagtctctgtgaaaatcaacccctctaaaaatgtccaagtggaactgtcctgagaaac

SEQ ID NO: 593 - DNA, 120 bp, synthetic construct
  source 1..120: mol_type = other DNA
tcccaatgataaaaggcaagctctcaagagaaaattagaatcctggggaacttgtatccaccatcataagcctgatggcttcccaatacttaacaatcttttctggtaatatctgtggta

SEQ ID NO: 594 - DNA, 120 bp, synthetic construct
  source 1..120: mol_type = other DNA
actcacataaaattatcttcagagtcctcactaattcctaagagcatgcagagatctgaaaccaaaacgtttgagaaacgatgacgtaactcctagctctggattaagggagaatgtgtg

SEQ ID NO: 595 - DNA, 120 bp, synthetic construct
  source 1..120: mol_type = other DNA
agtgctggctgtatgaaatgctagttttacatctggaaactaaaaacaggcaaaaattgctggccttgaggggcacatgttttagtgggaaaacacagactatgtactataagcagagta

SEQ ID NO: 596 - DNA, 120 bp, synthetic construct
  source 1..120: mol_type = other DNA
tctaagattcaggtggtctggagttgagaatgagattctgtgtttataaaaaagttgaggcagacactgatggtcttcagatcacacttttagtagcaagaatgtagaccaggattccca

SEQ ID NO: 597 - DNA, 120 bp, synthetic construct
  source 1..120: mol_type = other DNA
tccctaacatggagagggttcaggtgctgggacacaggaagatagagtggaaaaagaatgaaaaaaaaagtcaattcctagagcagtaatctgagactagaaccttatctggtatatcat

SEQ ID NO: 598 - DNA, 120 bp, synthetic construct
  source 1..120: mol_type = other DNA
caaggtgttggttaatttcatgtctgatgaaggcccctttcctgtttcataaacgtatatcttctccaagtggcctcacatggcagaaaggtgaagagaactgcctggggtctttctgat

SEQ ID NO: 599 - DNA, 120 bp, synthetic construct
  source 1..120: mol_type = other DNA
aggccagaagttcgagggcatcttgggcgatgtgttgagaccatgttactttaaaaaaaaaagagtcaacaaactgggaattgaaaggaactttctcagccggataaagggcatctataa

SEQ ID NO: 600 - DNA, 120 bp, synthetic construct
  source 1..120: mol_type = other DNA
ctatcagattcctaaatgacttcttcgtagaaatttgcaaactaattgtaaatttataaagaaattaaagggacgcagactatgcaaacaatcttgaaaaaaagaacaaagggccaggca

SEQ ID NO: 601 - DNA, 120 bp, synthetic construct
  source 1..120: mol_type = other DNA
gaaggcaaagatttcagtgatgtatctccaagccaatggagcaacaactaccaacagctaccagaagttaggaaagaatcatggaatgaactttcccccagagcctccagaagaaactaa

SEQ ID NO: 602 - DNA, 120 bp, synthetic construct
  source 1..120: mol_type = other DNA
tttgcaaatcatacatttaacaagagatgtttctagaatatataacaatctcctacaacttaattgcaaaacacacataatcccaattttaaaatgagcaaaggagtccgagcgcagtgg

SEQ ID NO: 603 - DNA, 120 bp, synthetic construct
  source 1..120: mol_type = other DNA
ggctattgtttctatcaatgaccattaatccttcaactcattaagcctgctcattaacgttatctttcagtaaagtgggctgtacttttaggacatctcgacattctgcaggcttggtgg

SEQ ID NO: 604 - DNA, 120 bp, synthetic construct
  source 1..120: mol_type = other DNA
gtaggacatagattaactcttgcttagggtttggggtgatggggaagggggaataagagagtaatagctatagggcatggggtttctttttcaggcgatgataatattctaaaattgaat

SEQ ID NO: 605 - DNA, 120 bp, synthetic construct
  source 1..120: mol_type = other DNA
cacagtaaacatgggggtgccagtatccctttgatgtatcgatttccttacctttggataaatacccagtggtggtattgctggatcacacagatctattttcagttttctaagaaatct

SEQ ID NO: 606 - DNA, 120 bp, synthetic construct
  source 1..120: mol_type = other DNA
ttgtcacccaggctgcaacacagtggcgcaataccagctcactgcagccttaacctcctgaggttcaagcgatcctcctgcctcagccccctaagtagctgggactacatgcacatgcca

SEQ ID NO: 607 - DNA, 120 bp, synthetic construct
  source 1..120: mol_type = other DNA
cctgtctccagcagttaacaaatgtcctttctttcaacaaatatctattaagaggctaacatgtgccagactctacagaacaggcttacaggcataatgccacaaaggaacagaaatcta

SEQ ID NO: 608 - DNA, 120 bp, synthetic construct
  source 1..120: mol_type = other DNA
gagggcagttgaactcagcaatttatgtgtccagcactgaaaaccttcatggtaaacaattactaataggttatatgttaggttacttttcagtcccactcagctcaaagggcttgtcat

SEQ ID NO: 609 - DNA, 120 bp, synthetic construct
  source 1..120: mol_type = other DNA
agtttgagaaaggctgagtttgattatccctgagtggatccaagcattaggaaggtcttgcttaagtgggtgataggaagtgacaaaaaaagctggaagaaacatgacagactataatac

SEQ ID NO: 610 - DNA, 120 bp, synthetic construct
  source 1..120: mol_type = other DNA
atccgacttctactgcatggttggaaaagaagatacgcaataactctttcaaactcctttatctcttttactctctcatgcttctcatatgtaagtagctggctctggcttcttctcaag

SEQ ID NO: 611 - DNA, 120 bp, synthetic construct
  source 1..120: mol_type = other DNA
tttacttaccaagatctttttttccagtggagactgctgacctgcagcaatcctaggatctttagatgatgtaccccaggccaatctggaagataaaaaaggcaaggtagattcaaatgt

SEQ ID NO: 612 - DNA, 120 bp, synthetic construct
  source 1..120: mol_type = other DNA
atgtcttttataccatttagagttcaaaggatggtctttacagtctgacagagctagatctgaaatctaattctaccacttcctaggtgtgtgactcagggcaagtaacttctgtcagct

SEQ ID NO: 613 - DNA, 120 bp, synthetic construct
  source 1..120: mol_type = other DNA
acgacaatcagctcaacaacacgtctccctttgtaagacagaataacaagcaatttcacagttaaatgatagggcttgtcactcttcagcagtttgctgagttttaaccctttcactatg

SEQ ID NO: 614 - DNA, 120 bp, synthetic construct
  source 1..120: mol_type = other DNA
cacgattgtatctacagtttctagaagagtactggcaactaggtagtgcttagtcaacatttattgagtgaatgtttttggcttaggcagtttaaagtggaagagaggtgtgggtggatt

SEQ ID NO: 615 - DNA, 120 bp, synthetic construct
  source 1..120: mol_type = other DNA
ttgtagttctctaatccaaagaaatcattatttggcaacgtacggttttcagggggatataccccgcgactgcgttcctgtaggatgtgagacaaagagaataaatatcccaggattggg

SEQ ID NO: 616 - DNA, 120 bp, synthetic construct
  source 1..120: mol_type = other DNA
ggcaaactgtcttctacacctgtaccaactgcaagtgagtattctttcccctccctctgctcagtctgtttgctaactaaacaaatccagtgatttatttttttgtacgaaatggccgtt

SEQ ID NO: 617 - DNA, 120 bp, synthetic construct
  source 1..120: mol_type = other DNA
ttctctttcccccatgttctcagtcctcacattctggacctcgaattagttactagaaagaggtttctctcttctgtcctccatttctctcaccttcttttcatattttcaattgctgtt

SEQ ID NO: 618 - DNA, 120 bp, synthetic construct
  source 1..120: mol_type = other DNA
gtgactgtcaaaacagtataaagggcaccatagtgtcactgtcacgtttcatagggacattagttttaacttccctgtctggatttctggttttacagaacttttaaccagtgtgcagat

SEQ ID NO: 619 - DNA, 120 bp, synthetic construct
  source 1..120: mol_type = other DNA
ccatcctgtctggttgcaatgttttgctcccagaagagaatcagatcatcatgtggggattaccattgttcctggagtactcctacccttagttgaatttccttattaaagttatatttt

SEQ ID NO: 620 - DNA, 120 bp, synthetic construct
  source 1..120: mol_type = other DNA
gacccactcctgaaatctgaaacaaacctgttcatgtttctaccctactttaagcctttctctggcccataacagtgattggattaagcttaatttcttagcaaagcatacaggttcttc

SEQ ID NO: 621 - DNA, 120 bp, synthetic construct
  source 1..120: mol_type = other DNA
tgactcttaagtgtgtttccaactgctcccacttcccgttttctttagagaaacccagaccaaacaaggaaagggaaataggccacggtagggtcattactattgctccttaagcttcct

SEQ ID NO: 622 - DNA, 120 bp, synthetic construct
  source 1..120: mol_type = other DNA
agaataggtggataagaggtagggagggctggagcttgagaatgagagaggttttgtttgtttttttaagagaaaaagaataggggatctggaaaaaggaagggagatcaaagattaggt

SEQ ID NO: 623 - DNA, 120 bp, synthetic construct
  source 1..120: mol_type = other DNA
agaaaataggaattttcactgagtttgagtgggaatggaactgactatatatcttacccttcctcctctttaactgggctcctccctctaaatctaggctgctgtatttatgagaaacct

SEQ ID NO: 624 - DNA, 120 bp, synthetic construct
  source 1..120: mol_type = other DNA
ggatccggttttcattttccggtccttttgccatacacagttacagagatcagtcaaatccataccaccactgagatctcatttattgccacagatgcacaaaataaataacccaaaatc

SEQ ID NO: 625 - DNA, 120 bp, synthetic construct
  source 1..120: mol_type = other DNA
gcttaaatgaacctgattgagaataaacactgggaagattgaattttcccagcgtatacattgtttctcagaaaataaaagctgtccctttggcctccacagatctcatgcctgcttgac

SEQ ID NO: 626 - DNA, 120 bp, synthetic construct
  source 1..120: mol_type = other DNA
tggttttgagcagggacgtggaaacgtggagaccaggtgaggtctcattattttggggcgaaaatgtgggttgctattaatactcctgcaatgggcgtgtgaatgtgttcccagaaatga

SEQ ID NO: 627 - DNA, 120 bp, synthetic construct
  source 1..120: mol_type = other DNA
ttatatgtatggggtgctttgaagaaaaatttctggattaggggtgtcagaagcaatctggactgggcaagatggtggatgaccaagatggtggaccaccttctctaggcagtttaaaga

SEQ ID NO: 628 - DNA, 120 bp, synthetic construct
  source 1..120: mol_type = other DNA
cttcttctttccttacctgtcagtctatgaagcatttttttgaccactggataatcttcagggagatcatcctctgaattagatgacttggatgttgggacttcaaatctacacagatga

SEQ ID NO: 629 - DNA, 120 bp, synthetic construct
  source 1..120: mol_type = other DNA
gagagaaacaatttgcataattgtgccaattactttcagactaattaggtctatgaagacttcaaagggcagaagcaagacccaagaccagcttggctgctgggaagaagccagtcagga

SEQ ID NO: 630 - DNA, 120 bp, synthetic construct
  source 1..120: mol_type = other DNA
ggaccaagtgtcaactccatccatcgtccttccgggcgcctctcaccttgaggacccagggtcctcgccccctcatcctttgcttttctctccccaccccatcctttgcctaaacttcca

SEQ ID NO: 631 - DNA, 120 bp, synthetic construct
  source 1..120: mol_type = other DNA
gtgattttattaccagttttctctttccttccttctttggaatgtacccggtattatctatttcaactctggtagttcacagaggcccagagaactggaatagccaaggtcacatagcaa

SEQ ID NO: 632 - DNA, 120 bp, synthetic construct
  source 1..120: mol_type = other DNA
tactctatcatcagttttattattaataagaataacagtataacagcagtaagtctttatggagcagcaggactttattaggcaccccctccaggcactcttcttctgcctcccccatac

SEQ ID NO: 633 - DNA, 120 bp, synthetic construct
  source 1..120: mol_type = other DNA
agcttcacatggctttctccattttctcactcatgtctcaacccaaaggtaacattcagagaggacttcttttaccacttgtatctcaagtggtctttctcaaaggtattcactatctct

SEQ ID NO: 634 - DNA, 120 bp, synthetic construct
  source 1..120: mol_type = other DNA
tatcctttcatttatccttcagtctctctcctccatattagcaacatcctcatgcttttaaaagccccactagtctttagaagctttccagagggagagataagtatgatagaggagttt

SEQ ID NO: 635 - DNA, 120 bp, synthetic construct
  source 1..120: mol_type = other DNA
aatcaatcttgatactcaaatacatgactatgttatagaaatgtcaccttcatagtccattctctcatttaaccctataatagccgtgaggccaagtccagccatgttacactgaggccc

SEQ ID NO: 636 - DNA, 120 bp, synthetic construct
  source 1..120: mol_type = other DNA
ggaaggcagcaaggtgcctgtggaataatacagtggcgacatgctgtaggctatatggacttaacatttaatgagggtggtagagactaaagatatatatttaagaaatagcagcataca

SEQ ID NO: 637 - DNA, 120 bp, synthetic construct
  source 1..120: mol_type = other DNA
ctgggtcaaatggtatttctagttctagatccctgaggaatcgccacactgacttccacaatggttgaactagtttacagtcccaccaacagtgtaaaagtgttcctatttctccacatc

SEQ ID NO: 638 - DNA, 120 bp, synthetic construct
  source 1..120: mol_type = other DNA
tctgtgaagaaagtcattggtagcttgatggggatagcattgaatctgtaaattaccttgggcagtatggccattttcacgatattgattcttcctacccatgagcatggaatgttcttc

SEQ ID NO: 639 - DNA, 120 bp, synthetic construct
  source 1..120: mol_type = other DNA
gaagattccctctttttctattgattggaatagtttcagaaggaatggtaccagttcctccttgtacctctggtagaattcggctgtgaatccatctggtcctggactctttttggttgg

SEQ ID NO: 640 - DNA, 120 bp, synthetic construct
  source 1..120: mol_type = other DNA
gagctgagttcaattcctgggtatccttgttaactttctgtcttgttgatctgtctaatgttgacagtggggtgttaaagtctcccattattaatgcatgggaatctaagtctctttgta

SEQ ID NO: 641 - DNA, 120 bp, synthetic construct
  source 1..120: mol_type = other DNA
tgaatctgaacgttggcctgccttgctagattggggaagttctcctggataatatcctgcagagtgttttccaacttggttccattctccccgtcactttcaggtacaccaatcagatgt

SEQ ID NO: 642 - DNA, 120 bp, synthetic construct
  source 1..120: mol_type = other DNA
cagttcgagcttcccggctgttttgtttacctcagcaagcctgggcaatggcgggcgcccctcctccagcctcgctgccaccttgcagtttgatctcagactgctgtgctagcaatcagc

SEQ ID NO: 643 - DNA, 120 bp, synthetic construct
  source 1..120: mol_type = other DNA
catgcgttgttctaggagttaggaagagtggagagcaagccagccatagtcccttgtcctctggtaatttagattccattgaaaaaggccaacaataagcaagtaaacaaataaattaac

SEQ ID NO: 644 - DNA, 120 bp, synthetic construct
  source 1..120: mol_type = other DNA
gagagatgatcttgctggtgtgtaagtagggaaaactttcggatcctcatctgtcaagaatgcaggagcaggttccttcctgtcttttaggcgcctgtttcaattaagaaaaaaaaatat

SEQ ID NO: 645 - DNA, 120 bp, synthetic construct
  source 1..120: mol_type = other DNA
cagcctagaggcaagaacaatttgggctaatttaagcaaagttgacacatgatgagttaggagtaaagatggcacaagataataatgaagacgtaggcagagactagagcaagtgaaatc

SEQ ID NO: 646 - DNA, 120 bp, synthetic construct
  source 1..120: mol_type = other DNA
ggggagaacagctcattaacaaataaataagtgtaatgtatggtaggtaccacgaagcaacataaagctgggaagaaagacacaaatgctagcatagttttctctctttgggatgactgc

SEQ ID NO: 647 - DNA, 120 bp, synthetic construct
  source 1..120: mol_type = other DNA
atcagctgaaggtacagaaagtaggattagatatcttgaggaagtcaagccttcttgaagtagctactatgaatcctattagggaaatgcaagtgagtgggatagcattgaagggaacaa

SEQ ID NO: 648 - DNA, 120 bp, synthetic construct
  source 1..120: mol_type = other DNA
ctgtgggccatccaacagtgctgtgaactgtgcagcccgatgtaagcatatctgacattaggagtggtggagaaacaaaaagaacaaggatagttcattttaacacagtaataattttat

SEQ ID NO: 649 - DNA, 120 bp, synthetic construct
  source 1..120: mol_type = other DNA
acagagctatgctgaaaggagaaaggcaaaggctacagaaaagtgaacactgaagaggaattaggcaagaacaaagcctaccaagttagaagaagggaatgagagggcgaaacaacagca

SEQ ID NO: 650 - DNA, 120 bp, synthetic construct
  source 1..120: mol_type = other DNA
acattctcctctataccacagagcacctcttctgtgtgtggcatattacatagaaaaatgagattagacatttagaagttgaggattctcatcccgcaaacacttatggggcacttttta

SEQ ID NO: 651 - DNA, 120 bp, synthetic construct
  source 1..120: mol_type = other DNA
agaaactgggctgaggaaatgagtgggtgacagatcttcacatggctggtagggggaaaaaaaaggaacacagaacacaattagattattttcaggattttcatcgcagttatatatgca

SEQ ID NO: 652 - DNA, 120 bp, synthetic construct
  source 1..120: mol_type = other DNA
cagggatgaggaaaatttcagaacagaatcaattcagccttgtgcagaaaggaataatgaaggcaggaggcagcaacttcagggctgtctgatttgaaggaaatattaaagcctttatca

SEQ ID NO: 653 - DNA, 120 bp, synthetic construct
  source 1..120: mol_type = other DNA
gttttttgcattgaactggattctgcacatatctatacacatgctccaatcccactaattcatcttttttcccaatgcccaacctaaacactgagagaaaaaaaaagagcagcctctgac

SEQ ID NO: 654 - DNA, 120 bp, synthetic construct
  source 1..120: mol_type = other DNA
ggacaatagacaaataaagcaggatccctgaatttttaggaagctctcagttggggtagaggtgagaaacacacataaacagatcgtcttgattgtggagattagtgcagtgatcaaagt

SEQ ID NO: 655 - DNA, 120 bp, synthetic construct
  source 1..120: mol_type = other DNA
gtcagaagattttcaaaataaaattttagaaaagcatagactttggcctgggtaatggaagatggattgggcagaataagtctggaggcagggaaatgagaaaggcagctgtcataatcc

SEQ ID NO: 656 - DNA, 120 bp, synthetic construct
  source 1..120: mol_type = other DNA
ggaaagaaggaaggaaggaagcaaggaaagaaggaaggagggagggagggagggaaggaaagaaggaaagaaagagagagagaaaaagaaaatagggtcttttcatcaagttcagatgag

SEQ ID NO: 657 - DNA, 120 bp, synthetic construct
  source 1..120: mol_type = other DNA
gctgagaagagtgtgatcatcgtttaaggttaaggtccaggttggaagacctccccaaatttaaaccttgctacaaagtattctttcatttactttgaacccttccttcatttacatccc

SEQ ID NO: 658 - DNA, 120 bp, synthetic construct
  source 1..120: mol_type = other DNA
aatgttaaggaaatagaagttgcatttcagtagataaacagaagttgaggaagtaactggatgaggttgccagaaaagaaagcagattagggacactatggtaggcagactaatgccctg

SEQ ID NO: 659 - DNA, 120 bp, synthetic construct
  source 1..120: mol_type = other DNA
aacactaggaatgatcaagacttttgttgcgggtagtggtgatgtgggtttgagaggaggatgcatctggtcgtgggattaattttggtttctgagtattacgaagaactagaaaagttt

SEQ ID NO: 660 - DNA, 120 bp, synthetic construct
  source 1..120: mol_type = other DNA
cacagcctttgtggtccccagagaagtcttaggcccggcaccgcctcctcctcctcaaagttaatccctaaatttcacaatgtgttgttctgtgggcgcagagagaagttcttcattggt

SEQ ID NO: 661 - DNA, 120 bp, synthetic construct
  source 1..120: mol_type = other DNA
aaagttagaagtgtctccatccaccccctacagaggcttgcgtggtggttccagtctgctaaatatttcagaatggggacctcattctatctactgatttatcaaatctcattaattaat

SEQ ID NO: 662 - DNA, 120 bp, synthetic construct
  source 1..120: mol_type = other DNA
ttctgtaacaagccccctaaaaattggggagagaaaacctatttggtcttgataaccagaagctgcaaattaaaaacaaaaacaagcaccctgccatcatcaatcagaacagtcaatggt

SEQ ID NO: 663 - DNA, 120 bp, synthetic construct
  source 1..120: mol_type = other DNA
ttcatgtcatttttattcatgcttttgaagaatctgttttcatcttttttcctatcagcctggagttggtctggggaataaagaatgggatgaaatggtgagagtccagaggggttgagc

SEQ ID NO: 664 - DNA, 120 bp, synthetic construct
  source 1..120: mol_type = other DNA
ctgtggagattggacctgtggtataagtagactccctaccacctcctgtatttcctaggctttaatagggccaggtggccattgtgccttcttctttggggtaaaaataaaataaaaata

SEQ ID NO: 665 - DNA, 120 bp, synthetic construct
  source 1..120: mol_type = other DNA
ataaacaaataaataaagttgctagatcggctgagatcatgcccagtggggtgggaggagctagacaaagcagagcagttagtggacaaaagaaaagctcagacaacaaaattaagaata

SEQ ID NO: 666 - DNA, 120 bp, synthetic construct
  source 1..120: mol_type = other DNA
aagtaggtgaatagagaaaatacagcctcttccttacctttgaatttttttaggctccctgtgatggagtcatgtcttgattttgcttcactgagttttttctccagttccagaggaaca

SEQ ID NO: 667 - DNA, 120 bp, synthetic construct
  source 1..120: mol_type = other DNA
agtgagatttagaagatgaatttggctctgagactgaacaagggagcctgctagccagggcaggagaaaggctagaatggctttgcatgatctttcttaaaataaataaataggtttttg

SEQ ID NO: 668 - DNA, 120 bp, synthetic construct
  source 1..120: mol_type = other DNA
ccagaattatatttatgaattacatatgtggctcacattttcattctaatacatgcggctcacatattgctattggacagcactgggctagaggtaggatggttggggcaatctcaggta

SEQ ID NO: 669 - DNA, 120 bp, synthetic construct
  source 1..120: mol_type = other DNA
gctcaaataatattagaaataacatttgaaatgtctagaccaacccttttgcagtgactttactgggaggttgcatcagcatctagacacttccatacattgaggaaaaacagacagccg

SEQ ID NO: 670 - DNA, 120 bp, synthetic construct
  source 1..120: mol_type = other DNA
cacccagccaattgattcttatatatttaattttcattgagttcttaccatagtcagttattaataagtagaaactattaaatgtattattttatttaaaattcacaaagtcctgcgagt

SEQ ID NO: 671 - DNA, 120 bp, synthetic construct
  source 1..120: mol_type = other DNA
ggcagacctggaagaaaggaaaggagaggagaacaaacttctaaaagcacctactacgtgctcagctttaagcgaaattattaatttatggtttaccacttgccttcaaggaactgtcta

SEQ ID NO: 672 - DNA, 120 bp, synthetic construct
  source 1..120: mol_type = other DNA
actatggatggtgctttggaattatcaaagaactacaaacttcccttcatctgtcctaccaacaactttaagagagttgttttgtttttgccatttgaaaggtgaggtacctgaggctca

SEQ ID NO: 673 - DNA, 120 bp, synthetic construct
  source 1..120: mol_type = other DNA
tgtaataggctgcttataaagtgaaataagttgtcctgaactttggactaaaggtatgtttgtatggtggttgactaagatcagaatgaccggggcaccaaacaccacttatgggggatt

SEQ ID NO: 674 - DNA, 120 bp, synthetic construct
  source 1..120: mol_type = other DNA
taaactgctggcccctagaagcagaatttaacttttgacaggttttgtttgactggcatgatgatttagaaaataatgataatgtagatgcctttagagagggtggctatgttccccacc

SEQ ID NO: 675 - DNA, 120 bp, synthetic construct
  source 1..120: mol_type = other DNA
gaaaccaaatgcctccaatttgcaagggctagggtcttgagatagttggtattgtgttagttccaaaggacttccaagccaattctgaggcatagagtttataaaaattagccatagaac

SEQ ID NO: 676 - DNA, 120 bp, synthetic construct
  source 1..120: mol_type = other DNA
acttattttcttgaatatccaaataagttctttctggaaggataagaatttaataactaacaatggttgtctctaaggagagggactgactagccagggaacaggggtggaagagaggct

SEQ ID NO: 677 - DNA, 120 bp, synthetic construct
  source 1..120: mol_type = other DNA
gtattattattcccattttgaggacaagtcaacggagatcaagagagattaagcaatttgccccaaaggtcattcagtaagtaaatagtggaatggggacttgaacccaggtagcctcta

SEQ ID NO: 678 - DNA, 120 bp, synthetic construct
  source 1..120: mol_type = other DNA
caacacttcatatagtttgcagtttccatatatgtgatagaagtttaaacacaaggcctgaaaggatacatactaaatttatggcagtgtttgcttccgggaggagagagagaaagagcg

SEQ ID NO: 679 - DNA, 120 bp, synthetic construct
  source 1..120: mol_type = other DNA
tcatgagattaaaaaccccaacaaaatgtaaagctccctttcttccttagagaaacccattaaaacatagaagcataaatccagagatagtttaagggctgctgtgcctgtgcagatggg

SEQ ID NO: 680 - DNA, 120 bp, synthetic construct
  source 1..120: mol_type = other DNA
aaaagtggcaagaagaaataaaaatatgcttgggtttgaggatctaaatgcccccatcagaacacatcagactatgtaatattcttgtaccacagaagtacggtgtccagagcctaacac

SEQ ID NO: 681 - DNA, 120 bp, synthetic construct
  source 1..120: mol_type = other DNA
cataatactgatacatgacaaagtccagagcatggccatttgtgctagtgactaaatagagtggaaataaagattcctgggaaaagagagatcaaatgaatgagaagctggggtgctgga

SEQ ID NO: 682 - DNA, 120 bp, synthetic construct
  source 1..120: mol_type = other DNA
tcagagtttagtcctcagaggtaaaataagcccatcagagcggacctttgtctaatctgactggcgtcttcataagaagacgagatttggacacacagaagggcaccagggatgctccac

SEQ ID NO: 683 - DNA, 120 bp, synthetic construct
  source 1..120: mol_type = other DNA
cttaatcagactgcactttgactcacttccttgaaaccaaaagtcatgtaacactagacactgaccagtcatatccccattgttgctctaggtaggatttctgacataagaatcagccaa

SEQ ID NO: 684 - DNA, 120 bp, synthetic construct
  source 1..120: mol_type = other DNA
aaactgacaccttcagttgttccccattttctacagaataaagtccaactcgtcctccattggcctcttccctttcatctaaacttatctttcattccttaactgtcttttccagttggc

SEQ ID NO: 685 - DNA, 120 bp, synthetic construct
  source 1..120: mol_type = other DNA
aaataaaaaacttttaaaatattgaaccatttacgggggctttaaaaacagacagcttttgttccaaatgaggatgcctctccttccgtttgtctgacctaccctttgcccccatggtcc

SEQ ID NO: 686 - DNA, 120 bp, synthetic construct
  source 1..120: mol_type = other DNA
tttgtagtagcaaaaaactcaactgaaaaataggaagctattctctccatttctctctgtggtcacatagccgctcacgtttaattctttctaagctcacagattgaccaacacagccac

SEQ ID NO: 687 - DNA, 120 bp, synthetic construct
  source 1..120: mol_type = other DNA
gcgaccccagttgcaggctcacctccatgttcctttcctttcccaaattttggcccagcaattcctcactaacctttgaatatttaagtaagatacttaaaaatattttacccagcattt

SEQ ID NO: 688 - DNA, 120 bp, synthetic construct
  source 1..120: mol_type = other DNA
ccaaatgctgccttagaaatctgtaagccagctaagagttctgcagtctcaactaaacaaaacttttttattccattggtttggggtgtactgttcttagggcttttgccaactgaattg

SEQ ID NO: 689 - DNA, 120 bp, synthetic construct
  source 1..120: mol_type = other DNA
aaaaatccccccaaaattctaataactgcttgaaccacccctatattttcccatttatattttttgattccctcttcattcgacaacacttttgtaatgtattttcctgggtgagaatga

SEQ ID NO: 690 - DNA, 120 bp, synthetic construct
  source 1..120: mol_type = other DNA
gcttccattttgactagactttgatgagactgagtaatacgcttataattttctacatctaggggttaaaaggatttattggcttcactgtccacagacttctggtgcctcatgtcacag

SEQ ID NO: 691 - DNA, 120 bp, synthetic construct
  source 1..120: mol_type = other DNA
gtccatctggctgtgcttctcaagatcagctgttttgtaggacttgaaataaggattccttaacaacctggtgaatgcctaatagcctcaatacatttcaggctgttttagttttgttta

SEQ ID NO: 692 - DNA, 120 bp, synthetic construct
  source 1..120: mol_type = other DNA
agacaaattgcaagtctacattattgaaacagaagaacacaggggtatggagatgaaggtataggtggagaattagagggacatatatccagagtggtaactgggatagcaggaatatga

SEQ ID NO: 693 - DNA, 120 bp, synthetic construct
  source 1..120: mol_type = other DNA
ggggagggtggcagataatccaggcaagaataattcgaaggtacattgaacttgaggtggtgatggaacacttaagaatgcacagaagtttaaactcaatagggatagtaataccaagct

SEQ ID NO: 694 - DNA, 120 bp, synthetic construct
  source 1..120: mol_type = other DNA
tttaaagcatgagaaattagataagatcactcctttaaaacagttactgagcacctaatatattcaaggagctatgccgaataggctgactcagggaaataaggaccctgacagttgcgc

SEQ ID NO: 695 - DNA, 120 bp, synthetic construct
  source 1..120: mol_type = other DNA
tttatgttggagattattccaatagcaaaagttcccttccacaccccaccccctactaatggctgcacaatgttctattgtatgaatgtagctagtttatttagcttaacttccgttgat

SEQ ID NO: 696 - DNA, 120 bp, synthetic construct
  source 1..120: mol_type = other DNA
tcaagcttttactgaatcctttctaagagcaagaaaaggtatatatagagagatgacattttatggtaatgaagcccatgggctgggataagagacacccagatctgaatcccagctcta

SEQ ID NO: 697 - DNA, 120 bp, synthetic construct
  source 1..120: mol_type = other DNA
ttttaggagctctgtgccaagactaattatatatatatctcacaagatcacacaacccacagcaaacagtggcaaagtgggattgagggaggaggctctgaaatgaggttttcaacaagc

SEQ ID NO: 698 - DNA, 120 bp, synthetic construct
  source 1..120: mol_type = other DNA
ggacttctttctttgggtcatctttggtggtgatttgacaggaaggaacaaagtggcttcaaacattatacaagtctctagtctgttctgtgtcctgttttctttctcattctttcagtg

SEQ ID NO: 699 - DNA, 120 bp, synthetic construct
  source 1..120: mol_type = other DNA
agagtagctcaacaatggacatctctctttgtttcttctgcttcatcctgttttggacccttgtcttgcttttctgtgtatattttgaggctgatgtttccatgcattaatgtgagtctg

SEQ ID NO: 700 - DNA, 120 bp, synthetic construct
  source 1..120: mol_type = other DNA
agactaaaaatttgtcttcctttctccctccattcatagtcctcagaggtaaccattgtttgatttttgtacatccttccaaaaaatgtgtgtgcttatgaatgcactcttacacacaca

SEQ ID NO: 701 - DNA, 120 bp, synthetic construct
  source 1..120: mol_type = other DNA
tgtgtgagaaactgcagcatgtgctaggaatcaatgaagacagatgccattccttctgccaggagtttgcagtgtagtaagggagacacaaataagtaatcaaagaactgtaactttttt

SEQ ID NO: 702 - DNA, 120 bp, synthetic construct
  source 1..120: mol_type = other DNA
aataccatttgacccagcaatcccattactgggtatatacccaaaggattataaatcattctactataaagacacatgcacacgtatgtttattgtggcatggttcacaatagcaaagac

SEQ ID NO: 703 - DNA, 120 bp, synthetic construct
  source 1..120: mol_type = other DNA
actcttactctgtttcctaaggaatggtcataggacaggtcttcatgttctgacatttacttctcagtgaaagtccccaccaaaattcttctggactcttccagtaatatctgaactagt

SEQ ID NO: 704 - DNA, 120 bp, synthetic construct
  source 1..120: mol_type = other DNA
gacaagttgagtccaagttgagacacatcaaaataggatcttacatacgcagctggatcacaaatttagatctccagagtcttattcctagaacctagaacaaagatccatccaggcaaa

SEQ ID NO: 705 - DNA, 120 bp, synthetic construct
  source 1..120: mol_type = other DNA
attttgctggtttagtaagtgtgtgacagtgatgtacgttgttttactttgcttgattatgaatgctagtagtggtgaggcttttatccatgaagactcgctgtctgcattttcccctag

SEQ ID NO: 706 - DNA, 120 bp, synthetic construct
  source 1..120: mol_type = other DNA
agtcttctcaaccagtaccaagatacatcactaacggctttccactatgtatctgaatcagatattaaattgtctttacttaaacctcatgtgccctgactctattgagggtagctatgt

SEQ ID NO: 707 - DNA, 120 bp, synthetic construct
  source 1..120: mol_type = other DNA
agctctcacttggaagcatgagatggattgctaggaaaaaagatttggttttggaattctaagatctgaaggctccagaaaggaaagctaaggacatagtctgagatagaaaagggttga

SEQ ID NO: 708 - DNA, 120 bp, synthetic construct
  source 1..120: mol_type = other DNA
gtgggaaagatttagtgaaacacacacttttcagctaatagcacatcctgatctttagttcacaaatctcttctcgttttgttttctattttatcattcaccctccaactgccccccgaa

SEQ ID NO: 709 - DNA, 120 bp, synthetic construct
  source 1..120: mol_type = other DNA
tacatgttaaatgagaaccagtcctgctctgcctggatcacagtagggatcaaaggagaccagtgtctcgtcaactgaaaattactacacaagccataggcctctgtttctttttatttt

SEQ ID NO: 710 - DNA, 120 bp, synthetic construct
  source 1..120: mol_type = other DNA
gtgaattgggaaaggaatttggaggtgataggaacctgagaaccaattatgattctcactttttctctctcctagaatgctggtgacttactgaacaggtacgagctgtcccttcttctt

SEQ ID NO: 711 - DNA, 120 bp, synthetic construct
  source 1..120: mol_type = other DNA
tcctgcagtacttgttgtctgtaccactcacctggcacttatttattattgttgtggaagacagactcaaagacagcctcccttcatgatcctcacctcttggaattcatgcccttgttt

SEQ ID NO: 712 - DNA, 120 bp, synthetic construct
  source 1..120: mol_type = other DNA
tcagtatttattgagcctttgccaaagtagtcaataccatactgagaggtataaggaataaaacatggccacaattataaaacaagccacgtggtggtgcaaagagtgaaaactacaggg

SEQ ID NO: 713 - DNA, 120 bp, synthetic construct
  source 1..120: mol_type = other DNA
gaagtttataatttagctgtggaactatgactaaacagctacagaataagaagagagcgtgtaactgcactgaattaggtatcacagaggctaagtgccctgggaattcagaggaaagaa

SEQ ID NO: 714 - DNA, 120 bp, synthetic construct
  source 1..120: mol_type = other DNA
ggatgcattcataggaacagtacatttctgaattgtccctctgactttgtattactcaccacataataaaacaccttggaagtttccaggaaacaggaatatggagtgtggctagtcaac

SEQ ID NO: 715 - DNA, 120 bp, synthetic construct
  source 1..120: mol_type = other DNA
tcacggggcctggctcatggtggaaaatcgcattttccttatttctgcttttataataaacttacctatcatttgaactaacttgagtgggtctcagttctttgcaatagaaagggttgc

SEQ ID NO: 716 - DNA, 120 bp, synthetic construct
  source 1..120: mol_type = other DNA
tgcatgatcttggctcgttaccaagataaagtgacacaaggtgtgtaaagctcccgagctgcaagccaggatcttcatacacatacattttagaggataatagtcctttcaaaagacaca

SEQ ID NO: 717 - DNA, 120 bp, synthetic construct
  source 1..120: mol_type = other DNA
ttcccgtaacacccaccacactgtgctgtaatttcctctttatgtttctctgtcttcccaagagctctttcagatatagagcaggttttttttttctctatattttcaagtcaccagtgg

SEQ ID NO: 718 - DNA, 120 bp, synthetic construct
  source 1..120: mol_type = other DNA
tgttagtgttattattaccaaaaacatgtatagtgcctacgtgggccaacagtgtggaaccacctgggaacttgttagatatacgctctcagaatctgcatcctaacaagatgcccaggt

SEQ ID NO: 719 - DNA, 120 bp, synthetic construct
  source 1..120: mol_type = other DNA
aggaagcaggggttccttacgttctaaagaggtgattataaacccagatcaaagtcccctttatccagaaagcattcccagatggactttatcccattctgcattaatctttctatctac

SEQ ID NO: 720 - DNA, 120 bp, synthetic construct
  source 1..120: mol_type = other DNA
agcctttgattagagtgaaatttccttcactgacaggtcactggaagtatttgcaggaaatggaattatgggaaaagtccttctagggtgacataactgtgggtgggtcatttcaaaatt

SEQ ID NO: 721 - DNA, 120 bp, synthetic construct
  source 1..120: mol_type = other DNA
tgcaggcagacgtacttcctctaggatgaatcccactgcccatttttgggcatctatggatatacctgagaaggcatttgggtatatagaggtttatatgtaaatttgtatccttaagtg

SEQ ID NO: 722 - DNA, 120 bp, synthetic construct
  source 1..120: mol_type = other DNA
taatactttttcaaagtgctactttcacttccatcttactgttggatcctcacaaaagccctgtgaaatatttaaggaaagtatcttccctatttggcagatggtgggacggagaggtgg

SEQ ID NO: 723 - DNA, 120 bp, synthetic construct
  source 1..120: mol_type = other DNA
ctcttttcttagacatttaagacacttatggatttgttcctggggagaaggaacataaaatactcaagatggaaaatgatttgttcaggtttgtctggtcatctgaccctctgcctccag

SEQ ID NO: 724 - DNA, 120 bp, synthetic construct
  source 1..120: mol_type = other DNA
aaaaaaacataaaacataaacacaattttccatgcctgggtctattgcctgggtgatcatgtaagtaaggagaaagaatttggcctccgggtggcctaaataatccacaactctgctgtt

SEQ ID NO: 725 - DNA, 120 bp, synthetic construct
  source 1..120: mol_type = other DNA
agccgcgggcacaaaggtttttgtctcttgcttcagatgttgtacagtgaagaacagcgactcttcaaaccgaaaatgacaacatcaaagacatgatccatggaagaagtaattgataac

SEQ ID NO: 726 - DNA, 120 bp, synthetic construct
  source 1..120: mol_type = other DNA
ctgctgcaggcctcaaaagaggctggaatattccctatgatggggaggagaaagaaaactactaacggccagaatttatttacaatgacggtacaacttacattgatacaagcaatttgg

SEQ ID NO: 727 - DNA, 120 bp, synthetic construct
  source 1..120: mol_type = other DNA
attggacaaactagttcctgggctgcactcgtggcaggaagagcagagattggatgggaaggggaggtaataaagtgattagagtaaaaagggagcaaccacaaggggctaggctgatca

SEQ ID NO: 728 - DNA, 120 bp, synthetic construct
  source 1..120: mol_type = other DNA
taaaccctagataaatgtggttgaaactgattatctgactaatcgttttctaatgtgtatcaacataaatcatttgcattatggtttcttgccttctccccgctacagtaaaaataaata

SEQ ID NO: 729 - DNA, 120 bp, synthetic construct
  source 1..120: mol_type = other DNA
gcactttcctgtcagcctctcagatctctctcttgtcatccagtcaccaggtctggaagtggttaccttagaaacatctcccaaatctttaattctgccttatcctcacagccaggttct

SEQ ID NO: 730 - DNA, 120 bp, synthetic construct
  source 1..120: mol_type = other DNA
ttcctgagttgtcttattcattcctgcttccaatactttttgcacatagtctcttcctcctagaatactcttctcccttcctcccacctctctctctgtttttaagtatacaattcaggg

SEQ ID NO: 731 - DNA, 120 bp, synthetic construct
  source 1..120: mol_type = other DNA
ttctagggtttttatggttttaggtcttacgtttaagtctttaatccatcttgagttaatttttatttcaggtgtaaggaaggggtccagtttcagttttctgcatatggctagccagtt

SEQ ID NO: 732 - DNA, 120 bp, synthetic construct
  source 1..120: mol_type = other DNA
cacaaaggcatttgggatctcagaccatgagcactagaagtggttctgatgtcttgcaatccaagatccatcttgtatatcacattttacagagcagaaaacttaggaccagaaaagcaa

SEQ ID NO: 733 - DNA, 120 bp, synthetic construct
  source 1..120: mol_type = other DNA
tatccctgttaatcaataataagtatatagatgatcatcctggaagctatctctgagccccttcctaaccatgtctgccttttatcccttgaagactcagatcgaaagcaagaagcatca

SEQ ID NO: 734 - DNA, 120 bp, synthetic construct
  source 1..120: mol_type = other DNA
aaagcaaaggcactctggcagacacactgtctcattcaactgtgcacaaacagtccaaactcactaaagatttgcgttctaaaggttcatttttaaattgattggttggtattggggaca

SEQ ID NO: 735 - DNA, 120 bp, synthetic construct
  source 1..120: mol_type = other DNA
aatgatctctgtccctcagcccctacagaaccaaacattctcctaaaggggcttacctccaattcttgagaagtgattatccttagttcctcttaggtttaactgaaatgcctactattt

SEQ ID NO: 736 - DNA, 120 bp, synthetic construct
  source 1..120: mol_type = other DNA
aaaaaaaaaaaaggggaatgaaaccttcatggactcaggacagtgacatggaagcatggaaggtgtgccattacatccgcagcctctgcctgctgcctattgacgttagaggaaaaggca

SEQ ID NO: 737 - DNA, 120 bp, synthetic construct
  source 1..120: mol_type = other DNA
taaaatgcatgaattctggagcttgattgcttgagttctcgattccagttcttgctagctctgagacactgggcaagttattaagcctctgtcccacaatattttcttcatcagtaaaat

SEQ ID NO: 738 - DNA, 120 bp, synthetic construct
  source 1..120: mol_type = other DNA
ggcttcggctgtgcctagggcaacagccaacctaggagccagcgggctttcggggaaaaaaaagaaaaagacatctaaaataaaatgtttaaactgtttcaaaataattatcttgggaaa

SEQ ID NO: 739 - DNA, 120 bp, synthetic construct
  source 1..120: mol_type = other DNA
taactttaaaaagcaaagtattaatccctatacaagtgatgtttccttccacccctaccctttctcctctcaagttgaacactcacattctcacccttccaccccaacctctgaaaaaaa

SEQ ID NO: 740 - DNA, 120 bp, synthetic construct
  source 1..120: mol_type = other DNA
gtaacatgaatcaatgtgatgtgaataattaaccctaacttgactgttggggaaatagaggttcttgatataaaagaagccagacaatgtggggtttcttctgccccccagtgtggtgag

SEQ ID NO: 741 - DNA, 120 bp, synthetic construct
  source 1..120: mol_type = other DNA
taaattgttctgcataagaaaggaaagagaaatttagaagccaaaagaaatttgggagtggctaagacctcagggtgaggactgagagctgcctgaaggaaaagcagaggaaaattattc

SEQ ID NO: 742 - DNA, 120 bp, synthetic construct
  source 1..120: mol_type = other DNA
atgggcatttagtttgatttcatatctttgctattgtgaatactactgcaatgaacatacacatgcatgtatctttatagagaacgatttctattcctttgggtatatacccagtaaatg

SEQ ID NO: 743 - DNA, 120 bp, synthetic construct
  source 1..120: mol_type = other DNA
tttgttctacattctattgataatatgtatcatgcttatttattcatattgaaacatctttgcatctctactataaatcccacttgattttgatgtagtatttttcgatgtgctgttggg

SEQ ID NO: 744 - DNA, 120 bp, synthetic construct
  source 1..120: mol_type = other DNA
aggtacattgttggatggttaatttgtaatctttctacttttttaatgtaagcatttattgctgtaaactttcctcttagcactgcctttgctgaatcccacaggttttatgtttccatt

SEQ ID NO: 745 - DNA, 120 bp, synthetic construct
  source 1..120: mol_type = other DNA
tttttccatccctttactttgtctatatttgtctttactggtaagaaactttactgagtttcttgaaacagcttacaggtgtattatctttttaaataaatccagccattctacatcttt

SEQ ID NO: 746 - DNA, 120 bp, synthetic construct
  source 1..120: mol_type = other DNA
aatttgctctttattttgactttagacagtctaattataatgtgctatggagaagaccctttgcattgcatctgcctgggaaacattgagcctcctatacctgcatgtccaaatcccttg

SEQ ID NO: 747 - DNA, 120 bp, synthetic construct
  source 1..120: mol_type = other DNA
ctctggctacttgggagataactgagatattttaatgtcttttgctccctctgctttcacagcagcttccttgaaacatagaaacctgtttcaatattgtcttttaaaatggcggtgagg

SEQ ID NO: 748 - DNA, 120 bp, synthetic construct
  source 1..120: mol_type = other DNA
ctttgattttgagtgcctatagtagtgtgatccctgtatgatttatttggcagtatacaacatcagtggtatctgtgacttcctcattgacttaaggtgcacttattagtgaaggctgtg

SEQ ID NO: 749 - DNA, 120 bp, synthetic construct
  source 1..120: mol_type = other DNA
acagcagcgccacatcagtccggcctcaggtcaagacttatgtgataggcattattctgggtacttgggatgcatcagtttttaaaaagtttctttttaaagctcatgcctgtaatccca

SEQ ID NO: 750 - DNA, 120 bp, synthetic construct
  source 1..120: mol_type = other DNA
aacctccaagagtgcagaactttgttaaccttatcactgttgtaacctagaaacatcctggcacatcacgggtacttaataaatgaattcaggagacatatgaagcctggagataacaga

SEQ ID NO: 751 - DNA, 120 bp, synthetic construct
  source 1..120: mol_type = other DNA
actgttacagaaggcacagaaggaaaaccttcggctactgctatcagtggaatttctctgtagccagactgaggtctggtggcatttgagatataatatagatatagacctacaaataca

SEQ ID NO: 752 - DNA, 120 bp, synthetic construct
  source 1..120: mol_type = other DNA
atgtttgtcttggtgtttttggatgtgctgatcaagagcaagatgttctggattcttaaaactcccctcacaaggaccaatctagagataatttattgatcagtgatcacagcttgtacc

SEQ ID NO: 753 - DNA, 120 bp, synthetic construct
  source 1..120: mol_type = other DNA
gcacttccagtcctctgacagctgcaggtacccactggccgactgtgggtccagggtgacgctcactgtggggacaagggaaaaaaaaaaaaacagcatcactgttttgttttgtttttt

SEQ ID NO: 754 - DNA, 120 bp, synthetic construct
  source 1..120: mol_type = other DNA
tcttccatatcagtccttccttttccttccaagaatcttccaaaactgaccctgtcaacttcagcaattttattgcacaaattaagctgtcatccacgggattagaaaagagggcattca

SEQ ID NO: 755 - DNA, 120 bp, synthetic construct
  source 1..120: mol_type = other DNA
ctgagttccacaagttcttgcaaagcatcatctgttgtaacacaagcattcagggtctctgtaaactgttcaatttcagtttcaaaactaccagcctgctctgtaagatggttcaagaaa

SEQ ID NO: 756 - DNA, 120 bp, synthetic construct
  source 1..120: mol_type = other DNA
aatgggtttcccaacccagaacttcttccgtggatacctaagaagatgacatacataacaagctgttactcagctcttcttactttccttcatacttatctctcaatcctcatggcaatt

SEQ ID NO: 757 - DNA, 120 bp, synthetic construct
  source 1..120: mol_type = other DNA
taggaagtctctcgtgtcctagaagggaaagaaaaaagcacaagtatcaatatgaatcaaataagacttcaatgcatctgcacccaacactgtagcagagatgggacatatcagtgaaca

SEQ ID NO: 758 - DNA, 120 bp, synthetic construct
  source 1..120: mol_type = other DNA
tataggcctatttggattggccgtttcttcttgtgaagcaatcagtgtagtttttcctttcttttcctctttatcggagactattttaacatataaaggagcaaaaaggctgggtgcagt

SEQ ID NO: 759 - DNA, 120 bp, synthetic construct
  source 1..120: mol_type = other DNA
gagaaaaagagagaagcaatacattccaggtattttagagacagattcaactggacatactggtcaaggataaacaagaacagagcatggtttgtacaggggggagaatggtggtgctat

SEQ ID NO: 760 - DNA, 120 bp, synthetic construct
  source 1..120: mol_type = other DNA
ttcttgatgctcccagcccataggtttgtctttcctttcctatcacctctatcaaaaggtctcttctattttacacattttgtcctgctgcttctccctctcacctgtatttctatttta

SEQ ID NO: 761 - DNA, 120 bp, synthetic construct
  source 1..120: mol_type = other DNA
gcacaatctcggctcactgcaacctctgcctcctggattcaagtgattctcctgcctcagcctcccgagtagctgggattataggtgcgcaccatcacgcccagctaatttttgtatttt

SEQ ID NO: 762 - DNA, 120 bp, synthetic construct
  source 1..120: mol_type = other DNA
ctattcatccataataaatttgagttcatggaagtaagacagtagaatagtaatgattagaggttgggaagggggctggggagaggagggtggggagaagttggttaacagatacaaagt

SEQ ID NO: 763 - DNA, 120 bp, synthetic construct
  source 1..120: mol_type = other DNA
aaaggagatgcagaaaatgacccagtcaaagagtatgacgagagaaatctgagagaacagaatgacatctggaggaaaagagggggccagagagacattctggacaaaataagaacaaga

SEQ ID NO: 764 - DNA, 120 bp, synthetic construct
  source 1..120: mol_type = other DNA
ccaccagctgctaagtgtctgccaatgacttgttaagagggcttgtgatggcagtgatgaggatggaggatggtaaatgatattaataatcttcccttccattttctactataccattta

SEQ ID NO: 765 - DNA, 120 bp, synthetic construct
  source 1..120: mol_type = other DNA
acttttccctcctggacaaaatctgtcacctcttccaggaagttttgcttgattaatgtcatctaagcctgaccagccctctcttcagcaccccactgttcagtctaaaatatctatatg

SEQ ID NO: 766 - DNA, 120 bp, synthetic construct
  source 1..120: mol_type = other DNA
gccaggatatcagcttctccctttgcctggaagccctgaattttgtctctgtccctccttagggtactcaggtggttcaggattttttcctgtggaaaaacaagcagtggcaacaggtgg

SEQ ID NO: 767 - DNA, 120 bp, synthetic construct
  source 1..120: mol_type = other DNA
tataccttgctgttgggagagcctcaacaccctttccttctatctgttggaaaatcgctgtaatgcaccaactgtaataaaaaatctctcactacctgctgggaaactcataatgataca

SEQ ID NO: 768 - DNA, 120 bp, synthetic construct
  source 1..120: mol_type = other DNA
taaaaaacaaacaaacaaacagcactgaggttctttaccaaaactcgagaagcatcaggaagcttcaggagtctgactgtcagcatttccctttgtgagtatttccctgggctgttctat

SEQ ID NO: 769 - DNA, 120 bp, synthetic construct
  source 1..120: mol_type = other DNA
atattatcagaacataaatgtaattttgcacttttttaacaaaaaaattgtaatttttttctatattgattctgctttttttcctttattattgctgtttgtcctgactttgggtggaca

SEQ ID NO: 770 - DNA, 120 bp, synthetic construct
  source 1..120: mol_type = other DNA
gcctctgtcagtagtgacattaatgggacagaaataaaacccccagtctataagacccaagagtaaacaaaacagggatataacgtccactcattgagggtctagtacaataatacataa

SEQ ID NO: 771 - DNA, 120 bp, synthetic construct
  source 1..120: mol_type = other DNA
cacccaggctccatgctggggtttgatggtctctaaacctcctgaaactgtctaaaaattattgcatatgtactagatacctaaaattgtctggggattacagaagaataaccttctgta

SEQ ID NO: 772 - DNA, 120 bp, synthetic construct
  source 1..120: mol_type = other DNA
gactaaagagaaataataaccaaatgcaatacgtgaaccttgattggatcctgtaaaaagaaaaaaaaggttataaaaatagtcttggaactattgtgggaaatttgtaagtaggctggg

SEQ ID NO: 773 - DNA, 120 bp, synthetic construct
  source 1..120: mol_type = other DNA
accctagccttagctatgacaaactttcacatatggggtgagcaataaagtgtccctgttggacagtagttttccttcttagtgatagaggatctcaagatttcagaattaggagaaatg

SEQ ID NO: 774 - DNA, 120 bp, synthetic construct
  source 1..120: mol_type = other DNA
tggatctcataaatacctaatctgcatatgtcaacagactggtcaaggtgacaccatgtaatttcaagatgtggatgcatgcacgattattggctccaagaataatcactatgagctaca

SEQ ID NO: 775 - DNA, 120 bp, synthetic construct
  source 1..120: mol_type = other DNA
cgttaaattgccctggtcttgtggctgacccacaggggaaaattgagggttcttcatatttgtgccagaatatctgtctaatgttgaatcatgaaccaagctctcttgtctaaaatattc

SEQ ID NO: 776 - DNA, 120 bp, synthetic construct
  source 1..120: mol_type = other DNA
gcaagactgtgacccaggttaagaattttggactttatcctaacagccctgggaagccattgagggtttaagcagcaggatgttgaaagttattcaacagctagcagatgtttattaggt

SEQ ID NO: 777 - DNA, 120 bp, synthetic construct
  source 1..120: mol_type = other DNA
cgtatccaaggtttcgctccagcaacttacagaaaccaggagaagaaaaagctgtgtctgagaaaatggttgttgtggagtaaattgtaatagtgagaatcactccttcccttttcttta

SEQ ID NO: 778 - DNA, 120 bp, synthetic construct
  source 1..120: mol_type = other DNA
cattaatccagggaaagggaggaatctaagccatcagcaagggagttagtgcttttcatcaaatttgagacacctgtgacatcacattttagcatctctgaaatgtgatcaattgcatgt

SEQ ID NO: 779 - DNA, 120 bp, synthetic construct
  source 1..120: mol_type = other DNA
ttgaatacaatttgtccccttatctgtgaggtgtttcctgtacccatcccacctctgagttgaatgtatccctcctcctgcagctttgcatacactgtatttctacaatagcactatcac

SEQ ID NO: 780 - DNA, 120 bp, synthetic construct
  source 1..120: mol_type = other DNA
aacatgaaaaaaaaaatcagagccctaaaacaactggatttggagtcaggcatcttggattctggcctcagttctatgcccaattcatggctcgttaccttattgataagacacatgtgt

SEQ ID NO: 781 - DNA, 120 bp, synthetic construct
  source 1..120: mol_type = other DNA
atctgatttcaatcttgagctcagtatttactcataacttgttagaattaaattagataatccatggaaaatgtatggatgaatgacacctcatgacgggtggttatgtgtgtatttgca

SEQ ID NO: 782 - DNA, 120 bp, synthetic construct
  source 1..120: mol_type = other DNA
atctcttggcctccctccacacacacacaattttggggggaagaacaaaattccatttctataaagctggcaaaatctaattcatcctgatgccagccaatttatgtttttgtcttctca

SEQ ID NO: 783 - DNA, 120 bp, synthetic construct
  source 1..120: mol_type = other DNA
ttggggaaaaacatgttagggattatgatttcagctaagagttaaaaacaggaggttaaggcatgcataaacgaatgtcattctcccctcttttgaagtacacacaaatcgtgggtcaaa

SEQ ID NO: 784 - DNA, 120 bp, synthetic construct
  source 1..120: mol_type = other DNA
tacttctggttccgcagactagaatggatgggagtctgagtaggataccagaaagcgagaaagacccaagaggagggggagaatgtaaggacaagcaaacaggagggatctggctggcag

SEQ ID NO: 785 - DNA, 120 bp, synthetic construct
  source 1..120: mol_type = other DNA
ttttagcaagcaaatactctcagagacctatttacgaaaattattacttcctaggtaaaataacgttcaaccagacagccattgtcgccattcgacggaaggaaaaactgaggttccagg

SEQ ID NO: 786 - DNA, 120 bp, synthetic construct
  source 1..120: mol_type = other DNA
ggtcttcctccctcacccagttgaaaccagttccccatcatgcattattctgtttccctttcttcatgcatttgttgccatttgaaagcaccttgttcatttctttgtcaatgtgtttat

SEQ ID NO: 787 - DNA, 120 bp, synthetic construct
  source 1..120: mol_type = other DNA
ccacaggttcttcttctgtaacatggaagtagctagatctgcttcgtacggttattatgaggcttaaatgtaaagctttgaaatagtgaatcagtgctgactaggccaaagggtatggta

SEQ ID NO: 788 - DNA, 120 bp, synthetic construct
  source 1..120: mol_type = other DNA
aaactgaatagacaggcctttccaacttctcagtttatcaccgttagctcatacacttttgtccttgcaatcatacatctgcctgactgtctatacaactacacaaatgtccccatttct

SEQ ID NO: 789 - DNA, 120 bp, synthetic construct
  source 1..120: mol_type = other DNA
caacgcgcccggccgacactgtagcattttctaataggcctacgtaaaaattatctaattctctagggtagtttaactttgatttagtattttagggtatttagagtactccttaggggt

SEQ ID NO: 790 - DNA, 120 bp, synthetic construct
  source 1..120: mol_type = other DNA
gtatcacatttagaggtatatgatctcatcccactattagtgatggtagatttgatggaagattcaggtattgtcagcctgatccctccattccccagtttgtgagttatggatttactg

SEQ ID NO: 791 - DNA, 120 bp, synthetic construct
  source 1..120: mol_type = other DNA
ctgcgcctggccagtaacataagtttttaaaaggtttttgcttcaggtactctcctattttcctgctccacatttacagcaaaattagaaaatattgtctgtacctgccctctgtttcct

SEQ ID NO: 792 - DNA, 120 bp, synthetic construct
  source 1..120: mol_type = other DNA
gcacaggacaaccatatgtcttaactgaaaagccatcatgttccttagatttggtcccttcatgattgctctgtttcttgtggtcctttttcatgccaaattgcagaaatgatagaagct

SEQ ID NO: 793 - DNA, 120 bp, synthetic construct
  source 1..120: mol_type = other DNA
ggtattacaggtgtgagccaccgcgcccggtcccagtgaacttttcttcttattattatttttgtagagatggtgtctagctatgtcgcccaggcttgtctcaaactcctggcctcaagc

SEQ ID NO: 794 - DNA, 120 bp, synthetic construct
  source 1..120: mol_type = other DNA
gcagaggagctccccacttcctagatggggtggcagccaggcagaggctgtaatcttagcactttcggaggccaaggcaggcggctgggaggtggaggttgtagcgagctgagatcatgc

SEQ ID NO: 795 - DNA, 120 bp, synthetic construct
  source 1..120: mol_type = other DNA
tactttgtgaggggagactatttcccaggggttgtataatctacattccctttagtggcagatgaaattcccattaaaccacatctgcaacttcacttggaattgtcagacttttgactt

SEQ ID NO: 796 - DNA, 120 bp, synthetic construct
  source 1..120: mol_type = other DNA
ccccttttttccatatggttaactaattatctcagtgtcatctaatgcacagcctctaattttccccactgttttacactgcaagctctgtcatatgttatatatccatccatgccttca

SEQ ID NO: 797 - DNA, 120 bp, synthetic construct
  source 1..120: mol_type = other DNA
acaaaccaagaaggggaacagggagtggggagaaaatattacaattttaaatagggaggttagagaagtccttacagagaaagtgatatttcagcaaatgcctgaaagaggttagagagc

SEQ ID NO: 798 - DNA, 120 bp, synthetic construct
  source 1..120: mol_type = other DNA
actttctacagagtttccaacattttgcagtaaaatcattgttcacaatttttttgggtcacagtttttggcaaatgaagcatggtataggatgcctgggactgtggagtttcccaggac

SEQ ID NO: 799 - DNA, 120 bp, synthetic construct
  source 1..120: mol_type = other DNA
tgacagtctttatgaatgataaaagagtgtagtcaatcataaagctctgactcactcccagtttgccctttccttcctagagaatgtctttcaggctcttcctcccctcagaagctttca

SEQ ID NO: 800 - DNA, 120 bp, synthetic construct
  source 1..120: mol_type = other DNA
ttgaaggctttaggggaaaatttgtttctgttcattctggttgcttgcagaactcaattccttgtagttggaggactaggttcctgtctttttactggctttaaacagagctgttaacag

SEQ ID NO: 801 - DNA, 120 bp, synthetic construct
  source 1..120: mol_type = other DNA
accagggaatgaaaataatgcacttttgttgataaagtaacagattttgcctggttgtctttggagccgtcatgctctgtgtgtgtttctgcttccagatttctttttttttctctccaa

SEQ ID NO: 802 - DNA, 120 bp, synthetic construct
  source 1..120: mol_type = other DNA
tgtttccagtgttgcctgcttcttgttgcatttagcaaaatattataagaaagtgcaaactcaggcaagaaatgaccagattgcaagcagagattgaaggaaatagagtccagagatgtg

SEQ ID NO: 803 - DNA, 120 bp, synthetic construct
  source 1..120: mol_type = other DNA
cgagtctactttgaatacagtttgctctagtcacaatggaaagtaatcatttaccagggacactagacatcatgctagttgtgctctacactacaagccaagttaaaacctgctccatct

SEQ ID NO: 804 - DNA, 120 bp, synthetic construct
  source 1..120: mol_type = other DNA
aggaagccataaagcctaacataaaaaagcctgtggttaagcttaaaataactcataggccctcaaattgcaaccacagaagtcaggctgcaaaatctgtacggggcaatcctaagaaat

SEQ ID NO: 805 - DNA, 120 bp, synthetic construct
  source 1..120: mol_type = other DNA
tgatcttgtaatcacatgttgaagatagaagaacttctaatagcatgcatccctaagtgacttcatagagtacaaccactcaccatcttgataaacctacccaggactgttgagatggaa

SEQ ID NO: 806 - DNA, 120 bp, synthetic construct
  source 1..120: mol_type = other DNA
ccaccgtgcccagccaggtgttctttttaactagataaactgattcaaagattcatatgaaaaataaagaaagaataccaactaaacctcagacaaggggagcttgagaaaaactggctt

SEQ ID NO: 807 - DNA, 120 bp, synthetic construct
  source 1..120: mol_type = other DNA
catgaaaaaattggaagatacacaggtaattaacaaaagagattacctctttggggtaaggtgtaaactggacagattgtggacaggattctgagtgagatccttcactgttcagtctcc

SEQ ID NO: 808 - DNA, 120 bp, synthetic construct
  source 1..120: mol_type = other DNA
tgcttatcctctatagcttctcatggtgatgtccctccaccttgtctccataaagcagcagcttccatctttccttatccccttgtatctttagttccccctttatttattttattttat

SEQ ID NO: 809 - DNA, 120 bp, synthetic construct
  source 1..120: mol_type = other DNA
ctctggtaaccgctattctcctcttcccttctatgagatcagcttttgcagttccacatatgagtgaaatcatgtgccatttgttcttcattgcttggcttacttaatataatgtcctct

SEQ ID NO: 810 - DNA, 120 bp, synthetic construct
  source 1..120: mol_type = other DNA
tattttactgagctgatctactgagaggtgggcacaaatcctttagactttattgaaaaattagttgtccaaaatcttctaggatactcccacttaattacatatatgaggccgggcgcg

SEQ ID NO: 811 - DNA, 120 bp, synthetic construct
  source 1..120: mol_type = other DNA
tgaccattgactgtggtcatgtcttttgctaccactgcatcattcaggtctgtgaatctactaggcaaccattacattgttctctgtgcaagccagcttttaagaaaaaatatctgccat

SEQ ID NO: 812 - DNA, 120 bp, synthetic construct
  source 1..120: mol_type = other DNA
tgaaagattcttggtaaagtactaccctttgcatttggataataaagctggtttggttttatatcttttatggaagtaagtctatcacattgccttgatggtttcatctctgaggttcag

SEQ ID NO: 813 - DNA, 120 bp, synthetic construct
  source 1..120: mol_type = other DNA
tttcagcctgtataaaatctatgtaatttttctttcagaatttaacaaggaaaatattatttcctctggggtcctagtatgtttcttcttgcctgctaaagaaacatcaggccaggcttg

SEQ ID NO: 814 - DNA, 120 bp, synthetic construct
  source 1..120: mol_type = other DNA
aaatacattctcaagaccgaatcttaaatttgtaggcatcttaaattaatcacgtttaaacccaggctcctccccccgttctggccccatccaatgcccacaaagcaaaaataaaaccta

SEQ ID NO: 815 - DNA, 120 bp, synthetic construct
  source 1..120: mol_type = other DNA
cgagactatccttgtttattttcatagggcaaaattctaaaccatcggaagattctgaagggatacaaggatagcattcagaattctcaatctatgggagaagatgagattcaggccctg

SEQ ID NO: 816 - DNA, 120 bp, synthetic construct
  source 1..120: mol_type = other DNA
tgagtcctcttgctctatgactacggtgtggcctatttgcaagagatttggaccaagagtcaagagagacaaggtgttattctcatttactgaattctttaataactgaattagccaacc

SEQ ID NO: 817 - DNA, 120 bp, synthetic construct
  source 1..120: mol_type = other DNA
agtgagggagaagtgaaaattatgatggggccaactgagttgaggccttccaaagcaggctgaaatttgagccttaactgaatagacaatgggattcttaacagatttttatctgtctat

SEQ ID NO: 818 - DNA, 120 bp, synthetic construct
  source 1..120: mol_type = other DNA
ggagattatagaaaagtattggagaaaatttagaatccatgttcatttctaaaactagtttcctttcattcttccccttcctacatggttcccagcctccactcctggccacagtttctc

SEQ ID NO: 819 - DNA, 120 bp, synthetic construct
  source 1..120: mol_type = other DNA
cacatactgccacactcagctgtgtagttctattttatctcttctatttgcctgtcccttttttccctcctacttttatggattgttgagccctgcttttacaaagtaccataatttcta

SEQ ID NO: 820 - DNA, 120 bp, synthetic construct
  source 1..120: mol_type = other DNA
aaggttggccttagtaattctgttatctaggtattttgtactaatacttattttctgacttcttgatatgtcacggactaaaagaagtcagtcacagattcctactaacagtgagttttt

SEQ ID NO: 821 - DNA, 120 bp, synthetic construct
  source 1..120: mol_type = other DNA
atgttgttgtcttatttaatatttttctctcccaaattcaattctgtccgatagtaagatcaagatatcagaattctttcattttggatttagttaatacacctttgcctaccattatct

SEQ ID NO: 822 - DNA, 120 bp, synthetic construct
  source 1..120: mol_type = other DNA
aatctaaaaagcagagcgcctctcctcctccaaaggaatgcagttcctcaccagcaacggaacaaacctggacagagaatgactttgacgagctgagagaagaaggcttcagacgatcaa

SEQ ID NO: 823 - DNA, 120 bp, synthetic construct
  source 1..120: mol_type = other DNA
ggaagaaactgcatcaactaacgagcaaaataaccagctaacatcataatgacaggatcaaattcacacataacaatattaactttaaatgtaaatggactaaatgctccaattaaaaga

SEQ ID NO: 824 - DNA, 120 bp, synthetic construct
  source 1..120: mol_type = other DNA
atcacaattaaaggaactagaaaagcaagagcaaacacattcaaaagctagcagaaggcaagaaataactaaaatcagagcagaactgaaggaaatagagacacaaaaaaacccttcaaa

SEQ ID NO: 825 - DNA, 120 bp, synthetic construct
  source 1..120: mol_type = other DNA
tgtaacattgcaacctcaaatgcaggttagacaagtacaaaccccagaagaatatcaaatagaaaaagataaagtctctgccatggcaatgccaatccagatacagtatccacaatatca

SEQ ID NO: 826 - DNA, 120 bp, synthetic construct
  source 1..120: mol_type = other DNA
tttgaaaacgggcacaagacagggatgccctctctcaccactcctattcaacatagtgttggaagttctggccagggcaatcaggcaggagaaggaaataaagggtattcaattaggaaa

SEQ ID NO: 827 - DNA, 120 bp, synthetic construct
  source 1..120: mol_type = other DNA
ttggcatgggcaaggacttcatgactaaaacaccaaaagcaatggcaacaaaagccaaaattgacaaatgggatctaattaaactgaagagcttctgcacagcaaaagaaactaccatca

SEQ ID NO: 828 - DNA, 120 bp, synthetic construct
  source 1..120: mol_type = other DNA
tatatagacattaaaaaaaataacttaaaaaaaagaaatctgtaacaataagatgatcctgtgggactgaatgcttttgtcatccttaaactcataattgaaacctaatctctaatgtga

SEQ ID NO: 829 - DNA, 120 bp, synthetic construct
  source 1..120: mol_type = other DNA
ctgacctgagaagagatagaaaatgtggccagtcatatattgattgtagaaattgaatgtgtaatcaaaatccttctcatataggaaactccaggtccagaaggcttcattgatgaaatg

SEQ ID NO: 830 - DNA, 120 bp, synthetic construct
  source 1..120: mol_type = other DNA
ttaaatgctttgctgcttagaaattttatctgccagataccctaaatcatctctctcaagttcagagtgccacagatctctagggcaggggcaaaatgccaccagtctctttgctaaaac

SEQ ID NO: 831 - DNA, 120 bp, synthetic construct
  source 1..120: mol_type = other DNA
ggaatatcttcaatgtggttaaggacacccacgaaaagtttacagctaccctcatattcaattatgaaaggccagatgcttacttcctaagattagcaacaaagcaaagatgtggctctc

SEQ ID NO: 832 - DNA, 120 bp, synthetic construct
  source 1..120: mol_type = other DNA
gacaagtgagagaccaaaggactacataacatatgattgcatgtccatgaaattctagaaatttcattattacagtaacagaaagcacagcagtggttgagtgaagagaagggggtgagg

SEQ ID NO: 833 - DNA, 120 bp, synthetic construct
  source 1..120: mol_type = other DNA
agcagtggaggagcctagcagggggttcttgacatgcattcggtatttaatacattttgtgggactgccaaaaactaatggcctcctcatgattaaaaacataagagtaaaaaaatacca

SEQ ID NO: 834 - DNA, 120 bp, synthetic construct
  source 1..120: mol_type = other DNA
acaaaaaaacctggtcactatgagaatctctatcttgtgccttcagccacaacttcaccaggtttaaagagaaaacccctttctctacaccgccattcccaaggcgagctcactctctgg

SEQ ID NO: 835 - DNA, 120 bp, synthetic construct
  source 1..120: mol_type = other DNA
tttcctgtagatttcccgggctggcctcccaccaggagagtaggaaaatgggaccaatgctagaatatcgccctcccactggtcctgaatgggaagaatcctgggtttccagatcctgta

SEQ ID NO: 836 - DNA, 120 bp, synthetic construct
  source 1..120: mol_type = other DNA
atcctacagcactacctagtggacagcatagtgcattacataaaattattgataaggcaagaaaacaaggagatactgaggcgtgacaattcccagtaacattagaactgataccacctg

SEQ ID NO: 837 - DNA, 120 bp, synthetic construct
  source 1..120: mol_type = other DNA
ggtgtcctgtccattctcaggatggtcacatgtatgctgctggagtgtcctatgaggaatgcaaagtgcctgaattttctgactcttcccctcagatcccccaaaggcacatgtgaccca

SEQ ID NO: 838 - DNA, 120 bp, synthetic construct
  source 1..120: mol_type = other DNA
atttgtttatgattattttctcctgtagcttgagacaactgccttgagtgggactgagagatacaaaatttcttcaggtccttcctctgacacacaccattgtaatttcaagagctcctg

SEQ ID NO: 839 - DNA, 120 bp, synthetic construct
  source 1..120: mol_type = other DNA
cctgcacacagaagtctgtggtattaagagatgaattttcaagcccgtgcagcttttaccctatttccagggctctttcttggattgtattttctatcttttccccaacctttttaaagg

SEQ ID NO: 840 - DNA, 120 bp, synthetic construct
  source 1..120: mol_type = other DNA
ctttgatgaaatatttgaaggacataaaggaatttgtcatgagggtatctggaagaagttttttctagggagtaggaaccttcagtgtcagtgtaccagggcaggatcatgtctgtgtgt

SEQ ID NO: 841 - DNA, 120 bp, synthetic construct
  source 1..120: mol_type = other DNA
acaggatgctgagagataaatgtcattttctctatcatggggtatagccagatggaagattgagaagtggctcacagctcagcagaatgaaaaaatatctgaatgctgctttctgaaact

SEQ ID NO: 842 - DNA, 120 bp, synthetic construct
  source 1..120: mol_type = other DNA
tgtgtcatctcatcctgattagaagcccacatgtggttatctaaattgtgcagccaaagcctcttgcagtgtttaactgcaataatgttggggaaagtgaatttttctcctttgtagaag

SEQ ID NO: 843 - DNA, 120 bp, synthetic construct
  source 1..120: mol_type = other DNA
atctacctcggtgtcagattaatggcaggaattaatcagtagcgaatggggattccatttccggtaatagggtgaactaggttttaaagctgcctcttctaccaaaaacaactaaaaaag

SEQ ID NO: 844 - DNA, 120 bp, synthetic construct
  source 1..120: mol_type = other DNA
ttgcccaaataattctacaaggaaaaagctgctcagagcatgaactgtataaagtacaagtggagaaaagtcagtctgattgagaaccagtggaaacaatagataagaggctcataaagc

SEQ ID NO: 845 - DNA, 120 bp, synthetic construct
  source 1..120: mol_type = other DNA
aagcactgtaagtctgcaggaggtacccctcaaattttcagttaatcagcatattatataagggaactacccaaagacagggaaagaattatccgaaaggacttcagagaatagtaccca

SEQ ID NO: 846 - DNA, 120 bp, synthetic construct
  source 1..120: mol_type = other DNA
aaatgtcagacataaaatacactggatgtgaggtgagattaatggtaaactttatgctgtagattaaacagtgactttgaagacatagaaatagaaactttctgggccaggtgcggtggc

SEQ ID NO: 847 - DNA, 120 bp, synthetic construct
  source 1..120: mol_type = other DNA
ggagttcaaattcatactggtgtggttgagtcaaactatgaaggtgaaattcaattggctattagctcctcaattccttggagtggcaatccaggagacaggattgttaaattattactc

SEQ ID NO: 848 - DNA, 120 bp, synthetic construct
  source 1..120: mol_type = other DNA
caaaccacagaatgagagaaaatatttgcaaaccttatattcactaatgggttaatatgtaaagtctatagactccatagaacttaatagcaaaaaacagataacccagttcaaatatgg

SEQ ID NO: 849 - DNA, 120 bp, synthetic construct
  source 1..120: mol_type = other DNA
gtcagttgaattaacttaactttgacctgaggctgcctgtgtacctaagtaagtaggtaaacaaatcaaaacctaagttaggagtataactgttagctggggttcacccaatcacaagca

SEQ ID NO: 850 - DNA, 120 bp, synthetic construct
  source 1..120: mol_type = other DNA
gaatagagaggctagaaataaaagtttataattatggtcaattaaatttcaaaaatactgccaaggcaattcagtgggggaaagaaaaatcttttcgagaaattatacacaactcaatag

SEQ ID NO: 851 - DNA, 120 bp, synthetic construct
  source 1..120: mol_type = other DNA
aaggtagaagggcaagtaaagtacagagaacacactcctggaagcccttttataaaggcattaaaaccacccccaagggtggaaccctcatggtccaatcacctctcaaaagtctcacct

SEQ ID NO: 852 - DNA, 120 bp, synthetic construct
  source 1..120: mol_type = other DNA
gtacataatggtcaagcagcattattctcaatggctgaagagtggaaacaatacagatgcccaggaacaaatgaatgaataagatatggtcaatctatggaacggaatatttggccataa

SEQ ID NO: 853 - DNA, 120 bp, synthetic construct
  source 1..120: mol_type = other DNA
tggcagcaaggcagaatcaaaatggacaaaatccccaaaatagtgagtaatgttagaatggaagccaggaaatcctgactgcaagggatttagggaaattattaagactatggtgtttct

SEQ ID NO: 854 - DNA, 120 bp, synthetic construct
  source 1..120: mol_type = other DNA
gtggatgcccctaagagagcttctaatatcgaccaagatagaaattttaaaacaatgtagtatttgaggggcaatgaaataaactgtcactcaaagacataaaagatgcaggggttgtgg

SEQ ID NO: 855 - DNA, 120 bp, synthetic construct
  source 1..120: mol_type = other DNA
cttctgggctcaagtgatctgccctcctcggcctcccatagtgctgggattacaggtgtgagccaccatgcaaaacgctggttttgtcttttgtggggtatatacccagcagtaggattg

SEQ ID NO: 856 - DNA, 120 bp, synthetic construct
  source 1..120: mol_type = other DNA
caggcatgagccaccacgcatggcctgtatgtcttcttttgagaaatgtctattcaaatcttttgcccatttttttacttagacttttagaattttttttttttttttttttactataga

SEQ ID NO: 857 - DNA, 120 bp, synthetic construct
  source 1..120: mol_type = other DNA
ctccagttttgatctttttgcttaatataattttggctattctgggcattctgtgttttcatataaattttgggatttttttttctatttctctgaagactattattggtattttgatag

SEQ ID NO: 858 - DNA, 120 bp, synthetic construct
  source 1..120: mol_type = other DNA
aattataattgatctgaaggattgcttttttaccattcctctggaggagcaggattttgaaaaatttgcctttactataccagctataaataataaagaaccagccaccaggtttcagtg

SEQ ID NO: 859 - DNA, 120 bp, synthetic construct
  source 1..120: mol_type = other DNA
ctgggttcaagtgattctcctgcctcagtctcctgagtagctgggattacaggcatgcaccaccacactcggctaattttgtattttcagtagagacgaggtttcaccatgttggtcagg

SEQ ID NO: 860 - DNA, 120 bp, synthetic construct
  source 1..120: mol_type = other DNA
taggttttggtatgttgtgtttcctttatcatttgtttcaagaaattgttcaatttccttcttaatttcttcattgactcaatggtcattcaggagcatattgtttaattttcatgtatt

SEQ ID NO: 861 - DNA, 120 bp, synthetic construct
  source 1..120: mol_type = other DNA
tatatcttcccaacagtccctcaaagtcttaactcattccagcattaattcaaaagtccaaagtccagagtctcaacctgagacaaggcaagtctctcccacctgtgagcttacaaaata

SEQ ID NO: 862 - DNA, 120 bp, synthetic construct
  source 1..120: mol_type = other DNA
ttgcaattttctgcagctagcttgaattcctctccagaaaatggtttttttcttttctacaacatggccaggctgcaaattctccaaacttttacactctgcttcctttttaaatataag

SEQ ID NO: 863 - DNA, 120 bp, synthetic construct
  source 1..120: mol_type = other DNA
attgtatagtgactttatttgtctcatagtttttgtatcaaaatcaatactccttctctttttcctggtttccattggcatggaataactctttccaactctttactttcagcctatgtg

SEQ ID NO: 864 - DNA, 120 bp, synthetic construct
  source 1..120: mol_type = other DNA
atgttatctgtttcttttctcttgctgcttttaggatcctttctttacccttgtcctgtgggagtttgattattaaatgccttgaggtaatctttgggttaaattggcctggtgttctat

SEQ ID NO: 865 - DNA, 120 bp, synthetic construct
  source 1..120: mol_type = other DNA
ttttttgaaaagtgtctgttcatgtcctttgcccattttttaatggagtgggttttttttttcctgtaactgtgtttaaattccttatagatgctagatattagccccttgtcagatgca

SEQ ID NO: 866 - DNA, 120 bp, synthetic construct
  source 1..120: mol_type = other DNA
tgagttatgttccttcaacacaagatgggaagctccccaaatccacatctcttgcttgtgggggagccatcctcagcacatcggccctacccaacccacagtagataccaacatccctat

SEQ ID NO: 867 - DNA, 120 bp, synthetic construct
  source 1..120: mol_type = other DNA
actgtaacagattcctaagtgcaagtccctgaaacaggatcacagtacacaacattaacataagagggtacattatgcacggtacagctttccttgaggttctagagaatgcaaacctta

SEQ ID NO: 868 - DNA, 120 bp, synthetic construct
  source 1..120: mol_type = other DNA
aggccacaggtagcagtgttgctgggttgctgcattctttactgtgagatttagaaaaactgtcattatcattatcctaatattgtcaaaacttgtaggcagcctatttgctgtttttgg

SEQ ID NO: 869 - DNA, 120 bp, synthetic construct
  source 1..120: mol_type = other DNA
atggccttgtgggaagggaaagacctgaccgtccccaagacacccataaagggtctgtgctgaggaggattagtaaaagaggaagtcctctttgcagttgagataagaggaaggcatctg

SEQ ID NO: 870 - DNA, 120 bp, synthetic construct
  source 1..120: mol_type = other DNA
tgaggaacttataccaaccttactcatcagtgcccaagaaaaatagctttaatgtgagacagttgtatgatggtacagatagtgccagtatatgcaacgaagaaagttcaggtttcacca

SEQ ID NO: 871 - DNA, 120 bp, synthetic construct
  source 1..120: mol_type = other DNA
agtgtgggttttttttttttgcttctctaggtgaaggtttaaattaacttcagcatgggtaaaactattctttccttcttttttctctcccagagttctcaccacctcctcccaggctaa

SEQ ID NO: 872 - DNA, 120 bp, synthetic construct
  source 1..120: mol_type = other DNA
agagcaagtggctgaatctctttcgtgacagagaactcaccacctaccaaggcagcccattttattaagtctaacttttaaaaaagatacttatgatgagcacaattctgtctctctcat

SEQ ID NO: 873 - DNA, 120 bp, synthetic construct
  source 1..120: mol_type = other DNA
tagaaccctcactgtgaaatgggagatgtgataggaatgttgtgaggattgtttgagtgaatacatgcaaaggacttaggacaagcctggcacatagttaatgctcaatcaatgttttct

SEQ ID NO: 874 - DNA, 120 bp, synthetic construct
  source 1..120: mol_type = other DNA
caatttctctatctgcatgacacagaaacttccatgtcactagaggatttcacaatccatatatgaatcccctgaagacttcttggtgtgaaggaaacatcactggacacaacactgaaa

SEQ ID NO: 875 - DNA, 120 bp, synthetic construct
  source 1..120: mol_type = other DNA
gaagcatttcagaggtcagaagggtgtttgctgttacgactcttgctctcacttctacctgacaagagagaagaatttgtatagactgttagacatgttactattttttgaaagcactag

SEQ ID NO: 876 - DNA, 120 bp, synthetic construct
  source 1..120: mol_type = other DNA
actctgagtctaccaaacagaaattgctcttaatgggttcatctaatggcagggccggctcaaggcaaaattttttgcccccatccctctttttcattcgacacgattttgctgtatcat

SEQ ID NO: 877 - DNA, 120 bp, synthetic construct
  source 1..120: mol_type = other DNA
atagcctttctgactggtgtaagatggtatctcattgtggttttgatttgcattcccctaattagggatattaagcattttttttcttatgtttcttttgaaaagtgttcatgtcctttg

SEQ ID NO: 878 - DNA, 120 bp, synthetic construct
  source 1..120: mol_type = other DNA
gtattttattcttcttgaggctactgtgaatgaaactgcattcttcacttggttctcggtttagatgttattggtgtatagaaatgctactgatttttgtaaacttattttgtatcctga

SEQ ID NO: 879 - DNA, 120 bp, synthetic construct
  source 1..120: mol_type = other DNA
aatttatccattcttctaggttttctagtttgtgtgcagaggtgttcataatagtctccaagcggtttttgtatttttgtgtggtcagtgacaacgtcccctttgtcattcctgattgtg

SEQ ID NO: 880 - DNA, 120 bp, synthetic construct
  source 1..120: mol_type = other DNA
tctttaaaaaatgctctgacagtgtttactgatggttccagcaatgggaaagcggcttacacagggccaaaagagcaagtaatcaaaattcaatatcaatcggctcaaagagcagagttg

SEQ ID NO: 881 - DNA, 120 bp, synthetic construct
  source 1..120: mol_type = other DNA
taggagaaagcatgcaaaacagcccaaggtgaagctcacttggcagctgagagtgagttcacaccatgtactctaaaatgaggaggtgctcttttcttctcactctaattaaagaagact

SEQ ID NO: 882 - DNA, 120 bp, synthetic construct
  source 1..120: mol_type = other DNA
tgcatccaaggaaaattttatcatacataacttatgataaggaaacttatgcttaggaagattaattaggaggttaaggtcaccaagcctctagactgtttcgccaggacccaacccagg

SEQ ID NO: 883 - DNA, 120 bp, synthetic construct
  source 1..120: mol_type = other DNA
gcctctggaagctacaggtctgtttcagatggatctattctttttcctgggttcagtgaagttatttggccataaagccctaagccatgtatgatcataacattttaagaaatagaagcc

SEQ ID NO: 884 - DNA, 120 bp, synthetic construct
  source 1..120: mol_type = other DNA
agtagacgtgaccttggatttcaagaaggagcaaattacctctgctaatgcagataaagacgccaccatttttggttttcaggatttcacagggaaaatagtcccattatttggcctcta

SEQ ID NO: 885 - DNA, 120 bp, synthetic construct
  source 1..120: mol_type = other DNA
cctagaacagtgcttctggaaattttaatacgtaagcaaattaagagcagcttgttaaaatgcagacgtttaaaaacttggtgcaggcctgaaattctgcactcatatgttctcccagag

SEQ ID NO: 886 - DNA, 120 bp, synthetic construct
  source 1..120: mol_type = other DNA
ccactaaatgaaagaatcactcgtactggttgaaacaataccaataaataccttaggttctgtggtgaacacagatcagtaaataaatgttgggcaatcttccagtctctcagtgtccca

SEQ ID NO: 887 - DNA, 120 bp, synthetic construct
  source 1..120: mol_type = other DNA
gatcaacatgaagatgacaaagttacatcatttgctattcaatattggaaaatacatctcaccccatattgagatcctagtctgggctagctgagttacgggggctgctaaaactctagt

SEQ ID NO: 888 - DNA, 120 bp, synthetic construct
  source 1..120: mol_type = other DNA
atagtgtaaattgagtagcaagaggaaggaggactgcagaagttcaagaatgatgagaactgaggaaacgaagataaacacagagataaacacagacaacttcactgcagcgaaagagaa

SEQ ID NO: 889 - DNA, 120 bp, synthetic construct
  source 1..120: mol_type = other DNA
atgcctttatttctctagaactggtttttcttcctcacaagtctctcatccataaccttagtccagcccaatggacaaaaccatgaggaacctcaaacacccttccaaaaagatttagat

SEQ ID NO: 890 - DNA, 120 bp, synthetic construct
  source 1..120: mol_type = other DNA
ttctcctgtcccaaccccattattcctaaatctgagctcaggcttgccagcacctctaggagtaaatcacaagactgagaccagagcaacaagaaaagcagagacaaatgactcaacaag

SEQ ID NO: 891 - DNA, 120 bp, synthetic construct
  source 1..120: mol_type = other DNA
tccttactagactactgcatttccaggaagtctagtttaatcctagtttgtctggacattccttatcaaataatgcccttctctcttttctccagccagttcctttccacctttttctca

SEQ ID NO: 892 - DNA, 120 bp, synthetic construct
  source 1..120: mol_type = other DNA
gttgccatccaccaagaagacaaagctgctgacttgggcacaattaaagaagctgacgcagttagctacaaaatgtctagagaacacaaaggagacacaaactccagagagtatgctgct

SEQ ID NO: 893 - DNA, 120 bp, synthetic construct
  source 1..120: mol_type = other DNA
ccctgggccctacagaatgcctagtccaacttcctaatactctgagccagagaaggacattctctacacctacattacaacttccctcttcagacattgatttttaaaagaatatataga

SEQ ID NO: 894 - DNA, 120 bp, synthetic construct
  source 1..120: mol_type = other DNA
taacatttatagaaaacctctgtttgctccctatactaggggcagctccttttggtcccttcctaaagaaatagagccagtttgagaaacaggaaaatcaagttccatactttcctagcc

SEQ ID NO: 895 - DNA, 120 bp, synthetic construct
  source 1..120: mol_type = other DNA
agcagccctaggaaataaatgcataccaccaccactccatctattttccttctatgtgcccaacatttatcttctcagaggatgattataaaccctagttattgtatcaacacacgggaa

SEQ ID NO: 896 - DNA, 120 bp, synthetic construct
  source 1..120: mol_type = other DNA
cattcattgagtaccttcaatggtaagcatagtaccagacagcaggcataaaaatggtccctgcttagaaattcacaggaatgacaaataggttttgtaacagaagctactgctgtacca

SEQ ID NO: 897 - DNA, 120 bp, synthetic construct
  source 1..120: mol_type = other DNA
tacagggtcttattttagagctacttctttccgtaatgtacaagtggatcaaagtgtggcaaggctgaaggtaggaaaaccaattaggaaatgagaaactcgcaactggtaaataggaca

SEQ ID NO: 898 - DNA, 120 bp, synthetic construct
  source 1..120: mol_type = other DNA
atacctggttgcataagatgctgaaaaatgtaacttgtattcagccagccatgtgcccagctaaaattttttattcaggaagaagaggaagacaggtactggaagataaccagcaatctc

SEQ ID NO: 899 - DNA, 120 bp, synthetic construct
  source 1..120: mol_type = other DNA
tatcatgatatagctatattactttgcagggtttttatgtctaagttattttctcctcctgttccacttccaccctcccattcactctcttctctcctagtagacaaagtccttacctgt

SEQ ID NO: 900 - DNA, 120 bp, synthetic construct
  source 1..120: mol_type = other DNA
atgcgggaatcataataaatgcttatgaagcaaaactaaatgcacctgtactgctacatccagattcacatacaaacgacaaagagcttatatccagactgcatgtgtctgtttttgcac

SEQ ID NO: 901 - DNA, 120 bp, synthetic construct
  source 1..120: mol_type = other DNA
ttgtaatcatggaaaatactcagtaaaaatggccaaaattcaaaagtctgaaaataccaagtactgagagaatgtgaagcaatagggactctgcactgcttggtggagctgctgtgagct

SEQ ID NO: 902 - DNA, 120 bp, synthetic construct
  source 1..120: mol_type = other DNA
tgcgtttgcatgcatggacacacggatagggcaagcacacatacatgtgtgcatatgtatgagactgataaacaatccaataggaaaaatgggcaaaggatagaattgaaaatgcacaga

SEQ ID NO: 903 - DNA, 120 bp, synthetic construct
  source 1..120: mol_type = other DNA
aggacaaactcaatcatgtcccagtgcacaagtgagtccagatgttgatagcgacataacagaaagtctagacaaacataagcacgaaaaattatagtctttctacccttgagaatgagg

SEQ ID NO: 904 - DNA, 120 bp, synthetic construct
  source 1..120: mol_type = other DNA
aaggttaacagcctactgagaaagcaatatggcaacatccatcaaattagaaacatgccatatccttcgacccagaaacctttctcacaaaaatctaccagcacatgacatgtgttcaga

SEQ ID NO: 905 - DNA, 120 bp, synthetic construct
  source 1..120: mol_type = other DNA
aagagtaatgaaaccttgagaaatgaaaccgaggataaggggaggactactgtatttcatgatatgctggtgtggataaaaataggtgcaaccttactgaagttgaccatgaggttgatc

SEQ ID NO: 906 - DNA, 120 bp, synthetic construct
  source 1..120: mol_type = other DNA
gccagggctctgacaccttgccaggcacttacggaaagataattgtaaaaatctaatagaattttaaatttccatgccttcgaacccagcagccaaacttccagaaatttatcctactaa

SEQ ID NO: 907 - DNA, 120 bp, synthetic construct
  source 1..120: mol_type = other DNA
tagcttgttttcactctctcccaattactatcgcttgaaaaataccggatatttcattattatcctgtccggagtcggcaaactacggtctactatctgtcttcgtatacgtcaaaagct

SEQ ID NO: 908 - DNA, 120 bp, synthetic construct
  source 1..120: mol_type = other DNA
taatatcagtctctaggcaagcacattcttcacagtccttagaactggacctcctcttgttaatttccttagtctaatcacattcctcctggttatctacaaacagaaagccagaaagga

SEQ ID NO: 909 - DNA, 120 bp, synthetic construct
  source 1..120: mol_type = other DNA
ataggtagataatttcggtaaatttcgccaagcaggggcaggacaaagagtatttgaagtctaccgcggggagaacttacctaatccttgaatgttaaaaggctaaaaactccactagtc

SEQ ID NO: 910 - DNA, 120 bp, synthetic construct
  source 1..120: mol_type = other DNA
gccacttaatttgtaaaagactgaggaaggggtaggatcaccacaagtcaaagttggattcccacagatagaaatcatctgactgaacttctctcctattgctgacagaagaaattcaaa

SEQ ID NO: 911 - DNA, 120 bp, synthetic construct
  source 1..120: mol_type = other DNA
ttgccataatttatcagttttcagcagttctgagtgtccagatgaacacaagagaaatggaatgttgcgtgaaatgtcattccaagaagagagcagatttcctttaggctagtctgatgg

SEQ ID NO: 912 - DNA, 120 bp, synthetic construct
  source 1..120: mol_type = other DNA
aaaaaaaaagaaaaaacctccaattaatatttttattttctctgtcctcttccccactcccaagttaaattatggcagagacaagtctgttagaggctggggcctctgcagcctctacag

SEQ ID NO: 913 - DNA, 120 bp, synthetic construct
  source 1..120: mol_type = other DNA
ataataaccatgtttttattgtaggtggacagaggtggatgggaggacaggtttaaagagagatattagggtacagaaggttgcttggatggtaataggcagttgcctcagtaagaaaat

SEQ ID NO: 914 - DNA, 120 bp, synthetic construct
  source 1..120: mol_type = other DNA
gcaggagttgcattgcactcttctgttcagacagtaaactttgttaacgattggcaaaagaattctacaagattgtggaattcacaatctggtattaatcaaaaactggcaaatcaaatt

SEQ ID NO: 915 - DNA, 120 bp, synthetic construct
  source 1..120: mol_type = other DNA
catgaattaagtattaagagggatttaagagatgaagaacagacagaatatcttacatctggtgagctgagagagttcgtgcctcttggtctcctttttttgttaaagcagcaaaggagg

SEQ ID NO: 916 - DNA, 120 bp, synthetic construct
  source 1..120: mol_type = other DNA
atttgacactggggaacaatgatgagcaaaaacacagttcctgccctccttgagcttaaagttaagtggagaaaataagtaatggcacaaaatgcacagctgcaagttcataagaagaca

SEQ ID NO: 917 - DNA, 120 bp, synthetic construct
  source 1..120: mol_type = other DNA
tgactaccctgaacgactttacagtgtagctggttatatgcttgcccctatatgtgtcattatcagcaacgccataaatacaaattcagactgagatggatgtgtgccaatatgattgaa

SEQ ID NO: 918 - DNA, 120 bp, synthetic construct
  source 1..120: mol_type = other DNA
atgcagaagagaggatgtgctgataattctcagaaagtgttatggctggtgtttgagtcctatattatcaaatttcaggaatgttagaggcttaagtctgtgtgctggcttaaagaaagc

SEQ ID NO: 919 - DNA, 120 bp, synthetic construct
  source 1..120: mol_type = other DNA
tttgttaaaccattttcaatgaaactggaagtctgtgttaattcatacatatggtgggtgagagaaaggcttccttataccacactgaccctgctgatacaacatcttccctctcttctc

SEQ ID NO: 920 - DNA, 120 bp, synthetic construct
  source 1..120: mol_type = other DNA
tctgccaggtgtactcaaagggtctttgctacggaaaagtgatttctcccatccccttctaaccatttttgtgttcttatctctggtcagcaattatgtgcttaatctgttccaaagaaa

SEQ ID NO: 921 - DNA, 120 bp, synthetic construct
  source 1..120: mol_type = other DNA
acaagagtgaaactccatccccccaaaaaaaacttcagtaaaggctaggcacgttggctcacatctgtaatcccagcactctgagagatcaagccaggaggactgcttaaggccaggaat

SEQ ID NO: 922 - DNA, 120 bp, synthetic construct
  source 1..120: mol_type = other DNA
ggccagaggagatggagaaagatgagggaatagctggtagtggatcagttagaacacataaaatatatttatcgattaagttgttcgtcttatatggatgcagttcacagtgcccccata

SEQ ID NO: 923 - DNA, 120 bp, synthetic construct
  source 1..120: mol_type = other DNA
aaagaattgatacaatccctgtcccttatagggagctcccagcatccttgaggagcaaagacaagcataaaagaaatcattgggaagtgatataaatgaccaagcttcatgatgaccaga

SEQ ID NO: 924 - DNA, 120 bp, synthetic construct
  source 1..120: mol_type = other DNA
aaagaaatcaacaggtgagcttttcagggaggaggaagaaagtgggaagatggagaattttaatttctccctaaaaatgttaacatctgaatagtcacttggctggagcttctccctaac

SEQ ID NO: 925 - DNA, 120 bp, synthetic construct
  source 1..120: mol_type = other DNA
cctttccttaatttttgcctttaaacaaaatcccaagcaccagaaacctctgattgatggcttcagccattatttttctggcctaacagctcaaattcaaatgtccagaatagagcaagg

SEQ ID NO: 926 - DNA, 120 bp, synthetic construct
  source 1..120: mol_type = other DNA
aaaagaaagaaactgaaagggagtgtcattatattaatgtgaatatgcagggaaaatagtcataaaccaggccagttcctggaaaacacacatggtcaccctatccctagaccatatgct

SEQ ID NO: 927 - DNA, 120 bp, synthetic construct
  source 1..120: mol_type = other DNA
ttcttgaggtagatcacaggggtctgtgtacctctgaattcatgagagatgaatgacagatgctctcatgggtctagatattgaggagtttttctgagggcagagattggacatcaacaa

SEQ ID NO: 928 - DNA, 120 bp, synthetic construct
  source 1..120: mol_type = other DNA
actggtgttaagccaggcttttgcttgtttgttgccatccctcaccctttgccatttcccttttcagagaatgtaaatgattttcatgttaggccaaaataaacaacttatagggtacat

SEQ ID NO: 929 - DNA, 120 bp, synthetic construct
  source 1..120: mol_type = other DNA
tacctaagcctaggagttagaaaccattcactcagaaagtgaggatcacctactgtgtgtccagcactgcataacaggaagtgtgtttctttggtaggtggaatagtaggagtaaactgt

SEQ ID NO: 930 - DNA, 120 bp, synthetic construct
  source 1..120: mol_type = other DNA
ggagtcttccttcttcgggtttggattaagttcctaacgccacttgcacaaactagggtttgggctcggctgttttttttttttttcttccagtgtgggcaataaataataacttttaag

SEQ ID NO: 931 - DNA, 120 bp, synthetic construct
  source 1..120: mol_type = other DNA
ggagaaaatgcagactcagggttccagtaaccagtgatggattcaccccatctcccaaataaagtttacttgttttacattccatgattctgttctgtgggtatttcaactcttaattcc

SEQ ID NO: 932 - DNA, 120 bp, synthetic construct
  source 1..120: mol_type = other DNA
gcggagagtgtttgtatcctctaggcccactcatagtcagaaaagactcaggtcttttcccagtctcaaagttgtctttaataaaattctgataaaggaaatggcgcaaacctgaactaa

SEQ ID NO: 933 - DNA, 120 bp, synthetic construct
  source 1..120: mol_type = other DNA
gtaagtaaatgtttctgagtcatcctttgacattttatttctggaaatagtgcctacctgggtcaactttcagtccaacaaaaatgtgtagcctgaaagtaacacctcgtgcatacctgg

SEQ ID NO: 934 - DNA, 120 bp, synthetic construct
  source 1..120: mol_type = other DNA
acagtatctggaatctggttcacttgtgagtctttgtggtttctttatttgttgtgggtttctatcaatatataactctaaagatcacagccctcttcctctttccacagccctcttcct

SEQ ID NO: 935 - DNA, 120 bp, synthetic construct
  source 1..120: mol_type = other DNA
ccaccagcaatgcacatggttctaatttctctccatcctaatctacacttactttcagtttgttttgttgtttattatagccatcctataataacattctagtgggtataaaaccgctag

SEQ ID NO: 936 - DNA, 120 bp, synthetic construct
  source 1..120: mol_type = other DNA
cctttcaaacatacaagactgtaatattttttcgtacctagaggactcagagaaaacgtgcagagcttggacacgtcctacttattcatccatccaaatcctgtacgtgctgttttgcta

SEQ ID NO: 937 - DNA, 120 bp, synthetic construct
  source 1..120: mol_type = other DNA
atgtgggtatctgagtttctcttcctaaaatcctttccttcttagagcgatcaatgagccctgttgaatggcctatggaagggaaatgaatgttctaaatttcctctgacccttttcttc

SEQ ID NO: 938 - DNA, 120 bp, synthetic construct
  source 1..120: mol_type = other DNA
aattctagaccatggacctatgagagtgggcctctggagtacttagccacaattacaaattggattctaggtttgtgtgtatggaaattacctgaggaaagtcaaattttccttcagctt

SEQ ID NO: 939 - DNA, 120 bp, synthetic construct
  source 1..120: mol_type = other DNA
cattcaggctcagttggagtatgcttttaggctttcccaggttatggagtataaagctaattgttgattcattccttcttggctttacagttgtagaaagagatctggcctaaaatccct

SEQ ID NO: 940 - DNA, 120 bp, synthetic construct
  source 1..120: mol_type = other DNA
gtgattgctggagtagaggcacctgggctgccagcaacgtttaatttctcaagtaagatagtaggtacattgcatgtatgcttcatttagctgtacttttttgcatttatgtcatgttat

SEQ ID NO: 941 - DNA, 120 bp, synthetic construct
  source 1..120: mol_type = other DNA
ctacttaacaaatggattgacccatcctgatatgtctattttttcatttcctaaaacaaatgaggcttaacttctctgacccaaattgtccttgctgtgcttcaagggggacctaggcaa

SEQ ID NO: 942 - DNA, 120 bp, synthetic construct
  source 1..120: mol_type = other DNA
tttaaaaataagaaaaactaatctgtcattctgccaaataaagatgcctctgggaaatccaactctgagtgatgtctcagctatcttctacacatcagttctcaagtgaacccccttccc

SEQ ID NO: 943 - DNA, 120 bp, synthetic construct
  source 1..120: mol_type = other DNA
aaaaagagaaaaagaaagaccatgacagacgcctctgccttcaaggtggccaactgggcacaaaatctttcctccttgactcttaagatattgttaaaacgttattaggggaactgaaat

SEQ ID NO: 944 - DNA, 120 bp, synthetic construct
  source 1..120: mol_type = other DNA
agttctgcatatatataggccataaaaggaaatgaagcttgcgtgacactttccgtgaaagcaatagtaccgaactacaaatcaaactgcatcttagccgatctcctgaagaagaggaaa

SEQ ID NO: 945 - DNA, 120 bp, synthetic construct
  source 1..120: mol_type = other DNA
tgctatatcttaattactaagtaaccccaattcctattgcttttagaacttcccagtttgcttcagagttcaacggcccagtgtgcaaaactgactcgtgaattttgtaggtgatgtgga

SEQ ID NO: 946 - DNA, 120 bp, synthetic construct
  source 1..120: mol_type = other DNA
aattgaagaaagggccagaaggaagaaaagaggaagatgggctccagtgctagaaaagagagaccaaatacagtcgaaaaagcagagaaatgtatttttcctcaagttcttctgctgtca

SEQ ID NO: 947 - DNA, 120 bp, synthetic construct
  source 1..120: mol_type = other DNA
ctccagaagcaagttctcagcagaattccagctttttcactttttgtcccccgctttgatacatgaactagcattcaaaaggaaacaaaaatggaactgattttggtacattcctccagt

SEQ ID NO: 948 - DNA, 120 bp, synthetic construct
  source 1..120: mol_type = other DNA
gaagaggcaagttgacccagtccaggtagagcaccgacttagaaagagaaagaaggaaacagctgaaaaaatctgagaaggcatatcaacttgtgagccaaatataaatcataatgtgtg

SEQ ID NO: 949 - DNA, 120 bp, synthetic construct
  source 1..120: mol_type = other DNA
acagccataggaaactaatgtactactttggtagtctggaagacaacccttccaaggatatccatgtcaaatccttggaacatgtaactattactttatatgacaaaagagtgaatatta

SEQ ID NO: 950 - DNA, 120 bp, synthetic construct
  source 1..120: mol_type = other DNA
aatccctaagataagtctgggtctttgtggctgatgtttgtaaactgtgttgaacctgtaatgaggccttcatttccctttaggctttggttaaaagtgtgtcacaattgtggatcaatg

SEQ ID NO: 951 - DNA, 120 bp, synthetic construct
  source 1..120: mol_type = other DNA
atagatttcccatcctctgaagtacacaaacatctttccaaaggcacctaacccacaaggattcctcttgatagaaccagatgtgaagttgctacaaagaaatgatggtgtatgagaaac

SEQ ID NO: 952 - DNA, 120 bp, synthetic construct
  source 1..120: mol_type = other DNA
gaaaacctaaaaaaatgtctcctggctatttatccttcacttgccagtcactatgattgtctcttcccattttcctgttcttctcagggtgtttctgggaccttcagtagaaattctcaa

SEQ ID NO: 953 - DNA, 120 bp, synthetic construct
  source 1..120: mol_type = other DNA
ttatacttggattcctgttggaagtttagcctgctttcctgaaactggctttgctcttcctcctttcttttctcacagatcctttccttccttctcaaagcactttttgtagtagcttct

SEQ ID NO: 954 - DNA, 120 bp, synthetic construct
  source 1..120: mol_type = other DNA
acaccagccagcatcatataactaatttgttattgcttaaaaaggaaaaaatggaaagtgagctgatggagaatgaaatatggacagaggaagatgatgggaagctttgaagggctgccc

SEQ ID NO: 955 - DNA, 120 bp, synthetic construct
  source 1..120: mol_type = other DNA
tgacttcaaactatactgcagtgctacaataaccaaaacagcatggtattggtacataaacagacacatagaccaatggaacagaaagagaactcagaaatgaggctgcacacctacagc

SEQ ID NO: 956 - DNA, 120 bp, synthetic construct
  source 1..120: mol_type = other DNA
aatgcctaccaatggtagactagataaagaaaatgtggtacatatacatcatggaatattatgcagccataaaaaagaacaacatcatgtcctttgcaggaacatgaatggagctggagg

SEQ ID NO: 957 - DNA, 120 bp, synthetic construct
  source 1..120: mol_type = other DNA
atcttctaaagtcagcagtcccatcactttgacctctgattctgttgtcacatctccctctccaattctcactctgctgctacctttttcacttataacgaccattgtgattgtattgga

SEQ ID NO: 958 - DNA, 120 bp, synthetic construct
  source 1..120: mol_type = other DNA
attatctctgaaattacaagactggatactgtgtagtggcttcattagacgagtaacagattttagtctgaatagcaccgtttttgattctaggaccttcccattcctgttaacttgctc

SEQ ID NO: 959 - DNA, 120 bp, synthetic construct
  source 1..120: mol_type = other DNA
ttcttctcacctactgctatagtcctgccttgattcttcagccattgtcctctttttaccttgtgtatgcttaagccaattctccaagaagaaattccagatggctctttattgctgttt

SEQ ID NO: 960 - DNA, 120 bp, synthetic construct
  source 1..120: mol_type = other DNA
tttgtttctcttgggtatgctgtatacctaggaggggatagctgggtcatatgctaacttagtgtttgacattttgaggaagtgctggcctgttttctaaaggggcttcacctctttata

SEQ ID NO: 961 - DNA, 120 bp, synthetic construct
  source 1..120: mol_type = other DNA
ctctcacagggactttgtgaaattatgctggcaagtaaaagtcagcttctgacatttactactttgtctcacagtgtgaaatactatcgcattgtagggccgatttgcattttcctgatg

SEQ ID NO: 962 - DNA, 120 bp, synthetic construct
  source 1..120: mol_type = other DNA
tgcttctctagtgtaaatattcagatggtttcctttagttgtcactacactgaatgtccactgcacagacatctttacacacatatccttacagccatcccagagttttctgatttccca

SEQ ID NO: 963 - DNA, 120 bp, synthetic construct
  source 1..120: mol_type = other DNA
tagggcattctataggtagaatcctcctttttgtggtccctaagttggcctggatattacactctaaagtctagaatgcagtcatgccaaatcccacggagaaccttttataagtaacta

SEQ ID NO: 964 - DNA, 120 bp, synthetic construct
  source 1..120: mol_type = other DNA
aaaataagcatatctgagtatgatgagttctaaggattcctttcagggcaaaaattgaggctaccccattgcagttgtccagtctttccacaggatggcaaagtatagccagtatttctt

SEQ ID NO: 965 - DNA, 120 bp, synthetic construct
  source 1..120: mol_type = other DNA
tctgtggataagatattgggaacttctgaaaaattttagtagggctatgcctagagaattttcatgatcttaacaaatcttgctcattcagcaagtccttagagagccttcatgggaacc

SEQ ID NO: 966 - DNA, 120 bp, synthetic construct
  source 1..120: mol_type = other DNA
tgtccatggttctgaaagacaaactagcaggtcccaccacctttacaaatggcaatcttactgtggaaaactgcactagtgaaaactctacatatgactttgtacatgcatcacttacaa

SEQ ID NO: 967 - DNA, 120 bp, synthetic construct
  source 1..120: mol_type = other DNA
taggaaattttaagtgtggttgatgacatcttcctccagagaggatttgtgtttgttttgcgtgttatttgcgtttgttttttgacaggttccttggagcctggcccactataaactgaa

SEQ ID NO: 968 - DNA, 120 bp, synthetic construct
  source 1..120: mol_type = other DNA
ggtggacatctcaagtcacttggtcatttgctgtatcatgatcatggcattcagaatctaccagggctcagtagcaagccaggaactgttatttagtagaagaataaagaataaagcttt

SEQ ID NO: 969 - DNA, 120 bp, synthetic construct
  source 1..120: mol_type = other DNA
tagcatataaggcgaaggatgtacatattcacgtcaaagccttgggctgcttctttatccaagagctgttgtgtaacactgacgaaagttatatcaagcaagttttcctttaaagcctca

SEQ ID NO: 970 - DNA, 120 bp, synthetic construct
  source 1..120: mol_type = other DNA
tgaattgtgagctgtgacattttctcccaaaagtctcttttaggacagaacttctggtaatggcaacatgaacaggtagatcagcaagtcttcctctaaatagcaatatgagaactggac

SEQ ID NO: 971 - DNA, 120 bp, synthetic construct
  source 1..120: mol_type = other DNA
gacaaatattacaaagatgcagagtagacacccagagccccctgctgaaaatgcagcaactggatatcggtaaacagagcagagacatcagctgtagccaactgcaggggtaacagattt

SEQ ID NO: 972 - DNA, 120 bp, synthetic construct
  source 1..120: mol_type = other DNA
atggctgaaagattcccaaatttgatgaagaattttagcttatagatgtaagacactcatcaaagctgaatacccacatagaaaatcataggtagagtggccatggccttggctggcctg

SEQ ID NO: 973 - DNA, 120 bp, synthetic construct
  source 1..120: mol_type = other DNA
ccactgatagctctagacagatcatcaagacacaaagtcaacaaagaaacaatgatcttaaaccatatcctacaacaaatggacttaacagatatttacagaacatttcttcccagtaac

SEQ ID NO: 974 - DNA, 120 bp, synthetic construct
  source 1..120: mol_type = other DNA
caagaaaaggagagaagatccaaataagctcaattagaaaacaaactggagatattacaactaataccacagaaacacaaaagttaattcaaggctactatgaacacctttacacacacc

SEQ ID NO: 975 - DNA, 120 bp, synthetic construct
  source 1..120: mol_type = other DNA
catagatctgataaacaaatttagtaaagtctcaggtcacaaaatcaatgtacacaaatcaggagcattgctatacaccaacaacgaccaagagagaatcaaatcaagaactcaatccct

SEQ ID NO: 976 - DNA, 120 bp, synthetic construct
  source 1..120: mol_type = other DNA
atagagagtgctgggaaaactggcaagccacatatagaatgaaactgtatctccatctctcactttatataaatgtcaactcaaaatggatcaaagacttaaacctaaaacctaaaacct

SEQ ID NO: 977 - DNA, 120 bp, synthetic construct
  source 1..120: mol_type = other DNA
cactagaaatcaagagacactgtggaaagagtacatagaagacctaaataaatagatcccctgttcatggggagcaagatttaacattgttaaaatgcaacactccccaaattaacccag

SEQ ID NO: 978 - DNA, 120 bp, synthetic construct
  source 1..120: mol_type = other DNA
atctctgcaaccttgggcttagtggatttcccaggaaagaaatgcttccaccaaataagaacctcagctggccattttatatttccataaaatatagtggtatgagggttctaatttctg

SEQ ID NO: 979 - DNA, 120 bp, synthetic construct
  source 1..120: mol_type = other DNA
ctcttcttccgcttcatcgcaagtgtagccaccacagctcaagtaaccacatctccaatgaaatttgatagtgcataccagagtatcttagtttttaatctccctaaaagtataccatgt

SEQ ID NO: 980 - DNA, 120 bp, synthetic construct
  source 1..120: mol_type = other DNA
ccctacatttcagtaaatcctctaaaactgatgattgtcccaatttctggatatccagtggttggtaggacagtttactgtattcaacctcactatttcagaaaatcctagaccagtccc

SEQ ID NO: 981 - DNA, 120 bp, synthetic construct
  source 1..120: mol_type = other DNA
atgttcagtattgatgagtctgaataatcttggtgactctgaggcatagggattgtctctagttgtctgatacctgtctctcagattattaagacaggagaatattgactgggagtatcg

SEQ ID NO: 982 - DNA, 120 bp, synthetic construct
  source 1..120: mol_type = other DNA
aatccatcagcttggcaaagacagaagtaaatgatggtagtattgatcagagtacagggaaaatgtactgttacgaagactgatggcattgaaaagtggtacaaaacttctaaagggcac

SEQ ID NO: 983 - DNA, 120 bp, synthetic construct
  source 1..120: mol_type = other DNA
tttagtatgactcagaaaataatgccatggctttacatagagagtcagatttaatcctcaatgcaaacccatggggaactcaatatgtgatcctttgtacagacagggaaggagagaggt

SEQ ID NO: 984 - DNA, 120 bp, synthetic construct
  source 1..120: mol_type = other DNA
gagaacttctttaaaacctggtctacgggcatgcattaccccagttattttttccctaagtgaaaaatcaaccagaggagatgatttattttaatagccttattgcaggagaggaaggtg

SEQ ID NO: 985 - DNA, 120 bp, synthetic construct
  source 1..120: mol_type = other DNA
gggatatggaagccacttttcatccagccaaacacagatgcaaatgagatgttctgggagaaagcagaaaaagcccttttcacagagttccttattttactattctattacacttgtctg

SEQ ID NO: 986 - DNA, 120 bp, synthetic construct
  source 1..120: mol_type = other DNA
gctgctatgaaaagggatttgaaaattcccagaggagcctttcagcctctttccatggctctttatgccctttcaaaggcacagccagagacatcagaaatgaaattgtatataattata

SEQ ID NO: 987 - DNA, 120 bp, synthetic construct
  source 1..120: mol_type = other DNA
gaagagagaagaaatggaccataagagaagggggcaaggggggagaaagagagtgaaaggagccagggaggagagaaaaatggaaaacatcctgttaggaatgtgtgtgtttgtgttgat

SEQ ID NO: 988 - DNA, 120 bp, synthetic construct
  source 1..120: mol_type = other DNA
ccaggaccctgcagccccaccccaaaattgcttgataatacagtgattctattttcagtgttttgaaaactctgtatactgttttttacagttgctgtactagttttacacactgtgtgt

SEQ ID NO: 989 - DNA, 120 bp, synthetic construct
  source 1..120: mol_type = other DNA
gccacagtacctggcctttgtgctgtgttttgattcatcgttatctcctaagccctttcccagcattgatattttactaaacaccctatgattaaattatatctctacaccttgagataa

SEQ ID NO: 990 - DNA, 120 bp, synthetic construct
  source 1..120: mol_type = other DNA
gcatcaccacaaacatatcattaatgcattgtactatgatgtacagtgtcacctacaatgtcactacagagaagaaacccccaaaatctgcactcctaagctgcatatgctttaggtgat

SEQ ID NO: 991 - DNA, 120 bp, synthetic construct
  source 1..120: mol_type = other DNA
cccaattaatggatgcttcagctctagttaaggaggccccatagaaggaaagggaaagagtaaaagaagggaaaagctgcaatgtattataaagcctcatttggataaaattctgtccag

SEQ ID NO: 992 - DNA, 120 bp, synthetic construct
  source 1..120: mol_type = other DNA
tccttcccaccagaaaaacttcttaccacatttcctcccatcaattctttcaaaaacttaaaaaaggaatgtcagtcctatatagtcatcccttggtatccttttgggctgggttctagg

SEQ ID NO: 993 - DNA, 120 bp, synthetic construct
  source 1..120: mol_type = other DNA
agagcaatggaaaactggcctatgaaaagaatacccgtataggacacagtcctgtggaaatcactatggtaatttgaggggtgcattaatgtaaggcgtgttgatgtctgatataaattg

SEQ ID NO: 994 - DNA, 120 bp, synthetic construct
  source 1..120: mol_type = other DNA
gcacgaaatacccataaggactgttctgtttaagaagagacagagacagcatatggctatgtagcaaattctctcatgggaaggtcttgaaaatagatagctggcaaattagactgatac

SEQ ID NO: 995 - DNA, 120 bp, synthetic construct
  source 1..120: mol_type = other DNA
gggatgcatataaaagtgccaaaacaggaattattcctaagcaagaaagtgtaaatatattttaaaaccattatgcaagaattcctcagggcctggaggagtaggttgtgccttcactgc

SEQ ID NO: 996 - DNA, 120 bp, synthetic construct
  source 1..120: mol_type = other DNA
tgagttcgacctcttactccctctagctctcaccctctcttgcgcttctcccttctgccagatacattcccttgattttggaattcccatcctcgacaaccatgagccaattaaatttgt

SEQ ID NO: 997 - DNA, 120 bp, synthetic construct
  source 1..120: mol_type = other DNA
catagttgactgtttttccccttctgcctgctctttcccctgtaagtactgaagtcctcaaaacccttttaggaaaaagcgtgggccacagatgctagtgatttttgtctctttttccaa

SEQ ID NO: 998 - DNA, 120 bp, synthetic construct
  source 1..120: mol_type = other DNA
tatgtacagcctagggacttggtgccctgcatcccagatgctcccactgttgctaaaaggggccaaggtacagcttggtctatggctccagagggtgcaagctttaagccttgacagctt

SEQ ID NO: 999 - DNA, 120 bp, synthetic construct
  source 1..120: mol_type = other DNA
catcagtgaagccttctggacctagactttcctatattagaaggattttgattacaaattcaatttctacaatcaatatatggctgaccacattttctatctcttctcaggtcagttttc

SEQ ID NO: 1000 - DNA, 120 bp, synthetic construct
  source 1..120: mol_type = other DNA
tctggccttgaaagcagggaacaaagagccaggatgctgagcaagttaacccttaaagaggaactctttttatatctaacactacttcaactgcatcccatacatttgatatgttgtgct

SEQ ID NO: 1001 - DNA, 120 bp, synthetic construct
  source 1..120: mol_type = other DNA
tacttctctctgtaattttgtcaatttttcttcatgaactctaaagatttgctattggatccatttctggttgcatgtctttctgttgattttacccttttgttattatgaagcgcctct

SEQ ID NO: 1002 - DNA, 120 bp, synthetic construct
  source 1..120: mol_type = other DNA
cggccccacttacttccagctcctaccatcccagcttatgaatcaatatccttttccattatccgtgtatttcctggtatctcacagctttcaaaataataggaaacttgattcttatgt

SEQ ID NO: 1003 - DNA, 120 bp, synthetic construct
  source 1..120: mol_type = other DNA
aaaacactaaagacatttgtcccacaggaagatctgacttgtttagtctaaaattgttatggctttgacaatgccttgctgcccttttctgtcactggacaaacactatgagcactttgg

SEQ ID NO: 1004 - DNA, 120 bp, synthetic construct
  source 1..120: mol_type = other DNA
attactctttattccaatattataataatctttgttctacaattataacctagaaaaaaccaggccatacagagataggagctgaagggacacggtgagaagtgaacagaagacaagagt

SEQ ID NO: 1005 - DNA, 120 bp, synthetic construct
  source 1..120: mol_type = other DNA
agaaagtgtctcaggctaaaagcaaatgataccaggtggaaaatgagattatcagaaaagatgaagaatgtgagaagtggtaaatattaagtgcgaaaggctatcttgctcccccacccc

SEQ ID NO: 1006 - DNA, 120 bp, synthetic construct
  source 1..120: mol_type = other DNA
agaagagctggtaccattcctactgaaactattccaaaaaattgtaaaggaggaactcctccccaactcattctatgaggccagcatcatcctgataccaaaacctggcagagacaaaac

SEQ ID NO: 1007 - DNA, 120 bp, synthetic construct
  source 1..120: mol_type = other DNA
accatatcaacttgtaaattactacaaaactgtcaacacttagccacttctgcttcctcaggaaggtcggggcagcagatctgtgtgttaaatatctatgtgaagttatttccaggaaga

SEQ ID NO: 1008 - DNA, 120 bp, synthetic construct
  source 1..120: mol_type = other DNA
gaccttagctatgaatatcagaaatttctgggatgaagatgccacacaggccaagacactttcaccctgtgatggcagaccgtctgcagaaactacagtaacatctcgaatcctaggagg

SEQ ID NO: 1009 - DNA, 120 bp, synthetic construct
  source 1..120: mol_type = other DNA
cctttttttcagggaaagccctgatgcttcagagtctatggcaaccgttccgtatgttgcggctgctgctgtttttgttatcattattattattctctgtgtcctttggtgcaagaagaa

SEQ ID NO: 1010 - DNA, 120 bp, synthetic construct
  source 1..120: mol_type = other DNA
ctttctcaaggtggtcactttcctgtaaatttggagtaaaggatggtcaggatgatttcccccacagtcagttgtttgaggggaaagtaaaagagaaaacaggaagttttgtgtttctgc

SEQ ID NO: 1011 - DNA, 120 bp, synthetic construct
  source 1..120: mol_type = other DNA
gttcacaatttccgctggataatcttaataggatttcctctaatattgatgttgtaaagcatgtacaatcaaatgagaagtcaagcttggagcttcctctccaggagggtccatgttgga

SEQ ID NO: 1012 - DNA, 120 bp, synthetic construct
  source 1..120: mol_type = other DNA
gcctttttggcaccttgaggtcccctcacccttcgcacactgttataaattaccccatgtctactatgtctgcataattttatactgtggatttttactctttaaatagacatttctggc

SEQ ID NO: 1013 - DNA, 120 bp, synthetic construct
  source 1..120: mol_type = other DNA
ctttgagtttccctggtattgaagaataggagtcagactgcttctggggtgaagcgactgctgggaacatgtgaaccaaattgatgaagaataagtgaatggggaatgtgggtgagtaaa

SEQ ID NO: 1014 - DNA, 120 bp, synthetic construct
  source 1..120: mol_type = other DNA
ctaccactgtaggcagaagccaacattgaagacttacgagaattaaatgggttaccagaagagtgactataggcatgaaagtggaaaaacagatttaagagaatgaggaagaatgcagac

SEQ ID NO: 1015 - DNA, 120 bp, synthetic construct
  source 1..120: mol_type = other DNA
gggggccctagatcccatcccaaaaggataccaagagatgactgaataagactgacttttttaaaaaaagttttggaagaattgacaggggaaaaaacgtgggcaaagagtgtttttggt

SEQ ID NO: 1016 - DNA, 120 bp, synthetic construct
  source 1..120: mol_type = other DNA
tctacttgttgcattttctctgctgcttggcatgccacatattctggatgatgtgttatagaggctctggattttgccatcttcctccacagactgctaacaatttgatagttcattaat

SEQ ID NO: 1017 - DNA, 120 bp, synthetic construct
  source 1..120: mol_type = other DNA
cactttttgatggggtggttttttttttcttgtaaatttgtttaagttctttgtagattctggatattagccctttgtcagatgagtaggttgtgaaaattttctcccatgttgtaggtt

SEQ ID NO: 1018 - DNA, 120 bp, synthetic construct
  source 1..120: mol_type = other DNA
tttgcagctgcacaactgcatcgtgttttgtctggcttttatacttgtttacagtgggaggatgagttttaaatgagctagtctatcacagttcaagtcagaagacctctaatccttcaa

SEQ ID NO: 1019 - DNA, 120 bp, synthetic construct
  source 1..120: mol_type = other DNA
tggtcacataatcaaaagtaaaacactcctcagcaaatgcaaaaagaactgaaatcataataaacagtctctcagaccacagcacaatcaaattagaaaccaaaagtaagaaattcgctc

SEQ ID NO: 1020 - DNA, 120 bp, synthetic construct
  source 1..120: mol_type = other DNA
ctcaataaaattctggcaaaccgaatccagcagcacatcaaaaagcttattcatcacaatcaagttggcttcatccccaggatgcaaggttggttcaacatacacaaatcaataaatgcg

SEQ ID NO: 1021 - DNA, 120 bp, synthetic construct
  source 1..120: mol_type = other DNA
ctcatgatctgtccacctcagcctcccaaagtgctgggattataggcgtgggccactgcgcctagcctgaaaaaaaaaacaaaactatttttaaattcatatggaaccaaaaaaagagcc

SEQ ID NO: 1022 - DNA, 120 bp, synthetic construct
  source 1..120: mol_type = other DNA
agacagtgtggtgattcctcaaaaacctagaggcagaaattgacctagcaatctcattactggatacatacccaaaggaatataaatcattctattataaagatatatacacgcatatgt

SEQ ID NO: 1023 - DNA, 120 bp, synthetic construct
  source 1..120: mol_type = other DNA
gtggcaaaattttgtgggaaaattcaaagtcttttttctactgttcttacaccccaacaactatcaacacagaaggcttctgcgatgaaatgtaggggatttctccccaaaaacaagcaa

SEQ ID NO: 1024 - DNA, 120 bp, synthetic construct
  source 1..120: mol_type = other DNA
atcaatataatgtctacacattagtaatgaagtagctaagaaagaaatttaaaagcagtcccatttatgatagcgacaaaaaccccccagaaaaacaggaataaatttaagcaaggaaat

SEQ ID NO: 1025 - DNA, 120 bp, synthetic construct
  source 1..120: mol_type = other DNA
ttaatctgttggctacttggtgctttgcactcatgcctttcttgtgttttcccaataactctgtgtagtggcaacccattacattttgttttactttgccagggagcagaaaataatgag

SEQ ID NO: 1026 - DNA, 120 bp, synthetic construct
  source 1..120: mol_type = other DNA
aggaagttcaaacccattgcaaagaagttaaaaaccttgaaacaagattagacgaatggctaactagaataaccaatgcagagaagtccttaaaggacctgatggagctgaaaaccatgg

SEQ ID NO: 1027 - DNA, 120 bp, synthetic construct
  source 1..120: mol_type = other DNA
gataaagagtcaagacccatcagtgtgctgtattcaggaaacccatctcatgtgcagagacacacataggctcaaaataaagggatggaggaagatctaccaagcaaatggaaaacaaaa

SEQ ID NO: 1028 - DNA, 120 bp, synthetic construct
  source 1..120: mol_type = other DNA
ggaggtggttttttgaaaagatcaacaaaattgatagaccgctagcaagactaataaagaagaaaagagagaagaatcaaatagacacaataaaaaatgataaaggggatatcaccaccg

SEQ ID NO: 1029 - DNA, 120 bp, synthetic construct
  source 1..120: mol_type = other DNA
attgtccctgtttgcagatgacatgattgtatatctagaaaaccccatcatctcagcccaaaatctccttaagctgataagcaacttcagcaaagtctcaggatataaaatcaatgtgca

SEQ ID NO: 1030 - DNA, 120 bp, synthetic construct
  source 1..120: mol_type = other DNA
aacaagcaacttatagaatgggagaaaatttttgcaatctacccatctgacaaagggctaatatccagaatctacaaagaacttaaacaaatttacaagaaagaaacaaacaaccccatc

SEQ ID NO: 1031 - DNA, 120 bp, synthetic construct
  source 1..120: mol_type = other DNA
atttatttatagaaagagaaattgaaaaaattctgaaaataaatgataatggaaatgcaacataccaaaacctaagggatacagtgaaagtaatactaagagggaagtttatagctataa

SEQ ID NO: 1032 - DNA, 120 bp, synthetic construct
  source 1..120: mol_type = other DNA
tgctgtaaaaacagtcaataaaattcaacattccttcatgataaagactgtcaaaaaactgagtatagaaggaacataccttaacataataagccattatgtacaacaaacccacagcta

SEQ ID NO: 1033 - DNA, 120 bp, synthetic construct
  source 1..120: mol_type = other DNA
ttaccctcattactgagcattggtttcttaatatataaactgggagtaatatccccaattaataacaatgggacatagcaggatggggttgcccttttcacccttttcatccctcctctc

SEQ ID NO: 1034 - DNA, 120 bp, synthetic construct
  source 1..120: mol_type = other DNA
atttgacacaattgctggtactgcaatttgtggtgctaatgacaacgttagtgatgatgattttcttctgtagggcaccatgttctctagggaatggtgaattctagaggccaagtctta

SEQ ID NO: 1035 - DNA, 120 bp, synthetic construct
  source 1..120: mol_type = other DNA
ccttgatctctgatcccatgtctccctgcaactactgccctatactatggcagtcttcataggacaatctctgagtctattcttcatgtagtcttttgaaacattgcattttttgttgtt

SEQ ID NO: 1036 - DNA, 120 bp, synthetic construct
  source 1..120: mol_type = other DNA
gcccctgctcaatcttacctgccaagtaagtcctctcccagatcctgtcactggtctaaagcttctttttatttttaattttgagccacctacacatgtgaaagtggaaatggaagacaa

SEQ ID NO: 1037 - DNA, 120 bp, synthetic construct
  source 1..120: mol_type = other DNA
gagaagatctcctggcttcaatccagcttcaccacctcctcaacctctctgagtcacatagtagattcctgatgggttttctctgatgattaaattatatattgtctatgtattatacac

SEQ ID NO: 1038 - DNA, 120 bp, synthetic construct
  source 1..120: mol_type = other DNA
ataattttgtctaagcactctctccactaataccaggggctgatgcttgtctaccaattacagctttattctgctctagtccaccctcactagagctaagatttgttgagacattcaatt

SEQ ID NO: 1039 - DNA, 120 bp, synthetic construct
  source 1..120: mol_type = other DNA
gtctgtaccctccacttatacatatacatattaattagactttcgtgggcttgctgtgttttaaggacgtgtctaaggcccatgtggacaaatccgtgacttctcgatgaagataattta

SEQ ID NO: 1040 - DNA, 120 bp, synthetic construct
  source 1..120: mol_type = other DNA
aaaatggctttcactgttggaggggatcttgaatccagaatctgttcccaaaaaagagaaagaaaagcagatttgggtgacctcaaaagtttcaaactaccttcccacgtatcctaaaaa

SEQ ID NO: 1041 - DNA, 120 bp, synthetic construct
  source 1..120: mol_type = other DNA
acagtttctgctcaagggagacacaacctgaagaaggaaaacaagaccaaaattgagaagcaatcttttaatcacagtgtttgcaaacacatagccaggaaagaatgttagcacagaggt

SEQ ID NO: 1042 - DNA, 120 bp, synthetic construct
  source 1..120: mol_type = other DNA
tttagtgttcttctagcttactaggcaagtaaccacagtgtgcctccattaattaataaatccccaaaacactggtcttatgaacagtgtattgatcagggctctccacagaagcagaat

SEQ ID NO: 1043 - DNA, 120 bp, synthetic construct
  source 1..120: mol_type = other DNA
tctacaagaaataaattaataaaagacttcttcggacatgactagaacccaagaggtgggtacctggtagagttatatgggaagaatggagcaatgggtttggcagttggggtggggaaa

SEQ ID NO: 1044 - DNA, 120 bp, synthetic construct
  source 1..120: mol_type = other DNA
caactcctgaatccaaccctgtaaaataagaagaaattcagacattgcaaggcatgaaaaattttctcccaatagcaaaggtgaaggatgtactcggagaggagggaacataccaagaag

SEQ ID NO: 1045 - DNA, 120 bp, synthetic construct
  source 1..120: mol_type = other DNA
attatcaagagacataaagataaagaacaacatatgaagtaaaaggcttctatgtggttgtttgccaggaagctggtggctaggaaggattgagagggagtagaggggagaccatgtttt

SEQ ID NO: 1046 - DNA, 120 bp, synthetic construct
  source 1..120: mol_type = other DNA
atgagaaactgcagtttgcaccactagcctccagcacagagattccatcccagctcagtatttagtatttagagatgtagtatttagtatttagagattcctaaacactgaggggctctg

SEQ ID NO: 1047 - DNA, 120 bp, synthetic construct
  source 1..120: mol_type = other DNA
taatttctttggtctggatttataactctcctttagggactgaggaattagggtttcaaatctcaaaaatgctgggataatttccttaccatcggagcttctttcttctgcctccagagc

SEQ ID NO: 1048 - DNA, 120 bp, synthetic construct
  source 1..120: mol_type = other DNA
cacctccctgcctctcttaaggaggacctggcccattaggaagcccggggcgttctgtggactgggtggtcaaaaatggtgtgtggaggagggagtcaattgagattagacgtgaaaaac

SEQ ID NO: 1049 - DNA, 120 bp, synthetic construct
  source 1..120: mol_type = other DNA
tgaaaatattcacatgagaaaaggtcaagtccatttttgctatcctgtactgaacacagatcaattaactggtcccaggattgatagcaacaggcctataactggtctcctggttcctat

SEQ ID NO: 1050 - DNA, 120 bp, synthetic construct
  source 1..120: mol_type = other DNA
agggttggaggatcaactagtggattccggcgaggaggtatcttcctccctggaagcagcagaacaaatttcagggactcgggagtccaaggcctcattccaaaaacactgagagattgg

SEQ ID NO: 1051 - DNA, 120 bp, synthetic construct
  source 1..120: mol_type = other DNA
ccgcggcatcctctggtctgtgacagttcctgagattttcctaatttttgatgcccttcacaatattgggaagtactgaccagatatattgtaaaatgtccctcaaactgaatttagttg

SEQ ID NO: 1052 - DNA, 120 bp, synthetic construct
  source 1..120: mol_type = other DNA
cttcagtctccccaaagagaaattttttgttgtcaggataaagtggtacatgaataaacaagatttccattaggcagcgtgccagtctcaagaaaattctggagaaaatggtgacaggat

SEQ ID NO: 1053 - DNA, 120 bp, synthetic construct
  source 1..120: mol_type = other DNA
agtttgtgaatagcttttcttcaaaacatgctgaacttggtaaaagagccagcaatttagggaaactatgtgcacttctgatcttgtccatttgataaatcacctgcctgtccccttgag

SEQ ID NO: 1054 - DNA, 120 bp, synthetic construct
  source 1..120: mol_type = other DNA
ctacatcacaccctttcactgctgaatctaatacctgtctctgtataggcaaaactgttgatattggcaaactttataatatacctcctataaaaatccagcttgatccatcaaaacccc

SEQ ID NO: 1055 - DNA, 120 bp, synthetic construct
  source 1..120: mol_type = other DNA
ttctccttaaggttccaccttactacaatatatagatggccgccttctttgctctgcttcacagatagcctatgaaaaaaatggtgtacaactgttaaagcaactgactgctaaagacca

SEQ ID NO: 1056 - DNA, 120 bp, synthetic construct
  source 1..120: mol_type = other DNA
agacaaagagggtcactatataatgataaaggggtcaattcagtaagatgctataacaactataaatatacataccccaacactggagcacccagctgtataaagcaattattattagag

SEQ ID NO: 1057 - DNA, 120 bp, synthetic construct
  source 1..120: mol_type = other DNA
agaaaagaacagaaatgccagctgtggtcaggtgttttaaaaatttattcagtgctctctgggcatgcatttcaggacaataacattgtttctggtctcaatgcactttcaccacatctg

SEQ ID NO: 1058 - DNA, 120 bp, synthetic construct
  source 1..120: mol_type = other DNA
cctcagcagttaaggctctttgcctgatggggtaaaccaaaccttcactcctagagagtttatgacatttagcagtgccctgtacaaaagattgttctagtttttgattgactttaatca

SEQ ID NO: 1059 - DNA, 120 bp, synthetic construct
  source 1..120: mol_type = other DNA
agcagaggggaagccatctccaagaagatgaccttgacaacagccaacataagtttaaaggtattgagaagacatttactcaactaaggaacagttggtgaattcatttaaggttcatgg

SEQ ID NO: 1060 - DNA, 120 bp, synthetic construct
  source 1..120: mol_type = other DNA
gcagagggagaaatctcctaagagtaggaaggaataacagaattaggaagcgtttccttacttcacagtgagtgcaaacatgatgggaaggcatagagaaaaagtaagaaattataggga

SEQ ID NO: 1061 - DNA, 120 bp, synthetic construct
  source 1..120: mol_type = other DNA
ggaaatcgtctctaaccactgactcctccagaaaaggaagaaagaagcctctctacactaagctgaaacactaaatacactaagtgttgattaagtagactaggtacactaagtggtaaa

SEQ ID NO: 1062 - DNA, 120 bp, synthetic construct
  source 1..120: mol_type = other DNA
cttccatctaagacaggtgactaagtgaggggcacaggtgcaacagaaagaaagactgatttgcaattgacttgtaggtgtaatcggttttagtccctatttgaccaccagaggtctgca

SEQ ID NO: 1063 - DNA, 120 bp, synthetic construct
  source 1..120: mol_type = other DNA
ctggggccagttacttccctttcttagccaccccatgctttacagaactgaactccacagtcatactcatctctcccagtgaagctcaaaggaattattaataaaaaacacaaaaacata

SEQ ID NO: 1064 - DNA, 120 bp, synthetic construct
  source 1..120: mol_type = other DNA
tggccagatcagtggacttccagtgtccttcctgagtcacaccgaggtgaattgcatagaccagaaacccacattttaaaaagaataaaataaaataagtggcctgtagtgtgggggctg

SEQ ID NO: 1065 - DNA, 120 bp, synthetic construct
  source 1..120: mol_type = other DNA
aaactctaatggcttcaggacacaaaaccttcgttgtcagtaggatgactggaaatttcaagcatgcagctcctattctgcaactcagtaaattttcaaacataccccaaactccaaaga

SEQ ID NO: 1066 - DNA, 120 bp, synthetic construct
  source 1..120: mol_type = other DNA
gcaacgaaatttgatggtgtttatgaggaaaactacagcaataatctcttctgtaacttttattaatagtaatgttagactcagaaatggtggcctccatgttcttccgcccgctgttgg

SEQ ID NO: 1067 - DNA, 120 bp, synthetic construct
  source 1..120: mol_type = other DNA
gtagaaggtatcaaagaggaataagctctccagcttgcacagaagatgggatttccatctaatattgtggcttcagcagcagaaaacatgatcaagctttacagcctttttctgaaatac

SEQ ID NO: 1068 - DNA, 120 bp, synthetic construct
  source 1..120: mol_type = other DNA
gtgcttgtaaagctctctgaaatagtgaagcaaagcaagcgcatgtggatgtgaaatttcaattgccaatatgatctgaaaacccagtgatggctgaaggtgttaaatgtgctacaatca

SEQ ID NO: 1069 - DNA, 120 bp, synthetic construct
  source 1..120: mol_type = other DNA
ctgagagtgagccccaatcatgaagcagttgtgtaggcaacagaaactgtgacagaaactccatatttctagccaaattatcaaggaaaagttgagaaaagtctgaagagttaaggagaa

SEQ ID NO: 1070 - DNA, 120 bp, synthetic construct
  source 1..120: mol_type = other DNA
gttaacaaaaacaaattttcccagtttttttgccttgtatttcccagcacaatttcatttaaaagtacaaaaagtgtttgctctcaaattgcatcataagcaagtgttaatactctgggc

SEQ ID NO: 1071 - DNA, 120 bp, synthetic construct
  source 1..120: mol_type = other DNA
aaagataaagtatttttcatacaaacaaatgctgagagaatttgccactaacaagccagcactataagaactactaaaagatgttctaaatcttgaaccaaaatcttgaaatataccaaa

SEQ ID NO: 1072 - DNA, 120 bp, synthetic construct
  source 1..120: mol_type = other DNA
caatacaatcaagatggaaatacaaaaattctttgaactggcctgtgtggtggctcaatcctgtaatccccacactttgggaggccaaggtgggtggatcacctgaggtcagggatttga

SEQ ID NO: 1073 - DNA, 120 bp, synthetic construct
  source 1..120: mol_type = other DNA
ctgatgccaagccgaagctggactgtactgctgccatctcggctcactgcaacctccctgcctgattctcctgcctcagcctgccgagtgcctgcaattgcaggcgcgcgccgccacgcc

SEQ ID NO: 1074 - DNA, 120 bp, synthetic construct
  source 1..120: mol_type = other DNA
cgcggttttgtggaatagaaagaggggaaaggtggggaaaagattgagaaatcggatggttgccgtgtctgtgtagaaagaagtagacatgggagacttttcattttgttctgtactaag

SEQ ID NO: 1075 - DNA, 120 bp, synthetic construct
  source 1..120: mol_type = other DNA
ccaatatacctaatgagcatagatgcaaaaatcctcaaaacatactagtggccgggcgtggtggctcacacctgtaatcccagcactttgggaggccaaggtgggctgatcacttgaggc

SEQ ID NO: 1076 - DNA, 120 bp, synthetic construct
  source 1..120: mol_type = other DNA
ttcaccacttctattcaacatagtactggaagtcctaaccagagcaatcagacaagagaaagaaataaagtgcatctaaattggtcataaggaagtcaaactgtcgttgtttgctgatga

SEQ ID NO: 1077 - DNA, 120 bp, synthetic construct
  source 1..120: mol_type = other DNA
aacccaaaagcaaatgcaacaaaaacaaagataaatagatgggatttaattagactaaaagcctctgcacagcaaagaaacaatcagcagggtaaacagacaacacacagagtgaaagaa

SEQ ID NO: 1078 - DNA, 120 bp, synthetic construct
  source 1..120: mol_type = other DNA
ataagggcggagaaatactatgttcaaagattggaatattcagtattgttgaggtaccaagtctcccacaactgacctgtggattaagtgcaattccaatcaaaatcatggcagggctga

SEQ ID NO: 1079 - DNA, 120 bp, synthetic construct
  source 1..120: mol_type = other DNA
ttgaaattattccttagagcctccagggcttagaaattccttaattttacatcctgccatgtcaagatttcttccagttccggggattctaggatttgcagaagacatcagtaccactta

SEQ ID NO: 1080 - DNA, 120 bp, synthetic construct
  source 1..120: mol_type = other DNA
tcttcaagacaaaatacaatcaatagatggcaaatccaaggtgactcagatcttgaaattatcagatgaggactttcagtgtctattttaactgtggtctatgccaagcatactttaacg

SEQ ID NO: 1081 - DNA, 120 bp, synthetic construct
  source 1..120: mol_type = other DNA
aaattagatttgagtccagaatcaaggacctttaagcagggattggagatggcagggggccaggattaagggatatagacagcaggtcctgtctgcttaggttgcaaatgggaagaagag

SEQ ID NO: 1082 - DNA, 120 bp, synthetic construct
  source 1..120: mol_type = other DNA
agagttgccatccgctccacagtcagtttcccctgatgttaacatctctcattactatggtccatttgtcacagctaatgaagccattttcataccttattattactaaactgcagactt

SEQ ID NO: 1083 - DNA, 120 bp, synthetic construct
  source 1..120: mol_type = other DNA
gagcaaaatttactttctaaaaagatgggtatgtgtcgaccctttaaaagctgtttgggctattgtcgccattcaatgagaaacttcagtctccccaaagagaaattatctgttgtcagg

SEQ ID NO: 1084 - DNA, 120 bp, synthetic construct
  source 1..120: mol_type = other DNA
tttcataatgcattcgggattcaaacattgcctccctctaagattctatcacaaaattaactgagaccagcaaacagttaaggaaggacaacaaggctttagggccccagattctttcct

SEQ ID NO: 1085 - DNA, 120 bp, synthetic construct
  source 1..120: mol_type = other DNA
ttcaaaaaaaaagaaatcaccacttgcacagtttttatgtaatgtgaaatatgaatatccacaattacatgaaaagctgttaaaaataatcctcccagtccgggcatggtagctcacaca

SEQ ID NO: 1086 - DNA, 120 bp, synthetic construct
  source 1..120: mol_type = other DNA
gagagatggctattatatccaagcccagagtaccatcatagtgtttgatgtaacatcgagagttacttacaagaatgtgcctaactggcatagagatctggtatgagtgtgtgaaaacac

SEQ ID NO: 1087 - DNA, 120 bp, synthetic construct
  source 1..120: mol_type = other DNA
ttgcaagaacaacacttatgaaaatgaaaaataatcactcttcttgttaccaaaaatcttggtagctgcagaaggtgggatctttcctcactgggagtcgcagagccaatacatgaaacc

SEQ ID NO: 1088 - DNA, 120 bp, synthetic construct
  source 1..120: mol_type = other DNA
ggcgtgagccaccgttcccggcctatacgttgtttattttggaaaaattaaaaattaagttttttttcattaaagatatgttatttccgatcaagagatcaagaccatcctggccaacat

SEQ ID NO: 1089 - DNA, 120 bp, synthetic construct
  source 1..120: mol_type = other DNA
ctaatttctaagagtgtgcagagataccgaaacctaaaagtttaagaactgctgattgctgggaaactctgcagtttcccgttcctctcgtaacctggtcatgtgtccttcttcctggat

SEQ ID NO: 1090 - DNA, 120 bp, synthetic construct
  source 1..120: mol_type = other DNA
aggagatcctataccacagagtgactctcttaaagggccagacctctctcaggggcaattaaggaatctagtctcgctggagattccatccttcagatgaactgatgagcagttctcttt

SEQ ID NO: 1091 - DNA, 120 bp, synthetic construct
  source 1..120: mol_type = other DNA
taatccagaattcagtatctagagagacaatccagaaatgaggagaaaataaaggtattctcaaagaagggaagctacaagaatgcattaccatcaaatcttctgtgtaagaaatattga

SEQ ID NO: 1092 - DNA, 120 bp, synthetic construct
  source 1..120: mol_type = other DNA
tctccttggatctgtggtctctggagctgtggttgctgctgtgatatggaggaagaagagctcaggtggggaagggagaagggtggggtctgagttttcttgtcccactgggtgtttcaa

SEQ ID NO: 1093 - DNA, 120 bp, synthetic construct
  source 1..120: mol_type = other DNA
ttttttgattcagaatttttgagtgtgtggtgggctgttcagagtgtcatcacttaccgtgactgacctgaatttgttcatgactattttcttctgtagcctgagacagctgccttgtgt

SEQ ID NO: 1094 - DNA, 120 bp, synthetic construct
  source 1..120: mol_type = other DNA
gaaatggacttgaggaagctaagatcatagctagaaatacagataattccacagcacatctctagcaaatttagcctattcctattctctagcctattccttaccacctgtaatcttgac

SEQ ID NO: 1095 - DNA, 120 bp, synthetic construct
  source 1..120: mol_type = other DNA
tcatttgtatttcatttgtgcgttttgtgccttgttgttttaattttttaaccacattcaagctatcctttggcttccaatgccatggtccacccagaactgcattcactggcccatgtt

SEQ ID NO: 1096 - DNA, 120 bp, synthetic construct
  source 1..120: mol_type = other DNA
agatctgccttcctcagttttagatcttaaatctttttaagccagactccaagggatctttaacaaatatttatcgaacccttcctgtgttcaaagaatgttgtgaggtccagggtggga

SEQ ID NO: 1097 - DNA, 120 bp, synthetic construct
  source 1..120: mol_type = other DNA
ccactgtagatgttttaatcagggaattgggttattaccaaaaaaaaaatgttggaagatgaaagagcaggttctttatgcctcctggcttgaccctggaacaatttagaaccagcccag

SEQ ID NO: 1098 - DNA, 120 bp, synthetic construct
  source 1..120: mol_type = other DNA
aggaagaaagaaagaaaggcaaatgatcacttagaggattttgtttggtagttaaaaccattttgaaacagagggagggaagaaatcacctatgcttcctcagtggtaaagagactggga

SEQ ID NO: 1099 - DNA, 120 bp, synthetic construct
  source 1..120: mol_type = other DNA
ccatgtccacctctttccacacagacacagtaacaatctgatctctctttcttttccccacatttcccccttttctattcgacaaaaccgccatcgtcatcatggcccgttctcaatgag

SEQ ID NO: 1100 - DNA, 120 bp, synthetic construct
  source 1..120: mol_type = other DNA
gcctggctgagcactttcaagtctcattcctaacatctgtcagttaagctgggataacaattatctgactgactgcacggaattctgaatgaattgaattggataatacatgtaaatcct

SEQ ID NO: 1101 - DNA, 120 bp, synthetic construct
  source 1..120: mol_type = other DNA
atgagaaattaagagtagcgatgcttgctttgaggaattggagggaaaactaaaatgaaagttgaatttggataagagaaaaatcaagggcactcactcttcccaaccccagcctgtctg

SEQ ID NO: 1102 - DNA, 120 bp, synthetic construct
  source 1..120: mol_type = other DNA
tcatcttcagcccattaattaatccctatgagatgaggcagacaatagtgtggtcctacaacactatggcaaacatattttctctgctcaaattgtttctcttctgactccagctaagac

SEQ ID NO: 1103 - DNA, 120 bp, synthetic construct
  source 1..120: mol_type = other DNA
atttctgctatgctattcctctgtgcgcttaccctttctgtttctaaatatttcagctaaaagacaataaatactgcaacccttacattccttcagccctgctttcacttgtcctgggtg

SEQ ID NO: 1104 - DNA, 120 bp, synthetic construct
  source 1..120: mol_type = other DNA
cctaaacacttactactcccatttcacaacttctattaaagtgaatataaaaggtttggtacaattccctaatgctcttggcatcccactattacagagtgcccaaatatgctttctagt

SEQ ID NO: 1105 - DNA, 120 bp, synthetic construct
  source 1..120: mol_type = other DNA
tgtgcctggccatatagagacttctctaaaactttggcttctctgaactttctctgtgacatatactagaaccatctgtagcattgtgtaaccatttcacatcaaaaccacttttcttga

SEQ ID NO: 1106 - DNA, 120 bp, synthetic construct
  source 1..120: mol_type = other DNA
cttatgcaatactgaaagcattcccacctgccataatctttgcatatcagttgttccaggctgtgattcaatattaataccattggtttcatgatttgtctcagattcagaagagtcatg

SEQ ID NO: 1107 - DNA, 120 bp, synthetic construct
  source 1..120: mol_type = other DNA
ataagttacagcatgtgaggataacaattaactgatgattttcctaaaccacaaaacaatgaatgtacaatggtgacatggctgaaccagccggtggtgccataaatgattctcagatgc

SEQ ID NO: 1108 - DNA, 120 bp, synthetic construct
  source 1..120: mol_type = other DNA
gatgccagtgtgtaagacaatgccataaagggctatatgagcattagctactatgctatgacttttaacattgagttgattaggttcaagggtcaggtggggcacttttagaaattacag

SEQ ID NO: 1109 - DNA, 120 bp, synthetic construct
  source 1..120: mol_type = other DNA
gaaaaggaaatatgcagtctatttaggaaagaatgcatgagtttgttcataaagcataacagtgggcgtgggtaaccaatgaagactgctcggaatatccattaagcacaaattcctgcg

SEQ ID NO: 1110 - DNA, 120 bp, synthetic construct
  source 1..120: mol_type = other DNA
aaggtgaaagtctatcatatccatgagtagacaataagagtttgtggcttttatcttgctagcagactcatttactgactcaagtaatcaagctgccatgttaaggaggtccatgtggtg

SEQ ID NO: 1111 - DNA, 120 bp, synthetic construct
  source 1..120: mol_type = other DNA
gtgaatttaaaaatacttaacagacataatgacaaaaagtagtaagtacatctctttggatcgtgagaaagaagatcaggaatgaaagatctagctgggccttcccccaccctccccagc

SEQ ID NO: 1112 - DNA, 120 bp, synthetic construct
  source 1..120: mol_type = other DNA
aattcatcccacacaattgatggagataattttcactgctttagtcacctaaacaggccttgctgatccacattcctgttcagattactaggattctctaagggagggatgattgttgaa

SEQ ID NO: 1113 - DNA, 120 bp, synthetic construct
  source 1..120: mol_type = other DNA
gcaggatttctcataagtaagttttgcacaaacttctcatctacatgttcttatattgtaattcctgtcccccaaaatcaggcccataacttctccagatgccactgaagggcctttcca

SEQ ID NO: 1114 - DNA, 120 bp, synthetic construct
  source 1..120: mol_type = other DNA
ttcgtcaacgtggccacctactgtggtctgacagcgcaatatcctggtaagagaattcatagttacttctctttgggactaaattttccagctgatcatattctaaattatacttggaat

SEQ ID NO: 1115 - DNA, 120 bp, synthetic construct
  source 1..120: mol_type = other DNA
actgacacatgctttacacttcatttcacgctgatattgtgaattaattcccctccagtcttatctcctctcttggacctccgttccctgagtagctctcctagtactggtcttagtatt

SEQ ID NO: 1116 - DNA, 120 bp, synthetic construct
  source 1..120: mol_type = other DNA
gagcagaaatatctgagcagaaatatctgaagcctcatactgcatactgcaagggaaaaggactccactgaattagtacaggcaagtcactataaaaatatctgaaccctcatactgcaa

SEQ ID NO: 1117 - DNA, 120 bp, synthetic construct
  source 1..120: mol_type = other DNA
gtaacatatgcaaatttgggggttagtggggagaagctagcaatcaagaattttacatcaagaaaaattatccttcaaaactgaagaccggtacagggacagtggtttgcacccataatc

SEQ ID NO: 1118 - DNA, 120 bp, synthetic construct
  source 1..120: mol_type = other DNA
atatatgcactcacacacatatgacaataatggtacaaaggatagggaaaagatggagttacattgaaacaaaggaaccacatcagattgtaagtccaatccacaagaacaaatcatcag

SEQ ID NO: 1119 - DNA, 120 bp, synthetic construct
  source 1..120: mol_type = other DNA
ccagcctggccaacatggtgaaaccccgtctctactaaaaatacaaaaattagctcagcgtggtggcacatgcctgtaatcccagctattcgggaggctgaggaatgagaatcgcttgaa

SEQ ID NO: 1120 - DNA, 120 bp, synthetic construct
  source 1..120: mol_type = other DNA
tcagccacccaaatgggattgcaaagaggaggacagggatggaaaggggaaagtttgatttggtttggtttgcttagtctttctattggtaccacttccttatcccaacctcatcatctt

SEQ ID NO: 1121 - DNA, 120 bp, synthetic construct
  source 1..120: mol_type = other DNA
tgtaaataatccgttgagaatatttaatgaaaaatgttggtcgtatctttatctggtctgcggctctgtccctgtttcctggataggagactacgtctgtatcttgtatcacaggaggca

SEQ ID NO: 1122 - DNA, 120 bp, synthetic construct
  source 1..120: mol_type = other DNA
caagcacccaccaccatgcccagttaatttttgtacttttagtagagacaaggttttgccatgttggccagggtggtctcaaactcctgagctcgtgatctgcccacctcagcctcccaa

SEQ ID NO: 1123 - DNA, 120 bp, synthetic construct
  source 1..120: mol_type = other DNA
atcagctctctgtaaaatagaacaatcagcaggatgtgggtggggccggatgggggaataaaagcaggccacccaagccagcggcggcaacgtgctcgggtcctcttccacaccgtaaaa

SEQ ID NO: 1124 - DNA, 120 bp, synthetic construct
  source 1..120: mol_type = other DNA
gatcacgtgcgtagaggttactgctgccttaattaaaggagacaacatgtttcataaaacttggaaattgtagagggtgtggggaaccactcaaattcagaatatcaaaacagaacttta

SEQ ID NO: 1125 - DNA, 120 bp, synthetic construct
  source 1..120: mol_type = other DNA
acaagagggatgctcgccaatctcctctgaattttgcaaccctgtgtgttaaaaacaggtatttctggtctttaaagacacttggaaaagacagacttgttgaatacttagaaaggccaa

SEQ ID NO: 1126 - DNA, 120 bp, synthetic construct
  source 1..120: mol_type = other DNA
ggtctacgttttgggtggtatgtctaaataatgctgcattgaagcgtgggattaggaagaaccaaggcccttggaattaaaatgaatagcagtaatccactttcatcgtttgtttcttac

SEQ ID NO: 1127 - DNA, 120 bp, synthetic construct
  source 1..120: mol_type = other DNA
aggcaggtgcccctctggaacaaagcttccagaggaaggatcaggcagcaatatttgctgttctgcagcctccgctagtgatatccaggcaaacagggtctggagtggacctccagcaaa

SEQ ID NO: 1128 - DNA, 120 bp, synthetic construct
  source 1..120: mol_type = other DNA
cccacaaaggggagcccatcagactaacagcggatctctcagcagaaaccttacaagccagaagagagtgggggccaatattcaacatttttaagaaaagaattttcaaaccagaatttc

SEQ ID NO: 1129 - DNA, 120 bp, synthetic construct
  source 1..120: mol_type = other DNA
agtaaaacactcctcagcaaatataaaagaacagaaatcacaacaaactgtctgtcagaccacagtgcaatcaaattagaactcaggattaagattcactcaaaactgcacaactacatg

SEQ ID NO: 1130 - DNA, 120 bp, synthetic construct
  source 1..120: mol_type = other DNA
taaaatactggcaaacgaaatccagcagcacatcaaaaagcttatccaccatgatcaagccggcttcatccctgggattcaaggctggttcaacatatgcaaatcaataaatgtaatcca

SEQ ID NO: 1131 - DNA, 120 bp, synthetic construct
  source 1..120: mol_type = other DNA
acaagactacagtaaccaaaacagcatggtagtggtaccaaaacagatatatagacaaatggaacagaacagaggccgcagaaataacaccacacatctacaaccatctgatctttgaca

SEQ ID NO: 1132 - DNA, 120 bp, synthetic construct
  source 1..120: mol_type = other DNA
tcaatgatagactggattaagaaaatgtggcacatatacaccgtggaatactatgcagccataaaaaaggatgagttcatgtcctttgcagggacatggatgaagctggaaaccatcatt

SEQ ID NO: 1133 - DNA, 120 bp, synthetic construct
  source 1..120: mol_type = other DNA
ttaacaatttgtaatgcagacatttgatggtctggttctatgttgagttcatgttgatacttggtcttaaggacagttagagctgataaaaataacttgtgcatagaccaggcgcggtgg

SEQ ID NO: 1134 - DNA, 120 bp, synthetic construct
  source 1..120: mol_type = other DNA
caaccacgtggaaaattaaataaacccatgacatttgtagccagcagctcgggtgttttgtagggttttccctgagaagtggggactaatcgcatgaatcactttttttttctttttaga

SEQ ID NO: 1135 - DNA, 120 bp, synthetic construct
  source 1..120: mol_type = other DNA
tctgtggcttctgttggaggatgtgctgtgggaatgcaaggaggagatggaaggaaggtgtcaatatagctttaacaaaggaaaaaaaaatgaaaacaccgaaaccacccttgcaaaaat

SEQ ID NO: 1136 - DNA, 120 bp, synthetic construct
  source 1..120: mol_type = other DNA
caagcgatcctcctgcctcagcctcccaaactgctggggttacaggcacgagccaccttgcccagctcaggcttttccattttggaaaaccagatgactccacccagatccaagaccggt

SEQ ID NO: 1137 - DNA, 120 bp, synthetic construct
  source 1..120: mol_type = other DNA
taacatagtcatagtaataaccttctaaagagaagttggaagccagcatttacaggtggaaagaaagctgatgcagcttcatgagtaaggatgcagtcagcatccaacaaaaggcatttg

SEQ ID NO: 1138 - DNA, 120 bp, synthetic construct
  source 1..120: mol_type = other DNA
ttatttttcacagttcatggggctgggaagttcaggtatcaaggcactggcagttaaggtgcttggtgaaggtcctttttctgttcccagttcacagatgtcccaccttcattttctttc

SEQ ID NO: 1139 - DNA, 120 bp, synthetic construct
  source 1..120: mol_type = other DNA
aagactatcacattgggaattagagagcttcaacatacagtttgaggggactacaaacattccattcatggcaactaggaatttatagaaacactccctctagtgtgcaaaaaagtaagt

SEQ ID NO: 1140 - DNA, 120 bp, synthetic construct
  source 1..120: mol_type = other DNA
ctccatccatctttgctgatatataaacaggaaaaagttgggggagagaatacaggaacacggaacaaacagtaaacaatggttatctcatagacgtgattggcggcatttttggttttg

SEQ ID NO: 1141 - DNA, 120 bp, synthetic construct
  source 1..120: mol_type = other DNA
tgccaacccctatgatagcatgaaacagttctttcatctgattggttctaactctctggaacaccctaactaatacagtgctgttataggtactgagaatagagtgatcaacagggaaga

SEQ ID NO: 1142 - DNA, 120 bp, synthetic construct
  source 1..120: mol_type = other DNA
gaaataagaccaggtgctgggaccaggagtcctacactcatcacactcagttactcatggggtgacttcagaagccctaaaagattttgtttcccaatttttttttttttttgacaagat

SEQ ID NO: 1143 - DNA, 120 bp, synthetic construct
  source 1..120: mol_type = other DNA
agaaaaaagaaaaagaaaaatggctgattccacatctggagctgggaaagtaaaaaaaaattgtgcctgggacatctagttgtgtcaaaagcaagcaagtgctcacagaacttttggggt

SEQ ID NO: 1144 - DNA, 120 bp, synthetic construct
  source 1..120: mol_type = other DNA
ttgaggtcaggagtttgagaaggaccctactttttccagttggtgagagaaagctccttcctaggtaattatgcccttataaatgtagaagtgggagaattagaaaagcaccttttgtaa

SEQ ID NO: 1145 - DNA, 120 bp, synthetic construct
  source 1..120: mol_type = other DNA
tcagggagacagatgaacacattaagtgacatcaaagaaacagtaagacaaatctagaatgttgaacagtctaaaagacaactgccctagtatcctcaaagatccaattccaagaagaaa

SEQ ID NO: 1146 - DNA, 120 bp, synthetic construct
  source 1..120: mol_type = other DNA
aggttgcagtgagctgagaccgtgccatcgcactccagcctgggcaacaagagtgaaactccatctcaaaaaaaaaaaaaagaattaccatatgatccagcaatcttgcgtctgggtatt

SEQ ID NO: 1147 - DNA, 120 bp, synthetic construct
  source 1..120: mol_type = other DNA
taccagaggctgggggtctggggtaaatggggatatgatggttaaaggttacaaagcttcattggactggaaaaataagcttttctttttctttgagatatactgcacagcaaagtgaat

SEQ ID NO: 1148 - DNA, 120 bp, synthetic construct
  source 1..120: mol_type = other DNA
aatatatatatattattcacatggacaggggccccacaaaaaacaaatatgtttgtctgggttactcaacatcctaggggtggctctgccccatttttattctgtgagtcttggcaccat

SEQ ID NO: 1149 - DNA, 120 bp, synthetic construct
  source 1..120: mol_type = other DNA
ggcagatggcgctgcaaagcttctcaaatgcagcgggaagtccatttaccaacggctgttgcgatctcttaattagcttgaactgagtttgtattagaatttataatttttactgcatat

SEQ ID NO: 1150 - DNA, 120 bp, synthetic construct
  source 1..120: mol_type = other DNA
aacaggatgtatactcttgacttgtctctctcccctacacagcaaaacaatcccaagacatgtcaattctatctcctgagcaacccataaaacgatttctcttctttccatcttccatta

SEQ ID NO: 1151 - DNA, 120 bp, synthetic construct
  source 1..120: mol_type = other DNA
ttttaaccaatttttgttgactgtatcaatgattgtaagaagtgaacaaagggccagataattgaactatcctggaccacacacagctaccctgttccagaagcaggactataatcccat

SEQ ID NO: 1152 - DNA, 120 bp, synthetic construct
  source 1..120: mol_type = other DNA
ctagcacattttgggaaaccttcaagtacattctcatgctggtattatttaaactttgcactggagtgaattccaggagttatgtccacactgagaccaatggagatgaacctaaagcaa

SEQ ID NO: 1153 - DNA, 120 bp, synthetic construct
  source 1..120: mol_type = other DNA
caataaatatttgctgaatttgaacaattcctgtaaaaatctcattaagagacatcagcttgggacacagttcctctcttactgttccttctcccagaagctcctggaatgagcaggtct

SEQ ID NO: 1154 - DNA, 120 bp, synthetic construct
  source 1..120: mol_type = other DNA
atctttacaatcactatgctaagggtcaattattaccctcagtttgcagatcaggaaaatatcacagatgttaagtaacagagctagccaacaggtacagaatccaggtttgaccctctc

SEQ ID NO: 1155 - DNA, 120 bp, synthetic construct
  source 1..120: mol_type = other DNA
ggaaacctgaggaaggcaaggaaaattaacgtttaacaggtttctactctgtgatgggacttggtgctatacctataggtaaaaggggaactaaggctcagaaattaaggaaatggtatt

SEQ ID NO: 1156 - DNA, 120 bp, synthetic construct
  source 1..120: mol_type = other DNA
agaaaaaagttctcctttgacgaccaccaccagacctagttctctgtccgctttgcaggaaaactccttaaaagacttacctacttttttcaccatttcttcctgctatcttctttgtaa

SEQ ID NO: 1157 - DNA, 120 bp, synthetic construct
  source 1..120: mol_type = other DNA
agcttaattttgcagctttcaaacttgatagaactgaaattgtgcagtatggatgctattgggtcagactcttttcacacaatgttatgtgaagttgttgcaccttctctcatgggccta

SEQ ID NO: 1158 - DNA, 120 bp, synthetic construct
  source 1..120: mol_type = other DNA
tttcttgcccaccccccatcatttattctctactcaggaggtaaacttataagaaacaaaatcagatcctatcattcccctgttcaaaacctacccttggcttctcatgagacttggaat

SEQ ID NO: 1159 - DNA, 120 bp, synthetic construct
  source 1..120: mol_type = other DNA
acatagtggttatcttttatcgggcattaattatcaattagaatatgaaaggattaagcaaaaatcatgttcctcaaggagaggtgccaggttcctcaaggagaggcgccaggacaaaga

SEQ ID NO: 1160 - DNA, 120 bp, synthetic construct
  source 1..120: mol_type = other DNA
ctccactgtgagctgagacaaagcccttaagaggagattctccttggcaacaaacttaaagggttaaaacctagaagaatactaattcttgctgagctcctactatgatttgataatcac

SEQ ID NO: 1161 - DNA, 120 bp, synthetic construct
  source 1..120: mol_type = other DNA
atcaaagtaactaagactcagagtagcaaaatcacttactcaagacctcacagctgagaagaggtggaatttaactcaggctgtcatgatccttccactgcagcagacgcctcttctgcc

SEQ ID NO: 1162 - DNA, 120 bp, synthetic construct
  source 1..120: mol_type = other DNA
ggtagcagactctgggctaaaaactataaaccagacaaactgaaaaacaaagacaaaacaggggttagtaatacttctgagtctcagagggcttcctataggtcatgattagagatggaa

SEQ ID NO: 1163 - DNA, 120 bp, synthetic construct
  source 1..120: mol_type = other DNA
aacacttggattttctattggtctgtgatgagctaaaggacaggacatggctgttttgaagagaagagtgagctggccaagggaggaatgacaggctataagagaataaaaaactgagtt

SEQ ID NO: 1164 - DNA, 120 bp, synthetic construct
  source 1..120: mol_type = other DNA
ccacaaactcctattttctcccctcttgtacaatcaacttcgcaaaccattctctccagagtcgttcaagtctcctctctcaagtcagacttcccccaagtccttctttcaggcaatact

SEQ ID NO: 1165 - DNA, 120 bp, synthetic construct
  source 1..120: mol_type = other DNA
ctgttgggacccaaattccttgtgggaacgatgataaggagcaggtttacagatcataagtgcaaaagcgggcgagaagggaaacccaagcgggacaaggacttttggggggaggtcaaa

SEQ ID NO: 1166 - DNA, 120 bp, synthetic construct
  source 1..120: mol_type = other DNA
gggattggttcatgtctggagacacttaggttgttttggatagcgacggtacggtgaagaaaaaaagttgtcagtatcttttcctgcattatcccctttgattgaatatctactttttgc

SEQ ID NO: 1167 - DNA, 120 bp, synthetic construct
  source 1..120: mol_type = other DNA
acaacgatgcagtttggaaacaatgatagacataagtcaataggacttatgtcccgaagagtccaataacaggcccatacatgtgtggacacttcatttatgatgaagatggaactgaaa

SEQ ID NO: 1168 - DNA, 120 bp, synthetic construct
  source 1..120: mol_type = other DNA
taccagatgacaaaaaaattaaaaatagaattaccccagaactcctgcttccaggtatatatcaaaaaaaaaaaaatggaaagcagggtcttgagatatttgcagactcatgttcatagc

SEQ ID NO: 1169 - DNA, 120 bp, synthetic construct
  source 1..120: mol_type = other DNA
ctccatctctactaaaaatacaaaaattagccaggcgtggtggtgggcgcctgtaatcccagctacttgggaggctgaggcaggagaatcacttgaacccaggaggcagaggttgcagtg

SEQ ID NO: 1170 - DNA, 120 bp, synthetic construct
  source 1..120: mol_type = other DNA
aaaaccaggaaagcatcaatgaatatatgagaaggtggaagaacagagcattttctcattgatcatcctactagtctcctcccttcacctcaatcttcacagtacctgccatcaaaagtt

SEQ ID NO: 1171 - DNA, 120 bp, synthetic construct
  source 1..120: mol_type = other DNA
ttgaggtgctaataaggctttatctcttcacctggtggtggaaactcaagtgtgtctactttgtgagaactgggttgtgcacttaaaactggtgtgtctttatgtatgctgttcttcaat

SEQ ID NO: 1172 - DNA, 120 bp, synthetic construct
  source 1..120: mol_type = other DNA
ccttctgtctctgcgtttcattgtatttgttttctttgttgctcaaatttttaactgttccattttcacttgttcacagacaaatccgaccgccctgtctgccgacattttgccaaaaag

SEQ ID NO: 1173 - DNA, 120 bp, synthetic construct
  source 1..120: mol_type = other DNA
aataaatgcagtggaaaccagcattttatttaatccctgtgttctagtcatctctggagttgcagatgaagctgttctcacctggtggagtcagcttattctttagttcatacacactag

SEQ ID NO: 1174 - DNA, 120 bp, synthetic construct
  source 1..120: mol_type = other DNA
cttggacctggaagttaattagaaggctactggctacttcagtagtacaagtgagccatgatggtgacatagacttgggtagtagagttggagaaaagtagacatttgaaaattacaggt

SEQ ID NO: 1175 - DNA, 120 bp, synthetic construct
  source 1..120: mol_type = other DNA
caccacgcccagccggaagaaacttcttaaaagttaacttataactcctcaacttatgggcaagcatttaagttgagtttattaattctacagaggttatctccctaaaagggggctagg

SEQ ID NO: 1176 - DNA, 120 bp, synthetic construct
  source 1..120: mol_type = other DNA
catatccaaaaaaaaaaaagacatggtggctaggatagacctctctgaggaatctgtagatgaagggcccagaacttagccttgaggaactctgacattgaattgctaagtgaagaagga

SEQ ID NO: 1177 - DNA, 120 bp, synthetic construct
  source 1..120: mol_type = other DNA
gcccagtgtggctagactgtgggagatgggatcaagatgtttaacagagggcatattgtacagagccctataaactatggtaaagcatttggattttattctggattttatactttttta

SEQ ID NO: 1178 - DNA, 120 bp, synthetic construct
  source 1..120: mol_type = other DNA
cttaattctatttgtcaaacatgacctccaatccattaacaaaacttgttggctcttttccaaaatacattcagaaaccagcccttttcacacctccactgctgtcaccctagtctgagt

SEQ ID NO: 1179 - DNA, 120 bp, synthetic construct
  source 1..120: mol_type = other DNA
acagggctttactccagctgtttcttatgctagaaaggcccttctcctggaaatccatgtggccaaaactaatcttctttaatgatttgcttgaatttcactttactgaggcctcattta

SEQ ID NO: 1180 - DNA, 120 bp, synthetic construct
  source 1..120: mol_type = other DNA
gaactacaggagcaccttgctcaagctcccatattaagtggtagagttagaagtgaaccaaagtcttgattgtggtgatagtttactgggtttatgcaggtcaaaacttatttaagtgat

SEQ ID NO: 1181 - DNA, 120 bp, synthetic construct
  source 1..120: mol_type = other DNA
ataaaatcaacctgagacacattcatactacaaatcctgaaaacaggatttgtggagggcaagatctgccctttcctcaccaacctcttggcaaatcttcagcaaacattatataagacc

SEQ ID NO: 1182 - DNA, 120 bp, synthetic construct
  source 1..120: mol_type = other DNA
tgtttctcaagagagggtgactccttcatggtttctttcttaagacacccctctcactcaactggagcaagagtgtagatttttgatgttggaatgagggttaaggtttacttaaaaagc

SEQ ID NO: 1183 - DNA, 120 bp, synthetic construct
  source 1..120: mol_type = other DNA
tatgatgaaggtgcttaagaatgttatgggactgtagaagagaggaggagcatctactcagacaggtaagggagtgtcagcaaagcctcccaagaatatgtaatagctgagtattttttt

SEQ ID NO: 1184 - DNA, 120 bp, synthetic construct
  source 1..120: mol_type = other DNA
aaaccaggagtgagcaagatcccagaaattaaataatgatagaagagaataaaaaaggtgtggaggtaggcagcatggaatgctgcagagaagtcaggcaaaataaggaccaaaaaatac

SEQ ID NO: 1185 - DNA, 120 bp, synthetic construct
  source 1..120: mol_type = other DNA
ctgggatgagtcagtcatctgtgttgataaggtgagctgatcaggtttttccttcttaggtacttcagtagatccttcctcctaatgcctttaggattaaactccttggaatagcatata

SEQ ID NO: 1186 - DNA, 120 bp, synthetic construct
  source 1..120: mol_type = other DNA
gatttgtgctataatattcaagcagaacaagtaaggcatagactgaggtgttcatttgcttaccagataactctatttacatggcctataggttttacaaacaacgtgtccccctggcca

SEQ ID NO: 1187 - DNA, 120 bp, synthetic construct
  source 1..120: mol_type = other DNA
gtggatttcccactatgcttattccctccgattcttgctgtactctgaagccagagtgaaactttaaagtgtgaaagtgatcataccaataaagtccccattccttaaccttgctacaag

SEQ ID NO: 1188 - DNA, 120 bp, synthetic construct
  source 1..120: mol_type = other DNA
tggtgaagaaagggaagaaggacaagaagatcaaaaaaacggtgagaaaatgagggttgaggataagaaatgactatggatgtttccaagctaaataaatagccatgtgaaggaggtggg

SEQ ID NO: 1189 - DNA, 120 bp, synthetic construct
  source 1..120: mol_type = other DNA
tcagtcactctcactccatttagcaccttctggccatggtggagtaatttcccgcttttaaactagctcttctcggtctgtcttacttatactgttaaaatcatctttttagaatacatg

SEQ ID NO: 1190 - DNA, 120 bp, synthetic construct
  source 1..120: mol_type = other DNA
aagtttctggtgggtttatcgggatgcaacctgtcgtaaatggaggagcatgtgtatggttaacacagtagactctctagaaatgcttattacacagcaaagtagcacaataatttgtat

SEQ ID NO: 1191 - DNA, 120 bp, synthetic construct
  source 1..120: mol_type = other DNA
ttcatcagacctgtcttttccctattagcctcaaaataaattcgctgctctggacaatgaagaggaggataaagaagaagaaattataaaggaaaaggagcctcccaaacaagggaagga

SEQ ID NO: 1192 - DNA, 120 bp, synthetic construct
  source 1..120: mol_type = other DNA
tgagctatgtggccaattatttcacctctgaaaaagttggtttatcaaaggagtgatgtgctcatttaatgcaacccgttgttatgacattatccacgtgttatctccagctacctcaag

SEQ ID NO: 1193 - DNA, 120 bp, synthetic construct
  source 1..120: mol_type = other DNA
caccgtgcccggacggctacctgatcttttctttgcatgttaacaaggaaaccacagaaactcattttatacaaatgaaactcttgaaatccatttactccaccttcagttacattgtat

SEQ ID NO: 1194 - DNA, 120 bp, synthetic construct
  source 1..120: mol_type = other DNA
gacacgaaggaaaggtttgggggctactccaagtaaaacaatcggagtaagaaaataattgtgttctgtgaaccttatctcaatgtctgatgacatgggctgtttcactttggggttttt

SEQ ID NO: 1195 - DNA, 120 bp, synthetic construct
  source 1..120: mol_type = other DNA
tgaatgggttagttcagtgggaagaaagattggaggcattttccacaccttaggttctgccaacttgagcaagaagatagaaaaaccagtagaagtggggtccacccttggcagaaaata

SEQ ID NO: 1196 - DNA, 120 bp, synthetic construct
  source 1..120: mol_type = other DNA
cttctcattcttccaaggccaatagggaggctcaaggcttacctctccctccttactatctgtgttgtgagaacttagggtctttctctatttatctccctacttggtggtgagttctca

SEQ ID NO: 1197 - DNA, 120 bp, synthetic construct
  source 1..120: mol_type = other DNA
ctactataggggcaattacagtaagtaggattgtgtgtggatgcagggaagagatagaacctcgaaaagaggcctgagtgggagggcctatttagataaactgaatcctgtcagaattcc

SEQ ID NO: 1198 - DNA, 120 bp, synthetic construct
  source 1..120: mol_type = other DNA
caggggggagagctaagagaattaagatagaactagggggcacacccacgtgttttggttatacaagaaatatatgtcttttatagaacgattaaaaattgcataaacgggccaggcaca

SEQ ID NO: 1199 - DNA, 120 bp, synthetic construct
  source 1..120: mol_type = other DNA
aaaaaaaaaaaacagaccagcctgagcaacatggtgaaatcccatctctactaaaaatacaaaaattagctgggtatgttggtgcacgactgtagtcccagctactcgggaggctgaggt

SEQ ID NO: 1200 - DNA, 120 bp, synthetic construct
  source 1..120: mol_type = other DNA
accacgcccggcaaactctaccattttatttgaacttttgtaatatattgccatctagtgtgttagaaagtttgtagccatttctgctctctctagcagtgttgagaggccattttctca

SEQ ID NO: 1201 - DNA, 120 bp, synthetic construct
  source 1..120: mol_type = other DNA
aaaaaaaaaaaaagttgatgtatggagctgcagcacctttttcccttgccctcctcttaactactttgtcttcccttgcagacccatggggaaatgagaaagaaccaccggctggtaagt

SEQ ID NO: 1202 - DNA, 120 bp, synthetic construct
  source 1..120: mol_type = other DNA
cactctgattgcatccatttctctgaaagacttgtttgttctgcttctcttcatataactgagctggccttatccttggcatccccctaaacaaacaagaggtgaccaccttattgtgag

SEQ ID NO: 1203 - DNA, 120 bp, synthetic construct
  source 1..120: mol_type = other DNA
ctagacttttgtgtaaatgaactcacaataaacttattggggtcccactctagccaaaatacatggagttttagatatttaatccaagtgtctgattgacctgttttggccactgggctc

SEQ ID NO: 1204 - DNA, 120 bp, synthetic construct
  source 1..120: mol_type = other DNA
tgacagtgtttgctgtttaaggatcataggattcctttcccccaacccttcacgcaaggaaaaagcaaagtgattcataccttctatcttggaacatgggtctctttccttttttttttt

SEQ ID NO: 1205 - DNA, 120 bp, synthetic construct
  source 1..120: mol_type = other DNA
acatactcaaaaaagggaaagattatccagggcctgattatttgacagggtcacttgagggtagatcttgaaaaatgatgatttgactaatcagggaccagggagccatttttcagaagt

SEQ ID NO: 1206 - DNA, 120 bp, synthetic construct
  source 1..120: mol_type = other DNA
acaaaaaccaaaagacatcaggaaacatgcctcttatggaatttgagggggaaaagtcagggtcttggcagtgaccttggacaagccattagcctcttgatacctcttttctcatctgta

SEQ ID NO: 1207 - DNA, 120 bp, synthetic construct
  source 1..120: mol_type = other DNA
gagacagggaaaagagatgccaggagaacagctcaatattactttggaaagaagattctcttcatctaagaatggaatggaagggagataatgtagactcagatatttccatgtgaaggg

SEQ ID NO: 1208 - DNA, 120 bp, synthetic construct
  source 1..120: mol_type = other DNA
ataggataatgattctgaattgaagatagaccccgttgcacctggggaaggattgacagaaagagaacgttgaatgtcacaagggtattttagagggaaaaaatggaagcagaaaggaaa

SEQ ID NO: 1209 - DNA, 120 bp, synthetic construct
  source 1..120: mol_type = other DNA
tcaagcgattcccctgcctcagcctcccaagtagctgggactacaggtgcgtgccaccactcccggctaatttttttttttttttgagacagagtcttgctctgtcgcccaggctggagt

SEQ ID NO: 1210 - DNA, 120 bp, synthetic construct
  source 1..120: mol_type = other DNA
gacacaaagttgtgaccactaggttgtgacatgtttgggttttttcacttgagctgtatacttctttggtatttcacgccctagcctggtccttagattatgtcttctcaggtcttctcc

SEQ ID NO: 1211 - DNA, 120 bp, synthetic construct
  source 1..120: mol_type = other DNA
cggccccagatttgttttctaataagctcttcagatgatcctgatgaatgctaacagacttgaaaaccgccattctcaacccacatgttaaaacatgttaatatcttcaactgccccata

SEQ ID NO: 1212 - DNA, 120 bp, synthetic construct
  source 1..120: mol_type = other DNA
caggaaagagccctgtggccgagatctactctgtatcctagagtattttatgtactttttgaagcattttttcaccagtacttaatagcaactgttagatcaagcattagctccagagga

SEQ ID NO: 1213 - DNA, 120 bp, synthetic construct
  source 1..120: mol_type = other DNA
aaaaaaaaaaatactcatcctcaaatccattttggctctaacccaagaccctgcacaaaacccaaccaatccactgttttcatagaaaacaactgatgccaaagtgaaggagagaactgg

SEQ ID NO: 1214 - DNA, 120 bp, synthetic construct
  source 1..120: mol_type = other DNA
aacttgtctatgtttcattctccttgcgtgtgttattttggctcagcagaagtaagaaaagccagtgtaactgtatgacttgaggctgtctattctgttctactgtaggggagatcatct

SEQ ID NO: 1215 - DNA, 120 bp, synthetic construct
  source 1..120: mol_type = other DNA
tttgacatgtctgtgggaacgatggcaaaacagttagacaggaaatagctgagggcaatgccaccctcaccaccccttgtccatgacatcctgagaactgtctttcagagacaatcttgg

SEQ ID NO: 1216 - DNA, 120 bp, synthetic construct
  source 1..120: mol_type = other DNA
acctgtaaggggacaaaaaagagagacagtatcagctaccaggaactgccatctcccaacctaaaccaccacctcccaccttccagtcaatcctatactattatcagactgaaattaagc

SEQ ID NO: 1217 - DNA, 120 bp, synthetic construct
  source 1..120: mol_type = other DNA
caggttccagagtctcaacatacggagtctcatccatggaacactcctgaaagaagaacaaaaaaaatcaggattgacagaacagagacattctcatatgaaagatgcaccgaattcaat

SEQ ID NO: 1218 - DNA, 120 bp, synthetic construct
  source 1..120: mol_type = other DNA
tagctgctgtgccctttcttctactttaccttttatactctgtcactgaaacctacttctgggagcccataccttggcagccgtaggtgacagtactttttttttcttcttaattttgat

SEQ ID NO: 1219 - DNA, 120 bp, synthetic construct
  source 1..120: mol_type = other DNA
aggtacaaaaagtaagggataccaagaaatcaaaggaaaatggagggaaataataaaagagaagggaaaaaacttctcgttcccagggacattcattcccataagagtttgctcctggcc

SEQ ID NO: 1220 - DNA, 120 bp, synthetic construct
  source 1..120: mol_type = other DNA
aaaaggattttatttagatgaacactgtcagaggtgaagcagactgggagcacctaaaggccacatcccaataggaaagaaataaatacaaaggataaaggactaaggagcttaccagca

SEQ ID NO: 1221 - DNA, 120 bp, synthetic construct
  source 1..120: mol_type = other DNA
tttggaattgagaacaggaaagagggtacaggttagaggaactttctctttaaaagaaggaaaaaaagcaaggtgaggtagaaagagaaaagtgaagggacaatccaaggatgggaaaag

SEQ ID NO: 1222 - DNA, 120 bp, synthetic construct
  source 1..120: mol_type = other DNA
tacctcacaggcccaagattacagccacatcagtcagtttgagtttttcatccattagactaaaccaaaaaaggaagaatcagggtttaaagactaaaggtacctgcttgagatggtcta

SEQ ID NO: 1223 - DNA, 120 bp, synthetic construct
  source 1..120: mol_type = other DNA
catgactcccttgggaccgtggacgtccaaatctccagtttccattatggtcagaaacaagtgatcatcttttcctatcccttatcctaaaattgttacattttaatcctattgcactga

SEQ ID NO: 1224 - DNA, 120 bp, synthetic construct
  source 1..120: mol_type = other DNA
caaacactacacaagtttttactgtctctaagttaaaaggaagctagtggtttgtgctttcaaaagcaaagatgcgaatctggtcctctcctcaaaaatcacgctgtacaagatccccta

SEQ ID NO: 1225 - DNA, 120 bp, synthetic construct
  source 1..120: mol_type = other DNA
tggaccacaatttattttcccagtttatagggactttaagaatcgatttattcagtttccaccctgcaaataacagataacagaaggacatagggaggggtactgaggaaccctgtgaaa

SEQ ID NO: 1226 - DNA, 120 bp, synthetic construct
  source 1..120: mol_type = other DNA
gaagacggcgggtttcattgccacgagtctcggattttcctggggttttcaaaaccatcttgatttaccagaagataatctgtgctactatcctatcctaaaaaaatgtgctatgtaaca

SEQ ID NO: 1227 - DNA, 120 bp, synthetic construct
  source 1..120: mol_type = other DNA
gttctcaaacaaaagaaaaaacatagcataacaatctcagcctttttgtcctcccaacaaaaacgtcagtaagtttccaaatgtgtaggtcctaacaacctaggcgagcagcagcagaag

SEQ ID NO: 1228 - DNA, 120 bp, synthetic construct
  source 1..120: mol_type = other DNA
ggaccccaagtgtcttataacctagtttccttgctttgaagtcagtatattttggaaaaaaaccaaacaatttccaaggcgctcaagtggaaaggaatgtaaagtccaacatttcgggca

SEQ ID NO: 1229 - DNA, 120 bp, synthetic construct
  source 1..120: mol_type = other DNA
aagcttatctgccttccaataaagatgcaaaatgatataccaccctgactcatagaaaaagaccccagactagaactctggccacaaactacaaggatcaggttttccaagattttctga

SEQ ID NO: 1230 - DNA, 120 bp, synthetic construct
  source 1..120: mol_type = other DNA
aaagcttcccagtcttaggtttgcctgttttttcacccctggcagctgaagtggggaaaaattacaagcagttgtgatgagtgaaggaaagtgaaaataaaaactggttctataaaaact

SEQ ID NO: 1231 - DNA, 120 bp, synthetic construct
  source 1..120: mol_type = other DNA
acaacctgcaacgccgcttggaagacaaaaggacaaggaaagtcgccatattgaagcagggaagaaaaaaattccttttaacgacacaaatcttttagaaagctagcattcaattgcact

SEQ ID NO: 1232 - DNA, 120 bp, synthetic construct
  source 1..120: mol_type = other DNA
cattggatcaaaaagtcttttaaaaaataaaggccaactcagtattcatttcccccccacccaactccatttagggaggggggtcgcagaaaaaagttctgagtggattcaaaaaagtaa

SEQ ID NO: 1233 - DNA, 120 bp, synthetic construct
  source 1..120: mol_type = other DNA
gccttcaaaattgcttaaaaggcaaactttaacaatgcgatctaagagtcgtagtgactggccaaaaaaaaccgcaattttggggtctaattcgattgtgacgcagttgaaattagcttc

SEQ ID NO: 1234 - DNA, 120 bp, synthetic construct
  source 1..120: mol_type = other DNA
aggtcaacacagaaataataacagccttggtagctttaaaactagcgttaggactcaagtttgttctgccctgtagaatgttgaccttcagcttttatgaaaatgggcaactcagtgact

SEQ ID NO: 1235 - DNA, 120 bp, synthetic construct
  source 1..120: mol_type = other DNA
aacaatttagtcctttccttaaactcattcttttatttttttcttctcctttgtaggttcccctccagactctttgcaccaaagctccctctgaggaagattctttgtcctcagttccca

SEQ ID NO: 1236 - DNA, 120 bp, synthetic construct
  source 1..120: mol_type = other DNA
ccacacttcgtatatccaggaggccctacagtccgttttatagtaactgtttctggcattataaaaacatccctccagccttttaccttctactatggattgtactgaaagttttatcct

SEQ ID NO: 1237 - DNA, 120 bp, synthetic construct
  source 1..120: mol_type = other DNA
tgtagaagagatcatccccaacaaagaaacaagccgttttcttgtttctttaccttctcctaagagatagaaaagtaggtgttcaacaatgccagttttgaactgaggaagcaggagatg

SEQ ID NO: 1238 - DNA, 120 bp, synthetic construct
  source 1..120: mol_type = other DNA
agtgttcttctgagcttgcagcaaaagtattagagcagaagctatatggctgatcatcagggaagtagtagagcatttggataacagtcagaaaatgggggtatttgactgcaataagaa

SEQ ID NO: 1239 - DNA, 120 bp, synthetic construct
  source 1..120: mol_type = other DNA
aaaaaaaagaacttaacctctgcataagagatttctatgggagcacagtgacagaatatgggatgtgcaaggatggattcagtgaattgatgaagccaaactgggacatgaaggaggatg

SEQ ID NO: 1240 - DNA, 120 bp, synthetic construct
  source 1..120: mol_type = other DNA
gttgagtagctgagacagagaccacaggacctgcagagtttaaaatatttactatatgactctagacagaaaaattttgctaacccctgctctgaagcaagacaaatttgcagagaataa

SEQ ID NO: 1241 - DNA, 120 bp, synthetic construct
  source 1..120: mol_type = other DNA
gccttccccaactctgaaatctcttttccctttattgaatctttgtggattgttcaactcaaccctctaattaaccacacttgcccattaaattgtgttctccctgtcttggaggtttta

SEQ ID NO: 1242 - DNA, 120 bp, synthetic construct
  source 1..120: mol_type = other DNA
cacctgtttgcagtatacaacatgcataaatgtacctggtggctctgactggtccttccctttataatcctttttcttacttcatctaaaccaccctcctcattgcctcttaaatttctt

SEQ ID NO: 1243 - DNA, 120 bp, synthetic construct
  source 1..120: mol_type = other DNA
cctatatattgtaaatagatgggctgggctaaacattgttgccgtttcatacttctaccaactcagcttttacacaataaagctctactgtctctggtttgctttgggctgtttccgatg

SEQ ID NO: 1244 - DNA, 120 bp, synthetic construct
  source 1..120: mol_type = other DNA
ctacagggctggaaaaggagccattattggtttcatcaaagttggatacaagaagctctttgtactggtgagtgttattggatgctaggagttcgtataccttggtttctgagaacaaaa

SEQ ID NO: 1245 - DNA, 120 bp, synthetic construct
  source 1..120: mol_type = other DNA
caatctggagaccacagtcccacaggttagaggtttcagagaatagatccccactgagcattcccattgaatttatttgttatttatggcaaagaagtagtgacttatttcctatcacat

SEQ ID NO: 1246 - DNA, 120 bp, synthetic construct
  source 1..120: mol_type = other DNA
gctcattttcacctccttgttttcacatagttcattactcatctggtcagtcagtatttattaagggtccagaataatatgcattccctgtcctcatggagctttggcctaatataggga

SEQ ID NO: 1247 - DNA, 120 bp, synthetic construct
  source 1..120: mol_type = other DNA
ttctagctggagagacaaacaaacataataaacaatatggttaataagtgctctggaaaaatgagagcaagtaagggtttgggagtactcaagtaaggtggggatgggagtatgtgggat

SEQ ID NO: 1248 - DNA, 120 bp, synthetic construct
  source 1..120: mol_type = other DNA
tatggagttgaattacagtagctgagctttaattacttgctggaggctctgtaaccaattaacaaagtaagctgtaaccaatgaggttgtctccactgtacttatgtttcccacctatgc

SEQ ID NO: 1249 - DNA, 120 bp, synthetic construct
  source 1..120: mol_type = other DNA
agcagcatgagtcagcggaggagtatggtaggagatgagaccagagaggtaatgcggaggaggggccttataggctactgcaaagactggcttttattttaagtaaaaaataagatcagg

SEQ ID NO: 1250 - DNA, 120 bp, synthetic construct
  source 1..120: mol_type = other DNA
aagtagactaattaggcagcaacaatcctggcgaaaaatggtggtggctcagaccaaggtggtagcagtagtgatggtaaagagtggtcaaattttaaatattttgaaggtaaagcaagt

SEQ ID NO: 1251 - DNA, 120 bp, synthetic construct
  source 1..120: mol_type = other DNA
atgatgaagatgacgatgttgataccaagcagcagaaggccagtgaggatgattagacagcaaaaaaagaaaagttaaactttaaattaaggccaccgtgacctattcaccctccacttc

SEQ ID NO: 1252 - DNA, 120 bp, synthetic construct
  source 1..120: mol_type = other DNA
acaacaacaacaacaaaaagtctcgttctgagcattccagtagcttctttagtgtatgtagttagttgtaccataagtagttggtttgtgtgagatggttaaaaaggccaaagataaaat

SEQ ID NO: 1253 - DNA, 120 bp, synthetic construct
  source 1..120: mol_type = other DNA
gaagctaggaacacagcaagaataagctactcttttaaatcctgctttaatgggaatagaaatagagcaagagctggagagtgaagtggatcaaaagagttgatcttttgcagatgggag

SEQ ID NO: 1254 - DNA, 120 bp, synthetic construct
  source 1..120: mol_type = other DNA
ggatgggctggtagacattacaacaaggtcaaggcaagggataggcagggtcttcctacagtatatttttccattaagaggcaacagagagcagtggaaggagcacagtttttttttgtt

SEQ ID NO: 1255 - DNA, 120 bp, synthetic construct
  source 1..120: mol_type = other DNA
aaaaaaaaaaaggccggacgcattggctcgcgcctgtaaccccagcactttggaaggccaaggcgggcggatcacgaggtcaagagatcaagaccatcctggccaacatggtgaaaccct

SEQ ID NO: 1256 - DNA, 120 bp, synthetic construct
  source 1..120: mol_type = other DNA
tggcattggccaagcgaagccatgtctccaaggctgtatttcccccaaccttctttcaaatagtgacttccaggattgtgaaggccaaattaaatgtgaaaatataatgaagtaactcta

SEQ ID NO: 1257 - DNA, 120 bp, synthetic construct
  source 1..120: mol_type = other DNA
atcttctttagagaaaagtttatacaagtcctttgtctgttcttaaattgtgttcttttttgttctgagagtttttcatatattctagatagaacgcacttatcagatgtatgacttgca

SEQ ID NO: 1258 - DNA, 120 bp, synthetic construct
  source 1..120: mol_type = other DNA
gcaattttggaaaattctaaagcaacccaagtctccagcagtcatgactgtttgcctttgccctcatgggagctcagtgcattttatatttggcaagacttttaactaagcaagctcatt

SEQ ID NO: 1259 - DNA, 120 bp, synthetic construct
  source 1..120: mol_type = other DNA
gcacatattataggagcatgttcctgaaatctacagcataaatgaattgtattaaagacttctcccctctctagtagagatgtcagttgctgcttacaggtccttttggagtgaatgctg

SEQ ID NO: 1260 - DNA, 120 bp, synthetic construct
  source 1..120: mol_type = other DNA
tttttttttttaacctaataaaacttcagtctcttcccattttcgtataggaaggagagattgtgccctccttccaaacctcccctgacctctccagagcaattcctgattaaccaaggg

SEQ ID NO: 1261 - DNA, 120 bp, synthetic construct
  source 1..120: mol_type = other DNA
tcacagctataaaagaggatgttagaaatggcaaagggcaatttgaatccatcagagagatggatcaataagatgggtggcttggggggggtcctgaaacctttcaagaaaaatatttgt

SEQ ID NO: 1262 - DNA, 120 bp, synthetic construct
  source 1..120: mol_type = other DNA
tagatggctcatacatttatctagagaagcacactcttgcttgctgtcaaactttagaccaccatggaaggtctaagggcatcctgtgccagggaaactttttaaggaattttatctatg

SEQ ID NO: 1263 - DNA, 120 bp, synthetic construct
  source 1..120: mol_type = other DNA
aatgaaaaaaagaatcacaaaaaaaaaagttgtcagcctcatttgtgcgtcatcccttattttcctgggatctcaggacctctgtccctctcatttctcacttctgagatctgcacatct

SEQ ID NO: 1264 - DNA, 120 bp, synthetic construct
  source 1..120: mol_type = other DNA
tagagcaataaatcagaagcactccagaaaatcttgggtataaaatgaacttcccccgcccttttctggggcacagctttgattaaaacctgttaggaatgataattacccccttctctt

SEQ ID NO: 1265 - DNA, 120 bp, synthetic construct
  source 1..120: mol_type = other DNA
tttaaccagaccaataaaagtatttatttttatcacaagagctgttgaaaaatttgactcattatttcagccgcctcacccctcactgtcgttgcacccattcagccttcagccctgttt

SEQ ID NO: 1266 - DNA, 120 bp, synthetic construct
  source 1..120: mol_type = other DNA
tcctgaggttgtgtctgtcattagaggggcccgaaatgataatagcttccatttatgtactgctttctaggtcgctacgttttgtttacattcattatttcatataggcctcataaccca

SEQ ID NO: 1267 - DNA, 120 bp, synthetic construct
  source 1..120: mol_type = other DNA
ggccacatttctttaagattccaacactgggccgggcacggtggctcacgcctgtaatcccagcactttgggaggccgaggtgggcggattacctgaggtcaggagttcgagaacagcct

SEQ ID NO: 1268 - DNA, 120 bp, synthetic construct
  source 1..120: mol_type = other DNA
aaggatgtgggtaatccttggacgtacagggatagtcaactggattcttttttggaaccatgaggcaggcatagaaatatattataaacattttcctgagaaaatgatgttccagccagg

SEQ ID NO: 1269 - DNA, 120 bp, synthetic construct
  source 1..120: mol_type = other DNA
aaaaaaaaattagaaaactgaaaaataggattatcttttctttcccactgggttgatgccatcttcttccacctagcttcccaagctcttccttcagtcccacgactacagtctgtattc

SEQ ID NO: 1270 - DNA, 120 bp, synthetic construct
  source 1..120: mol_type = other DNA
tcattgcatggaagacatttatggattctagtaggttcatctctttatgtttgcttttagcatgtcattacattgcaaattagtcacttcaaagtgaggcttagtgtgaagctcctcaat

SEQ ID NO: 1271 - DNA, 120 bp, synthetic construct
  source 1..120: mol_type = other DNA
tgctgagattacagatgatctagtctcccagacaacccttgacctatcctcacttgactgtttaaggacagggatcctgtttagtttatgttaatgttaaaaaaaaaatagagactgggt

SEQ ID NO: 1272 - DNA, 120 bp, synthetic construct
  source 1..120: mol_type = other DNA
acgccaaacactctgatttaattgagacagggcacaacctaagcactgagatgtttgtaagttgcccaggtgatctaatatgtagcagaatttagggactactcgtttaaacaaatgctt

SEQ ID NO: 1273 - DNA, 120 bp, synthetic construct
  source 1..120: mol_type = other DNA
aagttatctttcctctttgactgcagggctaggtgtaaaggtgcctggctctattattatatacccaaagggcagatacacctctgtatgttattcaagataccaaataagctattccca

SEQ ID NO: 1274 - DNA, 120 bp, synthetic construct
  source 1..120: mol_type = other DNA
aaaaaacaaaaaaaaacaaaggatgtctttctattttaccctaccttcctctttctgtaccagtcccagcaacttgaacctgggttcttagcttgccaggacaccatctctctacatagt

SEQ ID NO: 1275 - DNA, 120 bp, synthetic construct
  source 1..120: mol_type = other DNA
aaagtgtgcattcactatgtgcatttggaaaagatctctgacagcagaggaatggcatttaaaggtcatccctccacagctacatctaaatgttctagttggaaaccttaggaacaagta

SEQ ID NO: 1276 - DNA, 120 bp, synthetic construct
  source 1..120: mol_type = other DNA
gctgattggctgaggcctggaaagaaaggggaacaggctggctgacaatttggtcagggaaaagaaaaaggcagtatttatgcaagaaatctggaaggatgcaaactgctcatcccggtt

SEQ ID NO: 1277 - DNA, 120 bp, synthetic construct
  source 1..120: mol_type = other DNA
cttgtatctcttcatagcactggccacaaattgacaatatgtatttatgcatccactgcttccccgatagaccacaagtgcaagtttgttaggctaaggactttgttttgttcatcactg

SEQ ID NO: 1278 - DNA, 120 bp, synthetic construct
  source 1..120: mol_type = other DNA
agaaaaataaataaagtccaaactttcctgtcatcaaaggccctccctaatcttagccccaaattgtttttagccttgtctcctactccttcaccacatgaacctcccactaagcctact

SEQ ID NO: 1279 - DNA, 120 bp, synthetic construct
  source 1..120: mol_type = other DNA
ttaggcaaacctttcctctcctcccaattcaacatacactttatcctagttcccctttgaaccttccattccatctttccctccacaggataaccttctccaaaggcctcagcttttctg

SEQ ID NO: 1280 - DNA, 120 bp, synthetic construct
  source 1..120: mol_type = other DNA
aagatgtagaggctgcacactgaggccaggacaagttagccataccctctagttcagtcaagagtctgcttagactcagcagctgctcttactagaaaaagttgaaggatatgttttagg

SEQ ID NO: 1281 - DNA, 120 bp, synthetic construct
  source 1..120: mol_type = other DNA
attttgccatcactagctgtaacatatcttagcagatttagctgcaggttgcagtgaattattgtttttcaacttcttagaaaatactgtacttctaggccgtgcgttgtcgctcatgcc

SEQ ID NO: 1282 - DNA, 120 bp, synthetic construct
  source 1..120: mol_type = other DNA
gttcttagagatcttttgcaagggatatgaaggataaaatcctatctgtccaattgctccactgtgatcttccaagaccagaaattcacagcctctgaagagtcaaaaaggcacatattg

SEQ ID NO: 1283 - DNA, 120 bp, synthetic construct
  source 1..120: mol_type = other DNA
tcatacccttgtttgtataaccctgaatgacaaagaaaaaagaagaagtttgccctttactaaatatgcaccctgggaccaggtacatttcagagaaagaagttgtaaaaaccaggcagg

SEQ ID NO: 1284 - DNA, 120 bp, synthetic construct
  source 1..120: mol_type = other DNA
actctgtctcaaaaaaaaaaaaaaaaaaatttcaggccaggcacagtggctaacacctgtaactccagcactttgggaggctgaggtgggcagatcacgaggtcaggagattgagaccat

SEQ ID NO: 1285 - DNA, 120 bp, synthetic construct
  source 1..120: mol_type = other DNA
aagaatttcacaatttagtggaaaagataggtaagtgactactaaaaatataatgtaaaaggagctctgacaggaatgaggacattgatgccaggtgccctggcaagctgaagggtgaga

SEQ ID NO: 1286 - DNA, 120 bp, synthetic construct
  source 1..120: mol_type = other DNA
acatcgtatcttcctgcagcagaatccagctggaaagtcctcttaggcagcattatcatctttgttaatatagatgcactagggagatgtctgcgtagcttatattttactcttgccatt

SEQ ID NO: 1287 - DNA, 120 bp, synthetic construct
  source 1..120: mol_type = other DNA
aaaaagcccctctgctgttctacccttaaggggcctggttctatttagttgtttggcttttcttgtttgttctgtaaagacttaaaatgcagtttatgatcatgacctaatctgggtacc

SEQ ID NO: 1288 - DNA, 120 bp, synthetic construct
  source 1..120: mol_type = other DNA
tcctgccacaactgtttaatctgagtgtcaataagctttagacccaattcctgcttcaaagaaagcacagggcagagaagtacttaacaccacaagataagaatcaggcaaatccagaat

SEQ ID NO: 1289 - DNA, 120 bp, synthetic construct
  source 1..120: mol_type = other DNA
aaacccgaaaaattaaattcaggccaaaacagtaacaccactaccaccacaactgcactgagatgtcccagaagcctaaccacagtcaatttcaggaagagatatgagataaattggtca

SEQ ID NO: 1290 - DNA, 120 bp, synthetic construct
  source 1..120: mol_type = other DNA
aggaacttcaagagtctcaaaattctattggggtattggggaatctaagtgtgactttacttgacaagaccaggcctttggaaaacagcttaccctacctagtttcacaccataaaaagt

SEQ ID NO: 1291 - DNA, 120 bp, synthetic construct
  source 1..120: mol_type = other DNA
ttcataagcctagaagaaaaaacaagaatggaggggtgtgaggccaaagagcccccacactgacagctgctcccctctagaatcacaaggatcattcagatgcgccctaacacaaaaaat

SEQ ID NO: 1292 - DNA, 120 bp, synthetic construct
  source 1..120: mol_type = other DNA
caagacaactacagtgaggttatgaagagcaaaagaaaaagactggcaaatcagtgcttccattaaagctgttattcactgtcttgagtggctgtgagtggaatcaaaggccaaataaaa

SEQ ID NO: 1293 - DNA, 120 bp, synthetic construct
  source 1..120: mol_type = other DNA
gccaccacacccgggcacaattacttagttttaaaccagctaaccagcattcattctctttcttcctcatggcttcaccccatcttcatcatcctgaatggggttttttattttttttta

SEQ ID NO: 1294 - DNA, 120 bp, synthetic construct
  source 1..120: mol_type = other DNA
taattcttttttcttcatttcgcctctgtccagtttctctgacgccccctgatggtcagtctgtgagtgcttcgctcacgcattcattcaacaagtgaaattaatttaatggatgcctaa

SEQ ID NO: 1295 - DNA, 120 bp, synthetic construct
  source 1..120: mol_type = other DNA
gttgttaaagacaaaatctccaaactaaggaacaggcaaactgtgttctgcatttttgcttaacagcttgagaaaatcactggtggctgcttatttaaaagtaagcaaggccaggtgcag

SEQ ID NO: 1296 - DNA, 120 bp, synthetic construct
  source 1..120: mol_type = other DNA
agcttcctaactctgttttcctgggtcacaactggaaactttttaagacctttacctaacaggctactaatataatcattctgtttccttccctacccagaccttctctgaactggctga

SEQ ID NO: 1297 - DNA, 120 bp, synthetic construct
  source 1..120: mol_type = other DNA
tccattgtctatcagaggggaaccttttccaggaaactgactcttgtacatacttacttcattttgcagcaatttcagatttagtattcgtagccccagctctttaagtaagtatccctg

SEQ ID NO: 1298 - DNA, 120 bp, synthetic construct
  source 1..120: mol_type = other DNA
attgtgaaccactaggagaaacagaattaaataactatcaaggggtacagagttaagagttccagccttccctcttggggaaaactaaggcaaagtaatactgagaaaaagtggaggaag

SEQ ID NO: 1299 - DNA, 120 bp, synthetic construct
  source 1..120: mol_type = other DNA
gctcggactctgtgccaggcatccttataactgtttaatctcaccataactccaggagagattaagtaatatgatatccagctgtggctcttggtgcttcacaaaaaattacttaatctt

SEQ ID NO: 1300 - DNA, 120 bp, synthetic construct
  source 1..120: mol_type = other DNA
catttcataaataataaactaaagcaagagatcagatggtttccctgagatcacacaattaaagagacaagctggaattccaactcaggcctgtcgacccaccctgtgattttgaccaga

SEQ ID NO: 1301 - DNA, 120 bp, synthetic construct
  source 1..120: mol_type = other DNA
ttttcctttccatactggctctccaattctagagtttccctcttcgatcatatcatttcaaaacatcagactttgccctgtacgttggcaggggcttgggaggcagaagtgaataatata

SEQ ID NO: 1302 - DNA, 120 bp, synthetic construct
  source 1..120: mol_type = other DNA
gaaaaaaaaagaaaaccagatatgacacctgggtccccatgggaaggtagaactcaggaactgtatatgttactccttgttggctctgaaccctgcagtgtctccccatctcacttggag

SEQ ID NO: 1303 - DNA, 120 bp, synthetic construct
  source 1..120: mol_type = other DNA
aaatacagggtcccttattcaaaaagcaggggcaactgccatcaaaagtgctaaaatacaaagcttttccctttcagtcgctcttttttcggcctgtcatggtatttttcattttctgtc

SEQ ID NO: 1304 - DNA, 120 bp, synthetic construct
  source 1..120: mol_type = other DNA
agccagactgcttatatcccaagttctcagaagggaccgcttaggtttctgtaactgacagatttacccacatttctgggaacccatttttgttttcttctcatatcctcttttggaata

SEQ ID NO: 1305 - DNA, 120 bp, synthetic construct
  source 1..120: mol_type = other DNA
ttcatgtgaagatgaattgggggatcaaatgaacccccctccacccaaggcttaacccgtatctttagtccctgtggttccccactgacactgaggacacaaaaaaatcaaatctgagga

SEQ ID NO: 1306 - DNA, 120 bp, synthetic construct
  source 1..120: mol_type = other DNA
agtgcctgttctcaaaactgtctccaaattcacttctctcttttgctaccctaaggggagggaaagtccaggatggcaggaaaagaggggaaaaccgatccctgagccagttcttgggag

SEQ ID NO: 1307 - DNA, 120 bp, synthetic construct
  source 1..120: mol_type = other DNA
ttgccttgggcctcccttgtcagggtctcggacagctctgcagtctcttttggagctacccctggaactggccactcttcttttctcccacattcttccgagtagtcttgtctttcttct

SEQ ID NO: 1308 - DNA, 120 bp, synthetic construct
  source 1..120: mol_type = other DNA
tctactttccacctcttttctcctggggctttgctctcgagactctgctagtctcagactccgctctggagtttctccaggactcagcctccatttccatgcctctgacagtcgggagct

SEQ ID NO: 1309 - DNA, 120 bp, synthetic construct
  source 1..120: mol_type = other DNA
ccgtctctaggatgtgagaaagagagagaagggcgaaaaggaaagttggcgtgagggagaagagagaaatgtggcaggggtgaggggaacctgggtgcaggccaggctgcctcagcgata

SEQ ID NO: 1310 - DNA, 120 bp, synthetic construct
  source 1..120: mol_type = other DNA
ctctggctttctttcccaaactcagccctgtagcttgggagacactgacagactgcatgccatatgtagaaaaaggctgacttttattttcctgcagagcatcttcctcgggagagcagg

SEQ ID NO: 1311 - DNA, 120 bp, synthetic construct
  source 1..120: mol_type = other DNA
ttgctggtgagaagtggaccttggagttcagtggctgaaactcagaatttagggtatggagctggacccagagaataaagtctcaagtagtagaaggggcatctccttcagtccatggat

SEQ ID NO: 1312 - DNA, 120 bp, synthetic construct
  source 1..120: mol_type = other DNA
tttgaagaaagggtaggactgaagagaagggatctcaagcaggacataaacaaagttgcagaggtgagaagcatatcttgtgcttagggaaggacaagtacacccttcttgataaaaagt

SEQ ID NO: 1313 - DNA, 120 bp, synthetic construct
  source 1..120: mol_type = other DNA
tcttacttcggttctccaaatgctccttctttttaacactctcctctcaacagtcctctctacaaaacactttacttagaatactccggtcaccgcccttttcggctccctcagtcctca

SEQ ID NO: 1314 - DNA, 120 bp, synthetic construct
  source 1..120: mol_type = other DNA
ttggtgagtagctaaagaacagcaacattttcaggaaatgaaaccaagacagcacacattttaagtatgcattctaccaccgagcaacattcttgtgatagccaagctctcttggagata

SEQ ID NO: 1315 - DNA, 120 bp, synthetic construct
  source 1..120: mol_type = other DNA
tgttgtatgctgtaccagacatcttatgttttcccttgaattcagtctccaccctgctttctgcttcagtaagttgtcccaaatggacggtatcaatgaaagtcacagtttttattgaga

SEQ ID NO: 1316 - DNA, 120 bp, synthetic construct
  source 1..120: mol_type = other DNA
aagaaaagatccctaatctctagatgtttaacctgaggcatttaaatagtaccactcatgaagagggagtgtagctgagtgctacatggtgctctacagacagcaggtatggtaagaaat

SEQ ID NO: 1317 - DNA, 120 bp, synthetic construct
  source 1..120: mol_type = other DNA
gaaagctttgagttgtgcaaggggactaatatttatctgggtcatactgtctgccacccccacaatggctgtgcttaatgtatattatgagattagatatgtttaatagccagcaaaatg

SEQ ID NO: 1318 - DNA, 120 bp, synthetic construct
  source 1..120: mol_type = other DNA
tttcatcacccccaaataaaactccatacccatgaagttactccccattttctcatctcccccaccccacagccactggcaaccacaaatctgctcttgttctctatgggtttacctatt

SEQ ID NO: 1319 - DNA, 120 bp, synthetic construct
  source 1..120: mol_type = other DNA
cagtagctgggattacagccacatgccaccatgcccagctaatttttttattattattattattattttttgagacagagtctccctctatagccaggctcgagtgcagtggcatgatct

SEQ ID NO: 1320 - DNA, 120 bp, synthetic construct
  source 1..120: mol_type = other DNA
ttttttttcctccaatttgagagcaggtactgcttaagtgcttagattagaaaaacaatcacagtagacaccttagctcattcttctaataagtctgttgatccggttctccctgttgcc

SEQ ID NO: 1321 - DNA, 120 bp, synthetic construct
  source 1..120: mol_type = other DNA
cagcctggtcttgaactcctgacctcaggtgacctgcccacctcggcctcccaaagtgttgggattacaggtgtgagccactgcaccccggccctctccttcttatctacaacactctac

SEQ ID NO: 1322 - DNA, 120 bp, synthetic construct
  source 1..120: mol_type = other DNA
gggattacatgtgtgagccactgtgcccatccatatgtttaactttttgaggaaccatcaaactgtttaccacagaggctgaaccatttaacattcctaccagcaatgtataaggattct

SEQ ID NO: 1323 - DNA, 120 bp, synthetic construct
  source 1..120: mol_type = other DNA
cactacaccataaggcacagagtgaatatttatttatcacagaggtcaagccgaagctctaattttataaatcctggaaaagctggccagaaaagtacagagacttgcccaaagtcaaag

SEQ ID NO: 1324 - DNA, 120 bp, synthetic construct
  source 1..120: mol_type = other DNA
aaagaatcctagaaatgggttcaggacccactaaccagtcttaccatcactaaaataatacctcctaatatgaagccaagtgaagcacaccgcatactgtctatgaaatactcttgctag

SEQ ID NO: 1325 - DNA, 120 bp, synthetic construct
  source 1..120: mol_type = other DNA
tagctttcatgcagtttgcttgtgaatggagcttgaagcaggctaacaggaactggaaagtccgaggataagaaactgcgtcatttggactataatcttagtgtcttagtatactgttat

SEQ ID NO: 1326 - DNA, 120 bp, synthetic construct
  source 1..120: mol_type = other DNA
agtgacccagcttctgcaggaaatagatggcataaaaaaagctgggtgggttaagggatgctctagagtaaagataattaagaagataataggtgtggcagtatgtggaccttatttgaa

SEQ ID NO: 1327 - DNA, 120 bp, synthetic construct
  source 1..120: mol_type = other DNA
ctcattcctatccctttctataccataggtcttttcccccaccctctcactactttatattcctttctgaacctccatttttttccctccaatctttgccattccagccacctctttaac

SEQ ID NO: 1328 - DNA, 120 bp, synthetic construct
  source 1..120: mol_type = other DNA
ctgcagtatcttcttcctcttccttgataatcactgtcttctgggagacttcccctctttggggctgtttttgatgtggtggtgaatccatggtagctaaagacctcttgcggctttgag

SEQ ID NO: 1329 - DNA, 120 bp, synthetic construct
  source 1..120: mol_type = other DNA
gggctatagggacagttgattcagggttcttcacagaggacatatttgtcctgctcctagtggtccgagatgtgggcttaggggtgacaggttggtctgtggaggtggaaatctggagct

SEQ ID NO: 1330 - DNA, 120 bp, synthetic construct
  source 1..120: mol_type = other DNA
gagattcctgatcgccctagggagaaacagaagcaagtgagggggaggaggtggagaaaagagatagaacttggatactgttcttgatacttgtttatggttagataggcttaccagatt

SEQ ID NO: 1331 - DNA, 120 bp, synthetic construct
  source 1..120: mol_type = other DNA
aacaaaaacaaaaaatatgctcactggattttcctttctgtctatgatctctcctccattagactgggatctacctgggaagctacctttttcccacagacctgtctccataatgctact

SEQ ID NO: 1332 - DNA, 120 bp, synthetic construct
  source 1..120: mol_type = other DNA
ttggaagggtctgcttctgtacttgtttctcttgtatttcctcagatgtctcaatttctaccttcaaactctccctatctctttcaggacttgcactttccccatttttgtcagattctt

SEQ ID NO: 1333 - DNA, 120 bp, synthetic construct
  source 1..120: mol_type = other DNA
catgaataataaatctgaacaggttattaaaggtaagctgggaataagggtggtagttataacatttaacgtttgtctcaaaaaggtcatagccttaggcgggcatggtggctcagacat

SEQ ID NO: 1334 - DNA, 120 bp, synthetic construct
  source 1..120: mol_type = other DNA
atatttgcctttctgtgctgacttatttcacttaacataatgtcctcagggttcatccatgttgctgcagatgacaggatttcattctcttctgttgctgaatactgttccactgtgtat

SEQ ID NO: 1335 - DNA, 120 bp, synthetic construct
  source 1..120: mol_type = other DNA
cagtccctaaatattttcaacctgcagctggttgaattcacggacgcaaactcgcatacacagagggctcactgtaatcagagtatgaaagaaacatgtaggaaggcaaatcaagaaaga

SEQ ID NO: 1336 - DNA, 120 bp, synthetic construct
  source 1..120: mol_type = other DNA
aaagaaaagtcacctgttgaacttttgaataataaagaagactaagccccatttcagaggaacagaaaactctctgaaatgggacctgggcatccctatttttaggaaagggccttcagc

SEQ ID NO: 1337 - DNA, 120 bp, synthetic construct
  source 1..120: mol_type = other DNA
aaaaaaaaaaaaacctaaatagataaattttccatcaagatctccttggcaggaagcacgaaccctgcaatctcattacggacccatgcactttgagttccgtttggcggtatcgctaaa

SEQ ID NO: 1338 - DNA, 120 bp, synthetic construct
  source 1..120: mol_type = other DNA
gaatataagacagtttaaaacaaaaatcatacctgacactaaactccttaaataatctctacctttctctccccaaccccagctgttagaaccctggttgatttcagaggtctaggaagg

SEQ ID NO: 1339 - DNA, 120 bp, synthetic construct
  source 1..120: mol_type = other DNA
gctcttatctgcttccacactgtcatcactgtccccaaaaggaggttggtccttttctgaatgtgctctaacaagggctctaatctttgtgtgatccttgaggacagcttctctattttc

SEQ ID NO: 1340 - DNA, 120 bp, synthetic construct
  source 1..120: mol_type = other DNA
cctttcagaaagaaaatctgtcaagaacagaaaggaatgagttgacaattgtacactcattattcctgtctcctcattctccctgccaatatacaaacttacctacttcctcctccgagt

SEQ ID NO: 1341 - DNA, 120 bp, synthetic construct
  source 1..120: mol_type = other DNA
cactgcacccagcttcatttcaatctcttaattttcttttatcaaagtaaaatcacttccagtgagtccagggtagtagtctgcaactatcaactcaatcggccccatctcttccattca

SEQ ID NO: 1342 - DNA, 120 bp, synthetic construct
  source 1..120: mol_type = other DNA
tatataaggttaagacttgccccaaatcactcagatgtctctcctctaaaatcttgatggtttttcgtgcacacagaataaaatctaaactccttagcgagaccctccatgatctgaact

SEQ ID NO: 1343 - DNA, 120 bp, synthetic construct
  source 1..120: mol_type = other DNA
atgaaggaacaaatgagatggaaagaaaatagcataaatggaattcacctgaaaatatgccactctagagggaaactgttgacaggtagggaaagtaggatgccccatggataaagtgtc

SEQ ID NO: 1344 - DNA, 120 bp, synthetic construct
  source 1..120: mol_type = other DNA
tccaagatcctaaagatctgtagtcgaacagagaaaactggtttgctctctgtcttaaaggctgtccccacctttcgaggggcgagggaaggatcataaaatcatttatttttatttttt

SEQ ID NO: 1345 - DNA, 120 bp, synthetic construct
  source 1..120: mol_type = other DNA
tgtgttcatttccctaaaacgtaaagcattatattttaagtgggtagagagggcttacacaagttgatgttccctcatttagaaggcaacttagaaatacattgatctgcccagcgcggt

SEQ ID NO: 1346 - DNA, 120 bp, synthetic construct
  source 1..120: mol_type = other DNA
cttgctgcaattttgtttctctttcaaaacaatggctcgaaaatttccaaggaaatagcaagagggcgattcccttcttgaagtatttgagggagcagaagcttactgaagttcatgcct

SEQ ID NO: 1347 - DNA, 120 bp, synthetic construct
  source 1..120: mol_type = other DNA
acatttatatatataacaattgtagctagcatttgcctttggaaagctgggaatcatttttcttggcaggcacattttggagaaactagtaaaagggctcttcgggtttgggggcgggaa

SEQ ID NO: 1348 - DNA, 120 bp, synthetic construct
  source 1..120: mol_type = other DNA
tttcctcgatgaatttcagggttgtttgttcttgaatctttaaatgaattaataatacttcacatatcactgtaccaaaggccccaaaggcaggtgtggccaaaggtgtgtggatgagga

SEQ ID NO: 1349 - DNA, 120 bp, synthetic construct
  source 1..120: mol_type = other DNA
catatccagagcagggaaagctgtggctttctcgggggagcgagtgtctaggggaagggtgtggcaggcccacgggatgccatgccctagaacaacggcctgagcgcttgtggaattaaa

SEQ ID NO: 1350 - DNA, 120 bp, synthetic construct
  source 1..120: mol_type = other DNA
tttgggtgcaaggacacagcaaaagttaggagatgattgttgtattggagtgctaatacagaaatgtgttctgaaatctaacggagggtagaggtagtgcctactattgctggtaaatta

SEQ ID NO: 1351 - DNA, 120 bp, synthetic construct
  source 1..120: mol_type = other DNA
atcagttggtagagaatactgatgagacctattgcattgacaacgaggccctctatgatatctgcttccgcactctgaagctgaccacaccaacctacggggatctgaaccaccttgtct

SEQ ID NO: 1352 - DNA, 120 bp, synthetic construct
  source 1..120: mol_type = other DNA
aaacacatgtagataatggccatcatcctaagcccaaagtagaaaatggtagaaggtagtgggtagaagtcactatataaggaaggggatgggattttccattctaaaagttttggagag

SEQ ID NO: 1353 - DNA, 120 bp, synthetic construct
  source 1..120: mol_type = other DNA
gttcagttgcactgctctccttaaattgacacttaatattgagtccctgtcctacggattcaaccaactggatattgggaaaagagttgtactggacatgtatagacttctcattattcc

SEQ ID NO: 1354 - DNA, 120 bp, synthetic construct
  source 1..120: mol_type = other DNA
acttgcttttctcccattctagaaagcctattgtatgcaagaaagcctattgtatgcaagggaagaagctacattctagcattcattttctttctaatagagccaggatcttgctttgtc

SEQ ID NO: 1355 - DNA, 120 bp, synthetic construct
  source 1..120: mol_type = other DNA
ttatttgggtagcaaagttgaaaacctccagcccatccctcagtcttggtcaggaaaatattctagacaacaggctcaaacagtctgatttaattaggaagttaaataagttgaggtggg

SEQ ID NO: 1356 - DNA, 120 bp, synthetic construct
  source 1..120: mol_type = other DNA
gcatttctttctctttttttttttgagacagagtcttgctctgttgcctaggatggagtgcagtggtgctatctcggctcactgcaagctctgcctcccaggttcacaccattctcctgc

SEQ ID NO: 1357 - DNA, 120 bp, synthetic construct
  source 1..120: mol_type = other DNA
agtcgacctggatttcactccagctgcactagcagaatgagtaggaacatgctggatgttgagtttctggactttgtaaaatcctatataccctaatggtagtttgatttaaaacaactc

SEQ ID NO: 1358 - DNA, 120 bp, synthetic construct
  source 1..120: mol_type = other DNA
ccacgcatctgagggttaaggatgcttgtgagattgacggaaatcattaagaacaagaaatccccgatcaagcagcaacccccaccctctccacaagccagcatggaactgcctcttaac

SEQ ID NO: 1359 - DNA, 120 bp, synthetic construct
  source 1..120: mol_type = other DNA
ctgcacaattagaaatactaggaggagggtacaaaagagcagaactcagaaagttgtctggggaaatctagattcagatggaagaagaaaacaggtcccaaatgaaaacctatgtgtgct

SEQ ID NO: 1360 - DNA, 120 bp, synthetic construct
  source 1..120: mol_type = other DNA
tactgcaatagctgacttattttttgtgggggtggggacaggtgatcttttttgtcttttgcacatggtgcagatttaacagaaaaaaaagtgaaccacgaggcttcttcctcattctcc

SEQ ID NO: 1361 - DNA, 120 bp, synthetic construct
  source 1..120: mol_type = other DNA
ctcctgtgtcccttaggcaaccatttgtctgtttctttttccttcctgtctatgcccaccttttggtgaaactcaacctccagaagcttcctcagaaagaatataaagacaatatttttt

SEQ ID NO: 1362 - DNA, 120 bp, synthetic construct
  source 1..120: mol_type = other DNA
gaagcctgcctctttgagatctctctctctctagaagctttcatattttttgtcctcagcattcttaagtttcacagtgttatgtttcaatgtatatatttttcattcattgcattgggc

SEQ ID NO: 1363 - DNA, 120 bp, synthetic construct
  source 1..120: mol_type = other DNA
gtgatctggataggccatgtacggagaaacatctgattcaggattttaagttatttctttttggattggtcatgttccccagagcagtcttctgatctcttttttggaagatggaagttc

SEQ ID NO: 1364 - DNA, 120 bp, synthetic construct
  source 1..120: mol_type = other DNA
atcatttcattgttttcccttttgcaggtttcaagctcagctgtgtcatacctgcttagtcaattactactgacttccagtttccaaaatgatgctctggtttccgttcctattttctcc

SEQ ID NO: 1365 - DNA, 120 bp, synthetic construct
  source 1..120: mol_type = other DNA
tgatccctatacaaatataaataagaccatggcacctttctgcttgaagttctccaatagctttccactgtgctttcagttctcttctgtgtctccatcgtgaccacacaaaccctttgt

SEQ ID NO: 1366 - DNA, 120 bp, synthetic construct
  source 1..120: mol_type = other DNA
ctaaacaagaattatagcctgggaaggtcatttacttgcttactagctgtttcctgtgtcataatgtaagctgcataagggcaggaatcttttctgcctcacctccatatttatagcctc

SEQ ID NO: 1367 - DNA, 120 bp, synthetic construct
  source 1..120: mol_type = other DNA
aggcaaattctcagatacgaataatgaagaatgaagatcaactatacttcctggcaatatcaagggctgcccatatctcactttgcaggattcaatgtccaagtccatgttttccttctt

SEQ ID NO: 1368 - DNA, 120 bp, synthetic construct
  source 1..120: mol_type = other DNA
tttctttaaagcttttcagctgtaacgtctgagtcttttaaatctctcctcatatgggggagttggtccagagatggagagccagaataagaccaaagttaaagtatgagaaatagtgta

SEQ ID NO: 1369 - DNA, 120 bp, synthetic construct
  source 1..120: mol_type = other DNA
atgttgaccaggtctgaggaggccactttgaaaacctgttctgagaatttctgcctgtccttatagatctcctgtgataacaggatggtggggagaagggatgtaagttttttttttttt

SEQ ID NO: 1370 - DNA, 120 bp, synthetic construct
  source 1..120: mol_type = other DNA
atcatcatgatcaggaaactcagcagtggcttcgtctcagggacgctgcagttccgttcctgagacctacaaagaaacacataggaggcatttaagtttaagggacttaaacttctgtta

SEQ ID NO: 1371 - DNA, 120 bp, synthetic construct
  source 1..120: mol_type = other DNA
aaccttttcactcttgacattgagggtcagtgtgttgagagagatcctaggggaaaaagaagggacagacagtaagaagaggaggaaaaagagaaaacggaggtcccccttccctggttc

SEQ ID NO: 1372 - DNA, 120 bp, synthetic construct
  source 1..120: mol_type = other DNA
ttgccatctgaaggccgggaggagtggggagtcggcgcttgcaaagatacactcaagactgcagacagtaaatcaattttatttgtgttcacagaacatactaggcgatctcgacagtcg

SEQ ID NO: 1373 - DNA, 120 bp, synthetic construct
  source 1..120: mol_type = other DNA
aataaatattacgtacacatctccatcacctaggaggacgtacataaatacatataaatattaattaggagcaataagaaataaattaacgacgctctccttcccaccgggcctagcccc

SEQ ID NO: 1374 - DNA, 120 bp, synthetic construct
  source 1..120: mol_type = other DNA
cagcgggctggaaattccgacgattaaacaaagggagtgggtggagacttgacatgcacaatcctaggcgcccaactgcacgttgtgagtgtgtgagtcgtgagtgggggtgggtgagat

SEQ ID NO: 1375 - DNA, 120 bp, synthetic construct
  source 1..120: mol_type = other DNA
aaaaggaaaacataccacgtacacctaccaacacacatgtacacagtaaaggtgcaaagactgtatagggacagttcagcaaaactactctcttaggagcgtgcagaaatattcacataa

SEQ ID NO: 1376 - DNA, 120 bp, synthetic construct
  source 1..120: mol_type = other DNA
cagaatttaacatcttttgagcattcacctgtttcaggcgccctctgttgagggtactactgttgagagtcctgaggctagtttcagtataagtgctgtgccatgcagctgcctgaggaa

SEQ ID NO: 1377 - DNA, 120 bp, synthetic construct
  source 1..120: mol_type = other DNA
aaaagatctgagatgactccagagatttgaaatacatctggctcagatctttctaccatcattttaagcctggtgcacaaagtgaatacatatatgatctcttccactggaggctgtgtc

SEQ ID NO: 1378 - DNA, 120 bp, synthetic construct
  source 1..120: mol_type = other DNA
acataaacataaattgggagtagggggagatagtgatgatggaagaaaactagtgggtgggagagagagagaagcaccaaaggttaggaatgcattacttgtttatgatggaaaatttct

SEQ ID NO: 1379 - DNA, 120 bp, synthetic construct
  source 1..120: mol_type = other DNA
ggtagggaatgacaaagtgaaagctttttagctgcacctggtattcagtagatcctcaataactacttggtgacttgagatgggtttgagatagaaaggaaacacggaatagcaaaaaga

SEQ ID NO: 1380 - DNA, 120 bp, synthetic construct
  source 1..120: mol_type = other DNA
tgccctccctccctctccatatcaggcaggttttgtggctctttattttccagagaagcaaagacttctgcattcctagttcctgttcaactaatgtgagtgattttatttttttatgta

SEQ ID NO: 1381 - DNA, 120 bp, synthetic construct
  source 1..120: mol_type = other DNA
ctatttgtgcaaaatctgtatcttcctgaatatgtgaataaattatgtatcaacttcttggttccttcccaacttttgtctcctgtccccacccccgctagaattaacggagtgaggctc

SEQ ID NO: 1382 - DNA, 120 bp, synthetic construct
  source 1..120: mol_type = other DNA
agagtaggactttatctatcttgtgtactgctctattttcagtgcctagaactgtgcctgtcaatcaatacaggctgctgaaaaggctagaaatacaggatcgttgatgtcattactgtt

SEQ ID NO: 1383 - DNA, 120 bp, synthetic construct
  source 1..120: mol_type = other DNA
ttttggcattcagaacagttcactaccaaaaaggcacattttattttagtgaaaatgggacaatcatgggccataaagaaccttcctaactattgttcctccggttcacctcctataccc

SEQ ID NO: 1384 - DNA, 120 bp, synthetic construct
  source 1..120: mol_type = other DNA
ctacattgtatacaaatctctcaaagcatcacacacacgatattatagtcatttgtctatctttttgattgccaggagaggcacgtgccattgagatgcagccgtcttaatactggtaac

SEQ ID NO: 1385 - DNA, 120 bp, synthetic construct
  source 1..120: mol_type = other DNA
gacaactcttttttaagacatgtattcttatttctcttgagcagatgtctaggagtagtataactaggtgcatgtttagcttagtaagaaatcgctgctgtgcccagtggctcacacctg

SEQ ID NO: 1386 - DNA, 120 bp, synthetic construct
  source 1..120: mol_type = other DNA
atgttcctcttgtaaattcttgcttaaaatatgccaaaactaagtgttttttttgttatagaacaggttgccactcagattacctcaagggacagagatgggctggaatagagccacctc

SEQ ID NO: 1387 - DNA, 120 bp, synthetic construct
  source 1..120: mol_type = other DNA
aattcactttcttaaggttgtgtaaccaagaagtaatgggagttagatgtgaacctaggtctatttcattccaaagcctagtggcatacctatttgtcagagcatagatgctagagccca

SEQ ID NO: 1388 - DNA, 120 bp, synthetic construct
  source 1..120: mol_type = other DNA
ttactcccaaatacttttctcaagagaaggtggtgtaaccagaagacactttaaggtcttgaggccatccccaaagatcatttgtttcctcaaacagattttgggctttttcaggtgaga

SEQ ID NO: 1389 - DNA, 120 bp, synthetic construct
  source 1..120: mol_type = other DNA
gggaagagaaaatgctgcattgggaaaatgcttggtataggctgatggctttaatctgcttttgacacttttaaaagagtcaagatcacttgtctctcattagattgtatcgcacactgc

SEQ ID NO: 1390 - DNA, 120 bp, synthetic construct
  source 1..120: mol_type = other DNA
gaggcagaaccagcaggaatgtggggtagtcacacaaacacagatacaattcctggtttccctactagacacttcccaggctctcaattgcttgtagtttttgtttgcttttttttttta

SEQ ID NO: 1391 - DNA, 120 bp, synthetic construct
  source 1..120: mol_type = other DNA
accagtcttgcctaggttctccttacataatcataaccacttccctgccaggagcaattttaaaatgttcttctaaagccctgtgcacttcgccttggcttcctttaacttttcttttct

SEQ ID NO: 1392 - DNA, 120 bp, synthetic construct
  source 1..120: mol_type = other DNA
taattttctcaactgtgtattttgaaagtctcggagtttcgccagaagcgtctttcgttcggaaaaaattctaaacattccttctttagagaaagctgagatcacagcgctcccatgact

SEQ ID NO: 1393 - DNA, 120 bp, synthetic construct
  source 1..120: mol_type = other DNA
accagttcatgagaagaatcattatagtttcaggaactttatgagccaactggcataacattggtagcttgaagttggcctttgtagagacagaaagatgtgattgctttctgcacccat

SEQ ID NO: 1394 - DNA, 120 bp, synthetic construct
  source 1..120: mol_type = other DNA
agaaaaaaaaaaaaaaaagaacagacagtcatgtagaaatgtgactgaacacaggctgggcacggtggcttatgcctgtaatcctagcacttagggaggccaaggcgggcggatcacctg

SEQ ID NO: 1395 - DNA, 120 bp, synthetic construct
  source 1..120: mol_type = other DNA
ttcacaagttgtgagaagaaccaagttagcattaggttgacctgtgagtgacaaaaaccgaatagaacaatggcttcctagatggaagtccatttctctctgacagaaacaaagtccaga

SEQ ID NO: 1396 - DNA, 120 bp, synthetic construct
  source 1..120: mol_type = other DNA
aggcatttcagaaatgttaatctcacacttaagtgctagacagattggaggcaggaggaaaaacaggaagcagcagggaggttggaaaggagaattatttcataagccaggtgtgaggtg

SEQ ID NO: 1397 - DNA, 120 bp, synthetic construct
  source 1..120: mol_type = other DNA
aaatgtattcaaactgatggctggtctgaaagggagttgtaggctggggtgatgagagacaggtctcatagcaacagggtaaacaaagtaaacttggcttggttggtgttttatttatta

SEQ ID NO: 1398 - DNA, 120 bp, synthetic construct
  source 1..120: mol_type = other DNA
tgatattcccaaaagctggaaagtgagtggactcactggtgaaaaggacctgagcccaaacagtgtccatgatagtgaatccattttggttgtgttggatttgaggtggcaaagaaataa

SEQ ID NO: 1399 - DNA, 120 bp, synthetic construct
  source 1..120: mol_type = other DNA
tagggtactttctccttcgacttatgtgctgctcattctggcttgtcctctgtgttctggttattttttgttgtccaacaaattgcctcaaaattttgtggcatgagacaaccctttatt

SEQ ID NO: 1400 - DNA, 120 bp, synthetic construct
  source 1..120: mol_type = other DNA
tcctgagcattggcccaggaataagtatctgtggaaggacgggatccttctaagtctctcatctatttttcatacacggcatcatttaattctaaactagctgtcattaccatttcacaa

SEQ ID NO: 1401 - DNA, 120 bp, synthetic construct
  source 1..120: mol_type = other DNA
ccagacacccatgctccccacatcctttattattttgttaaaactagcaatgccccccccaacccccatgattaaaatagtacatgtttgttgtgggaaatctgtaatatgcaaaatata

SEQ ID NO: 1402 - DNA, 120 bp, synthetic construct
  source 1..120: mol_type = other DNA
atcaatagtgttaggtaaagtgtggaggagaggtccgtgaacaatcctggggagatgacaccattgttttatcttgttaatgcatttacttcacagaatcacaggataatggaattggac

SEQ ID NO: 1403 - DNA, 120 bp, synthetic construct
  source 1..120: mol_type = other DNA
catctatttcaaggactgctgttagccaactttctttgtcagtttccgtccacctggagcgaagttccaagattgaatcttctggtatgtcttcagattctctcctttttaaaaaaacct

SEQ ID NO: 1404 - DNA, 120 bp, synthetic construct
  source 1..120: mol_type = other DNA
gagtcctctttacttcgttgtaggtggccgccattttgctctgtactcacatggcctcttcgtgcatgtggggagagagagctctcttgtgcatcctgttccttttataagaacaccagt

SEQ ID NO: 1405 - DNA, 120 bp, synthetic construct
  source 1..120: mol_type = other DNA
ttgaaatctcctatcccgtgcccatcctgggctccttcattcaggaaacattcccataaatgattattaactgatctccctacaactttcccaacatgtatcacatttgaaggaacaatc

SEQ ID NO: 1406 - DNA, 120 bp, synthetic construct
  source 1..120: mol_type = other DNA
ctgcaagggaaacaagggagactcctgggttgaagctatcttgtctagatggtggttaaatgggtaaatataaatgtaaaagctcatcggtttgtttcctgctgatagccaattagttaa

SEQ ID NO: 1407 - DNA, 120 bp, synthetic construct
  source 1..120: mol_type = other DNA
gactcataactgttactagatccttctctatctatctagaaacatttatgtgaaggtaggcatgtatgtccacatatatgcaacagatatgattgccccacagctcctgggctacaagta

SEQ ID NO: 1408 - DNA, 120 bp, synthetic construct
  source 1..120: mol_type = other DNA
ggccagtgagcaaagatgagcttcttatcctttttcttcctgggttccagcaagccaagcctcacagcagtgtccaaaaagttggtagaaaaggcctaatttttttttttttttttcagg

SEQ ID NO: 1409 - DNA, 120 bp, synthetic construct
  source 1..120: mol_type = other DNA
taaaagctagtgtatgcttttccacatttttttttctccttcaactatagtaattggtgatattccacatagtggctgctctgtcaacctgggtcctggagttaggacaatgacagctca

SEQ ID NO: 1410 - DNA, 120 bp, synthetic construct
  source 1..120: mol_type = other DNA
ggatataaagcaacaaaggtacagaaatgtaatacagaggaaaggaaaagaaacaaagtgataaagaaggcgagacaaagtataaaaacagggaagaaagaggtacagagggccaggcag

SEQ ID NO: 1411 - DNA, 120 bp, synthetic construct
  source 1..120: mol_type = other DNA
aaatgttaagatgttggtctttaagtggatgggctcggggatatttgggctgttatgtggggaagtgacatggtcagatttttagctaaattgctctgcctgccatgtggacagtgtgtt

SEQ ID NO: 1412 - DNA, 120 bp, synthetic construct
  source 1..120: mol_type = other DNA
agttgagcctgccttttggctccgtgtttgtttttttcttagtcttgtcctccttattttgttcttggttataaagactgaggaggctaatttggtaattttctgcataggggtcatgct

SEQ ID NO: 1413 - DNA, 120 bp, synthetic construct
  source 1..120: mol_type = other DNA
tttttttttttttgtcagccagggtgtttgataaattgaggtgtttgatggtaagcagaagtttttgagttatgtacattatctgagcaggagggccatatgtcttgggccatttgcctc

SEQ ID NO: 1414 - DNA, 120 bp, synthetic construct
  source 1..120: mol_type = other DNA
tgtggtatatacatacaatggaatattattcagccttttataaaaaagaaattctgccatttgcaccagcatcaatgattaacctggaggacattatgctaagtgaaataagccagtcac

SEQ ID NO: 1415 - DNA, 120 bp, synthetic construct
  source 1..120: mol_type = other DNA
atagcttctgtgaggtattattattcatagctttaaaaaagccagttgaaggaaatccagtgatttgtcaaaggtcagaagttaggtggccgctctcctgctcagacttacgttttctga

SEQ ID NO: 1416 - DNA, 120 bp, synthetic construct
  source 1..120: mol_type = other DNA
ttgatcccaaaactcatgcacttttctgtggacactgagacttgaacaaatcaataacttgagaatgtaagcagccctctgccatgttatactttgttgagttatataacagttggggga

SEQ ID NO: 1417 - DNA, 120 bp, synthetic construct
  source 1..120: mol_type = other DNA
gtggaatcataaaatatttttcctcttgtgattggcttttttttttttttgagatggacttttgttcttgttgcccaggctggagtgcaatggcacaatcttggctcaccgcaacctttg

SEQ ID NO: 1418 - DNA, 120 bp, synthetic construct
  source 1..120: mol_type = other DNA
tccaccctttaaaaatgtacaatgaaatgtgttttttttttttttttttttgagacagagtctcactctattgcccaggttggagtgcagtggctcagtcttggctcactgctacctctg

SEQ ID NO: 1419 - DNA, 120 bp, synthetic construct
  source 1..120: mol_type = other DNA
ttgtgtggacatccattttctctttggtatacacttaggagtggaatttcgaggtcattaactttatgttccacttttgagaactgctttccaatgttgctgagccatttgacattctca

SEQ ID NO: 1420 - DNA, 120 bp, synthetic construct
  source 1..120: mol_type = other DNA
cattatcttcccaggattctcttagccccatgcaagacacatgctacatgctcaataaatatagcctgagtgagtgaacatatgagtgactgagactcagtgtggttaaataacttgcat

SEQ ID NO: 1421 - DNA, 120 bp, synthetic construct
  source 1..120: mol_type = other DNA
agaaacggtatttctccaaagtttcatttgctgtctctgctgtatgatcccaatcatttcattgtttgtgagcagcaaaactcaaatctagggagcctcatgtcccttctgcttctgact

SEQ ID NO: 1422 - DNA, 120 bp, synthetic construct
  source 1..120: mol_type = other DNA
ttcaaagtaatcctgtgggttggttttatcaatcctattttgcagagttggatgctgaaacttgcagtcacacaaggacttgaacctagagcttttctaaagcccgtactctttccagta

SEQ ID NO: 1423 - DNA, 120 bp, synthetic construct
  source 1..120: mol_type = other DNA
ttattaatcccagggattttgctgggaggagttctggcttgttattagggtccttttctttcagatcaagaaaagggagatctaattcatgaagaaactagaaaagtgccctggattggt

SEQ ID NO: 1424 - DNA, 120 bp, synthetic construct
  source 1..120: mol_type = other DNA
gtattgttgattctcttgaggttcaatccagggctagagattgtgattaaagagatacccagattgggtatgcgtgtaaagggcaagagctatgagaccaatgtgacatttaggattaat

SEQ ID NO: 1425 - DNA, 120 bp, synthetic construct
  source 1..120: mol_type = other DNA
aaccaaacaagcaaagacaagaggttaattcacaacattgacaaaaacaaagagtgacaaaggtagcagttttgcacaaggttgcgtccaacatctggatttggaaatgtggcagcggct

SEQ ID NO: 1426 - DNA, 120 bp, synthetic construct
  source 1..120: mol_type = other DNA
attgggtgttatgaaagaaaagcatggtactgtataatgaggtcatctaatttagtctggggtgacaaggaatgcctactaaagaaggtatcgtttaagacatacctggggaatagcggt

SEQ ID NO: 1427 - DNA, 120 bp, synthetic construct
  source 1..120: mol_type = other DNA
aagagtaaaataataaatcaagtaggaatggaggggaggatatgcatgcagcactagataatatctatacagagagaggatgaggtcttggaagatgagtctgaagactttcctgttgga

SEQ ID NO: 1428 - DNA, 120 bp, synthetic construct
  source 1..120: mol_type = other DNA
agatgatacataaatacttccccaggtcttctaggcctgattcaataatatttacttcgagaggctgctgcttcctgtttgtattctcttaccacaagttatctgctgttcctactttca

SEQ ID NO: 1429 - DNA, 120 bp, synthetic construct
  source 1..120: mol_type = other DNA
aagccctgtgccccattattgcttcattgattcactgaaataatgctgggtatgattgtggctacagagttaagccccattgttaattatatggtttggtgagggaaagagttttttttg

SEQ ID NO: 1430 - DNA, 120 bp, synthetic construct
  source 1..120: mol_type = other DNA
aaacttttcagttatttcatataacttccaggtgtttgaaatacgaaatgcgtaagagacatgttcctgagatgtcggagtgaggtttcctttgagagaaggaagtgagggttgttgcct

SEQ ID NO: 1431 - DNA, 120 bp, synthetic construct
  source 1..120: mol_type = other DNA
agaacttgttcatttggggacatccccaataatgccaaaatctatgctccagatgagtaagagtatgaattggaaccactttcagggaacctcttgtctgcacctcattctgtttttatt

SEQ ID NO: 1432 - DNA, 120 bp, synthetic construct
  source 1..120: mol_type = other DNA
tctctcattttttccccctcttgaaataggtttgttggagaaaatggattttttttgtactgtacagctttccagtctgggttttgctgattctaccctggaggtgctatgtaagacact

SEQ ID NO: 1433 - DNA, 120 bp, synthetic construct
  source 1..120: mol_type = other DNA
ccaagcatttctttaagaagatctgatttcagttgaagggaaatgatagactgccagagatgcttgttgctgctggattggttcttgtttctagggccttttagtgggaagaaaatataa

SEQ ID NO: 1434 - DNA, 120 bp, synthetic construct
  source 1..120: mol_type = other DNA
ctggaaatgcatatgtaattttgctagatacagccagtcaaattcccttccatagagattgcctcattttgcattcctagtcacaatgtactagaatgcctatttccctatagctttgcc

SEQ ID NO: 1435 - DNA, 120 bp, synthetic construct
  source 1..120: mol_type = other DNA
ttttcttggccaaagctggacatggatcaaaataaacgtctgttcaactccctgtgtttggttccattttgctgcctgtttttctttcctggattctttgtgatttcagcacagtgtttt

SEQ ID NO: 1436 - DNA, 120 bp, synthetic construct
  source 1..120: mol_type = other DNA
attttcgcgtgtttgggtttaaaatacaagagaaagaatgaggaagaaaggttaagtagtgactgaacgttttgggttagagtagatacccactaaaaccatcgtacttctggctagctc

SEQ ID NO: 1437 - DNA, 120 bp, synthetic construct
  source 1..120: mol_type = other DNA
acgcatcagatactgcgctaagtactttatacagaataaatcatttcatcttgacctgttagttggctagggtggttacttccagaaggaaaaagaggcccagagataagttcacacaat

SEQ ID NO: 1438 - DNA, 120 bp, synthetic construct
  source 1..120: mol_type = other DNA
attttctgttaactcttatctgatccaactagaaagcaaagcaaaacaaaaacctgactgccttctacagacaagccaatgtgaaggtattcagctcacacaggttgcaaaagacagaga

SEQ ID NO: 1439 - DNA, 120 bp, synthetic construct
  source 1..120: mol_type = other DNA
tggggttcttgtgtgaaagaaaacattttaatgtgtcctttgattacatgaaattcaggcagagtctgatcaaagagatgccccattgctgagcacagtgaagagaaaggatgtcttcct

SEQ ID NO: 1440 - DNA, 120 bp, synthetic construct
  source 1..120: mol_type = other DNA
agtgcaggcctgagttatttaactatcaaagaaaaagtgatgctctgtgtgtgggaaaaacaacactcaatgtgctttttcctactctctcactcacaacaatcattaacacagaaggct

SEQ ID NO: 1441 - DNA, 120 bp, synthetic construct
  source 1..120: mol_type = other DNA
atatataaattataatagcacagaatcccaaaggctggaaaacttgtgggcttccctttcaccatatagagccactgttctctccacagtgcctgcatattcctgtctctttctgttgaa

SEQ ID NO: 1442 - DNA, 120 bp, synthetic construct
  source 1..120: mol_type = other DNA
gcttagagttgatgaagaatggatggtcatgtggaagcattatgggacagaaagggtatgatctcctggaggaatccagcaatgcctgtctgtccggattcttctcggcctctatgttgt

SEQ ID NO: 1443 - DNA, 120 bp, synthetic construct
  source 1..120: mol_type = other DNA
ctaattctggcttctgtggctcacttcaggagagaatgaggggcgagagacaggaggggcagaaggtcagagggatcttggtttcgaggctgcttctgagtcttcccaatgtcctttagt

SEQ ID NO: 1444 - DNA, 120 bp, synthetic construct
  source 1..120: mol_type = other DNA
atttgttcagcataatagaagtgcaaaccgatggcctactgcctgagtatctgctctgcagaaacatataatttgctaagagaacgtttatccaaaatattgtcttcaggaactgggagc

SEQ ID NO: 1445 - DNA, 120 bp, synthetic construct
  source 1..120: mol_type = other DNA
attttcaaccttcgctatagacaaaggctcaggtctcccttcccaatttctcaccgtgcctcacttctcttttactctctccatatatcctcgtttctctttttgttcatataaggttaa

SEQ ID NO: 1446 - DNA, 120 bp, synthetic construct
  source 1..120: mol_type = other DNA
gaatcggttactaggccgtatgaaagaggagtcttctttaggatcattatcagtacaggcctggcattcacctaaccagtaatagaaacctgaaaaacagtggcataaaaaattgagagt

SEQ ID NO: 1447 - DNA, 120 bp, synthetic construct
  source 1..120: mol_type = other DNA
atggggctctaactctgtgtggtgaagaaagttgtgtggaatggcaacttttactaggaccaccctcttttgctcattgacattcattcattaattcattccaggtacacttgatgaatg

SEQ ID NO: 1448 - DNA, 120 bp, synthetic construct
  source 1..120: mol_type = other DNA
agcattttcggagaccaagacaagagaactgagtccaggagtttgtgctcaagtaataacaatactatcagcactcaatcttggtatcttaaaacttgacatttaaatgaaattttaatt

SEQ ID NO: 1449 - DNA, 120 bp, synthetic construct
  source 1..120: mol_type = other DNA
ccagagatttttatctgttttctttatggtaagttcctagaactgaaaacagggcctggcatgtatttactgaaaaagtgattaagtgctctccagttgatggctggagttcagaccatc

SEQ ID NO: 1450 - DNA, 120 bp, synthetic construct
  source 1..120: mol_type = other DNA
acaggcgtgaagccaccacgcccggtttcctctctatttactcttgtgagtaacatcagcttctttgaacttcaccaaacttaattccttaattccatactaactgtttatttgttgagt

SEQ ID NO: 1451 - DNA, 120 bp, synthetic construct
  source 1..120: mol_type = other DNA
cacacctagctgagaatttctttatggccatcttctggacaaaaagtcaaggagagtttagagtaataattccagtttttatggcttttgcttcggggaaaaagggttctagtttctagg

SEQ ID NO: 1452 - DNA, 120 bp, synthetic construct
  source 1..120: mol_type = other DNA
attggagcagctgtatcagctctggactgcctgctcaagtcttcttcataactgggaaaaataaacacctatgaagttaggccattgtattgagtttttgttactcaagaaccaaacaca

SEQ ID NO: 1453 - DNA, 120 bp, synthetic construct
  source 1..120: mol_type = other DNA
aaatgtaaaggttctccaaggccccaccagagcagctagatacagagtgtcgattggtgcactcacaaaccctgagctagacacagggtgctgattggcgtgtttacaaaccttgagtta

SEQ ID NO: 1454 - DNA, 120 bp, synthetic construct
  source 1..120: mol_type = other DNA
tgcagtaaatagtgtctaatcttttccttccttacaggctatttctccatattgcttcccagatacaaaattcataaatgtatacaagccatacccatgttacccactccctcaggccct

SEQ ID NO: 1455 - DNA, 120 bp, synthetic construct
  source 1..120: mol_type = other DNA
aagtctaaaaagagtttgggtctgaactggggcctaggaaaagttaatggggcagtgattttggccttttctacccacctccttgtaataatattattttaacaatctggctgggtatgt

SEQ ID NO: 1456 - DNA, 120 bp, synthetic construct
  source 1..120: mol_type = other DNA
tccggtttggaaggagaggacatatatacacgaagcatggtatatttaaataaactggagttaattttccttcagaaatacctcctatttaagcctttgccacacaggtataggcctgga

SEQ ID NO: 1457 - DNA, 120 bp, synthetic construct
  source 1..120: mol_type = other DNA
tcagtgatgaatattctttggtttcagcaccagcatcagctatttatatgtcagtgatgcaaatctccatatgcagagtccttgatactgttcggagtgcttccatacccatgcccaaac

SEQ ID NO: 1458 - DNA, 120 bp, synthetic construct
  source 1..120: mol_type = other DNA
actcagctcttctcggggctcacgaaacactttacaaaacatctttctgtatctcatttgagggtttttgcctacagtcattgccaaggccacttatctgtagttttcttttctttttta

SEQ ID NO: 1459 - DNA, 120 bp, synthetic construct
  source 1..120: mol_type = other DNA
tttgtttactaagagactgcaatctgcttgtagttcacccctgctcaagcaagacatacattcagttttgttttttcagttgtgagtaaatacctcttttcctcagcaatatgtgggtcc

SEQ ID NO: 1460 - DNA, 120 bp, synthetic construct
  source 1..120: mol_type = other DNA
tcttctggaaacattattctgttcctttggacatgggcaagggtcctgtccctaacttgtccttctttttcttttgatcttaaccagtttcacttgtaccaagaccaaactttcttacct

SEQ ID NO: 1461 - DNA, 120 bp, synthetic construct
  source 1..120: mol_type = other DNA
catagatttgtttattcaacaagcattccaggcaccatataggggctgggaagaaagagtaaataaggcagagttccaactttcaaagagctttctaatcttggtttttagtcccacagg

SEQ ID NO: 1462 - DNA, 120 bp, synthetic construct
  source 1..120: mol_type = other DNA
agaaagaaagagacagtagaataatgggaaccacgttgcaaaaatgtaaatcgctcactggtgactgccaggattttgatgatctaataaaatgactggcatatgaggtggggaaaatgt

SEQ ID NO: 1463 - DNA, 120 bp, synthetic construct
  source 1..120: mol_type = other DNA
catagcacgttccgcttggatcactttctctttctctgttttataattgtccattacatacagccactgataactgaaaaggctcgcagtgtttggatgaggaaccatatgcaaacaaat

SEQ ID NO: 1464 - DNA, 120 bp, synthetic construct
  source 1..120: mol_type = other DNA
gtattttctaggtgctggttactgttctaagagctttaaatggagtaattcagttaatcctgcctcacggtacaataattagtctcgtatgacggaggaaatagaagcctggagaggtca

SEQ ID NO: 1465 - DNA, 120 bp, synthetic construct
  source 1..120: mol_type = other DNA
taactgcctccttgaggatactgaagactctttccaatgattatattcttttcacttcacctgtcatgcatcaagtgttgatgttgctggctgcctttctcagtgttagtttttatgtgt

SEQ ID NO: 1466 - DNA, 120 bp, synthetic construct
  source 1..120: mol_type = other DNA
ttagaagcatttactgtagctttatactacatatttggggatcactaacaattttttccggtcacactctaatcactttctcaaggctggatcaggtgcgagactctgtagcagtaacct

SEQ ID NO: 1467 - DNA, 120 bp, synthetic construct
  source 1..120: mol_type = other DNA
tatagaatcatgactcagctttccctgttaatgtagtcaacttaagctactgccatggttcaggttccatcatgcttcaaatatagtttatgactgtagttacgtagtgtggcagcaaca

SEQ ID NO: 1468 - DNA, 120 bp, synthetic construct
  source 1..120: mol_type = other DNA
ctctaacaggatgagaagacatacaaaatagaggctactttaaaaaaaaaattctcagagtgtagtgtgtaaacgttcacctccactataaagacctccttgccaggggtaggaagcctt

SEQ ID NO: 1469 - DNA, 120 bp, synthetic construct
  source 1..120: mol_type = other DNA
caaaatcttctggggccaggatgtgcaaacgcttcctggaatggggtagaacagtgacaaaacaggaagaacaaaaaaacacatgttaatatctcaagaaagtatccagccaccataatg

SEQ ID NO: 1470 - DNA, 120 bp, synthetic construct
  source 1..120: mol_type = other DNA
taggccctgtaagtcaccatcatctttaatgcggatgttaaccagtacaagaaccccgttagagttgcatttgctttctagggcaagatctttgctctaagtttttttaaacacatggct

SEQ ID NO: 1471 - DNA, 120 bp, synthetic construct
  source 1..120: mol_type = other DNA
atatgcatgcagtggaatatttctcagcactgaaaatgaatgttcctataactgcatgtgataacaggcaaatctgcagacataaagtcgagtgaaagaagccagctgtgaaagagcaca

SEQ ID NO: 1472 - DNA, 120 bp, synthetic construct
  source 1..120: mol_type = other DNA
gaactggaatatcagtcttcttctctccttggactgagatttgtactattagctcccctggttcctctggtccacaagattgtggacatagactggaattatattactggctttcctggg

SEQ ID NO: 1473 - DNA, 120 bp, synthetic construct
  source 1..120: mol_type = other DNA
ttttatatatgccattgttgaagccaaccccaactcacctggcaatcagctggaggaaggggactacttctattcattgcagatttaaaagttggctacatatcctttgctacttctccc

SEQ ID NO: 1474 - DNA, 120 bp, synthetic construct
  source 1..120: mol_type = other DNA
aatttactgtggaattgttttgttttgttcttgttgctctgtgtatactcccctcaccaagagagttactgggctttttgttcccaattctgaggctctttcttgagtatggagaaggtg

SEQ ID NO: 1475 - DNA, 120 bp, synthetic construct
  source 1..120: mol_type = other DNA
ggtcataagggtggagcccccatgtgtgattagtgcccttataagacgagttagagaccagagctctctctcggccatcggtagtgagaaggctgcagtctgagaatcaggaagagagcc

SEQ ID NO: 1476 - DNA, 120 bp, synthetic construct
  source 1..120: mol_type = other DNA
tgtctttatgaaaagtggggcatgggaccagaggagggacttggtcagaaaaacaaaatacgattatttttgatccatgtccttatttcttggttactaaatagctgccctctgtatttc

SEQ ID NO: 1477 - DNA, 120 bp, synthetic construct
  source 1..120: mol_type = other DNA
tccttcacacactgtgatatcatattctggactcttgccaaccaaggaaagatttatgtataagttcaacatggatgcacttaggctaattctccttcctgcatttccttcagaacatcc

SEQ ID NO: 1478 - DNA, 120 bp, synthetic construct
  source 1..120: mol_type = other DNA
cttcctctctttttttgcccacttctctagctagtcccaagacttgttcaactctttcttatggatggttttgcagaatacatacatggaaaccgtccacaaattctagcccaccaatta

SEQ ID NO: 1479 - DNA, 120 bp, synthetic construct
  source 1..120: mol_type = other DNA
tggcttggaagtgcagggtggtgcgaagagtgggagggaggcagggttaggtgaggaaaaaacagaaaacacaaattaatttgacaatgatatgttaacttaaaaatcacaactttaggc

SEQ ID NO: 1480 - DNA, 120 bp, synthetic construct
  source 1..120: mol_type = other DNA
cacaaattgccaaaggggtctgttttaggttagtttccttcagaagcagatctggagacaaagatttgaagcaaggaggttattagagaggaaatccctggcataattgataaagtagac

SEQ ID NO: 1481 - DNA, 120 bp, synthetic construct
  source 1..120: mol_type = other DNA
ctatgccagggacaaagtgcactttaatagtcaatacacaggttgcttaccgggttcttgttttttttgtcaatagtcttctttcatttcaagttcccaaagtcttgggaacaagccggt

SEQ ID NO: 1482 - DNA, 120 bp, synthetic construct
  source 1..120: mol_type = other DNA
tttatgtgtgaccctgccacccttaacccccagcagcaggggatgtcagctttctttcagggaagaacacagactccttttgagagactatagtgagataattttgtaaactgaaaataa

SEQ ID NO: 1483 - DNA, 120 bp, synthetic construct
  source 1..120: mol_type = other DNA
cctttcttattcctcctcgtccctcaaagttcattctctaggctctgccagaggctatgcttcccactagtccgaatggtacattgtaggctgcaactctttatttttattttattttta

SEQ ID NO: 1484 - DNA, 120 bp, synthetic construct
  source 1..120: mol_type = other DNA
gtgtgacaagaacctggttttagggtttaaggaacaaagttctgcatcaataagattcaaaagaaatcattctattgaaatatgattctaggcacaggctagttgggggtctctgagccc

SEQ ID NO: 1485 - DNA, 120 bp, synthetic construct
  source 1..120: mol_type = other DNA
aatgctcagcccctcttattccttctagcaagagcttcttgcaaatacctcaatttttttttttatcttctgcagctgatgctcaaactgtcaacttgttacttgagaccatgaatgttg

SEQ ID NO: 1486 - DNA, 120 bp, synthetic construct
  source 1..120: mol_type = other DNA
ggctgattttacccaccaacctggtgatcatgaaccagccatctataaccttgttgatctagctcaacccattatataaaactgtgcttggattgtatggaatgctacacacttacaatt

SEQ ID NO: 1487 - DNA, 120 bp, synthetic construct
  source 1..120: mol_type = other DNA
aaaagttactcactcatttgttctgcagaatctatttattgctgtgttcacagaaaaggaagcatcaagacggcaaagctctttgatgaaaagccaggcgtactcacacacacaactgag

SEQ ID NO: 1488 - DNA, 120 bp, synthetic construct
  source 1..120: mol_type = other DNA
caaaaaaaaaaaaagtatcaaaaggcctaggaatttgttctccaggtaaatctgccctccctcatctctaacctttatgaaatcacccaaatggagacatcacagcaaggccccgacaag

SEQ ID NO: 1489 - DNA, 120 bp, synthetic construct
  source 1..120: mol_type = other DNA
tctgcaatctctgaggatggaacaggatcaaagatgaagccaggaagcacagagtagttttcttcctccctaatctcatcccttgttttcatttggcactttaaaaaatttccacattta

SEQ ID NO: 1490 - DNA, 120 bp, synthetic construct
  source 1..120: mol_type = other DNA
gcaagctgagagccgactgccaaagcacaattcactgtaagagattctgtgaagggttaaaacaaacagtccaaattcacagtgctgcaaatgtctgtaattgcataatctgcaaaatat

SEQ ID NO: 1491 - DNA, 120 bp, synthetic construct
  source 1..120: mol_type = other DNA
attaatacagtaaattggtaccagtaaagtggggtactgctataaagatacctgaaaatgtggaaatgggtaacaggcagaggttagaagtttagagggctcagaagaagacacaaaaat

SEQ ID NO: 1492 - DNA, 120 bp, synthetic construct
  source 1..120: mol_type = other DNA
aaacaacaaccaagtttgtaaagtaaaccaatcacagattccctcagttttcgcatcgtcttggcttcatggaaatgacgagttactgggaagaaactatttcatttttccagtgcccag

SEQ ID NO: 1493 - DNA, 120 bp, synthetic construct
  source 1..120: mol_type = other DNA
ctacacagagttccccaccggggcattgcctggtggagctgtgagaagagggccaccatcctccaaaccccagaatggtagatccaccaacagcttacaccatgcacctggaaaagctgg

SEQ ID NO: 1494 - DNA, 120 bp, synthetic construct
  source 1..120: mol_type = other DNA
ctcggctcactgcaacctccatctcctgggttcaagtgattctcctgccttagcctcctgagtagctgggattacaggtatgtgtcatcacagctggctaatttttgtatttttagtgga

SEQ ID NO: 1495 - DNA, 120 bp, synthetic construct
  source 1..120: mol_type = other DNA
ataaaaataaaaaaataaagaatagccaagtggtagaaagcctgcagatgctgttccagagctgtgcccacagctctgggcccaggtcacaggtataacctgcaataagaagagacaaga

SEQ ID NO: 1496 - DNA, 120 bp, synthetic construct
  source 1..120: mol_type = other DNA
atctccgacaaaaccactgattgggtatagagtcccaaccagccagttattgaaattttgtttttttgttatcacagcctagcctaatctaactaaagaaagggggatcaggaagcaact

SEQ ID NO: 1497 - DNA, 120 bp, synthetic construct
  source 1..120: mol_type = other DNA
taagactcctgatgttggaactgttaatgagaaacacactttgtcttttgacatacagtttttctctcagctgctgaacctggattctacctacacaggttcattgtgtatgcatgcttc

SEQ ID NO: 1498 - DNA, 120 bp, synthetic construct
  source 1..120: mol_type = other DNA
tcatcccagtagtagtaattaatctgtcatgcacaattcatagtatttcaacattaggttccaaataagtaacctgagcatccctgggtcttgctaacctatgggaatgtgcaaatgggg

SEQ ID NO: 1499 - DNA, 120 bp, synthetic construct
  source 1..120: mol_type = other DNA
ccagtgagggaggttaactcttactgtgctaaagtgtctgatttgtttcaacactctaacaaccaaagaaaacactgattgtatctcttaaagagcttttcttccttccccattccacac

SEQ ID NO: 1500 - DNA, 120 bp, synthetic construct
  source 1..120: mol_type = other DNA
acgatggtgaaggcctatatattagtctgttttcatgctgctgataaagacatgcctgagactgggtcatttataaagaaaaaggggtttaatggactcacagttccatgtggcagggga

SEQ ID NO: 1501 - DNA, 120 bp, synthetic construct
  source 1..120: mol_type = other DNA
tccgtgagagctccaccgctgcagcaaacttctgcctggacatccaggtgaaatctagttggaggttcccaaacctcaattcttgacttcagtgcacccacaggctcaacaccatgtgga

SEQ ID NO: 1502 - DNA, 120 bp, synthetic construct
  source 1..120: mol_type = other DNA
tgccagataccctaaatcatctccctcaagttcaatgttccacaaatctctaggtcaggggcaaaatgccaccagtctttgtggtaaaacatagcaagagtcacctttactccagttccc

SEQ ID NO: 1503 - DNA, 120 bp, synthetic construct
  source 1..120: mol_type = other DNA
tgctgtttgcagagcaggggtaccctatagaaagtgtgtccaaagtagcctgaaatttctttcttcaggaagatgctaaaaaggattggcactgagatttgaaagaataatgctaagaaa

SEQ ID NO: 1504 - DNA, 120 bp, synthetic construct
  source 1..120: mol_type = other DNA
agagacattcttcgttggcctagggacaccacataaacacctctgtgcatggtgggagggaccagctcctccccaaacactgtttagattttggccttgaaaaccatgactactaacgtt

SEQ ID NO: 1505 - DNA, 120 bp, synthetic construct
  source 1..120: mol_type = other DNA
gcccggcctaataattcatcttactactagaatttcaggcttcctttttaatttgcttgctttcttgttggtctgtgtcttggaacataggaactttcaatccctccaatatgggctcca

SEQ ID NO: 1506 - DNA, 120 bp, synthetic construct
  source 1..120: mol_type = other DNA
ctccgtttgcaagtaggatgctctagaactgatgttataaagtcagtttaatgatttaaatcccattgtggagaaaatagatctctgcagaaaagtacatccctgccctttcccagctcc

SEQ ID NO: 1507 - DNA, 120 bp, synthetic construct
  source 1..120: mol_type = other DNA
gacagttttgctgctcctgggatggaataggtatgatggtgatccatccacctgcaagttctggtttcccagtacgtatatgatttagaattagaagcacataatacatagccttgttac

SEQ ID NO: 1508 - DNA, 120 bp, synthetic construct
  source 1..120: mol_type = other DNA
agcctgtctgatttcacgaaaggtttttgcaggacacgcttttagtttccacaaaacagccaccctctacttccttactggcaaagctttcatgaatattatttatttgccatttcagtg

SEQ ID NO: 1509 - DNA, 120 bp, synthetic construct
  source 1..120: mol_type = other DNA
ttgatattttgacctcctcccgtgaatcacaagtgttctttttttttctttctctctctctcttttttttttttttttttttttttttgagacagagtcttactcttgttgcccaggctg

SEQ ID NO: 1510 - DNA, 120 bp, synthetic construct
  source 1..120: mol_type = other DNA
ggagctggccttctttggtttgggtggcaaggagagaaggttggggtttgtttttgacatacaaatcactttttaaaacttcaacaataacaaattaatactgtgtttgtgtgtgtatgt

SEQ ID NO: 1511 - DNA, 120 bp, synthetic construct
  source 1..120: mol_type = other DNA
acaataactaatttgccatccggctgcttcttacatgggcaactccatagaaccattcttaaggctcattacaaacatacttatttatgtcagttggtaaccgggaacaacatagggttc

SEQ ID NO: 1512 - DNA, 120 bp, synthetic construct
  source 1..120: mol_type = other DNA
catggggttttatgaaggtcaaagtaaataatgtgaggttttggcaacacaaaagaactatacagatgtatcactgtgattatatatcaatcaagaaaggtcagccaggcgtggtggctc

SEQ ID NO: 1513 - DNA, 120 bp, synthetic construct
  source 1..120: mol_type = other DNA
tgctcacatttgattggccacagaaggtcacatagccaaacctgatgccaaggagtgaaataatgtaatcttcccatatttttgcattttctattgttctttctttcttcctgatgctcc

SEQ ID NO: 1514 - DNA, 120 bp, synthetic construct
  source 1..120: mol_type = other DNA
tagtatatcgaaaagatatctacactgtcatctttattgcagcactattcacaatagccaagattgggaagcatcctaagtacccatcaacagataaatgaataaagtaaatgtggtacg

SEQ ID NO: 1515 - DNA, 120 bp, synthetic construct
  source 1..120: mol_type = other DNA
tttcagctccatcctgtttctcctctccttctgggaccccaataacatgaatgctagatcttttgttacagtcacatagttatgttcattgtggtctgaggttacgttcatttttttcct

SEQ ID NO: 1516 - DNA, 120 bp, synthetic construct
  source 1..120: mol_type = other DNA
actaccactgagggtgaagaggaaatccaggaccccatgttacctccactgacactgtggggtatgcttttcaccgttagtgtgaataaatgtctgggcttttgagatatcttttcagat

SEQ ID NO: 1517 - DNA, 120 bp, synthetic construct
  source 1..120: mol_type = other DNA
tgggtaaaataaggctgaaacctactgggctgcattcccacatggttaaggtattctaagtcacaggatgagacagcaggccagcacaaaatataggtcataaagacattgctgataaag

SEQ ID NO: 1518 - DNA, 120 bp, synthetic construct
  source 1..120: mol_type = other DNA
ccaggtgactgccctctgacttcttcactttgtgaatcagtccttcacatcttcctctcttagtagcccagaaaccccaggttctaacttccttgtgacacaggagttaagaagaaatta

SEQ ID NO: 1519 - DNA, 120 bp, synthetic construct
  source 1..120: mol_type = other DNA
tcattgcaagttttccttggagactcttgatggcccaggtttagtttatacctactgtgagagcaagaacttgagtaatgtatggatggacctttttggaaggaaaacaattttcatgga

SEQ ID NO: 1520 - DNA, 120 bp, synthetic construct
  source 1..120: mol_type = other DNA
gatgttcaaggactagagagaaaggataagaatgtattatagacctctagagttggaaaaagaatggtggctgagatcctccagcctagctttggctctgtaatcaaaaagactcagatt

SEQ ID NO: 1521 - DNA, 120 bp, synthetic construct
  source 1..120: mol_type = other DNA
aaaggacaatagaaaagagaaagtgaagattctaacattctgcctataaatgacaacatctcctatatgtgcaaattaggtcattgtaccctaaatagccccgcagctgccctgggcttc

SEQ ID NO: 1522 - DNA, 120 bp, synthetic construct
  source 1..120: mol_type = other DNA
aagaacacaaatctaaacatgtcatttcccagctcaaaaccccaaggttctttctcctcaccttcagaataagccaaactactcaatgataggttccaaatctgcctttctggtttcact

SEQ ID NO: 1523 - DNA, 120 bp, synthetic construct
  source 1..120: mol_type = other DNA
ttactcctcttccctcctccagtccctccaagcctaattcatcacctttggctttgggatcatagtttccaaaccaaggattgtctgaacattgtctgacaatgcccttttttttttttt

SEQ ID NO: 1524 - DNA, 120 bp, synthetic construct
  source 1..120: mol_type = other DNA
cgccatatataatatttttgagacagccaactaagaaactgggattctggttctctccagggtgcaaaatcctgggagaaggaagtgaattctcaggggcccagaaggagtctctaaagg

SEQ ID NO: 1525 - DNA, 120 bp, synthetic construct
  source 1..120: mol_type = other DNA
cctttgtctgtctgtgtttggagaacgaatatctggcagaaaaatgcttgctgtgtttaacatcactatttctaaaacctttagactgtgaccagcaaaagcggcactaaatactaaacc

SEQ ID NO: 1526 - DNA, 120 bp, synthetic construct
  source 1..120: mol_type = other DNA
ctcagttccctgccttcctctcttaggagtttgtttccaacactgtttccttcccgagtccacttcagttccttcatccagttcagcccttttcttcccaaacttcagtctcctcctctg

SEQ ID NO: 1527 - DNA, 120 bp, synthetic construct
  source 1..120: mol_type = other DNA
ctttcccaagggccagcttcttcctggtagtgcttttgtgtacttgtctggttgggacttcgtgtttctttcttgggattgttgtctgggactgcaagcagggtatgtttttatctactg

SEQ ID NO: 1528 - DNA, 120 bp, synthetic construct
  source 1..120: mol_type = other DNA
tgagccctgagacctgagctctgctcccttctctgggctaactcccgcagctgggctgggccgagcctgtgggaacctgcttcttcctctgtgccctggggctgctcccctttgcctctc

SEQ ID NO: 1529 - DNA, 120 bp, synthetic construct
  source 1..120: mol_type = other DNA
agccaacacccagttggtcagtctggtcacagtccagcaaaaagagggactgccactctaacccaccagtgacaccactcttcccggctggatggtcaattagctctggcatgagagaat

SEQ ID NO: 1530 - DNA, 120 bp, synthetic construct
  source 1..120: mol_type = other DNA
atgagcttctgtgtttgctctgtctcagaaactctgtgagggttgtcagggacactgagaggtgggtgtgtgcatgccacatttagcctcgctgtttacagccagttcagtaagtttgtg

SEQ ID NO: 1531 - DNA, 120 bp, synthetic construct
  source 1..120: mol_type = other DNA
atgccatttagaatagttttatgtggggtaagcttcctgggcctgaggaacagagtagggattttcaaactttaatgggcacaggtcacctgggaattgtgttaaaaggcagattttgat

SEQ ID NO: 1532 - DNA, 120 bp, synthetic construct
  source 1..120: mol_type = other DNA
tcgagggaatgctgggtcgaagaggatgtgcatttttaattataatagacattgctagattgctttccaaatagaagataacactcatttctgccattgagcatggtgcctcccttttca

SEQ ID NO: 1533 - DNA, 120 bp, synthetic construct
  source 1..120: mol_type = other DNA
aaatatagctgatgctgttaaacaatgactgttgttgttgttttactgttattatccccaaagcggcccattctgtctgttgctgtcagctatgactcagtcccctgattaacttacgca

SEQ ID NO: 1534 - DNA, 120 bp, synthetic construct
  source 1..120: mol_type = other DNA
gtggtatcaccattgcctggttgcctaggctataagttaagatgatatccttgattcctttttttctctcacctccttccaaagcatcagcagccccgtctgttctacctccatagtgtt

SEQ ID NO: 1535 - DNA, 120 bp, synthetic construct
  source 1..120: mol_type = other DNA
tgaatgaacagagggaatgggctgaaatgaaggggaagctgaggcaggggtgcagggctgtgaggattggggagaatctgggcacaatgggatgataggcttggagacaaatggatggag

SEQ ID NO: 1536 - DNA, 120 bp, synthetic construct
  source 1..120: mol_type = other DNA
tcaagtaatatgatttacaaattgcaacatgaaacaaaatgaactgaacaaatggagaaatctagattacatactccgtgggttgcgtctacccagggcctggatagctcagttggtaga

SEQ ID NO: 1537 - DNA, 120 bp, synthetic construct
  source 1..120: mol_type = other DNA
acactgtatgaaaaaggcacccctttgctaacacacattgttggaaattgctgcaataaatatacacatcatagattgaaatggtgccccttagaggtggtgcctttgtgctggatgtga

SEQ ID NO: 1538 - DNA, 120 bp, synthetic construct
  source 1..120: mol_type = other DNA
agtatgacagtactggttgttaaaatattgaaatacttctgtattagttgagaaatagcctcttctctaagcctccagatacctgtcctccacctccccacaatccagcaactatagggt

SEQ ID NO: 1539 - DNA, 120 bp, synthetic construct
  source 1..120: mol_type = other DNA
aacaaaaaaaaaacggttgatagttatggactgggcagatgagggttagaatctcattgtgggacagggaagttacctccatgctcttgagcttcactttctctgcctgtaagatggtgc

SEQ ID NO: 1540 - DNA, 120 bp, synthetic construct
  source 1..120: mol_type = other DNA
ttgctttgtattagactcaccatgtttgttccttcatctatcctccatcacccatccttccatccatagtcatacatccttgcatccatccatcaatcttccatcatctgtctttctatc

SEQ ID NO: 1541 - DNA, 120 bp, synthetic construct
  source 1..120: mol_type = other DNA
aattcttcttccagccaagatttatctcacagtctcttgagagaccctagggaggccctaaaagagtaagactttatgacagttttgctcaaccatattcattgccttgaaaagctctgg

SEQ ID NO: 1542 - DNA, 120 bp, synthetic construct
  source 1..120: mol_type = other DNA
cttagtcatttgtaaccgtgttaatccgtttgaccctgtgaccgcctagcaaacgaacttctttctccaggtgcacctgtgtgaggtcgacagccctcaagatctggttagtcttgattt

SEQ ID NO: 1543 - DNA, 120 bp, synthetic construct
  source 1..120: mol_type = other DNA
tcaactttgtacatcgggacctggccacgcggaactgcctagttggggaaaatttcaccatcaaaatcgcagactttggcatgagccggaacctctatgctggggactattaccgtgtgc

SEQ ID NO: 1544 - DNA, 120 bp, synthetic construct
  source 1..120: mol_type = other DNA
aggtcagagtggaggagagggaagatgggtccgaggcgggggacagaaggggcagagttgtcatcttggagactaaagaatatttgttccctgactctcatccacactgccacaatgcag

SEQ ID NO: 1545 - DNA, 120 bp, synthetic construct
  source 1..120: mol_type = other DNA
ggttggacatctctagtgtagctgccacattgatttttctataatcacttggggtttgtacatttttggggggagagacacagatttttacactaatatatggacctagcttgaggcaat

SEQ ID NO: 1546 - DNA, 120 bp, synthetic construct
  source 1..120: mol_type = other DNA
tcataattggaggaaatgctaaacttctattagaggttagtaaaaggtgtaatttctttttcttgcccaaattctagaacccatctggctccccagggtctggaaatcccaggggagaat

SEQ ID NO: 1547 - DNA, 120 bp, synthetic construct
  source 1..120: mol_type = other DNA
agcaagaaaagagacaaaacaccttacctacagagaaaaccaatttgcataacagtgggtatcttatcagaaatcacagaagtcagaaagagtggcacaacagttttcaaggaccgaaag

SEQ ID NO: 1548 - DNA, 120 bp, synthetic construct
  source 1..120: mol_type = other DNA
gatcacagtaaagataaatcaatgtgaagttgaattaataggcccttggggcctaggtcccgaatctaatagtcctgctaaaacttacacaggtcaaaccactgtgcactatgatttaag

SEQ ID NO: 1549 - DNA, 120 bp, synthetic construct
  source 1..120: mol_type = other DNA
tcagcagtctttcctgacttccccaaccaggtcaaattccctactgataatctcagaggacatgaatctcttctttgtggcacttactacgtgtgtaattttacatatctttttatacct

SEQ ID NO: 1550 - DNA, 120 bp, synthetic construct
  source 1..120: mol_type = other DNA
tggccctggctctctgttctttctctccaggatgctgcctgagaggaggaggtcatgagctccctatcacaggaattttcttttttgaactaccatgcccactaacatgctggccaacac

SEQ ID NO: 1551 - DNA, 120 bp, synthetic construct
  source 1..120: mol_type = other DNA
cccgggttcaagtgattctcctgcctcagcctcccaagtagctgggattacaggcgcccgtcaccatgccagctaatttttgtgtttttagtagagacaaggtttctactaaaatgttga

SEQ ID NO: 1552 - DNA, 120 bp, synthetic construct
  source 1..120: mol_type = other DNA
ttttttttttttaagctgctccttgctgagcagggctaactagtaagcagtggtctgtcccaatctttctattatgtttctttttcttattgctttgtaacagctttttgtattttgttt

SEQ ID NO: 1553 - DNA, 120 bp, synthetic construct
  source 1..120: mol_type = other DNA
gggtgaagacctccacttttgtagtaggttcataaatcaaatcagagcaaatagttggtgtcttaaaaactgtatttatctgggtcttctaagtaaacggtttgaggagtggtggaggca

SEQ ID NO: 1554 - DNA, 120 bp, synthetic construct
  source 1..120: mol_type = other DNA
ttctcatcctcttcacttttccactcctccccttacctcccttctcttctgaattctccattctgggctcttgcctgtgaaatctttctttgctttccccatcttttcctcgcatttttt

SEQ ID NO: 1555 - DNA, 120 bp, synthetic construct
  source 1..120: mol_type = other DNA
ttgtccctgtttagccaaagatgagacaagtcattgaaatacaaaatgatcttgcaaacactggacagttaacaattctgtcacttggtaattgagggaagactggagttgaagggcaga

SEQ ID NO: 1556 - DNA, 120 bp, synthetic construct
  source 1..120: mol_type = other DNA
taatgaggctctgataagtaatgcagtaaagaatttgtcttaggaagatactaatttcactctgtggaacagtgttccaagggtcagcaagttcagaacaggcagagatggtggctttta

SEQ ID NO: 1557 - DNA, 120 bp, synthetic construct
  source 1..120: mol_type = other DNA
tcaagatcagaggacattagctggaaaaggcaagctgagtagaatatagccagagataccaagaaaaaacgtgagtggacaagtggggatagtagtctttctctgcatatcaccatcatt

SEQ ID NO: 1558 - DNA, 120 bp, synthetic construct
  source 1..120: mol_type = other DNA
tgaaatattagtggcccatggaaccctaagacctggaaaaccacattccaatccaagctatttactttgaagaaaaggaaaccaaaagcataaaaggtaacatgtcttatccatggcagc

SEQ ID NO: 1559 - DNA, 120 bp, synthetic construct
  source 1..120: mol_type = other DNA
gtaggagaggcaaagtgacaaaaaggtaaagatgacacacatcactttaactgataaaataatgataccagtacacagtgataaattaaataaatatgtaatactcagacaaatcactaa

SEQ ID NO: 1560 - DNA, 120 bp, synthetic construct
  source 1..120: mol_type = other DNA
agaagataagaatgaaaacagaacgaacagagatggagaaagaaagaatgaatgtatggggttgggggtgggtgggttgtgttttggaccccagctggaaacctctgttcctcaggatta

SEQ ID NO: 1561 - DNA, 120 bp, synthetic construct
  source 1..120: mol_type = other DNA
aaagaaaatagtagctgctgctattttaaagaaagaaaaacaaaacattactggaaagggcgaatgtgccagaaaaggaatatcccacgttgctgggagcagcaacgtgggataacagct

SEQ ID NO: 1562 - DNA, 120 bp, synthetic construct
  source 1..120: mol_type = other DNA
ggtgagggaataattcacagtaatttgtattaggcctttctgaatatggctggatcacactggtgttaagatgaacccctgagcagacaagcatagagaattagtttgtaaaattgcggt

SEQ ID NO: 1563 - DNA, 120 bp, synthetic construct
  source 1..120: mol_type = other DNA
gcagaatccattaaggcctggaggcctaaggagttagtattgtatgaaatccctacgaaacccggtgaaaagaaaggtaagtagaataagtaagaaggccttttctttcacatatgtgtt

SEQ ID NO: 1564 - DNA, 120 bp, synthetic construct
  source 1..120: mol_type = other DNA
tccctggttcagatcatgcaggaattgctacacaagtatgtcttttgttacctgttccttttcttgggcaaaagcaatttcttcccccaaagcaaccaagcaacctgactctgttcattt

SEQ ID NO: 1565 - DNA, 120 bp, synthetic construct
  source 1..120: mol_type = other DNA
ttttgcctcttttaatatcttagaaaaccccatactgggtttgtaagtccatttctattagcctctagaggctagatcaatgccatcctcacttgattttcctccaacacctggcattgc

SEQ ID NO: 1566 - DNA, 120 bp, synthetic construct
  source 1..120: mol_type = other DNA
ctgggggatgtacaaaaagtgcatgtggtcactgccctttgagagtgtggtgtgattcttcaggagtgcgctacccaggaaagagatcagttctaaggtatgttttgttttgtttgtttg

SEQ ID NO: 1567 - DNA, 120 bp, synthetic construct
  source 1..120: mol_type = other DNA
tcttctcttgggttttaaatggtggctctttctctcttgcttctacttccttttcctgagacttctctcagtggttctgattggactccctcctcctcttatagtttttctgtagctcag

SEQ ID NO: 1568 - DNA, 120 bp, synthetic construct
  source 1..120: mol_type = other DNA
tttgtctctaggcccaaaagcctaaaatatctacattctggccccttaagagtttgctgaccttgctctagcttgctaccttccactttctaccttcttattcctggggttctcacgccc

SEQ ID NO: 1569 - DNA, 120 bp, synthetic construct
  source 1..120: mol_type = other DNA
aatcttggcaagaggcttgggaggtcctttctgagttttaaaatgacctcagaggccactcgtcctatctgtggaggtgcggccgtgcaggaagggcaacattgtctaaagtcccctttc

SEQ ID NO: 1570 - DNA, 120 bp, synthetic construct
  source 1..120: mol_type = other DNA
caaggatgttgaagaactcaaaatcatcttcagctaacagaattcagtcaacatttaaagaagactccacacaagaaaagcagaacacacagaacacaggtcaagatggaacatattctg

SEQ ID NO: 1571 - DNA, 120 bp, synthetic construct
  source 1..120: mol_type = other DNA
ttctgtgactccagtgttccccaaaccttgtcctcccttctaacccctaatgtggtcctttccacgttgctgattcctttttcctaattcacttcctaccctacccccaaaagtatggag

SEQ ID NO: 1572 - DNA, 120 bp, synthetic construct
  source 1..120: mol_type = other DNA
tttctgcaacaagatctggaatgctcttcgctttatcctcaatgctttaggggagaaatttgtgccacagcctgctgaggaggtaagagaaaacagaggtgcttgggagtagggtagtca

SEQ ID NO: 1573 - DNA, 120 bp, synthetic construct
  source 1..120: mol_type = other DNA
agctcagccttttaaaaacctctgtcccctgttgataagcaaaaaactcaatgatttttttccctaaactacatgtttccctggaaatcctgtccctgtgtactgcagagaattgctgtc

SEQ ID NO: 1574 - DNA, 120 bp, synthetic construct
  source 1..120: mol_type = other DNA
gccatttcaatcacagcaactaaacaggcatcaaacactgatcatctaaaacctcttaaatgacgcctcactttttgtcatgttccttgagatagtggattttctgtggtgctgaggaca

SEQ ID NO: 1575 - DNA, 120 bp, synthetic construct
  source 1..120: mol_type = other DNA
atcagttttcctccctctcagacctgtctttgaggacaaacagatttgtcagctgtcagggtgcagtgggacgtcagagactatgtggtccatcgccttcattgtgtaaatgaggacaca

SEQ ID NO: 1576 - DNA, 120 bp, synthetic construct
  source 1..120: mol_type = other DNA
tcctgggctgggtcctctgtggtgctagatgtacaatgccatttaatcctactgaaaacctcatgaggcgggtgttagctccattttggagatttttatttttactttatttttgggaca

SEQ ID NO: 1577 - DNA, 120 bp, synthetic construct
  source 1..120: mol_type = other DNA
tttttttttttttttgagcacctgctatggatgggctgggccttattctggacacttagattcatcagtgagtgaaacaaaattctgtgcccttgtagtactttccttctagcaggacag

SEQ ID NO: 1578 - DNA, 120 bp, synthetic construct
  source 1..120: mol_type = other DNA
tttttaagtgttttttttccaccctgccattttctatgctcccctcatcttcagtgatgctccatactgaactcttgttgtcttctgtctccaaaggagtcagtctccaatttcatatgg

SEQ ID NO: 1579 - DNA, 120 bp, synthetic construct
  source 1..120: mol_type = other DNA
cgacctataagacaggctgtgatatgtccctaagtagcttccctgtgtgatcctcacaacaacctgatggtgcaggaataatgagaaaaactcagaattgtgtaaaaacaaaacaaaaca

SEQ ID NO: 1580 - DNA, 120 bp, synthetic construct
  source 1..120: mol_type = other DNA
aaataggataatgatacctagtatgccacattcaagactgctgcaagcatcgaaatagggatgcaggagaaaagcaggacttcaataaatgttgcttctctttattcccaggtgttccaa

SEQ ID NO: 1581 - DNA, 120 bp, synthetic construct
  source 1..120: mol_type = other DNA
gaaggtggagaggagccgagaaccagcaggtggggaaagggaagaggcaggctagagttaaaaaatgaaggaggaaaagcatcctcaagattattcagaatatatatatatataatatac

SEQ ID NO: 1582 - DNA, 120 bp, synthetic construct
  source 1..120: mol_type = other DNA
aaacacacagccccatctttccccttccaaagaactaccttttcaagcaattccaggaagctggactcataggaggaatttgtcagaaaagactccttcagcttcagttgcaaagtcata

SEQ ID NO: 1583 - DNA, 120 bp, synthetic construct
  source 1..120: mol_type = other DNA
taatggactgtgaacactgcttccccagccttggtggctttctagatgagaaatctggtcatgggaacttccattgctgaacattctgttttacttgctctaacgcatcctggattgtca

SEQ ID NO: 1584 - DNA, 120 bp, synthetic construct
  source 1..120: mol_type = other DNA
atcactaagtattcctttatagcgcataagcgcctgtgaagtaggtactagattaccccgattttagaggtgaaattaagacttaggccttgtgacttgccagagaatgcacagctcagc

SEQ ID NO: 1585 - DNA, 120 bp, synthetic construct
  source 1..120: mol_type = other DNA
agtggaagcagctcccttgcctttgtggctatacaagggcctctctttctgttttccaattcatcacctttttctgtcatgattagttcctgttgtatcctaagacttttttggctactt

SEQ ID NO: 1586 - DNA, 120 bp, synthetic construct
  source 1..120: mol_type = other DNA
taacattatttcatcagtttattccaaaaacttgctggagtcttgcctgtgggtgcatttgatgtgacctctgctttgctcttgcttgaatctcttctgttttttccctctgccctctta

SEQ ID NO: 1587 - DNA, 120 bp, synthetic construct
  source 1..120: mol_type = other DNA
aaaggttttcatctttcttcctcatgatctaatctctctgttcagggcgagaggcattccttccagagatcacccctccttcttccatcatcctcctcccctccctttcattcctagaag

SEQ ID NO: 1588 - DNA, 120 bp, synthetic construct
  source 1..120: mol_type = other DNA
gcttatgcaaagagagcactaatggtgcttggcatgtattatagtaagtgctcaatatacagccttattcattattattgctgtttttgctcaaagaggaatgctgagtgcctgggttgc

SEQ ID NO: 1589 - DNA, 120 bp, synthetic construct
  source 1..120: mol_type = other DNA
aggctcatttatcctcatctgtaaagtgagggtgacaggtgataactcataggtgaggtgcttagtacattcttcagtacatagaaatgcccaaacaatggtagttggcagagttgtttc

SEQ ID NO: 1590 - DNA, 120 bp, synthetic construct
  source 1..120: mol_type = other DNA
gtgacatatgtccctgtggttctgtgtcttgtctctgtcactgcctctgcactctccacatattgttgtatgacctctgaacatcatgaagcacctttctctgcagcgagggtcattcga

SEQ ID NO: 1591 - DNA, 120 bp, synthetic construct
  source 1..120: mol_type = other DNA
tgcctcctcttccttctagcttcttggggggcaggtaagatgcccacaggggatacagaagacagaaacagcttgtttcttagtgttcatagcgttggacaacaaatagaaatgaatgaa

SEQ ID NO: 1592 - DNA, 120 bp, synthetic construct
  source 1..120: mol_type = other DNA
aaatacagacatttgtaaaaacagttatgcttaagaagccagggaaaggagtaacagtataggaatttgcctttcctttttttcccttcaaccttgttcttgggtggggtgggagaaggg

SEQ ID NO: 1593 - DNA, 120 bp, synthetic construct
  source 1..120: mol_type = other DNA
tgcgtcaaaggctctgtccctgtcttacagttgggaaacatctcaggactttgatgggaaaatgactatggacaagttcgacgaacaaaacataccctaaagataagatgaaattatgaa

SEQ ID NO: 1594 - DNA, 120 bp, synthetic construct
  source 1..120: mol_type = other DNA
attaaagcatctgagggagcacaggtgcagtctagattaaatcatctgagggagcacaggtgcagtctagattaaattatcacagggaggcacaggtgcagtccagattaaatcatcaca

SEQ ID NO: 1595 - DNA, 120 bp, synthetic construct
  source 1..120: mol_type = other DNA
ctcatactgtataggtattttaacaaacatttacccacattattgcaaatggagcatgccatttatgggggtaaggataccaggaaacactagagatgctcttttgggacagcgtgccct

SEQ ID NO: 1596 - DNA, 120 bp, synthetic construct
  source 1..120: mol_type = other DNA
taaaatcttgttatctgagtctagttatggactgtgatcctgtggtttaatgacaactggtatcccagaattggtgggccagaggccttctttcaacgtcttttaatctcagagctcaat

SEQ ID NO: 1597 - DNA, 120 bp, synthetic construct
  source 1..120: mol_type = other DNA
cattgtggaaatttaattgtatttatcacatatcagaaagtgatgagtgctgtgttattaaaacacagcagagaaagtggcccaggaatgcagaggctgctgttttcaagaaggtggcca

SEQ ID NO: 1598 - DNA, 120 bp, synthetic construct
  source 1..120: mol_type = other DNA
cttttcctccgtgaaatgtaaatttctcagatgtaaaataggggaagttgaccgcttctaaagagccttatggagcattgggagatcaatcaccatagaagagaatccagaaagagaatg

SEQ ID NO: 1599 - DNA, 120 bp, synthetic construct
  source 1..120: mol_type = other DNA
ctcaatttctcacactgttacatttgggatggtgttagaatgttatggaaaggtgaagagtctaacgtttactcctggtcttctcagctatgccatagaaagaagactccattccataag

SEQ ID NO: 1600 - DNA, 120 bp, synthetic construct
  source 1..120: mol_type = other DNA
aatcagataaaactggaagacctttggaaaagtccatgagtactttggataagacaagtaccagctcacataagactacaacttccttccacaactcaggcaattcacagaccaagcaaa

SEQ ID NO: 1601 - DNA, 120 bp, synthetic construct
  source 1..120: mol_type = other DNA
agaaaacagagaaacgacagccaacgagaagaccacactatccccagtagagcctacagaaaatagagaaacaacagccaatgagaagaccacaccatccccagcagagcctacagaaaa

SEQ ID NO: 1602 - DNA, 120 bp, synthetic construct
  source 1..120: mol_type = other DNA
gcctacagaaaatggagacaggactccattggccaatgagaagaccacaccatctctagcagagcctacagaaaatggaaaaaggaccccatttgccaatgagaagaccacatcatcctc

SEQ ID NO: 1603 - DNA, 120 bp, synthetic construct
  source 1..120: mol_type = other DNA
ggttaaagaattaaaacaaggtctacacaatctattctgaaaaaaacagaagaggacaaaaaactttccatttatttatgaagttaatagtatcctgatgctaaaaccaggtaaatacag

SEQ ID NO: 1604 - DNA, 120 bp, synthetic construct
  source 1..120: mol_type = other DNA
cagaaaaaacagcagcagtcacaaagactataaaaccttcagtcaaggtcacaggagacaaatctctcactactacctcttctcatctaaataaaactgaagttactcatcaggtgccca

SEQ ID NO: 1605 - DNA, 120 bp, synthetic construct
  source 1..120: mol_type = other DNA
agaatactgacggttaccagtattaacccttcatctgttcttgaaactggttggggaatgaggtgataagcaaggagggtgtaagtttaggggacaaagaagaaagaatgaataatacga

SEQ ID NO: 1606 - DNA, 120 bp, synthetic construct
  source 1..120: mol_type = other DNA
ttcaagttttcctccttgtaggcatttcatctgtgtgtgttttctggattttctctctctcttcttatggccatttcaccttattactgattgggtagagggggaaaaggagaatgatga

SEQ ID NO: 1607 - DNA, 120 bp, synthetic construct
  source 1..120: mol_type = other DNA
caattcaaaaacaaaacgaaataaaaacatctctgcctctagagtcctaaacatccaaccggacagacccctcccctatcaagacaccaaaatgcagcactggaggtcaaagggtgtata

SEQ ID NO: 1608 - DNA, 120 bp, synthetic construct
  source 1..120: mol_type = other DNA
tcacgtacatcgcacctgtgatcctccgatcaccctgcgagttacgaggcctgctttacaagccttataagaagttacagaccttataagagttcttataaagcttgctttacagatgag

SEQ ID NO: 1609 - DNA, 120 bp, synthetic construct
  source 1..120: mol_type = other DNA
acactgaggccacaaaaagtctgaaggagacaagggttcctgtcccaggcattctgtttgcttttcttattctcattcttttgcaaaagcaaaaagcaagcaaagatgatgaacttcttt

SEQ ID NO: 1610 - DNA, 120 bp, synthetic construct
  source 1..120: mol_type = other DNA
cctcctccctgcgtctctgtgagcttgttcattttaagaggcccaaattattactgcaacaggcaacttccaaactcatattaagtctaccttggctctgaaatccagtcctttattttc

SEQ ID NO: 1611 - DNA, 120 bp, synthetic construct
  source 1..120: mol_type = other DNA
tccccttcatcaccaagcctcttgaaacaatcccctacaaacactatcttcatgtccttatctcctactctctgtgtgtatgtattttctctgcaagttttaccagagcaatccatgtaa

SEQ ID NO: 1612 - DNA, 120 bp, synthetic construct
  source 1..120: mol_type = other DNA
tttaggaagtaattaaagttaatggggtcataagagtggtgcccgaattcaatgggactgtggccttatcaaaggagaaagagagttctttctgtcttcactatgtgaggacacagcaag

SEQ ID NO: 1613 - DNA, 120 bp, synthetic construct
  source 1..120: mol_type = other DNA
ctcttaaacaagctccaagtccatgaaatgccgtgtcagaatttttcctttcctttttgcatagcaaagtacttgcacaatcccaaatatttgtcttcctgagcagcagctacaaagatg

SEQ ID NO: 1614 - DNA, 120 bp, synthetic construct
  source 1..120: mol_type = other DNA
tgtatagtattggcaaggagataggcacgtggttaatagagagaatggaaaaataaacctacacaaatattctcaactggtttttgacaaagttgcctaagtagtaattccatggaagaa

SEQ ID NO: 1615 - DNA, 120 bp, synthetic construct
  source 1..120: mol_type = other DNA
caaaacaaaaacaagaaaacattgtggcaatttgctcagaagcgctacttttccatattcagaagggcactgtcacagtacggcttccattttgaaaaaccagtctgcaggtatttcttt

SEQ ID NO: 1616 - DNA, 120 bp, synthetic construct
  source 1..120: mol_type = other DNA
gaataaatgaatgagaaggcctggatgcagagagtgtatatcagagagaaacccagactaatcccccagattcttctctaatccattcccagtgctaccacttaatctagtatgttatac

SEQ ID NO: 1617 - DNA, 120 bp, synthetic construct
  source 1..120: mol_type = other DNA
taattaaatatcaaaaatgtaaagtaggtgtcgtatttgactaaaaattgatatttttcaggaaggactatgcccccagggcccactgtagcctttgagaccatggtggagtctgtgtcc

SEQ ID NO: 1618 - DNA, 120 bp, synthetic construct
  source 1..120: mol_type = other DNA
ccacactctatcagaatactatagactccgtgaccaagtctgtgcccaccatggactctaccatagcctccaagagcaccactctctccaagatagtatctgtgcctactgcagtcttta

SEQ ID NO: 1619 - DNA, 120 bp, synthetic construct
  source 1..120: mol_type = other DNA
tttctactcagaccatcaccaaaacagttgtgtcaggtactaacccccatgtcttctctgatcacacacattttaattccaatggcaaccactagctcttcacctgtttctatcatctct

SEQ ID NO: 1620 - DNA, 120 bp, synthetic construct
  source 1..120: mol_type = other DNA
taccataatggacagcagaggcaaagtggcaatcagaatagtccaactcatgcagagctctggcattggctaattaatcacagtgttcctagaagtgaaattgataggaagcctattgca

SEQ ID NO: 1621 - DNA, 120 bp, synthetic construct
  source 1..120: mol_type = other DNA
ggaagccattagagctgcctctacctagaaaaatagtaaataaaaaaaaaaatcacatcccaggagggactgcggagattagtgccaccatcaaggacttgaaagacacaggggtggtga

SEQ ID NO: 1622 - DNA, 120 bp, synthetic construct
  source 1..120: mol_type = other DNA
agcagaggcctctaggattttggaacaagtccctgccatcttctgcagataactactctccttttgagagacagctcttggcctattactgggctttggtggaaactgaacatttgacta

SEQ ID NO: 1623 - DNA, 120 bp, synthetic construct
  source 1..120: mol_type = other DNA
agagaccaacactgagccctcagtatagcaccattcctcaggatgatcagccagctgattactggattactggctggacttctttcatcatgcaaagggcagaggtttgtcctcactgga

SEQ ID NO: 1624 - DNA, 120 bp, synthetic construct
  source 1..120: mol_type = other DNA
gctaaagggaaagggaatacagaatgggtagcagaagaaggtagccatcaataccaactatgactgcgtgaccagctgcagaaagagcactgtaattgtcatgagtatttcctccttctt

SEQ ID NO: 1625 - DNA, 120 bp, synthetic construct
  source 1..120: mol_type = other DNA
gacaagaactctggtgagttcttctacaggaaaatcagtctcttgtgtgtgactaccaaaatcatctaaaatgttgacggtgtcaaagagataataaatgcatccccacccctgatgtaa

SEQ ID NO: 1626 - DNA, 120 bp, synthetic construct
  source 1..120: mol_type = other DNA
aatccaaatcatatcaccttgctccagtctaagaccaaacaattatgttcattctctggcactttccatcagcaagccggttgcatctgattctatcctcttcgttctgagcaccctcac

SEQ ID NO: 1627 - DNA, 120 bp, synthetic construct
  source 1..120: mol_type = other DNA
ggagctgaggagcttctcaccaaacaacggaaatgtcattacagtattgggggaaatgtcattatagtattgggggaaatgtcattatagtattggaggaaagtgtggatttttggtgaa

SEQ ID NO: 1628 - DNA, 120 bp, synthetic construct
  source 1..120: mol_type = other DNA
gaagggggccccaagtgagaggaaagtgtctgggtatgaataggagagcattgagaatatgatggaaaatgtgtcttataaaatagctgggaatgtaacactagaaaaaacatctttgga

SEQ ID NO: 1629 - DNA, 120 bp, synthetic construct
  source 1..120: mol_type = other DNA
atgtgactcaccagccatgagcaaccccctaaatgtttaagataaagatgtaatattagttaactagcattttattagctatctactaggtatgaggtccagggcccagagtgcttagag

SEQ ID NO: 1630 - DNA, 120 bp, synthetic construct
  source 1..120: mol_type = other DNA
ggcccacagtgttttttagatagttctccaacctttagctctttatggcctgtctcttatttttctttatctttaaaaattgaggtgtaattcttaccaataaaaaatgataagtatgca

SEQ ID NO: 1631 - DNA, 120 bp, synthetic construct
  source 1..120: mol_type = other DNA
tgtacctggccttatgaacttttatttatttttacctgacctcatagacatgcaacctttttggttgatttacacaataaaagattccctactcttagctgactctgttcccaggtacag

SEQ ID NO: 1632 - DNA, 120 bp, synthetic construct
  source 1..120: mol_type = other DNA
tatttttctcttttagaaggatctttctttaccctgacaaatagaggcatttataacctccatgacaacagccttgaccttggtttatacctggactcagtcctgggctctgggacattc

SEQ ID NO: 1633 - DNA, 120 bp, synthetic construct
  source 1..120: mol_type = other DNA
atgaaagtatggaatgctaaaattaaagactaaataggacccaggaggtaagggaagtactgaagccaacttttgcaaaacccaaagaacttaagcttcgggtattacagcttcagctgg

SEQ ID NO: 1634 - DNA, 120 bp, synthetic construct
  source 1..120: mol_type = other DNA
tgctagtgccactgcagccttgatctcgacagataacattccaagaaaaataaatttatagtcatgattctcaaatcataagtgaaaacagacaccctgagtgaaaaccagcaaggaaga

SEQ ID NO: 1635 - DNA, 120 bp, synthetic construct
  source 1..120: mol_type = other DNA
caggctggagtgcaatggcacaatcttggctcactgcaacctccgtctcccaggttcaagcaattctcctacctcagcttctcgagtagctgggattacaggcgcccgtcaccacactgg

SEQ ID NO: 1636 - DNA, 120 bp, synthetic construct
  source 1..120: mol_type = other DNA
gtctgcattaccttccttcaaacaaaaaaaaaaaatgtatcttataacgaacatatggtttgtccctggggcacacaaccagtcttcagctaagcaggtttcactagacaatatctctcc

SEQ ID NO: 1637 - DNA, 120 bp, synthetic construct
  source 1..120: mol_type = other DNA
ttgaatccaggatctcagtttctaaataattctggaagaagaaaattcttagagtgctattggcttttcagctgcagaatactggcacatcagaagaattgctgggagtccaggacccaa

SEQ ID NO: 1638 - DNA, 120 bp, synthetic construct
  source 1..120: mol_type = other DNA
agaccccaaacatgttttcattatctctcttcattatgtcttctggatctctcttcccctgttccttcaatgtgcattgttgagtgcttactgcatactcagtaatactccatttgtctt

SEQ ID NO: 1639 - DNA, 120 bp, synthetic construct
  source 1..120: mol_type = other DNA
aaaggaaatgttctccttatgtttggtctactattgcatttagaagctggtgagtgattttatttaaaatcgggtggtctgagaacctttgaggagttgggagagaaatgtgaccactac

SEQ ID NO: 1640 - DNA, 120 bp, synthetic construct
  source 1..120: mol_type = other DNA
aataaaataaaataaaataccactcttctatattctacaaactcaatttctctcctacccctacacctaattcctcgtcagcttcccacgtacaggctggggaggttgaatgtcttcatc

SEQ ID NO: 1641 - DNA, 120 bp, synthetic construct
  source 1..120: mol_type = other DNA
taagcagaaagtatatacacacaatatatatttgtcattatatgatttcttcagcaacaaattccaatgagactagcacctctgccaacactggatccagtgtgatctccagtggagcca

SEQ ID NO: 1642 - DNA, 120 bp, synthetic construct
  source 1..120: mol_type = other DNA
cacagtcaccaattctgagtccagcacaccctccagtggggccaacacagccaccaactctgagtccagtacgacctccagtggggccaacacagccaccaactctgactccagcacaac

SEQ ID NO: 1643 - DNA, 120 bp, synthetic construct
  source 1..120: mol_type = other DNA
tattcctcacctttcttgcctttaccagacactggaaagagaatactatattgctcatttagctaagaaataaatacatctcatctaacacacacgacaaagagaagctgtgcgtgcccc

SEQ ID NO: 1644 - DNA, 120 bp, synthetic construct
  source 1..120: mol_type = other DNA
tagaaactgctccatcttccaccacttattgggtttctccagtgtcagcaaaccaaagaattggatcttaccaatgcggctataggaaaacagcctgttgcatggtaagagtgataccat

SEQ ID NO: 1645 - DNA, 120 bp, synthetic construct
  source 1..120: mol_type = other DNA
ctagcagcagaagccaaaattaaatgtctagagaaggaattgcaactagaaaaagacgtgtacctctccatgtctctcctcacatccaacttagcaaacaaaattgaagaccaagagaca

SEQ ID NO: 1646 - DNA, 120 bp, synthetic construct
  source 1..120: mol_type = other DNA
taaaacagttttttcctgcagggatgaaaaataaattgctgaagggtgcaccaggagaatggcacaacccttggctcatgttattgagtcctataaatgggacaagaagtatatgatgtg

SEQ ID NO: 1647 - DNA, 120 bp, synthetic construct
  source 1..120: mol_type = other DNA
gacctcagtgttttattttaacgaggagaatggagtgactgatgcaatacaggaaaatgaatcaatcgtatggactatcagtagggaatgtgttgatccttattgatttcgctccttccg

SEQ ID NO: 1648 - DNA, 120 bp, synthetic construct
  source 1..120: mol_type = other DNA
gttaaaatatggaaaatatgaaaaatgctgtgttagtagccttatggagggaagtacagactgaagggctgttttgtcccttcatttctgcccctctagcagaagaggaagatgactcaa

SEQ ID NO: 1649 - DNA, 120 bp, synthetic construct
  source 1..120: mol_type = other DNA
aaaccgccatcgtcatcatggcccattctcaatgagctgttgggtacacctcccagacggggtggtggcctggcagaggggctcctcacttcccagtagtggcggccagtcagaggcgcc

SEQ ID NO: 1650 - DNA, 120 bp, synthetic construct
  source 1..120: mol_type = other DNA
ctacatggcgttgtcaacattaaatgattcatattgtccagggggtatgctgaaataagtgcaattattatcctcccaataagtgcaactattatccacccagcacaaagcccatgaaag

SEQ ID NO: 1651 - DNA, 120 bp, synthetic construct
  source 1..120: mol_type = other DNA
cctggccacgtccatgtgcttttataacagaatgatttatattcctttgggtatatacccagtaatgggattgctggatcagatggtatctgtctttaagtctttgaagaatcaccacag

SEQ ID NO: 1652 - DNA, 120 bp, synthetic construct
  source 1..120: mol_type = other DNA
catgttgttttggtttgcagtaatgtcttatggtattgggtgctcatctatggaatggagatgggccatcaatcctcagaagatgcaaggcccagagcccacagtgaagattttttgttt

SEQ ID NO: 1653 - DNA, 120 bp, synthetic construct
  source 1..120: mol_type = other DNA
taaatggcatgattatttgcaacaaggaagaatgctagcaatgagtcccttaagcccagaattacatactgcattaggctctgttatgacgtgaacaaacaaaggataccacctgaccct

SEQ ID NO: 1654 - DNA, 120 bp, synthetic construct
  source 1..120: mol_type = other DNA
taccatgttctctattgtagatcatattgagcaggacacattcagatattcagaaggctgtccaccatgtaacagattggcaagtggattatttagatactgtccctgtaagccaaggaa

SEQ ID NO: 1655 - DNA, 120 bp, synthetic construct
  source 1..120: mol_type = other DNA
actatgctataatataataaaatactcattgggcatgttacagaacggacactgtgtgcaggaatcttttggttggccccaaatggaacttcctggatatgtggtaccaatttatggcct

SEQ ID NO: 1656 - DNA, 120 bp, synthetic construct
  source 1..120: mol_type = other DNA
tatattcctgatgaatcagttaatatcgctaaattaatgactgatataaaagcccacataaccaagctctcagacccctactttgaataattggcttcacagctggtttgggtcctgggg

SEQ ID NO: 1657 - DNA, 120 bp, synthetic construct
  source 1..120: mol_type = other DNA
gctcagggttcgtgagttcaccaatcgacactctgtatctagctgctctggtggggccttgaagaaccttcgtgtccacactctgtatctagctaatctggtggggacgtggagaacctt

SEQ ID NO: 1658 - DNA, 120 bp, synthetic construct
  source 1..120: mol_type = other DNA
atttgttgtttactcagccggaatattaaaggttagatttgattgaggaaaatcacagtcagaagaaaacctgagagcgatgcactcagcatttcatcttaagggtctttagctggtgtg

SEQ ID NO: 1659 - DNA, 120 bp, synthetic construct
  source 1..120: mol_type = other DNA
tagtccttgttcaaaatttcttttggagaaactggatttgttagccacttatttcattcagcctttgttccataaaagggtcatacatgtaaagtggctcccaaacgctgaaggagccga

SEQ ID NO: 1660 - DNA, 120 bp, synthetic construct
  source 1..120: mol_type = other DNA
gctagtaatccggaagagcaagcgcgaaaaataactcaaacagacacaattatacaggaataaaaatcacccggcaaatataatacatttggaggatagatccaggaagactaacgtgca

SEQ ID NO: 1661 - DNA, 120 bp, synthetic construct
  source 1..120: mol_type = other DNA
ttatttccaaaaataaacaacaaatgactcaaatgaatgggcattttgagctagaggaaggagaaaaggggggagtccctggtgagcaatttaccttgtgattgattcacatagttgtgc

SEQ ID NO: 1662 - DNA, 120 bp, synthetic construct
  source 1..120: mol_type = other DNA
tcctgttttctcctgcctcatataaattcctgtgaagggctacgtggagtgtaaggaactggtaattttggcatgtgttaaggtgttatttacgcagatacactgtagaatgaagtaaca

SEQ ID NO: 1663 - DNA, 120 bp, synthetic construct
  source 1..120: mol_type = other DNA
acatgagagtgaaaatagtacccacttcatggggttattgtgaaggcttagaatagtcctgcatttcgtaagcgctctgtaagttgtgttatttttaaaatgttaggtaagtgggccaag

SEQ ID NO: 1664 - DNA, 120 bp, synthetic construct
  source 1..120: mol_type = other DNA
aattgtttttgaacgtatacacaacagaaaatttgaagatgggcactcaagcacataggacatttctacacaaatggtggctccagatagctgaagaagcttaagcagctgtaggagaga

SEQ ID NO: 1665 - DNA, 120 bp, synthetic construct
  source 1..120: mol_type = other DNA
gctcttaactcattaattttcccgacatgtcccttatgatgactcgtccatctgtttttcaaattccacatagctgggcctctgtagctttgtggttttatattccgcatactttctaac

SEQ ID NO: 1666 - DNA, 120 bp, synthetic construct
  source 1..120: mol_type = other DNA
atcaccccagaagcctcccctgcctcctccccatcagtgccaccctagaggtagccagtattttgactttaatcatcatcagttgatttttccatgtacttgactttcatataattagaa

SEQ ID NO: 1667 - DNA, 120 bp, synthetic construct
  source 1..120: mol_type = other DNA
atagactgctattgacctttaccatccatttgtttccttttcttctcttcttccttctttcttctacaaaggcctcctgctttgaaaatgaggcatacccagggaaaacaggtttcaggt

SEQ ID NO: 1668 - DNA, 120 bp, synthetic construct
  source 1..120: mol_type = other DNA
ggcggtggggcggtgctggggaaatggaggggggtgagattttactttcctttgtatcttggataaaagtttttttttttaaccggaaaactctagttccaatagcattcttaattccaa

SEQ ID NO: 1669 - DNA, 120 bp, synthetic construct
  source 1..120: mol_type = other DNA
tggaggtgtagaaatagcaatggggtcacagtcacacaatttaggttccacttcataacattttttgtctcctaggacaaacgtgtatcatcagtttccaactgttttggctcagttttc

SEQ ID NO: 1670 - DNA, 120 bp, synthetic construct
  source 1..120: mol_type = other DNA
tactcatatatgagcctttgccaacactcatgaaataacattgatcccttgtagaactggcagaaaacagcaggttatatggcagacttgtcttttcggttggctgatggaatttctaga

SEQ ID NO: 1671 - DNA, 120 bp, synthetic construct
  source 1..120: mol_type = other DNA
agatagtactgttcactccagtctttgatttcttacatcaacatatcttccctaattatgagacaccaggttaattggctcatccattccattgcctttactgtaggatggctcgtcaag

SEQ ID NO: 1672 - DNA, 120 bp, synthetic construct
  source 1..120: mol_type = other DNA
cacccccattcttgaaggacttccccacacttgctatgtcacttctcacctcccactcacttgtttattttattttattgtattaggtaatggatgtaagcagttctgaaaaagaaatac

SEQ ID NO: 1673 - DNA, 120 bp, synthetic construct
  source 1..120: mol_type = other DNA
tttgggcatgatttattgtcttccttctaatgaaaagaaagatttaggttagaccactccccctacacacttactgtctcacattcccgctcacaattctccccaaatgactgtatcaaa

SEQ ID NO: 1674 - DNA, 120 bp, synthetic construct
  source 1..120: mol_type = other DNA
ttgaataattcctgtgttctttgagctatatggctgattaccacctagttgcctagtacttgactttggaatgactaaggcagataaatattgtttcctggagtatatgggccagataga

SEQ ID NO: 1675 - DNA, 120 bp, synthetic construct
  source 1..120: mol_type = other DNA
ggatgtttgacctcctgggctgacactctaattttcttatatttcttcttctgtcttccaactctgtcgttttatttttcttctggggagatttcctcagcttctaaagtcttcaaatcc

SEQ ID NO: 1676 - DNA, 120 bp, synthetic construct
  source 1..120: mol_type = other DNA
catgcctgagcctcccccacgccgccatgggctcctgtgcagccagaacctcccagacgagcgctgccccttgctttgcggcacccggtcccatagactgcccaagggctgaggagtact

SEQ ID NO: 1677 - DNA, 120 bp, synthetic construct
  source 1..120: mol_type = other DNA
cagttcctagctacattgtatttcaactatccttcctgtatttagtcacatgccacacccaaatctttagaggaacccagttgcaattcccgaatctttccaggattccacagaattaat

SEQ ID NO: 1678 - DNA, 120 bp, synthetic construct
  source 1..120: mol_type = other DNA
cttttgatctgatttctcctctaagaactaagtgcaggtttccaactgccaacagtctcctggatatctaatgggcacaaaaagttcaaagtctaatatttccaacttccacttcatccc

SEQ ID NO: 1679 - DNA, 120 bp, synthetic construct
  source 1..120: mol_type = other DNA
ttgtgagggtgagagggagtatggggtggagggagtatgggctgaaaatgaatgaatagaataccagtgattttgtgagacaatgttttgtctgcaatatgtattattgaagttccagaa

SEQ ID NO: 1680 - DNA, 120 bp, synthetic construct
  source 1..120: mol_type = other DNA
gcccagtcccaccgaccgcccacgggctgaggactgtgagcgcatggcgtaggactggcaggcagctccacctgcggccccggggcgggatccactgggtgaagccagctgggctcctga

SEQ ID NO: 1681 - DNA, 120 bp, synthetic construct
  source 1..120: mol_type = other DNA
tttggatatacaaagtgatttaaatatattattgaaactggacataaaagatagcaacaacaaacactggggactatggggaggggtgggagggagggcagaaagatttgaaaagctacc

SEQ ID NO: 1682 - DNA, 120 bp, synthetic construct
  source 1..120: mol_type = other DNA
ttacaggcgtgaatcgacaggcaagactgacatttttttttaaatgtaaaagttcttcaggaagaaaaaatttagatctatgcaaaaaagaatgaagtgtgctggaaatgataaatatat

SEQ ID NO: 1683 - DNA, 120 bp, synthetic construct
  source 1..120: mol_type = other DNA
tcatgcctttacaggaagaggaatgagctcactgggaggtagacagtgataaaggtgtatatcgtaaatcctagagcaaaggcacacaaataagaatgatatttaataagctaatggtgg

SEQ ID NO: 1684 - DNA, 120 bp, synthetic construct
  source 1..120: mol_type = other DNA
aagggagaaaaaccagcctggatacaccttcttaatcaagtaatccaagagaacatcatcaatgatgggacacattgatattatctgtcacctgatagtatgcaaagagaagaatacagc

SEQ ID NO: 1685 - DNA, 120 bp, synthetic construct
  source 1..120: mol_type = other DNA
agtactgagtatatgtgaaagtaacactatactaaacctgcaaattcatctttaacccattcccaccaccttatttgttctccacctcaggctctgagaataccacagccttcacaaaag

SEQ ID NO: 1686 - DNA, 120 bp, synthetic construct
  source 1..120: mol_type = other DNA
acaacaacctttactatagcctccactacagtccctgagactaccatggcctccagcacaacctccactgcaggctctgagaaaacgatggcctcctccataatttctgagaccaccatg

SEQ ID NO: 1687 - DNA, 120 bp, synthetic construct
  source 1..120: mol_type = other DNA
agattctgaaaccaacacagcatttactgaagattctaagactaccacagcctctactacagggtttgagacaaccgcagcctctactacaggctctgagcctaccatggcatccaccat

SEQ ID NO: 1688 - DNA, 120 bp, synthetic construct
  source 1..120: mol_type = other DNA
tactgaaggctctgggaccactacagtctccatcacaggctctgagaccactaaagtttctaccacaggttcagagaccaccaccacttctactgaaggctctgagattactacagcctc

SEQ ID NO: 1689 - DNA, 120 bp, synthetic construct
  source 1..120: mol_type = other DNA
gcactgagactaccatcacctctactgaaggttcagagaccactacagtcactactgcaggttctgagaccacagcagtctataccacaggctctgagactaccaccacctctactgaag

SEQ ID NO: 1690 - DNA, 120 bp, synthetic construct
  source 1..120: mol_type = other DNA
cttctttgagcccacacattttaactccagtggcaaccaccagctgttcacctgtttctatcatctctgccctggttcaagtcaagccagcacacagttagatataatttcctcttctag

SEQ ID NO: 1691 - DNA, 120 bp, synthetic construct
  source 1..120: mol_type = other DNA
caattttgttcattctctggcacttgccatcagcaagccggttacatctgattctatcctcttggttctaagcatactcacttctattctcatgactggtgctgtttgtgatcccatttt

SEQ ID NO: 1692 - DNA, 120 bp, synthetic construct
  source 1..120: mol_type = other DNA
tcttaatggagtaaaacacaagcttctgagttgagaaagcctcagtgaaaggataaagtacctgattcccagtttctgtacagtcaatgtccctaacccaaggttacttctcatttggta

SEQ ID NO: 1693 - DNA, 120 bp, synthetic construct
  source 1..120: mol_type = other DNA
ttaattcattcatttttatcagcccaccctcttctatttgggtggccacttctgaagtcaaatagatcttccacttctgaacccatcgcgataacgtttcctcaaacttctgcctcctcc

SEQ ID NO: 1694 - DNA, 120 bp, synthetic construct
  source 1..120: mol_type = other DNA
acagcaattccttgtgtggcctgtgactgttactctctgacctcccactccatctctgctctctggtcttgattgttctttgaatacatatttttcttacatcgatttcacatttattga

SEQ ID NO: 1695 - DNA, 120 bp, synthetic construct
  source 1..120: mol_type = other DNA
attatattcatcttacaagtaagggatctggagcttcatgatcttagctatttgccccagcacatgtagtgagtggcagatataagactctaactcaggttagttggattctggagttca

SEQ ID NO: 1696 - DNA, 120 bp, synthetic construct
  source 1..120: mol_type = other DNA
aataatgatcatgaaataattaaaatggagcataggaagcttcccaggatgtgatccatggagatggacatggactaggtcaagaaaagaaccagcaaaaggacctcagagactttgact

SEQ ID NO: 1697 - DNA, 120 bp, synthetic construct
  source 1..120: mol_type = other DNA
aaatgaatacctgtgtccaccaaaagacatgtaccatgccagcttcattcataccactgcagggtggaaatttaaccccaaagtccactaacattagaacaggtaagtaaattgtgacat

SEQ ID NO: 1698 - DNA, 120 bp, synthetic construct
  source 1..120: mol_type = other DNA
attttcaatgaggacaaatcacctctctctttaggttgaaataggtctgatataattaatctgccattctctctggagaatggtgccacataacggggccaacactgatctctgctgtta

SEQ ID NO: 1699 - DNA, 120 bp, synthetic construct
  source 1..120: mol_type = other DNA
tcagcaatgtctcaagcagccttatggccttgctttggttcccacttgaaagtggggaaatatgcgcagacggagcctagagatgaactttgagtaagatgttatttatgttcttttttt

SEQ ID NO: 1700 - DNA, 120 bp, synthetic construct
  source 1..120: mol_type = other DNA
ccttctaatgccttgatgaagacagtttcaatggaaccttctgggaggacgtaatgaaagagtgagtgagcaagttgcacatattaaatccattccaacataactctcttcctaagtctt

SEQ ID NO: 1701 - DNA, 120 bp, synthetic construct
  source 1..120: mol_type = other DNA
tctgactcaacgcatggagctggaggccacgaggggcattgtaatagggcctgtggtaggcagaataacagcccctcaaaaacatccacgtttcaattcccagaacctggaaatatgtta

SEQ ID NO: 1702 - DNA, 120 bp, synthetic construct
  source 1..120: mol_type = other DNA
ttcaacaattgctttattccaggcaccaccacaggtgataacttaagtcactttttctatcttttgctgtgtaatacaaagacttcattttatactagcatgaggtcgcccctgccctca

SEQ ID NO: 1703 - DNA, 120 bp, synthetic construct
  source 1..120: mol_type = other DNA
ttcttacagcactttaataatggagttgactcaagatacaaacccgggtttttctaatttcaaaatgtttcttgcatacaccacacccccatatatatgctcatacagtataatagttac

SEQ ID NO: 1704 - DNA, 120 bp, synthetic construct
  source 1..120: mol_type = other DNA
ctgaaggagcggcagaaaacaaatatgggaacggggtaattggcttccagttccttcattcgcaggtcatgaaaaaaacctggggctagactccatgagagtttttttgttttctgtttt

SEQ ID NO: 1705 - DNA, 120 bp, synthetic construct
  source 1..120: mol_type = other DNA
tcccttccagcctcacacaggcagactatctcaaaagaaagagaaagcaattttcccttgcatgctggctgtttcacttccttctacttttaggaaatggtgagtgattttgtttaaaag

SEQ ID NO: 1706 - DNA, 120 bp, synthetic construct
  source 1..120: mol_type = other DNA
cctgaatcccagaagatcttatttcttcaagctgacatgactgattctttactagtccatgtgtcaagaccatctggggtcccttaaaccagtggctcccaaactattttttttttttga

SEQ ID NO: 1707 - DNA, 120 bp, synthetic construct
  source 1..120: mol_type = other DNA
ctggaatatagtgagcattcttaaatgacagccactattattatcactagtattactcatagtagcggtagtggtgaacaaaaccaaatttccagtggagccaaccagccaccctttctt

SEQ ID NO: 1708 - DNA, 120 bp, synthetic construct
  source 1..120: mol_type = other DNA
taactctgaaccatccatccttttgttttctagagaaactctctgtgcctaagaaacctcttcaccaaagatcttcacatcccaaaccttggtccatgtcctcaaggatatcatggagtc

SEQ ID NO: 1709 - DNA, 120 bp, synthetic construct
  source 1..120: mol_type = other DNA
ttatcagtttcaccctctgctaagtctcttcagcttctgggattctcctgggtctttgggagagccttaacaggaccaagctgtttctctaagaacattttacaatatgatgaacaaaac

SEQ ID NO: 1710 - DNA, 120 bp, synthetic construct
  source 1..120: mol_type = other DNA
atcctttaacagcacaaagcccacagatcactttaaggtgtagtgggacacaattttttccccaataagaacacttcaatcagctgagtgagtagaaaatagaggctggaaaccagcaaa

SEQ ID NO: 1711 - DNA, 120 bp, synthetic construct
  source 1..120: mol_type = other DNA
ctaattcatcaaatgactaattctttgaatttttaaattttgtttaaatcctattcagtgtgattccctcctgctgcaggctggaggctgggagacagagggagactggggaatgtcttc

SEQ ID NO: 1712 - DNA, 120 bp, synthetic construct
  source 1..120: mol_type = other DNA
tttatagacattcgtagccatgtcagagaaaggagttacaaataaagaaaagggagagactagaatgaaccccatgttgctggattaaagctggaggtgtcaaaatgcacccatgcttgt

SEQ ID NO: 1713 - DNA, 120 bp, synthetic construct
  source 1..120: mol_type = other DNA
atagttgattccagggcctggatggacaaaataaaaaatgagcatgaagcatcttgtaataccagaatgcaagaaagtgttttaaaaagggatggagagggccatgcacagtgtctcatg

SEQ ID NO: 1714 - DNA, 120 bp, synthetic construct
  source 1..120: mol_type = other DNA
aacccagggttgaaccagggaactttaagatcttcagtctaacgctctcccaactgagctatttcagctactctaagcacacacccttagtcatttcttcaaaatataaaaacgtcattt

SEQ ID NO: 1715 - DNA, 120 bp, synthetic construct
  source 1..120: mol_type = other DNA
accaacaataacttcttagcttctataattgtatatataatctctcagtttctataattgtactatgtaagatattgacatgaggaaaagctaggggaaaaatatacgggaactctgtta

SEQ ID NO: 1716 - DNA, 120 bp, synthetic construct
  source 1..120: mol_type = other DNA
gttaacatagtcagttacatgtggtaaactagccattcattaaattgattttcaggaaatcagctgccttctaagagaggaacaattcccggcccacctgcaatttcacactcctctttt

SEQ ID NO: 1717 - DNA, 120 bp, synthetic construct
  source 1..120: mol_type = other DNA
atgattgagcaaagagtgaggttttaagagacagagagattgggtgttttagccccctcatgagtgttcctctccttctgttggaggaccttctcttggtccttaccaaatgtcctctac

SEQ ID NO: 1718 - DNA, 120 bp, synthetic construct
  source 1..120: mol_type = other DNA
acttgaaccctattagaaaaatgtggagcgtcagcagtagggagggatgactagatttgggcagagtaccaaaagttcaaaatttatgccatgtaagctacatgtattcctaagaataag

SEQ ID NO: 1719 - DNA, 120 bp, synthetic construct
  source 1..120: mol_type = other DNA
accacattacctggggagaggtgtcatttggatgtgaggatagttatgaaaatactgagcagagcagatgaggataggccatcaacaattcacattaaatgagattactttttagtagga

SEQ ID NO: 1720 - DNA, 120 bp, synthetic construct
  source 1..120: mol_type = other DNA
aaccgttaggtacagatggatgtaaaagaggaaattttcctaagaagacaaggaactggggaccagaggagtggatgaattagaaacattctgggtggtccactcatatcagaaattaca

SEQ ID NO: 1721 - DNA, 120 bp, synthetic construct
  source 1..120: mol_type = other DNA
actgacccctgctccaagatgcaaatccacagctttggatcagtttgtaagtgtgagtaaagccgaaagtaatgcatgatacagatgaggtgttcacatttaattctgctaaaatgacac

SEQ ID NO: 1722 - DNA, 120 bp, synthetic construct
  source 1..120: mol_type = other DNA
aaaacaaaaggcttttttttccccctaaatgtcgtccacatttttggcaagtattgatctctagtagtcagtgtcaggatctgaagaaaacagtgacatctagcagactcccagagccag

SEQ ID NO: 1723 - DNA, 120 bp, synthetic construct
  source 1..120: mol_type = other DNA
aaataaatgagtctcatcttagtcaatcgcggtgtgaaatgaggacacgaagtccagacctaacctctaagagaaaagccctgcctgatagaagaagagatttgtccttacttaatgcaa

SEQ ID NO: 1724 - DNA, 120 bp, synthetic construct
  source 1..120: mol_type = other DNA
gtgggccaccgtgcctggctggaaaagagattttttgagaactcgccatgttggcttaaacgtaaatatatatgaaacagaaaatgaagtataaactccttatgcttatagctctactgt

SEQ ID NO: 1725 - DNA, 120 bp, synthetic construct
  source 1..120: mol_type = other DNA
cgcgtctctccccagctgagtgcagcctcagcctatggtgcaaaaatgtttaaagctgagcatacagagaaggaaaagaagaaaaaaaaaatagaaagtgatgtggaaagatctacatat

SEQ ID NO: 1726 - DNA, 120 bp, synthetic construct
  source 1..120: mol_type = other DNA
cttcttgtgattccagctaaatgggatcctaaatgatatgacacataaacatcatctagaacatgcagacttctgcgaatatctccatgacacatttgggaagacacagtgctcaggatt

SEQ ID NO: 1727 - DNA, 120 bp, synthetic construct
  source 1..120: mol_type = other DNA
aatttctgctcctgtcagattagagggaaattcaatctcagtctttttgctgctctccaaagatcccagagttgtacataggattgaagcataaggaacatccttaaagtcagtagcaac

SEQ ID NO: 1728 - DNA, 120 bp, synthetic construct
  source 1..120: mol_type = other DNA
cagtcccctgtctttctaaacaagaatgtttggtgaagcaacagtgattcaacactctcccttagcgaggtattgtttgacaccttagaaaacacgtagttatttttcagatctattcag

SEQ ID NO: 1729 - DNA, 120 bp, synthetic construct
  source 1..120: mol_type = other DNA
tgatagcacatcatgaaccagtcagtagcactctttcttccttagtggggcataagtaatgctgcatcttgcattcaacgtcatcttagatgggatgaaatacacattttggaataaacg

SEQ ID NO: 1730 - DNA, 120 bp, synthetic construct
  source 1..120: mol_type = other DNA
tggctccaggattactcactttttatctcatttggactgaatctcaagtgatgaactgttctgcactgtctctacaaaaatcactcacaggtatgaacacttttatccttcagtcttctc

SEQ ID NO: 1731 - DNA, 120 bp, synthetic construct
  source 1..120: mol_type = other DNA
tgggttcacctcccagacggggtggctgccgggcagaggggctcctcacttcccagtcggggctgccgggcggaggtgcccctcacctcccggacagggcggctggccgggcgggggctg

SEQ ID NO: 1732 - DNA, 120 bp, synthetic construct
  source 1..120: mol_type = other DNA
ttcaaggtgcctggcagaagcgaatgaatattgctgtcatgtacatgcaaacgttgtgaaatgcttcaatgttccacatcttctttggagacctttaagaaattcatggaactttcagca

SEQ ID NO: 1733 - DNA, 120 bp, synthetic construct
  source 1..120: mol_type = other DNA
gatgaagattggattatagtatatattcagcatgcaaaaacagataatcaggggaaatgcagtgacagtcaaagcaactatggaaacaatatccatggcaacaaatggcctggtcggaag

SEQ ID NO: 1734 - DNA, 120 bp, synthetic construct
  source 1..120: mol_type = other DNA
gaatctgtgagtcagtgagtccgtgaccctaagtgagtttcagagtgaaaacagacaccagataagaagccagaaaacctgggttctagtctagttcttccccttaatagtttatttaat

SEQ ID NO: 1735 - DNA, 120 bp, synthetic construct
  source 1..120: mol_type = other DNA
ccatttctcatcttcccatccttgcaaagcccttgctggaggaaaggagacttacctttggaactaaacgttgagtttctgaattggcattgtgtttggtaatataaaataactacagga

SEQ ID NO: 1736 - DNA, 120 bp, synthetic construct
  source 1..120: mol_type = other DNA
aagcggaatctaccggcagctttgagactaagcatgacggtggaaacagctaattttattagcttttgtctgaaatgcaaaagatgagaaagaaaattcccgtttgtttgctccacatac

SEQ ID NO: 1737 - DNA, 120 bp, synthetic construct
  source 1..120: mol_type = other DNA
cctttttgatgtgactactagaactttgtaaattacacggagctcgctttctgtggacatgtagtctctctcacagagaaatacatgtatatttctgctggacatgtagtctctctcaca

SEQ ID NO: 1738 - DNA, 120 bp, synthetic construct
  source 1..120: mol_type = other DNA
ctgcgggtcgctgctgttctctttgtgtctcttagcctgtgacttcaatgcagtcatctcatttctgggaatctatccaattctcaattgtgtaaaaagctttataaacaaaaaaagtgc

SEQ ID NO: 1739 - DNA, 120 bp, synthetic construct
  source 1..120: mol_type = other DNA
ccttggacacctttcacagcattcctcacctctgtcttctaccattattatgcatgtctgaatatgtcttcctttgctaaacatcaaacagagttttaggactgggattctagaaagtga

SEQ ID NO: 1740 - DNA, 120 bp, synthetic construct
  source 1..120: mol_type = other DNA
gggttattttcaatcaaatgcagatcacaaacacagtaatggtgacatgtgaaacccatgtatacaaaggcccaactttacatatatttgggacccaaagggctgactgtgggacttgaa

SEQ ID NO: 1741 - DNA, 120 bp, synthetic construct
  source 1..120: mol_type = other DNA
cctcccaggctcaggcaatcctcccacctcagctccctgagtagctggggctacaagaacacgccaccatgcctggctaattttgttcgctttttgtagagatggagatctcactacgtt

SEQ ID NO: 1742 - DNA, 120 bp, synthetic construct
  source 1..120: mol_type = other DNA
gagcattaatagcagggaatgtaaattagcctatttgttttggctctgctttgcttctgatcattagaggccagcaaaaatagaatgagaactgcaaactccctcttgttcccggaagat

SEQ ID NO: 1743 - DNA, 120 bp, synthetic construct
  source 1..120: mol_type = other DNA
aaataagagaagcaataaaagaaaagaaaaagtcatttaggattatgtaaaagcctgcctatcgaacagtaaggcttcctggtcccctccatgaagttggttctgagaactccagcagcc

SEQ ID NO: 1744 - DNA, 120 bp, synthetic construct
  source 1..120: mol_type = other DNA
atccccaacacacacacctggagtttccaaacagcttaagatctaactaagccaaggattactgtatcattcacaaagcccaagccccaatttgagcagagaaagtttattattagaaag

SEQ ID NO: 1745 - DNA, 120 bp, synthetic construct
  source 1..120: mol_type = other DNA
gctggctgcgaaggagaaccgcttaattcaatacagatcagttaagaggatggatttacggttgagaggcaatacattgataagaaactagtcattatgggatgaaaaccactgacatga

SEQ ID NO: 1746 - DNA, 120 bp, synthetic construct
  source 1..120: mol_type = other DNA
ttctcagaactgagagatatggttccaaagtgagatagacctcaagtgtctaacagaagtgtctaacaaaaggaatgaaatccaaggcatactaccataattttaaaaatactgaggaca

SEQ ID NO: 1747 - DNA, 120 bp, synthetic construct
  source 1..120: mol_type = other DNA
ttttgaagaactacttcagctagagactctacctgggaatgtaacaaatctacgacagactggaggttacttaaattagcatctacctgttgagatagggccattattccagtttctcct

SEQ ID NO: 1748 - DNA, 120 bp, synthetic construct
  source 1..120: mol_type = other DNA
ataaagcccagcttagaacctgtgccctcagcccttataaagatttcaaaagctcttaataccctttgtaaaatgtcttcctgttaatttacctagcgtaatctctagttgctgcactga

SEQ ID NO: 1749 - DNA, 120 bp, synthetic construct
  source 1..120: mol_type = other DNA
gacattcctacattctggaagatttacaaatacatagtggggatacctctcataaatgtataagcctctcagtttttccttccaatgcattgcagattgtccttatttagccctttcccc

SEQ ID NO: 1750 - DNA, 120 bp, synthetic construct
  source 1..120: mol_type = other DNA
gtctcttttttaggcagtcactgcaatcacacatgctcactaatccagttcactaaggtacgaagccacaataaagtttggagccaaaactgtagatataaagagagttcctttatctgg

SEQ ID NO: 1751 - DNA, 120 bp, synthetic construct
  source 1..120: mol_type = other DNA
ggatataagccctcagcagggaggagagcaaaaaggccagtgtggttggttattggagaagttatttggatagtttttaattagagacatctcttgcatgaatggatttcctaatgaaat

SEQ ID NO: 1752 - DNA, 120 bp, synthetic construct
  source 1..120: mol_type = other DNA
aaacagattctcagatagatttatctgcagaagttttattggggaacaatcttgggacaaacacctttaaaagctgagagaaacgggacagggaaagggagcagttgaactgtaatgaag

SEQ ID NO: 1753 - DNA, 120 bp, synthetic construct
  source 1..120: mol_type = other DNA
cggttattggtcacggcggtgagttaaggctgttttattgaatgaaatcatcaacccccctccttttcctgctaaaacgcaatctgtttccaagactttcctaatgtagagtgattttat

SEQ ID NO: 1754 - DNA, 120 bp, synthetic construct
  source 1..120: mol_type = other DNA
cttgctaaggatgatatcattatgctagggtgatagtagcaagcctcattgttagtcacctaagaagttaagacaataagaaatcattcaaaaaataaaatggtggcaggacgaggtggc

SEQ ID NO: 1755 - DNA, 120 bp, synthetic construct
  source 1..120: mol_type = other DNA
ttgaacctaggaggtggaggttgcagtgagccgagatcgtgccactgtactcaagcgtgggcaacagaacgagactccgtcttgagaaaataaaataaaataaaataaaataaaatggtt

SEQ ID NO: 1756 - DNA, 120 bp, synthetic construct
  source 1..120: mol_type = other DNA
atacctgaaaggaaaagttgactgccaatcaaaatacgttgctgggtgaccaagaaatcaaagttaagagaggtagatattttaggagtatttcatccaggtcatagtaaaacccagtcc

SEQ ID NO: 1757 - DNA, 120 bp, synthetic construct
  source 1..120: mol_type = other DNA
aaagaaaaatacgaaggcaagtaaagagttagaaaaatcagataaaaccagtaagattagtataaacatcatgctgtgctgggggtgggggtcgcaggtttggaactgagctctctagaa

SEQ ID NO: 1758 - DNA, 120 bp, synthetic construct
  source 1..120: mol_type = other DNA
aagaggattacaattttttctagtacacaatctaggatgggaagcacgacttatggaaagagttgaagatccggttgatctcccagagttaagtgtctaaagttacacgtgtccaatcag

SEQ ID NO: 1759 - DNA, 120 bp, synthetic construct
  source 1..120: mol_type = other DNA
tctgcatccacattctttcttcagttggcgcctagtaccatggatttgatttttgcttccttaggtctagtctttatccatgcatacttccccttggctccctttgattggatttattta

SEQ ID NO: 1760 - DNA, 120 bp, synthetic construct
  source 1..120: mol_type = other DNA
acaacagcaaattgttattgagttcttatcgtgccagacacgatgctaagaatttcgtatacaaatatttggttgagtcatctcaacaagcctatcacatgggaactctgactatcccca

SEQ ID NO: 1761 - DNA, 120 bp, synthetic construct
  source 1..120: mol_type = other DNA
gtctggccaccaaatacattttaacttctttcctctttccattcctcttactgtacccttctaggattccctgggttttgttaaaagcttctggaactggaatgtagcaaatgaatgttc

SEQ ID NO: 1762 - DNA, 120 bp, synthetic construct
  source 1..120: mol_type = other DNA
tgactatagctcaaacaggtctttgttaggtgaaaataacaggtggaaaaatcactgagcacttcaccttatctcaaacttatgacttcaaaatctctacagtggactggtttcccagct

SEQ ID NO: 1763 - DNA, 120 bp, synthetic construct
  source 1..120: mol_type = other DNA
ctagcctttggtttcaaatactgtttttcatttatagaaactaggaccccttagaatgcaaggcttaggtgacaactgattccatgtctcagagaaggaaagaatcaggacaggacttga

SEQ ID NO: 1764 - DNA, 120 bp, synthetic construct
  source 1..120: mol_type = other DNA
tacaactccagtaaacacactgtgcatgccgccctttccaagggctagcagaccactgcacatatggacagcccagcccaagggaagaatcaagggagaaggaacaccaagacccccgaa

SEQ ID NO: 1765 - DNA, 120 bp, synthetic construct
  source 1..120: mol_type = other DNA
ttcaccgccagtaacagccctgctgtaaatatgaatgttagcagaaataagaacgtctgacatgagatgatgtcagaggcaataatgaaagagaagggagtttcaatagtaggtaccaag

SEQ ID NO: 1766 - DNA, 120 bp, synthetic construct
  source 1..120: mol_type = other DNA
gtaggggagggttaggagattgggagtgactgctcatgggtttgggctttcttttggggttgatgaaaatgttctgaaattgattatggtgttggttttgtaactccatgagtatactaa

SEQ ID NO: 1767 - DNA, 120 bp, synthetic construct
  source 1..120: mol_type = other DNA
aagttattattgactgtagtcctcctgttgtgctatcaaataccaggtcttattcatgctttctaactattttttttgtcccattaaccatccccacgtgtcccccatagctctactctt

SEQ ID NO: 1768 - DNA, 120 bp, synthetic construct
  source 1..120: mol_type = other DNA
actcttagatttgcccttttgaggctgttttctagatctcgtaggcatgcttcattgttttttattattttttcttttgtctcctctgactctgtattttcaaggagcctgtcttcaggc

SEQ ID NO: 1769 - DNA, 120 bp, synthetic construct
  source 1..120: mol_type = other DNA
ctgccctccaagtactgtttgcgaatatacgtcttgtcatgaaataggtgagaagaagggaataggaaggtgcagaggacatgacaggcaaaaaccaaaaagagaagtaaataaaaagaa

SEQ ID NO: 1770 - DNA, 120 bp, synthetic construct
  source 1..120: mol_type = other DNA
ttcctcaaaacatctattttgaatgatctatctgaaagatcatatatctctttttctccaggattggtccctgatagcctatctagttcatttgatgaggtcatgatggtattgatgctt

SEQ ID NO: 1771 - DNA, 120 bp, synthetic construct
  source 1..120: mol_type = other DNA
ctggacctgccatgagccagaggggcaggtccaggacagaatctacacctagatttggggactccaagagactgcttgttgctctgccctaccatggttgagctggtgcctaaggtacaa

SEQ ID NO: 1772 - DNA, 120 bp, synthetic construct
  source 1..120: mol_type = other DNA
gcaggtgccggtcgatcccagcatgactttgctctccgctatgacagtgcagcagtgagttcaatataaagtcccccaccccatgccctccctccccaaaatgcaaagactctctttcca

SEQ ID NO: 1773 - DNA, 120 bp, synthetic construct
  source 1..120: mol_type = other DNA
atccatctcaaaaaaaaaaacgcatttgcttcttagggggtttcagacatttaagagaatcctatgtattaaatgcaagattttttttttttttttaagatggagtcttgctcttgtcac

SEQ ID NO: 1774 - DNA, 120 bp, synthetic construct
  source 1..120: mol_type = other DNA
tgcacctattaatcatgaacagagttagttctcctgaattcatcatatgaaaatgtcacagtggacagagagactcaagagaagtgagttttgactgggtgagtcaagagggattatggt

SEQ ID NO: 1775 - DNA, 120 bp, synthetic construct
  source 1..120: mol_type = other DNA
gctaagtgaatgctgtttgtttgagggatgaaatatttaaatgagaagccaactcaactcttcctcttgatcttagagtcattctctcaagtgtaactcccagtgcaaagcatcacatca

SEQ ID NO: 1776 - DNA, 120 bp, synthetic construct
  source 1..120: mol_type = other DNA
cttgccctgtcacccaggctagagtgcagtggaatgatcatggctcactgcagcctcaacctcccaggctcgggtgatcctcccacctcagcctcccaagtagctggtaccacaggcata

SEQ ID NO: 1777 - DNA, 120 bp, synthetic construct
  source 1..120: mol_type = other DNA
gttgttatttctgttaattgcatattgtacttgaatactccctggacagataatgagaaaaatgaggtttgagtcaccacccctgtcacttgtaaccctgtgtgacttgcttaatccctc

SEQ ID NO: 1778 - DNA, 120 bp, synthetic construct
  source 1..120: mol_type = other DNA
ttatgctctagtgagtctgtggaacagagcaggggactgttgacaccaaatttaaatgtgcgaataggaatgactatgcagaagaggccaccaggaagagggacagagagaaatgagact

SEQ ID NO: 1779 - DNA, 120 bp, synthetic construct
  source 1..120: mol_type = other DNA
aacaggaatgaacagactcacttcagcttatgcccagactcacttcagcttatgcccagaaacaaagaaaccaaggagaagcaaattccataagtgcttttattttattggagatgagca

SEQ ID NO: 1780 - DNA, 120 bp, synthetic construct
  source 1..120: mol_type = other DNA
agtgcagttgtcaaaacttttgccaaacctgaactggcatggtaaactggtggaagaatatgcactagcagacatgaagttttaggtgcttgagaaacatgaggggaatggtaattataa

SEQ ID NO: 1781 - DNA, 120 bp, synthetic construct
  source 1..120: mol_type = other DNA
agcagggctagaatttcttctttgtttttgatagtctttcctgctgaggtgcccacgctcctgatagatggctccatgtacatgtacagtagttaaagcatacctgctgtcagtgtaaat

SEQ ID NO: 1782 - DNA, 120 bp, synthetic construct
  source 1..120: mol_type = other DNA
agtggtctccagtccccgagtccccagttccctttgcttcccctatgcctattcttccttttccctcagggacctaaatgtgtaccctcctgcctttacccctttccttaattcctgttt

SEQ ID NO: 1783 - DNA, 120 bp, synthetic construct
  source 1..120: mol_type = other DNA
ctagggaaatggacctggatgccatccttatgagatactgactaattcctgctgctgcagtgacaaattaccatgaaccgaatggcttacaacaacatggatttattactttacagtttt

SEQ ID NO: 1784 - DNA, 120 bp, synthetic construct
  source 1..120: mol_type = other DNA
tcaatccctttctggtcaatgtaatacatttttgctgattccagacttggagtttcaacagttctaaattcaggaccagacagcaccaccctgataggagggaatgggttaagtgctaca

SEQ ID NO: 1785 - DNA, 120 bp, synthetic construct
  source 1..120: mol_type = other DNA
tattgggtgggttgactagatgtcgaagaaaggtcagtgaaaagtggccactgtttccagatgatggtttgactttgctttatttggtaaaggggaagaggaaggtataacttcttcagg

SEQ ID NO: 1786 - DNA, 120 bp, synthetic construct
  source 1..120: mol_type = other DNA
atttaaacagtaggagagaatcaagagaggagctttgaatctaccattttgagaagaggaaggaggaaggggtgataagagagagtctgcaaccttggggtagtggagaaagcagaacca

SEQ ID NO: 1787 - DNA, 120 bp, synthetic construct
  source 1..120: mol_type = other DNA
tctgggaagaggaagagctttgtccaggctgggaagggtttagtattccgcggtaagagttgtcattggttggcagagcagagccattccctacttggaagctgctgctgctgaactgaa

SEQ ID NO: 1788 - DNA, 120 bp, synthetic construct
  source 1..120: mol_type = other DNA
gttttttaattaaaattttttttaaaaagaagagggaatggagaaggggcaggaacaagtaggtctaaaagaaaggaccctgaagagacagagaattggggaaactgaggctctgaggag

SEQ ID NO: 1789 - DNA, 120 bp, synthetic construct
  source 1..120: mol_type = other DNA
atgttttagaaagtgtaaagcattatatattatgaattattactgccactcatcctgatccctccaccaacaaccagactgccatcctctgtgatgtccctgttctctcctcagaaagaa

SEQ ID NO: 1790 - DNA, 120 bp, synthetic construct
  source 1..120: mol_type = other DNA
tacatatcacatacattatttaatttgagacacacagactagagttaggtgtcattaaccccacttcagagtttcagaaactggggctcaggaagtttaagaaacttacctgaggcgacc

SEQ ID NO: 1791 - DNA, 120 bp, synthetic construct
  source 1..120: mol_type = other DNA
caccactccccaagtaccaggccagccacatacctattacgtgttccatcacctggggaactttctccttctcagaaatggggcaccacattcccaaaaccaactccctgacctgtcgct

SEQ ID NO: 1792 - DNA, 120 bp, synthetic construct
  source 1..120: mol_type = other DNA
aggaggtaaagtaggtccctagtatgttgcaggcaactgtctttagtttcagtagctaataaaaggttgtccacctactgaagaagagtacagttaaggtgactagcttggaatggtata

SEQ ID NO: 1793 - DNA, 120 bp, synthetic construct
  source 1..120: mol_type = other DNA
ctgtgaaatgggggtattttaaataacacttatttcacaaggtttttgtgaacatcaaatgggaaattatcaaaaaggttaaatgggacaaggggtgcagtcccccagtaggaagcccag

SEQ ID NO: 1794 - DNA, 120 bp, synthetic construct
  source 1..120: mol_type = other DNA
ttgagctctaatccgccgtgcttttggttttttactgaaaccctgccttctgtgctagattttactctggtgctcaccattaatctttctctcagtgcaggtggtggagacctaaagcta

SEQ ID NO: 1795 - DNA, 120 bp, synthetic construct
  source 1..120: mol_type = other DNA
tattactctgcagctgacaccatgctataaatgaatggcagaggttcatggacaggcttaagaggctccctaaaccctgtaaggatgtgtgcaaaattccttatgtatatgaatatttct

SEQ ID NO: 1796 - DNA, 120 bp, synthetic construct
  source 1..120: mol_type = other DNA
cagaagttctagcacaagtgtttcacataggggtccttggtagaccagggcttaggcttggaagaaggaaaatggagtgagcacgaggaagagaaaaagcctggaaaagcagcttatttt

SEQ ID NO: 1797 - DNA, 120 bp, synthetic construct
  source 1..120: mol_type = other DNA
tctattggattagctccttttatttccccctagggatgcaacacatttttatgaacaaacagcagtgttcacatggctgtgatgaggacgtactggggtttcccctggacatggcattca

SEQ ID NO: 1798 - DNA, 120 bp, synthetic construct
  source 1..120: mol_type = other DNA
agtgagtgtgagggaaaagagctctccttgtctgctcattatgtgcacctgttaaatagtcattctttccactagggctattagtggtttttattgttactggtcacccagaattagagt

SEQ ID NO: 1799 - DNA, 120 bp, synthetic construct
  source 1..120: mol_type = other DNA
gtttagaggttattaaagaaatccccctaaagtcccatcccaaggtcacatagagaacgaatggctaagtagcgacaagaacccaagtcacagtctgttgatctcactaccatgctatcc

SEQ ID NO: 1800 - DNA, 120 bp, synthetic construct
  source 1..120: mol_type = other DNA
ttggccaagcatttaataactatctgtcatgtccaaggttctgggctattgttctgtaaatctgtgatcctattctgttatttaattccgtgactctgtgttgacatagacgtgacggtg

SEQ ID NO: 1801 - DNA, 120 bp, synthetic construct
  source 1..120: mol_type = other DNA
aattaattaattaattttttttcctcctaactaattccacgttattggcttgagggtcagtttgaggggtccagacctccttcttcctttctatccttagcttcctgccacagtataccc

SEQ ID NO: 1802 - DNA, 120 bp, synthetic construct
  source 1..120: mol_type = other DNA
ctcttcttcgggttattttactccaatcattccgatctactctttgttaattgggcccttcattaaataatttagcctttcacaaaacacacattaagtgtgcatgacggcccaggcact

SEQ ID NO: 1803 - DNA, 120 bp, synthetic construct
  source 1..120: mol_type = other DNA
gtttgactggcccaaactctgggaaagagtgtctgtaagtccaacaggagaggattagtattattttccagtggttgtgatggtgacactaaaagattttcctctgacagaggggtagtt

SEQ ID NO: 1804 - DNA, 120 bp, synthetic construct
  source 1..120: mol_type = other DNA
ttgcaatagtgtgtagcaaatactttgcatcctaggttggattccccagaagcaggccctgagacaaagattcaagtaaaagagatttatttaaaactaatgagaagttgggcagggtgg

SEQ ID NO: 1805 - DNA, 120 bp, synthetic construct
  source 1..120: mol_type = other DNA
tccgtaggcacaaaaatggtaaaggggttcaagaagaaatgcgtagaacacagtccctgccccacaaggttcatggcctgggaagggaagacagacatgaataaatcattgccatagggt

SEQ ID NO: 1806 - DNA, 120 bp, synthetic construct
  source 1..120: mol_type = other DNA
tgggtgaatccagtccagcttggggcctatttaattctactaggctcaacctacaattcttatgtgttctcagattattcctaaaccctaagcttagttttgtttcattcggaccacatg

SEQ ID NO: 1807 - DNA, 120 bp, synthetic construct
  source 1..120: mol_type = other DNA
ctcagtctgtcggagactgcacgtcactctaagtgtagcaaattgaatataatgccatagaactttcatatctgttagcatccttttaaaaaatacgtgaacaagcccttgaacaagtgt

SEQ ID NO: 1808 - DNA, 120 bp, synthetic construct
  source 1..120: mol_type = other DNA
aaagaaaagaaagaaaatgaatctcttaatgagatgggaaaggttgatttgtttcctattgacctttggcggctctgggaagggcactctggtcaggcccaggacaagcaggagattcat

SEQ ID NO: 1809 - DNA, 120 bp, synthetic construct
  source 1..120: mol_type = other DNA
aaataaaaaagaccctaagtgttagttaaagcagcagcctagattcagaattaagaaaacatgatttttatttttccgtttcatggaagcagcagctgtctactgatagttcctgccgcc

SEQ ID NO: 1810 - DNA, 120 bp, synthetic construct
  source 1..120: mol_type = other DNA
aacagaccaaaaaagtcactctcaaagagctctcggtaggtttgtaaatacttaactgatggtaaaatgtcatgaacccctacccccgatggatctgaaccgttcacttgacccacttta

SEQ ID NO: 1811 - DNA, 120 bp, synthetic construct
  source 1..120: mol_type = other DNA
tggttttcacaccctccatccacatcctggagcagtcaatacccacttggcatctccgtaatcacagagatgtccaccttcatcccttgcaactattggaagccaaagaatgggagcaaa

SEQ ID NO: 1812 - DNA, 120 bp, synthetic construct
  source 1..120: mol_type = other DNA
tctgttagcctttcagaagtaacatgtccaaaataaaatttgattcctcccaggttgttccctgcctggtccgctaccccacagtaaggaacaccttattatgcaatggcgtgatctcat

SEQ ID NO: 1813 - DNA, 120 bp, synthetic construct
  source 1..120: mol_type = other DNA
atatgtgtacctcactctggaagggaccatccagtaagtccctcaggaaaaaaaatgtacaccaaatcatgttgcgtcttccctttgtttggggagtgaggacaggttctcgctctctta

SEQ ID NO: 1814 - DNA, 120 bp, synthetic construct
  source 1..120: mol_type = other DNA
ttgacctctccgatggccgcagctaagatttttgcttgtcttttgtatgctttatcagctgctgcctgtgctgtttgttttcttttttcaaactctcgattgtcaaaaactttttgggct

SEQ ID NO: 1815 - DNA, 120 bp, synthetic construct
  source 1..120: mol_type = other DNA
aaagagttttaaaacaaaagttgagaataaagaaaagcaggagcttcccaaacatttccaaagctgcctagaaaaaggatttgaaaaggtgccacccatagagagagctatgggtgggac

SEQ ID NO: 1816 - DNA, 120 bp, synthetic construct
  source 1..120: mol_type = other DNA
gggctgatgctctaggagcctgggaatctgaacctaagtatcttcctcatccctgaaccatcctggagttcctcaggggaaatctgaacatgaactgggttagattttgtgcaattagtg

SEQ ID NO: 1817 - DNA, 120 bp, synthetic construct
  source 1..120: mol_type = other DNA
tcatctgtgctactcctggataccttcattacttcctgtaatgaagctttgaacacactttgaggggaaaataataaccttatgtcttaacacttccttcttcctggaaggccctatcca

SEQ ID NO: 1818 - DNA, 120 bp, synthetic construct
  source 1..120: mol_type = other DNA
gaaaaagcagggagaaaaagagatgaagtttgcatgggagaaagtggggacagggagtaagggaaaaagagatgcaaggactggtgaaaggaggaaggtgaatggatgtgggatcagaga

SEQ ID NO: 1819 - DNA, 120 bp, synthetic construct
  source 1..120: mol_type = other DNA
gtacagaacgcacagcttccgtcaattatctaaaggacccttgccccaagaatgcattaaatgactatctttttaagcaacctgttaagcttatttctcacaactgtgttttgctcacta

SEQ ID NO: 1820 - DNA, 120 bp, synthetic construct
  source 1..120: mol_type = other DNA
gaagtcatcaccagcacaaagaagctttgctgttttcttagaggtttttctgaaggtcatacaacaattgtaggtaatgaaacaactaggaagttggtaggagagacaaaggctggcaat

SEQ ID NO: 1821 - DNA, 120 bp, synthetic construct
  source 1..120: mol_type = other DNA
gcccgtaaaattttagaaaaaaaaaggaagatgaagtgtctacactctccatccttgaacaatactgcaagtaaagatcctcccgggtgctctatttagctcaagccattactagactga

SEQ ID NO: 1822 - DNA, 120 bp, synthetic construct
  source 1..120: mol_type = other DNA
gtcacctcctcagagaggctgtctctgagcatcctacctgaggctgactcaccccacagtctctccgtcacattatcttttgaatttttcttactactttctttttttttgagaaaagat

SEQ ID NO: 1823 - DNA, 120 bp, synthetic construct
  source 1..120: mol_type = other DNA
tcaatctttctatcgcacatataattacccaacattatctgtttacttgcgtgttctgtgtctctgttctagaatgcaagctccacattttagttttgttcagggctgtgtgcccagcat

SEQ ID NO: 1824 - DNA, 120 bp, synthetic construct
  source 1..120: mol_type = other DNA
aaaacatatcttcacctctctgtctccgtctccactgccaccaaccctcatcttttgcctgggcaacagcgaccatctcctaactagtctttacaaaccctcagtggcttctcacagcat

SEQ ID NO: 1825 - DNA, 120 bp, synthetic construct
  source 1..120: mol_type = other DNA
aaaaactcattccctagggggctggagtatcggaagaacagaattaacataaccagaaggagccgaaagacaacaatagctcacactacttgccacaggacggttaactagctttaagat

SEQ ID NO: 1826 - DNA, 120 bp, synthetic construct
  source 1..120: mol_type = other DNA
aggagggcaaagtgcccaccctgcttcctggtctgcctcctctagccctgtctccatacaacaataaaattaatttgggggacataaatgacaaaattttttagacataaaatacaaatc

SEQ ID NO: 1827 - DNA, 120 bp, synthetic construct
  source 1..120: mol_type = other DNA
cactgtgcctggcctagcttcttgtttctaagtttctttcataaatctcctttgtccattttctgattggattgctggtctttcccttaccaatttctaggcacacattttatattaggg

SEQ ID NO: 1828 - DNA, 120 bp, synthetic construct
  source 1..120: mol_type = other DNA
acctgagtcttgggggaaaagtgcaacctgaattaagataaaagtacccaaattctccatctttctaggccatgtgtgtttattttcaccaaaggtctcatcactctactactcactact

SEQ ID NO: 1829 - DNA, 120 bp, synthetic construct
  source 1..120: mol_type = other DNA
cacattttaagtggaaaggttggaagaacacacagggacttctcaattctaatttaagggcaagaagtttgagggaggaatgggcatagagaggtcgtaagcttccagtatcaatatggt

SEQ ID NO: 1830 - DNA, 120 bp, synthetic construct
  source 1..120: mol_type = other DNA
tcctgacacccagtctagtattccttcttcatcatgctgcttcttctaatgtaatcctattctggagcaaaatggcagaatgatatcccagtacatctgggaaaagacacatgaaacaag

SEQ ID NO: 1831 - DNA, 120 bp, synthetic construct
  source 1..120: mol_type = other DNA
aaacaaagacactccaattcaattttcaggccaccttccaaagagaaagcccctacaataacaaagtcataatccttgaattatagccaggtccacccgatgcttagctcttttcctact

SEQ ID NO: 1832 - DNA, 120 bp, synthetic construct
  source 1..120: mol_type = other DNA
accctcattaatctattttttacccgaatctgggatccctactcccgtccctttttacaacctaatctacctttttctgaaggaattattctggtcctgaccctcacccccatctctcaa

SEQ ID NO: 1833 - DNA, 120 bp, synthetic construct
  source 1..120: mol_type = other DNA
tttcatttgcaagtcggcttaaccaattttgcattgagtcctaggctgcttgcactctgaatttgggctattcaggtagtgtgctcaaagttgaaaccgcatacagcacaactcaagttt

SEQ ID NO: 1834 - DNA, 120 bp, synthetic construct
  source 1..120: mol_type = other DNA
tttgagttttgccactgcctcttggtaaagtcagctgtaggagtgttatggttattagactatagtagccaacattcatctagtgcttactgttatgagccaggccctattttaagtgta

SEQ ID NO: 1835 - DNA, 120 bp, synthetic construct
  source 1..120: mol_type = other DNA
ctgaggggcttaggatgtgagggagaatctgactacagtttcatattcttccccagaaatcatacagatttctccactcctgactctggtcatttctgtttttgtcctccatatttgcct

SEQ ID NO: 1836 - DNA, 120 bp, synthetic construct
  source 1..120: mol_type = other DNA
tgggcagtatcgatgacctgacatacgaaactttgacaaccactaaacaggacaatagacaccgagcaggacaacaaacacaaaacaaacaatagacccttgggtatataaacaattatg

SEQ ID NO: 1837 - DNA, 120 bp, synthetic construct
  source 1..120: mol_type = other DNA
agtgcttataaaacaaccggagtgagcatgtcctgctttttacattcatatggctttaaccccattcttctagtgcctaaggatggggaactttcaggctcatactagaggtttttaggc

SEQ ID NO: 1838 - DNA, 120 bp, synthetic construct
  source 1..120: mol_type = other DNA
ctaattcagaatcttaggggaaggggagagatggaaatacaaacctgcttactggaaaggtgcaaatatatgggttgagctggaggtaggaatacaggtaattaaggtttctagtttaag

SEQ ID NO: 1839 - DNA, 120 bp, synthetic construct
  source 1..120: mol_type = other DNA
ggtatgagcattggatattcccatccctacctcagtaactgaaggacaaaccaagataagtgtgtctatctactgtgtcccaggcttctttatttaagaaaaaagtgatacatgatgtgg

SEQ ID NO: 1840 - DNA, 120 bp, synthetic construct
  source 1..120: mol_type = other DNA
aagtgaatgacagaaaggagaatgacattagacaatgagctgagacgggcctgactctgcttggacattctatccaaagccaacagccctagagcagttagaggaggacattagagaatg

SEQ ID NO: 1841 - DNA, 120 bp, synthetic construct
  source 1..120: mol_type = other DNA
tcgagttctttctgcagagctttgatgtcctgggactggattttaaaaggcagaagacttgtaagaacataaacacaccagttatcaatctcccctttccattcgggattcaagaaccta

SEQ ID NO: 1842 - DNA, 120 bp, synthetic construct
  source 1..120: mol_type = other DNA
ctttttcactatagaggcatcctaattgatttttaaattcaagagatttatcgagcaccttctataagccagcggctatacaaagtggacaaagagccctgacatccagcatgacagaag

SEQ ID NO: 1843 - DNA, 120 bp, synthetic construct
  source 1..120: mol_type = other DNA
gcagtataatttgagaagctactgcggtaatcccagcagagatgatggtggctgaggccagggttaggttgtgattgattcaggatgtttcttaaggataggatgtaggacatgaaagaa

SEQ ID NO: 1844 - DNA, 120 bp, synthetic construct
  source 1..120: mol_type = other DNA
atcatttagcagttaaaacccgttaaataggataataatacctccccctaggagattttgtgctggttaatgagataatgatgtataaacggagcacacagccaggcacttaggaagtgg

SEQ ID NO: 1845 - DNA, 120 bp, synthetic construct
  source 1..120: mol_type = other DNA
tcctccgggttttgctccagcttctccttctccagcttcacggcaccaggggtgacggtgcagggctccggggaggccccatcggagttgctctccaccccgactcctgcttcgccctca

SEQ ID NO: 1846 - DNA, 120 bp, synthetic construct
  source 1..120: mol_type = other DNA
agctcctcaaatttattgaatgtgtgtgtggcgctatccctcaatgcatcaacagccataagcacaatggccagctgctcccttatgccttcccccgatccatccagaatcctaggcatt

SEQ ID NO: 1847 - DNA, 120 bp, synthetic construct
  source 1..120: mol_type = other DNA
tgcaggggctctaaatctatcataaggcgttaggtatgggggctctcccggacacaaactcaaagctttatggtgttatctcttgagcgaaatcctggtaacttcgtaaattgcttgctt

SEQ ID NO: 1848 - DNA, 120 bp, synthetic construct
  source 1..120: mol_type = other DNA
gagtatcctgaggctcatgctgctggtctagtgcttgattctgtttgcaagagaatagccaacggaatgcctgtctgtgagggatgatgtttgtctgtctgctcccaaaacttgatctca

SEQ ID NO: 1849 - DNA, 120 bp, synthetic construct
  source 1..120: mol_type = other DNA
gagagtccctgctgcccattttcctagtggctcctaaaacaccttccccaatttccccactcaacaccaccctcttgtttttagattataatttgtactgtaggtggtgtatttctggcc

SEQ ID NO: 1850 - DNA, 120 bp, synthetic construct
  source 1..120: mol_type = other DNA
tttggttgaaaaaccagctgaaaaaactcagttgggaccaatagagacttgctctcgacccggtctaggaaaccacttattttgacttccgaggcctgtcaatctgaaggcaaaagaaag

SEQ ID NO: 1851 - DNA, 120 bp, synthetic construct
  source 1..120: mol_type = other DNA
gaacttgaacaccaagtgggaaaagggctgaccaagcacgggagagggaaggaaagcagagtggctaggacggtcagcaacagagctgtgttcatttaggacatgggtattgaaatggag

SEQ ID NO: 1852 - DNA, 120 bp, synthetic construct
  source 1..120: mol_type = other DNA
ccaagccttgctttcctcatttggcaactggacacaattatagtctctaccacacaagtaaagataacatgagataatccttgccagtgttaatgtaggacctaccaagaagaattcaag

SEQ ID NO: 1853 - DNA, 120 bp, synthetic construct
  source 1..120: mol_type = other DNA
aaaaaaaaacagacttttttcacctgaagggaaggcttgggagcttaaggacaatggcttctttcttagagacctagtccttgactgagggaaagggtgagggtcttatacttctttttt

SEQ ID NO: 1854 - DNA, 120 bp, synthetic construct
  source 1..120: mol_type = other DNA
ttttaaatagtaatgactcccaaatctcttcatccctgttcttcacatcggtatatccaactacctacctgttggtcatctggacctaaggttccatatggccttaaatctgacacatcc

SEQ ID NO: 1855 - DNA, 120 bp, synthetic construct
  source 1..120: mol_type = other DNA
cctcttggggccatctcttgtggacaagaatatgagccacattcttcatatatgagaaaattacaccaatctcagaggattagaggtcatgccaaaaaacacacctggtagttatgttta

SEQ ID NO: 1856 - DNA, 120 bp, synthetic construct
  source 1..120: mol_type = other DNA
ggcataaggacctcctacggccaagtttaagcttcaagtgggagacatgggacaattacttaccagatacaaccagtttcagaggaagccctacctaccctctaagcctgaccttatctt

SEQ ID NO: 1857 - DNA, 120 bp, synthetic construct
  source 1..120: mol_type = other DNA
gactttccctttttcttgaaccccattgggttaagtccagtccgagacaagcgtctctcctcagcagtgggaggggtgatttggctcatccatacttaggaatttggggtttgaggccgg

SEQ ID NO: 1858 - DNA, 120 bp, synthetic construct
  source 1..120: mol_type = other DNA
cattctttgggtttagatggatgagtttattttctcacataacagctgcagaggtggtacaggtgaatccctctcaagtcaagtgggttaacctcaaaattgacttaaggggtggtttgt

SEQ ID NO: 1859 - DNA, 120 bp, synthetic construct
  source 1..120: mol_type = other DNA
caatttagagaaccgcatcctattccatgctgcttactatcaatagcggcacaagcaccaaattttaaggttacatttttgggggcccctcttttttccattctagctattaccttactt

SEQ ID NO: 1860 - DNA, 120 bp, synthetic construct
  source 1..120: mol_type = other DNA
gctgggttagggtgttggaaacttcaatggttttgtggggattttcacagagcaaggtttggtatctagttagtctagcatttattagctaatgatgtcctttggtatttattaaagtca

SEQ ID NO: 1861 - DNA, 120 bp, synthetic construct
  source 1..120: mol_type = other DNA
cagcccacacctggtcgactggaggaccaccttagtggaagagggacaatcagggcctctggcctgccatgtgcacaagcataacaattgattttgtttaacgtgcagatggaatattta

SEQ ID NO: 1862 - DNA, 120 bp, synthetic construct
  source 1..120: mol_type = other DNA
ttggactagactgtctaaggccacaagattagaagttaccataatacatgttatactgttaatttttagcaaacttcacttttgttgaaaaccttgtaagtttgggatttcaattatcct

SEQ ID NO: 1863 - DNA, 120 bp, synthetic construct
  source 1..120: mol_type = other DNA
aaggggctgccttggccgtccgtcagttacctcgcttcctgttcagggaaccaagaaatgtagcaggacgagccccagacaaaacctttcagacaccgagttgtagaaggaagggcttta

SEQ ID NO: 1864 - DNA, 120 bp, synthetic construct
  source 1..120: mol_type = other DNA
aaagcaaaaagtttttaaaagaaaatagtggaaagacagagaccctagaagagggagaaggcctaaggcaatttcttcttcctctcttccccatcattctttcagccactgtggagagag

SEQ ID NO: 1865 - DNA, 120 bp, synthetic construct
  source 1..120: mol_type = other DNA
agtttgagtgcccagcaggtgtttcaagtcactgattacgtatctactctgcgaaagttgtttgtgcagcctgtttatcctctcctttggaacttcagtactcttttttttttttttgag

SEQ ID NO: 1866 - DNA, 120 bp, synthetic construct
  source 1..120: mol_type = other DNA
atacatgtgcagaatgtgcaggtttgttacataagtatacatgtgccatggtgatttctgcacctatcaacctgtcatccaggttttaagccccgcctgcattgggtatttgtcctaatg

SEQ ID NO: 1867 - DNA, 120 bp, synthetic construct
  source 1..120: mol_type = other DNA
ctgtgctgggctgcctgttttaaaacttcctataaatgcatgcataggtatggcctcttttgtgtctggctttttgtatttggcataatatctatgtaatccatccatgttgttgcacct

SEQ ID NO: 1868 - DNA, 120 bp, synthetic construct
  source 1..120: mol_type = other DNA
ccaaggaggaaaaaaacccaaaaaactcatagtgaaaatttaagaaaaaaactcagcctgatagaattctcttaccttcattaagagaaaacaaaaattgtagctggggccaggcgcggt

SEQ ID NO: 1869 - DNA, 120 bp, synthetic construct
  source 1..120: mol_type = other DNA
atagtgttaagatgcttgccaagtatccccctgtgaatttctgcttagcactgtgatatcagaattagaaattgtgcagggttctaatctggagatatgggatgttcagtagctaagaag

SEQ ID NO: 1870 - DNA, 120 bp, synthetic construct
  source 1..120: mol_type = other DNA
ggctggtcttgaactcctgacctcaagcgatccaccgtggcccaccctcagcctttcaaatttctggcattacaggcatgagccactgctcccagccaaaccgcagtctttacaagggat

SEQ ID NO: 1871 - DNA, 120 bp, synthetic construct
  source 1..120: mol_type = other DNA
caaccaaagattctcattcttagcccattctgttatccctatgagtctgctaatagttgtcatactaggtcaccctgtatttggatcagaaggtacggtaggagcgcctagggtcatata

SEQ ID NO: 1872 - DNA, 120 bp, synthetic construct
  source 1..120: mol_type = other DNA
acatattatatcagaaactgcagtttaacctccccccacccctggagaattctgcttttcgaatcaggcctttctctttttctgtctgtcttaagtctcaacattgagtagctgtgattt

SEQ ID NO: 1873 - DNA, 120 bp, synthetic construct
  source 1..120: mol_type = other DNA
ctgctccacaaggaatgtacagttttgatatgtgcagggctcaggtcttcaggggataaataagttcctaaatgcgccatcaacaggaatttccttcaggataaataggaaaagaacatt

SEQ ID NO: 1874 - DNA, 120 bp, synthetic construct
  source 1..120: mol_type = other DNA
gtgtatctaactaatctgatggggacttggagaacctttgtgtctagctcagggattgcaaacgcaccaatcagcaccctgtcaaaacagaccactcggctctaccaatcagcaggatgt

SEQ ID NO: 1875 - DNA, 120 bp, synthetic construct
  source 1..120: mol_type = other DNA
tccgaaaactctagttttacagatatgaaccatagcgctagctcttactgtctttcttcaacacgtcctcccatccttccctcctttctccactctgcatttgaccccggtgtattccag

SEQ ID NO: 1876 - DNA, 120 bp, synthetic construct
  source 1..120: mol_type = other DNA
ggagccgaagaccatctcagctttccctagcccagaaagggtgggactggctttatttctgcctgccatcacctcaaaatgccgtgggacaaatcttacatattattattgttatttatt

SEQ ID NO: 1877 - DNA, 120 bp, synthetic construct
  source 1..120: mol_type = other DNA
aaaaaaaaaagatatttcccaccttggattgctgggtcggggggtggtgggtattttcattcataattgtcagattactttcataaacaatggaaacagtttcaggctcctcagcttctc

SEQ ID NO: 1878 - DNA, 120 bp, synthetic construct
  source 1..120: mol_type = other DNA
tagtcttctttaccccaggcatcttctttattctggaatgagcctgcccatccctcaggaagactgaaaggaattcggtcagaagaatattattgacttttatccagacttgatttcagt

SEQ ID NO: 1879 - DNA, 120 bp, synthetic construct
  source 1..120: mol_type = other DNA
atgtatatatatattataaacaacctttatattatctctcattctgtgggctgattgggctcagctgggcagctcttccgctccatacaacatgggctgggccaccatcatctggagccc

SEQ ID NO: 1880 - DNA, 120 bp, synthetic construct
  source 1..120: mol_type = other DNA
agtgatttgtggaactaattaggacagggggataattctaagcaacaaagaactgtaagtgaatgaacacgaattatctccctgtatgagagagaaatgcagaggccaacacaattccct

SEQ ID NO: 1881 - DNA, 120 bp, synthetic construct
  source 1..120: mol_type = other DNA
gtaaaaaaaaaaaaatgcaaagttgacaatcaatgcaaagtaatagaggtggcattttaagtagggtggtcagggtgggcctcatgaaggtgccatttgagcagacttgaagaggagaga

SEQ ID NO: 1882 - DNA, 120 bp, synthetic construct
  source 1..120: mol_type = other DNA
tgagaataaaattatcaatgtctcagctctgcaggctgaaaaaacggaggctttacaaaataaaatcatgcttggaaaacttctcctctgagggatgtcaaaggctgcactgaataagct

SEQ ID NO: 1883 - DNA, 120 bp, synthetic construct
  source 1..120: mol_type = other DNA
ctttccatttggctgctgcttttacagtgtttacaattaccttatttggatggaacgccctgattattcagccttgggacttttgctgcttctgtttcactttttgttttgctgttcctc

SEQ ID NO: 1884 - DNA, 120 bp, synthetic construct
  source 1..120: mol_type = other DNA
ggattttggtacatgtttctgtggttgcaggattctcttgttacctagaaagccacctcctctactgtcactgaaacacctctagggtatatactaaacattggaatattttgaaactgt

SEQ ID NO: 1885 - DNA, 120 bp, synthetic construct
  source 1..120: mol_type = other DNA
acagactttcatttgctttctttttctctctaacccgtaagactgataaaaattgtcctaaagtttctttctttctgctttgtgtgtcagggctcctctgcctttggtgagagcagagtt

SEQ ID NO: 1886 - DNA, 120 bp, synthetic construct
  source 1..120: mol_type = other DNA
gattttccaagggcccaggggaacctgacattattccccctactaaccagacagctctatactaagaccagtcccttagagactgataccaaatctattatgctcatgttattcaaaaga

SEQ ID NO: 1887 - DNA, 120 bp, synthetic construct
  source 1..120: mol_type = other DNA
aacttttggtgtctttaattaccaagacagagtggaaaaggcacatagagatcaaagggaagaaaagagagacaaaagatagtcccaatttttggccttcactcactatgcgaaaactcc

SEQ ID NO: 1888 - DNA, 120 bp, synthetic construct
  source 1..120: mol_type = other DNA
tcctatacacctcctggaacaaactttggaccataatgtgggaatatctgactaaacaaacaatacaaagagagttccttggacctggccactgccagttcaaacttccatttttatcta

SEQ ID NO: 1889 - DNA, 120 bp, synthetic construct
  source 1..120: mol_type = other DNA
ctggacttcctggcagtcctacaaaaccgaagagccttagaccttctcacagttggacaacgaggaacatgtttgtatctagaagaagaatgttgttttcgcatcaatcaaattacaaat

SEQ ID NO: 1890 - DNA, 120 bp, synthetic construct
  source 1..120: mol_type = other DNA
aaaaaaaaaaaaaaattgctgatttcttgctttgtcacctacagcaaatcccggttcatgtgatggttttgcaaggcttccaacctttggctgctaattagctatctcacatcttgccca

SEQ ID NO: 1891 - DNA, 120 bp, synthetic construct
  source 1..120: mol_type = other DNA
aaaaaaagaaaaatgtctctctctcaatgtggtagaaacaccagaactgtttcagcaggtggtagaaataggggatcaaaagttcagaaaagtgggcaggttcaagtggtttaccatgca

SEQ ID NO: 1892 - DNA, 120 bp, synthetic construct
  source 1..120: mol_type = other DNA
tactaaaaggaaccagagatactaatagaaagtagctattagtgtcaactacacagactccaggactgtgccagggaaactgcaaaatgaacctaagatatcttgccttgccagaatgta

SEQ ID NO: 1893 - DNA, 120 bp, synthetic construct
  source 1..120: mol_type = other DNA
ttgtgtatactcacaagctgatttaaaaatttatatggagaggccgggcacagtggctcatgcctgtaatcccagcactttgggaggccgaggtgggcagatgacctgaggtcaggagtt

SEQ ID NO: 1894 - DNA, 120 bp, synthetic construct
  source 1..120: mol_type = other DNA
atatgtggaatgtaaaaaaagccaaactcatatacatggtgagtaaaccggtagttgtcagaggctgggaggtgggaggattggggaggggtaagcaaatgacacaaaatttcttttctt

SEQ ID NO: 1895 - DNA, 120 bp, synthetic construct
  source 1..120: mol_type = other DNA
catccacatgcaagaaaagtgaaatgaaaagagctctcttgaaaggttgttgtgaaggtcatctgtgacaggaacaaaaagtgcccagcagggtctctgacagcaagctcctacattaat

SEQ ID NO: 1896 - DNA, 120 bp, synthetic construct
  source 1..120: mol_type = other DNA
gctgataaaatgggttgcagtaaagaagctagccaaaacccaccaaaaccaagatggtgatgagagtgacctctggtcgtcctcactgctacactcccaccagcaccatgacagtttaca

SEQ ID NO: 1897 - DNA, 120 bp, synthetic construct
  source 1..120: mol_type = other DNA
ttcttcaacttccttgttctttgttttctatttctaaaacccaacttccttgtactctcttgttcctagttacccgctctgtaaacaccaactcccaccagttccaatctgtaacttgca

SEQ ID NO: 1898 - DNA, 120 bp, synthetic construct
  source 1..120: mol_type = other DNA
ttaaaggagaaagggcaagcaggagaggaaagaaaaaaaaaggaaggacaggtaggcaatgatgcgagtggttacatacttgtgaggctgtgattagtccttagtgaatctacattttac

SEQ ID NO: 1899 - DNA, 120 bp, synthetic construct
  source 1..120: mol_type = other DNA
aaaagggaaaaagagaaacaaaagggagggaccaagaccagattatagaaacaaatggaatgcaatcctggaaaagtaatttaggatatgctaccgagaagtccatacttcagtaggcag

SEQ ID NO: 1900 - DNA, 120 bp, synthetic construct
  source 1..120: mol_type = other DNA
tcttctcaaggtctcaaaataacgtgtggttcctaggtctgtgagaaagtgatattcttacttactacctgtcaggaaccctgtaaaggaaatgcgtagacaaagtatgaggtcagtttt

SEQ ID NO: 1901 - DNA, 120 bp, synthetic construct
  source 1..120: mol_type = other DNA
aataaacccctctaactaggcagaattacttttcctttaacaaaagccctatttccatgccttcttatgtttctaccaaaaaccacattctacttttctttgcatgttgcttgtagaatt

SEQ ID NO: 1902 - DNA, 120 bp, synthetic construct
  source 1..120: mol_type = other DNA
tctcttggattccctcttgggattccctgaggaaaaaacagcagtttctcacaaaaatgcgtctgtggtgccttttgcatttttcttaagggatcccaggctattagaattttatttaat

SEQ ID NO: 1903 - DNA, 120 bp, synthetic construct
  source 1..120: mol_type = other DNA
tgcctcttggtgtgagagagggtaataacgtgatttctgtgacatttctcccaaattccataacccgatgtaatcttatcatggctaatacagattaagaaacgttgcacaaaaccactg

SEQ ID NO: 1904 - DNA, 120 bp, synthetic construct
  source 1..120: mol_type = other DNA
atctctgaaatctttaatagcccacagagagaggctgggaaggtgttcctgttatataaatgaaacctctcaggtagtcaaattttatctttttttaaccagctgggggttttacaggtg

SEQ ID NO: 1905 - DNA, 120 bp, synthetic construct
  source 1..120: mol_type = other DNA
aaatactgtgcaccacccccaggaaccccaggatcagaaatatcccagctgctcccaggccactgggaaaatggaagagaccacaaaaggccagaagttagcagtgtgatggttaatact

SEQ ID NO: 1906 - DNA, 120 bp, synthetic construct
  source 1..120: mol_type = other DNA
gaaccagtcaagtgtccattatgcatcagatgcccatgacctatgtgatgagattgaagaaaaacatactaaggttcagggaggaactaagtgtttcatgagatcagcactcaccgtgga

SEQ ID NO: 1907 - DNA, 120 bp, synthetic construct
  source 1..120: mol_type = other DNA
aggttggtaaccatagaactggtcattgaaaatcttttggggtcattcttggacatgtgcagaacagcaaacaattttagtcacctgatgtgtttccttggcttcctgttcagttttcct

SEQ ID NO: 1908 - DNA, 120 bp, synthetic construct
  source 1..120: mol_type = other DNA
tgctagggccttggagggacaaacagggagtgtacatacaattttatactggcagtttttatagtactttgtaggactagagattgtgagataggttgggttcatggatgttaactgaca

SEQ ID NO: 1909 - DNA, 120 bp, synthetic construct
  source 1..120: mol_type = other DNA
ggggacacttttctgtcagtgtttcttctagtatggttaagggggtaacaacatcaaaacaatgtacagcatatttaaatctagcaaggacaaaagaggtctttatttgggggaggaggt

SEQ ID NO: 1910 - DNA, 120 bp, synthetic construct
  source 1..120: mol_type = other DNA
tacatgtattttttttttgaagccatgcctttggattagggcaaactctaggatatttaagtgaattccctgaggaatgtggactctgtaagcaggtgagtgcattattctctgcttctc

SEQ ID NO: 1911 - DNA, 120 bp, synthetic construct
  source 1..120: mol_type = other DNA
cctgccaggtccctgactgaccacagggtgctcccacaaaaggagaagtgacaagaatgtatttaagacattgcactaacacatctattcatgatgttaattcaaaaaattgacttacta

SEQ ID NO: 1912 - DNA, 120 bp, synthetic construct
  source 1..120: mol_type = other DNA
acagcttcaaagaaaggatatgagaataataactcatagagcaagatatctgtttagagtgagtgagtcacaggggagatctgggagggaaacactgcaactctttcattcccagaaaaa

SEQ ID NO: 1913 - DNA, 120 bp, synthetic construct
  source 1..120: mol_type = other DNA
ttgagataacctatattgttttagagatgtatgcatgggagtaaagctttaaagaaaggcgtgaacaggattactatgaaatcaggatgagggtgaactctcacgacagcaaagggattg

SEQ ID NO: 1914 - DNA, 120 bp, synthetic construct
  source 1..120: mol_type = other DNA
agacggacaggaaacagcagaggaaatggctgctgtttcactacagttaaaatgtcttacacatctgtgaactatttgtcctcttctcagaggagggacacttttttaggtactaaaaaa

SEQ ID NO: 1915 - DNA, 120 bp, synthetic construct
  source 1..120: mol_type = other DNA
tcctcctggaatctcttccttggcatctggctcatgataaggttttaggtgtcttgatagtatccaaattggctgctggttttggcctggagaaacacaagcataacctctacccaagtt

SEQ ID NO: 1916 - DNA, 120 bp, synthetic construct
  source 1..120: mol_type = other DNA
ccttgcaaattttttcctagtcccataccagggacatgccccatttcatgcatcatatgttgactttgagggctatataattgctctggaagtagaacttgtgctccccattgttgtaat

SEQ ID NO: 1917 - DNA, 120 bp, synthetic construct
  source 1..120: mol_type = other DNA
tctacattgttttttagtgtgatcatgcttcaaacagttaaaacaagctccaggaaatggagtatttcctttatccactctcagtcctgccattgcctgtgccaacaaagtagctttatg

SEQ ID NO: 1918 - DNA, 120 bp, synthetic construct
  source 1..120: mol_type = other DNA
gaacctcttcctcctttgccgctttagctttagctggcaaataaacctgctctgtaacctcttctgttacttcgtcatactctccttcctcctcatcatcagtgtgaaaaagttccaagg

SEQ ID NO: 1919 - DNA, 120 bp, synthetic construct
  source 1..120: mol_type = other DNA
cccatttcaaagaaaaatgggatttcagcttcttcagtggtagattttcttacactcagcagctaataaaatatctgaaccccacaaaaaacccctgtttatctctgttatctctgggta

SEQ ID NO: 1920 - DNA, 120 bp, synthetic construct
  source 1..120: mol_type = other DNA
ggagccagtcagccactttcaaacatgtttttcaaagtgaaattttaaaggcagtgtcattgtttacttctactaatgctcataggtttagctgtggtcctgctatagagtttgttaaga

SEQ ID NO: 1921 - DNA, 120 bp, synthetic construct
  source 1..120: mol_type = other DNA
gatttcacttattaattcaatcaaaagccattgaagtttatagcaagaggcatcaaagaaggcagaatgtttctatctgttctgggattaacgggggtagaaagatgggaagggcagagg

SEQ ID NO: 1922 - DNA, 120 bp, synthetic construct
  source 1..120: mol_type = other DNA
aattcctttctgctgttgctgtatttgccctgtgacaactggtgcttgaaggaaggagaaatcattatgtgtgcaggaaagcacatgcaattagaaaactgggacatgattcataaggca

SEQ ID NO: 1923 - DNA, 120 bp, synthetic construct
  source 1..120: mol_type = other DNA
accgtgcctgaccatcagctcgggattttaagaaacatgatccttaaaagtaggaagaaagcacataatacctgcaaagccctgggcaaaaatcctcttttacttcagtaatgattacaa

SEQ ID NO: 1924 - DNA, 120 bp, synthetic construct
  source 1..120: mol_type = other DNA
aggcgccagctaccgctcctggccgagattgcgttttctaaagagtaaaacagagtaaatctcttcggcttaactctgtctcttaatactctgaaattttgttcttgcagtgagaacaaa

SEQ ID NO: 1925 - DNA, 120 bp, synthetic construct
  source 1..120: mol_type = other DNA
agcaggctgaaattaaggggataaaatatattacatgcaaaagttaatcaaaagaaagcaaaagtgactatattaatataaacttaagaacaaagaaaatccaccaagaaggcataacaa

SEQ ID NO: 1926 - DNA, 120 bp, synthetic construct
  source 1..120: mol_type = other DNA
acagagcattctttcacctttttgtgacatgcatgcatccaagtctctggtgttttaaataactgaaactgagacctagacccacttatctgtaaagtagaactgtggagaaggaagcat

SEQ ID NO: 1927 - DNA, 120 bp, synthetic construct
  source 1..120: mol_type = other DNA
acattattgatgtcacaaattactcctctgcaggctagcaggctggaaagtcacaatgttgcagtcttcagtctaaaatttgtaaaccaggctggcagattggaaatctaaactgtagtt

SEQ ID NO: 1928 - DNA, 120 bp, synthetic construct
  source 1..120: mol_type = other DNA
tccgggagggaggtgggggggtcagccctccgcccggccagccgccccgtctgggaggtgaggggcgcctctgcccggccgcccctactgggaagtgaggagcccctctgcccggccagc

SEQ ID NO: 1929 - DNA, 120 bp, synthetic construct
  source 1..120: mol_type = other DNA
tgctaaagatgatacagctatcttgcatccatctaaaaacactaaccatttcctcagaaaaaaattcaaactcaatgcatgataagcatttttctcttcgatatactgtaacctaaacac

SEQ ID NO: 1930 - DNA, 120 bp, synthetic construct
  source 1..120: mol_type = other DNA
gagtattactaagagatgctctaaaagatctcctgtatttcaaacatagtcttatttactgccattgtgtagtagcagaccaatttccccctgatgaccaggaccaatcaccccagaaag

SEQ ID NO: 1931 - DNA, 120 bp, synthetic construct
  source 1..120: mol_type = other DNA
ctctgagaaacatcagattatgtaaagaaactgaatccatgaattattggtatacctgaaagagatgggaataatggaatcaatttggaacacacttcaagatatcatccatgagaactt

SEQ ID NO: 1932 - DNA, 120 bp, synthetic construct
  source 1..120: mol_type = other DNA
cacccagatttataaggcaggttcttagagaccgtcaaagagatttagaacctcacacagtagaagtggtggactttaataccccactgacaatattagacagatcatcaagacagaaaa

SEQ ID NO: 1933 - DNA, 120 bp, synthetic construct
  source 1..120: mol_type = other DNA
gagttctgaacttgaggcagtaatgaagagcctaccaaaaaaaaaaaaaaaaagtgcaggaccagatgattgacaggtgaattctactggatgtacaaagaagagatggtaccattccta

SEQ ID NO: 1934 - DNA, 120 bp, synthetic construct
  source 1..120: mol_type = other DNA
acctaggaataatgctaatttgggaggtaaaagatgtctgcaaagagaactactggtcccaaaaagtgtgcattaatgttagcagtagctatgataggctgggtggaatgcccataggtg

SEQ ID NO: 1935 - DNA, 120 bp, synthetic construct
  source 1..120: mol_type = other DNA
ttcattcaattcattgaaggtgtaaattaaacaaaacattgaccttctctgagcaagatggaactctgcagcagaaagcgctgggatttgaactgcaatatccgtcaactgatctcaaac

SEQ ID NO: 1936 - DNA, 120 bp, synthetic construct
  source 1..120: mol_type = other DNA
atagaattaaaaaaatcgacaaatgcagttacattagagacttcacttctctctctctcttttttgtgaatttgttcttattggggaagacggcacagggtgggaaatgtcgccttgggc

SEQ ID NO: 1937 - DNA, 120 bp, synthetic construct
  source 1..120: mol_type = other DNA
taagtagacactggggctgtagcaatgcagagagaggtggaatcaaggcatattcctcttgcattccccacgtcacaggcataaaatacatataagtgttttctttaacaaaaaaaaaaa

SEQ ID NO: 1938 - DNA, 120 bp, synthetic construct
  source 1..120: mol_type = other DNA
gctcaaaatgtcagaaagacatccttctcagaggaagagttccatagagaattaaaatattccattgaaacattggttgtataaagcaagagtggggaaacaagcatgaagggtgggctt

SEQ ID NO: 1939 - DNA, 120 bp, synthetic construct
  source 1..120: mol_type = other DNA
gagatataagcaagagatgatattgtctcttaactcaattttaccaaatgcctgaacgggtgcagccatatgttgctgagactactcctgtttttgggctgcaacgggacaatttttttt

SEQ ID NO: 1940 - DNA, 120 bp, synthetic construct
  source 1..120: mol_type = other DNA
ttgcctactttttgatggggttgtttgattttttcttgtaaatttgtttaagttctttgtagattctggatattagtcctttgtcagatgggtagattacaaaaattttctcccattctg

SEQ ID NO: 1941 - DNA, 120 bp, synthetic construct
  source 1..120: mol_type = other DNA
cttgtgatttttgcacattgattttgtatcctgagactttgctgaagttgcttatcagcttaaggagattttgggctgagatgatggggttttctaaacatccaatcatgtcatctgcaa

SEQ ID NO: 1942 - DNA, 120 bp, synthetic construct
  source 1..120: mol_type = other DNA
tttctgtgggatcggtggtgatatcccctttatcattttttattgtgtctatttgattcttctctctttttttctttattagtcttgctaatggtctatcaattttgttgatctttccaa

SEQ ID NO: 1943 - DNA, 120 bp, synthetic construct
  source 1..120: mol_type = other DNA
cctgctttttttgttttccatttgcttggtagatcttcctccattcctttattttgagcctatgtgtgtctctgcacatgagatgggtttcctgaatacagcacactgatgggtcttgac

SEQ ID NO: 1944 - DNA, 120 bp, synthetic construct
  source 1..120: mol_type = other DNA
ctcatgccatggttttcagctccatcaggtcatttaaggtcttctctatgctgtttattgtagttaaccattcatctaatcttttttcaaggtttttagcttccttgcaatgggttcgaa

SEQ ID NO: 1945 - DNA, 120 bp, synthetic construct
  source 1..120: mol_type = other DNA
tttggttatcttggaatgatctcccctgggataattgttcatgaccaaaaaggattctggtaatgtaccaggatcttctcactgttatgattcttctggtataggagatctgtgattggc

SEQ ID NO: 1946 - DNA, 120 bp, synthetic construct
  source 1..120: mol_type = other DNA
tatttggtctttttccctgtttcctgacaagcaggttccaaaacatttgcaatctcctcagtgataagtatgactttaatatgccaatgagatgactatggggtgaggggctcctaaata

SEQ ID NO: 1947 - DNA, 120 bp, synthetic construct
  source 1..120: mol_type = other DNA
aaagtctcaaatcagtcctttaagctcttacttgaagaactcaggtgggggaaaataacccaaagcaaatagaagaaaggaaatgagcagaaataaacggaactgaacacacacgcacaa

SEQ ID NO: 1948 - DNA, 120 bp, synthetic construct
  source 1..120: mol_type = other DNA
acaccaaattcactataccaaagggacaagttaagtttggtaactgagtgatggaaaaactgcctttcttttgttcctaaacaaataactgcaaagattgaggaccacatatctccccag

SEQ ID NO: 1949 - DNA, 120 bp, synthetic construct
  source 1..120: mol_type = other DNA
tagtgtcagaattgagtcaaattctaggactcccagttgctgttggagaatcagaaaattatttggctggaggaaaaccccatcaccatcccacagagagaaacttacagtatattgggg

SEQ ID NO: 1950 - DNA, 120 bp, synthetic construct
  source 1..120: mol_type = other DNA
ggagtggccctacctctaacctagaagttaggattttttaggcctttgagggggtcacataaaaactaataagtgtcagagattctctccccagaaatatttccacacacaagaaaatat

SEQ ID NO: 1951 - DNA, 120 bp, synthetic construct
  source 1..120: mol_type = other DNA
atttttggtttacaacatgtaaaatgttaagaggagatagaaaccacccgcatccctagaatagcacaacactccagtcacccctgcagttgataatggacatgagtcttaaactccatc

SEQ ID NO: 1952 - DNA, 120 bp, synthetic construct
  source 1..120: mol_type = other DNA
atactactttatgtgtaaattacagaaatttgttttccatagttttctccaagaggtgagtgagaaatgaatctatggaccagggtcagagagcagcattcggaggtgttccttgtgtga

SEQ ID NO: 1953 - DNA, 120 bp, synthetic construct
  source 1..120: mol_type = other DNA
cacccttccttctactcactcattttacaactatgggtgtccttgattcgtctttctcacaccacagatacaatccattggcaaatgctgtgagtctatcttcaaatgtatccagaatcc

SEQ ID NO: 1954 - DNA, 120 bp, synthetic construct
  source 1..120: mol_type = other DNA
gcagcacacgatcaggtttctctcttcaggaaggaacaattctagactatggacccaattttacaaacaaatacaaatctaaattaggctctgctttagattcatgagttgggattggag

SEQ ID NO: 1955 - DNA, 120 bp, synthetic construct
  source 1..120: mol_type = other DNA
caaaggagaggtgtgaagaaatcctgcatctcagtcccacacaggcagctgtctcaggctacagaacacaatagtcatgaacaaattcaggtcagtcatggtaagcgatgacactctgaa

SEQ ID NO: 1956 - DNA, 120 bp, synthetic construct
  source 1..120: mol_type = other DNA
ataatctcctattcattggaaagttctagtctctgagggaggaacagcgacttctggtcctgacctgagtggaggctgcaggactcagaaaagctggaatcaaaccttcagacacattga

SEQ ID NO: 1957 - DNA, 120 bp, synthetic construct
  source 1..120: mol_type = other DNA
agaggaaactcaggaaaactcatgccattctccattcaagggagggcgatattccagtgctgatcccattttcctcccctcctcgtgggaggccatcccgggagatctataggagatggg

SEQ ID NO: 1958 - DNA, 120 bp, synthetic construct
  source 1..120: mol_type = other DNA
aatttttaaagtgttttttaaattctcccttcttacatcttcttttccttctgccttcaagggctgtcacacgaagagtagcgtaggtggataaaaaaacagaatggtcagtaccgcctg

SEQ ID NO: 1959 - DNA, 120 bp, synthetic construct
  source 1..120: mol_type = other DNA
ggacgtgtagagtcaggagttttctctttaaacctggtgaagttttgtctgaaagcaccaggtagagattctcatagagaccagtttcctttttgtttattgatacagtaggtagcacaa

SEQ ID NO: 1960 - DNA, 120 bp, synthetic construct
  source 1..120: mol_type = other DNA
aatcataaggagcccattagttttaaggcagtcacacaaaatgtattaaataccgaatgcaaagaaccccctgccaggctcttctactgctttagaattctttcctctgctccttttcct

SEQ ID NO: 1961 - DNA, 120 bp, synthetic construct
  source 1..120: mol_type = other DNA
catatgttatgtagtcttttgtttggtctctcccttagcataacgatgtttgagatgatgccattcattcatttttgttgctgagcagctgccgagtattgctggaatcccagtttattc

SEQ ID NO: 1962 - DNA, 120 bp, synthetic construct
  source 1..120: mol_type = other DNA
ctcacacacgtatatgaaacgtgactgtttataatcctatccaaaaaagacctgatttcaagcaacagcaggattgcttccgttcaatacttggacctgcaaacatcaaaaaagccactg

SEQ ID NO: 1963 - DNA, 120 bp, synthetic construct
  source 1..120: mol_type = other DNA
tcctttgctattcccagtatacaacaaatgctaaggtcactccacccccacaacaccagaatgaagagttgtctatctcattggattttacttatccctcactggaagaatcaattcctt

SEQ ID NO: 1964 - DNA, 120 bp, synthetic construct
  source 1..120: mol_type = other DNA
tctaaggacagaaacttttagagaggatacagatgatactgaaagaaataaaactcaacgagaaccttcgataatagcacgaagtgaagaaatggggaggatggtaccaggactgccttc

SEQ ID NO: 1965 - DNA, 120 bp, synthetic construct
  source 1..120: mol_type = other DNA
cagattttactgcaatctttgcagagctcgacgggattcttaaaaaagaaatctggaagttaccacctgtgcttttagtgcatctgaaacatttttcctacaatggcaggtggaaacaaa

SEQ ID NO: 1966 - DNA, 120 bp, synthetic construct
  source 1..120: mol_type = other DNA
ttagaactcagaggattgcatttttttctttgagcatattttgagtaactgcagtgctttcttatggaaatgacagggcaaagctatttttctgttggctttgggggcatttgggtgcac

SEQ ID NO: 1967 - DNA, 120 bp, synthetic construct
  source 1..120: mol_type = other DNA
aaggcttccggacttgcaagactgtcttcgctgagcacatcagtgatgaatgcaagagacatttctataagaactggcataaatctaagaagaaggcctttaccaagtactgcaagaaat

SEQ ID NO: 1968 - DNA, 120 bp, synthetic construct
  source 1..120: mol_type = other DNA
attcatgggaccactcaagaaagaccgaattgcaaaggaagaaggagcttaatgctgggaacagatattgcaactggtgggatctcaataaaagttattttccattaaaaaaaaaagaaa

SEQ ID NO: 1969 - DNA, 120 bp, synthetic construct
  source 1..120: mol_type = other DNA
aggaagagacaaatgtgaaaacgcagaaggtagacagacagagaacatcttccaaggaggaagagtctcctaaccacaaggaactctctacttaatgctgcgaagatattttaattacat

SEQ ID NO: 1970 - DNA, 120 bp, synthetic construct
  source 1..120: mol_type = other DNA
aggctaaaggcaaatgataccaggtgggaaatgaggttatcagaaaagatgaagatgatcaaaaatggtaaatactgagctaagtgcaaaaggctatcttgttcccctcatttactctaa

SEQ ID NO: 1971 - DNA, 120 bp, synthetic construct
  source 1..120: mol_type = other DNA
aatgtgtattttgattttattttactggcagcacaataaaccaggacatgctgaaactagaaatcacatccactttccagtgttaaaaagcccagtctagggaggtgagaaggagacagt

SEQ ID NO: 1972 - DNA, 120 bp, synthetic construct
  source 1..120: mol_type = other DNA
aggactccaaaagaaaaaaatgtctaaaatttgtgtcctttaatacaaagtaaacacccattaatcaccagggatagatgtttgtggggcaaaccagaagccccatcatttgctccagcc

SEQ ID NO: 1973 - DNA, 120 bp, synthetic construct
  source 1..120: mol_type = other DNA
atctgtatacaacaaaattgtctatcaacagtgaaaggacaagaaatgtgagttatttataaagtggagcattggacagccatgggagtgaataggctacgaccacacacagcgagatga

SEQ ID NO: 1974 - DNA, 120 bp, synthetic construct
  source 1..120: mol_type = other DNA
gtttctaggataaggcaaaggccctgctcatggattcatccgtaatctgaacacagcacatgaagagtgaacagctgtcaatatctactttcacctcaatgtaaactttcaaaattaaga

SEQ ID NO: 1975 - DNA, 120 bp, synthetic construct
  source 1..120: mol_type = other DNA
cagaagcaatatcacatcattaatacaaaaggtgctcagctgcgggattataataccattgagtgctgagaccacttgaaatcttaagtacattcttagcatatggtctcctggctgtca

SEQ ID NO: 1976 - DNA, 120 bp, synthetic construct
  source 1..120: mol_type = other DNA
gctctttgtcatatgccatcatattccactcatggtgcttgtttctggcttttgtaatccttttcacatcataagtggtgccatctatgtggttttgctacttttgatgccttctgtctt

SEQ ID NO: 1977 - DNA, 120 bp, synthetic construct
  source 1..120: mol_type = other DNA
gccaggccaaggccttggtcaccctatttgtaattttctctgcagttattttgctttcatttattgaacaccttagatatgagctaaaatcccccaccaaatgtgggaaactttcaacta

SEQ ID NO: 1978 - DNA, 120 bp, synthetic construct
  source 1..120: mol_type = other DNA
aaccagaagttctaccctgaaagagacttttgggagagaaggtcacagtccacaattcaatcttctgagacaaatatggatccaggcaccagaaactgtcaagttagatttctaaaatta

SEQ ID NO: 1979 - DNA, 120 bp, synthetic construct
  source 1..120: mol_type = other DNA
ataggactcattgcccaagtttcagggtttggggaaaaagttccattctttttctgaatttgagtaatagcttctggcttactactgggccctggtagattctgaattctatgatcatga

SEQ ID NO: 1980 - DNA, 120 bp, synthetic construct
  source 1..120: mol_type = other DNA
aaaatattgaaggtctcaaagaggtaataaatccactctcatcctgatgtaatgcaaatacgtcactggctttcctacgtggtttgagttttttattgaaaataggcagggaaccccggg

SEQ ID NO: 1981 - DNA, 120 bp, synthetic construct
  source 1..120: mol_type = other DNA
atgtaggataattaaggtttagttttcatggcctcctaaggcatttggaatagaagacagagttcaggtagcactcagagtgggaaatttaatagagtgttctcctcatttcaccaggat

SEQ ID NO: 1982 - DNA, 120 bp, synthetic construct
  source 1..120: mol_type = other DNA
attgtccagtacttcacgttctccaaccttgtaagtaatgaatgtacaagttcaactgtacatttttactagtgggcagttttccacaatatgaatgccattcatgtagttggcgggacc

SEQ ID NO: 1983 - DNA, 120 bp, synthetic construct
  source 1..120: mol_type = other DNA
aggaatttggaaaattccagtctgtgaagtgaagggagaggagatacttccttagcaggaggaagagaatgtaccaagtacagggcagttaaagaaatgtttgtttgatttttttgccag

SEQ ID NO: 1984 - DNA, 120 bp, synthetic construct
  source 1..120: mol_type = other DNA
tgggatggctgggagaatatgtgcatatagacatctgtagagtgggtgacaaataaatgaaaccacctaaatatttaccccaggggagtaggtgcatataacatactatggaacagcatt

SEQ ID NO: 1985 - DNA, 120 bp, synthetic construct
  source 1..120: mol_type = other DNA
tgtggagatactagaatactcacactttgctggtggggatttaagagacatagcccctttagaaagcaggctagcagtagctcaaatttgtgaacattaagttattacatgacccagcaa

SEQ ID NO: 1986 - DNA, 120 bp, synthetic construct
  source 1..120: mol_type = other DNA
aagttacaaatcttcaaagctctgcagtcaaataaacatagtaacaagtgataatgagctgtctggaatgtcttcctagagaactggctgaagcacatgcatgcaaaaggaaggcaatgg

SEQ ID NO: 1987 - DNA, 120 bp, synthetic construct
  source 1..120: mol_type = other DNA
ttcgatgtaatcacaatagtccttataagtgaaaggagtagaaagcagcatcagagttagagctgtgacaacagaatcagaggtcaaagtgatgtgactgctgacttggaagatggagga

SEQ ID NO: 1988 - DNA, 120 bp, synthetic construct
  source 1..120: mol_type = other DNA
tttatttaaaaatgtgagttcgtggtctgagtaatttacctcagtatgactcaagaagggcactggaagtccgttgatctggccagaacagaaccacatatatgaatggaaaaagtggtc

SEQ ID NO: 1989 - DNA, 120 bp, synthetic construct
  source 1..120: mol_type = other DNA
caagtgttttatcagtaatttcttagaggtgcacacagagagagatgagtataattgtgaagctaagttttgtaaagcacagggatggctaagaatgggaaggaactgatcccagaatcc

SEQ ID NO: 1990 - DNA, 120 bp, synthetic construct
  source 1..120: mol_type = other DNA
agatttagcttgccttgtattagcggtatgagtttgttctttcttcccatagtgccacactcagaaacgttatctaagggctcacatatgtatgatcttctaataggggaaccacataac

SEQ ID NO: 1991 - DNA, 120 bp, synthetic construct
  source 1..120: mol_type = other DNA
caaggaaaatggaatggctgaggaaatacaggaaaatgaatcaattgtatcagtagggaatgttgatccgtattggtttctgctcctctcatgttgaaggtctcttattccctgacagtc

SEQ ID NO: 1992 - DNA, 120 bp, synthetic construct
  source 1..120: mol_type = other DNA
agcagaactttaatttctgtcttaatttcttgctgaaactggtaacagtggttgcatccaggcaaggaatttggaagaattgtggatggggtggagaacgaaatttgctttgcacactat

SEQ ID NO: 1993 - DNA, 120 bp, synthetic construct
  source 1..120: mol_type = other DNA
actataattagtgcgggaaaactgcttccaagaggatgcaatgtctaaacagagaactggatgaggaacacagttaatccaggtgaatggcaggagaaatcttttagggaatcagtatca

SEQ ID NO: 1994 - DNA, 120 bp, synthetic construct
  source 1..120: mol_type = other DNA
cagaagttcgtgggattctgcatgaaaacaagcttgaagaaatagtgaaagcagaagatttgcctaacagtatgacactcgaatgaaaaaaaaaccagataggtttagtggtgctgcttc

SEQ ID NO: 1995 - DNA, 120 bp, synthetic construct
  source 1..120: mol_type = other DNA
ctccagataagacccagccatggcactctgatgaaaatcatgtgagaaagctgcatagctgtgtctggattcctgacccatagaaatgtgggataatacatgtgtgttgttgtaagctgc

SEQ ID NO: 1996 - DNA, 120 bp, synthetic construct
  source 1..120: mol_type = other DNA
ccaattccttgattcagtttggggcctgggtaattccagttcaatctcttttaagaaatttaagaatctgaaagagaaagacctgagaatttttgtcccacaagagacagacccacttcc

SEQ ID NO: 1997 - DNA, 120 bp, synthetic construct
  source 1..120: mol_type = other DNA
cacatctgctactttctattagaacctagcagtccttcgtggtactttcatctactgtgtctctgccgattccgtttcctggtgttttatcttctggttgggttaaagattatatgtaat

SEQ ID NO: 1998 - DNA, 120 bp, synthetic construct
  source 1..120: mol_type = other DNA
ctccttcctccctctgtcattggtcacagaacaagtcagtcatgatccagattgaaggagaaacctggagcaaaatggccccagcgcttccccacctgagagggatcagctgaggccccg

SEQ ID NO: 1999 - DNA, 120 bp, synthetic construct
  source 1..120: mol_type = other DNA
gtgtaaaatgctatcattcttgtcatttctttaggtcctttttcttgaggtcttcctcttctctttgggttcccatgaaaatttaccctgttggaagttgatgtcagcaagagacctcct

SEQ ID NO: 2000 - DNA, 120 bp, synthetic construct
  source 1..120: mol_type = other DNA
aattatgtaatttggatcatccctcccattgagtactactggacaagtgggaaaagggtacatatttgaaaaatctgatggaaagtatgaaggggctaaccaagcagtaaagatttgcca

SEQ ID NO: 2001 - DNA, 120 bp, synthetic construct
  source 1..120: mol_type = other DNA
gttattttaattaagagagtcgagatgttgagacagggtagtaaactagaacttgggaacagaatagaaagccctgaacgtatgtagagcagaggcaacattacagatcagtgggtaaag

SEQ ID NO: 2002 - DNA, 120 bp, synthetic construct
  source 1..120: mol_type = other DNA
agttggaaggaaaagggctccggatcagctaattccagggttctcttgattgttgcttttcatcccattcgtggaagtcctgtattagaaggtgcctaaagttcatattatttaatacct

SEQ ID NO: 2003 - DNA, 120 bp, synthetic construct
  source 1..120: mol_type = other DNA
ggtaactttctttttctgagtattgtggagcgtctgcagctgctgtgagtagaagatactaggtactaacgggggatacaaattatttagaatacagtatacgacttgaaatggaaggcg

SEQ ID NO: 2004 - DNA, 120 bp, synthetic construct
  source 1..120: mol_type = other DNA
cctctgcagtatgcctgtgatagggattctgttgatataggctagtggttttcacaaactgttgcatatagcaaaatctggagagatgatttgttttaataaactcaaggctctagcctg

SEQ ID NO: 2005 - DNA, 120 bp, synthetic construct
  source 1..120: mol_type = other DNA
cacagagaagataccagcagacctgccctctccattgcactcaaaatcacactggatttcctagctagtgcaatcaggcaacagaatatatcaactacatgaattaataaaagctttaag

SEQ ID NO: 2006 - DNA, 120 bp, synthetic construct
  source 1..120: mol_type = other DNA
tggaaaaattaacctttactcacaaaagagatgggtttccccctacaccactcatcagagaagagaccatgaattggaatgggaactcggaattgtcatcatcctataattctactcagg

SEQ ID NO: 2007 - DNA, 120 bp, synthetic construct
  source 1..120: mol_type = other DNA
cagcttcttcaggggtgagactttcttgaactcagcatctaataaaatacccaaaccacacgaaaggaccctgtttatctctgttctctctgggtatagaaaaacatgctgaattcttat

SEQ ID NO: 2008 - DNA, 120 bp, synthetic construct
  source 1..120: mol_type = other DNA
ctgaatcatttgaccatgtgaggaaagcagatttttagacttttagcccatcttgaccagagggatcagcaaaaacctggaatgaagaatttcttcctgtgcacaccttttttcttgtgt

SEQ ID NO: 2009 - DNA, 120 bp, synthetic construct
  source 1..120: mol_type = other DNA
tcaatcaaatggcattgaaatttgtagcaagaggcatctaagaaggcagaatgtttctatctgttctgggattaacaggggtagaaagatgtgaaaggcagatggaaaagaggcctcaga

SEQ ID NO: 2010 - DNA, 120 bp, synthetic construct
  source 1..120: mol_type = other DNA
gaataaaatagagtaaatctctttggctcttgatactctgaaattttgttcttgcaatgagaataaaaaaacggagagccaaaggttggtgtcacccagaaggtgagccctccctaactc

SEQ ID NO: 2011 - DNA, 120 bp, synthetic construct
  source 1..120: mol_type = other DNA
catcacacttgcttttctttagtttgacccaccactccctcatcaagaggtaaggtctctccactctttaaacataagcagatctgatatttgcgctacccaataaaatatggcagaagt

SEQ ID NO: 2012 - DNA, 120 bp, synthetic construct
  source 1..120: mol_type = other DNA
atcaatatgaaactctgcttctttacatcttttcccacccctcattttacgttattgatgtcacaaattacacctcagcaggctggaaggctggaaagtcataatgttgcagccttcaat

SEQ ID NO: 2013 - DNA, 120 bp, synthetic construct
  source 1..120: mol_type = other DNA
ccactgtgctggccacaactagtatttataaatacttttttgttgtttttcactaaccatcccatattcccattgctttcagcaagtccctcagctgatcaggtttcttttcctgcttga

SEQ ID NO: 2014 - DNA, 120 bp, synthetic construct
  source 1..120: mol_type = other DNA
catttgtagggtcagtatatcttccaattctgttgtcttcaatatcacctgtcattcactcaccccttcacccccaaaatatagattcttccccaatttatgtctgaaaacaggacccaa

SEQ ID NO: 2015 - DNA, 120 bp, synthetic construct
  source 1..120: mol_type = other DNA
aatttcatagtgcactcacaagtattaatagcagaatagagcaagtggagaaaagaatctcagtgcgtgaagactggctttctgaaataagacaagaagacgagactagagaaaaaagaa

SEQ ID NO: 2016 - DNA, 120 bp, synthetic construct
  source 1..120: mol_type = other DNA
caacccttgtttctgacaaaacagttgttaaaccaaaaaagatagaaaaagacaaagaagggcattacataatggtaaagggttcaattcaacaaggagatctaactatctgaaatatat

SEQ ID NO: 2017 - DNA, 120 bp, synthetic construct
  source 1..120: mol_type = other DNA
tgcaacctctgcttcccaggctcaagtgattctcctgcctcagcctctcgagtagcttggattataggcatgtgtcaccatgcccggttaatttttttgtatttttaatagagatgaggt

SEQ ID NO: 2018 - DNA, 120 bp, synthetic construct
  source 1..120: mol_type = other DNA
tctcaataacctagatagtgaaggaacacacttcaaaataataaaagccaattatgacaaacccacagcgagcatcatactgatgggcaaaggctggaagcatttcccttgaaaactgac

SEQ ID NO: 2019 - DNA, 120 bp, synthetic construct
  source 1..120: mol_type = other DNA
tcacctgaagccaaaaaagagcctgaatagccaaggcaatcctaaacaaaaggaacaaagctggaggtattacactacctgattttttttttttgagacggagtctctaccctgttgtcc

SEQ ID NO: 2020 - DNA, 120 bp, synthetic construct
  source 1..120: mol_type = other DNA
catacatgcagccaacaaacatgaaaaaatgctcaacatcactgataattagagaaatgcaaatcaaaaccacagtgagatgccatttcacaccagtcagaatgactattattaaaaagt

SEQ ID NO: 2021 - DNA, 120 bp, synthetic construct
  source 1..120: mol_type = other DNA
aaataaaagttaaaaaaaggaactgatctgtggattttgcctgttgctgagtaggtctgtttcaattatgcaaaccagcactgagaaaataatcacagagtggtcaggggcccactggaa

SEQ ID NO: 2022 - DNA, 120 bp, synthetic construct
  source 1..120: mol_type = other DNA
ttggtaagagccttttctataagcctttgcactaatccacgaatgcaaggtataatacaacattctacaaggataagtacactgattatgagagccagtgaggtgagaactgaggacatg

SEQ ID NO: 2023 - DNA, 120 bp, synthetic construct
  source 1..120: mol_type = other DNA
ttaaattcatctggtactccaatagcatctatataaacgctgggatcaaaagactcacaagaacacttcttgtactacgatgcctggttgttaattcttttggcgaatgaaatgccaggg

SEQ ID NO: 2024 - DNA, 120 bp, synthetic construct
  source 1..120: mol_type = other DNA
gatagatatattaagtttttctttttatcgttactctggtgggagttgacggaataacggtccatgtctccggagaaggtgatgccttcttgacttgagtataatgagtccacccttttt

SEQ ID NO: 2025 - DNA, 120 bp, synthetic construct
  source 1..120: mol_type = other DNA
atggtaagttggccggatagaaaatccactgtctcatatctcactatttcttacctctaaactatatcccctgaagctgctaggagaaatgtaagagaatcacagaccagaacacagttt

SEQ ID NO: 2026 - DNA, 120 bp, synthetic construct
  source 1..120: mol_type = other DNA
tttccttctgagttttcctcagctcctattttttttagtttttcctgatctgcttgagagaagatagggagtgcagctgaagatggaagacaaggggttagtcaaaaaatgggttctgct

SEQ ID NO: 2027 - DNA, 120 bp, synthetic construct
  source 1..120: mol_type = other DNA
gggcaattctaaagagggtaaggctagaacatgggctgtcactagtaactcttaatttttttacctgctgtatttctggtaaaaaccatataagggggtccaattcatcctgtgtaagtt

SEQ ID NO: 2028 - DNA, 120 bp, synthetic construct
  source 1..120: mol_type = other DNA
cgtaattttcctcggtttccttcctttgaccatacatctgaatggatgtatccctcatttagagtagcaagcaaatttaaggaagggaggagatttccttgattaacttaaaggcctagg

SEQ ID NO: 2029 - DNA, 120 bp, synthetic construct
  source 1..120: mol_type = other DNA
tccttttattattatttcttgcaggtctctcatattcctcctatgagctatgttgttattatcccactgggaatcttgagtaggaaatttctgtttggctgcagggacgttttgaccagg

SEQ ID NO: 2030 - DNA, 120 bp, synthetic construct
  source 1..120: mol_type = other DNA
attttaacatgagtcctaaaggactatcagaggtgatttcactgtctgccttttcctttttaccttctgtcttactcagggtatttcccatgttgaatactggttaggctcagtcccttg

SEQ ID NO: 2031 - DNA, 120 bp, synthetic construct
  source 1..120: mol_type = other DNA
ggcagatccaggcagactaggggacaaaggagttaggccttggttcaagtacaagaacatagaatgtgtttatttctttactgtatgtaacaactccttgggggcacaataaagaatcat

SEQ ID NO: 2032 - DNA, 120 bp, synthetic construct
  source 1..120: mol_type = other DNA
catagataacctcttgccattcttttaccttctgtctctatggattgtggtgaggtggtattaccggtgagtttttctgtaagcagaatgtagttagatcatgttttctacccattcagc

SEQ ID NO: 2033 - DNA, 120 bp, synthetic construct
  source 1..120: mol_type = other DNA
tcatggtgataatgtggaaatgttgaaaatgtcgtttcaattccaggtttaggactttcttgagcatttcctgtaggccctgtctagtggtaatgaagcctttcagcatttgcttgtctt

SEQ ID NO: 2034 - DNA, 120 bp, synthetic construct
  source 1..120: mol_type = other DNA
gtgtcctaacgttaatatttttgcatctgatataacagtcagttcttcctatttttgaattttgtttcatagtggagagcattttcctgaagatgagtctatggtgttggttgcgtgggg

SEQ ID NO: 2035 - DNA, 120 bp, synthetic construct
  source 1..120: mol_type = other DNA
gtgggagggggcgatgaagttgtctcttcatcattaaatgctgtgccaactagtcccttaattttctttttgcctagaggactgaaacatttattatagtttaggtctgctggttatttt

SEQ ID NO: 2036 - DNA, 120 bp, synthetic construct
  source 1..120: mol_type = other DNA
atgctatgaccccaaaactagacggttacatttatacccaagagaagtgcatgagcatctcccttgaaggacatgtatcagaatgtttacagcagcattagacatttcaaccaaaaacga

SEQ ID NO: 2037 - DNA, 120 bp, synthetic construct
  source 1..120: mol_type = other DNA
acccagaattatagagtgaacgtgagaaacaatctctagggagggctttttgactattgcttgtaaatttttagaaacagttgtttgctccttgttttattagatcacaggctaatttcc

SEQ ID NO: 2038 - DNA, 120 bp, synthetic construct
  source 1..120: mol_type = other DNA
ttcattcaattcactgaaggtgtaaattaaacaaaacactgacctcccttgagcaagatggaactctatagcagacagccctgggatttgaactgcagtatcagtcaactgacccactaa

SEQ ID NO: 2039 - DNA, 120 bp, synthetic construct
  source 1..120: mol_type = other DNA
tccatgaaataagtagacattggggctgtagcaatgcagagataggtggaatcaagacatagtcctcttgcattccacacatcacaggcacaaaatacatataagaagtcctttctttaa

SEQ ID NO: 2040 - DNA, 120 bp, synthetic construct
  source 1..120: mol_type = other DNA
aaaatgcacctgctcaaaatgtccaacaatggtcacagagagatatcctcctcagaggaagagttccatagagaattaaaatagtcagttggatgtgtaaaggaaagagtggggaaacaa

SEQ ID NO: 2041 - DNA, 120 bp, synthetic construct
  source 1..120: mol_type = other DNA
tgccgaaactattcctgtttatggattgcactgggataattgttaatgaccaaagaggattctggtaatgtgccaggatcttttcactgttatgattcttctggtgtaggagatctgtga

SEQ ID NO: 2042 - DNA, 120 bp, synthetic construct
  source 1..120: mol_type = other DNA
ctcatcctctcttgtccttttgttttctaccagatagagtcccttgatctgggaattctcatcgtcgacaccatgaacgaaacaaatttctgtttgttaaaagttatccagtctcaggaa

SEQ ID NO: 2043 - DNA, 120 bp, synthetic construct
  source 1..120: mol_type = other DNA
gtacacattgaagtcctcaaaagcctgttaggaaaaagcatgggccacagatgctacaatgatttgtgtctctgtttccaaggtgcatcttcagcttggtgaaataaacttctaaactga

SEQ ID NO: 2044 - DNA, 120 bp, synthetic construct
  source 1..120: mol_type = other DNA
gatagacaaaaacttgatgtaaacctatcctcaagggaatgggtggaaatatgttatttattagtcactggttcattcagccactcttcgtgcctactgggtaccagataaagttctcgt

SEQ ID NO: 2045 - DNA, 120 bp, synthetic construct
  source 1..120: mol_type = other DNA
ctttcaggttaacttttgagcaccctggctgagggtgtccattaaaatgattgggaaggggtggctttgatgtttatttttggtttacaacatgtaaaatgttgagaggagacagacacc

SEQ ID NO: 2046 - DNA, 120 bp, synthetic construct
  source 1..120: mol_type = other DNA
cagcctgcttctgtagccttccccacaataaaactagcccccaataccagatatacgactttctgtgtacattacagaaatgtggtttccatagttttctccaagaagtgagtgagaaat

SEQ ID NO: 2047 - DNA, 120 bp, synthetic construct
  source 1..120: mol_type = other DNA
tctatggaggtggaggtcagagagttaggataattgaaatgaggcaaaaggcagctgttggttgctgaaaaattcagtatcttggcctgaattttggttatatataataagccgtaagct

SEQ ID NO: 2048 - DNA, 120 bp, synthetic construct
  source 1..120: mol_type = other DNA
ctccatccttctactcactcattttacaactatgggtgtccttgattcgtctttctcacaccacagatacaatccattggcaaatgctgtgagtccatcttcaaatgcatccagaatccc

SEQ ID NO: 2049 - DNA, 120 bp, synthetic construct
  source 1..120: mol_type = other DNA
cacacaatcaggttctctcttcaggaaagaacagtccttgatgacgggtccaatttcacagacaaatgtaagtctaaattagactctgctttacagattcatgagttgggattggattca

SEQ ID NO: 2050 - DNA, 120 bp, synthetic construct
  source 1..120: mol_type = other DNA
tgaagaaatcctgcatctcagtccctcacaagacagctgtctcaggctacagaaaacaacagtcatgaacaaattctggttagtcatggtaagcgatgacactctaaacagcccaccaca

SEQ ID NO: 2051 - DNA, 120 bp, synthetic construct
  source 1..120: mol_type = other DNA
gataatctcctattcattggaaagttcgagtctctgagcggggaacagggacttctgctcctgatctgagtggaggtaaagtgactcagaagtgctggaatcagagccccaaacacactg

SEQ ID NO: 2052 - DNA, 120 bp, synthetic construct
  source 1..120: mol_type = other DNA
gaggaaactcaggaaaactcatgccattctccattcaacggagggcgacattctagcgctgatcccattttcctcctcttctcgtgggaggccatccccggcgacctataggagatgggg

SEQ ID NO: 2053 - DNA, 120 bp, synthetic construct
  source 1..120: mol_type = other DNA
gtgtagagacaggggttttctctttaaacctggtgaagttttctctgaaggcaccgcatagggattctcatagagaccagtttcctttttgtttgttaatacagtaggtagcacaatatt

SEQ ID NO: 2054 - DNA, 120 bp, synthetic construct
  source 1..120: mol_type = other DNA
ctcagcagtcctgctaatgtgactcaggtcatgtcatttcttcacttgcaatggttgggttttggtctaccattttgctatacgttttcaatttgtctcatatctttttgtttctgttcc

SEQ ID NO: 2055 - DNA, 120 bp, synthetic construct
  source 1..120: mol_type = other DNA
caccactctgttttctgtcactgcaatactgaaatttctagaatgtaatggacgtgcagtcgtatgttatgtagtccttcgtttggtctctcctttagcataacgatgtgtgagatgatg

SEQ ID NO: 2056 - DNA, 120 bp, synthetic construct
  source 1..120: mol_type = other DNA
ccaccatgcctggtccttctattggtttcttatttcattttcttgccatgttgcactgatttggatgcctcttaggtgtttaaacaagaatgatgagagctcacatgtatgtttacaagg

SEQ ID NO: 2057 - DNA, 120 bp, synthetic construct
  source 1..120: mol_type = other DNA
taaagaaaatgtggcacatatacaccatagaatactatacagccataaaaaagaatgagattacgtcctttgcaggaacatggatggagctggaggccattattcttagcaaactaatgc

SEQ ID NO: 2058 - DNA, 120 bp, synthetic construct
  source 1..120: mol_type = other DNA
cgtttagaaagtgagtaaaagaaaggatgcatagggaagcccacaagtttgcttggcttctgcagatggagagaggtcgcttttctgccttctggatgtttagtaacttattttttattt

SEQ ID NO: 2059 - DNA, 120 bp, synthetic construct
  source 1..120: mol_type = other DNA
gatcgacaagtctcggagatggttttttgaaaacaaatcctagccagtcttgagtatcatcatcctacgatttcagaactatcgtgaatataaaagtaatcaaagaacagtcctgcccag

SEQ ID NO: 2060 - DNA, 120 bp, synthetic construct
  source 1..120: mol_type = other DNA
tatttattcagtgtgtattttgattttattttactggcagcacaataaaccaggacctgctgaaactagaaatcacatccactttccagtgttaaaaagcccagtccaggcaggtgagaa

SEQ ID NO: 2061 - DNA, 120 bp, synthetic construct
  source 1..120: mol_type = other DNA
tgggccattccacccagctaacctattaatatttttactgtttctttttaaagccagctccatagctggaatatttcctgtgttggatcctatttgctggatccatgtcattctctggtt

SEQ ID NO: 2062 - DNA, 120 bp, synthetic construct
  source 1..120: mol_type = other DNA
agcagtatggagtttgttaccagtgagaacctgctcactggctttaaactggttttcttaccttctcagttccatttctccgtacctcaattgatgatttctggtaagacctagaaaata

SEQ ID NO: 2063 - DNA, 120 bp, synthetic construct
  source 1..120: mol_type = other DNA
caatttctggaaaaaacgtgtcactttcaaagtcctgcatgatctttgtcacaaatagtttaagatggcctgggcgactcatggcttccttataaacagaactgccaccaactatccaaa

SEQ ID NO: 2064 - DNA, 120 bp, synthetic construct
  source 1..120: mol_type = other DNA
ctgggtgctcagagggaagatggggagggggcttcgtgcaaaacagtaaccatactctataaattattttttcattagcctttgtgtcataaaataaaatctaggactccaaaaggaaaa

SEQ ID NO: 2065 - DNA, 120 bp, synthetic construct
  source 1..120: mol_type = other DNA
tgtaaaatctggatataacacaattgtctatcaacagcaaagggacaagaaatgtgagctatttataaagtggagcattggacagccatgggagtgaataggctatgaccacacacagca

SEQ ID NO: 2066 - DNA, 120 bp, synthetic construct
  source 1..120: mol_type = other DNA
agctgccactgctgagggcccagcccaccaaaagcagctgtttttttgacggagaaataaaacaggcagtggtaattaagaataaaataacattatgatagataaatatgccactaaaga

SEQ ID NO: 2067 - DNA, 120 bp, synthetic construct
  source 1..120: mol_type = other DNA
ggagataatgacattttattagatgcagaaattactgcagatgaaattcaacactccatctcacccacatttcttcagttatctccacttctaagaacttgtgatcagtactcgctttgg

SEQ ID NO: 2068 - DNA, 120 bp, synthetic construct
  source 1..120: mol_type = other DNA
atgagttatttatgttccagcaaacagtggatgaatgtgactatggagagcattgtttcaaaatgttttaacaaatatatcattgaagttcttgctattttattcaatttcagccactat

SEQ ID NO: 2069 - DNA, 120 bp, synthetic construct
  source 1..120: mol_type = other DNA
ataacctcaagtgaatgaacacgcatcaccctctgtatgagagagaaatgcagaggccaacacaattcaccttgacagacagaaaaatttaaagttggggaatatcatggaccgcttctt

SEQ ID NO: 2070 - DNA, 120 bp, synthetic construct
  source 1..120: mol_type = other DNA
aatctggagctgaaatgtacgggaagcaaaatggaaaattgactggagggcttcaagagcagattttagtttgcagaatgaagaatcagtaaacgcaaacataggccaattgaaattgcc

SEQ ID NO: 2071 - DNA, 120 bp, synthetic construct
  source 1..120: mol_type = other DNA
tcacaatggcaaattttgtatttacgtgcattttaccacaactaaaaagaggctggcaaatatattccaagtttgcttgggaatctgcccatctgtcttttcccctcaggatttcatctc

SEQ ID NO: 2072 - DNA, 120 bp, synthetic construct
  source 1..120: mol_type = other DNA
ggctttaatgttagggaagttatgtttgcatttctaaaaaggatcctgctcactagtgaatatatggtttttgtctgtgcagaatggagttctcagcagaggaatgaaagacagccctag

SEQ ID NO: 2073 - DNA, 120 bp, synthetic construct
  source 1..120: mol_type = other DNA
attgtgaaggaagaactcatttcttttctctggtggagcactcggtaggcatttctgccctttgggttcaaatgagaaagtagctttagcctgagggagaaagaagattatgactattat

SEQ ID NO: 2074 - DNA, 120 bp, synthetic construct
  source 1..120: mol_type = other DNA
cattaccttttccttagggaaagctggattaacttcgccaaatgtggttgaatgtaactggcaaataattctcagaggaatttaggagttcagtgtctttagcttcattaggatctgccc

SEQ ID NO: 2075 - DNA, 120 bp, synthetic construct
  source 1..120: mol_type = other DNA
tttaaatccaaatagattagagaaacaattcaagaaaccccccccccccccgcaccaaattcagtacattcattcttaaaattctgttccagtgtccctatgccccagtaagctaggctg

SEQ ID NO: 2076 - DNA, 120 bp, synthetic construct
  source 1..120: mol_type = other DNA
agcttccattgtaaatgtgtgtgtttacatatgccaagtacccagaaagatgtctggaacatggcaacacccaccacagaagtagtagctgcaattattgcctccttaaaacagtggaga

SEQ ID NO: 2077 - DNA, 120 bp, synthetic construct
  source 1..120: mol_type = other DNA
ttatttgcctcctcaaaaagcgtaaaattatgtaacataatactttaaaaatttctatcaacacaaaactaatctgggcgcagtggcttccggtgagccactgggacagacggcatcgtc

SEQ ID NO: 2078 - DNA, 120 bp, synthetic construct
  source 1..120: mol_type = other DNA
ggatgaactgacagatacacagcaaagctccacatacttttccttttctttgtgcctgcaaagttcttgttcagtgtctctctctttcagctactactgctggttggttttaaaaaaaca

SEQ ID NO: 2079 - DNA, 120 bp, synthetic construct
  source 1..120: mol_type = other DNA
catgtgaattttcactccaaaaacacaagctagaagcttaagtgaaggacacctagggcaaatggtggctgaaagtgaggaagatccaaattactgttgcttgtactgtattaggaaaag

SEQ ID NO: 2080 - DNA, 120 bp, synthetic construct
  source 1..120: mol_type = other DNA
tcaccccaaggtggactctccatcacgttagacttcctggagcatacttgcattctatcatttgagtgtgtcccggtatacaacattctcttgcaaattttctgattataactttctgta

SEQ ID NO: 2081 - DNA, 120 bp, synthetic construct
  source 1..120: mol_type = other DNA
caggaaacatgaagaaagcaggtgtgaggactgaaccaactgcacggtatgtaaagacatacttggtacatagtagatacaaagttagctttggtctttggtgaattcatgaatatgatt

SEQ ID NO: 2082 - DNA, 120 bp, synthetic construct
  source 1..120: mol_type = other DNA
atgtgggggccatcactgaatcatcctcgcatagccaggatcttccttttgtgtttaattgggtcgtggtaggaaactgaagttcaaataaataggttgttgtgaatgttaataaaatac

SEQ ID NO: 2083 - DNA, 120 bp, synthetic construct
  source 1..120: mol_type = other DNA
tgggtgaatataagggatgggacatgcagccacactctcttccatcccttggtttctggacccaagtttcttcctactgagaatacagcaccgtagtgatgtctctgattcaataaatgc

SEQ ID NO: 2084 - DNA, 120 bp, synthetic construct
  source 1..120: mol_type = other DNA
ccaatctataactctgtaggtcacacagaagccaattcatacaaccacttggaattacgtggttctcagtgtcctgtggtcaagaattctatctgatcagggccagcaacactaaaagtt

SEQ ID NO: 2085 - DNA, 120 bp, synthetic construct
  source 1..120: mol_type = other DNA
tgacagaagagttataatagctctcagggaaagtgtaaataaatgtggtatgaatgtgaataactccatatccactttctagctggaaaggaatgcactcagcaaatcctcggctgcaca

SEQ ID NO: 2086 - DNA, 120 bp, synthetic construct
  source 1..120: mol_type = other DNA
tttccacagttctgttatgtatgtgtttcagtcgatactgtactgagtaaagcaaggactgccagtggggagtggcggatgtcttgaatttggtgaatgcctttatattgttacaaagtt

SEQ ID NO: 2087 - DNA, 120 bp, synthetic construct
  source 1..120: mol_type = other DNA
ctgggtaacataaggaggcctcccttcttaagaaaacccaaacaagcactgcatagctacacggcagagtctacaaacatttaacacaaaagaagaaagacatagaaaactcttgatatt

SEQ ID NO: 2088 - DNA, 120 bp, synthetic construct
  source 1..120: mol_type = other DNA
catgattaattaaatgcagtttgtttggtgaaggaaattttgttcaaatcttggtctaagtgggaaagggattctaggggatccagtgcagcagttatgggtttcagtatgctcacgacg

SEQ ID NO: 2089 - DNA, 120 bp, synthetic construct
  source 1..120: mol_type = other DNA
tttcttttatgagatttttggtattccttcattagtcagagctgaagatctacatatatgtctaccaagcaagtgtgcatgtcccactagccagtttgttagtcttgccaatgcaccaca

SEQ ID NO: 2090 - DNA, 120 bp, synthetic construct
  source 1..120: mol_type = other DNA
gactcagatgcccaaactatgaaaatgagagaatctatcccactctctcaggtgtggtgagattcatattatatgacaatcggtcgtctacacattgatcacactctcagtattgccttt

SEQ ID NO: 2091 - DNA, 120 bp, synthetic construct
  source 1..120: mol_type = other DNA
aaaatttccctgcagatctgtctgctaactgggcctggaagaaatacctcagaaacaataagcaaagataacaatattttgattcacaaataccattccctactaaaaggcaccagagat

SEQ ID NO: 2092 - DNA, 120 bp, synthetic construct
  source 1..120: mol_type = other DNA
gcccctgagtttccactcctggtttttgtgcatgcgggtgactgtgcaggatgacttagtgtcgtcatgcttatgagttattttgaatcttgcttttcaaaactttattatcaatacaca

SEQ ID NO: 2093 - DNA, 120 bp, synthetic construct
  source 1..120: mol_type = other DNA
gtccttggatttctagatgctggaaatccaagtggtgactagacaaggtccctgcctcgaagaacatgacaaccaatgaaacaaatgaaaacaattctaataccggtgataattgttatg

SEQ ID NO: 2094 - DNA, 120 bp, synthetic construct
  source 1..120: mol_type = other DNA
ttaaaagattaaggctggggtaaagctggaacattactaggcaggaaggaacatctgaaacatttgctgaaatggagttgaccctttacctagccatagatttgttgcctcacgatttca

SEQ ID NO: 2095 - DNA, 120 bp, synthetic construct
  source 1..120: mol_type = other DNA
ataactgtcccagctcctgaaataaaagcacaggtgcacaaaataccgactgttgcaagcaatgcctaggtggggatgtttcctaggcgccaggtttagcactttgactttgtatgtaca

SEQ ID NO: 2096 - DNA, 120 bp, synthetic construct
  source 1..120: mol_type = other DNA
tccttcttcctctgccatttattccctgagtgtcctcgcctttcctccgctacctggaccccactacagtaatgcacactggcctggactccctttgtaaccaccaagtgggttcatctt

SEQ ID NO: 2097 - DNA, 120 bp, synthetic construct
  source 1..120: mol_type = other DNA
gctttgagaataaatggaacagggtcccctgtgtccccactcatttgcgttttcctttttattacagccaaccgcttttgtaaatattgttacacatctctctattccactgaaaacatc

SEQ ID NO: 2098 - DNA, 120 bp, synthetic construct
  source 1..120: mol_type = other DNA
gttatcccagtctctggagtcactgtcaaaactttggtgaggaatcttccaggttttcccctacttcaaatatatattaatattatgtaagtgatattagtggcattttcgcccaggctg

SEQ ID NO: 2099 - DNA, 120 bp, synthetic construct
  source 1..120: mol_type = other DNA
aaaaaacaaaaaaactctcctttactttttctctccccttttcttcctatctcttccctcatttcttcaacacgtccccccatccttccctcttttctccattctctgcatttgatcccc

SEQ ID NO: 2100 - DNA, 120 bp, synthetic construct
  source 1..120: mol_type = other DNA
gcgccgttattccgtttctatatcagtaaacacatttcattttccgtagaccagggcggggtgacgggtgatcccagtcctcgcagtgaattccgggcagcaaaattcaaaacacatgcg

SEQ ID NO: 2101 - DNA, 120 bp, synthetic construct
  source 1..120: mol_type = other DNA
aaaagtgtaggctagggatcatgggggaatagttagtaatgacagggatagttgaacttaaaaaaaaagtttgtgaggctgacaaagaagaaacggacacatttcctgatcttggagggt

SEQ ID NO: 2102 - DNA, 120 bp, synthetic construct
  source 1..120: mol_type = other DNA
ccattgttgctgattgtttggttgaagaggcaagatggtctgaaatgatcccaagatgtggacaatatgtgcttctcatgtggttcccattccattttaaatgtttccaggcagaaacaa

SEQ ID NO: 2103 - DNA, 120 bp, synthetic construct
  source 1..120: mol_type = other DNA
tggggaaagaggaaatcagaagggaccaaggatggtgatgttcttaagagaaactgaggaggaagagaggatgatatggtggcagacgtatagagagtctttgtagatctctcacattgg

SEQ ID NO: 2104 - DNA, 120 bp, synthetic construct
  source 1..120: mol_type = other DNA
gatctggaaacaggtctgcaaatctggtcactggtctcattgccagtaacgctgtgcgcggttgagggagtgtgttgggagaatagccacgcgttgtctgtcctggaaggaacaagccag

SEQ ID NO: 2105 - DNA, 120 bp, synthetic construct
  source 1..120: mol_type = other DNA
tcctgcgacttctctcatccccagctcattctcccctcgcctctggctccgagggtcctctcctctctctcatcccacccctactaatgaccagtgatctaaggacaccagattccctct

SEQ ID NO: 2106 - DNA, 120 bp, synthetic construct
  source 1..120: mol_type = other DNA
aggctgagaatctccccctctaccttggttttctctctctggccagcacccccaccccttgctttgtttttaatttttaacttttgtttgggtacgtagtagatatatatgtatatattt

SEQ ID NO: 2107 - DNA, 120 bp, synthetic construct
  source 1..120: mol_type = other DNA
ctgatcctttgtcagatgaatagtttgaaaatattttctcccattcttggatggtctcttcattttgtttattgtttcctttgctgtgcagaagcctttttacttgatatgatcccattt

SEQ ID NO: 2108 - DNA, 120 bp, synthetic construct
  source 1..120: mol_type = other DNA
ttgaactcctgacctcaggtgatccacctgcctcggcctcccaaagtgctgggattacaggcatgagccaccacgcccagccacatcactgttttatagtttttattggagaggtctttc

SEQ ID NO: 2109 - DNA, 120 bp, synthetic construct
  source 1..120: mol_type = other DNA
aattatacattacataaattttactgttttaaccacttttaagtgtatactcggtggcattagatacattcacatttttgtgcaacccaaaactctgtgcccattaatcggtaactcccc

SEQ ID NO: 2110 - DNA, 120 bp, synthetic construct
  source 1..120: mol_type = other DNA
tttttgtatatagtgcaaattaagggtccaattttattttaacaccccctgcccccagaactatttgctgaaaagatcaactgactctttgtcacctgctcaccccagtggacactagct

SEQ ID NO: 2111 - DNA, 120 bp, synthetic construct
  source 1..120: mol_type = other DNA
ctcacagttttctttgtatatgaaatcctcgttcttgtccctttgcccgtgtgcatttcctgccccaggaaggttgggacagcagacctgtgtgttaaacatcaatgtgaagttacttcc

SEQ ID NO: 2112 - DNA, 120 bp, synthetic construct
  source 1..120: mol_type = other DNA
tgctatggatgaaggcatttcctgttggcacatcgtgtcctgattttcctctattgttagagccactggataaagacagagggtcagggactggaccatccagtgttgtaatcagggcaa

SEQ ID NO: 2113 - DNA, 120 bp, synthetic construct
  source 1..120: mol_type = other DNA
tgaaatgtttacattctccctggtcccatcctgagctgcccaccaggtaaaagtgggttcaaaacaagacctacagaccaacttgaattaacacttgtttaaaaaaaaaagtgatagtgg

SEQ ID NO: 2114 - DNA, 120 bp, synthetic construct
  source 1..120: mol_type = other DNA
aaacatcttcagccaccagaattcagttaacatttataaaacagtccacacaggaagagcagaacacactagtcaaatccacactgaatataggtaaaggtaaaacatatcctgggccat

SEQ ID NO: 2115 - DNA, 120 bp, synthetic construct
  source 1..120: mol_type = other DNA
tttcagggaaagtgctggtgcttcagagtcattggcagacattccatgtttctgctgttgctgctggctgctgctatttttgttattattattttctatgtccgttgttgtaagaagaaa

SEQ ID NO: 2116 - DNA, 120 bp, synthetic construct
  source 1..120: mol_type = other DNA
ctgtgggcaggaatggtttcctcataggtcactggagttttggccaggaaaagagtatgaagttcatgtgccagtttctcaaaattcctgctttcaatgttgatgtccagtaaagatatt

SEQ ID NO: 2117 - DNA, 120 bp, synthetic construct
  source 1..120: mol_type = other DNA
tggcaggggctgggaaaagcaaggagggaggaagaaaaaagtgggggcctcatcttccctcagagaaagggcaaatctggttttggagcaactgaagagagaaaagtccccagggaataa

SEQ ID NO: 2118 - DNA, 120 bp, synthetic construct
  source 1..120: mol_type = other DNA
ctttccctcttggtgcctcagtttcctgacctatgaaacagagaaaataaaagcacttatttattgttgttggaggctgcaaaatgttagtagatatgaggcatttgcagctgtgccata

SEQ ID NO: 2119 - DNA, 120 bp, synthetic construct
  source 1..120: mol_type = other DNA
gtaattttataccatagatgtttactctttaaacagacacttctagtctgttttatttcatgtgtctgggagcggataaagtgtgaggttcagggagaaagagaggtctgtctcaatgcc

SEQ ID NO: 2120 - DNA, 120 bp, synthetic construct
  source 1..120: mol_type = other DNA
cattaatactgcttgatttttccgttgcagtcattatctgttgcacagcacagtggtgaatgcaatagttaattgtacctgttccctttcactcttcccattctttcatcttcccgatgt

SEQ ID NO: 2121 - DNA, 120 bp, synthetic construct
  source 1..120: mol_type = other DNA
agtgaccctcctacctcatcttcctaggtagtcaggaccacaggccacatcctaatatatttttaattaactgatgcagtttctttctaaattagtaagagggctgagcattttttcatt

SEQ ID NO: 2122 - DNA, 120 bp, synthetic construct
  source 1..120: mol_type = other DNA
ttcaacatatctactatcattttgcctctctccaggaagaggaaagaaatgtattaaggtgctctttggcacagcatttaatggtaaagaaagaaacagtataactggccggtgctgggt

SEQ ID NO: 2123 - DNA, 120 bp, synthetic construct
  source 1..120: mol_type = other DNA
atctgtggaagtgaggctgacacatttgcaaaatgcattgagcactagtacaccatgcatttatttacttttctttactccacagttgttttgaggaggcttccagtgacaaacacaaca

SEQ ID NO: 2124 - DNA, 120 bp, synthetic construct
  source 1..120: mol_type = other DNA
gtttttgatattgtttgtatttgagctgcagcctggggcttagaaatgtgacttgggtattttgccaaaatggtatgtttttctatagaatttgacgttgtggagaccctgcttttctgc

SEQ ID NO: 2125 - DNA, 120 bp, synthetic construct
  source 1..120: mol_type = other DNA
aaacaaaaaagaaatggtaaatccaaccccacccctgacataatgcaactacaaaccccactggctgtcctacgtggtttaagtttttgattgagaataggcaaggaaccccaggaaaaa

SEQ ID NO: 2126 - DNA, 120 bp, synthetic construct
  source 1..120: mol_type = other DNA
ggagatgcacgatgaggtgtttagtggtgaaatatcatgggtctagcaagttactttagaatggttcagtcaaaaatcttagtctcttcattctgtctctcttcatacatacacacacac

SEQ ID NO: 2127 - DNA, 120 bp, synthetic construct
  source 1..120: mol_type = other DNA
atttgattctaaaaatggaggccaagagcctcaaaataaaaaaacagagtggaggtctgctcctgtactcaccattctgatgaatgtaccttgggatcctgaatgagcaccaaaaataaa

SEQ ID NO: 2128 - DNA, 120 bp, synthetic construct
  source 1..120: mol_type = other DNA
tcataggagtttatccttgcaggtattaccaaactgcttccttagctatcaacatcctaggaccatgggtcatgacaagcaaggaatgtaccctgctagtttaaagataaacttgatttg

SEQ ID NO: 2129 - DNA, 120 bp, synthetic construct
  source 1..120: mol_type = other DNA
gttttctgtccttgtgatagtttgctcagaatgatggtttccagcttcatccatgtccctacaaaggacataaactcatcctttttatggctgcacagtattccacgatatacaccacat

SEQ ID NO: 2130 - DNA, 120 bp, synthetic construct
  source 1..120: mol_type = other DNA
ttccccactttatgttttcatttcctttgtcagagatcagttgactgtaagtatttggttttatttctgggttctctattctgtttcattggtctacatgagtctttagggttttctagc

SEQ ID NO: 2131 - DNA, 120 bp, synthetic construct
  source 1..120: mol_type = other DNA
ttttgtgtgtgtgtgtatatatatattctatatatatattctatatatatattctatatatatattctatatatattctatatatatattctatatctattctatatattctatatatct

SEQ ID NO: 2132 - DNA, 120 bp, synthetic construct
  source 1..120: mol_type = other DNA
ctatatatattctatatattctatatatatatcctatatatatcctatatatatcctatatatcctatatatatatatcctacatatatatcctacatatatatatcctatatatatatc

SEQ ID NO: 2133 - DNA, 120 bp, synthetic construct
  source 1..120: mol_type = other DNA
tacatattctatatatatatattctatatatatatattctatatacatatatattctatatatatattctatatacatatatattctatatatatattctatatacatatatattctata

SEQ ID NO: 2134 - DNA, 120 bp, synthetic construct
  source 1..120: mol_type = other DNA
gggaggatcctaatgaagctggggacactaagtgtgtaaattatgatgaaactttttttgctagaagaatcagcttccccgtccctagtattggcaacatcccctccccagcccatgctg

SEQ ID NO: 2135 - DNA, 120 bp, synthetic construct
  source 1..120: mol_type = other DNA
taattaatcatggtgttcctaggaatgaaattgataggaagcctacttcattcctacttaatttatacaagcagaaaacttctatgtgcaatggacaaaagactaattttaatcataaaa

SEQ ID NO: 2136 - DNA, 120 bp, synthetic construct
  source 1..120: mol_type = other DNA
aggaatatgaatatgaatcagtcttatggaatatcagtagggaatgttgatccgtattagtttttgcttcttgcatgttgaaggcctctaattcccggacagtcttcgtttggccgtcca

SEQ ID NO: 2137 - DNA, 120 bp, synthetic construct
  source 1..120: mol_type = other DNA
ctttttctccattcctgtccataaggcccacaagaagcaatttgccttcagctggcaaggccagcaatatgcgtttactgtcctgcctcaggggtatatcaacaatccagctttgtgtca

SEQ ID NO: 2138 - DNA, 120 bp, synthetic construct
  source 1..120: mol_type = other DNA
actcctgccaccctgctttctcttcctcagcctgcaccgatggcctcatgaggagttccctatgatcagttgacagaggaacagaagaatagggccttgttcacagattgttctgcacga

SEQ ID NO: 2139 - DNA, 120 bp, synthetic construct
  source 1..120: mol_type = other DNA
agcagctggattgatagaatggtgtaatgaccttttgaagtcacaataacaatgccaactaggtgacgatactttgcagggctggggcaaagttctccagaagactgtgtatgctctgaa

SEQ ID NO: 2140 - DNA, 120 bp, synthetic construct
  source 1..120: mol_type = other DNA
tgtctttgtttgaagattatgtatgatctcaggagatgagtatgggttcaagttgacaaggggtggacttgtgatggttaatactgagtgtcagcttgattaaattgaatgatacaaagt

SEQ ID NO: 2141 - DNA, 120 bp, synthetic construct
  source 1..120: mol_type = other DNA
ttccaggaatttatcaatatcaatctattctagattttctagtttgtgtgtgtaaaggtattcatggtagccttgaatttctgtggtatcagttgtaatatatcctgtttcatttctact

SEQ ID NO: 2142 - DNA, 120 bp, synthetic construct
  source 1..120: mol_type = other DNA
ggttgttgccttaataccttgttttttccatttcatagtgttgttgaagagtgatggctaaatgtatccagcataattcacctacacttagttttctagataattgagttgggtggcccc

SEQ ID NO: 2143 - DNA, 120 bp, synthetic construct
  source 1..120: mol_type = other DNA
caggttagagggctcagaagaagacatgaacatgtgggaaagtttggaacttcctagagactcagagggctccgaagacaggaagatatgggaaagcttgaaacttcctagagacttgtt

SEQ ID NO: 2144 - DNA, 120 bp, synthetic construct
  source 1..120: mol_type = other DNA
acccagaggtggggacagatgctaacaggtccatcttataagtgcaacatgaaatttaaggtcagggaatctcttaacttttcttgaaggacctcatatttagcttcttgactcaaaatc

SEQ ID NO: 2145 - DNA, 120 bp, synthetic construct
  source 1..120: mol_type = other DNA
cagaacatggcaagacttcagcaaatacatcagtcagctggatgaaggaggcaggtgtgagccagcaaaaaaaagcttgtgattttattggagcatgaatttaaaagtgttgatgtggct

SEQ ID NO: 2146 - DNA, 120 bp, synthetic construct
  source 1..120: mol_type = other DNA
ctttctggcctttcaaaagcgccagagacatcagaaatgaaatcgtacacacttattcggagttttccacaatcattgaaatttctgtgagtgccaaagttaagtttttggcaaccccgt

SEQ ID NO: 2147 - DNA, 120 bp, synthetic construct
  source 1..120: mol_type = other DNA
gtgtaggacttgaaacgaaaaacgaaagattagaaaagtgtcagataataaccacaagaagtttcctttgtggcctgaagacgttgagttcttagggtctgcttctattatgcttggcaa

SEQ ID NO: 2148 - DNA, 120 bp, synthetic construct
  source 1..120: mol_type = other DNA
ccaaccttggggcctcggtccaggaaggagggaggctccagagagcagaagggagatgaaatggatcataagagaagaaggaatcataccaaacactggaactgtaggtcaattaaacct

SEQ ID NO: 2149 - DNA, 120 bp, synthetic construct
  source 1..120: mol_type = other DNA
tgaaaatgttttctcctgttcagcagattgtctcttcactctgtcaattgttttatttgctatgcagaagcttttttagttattatagtcctatttgtctggttttatttgtgttttcta

SEQ ID NO: 2150 - DNA, 120 bp, synthetic construct
  source 1..120: mol_type = other DNA
atcccaaccccatgggacagaagctcctgcactggaaacccttctgaccttgccctatgtgtctgttcatggggctctttatttgtgtcttttaaaatatctttttaaataaactggtaa

SEQ ID NO: 2151 - DNA, 120 bp, synthetic construct
  source 1..120: mol_type = other DNA
ttgcaggacctttgtgatgctcaggaatgtcctgatgtcagcggagatgaaggaaaaccagagattcaaaagtcaaaggaaagggccatttaccataattcatatcatacatatttcctg

SEQ ID NO: 2152 - DNA, 120 bp, synthetic construct
  source 1..120: mol_type = other DNA
catctgctggaatggaaaatatttcttaaatgagacacaaatgtatcaaattgaaaatgtttaaacttcaaaggacttacatacatatacagtcattcttcgctcaatggtgagatagct

SEQ ID NO: 2153 - DNA, 120 bp, synthetic construct
  source 1..120: mol_type = other DNA
gcggtgtttggtgttttgtccttgcgatagtttactaagaatgatgatttccaatttcatccgtgtccctacaaaggacatgaactcatccttttttatggttgcatagtattccatggt

SEQ ID NO: 2154 - DNA, 120 bp, synthetic construct
  source 1..120: mol_type = other DNA
ctatttaattatctttaccttttaatcttttttggtaaaaataaagacatacattagcataggctgacacagggtcaagaccaacaatatcaaccatcttcagccttcacatcttgtccc

SEQ ID NO: 2155 - DNA, 120 bp, synthetic construct
  source 1..120: mol_type = other DNA
ggaccgtgaccttggagtaagaaccacactgaaatagactcaccctagcaaaggctaaaatcaagaggaagcagaatcaaagtgggtctgatttttactaaaggtgattctttgataatt

SEQ ID NO: 2156 - DNA, 120 bp, synthetic construct
  source 1..120: mol_type = other DNA
taaatacattccttcccaccagagaaactccatgcccagacttcttcacctgtcaattctttcaaaaactttttaaaaggcatgtcagccttatacagtcttcctctggtaccttttggg

SEQ ID NO: 2157 - DNA, 120 bp, synthetic construct
  source 1..120: mol_type = other DNA
cttccctaacagaatacagttatttacaacaaagaaatacaaagaaatacctaaatctaaagtcataattaatgaagaaatattaaacactcctctgaggtggggacaagagaaggatgt

SEQ ID NO: 2158 - DNA, 120 bp, synthetic construct
  source 1..120: mol_type = other DNA
tctttcaggaatgggagaaagattgaaagatggagaagatgagttagtttggctcatgctaaatttaaaatatctgtggggcacgcctgtgaggatattacacagagaactcaggcaatt

SEQ ID NO: 2159 - DNA, 120 bp, synthetic construct
  source 1..120: mol_type = other DNA
caacttcatcctttagaatgtgggcatccaggtgcccagctccattagatgaagagtgtatactttaacacattgagttgtcttaacacctttactgaggttctttgcatatatctcttt

SEQ ID NO: 2160 - DNA, 120 bp, synthetic construct
  source 1..120: mol_type = other DNA
cctttatttttttttcttcctgctcttcagattgcataatcgtaattggcctatcttcaatttgctggttcttctgcctgctaaactctgcatatattagtcagcatggcagtgtcccac

SEQ ID NO: 2161 - DNA, 120 bp, synthetic construct
  source 1..120: mol_type = other DNA
ggggggctgacccccccacctccctcccggagggggcggctggccgggcggggtgctgatccccccacctccctcccggacgggtcggctggccgggcggggggctgagccccccacctc

SEQ ID NO: 2162 - DNA, 120 bp, synthetic construct
  source 1..120: mol_type = other DNA
gccaggcagaggggctcctcacttcccagtaggggcggctgggcagaggcgcccctcacctcccggacggggcagctggccgggtggggggctgacccccccacctccctcccggatggg

SEQ ID NO: 2163 - DNA, 120 bp, synthetic construct
  source 1..120: mol_type = other DNA
agaggcagaggcagaggcagagcaggaattcagatttttttttttccttatatttttaatgagtctttatttggtgagatattgttcttctggttcctttacatatatacatatatatat

SEQ ID NO: 2164 - DNA, 120 bp, synthetic construct
  source 1..120: mol_type = other DNA
tttcagtctgtctgctgttaacccatccatcattccatgccccaggcatctgtgactagtatttgcctttaaatgcttttgacaaacattgctatggagacctctccaatcttaataaag

SEQ ID NO: 2165 - DNA, 120 bp, synthetic construct
  source 1..120: mol_type = other DNA
atactttgagtaaagtagattgacctctataatgtggacaggcttcattcaattcattgaaggtgtaaattgaatgaaacactgaccttccccaagcaagatggaattctgtcctgggat

SEQ ID NO: 2166 - DNA, 120 bp, synthetic construct
  source 1..120: mol_type = other DNA
aagctcctatgttttagttttactgacttatgggcagtgactgatggcctggccatataattaattaagaaagcagtggaaaactggcctatgaaaagaatgcccatatgagacacagtc

SEQ ID NO: 2167 - DNA, 120 bp, synthetic construct
  source 1..120: mol_type = other DNA
aatttgttcctcagaagaagagtttcagagagaattaaaatagtcatttgaaacattgagtgtataaatcaggagcggggagacataagcatgaagggcgggcctatacaccttcatgag

SEQ ID NO: 2168 - DNA, 120 bp, synthetic construct
  source 1..120: mol_type = other DNA
tagaaattataagaagaaataatgtggttaaagaccaggaagtgatctgtgatccaataaatatatttggtctttgcccctagtccctgacaggcaggtcctaaaacgcttgcagtccct

SEQ ID NO: 2169 - DNA, 120 bp, synthetic construct
  source 1..120: mol_type = other DNA
aaacactccttcatccttatgtcatgtcacagccagagaaacctggctgtctatcagattcttgggaattcataataagaagatatgcttttttgtttgccacatgaaaggggggaattt

SEQ ID NO: 2170 - DNA, 120 bp, synthetic construct
  source 1..120: mol_type = other DNA
ctgctgatcagtgttccagggatttgctccagattaatctgagtcatggaaaaactgcctttcttttgtttctaaacaaatacctgcaaagacaaaagaccacataaatccccaggtgca

SEQ ID NO: 2171 - DNA, 120 bp, synthetic construct
  source 1..120: mol_type = other DNA
gagcgaggggcccgcccggaggagtaaatctgcacatatatttaattacagattacaattacaatcaaggcagaaatgatctcatttttacattacaactctggaaaaggcaatagactg

SEQ ID NO: 2172 - DNA, 120 bp, synthetic construct
  source 1..120: mol_type = other DNA
tttcaggtttgggtgttttctggggatgttaacatgggattcaggctcaactcacaagaaacttttccatctcatgatggatgctgttgggcatgtccaatgtatgacttcatgagttac

SEQ ID NO: 2173 - DNA, 120 bp, synthetic construct
  source 1..120: mol_type = other DNA
gaatctctgtaaggtttatttatcttcaccctctggagagaagatgttttaccaaagcctctagtgtaccttcctcctcttactcatccatcccagtcaacatgatgttgtcaatgaaat

SEQ ID NO: 2174 - DNA, 120 bp, synthetic construct
  source 1..120: mol_type = other DNA
gctgcaatcaggactcctacttggtcacatctggagtaatcccattcattccttagtaatcccattcattccttaggctccatcaggcttatttgctaaattacatggagataataggca

SEQ ID NO: 2175 - DNA, 120 bp, synthetic construct
  source 1..120: mol_type = other DNA
tctatctcttcagggccacaccctctccgtggatattaatgagcccaactctgggacatcttttcctaccatcaccctcagccttcagagaacaatacaatgaaacttcttagtgatgca

SEQ ID NO: 2176 - DNA, 120 bp, synthetic construct
  source 1..120: mol_type = other DNA
ttggttagcatcccctgaggagcagactgcaatacagaattaaatgtgccaggatttattaggggaaatagccatgaaagaaattggggagcaagacagaaaagactgggaaagccataa

SEQ ID NO: 2177 - DNA, 120 bp, synthetic construct
  source 1..120: mol_type = other DNA
tgccacaacaatccagtggggagaaaggacaaagggtaatgatcaaagagaaaaaaaggtatgaactgatgaactgatacctttaagtagatgagaaggatgatgtttgggacaccagta

SEQ ID NO: 2178 - DNA, 120 bp, synthetic construct
  source 1..120: mol_type = other DNA
agccagagggcgatgcatcctctctgctctatgggtgtttattgctgccataaaaattaacacaaaacaagtggctttaaacagcatctctttatcatgtcacagtcatgtgtgttacaa

SEQ ID NO: 2179 - DNA, 120 bp, synthetic construct
  source 1..120: mol_type = other DNA
gtccaaaataatcttgcaattttaaggtccttaatcttcatcacatcagtattttcccttttgccatgtaatgcaacctactcgtgggtgcccaggattgagattggacgtctttgggaa

SEQ ID NO: 2180 - DNA, 120 bp, synthetic construct
  source 1..120: mol_type = other DNA
agaagacttgtattatcttttaattggacagcattgtctagagatgatgttatctctttaaatgctgttctgggagattcccagagccagagaacatggagcatggtctcccagtaatta

SEQ ID NO: 2181 - DNA, 120 bp, synthetic construct
  source 1..120: mol_type = other DNA
cctaacattttacaaagtttctgtgttctttttccactgagtgggaacaagtcagctagtgaggaacatgaggcctttggcctcatctaaagttactttagctaccaattgtgagaagca

SEQ ID NO: 2182 - DNA, 120 bp, synthetic construct
  source 1..120: mol_type = other DNA
tattctcctcacttggacacttagaggccattgtagggttactaatcggcctgccttcaatatttttgtgtctcacagaatagggaaggccgggagagagagagagagtcaagaaaccag

SEQ ID NO: 2183 - DNA, 120 bp, synthetic construct
  source 1..120: mol_type = other DNA
aatgaaaccatctgagccagtttcctcatctgcaaaccagtgacataattcctgccttgcagagtttcagaagaataagtgagaaaagacacagtgccaagagaaacagacacaagacct

SEQ ID NO: 2184 - DNA, 120 bp, synthetic construct
  source 1..120: mol_type = other DNA
caaaccgtatcactggatgagagcaattagattgatgtcatgatgtatatgggtccatgggaacttgaaaaagtcttccccttccacctagtttaacaagataaacaggaaaggaacttc

SEQ ID NO: 2185 - DNA, 120 bp, synthetic construct
  source 1..120: mol_type = other DNA
aaagtcatatttttggattagaacaaactctggtatatttaagtaaattccctgaagaatgtgaacaccgtaagcaggtgagtgcattattctctgcttcccctccacagagctgtggtt

SEQ ID NO: 2186 - DNA, 120 bp, synthetic construct
  source 1..120: mol_type = other DNA
tagtggctctcctatgaaataatgctcataaacatcccttgtgagaaggatcagatcaacatataaaaatatgccaaataaagtgaaactcaaggcaggagtgggactggccattctcag

SEQ ID NO: 2187 - DNA, 120 bp, synthetic construct
  source 1..120: mol_type = other DNA
gctgttctcatctgtgaatgcagccagaccactttcttcctctgatataaataacttggaggatctgtcaccagacacctcatatctacatattaataaattctgtacagtggtttggct

SEQ ID NO: 2188 - DNA, 120 bp, synthetic construct
  source 1..120: mol_type = other DNA
cctccacctgggaaatgctggttcatggcagggtctctcttttagtaaagggaaaaattcctggctaattgatagctaataagtcatttagaatccagttcatgtaaaaggattacctac

SEQ ID NO: 2189 - DNA, 120 bp, synthetic construct
  source 1..120: mol_type = other DNA
acatggtattcattataatttctgatgaggaactagagaggtctcatagcatatagaccttgatcaaattgggtcatggtggagtcaggcaaaactctgcaatgactcacaggtacctaa

SEQ ID NO: 2190 - DNA, 120 bp, synthetic construct
  source 1..120: mol_type = other DNA
ctctctaccactagggacttttaaactcatctgtgaatcctggataaacacagacattccggtaaccttactgaaatgaagtgaggaccaatgagttgacaggtggagaaaaattttttt

SEQ ID NO: 2191 - DNA, 120 bp, synthetic construct
  source 1..120: mol_type = other DNA
ttgttctttcctggattccaacacagaaattagttaagatttggaaattctggacaagggtgccaggcttcctgtcagtaagaaaacttagaatattcctgtaattaggcctggtgtggt

SEQ ID NO: 2192 - DNA, 120 bp, synthetic construct
  source 1..120: mol_type = other DNA
atcttctccctctatcttgtcaacattggcctcaaaatatgtgtacagggacacagtttagcccataagagtctgcgccatccttggcggtgcatattataagaaataaaagagaataca

SEQ ID NO: 2193 - DNA, 120 bp, synthetic construct
  source 1..120: mol_type = other DNA
cagggcagcaagacccagtgctatgtagttctccaaagtcctatttactttagtgattctgattctgtatttttaactgggaaaaggattctctttcaggaaagcaaccacttctgatgc

SEQ ID NO: 2194 - DNA, 120 bp, synthetic construct
  source 1..120: mol_type = other DNA
tatcgtttaatatggtctatgaggtgaacccacacacccatagaaacagttcatttgttttcagtgctggatagcatttatgagacgaatatcccacaatttatctcttctcctgtccgc

SEQ ID NO: 2195 - DNA, 120 bp, synthetic construct
  source 1..120: mol_type = other DNA
accttcctaagaaaacccaaacaagcactgcatatctacacggctgagtctacaaacatttaacacaaaagaagaaagacataggaaactcttgatattccctcatgggatggtctccat

SEQ ID NO: 2196 - DNA, 120 bp, synthetic construct
  source 1..120: mol_type = other DNA
tgtttgtgtgggctcatggatgccatatctagaaaacactggaattctcaagcacacgtgactgaagccatttgccaaatgttcaaggtcctattaatggcccatctgagtacttgtcat

SEQ ID NO: 2197 - DNA, 120 bp, synthetic construct
  source 1..120: mol_type = other DNA
gtatttgataaatgtttaccaaatgaagggattgcctggaatggcttggcagacaggaaagcagaatgaaaacccacaggccaaaaatggctgggaaaagattttccaaatcctagtgct

SEQ ID NO: 2198 - DNA, 120 bp, synthetic construct
  source 1..120: mol_type = other DNA
gatgcccaaactatgaaaatgagggaatctatcccactctctcaggtgtggtgagattcctattatatgactatcggtcatctatacatggattgtactctcagagttgcctttatcagt

SEQ ID NO: 2199 - DNA, 120 bp, synthetic construct
  source 1..120: mol_type = other DNA
ctcacctgagctaggaattcggttttttgatgttggttctctttgagccattgtgtgagctttaaaatgtgatgtggagattttgctatactggtatttccttgctggaatttgacatcc

SEQ ID NO: 2200 - DNA, 120 bp, synthetic construct
  source 1..120: mol_type = other DNA
gcagaatttggctcttggtttttctgctttatcaggatggatttgggaaaccagccggagcgggagataaggagtctactttgcaaaggacacgtgtgagtctcgtcctaatttgaactc

SEQ ID NO: 2201 - DNA, 120 bp, synthetic construct
  source 1..120: mol_type = other DNA
tactcagtaggctgaggaaggagaatggcgtgaacccgggaggcggagcttgcagtgaaccgagatcgcgccactgcactccagcctgggcgacagagcgagactccgtcaaaaaaaaaa

SEQ ID NO: 2202 - DNA, 120 bp, synthetic construct
  source 1..120: mol_type = other DNA
agtgtatcttccaacgcctaattctgttgtcttcaatatcacccgtcattcactcacctcccctccacccaagaaatataagttctgctgcaatttatgtgtgaaataggatccaatttt

SEQ ID NO: 2203 - DNA, 120 bp, synthetic construct
  source 1..120: mol_type = other DNA
aacgtgctttgagaataaatggaacagggtcccctgtgtccccactcatttgcgttttcctttttattacagccaaccccttttgtaaatattgttacacatctctctattccactgaaa

SEQ ID NO: 2204 - DNA, 120 bp, synthetic construct
  source 1..120: mol_type = other DNA
ctgacacatctggaggtagagggtcatgctgtctgcaacttaccctcacaggctctgaaataacaataatagcagtatatttacagattcagaaagagagaaagctatagtaaaaatgtt

SEQ ID NO: 2205 - DNA, 120 bp, synthetic construct
  source 1..120: mol_type = other DNA
ttattccgtttctgtatcagtaaacacgtttcattttccgtagaccagggaagggtgatgggtgatcccagtcctcgcagtgaattccgggccacaaaattcaaaacgcttgcgggcaaa

SEQ ID NO: 2206 - DNA, 120 bp, synthetic construct
  source 1..120: mol_type = other DNA
tccacagaaaagtgtaggctagggatgataggggaatagttagtaatgacagggatagttgaacttaaaaaaaaaggttgtgaggccaacaaaaaagaaatggacacagttcctgatcct

SEQ ID NO: 2207 - DNA, 120 bp, synthetic construct
  source 1..120: mol_type = other DNA
tagatgtcccaatgactaagaatgtgcgctggggacaagccaattctcttagtagaggctttccagacagaattcttattattgagaattgagaattcacatgccacacataatttatcg

SEQ ID NO: 2208 - DNA, 120 bp, synthetic construct
  source 1..120: mol_type = other DNA
gagaaagaggaaatcagaagggaccaaggatggtgaagttcttaagagaaactgaggaggaagagaggatgatgtggtgggagacgtgtagagagtccttgtagatctgtcatattgaag

SEQ ID NO: 2209 - DNA, 120 bp, synthetic construct
  source 1..120: mol_type = other DNA
cctcctgtctcctttcagtcctcctcgggatcgcgcatcacccgcattttctggtctctcctgcacttgctctcctcgcctctcctccgtctcctctcacttttcggacaaaccagtcct

SEQ ID NO: 2210 - DNA, 120 bp, synthetic construct
  source 1..120: mol_type = other DNA
tgggaccttgtgctgctcctatctcttgcccagctgcctggggccctcagcaagttctcatctttcagtgggaaagtgggagtgctggagcatatgacagtgctgagaatctttcccaag

SEQ ID NO: 2211 - DNA, 120 bp, synthetic construct
  source 1..120: mol_type = other DNA
aggctgagaatctccccctctaccttggttttctctctctggccagcacccccaccccttgctttgtttttaatttttaacttttgtttgggtacgtagtagatatgtatgtatatattt

SEQ ID NO: 2212 - DNA, 120 bp, synthetic construct
  source 1..120: mol_type = other DNA
tagttttcatagtttgaggtcatagatttacatctttaatcctttttgattggatttttatatgtggtgagagatagggtccagtttcattcttctgcataaggatatctagtttcccca

SEQ ID NO: 2213 - DNA, 120 bp, synthetic construct
  source 1..120: mol_type = other DNA
ttccacctcagcctagaagttttatatcaattcaaaagtgtcaagacattggactcctcttgataaataacttaagaacaatttaagacgtttacagaatttcagaaacagttctctctg

SEQ ID NO: 2214 - DNA, 120 bp, synthetic construct
  source 1..120: mol_type = other DNA
gctgttagcacatagaagtgctattgttttttgcatgttgattttgtatcctgcaactttactgaatttgttcttcagttctaatagttttttggtggagtctttaggttttccaaatat

SEQ ID NO: 2215 - DNA, 120 bp, synthetic construct
  source 1..120: mol_type = other DNA
taatgtttgtctttttgattctggcttatttcacttataatatttcgaggttcatccaggttgtagtatgggtcagattttcattccttttaatgatgaataatactcattatatgtatg

SEQ ID NO: 2216 - DNA, 120 bp, synthetic construct
  source 1..120: mol_type = other DNA
gtgccctttgatgcacagatattttgaatttttcatgagtccagtttgtcagttctttctattctatctgtgctttggcgtcatatccatgaaagcactgtcaaaccctatgtcatgaac

SEQ ID NO: 2217 - DNA, 120 bp, synthetic construct
  source 1..120: mol_type = other DNA
cagttttccttgtatatgaaatcttcgttcttgtccttttgcccatgcgcatttcctgcctcctcagggaggtcgggacagcagacctgtgtgttaaacatcaatgtgaagttatttcca

SEQ ID NO: 2218 - DNA, 120 bp, synthetic construct
  source 1..120: mol_type = other DNA
atggatgcaggcgtttcctgttggcatattgtgtcctgatttgcctctcctgttagagccattggataaagacagtgggtctgggactgaactgtccagtgttgtaatctgggaaagcag

SEQ ID NO: 2219 - DNA, 120 bp, synthetic construct
  source 1..120: mol_type = other DNA
tttcagggaaggcgctggtgcttcagagtcaacggacagactttccatatgtttctgctgctatgccatgttttgttattattattattctctgtgtcccttgttgcaagaagaaaacat

SEQ ID NO: 2220 - DNA, 120 bp, synthetic construct
  source 1..120: mol_type = other DNA
tttcagctctataatcttaataggatttcctctaatactgctgttgtaaagcatattaaataaaacaggaactcaaatttggagccccctctccagaagggtctgtgtggagatggtggc

SEQ ID NO: 2221 - DNA, 120 bp, synthetic construct
  source 1..120: mol_type = other DNA
aactccctgcctggatctcaccagcactttccctctgtttcctgacctatgaaacagagaaaataacatcacttatttattgttgttggatgctgcaaagtgttagtaggtatgaggtgt

SEQ ID NO: 2222 - DNA, 120 bp, synthetic construct
  source 1..120: mol_type = other DNA
tattttaatatattacatgtgcagtaattagattatcatgggtgaactttatgagtgagtatcttggtgatgactcctcctgaccagcccaggaccagctttcttgtcaccttgaggtcc

SEQ ID NO: 2223 - DNA, 120 bp, synthetic construct
  source 1..120: mol_type = other DNA
taataataaaagataaacactctttaaccaccagagatatagaagtttgtcagccagcccagaaaccatcatttgccccagctcagtgataaaggcttcccttccccacataaaatcaca

SEQ ID NO: 2224 - DNA, 120 bp, synthetic construct
  source 1..120: mol_type = other DNA
tggaccaatcagcaggatgtgggtgtggccagataagaataaaaggcggctgccggagccagcagtggcagcccccgtgggtccccttccacactgtgggagctttgttctttcgctctt

SEQ ID NO: 2225 - DNA, 120 bp, synthetic construct
  source 1..120: mol_type = other DNA
ggtttgttacacagatataaatgatggatataagcactaagcacagttctgagcacaaagtaagagcctagggtaagttaggagtttatgacttttggggatcttctcattgccccaaga

SEQ ID NO: 2226 - DNA, 120 bp, synthetic construct
  source 1..120: mol_type = other DNA
attaaataaataaaatttataaaattatgttcgctttcagtctttgtcttgtcctcccgcttgtaaggtccgagccttctcagacaggaaacaacattcctctgggtttatcccctccgc

SEQ ID NO: 2227 - DNA, 120 bp, synthetic construct
  source 1..120: mol_type = other DNA
tctggctgagttttccatagtttgcattttgctggctccaccccaaggcatagtttaatatggacctgttttatctgtactttctacaaattggtagttggctacagagatttgcttata

SEQ ID NO: 2228 - DNA, 120 bp, synthetic construct
  source 1..120: mol_type = other DNA
aataccagtgaatttttttttaattccaggaaataaatgcccatgactcagatataaaaaggagaatctacaagagcagtaggcttgggagctgacaccagaacagctttggaaagggct

SEQ ID NO: 2229 - DNA, 120 bp, synthetic construct
  source 1..120: mol_type = other DNA
tgcccaactatatacagattgtttcacagggaagtcctactaaaccttcaaagaaggttattggacttatttaaaatattcaagagaatggagcaaaatacagaaagctaggcaactcac

SEQ ID NO: 2230 - DNA, 120 bp, synthetic construct
  source 1..120: mol_type = other DNA
atgtgagcagacttgagaaggagagacacagccatgcagatatttgaaggaagaaccttccagtatcccgctctaagcatacccaggactctgctctggggcagaccctaaagctgcagt

SEQ ID NO: 2231 - DNA, 120 bp, synthetic construct
  source 1..120: mol_type = other DNA
aaatactccacaggaaagaacaatgtgcctcctccctccaccggcttcttcctcttgcctattctggtcaattctctaagtgaatcatgtaaccaaaatgtgaaatgtttattttaggaa

SEQ ID NO: 2232 - DNA, 120 bp, synthetic construct
  source 1..120: mol_type = other DNA
cttccttacagaagaatttcaaaacatatattacgagaatctctttcccaggagattggaattttatttctctcaccttgaatatgggctggacttgctgacttgcttccaaagactaga

SEQ ID NO: 2233 - DNA, 120 bp, synthetic construct
  source 1..120: mol_type = other DNA
caatgttaatttcttagtttcttagtcttgacagaattttgttagatgttaacattaaggaaagctggggtttatggaaactctgtgttctagctttgcaactctttaaatctattattg

SEQ ID NO: 2234 - DNA, 120 bp, synthetic construct
  source 1..120: mol_type = other DNA
tattcatgccatctttcaccttgccaaagaccatgggcttgccatccaaccactcagtcttggcagtgcagatgaaaaactgggaattgcccgggctaggtggctcatgccgtaatccca

SEQ ID NO: 2235 - DNA, 120 bp, synthetic construct
  source 1..120: mol_type = other DNA
accatggctgatagtatggggctcctgatggtggcgtctgcaaagccaagacagacactttctatctcatttcatgaggccaggattccatgagggaatactttctaactaattccatga

SEQ ID NO: 2236 - DNA, 120 bp, synthetic construct
  source 1..120: mol_type = other DNA
taacaaactgattcaaactttatatggtgaggcaaaagacctagccagcacaatataggagaaaaataaagtcaaagaccaccactacctgacttagactttctataaagccatagtaat

SEQ ID NO: 2237 - DNA, 120 bp, synthetic construct
  source 1..120: mol_type = other DNA
aaaagatgagaaaaagttaccgtttctttgctccatatatatctcctagaataaagccaatcgaaagccaacttcaccctaaagaaactcttcctggcgtttgcaacgagctcctttact

SEQ ID NO: 2238 - DNA, 120 bp, synthetic construct
  source 1..120: mol_type = other DNA
catgtacaagaaaaatgaaaagagctctcttaaaaggttactgtgaaagccacctgtgacagtaacagaaagtgcccagcagggtctctgacacttagtaatgtaatctctctcactgta

SEQ ID NO: 2239 - DNA, 120 bp, synthetic construct
  source 1..120: mol_type = other DNA
atctcctcttgtccgtggctaaagacaggccccttctgcggagaccaggccagaatgctcatctgattaagactctatattaagagtcaggaataacaaaaacaacaataaataaataaa

SEQ ID NO: 2240 - DNA, 120 bp, synthetic construct
  source 1..120: mol_type = other DNA
ccactgcgcctggcctcatccactatatttgaaccgacccaaaggccagtgctttcttaattaagttcccacaggtgaacaaagccaaaattcagattctattttatttatggtttagaa

SEQ ID NO: 2241 - DNA, 120 bp, synthetic construct
  source 1..120: mol_type = other DNA
tatgagtcatgcataaccttatcaccaagatacaagagggaaagcccttctccccttaaacttttacaaaggttctgggttctttttccacttaagtgggaaaaagtcagctaatgagga

SEQ ID NO: 2242 - DNA, 120 bp, synthetic construct
  source 1..120: mol_type = other DNA
ctagacaggggcaagaaacaaggtcattctgggccagcaagaagagggaaagggaaatgacaggcatacctcggagatactgaagatttgtttccagaccatagcaacaaagtgagtcac

SEQ ID NO: 2243 - DNA, 120 bp, synthetic construct
  source 1..120: mol_type = other DNA
aatctctaaataaaaaacagcatctgcaaagagcaataaagggaagcacaataaaaggtacatctgcaaaggggaatcagcacttaagcaaggtcaggatgagctttcaagtcaggtgga

SEQ ID NO: 2244 - DNA, 120 bp, synthetic construct
  source 1..120: mol_type = other DNA
atactctccagctccacagctaccgctaatgtttgtaaaattcatacctaataaacactagatcaaaaaaaaaaaatcacagacctgtggtaggctgggcaccagtgctctaaagcaagt

SEQ ID NO: 2245 - DNA, 120 bp, synthetic construct
  source 1..120: mol_type = other DNA
caacagcacagtccacaaagtccttgaacaggatctattccccctcacctaacagttaattatttcttagcggggaggagcagctgatcctctttccagtgaccccatatccttgttcaa

SEQ ID NO: 2246 - DNA, 120 bp, synthetic construct
  source 1..120: mol_type = other DNA
acttatagataccacagacacatgtgtttcatttttagttttgttaaaaaaaaattctgacaaatcagaaatgggggttcaggagtggtggtgatgcaaaagatggaagccatggggtgg

SEQ ID NO: 2247 - DNA, 120 bp, synthetic construct
  source 1..120: mol_type = other DNA
atttttccctaaggaagctggcctctgaggtagcacagagttcagaaatcaaaattgccagacatgctaggagatgaggatgagatcacctcatgaaaaagtgataaaaaactagaatta

SEQ ID NO: 2248 - DNA, 120 bp, synthetic construct
  source 1..120: mol_type = other DNA
tggttcatgttagtgattggtggactgcttagaaaatataagtggataatcctaagcagcaaatagattcaaaggaataaacacgagtcacctctgtgtatgagagagaaatgcagaggc

SEQ ID NO: 2249 - DNA, 120 bp, synthetic construct
  source 1..120: mol_type = other DNA
agaaaagcagctcccaccttactcatgctcagcccctaagatatttataccctcattattctctcccacatcacacatgtgatttcctcaataaaagtgtacttaatatccaggtttctg

SEQ ID NO: 2250 - DNA, 120 bp, synthetic construct
  source 1..120: mol_type = other DNA
agactggtctcttgactaagaattaaaccatctacaggtttacaggaaaggtatcagtaagtggtgttaaaataccaaattcagagcagcagatacacttttaagggacaggatctcacc

SEQ ID NO: 2251 - DNA, 120 bp, synthetic construct
  source 1..120: mol_type = other DNA
ctgcttatgcaattggccccacctagccccaaaccctaacaaccacccgattacatccactttacctttcctatgtccctctcctctgagtattaaaaaaaacaaaaaaatttttttaag

SEQ ID NO: 2252 - DNA, 120 bp, synthetic construct
  source 1..120: mol_type = other DNA
gacttcccagtgaggtgaagattgctggaaatagtaacaacacaatggaaagagcaatggacttggaatcaagaagtgggatcagattccagctgtttgttttaaccaagcaagaaataa

SEQ ID NO: 2253 - DNA, 120 bp, synthetic construct
  source 1..120: mol_type = other DNA
aatccccccagggttcccactctgtttgagctaaaccaatttttagcatgtttccaaactaaaactaactttagagggcacctaatttaaaaattttatgtcccccccaccaaacactga

SEQ ID NO: 2254 - DNA, 120 bp, synthetic construct
  source 1..120: mol_type = other DNA
atgttaaaaccattaggtgaatagttgtttggggatctgggccttggtacagtatcaaataacaccagaaactactttctggtttcaagggggaaaagaacaactgtggaatcagactgt

SEQ ID NO: 2255 - DNA, 120 bp, synthetic construct
  source 1..120: mol_type = other DNA
tgtgttaagcatcatccatagcccaattacgaatcctcctgttacataggaactcaacactctgttacaccacagcaaactaaagcttctccaaaattaaagagactattggcctacaag

SEQ ID NO: 2256 - DNA, 120 bp, synthetic construct
  source 1..120: mol_type = other DNA
cttcaatgatcctagctctgtccttatttttcttaatctgtaacaattcatgacatttgaatacctgccacagaccacttctcctgcttaggttgctatacttcgggtcacgtaactact

SEQ ID NO: 2257 - DNA, 120 bp, synthetic construct
  source 1..120: mol_type = other DNA
tctcgcaaaataggtgaaaacaaggggtgaagagtaggggattgaggaacagcaaaggaaaacaaagatactatttctaacagaagagctggaggggggaaaaaaaaaagcaagacttaa

SEQ ID NO: 2258 - DNA, 120 bp, synthetic construct
  source 1..120: mol_type = other DNA
catcactgttacgctacgaaggtgagactccttttggagaaacatacaatgacaccaatcgtatcgtaaacacttggaaggcactccaaattaagttgggcaagtcaaggtgagaaaaat

SEQ ID NO: 2259 - DNA, 120 bp, synthetic construct
  source 1..120: mol_type = other DNA
gtatgagggttttttttttagagctaaggctgcaggaattctgagattttgtgtgaattttaggattgggaaaatgagtgtgtgtgagcgcgtgtgttgttggaaacaggctgtcactgt

SEQ ID NO: 2260 - DNA, 120 bp, synthetic construct
  source 1..120: mol_type = other DNA
aaaagatataaaggaaactaacgtctcccccccactgttatctttattctcttatcctactcctctccatgcccctcatctcttcgtttaggtttttgccacgcaggtcttctctgtagg

SEQ ID NO: 2261 - DNA, 120 bp, synthetic construct
  source 1..120: mol_type = other DNA
cacatgttgtcctaggatctggggacacaacggtgaacagccctgttctcacagtgtttacattacaggaaagaaaacacataaacacaaatataatgtcaagtatcgataagtggtcag

SEQ ID NO: 2262 - DNA, 120 bp, synthetic construct
  source 1..120: mol_type = other DNA
ggaaagtaaggtgtcaaggatatagaaaggaagggcatgcatatgagggaacacagtatcattttagatcttagaaagcaatgagcatctgataagtctttggggaaataggaaaggagg

SEQ ID NO: 2263 - DNA, 120 bp, synthetic construct
  source 1..120: mol_type = other DNA
gcaacttcatcctaaaacagaccgtaatatccccaccacctcaccatccatgaccataaaactctaccctccaccacaaatgttaatcatactccacatagatgttatactttacacaga

SEQ ID NO: 2264 - DNA, 120 bp, synthetic construct
  source 1..120: mol_type = other DNA
ttgattggtggtaacagaggaagcataaagggttgtgaatgcggtgaaaaggtaaggatgtcatcatgcaacctgtgttgggaaaagagcattctgggcttaattctaaactaactctct

SEQ ID NO: 2265 - DNA, 120 bp, synthetic construct
  source 1..120: mol_type = other DNA
tccacatctgtctgccgggtacatgatattcaatttctagatcattattggagattatctgtgactttttaaaactcagatttctgctgataaaaattttccccatccggccctgttggg

SEQ ID NO: 2266 - DNA, 120 bp, synthetic construct
  source 1..120: mol_type = other DNA
tggcatgtggctgtcatttgtccctttacattactgagctaccattgtctgaagaacccaacattccccaaagatcaactggtcttcaaatttcacatctgtttagattagtagctactt

SEQ ID NO: 2267 - DNA, 120 bp, synthetic construct
  source 1..120: mol_type = other DNA
ctggccttgttcctgtttttgttatcaacaggtccatactcccttaaccacaattctaaactcaaaaacactctgagaaccaacatttttcatcaggctgccaccaaaattcatttggtg

SEQ ID NO: 2268 - DNA, 120 bp, synthetic construct
  source 1..120: mol_type = other DNA
ctagcatattcagatttgtttcttgttgtttttacttaaaacagagtaggtttactgagtgcaggcatctaacttgacagctcatattgtaagaggcaggaccctggaaggcaaaagagc

SEQ ID NO: 2269 - DNA, 120 bp, synthetic construct
  source 1..120: mol_type = other DNA
attgtattgaattttaagaagctggtgagactgatattatcccatttacagatgaggaaagcagggcccaaaaggttcgggaacttgtctgaaatctcacagctctcaggtcattgtctt

SEQ ID NO: 2270 - DNA, 120 bp, synthetic construct
  source 1..120: mol_type = other DNA
tttttctaaattctcccttctcaaatttcttttccctcttccttcaagggctgtactcttctatcaagagtaacgtagatggatactaaaacagaagggtcagtaccgtctcgggggatt

SEQ ID NO: 2271 - DNA, 120 bp, synthetic construct
  source 1..120: mol_type = other DNA
gcctggccaaaatgtttttatgtttatttttcttagtatgaaactccagcgtattaaagagcattgagaacggttgatctggtaaatcgctataaaggcggcatttcttttttttttttt

SEQ ID NO: 2272 - DNA, 120 bp, synthetic construct
  source 1..120: mol_type = other DNA
tatgacaggaaggtacacaccaaattcatgggacagatggcctggggaggaatgaaacttggaaggcggtatcacggtaaactacctttatctgtgatgattttatttccttaaaataaa

SEQ ID NO: 2273 - DNA, 120 bp, synthetic construct
  source 1..120: mol_type = other DNA
aggcacacttgtatattggcacaaacttattgagagcagtttgaccaaattgcgcatgtcctttgactcagaaattccacttatgaaaatctacccccacagaaagactgtaagatactc

SEQ ID NO: 2274 - DNA, 120 bp, synthetic construct
  source 1..120: mol_type = other DNA
tgtagccagcttttttcaaacacatgcctcagttgtagtggctgtttaatattatgtttttatagttggaggccctactccttaaaacctatgaatgtaaacctcccatgcaagcctgag

SEQ ID NO: 2275 - DNA, 120 bp, synthetic construct
  source 1..120: mol_type = other DNA
atttatatagtgacaatatttttaagtgaaaagtggaatacatagtcaaagaatttgggcactgccttggtggctggaggcaggtcagaaaatgtcagttggcatggtagaacttctagg

SEQ ID NO: 2276 - DNA, 120 bp, synthetic construct
  source 1..120: mol_type = other DNA
attttaaactaccacacttaccatgcatgtggtaaactatcagtctgtatttatcagtgatggttatttcctaatacccaggaggcatccatgtgagccacccttccattgctttaagac

SEQ ID NO: 2277 - DNA, 120 bp, synthetic construct
  source 1..120: mol_type = other DNA
ccaccactgctccttgactctgccgtttcctaataagacctggttccacatctcactcccagtgtctcctctgtctttttccattgctgtggttttcatcacccatgacatctcctttcc

SEQ ID NO: 2278 - DNA, 120 bp, synthetic construct
  source 1..120: mol_type = other DNA
ctgcaaggagagtacagacatgtgctggtgagtgcactgtctgcatagttacaccagagcatcttatcaatcagaaacttatctttcaggttttgagcccagttctctacaggagaatcc

SEQ ID NO: 2279 - DNA, 120 bp, synthetic construct
  source 1..120: mol_type = other DNA
aggtcaactgagcattatgtagcccaaagataaatttaaaccctgcttcaagcttacaatctagtggggaggcagacccatacctagttaactgattcaaggcatgatgagtaaacttta

SEQ ID NO: 2280 - DNA, 120 bp, synthetic construct
  source 1..120: mol_type = other DNA
taataactatacattatagttataatgtataggtatgcctgcttagggtaataaagtgctcaatgaaggtttgaggtaccagcatgactctcaggtggagatttccagaaagcaggtctg

SEQ ID NO: 2281 - DNA, 120 bp, synthetic construct
  source 1..120: mol_type = other DNA
aacaagaaaggtaaggcagtcccagtatattttaaacttacgagggttttcagaaggagtactaccttgtttttatggaattcagggtgtccagatttcaacctacctagcagagtgaag

SEQ ID NO: 2282 - DNA, 120 bp, synthetic construct
  source 1..120: mol_type = other DNA
tggttcgttaagggggctagtcttttgagacatcacacgaaaacggaaggtgagatagactggacatttgagggagaaatattccaaggaaggatcttttttgttgtttattttcaagaa

SEQ ID NO: 2283 - DNA, 120 bp, synthetic construct
  source 1..120: mol_type = other DNA
ttagaacatcacgcacagtagtataatggggagtcaacaaagaatgagtaaaagttgtgtccaagaacactgatgactctctgagattagctggccaggattagttataggcctcttatg

SEQ ID NO: 2284 - DNA, 120 bp, synthetic construct
  source 1..120: mol_type = other DNA
gactgagctagttatacaagttgttaagagcataataaatattttgatggataagattgtgctgtgaagacaggaaaagcatggcaaatgcaaaaggcacgtgctttgggagatgaggag

SEQ ID NO: 2285 - DNA, 120 bp, synthetic construct
  source 1..120: mol_type = other DNA
cccaaaatagaattttttagtttttccatccatcagaatcctgcttctctcccagtatctacatctcccacccatcaatccatcatctagtcctgttgtttctacccctggaatgtataa

SEQ ID NO: 2286 - DNA, 120 bp, synthetic construct
  source 1..120: mol_type = other DNA
ctgggtgacagagcgattctgtcttaaaagaaaaaaaaaaaaaaaaaaggctgggtgcggtgtctcacgcctgtaatcccagcactttgggaggccgacgcaagtggatcacctgaggtc

SEQ ID NO: 2287 - DNA, 120 bp, synthetic construct
  source 1..120: mol_type = other DNA
cagtgccacccaaacactcaaagaggattttgctgactactgtatttaaaagtagctccctgccactcttacaacatcagcctgtcttattttctcatagtaccaatttcttcttcagtt

SEQ ID NO: 2288 - DNA, 120 bp, synthetic construct
  source 1..120: mol_type = other DNA
tttgaggctaagttcaagtttgaagctaatgtcatttcagtctcatttggaggcttcagagatttcactagtttctccacaaagaccactataaagactgtatttccctgagtctggggc

SEQ ID NO: 2289 - DNA, 120 bp, synthetic construct
  source 1..120: mol_type = other DNA
aacattttatattttaatatagctcagctggggtcccagtccatcagctcataccattagagaagcagaaagagacaacaggaagcaaaaaggaccctgagagaaagggcaacacagaga

SEQ ID NO: 2290 - DNA, 120 bp, synthetic construct
  source 1..120: mol_type = other DNA
ccaccagccccagctccaacccctctaacactctccaagtaaaatcacatcagtagcagtaataatatttgaggtgacaagttggtattatctcaaacttaggaaaagtgaataaagtca

SEQ ID NO: 2291 - DNA, 120 bp, synthetic construct
  source 1..120: mol_type = other DNA
gagtgagatgagacctcatcatacttgactgtccagcatcatctctgagtaaggggaccaaaaaatttatcttccaaactaggacactttcaagagtggaagggggatccattaatattt

SEQ ID NO: 2292 - DNA, 120 bp, synthetic construct
  source 1..120: mol_type = other DNA
aaagaatcaagtaaggtcatgttagcctcatagagtgtatctatcatgccagcctgataggctggtggactaggaacaaacatcatactctcttgcctctcaaagacactttaattcaat

SEQ ID NO: 2293 - DNA, 120 bp, synthetic construct
  source 1..120: mol_type = other DNA
gggtttggttttggtttccttctctgtctctgactctccatctgtcagtctcattgtctctgtcacacattctctgtttctgccatgattcctctctgttcccttcctgtctctctctgt

SEQ ID NO: 2294 - DNA, 120 bp, synthetic construct
  source 1..120: mol_type = other DNA
tcctcagccctagtactgtcttctttggagccttcgctctgtagaacttggaaaaatccagaaagaaaaaataattgatttcaagaccttctccccattctgcctccattctgaccattt

SEQ ID NO: 2295 - DNA, 120 bp, synthetic construct
  source 1..120: mol_type = other DNA
acaggggacgtttaagaagatatggccacacactggggccctgagaagtgagagcttcatgaaaaaaatcagggaccccagagttccttggaagccaagactgaaaccagcattatgagt

SEQ ID NO: 2296 - DNA, 120 bp, synthetic construct
  source 1..120: mol_type = other DNA
agagagatgggatgggtgaaagatgtgcgctgatagggagggatggagagaaaaaaacgtggagaaagacggggatgcagaaagagatgtggcaagagatggggaagagagagagagaaa

SEQ ID NO: 2297 - DNA, 120 bp, synthetic construct
  source 1..120: mol_type = other DNA
tttaaagttttggtcttgggggaggatggatggaggtgaaagtaggggggtattttctaggaagtttaagggtctcagctttttcttttctctctcctcttcaggatcatcttctcgaac

SEQ ID NO: 2298 - DNA, 120 bp, synthetic construct
  source 1..120: mol_type = other DNA
gccttcctctctccagatgtttccagacttccttgagacacggagcccagccctccccatggagccagctccctctatttatgtttgcacttgtgattatttattatttatttattattt

SEQ ID NO: 2299 - DNA, 120 bp, synthetic construct
  source 1..120: mol_type = other DNA
agttgtgtctgtaatcgccctactattcagtggcgagaaataaagtttgcttagaaaagaaacatggtctccttcttggaattaattctgcatctgcctcttcttgtgggtgggaagaag

SEQ ID NO: 2300 - DNA, 120 bp, synthetic construct
  source 1..120: mol_type = other DNA
cagccatgaagtaatgggggacactgttactcatcccagaagcacccacacttactcacttttgggaagggggacctaaagtgtgaaaaaaaggtgaggattttccgtctcaccctaaat

SEQ ID NO: 2301 - DNA, 120 bp, synthetic construct
  source 1..120: mol_type = other DNA
tgaattaagacgtgtgtcgcaactcagcatctttatcggcagcactgaagctttccattctttattttcatcaggttcaaaatcaatttccaaacagtctcctacatttttcccactgcc

SEQ ID NO: 2302 - DNA, 120 bp, synthetic construct
  source 1..120: mol_type = other DNA
aaaaggtcgtgaagcgggtgggaaaccgagcactggaatcatggagccgaaggactctgggcgagcagaactggaaccttcggattatttacactcttattcaggtcttggaggtcctta

SEQ ID NO: 2303 - DNA, 120 bp, synthetic construct
  source 1..120: mol_type = other DNA
caaaaataacttaaaaaaaaatagatgccttcagggcgcttttctcccttctcctttgtctttgcgtctcattaatcatagtacaaaatgggagtgaaagcgagccgcctgtgaatgtgc

SEQ ID NO: 2304 - DNA, 120 bp, synthetic construct
  source 1..120: mol_type = other DNA
actgactactgactcactaaggagggatggaaatggagctttacctcccttgctacaaaaagtaaagacagatggacgaggcatactcccaccctcagagagcttccaagtctacaatga

SEQ ID NO: 2305 - DNA, 120 bp, synthetic construct
  source 1..120: mol_type = other DNA
accaggtccaaggaagctggaagtggctccaatcatctccccttcttggtaacatctctatgtgtttccgtaatactaataataatatagctgacccacaaaatgcacttaacatgttta

SEQ ID NO: 2306 - DNA, 120 bp, synthetic construct
  source 1..120: mol_type = other DNA
actgacttgagatttgtatgtaaaatttgccttcctcaggccagaaaagaaatggggaaataaatactgaactccagtcaatgttaagcttctgaagggtttagatgtaaaatgtactga

SEQ ID NO: 2307 - DNA, 120 bp, synthetic construct
  source 1..120: mol_type = other DNA
caaacaaacaaaaaaccctgaatattattcagcatggggaacatggaggatggggagaagggtgggggaggaagtagaaggttcttgaatttggaaggggaaacgcaaattaatatggac

SEQ ID NO: 2308 - DNA, 120 bp, synthetic construct
  source 1..120: mol_type = other DNA
cagagtggggtgaagctaagatgaggggagggagagtatgggtttgagtttccctgggccgtcgaggaatcctctgagtctctgctccccaaagaaattaaagacaattcatttctgtgc

SEQ ID NO: 2309 - DNA, 120 bp, synthetic construct
  source 1..120: mol_type = other DNA
gacctaatgttatcgcggaatgatggtaagtaaagtgtctcttgcatctgcatagagagagtcctgggagcttaggaagtgatggggaacagtgatgtatgcagctcatgactaggtgga

SEQ ID NO: 2310 - DNA, 120 bp, synthetic construct
  source 1..120: mol_type = other DNA
catggtccccccacttctgtgtctcagtcctctcagtccatctcgagcctccgttcaaattgatcatcatcaaaacttatgtggctttttgacctttgaatagggaattttttaaatttt

SEQ ID NO: 2311 - DNA, 120 bp, synthetic construct
  source 1..120: mol_type = other DNA
agaaaacacttgagactcatgaggagttagtggtggggcagatttattggggtcttttgaagaggactagggacatctgggctctggaatcactcctcggggcccatctgaggagtggca

SEQ ID NO: 2312 - DNA, 120 bp, synthetic construct
  source 1..120: mol_type = other DNA
tcaccctctgccatcattctccagccagttcagtagtaacttgtctagctgaaatgtaaaccatcatggtgaaattaagctcattaatgaatgcagctgcctagttaactaatatcactc

SEQ ID NO: 2313 - DNA, 120 bp, synthetic construct
  source 1..120: mol_type = other DNA
gagtggggcctaagaatttgttctaggttcccagaaatccacattttgagaactcctgcatttagttaataatatgcctgatagttaaggtctctcagttcattaaaaacagtttcggcc

SEQ ID NO: 2314 - DNA, 120 bp, synthetic construct
  source 1..120: mol_type = other DNA
ggaggggaagggattcataaggcgtgaatgaaaaacagctatggggatggagagaagggttgaattatgagaataagaccgaagataaatacaaacagggttgaagaatgctttagaaaa

SEQ ID NO: 2315 - DNA, 120 bp, synthetic construct
  source 1..120: mol_type = other DNA
aaaaaaaaaaagtttcaccaagaaatttatcatagatttacttggatctctcaaactaaaaagcctcacagtgggtgacacagagagactgtgaattgggggagtccactgagtgtcacc

SEQ ID NO: 2316 - DNA, 120 bp, synthetic construct
  source 1..120: mol_type = other DNA
ccagcctcgccctcccaaagtgctgggattcctgttttggttttttgagacagggtctggctctgtctcacccaggctggagttcagtggcgccatcacggctcactgcagcctcaacct

SEQ ID NO: 2317 - DNA, 120 bp, synthetic construct
  source 1..120: mol_type = other DNA
ctggacatagtggcacacacctatagtaccagctactcaggaagttgaggaaggaggattccttgagcccaggagtttcaaggatgcagtgagctatgattttgccactgcatttcagcc

SEQ ID NO: 2318 - DNA, 120 bp, synthetic construct
  source 1..120: mol_type = other DNA
tcaagtgattttcctgcctcagcctccctagtatctgggattacaggtgactgccaccacacccggctaatttttgtatttttagtagagacagggtttgaccatcttggccaggctggt

SEQ ID NO: 2319 - DNA, 120 bp, synthetic construct
  source 1..120: mol_type = other DNA
aaatgcacatctgtggaacacaataaaacaaggtaatacctctacagggattggtacaagagtatgccagacactcttgtatgtgtatcacacagctacaggagataatacagcacatag

SEQ ID NO: 2320 - DNA, 120 bp, synthetic construct
  source 1..120: mol_type = other DNA
ttggccaggctggtctcaaactcctgaccttgtgatccgcccgccttggcctcccaaagtgctgggattacaggcgtgagccaccgcgcccagcctggctcattttatatgaatacatgt

SEQ ID NO: 2321 - DNA, 120 bp, synthetic construct
  source 1..120: mol_type = other DNA
ttgattccagcttctgcccgatcccctaccttgcttgcctccttctatcaacaccccattcacaccccaaaggatcaatataggaaaaattgtctctactatctcagctgtaagaagccc

SEQ ID NO: 2322 - DNA, 120 bp, synthetic construct
  source 1..120: mol_type = other DNA
tccaaagacagtatgtggggtttttttttcagtccatctagaataaatcctgatatgtgtgtacattcaagggaccccttttaataactctgagaacctctagggaaggctaacctgcaa

SEQ ID NO: 2323 - DNA, 120 bp, synthetic construct
  source 1..120: mol_type = other DNA
caagtcttatcaatatttttcaactaatgaatggctcccaggtgatgatactttcagcttctgagaacagcttctcctctgaggctcatagcatctgacctcacgaccttcaatctctcc

SEQ ID NO: 2324 - DNA, 120 bp, synthetic construct
  source 1..120: mol_type = other DNA
ccaatatgtacacccatgcaaccacactgtaatagagatatagataattctcattatcctggaaaattcctccatgcccctttttggtaaatccctttcccctcctagatgcaaccattt

SEQ ID NO: 2325 - DNA, 120 bp, synthetic construct
  source 1..120: mol_type = other DNA
gtctgtgtgtgtgcatgtaaatgatgggaaggattatcttggctctttgatgctgtaaaagcaatattaggacagtttgcagaaactctccttcatctttatgttgtgttacacccagag

SEQ ID NO: 2326 - DNA, 120 bp, synthetic construct
  source 1..120: mol_type = other DNA
cttattatggctcaatctgctatgaaacttcttgtacccatctcgcaaatgccttttcaataccctaagtgtgcaacttcacagttatttcaccttgtccactccaatcatcaccttgac

SEQ ID NO: 2327 - DNA, 120 bp, synthetic construct
  source 1..120: mol_type = other DNA
caccctatcttcatctctcttaatcgctcttttcagtatctctctccttatctctcatatttcccacagctctgtccacaactctttctgtctcaccatgttattcatattacttgtttc

SEQ ID NO: 2328 - DNA, 120 bp, synthetic construct
  source 1..120: mol_type = other DNA
atcattctccatgttttcccttcccatctctccccatctacataccttattcttttactccatttctcttccttccccatttctctctgggtgagagaatgaaggaaggctagtgactag

SEQ ID NO: 2329 - DNA, 120 bp, synthetic construct
  source 1..120: mol_type = other DNA
actcccaggctcaaaggggtgaggggagagagaggttacagcagtggttcttagttattttgtgccacagatccctttggcattctagtaaagcataaaatttaaaaaatatacatacaa

SEQ ID NO: 2330 - DNA, 120 bp, synthetic construct
  source 1..120: mol_type = other DNA
cccatctctactaaaaatacaaaaaaataatggcatgaacccaggaagtggagcttgcagtaagctgagatcctgtcactgcacaccagcctgggcgacagagcgagactccgtctcaaa

SEQ ID NO: 2331 - DNA, 120 bp, synthetic construct
  source 1..120: mol_type = other DNA
gaaaagaaagagaagaaaagtctatctgggtatgatgatgactcctaatatcttctctctggtggttgatctggtcatttgataagatctctaggcaggaggtcttaagacaattgcact

SEQ ID NO: 2332 - DNA, 120 bp, synthetic construct
  source 1..120: mol_type = other DNA
cagtgagccgagatcgccactgcactccagcctgggcgacagagcgagactccatccccccacaaaaaaaaaggccaggcgcggtggctcatacctgtaatcccaacactttgggaggcc

SEQ ID NO: 2333 - DNA, 120 bp, synthetic construct
  source 1..120: mol_type = other DNA
caagctcttttcaaccacaactgagtttatgttagtaagttgacttttagaaagcccctaaggttggggtttgttgccaaggtaggcaactgtgtgattagagagttagaacttttagct

SEQ ID NO: 2334 - DNA, 120 bp, synthetic construct
  source 1..120: mol_type = other DNA
ttagaaacaaatgttatatttaaaaccatagagaaatgcccaggtgatgaaagctggggtgaaggagtctgcacattcatttcaaactgttaaaggatttgtgggccatgcaatggtccc

SEQ ID NO: 2335 - DNA, 120 bp, synthetic construct
  source 1..120: mol_type = other DNA
gatcctctgccaaagaccctctagccagtgcttaccctgtctgttctctctctttacccaaagaaatacataaagtttgaccagaatggaaacagagatatcagtgaaaaaaggtgattt

SEQ ID NO: 2336 - DNA, 120 bp, synthetic construct
  source 1..120: mol_type = other DNA
tagaggttattctccatcaaaatgatacaacactaaaaaaaggaaaacataagggtccaaaacaggaagaaggcaaagtatatcccaggtcggtggaagaaaagccccaagaagacacct

SEQ ID NO: 2337 - DNA, 120 bp, synthetic construct
  source 1..120: mol_type = other DNA
ctgaatctaaaataaaagttgaaattattattattagtattattattttgagacagagtcttgctctgtctctcaggctagagtacagtggcgctatctgggctcactgcaaactcctcc

SEQ ID NO: 2338 - DNA, 120 bp, synthetic construct
  source 1..120: mol_type = other DNA
aggagttcaagaccagcctggccaacttggtgaaaccccatctctactaaaaatacaaaaattagccgggtatagtggtgatcgcctgtaatcccagctattcgttaggctgaggcagga

SEQ ID NO: 2339 - DNA, 120 bp, synthetic construct
  source 1..120: mol_type = other DNA
cctagcacctttaatatacttatttatttgtattgtctgccttccccaattagatcaaccatgaagacaagagttttcatttgttgggttctctgggcctagaggcatgtctggcatata

SEQ ID NO: 2340 - DNA, 120 bp, synthetic construct
  source 1..120: mol_type = other DNA
ttcaaaggagataagatgagagggttacgttgcacattctaaagcaaacaaattaaaatgttttgttagacatttccatatttttaagggcctccttggagctgccaggctgggagtgag

SEQ ID NO: 2341 - DNA, 120 bp, synthetic construct
  source 1..120: mol_type = other DNA
caaaggtgagggggaaactgtaggcggtggagacagggctgggggtaggagggttaggatttccacaagaacaaggcaggaacagcagagataaaaagtttacttttgtggtagcaaaag

SEQ ID NO: 2342 - DNA, 120 bp, synthetic construct
  source 1..120: mol_type = other DNA
tgccctgatttgaagggaaaagggatgatgggattgaaggggcttctaatgacccagatatggaaacagaagacaaaattgtaagccagagtcaacaaattaaataaattaccccctcct

SEQ ID NO: 2343 - DNA, 120 bp, synthetic construct
  source 1..120: mol_type = other DNA
ataccatgaaccaacattctccaccactataagctttgtcactttgacaaatcactcagcctctgtgaggcttttttctaaaaatggggataaagtgacctatgctattgtgcctgacat

SEQ ID NO: 2344 - DNA, 120 bp, synthetic construct
  source 1..120: mol_type = other DNA
ggcacaggcccccaaactcatgcctccactaatctgttctctgcacctgagatgtacaccttcttctgaaacttgggtaagttctaactcgttcttcatatctatttatttatatatttt

SEQ ID NO: 2345 - DNA, 120 bp, synthetic construct
  source 1..120: mol_type = other DNA
ctataatatcctgtgcattatctccagcgccttcaaatcatagtcattgaatgatctgttgaatgggtataactctgatgggagcagagagttctagaatcgggtagtaagagacaaagg

SEQ ID NO: 2346 - DNA, 120 bp, synthetic construct
  source 1..120: mol_type = other DNA
tttttttttttttaaactaaagacagccctggaagtagagggttagggtagaaagtgccccgccctttatgcaaattaaggggcgtgtctaggcgcggagggaggtgggaggtgggaggg

SEQ ID NO: 2347 - DNA, 120 bp, synthetic construct
  source 1..120: mol_type = other DNA
acgaagcaacatccatcttatctctagcttgtcataaagttctttctccccaattttagctttcattctgggcctgtctggatttccctgctttcttccccactatttctcatctcttta

SEQ ID NO: 2348 - DNA, 120 bp, synthetic construct
  source 1..120: mol_type = other DNA
aatatttcttaatgaaataaaacacaggcttctgagttgagaaagcctcagtgacttaaagggtaaagtatctgattcctagttcctgtacagtcaatgtccccaccctgaggttggtct

SEQ ID NO: 2349 - DNA, 120 bp, synthetic construct
  source 1..120: mol_type = other DNA
agtagatcatggttgcttgagaagagtgggcagtttacatagactggaggaaaagacaccagagggcctcatatctgagtccctaatgataatgcaatggagtttttaagtttctgttat

SEQ ID NO: 2350 - DNA, 120 bp, synthetic construct
  source 1..120: mol_type = other DNA
atttcagagattattaagggcaggggaaggaatcccttctaagagaagtttggaggaagtaggtaataaaatattcaacatgtataaatgtgtcccaggataggaggccatcagatctcc

SEQ ID NO: 2351 - DNA, 120 bp, synthetic construct
  source 1..120: mol_type = other DNA
taaatcaaggaccacccatattcagtttcatggaggcacatgagcaagtttaagtctcagtcttatatgatggagtgtagtggtgccagaactgacctccttggggaataagcagttatt

SEQ ID NO: 2352 - DNA, 120 bp, synthetic construct
  source 1..120: mol_type = other DNA
catctcagagctaggtgctggcttattcaccttcctccccatcactttcagctgtgttcacttgtcctccaatcattgatacctctctctaccttttccaaaatacagattctacaactt

SEQ ID NO: 2353 - DNA, 120 bp, synthetic construct
  source 1..120: mol_type = other DNA
gagaagaggagggggtcttggtttgtattttggtaatatactcttagaggagtatattagttgcagctgattttaatttcactgttgatctgctcacagcagggattcccaatcagcttc

SEQ ID NO: 2354 - DNA, 120 bp, synthetic construct
  source 1..120: mol_type = other DNA
tttggtaataggggagtctgggtaagaagtgagaaactgggatgctaatgaggaaagaagaaaaaggagccctgggtgtttgggtttcggaaggagagagggaacagaaaaataaaaaga

SEQ ID NO: 2355 - DNA, 120 bp, synthetic construct
  source 1..120: mol_type = other DNA
agtactgttgttctaatggtttcatagaaagttaatgccaccaccataggctcatgagaggccatgaagtgctttaatgggtcttaaatgggaggggcttcaatagaatagatgttgaat

SEQ ID NO: 2356 - DNA, 120 bp, synthetic construct
  source 1..120: mol_type = other DNA
tccctaattctcttcataagttaccttctgggtccctttgcttctttgtccagttgtctccattgtcacgccaatttcccctagtccaagttttttctttgctgattcctttgtccatgt

SEQ ID NO: 2357 - DNA, 120 bp, synthetic construct
  source 1..120: mol_type = other DNA
tcgagactagcctcggcaactggatgccatctctgccaaaacaaacagaaaaatagtaaaagagagtctgcatcataataaagtgttcttttcccacctagttctggttttcctgagata

SEQ ID NO: 2358 - DNA, 120 bp, synthetic construct
  source 1..120: mol_type = other DNA
taaagaaacctccaccacctacaaaagtagaagagctgcctcccaagcccctcgaacagggggatgaaacccccaaacccccaaagccagacccactcaagataaccaaggggaagctag

SEQ ID NO: 2359 - DNA, 120 bp, synthetic construct
  source 1..120: mol_type = other DNA
ggaaataacttaagatttggaaattctaggcaaggtttccaggctaaagaaatgtcctgtcagtaagaaacttaaaaatattcctgtaattaggactggtgcggtggttcccacctgtaa

SEQ ID NO: 2360 - DNA, 120 bp, synthetic construct
  source 1..120: mol_type = other DNA
aggaacaaacaaatttattgtggtttaaaaattggaggagggggaaaaagcctgagggaaagataagtttgggtggagtggagattgtggcctgaggggccatgggctctagaatgtcag

SEQ ID NO: 2361 - DNA, 120 bp, synthetic construct
  source 1..120: mol_type = other DNA
gctacaggaggtaagggatgggtttgagattgtgcttcactgcactcttactcgtgaaaattcttctgggttatgttttctctgttttctttcctgtttctttcactgtgtttttactcc

SEQ ID NO: 2362 - DNA, 120 bp, synthetic construct
  source 1..120: mol_type = other DNA
cagaaaggtaaaagaccaaaaaaggataaggggaatgtttccaggaatctgactttggccctacctttttctgctttttctctctgcgtgtgtgttctgggcattccaatttggatttcc

SEQ ID NO: 2363 - DNA, 120 bp, synthetic construct
  source 1..120: mol_type = other DNA
aggccccgcttcccattgcatgaccccttcagtgaataataatttttttctgcctggtatgtatttataatcaagcctttctacgttgcagagttgtgagataccactttgtcacatcat

SEQ ID NO: 2364 - DNA, 120 bp, synthetic construct
  source 1..120: mol_type = other DNA
attgtatcttcacacttccccttcatttgatttctctgtccagttgctggctttgattttccctggttttctgacattcctccctgcccccaacatgcacacccaaatttcttgttacag

SEQ ID NO: 2365 - DNA, 120 bp, synthetic construct
  source 1..120: mol_type = other DNA
ctcctcccccttcccctggtcccctgtccctggggctgtttgttaaaaaagagtaataaaaggatttaaaaaaaaaaacttctacaatgatttgggggatgagttgtttgcattgtctta

SEQ ID NO: 2366 - DNA, 120 bp, synthetic construct
  source 1..120: mol_type = other DNA
gctagttatgctaaagactatacttaggtctgcagctgctcagaaactttttttgatgggtaatttgagagctctatgctagtgtgcacctggaatatgctcccaactcaaaatacaggt

SEQ ID NO: 2367 - DNA, 120 bp, synthetic construct
  source 1..120: mol_type = other DNA
ggagagaggggaaattaagagtccaggatgtggtttttacagcagaaatgccttcctaattctctttggcactagccaaaactaaagtgaatgtgcttgaacgtgctcttcaaaacgaaa

SEQ ID NO: 2368 - DNA, 120 bp, synthetic construct
  source 1..120: mol_type = other DNA
tcaccccacgagacatacgacgctgagggacagaaagcagatttagaacacaaaaccctcaaccacctttagaaatagattagatccaggttacagaatgtcagtttagaaaagaaaaat

SEQ ID NO: 2369 - DNA, 120 bp, synthetic construct
  source 1..120: mol_type = other DNA
gctattaaactgctcttggagaaattccaggtttgtccggatgatgtccacacctggctgaacctgcaccaaggactgagagacaagataacacaaagatcccaaaatcaagaatcataa

SEQ ID NO: 2370 - DNA, 120 bp, synthetic construct
  source 1..120: mol_type = other DNA
tgagccactgcgcccggccaaaccgaggtttttggaattgcaaaatgtttcttgaatataccactaccacatatatacactcatacagcataatagttcttctacaggtttcttcatagt

SEQ ID NO: 2371 - DNA, 120 bp, synthetic construct
  source 1..120: mol_type = other DNA
agcagaagtatggtaggtatttaacagagtcaggcagcacaacttacctacctcttcctctgaacaggctgtcagaaagcagtgacactaattactatactttctttttctaaacctcat

SEQ ID NO: 2372 - DNA, 120 bp, synthetic construct
  source 1..120: mol_type = other DNA
aaaaaaaaaaaaaaaaagctgaaacctgaagacacaagacactacagcagccccattccaggaaagcaggaaccaagaaaatatggaaagaactggaaagtgccagtgagcagactagga

SEQ ID NO: 2373 - DNA, 120 bp, synthetic construct
  source 1..120: mol_type = other DNA
tccttctgagatcaggcatacttcaggcccataatcccccaatcagaaagcctgcctttccctccatctaaacagggagaggtactcccttcaccacacaaacacacctccaaagacaaa

SEQ ID NO: 2374 - DNA, 120 bp, synthetic construct
  source 1..120: mol_type = other DNA
gtgctgcgcacaaccagccaaacacaaaaaggcagaaaatatcaagctggagtccatctcactaataaaagcaataatgcctactgagaataccatgtcctccaaaactttcagttatat

SEQ ID NO: 2375 - DNA, 120 bp, synthetic construct
  source 1..120: mol_type = other DNA
aagagttatctgcatttcagcctgttctgttttgggagtactggggctgaggagaaagggcagggccatcaaagggctcacattgttattgtagtccgtggtggcagcagcacccagaac

SEQ ID NO: 2376 - DNA, 120 bp, synthetic construct
  source 1..120: mol_type = other DNA
agactgaacagagaaagtatcctaactagactccctgaaggcatggctctgcaattttatctccgactcgctagcaactagcataagactgacacaaattagatgcataataagcatctg

SEQ ID NO: 2377 - DNA, 120 bp, synthetic construct
  source 1..120: mol_type = other DNA
tctaacaaagagtagagattgtggtttcctttcctccacaagttggtttcccagcctccacaagttaagagagtagaatcctttaattgaaaagagatgccatgagactaagtctgaaac

SEQ ID NO: 2378 - DNA, 120 bp, synthetic construct
  source 1..120: mol_type = other DNA
ggtgaggggtaaaaaccaccacagaatcactacccgtttgtcttgaccgtgagatcattactgtgcaaacccttaaactaaagtaacagctgtcaaaatacagacaataaatttggcttg

SEQ ID NO: 2379 - DNA, 120 bp, synthetic construct
  source 1..120: mol_type = other DNA
gtaatatcacattttagaaaaccatggaccaccccacatgcaatttgtctccaagtattacaggagtaaagacacagatagctatgtccaaggctttaagctcaagagactcaagctatg

SEQ ID NO: 2380 - DNA, 120 bp, synthetic construct
  source 1..120: mol_type = other DNA
aaaaaaaaagaaaatctggtgaccagaaaatcaagctcatctctcaggctaaggggcctaaacgaggaaaagctaaaggtgtcttccagaactagtgaggtgtctcacctgggcccccac

SEQ ID NO: 2381 - DNA, 120 bp, synthetic construct
  source 1..120: mol_type = other DNA
tgtcttgctcttcaatgacatggcaaaaaggaacagaagattattgaacacgttaacctggtagtaggtttatagcttccgactgaagaaatcctgagcgagccaattctttttctctgt

SEQ ID NO: 2382 - DNA, 120 bp, synthetic construct
  source 1..120: mol_type = other DNA
tatggaccttggactttggagatgggggattatgccacattcatctatgtttaaatcttggcaggctgataatttcaggcggcactgtcctagccagctaaaactcttctccaccctatt

SEQ ID NO: 2383 - DNA, 120 bp, synthetic construct
  source 1..120: mol_type = other DNA
gacgaacataagtgtcagaattgacaaatccaggcctacaggactccagatcgagcacttgtactttactgccccaataaaaagctgttaacattttagcttatttttttgagagagggt

SEQ ID NO: 2384 - DNA, 120 bp, synthetic construct
  source 1..120: mol_type = other DNA
acagcattaactgctccagtcacttggtgctatccaaggacaacctatttggcaattcttactgcctattatttgagaacttattacccaccagaaactaagtgctttgcaaacattact

SEQ ID NO: 2385 - DNA, 120 bp, synthetic construct
  source 1..120: mol_type = other DNA
gcacctgcatcatacctgttctaaagcatttaccaagttgtattgcaatggtttgtctacacagctagttttccctctaacgacttcttcaagatcaggggctatgtcttattcgttttt

SEQ ID NO: 2386 - DNA, 120 bp, synthetic construct
  source 1..120: mol_type = other DNA
gcccacggaattcagtggctgtattaattgccctctggagaaagatgtgcctaaccaatgcttggtagcttgaaacccaaggagagctgggcttcaataacaaatacaatggagtaaata

SEQ ID NO: 2387 - DNA, 120 bp, synthetic construct
  source 1..120: mol_type = other DNA
aagccttcttattgactcctaggaatcaaggtaaggggttaaaatctcataaaacaggattaggactcaccaagtcttctggtgttacagggtgaaagaggctcgtgtgatgtcaccaga

SEQ ID NO: 2388 - DNA, 120 bp, synthetic construct
  source 1..120: mol_type = other DNA
tggaggtggaaaaaaaaaaaaaactgaaggtgggagaaaagtaaaagcaaaaataacagctggtgaatccaagagcagtgccctcactgtccataaacacaaacaccctaaatagttctg

SEQ ID NO: 2389 - DNA, 120 bp, synthetic construct
  source 1..120: mol_type = other DNA
tctggctcagaacaggtatttgcctggtgatgcagtcctactctgaattcagaagtggctcctcccttctctgaatagtcatgcagcctcaagtgtggcaagtagtttgcttcctcttca

SEQ ID NO: 2390 - DNA, 120 bp, synthetic construct
  source 1..120: mol_type = other DNA
tttcgcatccaagacttcatgaaaggctttcccagaaaagaaaaaatgaggagtcttgcgacttgaacagccctcccctgcccgtctgcaaatttgaattcctggatttcacaacagtga

SEQ ID NO: 2391 - DNA, 120 bp, synthetic construct
  source 1..120: mol_type = other DNA
attgataacatggcactttccctctccagctgtgaactctttgagggttgggaatgtctttacctgtattcttggcacatagtatatggacttatgtttgtgaaatcagtgaattggctg

SEQ ID NO: 2392 - DNA, 120 bp, synthetic construct
  source 1..120: mol_type = other DNA
ttttgaataatttcctcaaaaattttagattctcttacaggcttttttctttttttctctccctcttgtaaggcccgaacctccccagacaggaaacaacattcctccaggtttatcccc

SEQ ID NO: 2393 - DNA, 120 bp, synthetic construct
  source 1..120: mol_type = other DNA
aaagaagaaaaagcattaagggcaggggaaggaaaaggggaagagttgaggcctcagagggggctggcagggtagaataggatcttttcagcttttctgctaaggaacaaattgccagct

SEQ ID NO: 2394 - DNA, 120 bp, synthetic construct
  source 1..120: mol_type = other DNA
ctaagatgagaaaactggaacatgtagacattaggttgtttgcccaagtaagtggaatcaggctttaaatccagggagctcatgtttataaccacttgactatactaccctgtcaaccta

SEQ ID NO: 2395 - DNA, 120 bp, synthetic construct
  source 1..120: mol_type = other DNA
taaagtaaccccacaacttaggactctgcagggcctaagggagagagactttgcgtaaaaacatggaaccctacaataccgactttgctccttagtaaagattaataaaactccatgaga

SEQ ID NO: 2396 - DNA, 120 bp, synthetic construct
  source 1..120: mol_type = other DNA
gaaacctgtggaatgccgagaagccgtgtaatgaaataacgtcacgcctgcccctcaccattactctgaccagggttcgaaggtcacacttagagcctaaggggaaatggagaagtgcaa

SEQ ID NO: 2397 - DNA, 120 bp, synthetic construct
  source 1..120: mol_type = other DNA
tcttctgtgaagtgagttctcttcaacctccctacttgccagcttcacatatcttcccaccagacgttccttcacatattccacttctgcactgttctcttacatgctatttgaaaactt

SEQ ID NO: 2398 - DNA, 120 bp, synthetic construct
  source 1..120: mol_type = other DNA
ctaagaaaaagattgctgtatctacttatccttagaaaagaaaagccaaagcttttatgggagagagtgtaggtgaactagggagagacacaagtacttctgctgagttgggagtgagaa

SEQ ID NO: 2399 - DNA, 120 bp, synthetic construct
  source 1..120: mol_type = other DNA
ttgttttcagggagggagacagaccttgaatcagagagttgtgatagactgcctcttcctcaaggaacaaacaacaaatggctctgatggtttgtagcctgcctaattggaagaaaggca

SEQ ID NO: 2400 - DNA, 120 bp, synthetic construct
  source 1..120: mol_type = other DNA
ccacctgtcctgcagtctttgacttttcctttcttttttgccaccctttcaggaaccctgtatggtttttagtttaaattaaaggagtcgttatcgtggtgggaatatgaaataaagtag

SEQ ID NO: 2401 - DNA, 120 bp, synthetic construct
  source 1..120: mol_type = other DNA
tatactgtaaggggcttaatcagcagctccatcttttagttttagttctaaaggaaaagtagcctaaagtcagtataactaaagggtggaacgaggtgggacaaggtccggaattgctgc

SEQ ID NO: 2402 - DNA, 120 bp, synthetic construct
  source 1..120: mol_type = other DNA
acttttctagcctcttgaaggactctgggttagaagtaaattaggtctgggtgaaggatgggaaaagtcagtagcaggggttcttggactatgggaagctattggaaggggttatcagct

SEQ ID NO: 2403 - DNA, 120 bp, synthetic construct
  source 1..120: mol_type = other DNA
ttgaaatgcagaagatgagaaagaaagttcccgtttgtttgctccacatgtttcctttagaatgaagccgattggaagtcaacttcaccctgaagaaattcctcctggcgtttacaatga

SEQ ID NO: 2404 - DNA, 120 bp, synthetic construct
  source 1..120: mol_type = other DNA
tgaaaacacccacattctttggtcactgtgatttcttaggcctccgtctgttgtaccactagcatctatatgacttttgtgtaattttctctcttgaactctggtgctgtttttttgttt

SEQ ID NO: 2405 - DNA, 120 bp, synthetic construct
  source 1..120: mol_type = other DNA
cttagctggagatcaaagcatggggactgtgattcttcccagccttaaacataccctacaaaacctggaaagttagaccctgatgatgccaggtcttttcacctaagaaaagaaacttta

SEQ ID NO: 2406 - DNA, 120 bp, synthetic construct
  source 1..120: mol_type = other DNA
gctgagagcactgatgttgggctgcagtggttggatcttcatgctaatattttaattttgaaatagtgcaaacgtatagaaagcaaggatggatacaacagccttttccatacactggat

SEQ ID NO: 2407 - DNA, 120 bp, synthetic construct
  source 1..120: mol_type = other DNA
gcttgatggaaatggcatcgtacgcatctgcttttacctatatagtgttttgcacacgtgttaacaaatctgtgtggcctgtactctgacggaaaataccaaaccaatgataattaagtc

SEQ ID NO: 2408 - DNA, 120 bp, synthetic construct
  source 1..120: mol_type = other DNA
ctggaaactggtggaattttacaccaaagtttgctgcagtcacactaaggagtatagagccctctgttttgagggtcattgcagaaatccaggaagcagtattgagagaatatccagaag

SEQ ID NO: 2409 - DNA, 120 bp, synthetic construct
  source 1..120: mol_type = other DNA
gtatacagcaggtcaataaaacaaggaagctgtttacaaactgatatcggaacattcagttcccctaacttaaatgtggaataatgtttacagtgggatgctactatcttgggttggggc

SEQ ID NO: 2410 - DNA, 120 bp, synthetic construct
  source 1..120: mol_type = other DNA
cagataaaatcctctgcttttgagtatatgaagtgggaagacagctaaggaccaaaccttggtgaacatgaaccactaagggtcagagagaaaacgctccatgaaggagactgaagaagc

SEQ ID NO: 2411 - DNA, 120 bp, synthetic construct
  source 1..120: mol_type = other DNA
aataataataaatttttaaaaatcttcagattgcacatcagtccatgagcaggcattccctaccaaacccatctgtcccatctctcctcctgcatgggtttacctgagcatcctggacag

SEQ ID NO: 2412 - DNA, 120 bp, synthetic construct
  source 1..120: mol_type = other DNA
accagcaataggggaatgagaaaaggaactgtctttcctattaattggacagatgtttattgaatcactgcatcagatgctggggatacaaccctgcacaaagtctccaccctcacaggg

SEQ ID NO: 2413 - DNA, 120 bp, synthetic construct
  source 1..120: mol_type = other DNA
aaacagacgggagacgcccgcccagaaagactgcgggaagaaagaaattcgagaggaaactgcacgccactgagcgcctcccaaaagccttggaatgaatgaatttaaaaactatattag

SEQ ID NO: 2414 - DNA, 120 bp, synthetic construct
  source 1..120: mol_type = other DNA
gctgggactgcttagaaagaataggtggataatcgtaagcagcaaataaccttaagtgaatgaacacgaattacctctctgtatgagagagagatgtagaggtcaacccaaatatcttga

SEQ ID NO: 2415 - DNA, 120 bp, synthetic construct
  source 1..120: mol_type = other DNA
taacacaaaataaattgtattagagaaaagccagagtagtggagaactgcagaggaacgcggggcacctacataaatgtcttgaatgaatgagtgcacagagtgatagacaaaaagaatc

SEQ ID NO: 2416 - DNA, 120 bp, synthetic construct
  source 1..120: mol_type = other DNA
gcggctcgagattgcgttctagagaggaaccagagagagggtctttaacctaaatataaatgaatgactggattcctgaagaatccggaatggcttgttgattggatagatggatggatg

SEQ ID NO: 2417 - DNA, 120 bp, synthetic construct
  source 1..120: mol_type = other DNA
ggtttcaagaagagcttcatgcactgggtttggagaagacacagaaatttagccagagactccatctaggacattagaacattgtcgcccacgttaagtatcttgctcaaaagaatggag

SEQ ID NO: 2418 - DNA, 120 bp, synthetic construct
  source 1..120: mol_type = other DNA
tgcactccagcctaggcgacagagtgagaatccatctcaaaaaacaaacaaaaaaccatccccaacaaaataaaacaaaacaaaaatggactcagggcgataaactttggggtctttcat

SEQ ID NO: 2419 - DNA, 120 bp, synthetic construct
  source 1..120: mol_type = other DNA
tctttggggcctctgctctccccactacctgcccctggctccctggacacttgagaagttatacaattagcctgatagtagaaaaaatacctttttattaattattaggaataatccatt

SEQ ID NO: 2420 - DNA, 120 bp, synthetic construct
  source 1..120: mol_type = other DNA
gggatacctacggaggaagtgccaggacaggtcagggctgattttttttcattcaccatccctgaaccttcctccctccttccctgtgctggtatcagtatctgtgtgtgtacactgccc

SEQ ID NO: 2421 - DNA, 120 bp, synthetic construct
  source 1..120: mol_type = other DNA
ggataaaggtgaagggatggcagagacaaagcccttgcccaacataaaggtcctcactattcacggagaaagaaaactgaggcccccagacaaaggagtcctcctgcttccaacaatggg

SEQ ID NO: 2422 - DNA, 120 bp, synthetic construct
  source 1..120: mol_type = other DNA
ttttccttttaatgactgggcacaagaggggaaggaaaggtgaagtgtatgcaaataggatagcttcttccaggcccactcagagattctacttcctctctcttcttccttgagcctcca

SEQ ID NO: 2423 - DNA, 120 bp, synthetic construct
  source 1..120: mol_type = other DNA
atgtcttttccttggaagattaccagctggatctctttcaggaaggggactatggagatgtttttcctttctcgttttcgggtctgttatcttctgtgaccattgctattgtgtggtatg

SEQ ID NO: 2424 - DNA, 120 bp, synthetic construct
  source 1..120: mol_type = other DNA
tcacagactgtaaggcctgctttacccctgaccttcacagctttactttcctctttcaagccttaatgaaatatgtaccaggctagtgttttgcaaacttttcttactgcaacctttgta

SEQ ID NO: 2425 - DNA, 120 bp, synthetic construct
  source 1..120: mol_type = other DNA
cgcctgtatgttgttggaaccaggctctcactgtgggaaaggaggaaggtaaagaatagtcctattggtgatgatgggaattagaggcatcagtatgaaattatacacttaattgtaaaa

SEQ ID NO: 2426 - DNA, 120 bp, synthetic construct
  source 1..120: mol_type = other DNA
cccactgctccttttcagcctcactgaaggagcttttgttcatatcccagttctttacttactacatttgagactccagacctctctgagcctcttttcttcaaacataaatatggataa

SEQ ID NO: 2427 - DNA, 120 bp, synthetic construct
  source 1..120: mol_type = other DNA
atggaaaattctaacaggaccagaaaatcaggggagatggtatgccccatcaggtatcaggactggcctgtctgccctcttccaagctaagaacctaacactctgcttttctaaaaaact

SEQ ID NO: 2428 - DNA, 120 bp, synthetic construct
  source 1..120: mol_type = other DNA
tatacaaaaaggtaaatggcaaaacaaaacaagatgactaaaagcaaatttcaggcaggctttgctcagacctgctctcaaatctggacttagccactttcttgctctatgactccgaat

SEQ ID NO: 2429 - DNA, 120 bp, synthetic construct
  source 1..120: mol_type = other DNA
cactgtgggccaggcacagtggctcacacctataatcccagcactttggaaggccaaggcaggcagatcgtctgcagtcaggagttcaagactagcctggccaacatgatgaaaccctgt

SEQ ID NO: 2430 - DNA, 120 bp, synthetic construct
  source 1..120: mol_type = other DNA
gaaaaaagaaacattgtggaatgtttctagtttagccagttcttacaggtgagggagggggaagattgttctagcagaatattccattagaagtggtagggaggaaaaattcctcaggtg

SEQ ID NO: 2431 - DNA, 120 bp, synthetic construct
  source 1..120: mol_type = other DNA
gggttaggtacagccaggagaagacaataaacaacatttcagagagggataagtgctacagagaaaatacaacaagaatgaaccagaactttatgtgtcatcaatggtattcccccaaaa

SEQ ID NO: 2432 - DNA, 120 bp, synthetic construct
  source 1..120: mol_type = other DNA
ccccatgttgaagcatcgcccatcacctggttgtcatcttatgtacccactaggggtaggtgatctgtcctctttatttttttaaattgcgagatacaacatatgtacataaaacatata

SEQ ID NO: 2433 - DNA, 120 bp, synthetic construct
  source 1..120: mol_type = other DNA
aaaaaaaaaaaaaagaaaaccatgcccttgttgtcttcggtgttctacctcaaacatgcacatcccttttgaattttatataaatgaaaacatactgcatacattattttgtggttagct

SEQ ID NO: 2434 - DNA, 120 bp, synthetic construct
  source 1..120: mol_type = other DNA
ccttaaaccattctcaatgattccctctcggaggcccatcactaaaatgtatttgcacaaggtacttaatttttaaccagtgacagtgacagataagattcaaaccaggtttcctctcca

SEQ ID NO: 2435 - DNA, 120 bp, synthetic construct
  source 1..120: mol_type = other DNA
tcttcctctggaattatggaagaattatgtcttccatctccagacataattccatcacatttaaaggcagtctctctgtctactcaagttaatcaagccttttcaattggccctgctcag

SEQ ID NO: 2436 - DNA, 120 bp, synthetic construct
  source 1..120: mol_type = other DNA
tgacatcacatgcctcttggtgtgatagagggtaacatgatttctgtgacatttccatgacctgaatgtaaccatgactacacaaattaagaaacattcaacaaaaccactggcatatgc

SEQ ID NO: 2437 - DNA, 120 bp, synthetic construct
  source 1..120: mol_type = other DNA
aaataagagtagttgactaagaagagaatgtgggtaggagcgggcagtttgtaggagacagtaacacaatgagacaactgataaaaaggaagagaatatttagaacagcctaccaccacc

SEQ ID NO: 2438 - DNA, 120 bp, synthetic construct
  source 1..120: mol_type = other DNA
aatttttttctgtctcattattggcagactctagagcgacagcggaaacgaggggtgagattaggagtacttgataagagtaaccgaaaacataaggtgtctaggaatgtatctagtaca

SEQ ID NO: 2439 - DNA, 120 bp, synthetic construct
  source 1..120: mol_type = other DNA
tacaccatggtcctggatacgaaaattcagcacagtaagatatgcggaatatttgtaaaaagaaaataaatgaatcattactgttatgcatgaactggatcttaaaaccatgatgctgag

SEQ ID NO: 2440 - DNA, 120 bp, synthetic construct
  source 1..120: mol_type = other DNA
gccaccatgcctggccaggcttcttttactctcattatattgtgagattcaactttgttgcaaatcactaggtttgttcattctcattgctgtccagtcttctactctgttaagcattta

SEQ ID NO: 2441 - DNA, 120 bp, synthetic construct
  source 1..120: mol_type = other DNA
gggtccaggttatgcagtttcctttataaaataagaagaatgagtaaatgcttccagaaaagtagaaatgagtagaagagatgtgggcatttgccaactttcagccttttccctcttgcc

SEQ ID NO: 2442 - DNA, 120 bp, synthetic construct
  source 1..120: mol_type = other DNA
tttctgagcccaggagccgaagaccaagaatcatccgctgcctcatgactcacaacaaaggggtcagctttagcctggcaggtaaactgaggaaggagacggaaagggatgttctttcac

SEQ ID NO: 2443 - DNA, 120 bp, synthetic construct
  source 1..120: mol_type = other DNA
gggtgaattactataaagggtgtgaggggaaagtgtggttatggctggtggtctgctctgtagttggttgcccatgcgtgagcagggggcattgccattctctactttttattttatttt

SEQ ID NO: 2444 - DNA, 120 bp, synthetic construct
  source 1..120: mol_type = other DNA
tggccgccattctctatgggtcagggtgagaggcctggaaaggggcagagtagggtggaggatattgtgggcagggaagcttacaaagtcttctgttggaagagcccaccagactgtgga

SEQ ID NO: 2445 - DNA, 120 bp, synthetic construct
  source 1..120: mol_type = other DNA
agactcaagtcagagaaagtggaaagagatggacagagggagaaaaatagaagcacaaagtgggaggatggagggacagagaaaatggaaagcctcaacccatctctaaattaagccaga

SEQ ID NO: 2446 - DNA, 120 bp, synthetic construct
  source 1..120: mol_type = other DNA
caagcttgggccttactggaaaaaagctttctcagaagtctcacctaaaggcttcaggctgcaggggcttaaactaagccattggcaagaaaaaggacgaaaatgacacagatggagaat

SEQ ID NO: 2447 - DNA, 120 bp, synthetic construct
  source 1..120: mol_type = other DNA
gtaagaggggaacagggcttacaagagggcaggaggaagcttttgggggtgatgtctatgttcattatctttattgtactggtcgtttcatgattacacatgttatacatatatgattgc

SEQ ID NO: 2448 - DNA, 120 bp, synthetic construct
  source 1..120: mol_type = other DNA
cagccaactcctttataatcttataagaccaccgtaggatatgtggtctgtggtttactaaaatgtcaacatgtagcacattactgcactcatatcagatttttggcctccagaagtgtg

SEQ ID NO: 2449 - DNA, 120 bp, synthetic construct
  source 1..120: mol_type = other DNA
tggggcaggcagaggccagatccggagagggatcacagagagaggtgacacatgaagcagagagaggaaagctgtggaataagggaggaaagctgacagaagtagaaaaaatagctgggc

SEQ ID NO: 2450 - DNA, 120 bp, synthetic construct
  source 1..120: mol_type = other DNA
agggaagttgagggggtcagtgaaaaagttaagtaaatggcaccagagacagataggaaaatagaaattgacattgaccaaagggcccagcacagaagcaacacgtgaaataagggatag

SEQ ID NO: 2451 - DNA, 120 bp, synthetic construct
  source 1..120: mol_type = other DNA
ttttgtgaaaaataactattatttctccacagcacagtgagaagctgagcattgctttacatttttgtgaatctagtgtcaggcttcgtgggagatgcctgggttttcctatctgcttct

SEQ ID NO: 2452 - DNA, 120 bp, synthetic construct
  source 1..120: mol_type = other DNA
ccccacctccttattctcctaaaagaatctcataggcccattagctcacaaatgaagagctctggccctgaaaggccaaagttaaaaccaaacttcaaattttcggcattagttaaggac

SEQ ID NO: 2453 - DNA, 120 bp, synthetic construct
  source 1..120: mol_type = other DNA
aatgtttttaaaaaattagccaggcatagtggcacacacctgtaatctcagtttcctgagaggctgaggcaggaggattacttgagcccaggagtttgaggctatagggaggtatgattg

SEQ ID NO: 2454 - DNA, 120 bp, synthetic construct
  source 1..120: mol_type = other DNA
acaagggacatctgaacatctaatgtgagaagagaaacatccttctgtgagtcattaaaatctatgaaccactctacagctgactggaaaattacatctatctttggttgatgggagggc

SEQ ID NO: 2455 - DNA, 120 bp, synthetic construct
  source 1..120: mol_type = other DNA
tcttataataaatgtacattttatcagactcagacatttattactcaaaatggaaagaggtgagtatgggggatggggtacatatgggagcctgggtttggggagtcagctctgtacagt

SEQ ID NO: 2456 - DNA, 120 bp, synthetic construct
  source 1..120: mol_type = other DNA
tgtgttactgtctctttttgaggccgttttctcagtataataatagcacccacatcacagggttgtcatgaacattaattgaaaaaaaggcatgcaaagacataggatgttgcctggcac

SEQ ID NO: 2457 - DNA, 120 bp, synthetic construct
  source 1..120: mol_type = other DNA
gaaacttgaaagaaggagaaataataaaaatgaaaatcatgagggttacaacactgtcagaaatgccttggaacttgaggctggcgagaaagccatctgtggccagctttagcaatttac

SEQ ID NO: 2458 - DNA, 120 bp, synthetic construct
  source 1..120: mol_type = other DNA
tcagtcctctgaatgagcatcatcaaaggcctctgtgatttacagtgtccatggtggcagcttctgctggttcctggaaaatggacaaaaggatgtggcccaaattaattgctgaatttg

SEQ ID NO: 2459 - DNA, 120 bp, synthetic construct
  source 1..120: mol_type = other DNA
aataataccacacgtctacaaccatttgatctttgacaaacctgacaaaaacaagaaatggggaaaggattccctatttaataaatggtgctgagaaaactggctagccatatgtagaaa

SEQ ID NO: 2460 - DNA, 120 bp, synthetic construct
  source 1..120: mol_type = other DNA
attacaggcgcacctgaaaagttaagcaggccaaagcatttgtgtaaatggcccgagcacacattttaagtgagaaccatttgaagactccgagtttgcctgcgaggattcccaaaggga

SEQ ID NO: 2461 - DNA, 120 bp, synthetic construct
  source 1..120: mol_type = other DNA
gagagttgtgatagacgcagaggggctgaagcaagataagggccgcctagtagggtgggttgtgtgtgggaagatccaggatggctggagtgcagaacagagaagagaaagaggagacgg

SEQ ID NO: 2462 - DNA, 120 bp, synthetic construct
  source 1..120: mol_type = other DNA
tggaccaggaaccggtaagggcatggggatgggaaggggatagccagaatctctgaggaaaatggaccaaaaaaaaaaaggcctgaaccccaaggaagactgtggagaccatcttgtctt

SEQ ID NO: 2463 - DNA, 120 bp, synthetic construct
  source 1..120: mol_type = other DNA
taacaaacttccacttagacattctgcctgactgacctcaggcatttcgcactctgaatgtcaaacccaactcattgtcatctctgaagctgctcacttaattctcctctgtattctctt

SEQ ID NO: 2464 - DNA, 120 bp, synthetic construct
  source 1..120: mol_type = other DNA
cagtctctgaatcatctaacatttagataaattcagtgagcaatccacccatacactcttttctctgccctggacacacttcccatgatagaaattctgtcttgttcatcttgtgctcaa

SEQ ID NO: 2465 - DNA, 120 bp, synthetic construct
  source 1..120: mol_type = other DNA
aataatgacagcaagcacatagagcttacgatatgtcagacactaagtactttagttacctttgctaatttccaccttggaatcacatgcagttattttcaaccccctaccttccccagc

SEQ ID NO: 2466 - DNA, 120 bp, synthetic construct
  source 1..120: mol_type = other DNA
tccccatcccatccacacagactccccctccaaccgctcggatttcttagttttcttgtttcttcacctgtctgggagaagaaacagaaaaggaggagacagagaaaaagacatgcagac

SEQ ID NO: 2467 - DNA, 120 bp, synthetic construct
  source 1..120: mol_type = other DNA
tgggacagaaggagaaagctggagaggcaggggctggggaatggaagtcctgaatacccgaacgagaagggagagaggtgggtaggaagggaggagttcgagcctaaggagttaagcatc

SEQ ID NO: 2468 - DNA, 120 bp, synthetic construct
  source 1..120: mol_type = other DNA
aaaaacacttgatttttattctgtattttattactgaaatatgttgtcctactcatcccaccccacaataaaaatctgacccaggccccccatttctttccctcatcccctcttccacca

SEQ ID NO: 2469 - DNA, 120 bp, synthetic construct
  source 1..120: mol_type = other DNA
aacatgggaaccagcagttttgatcttccacaagaggaagtgaagactgaagttataaagaaagttaaagctttgactttaggaaaagcctgctctgtctaatctgggaatttggcagtg

SEQ ID NO: 2470 - DNA, 120 bp, synthetic construct
  source 1..120: mol_type = other DNA
atggaatactatgcagccataaaaaaggatgagttcatgtcctttgtagggacatggatgaagctgggaaccatcattctgaacaaactatcacaaggacagaaaaccaaacactgcacg

SEQ ID NO: 2471 - DNA, 120 bp, synthetic construct
  source 1..120: mol_type = other DNA
gagggaactgattagaacttcaggaaaagattgacatagtccgaaaaggcccgttgggggtggatactaatggtgagtccaaaataataatagctaacactcatgtagttacttttctat

SEQ ID NO: 2472 - DNA, 120 bp, synthetic construct
  source 1..120: mol_type = other DNA
gccaatgaaaatgcagggaaatatagaggtaaagcaaaaatgggaagctgggggaaatttacgaacatctgcttcatctccctgatatctgaacgtccaggtgcccctaatgtctcctac

SEQ ID NO: 2473 - DNA, 120 bp, synthetic construct
  source 1..120: mol_type = other DNA
agaacttgggaggatctgaatcctagagagggaagggtgtggaacttcagtgaggccagagttgtaggctagaagcctggatttctgggttcctgaagggagtagagtctgaagacagga

SEQ ID NO: 2474 - DNA, 120 bp, synthetic construct
  source 1..120: mol_type = other DNA
cacttcccttcctttagtctgctagaaacttgcacttttacaaacttttcagggttgatcctagaattctcattacttgctaacaagttaatgtcttcccctctcaaaaccacccctcaa

SEQ ID NO: 2475 - DNA, 120 bp, synthetic construct
  source 1..120: mol_type = other DNA
catataaaaaacttgacactaacagcttgggcacacccgtgaagattcagggatggggacttcaaatggaaaggtggtcgtttaatcattctgcatttcttccagactccaatccaaatt

SEQ ID NO: 2476 - DNA, 120 bp, synthetic construct
  source 1..120: mol_type = other DNA
taaataagcagggaggacataggaggagcagctctctctccagtaaccttgatttctattaaacctttatgacctgctgaaaaaataaacccagaattccagcctccatatcctgaattt

SEQ ID NO: 2477 - DNA, 120 bp, synthetic construct
  source 1..120: mol_type = other DNA
cacaaataagctttatggagcagtgacttcattatgttcaccgctttgagtccaacccctggcccaaaataggcactaaatagttgccgaatgcatgaatgatagatacctctctgtctt

SEQ ID NO: 2478 - DNA, 120 bp, synthetic construct
  source 1..120: mol_type = other DNA
actgttctaagctctgtataaatattaactcagagggtacaaatattaacttaagagttgttgcaggaaaaaaaataagcgcctctggctctttaagtttggcctccccctcaaaacccc

SEQ ID NO: 2479 - DNA, 120 bp, synthetic construct
  source 1..120: mol_type = other DNA
aaaaaacagggttgggaagagctgggcaagtctcttacctcctgagtggctgtttcacattcactaaatgggggtgatgatgcctatctcagagatttgagaaaatgattaaattatata

SEQ ID NO: 2480 - DNA, 120 bp, synthetic construct
  source 1..120: mol_type = other DNA
ttcaacacgatatttggcagggacaaatcacatccaaactatagcactgactcaatatattttacagttgcttcacagaggctccctcttttgtttttatgaattcatttcattatttaa

SEQ ID NO: 2481 - DNA, 120 bp, synthetic construct
  source 1..120: mol_type = other DNA
aaaaaaaaaacagaaattaacgtcttggggtcacgtgtttacttctcatgtgacaggcaacgaaaagagagtaggacacctgaatgtgctttgtactaaggagtggtattaagaactcgg

SEQ ID NO: 2482 - DNA, 120 bp, synthetic construct
  source 1..120: mol_type = other DNA
ttctcttagtcaaagacaaagatcctttaactcatttgatctctgttctccttccaagttctggatgagatcaatccccagtctgttgttacgagtgccaaacaggatgagaatatgact

SEQ ID NO: 2483 - DNA, 120 bp, synthetic construct
  source 1..120: mol_type = other DNA
tgggcaagtcaaataatctctcttgcttctattgtctcattcttaaaatggggtgaaaaaattgagctacaagaccgttccctttgcttgcctccctcaaataggtctggagataagcaa

SEQ ID NO: 2484 - DNA, 120 bp, synthetic construct
  source 1..120: mol_type = other DNA
ttttgagggaaagagaggaagaaaagcataaagatactagctttcttttctatagggagaaactgaggcaaagaaaagtaagggacaaaccttacatcaagatatgatctcggctgggcg

SEQ ID NO: 2485 - DNA, 120 bp, synthetic construct
  source 1..120: mol_type = other DNA
gtgttccttccctgggtttgtatgaatgtttctactagttgggtacctgttagggactttgggagaccttgtgtatagagaagagttttgtaactgcataactgcctatttgatttgtat

SEQ ID NO: 2486 - DNA, 120 bp, synthetic construct
  source 1..120: mol_type = other DNA
ctggccagttcttgagttttaactaggtctgctttgtgtatttttctggctaagtgtccctgtgagtgtccatcccttcccccatctccatgtacggtaatcccagctcatatttgtggc

SEQ ID NO: 2487 - DNA, 120 bp, synthetic construct
  source 1..120: mol_type = other DNA
ctgcatttcatccttataacagctttgtgtagtagctgatatgcatctcattttttgttgtcagcgcaggtacacatatacccattgatgatacacagacttgcacacatacaagcagca

SEQ ID NO: 2488 - DNA, 120 bp, synthetic construct
  source 1..120: mol_type = other DNA
ccccttctaagtcctttcctactggatctaccttatattctagtcatttagggccacttgccattatggaaacatgtcatgcctgtgtttatgctgctccttctggaaagtctttttttt

SEQ ID NO: 2489 - DNA, 120 bp, synthetic construct
  source 1..120: mol_type = other DNA
tgaatctgcttgcctccatagctatgaactctatctagtagctatacctgttacctcagtgtctgacacatggtcttgtacatagtagcactcaatgtgtgaacacaacgcaaatgtaaa

SEQ ID NO: 2490 - DNA, 120 bp, synthetic construct
  source 1..120: mol_type = other DNA
taagatacaaatcttcaggacctagtgtgtgcacatgttggctcttatataagatggcatccttagtacttgttctatgtagaaaagaatttgtgggctcacaagtccctacagagtctc

SEQ ID NO: 2491 - DNA, 120 bp, synthetic construct
  source 1..120: mol_type = other DNA
tattaatagtaatacaaatggccaggcgcagtagctcatgcctgtaattccagcactttaggaggctgaggcaggcagatcacctgaggtcacgattttgagaccagcctggccaacaca

SEQ ID NO: 2492 - DNA, 120 bp, synthetic construct
  source 1..120: mol_type = other DNA
ctctgatctgaatacgtggaggtgggagtgagtagaaggcaccaatacagtgtgagtacaatgagaactcaaagtgtcctttgagatatgaagatcagaaacttacttactgatagttgt

SEQ ID NO: 2493 - DNA, 120 bp, synthetic construct
  source 1..120: mol_type = other DNA
atccctaatgggacagttatgttttcacaggaagaatatgaaaagatgaatgtctgttgctgttacccagagacactttcacagctaaaaagacatacaaactcatactgactcaccgtc

SEQ ID NO: 2494 - DNA, 120 bp, synthetic construct
  source 1..120: mol_type = other DNA
gtaaggccttccttcttgaatcccaaaagtccaggtaaaggccctcagcctgtattccagactgtctgtaccctagacatgctgtccaattttattctaccctcttttttttttttttgg

SEQ ID NO: 2495 - DNA, 120 bp, synthetic construct
  source 1..120: mol_type = other DNA
ctcacccggccaatatttcagggtaatttctaaaagaaaattattttttaaaaagaataacagtattgttatcttactttaaaaattgtattatttggtatcatcaaatatctgaaattt

SEQ ID NO: 2496 - DNA, 120 bp, synthetic construct
  source 1..120: mol_type = other DNA
ctttttcttctcctggcaatttgttgaagaaactagattattatttgtcttatagtgttttccattagcctggattttgctgtttgcatttcctagatgtttttggcacatttctctctc

SEQ ID NO: 2497 - DNA, 120 bp, synthetic construct
  source 1..120: mol_type = other DNA
gtggccgtgctaatccctgtaaccttcgaaatttcagtatatgtgctgcagaaatgagcaccccccacctttatttactagctatcaatatggtaaattagttccctaacattctccaag

SEQ ID NO: 2498 - DNA, 120 bp, synthetic construct
  source 1..120: mol_type = other DNA
ccatatcttaattgtctttgtagtttcagtgtttggtacagtgcctctcactgtttctttttgcctttgagatcttccctctttgttactgtgatcttccctactggtctttgttcttct

SEQ ID NO: 2499 - DNA, 120 bp, synthetic construct
  source 1..120: mol_type = other DNA
agatgtcttttgggggagatattaggcttatgaaagacatactggtagataagaaaacttgtggggcagcctgaagaacatgaacacttttttgtggggatacagggatcttttaagctc

SEQ ID NO: 2500 - DNA, 120 bp, synthetic construct
  source 1..120: mol_type = other DNA
cactatcgtagtgcccgaaccaaggagctggatgcattgctgggggacctgcactgcgagatccggggtgaggaaaagccagaggttatatgcattgtaagatgtttaaaaaaagcagca

SEQ ID NO: 2501 - DNA, 120 bp, synthetic construct
  source 1..120: mol_type = other DNA
tgaaaatgctcataacaggaaagcatgccctctgctgcatgccctttatactaaaagtggggagcactaaggtcagagataagaagaatcaataccataaacatttcttgaacccttgtt

SEQ ID NO: 2502 - DNA, 120 bp, synthetic construct
  source 1..120: mol_type = other DNA
aagggtttcaggacaggaaggaggtgattgatgatacactgtcttttattctcttttaagaccatggagacctgtgaggatggcaacgatcttgtcttcttctatcaggtttgcgaaggt

SEQ ID NO: 2503 - DNA, 120 bp, synthetic construct
  source 1..120: mol_type = other DNA
tagactgtttgatggtgtgaaagttgtttccagagtcatcatgtaattattctctaacttgcacctgaagaaaccaagataccagttagattaccagaagttccccacaaggaggtgttt

SEQ ID NO: 2504 - DNA, 120 bp, synthetic construct
  source 1..120: mol_type = other DNA
aagtttattttgaagaaagatattgtttctttagtctcaaaacaagagactaggaaagatccaaaacacagagcaggagtccacaggggaacctgccctgcctcagtaaaaatacagtgt

SEQ ID NO: 2505 - DNA, 120 bp, synthetic construct
  source 1..120: mol_type = other DNA
ctagaattttctaacagatttacactcagagcctggtcgccccccgttagcccagattcaaaaggtgaacatctgtttgcagaatctgattcatgagaaggtgagtttattgttttcagt

SEQ ID NO: 2506 - DNA, 120 bp, synthetic construct
  source 1..120: mol_type = other DNA
aagtttctcctctgctcctgaaaacttcatcttcttggtgtctcatgtcctcattctcccctatatgacatgcaaaaacgatctttctttgaaatccctctgggaagaagcatgtttatt

SEQ ID NO: 2507 - DNA, 120 bp, synthetic construct
  source 1..120: mol_type = other DNA
aacaacaaaaaagagaaaaccttcatcccagctaggagaggtaaggtcctaagacctatgtgacaaatgtgtcccaggtcttcttaccaatggggcaggttgaaaatagtgctggagacc

SEQ ID NO: 2508 - DNA, 120 bp, synthetic construct
  source 1..120: mol_type = other DNA
ggggtgctggaaatgttctatatcctgaactgggtgtattatatgaaatccatcaaactgtacactttagtgcacattatgtaaattataactcaatataaaagttatgcatatgcacag

SEQ ID NO: 2509 - DNA, 120 bp, synthetic construct
  source 1..120: mol_type = other DNA
aaaaaagaaagaaaccacgtcaaacaggcagaaagggataccagtaagagaggggcacggggccagggatgaagttattatggtcagagacaaagttggaggcaagggattcaggatgag

SEQ ID NO: 2510 - DNA, 120 bp, synthetic construct
  source 1..120: mol_type = other DNA
aaaaaaaaaagaagtggctagtcatggatctaagaggaagagaaacttcctttcctgccccgtgactggaagaacaacacagcagtgagagtgattcccctttctcctataagaagagag

SEQ ID NO: 2511 - DNA, 120 bp, synthetic construct
  source 1..120: mol_type = other DNA
gagccccagttcttcacattgtttattaggcagggtcaaataaaaattcagcgttattaagggtagggcctcttacgtatatcattaaaggtatcaggaaatgttccactcattgtctgc

SEQ ID NO: 2512 - DNA, 120 bp, synthetic construct
  source 1..120: mol_type = other DNA
actgggtttcctcataagaaaagagaccgaatagcacttacctcagaggtttattgggaggactaaatgagttgattttgcaaatcttaagatagtgctttgacacataagtgctaagtt

SEQ ID NO: 2513 - DNA, 120 bp, synthetic construct
  source 1..120: mol_type = other DNA
taatcaatggaaaaggaatacaatgtagctagttatctcagatgcttcccagaagcctggccccaacaaccccatcttgataccaatctctgtctataggaaatggagagaattgaaaat

SEQ ID NO: 2514 - DNA, 120 bp, synthetic construct
  source 1..120: mol_type = other DNA
taaactcttggtttttgcatcctatccatttctaccctaaattacagaggtggacttccttaaagaagtctattgtggggagcagaaaaaaatatttccatttgggcctgagccctagca

SEQ ID NO: 2515 - DNA, 120 bp, synthetic construct
  source 1..120: mol_type = other DNA
ggttgctgctaattttctgtatgcacacagtagaggctcactcgggactacaggaagtgccaccccgagcccacttcctcaccacaggcctttatcccttacctttttatcttttctttt

SEQ ID NO: 2516 - DNA, 120 bp, synthetic construct
  source 1..120: mol_type = other DNA
aaaaaaggataaaaaggatggtgctttgtggaggggaattctggagtaaatcttagggcgtggtggtcagtcaccacagcacatggtggatcccctgatccctccagccagtcccccaaa

SEQ ID NO: 2517 - DNA, 120 bp, synthetic construct
  source 1..120: mol_type = other DNA
aaataataagaaaaaaacaaacacagtacgtgtagggaccaatcctatggggattatgccctctgtgagttgtggacaggaggcagcttccaggtgagagggtgagggggctgtgagaga

SEQ ID NO: 2518 - DNA, 120 bp, synthetic construct
  source 1..120: mol_type = other DNA
agtggaggagacatgatcaagaaggcaccataggacgcgctccatcccggacaggcacggaagtgaagacccctctgaccatcaacccaaccctgttctcacctgcagggcatgaagtgc

SEQ ID NO: 2519 - DNA, 120 bp, synthetic construct
  source 1..120: mol_type = other DNA
tctccatgggaacctgctttacctcaaaagtcgtgtctgctccagcctggcttccccaccctctcgctgtcacccagacaacctgagggcctcatcggaccattagggacatacacacct

SEQ ID NO: 2520 - DNA, 120 bp, synthetic construct
  source 1..120: mol_type = other DNA
atttgtcagatgatgatgatgatattgcccccctcccagggctcttgggagaaccaagtgagattaaccacgtccactcaaggctctctagctcttggcctccatgactggttttctctg

SEQ ID NO: 2521 - DNA, 120 bp, synthetic construct
  source 1..120: mol_type = other DNA
tcggaccagcccagaccagggttttgatggaggaaggggatggtgtgggaaatgcccacccaggccacacaccttggcttcatctgcctcctggacttcgagcggcaccttgacaggata

SEQ ID NO: 2522 - DNA, 120 bp, synthetic construct
  source 1..120: mol_type = other DNA
gctccttctcaccaagtagacatcacagagctcatagagccagaagctgtactgggcagtggtgacggccgggaagtcgtaggcctggaagccttgattgctgagcctcacagcctctgt

SEQ ID NO: 2523 - DNA, 120 bp, synthetic construct
  source 1..120: mol_type = other DNA
gcaaacttggtggcattccagagcttgttgcagaagtggcggtaacccagtatccggttcacatccaggttgatgtcacgacctgggtcgggggtgagatgtgagtcctcatcaccctct

SEQ ID NO: 2524 - DNA, 120 bp, synthetic construct
  source 1..120: mol_type = other DNA
aaatggataaggggaagaggccagaggagaaccaggtatccaatacatcctcatctgagagaggccaaaggtcagaggtcagagggagtggagctctgccccccacaactccctccagac

SEQ ID NO: 2525 - DNA, 120 bp, synthetic construct
  source 1..120: mol_type = other DNA
cacagggacagaggtggcctgatattatatcggaaaccaaggatttcccaattcttgagatatccttcagctcacactttcattagggttagcaaagggttttggatctttaaaatctat

SEQ ID NO: 2526 - DNA, 120 bp, synthetic construct
  source 1..120: mol_type = other DNA
cccacttgtctaatacagtcccttgagaaccaccccaagctctgtctatttggctgaagcttattttctttttctctgagagaagatggacagctagggtgcagctccagtcttttcctc

SEQ ID NO: 2527 - DNA, 120 bp, synthetic construct
  source 1..120: mol_type = other DNA
tatttaactttttaaaaatgcacgaagggctgggcccaagtccttcctttccagggccctgactatcccaacacttgaactcccccaaacagtccccaatagctctaccctcagagctgg

SEQ ID NO: 2528 - DNA, 120 bp, synthetic construct
  source 1..120: mol_type = other DNA
agcacaaagacccctctgaggggagtactttccttctttccttgagggggagagaggactaagggaacacaagagcaggcaacaagccttgtaatgctgcagatggcgaggaagacaatc

SEQ ID NO: 2529 - DNA, 120 bp, synthetic construct
  source 1..120: mol_type = other DNA
cgcatgcggtgcctgttagggggcatggaggaccagagggtgagccaggccagtggggcctggcaccaaagaaagcagaggcttcaggcaaggagtcagtggactaaataaagaagcagg

SEQ ID NO: 2530 - DNA, 120 bp, synthetic construct
  source 1..120: mol_type = other DNA
gaggctcctgccaaacaggatagcaaaagttctaattgttaaaataagttactaaacaggaacaaaatagtacctggaaacagatacaagcaaatttagtgtttgtgaaagttggcactt

SEQ ID NO: 2531 - DNA, 120 bp, synthetic construct
  source 1..120: mol_type = other DNA
cagggccgggcgtggtggctcacgcctataatcccagcactttgggacgccgaggtacgcgaatcacgaggtcaggagatcgagaccatcttggctaacacggtgaaaccccgtctctac

SEQ ID NO: 2532 - DNA, 120 bp, synthetic construct
  source 1..120: mol_type = other DNA
aacatataactgttttcctagctctcagttacttgcaaaatgcacaatcaaacattatattcccagtgctcagagcagaggtggcacatagttgggcccagtaaatattttttgaccaca

SEQ ID NO: 2533 - DNA, 120 bp, synthetic construct
  source 1..120: mol_type = other DNA
taatgctcaggcttagcaagggtggggaaatgaacactctcacagcaattcctggaggtatcaatcagcaaagccattctgcagggcaacttggcagcttccgtttgtacttaatatagg

SEQ ID NO: 2534 - DNA, 120 bp, synthetic construct
  source 1..120: mol_type = other DNA
atgggtacgtgtatatgtaagtaaataggaaagatctgggaagatacacatcaaagtgataacaatggctaaatcttaggaggaagtaggtgtggagggggatggtcaaggagatttgaa

SEQ ID NO: 2535 - DNA, 120 bp, synthetic construct
  source 1..120: mol_type = other DNA
gtcactcacatcataggacaggcatttgaggggcctagaggcagggcagggggtctgcaattcctcaccaaacaaagtggtgagagcaagaatagagcaagatagggtgaaaacttagaa

SEQ ID NO: 2536 - DNA, 120 bp, synthetic construct
  source 1..120: mol_type = other DNA
ctctacattcattgatgaaaataactttctcaatttcccagtttggaaggctttgcgtttgtcagggctcagcctgcgatggatcatggctaaacaaggaccagaaaaaaaataaaggaa

SEQ ID NO: 2537 - DNA, 120 bp, synthetic construct
  source 1..120: mol_type = other DNA
aaggtttggcccacctccatctcccaccacaacccaatccatgtggcctccctccaccccactctcacaaatcaccacctctgagtcccatttcttcactcaaatagtcacaataaaaat

SEQ ID NO: 2538 - DNA, 120 bp, synthetic construct
  source 1..120: mol_type = other DNA
ttctccagggaatgagaggaaaacacgaacagatggacagaaccctgacctggtagagttaacattcttgtaggggaacaacaaatgagcaaatataaaatgaagtgccctatttttctt

SEQ ID NO: 2539 - DNA, 120 bp, synthetic construct
  source 1..120: mol_type = other DNA
tactaagagactttaaaagtgcctggcactaaactatgtgctctgcgcacatcttttaatcctattaactcagtgaggcaagcattacatcaacttgcctgcgtgttcatagacatagga

SEQ ID NO: 2540 - DNA, 120 bp, synthetic construct
  source 1..120: mol_type = other DNA
cgccggtctcacgaggaacagcgcggggcgcggggcgctgggcgcggacgcaggacgagaggacacccctgagcacgacgctcccgtcaggcgccgccacgggcaccttgtgcgggtcct

SEQ ID NO: 2541 - DNA, 120 bp, synthetic construct
  source 1..120: mol_type = other DNA
tcaaaaacaaaaaggagggtcacactagatggtctctaagggtcccttaaggctgagaagtctcatctgtatcatgaactcatatttgctgaatgagtgaatgaagtttagtaattccca

SEQ ID NO: 2542 - DNA, 120 bp, synthetic construct
  source 1..120: mol_type = other DNA
agcctacttatcctccccttctcaagagaggatagctgttccctattactcctctcatccactcatcccttaaaaaaaacccacaaaaccatcattagtaaaaaaacaaaaccccttcaa

SEQ ID NO: 2543 - DNA, 120 bp, synthetic construct
  source 1..120: mol_type = other DNA
gaaaaggtagaaccaaaagggggcattcctaagccctggagtaggaaagacaactaacagagtagtttattttcaaccccacatctcctctccctaaaccaatccattcttttttttttt

SEQ ID NO: 2544 - DNA, 120 bp, synthetic construct
  source 1..120: mol_type = other DNA
ctccattccccaatcctcgagccccttgaaatgctatttgaggaatgctatcaaaacaccagtgctctttgagagaatggtgcaaaaatttaaaaaaacagcctttggctgggaatggtt

SEQ ID NO: 2545 - DNA, 120 bp, synthetic construct
  source 1..120: mol_type = other DNA
aaaaaagacccacttaaatatgctctaggaaattaatttaaatgaactagtactaggcaatcattattttttttgagacagagggtgagtctctgcctaataacaaaaacaaaaacaaac

SEQ ID NO: 2546 - DNA, 120 bp, synthetic construct
  source 1..120: mol_type = other DNA
ttaaagccacacacatattggctcacacctgtagtcactgcactttgagaggctgaggtgggaggatcacttgagtccaggagttcaagaccagcctgggcaacacggccgagactctgt

SEQ ID NO: 2547 - DNA, 120 bp, synthetic construct
  source 1..120: mol_type = other DNA
agttgtaatcagccaaggtctattttatttagttatttctgatatctcaaatttaggttttgcgtccctctttgctgacagctgagcaaaccgcattctacaccgaaggccctctattga

SEQ ID NO: 2548 - DNA, 120 bp, synthetic construct
  source 1..120: mol_type = other DNA
gttataacacaacagttaggcttcccatgtaaaaggcccaggaaggagaaaagaggagaatcaaaaacaagtcatcacaccaaattgcctaagactgatagtgattaccgtacttgtctt

SEQ ID NO: 2549 - DNA, 120 bp, synthetic construct
  source 1..120: mol_type = other DNA
gattacaggtatgagccaccgcatctggcctaaatgtacatattatttaaaggactgtacagataagtacagggccaggtgtgctggctcatgcgcgtaaccccagcactttgggaagct

SEQ ID NO: 2550 - DNA, 120 bp, synthetic construct
  source 1..120: mol_type = other DNA
atgtattcagaatagtggttagtcaatacgtcttcggatattatttttctttctttaagcacctatcatataactggcctatgctaggtattagatacactacatggtttcaccatgttg

SEQ ID NO: 2551 - DNA, 120 bp, synthetic construct
  source 1..120: mol_type = other DNA
ctttgacagtattaccaaatactggtattgtgaaccccactgcatccctgacagttctcaaaatttcacaggaaagaataattggttgacagagctgaaaggctggagcccaaattattc

SEQ ID NO: 2552 - DNA, 120 bp, synthetic construct
  source 1..120: mol_type = other DNA
ttgttcttttccagaatcctgccatctacagcgtgatgtgtttgtgccctacacacacttcctatcgagaattgtggggagtttgttaagattatgaagtgtgcacttttctatatttgt

SEQ ID NO: 2553 - DNA, 120 bp, synthetic construct
  source 1..120: mol_type = other DNA
aaacaaacaacgttgagcagtcccagagataaggaggagctggagcacaaattttgattttatcaaaggttaccaataaatacatttctccaaaggagccaacctcaatctccgcatttc

SEQ ID NO: 2554 - DNA, 120 bp, synthetic construct
  source 1..120: mol_type = other DNA
aaagaaatattttctccatgtaatggatgtaaacaatgaactctgtgagtgcatagatgctgaatctcctggaccttacctataagtgacatcaggacatcaagcaggatttgtccctcc

SEQ ID NO: 2555 - DNA, 120 bp, synthetic construct
  source 1..120: mol_type = other DNA
tgtgataggtggtgcatgagactccttctccagaatttccaagggatggtaacttagattcaggtctggtcaagaataataatgatgtttgaagatgaggggaatgaaatacatgtagag

SEQ ID NO: 2556 - DNA, 120 bp, synthetic construct
  source 1..120: mol_type = other DNA
cgctttttctacaggctccagggtacccctaaacaggtctgcacacaactcttcaaatcgagctctggtgatggatgtatagaagtcaatgccttcataaagtgaatcaatttctaggtt

SEQ ID NO: 2557 - DNA, 120 bp, synthetic construct
  source 1..120: mol_type = other DNA
gactttgggcttgcctccttcattaatcacttgaaaaggccaaagtttcatatctgcttgtacaacaggatcattaaatttcctgccgatcagacgtttagcatcaaaaacagtgttctg

SEQ ID NO: 2558 - DNA, 120 bp, synthetic construct
  source 1..120: mol_type = other DNA
tttaaggcgtgtgtttcttcagctcctctaaattttagaaagggggcgatatttaaactgacctcaaaaagacaaggctctcaagttacactcttttgtgtgtctgcgagtcaaacttgt

SEQ ID NO: 2559 - DNA, 120 bp, synthetic construct
  source 1..120: mol_type = other DNA
gtatacctctctctccgcaccacattcttttgtagtacctgtgaaacattcatgaaaacggaccacagaagaaaacctcagtaagttccaaagtatagaaataacacaaacatcattctc

SEQ ID NO: 2560 - DNA, 120 bp, synthetic construct
  source 1..120: mol_type = other DNA
tcacgcaggctgcactgcagtggtgtaatcatggctcactgcagtcttgacctcccaggctcataggatccttttgtctcagcctcccaagtagcttggaccacaggtgaatgccaccac

SEQ ID NO: 2561 - DNA, 120 bp, synthetic construct
  source 1..120: mol_type = other DNA
aatttcccaagtgacctaattctactgtcctgttcctatatattttactgtgggattctgtctctttatgacccaagagtagtgtacattctggtctcttcaagagacatcagcctccac

SEQ ID NO: 2562 - DNA, 120 bp, synthetic construct
  source 1..120: mol_type = other DNA
cccacatacctcaggcttaaaccaactagggaactttccagtactttcccaaacaaggacctactgagcctttcaggttcacaatcaatcagatccctactggctcacctagtctcccga

SEQ ID NO: 2563 - DNA, 120 bp, synthetic construct
  source 1..120: mol_type = other DNA
actggcctttccaggtgatcaacgacggagacaagcccaaggtgcaggtgagctacaagggggagaccaaggcattctaccccgaggagatctcgtccatggtgctgaccaagatgaagg

SEQ ID NO: 2564 - DNA, 120 bp, synthetic construct
  source 1..120: mol_type = other DNA
ggcctacggggcggcggtgcaggcggccatcctgatgggggacaagtccgagaacgtgcaggacctgctgctgctggacgtggctcccctgtcgctggggctggagacggccggaggcgt

SEQ ID NO: 2565 - DNA, 120 bp, synthetic construct
  source 1..120: mol_type = other DNA
aaaattcaagtgatgccttttattcctttatttgggggtcagtagggtctgcataggttgtttttcccatagcgtctaaaatggaatggcatttttgcttccagtaagggcagattttgc

SEQ ID NO: 2566 - DNA, 120 bp, synthetic construct
  source 1..120: mol_type = other DNA
tcatcttttaaaatggaagggtttggctcgatgcctctctcatgactgaaagcatactgaaatagaaatgtcacattcttagcagttatcacctacaatttaagtacgccagtgagcacc

SEQ ID NO: 2567 - DNA, 120 bp, synthetic construct
  source 1..120: mol_type = other DNA
gaaatgcttaggtttccaggccagtctacagaggaacatttatctcttatggtagttaaactgtagtactgtggactctggccacaatgtaaatcaatcttcatgggaatatgcctttgc

SEQ ID NO: 2568 - DNA, 120 bp, synthetic construct
  source 1..120: mol_type = other DNA
gttttgaggagcagaggaactttgagggaggaaagtgcaacaggaaaaataactgcaggtgtggaaaaacaaatataaatatcttctcaattccaatcacctcctaccttcctataccag

SEQ ID NO: 2569 - DNA, 120 bp, synthetic construct
  source 1..120: mol_type = other DNA
ccttctcttctcgcctctggccacccaatgcatctgatttagttgtatgaaagttacaaaattctccaatattttcgtcttgtaaatcacctagtatgagagaaactcgaaaggtccttt

SEQ ID NO: 2570 - DNA, 120 bp, synthetic construct
  source 1..120: mol_type = other DNA
accccaaataccctgactttactcataataagtgaaagacatactaaattagattggatagcatactttgttgtcaaggttgccgagaaattagtcttttcatagagtactggtgggaat

SEQ ID NO: 2571 - DNA, 120 bp, synthetic construct
  source 1..120: mol_type = other DNA
agcagctgtagtcctaataatggtccccaacttttaaacacctaaataagaatgactacgagtcatatccgagagtatgggatccccaataaaaggagggagaagatcatattctctttg

SEQ ID NO: 2572 - DNA, 120 bp, synthetic construct
  source 1..120: mol_type = other DNA
gcctataccatcttttaaaatgaacaaaattaagaaaactactgtttgaggaactataaaaaggagagggagaaggaaggaaaagaccctgcagcgtcagcctgaagaaggctgtcttac

SEQ ID NO: 2573 - DNA, 120 bp, synthetic construct
  source 1..120: mol_type = other DNA
ccagtctagtccacagaggcttcacttaaaagctaggtcaactatagcactgtagactctgactagtgtgactgattgaagaaaaacagcatttatattggatttttctgctatccagag

SEQ ID NO: 2574 - DNA, 120 bp, synthetic construct
  source 1..120: mol_type = other DNA
agacgcctaacaaagggtcttgcattcacactaagaatgaaggaaaaaaacaaagggaaagtaaattactaaatgcaaccgtatttaaaacaggaggaaggagaatccgcaggaagttgg

SEQ ID NO: 2575 - DNA, 120 bp, synthetic construct
  source 1..120: mol_type = other DNA
ttggatgggtgcccctgtcttgctaagaactgcctgtttacacaactgctttccttgtgaaaatttaaaggctcctattcccagttgttctatccttgtaggttaaagattatgtcaaaa

SEQ ID NO: 2576 - DNA, 120 bp, synthetic construct
  source 1..120: mol_type = other DNA
gcactggcctttccaggtgatcaacgacggagacaagcccaaggtgcaggtgagctacaagggggagaccaaggcattctaccccgaggagatctcgtccatggtgctgaccaagatgaa

SEQ ID NO: 2577 - DNA, 120 bp, synthetic construct
  source 1..120: mol_type = other DNA
gtgaaggccacggccggggacacccacctgggtggggaggactttgacaacaggctggtgaaccacttcgtggaggagttcaagagaaaacacaagaaggacatcagccagaacaagcga

SEQ ID NO: 2578 - DNA, 120 bp, synthetic construct
  source 1..120: mol_type = other DNA
ttctttagtatgtttgtctttgaggtggactgttgggactcaaggactttgctgctgttttcctatgtcatttctgcttcagctctttgctgcttcacttctttgtaaagttgtaacctg

SEQ ID NO: 2579 - DNA, 120 bp, synthetic construct
  source 1..120: mol_type = other DNA
aaacagtagaactcagaagcagagaagtggtggtcaccaagggctgtgggatgggggaatggggagacgtgcaagggaaacaaagccttagtcaggagaaataaattgtatttttttttt

SEQ ID NO: 2580 - DNA, 120 bp, synthetic construct
  source 1..120: mol_type = other DNA
ataaaacggttaaagtcctgtgttgcacctttgtgtaaatccttaccctctagggttttaaaatgttttaaatccttaaaacgttttaaggattacataatactggaaatcctccttgaa

SEQ ID NO: 2581 - DNA, 120 bp, synthetic construct
  source 1..120: mol_type = other DNA
gaatactaaatgatcagcttcaatctctccttcccctatgaagaagggcatatatgtatttgaacttcactgggacactgggtaatcactctcctacaattaccccatgcttatgtatgt

SEQ ID NO: 2582 - DNA, 120 bp, synthetic construct
  source 1..120: mol_type = other DNA
gtatgccaccacccatagctaatcttttttttatatacttgccaggcagtagagggaacaaatactttagctttgagccatggctctccaccgtaatggaacaataaaacgattaaggga

SEQ ID NO: 2583 - DNA, 120 bp, synthetic construct
  source 1..120: mol_type = other DNA
cgtctcaaaaaagaaaaagataccaacacacacaacacacatcaccaaacatcatacgcgtttataaatgggggcgataggaaagggtccagaaaggatttgaaatgacttatgagtttc

SEQ ID NO: 2584 - DNA, 120 bp, synthetic construct
  source 1..120: mol_type = other DNA
tcttccgcctggccagacagatccctgttttttgtttttcaaaattcagaaagcatctccgaatatttgcccagaggagtgtgaaacatactttcctggtctttctttcactttgtttta

SEQ ID NO: 2585 - DNA, 120 bp, synthetic construct
  source 1..120: mol_type = other DNA
tggctggaatgcagtggcaagaacacaattcagtgcggccttcaactcccgggtttaaccgattctcccaccttagccaattttttcctttttttttttttttttttgagatggagtctt

SEQ ID NO: 2586 - DNA, 120 bp, synthetic construct
  source 1..120: mol_type = other DNA
ggagctgttctctgctgttttaaattactttctactcctccctttctaacgtccactcctggactcatttgttagatcaatatatactgggactgttgtgttttctttgagtgtactaga

SEQ ID NO: 2587 - DNA, 120 bp, synthetic construct
  source 1..120: mol_type = other DNA
gcttttctctgaggatctttgaacccacctgatccaccttcatcctgccggcaatctcctgtaattcatgtttttatggccagttacttacatgatgaggtttaattggctatggttctg

SEQ ID NO: 2588 - DNA, 120 bp, synthetic construct
  source 1..120: mol_type = other DNA
ctgtaattccagctacttgggaggctgaggcagaagaatcgcttgaacctgggaggtggaggttgcagtgagctgatatggcgccattgcactgcgccattgcacttcaccctgggcaac

SEQ ID NO: 2589 - DNA, 120 bp, synthetic construct
  source 1..120: mol_type = other DNA
ctcttaagcctaatattagagattcttggttgggtgacatagtattatgtataatacactagacttttgacaatcatttgagatggtttttctggcaggggaggaggtggagtttcgccc

SEQ ID NO: 2590 - DNA, 120 bp, synthetic construct
  source 1..120: mol_type = other DNA
tcaaatgatgtgcctggccagaacattaccaataactttgaaacaaacctgtctgattcaatttctctttttcttcttcctacttggagaattaactgggtatatcatcctctggctttt

SEQ ID NO: 2591 - DNA, 120 bp, synthetic construct
  source 1..120: mol_type = other DNA
gccaccacacctggcctgcaacttttgttgttgttcatgtattttcctgtagttcatttggagtccacccttccatacacatttgtggacataaaaaacttcagggcctggcatggtggc

SEQ ID NO: 2592 - DNA, 120 bp, synthetic construct
  source 1..120: mol_type = other DNA
aagtggaaagctaagggcattctcaagaatggtggagattttgatgaaaggtaattgggaggaaatttgtgaatctaagaaagatagatcttaaactgcagtctggctagtatgcaggag

SEQ ID NO: 2593 - DNA, 120 bp, synthetic construct
  source 1..120: mol_type = other DNA
agattcaggagccagactgaacacttactgctaggttaactttggctaagttcctcagtgattcccataacaatttccttgtttgtaaatagataacagagttcctacccaccctctttt

SEQ ID NO: 2594 - DNA, 120 bp, synthetic construct
  source 1..120: mol_type = other DNA
agtgctgggattacaggcgtgagctaccgtacctgaccttttttttttttttttgagacggagtcttgctctgtcacccaggctggagtgcagtggcgcgatcttggctcactgcaagct

SEQ ID NO: 2595 - DNA, 120 bp, synthetic construct
  source 1..120: mol_type = other DNA
ggtttggggtataagactgagctacagccatggtaagatggtcacgtgaacttcttttctcacacagtggtgatgctgaaagacctcaaccccaaaatgctattttcctcatttcttttt

SEQ ID NO: 2596 - DNA, 120 bp, synthetic construct
  source 1..120: mol_type = other DNA
atctgcctgactgctctcctgttctcacatgctacatctaatttgtcagcaaatcatactgtctgtatcttagaaatgacacgaggatctgtgtctcacacctttactgctgctccatcc

SEQ ID NO: 2597 - DNA, 120 bp, synthetic construct
  source 1..120: mol_type = other DNA
ttagtgagttggagggagaaataatccataatgtggagcagagaaatcagaggtgatatgaaaaggaagttttgaaacatgaaggatggaatgagatactccaactccagagctgctttg

SEQ ID NO: 2598 - DNA, 120 bp, synthetic construct
  source 1..120: mol_type = other DNA
aggtggaagtgggtcacattctaggctggctgttgcctgtcttaaattctaaagaatgtagtgaagataaaggtgtcagctgataatccccagttatttactgatggcagataataaact

SEQ ID NO: 2599 - DNA, 120 bp, synthetic construct
  source 1..120: mol_type = other DNA
gagtgtggctggggggagagagtgagagagtagaggaggaaaaagtttaaaacagtttgggagtttggagagtttttcgtgaaacacagactcatcaacctttttattttttcactctaa

SEQ ID NO: 2600 - DNA, 120 bp, synthetic construct
  source 1..120: mol_type = other DNA
tggccagctttttttttttttttttttttttgagacagagtctcgctcttgttgccgaggctggagtgcagtggcgtgatctcggctcacttcagccttcccctctcgggttcaagcgat

SEQ ID NO: 2601 - DNA, 120 bp, synthetic construct
  source 1..120: mol_type = other DNA
aaaaaatactttttcctattccctccttgtcatgacttttggttggaaggattacattagcaaaaaagtatccatggtccctggtccctggtatttgctgttcaggtcagtgttcattgt

SEQ ID NO: 2602 - DNA, 120 bp, synthetic construct
  source 1..120: mol_type = other DNA
accgtaaaaagaaaacaaaacttcaggactctaagtttatgccaagatggaagttaagccttggagactgagtcatgtagcatgtttgcaattctgcttcttacagactctcctcctcat

SEQ ID NO: 2603 - DNA, 120 bp, synthetic construct
  source 1..120: mol_type = other DNA
taatatattcagtggccttagcttttcctctaagatctagaacaaggcaaggatgcttactctcaccactactgttcaacatagcactagaagtcctactcagagcaattagacaagaaa

SEQ ID NO: 2604 - DNA, 120 bp, synthetic construct
  source 1..120: mol_type = other DNA
gcaggctgcctgagtgagtagtgacatcccgctctggtcattttccatagagtggaaagtttgttatttccgtttttgcaataaattttattgctatttgttctttgggtccacactact

SEQ ID NO: 2605 - DNA, 120 bp, synthetic construct
  source 1..120: mol_type = other DNA
gccgggcgggggggctgaccccccccacctccctcccggacggggcggctggccgggcggggggctgacacccccacctccctcccggacggggcggctggccgggcagaggggctcctc

SEQ ID NO: 2606 - DNA, 120 bp, synthetic construct
  source 1..120: mol_type = other DNA
gggctcctcacatcccagacgatgggcggccaggcagagacgctcctcacttcccagacggggtggcggccgggcagaggctgcaatctcggcactttgggaggccaaggcaggcggctg

SEQ ID NO: 2607 - DNA, 120 bp, synthetic construct
  source 1..120: mol_type = other DNA
accccgatttttttttttttgagggagagtctcgctccatagcccaggctggagtgcagtggcatgatttcaactcactgcaatctccgtctcccaggttcaagcgattctcctgcctta

SEQ ID NO: 2608 - DNA, 120 bp, synthetic construct
  source 1..120: mol_type = other DNA
acatataattcattttagctggacacttgcacttgtttaaaagttctgaccctggttttcaaacttaaacgtattacgaatcacccagaaggcttgttaatgcctggtggctccaacacc

SEQ ID NO: 2609 - DNA, 120 bp, synthetic construct
  source 1..120: mol_type = other DNA
tttctttttttttttgagcaagggctctcccacttacctgcaggctgaacagattcttttcataagcatctgcctggggaatattttcttacataatttgccataggaagtgctcacttc

SEQ ID NO: 2610 - DNA, 120 bp, synthetic construct
  source 1..120: mol_type = other DNA
aaaattttaagttacaaacattttgattgatagtcagtcatggtggtgcacctagtccttactctgaaaccaaatatcctgccatctggggactttcaccagccctgtcggttatcttac

SEQ ID NO: 2611 - DNA, 120 bp, synthetic construct
  source 1..120: mol_type = other DNA
caggacttttttgtgggagaggacgcctagctttcagtcctaaaggaagtgatttccctggtaaagggaaggtgattttgccaaggctggagtctaaaggaagatggaactgtctttcag

SEQ ID NO: 2612 - DNA, 120 bp, synthetic construct
  source 1..120: mol_type = other DNA
tccaaagaggcagtgcctttttctactttgcatgagggtattgcatggactaacgcagtcctgttgacaatgccaaatgggaagccaatggcagagttccctcttctcctgataatgtgt

SEQ ID NO: 2613 - DNA, 120 bp, synthetic construct
  source 1..120: mol_type = other DNA
tgaaacctaaaatagtgcctggtataggtatatagtacccaataaatgtttgctaagtgaatgtccaactccttggtgatcccaatttccagatcactgtcctagacacttgcccttctc

SEQ ID NO: 2614 - DNA, 120 bp, synthetic construct
  source 1..120: mol_type = other DNA
aagctgtagaactcattcttcctgattttgaaccatactagaaagcaacgctaatgaagatggttgtaggggccaggcgcagtggctcatgcctgtaatcccagcactttgggagaccaa

SEQ ID NO: 2615 - DNA, 120 bp, synthetic construct
  source 1..120: mol_type = other DNA
cggggccgattttaaagagccgggcgcggaaaaaaaaaggccgcctgtcgtcgtggagagaatgagtcacagatttactgagttaacaaaatatctttaataaaatctttttgtttgttt

SEQ ID NO: 2616 - DNA, 120 bp, synthetic construct
  source 1..120: mol_type = other DNA
gggtcgggaatattatgttgcatagagcgatgataagaattagcggaaaaaatgcatgtcagtcgcttaggaggagactggcaaaccctgaatggatgcatgctgtagagtaagaaaatc

SEQ ID NO: 2617 - DNA, 120 bp, synthetic construct
  source 1..120: mol_type = other DNA
tggttcgtttagctcacaaaggcattgtttctagaagcaccaaatctccaaaaaaaaaaaaaaatgcttgaacggctcagtactttaaggttggggacaggtggctgggggtgtcactca

SEQ ID NO: 2618 - DNA, 120 bp, synthetic construct
  source 1..120: mol_type = other DNA
tgggaagtagcttctctggactgcgggaatcaagttctgtcggagagttccatctccaggctcaaactcagtttggtctgcctatagcataagcataatcagctccctcagtctcaatca

SEQ ID NO: 2619 - DNA, 120 bp, synthetic construct
  source 1..120: mol_type = other DNA
aggtgaggatatagatgaaataagaatagcaaaaagttgagggttgtggaatctgggtacagggaactcactgtgctatcatctctacttttgcatatgtttaaaaattcccataataaa

SEQ ID NO: 2620 - DNA, 120 bp, synthetic construct
  source 1..120: mol_type = other DNA
gggagtcccacctggctactacctagggctctgtgttccaagggagtaagacttaacaatataatacaattcaacctgttgttgagctcttatcaggtgccaggcattgtactaagcact

SEQ ID NO: 2621 - DNA, 120 bp, synthetic construct
  source 1..120: mol_type = other DNA
acaggagtaccaggtattctgggaactggtttcttctagctctgctgggggttgagtgtgtgaccttgcacaagtttcttgccctctgtggcctcagtcttctctgcacaatgaggaatg

SEQ ID NO: 2622 - DNA, 120 bp, synthetic construct
  source 1..120: mol_type = other DNA
agtgacattgtctttcatatctgtgtcctcagggcctggtgcagggctaggcatactgtaggtgctcactggataaacagaactgaataaatcaggctcacaggacccttagaggaaact

SEQ ID NO: 2623 - DNA, 120 bp, synthetic construct
  source 1..120: mol_type = other DNA
ggcaaggacacaagaggaggggaatctggtgactcacacaagaatccaataccaggactgggcaaaatcttcaaagatcttaacactgatgtctcgggcattgaggctgtcaataagacc

SEQ ID NO: 2624 - DNA, 120 bp, synthetic construct
  source 1..120: mol_type = other DNA
caggaagccttctgaccttatccccacctcctttggcaactgttatgtgcctacagagccacttactgccatccttgcaacaactttgccaggcagccttgctttgtcatttatttatct

SEQ ID NO: 2625 - DNA, 120 bp, synthetic construct
  source 1..120: mol_type = other DNA
ttagagaaatacaaatcaaaatcataatgaaatataatctcacatctgttaggatggccctatgaaaagaatagaaaataacaagtgttggagaggatatgcagaaattggaaatgtgtg

SEQ ID NO: 2626 - DNA, 120 bp, synthetic construct
  source 1..120: mol_type = other DNA
aggaaacaaggttcagagaggttgcatagttgggtcaagaccatagggctggaaagtgctagaatttatattcagatctacttgactttgaagtattcacttgagatactccttactgta

SEQ ID NO: 2627 - DNA, 120 bp, synthetic construct
  source 1..120: mol_type = other DNA
atttgctactggaaggaagagcacactgtaaaagaaaaaaagttcaactgtgatcctaccacccagccacgttcacttataacatttgaacaaatatccttctagccttttccctgtgca

SEQ ID NO: 2628 - DNA, 120 bp, synthetic construct
  source 1..120: mol_type = other DNA
agctgacaaatagctcagagcatgaacttggagctccacaacttcatatcatctttatgatcttgagcaagtcacctgttctcggtcttagttctactccatataaaacagtagtgccta

SEQ ID NO: 2629 - DNA, 120 bp, synthetic construct
  source 1..120: mol_type = other DNA
aggagacttggggaggtagggcttatggtctggaggggttaagggttagagagttgggtgatgctgcagcatgggcatcagtaggctttatttttatttttttattgcttttactttttt

SEQ ID NO: 2630 - DNA, 120 bp, synthetic construct
  source 1..120: mol_type = other DNA
ctccaaaacacaaaaagaaagaaaacctttttctgggtgggtaaactttcttctgaagtaaaagacagaaaagcacacaactcgcaagggctcagctgggtgagttctctcgcttgtgaa

SEQ ID NO: 2631 - DNA, 120 bp, synthetic construct
  source 1..120: mol_type = other DNA
atggctcatggacaatgattgacctgaagccgctccaggaagtctactcgggagtcctcactgcctgctcccctatggccctaagggactcaagcctctcctcgagaaggtccctcatag

SEQ ID NO: 2632 - DNA, 120 bp, synthetic construct
  source 1..120: mol_type = other DNA
ctctgataagaaaacgctttataatctcgccaactaccttaactgccgtacactcccaacacgctcccgccaaagattaaagtgtggaaattggacctgttttttcctttttgagatgga

SEQ ID NO: 2633 - DNA, 120 bp, synthetic construct
  source 1..120: mol_type = other DNA
tagccaagtatgctttctccccaccccaacacaaaaatcgcagtttattaccaaacccaacatttattgagaacaaaaggaaccagttggcatagaggcccgacttcaattcatcaaact

SEQ ID NO: 2634 - DNA, 120 bp, synthetic construct
  source 1..120: mol_type = other DNA
tgctcaccttgttgtctaagtcgaagaggtaagaatcatcctctctcacatcagcctcagcatcagagatcagctccccgacatacctgtgggacaggaatccatggttctgaaggtgag

SEQ ID NO: 2635 - DNA, 120 bp, synthetic construct
  source 1..120: mol_type = other DNA
aggaaggggctgcttgccagagaagttgagagatgacatgatggaaagaaactggatggtctgttgaacaggcaagtatggttagaggactatcttttttaaaggccaaagaatggtcag

SEQ ID NO: 2636 - DNA, 120 bp, synthetic construct
  source 1..120: mol_type = other DNA
ggtgtaagactagaggaaaatggttggtgagagttttcccaacacagggtttcttcacaaaattaaaattatgattcccatataatccagcaaacctacttctgcaggggtttcaaaaga

SEQ ID NO: 2637 - DNA, 120 bp, synthetic construct
  source 1..120: mol_type = other DNA
ctcacttgatgccactctgtacgacccggttcttgcagtttctccagcatgagcacgcctggttacactcgaaaatcagcggaggctcaatcttgttaaattcctggagcaatcgcccat

SEQ ID NO: 2638 - DNA, 120 bp, synthetic construct
  source 1..120: mol_type = other DNA
ggggctgggggcaggggagtaaggttgccaggtaagatgcaggacagcgagttaacatagaattttagataaacaagaaatagctttttagtatgtcccaaaaattacacaggacattct

SEQ ID NO: 2639 - DNA, 120 bp, synthetic construct
  source 1..120: mol_type = other DNA
ggagtgagggtgggggcagctggccctgctcaccaaagcagcaaatggtcaagattggctgtgtgtgtgaatcccagctccaccattcacaagctgtgggaccctgggtaagtcacttaa

SEQ ID NO: 2640 - DNA, 120 bp, synthetic construct
  source 1..120: mol_type = other DNA
tcatgtcacagccacagaggcctcttaaaggggcttcttctggacaatgatggaataattcaaagactgagaagaatgccaataaatgactaaaacacatccaatgtatgacaacccaag

SEQ ID NO: 2641 - DNA, 120 bp, synthetic construct
  source 1..120: mol_type = other DNA
tttatcagaataaggagtcaaaggcatcagctctgcctgaattcaaaccctgccttgcttctcagtaccactgtgcactgtgcaaggtccctaacctctctgtgcaagccaaggctaaca

SEQ ID NO: 2642 - DNA, 120 bp, synthetic construct
  source 1..120: mol_type = other DNA
tgccctcgcatccgggcactgtggaagaaggagctcatgtccaggagcaataggggtgggggagggaacagacagtacagaagggggaggccagtacctgggctgagaagtgtctgctct

SEQ ID NO: 2643 - DNA, 120 bp, synthetic construct
  source 1..120: mol_type = other DNA
acctccatgtactcactggggcctgaggagcccacaccattcactcctgacacagagacagagagagtgagagtgcgagctcacaggtgcctggacgcgtgggtacatgcaggtggacat

SEQ ID NO: 2644 - DNA, 120 bp, synthetic construct
  source 1..120: mol_type = other DNA
ggcaagaccaccaatggttgctaaaaacactagacacaaagctcatgagaaactttatatgaaaggttcaggctgacatcacctgaacccactggtcaatcttatcactaacaagaaaaa

SEQ ID NO: 2645 - DNA, 120 bp, synthetic construct
  source 1..120: mol_type = other DNA
gcctggctgacctaagacaaatgttaatcaaatcaaggtgtgggcctcatttggatcttgacaaaaaccatttgtgagagctgaggaaatgtgaagactgacaggatatttgatggtatt

SEQ ID NO: 2646 - DNA, 120 bp, synthetic construct
  source 1..120: mol_type = other DNA
aaatggtcatttcattagctgattaaaaaaaaaagaatactaaatcccatgtgcagggtggtggccacctttgtggatgaaacgggcagaatacacattgaaaatgagttacagctgggc

SEQ ID NO: 2647 - DNA, 120 bp, synthetic construct
  source 1..120: mol_type = other DNA
taaaaaggtaaacaaaattgtcaaaccctaaactagattgaccaagataagggagagatgattcaagtcactaaaatcagaattgaaatggaaacattactgtggggcgcagtggctcac

SEQ ID NO: 2648 - DNA, 120 bp, synthetic construct
  source 1..120: mol_type = other DNA
gagaaaacaaagcttaataaagttaaaagaccttttatatgtggccatatacacagcaggactgtttacaacagctgaggtgcggaagcaactcaagtgccactgacagatgaatggata

SEQ ID NO: 2649 - DNA, 120 bp, synthetic construct
  source 1..120: mol_type = other DNA
aataccattaaattatatacttaaaaatgttttttattttatttttaaatttttagatggagtctcactctgttgcccaagctggagtgcagtggcgcgatctcagttcactgcagcctc

SEQ ID NO: 2650 - DNA, 120 bp, synthetic construct
  source 1..120: mol_type = other DNA
ttgcaactataaaaattaatgtttatcatagtgagaaaggaaaggtagctcatagcaacctgtgctatgtgaagcaggcaaaattgatcaggctcagcgagaagtcagcatggaacggtt

SEQ ID NO: 2651 - DNA, 120 bp, synthetic construct
  source 1..120: mol_type = other DNA
ttcccaggaaaaactttacaaatagagcagtgacagatgagttccccaagggcttgctttgaggtagaaaggaagagtggtttgaaattcccttaccttgtcattatcataagagtaatt

SEQ ID NO: 2652 - DNA, 120 bp, synthetic construct
  source 1..120: mol_type = other DNA
aagagccatgaactgtagaggaagagaaaaagttcagagctaagggctcaggagatcctgtgtttagggaaggtgacggtccaattggggcccgttttagctgcactcacctctctcggt

SEQ ID NO: 2653 - DNA, 120 bp, synthetic construct
  source 1..120: mol_type = other DNA
agtaaaccttttttgccgaacacttcataagcacagtcaggtactccgtgggtcatagcccagcggacaatttaagtataaatgatatacaccaagatagacaatctcgatagctgtatt

SEQ ID NO: 2654 - DNA, 120 bp, synthetic construct
  source 1..120: mol_type = other DNA
gagttgtgacctctaggtattaagaacgcagcatcacagggagaggctgtctagggcaggatagtcatgtacacgcagttgccagagtgtaaaggaaaaaaaaaagtttttttttgtttt

SEQ ID NO: 2655 - DNA, 120 bp, synthetic construct
  source 1..120: mol_type = other DNA
tcagaaccttcccctgggcagccttagccaggaataaaacatttttgtcttccctcattctataggacccttttccctccctccacatatacatgcacttctaagagaaggaaatctttc

SEQ ID NO: 2656 - DNA, 120 bp, synthetic construct
  source 1..120: mol_type = other DNA
catcctctttgaggcctattttgggctcaatgaactggctgagggcattccggcatttctccaccacgtgctccatctgcaggtaggaggcggctgtaaggtagttgacgatgtccctaa

SEQ ID NO: 2657 - DNA, 120 bp, synthetic construct
  source 1..120: mol_type = other DNA
gatgcacgggacgcgcgcgcgcgcggggccggctccgcgtgggcgtaaggggggaggggcgggggcggctcgtgccgtgtgttccaggccccgcgcgcgcggcggcggcggcgtcggcta

SEQ ID NO: 2658 - DNA, 120 bp, synthetic construct
  source 1..120: mol_type = other DNA
caaacaaagtggcccagaagctcttattgggtggagtccaccacagctcaaggaggcctgcctgcctttgtagactccacctctggggggcagggcatagctgaacaaaaggcagcagaa

SEQ ID NO: 2659 - DNA, 120 bp, synthetic construct
  source 1..120: mol_type = other DNA
ctaattttaatgatgtgatttattatgttagtatgattctactctaatcttccaccgctccgtcccccttattcctcacctctcctccagactgacaaggtccagctctaaacaaaactt

SEQ ID NO: 2660 - DNA, 120 bp, synthetic construct
  source 1..120: mol_type = other DNA
ggtaccttgactttttgcctttttcttttaaattctctgatttgtatgcccgcacccagttccctctgttgaatctaagagtctgttctaaactgctctctttgtatttaggccttgtag

SEQ ID NO: 2661 - DNA, 120 bp, synthetic construct
  source 1..120: mol_type = other DNA
cttcttccccaacttctgccagtataaaaccaggggctttcctgtccttagcttgcagtaccaaatgccttggtgtggtgtcaagaacagataaatttaggagatacttttaggattttt

SEQ ID NO: 2662 - DNA, 120 bp, synthetic construct
  source 1..120: mol_type = other DNA
aagacattcaaagtattttaggctgtgggcttactttttacaacgatgcttagcacgtactagaataaccatatttcctgagcaatctataggaaaggaagaggtaagtcagcctggact

SEQ ID NO: 2663 - DNA, 120 bp, synthetic construct
  source 1..120: mol_type = other DNA
ggttgtcctccccaggcctgcctgtgtccctgcaaatgacctaatccatatcccaagtttaaaaaaaaaattgttcattttatttttttcatggagtcattcgtgagagcagaaatacaa

SEQ ID NO: 2664 - DNA, 120 bp, synthetic construct
  source 1..120: mol_type = other DNA
ctcctgcctcagcctcctgagtagctaggattacggacgtctgccaccacgcccagctaatgttttgtatttttagtagagatggggtttcaccatgttggccaggctggtcttgaactc

SEQ ID NO: 2665 - DNA, 120 bp, synthetic construct
  source 1..120: mol_type = other DNA
catttgcttattgtaatagtttcagtatctatgcagttgtaggttttcccggacagtttagttttgtctgtttgaccatcacacagatgaatcatactgtacatgttctggggctggcct

SEQ ID NO: 2666 - DNA, 120 bp, synthetic construct
  source 1..120: mol_type = other DNA
ctgcaacctctgcctcccgggttcaagggattctcctgcctcagcctcctgagtagctgggactacagtcacgcgccaccacgcctggctaatttttgtatttatagtagagatggggtt

SEQ ID NO: 2667 - DNA, 120 bp, synthetic construct
  source 1..120: mol_type = other DNA
gaaatagaactatgaaaataagaattcagaagaaatagaacaatgtgaaatttctgactgttaaagaagattataatcatgtactttaaaaatgaatcatgagcccagcacggtggccca

SEQ ID NO: 2668 - DNA, 120 bp, synthetic construct
  source 1..120: mol_type = other DNA
gttgaggtctgcacctgttcagcttccctgctaatgctaaactattttctgaagcagttgtacaccagccatgagactgttgcttcttgggaaaaaagatataaaggcttcaaatttaat

SEQ ID NO: 2669 - DNA, 120 bp, synthetic construct
  source 1..120: mol_type = other DNA
agggaaaaagaaaagcattgaatgtctctctataatcactactacacatgatcagtttgcattcagcattgagaccctctggaaataaatgaaaatcaccaggtgaacgagaaagacccc

SEQ ID NO: 2670 - DNA, 120 bp, synthetic construct
  source 1..120: mol_type = other DNA
gtaaaaagaagccgggcgcggtggctcacgcctgtaatcccagcattttgggaggccgaggcgggcggatcacaacgtcaggagatcgagaccatcctggctaacacggtgaaaccccgt

SEQ ID NO: 2671 - DNA, 120 bp, synthetic construct
  source 1..120: mol_type = other DNA
aaaaaaaaaaaaaaagatgtgtcaatttggcaaggctatggtgcccttgggcactgtatatatacacatttgcattattatttatcttaatgagatagactctcactatgttctccaggc

SEQ ID NO: 2672 - DNA, 120 bp, synthetic construct
  source 1..120: mol_type = other DNA
tcgctctgtcacccaggcgcgatcttggctcactgcaacctgcgatccgactccctggttcaagtgattgtcctgcctcagcctcccaagtagctgagattacaggcacatgccaacacg

SEQ ID NO: 2673 - DNA, 120 bp, synthetic construct
  source 1..120: mol_type = other DNA
ctcatttctgtgcttgcttttagcccctgttgtcttgccaggactctaaatgtctcttaactggtcttccagcccctacatactgattccagaataatatttctgaaatgcaaatcaaat

SEQ ID NO: 2674 - DNA, 120 bp, synthetic construct
  source 1..120: mol_type = other DNA
tggatggattataactctgtgttaatgttacagtctgggtttgctggcgtggaaggagtttgtggaagaagggcagtagtttatagggagaggaggatggaaagggatgatcttaatttt

SEQ ID NO: 2675 - DNA, 120 bp, synthetic construct
  source 1..120: mol_type = other DNA
aatgtctccagacgctttccacctgaaggacaggaggcaggagcatctgtctactgcttcccactctgcaataattgcaggttgactctgggcattagttctctgccctttttttttttt

SEQ ID NO: 2676 - DNA, 120 bp, synthetic construct
  source 1..120: mol_type = other DNA
agaaagaaaatgtgctcttatgtaagtgagaaatgttctgaaaaaagaaaaaagagaaatattttaaaatgaaaaatttgagcttttccgtaaaaaaatttttaatgaattcccagcact

SEQ ID NO: 2677 - DNA, 120 bp, synthetic construct
  source 1..120: mol_type = other DNA
aaaaaaaaaattcctggaaggaatggttggtgggtggtatatagacatgaacccagaccgtctatgaaccgagaccgtctatgaactgaagctagatgatggatacatacatgaaagttc

SEQ ID NO: 2678 - DNA, 120 bp, synthetic construct
  source 1..120: mol_type = other DNA
aatgctaaagcaaatatcctggtaccttttatacctgtagggtagccgatcttctccttttgatggtcctaattctcaaaggtaaccttaaggggagtgtattttgctgttggttctgtg

SEQ ID NO: 2679 - DNA, 120 bp, synthetic construct
  source 1..120: mol_type = other DNA
cgaggaacttagcagaggcctttgtgtggaaatgggtggggtctgacccaatgtaaatatttttattaaaaaagaaatggatgagaaaccaaagccaattctgttgctgacctgaaagat

SEQ ID NO: 2680 - DNA, 120 bp, synthetic construct
  source 1..120: mol_type = other DNA
ctgtaaagtgggagtaacaacagaacctgtgtcataagcttgctgtgaggattaagtgagcacctacatttaagacttaaaaatactgtctggcactatgtcctgctaatatgaagtctt

SEQ ID NO: 2681 - DNA, 120 bp, synthetic construct
  source 1..120: mol_type = other DNA
acacataacaatattaaccttaaatgtaaatgggctaaatgccccaattaaattagacacagactggcaaattggataaagagtcaagacccatcaagtgtgctgtattcaggagaccaa

SEQ ID NO: 2682 - DNA, 120 bp, synthetic construct
  source 1..120: mol_type = other DNA
gcagatattagaagcctagaattgataagaagaaatttggacaagatggaagaagctggcaggagaggcatgtctgttttttagatattattcacctgcttccctctacctggagtgaaa

SEQ ID NO: 2683 - DNA, 120 bp, synthetic construct
  source 1..120: mol_type = other DNA
acacacttctctgagtgttgcctttggctctcacattgatttcttgctaggtatatcagttagacatggtttggctttgttataaccaagctagaataacagcagcttaaatggtctgag

SEQ ID NO: 2684 - DNA, 120 bp, synthetic construct
  source 1..120: mol_type = other DNA
aactgaactcagcccctagctgactgccgctgcatggaagatcagcagaagaaccttctggccaatatgagaaagaataaatcatttttaaatttcctacatattgggtgggtacttttt

SEQ ID NO: 2685 - DNA, 120 bp, synthetic construct
  source 1..120: mol_type = other DNA
tggtggaagacggatctccgctaggtttatattccagcccatgaaaagaaaaggcacactgcctttttattttagggacataacttggaaatgacatacataagttctactaacatccca

SEQ ID NO: 2686 - DNA, 120 bp, synthetic construct
  source 1..120: mol_type = other DNA
ttctttgcttcctgcatttcatacaagtgtaggttatgatttaaaggcatatcccagcccccgcaaaagttttattcctttgagtaaccaaccccaaatgtatttactttgccagttggg

SEQ ID NO: 2687 - DNA, 120 bp, synthetic construct
  source 1..120: mol_type = other DNA
cagaacttttgtttaggagttgctcagggtgggacttaacctgactagatggcaaagttgcttttgcagagggcttttcaaaatatccagaaaatgtcaattgccagtagcaaggaattg

SEQ ID NO: 2688 - DNA, 120 bp, synthetic construct
  source 1..120: mol_type = other DNA
atttcacatgttgcaacctaatatttcagtgttttgacagccagttgaccattcccatgcattccagcataaaatcacctgcttaatccccagcccaggtgttatccatccagtcctata

SEQ ID NO: 2689 - DNA, 120 bp, synthetic construct
  source 1..120: mol_type = other DNA
cactccagcctgggtgacagagtgagactctgtctcaaaacaaacaaacaaacaaacaaacaaaaaacaaaaaaaacagcccctggaatctgataaatgccatgtacacttttttttttt

SEQ ID NO: 2690 - DNA, 120 bp, synthetic construct
  source 1..120: mol_type = other DNA
tgtaaaatgtacaaatcttaactattcagctcaatgatttgttacaatgcatccactcatctaatcaccacccaagacagaatgaggttccctcttgtcccctcccacaaggtaactgct

SEQ ID NO: 2691 - DNA, 120 bp, synthetic construct
  source 1..120: mol_type = other DNA
gccgggcggggggctgacccccccacctccctcccggacagagtggctggccgggcagaggggctcctcacttcccagcaggggcggccgggcagaggcgcccctcacttcccggatggg

SEQ ID NO: 2692 - DNA, 120 bp, synthetic construct
  source 1..120: mol_type = other DNA
agaaataactaagatcagagcagaactgaaggagacagaaacacaaaaaaccattcaaaaaatcaatgaatccaggcgctggcttttttgaaaagatcaacaaaattgatacatcaccag

SEQ ID NO: 2693 - DNA, 120 bp, synthetic construct
  source 1..120: mol_type = other DNA
tttggtacatgtatgcacttgcttctcttgagtaaatgatctaaatgtggaattgtcacatcacaggctggcatatgtttagttgtagtagaggctgagaaagtttcacccacgtacatg

SEQ ID NO: 2694 - DNA, 120 bp, synthetic construct
  source 1..120: mol_type = other DNA
ctccttcccctcctcagaaccccactcacagcccacctcctccaagaagtcttctcagattatactcatgccatgtaggaatcatgaattcaatttatacaatcataatttttattccac

SEQ ID NO: 2695 - DNA, 120 bp, synthetic construct
  source 1..120: mol_type = other DNA
ttcctcgccagaactttgttttgtaattgtgcttttcacaatacttcatgtaacattatagatggttttccctcccagctacattttaaagagggcagtttctgtgctctcttgggactc

SEQ ID NO: 2696 - DNA, 120 bp, synthetic construct
  source 1..120: mol_type = other DNA
cccatgtcattagccacccatacaccatgtaaagtgcctggttggcacttagcaaatggctgaagccactcaaggttttggaaacctcatctttgaatcttgggactttagtgtggtctt

SEQ ID NO: 2697 - DNA, 120 bp, synthetic construct
  source 1..120: mol_type = other DNA
tctaaggtggaaaggcttttaaagtttgaacaagcaatgatgccacatctctatctgaatggcaaatgtctgagtttatcaaaacaatcgataaattgcatttccaggccgggtgcagtg

SEQ ID NO: 2698 - DNA, 120 bp, synthetic construct
  source 1..120: mol_type = other DNA
gatgatgatgaccgtaaccacaatgacagcaatgatgatcatgatggctgtcctcctttccttacacaatttttatggaaagctatttaagttgcctgtgtgaaagtgctctgtgttagc

SEQ ID NO: 2699 - DNA, 120 bp, synthetic construct
  source 1..120: mol_type = other DNA
tatattttgaagctctcacaggcaatgtaaatgttgaggttcccaggctaaatgctttcctactcttccagggcctggggaaatcctgatattacctagaagaattctttattctctttg

SEQ ID NO: 2700 - DNA, 120 bp, synthetic construct
  source 1..120: mol_type = other DNA
taattttttaattattatttttaatcaacagctttagacagagaaccttggtttcatcttcagtgggctgtggccatgggcagtttcttcatctgcaaaaggggagtagtactaggaccc

SEQ ID NO: 2701 - DNA, 120 bp, synthetic construct
  source 1..120: mol_type = other DNA
tggctttaggcccttctcccagatgctaccttttacagaggaagaccagatctgaggtttagtttccatgttgtgttctgagttctttctattcattcagtcatttaaaagtacttacca

SEQ ID NO: 2702 - DNA, 120 bp, synthetic construct
  source 1..120: mol_type = other DNA
ttccaaataaagtcacagatactggggattaggactcgaacacatctttctgggggacacaattccaccattacagggaataaacaggataagaaaaccatagaacccagcaggtggtag

SEQ ID NO: 2703 - DNA, 120 bp, synthetic construct
  source 1..120: mol_type = other DNA
ttggaagttctggccagggcaatcaggcaagagaaacaaataaagggtattcaattaggaaaagaggaagtcaaattgtccctgcttgcagatgacatgattgtatatttagaaaacccc

SEQ ID NO: 2704 - DNA, 120 bp, synthetic construct
  source 1..120: mol_type = other DNA
atgtggactggagagaactgaatgagctagggtccaagaaggatggtgagaggcatgccttcattctgcaggacacaaaggctctgcaccaggtctttgaacatatgctgggtgagtgag

SEQ ID NO: 2705 - DNA, 120 bp, synthetic construct
  source 1..120: mol_type = other DNA
caacatccccttctcttgactatagagaatgaactgctgaacaaacagagtgttcctgctcattttgtcgccttgaatgggagcaaactgaacattaaccttaagatgggagtggaggtg

SEQ ID NO: 2706 - DNA, 120 bp, synthetic construct
  source 1..120: mol_type = other DNA
cagtccactgccctagatgacactgtctcctgtcaccctttgctggcaggagaatctgggggagcagttttccttgagcggagattcaggttttttcaggtgagaaggtagaagcttgca

SEQ ID NO: 2707 - DNA, 120 bp, synthetic construct
  source 1..120: mol_type = other DNA
gactcatgcttgtttcactttcacatggaatttcccagttatgaaattaataaaaatcaatggtttccacatctctcagtgcctctatctggaggccaggtagggctggccttgggggag

SEQ ID NO: 2708 - DNA, 120 bp, synthetic construct
  source 1..120: mol_type = other DNA
caagaaaaagcggagttaacccttactaagcatttaccctgggcttccaggcagccctggaagtcaagagaacactcagaaatggggagggagaagcagtggaaatccatatgggttgag

SEQ ID NO: 2709 - DNA, 120 bp, synthetic construct
  source 1..120: mol_type = other DNA
tgaagcagtttcttgactggtaattcctccatgaacctcagcccttgagcctcttactgagagcctccctgtcccagcaaagtcgctgaaatctcccaatcacagtattctattttcaat

SEQ ID NO: 2710 - DNA, 120 bp, synthetic construct
  source 1..120: mol_type = other DNA
gtcaaagggaagtccgtgtaatgatgattaacttaaaaagttgaaagatgtgggatttcagttgcagattggtctctggggttaaaagatggcttggaagaccaggtgaggtgatggtct

SEQ ID NO: 2711 - DNA, 120 bp, synthetic construct
  source 1..120: mol_type = other DNA
ccttcttcattcctccttctctacctcagtgtcactattcttgtttcctggcactgttcacttaaccttagaatcacagagctctgagcacttcagagatctttctatagtcctacattt

SEQ ID NO: 2712 - DNA, 120 bp, synthetic construct
  source 1..120: mol_type = other DNA
actacaacattaatgggaaaaaagaagcaggaattcctgaattttatgactatgacgttgccctgatcaagctcaagaataagctgaaatatggccagactatcaggtgagagcgtccag

SEQ ID NO: 2713 - DNA, 120 bp, synthetic construct
  source 1..120: mol_type = other DNA
gttgttacactgagatcaaacctgacagccgtttttaaaggtttaaccccaatcccaagtgctgaaaaaccagaggctgagggagatgtgtaagcttccacctcagtgttttactgagac

SEQ ID NO: 2714 - DNA, 120 bp, synthetic construct
  source 1..120: mol_type = other DNA
aaataaacaaatgggatctaattaaactaaagagcttctgcacagcaaaagaaactaccatcagagtgaacaggcaacctacagaatgggagtaaatttttgcaatctacccatctgaca

SEQ ID NO: 2715 - DNA, 120 bp, synthetic construct
  source 1..120: mol_type = other DNA
agccaccctgtgatgtggatgacttaatctatgttttccttccttacctcacacctgagttccagatccctgatttcgaatacttatgaaactcactctactccatctcaaaatgaacaa

SEQ ID NO: 2716 - DNA, 120 bp, synthetic construct
  source 1..120: mol_type = other DNA
gagactgaataaggaatctgagaatgtgagtttttctgtgtgaatagggagaggctttctttatcaagaggaaccaacttcttcctggcatctagtattttgaggagaacacatgagaac

SEQ ID NO: 2717 - DNA, 120 bp, synthetic construct
  source 1..120: mol_type = other DNA
ttatctctactctctaacctctcatacagagatttcctctggggacgtctggatgactgtaaaagagaccaagaacagttaagatgatttccagttgctgacatgtggtccaaaatatat

SEQ ID NO: 2718 - DNA, 120 bp, synthetic construct
  source 1..120: mol_type = other DNA
caccacgcccagctggtattttttataagtgactcgatatattatgtattcagtttatttgaacctctcttgaacctgataacattttcagccctttccatcccttagggcaacatattc

SEQ ID NO: 2719 - DNA, 120 bp, synthetic construct
  source 1..120: mol_type = other DNA
ctctggtcccctagatcatgtatgatgctggaaattcctaatctaaccaaaccacggaacccagaggttttccagagtgttacatttttgaagttgaagacaaataactcaatcatggac

SEQ ID NO: 2720 - DNA, 120 bp, synthetic construct
  source 1..120: mol_type = other DNA
acactgagtatctgaagtttttcagtataacactggatagaactggaaaaaacaaacttggggatcatcagctcttaagcggtactaaaagccatgggaaaggaagacaatccatggcaa

SEQ ID NO: 2721 - DNA, 120 bp, synthetic construct
  source 1..120: mol_type = other DNA
agctccagagagtagcgtgagtgacttttgaccctaacctttgacccgcattgagtccaaacctccttcaccctcctcacagtaggatctagcttaaccttgttcatctgtgcctgtact

SEQ ID NO: 2722 - DNA, 120 bp, synthetic construct
  source 1..120: mol_type = other DNA
ctgattgtcctagtctgtttgacacatctgccatttctgatctgaacacaagtcccatcatctcttttgtctgcattttatcctctttccttacctaatgcctctcatcttgcccttgtt

SEQ ID NO: 2723 - DNA, 120 bp, synthetic construct
  source 1..120: mol_type = other DNA
tatataatgtacacaatttgttcaccagtgtgcagtgacctgatttcatgtccctatcctacagatcttcttactattccacctggtttcaagaaaggcatggactttgcaccaaaaggt

SEQ ID NO: 2724 - DNA, 120 bp, synthetic construct
  source 1..120: mol_type = other DNA
agagaaatgaaaagacatggtggggagaaagtttagaagaatgacctgggttagtttaggaaggggttggggacagaatttttctggggttatatcatgcaggagaatgtaagggcagtt

SEQ ID NO: 2725 - DNA, 120 bp, synthetic construct
  source 1..120: mol_type = other DNA
aagtacaaaaaataagagaataaaatatttccccccttagacctgagccctgatagtatttatttatatttctgaccccctactacagcttcttacttttgacaattgtccttttttttt

SEQ ID NO: 2726 - DNA, 120 bp, synthetic construct
  source 1..120: mol_type = other DNA
gaacatgtcccacctggtggctgtgggatcccctttgggtccagattactttgcatgttgaaatgggatgagatgttgggggatagccttccattctgggtctcagaaaagactgggtaa

SEQ ID NO: 2727 - DNA, 120 bp, synthetic construct
  source 1..120: mol_type = other DNA
ttttgtacctgccagcacctgtttttcctcctatcttttttttccccttgtcccccaggggttttgacttgagctttgagcactgccccagttaacactagctcacctctcattggttca

SEQ ID NO: 2728 - DNA, 120 bp, synthetic construct
  source 1..120: mol_type = other DNA
tatatcatactctgagcttatatttcattcctgggtatatatcacaaagaaattctcaccctggtctgtgagagaacatgtacacccatcctttgtttgtggtggcatggtgttggtagt

SEQ ID NO: 2729 - DNA, 120 bp, synthetic construct
  source 1..120: mol_type = other DNA
gtgtgtgtatgtagagcctttgctgatcctttctgttctcctctgtcccaggtcttgtttgccacagagacctttgccatgggagtaaacatgcctgctcgtacagtagtgtttgactcc

SEQ ID NO: 2730 - DNA, 120 bp, synthetic construct
  source 1..120: mol_type = other DNA
aactgacagagacccagcacatgatccaggtgagcaagtgtgagtgctgaggaggtgataggagaagggaagagaagatcgtgttactctaggtgctactaaacttagtccaagtgtctg

SEQ ID NO: 2731 - DNA, 120 bp, synthetic construct
  source 1..120: mol_type = other DNA
gtgccctatccagatgacctcgtgggattcaagctgttcctgcctgaaggtgagagtgtggcagatgtctgttttctgccagcagtataagcaggatgcctgggtccatggcaatgtctg

SEQ ID NO: 2732 - DNA, 120 bp, synthetic construct
  source 1..120: mol_type = other DNA
agccctgtaagtgccccaaggatggaaaatggctgccttcttgatctggtccttccctgtcctggagcaggaaggcaggccttaacctctccttctttcctgcagggaatagaacgtgtc

SEQ ID NO: 2733 - DNA, 120 bp, synthetic construct
  source 1..120: mol_type = other DNA
taaaaacatgatgataaaacagcaaagcactgttgtgtgcttgagttgctggacagggatgactcagctaagaagacagcgagagaacctcttagaaatatgcttttattatctgcacac

SEQ ID NO: 2734 - DNA, 120 bp, synthetic construct
  source 1..120: mol_type = other DNA
aggagttacaggctgaaggtctgacacaagcattagtgagatgctcccctcgaagaatagtcttgtttcttctaaggactgattctcaccccggctttggctctcctaattttagagggt

SEQ ID NO: 2735 - DNA, 120 bp, synthetic construct
  source 1..120: mol_type = other DNA
aatccagttacctcaaagctccccaacttccacctccgcagagctatgacgtcatggcaggcacgccagaggccgaaggatgcaaaagtggttttctgctttcgatgatgcaatcattca

SEQ ID NO: 2736 - DNA, 120 bp, synthetic construct
  source 1..120: mol_type = other DNA
ctgagataaaccctagaacattggcagcactccaaacaactaagggaaatgagtccttctttgagagggaatgtaggtggcatttctccatgtcttatatatctcagttattatttattc

SEQ ID NO: 2737 - DNA, 120 bp, synthetic construct
  source 1..120: mol_type = other DNA
ctgcgtggctggtggtattaggagcacatttagttgttggactacagataatgtgtttaattttatacaagttgagttgatggtgcatgtggagcatccaaagacaaaggtattagacag

SEQ ID NO: 2738 - DNA, 120 bp, synthetic construct
  source 1..120: mol_type = other DNA
aatgaattacgctctcttggggcgggatttgggactctacatttttgaactgcctcaagtgctttttaagtgtgccttaaaatttgagatccactgacataaagggaaagcagaagaaga

SEQ ID NO: 2739 - DNA, 120 bp, synthetic construct
  source 1..120: mol_type = other DNA
aactatagaatatgaccagtatcccacatatatccctctctgatcaaaatgtctctgatcagaatgtccctgggaggtgactgctgtggtcattgttgccttagttttcccttttttttt

SEQ ID NO: 2740 - DNA, 120 bp, synthetic construct
  source 1..120: mol_type = other DNA
ggccgggcggggggggctgaccccaccacctccctcccagacggggcggctggccgggtggggggctgaccccccacctccctcccggacggggcggctggctgcgtggggggctgaccc

SEQ ID NO: 2741 - DNA, 120 bp, synthetic construct
  source 1..120: mol_type = other DNA
gggagaccgtggaaaggataattccactattacttgtcttttggggtttgtttttattctctctttgagttttgtttccttatgcgcccagttacttttgaaaatgttctgggcagattt

SEQ ID NO: 2742 - DNA, 120 bp, synthetic construct
  source 1..120: mol_type = other DNA
gtgatccacccacgtcagcctcccaaagtgccgggattacaggcttgagccatctcgcccggcctacttagatgttatattagtggtaattcctgttatcctgtgagctctttagtgtct

SEQ ID NO: 2743 - DNA, 120 bp, synthetic construct
  source 1..120: mol_type = other DNA
gtggatgagaatgtgggtagctagttggaaaaggctgcttggtcatttgcttgattattttctcacacagtttttcctttactaagagaaaatgcccccatattggcaaacaaaatctcc

SEQ ID NO: 2744 - DNA, 120 bp, synthetic construct
  source 1..120: mol_type = other DNA
aggagctaaataaaaatctaattttgagaggctgtatctggctcaggcctcctactttgtaacccatggaatatgtgaaagcatttgaaaaactatagcactgatctcacatgggcagac

SEQ ID NO: 2745 - DNA, 120 bp, synthetic construct
  source 1..120: mol_type = other DNA
cagggttcttttctctacgtgtcatgttaaaattgccaaataaagtacctctgcctgtgatattttctggatgtcctttatttactgtgacgtgtgtttgggtgccttgtttaggggtag

SEQ ID NO: 2746 - DNA, 120 bp, synthetic construct
  source 1..120: mol_type = other DNA
aaaagcctagtatagttcaatttgtgttggaatgaaagtaagagacaagtgtcttagaagcctgtcattgttttgtgagggcctttaaatatcctgtactcgtgggccatgttgggccct

SEQ ID NO: 2747 - DNA, 120 bp, synthetic construct
  source 1..120: mol_type = other DNA
cttggcttctacatccagattacaaatgttgccagggcaaaaggggtcccaactgctagattcacttctctgggtttgtttcttttactgacactcagcaggtaattgattactagttta

SEQ ID NO: 2748 - DNA, 120 bp, synthetic construct
  source 1..120: mol_type = other DNA
ctaagtgagataacctgaaagaaagtgccacacagaaggggtgcttaggaaacatttgtcccctgctccctctgtggagtttgacccaccctccccttgcacatggacccctgctcacct

SEQ ID NO: 2749 - DNA, 120 bp, synthetic construct
  source 1..120: mol_type = other DNA
gtctcaccctatgtcctgtttctttctatgccccagctggtgaatggacagagccacatttccctctcaaaggcagagttccaggacgccctggagaagctgaatatgggcattactgac

SEQ ID NO: 2750 - DNA, 120 bp, synthetic construct
  source 1..120: mol_type = other DNA
ctcttgtggctttccacaacttattgtctcatatttttatggacagtttatacaggcaccccacaagtccttttcccaacatgcccccctccctttttttttttttaaccgctattgcta

SEQ ID NO: 2751 - DNA, 120 bp, synthetic construct
  source 1..120: mol_type = other DNA
gagaggctttctaaggtctattgagggaaaccagtatccaaactcctttcttagtttttatcagtaacacagatgtttttacaccgaacgtggaattaatacaggtgaaaaggtgacagt

SEQ ID NO: 2752 - DNA, 120 bp, synthetic construct
  source 1..120: mol_type = other DNA
gcaggaatgggacacatgcccaataggtataattttgggctgttgtagccacaggtttgttaggcgaggaggtcactgtttttattttggctttgtattctaggattagtaaataacaga

SEQ ID NO: 2753 - DNA, 120 bp, synthetic construct
  source 1..120: mol_type = other DNA
gtgattggattatgtggtctccaccagactgttgctttttcatgtttaccagacccaccagtaaaaacagctatggctccttccaaaggggcatcacaagtaatttttggaagaacctat

SEQ ID NO: 2754 - DNA, 120 bp, synthetic construct
  source 1..120: mol_type = other DNA
tgacctgggcttgctgaattttgttttcaattactgataactctttcatggcctcgggtgttagttctctgttactgcgtaagttggtatttcccctcaatattgagaagagattagaca

SEQ ID NO: 2755 - DNA, 120 bp, synthetic construct
  source 1..120: mol_type = other DNA
tccagtgctgcatgcaccaatgaccaaagcgaccaaacaggcaaaggaatttcctttccttctctatatgctcttttaaggtcctttccaactccttcttaatgttttaatttcaaagtt

SEQ ID NO: 2756 - DNA, 120 bp, synthetic construct
  source 1..120: mol_type = other DNA
ttcttgggctctgtcccccacctctctctgtcctttgtcttgcaggtggggagatggaggaggcagagctcacatcctggtattttgtgtcatctcccttctccttggatcttagcaaga

SEQ ID NO: 2757 - DNA, 120 bp, synthetic construct
  source 1..120: mol_type = other DNA
agggcagatcgtgttcatgaatcgagagcccaagaggaccctgacctcggtctcggtgtttgtggaccatcacctggcaccctccttctactttgtggccttctactaccatggagacca

SEQ ID NO: 2758 - DNA, 120 bp, synthetic construct
  source 1..120: mol_type = other DNA
gcccatattctgaaggtgtgagtgagcctataccaacaaggtcaggctcaaacctagccattttcttccaaagtgttaaccacagtattaaatagcaccaaggtttttaaaataactgag

SEQ ID NO: 2759 - DNA, 120 bp, synthetic construct
  source 1..120: mol_type = other DNA
tgcagcctttctctctaccaggactaagctgtcccaaggagaagacaacccggaaaaagagaaacgtgaacttccaaaaggcgattaatgagaaatgtgagttgcgggtgcctaggcagt

SEQ ID NO: 2760 - DNA, 120 bp, synthetic construct
  source 1..120: mol_type = other DNA
agatcctgcaggaggaggacctgattgatgaggatgacattcccgtgcgcagcttcttcccagagaactggctctggagagtggaaacagtggaccgctttcaaatgtgagagtgtgtgc

SEQ ID NO: 2761 - DNA, 120 bp, synthetic construct
  source 1..120: mol_type = other DNA
ctgttcccatcttctacaattctgatccaactctgtccctggagttgaaactcaaagttctgggggagtctgcgctagcagggcaggctgtagtcctgtgtgacctcacaaccatgtttt

SEQ ID NO: 2762 - DNA, 120 bp, synthetic construct
  source 1..120: mol_type = other DNA
aggactctctttgccccttccccctcctgtttgacatcttttctccccttactaggggggtttggtgggcaatgatgagactgtggcactcacagcctttgtgaccatcgcccttcatca

SEQ ID NO: 2763 - DNA, 120 bp, synthetic construct
  source 1..120: mol_type = other DNA
aagggccaggggaccaggctcttctccctgccttcctgtttactcgtggtctcccttcactttcagataacctgtactggggctcagtcactggttctcagagcaatgccgtgtcgccca

SEQ ID NO: 2764 - DNA, 120 bp, synthetic construct
  source 1..120: mol_type = other DNA
caggtttgcttgtgcccttctaacatcgccttcccttttctgttgctgaagttttccttgggcagcaagatcaatgtgaaggtgggaggaaacagcaaaggaaccctgaaggtgagggcc

SEQ ID NO: 2765 - DNA, 120 bp, synthetic construct
  source 1..120: mol_type = other DNA
tccttcgtacctacaatgtcctggacatgaagaacacgacctgccaggacctacagatagaagtgacagtcaaaggccacgtcgagtacacgagtgagtgtgggggttgggaggccttgg

SEQ ID NO: 2766 - DNA, 120 bp, synthetic construct
  source 1..120: mol_type = other DNA
gtcagcagggaccctcagggtttgagagggagtctttcctaatgctggttttattcagcttgaggggctgcctttgtttttttgttgaacttcctatcttttttttaatattaaagcgta

SEQ ID NO: 2767 - DNA, 120 bp, synthetic construct
  source 1..120: mol_type = other DNA
gtgaagtcaccagagaccttgcggagcagctttgagagttctctgagtaggaaggtaacagaatgtgaaggacactggagagaaggccaataggaagcaaacaaaaacaggccaaggaaa

SEQ ID NO: 2768 - DNA, 120 bp, synthetic construct
  source 1..120: mol_type = other DNA
tctcctcaccccctcttaggcttccaggttaaggttctccgagaagacagcagagctgctttccgcctctttgagaccaagatcacccaagtcctgcacttcagtatgaagcaaaccgga

SEQ ID NO: 2769 - DNA, 120 bp, synthetic construct
  source 1..120: mol_type = other DNA
ttcaaggtatgctcttctactggatatgccatcttaattttctgtaacggaaactatccttttgccaacatctactcagatgactggactaatacagtcatgcctagatcaacctcaggg

SEQ ID NO: 2770 - DNA, 120 bp, synthetic construct
  source 1..120: mol_type = other DNA
gttatcagtggaatgaggtgactttcccggagttgtgcaatcctcaggtccggcagtgtcttcttccagttactggtttcaaacaagccaaaagtctgactttggtgtgtttgtgaatcc

SEQ ID NO: 2771 - DNA, 120 bp, synthetic construct
  source 1..120: mol_type = other DNA
atgagcactgtcttatcccacgtaactttgagaagtttgggcctttcccactgtggcagaggtttcctgaggctcttgcatacatggccctatggttgctcatcagatctttctcccagt

SEQ ID NO: 2772 - DNA, 120 bp, synthetic construct
  source 1..120: mol_type = other DNA
acttttgtgagtgaaaggaggcactaataacaatcacactgggatacctgtatatactggaatgccccaggcaaaccaggcttaaactgtattactctatctgtagcttaaactaacaaa

SEQ ID NO: 2773 - DNA, 120 bp, synthetic construct
  source 1..120: mol_type = other DNA
ggaccattgaggaagccatggtcaaaaagtgggcagactttgctggcagacctgagccacttacctgtaagggccgggggcattttttctttcttaaacaaattttttttttgttagaga

SEQ ID NO: 2774 - DNA, 120 bp, synthetic construct
  source 1..120: mol_type = other DNA
tgtcctgaactgaaagtactccatcctttcctggcaggaggacaacttaatgcctgcctattacaaatgtatccaggaggtgttaaaaacctggagccactggtccatccaaattgtgga

SEQ ID NO: 2775 - DNA, 120 bp, synthetic construct
  source 1..120: mol_type = other DNA
ggcctgccatgaaaatgtggtggaggctggtccccgctgccgctgaacgcctccccacccacctgtccacccgcccgcagatcgcttcctggagccaggcaagaactccagagctctggc

SEQ ID NO: 2776 - DNA, 120 bp, synthetic construct
  source 1..120: mol_type = other DNA
agaggattgaggcttaatcctgagctggtcctttccagccaataaatcaactccagctccctctgcgaggctggcatgattgttccatttcacccagccgctcagtcccttgcctgttac

SEQ ID NO: 2777 - DNA, 120 bp, synthetic construct
  source 1..120: mol_type = other DNA
tgcattgtaggaggtggagggaaagaggccaaggagctggtgagatgtgatccctcctgggagcaggatctcctgtgggacagacaagggggggtcaggggagagggaggtggagaccct

SEQ ID NO: 2778 - DNA, 120 bp, synthetic construct
  source 1..120: mol_type = other DNA
ctttgaagctgtccgcccgggatggtgggggcatccagttgaccttggctgaggtctccctgatttcactgaattggaggtcacgggggctctccagaactgcagaggggtcaaggaaca

SEQ ID NO: 2779 - DNA, 120 bp, synthetic construct
  source 1..120: mol_type = other DNA
cagagctaaaggccactcgcatccagcccatccatcctctctccctggtacccgcctcacgctctttccctgcgaccaccccttctgagcccccgtttctcccttctgagtcctaggcta

SEQ ID NO: 2780 - DNA, 120 bp, synthetic construct
  source 1..120: mol_type = other DNA
tcttaacccagcctgaaggggttcagtgaacacctaggaaccaaacttactcttgagacctaaaagataagaaagaattagtttcaaaagaaaaaaagtgcagaaagaggctgcacgttg

SEQ ID NO: 2781 - DNA, 120 bp, synthetic construct
  source 1..120: mol_type = other DNA
actttggtcttcccaagatagccatttggttgtgcctaagtcattccccagaactttgatgtgcctcgcacatgaaagcacccataaataatggcaagaacaaattcactacaaattttc

SEQ ID NO: 2782 - DNA, 120 bp, synthetic construct
  source 1..120: mol_type = other DNA
caaatgcagccactgctgttggtttctgtgtccccgctcattttgttttccagtgatgttcctcttaagaaaatgctcctgactcatccacggcagggaggtttgccactatctggacaa

SEQ ID NO: 2783 - DNA, 120 bp, synthetic construct
  source 1..120: mol_type = other DNA
ttcttttctctacgtgtcatgttaaaattgccaaataaagtacctctgcctgtgatattttctggatgtcctttatttactgtgacgtgtgtttgggtgccttgtttaggggtagaggtg

SEQ ID NO: 2784 - DNA, 120 bp, synthetic construct
  source 1..120: mol_type = other DNA
aggacaggtagtgaaaggatcagtgttcctgagaaacccatctcgtaataatgtcccctgctccccaaaggtggacttcacccttagctcagaaagagacttcgcactcctcagtctcca

SEQ ID NO: 2785 - DNA, 120 bp, synthetic construct
  source 1..120: mol_type = other DNA
tcagcccgattctcagatggcctggaatccaacagcagcacccagtttgaggtgaagaaatatggtgagagctggaaactggagggacaggcagctgctttcctgaaggaaataagggtg

SEQ ID NO: 2786 - DNA, 120 bp, synthetic construct
  source 1..120: mol_type = other DNA
acttctcacatctcatctcagactcaaaaccaggaaacacccaggagacctggtttctctccaactctgtctctgtgactcggcccttttccctggctgagtttatttatttctttgctc

SEQ ID NO: 2787 - DNA, 120 bp, synthetic construct
  source 1..120: mol_type = other DNA
gtctcatatttttatggacagtttatacaggcaccccacaagtccttttcccaacatgcccccctccctttttttttttttaaccgctattgctattatggcttatttgtggtgtttggt

SEQ ID NO: 2788 - DNA, 120 bp, synthetic construct
  source 1..120: mol_type = other DNA
gatactggtctttgattatgacctggaattttaactagtcaatgttgtcggtagccttttaggcaaccgatagttggccttatgtaaagaggggggaactgataacctatggacacattt

SEQ ID NO: 2789 - DNA, 120 bp, synthetic construct
  source 1..120: mol_type = other DNA
aatgggacacatgcccaataggtataattttgggctgttgtagccacaggtttgttaggcgaggaggtcactgtttttattttggctttgtattctaggattagtaaataacagaagaca

SEQ ID NO: 2790 - DNA, 120 bp, synthetic construct
  source 1..120: mol_type = other DNA
ggtctccaccagactgttgctttttcatgtttaccagacccaccagtaaaaacagctatggctccttccaaaggggcatcacaagtaatttttggaagaacctatgtagttaattttaag

SEQ ID NO: 2791 - DNA, 120 bp, synthetic construct
  source 1..120: mol_type = other DNA
tagttctgcctacaaaagtttgacaaactgtgggactatttaacataccctggggcaaaactttccaatgatatttggctgcaggttttttgttattaacggcaggaatggtaaaggcaa

SEQ ID NO: 2792 - DNA, 120 bp, synthetic construct
  source 1..120: mol_type = other DNA
taaaactttaccatcagtcctaaggtagtatgatccatgctacaaaactcgccataaaaccttactatgtaacactgctatagaaatctataaagtgtttccttcgtaggagggccgtag

SEQ ID NO: 2793 - DNA, 120 bp, synthetic construct
  source 1..120: mol_type = other DNA
agcatgaaacaaatccataagattttccgtatcaacttttaccccaccatgcatgcttgaagagctgccgtaggaagctcaaatacgtggtgtacttactttcagtttttcccattgtgt

SEQ ID NO: 2794 - DNA, 120 bp, synthetic construct
  source 1..120: mol_type = other DNA
tggcattcctgtcaaagtttctgccacggtgtcttctcctgggtctgttcctgaagtccaggacattcagcaaaacacagacgggagcggccaagtcagcattccaataattatccctca

SEQ ID NO: 2795 - DNA, 120 bp, synthetic construct
  source 1..120: mol_type = other DNA
agatcgtgttcatgaatcgagagcccaagaggaccctgacctcggtctcggtgtttgtggaccatcacctggcaccctccttctactttgtggccttctactaccatggagaccacccag

SEQ ID NO: 2796 - DNA, 120 bp, synthetic construct
  source 1..120: mol_type = other DNA
cctttctctctaccaggactaagctgtcccaaggagaagacaacccggaaaaagagaaacgtgaacttccaaaaggcgattaatgagaaatgtgagttgcgggtgcctaggcagtagctt

SEQ ID NO: 2797 - DNA, 120 bp, synthetic construct
  source 1..120: mol_type = other DNA
gatccatggcctgagcctgtccaaaaccaaaggtgatgtcaccctgtctgggcctcaggtgaccctgcttccatttccctgtaccccagctccctgttccctttgctcttagtgtaggaa

SEQ ID NO: 2798 - DNA, 120 bp, synthetic construct
  source 1..120: mol_type = other DNA
aaatacctggcaactctgatcccaatatgatccctgatggggactttaacagctacgtcagggttacaggtgggagtgccctttagtcccttcccagtggccaccttcggattcatgtgg

SEQ ID NO: 2799 - DNA, 120 bp, synthetic construct
  source 1..120: mol_type = other DNA
cctgtttgacatcttttctccccttactaggggggtttggtgggcaatgatgagactgtggcactcacagcctttgtgaccatcgcccttcatcatgggctggccgtcttccaggatgag

SEQ ID NO: 2800 - DNA, 120 bp, synthetic construct
  source 1..120: mol_type = other DNA
ctgagcttcagttttctcacttgtagagtaacatacacagagttcaccctacagggtcgttagaaggctgaagtgagataattcatgtgctggtataaactttgtggaaatgtgaggtgg

SEQ ID NO: 2801 - DNA, 120 bp, synthetic construct
  source 1..120: mol_type = other DNA
acagctctccttgtctacacagatccccttgcctttcctgtccttccctgcttcttggcccacaggacaagctctttcttctccttcaagccttggccagaagcctttcctgagcttttc

SEQ ID NO: 2802 - DNA, 120 bp, synthetic construct
  source 1..120: mol_type = other DNA
actcgatggcaccgggtttactgagtatgcgttaggaggtttctcaggagacagctgtgtcagcggctggtgctcttgagaacttgtgatgtcatcagagagaaggacaagaatgtgagc

SEQ ID NO: 2803 - DNA, 120 bp, synthetic construct
  source 1..120: mol_type = other DNA
gcaatgctcggctcttcggcatatgggcaaaaagagccaaggaagctgaaaaacaggatgtgtgaaagcaaaaataaagccctcttggggacttgtaataaatacgttttaaaagaaatc

SEQ ID NO: 2804 - DNA, 120 bp, synthetic construct
  source 1..120: mol_type = other DNA
ccggccttcaaaaaaagttttggaacatttactgtaacctctgggagaaaatgtgagaaaggtgtggtggctgtcattagccagctgtttgtaggtcagggagacccctacccagtgtgt

SEQ ID NO: 2805 - DNA, 120 bp, synthetic construct
  source 1..120: mol_type = other DNA
tgtgccctaactcctctctgttctccagagcgcagatgttctgtgttttacggggcaccaagtaagagcagactcttggccaccttgtgttctgctgaagtctgccagtgtgctgagggt

SEQ ID NO: 2806 - DNA, 120 bp, synthetic construct
  source 1..120: mol_type = other DNA
accatgaagctggaagcactgctgtgtccgctttcatgaacacagcctgggaccagggcatattaaaggcttttggcagcaaagtgtcagtgttggcagtgaagtgtcagtgtgtgttgc

SEQ ID NO: 2807 - DNA, 120 bp, synthetic construct
  source 1..120: mol_type = other DNA
ttctgttatcagtggaatgaggtgactttcccggagttgtgcaatcctcaggtccggcagtgtcttcttccagttactggtttcaaacaagccaaaagtctgactttggtgtgtttgtga

SEQ ID NO: 2808 - DNA, 120 bp, synthetic construct
  source 1..120: mol_type = other DNA
gttgtgctgggaatccatactttccctggctggagtagaacctgtggactgtagtcctgagggcagtcatgttctgcctgtgcctggaaacacaagaaacttgactgcagagagaagaaa

SEQ ID NO: 2809 - DNA, 120 bp, synthetic construct
  source 1..120: mol_type = other DNA
tgtattactctatctgtagcttaaactaacaaacaacccacacaaatcacattttgttcttcaggcgattcaggaaggcctattaggcagggactgccattttctctctgagacaaacat

SEQ ID NO: 2810 - DNA, 120 bp, synthetic construct
  source 1..120: mol_type = other DNA
gaactccaagaggaccattgaggaagccatggtcaaaaagtgggcagactttgctggcagacctgagccacttacctgtaagggccgggggcattttttctttcttaaaaaaattttttt

SEQ ID NO: 2811 - DNA, 120 bp, synthetic construct
  source 1..120: mol_type = other DNA
tctggacagctcctggaagggcacgtgcacatggctgcagtggacctcctgatcggtggcactgagaccacagcaaacaccctctcctgggccgtggtttttttgcttcaccaccctgag

SEQ ID NO: 2812 - DNA, 120 bp, synthetic construct
  source 1..120: mol_type = other DNA
tttcttggtctcagcttcatttccgtgaagggcaccgagaactcgaagcccttccagtggtaccagctcactccctgggaaaggggttgtcaagagagagtcaaagccggatgtcccatc

SEQ ID NO: 2813 - DNA, 120 bp, synthetic construct
  source 1..120: mol_type = other DNA
ccccatccgtagttccccagtccctgtgaggcactgacccagccagaactctccagagatgttcccaaaaccatgggcatagtcctcccagtccctccagaagtctgtctgtccatccat

SEQ ID NO: 2814 - DNA, 120 bp, synthetic construct
  source 1..120: mol_type = other DNA
attgcgatgggaagagagtggtggggaaatccgtgggacagttttcctattttctgggtctgtcccttgaccaaggaacagctcaaaaaagaaaggatctaaaataaattgtaaaaaatt

SEQ ID NO: 2815 - DNA, 120 bp, synthetic construct
  source 1..120: mol_type = other DNA
ggaaagcaggaagaggagatggggatgaggcccaacctggctccctctacctcctctccctgtcccacacaccccacagaccctacctgtggtgaaggtgatgctggctggggaagtgag

SEQ ID NO: 2816 - DNA, 120 bp, synthetic construct
  source 1..120: mol_type = other DNA
tgaccttggctgaggtctccctgatttcactgaattggaggtcacgggggctctccagaactgcagaggggtcaaggaacaatgacgcaggcaggggcagggaggcttctccctacgagt

SEQ ID NO: 2817 - DNA, 120 bp, synthetic construct
  source 1..120: mol_type = other DNA
aatctgagtgaggggcgccatggggtgctccatttttatcttccaggcttggcccaaggctgaggtgggaagtttataggtccaggcccagtcagacaatgaagtcgctgtggcctcgtg

SEQ ID NO: 2818 - DNA, 120 bp, synthetic construct
  source 1..120: mol_type = other DNA
acaaatgcagccactgctgttggtttctgtgtccccgctcattttgttttccagtgatgttcctcttaagaaaatgctcctgactcatccacggcagggaggtttgccgctatctggaca

SEQ ID NO: 2819 - DNA, 120 bp, synthetic construct
  source 1..120: mol_type = other DNA
aaaggctaggactggaactggaacacagatctgctggccccaaagcccgtgtcccttttatttcctcagcagtcagcgaatgaaaggaagtaatgcatatgcttcagaactgtgcctgac

SEQ ID NO: 2820 - DNA, 120 bp, synthetic construct
  source 1..120: mol_type = other DNA
ggaataaaagaggagccagacaagaaagcaagtgtcccctggggtgcagggaaagtagggagagggatgagtgtgagtgggagaggagagctcagggcctgggttttcctggacccaata

SEQ ID NO: 2821 - DNA, 120 bp, synthetic construct
  source 1..120: mol_type = other DNA
atttaaccctcgcacaacatatgaagtgggtgccattattatcatcaccccaactttgcaggaatctgaagcacaaggttaggaaacgcctgcaaagtcgcacaatcactacattcgaag

SEQ ID NO: 2822 - DNA, 120 bp, synthetic construct
  source 1..120: mol_type = other DNA
gtcatggtaggcactgcttgggtggtctcggcttcatcctttggagctggacagacacgtgtggggacagtgaggaccctgggttctcagttcagcatagaaaggatgtgtcacaaaaca

SEQ ID NO: 2823 - DNA, 120 bp, synthetic construct
  source 1..120: mol_type = other DNA
ttaggacaggaacttttcccattaggacaggaaccctaactctgagcctaacctctgtgaggattcatgaatgcaagaaaaattcgcttcaacaaattctaagagagtttccaaatctgt

SEQ ID NO: 2824 - DNA, 120 bp, synthetic construct
  source 1..120: mol_type = other DNA
aagtggagggtgacagtccacagcaatgtgagtggacttcatgctggactgcaaactagaaagcgattagaatggcgaattatgtcaagtgtactttactacaataaaaaacaacaaaaa

SEQ ID NO: 2825 - DNA, 120 bp, synthetic construct
  source 1..120: mol_type = other DNA
cccccaacgctcaacgtgggccaaaatatttctatgacctgttactattatcggtcgtgccaagaagcatattttgtcgaacttaattttgaattcgctatactggatattgtttcctga

SEQ ID NO: 2826 - DNA, 120 bp, synthetic construct
  source 1..120: mol_type = other DNA
gtggtcttgctcagtttacagtcaacacacatgacaagctctgaggtcagtgctggggaacttgggacagccaccaacagagctcacagggcccttctccacccaggaagatctgtcagt

SEQ ID NO: 2827 - DNA, 120 bp, synthetic construct
  source 1..120: mol_type = other DNA
acttcaggatgatccaccaactgcaaaggacaccccactcaatcctcagtgtctctcacacaccatgctctttctagcctcctggcctttgcactagctgtgatgatttgacatgcttca

SEQ ID NO: 2828 - DNA, 120 bp, synthetic construct
  source 1..120: mol_type = other DNA
cggtaatagggttatcccttcttcctgacagcgtctaataaagagcaaaaccttgcttccttaaatgctttcctaaaacaccaaacacaagcccagttccttaacaatctctttctaaag

SEQ ID NO: 2829 - DNA, 120 bp, synthetic construct
  source 1..120: mol_type = other DNA
ctcttagcaagatccccaagcatggaaacgtgcaaaagaagcccggctggtgagaatatttttgttttcatgaagttgcagagaaagcaacatcttctagggccatcttcctcactcaca

SEQ ID NO: 2830 - DNA, 120 bp, synthetic construct
  source 1..120: mol_type = other DNA
ggcactgcttgggtggtctcggcttcatcctctggagttggacagacacgtgtggggacagtgaggtccctggctcctcagttcagcatagaaaggatgtgtcacaaaacacaaagtgcc

SEQ ID NO: 2831 - DNA, 120 bp, synthetic construct
  source 1..120: mol_type = other DNA
tttgcttcatttgctggattgcagcctgtctctccatgacatgtctttccataatgttgctatattcctttcactgtgagccccatcaagacagaaatatgtataggaaaatggtagaga

SEQ ID NO: 2832 - DNA, 120 bp, synthetic construct
  source 1..120: mol_type = other DNA
aaaatacaggaagggaatgtgcactacacacattgttattaatgccggcagctgggggagaaagtaggactatgagattcttgttttctgtttttcaagctttccacataatgttgctgt

SEQ ID NO: 2833 - DNA, 120 bp, synthetic construct
  source 1..120: mol_type = other DNA
aacctggctgaggatgacttagaaaaggcagcctgactgagcatttggaattcaattaacctcatgatctccacccctccaatttcttatggactagaaattttgaacttcctcataatt

SEQ ID NO: 2834 - DNA, 120 bp, synthetic construct
  source 1..120: mol_type = other DNA
tgtggttataacaaagaatgctgttattaagatggaaagaaaggaaaattctcgtaagtcaggcttggtgtgcgcctgacatatttcactcttggaggttatcagtggttgaccattaga

SEQ ID NO: 2835 - DNA, 120 bp, synthetic construct
  source 1..120: mol_type = other DNA
gctatgactaggggacatatgaaatagccaaggctatgactaggggacctgaggtcagttcagagaggcccattcttggggtcctgctcagctgacagctaacacacatgacaaattcca

SEQ ID NO: 2836 - DNA, 120 bp, synthetic construct
  source 1..120: mol_type = other DNA
gctacctgatcttccaattaaagtaggtgataagaccgtcaattcagaggggagaaaatgtacttggaggaaataaacgaagacacagagatgccaaagagaacctgaataaacaggctt

SEQ ID NO: 2837 - DNA, 120 bp, synthetic construct
  source 1..120: mol_type = other DNA
gaaaacaaagaacaccaaccaaacacaacaggcaagttgtatcaggaggttcatccacctgggcttggaaattccacctaatcctgagcatttttagaaaccaacttagattttatagct

SEQ ID NO: 2838 - DNA, 120 bp, synthetic construct
  source 1..120: mol_type = other DNA
acatacaatttttcccactgaaatcagtgataattatgagaatttgccctaagcggttttcaggaactacctaccttcctcagaagggaaagactgcagttatctctcattgtgtgtgag

SEQ ID NO: 2839 - DNA, 120 bp, synthetic construct
  source 1..120: mol_type = other DNA
cttaagatcgatttctgattataatcataatcagattttgtggcttccttatggtccctcaaccatgccaggcagcctcctacctcagtacttttacaatgactgttccctctacctaaa

SEQ ID NO: 2840 - DNA, 120 bp, synthetic construct
  source 1..120: mol_type = other DNA
tgaaagcataggatgtctgtggttcgtttttaaaatactgcagtagtataaccacacaatgcaatactgtttggcaataaaaagcagtgtagtggctgagagagagcaggtggctcatgc

SEQ ID NO: 2841 - DNA, 120 bp, synthetic construct
  source 1..120: mol_type = other DNA
gtgggtggggcagagatgagccagactggccagaagtcgatatttgattgaaggaggatggcagggtctttgtactattctttctgtttatacatttgaaattttatttaacaaatactt

SEQ ID NO: 2842 - DNA, 120 bp, synthetic construct
  source 1..120: mol_type = other DNA
aaaggagggagaagccaaggctatgactgggggacccgaggtcagttcagagaggcctactcttggggctgggtggtcctgctcagctgacagctaacacacatgacaagttccagggtc

SEQ ID NO: 2843 - DNA, 120 bp, synthetic construct
  source 1..120: mol_type = other DNA
tgggtgaatttcaaaagcattgtgctaattgcaagaaatgaaacacaagagactgcgtattgtgattccattacatggagagtcaaaatgctgtctccaggatgatcgaaagcagacagt

SEQ ID NO: 2844 - DNA, 120 bp, synthetic construct
  source 1..120: mol_type = other DNA
tggagaggaaaggttcttgtgtttattttttccaaaacgactccttgactgcctccctctggggctggaaaaacccagaactgcccaaatgctcagtgcttccccaaaatatttccatca

SEQ ID NO: 2845 - DNA, 120 bp, synthetic construct
  source 1..120: mol_type = other DNA
tcatccaacaaaagtggaaattacgagaagagaggcagagtcagcaggggacagcagacccaggaactggccccactctcctggtcctcatctgctttgcggcttttctttctttttttt

SEQ ID NO: 2846 - DNA, 120 bp, synthetic construct
  source 1..120: mol_type = other DNA
caggggggctgtgaactgagatggggaatagttacacctttacttccagacctctaactgaaatgcagcatttctttccaaaactaatatagaaaacccaccagagtagaattattgtga

SEQ ID NO: 2847 - DNA, 120 bp, synthetic construct
  source 1..120: mol_type = other DNA
ttttcctaacttcaaaagataagctgcagaccatcaacaaattacagctcataaacgtagtgtaaacccaaagaacaatcaagatccatcgcagagagcgaaaaatcacttccgcaccgt

SEQ ID NO: 2848 - DNA, 120 bp, synthetic construct
  source 1..120: mol_type = other DNA
atataatgtttcctttgtaatcctatacagcttattttacagatttaaaaacattgccttcaggtggggtaggggtttcaccagatgccacagcacaacaatcatggagaacctgtgccc

SEQ ID NO: 2849 - DNA, 120 bp, synthetic construct
  source 1..120: mol_type = other DNA
cagtggctggaggggtctcttcttgttgtggggctgggacagagatggtagggggctgttagtaaagaatcccccttttcttatagtaatgatgtctagttatttattttttatttttta

SEQ ID NO: 2850 - DNA, 120 bp, synthetic construct
  source 1..120: mol_type = other DNA
ttctacctcactcagggtgaaatccaagtcctgcactggcctctgaggtcccatattcatctcttagatcattccctattgcctgccctcctccaactccaccacaaaacatactgcatt

SEQ ID NO: 2851 - DNA, 120 bp, synthetic construct
  source 1..120: mol_type = other DNA
tcctttttgccctctctgcacttctttccatgagggaatgaaaatgtccttcaccatcaagctttattgctggtggtttggattaactggaaaggtacaattataacgattcatgactct

SEQ ID NO: 2852 - DNA, 120 bp, synthetic construct
  source 1..120: mol_type = other DNA
tgactgaggcaaagaaaataaattgagggtggaaggttctggaaatgaaatcaaccaagtcatgatgaggctgagcttggtggaattacagaaaccatgttctggaaaactatctatttc

SEQ ID NO: 2853 - DNA, 120 bp, synthetic construct
  source 1..120: mol_type = other DNA
aaagaaagaaaaagagagaaagaagaaagagaaagctttgtggtcaggcgtggtggctcacgcctgtaataccagaactttgggaggccgaggcaggtggctcacttgaggatctggagt

SEQ ID NO: 2854 - DNA, 120 bp, synthetic construct
  source 1..120: mol_type = other DNA
actctgtgaggtaggtgtccccattttacggacaaggaaacagaggtgcagaaagtttaaaacttgctcagggccatgaaagctggtggtacgccagtccccagtgacatgctctttcta

SEQ ID NO: 2855 - DNA, 120 bp, synthetic construct
  source 1..120: mol_type = other DNA
ggggagcaaaaaagattactgggaagtgagagagtcagggagaaattgcagctcactctgaaaatgctttgctgctccaagcactattctaagtgtgtgggctttttttgtttttgtttt

SEQ ID NO: 2856 - DNA, 120 bp, synthetic construct
  source 1..120: mol_type = other DNA
tcatgctgcaaaaaggctagagaaacgtggtgctcttgtcacttggatctgccacctctgaacacagcagaaatggcaggaggttgtgggcagcaggtgacagaagcccagaagtgacca

SEQ ID NO: 2857 - DNA, 120 bp, synthetic construct
  source 1..120: mol_type = other DNA
taggaagagtgggtagagagaagggagagacttaggtccaaggagaatggggaagccaaatcccacataggaatgctgtgtgaggctgtgcaggttgttcactgcacaaaagtgcatttg

SEQ ID NO: 2858 - DNA, 120 bp, synthetic construct
  source 1..120: mol_type = other DNA
aatgcttcctgaattttgcttttacagtaacttgtattcattcatgcatttttcaacctgctcactccagttcaaggtctttggtggctgaagcctaattcaactcctcatagtgtcagg

SEQ ID NO: 2859 - DNA, 120 bp, synthetic construct
  source 1..120: mol_type = other DNA
taggcatgcctcccaggtgtgctttatggggtgtgatgatccacttagagaacatcttgatcacaactgactctcaataaatgcacaaaaggtatttatgtaagtgtctcttagatattg

SEQ ID NO: 2860 - DNA, 120 bp, synthetic construct
  source 1..120: mol_type = other DNA
gcaggatcaaccctgctagcctttaccagctcttaactcacttctccagctagtctcagcagccacccggttatttgcaagataaatatctagtctcatcactctcccactttacccttc

SEQ ID NO: 2861 - DNA, 120 bp, synthetic construct
  source 1..120: mol_type = other DNA
tttacctctgcctctttcccctctccccacccatccttatcattgttttaagatccccctcgatccatcttcctgctgaacctgcaattccttttctctccttttctcctctatccagcc

SEQ ID NO: 2862 - DNA, 120 bp, synthetic construct
  source 1..120: mol_type = other DNA
tcccaaaggtcagccaatcctccaaacacccccatctaccacattcctgagcagacgggcctgtgcttcaggcaggtaataggtaaaataaagcctgctatccttcaccccacaaggctt

SEQ ID NO: 2863 - DNA, 120 bp, synthetic construct
  source 1..120: mol_type = other DNA
acgcagttctgatgtgtcccttcaaggtcaaggccaaattgtggaaaacagtaaccactaaccacagtcttcagccactctcaccacagtgagtcagaacgggaatcactgttttcaatt

SEQ ID NO: 2864 - DNA, 120 bp, synthetic construct
  source 1..120: mol_type = other DNA
aggaaaagaaaaatatccaggtatctgttaagaaacctcgaggtttagtggaaaatcactgctgtgagacccacctcccagcaatcccaatccaaaagtcaacaggactgatgatctcta

SEQ ID NO: 2865 - DNA, 120 bp, synthetic construct
  source 1..120: mol_type = other DNA
tctgctgctcaatcccccttatctcttctttctccaattctaaacagtgtcagcatggtactgtgtggaacttgaccctgtacaagctggggagcaaacatgctgagagcgctaactcct

SEQ ID NO: 2866 - DNA, 120 bp, synthetic construct
  source 1..120: mol_type = other DNA
gattttgtacctggcatcatgctgggcattggagacacaaaaataaaatatatggtccctgtcctcaggtagctgagactctaatagctaaatgtatggccacatcttgaatatatgaga

SEQ ID NO: 2867 - DNA, 120 bp, synthetic construct
  source 1..120: mol_type = other DNA
aataccccagcctaggaagccttgggttggcctcaactcaagacccatgaaatccttacccttcccagaatttatttgttcattttctctgtgtgtgtgtatgtctctttctctttatcc

SEQ ID NO: 2868 - DNA, 120 bp, synthetic construct
  source 1..120: mol_type = other DNA
gagtcagagtaacagtgccacatatacagggagaggagaaactttcttcttctgcattctgaaaaataattccaataactaggtatgtcccttgatctggaatagcagagtttgggcttt

SEQ ID NO: 2869 - DNA, 120 bp, synthetic construct
  source 1..120: mol_type = other DNA
aagtttgaaaaccactgggcctgaaaatctagccacaacagaaactgaaactaggatctggggaaagttaacaaggggaggagaaagattggaaagtattacaagaaaaacttgggattg

SEQ ID NO: 2870 - DNA, 120 bp, synthetic construct
  source 1..120: mol_type = other DNA
cttttcgaagtcccaccctttcaagattagagctatgtaaataatatatacagagaagaagagagtgggagaaacactttaaaatgttagcagtgcttgttttagtgaggagcagccagg

SEQ ID NO: 2871 - DNA, 120 bp, synthetic construct
  source 1..120: mol_type = other DNA
gagacagagaaaaaactggtttgcatgtactgatgacaaggaggtgggagatgaagttcacagactcaaaattattgcaacagcctagacagcttggcccaaaccaaaaaagataacatt

SEQ ID NO: 2872 - DNA, 120 bp, synthetic construct
  source 1..120: mol_type = other DNA
ttctgcaacaatgataacagctaacagtgatgaccaacaatggactggacagcctcaggaagtactgagctctctgttaccaggtgttccaactgtgtgggaccaatgcttgctggagat

SEQ ID NO: 2873 - DNA, 120 bp, synthetic construct
  source 1..120: mol_type = other DNA
ctaggcactggccgcggcctcggcagcccccggggcagctgcgcgtgctgcagtcttcccctgagtagcctgcgtcacacacgcacacgccatcctcgcaaaggccgtgcccacggcagt

SEQ ID NO: 2874 - DNA, 120 bp, synthetic construct
  source 1..120: mol_type = other DNA
agcctatgtagtgctcctatgtgcaggcccctagccaggctagcctcatctcataaggccatgtctgctcccagttgctagtatgtgtaatgtatgcagcctctcagggccctcgcatat

SEQ ID NO: 2875 - DNA, 120 bp, synthetic construct
  source 1..120: mol_type = other DNA
ccacccacaagtaatctacccaactcacatgcatgtaaaaattcacattccgcccaaccctaaaggataccctccctgggcaagtctgttctctacctctctgatatcatttatttaccc

SEQ ID NO: 2876 - DNA, 120 bp, synthetic construct
  source 1..120: mol_type = other DNA
ttctctcaatgctacaatgggagctccttgagaacaaggacctcatctatcccaggactgctgtatacttgtgtctggcacataaatgttctatctgacacatcaatgttgaatgaatta

SEQ ID NO: 2877 - DNA, 120 bp, synthetic construct
  source 1..120: mol_type = other DNA
tgatcaaatatcaagacttattttaaaggtgcaaggatagacagatgaaacagaatagggcccagaaacaggcccacacatatgtggtcaactaattaacgacaaaagtgcccctgcagt

SEQ ID NO: 2878 - DNA, 120 bp, synthetic construct
  source 1..120: mol_type = other DNA
aataagccaaaatcaggaaacctagttttttaaattgtcaaaagacaaacaggtactccagaaaagaatatagccaaagagccaataaacattttatttattttacctgggctcaagtga

SEQ ID NO: 2879 - DNA, 120 bp, synthetic construct
  source 1..120: mol_type = other DNA
cttcaaagaggctgtcattgcttgatattggcaagaatgtgaagcagctggaattgtcatctgttgcaagtgggagcatatattaatgcaaacactggaaagttgtttggtagtatctgc

SEQ ID NO: 2880 - DNA, 120 bp, synthetic construct
  source 1..120: mol_type = other DNA
ttatatcatggatctgagttgacaaatggtttaaagtacctctgacattactctcttcatcagggaaataggtgcaacagttagcacctagaaaggcacattttgggtctttgtcacgtt

SEQ ID NO: 2881 - DNA, 120 bp, synthetic construct
  source 1..120: mol_type = other DNA
accttaaaaaacctatccccaatctcacaccccctccagccaccacatatttctctcctctacttcatggccacagttgtcaaaatttatttgtatttgatgtttacatttccttatagc

SEQ ID NO: 2882 - DNA, 120 bp, synthetic construct
  source 1..120: mol_type = other DNA
tctactaaattaatagacctactgctctagtcatccacctggtaccttcatccagacttataacttcaatttccaaactatacaccaatttgtaaaacaccccagtcatcttcctctcgc

SEQ ID NO: 2883 - DNA, 120 bp, synthetic construct
  source 1..120: mol_type = other DNA
ctcagcccgccatttttttcacagggaagttttcctgaccaggtcaggtcctcctatcatgtgatatcacagcatcatgccattctcatgtgtagcgtttataacaatttgcaatcatat

SEQ ID NO: 2884 - DNA, 120 bp, synthetic construct
  source 1..120: mol_type = other DNA
actaagatgatgttgaacaaaagccagacacaggaaagagcatgctgcacagttctatttatgtgaagtttgaggagaggcaacattaatctgtagtgctccaagtcagaagtgtgatac

SEQ ID NO: 2885 - DNA, 120 bp, synthetic construct
  source 1..120: mol_type = other DNA
caaagatgtgtacacatgtacacttacaaatatattaatgtgtgctcatccacaagtacaaacatacctgcacagacacacaaatccacccccaaaacctgcatccttgtaggtacacat

SEQ ID NO: 2886 - DNA, 120 bp, synthetic construct
  source 1..120: mol_type = other DNA
aatccagataccccttattctggggagctaatcggcctgggaatggaaaaattaagagaaaggatttccaggccccagctgaaaatggttaggggtgcaatgagagacaggaaggcagtt

SEQ ID NO: 2887 - DNA, 120 bp, synthetic construct
  source 1..120: mol_type = other DNA
cggtcttacctcccacgtcctttccctatgccatttttagctcaccctaatttttgcccaacttgacaccccccacccttcctgccatttcttttttccccaccatttctccacctgctg

SEQ ID NO: 2888 - DNA, 120 bp, synthetic construct
  source 1..120: mol_type = other DNA
gacacaccccacataagtctgttgggtgtttccctagcttcatctccccatgtgctgccctgacaaggagctgaaaaagagactttgctacagaggagaaatatcccagctgagtgggaa

SEQ ID NO: 2889 - DNA, 120 bp, synthetic construct
  source 1..120: mol_type = other DNA
gagagaaatgtgggattccagatgtacacaagcttataaggcatttggggaagccactggaagcttagcagatatagtttcaggttctgaaattatctttgtttaccatttgattcaccc

SEQ ID NO: 2890 - DNA, 120 bp, synthetic construct
  source 1..120: mol_type = other DNA
cttgtacaaagaagggtggagaatccagatttttgaaacttttctgcatccagttattgtgtagattcacttagaagaaatggcatcagatggggaagggggtggtcaacattccattat

SEQ ID NO: 2891 - DNA, 120 bp, synthetic construct
  source 1..120: mol_type = other DNA
aaaacactttacttgagattgggactacaagtggtataccaggaattgcgacttccattccttcccagacaaaaggaaagttaaaaagttataattcttagaaaggaagaaacagaacta

SEQ ID NO: 2892 - DNA, 120 bp, synthetic construct
  source 1..120: mol_type = other DNA
ggtgactcatttaaagtttgtatggctttatggagattcttagtccaggaacttaaagagccaacctgaaacagtgcacacatctgggtctttaacaggccattatttctttctgtaagt

SEQ ID NO: 2893 - DNA, 120 bp, synthetic construct
  source 1..120: mol_type = other DNA
gaagcagtggatggggtggggaagatacaaaagaagaaaaaaacagtgatgaataatggttcaaaaagaggttgtgataactgctaatgaggtagagagcaaagaaaggcaggaaagaag

SEQ ID NO: 2894 - DNA, 120 bp, synthetic construct
  source 1..120: mol_type = other DNA
agataagcaaactaaggctcagaatgtttaaggacatctactaacgaaaggcagggtagggaatccagcttaggtgatgtgcttccaaaatccttgttctcactgcaccccctccagaga

SEQ ID NO: 2895 - DNA, 120 bp, synthetic construct
  source 1..120: mol_type = other DNA
aagttgtttatttaataataataaaaaagaaatgcacacacataaacctgaactcccccccaccccaccctcccttactcccagtaactagctccaaaatgaaaaaacttcccttgtccc

SEQ ID NO: 2896 - DNA, 120 bp, synthetic construct
  source 1..120: mol_type = other DNA
aaacaggatggcagggacagagtttggtgcaggggcaaggagagggtaggaaaagaaaagggcattgagtgtggggtcacacaggagaggacatcaagagaaaaaagtaagtgagagtct

SEQ ID NO: 2897 - DNA, 120 bp, synthetic construct
  source 1..120: mol_type = other DNA
agggaggtataatcccactggtgacagtaatgacaggcacaggacagctactgggggtacagctcttgaaagtggaatttcacttaataagtaagcaccccaccccacactcacctttct

SEQ ID NO: 2898 - DNA, 120 bp, synthetic construct
  source 1..120: mol_type = other DNA
ggtccctacatacaaaaaagacagtgcatcacctagagcctagaactcagtaagcacttaatagtcactatttctaccagcattatcaccatcatctactctccactggaaaaataatgg

SEQ ID NO: 2899 - DNA, 120 bp, synthetic construct
  source 1..120: mol_type = other DNA
ggaagaactttctccatgctggtggaaactctttccttcgtaactctttcttcctgtcagcccacatttgtagggttcaaagtttaaccttgttatactgcttatacagtttacctgatt

SEQ ID NO: 2900 - DNA, 120 bp, synthetic construct
  source 1..120: mol_type = other DNA
ggtggggtccttgtgtccacacccacacaagagcacccaaggattgggcagcctcaatggctgcaagctctctgacagggtcaatgcagcccgcctccttttctcctttttttctttttt

SEQ ID NO: 2901 - DNA, 120 bp, synthetic construct
  source 1..120: mol_type = other DNA
tcagagttgacggaagaacatggagagacaggttctatcttggtctggacatctgtgggaggcaggatgaggcaaaagctggatatcatgtaaacactgaagggttaagagggttaagat

SEQ ID NO: 2902 - DNA, 120 bp, synthetic construct
  source 1..120: mol_type = other DNA
aaaacccttctgagggccagattcagcccacaggtcaacagtccaccactacctctggtccataccgttcactttggtacttaattatatgatcactaagattgctttttaaaacttcaa

SEQ ID NO: 2903 - DNA, 120 bp, synthetic construct
  source 1..120: mol_type = other DNA
tataggtaccattcccattagttgcttttgccccaaacctaaattcatccctgtgacatctctggtgattactaatacagcagtagagtctgtatgcttgggcttgtttcaccaatattt

SEQ ID NO: 2904 - DNA, 120 bp, synthetic construct
  source 1..120: mol_type = other DNA
caaaactctccaaaagcaagaactatgtctcatgtccattgagggtaaagtacaggccctcaaaaaatacctaagtatggaggagaatctgactctaataacactatgcaatgcaaagcc

SEQ ID NO: 2905 - DNA, 120 bp, synthetic construct
  source 1..120: mol_type = other DNA
tctctccaatgtccaggaggtcacaactcatctattccacttcattctttctcaagtctgctttcttcatgacatccgaatatcttacttgatcaactgcataagcttcttccttggttc

SEQ ID NO: 2906 - DNA, 120 bp, synthetic construct
  source 1..120: mol_type = other DNA
tttctatcctagaatgaccacacctgtattgactggtacttgtctttctcccattaccaaatcacagggtttgaaagtcagcatggtggtcaggtcttgttcatctttgcattcccagca

SEQ ID NO: 2907 - DNA, 120 bp, synthetic construct
  source 1..120: mol_type = other DNA
cagaaagaagggcaaaaaacaagggagatgttgacagtaagagcgagaacaaaagctttagaagtttagggcttacaagccatcaattatttgacattctggtctgaatggtactgacca

SEQ ID NO: 2908 - DNA, 120 bp, synthetic construct
  source 1..120: mol_type = other DNA
taaccaaaggggatgtggaaaatgaagatattaaggaaacggcaaaggtagtggagaaggccccccacacctcacacacctcatgactcatagcacacaaatcatttaaatcatttcttt

SEQ ID NO: 2909 - DNA, 120 bp, synthetic construct
  source 1..120: mol_type = other DNA
ccaaacaggctccagtgataaagcgcctgggagatgtagtacccagtattaaggtccaccatctcccccagccactactaagtttagtttagacagcttctatgtgtcctcggagataga

SEQ ID NO: 2910 - DNA, 120 bp, synthetic construct
  source 1..120: mol_type = other DNA
cagtaccagagatcagaagcttgaagggcctctggcatctgactggttgatccatgagacttatgagagtctccttcaagttcagcaaccagtttttcagctccttgagtatgctctaga

SEQ ID NO: 2911 - DNA, 120 bp, synthetic construct
  source 1..120: mol_type = other DNA
gagtgaacagttttggtcagaaagggatgaaccaggttcaggtcagcacctgaaaagaaaaccaaacaatgctaatagcagggttcttatttagactcctttctcgtcctttcccattct

SEQ ID NO: 2912 - DNA, 120 bp, synthetic construct
  source 1..120: mol_type = other DNA
gagccgagatggtgccactgcaatccagcctggcgacagagcaagattcccgcctcaaaaataaataaataaataaataaaaagccgggcatcgcgcacgcctgtaatcccagcaatttg

SEQ ID NO: 2913 - DNA, 120 bp, synthetic construct
  source 1..120: mol_type = other DNA
tttagtttatcctacattttacatgtataactggtgtgacctgctccactggatgttgcaggttctcctcctaatagaagatgtagagacctattgtgattcagtcttgcttgtccagct

SEQ ID NO: 2914 - DNA, 120 bp, synthetic construct
  source 1..120: mol_type = other DNA
caatagcaggaagtattgtttcatgttcattacctgcaaggatacaggtgcatatttggcctatcccctttttgctttctctgtggacctgatcgttatttttatccagctcactgaggt

SEQ ID NO: 2915 - DNA, 120 bp, synthetic construct
  source 1..120: mol_type = other DNA
tttaaaaatatggcccatcaagaggtaagcacaaacttaaagttttagaagagttccccagagaagatagccatggacctgtagattccccctagtcttaacttgagaaacacaggacta

SEQ ID NO: 2916 - DNA, 120 bp, synthetic construct
  source 1..120: mol_type = other DNA
aaagatacataaagaggatgacaagtgaaatttgcttatctgttgggatagatgcttggactggaaagtggggaaacagcaatgtctctctcctctccctttcccctaaagatttgagaa

SEQ ID NO: 2917 - DNA, 120 bp, synthetic construct
  source 1..120: mol_type = other DNA
ttaagtgaagaaaattggactgagggaaaccatatttgacaagtttctggggatttacctgcaaatatatttacatcttacctggagtcacttccctccttccttttttctgggtcctcc

SEQ ID NO: 2918 - DNA, 120 bp, synthetic construct
  source 1..120: mol_type = other DNA
tgagctggttggaagtttttacactctcacattcccctgcgttctatactcaccacatggaaccatatgctgcacttattctcttccatttattatctgcatgagagacaaaaattctag

SEQ ID NO: 2919 - DNA, 120 bp, synthetic construct
  source 1..120: mol_type = other DNA
aaatcaataaaatttaatacaatgtcaggcactaacaagtgctatgaacaccatgaagcagggtgaggggtaagggaatgggatagaaagtgctcccaggtatgcatggtgctatattta

SEQ ID NO: 2920 - DNA, 120 bp, synthetic construct
  source 1..120: mol_type = other DNA
attttaaagatcactctggtttcttcatagagggtaggccacatcagtaaaaaatagaagcagaaaatccaattaagggacaaaggaagggacaatggaatcatgggagcttggattagg

SEQ ID NO: 2921 - DNA, 120 bp, synthetic construct
  source 1..120: mol_type = other DNA
cattctttactatggctgtgaaataattatttattgtgtcctccagttgcaaggagtttaacagcatgcctggccgctgctcactagacgctaggagcacctcctcagttgtgataactg

SEQ ID NO: 2922 - DNA, 120 bp, synthetic construct
  source 1..120: mol_type = other DNA
caccacacccggccagtgttactattttcttagtgtttatacaggtttaggttatatgcctacatgcagtatggcattcaccaaagtctatcagtaactaattttgtttcaactagaggg

SEQ ID NO: 2923 - DNA, 120 bp, synthetic construct
  source 1..120: mol_type = other DNA
ttcaagagtgaatgagaggtgagaaagtagaggcagtgagaagttttgttaagtggagagagaagtggaacactgagggagtgagctgggtcagggaagagtttttaaatttaaaaataa

SEQ ID NO: 2924 - DNA, 120 bp, synthetic construct
  source 1..120: mol_type = other DNA
taccatgttgaaccttggaatctaaactgggtaatgaggaaagtgaagaattgagatcaaacaatgaaaagtaagttagtggatgggaggcccagatggggttgaagaatttttgggata

SEQ ID NO: 2925 - DNA, 120 bp, synthetic construct
  source 1..120: mol_type = other DNA
actgccagcacgctgtcacctcagtgtgaccaatgccctatattataaatgccattttttgaattggaaatgatccagacattcaacaagtacttaaaacaattttaaggttttaaacta

SEQ ID NO: 2926 - DNA, 120 bp, synthetic construct
  source 1..120: mol_type = other DNA
gtgagccgagatcgcaccactgcactccaggctaggcgacagggtgagactctgtctcaaaaaaaaaaaaaaaaaaacccaaaatttatccgggcgtggtggcaggcgcctgtaatccta

SEQ ID NO: 2927 - DNA, 120 bp, synthetic construct
  source 1..120: mol_type = other DNA
ttgcctgattcctttcaattcaattgagttcaaagattggtagaggaggttttatctgatgaggatctgaaaaacagagataagccagatttgactcttgccttcaagtagctcacaagg

SEQ ID NO: 2928 - DNA, 120 bp, synthetic construct
  source 1..120: mol_type = other DNA
gtccttaaagtgtctgtaaacctgtgattcccaaccttagctgccctttggaatcacctggttatgtcttaaatactgatgccagagttccacccccagagattcttttttgtttgtttt

SEQ ID NO: 2929 - DNA, 120 bp, synthetic construct
  source 1..120: mol_type = other DNA
taaaggccagattaaaattttgtaaataattgagtaggcaatagggaaccttgaagggcttttgagcagtggagttatgaaagtgtgtttagggaggctgatctgacaatagtgtggagg

SEQ ID NO: 2930 - DNA, 120 bp, synthetic construct
  source 1..120: mol_type = other DNA
caggagaatagggtgtggatgcatattccaataagtcaagaaatagtgggtatgaaaaaaagacagatacagacatatctctgatagcaatattccgcacccccctgccccttttttttt

SEQ ID NO: 2931 - DNA, 120 bp, synthetic construct
  source 1..120: mol_type = other DNA
ggtcctacaccaggaacttcccaaatgtccttaaaaaaagcaaaaggaaaggttctgggattagcaagaaaataggcagatacctgggtggaggagggacaaaaatgtacttgcaaaaaa

SEQ ID NO: 2932 - DNA, 120 bp, synthetic construct
  source 1..120: mol_type = other DNA
ggcgtttttagggatcccagtagttctcgtggtgctgcgcggcgatgatgatgactacggtgaggatggtacagagcaccatggccgcgatgcccacggccagggagatgaaggagaagt

SEQ ID NO: 2933 - DNA, 120 bp, synthetic construct
  source 1..120: mol_type = other DNA
taaaagcacaatttttacctatggcttctcaaaataaagcacccattacccttccaggacacccataaattccacctaagcccctctcctcccttccttgcttcattaaccaccatattc

SEQ ID NO: 2934 - DNA, 120 bp, synthetic construct
  source 1..120: mol_type = other DNA
tccgagctagtcctgtgtgtgcgtatgcgtagacatgcaaccctgtgttaatatgtgctcaattcaacagttgtataaacacatgtgggatgacatgtgttccactctgctgttccttca

SEQ ID NO: 2935 - DNA, 120 bp, synthetic construct
  source 1..120: mol_type = other DNA
cagtttcctcctctttagaagagataaatacttgtgtgtgagagagaattgtgcagagttcagaactgcgatggtctgaaaagttcccagggtttggtgaacctaccaacctagcagtaa

SEQ ID NO: 2936 - DNA, 120 bp, synthetic construct
  source 1..120: mol_type = other DNA
aagcatgtatctatacacacaaaccaatatccaacagcttttacttggaactctagccatgagacaacatcataaatttactattttacaaaagatagttggatcaggccgggtgcagtg

SEQ ID NO: 2937 - DNA, 120 bp, synthetic construct
  source 1..120: mol_type = other DNA
acaaatttagaccaagcaatgaccttgtaaacagagagaggggctcagacatgctgagaaatccttatctctagagaaacgtctttaaatgctaagtaaaagccctagcaagtaaaagcc

SEQ ID NO: 2938 - DNA, 120 bp, synthetic construct
  source 1..120: mol_type = other DNA
gaggccttctttccattcccagaatatgtttgctgctttttcctctccccactggcctaaatggatcgctccgcctgtttcctccccagcacctagggcgcaatggaatattccattgcc

SEQ ID NO: 2939 - DNA, 120 bp, synthetic construct
  source 1..120: mol_type = other DNA
tgcccttttgcttcctgttacccatggttcttggacataagggctaatggggcaggtaaaaacatcctagaactagaggcaggaggcccagcatctaattcgggctcagtcacttatatg

SEQ ID NO: 2940 - DNA, 120 bp, synthetic construct
  source 1..120: mol_type = other DNA
ctgaactggggcttccatggatcaggtcagttgcttccacctctgctacaaccaatagcagtgatgacaataaagataacttacatttattgagttatttgaacaggctctgttcagaat

SEQ ID NO: 2941 - DNA, 120 bp, synthetic construct
  source 1..120: mol_type = other DNA
tacattatcactactattttattactatccaccttgactattgctgcagcttccttattgggcttttcaccaccagtcttgcctcccttttctgcttctttttctaactgctgtttgtac

SEQ ID NO: 2942 - DNA, 120 bp, synthetic construct
  source 1..120: mol_type = other DNA
ttttataccattttatcacatttcctaccacctctttacttacctggactattataacagcctccagctttgtcccctccatcctattccttagaaaaaaatccatggctccatggtact

SEQ ID NO: 2943 - DNA, 120 bp, synthetic construct
  source 1..120: mol_type = other DNA
ctcatccctatttcccgacagtcccggtaaccaggcttttgatttttttttttaaattctgagtgagatgggaaggcactggacagttttcagtgaaggcaggacatctcttaaaatatt

SEQ ID NO: 2944 - DNA, 120 bp, synthetic construct
  source 1..120: mol_type = other DNA
ggctaatttttttgtatttttagtagagacggggtttcactgtgttagccaggatggtttcgatctcctgacctcgtgatccacccgcctcggcctcccaaagtgctaggattataggcg

SEQ ID NO: 2945 - DNA, 120 bp, synthetic construct
  source 1..120: mol_type = other DNA
ctgaatatgcgctcacagattattcaaatttttccaactgtccttacagaaaaaaatatacagtggaagatccaaatcaggatcttgagttgcatgatcttgttacgtctctttagtatc

SEQ ID NO: 2946 - DNA, 120 bp, synthetic construct
  source 1..120: mol_type = other DNA
agtaatgcatttttgatggggtttctacagaagtgaggtcgtatcttcagtgtatcacctcatgaagtacattatatccagtaaggtagttttgagtgtcctccctgctacctgtctccc

SEQ ID NO: 2947 - DNA, 120 bp, synthetic construct
  source 1..120: mol_type = other DNA
ttaaaaaatgtgcacaagaaagggccatacataataggtaaccagctggagtcctaaaaaagctggcatgctttgaacttctgcaggtgtttctatcctttctctgtttcctgctctaat

SEQ ID NO: 2948 - DNA, 120 bp, synthetic construct
  source 1..120: mol_type = other DNA
gggagagcctagtttctttgaggccccaggccctcttttaactacctttgaataggtgttatccctgtatttatggaaataaagttccatttcctcagtgtgacttggctcatttccagg

SEQ ID NO: 2949 - DNA, 120 bp, synthetic construct
  source 1..120: mol_type = other DNA
ctaactctcccctagtctgttttgggttcaagggggtactggtggtgttacagagctcatagcttctgatctggggagtccagaaataggggcctcagagggttggaaagatacttctag

SEQ ID NO: 2950 - DNA, 120 bp, synthetic construct
  source 1..120: mol_type = other DNA
cagctagggttttgaaggtatgaagttataagagggcatgttaaagacaggagggttggccaggcatggtggctcacacctgtaatcccagcactttgggaggccaaggcaggcggatca

SEQ ID NO: 2951 - DNA, 120 bp, synthetic construct
  source 1..120: mol_type = other DNA
ttatgatgctgaaaggatcatgatatgctaaggacaggatagtgttgggttgtacacacaggtgtaggcaatcctggtggctagtatgtaaaagtgaatgtcctgactcccttagagggt

SEQ ID NO: 2952 - DNA, 120 bp, synthetic construct
  source 1..120: mol_type = other DNA
ttttcggtaactagacgtggatgaatgtaggaccagcatcaccctctgctcgcaccattgttttaatacggcaggcagcttcacctgcggctgcccccatgacctagtgctaggcgtgga

SEQ ID NO: 2953 - DNA, 120 bp, synthetic construct
  source 1..120: mol_type = other DNA
gggggcaggttgcctgggcaagaactgcttcttcaattccttaacaaatgcaaccaccaacacccagatctctctctctctttattttcagtttttttgctgttatccagataattaata

SEQ ID NO: 2954 - DNA, 120 bp, synthetic construct
  source 1..120: mol_type = other DNA
tcctcacaaatggatgagtccattgaatccatggactttggagtgggggggatttgttccaaagaatggatgagtccactggccaatgtggggtagaggggtagagaagaccacatagga

SEQ ID NO: 2955 - DNA, 120 bp, synthetic construct
  source 1..120: mol_type = other DNA
ggagaaagagggtcaaagaagacaaatacatatggaggagtcagaataggtgtgatgttataatgggacctttgaggcccactggccctgcatatcagtttatttacaactgttctactc

SEQ ID NO: 2956 - DNA, 120 bp, synthetic construct
  source 1..120: mol_type = other DNA
tctctggtctctctcagtcttttctacacacaccatgcccccttcccccaatccactactcactttgtacccttaggttccctcattgcccaagaccccttgcccctcacttcatgttct

SEQ ID NO: 2957 - DNA, 120 bp, synthetic construct
  source 1..120: mol_type = other DNA
agcagtttctaggttaaatctaagccgcctgtgttcctaaccactccattacgctgacactggtatgtattgcatatatatatacgaacacagcacacagcatatatggtgattgtgaca

SEQ ID NO: 2958 - DNA, 120 bp, synthetic construct
  source 1..120: mol_type = other DNA
acagcttgacaagtaagatgaatttattaggacttacacacagggtactcctggatgtagcaggacagctccagagatccatgcagcctcctgtctctaaatggcttttttttttttttt

SEQ ID NO: 2959 - DNA, 120 bp, synthetic construct
  source 1..120: mol_type = other DNA
cacagagatttttctgttagcacagatttttctgaaacacagagcatttccctgtcttgcctaaaggctcttcttgataagttgacttctgcttacatcttcgaccacatcctcacaaaa

SEQ ID NO: 2960 - DNA, 120 bp, synthetic construct
  source 1..120: mol_type = other DNA
attctaaggctgtatacccacccatagagccacagttaatgacagagatggcggttctgatcacaaattagatagttatcctcttgagtagaagtgactactaaaagaagtcactgagaa

SEQ ID NO: 2961 - DNA, 120 bp, synthetic construct
  source 1..120: mol_type = other DNA
gcaattctgatagaaaataacacaccatttctacacagcctatggatagcattgggacaacctagttgcacacaagccattaaacatgtcaaaggcacacagactcaatgtagaaaacat

SEQ ID NO: 2962 - DNA, 120 bp, synthetic construct
  source 1..120: mol_type = other DNA
tctcttttaactgccacttttacttggtctctttttttctcaactccggttatctgctgcttattccccccaactattcttaaggaccccttttcccgtacccattcaattctaaacatt

SEQ ID NO: 2963 - DNA, 120 bp, synthetic construct
  source 1..120: mol_type = other DNA
agctttcctgctctgaaggtttaaaacggagttgaagtcaatcctgttctactctgtgtacaacattaagaaaggggtgggcctttagttcagttttgctctgtaaatcacctaatatgg

SEQ ID NO: 2964 - DNA, 120 bp, synthetic construct
  source 1..120: mol_type = other DNA
gttttacctaaccaccattttccgtcaagttttagccaatgagttgatttggagccatacgctccaaagtccaatagcaatccggacattctctaaaagaggaagcgaaggaaagaaagg

SEQ ID NO: 2965 - DNA, 120 bp, synthetic construct
  source 1..120: mol_type = other DNA
aaggaaattagaaattaacttgaaaggcagaaaagagagggcacgaaaatttgtatgtgtttgttggggagaggagaaaggagagggttgagtgtgttgaggatggacagagctttaggt

SEQ ID NO: 2966 - DNA, 120 bp, synthetic construct
  source 1..120: mol_type = other DNA
tttccctgatttcttgatttgatcttcaaaggtgggcaaagttccctctgactcttcccccactccccatcttactgatttaatttaatttttcactccccagagtctaatatggattct

SEQ ID NO: 2967 - DNA, 120 bp, synthetic construct
  source 1..120: mol_type = other DNA
taatcatcattgtggggggctctggttgtagaagaaagcttggcaaggtggggttatacaggagagagattatacaggagagagttggtctgaggccagaacagttcaagggaaaaagaa

SEQ ID NO: 2968 - DNA, 120 bp, synthetic construct
  source 1..120: mol_type = other DNA
ggagactatttcaaaacccttgtctttttgtctccatatcttcagataccctctcttcctcctcagctcctagcctgcctttccctcgttagccctctgccctccctgttgctagttatg

SEQ ID NO: 2969 - DNA, 120 bp, synthetic construct
  source 1..120: mol_type = other DNA
aggctgcatagggttgggcagctccagttgcagaaggaaacaccaatttagcatgtttgctttcttgctttttttgcctgcttatttttagcatatctagttgagaatccaaaacaacaa

SEQ ID NO: 2970 - DNA, 120 bp, synthetic construct
  source 1..120: mol_type = other DNA
actaccttattgggaacaccagccgtgagttcagaggcagaatctacaatttctggcttcccaggaatctctgaaggaggaaaaatccagtcagaggctgtaattgtgaaggttctcaaa

SEQ ID NO: 2971 - DNA, 120 bp, synthetic construct
  source 1..120: mol_type = other DNA
attgggcctgcatcatgaaggcaaggctggggaacaggagagaaacctgtttggaacttcgtgaaagaaaatcattttttttctggggtttctcatgttttttgaaaaaaattctcaact

SEQ ID NO: 2972 - DNA, 120 bp, synthetic construct
  source 1..120: mol_type = other DNA
attttcaaatagtagttttttaaaaaattaaagacatgtcactcacaggggaagatggcatcttcaatttcctcaaaattactgagtccagccctgcccaagggttgtgggaagaagggg

SEQ ID NO: 2973 - DNA, 120 bp, synthetic construct
  source 1..120: mol_type = other DNA
gagagagaaagacagaggagaaaaaggggtctgagaaataggtttctcggtatgtgtatgtttctgtgtaagaaagaaagcgagagaggaaaaagatggaaaaaagggagagacagaccc

SEQ ID NO: 2974 - DNA, 120 bp, synthetic construct
  source 1..120: mol_type = other DNA
agagagggaagagtgtaatagagcccgtgatggtagaggatgaaccacaactctcaactcttgtggggacatgctactatactccaattatccacaaaataacattccaacacacagaaa

SEQ ID NO: 2975 - DNA, 120 bp, synthetic construct
  source 1..120: mol_type = other DNA
ccaagttcccaggctttggttccttccccagtccccctgactccttactttcctcagggccccaagttgtcacactctagccctataatgaacagggttctgttcccagagttgagcaat

SEQ ID NO: 2976 - DNA, 120 bp, synthetic construct
  source 1..120: mol_type = other DNA
gatggtctagaaaggtaggaggaggaatctgggagtggatggagaaaggaaagtgacttggtaggtttcagagggagagagacagaggctggggttgagaagagtcagagtttgaggtgg

SEQ ID NO: 2977 - DNA, 120 bp, synthetic construct
  source 1..120: mol_type = other DNA
cagttcatatttcttgttctaatgactcccctccctgttctacttaattaaaaccgaagaggggggctgggggagataattagggaggtctccagccgctgcttaatgagccagtaatta

SEQ ID NO: 2978 - DNA, 120 bp, synthetic construct
  source 1..120: mol_type = other DNA
ttaaatccctgttccatctcgcctgttcccagagtttgaggactttcaccctgtccagttcccagggaaggtgatgtgggagatgaatattgagatttgtgccgtgtctttcagtctctg

SEQ ID NO: 2979 - DNA, 120 bp, synthetic construct
  source 1..120: mol_type = other DNA
gccctgatgccaaaatatgtccattctagtcaagcagtggtggttgaagcgggaggagtggacagggggctaggccagtggcccgtttcctctctgtgtgtctctgttcctgcctcagtt

SEQ ID NO: 2980 - DNA, 120 bp, synthetic construct
  source 1..120: mol_type = other DNA
caaaaaacaaagaaggaacctatttgaactggagaaagaaggtggatgctgcaggattgagagactttatggattttaaaagaaacaaagatggagagtgtcctcaggaaacacacacac

SEQ ID NO: 2981 - DNA, 120 bp, synthetic construct
  source 1..120: mol_type = other DNA
taccaaatagagtacgggaagggttcattttggaaacttatagtttagtgcagacaaggggcaggggaaattttattttgggcataagagatatagatatggaacaatgagaggctgagg

SEQ ID NO: 2982 - DNA, 120 bp, synthetic construct
  source 1..120: mol_type = other DNA
gtagatattattggctttcaaaatgcctcatgactccatgtttcaaacctagcaacatattgctgcaaggtggacaaagtttcaagatactctctccatctacttgacttgtggccttag

SEQ ID NO: 2983 - DNA, 120 bp, synthetic construct
  source 1..120: mol_type = other DNA
gcatacattcattttaggagagaaactaaactcacaacccttcattttgggggatccatcttaaaaccaggaaggccttccagcctgccttttaatgggtaatcatttttggaattcctc

SEQ ID NO: 2984 - DNA, 120 bp, synthetic construct
  source 1..120: mol_type = other DNA
tggcccctatcccttcaggctttgcgggttaccgcactttccatctctcgtgcgcctgactgttttgtgggaagccctctgtcccatctaaccctgttgtcctgggcatctttatcggct

SEQ ID NO: 2985 - DNA, 120 bp, synthetic construct
  source 1..120: mol_type = other DNA
atctgttggtaagacagagtaatgggtcaatctaaaggacacaacaagggggaagggacaacatgtaagctcagagagaatcaaaacctgaggtgttgggaagctaagttctggctctgt

SEQ ID NO: 2986 - DNA, 120 bp, synthetic construct
  source 1..120: mol_type = other DNA
aaattatttcctctagttctgatattaaaggactctctgattctaatagggtcaaaggactttttttttttttcttggtctgggttgactcacataccaggtccacgggtgtccaggtca

SEQ ID NO: 2987 - DNA, 120 bp, synthetic construct
  source 1..120: mol_type = other DNA
ggcagggggtgctggtgggagagacagagtcacaaagagaggccactcctggtgagactgattactattgggagacctttggacaagtttagtagccggtctttgcctcggtttccttat

SEQ ID NO: 2988 - DNA, 120 bp, synthetic construct
  source 1..120: mol_type = other DNA
ctttcatgtactatgaattgtctgatacaaagactattaggtattctcagtctggtagagaagataaaccatccctttgttggagggctatgacagaggttaggataatgtgcttaggga

SEQ ID NO: 2989 - DNA, 120 bp, synthetic construct
  source 1..120: mol_type = other DNA
aaaacctgactcttttcttcaccctagaaagaattccccatattttgtgccctctagggctttggttgctaagtgggggcagctgtggagcaatgagcttagtcaagtcctggatggtag

SEQ ID NO: 2990 - DNA, 120 bp, synthetic construct
  source 1..120: mol_type = other DNA
tgcaacttgcattattcttcccgctctccatcaagcaaactcttgggttaagacggtgcagagggtcctagattctcatatctaaaaggcgcctcagagagcatcaagttaatcattttg

SEQ ID NO: 2991 - DNA, 120 bp, synthetic construct
  source 1..120: mol_type = other DNA
agctgacaattgtattttagctcacaaagatctcaaaccctaatattgtcactatccaggatctaaaccttttagctctgttgtggcctctctggaggaaggattaggaccatgaatcat

SEQ ID NO: 2992 - DNA, 120 bp, synthetic construct
  source 1..120: mol_type = other DNA
cggccggctgttatattattatcttactccttagaaataggatcatatgtcttcctcttcctctggagagggaacaggatacaggaggaggacttaagtagatgtaagttattattaata

SEQ ID NO: 2993 - DNA, 120 bp, synthetic construct
  source 1..120: mol_type = other DNA
agtcccaaacaatctctatgacacactgccaccaaacacagcaccatttttggtaaaaccttcctcccctgctaaatacctaccaggctctctcatactttattaattcataagcatcta

SEQ ID NO: 2994 - DNA, 120 bp, synthetic construct
  source 1..120: mol_type = other DNA
cattttatttgggttatctcattcgatttttactttgcacgtaaggaagctgagtctctgaaaggttagtgacttgtgcaagtcaaatagctataggtggcagagctgggaatcaatgaa

SEQ ID NO: 2995 - DNA, 120 bp, synthetic construct
  source 1..120: mol_type = other DNA
attgcaaaagaagaactcaaattatccatgttcacagatgacataatcctatatttagaaaaacctaaagaaaacactggttataaacaaattcagtaaagctgtaggatacaaaatcaa

SEQ ID NO: 2996 - DNA, 120 bp, synthetic construct
  source 1..120: mol_type = other DNA
accaagtacacacactggggaaaggacactctcttcaataaattgtgctgggaaaactggatatccatatgcagaagaaactaaacctaggccgggcggggtggctcacgcctgtaatcc

SEQ ID NO: 2997 - DNA, 120 bp, synthetic construct
  source 1..120: mol_type = other DNA
acagcaaacaccaccactaccaccaccgacaaataatgtggtttaaaaaatgagcaaattatctgaacagacatttctcaaaagaagacatacaaatggccaacaggtatatggatgcaa

SEQ ID NO: 2998 - DNA, 120 bp, synthetic construct
  source 1..120: mol_type = other DNA
agacaaatattgcatgtctctcaccttcacctttgtgccactgccttagttagtcctgacctttcttgcattccaggtagatacttgcatcagcctcctattgcatgtgtaatattgctc

SEQ ID NO: 2999 - DNA, 120 bp, synthetic construct
  source 1..120: mol_type = other DNA
ctaccgtttgtcaataacaaaagaaaataaaatggcaaccacacacacaaaaaagttgtggttctgagcatatgaatcaggctgcttagacttgaatgccagctttgcctctcctggctt

SEQ ID NO: 3000 - DNA, 120 bp, synthetic construct
  source 1..120: mol_type = other DNA
aaataaataaataaataaggtatgtgaggaggaggaagggtgtattcagggcccaatctctgggtgtagaggcctttaccttggggaccactaacattcctgggtggagactggtctggg

SEQ ID NO: 3001 - DNA, 120 bp, synthetic construct
  source 1..120: mol_type = other DNA
ggttggtgttgcttgaattgcgttaaatgaggtaacaggaattgtgttaggcttctctgattgcacaattcaacacctctgcaatcaagaactgatttgtctgtgtggttttgattctca

SEQ ID NO: 3002 - DNA, 120 bp, synthetic construct
  source 1..120: mol_type = other DNA
tcgatttttaatgtttgctgacagctttcaaaacccattattctctttgatctatctgcctcacatttaggtcagcctataagaaagtgtatttaatctatggatcacttttggtagtgt

SEQ ID NO: 3003 - DNA, 120 bp, synthetic construct
  source 1..120: mol_type = other DNA
tctgcaacagtttatgtaaacctgtattggaatgacaagaagtacgatattattccaaatcttgtactcatgctagttcatatcctatgccactctgtggtctcttcctcatcaatgtcc

SEQ ID NO: 3004 - DNA, 120 bp, synthetic construct
  source 1..120: mol_type = other DNA
ggcctgtgacctcagtcacactgtacataggacatacaccccccacccccatcaaaacgacagctcactgccatccaattaatttttatttatatgatattttattgtttttagataggg

SEQ ID NO: 3005 - DNA, 120 bp, synthetic construct
  source 1..120: mol_type = other DNA
ctttctgtaacttacttattttctgtctttctttagaatgaaagctctacgagagcagttgctttatctcttttgctttgtgtttcccccagggcctggaacagtagccacacaaagtag

SEQ ID NO: 3006 - DNA, 120 bp, synthetic construct
  source 1..120: mol_type = other DNA
ccctattgcctttaagatattgtttaactttctcagaatgatatgcagagtcctgcaggacatgacatttgtacaacagctgtgtttctcatctttgccttgctgtacccttaactctga

SEQ ID NO: 3007 - DNA, 120 bp, synthetic construct
  source 1..120: mol_type = other DNA
tctctctgtattagacttaaagtcacatgaagatggcaactgtcttactcagatttgcctccgtatctggcatagtaggcagttggtaagtgcttgctaaataagcaagtgaatgccttt

SEQ ID NO: 3008 - DNA, 120 bp, synthetic construct
  source 1..120: mol_type = other DNA
acctacctcatggtactgttaaaaagattaaatgacataacgcctgaaaagtactcagccaaatggctagcctggagtaagtggtgaataagtgtagttattataatagcaggggacaga

SEQ ID NO: 3009 - DNA, 120 bp, synthetic construct
  source 1..120: mol_type = other DNA
ctggaccttggcttcctttcttttcttgcctgaggagtctgcttctgaagctccttgatatctacaatgttgtcccttgggttaccgaaccgttttctcttatttctctatgattgtctg

SEQ ID NO: 3010 - DNA, 120 bp, synthetic construct
  source 1..120: mol_type = other DNA
aaatgggcagtgctgacctcatagggttattgtaataagtagatgagacaatgcctgtaagatgctcagacagtacctggcataaagttggcgattatttttctgatttcattcaactcc

SEQ ID NO: 3011 - DNA, 120 bp, synthetic construct
  source 1..120: mol_type = other DNA
aacattggagagagggtcatgtaggcaagagatgccaaatctgggcaaattcaaggaaaaagatgtttggttttttaattggaaaagcaatctgcccttttctgtcttcagtgcagaggc

SEQ ID NO: 3012 - DNA, 120 bp, synthetic construct
  source 1..120: mol_type = other DNA
gccgtttctagcattgtacgaattctagcccatctgaggttacccagtgctcactctggattatctctgggtctcattttcatatttccttccctttattaccatactttctttgctctg

SEQ ID NO: 3013 - DNA, 120 bp, synthetic construct
  source 1..120: mol_type = other DNA
gggctcatggcacccttaatttggaaatattttaacattttagcaatcagtacaaccatgctggtgaatgttggttgtgggtaagtggattgccaagaattggcatgttgattctcatgg

SEQ ID NO: 3014 - DNA, 120 bp, synthetic construct
  source 1..120: mol_type = other DNA
gtgacgcgtttttgtcaagaccaaatcaaacttgggaagtcttcaagtcaggaatggaagtcactaagctccatgtaaataaacagtatatgtgaactgaataacctactttgttccggc

SEQ ID NO: 3015 - DNA, 120 bp, synthetic construct
  source 1..120: mol_type = other DNA
ttcatttgtttcccttcatctccttcacttcctctctttcttctttggtctcacttcctcacctctccccccctgctctccctccccctttctctccagtctcccactcctgcaaggcac

SEQ ID NO: 3016 - DNA, 120 bp, synthetic construct
  source 1..120: mol_type = other DNA
gcaagatgctggccggttttggggaaatcttggtcttcctgttgtaggggaatgttaagactgtcattatcagtgataaatgaacatagtctaccctaaattttgcagtctgaattgtct

SEQ ID NO: 3017 - DNA, 120 bp, synthetic construct
  source 1..120: mol_type = other DNA
aacttagaccgatgtaatactatgatctaattgacagtccaaattcaggtcctgccaattgccccataatgtccttcatgacaattttttcctttggtctaggatctcatttggcatcct

SEQ ID NO: 3018 - DNA, 120 bp, synthetic construct
  source 1..120: mol_type = other DNA
gcgcccagaccttcggtaaatatccttgaacttacatatttgcatggctaattattgccttaggctaaattctagaagtgaaacccctgagtgaaagggtgaagacatagacttgtttta

SEQ ID NO: 3019 - DNA, 120 bp, synthetic construct
  source 1..120: mol_type = other DNA
gaccagggtggtaccatcatcactacagtgaactgcagcatgccagggatacagatagttccctctgggaaatgaccctttttcctacagtatttcatcaaatagagattcattttatta

SEQ ID NO: 3020 - DNA, 120 bp, synthetic construct
  source 1..120: mol_type = other DNA
gtaccacaaacttaacatgtccagaactgacctgatcttctcccttaaccttctcttccttcctgatagaattgagttttgcagttctattctttccattgtttaggcccaaatccttga

SEQ ID NO: 3021 - DNA, 120 bp, synthetic construct
  source 1..120: mol_type = other DNA
aaaaatatgtatatccagaatctgagcacttctcatctcttctcatccctattgccaatatcctagtccaagcctatgtcatctcttgcatctcctaacttgtcttcctgctgctgtcct

SEQ ID NO: 3022 - DNA, 120 bp, synthetic construct
  source 1..120: mol_type = other DNA
atttaaaaaactaatgtgggcatggctgggaaacaagtttctgcttcgattacatcagaaactacagatccagacattctcttatgcctttgctgacattcagtgcagcattcagtaagt

SEQ ID NO: 3023 - DNA, 120 bp, synthetic construct
  source 1..120: mol_type = other DNA
gagatgattggggcatggtgagtctgatttggaatatattttaaaactagagtgggtatagtttgactgaataaggggtacacaggttgggtctccaggaagtggactttgagatttaac

SEQ ID NO: 3024 - DNA, 120 bp, synthetic construct
  source 1..120: mol_type = other DNA
aacagaacatatcagaattaatttttgacatgtagctaaagctatgcttagaggggatttatagcttgtaattcctatattacctcataccatacacaaaaaaccaacttaaaattgatc

SEQ ID NO: 3025 - DNA, 120 bp, synthetic construct
  source 1..120: mol_type = other DNA
tctgggaacaagatctctcacagagattctctatggctgagactctgaacatggtttaaaattagtgttctccagattttcactaactaccaaaaaaggtaactgtcatcacctggcaaa

SEQ ID NO: 3026 - DNA, 120 bp, synthetic construct
  source 1..120: mol_type = other DNA
ttcagtctatttttctccgttgtccagattgagtaatttctcttctacctttaagttcgctgaatctttcctctgtcctctccaatctgctgttaagccaatctattgagtcttcaattt

SEQ ID NO: 3027 - DNA, 120 bp, synthetic construct
  source 1..120: mol_type = other DNA
gctaatttttgtatttttagtagagatggtgttttgccatgttggccaggctggttttgaactcctgacctcaagtgatctgcctacctcggcctcccagaatgctgggattacagatgt

SEQ ID NO: 3028 - DNA, 120 bp, synthetic construct
  source 1..120: mol_type = other DNA
ttgcctgaaatagagtagtcattgtctaaaagttttgtctttccaggatgttcctttgttggtcctttggccagagactttccgggatttttttcatcttcctgttggagtttcctggtt

SEQ ID NO: 3029 - DNA, 120 bp, synthetic construct
  source 1..120: mol_type = other DNA
caggagtttgagaccaggctggccaacatggtgaaaccccgtctctactaaaaatacaaaaaatttagctgggcatggtggtgcacccctgtaatcccagttacttgggaggctgaggca

SEQ ID NO: 3030 - DNA, 120 bp, synthetic construct
  source 1..120: mol_type = other DNA
taaatctgtgagaggagaggaggtagagacattttgtgttgtagaatttcttaaggaattttgctgtcaagagctgcagagaaagtatgtctagcgagacagcatatgaggtcatgagaa

SEQ ID NO: 3031 - DNA, 120 bp, synthetic construct
  source 1..120: mol_type = other DNA
agttttagatttctagagaaactgagaggatagtacagagtattcccatgtgccctccctggattcagtgtcccttattaataacatcttacgtgagtgtgggtatatgtgttataatta

SEQ ID NO: 3032 - DNA, 120 bp, synthetic construct
  source 1..120: mol_type = other DNA
tctattttctggcaaggctacgtcataggtggtattgtgctgtgtttctatcaggaggcatagaattctagttggtagccatgatgagcattgctagatccattattttcttagggatta

SEQ ID NO: 3033 - DNA, 120 bp, synthetic construct
  source 1..120: mol_type = other DNA
agtgtgaaatagttgccttgaaattctgtgagtgagtggccaggaaaatgccgtatacttctttttcttttctttactctaattccatcacaggttatctgctgggtgtttctaatggcc

SEQ ID NO: 3034 - DNA, 120 bp, synthetic construct
  source 1..120: mol_type = other DNA
gcttgactatctaccctgtgcttagcaaaaccctccctgccctcacagaatgtatatgtattcattacaaaattgtccttataaagtcaggacatcttcaggacacttccagttaatcag

SEQ ID NO: 3035 - DNA, 120 bp, synthetic construct
  source 1..120: mol_type = other DNA
tcagatcacctgtggaagtgaaaggaccttggagttgaaaggaatcttcaggatggtcttgcctctggctttcaaactttttcttttcatcatgtcaaatgtagaggaattttgtccatc

SEQ ID NO: 3036 - DNA, 120 bp, synthetic construct
  source 1..120: mol_type = other DNA
cagatgtagaaactgacacctaaaagggtataacacattgcccaacacaactaataaagggtaaagctggaaacttaaccaaaatattaagttatttctggagcacaagtctcaatgttt

SEQ ID NO: 3037 - DNA, 120 bp, synthetic construct
  source 1..120: mol_type = other DNA
tgtgcgtgtatatttttttttcgttgttgtttctctgcctctctcgccaaactatatggagccctggctaaggatagaggactgtcagatgtgttttcaggggaatcgctgttttcttca

SEQ ID NO: 3038 - DNA, 120 bp, synthetic construct
  source 1..120: mol_type = other DNA
tgtcggatgtgttttcagtggaatcactgttttcttcacattcttcacatcagccacctcctccactccccaccaggatgtcaactgaaacatgtctcagtccaaattctttattccctg

SEQ ID NO: 3039 - DNA, 120 bp, synthetic construct
  source 1..120: mol_type = other DNA
tttctgagacccgctgctttagagaagatttctggagcagagatttggagcaaggatctccaaactcttttgatcacacactccattcagtaatatattttgaacatgcagctaacaaac

SEQ ID NO: 3040 - DNA, 120 bp, synthetic construct
  source 1..120: mol_type = other DNA
actagggctctctttattttggggacagagtgagaacttcttcacttataaggtggctttgtcttgattggtgaaaatagagaattatttcattgttgtataaaagttcaggccgggcac

SEQ ID NO: 3041 - DNA, 120 bp, synthetic construct
  source 1..120: mol_type = other DNA
aagggaagccataaacctgacaagctggtaaaaagctaatttcttaccagctagcctctggcctttctctctctgtgcaaatgagttgagtgaacaataaaaatcactgtttgtctcctc

SEQ ID NO: 3042 - DNA, 120 bp, synthetic construct
  source 1..120: mol_type = other DNA
aacagtcctatctctacaggacttttgttgtattttgctatcttaaacccatttccaagagggaatacttggggatgcctcctctaggaatacttcttgctgcttatatggcaaaaacct

SEQ ID NO: 3043 - DNA, 120 bp, synthetic construct
  source 1..120: mol_type = other DNA
ttttttttgcacatttagataagaaaagcatgctttggggcacctagaaggtatggaatgagggctaagactcccatggagcattaagtgattacagaataggctgattgttatagggtt

SEQ ID NO: 3044 - DNA, 120 bp, synthetic construct
  source 1..120: mol_type = other DNA
gaattgtgcctttagaaatgcagatttggagtggcatagctgacaattatttagggcagggaacaggtaatcaggagaaggtccaaaatgaggaagagaaactttaaaaactggcacatg

SEQ ID NO: 3045 - DNA, 120 bp, synthetic construct
  source 1..120: mol_type = other DNA
cctaattttggcaggccataagacatgtagtgtcttctagaactaggggaagaattaaggccaaccagcatcaagaaaaataagcaccttgtttactgggtttagtatctgagtcgtttt

SEQ ID NO: 3046 - DNA, 120 bp, synthetic construct
  source 1..120: mol_type = other DNA
agtttgagaatcacttggctagagcacaggtgaagggagaaaatttgtatggaaaatctgtatggaagcaggaatgccacttccactgagatatgagataagaatgtaaggtatgatcct

SEQ ID NO: 3047 - DNA, 120 bp, synthetic construct
  source 1..120: mol_type = other DNA
cagagtactttccaagtgcttattgcctatttacatattttgtttggagaggtgtctatttgagttctttgtgcatttaaactgagttgccttgttgattttcagttctaaggtttggtt

SEQ ID NO: 3048 - DNA, 120 bp, synthetic construct
  source 1..120: mol_type = other DNA
gagagtgagatgctgatgtgtaaggtttcagaagggacctcttagtctcattaaaatgcaaagaaagtatccagtaacaaaggcagagttcaaaacaaggaagaacttggaagaacagag

SEQ ID NO: 3049 - DNA, 120 bp, synthetic construct
  source 1..120: mol_type = other DNA
aagttaggttcatggatgtgcagaccaagaataagggaaagatctcagccctaactccttcttatacagattttcaataggtccatctttttcaggtttaccctcttaccctagactttc

SEQ ID NO: 3050 - DNA, 120 bp, synthetic construct
  source 1..120: mol_type = other DNA
ttccttcctccgcctgcctcttaaataacgtggtatctcgcagtttggctgaaacctgaattaaatgcaatgcttttttgacttttactttctcccagaacaacagttgtgatatgatct

SEQ ID NO: 3051 - DNA, 120 bp, synthetic construct
  source 1..120: mol_type = other DNA
gaagtttcctcggagtattatctctggatataagcttctgggctgataggtcttattttttagcagttgaaaaatgttgtgctactttcttcctgttttgggttttttggtgagaaatcc

SEQ ID NO: 3052 - DNA, 120 bp, synthetic construct
  source 1..120: mol_type = other DNA
gagagcctgtctcaattttttttttttttagcaccctatgccgtctccttctgtaattccagtcacaggaatgttagagactttgttattgtcccacagatacttgttgctctgttcgtt

SEQ ID NO: 3053 - DNA, 120 bp, synthetic construct
  source 1..120: mol_type = other DNA
tttctgcatatggctagccagttttcccaacaccatttactaaattgggaatcttttccccattgcttgtgtgtgtcaggtttgtcaaagatcagatggttgtagctgtgtggtgttatt

SEQ ID NO: 3054 - DNA, 120 bp, synthetic construct
  source 1..120: mol_type = other DNA
ggggtgttgaattttatcaaaggccttttccgtatctattgagataatcatgtggtttttgttattggttctgtttatgtgatggattacatttattgatttgcgtatgttgaaccagcc

SEQ ID NO: 3055 - DNA, 120 bp, synthetic construct
  source 1..120: mol_type = other DNA
attggtttcaaagaacatttttagttctgccttcatttcattatttacccagtagtcattcaggaacaggttgttcagtttccatttatttgtgcagttttgagtgagtttcttaatcct

SEQ ID NO: 3056 - DNA, 120 bp, synthetic construct
  source 1..120: mol_type = other DNA
gtaaaggattttatttctccttcccttatgaagcttagtgtggctggatatgaaattctgggttgaaaattcttttctttcagaacgttggatattggcccccactctcttctgtcttat

SEQ ID NO: 3057 - DNA, 120 bp, synthetic construct
  source 1..120: mol_type = other DNA
tctttgcattggcttagaacatgcttcttgagcttgtagttttttgttattacccaccttctgaagcctacttctgtcagttcatcaaactcattctctgtccagttttgttcccttgct

SEQ ID NO: 3058 - DNA, 120 bp, synthetic construct
  source 1..120: mol_type = other DNA
ttacagctcacacaggaaatacaaacctcaaaaagcaagcagcagtaaaatttattacaaagaacataaagaacaaggtttccacaacagagagatcgactccgagtaggttatcgtggc

SEQ ID NO: 3059 - DNA, 120 bp, synthetic construct
  source 1..120: mol_type = other DNA
tgtctcgctggtgttccaggcgccactggggtatggaaaaaagaaaaaaagctcctacagctagttcagtgtctgcccaattggccacccagttttgtgcttgaaacccagggccctggt

SEQ ID NO: 3060 - DNA, 120 bp, synthetic construct
  source 1..120: mol_type = other DNA
tttcctgtgtccatgtgttctcattgttcaattcccatctatgagtgagaacatgtggtgtttggttttttgtccttgcgatagtttgctgagaatgatggtttccagcttcatccatgt

SEQ ID NO: 3061 - DNA, 120 bp, synthetic construct
  source 1..120: mol_type = other DNA
agaatcaatatcgtgaaaatggccatactgcccaaggtaatttatagattcaatgccatccccatcaagctaccaatgactttcttcacagaattggaaaaaactactttaaagttcata

SEQ ID NO: 3062 - DNA, 120 bp, synthetic construct
  source 1..120: mol_type = other DNA
atttagtgttcaaagtctttatggtgctattctggcttgtcctacttgtgtgctacttagaggtcaatctgaagcctggtgatgtttcacatcactgttaagttctcaggttttgtggat

SEQ ID NO: 3063 - DNA, 120 bp, synthetic construct
  source 1..120: mol_type = other DNA
atcagatctagtcacttatctgatgaccagtacagttttaatcttaataagtcttctattgccagtcatttgattcttgtatcttatgctgtcctgcctgagagtagtcctaccaaaacc

SEQ ID NO: 3064 - DNA, 120 bp, synthetic construct
  source 1..120: mol_type = other DNA
agtctcccttagtaggtgtttaggaagactttacaaatgagatgacatttgacctgaatcgcaaataagtaggagcttgtcggatggataaaaggtagaatgtgagtccttttaacacct

SEQ ID NO: 3065 - DNA, 120 bp, synthetic construct
  source 1..120: mol_type = other DNA
acccggcccatttttttcttttcaacttttcttaggctggacagacacatttcagtgattggcaaagcacctcattaaacttggctgctataatttttcttcttttttcatctcattttc

SEQ ID NO: 3066 - DNA, 120 bp, synthetic construct
  source 1..120: mol_type = other DNA
gtgtgtggcgccatgccttactatttatttctaaacacattgcagaacatggaatttagggaggacaaattttgatgaatcaaataggtatagtgatatgggtagaagattggtttactt

SEQ ID NO: 3067 - DNA, 120 bp, synthetic construct
  source 1..120: mol_type = other DNA
aactggaaatcagctccaaaaggaacctttaaaaccacgcaaatacatggaaattaaataacctgctcctgaatgatcattgggtcaacaatgaaatcaagatgaaaattaaaaaattat

SEQ ID NO: 3068 - DNA, 120 bp, synthetic construct
  source 1..120: mol_type = other DNA
tgcagggatggtctaacatatgcacgtcaataaatgtaatacaccacataaacaattaaaaacaaaaatcacatgatcatctcaatagacacagaaaaagcatttgacaaaatgcagcat

SEQ ID NO: 3069 - DNA, 120 bp, synthetic construct
  source 1..120: mol_type = other DNA
tgtttggttaatgctttctccacattgtggaaggtttgttttttttgctgtttgcaatgattcctgctgctgctcggtttttgcatgcgcattgcctttgtgggctgtgataattgctgt

SEQ ID NO: 3070 - DNA, 120 bp, synthetic construct
  source 1..120: mol_type = other DNA
aacagaatagagaacccagaaataaacccaaatacttacagccagctgatctttgacaaagaaaacaaaaacataaagtgggtaaaggacaccctattcaacaaatggtgctaggataat

SEQ ID NO: 3071 - DNA, 120 bp, synthetic construct
  source 1..120: mol_type = other DNA
aaacattgtgtacttaatgaattatttatacagagcatttgttgccaactgttgttccagctatctacacaggagtctgttctgaggtggcaatagcacatgggaagatgaactttccct

SEQ ID NO: 3072 - DNA, 120 bp, synthetic construct
  source 1..120: mol_type = other DNA
ggtctaagattattttattgctcgttttctattttttcacctgttttgtattatatgttttcttatgtttttggcctcctatttgtttattgagaccgcatctggctctgttacccaggc

SEQ ID NO: 3073 - DNA, 120 bp, synthetic construct
  source 1..120: mol_type = other DNA
gtgccaagttggcaatgaatggactgttggcaactctatacccacttatacccactttcaatcatatgccaatcagtggtgggttaatgcaaattgaggagtagtttatttaaagctttc

SEQ ID NO: 3074 - DNA, 120 bp, synthetic construct
  source 1..120: mol_type = other DNA
aaatattagtaattggctaaaactcaataggctaatcaggacattagacactgaaaagaaaatcagtgaattggaaggtaaacttgaggaagttgtctatactgcattgcagacagactt

SEQ ID NO: 3075 - DNA, 120 bp, synthetic construct
  source 1..120: mol_type = other DNA
caaaactgttattttacaatgaaggcgaagttaatttttctggcaaaagtccaagaatttattattcacagatcctcatttaaaaatgaaaccacaggcggggtgcgatggctcacactg

SEQ ID NO: 3076 - DNA, 120 bp, synthetic construct
  source 1..120: mol_type = other DNA
tttttcataggcctgtggcacctggaaccccagcaagacagaaccattcactcccctggaaagggggctgaagccagggagccaagtggtctcgctcagtgggtcccactcccccagcgc

SEQ ID NO: 3077 - DNA, 120 bp, synthetic construct
  source 1..120: mol_type = other DNA
gctacttgggaggctgaggtgggagaatcactcgaacctggaaggtggaggttgcagtgagccgagatcacgccgctgcactccaggttgggcaacagagcgagactttgtctcaaaaaa

SEQ ID NO: 3078 - DNA, 120 bp, synthetic construct
  source 1..120: mol_type = other DNA
tctctgcagaaaccctataagccagaaaagagtgggggccaatactcagtattcttaaagaaaataattttcaactcagaatttcatatccagccacactaagcttcataagggaaggag

SEQ ID NO: 3079 - DNA, 120 bp, synthetic construct
  source 1..120: mol_type = other DNA
gtcatcctgataccaaaacctaacagagacacaacaaaaaaagaaagtttcaggccaatatctctgaagaagattgatgcaaaaatccttagtaaaatacatgcaaactgaatccagcag

SEQ ID NO: 3080 - DNA, 120 bp, synthetic construct
  source 1..120: mol_type = other DNA
acatcgtagtaggtagcaatgccctggctaaagactactgcgtgttagtacaggtaaagaattagcacagataaattttattcagtgcccaaataaagtattttaaggctcaagtggggc

SEQ ID NO: 3081 - DNA, 120 bp, synthetic construct
  source 1..120: mol_type = other DNA
aaaaaagggcccatatagccaagacaatcctaagcaaaaagaacaaagctggaggcatcatgctacctgacttcaaactatactataaggctacagtaactaaaagaacatgggactggt

SEQ ID NO: 3082 - DNA, 120 bp, synthetic construct
  source 1..120: mol_type = other DNA
ctactataaagacacatgcacacgtatgtttactgcagcactatttacaatagcaaagacttggaaccaacccaaatgcccatcaatgatagactggataaagaaaatgtggcacatata

SEQ ID NO: 3083 - DNA, 120 bp, synthetic construct
  source 1..120: mol_type = other DNA
gtcttaggatactgaacatctgtgatttatacctgaaaagaataaatcgcaataaatcattggatttcttgatccacccagaactcgtttttgacccttggagggcaatgtggcccctgt

SEQ ID NO: 3084 - DNA, 120 bp, synthetic construct
  source 1..120: mol_type = other DNA
cattctcattaatcatgtatatgcattccaaagagaccctttagaaagcccagaagtttccgaggataaggcagacatatttgactagatgaaatatatttttgtatagtaaaatgtacc

SEQ ID NO: 3085 - DNA, 120 bp, synthetic construct
  source 1..120: mol_type = other DNA
gaacaaaaaaacaactttgcaatttttacgctgatgggggttggtctttggagagttttgagtagagaagtgacttcatctgatttatattttgaaagcacgattccgttgggagtgggg

SEQ ID NO: 3086 - DNA, 120 bp, synthetic construct
  source 1..120: mol_type = other DNA
gagaaacttaataaagatttgaatagaaaatttattgagacctagcttacaacgtgtataatctgtagtgtggcatctcaggtttgacttcccggtcttggcaagtgctcaagcttctgg

SEQ ID NO: 3087 - DNA, 120 bp, synthetic construct
  source 1..120: mol_type = other DNA
aattacagacatgagccccacacccagccaggaaattgcatttttaatgcactactaactcagggagtctttaattgggataggagccgcattaactgattttacataaattgtttgttt

SEQ ID NO: 3088 - DNA, 120 bp, synthetic construct
  source 1..120: mol_type = other DNA
taaaattaacataggcttccatacctgcggcagggctgtgagaacacagtagacagccatacagtggattagattgtgctagaagttatggagatactcttttaaggttgtgattgggta

SEQ ID NO: 3089 - DNA, 120 bp, synthetic construct
  source 1..120: mol_type = other DNA
tgtttgaaaggcacatcccacaactacttacttgtatctctatattcttcctgcttaccttccttctcctagcttcctttctttggaaagtgctctttagaagttcattagtcagctcca

SEQ ID NO: 3090 - DNA, 120 bp, synthetic construct
  source 1..120: mol_type = other DNA
agcctttaaccctttacctttcttttactctttgtaattcactcagcatatcaacaccttatccatctgctgtgacatattgtataccactactcccttccccatgaagttaccacctct

SEQ ID NO: 3091 - DNA, 120 bp, synthetic construct
  source 1..120: mol_type = other DNA
aacatttatggaatgcaaatgccaatcactatgccagctacatgcatacaaagatgaggaagaaccatctggttccctttctctcaatttgtaccaacatcactagatctgtgtgacagt

SEQ ID NO: 3092 - DNA, 120 bp, synthetic construct
  source 1..120: mol_type = other DNA
ctttatcattatttcctttatcctcaaaactctccttcttttcttgggcttcctgtccttttagtacacctgactcactcttctttacttgggattccagtgtttctggtacactcacct

SEQ ID NO: 3093 - DNA, 120 bp, synthetic construct
  source 1..120: mol_type = other DNA
tggagctgggatttgaatctgagtagtcagactccagtgttcagttttgatcattactgtagactacttcttgcaatatctgcaaactctgcaaaaatttcaggtcctttgatcatgttc

SEQ ID NO: 3094 - DNA, 120 bp, synthetic construct
  source 1..120: mol_type = other DNA
tgtagagttactaaatattgtagacaaatgttaaagtaacatagcctttggagacagactggttcaaatcctgcctccgcacctgcctagctgggtgacctttggcaaactttactttct

SEQ ID NO: 3095 - DNA, 120 bp, synthetic construct
  source 1..120: mol_type = other DNA
gttttgtttaggggtatggtggtgtggaatggtaagatcatgctccgctgaagtttctaaccttaagaatttcatggaatgtactcctcacataagctgattttccttaagctatgaata

SEQ ID NO: 3096 - DNA, 120 bp, synthetic construct
  source 1..120: mol_type = other DNA
ttcatacatcttttccttctcttggacctcataatcatctaacacatacagtgtaaatcttcataatataaagacttggaagccctggctgcaagtacatttattgcaggcagtagccca

SEQ ID NO: 3097 - DNA, 120 bp, synthetic construct
  source 1..120: mol_type = other DNA
actttttctatgtgaggagagcatttgagggatgttggcgcattataatttttctgaatgcatactgtttcttgtaccatgaatcaaaagaaattaatttccccggctgggtgcagtggc

SEQ ID NO: 3098 - DNA, 120 bp, synthetic construct
  source 1..120: mol_type = other DNA
atgttttcctgagaatcagggaggagattctttttcagagcctagaagatggccagagattgtggcaccctttcatatgagcttcatcttctctacagcaatctcttaaattgtagttat

SEQ ID NO: 3099 - DNA, 120 bp, synthetic construct
  source 1..120: mol_type = other DNA
ctgctgtaaggtagaggaactcgtaacacaagaacatttgggaaaaagaacttaaaggtcctaggcacagaaataggtaaggcaaggaaatgatccaaacttactgatttttccagaact

SEQ ID NO: 3100 - DNA, 120 bp, synthetic construct
  source 1..120: mol_type = other DNA
cctggtacgaaatatttaagatacagttgttaccaagtactgaaatataggtatatctcttgtgttgatgttacttgataaacctaacatagaaagcacaaaataggctggcgccgtggc

SEQ ID NO: 3101 - DNA, 120 bp, synthetic construct
  source 1..120: mol_type = other DNA
ctagtgtgaacttgaggtattcctgaaaatcaaaacaagaaaataggttaatggcagcatttttggaacagaagtacagttctttcctactcccaattccctagttgttttttctagggt

SEQ ID NO: 3102 - DNA, 120 bp, synthetic construct
  source 1..120: mol_type = other DNA
ctgatgggaaataagaccttcattttgagtaaagcattttccatattcagggcaatgaggaagtctttcccctgtatgaatgttgggatagttaatgaagtgtgagctctcaatgcagac

SEQ ID NO: 3103 - DNA, 120 bp, synthetic construct
  source 1..120: mol_type = other DNA
ggtggtttacttgttgtcttctctgattgaaatattcccccctcagatattgcctggctaattctctcacctatttcatgttccatctagtagttatagcaattgctgagaatgaggcat

SEQ ID NO: 3104 - DNA, 120 bp, synthetic construct
  source 1..120: mol_type = other DNA
ccagcatattttcccagcattatttcctctggcttctcttttgcaacttaactctctaaccagaagaacaaattgattttggtcctttctatgtggtttcttgtttctgtgggcctttga

SEQ ID NO: 3105 - DNA, 120 bp, synthetic construct
  source 1..120: mol_type = other DNA
aaagccttcaggactcacatcttagtcacagattagaagaagttaatgacttatgtctttagatgaatgcacacttacacgtagacatatagcttagaaggtatattggctctggaaaac

SEQ ID NO: 3106 - DNA, 120 bp, synthetic construct
  source 1..120: mol_type = other DNA
caccaacccttgtctctcatgtctggcttttcagctgcaagcagccaaacctgggtttggttacttacatttatgtgtatcaatattgtaaaaatcagcactaaaattgtttccattagg

SEQ ID NO: 3107 - DNA, 120 bp, synthetic construct
  source 1..120: mol_type = other DNA
gttgaggcttgctctagttgaaggaattggtggtcaaggtaatcttttccatctgtgcttgcttggtggaatgttcagtgtacattactagataaagctttctaaaattatgtcaaagcc

SEQ ID NO: 3108 - DNA, 120 bp, synthetic construct
  source 1..120: mol_type = other DNA
cgcacctggccaattgcctggtatgttttaaaattccttcatttaaatttttctgtgtgtcaccttattttaggtatatttcttaatagagtttagctatttttcttatttttttatagg

SEQ ID NO: 3109 - DNA, 120 bp, synthetic construct
  source 1..120: mol_type = other DNA
ttactcaaaagtaaactccctgaagtatgtccctttgataattctttcactggggacctgtgtttaatgagtttctatgttcttgaatatacaaaatgacttcatttcagtctcactcat

SEQ ID NO: 3110 - DNA, 120 bp, synthetic construct
  source 1..120: mol_type = other DNA
tctagtgttaacatgattttttgcaggtgatctgcttctctggttgtctttatgatttgctttttaatgtctgtcagcttactacgatgagttttggcacatgtaagtgtgtgtgtgtgt

SEQ ID NO: 3111 - DNA, 120 bp, synthetic construct
  source 1..120: mol_type = other DNA
gccttttgatatagagtatatgcttggatggggggcagaatgtttagtgggatttttcttgttactcccaaattgacaagtaggatcacaaagctgaggaaaaagaggttataacttccc

SEQ ID NO: 3112 - DNA, 120 bp, synthetic construct
  source 1..120: mol_type = other DNA
ttgtatttctcctccccattctgagtcagtgtgcctgagacgggccattaggagaggagagggttttaaaggggatggcttaagcattttaaataatttagcataactagaaaattatgg

SEQ ID NO: 3113 - DNA, 120 bp, synthetic construct
  source 1..120: mol_type = other DNA
aatgtaaactagtacagccaatatggaaaacagtatgcaaattctttaaagaactaaaagtagatctatcatttgatccagtaatcccactactgggtatctacccagaggaaagtaagt

SEQ ID NO: 3114 - DNA, 120 bp, synthetic construct
  source 1..120: mol_type = other DNA
attgcaggatttaagggatcatcacttttccatcttcccaggaacagtgagtgagatgctacttcttcagtactttttggaaccctgaagtcatgcttagctttctaaacctatactcag

SEQ ID NO: 3115 - DNA, 120 bp, synthetic construct
  source 1..120: mol_type = other DNA
ttttgcacctccatagcaggcctgtgcatgttgtacttgttccttttgcctgaagcacactcccccttctataccatctttctttagtctgttactcttcttatttttctacatgaattt

SEQ ID NO: 3116 - DNA, 120 bp, synthetic construct
  source 1..120: mol_type = other DNA
tgttggatttttacattatttccctgcccatcctctttgatgactcctctgaaaaggacactatgcattcaatttgggttctgccttgtaatttctagctgtgagaccaataatcccttc

SEQ ID NO: 3117 - DNA, 120 bp, synthetic construct
  source 1..120: mol_type = other DNA
ctcatttactgacctgcctgggctcttttggcatctgcgtttttaaccttgacaggaactttgggttttaatattaatgtgatttaatttcaggatgaggaatctcagctgatattgggt

SEQ ID NO: 3118 - DNA, 120 bp, synthetic construct
  source 1..120: mol_type = other DNA
acttataggtgctgccagctgacctaaaaaaattagatatcagtgaagatttgtttgaaaggagcaagtttccttctagggagagatatttgtgttggggagaatcttggtagtcacaca

SEQ ID NO: 3119 - DNA, 120 bp, synthetic construct
  source 1..120: mol_type = other DNA
ccacctaggcaataccattctggacataggaatgggcaaaaatttcatgatgaagacaacaaaagcaactgtaacaaaagcaaaaattgacagatgggatctaattgagctaaagagctt

SEQ ID NO: 3120 - DNA, 120 bp, synthetic construct
  source 1..120: mol_type = other DNA
ccctgaacttaaaacttaaataaaaataaagaaagcaagttgatactacttatcataatatttccttacaagtaaataaaggaaagctaaaaaaagccaaccaaagacataatgaaatat

SEQ ID NO: 3121 - DNA, 120 bp, synthetic construct
  source 1..120: mol_type = other DNA
gatcttttaaaattataaagtgggccctatcatttccctgttcaagcccttcagttgcctctcatgacacctagaatgaaatctgcaattttttattaaggactgcagggcccgacataa

SEQ ID NO: 3122 - DNA, 120 bp, synthetic construct
  source 1..120: mol_type = other DNA
ttgttcctgaggcaaagctgtcatctctattttttcatcccctcactgttcccaccaagagcttaactttagcttcttcttgcaatgtgttcctatattcaatttctgctccttggaaat

SEQ ID NO: 3123 - DNA, 120 bp, synthetic construct
  source 1..120: mol_type = other DNA
cttggatttttacatctttttcctgcccatactctctgatgacttctctgaaaaggacactatgccttcaatttggattttggcttgtaatttctagctgtgagaccagtaatcccttct

SEQ ID NO: 3124 - DNA, 120 bp, synthetic construct
  source 1..120: mol_type = other DNA
tttgctggagtctgtgaggggaggacttgggtgggcagtgaaggaggtattccaaaccaccctatagattatttggttttagattagttttataatgcaaaactagatgtaagatttagc

SEQ ID NO: 3125 - DNA, 120 bp, synthetic construct
  source 1..120: mol_type = other DNA
tgtggtaaatactataagagtgaagcataagagctttgggagtgcaaagaaggaaacatctaactgcctgagagaatcaaacagaaagttttgcagcggaatggttgattggcgtatctt

SEQ ID NO: 3126 - DNA, 120 bp, synthetic construct
  source 1..120: mol_type = other DNA
agaacaacaacagaaaagagtagaaaaagaaattgaacttaccgcggggtgctgaaggtggaccagctgaaaaacagagaggtatcttagcaactgttttttctcccatgatattttcct

SEQ ID NO: 3127 - DNA, 120 bp, synthetic construct
  source 1..120: mol_type = other DNA
ttgcagtgactggtaactgcttgaaatcctgcaggggattgtaaattgatagtcttaaaactttccagtacatcatgaataatgcagagaggttttgataatgagacagcaagaggccaa

SEQ ID NO: 3128 - DNA, 120 bp, synthetic construct
  source 1..120: mol_type = other DNA
atgcgagtcagtgaatgttctagaaacttattaataatttatttatgcctttctgcccatggatgccatggaagaagcatcattaaagtctctcttctcctggccgtcttatctaagtca

SEQ ID NO: 3129 - DNA, 120 bp, synthetic construct
  source 1..120: mol_type = other DNA
agtttcactcatgaagggaaatggtcaaacttacaagaggatcctgtagctgaaaaacaaagataaatcaacgtgtacagcctgctgaaagaggagctagttttcgtactactttcctga

SEQ ID NO: 3130 - DNA, 120 bp, synthetic construct
  source 1..120: mol_type = other DNA
tctgaagtttcatctggtggtaaaaaacggaaggaacacaaaatggagaaatcaacatgtgtagaaccaagtgaattcagttctcccttgataggcttaaagagggtaactgcagagagg

SEQ ID NO: 3131 - DNA, 120 bp, synthetic construct
  source 1..120: mol_type = other DNA
agtagctgagattacaggcgtgcaccaccacgcccagctaacttttgtattttttttttttagacagagtctcactctgtcacccaggctggagtgcagtggtgagatctcggctcactg

SEQ ID NO: 3132 - DNA, 120 bp, synthetic construct
  source 1..120: mol_type = other DNA
aggtgagctggcttatgtttatcctccctgtaataattatgagaacttccaaggctataagtcttggcaatctgtgagtactgagaaaagcagtcttgattcaggggaatagtcaataac

SEQ ID NO: 3133 - DNA, 120 bp, synthetic construct
  source 1..120: mol_type = other DNA
acagggaacaggccctctagacactgtagaagatcaaggaacctggagggagaaggatagataaggtacttaccattggatccaggatattgtactaaaaaatagaaacaaacaaattaa

SEQ ID NO: 3134 - DNA, 120 bp, synthetic construct
  source 1..120: mol_type = other DNA
actgctgctgtactctagcctctccataagaaccagatcttcttttaggagattattaaccctgttttagcataaccacttcattcttgcttttcattgtaggtgttggagatgagatcc

SEQ ID NO: 3135 - DNA, 120 bp, synthetic construct
  source 1..120: mol_type = other DNA
ctgatcaactaatatgttccagaggtagacattagaataggaggtaagaatctagtttcttcttctcacagcttccagcttattggagagtgatagagcagtgactgctgctttgattag

SEQ ID NO: 3136 - DNA, 120 bp, synthetic construct
  source 1..120: mol_type = other DNA
gaaggaaggaaaagaaaaaaaattatagaaaatagattgtcggttgcctgcaggttgggggaggctgagagatggggagtgactgctaaggagtatttttttttaccttgaggtgataaa

SEQ ID NO: 3137 - DNA, 120 bp, synthetic construct
  source 1..120: mol_type = other DNA
taaatatgtattaagaagccataactttgggcttccctgagtgtagtgacccatgtatttggtcatattccttacgggatccctgcaggtaatgtgtatggggttcttataggagatttt

SEQ ID NO: 3138 - DNA, 120 bp, synthetic construct
  source 1..120: mol_type = other DNA
taagacattatagggatcactcaaagaatgtgactaggttgctaaaagttgctgaaaatagagcctaactcttctggagagaacttttcagggcaattagaaaggaaaggaaggccaggc

SEQ ID NO: 3139 - DNA, 120 bp, synthetic construct
  source 1..120: mol_type = other DNA
ttattgcagaacctggatgagtccaatctggagtactgggtgagattatgaggtggcagaaggacttgatccttgagtccttgggcatgaataattgaaataaaaatagattgatgttct

SEQ ID NO: 3140 - DNA, 120 bp, synthetic construct
  source 1..120: mol_type = other DNA
tttaaatgttagcctgtgagatttcttaacacttcgtgcatggcctctttggaaactatgtaataggaatgccaggggagttgagaaagacagtgttaaaaaagcaagtcacccctaaac

SEQ ID NO: 3141 - DNA, 120 bp, synthetic construct
  source 1..120: mol_type = other DNA
tgtagtgattttggcccttattcaacagagtaacttggcctgccatgtaaaagggaatagaaactgctaggttgacttaagacatttataggtatgagtgttgggcaaaggaattgagac

SEQ ID NO: 3142 - DNA, 120 bp, synthetic construct
  source 1..120: mol_type = other DNA
cagggtgacgttgatgcaggcccttggacccactttaagcatcaaggccataaagggctggcaaaatctcagatcatataaaagtcattgtttccatttaccattttttttcctttttaa

SEQ ID NO: 3143 - DNA, 120 bp, synthetic construct
  source 1..120: mol_type = other DNA
aattcctcacactggtaaaagagagaacagtaaaattgcaagtttttctcctttcctccatctttatgtgctttctcaccaccttccccattcctctggtagcaggcacattatagaata

SEQ ID NO: 3144 - DNA, 120 bp, synthetic construct
  source 1..120: mol_type = other DNA
cctcagcatttgggaagagatgtctgtttttctatgtggtattttaggccgtcaatcactgaactgtcagtttcttgagaaggtgaagccactcctaccaccaaataaagataattttaa

SEQ ID NO: 3145 - DNA, 120 bp, synthetic construct
  source 1..120: mol_type = other DNA
cagcaggtctcatgattgtgaatctgctagttataagggatagagatggtgaaaagtccatgccctacccagaggcattcaaattcaaaatttaaagtaataccatcctgaccaaacaaa

SEQ ID NO: 3146 - DNA, 120 bp, synthetic construct
  source 1..120: mol_type = other DNA
atgagagattaaataacttgcctatgttcaaataaatagtaagtagggagctgggatacaactccagttagcctggctctagagtctgcatacttaactgctaggcaatactcctctgta

SEQ ID NO: 3147 - DNA, 120 bp, synthetic construct
  source 1..120: mol_type = other DNA
cagtattggaatataaaaaaatttaggataagaaaacttatttagaatacattcgataagtgggtagtggtatgtcccctattctgcttaaaacccaggatcaccactttgggaggctga

SEQ ID NO: 3148 - DNA, 120 bp, synthetic construct
  source 1..120: mol_type = other DNA
aaagtggccacacttgcaagtgatcccatgtcttttcccccttagacactatgcaggagtgaaagtttcaggggaatattcagctttactatatttccaatattctgatttcattcacca

SEQ ID NO: 3149 - DNA, 120 bp, synthetic construct
  source 1..120: mol_type = other DNA
taaattcacaaactaaagccctgtgttcttgggccttttagccttagggtaagttttggtaggagaagcaaaaaggctgactttctagaaatagggcctgcctagaaagaggtaaataag

SEQ ID NO: 3150 - DNA, 120 bp, synthetic construct
  source 1..120: mol_type = other DNA
aggggacccttgattaggtctcattaagtacaatgggccatcaactactagaatgcttgggtttgaattctggttcctctacttactagctgtgttactctgcctgtttttttttttatg

SEQ ID NO: 3151 - DNA, 120 bp, synthetic construct
  source 1..120: mol_type = other DNA
aatcggacgttccttccacctctccttactccctaaaacacaccatgctgtctgaaattcatatcagcaaattttcctgtatctttaacttctccaaacgttttcttcaccgtcttgctt

SEQ ID NO: 3152 - DNA, 120 bp, synthetic construct
  source 1..120: mol_type = other DNA
atccatacccatatacatgcctgaatgtaggtaaatgtcatttttgctccccattgctgtttccgaacagtcttctccagtagaaactcctgttgtctttgaagcacatatgagacttta

SEQ ID NO: 3153 - DNA, 120 bp, synthetic construct
  source 1..120: mol_type = other DNA
ttttatttccaaagaatactttggattggaagagtaaacacatttaatgatgtcctgggggtagttggacaacctcaggacttggagtccaaaggccagtgtttagaacctcagttttac

SEQ ID NO: 3154 - DNA, 120 bp, synthetic construct
  source 1..120: mol_type = other DNA
cttggggatgcctcagggaaggctgccctttcgtgctagccatgtaaagctttaaaattctgaggacacagctaatatcatttatccctcattctatattatcttcatcctcatcttatt

SEQ ID NO: 3155 - DNA, 120 bp, synthetic construct
  source 1..120: mol_type = other DNA
aaaaatatatcaagaaggaacccatattcttggtaatgaatgagaagttttaccacccatgtgataccttattgggggactgaggcttaaacacctgatcaccagcagaaatcaaggcca

SEQ ID NO: 3156 - DNA, 120 bp, synthetic construct
  source 1..120: mol_type = other DNA
tgctgagagaagggccatccgccaatctggaattcctgttttggacttctcataagtaagaaataaaattctattagggaaaaccactgagattttaagatccggggctaacttaatcag

SEQ ID NO: 3157 - DNA, 120 bp, synthetic construct
  source 1..120: mol_type = other DNA
aagctattttcagccatatgaaggcttagaaaatttttcacatacatgtagagtttaaagaaccagtaaaggattgtatttgggcaagaaatagaagagaaaagacacaggatgtagcaa

SEQ ID NO: 3158 - DNA, 120 bp, synthetic construct
  source 1..120: mol_type = other DNA
ggcgagaaatagaaaattccatcagtttggtgaaagcttttagaggataacgtactctgttccatgaaagaatcagaaatgtgagcaatgcagggagaagtaaggtaaatccagacaagc

SEQ ID NO: 3159 - DNA, 120 bp, synthetic construct
  source 1..120: mol_type = other DNA
agatggcattacaaatcagcagagaaagaatgcaccagtcaataaatctagttggaacaagatgagacgaaatccctctagttggttttccagatgaaaggaaaattagatctcacctgt

SEQ ID NO: 3160 - DNA, 120 bp, synthetic construct
  source 1..120: mol_type = other DNA
ctaatcctacttcagggtatgtaccccggataaactcttttccatctacttaaggactgtctttgcagcattatttgtgatagcagaaattggaaatattgagaatgcatcggtagtaga

SEQ ID NO: 3161 - DNA, 120 bp, synthetic construct
  source 1..120: mol_type = other DNA
actgccctaattcctccctcccttttttccctctctattttcttctctctctcccttttatctttattactttccttttctcttgctcatcacttctattgttttccttttctcccagcc

SEQ ID NO: 3162 - DNA, 120 bp, synthetic construct
  source 1..120: mol_type = other DNA
ttggcagtcattgtgatgggaattaagtacaaaacacattctctgttttataataatgtttcttgtttctcatggttctatggggattttaaaaacggtgtctcaagcctgtagtcccag

SEQ ID NO: 3163 - DNA, 120 bp, synthetic construct
  source 1..120: mol_type = other DNA
ttattcatttaagaggtacttattaaggatctccctcgctgtggtgaggtgaatagactataagaaggcaagaggagtatcaaggaaacaaggtaggaggcaagagatattggtgtttgg

SEQ ID NO: 3164 - DNA, 120 bp, synthetic construct
  source 1..120: mol_type = other DNA
agcttcttgcactggttaaatctggtattctggtggactgttactggagaggttttttcccaagaaatatgagatgtaaatgacaacagtagacaacagcagtatttctttgcacccttg

SEQ ID NO: 3165 - DNA, 120 bp, synthetic construct
  source 1..120: mol_type = other DNA
agcattttttcatgtgtcttttggctgcataaatgtcttctttttagaagtctctgttcatatccttcacccacttgttgatggggttgtttgtttttttcttgtgaatttgtttgagtt

SEQ ID NO: 3166 - DNA, 120 bp, synthetic construct
  source 1..120: mol_type = other DNA
gtgtgtgtctgtgtatcacattttctttatccattcatccactgatggacacctagtttattcctctatcccgggtattgtaaataatgctgcaatgaatatgggagtgcaaatatctct

SEQ ID NO: 3167 - DNA, 120 bp, synthetic construct
  source 1..120: mol_type = other DNA
gctgggtcaaatggtatttctagttctagatccttgaggaatcaccacactgtcttccacaatggttgaactagtttacactcccaccaacattgtaaaaacattcctatttctccatat

SEQ ID NO: 3168 - DNA, 120 bp, synthetic construct
  source 1..120: mol_type = other DNA
tgtttcctttgttgtccagaaacaattttgtttgacgagataccacttatttttgcttttgttactgtgtttttggtgtcatctaaaacaacttgcaaagaccaatgtcatggaactttt

SEQ ID NO: 3169 - DNA, 120 bp, synthetic construct
  source 1..120: mol_type = other DNA
tttcacggtgattacatttgcgagaggaacgtacagctttcatatttcattcaatggttaaaatggtactcaattttgactgacaaaacggtaatgatcagatgccaaaacgagtgtgaa

SEQ ID NO: 3170 - DNA, 120 bp, synthetic construct
  source 1..120: mol_type = other DNA
actttcattctatatgtatccttagagctggagtgtgtctgctacaggcagcatagatagttgcaacttgtttttaaatacatttagctactctgtgtcttttcattagaaaatttaatc

SEQ ID NO: 3171 - DNA, 120 bp, synthetic construct
  source 1..120: mol_type = other DNA
ggtctttgacttctcttattctttcttgtacttgatccatcatcttggaagctctctatttcctttttgttttagtttaggcattgcacccttcagctccaaaatttgtatggctctgtt

SEQ ID NO: 3172 - DNA, 120 bp, synthetic construct
  source 1..120: mol_type = other DNA
tttaatacatctgttctaggattttataacctgacagcgtgctggaacttctctgctggactcctggactcccacaatggtattgtctcatctgtggatagttgtctaaattgatgcttc

SEQ ID NO: 3173 - DNA, 120 bp, synthetic construct
  source 1..120: mol_type = other DNA
tcattagtctcaatccaactactaaaagatttgctagtttcccagatattcccattttctttaggttccatttcagaaaataaagagggaatgccatggcactgtgctcttcactcttgt

SEQ ID NO: 3174 - DNA, 120 bp, synthetic construct
  source 1..120: mol_type = other DNA
tgccgtcttctcataactctcacgtttcaaaacctgaatttgatatccagctccctcctcagctaggtgaacttgagtaagtctcaatcttttgagcataaatttcatcttcttaaatgg

SEQ ID NO: 3175 - DNA, 120 bp, synthetic construct
  source 1..120: mol_type = other DNA
gttattctaggatacattatattttttggtccggccacttcactaaggccatcttcatgaatggatttaggctttttactgaaccatctgttccagtgcctgaactggaacagttctctg

SEQ ID NO: 3176 - DNA, 120 bp, synthetic construct
  source 1..120: mol_type = other DNA
caccgctcccggcctgtgactttttctttgacattattgataatgtaaaccttgggagttaaaagtgcagggacaatcactaataggtcagagattctttgactcaagtattgaaacaga

SEQ ID NO: 3177 - DNA, 120 bp, synthetic construct
  source 1..120: mol_type = other DNA
gagtgagtgatcaaaaaactttcagcaccttgactgaagggtgctgactgaaggtggttttattaatgaaagccacagcaaaggacagaaatttcttgtcacagaaaaacctttcagcca

SEQ ID NO: 3178 - DNA, 120 bp, synthetic construct
  source 1..120: mol_type = other DNA
tacaggaagtgagataatgggctaaggaatttttcctagtgctacggaggatggttattttctttgttcagtttaaactctagaaaccaaaggagaaaccagcactatcagcctagagct

SEQ ID NO: 3179 - DNA, 120 bp, synthetic construct
  source 1..120: mol_type = other DNA
caccgtgcccagcctaatgtttgtaactcttgaggcagagaaccttccacagaataagcattttataaatgtttgataattaaaaatgagaaaaatgactatatttaaaaagaggcagac

SEQ ID NO: 3180 - DNA, 120 bp, synthetic construct
  source 1..120: mol_type = other DNA
tgagccaccgcgcccggtacctaaaagccgattcttaaaaatatacgttggtaattgtttatgcctactgctgagatcaggatatctctaaagtaaggagaggaaaaagaaaagtatgtg

SEQ ID NO: 3181 - DNA, 120 bp, synthetic construct
  source 1..120: mol_type = other DNA
actgtattcacaaagccacattttgtttcagtcttctatgcatcctgtggtggtgatttctaagttaagaagtcagtcacttgaagaggaaggtgatgacttctagttttaggatgctcc

SEQ ID NO: 3182 - DNA, 120 bp, synthetic construct
  source 1..120: mol_type = other DNA
aaagtctccattctttcctgaatgtaacgtttgatgtttctgcccggttagcttagtcattagctaatgattgaacagagacaatgcctagaaccaaagcaaacactatgctagtctgtg

SEQ ID NO: 3183 - DNA, 120 bp, synthetic construct
  source 1..120: mol_type = other DNA
tctctgtaatctttggcactaattttttttccttgtataatacacgtatttattatagtatgtatagtatgtatgtatgtagttacagtgtgtataacttgggtatacatacccaagtat

SEQ ID NO: 3184 - DNA, 120 bp, synthetic construct
  source 1..120: mol_type = other DNA
gaagacctttcccatttcagtatcttagaaggtggtaactgctgtgaaaagtgaaaaagcaagtcagtgaaagagaactactggcagctgcagtgggatttcgatttaaatagattatcc

SEQ ID NO: 3185 - DNA, 120 bp, synthetic construct
  source 1..120: mol_type = other DNA
gaatttcatgcagaccagggttaaagggtctaaggatacacctgagacaatgtctgaaaactaaggaagggaagaaaagtgaacagaaatagagttaagtgggagtagttgtcagaaaag

SEQ ID NO: 3186 - DNA, 120 bp, synthetic construct
  source 1..120: mol_type = other DNA
acacacacataaaatttgtttgattttgtgtttttattatttctatacctggagtcaaggggttaactgagctaggtgcaatctgattctttttattctaagtaaaatagccaggcacag

SEQ ID NO: 3187 - DNA, 120 bp, synthetic construct
  source 1..120: mol_type = other DNA
aaagttacagtaatcaagagcacatgcagcactggtataaagaaaaatacagagacaaatggagaagcattgagaggccagaagtgaactctcaattcatttaccacgggtgccaagacc

SEQ ID NO: 3188 - DNA, 120 bp, synthetic construct
  source 1..120: mol_type = other DNA
agggaagaatcaaaagctaacatcaataacagtagtgttgtattgctcactttacccctaaaatcgagaacaagaaaagaatgtcctctattagtacttccagtagtgaggaggacctgg

SEQ ID NO: 3189 - DNA, 120 bp, synthetic construct
  source 1..120: mol_type = other DNA
taaaaaagagagattacaaaattttgagtttgagagtagaaattcaagcctaatcttcttgagccttttaagactactgggttgaaagggagacagaccctagcttactttataacactg

SEQ ID NO: 3190 - DNA, 120 bp, synthetic construct
  source 1..120: mol_type = other DNA
cagcctccctctatctagaaacagaataaaggtgagggggtaggtaggcaggattaaacaaacaaaaaacactgtcctctgtgaatgatcgattcaaccaaattaaagaccatgtatcaa

SEQ ID NO: 3191 - DNA, 120 bp, synthetic construct
  source 1..120: mol_type = other DNA
ccaggtaacagtgcctggcaaacacggtagaggttcaataaatacattttaactcaaccgtcttaactcttgtatttggggctgtgaggttcagatagaggaaatataaagttggatatt

SEQ ID NO: 3192 - DNA, 120 bp, synthetic construct
  source 1..120: mol_type = other DNA
attaaatatttgaaacacagaaatgcctgcctggaccctcaccatgaatccccatcccttctgataccggaatctggttgctatttctagaacatttctcatcaagacattatcctaact

SEQ ID NO: 3193 - DNA, 120 bp, synthetic construct
  source 1..120: mol_type = other DNA
tggcactaggagccttactctgttcaaatttggtgccttcctaccgttatggaaggaagctctgtattctccttactttctcaacctttgatcctaacagaggcagtttctttttctttt

SEQ ID NO: 3194 - DNA, 120 bp, synthetic construct
  source 1..120: mol_type = other DNA
gagacgctcctcacctcccagacggggcggcggggcagaggcgctccccacatctcagacgatgggcggccgggcagagacgctcctcacttcctagatgggatggtggccgggaagagg

SEQ ID NO: 3195 - DNA, 120 bp, synthetic construct
  source 1..120: mol_type = other DNA
agagttaggtgtgcctgaaagaagcaaggtaacgtcaccaagatcagagctactaaagaaagagcaattatcaagattcagatctttttgactacaaggcctgggatttcaatcactaga

SEQ ID NO: 3196 - DNA, 120 bp, synthetic construct
  source 1..120: mol_type = other DNA
tattctagccttcagagtgctggcacatctgtgaccttctgcttagatcatcatgaaaattgtcctgattcttttccagttacccctgtaacttctttaacgagttgtgatagagatgtt

SEQ ID NO: 3197 - DNA, 120 bp, synthetic construct
  source 1..120: mol_type = other DNA
taacattaacattctttttcttcctgacctgttctgcccactgttgagggtttcccttgtccttgctgcatgtaagacttctccagctgtttatcatcaagttgtcttcaaggatataga

SEQ ID NO: 3198 - DNA, 120 bp, synthetic construct
  source 1..120: mol_type = other DNA
gataaaatattaatagttataatcaaatggacatggtggatgagaagggatttctggacatgcgagccctaaacatgggggtaacaacaaaacaggaacaaatggggtggaactgtggta

SEQ ID NO: 3199 - DNA, 120 bp, synthetic construct
  source 1..120: mol_type = other DNA
gcatcatcctcaatgccaccaacccctctccttcctgtggcttttctaactggaactggaactcagaaagtacattaatcaccaatttgggaagctataggaaagtatgttttctaatat

SEQ ID NO: 3200 - DNA, 120 bp, synthetic construct
  source 1..120: mol_type = other DNA
aacatttatgtgtttaaatttatgagtttaaaaatagaaaaaaaaatgatggcccagaagagcaagttcagagtgctgttcatgagtgatccgcatgggaccgcgatgcctctgacgtct

SEQ ID NO: 3201 - DNA, 120 bp, synthetic construct
  source 1..120: mol_type = other DNA
gattattcctttcatttcttcctgtaggctaaattgtatttcccatgggattttctaagggtccttgattatcagatgtcagattgtgattgataggccggatctcagagaacctggaac

SEQ ID NO: 3202 - DNA, 120 bp, synthetic construct
  source 1..120: mol_type = other DNA
gagagaaaattagtagtgagaagtacagtgaacactggttccccagtctccctccaatacatgagatttgtatattttctttcgattggaaggaaattgtccaggaagtgattcccaaca

SEQ ID NO: 3203 - DNA, 120 bp, synthetic construct
  source 1..120: mol_type = other DNA
aaagtggaagcactttctagagcacacaaaacagcctccctaacacatgagaagtcaccagcaacacagaaatcaccaacaagtaggtcaccacatttttaaagatcataggaaattgtt

SEQ ID NO: 3204 - DNA, 120 bp, synthetic construct
  source 1..120: mol_type = other DNA
agagaatttaaagagagagagtgaaaacagggtcaattacgagaatttagtgtgtatccaatgataaaaataattgcagggcgctagttgagggtgtcagagagaaactcagaggagtag

SEQ ID NO: 3205 - DNA, 120 bp, synthetic construct
  source 1..120: mol_type = other DNA
catggctaaacgtgtttattaatttagaatcaaaatccgtgggagaaacacgtagcatatccaagacttgggcctatatgtactcaatggcatctgctaaccttggacgtttcaattctc

SEQ ID NO: 3206 - DNA, 120 bp, synthetic construct
  source 1..120: mol_type = other DNA
ctctgacgaggatgggctgggaaggtccattcacttttaaagaagctgttaaatagagtggacaaaacacaatgaaagaatcaaaatggaaccaataatgtcatctctaagaacagctcc

SEQ ID NO: 3207 - DNA, 120 bp, synthetic construct
  source 1..120: mol_type = other DNA
gtccataaatgctgtctgaccaaattgctgctttgaattctctgaaaccgttctgattctgagggatggcttgtttatgagtcatccttttctcagttagactctgctaaatttagtctg

SEQ ID NO: 3208 - DNA, 120 bp, synthetic construct
  source 1..120: mol_type = other DNA
attagtttggggctgtttctgcatccacatggcttacggtaaattacttaataaaacagactgtttcctcatctcctttatccatatgaggattttattccctgtccgtgtgtgacctgt

SEQ ID NO: 3209 - DNA, 120 bp, synthetic construct
  source 1..120: mol_type = other DNA
atttttataaatgaaaaacattatttgtaagactacaagcagtgatttcagtcttaggacttccatagagagctgggtgtcccatcattagagctcacctgcaaagcttccgtgcccaga

SEQ ID NO: 3210 - DNA, 120 bp, synthetic construct
  source 1..120: mol_type = other DNA
ggaggtaaaggggaaactcaaaggggctcagccatcggctggttatgttttaaaccacttatctcaggtgcagcaaaataataccctcagtccaactccgagatttaaaaaacaaaaatt

SEQ ID NO: 3211 - DNA, 120 bp, synthetic construct
  source 1..120: mol_type = other DNA
caggtgtgtgccagcacctcgtacttacccagctcagtctggagtttctctggaaaaagaacaagaataacatattaaggaatttggtgtaagggaaaggagagaaactattttttaaaa

SEQ ID NO: 3212 - DNA, 120 bp, synthetic construct
  source 1..120: mol_type = other DNA
ttccagtcataaatgttttatggctttcaatacatattgctatatgatagataatgtctcttgataaaaatacgaggtgctatggtgcagtccctgggacctctcctgctgatctgagca

SEQ ID NO: 3213 - DNA, 120 bp, synthetic construct
  source 1..120: mol_type = other DNA
cgtgacccaccgctcctggcacattttaataggtaacaaatgatatagcgcccccccttttttttctgatttgattattagtgaggtccaatattcatgtttaaaggatttttatactcc

SEQ ID NO: 3214 - DNA, 120 bp, synthetic construct
  source 1..120: mol_type = other DNA
ggagaagggggacatcatgacattttgcaacgcctctagcactgcaaacagagatgagctgtaatttattcattaattcctctgtgccatgaactctgcctttttcatcttaaaattatc

SEQ ID NO: 3215 - DNA, 120 bp, synthetic construct
  source 1..120: mol_type = other DNA
gacattcttagccttttcagtcttgttgatagctttctaactgagggcatttcacaaggaaagaacattttcacgtctcagtttctgcatagatgggattgggtagagaaaaaccaatgc

SEQ ID NO: 3216 - DNA, 120 bp, synthetic construct
  source 1..120: mol_type = other DNA
cagagtcaattttgtgtactgaaaacaaatgcagttcaaaaatgtgggtgaggttgctgtctgtcacctaccagctatgtgattcggtggcaaatctattactcttggtaagattttgag

SEQ ID NO: 3217 - DNA, 120 bp, synthetic construct
  source 1..120: mol_type = other DNA
aagaagcagctgcatttcttgaccccaaagtactagagtgaattaataatttaacgtggtgcaaccactgattcaagtgcttttaatgtctcatttaatcctaaagcctgtgctggcctc

SEQ ID NO: 3218 - DNA, 120 bp, synthetic construct
  source 1..120: mol_type = other DNA
tcctacacataagataacgtctgattgaaggatacctctgtaacctataaccagatctgctcatacacccaaacgttgatgtagttcggcttcaatgtagcttctgagctaatttgatgt

SEQ ID NO: 3219 - DNA, 120 bp, synthetic construct
  source 1..120: mol_type = other DNA
gaattaaaaaaacaaaaagcccaactggcagaaactggcaaacccagcaaccccactgtcccagctgaacaaaaatacttcacacagctaaaaactttaaaacttaccaggacaaggata

SEQ ID NO: 3220 - DNA, 120 bp, synthetic construct
  source 1..120: mol_type = other DNA
tgggagggaaaatctacaagtgaactctcaaaaaaattgctcaaatcaatgaagctttcgaagaatgttgggagaatccatctccagtgctcagatagactgtgagagaatatatcaggg

SEQ ID NO: 3221 - DNA, 120 bp, synthetic construct
  source 1..120: mol_type = other DNA
aaggtgtaaggaagggatagactggattaagaaaatgtggcacatatacaccatggaatactatgcagccataaaaaatgatgagttcatatcctttgtagggacatggatgaaattgga

SEQ ID NO: 3222 - DNA, 120 bp, synthetic construct
  source 1..120: mol_type = other DNA
tgtgaaaatgagattgcattctgaaaatcagaatagcacattcacctcctaacagctataatcctctcaacagtgaaactccggggacaagtggactttggctgggttcagttgtgaatt

SEQ ID NO: 3223 - DNA, 120 bp, synthetic construct
  source 1..120: mol_type = other DNA
agcattatgatgttacaaggtttgagccgattttttccttaagtttctttccctcccattatgagcagcccataattgggtcccctgacttacggttacgattcttaatgtaagggtttc

SEQ ID NO: 3224 - DNA, 120 bp, synthetic construct
  source 1..120: mol_type = other DNA
gtgagagtgggcctcctcagcttgttcctgatgttagaggaaaatcaggttttcactattgagtttgttagctctgggcttatcttatatagcctttgttattgtgaggtacattccttc

SEQ ID NO: 3225 - DNA, 120 bp, synthetic construct
  source 1..120: mol_type = other DNA
ccttgactgttttgtttgaggttcatataacttggttttctggtatgtccaggattacgtgagagtaacagagattggggtggaaattgagatgatgctgtattcaaatgagactgacca

SEQ ID NO: 3226 - DNA, 120 bp, synthetic construct
  source 1..120: mol_type = other DNA
ctgactgagattttcattctagctttgctatacatttgggcaagctttactttgggtaagtctgttctttccaggggtctcaattttcttagtttttacacagggatagtatgtgggtgg

SEQ ID NO: 3227 - DNA, 120 bp, synthetic construct
  source 1..120: mol_type = other DNA
agtagaacttctgaataggaaaatgcccaaacatttagggatggaggactgaggtattcttagttctggctgacctacagtctaagttgagctctttacatacatggctgtcatatactt

SEQ ID NO: 3228 - DNA, 120 bp, synthetic construct
  source 1..120: mol_type = other DNA
agagtggcgggaaggactgagagtcccatttagaaacttcccaaatcttaactgccaatatctttctttctaaaattgtgtttttgtatttcgtggtaaactcagttcaaagccgcggat

SEQ ID NO: 3229 - DNA, 120 bp, synthetic construct
  source 1..120: mol_type = other DNA
ctccggctcaaacacctctgacatttgtggacacgtagaaaaggataattaatgggttagcaggatgaaaggaaaactataccccaaaggatagcctagccattgaaattgatatgaact

SEQ ID NO: 3230 - DNA, 120 bp, synthetic construct
  source 1..120: mol_type = other DNA
gcttcaaagctatgggcaacatgtcaaggctagtaatgtaagttagagaaacttcaacaaagaattgtgcttagttgtgggaatccatgggagattctggaatgaagatgcataggaaac

SEQ ID NO: 3231 - DNA, 120 bp, synthetic construct
  source 1..120: mol_type = other DNA
cgccacactgaaaaaacaataaaaatatcaaaacctagcaaggatgtgggtcaatgtttctaccaacagacttctgaaggaaatagaaattgttaggatcattttggaaaacaagtcagc

SEQ ID NO: 3232 - DNA, 120 bp, synthetic construct
  source 1..120: mol_type = other DNA
ggtgaaaagcagactggagggagaattgaatagctccaatagtgtactttccttggtaattttcactcttccttggactatcacataggttgaaactctgatatatgtcaaggttgtaaa

SEQ ID NO: 3233 - DNA, 120 bp, synthetic construct
  source 1..120: mol_type = other DNA
gatcatccttcataggaactgaatcctgagttctaactaactaatcctagactagatttgggtgatttgagatattaatgaccttagcctcatagcctcattgcctgacacaagcaaaac

SEQ ID NO: 3234 - DNA, 120 bp, synthetic construct
  source 1..120: mol_type = other DNA
ggaaggagagtcatggcctctggtattgacggagtagtttgtattgaaatacccctcttgctggtaacaatgataaattctggaccaccttcattttccaatttatttcattgtgttgtg

SEQ ID NO: 3235 - DNA, 120 bp, synthetic construct
  source 1..120: mol_type = other DNA
tatcagaggtgtttatagtattctctgatggtagtttgtatttctgtgggatcagtggtgatatcccctttatcatttttattgcatctatttgattcttctctcatttcttctttatta

SEQ ID NO: 3236 - DNA, 120 bp, synthetic construct
  source 1..120: mol_type = other DNA
aggatttagtaatgtgcttatatcattaagtcaaaatttagtgcaggacggagctagtgggcaagtctcttagtctcaagaaaaagggcactaagaaacatagcccaggcatttaggctt

SEQ ID NO: 3237 - DNA, 120 bp, synthetic construct
  source 1..120: mol_type = other DNA
cctgttattaatgatctttatcccaatatcgaagtggtgcttctccctctttaatccaaccaatggatcaaggaattatagcagcttttaaggtttactatctgaagagggcctttgccc

SEQ ID NO: 3238 - DNA, 120 bp, synthetic construct
  source 1..120: mol_type = other DNA
agaagaaccccaaataaaattccctgtgcagggtttagcaggagcttttgcagacctcaacaagctccttaaaaatttgaaaacatgaaccccagcacaacaaggttttcattaataaag

SEQ ID NO: 3239 - DNA, 120 bp, synthetic construct
  source 1..120: mol_type = other DNA
ttgctacttggcatcaattcaccagttcttctgaaacttacgtctgttttgttttagggcccttatcaatggtaggtctttgtttcctcaacaccactggacagtgaaagattttgcact

SEQ ID NO: 3240 - DNA, 120 bp, synthetic construct
  source 1..120: mol_type = other DNA
tggggaaccaattcccttatcttcaataaacaatacagcaaggtagtctgcttaagtccgacttgcaggaagtcagattgctgtctctagtaacaatccaggaggctaaataataacttt

SEQ ID NO: 3241 - DNA, 120 bp, synthetic construct
  source 1..120: mol_type = other DNA
cctgcagttcctgacctttggaagcacaattttgctttttctgtccttacaaaacttttgcaatgcacttcactgtattacatctctctgggcttaaaataccttgagtgtgttttttcc

SEQ ID NO: 3242 - DNA, 120 bp, synthetic construct
  source 1..120: mol_type = other DNA
ctatatgtgaccttccgagactggcattttgtactcagaataatgcccttgggatctgtattaggtgctccagagcagttgtactaacaggatatgtatatatagaaagatacttctttt

SEQ ID NO: 3243 - DNA, 120 bp, synthetic construct
  source 1..120: mol_type = other DNA
tggtaaggagcacctcctgccaccacacagctcaaacacaaagaagaacaaatacgttgaactcactgagtacttttgtaccccattgtttactattgtacagttgtatgaatatcatgt

SEQ ID NO: 3244 - DNA, 120 bp, synthetic construct
  source 1..120: mol_type = other DNA
ggctgctctttcttgttcccttggatagagaaacatgctttccttaggatatttttgtctgtgactactgatgtttcctgttttccagtttctccagcactcattcctggatatattagg

SEQ ID NO: 3245 - DNA, 120 bp, synthetic construct
  source 1..120: mol_type = other DNA
tcactgcatttggaaatacccaaactatgggtccccgtcatttgttacggttcatgaaatattcttcccagtaaagatacaaaatgccaaccagaagccatttgtgccataagcaatgtt

SEQ ID NO: 3246 - DNA, 120 bp, synthetic construct
  source 1..120: mol_type = other DNA
gtggtatgagtggttttagtgttttgagtggactggttcttggactccacatattattggctacagagatagagacttgatttagaaaatcacagttgccactttctaagtaagcccttg

SEQ ID NO: 3247 - DNA, 120 bp, synthetic construct
  source 1..120: mol_type = other DNA
ctctgctgcttcctagctgtgtaccttggataagtcatttaccctctctgctgcagtttatctgtaaagtaagacaacagtacacacttgataaaattatcatgagcattaaggaagcta

SEQ ID NO: 3248 - DNA, 120 bp, synthetic construct
  source 1..120: mol_type = other DNA
actaaaggaaaagcctcttaagggtcttatagaaatcctgccactttcacctgaaagaataatcttcagttatgtggcacatggccaagagtaaaagtctttagtcacttggaagcagac

SEQ ID NO: 3249 - DNA, 120 bp, synthetic construct
  source 1..120: mol_type = other DNA
tctgttattgtctctctactgaccaaagggtggtcagagagtataggatgaagcagatttgtgatatccttgaatagatctgctctttactatgaattctatcatctactcccagcgtat

SEQ ID NO: 3250 - DNA, 120 bp, synthetic construct
  source 1..120: mol_type = other DNA
taattcctacccaagcgcaggggaatagcatctctaatgaaattctctaaagaggcaagagcaggcacaatgagtttttgtttgattaaagattccatttagtgcttatccaacctagca

SEQ ID NO: 3251 - DNA, 120 bp, synthetic construct
  source 1..120: mol_type = other DNA
tagcacatttgttaacgtcctagtgcatttgttgatatcaacagttcacagtttttattctgatagggatctattccagcagaccagcttctgtgacctctcaggatgagaaaaagtaac

SEQ ID NO: 3252 - DNA, 120 bp, synthetic construct
  source 1..120: mol_type = other DNA
tcaaacacacaggaaattagagtttgaaagaaaacggagaaccatgagcactgtccaaataggaacttctctcctatcacagagaaagggaactgaaagtcatttctcaagtgtcccaaa

SEQ ID NO: 3253 - DNA, 120 bp, synthetic construct
  source 1..120: mol_type = other DNA
acaacaaaaaaaaacaatggattcaccatccgatgggctccctcactgccaggtcactcttcatggaagtatttgtattccagtcctttctgtggaaagaaattaacattctccttttca

SEQ ID NO: 3254 - DNA, 120 bp, synthetic construct
  source 1..120: mol_type = other DNA
tcccttacgcaaactctccaactgtcattgcacagacatatgatctgtatttagctctcactttaggtgtttccattgattctattctcactaatgtgcttcaggtatatccctgtctag

SEQ ID NO: 3255 - DNA, 120 bp, synthetic construct
  source 1..120: mol_type = other DNA
tcggtatatattgagcacatatattgtgttgaagattactagaaggaaaagtcatcaaaaagcaacaatttaccccaggaaaaggggagggaaggcatgctgatatgagttgcctcatgg

SEQ ID NO: 3256 - DNA, 120 bp, synthetic construct
  source 1..120: mol_type = other DNA
cccttggtgttggttattctcaatgtcaatcataacagaacatcttccataataacagtcccaatttaaggagcattaagataaaaggtggaattgccaaggtcaatccagacgagaacc

SEQ ID NO: 3257 - DNA, 120 bp, synthetic construct
  source 1..120: mol_type = other DNA
tctttgtgttagattattgtaactgattttccctccaagggtctaaccttgccattaacaagccccaaattctcatgccagaggtctgagaactttatgggtttgatcctatcttgttgt

SEQ ID NO: 3258 - DNA, 120 bp, synthetic construct
  source 1..120: mol_type = other DNA
tgggaaagcaacaccattaaccatttcctccccacacgcattccaacatctgaacccaatcctaccaacacccagaaagcaacaacaatgtaaacatccatattcagtttatttttaaac

SEQ ID NO: 3259 - DNA, 120 bp, synthetic construct
  source 1..120: mol_type = other DNA
ctcttctcaagcactggggtatggaccaacactcaatctcctttatttcaaggtttcctcctatgatgcttgtgtgaaactcggtgttctaactgtttcataatatctgctacaattaat

SEQ ID NO: 3260 - DNA, 120 bp, synthetic construct
  source 1..120: mol_type = other DNA
tcaaaggattaagagagaagaggaaggaatctgaagcaaggagctcaaaactgatcttcaactccttggtaactatgtgtgtcttgctataggtgatggtgtttcttagagagaagatca

SEQ ID NO: 3261 - DNA, 120 bp, synthetic construct
  source 1..120: mol_type = other DNA
tgaagactggccttacccattctgttagacatagtctcagatgcctattgtattaccgagagagtagtctgactgattcttgaaaccaccttatatttgaagatgtgtctttgagtggaa

SEQ ID NO: 3262 - DNA, 120 bp, synthetic construct
  source 1..120: mol_type = other DNA
ttataaaataaatagcttaacacagagaatacactaaaacttagacaagcatggattaagaaagcaaaaagtaaacccatatactaccatgtaagaaaaccgtttttggccaggcgcggt

SEQ ID NO: 3263 - DNA, 120 bp, synthetic construct
  source 1..120: mol_type = other DNA
aaacaaaatagcttcactgatctaaaaatgacccaggctccatctactcatccttccttcctccctctgagccattggcattctctgagctatttactattgttttgcctttttcagaat

SEQ ID NO: 3264 - DNA, 120 bp, synthetic construct
  source 1..120: mol_type = other DNA
attccccccacacaatcaccttaacaacttaaaaccactaatttctttgctattaatctctagaatagtgtcattttgaaaatactagttaaatggaatcatgcagtatgtgactggtgt

SEQ ID NO: 3265 - DNA, 120 bp, synthetic construct
  source 1..120: mol_type = other DNA
aaagaaggaaggaaaggaaagaaagaaaaagaaaaaggaaggaaggaaagaaggaaggaaggaagaaagaaaaagaaagaaagaaggaaggaaagaaagaaagaaagagaaagaaagaaa

SEQ ID NO: 3266 - DNA, 120 bp, synthetic construct
  source 1..120: mol_type = other DNA
gtattagctgtggggttgtcacagaaggctcttattattttaagttatgttcacttactactcagtttattaagagtttttaaatgaagggatattgaattttatcaaaaaccattcctg

SEQ ID NO: 3267 - DNA, 120 bp, synthetic construct
  source 1..120: mol_type = other DNA
tttctttttcatgtgggcatttgatgcataaatttcccacttaacactgccttagctgtgtcccagagattctggtatgttgtatcgttgttctcatcagttttaaagaacttctcaatt

SEQ ID NO: 3268 - DNA, 120 bp, synthetic construct
  source 1..120: mol_type = other DNA
ggcagaggttggaacagtttggagggctcagaagaagataggaaaatgtgggaaattttggaacttcctagagacttgttgaatgcctttgcccaaaatgctgatggtgatgtggacaat

SEQ ID NO: 3269 - DNA, 120 bp, synthetic construct
  source 1..120: mol_type = other DNA
tttttatttctaggatatcttgatacatctcattacatttcacaatctgcatgggaaggaaaaggatggtagagaacatggacatcctgtctcccactgcaagggcgtggaacatggtaa

SEQ ID NO: 3270 - DNA, 120 bp, synthetic construct
  source 1..120: mol_type = other DNA
cagaggatgcaagccccaagccttggcagcttccatgtggtgttgagcctacgtgtacacagaagtcaagagttgaggtttgggaacctccacctagatttcagaggatgtatggaaatg

SEQ ID NO: 3271 - DNA, 120 bp, synthetic construct
  source 1..120: mol_type = other DNA
tctgctgccatgtgagatgtgcttttcaccttccaccatgattgtgaggcctccccagccatgtggaactgcgagtccattaaacctccttcttttgtaaattgcccaatctcaagtatg

SEQ ID NO: 3272 - DNA, 120 bp, synthetic construct
  source 1..120: mol_type = other DNA
taaaaaaaaaaaaaaacctcagtaaactaggcattggaggaacatacttcaaaataataagagccatcaatgacaaacccacagccaacaacatagtgaatgggcaaaagctggaagcat

SEQ ID NO: 3273 - DNA, 120 bp, synthetic construct
  source 1..120: mol_type = other DNA
agaactagaacaaactactttaaaattcatatggaagcaaaacagagcctaaatagctaaggcaatcctaagcaaaagaataaagtaagaggtactatgttgctcaacttcaaactatac

SEQ ID NO: 3274 - DNA, 120 bp, synthetic construct
  source 1..120: mol_type = other DNA
cccagatagttattgctcacctgcaacagaaaatatttgcaaactatgcatctgacaaaggtctaatatccagaatctataaggaacttaaacaaatttacaagaaaaaaaccaaaccac

SEQ ID NO: 3275 - DNA, 120 bp, synthetic construct
  source 1..120: mol_type = other DNA
tttgttgtcttgctggcttcaggagtgaagctgcagaccttagcagtgagtgttacagctcataaaggtagtgcggacccaaagagtgagcagcagcaagatttattgcaaagagtgaaa

SEQ ID NO: 3276 - DNA, 120 bp, synthetic construct
  source 1..120: mol_type = other DNA
tacacttttatttcagagatttcgggatcataaagggagtgtaccaaggacagtttgtgactagcctcctcacattatccctcacattatcatttctcatctcttctcccctaaactttc

SEQ ID NO: 3277 - DNA, 120 bp, synthetic construct
  source 1..120: mol_type = other DNA
ccctccgctggaggagcttaaagagaagtgaaattgatggcaaaaaaccaaacacgcaacaccttatacaggaacgaaaaatgttaagagaagtgtggagttctagaagaaagaatagga

SEQ ID NO: 3278 - DNA, 120 bp, synthetic construct
  source 1..120: mol_type = other DNA
caaatctgatctgaagaggtaaggactcaaaagtgtcacagagctcttactggtgacatgtgcatctgtagtttcaatatatataaacatacaaacatacgtatgcatgtgtaaatacac

SEQ ID NO: 3279 - DNA, 120 bp, synthetic construct
  source 1..120: mol_type = other DNA
accaaggtttactgatttatttgccttcccagtcgccaagtcatattcttaatttctgtgtcactggtccactactcactgcctcagctaattcattttctaactttcagtttcctactc

SEQ ID NO: 3280 - DNA, 120 bp, synthetic construct
  source 1..120: mol_type = other DNA
cgctgaattgaggttttcttacacgctcatcatcccttattctgaaaattccaggggccccaagtttcatagaattcagaatattacaggttttagacaggcagcattctataatgaagt

SEQ ID NO: 3281 - DNA, 120 bp, synthetic construct
  source 1..120: mol_type = other DNA
ctgggtatcctgtactttatttggcaaccttagcccaacttgctaataatgctcagaaggagtgaatttaatacttctttgttttctttaacacatgcctatgacagcgtgcacataggg

SEQ ID NO: 3282 - DNA, 120 bp, synthetic construct
  source 1..120: mol_type = other DNA
atattctaagtcactaataaatattggctgtatgaactaatagccttttgcataacctgtcaccactgtacacaggggccttctagtgcttcattgccaatgactgagcatctgtctctg

SEQ ID NO: 3283 - DNA, 120 bp, synthetic construct
  source 1..120: mol_type = other DNA
taacaagacatgcaaaaagacatcccaagtctgttcactttatctggatctgtctttgtcactactacactacatgaagccaaaaatttgtcttccctggagaattctgctgttctccac

SEQ ID NO: 3284 - DNA, 120 bp, synthetic construct
  source 1..120: mol_type = other DNA
cataatattaatggactctccttgtaacctcccaggagcttccaatatgtttaaataaaacttaattccttactatggccaccaaggccgaatatgatgcagctcctgactttctctctc

SEQ ID NO: 3285 - DNA, 120 bp, synthetic construct
  source 1..120: mol_type = other DNA
aagctcctacaccctttcattctaatgacatgctatatcccttctcctccctgtgagaaattaaggcaaacttcttttctctcctctttctagttggaagaaggattcacagataaggaa

SEQ ID NO: 3286 - DNA, 120 bp, synthetic construct
  source 1..120: mol_type = other DNA
gtagattggaaacattttctcccattctgtaggttgcctgttcactctgatggtagtttcttttgctgtgcagaagctctttagtttaattagatcccatttgtccattttggcttttgt

SEQ ID NO: 3287 - DNA, 120 bp, synthetic construct
  source 1..120: mol_type = other DNA
tagatatacaatcatgtcatctgcaaacagggacaatttgacttcctcttttcctaattgaataccctttatttccttctcctgcctgattgccctggctagaacttccaacactatgtt

SEQ ID NO: 3288 - DNA, 120 bp, synthetic construct
  source 1..120: mol_type = other DNA
agaattagtttctaaaactgaacatgaattgactctccttgtaaccatccagtagtgtctcacatctatttaaataaaattcaggctgggtacggagactaatgactgtaatcccagcag

SEQ ID NO: 3289 - DNA, 120 bp, synthetic construct
  source 1..120: mol_type = other DNA
aacctgatgtcttttcttcagtgcactattactctctaacgttatcttctttgttaattgcatattgggttaatgtctgtctcctctattgttgtgtaacttccatgagagtcgggaccc

SEQ ID NO: 3290 - DNA, 120 bp, synthetic construct
  source 1..120: mol_type = other DNA
gttagagcatgtaggacatgtaggagaaatttctatagaaaggttagaagagattcgtaataaacactaagctgggccaggttttccgaggatgccttaagttctttaggcacgaaagaa

SEQ ID NO: 3291 - DNA, 120 bp, synthetic construct
  source 1..120: mol_type = other DNA
aatctgcccaggccattacacttactgttctgaaatctaaaactgtgtatgacccatgtcatctcctctggcatttagtattacagcatcttgctatcatcaagtgttttcctgcttcaa

SEQ ID NO: 3292 - DNA, 120 bp, synthetic construct
  source 1..120: mol_type = other DNA
cttacacagtctcatggactgtgtcatgagcaagtagtcaagctcctttcgtggaggagataatttgggatccaataatacagatgcacaatctctgaccaaaaagtcacaaagtcttaa

SEQ ID NO: 3293 - DNA, 120 bp, synthetic construct
  source 1..120: mol_type = other DNA
cctttgtatggcatttaccctaacaatgtgataaggtcaactgtgcaatccaagtattcatgggtctgagagatcgatcgaagactgtgaaagttagctgttcatagaacaactcttttt

SEQ ID NO: 3294 - DNA, 120 bp, synthetic construct
  source 1..120: mol_type = other DNA
accgcggctggactaaagtctgtaacctgtctttatggagaactacttttgaggccgtacacttctttcagtaacaatattgtctaagtaatggtatggcaaagttgtttctaccttttc

SEQ ID NO: 3295 - DNA, 120 bp, synthetic construct
  source 1..120: mol_type = other DNA
gatagatttcccttgtagttgtgctctcaaaccctttatttcctcgtttctcctttcgtggagaaggatttaatttgcagggaataagcaacgaccgagcaatatattctcccagttcaa

SEQ ID NO: 3296 - DNA, 120 bp, synthetic construct
  source 1..120: mol_type = other DNA
ggttagcatctctgcagcagtggtgtgataaatctgatgcttcattgccttctatagtcatgcaagaaattgtgcataaggttcttgtgacccttgcatgatatgtaaaaaggattgcac

SEQ ID NO: 3297 - DNA, 120 bp, synthetic construct
  source 1..120: mol_type = other DNA
tgagccaaattctttacattgaagggtagaaggcgcacagcaccaaatacagatactagcaatcctaaagtgaacaggctctgtacaccattatttaccacactcctttcaattccttca

SEQ ID NO: 3298 - DNA, 120 bp, synthetic construct
  source 1..120: mol_type = other DNA
gcctcagtggaaattctgagttggtcatgattctccagcctctggctctctacactgaatggattcaacaagaaagtggttgaatttatgcaactgtctagttatttataatgaaacaag

SEQ ID NO: 3299 - DNA, 120 bp, synthetic construct
  source 1..120: mol_type = other DNA
ttcttaatttctgtgccactggtccactaattatctgtagtaatgaatcacaaccagagccattttattcccatttaatgccccaactaactcatttctctcagtctcccactcccaaca

SEQ ID NO: 3300 - DNA, 120 bp, synthetic construct
  source 1..120: mol_type = other DNA
ttggaattagcagcccttgcatctctgctcccacttcaagaaacaacctgatacatatgaatatcaggaattctgtcaataattcagacacaatctggtcactactcactaataatgggc

SEQ ID NO: 3301 - DNA, 120 bp, synthetic construct
  source 1..120: mol_type = other DNA
ttcttgaaaaaaatctattttccttgacttacatgcattgtgttctcttggtttttcttcaacatccctggggctccctctcagtcccctttgctggcctgtgacttcttcttttttcta

SEQ ID NO: 3302 - DNA, 120 bp, synthetic construct
  source 1..120: mol_type = other DNA
gcggtttccaccctataatccttctttaacacctgagattgattttaccctatggcttcagctctgagacatttcaggaggcaaagatactgttaacacatagaaacaactgaggatttt

SEQ ID NO: 3303 - DNA, 120 bp, synthetic construct
  source 1..120: mol_type = other DNA
ttgagataggcactccttccttatgtgccttagtgtttccaggagcaggattctcaccatgctgcaataaaaatgcgcatttgactttgtactcagaattgtactaaaagctttctatgc

SEQ ID NO: 3304 - DNA, 120 bp, synthetic construct
  source 1..120: mol_type = other DNA
ctcagtcacagggaagccaagggaagatgggcatgtaatatttgaagtaagtttcttatagggagcatgtcgaagagtcattgcttttcactctggcatttgtctttttacacactttac

SEQ ID NO: 3305 - DNA, 120 bp, synthetic construct
  source 1..120: mol_type = other DNA
attatcatttctattccagttaaagcacttcctttagcccttgttttaacataagtctcctagcatgaaattctcttgattttccttcctttaagtatgtcatggccaggcgcagtggct

SEQ ID NO: 3306 - DNA, 120 bp, synthetic construct
  source 1..120: mol_type = other DNA
gtttgagcatttgagaatcaatcagtgtgattcactacattaactgaaggaaggagaatacacatgcaaccacctggatagagtcatgaaatacgatttgacagaatttagcacttggcc

SEQ ID NO: 3307 - DNA, 120 bp, synthetic construct
  source 1..120: mol_type = other DNA
tgtttgagctggttatttgcagtgaggggagcaggagattttatgtgatcgcttcatcctgaattgtctgaatcaaatgtatcatataaggtctgttatcgttagagaagtcagatggtc

SEQ ID NO: 3308 - DNA, 120 bp, synthetic construct
  source 1..120: mol_type = other DNA
aattaaacagaaatatccaggctcattgggttggtctctttctgatcatgtgcaagcagttctgttgctgtgttctcatcctctggaggaaaaagctaaagcagggttttttgtttgttt

SEQ ID NO: 3309 - DNA, 120 bp, synthetic construct
  source 1..120: mol_type = other DNA
tttaagtgtacagaaaaattgcagagaaagttcagggagttgccacaccccttcttccctaaaacagccctctgttcagtttctcctattactaacatcctgcatcattgtggtacactt

SEQ ID NO: 3310 - DNA, 120 bp, synthetic construct
  source 1..120: mol_type = other DNA
acaaaagtatcctatgaagtagtttcactgacctaaaattgtcctagactccaccttcttatccattcctcttcctcctgaacccctggaaaccagtatttactgtctctgtatttttgc

SEQ ID NO: 3311 - DNA, 120 bp, synthetic construct
  source 1..120: mol_type = other DNA
tggacagacgttttccactgatttgggtaaatacttcaaattgcaattgctgaatcttatggtagagtatgattagcattataagaaacagccagagtgtcttccagatgaggcaggaga

SEQ ID NO: 3312 - DNA, 120 bp, synthetic construct
  source 1..120: mol_type = other DNA
aattgtcaaagagctggaactcagcagatcgtcacttccagaccatgagatgccagtccccatcattgattatgattgtttccttattgtctggagttcttattttcccatacatagtaa

SEQ ID NO: 3313 - DNA, 120 bp, synthetic construct
  source 1..120: mol_type = other DNA
aattaagagaagggtttacctacatataaggatttcagaatccaccagactgcccaggaattttagtattcctgggtggaataatatatggccaactctttactgaatgtggctcgtgag

SEQ ID NO: 3314 - DNA, 120 bp, synthetic construct
  source 1..120: mol_type = other DNA
catggcgcccggccgacaaaaagatgctttttaaaaactttttacttggaaatcattatagagtcacaggaaattgcaaagacagtacagagaacatatgcttacccttttgagaggtga

SEQ ID NO: 3315 - DNA, 120 bp, synthetic construct
  source 1..120: mol_type = other DNA
ctcccaagtagctgggattacaggtgcctgccaccacgcccggctaattttttgtatttttagtagagacagggtttcactgtagtcaagatggtctcgatctcctgacctcatgatctg

SEQ ID NO: 3316 - DNA, 120 bp, synthetic construct
  source 1..120: mol_type = other DNA
tccccacaagcagagggagccagctccagcctcggccagccccagagaggggccctcatatcgcagcagcaggctgaagggcttctcaagcatggccagagcaaacgccaaggccgagga

SEQ ID NO: 3317 - DNA, 120 bp, synthetic construct
  source 1..120: mol_type = other DNA
ctaggaggaaaactagtgtttctgctgctgcgttggtgagtgcaactattccgatcagcagggtccagggaccattgtgggttcttgtgcaagaggtgtttctgctgctgtgtcggtgag

SEQ ID NO: 3318 - DNA, 120 bp, synthetic construct
  source 1..120: mol_type = other DNA
cccagtatggatccccactgcaacctcaactcagatcattgggactggagtcgcaaacatctgttgacctgtgttctagaaggactaaggagaattaggaaaaagcccatgaattattta

SEQ ID NO: 3319 - DNA, 120 bp, synthetic construct
  source 1..120: mol_type = other DNA
aaccgtggagttattgcacgcagtgcaaaaacccaaggaggtggcagtcttacgctgccgaagccatcaaaagggaaggagaggggagaaccacagcataaacagctggcagaggcaggg

SEQ ID NO: 3320 - DNA, 120 bp, synthetic construct
  source 1..120: mol_type = other DNA
taagggaactcttgtagaaccagagttaggaaaattgcctaataattggtctgctcaaatgtgagagctatttgcactcagccaaaccttaaagtacttacagaatcaggaaggagccat

SEQ ID NO: 3321 - DNA, 120 bp, synthetic construct
  source 1..120: mol_type = other DNA
attcccaacagcagttggggtgtcctgttcagaggggggattgagaggtgaagccagctggacttctgggtcgagtgaggacttagagaacttttctgtctggctaaaggattgtaaatt

SEQ ID NO: 3322 - DNA, 120 bp, synthetic construct
  source 1..120: mol_type = other DNA
gatccatccaagatgttgcgtgtatcaacaatttgctcttttttattgctaaggaatactctatcagacggaggcactgcagtttaactatttccctgttgagggacattttggctgttt

SEQ ID NO: 3323 - DNA, 120 bp, synthetic construct
  source 1..120: mol_type = other DNA
cactttctcctggatcattgtttgaaaagactctagactctattaccttcattgaattcttttgcatctttgtcaaaatgagttggcataggtatatttctggattctctatactgctcc

SEQ ID NO: 3324 - DNA, 120 bp, synthetic construct
  source 1..120: mol_type = other DNA
tcagtataaatccatttcccctcatgacacctctcctcacattacctgtgaactgctttagactctccgtcaagaatagacatttttgggcaaaaatgtggattttctcttgcaaatctg

SEQ ID NO: 3325 - DNA, 120 bp, synthetic construct
  source 1..120: mol_type = other DNA
taaaccagacttgcacccttgaataaacgctacttggaataatttacatattttttcagtttgactgatttttatttgctaacattttgttagggagttttgcatctacagtcatgtgag

SEQ ID NO: 3326 - DNA, 120 bp, synthetic construct
  source 1..120: mol_type = other DNA
aggcgtgagtcaccaagttctgcccttatattcattttttttcttcttcttgctttaggttattttagactacttttccagattcttgaggtgggaactgagattattggtttctgacct

SEQ ID NO: 3327 - DNA, 120 bp, synthetic construct
  source 1..120: mol_type = other DNA
ctcaaagtttaactgtgtatttacttgtccatttctccttccagttctgaccatttttgctctacttatttgtaacttggttgtttggtgcacacacatttagagttgctctgccttctt

SEQ ID NO: 3328 - DNA, 120 bp, synthetic construct
  source 1..120: mol_type = other DNA
ttccattatcatttctattccagttcaaggacttcctttagcctttgttttaggataagtctgctagcatcaaattctcttgattttccttcctctaagaatgtcatggctgggcgctgt

SEQ ID NO: 3329 - DNA, 120 bp, synthetic construct
  source 1..120: mol_type = other DNA
ggaacaatcaacactacctttatgctaatttcaaacatatttgaaaaaaggaaaaacacttgcagttacgtttgatgagatgtgtgtaaactttaagatctgaaaagaactctacaacaa

SEQ ID NO: 3330 - DNA, 120 bp, synthetic construct
  source 1..120: mol_type = other DNA
aggaatccaacttacaagggacgtgaaggacctcttcaaggagaactacaaagcactgctcaatgaaataaaagaggacacaaacaaatagaagaatactccatgctcatgaataggaag

SEQ ID NO: 3331 - DNA, 120 bp, synthetic construct
  source 1..120: mol_type = other DNA
aatcaaaaccacaatgagataccatcttgcaccagttagaatggtgatcattaaaaagtcaggaaacaacagatgctggagaggatgtggagaaataggaacacttttacactgttggta

SEQ ID NO: 3332 - DNA, 120 bp, synthetic construct
  source 1..120: mol_type = other DNA
ctgtctccttcatatctggagtagtagaggagttaggcaatgaaaatggcaagaaaaatatacaaaagggataatagttgcatccaggtaagatggtcattatttactctgggcaaaatc

SEQ ID NO: 3333 - DNA, 120 bp, synthetic construct
  source 1..120: mol_type = other DNA
ttgaaagtattgctcctatcttgatttccttcctgatctttgtttgctcaaagctacagagatgtttgttgtcttctatctacctccctacttcccacaccaccagtatgaagtcagaaa

SEQ ID NO: 3334 - DNA, 120 bp, synthetic construct
  source 1..120: mol_type = other DNA
aggtttacaccaatctatgctcacagtgccacacacagcaccaaatgtcattctgcagtgtgctgtcacttcacatgttgcatagcttttatgatgtacacaagttttataatcaagaca

SEQ ID NO: 3335 - DNA, 120 bp, synthetic construct
  source 1..120: mol_type = other DNA
tggtgaaacagcctgaactgctcatgaattaaagttcataaaatagcacagagcggaaaaacttttctacccacaagcatgccaagaataaaaggcatacagaacctggaacaaaaggct

SEQ ID NO: 3336 - DNA, 120 bp, synthetic construct
  source 1..120: mol_type = other DNA
ttgattattaaggatataataaaggatgcaaacgaacagccagataaagagataaacagggtgtgatctgaaagggtccagagcacaagagctttccttcccatgaagttgggatgtgct

SEQ ID NO: 3337 - DNA, 120 bp, synthetic construct
  source 1..120: mol_type = other DNA
agtccctcatagctagatgtgaccttgtgactaagttctggcctatgagaagtaagacgtatctcatggtgttttgagaaatctacttaaaaatgtaacatgacaggaaacagtggctca

SEQ ID NO: 3338 - DNA, 120 bp, synthetic construct
  source 1..120: mol_type = other DNA
ttgtgcaattatcacaatccagttttataacatttctgtcatgtccaaaatttctctatttataattaattcccaccaataccccaagccctaggcacccaatgatctgctttttgtgtc

SEQ ID NO: 3339 - DNA, 120 bp, synthetic construct
  source 1..120: mol_type = other DNA
aaacttgccctgggaaaactgccctcatgttcatgttcaggggagcctgtcagataagtctatttttgttcccttttactgttgaatgatattgctttgcatggatgtagtttatccatt

SEQ ID NO: 3340 - DNA, 120 bp, synthetic construct
  source 1..120: mol_type = other DNA
taaaacgacccaaaaccctgaattgaggatgcctatcagcaatctataggccttaatgtggaatttaactacaaatactaacaacccaatggtaccacagtctatcatttccctaccctg

SEQ ID NO: 3341 - DNA, 120 bp, synthetic construct
  source 1..120: mol_type = other DNA
catcccacacattttcgttcttctttataattccacaccacaagtctcatataaaatgagacaaatcatttcctcaacttagggaagaaagcctattttattgcaactctggaatcaaac

SEQ ID NO: 3342 - DNA, 120 bp, synthetic construct
  source 1..120: mol_type = other DNA
ctaagtggagaggaggagttttggtataaattgcctgatcaggaatttggatccaaagtctttcctgctatttctgtctcatgccttatcacctctgccatcattctaggaaaactgaat

SEQ ID NO: 3343 - DNA, 120 bp, synthetic construct
  source 1..120: mol_type = other DNA
gcatcttgctctgtgcagattcagactgtgctcctgggagaggaaaccaggtttagtgatttttatcccaaattgaacctttttaattgagaccctgcaatattcatagctttgaaaatg

SEQ ID NO: 3344 - DNA, 120 bp, synthetic construct
  source 1..120: mol_type = other DNA
ccatgaggcctcacagtgtcatcagcctggaatttagtctttatagtgggggctcatcagatttgagagatgtgaaaaattgtgtttgtttcttcatcacttgaaattgggatgcattgt

SEQ ID NO: 3345 - DNA, 120 bp, synthetic construct
  source 1..120: mol_type = other DNA
ttttctttccagaatgacatttggatcaaggcaggcagggtctgggactcattacttggggtgcttatgcctaggaaaatccctaacactagcagactctcaataaatacatttttttta

SEQ ID NO: 3346 - DNA, 120 bp, synthetic construct
  source 1..120: mol_type = other DNA
tttagacctaaagaagcttcagaagtgcctcagaggtctcctcaattcccctagaaattaatctaatgcttttgcaaacaaacaccacacacttttatttcagagactgcgtgaagggtg

SEQ ID NO: 3347 - DNA, 120 bp, synthetic construct
  source 1..120: mol_type = other DNA
agtaaaagtgaggccaaaaaccaaacacacaagagcttagacaggaatgagaaatgtctgaagtgtggagttccagaacacagagtaataggatgatctcaattacattagggtgccaga

SEQ ID NO: 3348 - DNA, 120 bp, synthetic construct
  source 1..120: mol_type = other DNA
ctttgatcgtgttccagctgccagggagttcttcctcacttttttttttttgatggaacatagagaaatagcaagagtaagaataagagccagaatccaggtggctcatcagtaattatg

SEQ ID NO: 3349 - DNA, 120 bp, synthetic construct
  source 1..120: mol_type = other DNA
taatgaagcaagcaaaaataaaccataaagaactgaattgggtgctgagtgtataaaagatgtgagtctagaattttcagaaagagcacagtgtgaaacagtgctctcagcctcagcact

SEQ ID NO: 3350 - DNA, 120 bp, synthetic construct
  source 1..120: mol_type = other DNA
gtgtagagaccttcacaaagctccgtttgccctttagaaatgatggcagagaggtgtgcaccctggatcaaacaatgtctatctttctattcctaaattatgtaagcactttctttacag

SEQ ID NO: 3351 - DNA, 120 bp, synthetic construct
  source 1..120: mol_type = other DNA
gagggcagaaacactggtttatgtctaataatgcagtatacctaaacctcacacaaaaggcacctgctgacatagaagaaatggactttctacatgctcagatttaaactgcaatctgat

SEQ ID NO: 3352 - DNA, 120 bp, synthetic construct
  source 1..120: mol_type = other DNA
agtcactgcgcctggcccaccatgagtcttttaaatgccattgaccttctgattgctccacacaaatgtcaataaatcatctcaaacttaaacaaaacttttatttccaaccacccactt

SEQ ID NO: 3353 - DNA, 120 bp, synthetic construct
  source 1..120: mol_type = other DNA
aataaaataaaattcaagtttcttaccatggacatcagagcctgatatgaggctcccgacttcctctctgcatcctacctcatcttctgccactgcatttccttgcttgctcacttcagt

SEQ ID NO: 3354 - DNA, 120 bp, synthetic construct
  source 1..120: mol_type = other DNA
ccagcactctttcaatttgatgtcacactagaatccttctcctcccggtgagaaatacaggcaaatttcttctttctcctccttctaattggaagaagaattcacagataaagaaacagt

SEQ ID NO: 3355 - DNA, 120 bp, synthetic construct
  source 1..120: mol_type = other DNA
ctccacatactaaagatctcagcttcagctccaaggatttttccccataagaaaaagcactaagcataacttctgtcagagaccttgcatacattacagggtaaacattggagttcagaa

SEQ ID NO: 3356 - DNA, 120 bp, synthetic construct
  source 1..120: mol_type = other DNA
ttgacaagacaattgtttgcagaagtgagtgtgtgagtgtgtttaggagtaaaggagatggagggaacatggttgtaaattggagacctttaatctggtccttattgcaccgtatcttaa

SEQ ID NO: 3357 - DNA, 120 bp, synthetic construct
  source 1..120: mol_type = other DNA
tctccctctgatgccgagccaaggctggactgtactgcagccatctcggctcactgcaacctccctgcctgattctcctgcctcagcctgccgagtgcctgggattgcaggcgcgcaccg

SEQ ID NO: 3358 - DNA, 120 bp, synthetic construct
  source 1..120: mol_type = other DNA
gattgttattgtgtctgtgtagaaagaagtagacataggagactccattttgttctgtactaggaaaaattcttctgccttgggatgctgttaatctataaccttactcccaaccccgtg

SEQ ID NO: 3359 - DNA, 120 bp, synthetic construct
  source 1..120: mol_type = other DNA
agtacccaccatccactggtcaaggacctcaggatttcaaatttactaacttaagcgtcctatgattggacctcaagcttgcctacctgtccagcttgctttctttttattatgaaataa

SEQ ID NO: 3360 - DNA, 120 bp, synthetic construct
  source 1..120: mol_type = other DNA
ggatgcgcatagcaatatcgctactcatgttagtgaatggcagcagtatacaatttgaagaagatactgtgtagcaattctagttccttcaaaagaatcccctcattatcatccttaccc

SEQ ID NO: 3361 - DNA, 120 bp, synthetic construct
  source 1..120: mol_type = other DNA
gaaaagaaggaacaaactgtgtaaaaaagaaactaattgagatgatggtaatctaggaaatccagctaaggttcagcttagtatttgaggttaaaagggtggtgatgccggcagtggcga

SEQ ID NO: 3362 - DNA, 120 bp, synthetic construct
  source 1..120: mol_type = other DNA
gtaaaagccctgggctcaggcggacttgagaagaggatggagagagcatagagacaggacagggacatgagggatgagttgctgaggagaggagttaacctccccagcgtctcctctcag

SEQ ID NO: 3363 - DNA, 120 bp, synthetic construct
  source 1..120: mol_type = other DNA
caaaattatcctatgaagtagtttcgctgacctaaaattgtcccaggctccacctactcatgcactcctctttctcctgaacccctggaaaccactatttactgtcactgtatttatgcc

SEQ ID NO: 3364 - DNA, 120 bp, synthetic construct
  source 1..120: mol_type = other DNA
aagtaagtccatatcctcccatgtaacgagaccatttttaaggcagtttcaagtgtataaaaaacttccagagaaagtttagggagttcctacatacctccttccctaaaatggccctct

SEQ ID NO: 3365 - DNA, 120 bp, synthetic construct
  source 1..120: mol_type = other DNA
cccgagtagctgggactacaggcacccgccaccatgccctgctaattttttgtatttttagtagagacgaggtttcactgtgttagccaggatggtctcgatctcctgacctcatgatct

SEQ ID NO: 3366 - DNA, 120 bp, synthetic construct
  source 1..120: mol_type = other DNA
accatcagtgtatgagaaattcaatttttctgcattctcaccagcatttaccattgtcagattttttagagattttagctttattagaagttgtgtagtgctattagaccaagttcttaa

SEQ ID NO: 3367 - DNA, 120 bp, synthetic construct
  source 1..120: mol_type = other DNA
atgaatttccactttctcctggaccattgtttgaaaagactgtagcctatattacctccattgaattattttgcatctttgtcaaaatgagttcatataggtgtatttctggattctcta

SEQ ID NO: 3368 - DNA, 120 bp, synthetic construct
  source 1..120: mol_type = other DNA
gcagaagaggaaaagcattcagacttccactattaagtacaatttagccgcaacgtttttgtagaagttatttatccagttgaggaggtcatcctcagttcctactattttgaggggctt

SEQ ID NO: 3369 - DNA, 120 bp, synthetic construct
  source 1..120: mol_type = other DNA
ttctagatttttgaggtgggaactgagattattgctttctgaagttttctctttttcagtgtatacattttgtactatgcatagtacttcaaagcactcctttagctatgtgccaaacat

SEQ ID NO: 3370 - DNA, 120 bp, synthetic construct
  source 1..120: mol_type = other DNA
tgatacgtaacagacatatatattttgggggtgcatgcgataatttaacatgttcataatttgtaaagaaatcagtgtattgggatatccatcacatcgttaaatatttgccttttcttt

SEQ ID NO: 3371 - DNA, 120 bp, synthetic construct
  source 1..120: mol_type = other DNA
gaagttccttttatggtccagggtatgagcgatgttggtaaatattccatggacagttaaaaatgtgtattctgctgtttggtgtggtggtctgcaaatgtccattagatcttattggtg

SEQ ID NO: 3372 - DNA, 120 bp, synthetic construct
  source 1..120: mol_type = other DNA
acgtgaagaagagaagtctgttgtatagaaagaaaagtctgttgtcaaagaaagcagaaatggctataatatcagataacaaaatgcacagagcaaagaatattctgagagacaaacgga

SEQ ID NO: 3373 - DNA, 120 bp, synthetic construct
  source 1..120: mol_type = other DNA
gtccaagatttcttccctcatcatttctattccagttcaagcacttcctttacccttgttttaggataagtctgctagcatcaaattctcttgattttccttcctctaagaatgtcatgg

SEQ ID NO: 3374 - DNA, 120 bp, synthetic construct
  source 1..120: mol_type = other DNA
tgtttgagcatttgagaatccattagtgtgattcattacattaactgaaggaaggagaatacacatggcaaccacctggatagagtcttgaaatatgatttgacagaactcagcacttgg

SEQ ID NO: 3375 - DNA, 120 bp, synthetic construct
  source 1..120: mol_type = other DNA
tctcttgtgtggccccacccacatcctgctgattggtagagcccagtggcctgttttgtcagggcgctgattggtgcgtttacaatccctgagctagatacaaaggttctccatgtccac

SEQ ID NO: 3376 - DNA, 120 bp, synthetic construct
  source 1..120: mol_type = other DNA
gatacctgggctcccctttccttcccccatgattgttagcttcctgaggccctcaccagaagcaattgccagcaccacacctcctgtacagcctgcaaaaccctgagccagttaaacctc

SEQ ID NO: 3377 - DNA, 120 bp, synthetic construct
  source 1..120: mol_type = other DNA
tgcaattatcacaacaatccagttttgtaacatttctatagtgtccaaaatttctctgtttatagttaattcccaccgataccccaagtcctaggcacccaatgatctgctgtttgtttc

SEQ ID NO: 3378 - DNA, 120 bp, synthetic construct
  source 1..120: mol_type = other DNA
gtgaaattgctgggtcatatggcaaacgtacgttaaactttgtaggaaattgccaatttccaggtatttgtaaaattatacactcccagcagcactacgtaagagttaagtctgtttgtc

SEQ ID NO: 3379 - DNA, 120 bp, synthetic construct
  source 1..120: mol_type = other DNA
tagaaactgtttagttgattcttataaagacacacggaaaaagtcatatccttttcctgcctttgggagttgtgaaagaataagaaacgtaaagctgctgcaggggtcctcctaccatct

SEQ ID NO: 3380 - DNA, 120 bp, synthetic construct
  source 1..120: mol_type = other DNA
cctttctcttattttttgtccttgcagccaaatggaccagataatttttaactccatgtttgagaaacattgaataatgcaatgtgtttgtggcacaaggggaatacagacccaggggag

SEQ ID NO: 3381 - DNA, 120 bp, synthetic construct
  source 1..120: mol_type = other DNA
tgcgcttttttcttgtactaataccaacagctttaattatatgggctttaaaatatggtgtagtatctagtagggccagttctccctcagagctcttctttcacagtgtagcctacctat

SEQ ID NO: 3382 - DNA, 120 bp, synthetic construct
  source 1..120: mol_type = other DNA
ttaatttgctccaggatctcgaaccaaaggatccctacttgttaacctttctcttatctctgcaggccacaagctattatgttttgacgtagtaaccatgcactgatgatttctggatta

SEQ ID NO: 3383 - DNA, 120 bp, synthetic construct
  source 1..120: mol_type = other DNA
ctatgctgatggagatgagaacatggagcaaatgaaaataggattgggagagtagaaacctgacgctcagggattagcacagtccccttcttggtggttgagaaatttatgaagtcagaa

SEQ ID NO: 3384 - DNA, 120 bp, synthetic construct
  source 1..120: mol_type = other DNA
caccttgagagaagaatatgttttaaagcaatgtggataaagggacagagtagggtaaatgaggaaaccgagtctgaatttttaggaatactaccaccatgctgtcacacgttagaacac

SEQ ID NO: 3385 - DNA, 120 bp, synthetic construct
  source 1..120: mol_type = other DNA
agtaggggtgcttatgcctaggaaaatccctgacactagcataccctcaatagtacaattttttgtgagaaggaaggagaaacctggagacaacaataccacaaaatggtagatttaaga

SEQ ID NO: 3386 - DNA, 120 bp, synthetic construct
  source 1..120: mol_type = other DNA
cactaagaaaaaaaatggcaagaaatttagacctaaagaagcttcagaggtgcctcagaggtctcctcaattcgcctagaagttaatctaatgcttttgcaaacaaacaccacgcacttc

SEQ ID NO: 3387 - DNA, 120 bp, synthetic construct
  source 1..120: mol_type = other DNA
agtgaaagctatggccaaacaccaaacacacaagagcttagacagaaatgagaaatgtcagaagtgtggagttctagaacagagaataataggatgatctcaattacattagggtgccag

SEQ ID NO: 3388 - DNA, 120 bp, synthetic construct
  source 1..120: mol_type = other DNA
aagctcagaaattcagttaaaaaaacttgtttctacaactcatttggcaaatgtcatctgataagggtaagtggtcaaaggtgtctcagagctcttattggtgacatgtgcttctgtagt

SEQ ID NO: 3389 - DNA, 120 bp, synthetic construct
  source 1..120: mol_type = other DNA
agtgttaattttattctgaagtagccacgcttggtcagccataggcatccagttctccatgtaatgagctgtttgaatagaactatgaaaagctgcagaggacatcacaacagaagttat

SEQ ID NO: 3390 - DNA, 120 bp, synthetic construct
  source 1..120: mol_type = other DNA
agggcaattggcctgggaatggtcggttagcacaccagttacattaatagaactaagacttaagaagtacatgagttttctgtagtgactcaaccatgtttgagcttgaattgtaagaca

SEQ ID NO: 3391 - DNA, 120 bp, synthetic construct
  source 1..120: mol_type = other DNA
atatgagaataagtgtctataggcacatgaacatagctaaacttaccaaaggctgctatgtgcgtaatatccatttgccaaatttcatttggaggcaagcctcgtggattacacccttct

SEQ ID NO: 3392 - DNA, 120 bp, synthetic construct
  source 1..120: mol_type = other DNA
tggttagaacctttaatgcagtgttaaatagagataaatgatactgggcatccggcctgtttctgacctcaatgggaatgcctccagtattgccccattaagtaatatttatcctgcttt

SEQ ID NO: 3393 - DNA, 120 bp, synthetic construct
  source 1..120: mol_type = other DNA
gtggcaatacctagcatcgggtgcagccaattaatatcccctaacaactgttgaaaatcttttaaagtctgtaacctgtctttatggagaactacttttcgagaccgtacacttctttca

SEQ ID NO: 3394 - DNA, 120 bp, synthetic construct
  source 1..120: mol_type = other DNA
ggatattactgacacttcagctcctgtatccataagcccataacatttctttcttttaatttgtactacacaggtgggtctattagaggctgtgggctgggatagatagatttccattgt

SEQ ID NO: 3395 - DNA, 120 bp, synthetic construct
  source 1..120: mol_type = other DNA
aaagctagagttaaagttagcatctctgcagcagcagtatgataaatctgatgcttcattgcctcttgtagtcatgcaagaaattgtgcataaggttcctgtgacccttgcatgatatgt

SEQ ID NO: 3396 - DNA, 120 bp, synthetic construct
  source 1..120: mol_type = other DNA
ctctgtattggagtctctatttttgctactgaaggaggcggtacagatgtttctgctattggaggaggcggtataggccaatttttattctccttctcttgtttttttattttcaattgg

SEQ ID NO: 3397 - DNA, 120 bp, synthetic construct
  source 1..120: mol_type = other DNA
tttgctgtttgatcatattgccgcagtggaaatgctgagttggtcatgattctccggactctggctctctacactaaatggattcaacaagaaagtggttgaatttatgcaactgtctag

SEQ ID NO: 3398 - DNA, 120 bp, synthetic construct
  source 1..120: mol_type = other DNA
aattatctaagcactttctttacagagaggaagttaaaaaataaacatgtgtgaagtcgctgtcactgtggtttgcgtgactaacactgtaatccatgctcatgtgtcccagttagggtt

SEQ ID NO: 3399 - DNA, 120 bp, synthetic construct
  source 1..120: mol_type = other DNA
cctcagacaaaaggcacctgctgacataggagaaagggactttctacatgctcagatttaaactacaatctgatttctagcactacatttgggatactgggttttacttatatcctctca

SEQ ID NO: 3400 - DNA, 120 bp, synthetic construct
  source 1..120: mol_type = other DNA
ttgattattctatcccctttacagtaatccattaacaagctgagcaaaatacatgccgagtctgtccacttcatctttttcactgtctttatcactaatacacaccaggaagccacgaac

SEQ ID NO: 3401 - DNA, 120 bp, synthetic construct
  source 1..120: mol_type = other DNA
cattatcatttctattccagttcaagcacttcctttagcccttgttttaacataaatctgctagcatgaaagtctcttgattttccttcctctaagtatgtcatggctaggcgcggtggc

SEQ ID NO: 3402 - DNA, 120 bp, synthetic construct
  source 1..120: mol_type = other DNA
ggttgtttgagcatttgagaatccattagtgtgattcacgacattaactgaaggaaggagaatacacatgcaaccacctggatagagtcgtgaaatacgatttgacagaattgagcactt

SEQ ID NO: 3403 - DNA, 120 bp, synthetic construct
  source 1..120: mol_type = other DNA
ggagtgcaatggcacgatctcggctcactacaacctctgcctcccaggttcaagtgattgtcctgcctcagcctcctgagtagctgggattacaggcatgcgccaccacgcctggctaat

SEQ ID NO: 3404 - DNA, 120 bp, synthetic construct
  source 1..120: mol_type = other DNA
cagcctcaggtatttctttctggaaatgtaggaatggactaacataattatgctctatcataaacaaatagaaaacaaaaccaagaaaataattttatcaatttcttcacctctttgctt

SEQ ID NO: 3405 - DNA, 120 bp, synthetic construct
  source 1..120: mol_type = other DNA
tcttcccatgttaagattcagtagatgaccaaagaataagagtggacacttgaccctgctcgcctatgtggaatttgttcatctctggaatttggaatttttatactttttgatccacag

SEQ ID NO: 3406 - DNA, 120 bp, synthetic construct
  source 1..120: mol_type = other DNA
ttccaaaccgtggctcaacaaacgaccaattttatgtctcgttgggctcatgtaggattgttctttaagacggatgtttacaacgggatttttgttgttttcatcaagcgcgtaacaatt

SEQ ID NO: 3407 - DNA, 120 bp, synthetic construct
  source 1..120: mol_type = other DNA
ttgtacccattaagtaatctcatcatctagggtgcaagggttgaaatttgccttgggaaaactaccctcatgtttatggtatctcccctgccagataagtctatttttgtccccttttat

SEQ ID NO: 3408 - DNA, 120 bp, synthetic construct
  source 1..120: mol_type = other DNA
agtaccacaatctatcatttccctacccggaaatcaatctctgctactccatccaccatttctttattttttaaaatacatgattttgctccttttcttcccatgtgcctcaggcccact

SEQ ID NO: 3409 - DNA, 120 bp, synthetic construct
  source 1..120: mol_type = other DNA
ttggagccaaatggaccagatgatatttaactccatctttgagaaacatttaataatgtaatgtgtttgtcatacagggtgaatacagatgcacgggaggccatacggtttaggcaaagg

SEQ ID NO: 3410 - DNA, 120 bp, synthetic construct
  source 1..120: mol_type = other DNA
ggagaggaggaattttggtgtaaattgcctgatcagaaatttggatccaaagtctttcctattatttctgtctcatgccttatcacctctaccatcattctggtgtgtcctgagtttgtt

SEQ ID NO: 3411 - DNA, 120 bp, synthetic construct
  source 1..120: mol_type = other DNA
ttatgctttcacatagtaaccatgcactgatgatttctggattagcaggacattagagccgtttggggaaagaaaggctttattcagggccactcatatactgagaactaacctcagcaa

SEQ ID NO: 3412 - DNA, 120 bp, synthetic construct
  source 1..120: mol_type = other DNA
ctatagcacagctggccatgtgaccttacagtgtcatcagcctggaatttaatcttgacagtgaggacccattagatttgagaggtgttgtgaaaaattgtgtttgtttcttcatagttt

SEQ ID NO: 3413 - DNA, 120 bp, synthetic construct
  source 1..120: mol_type = other DNA
caatgcatctcccgtgcaacacaagcataattattattaggcctatcattgtaaaatgatttttctttccagaatcacatttggattaaggcagtgtctgggactcgttacttggggtgc

SEQ ID NO: 3414 - DNA, 120 bp, synthetic construct
  source 1..120: mol_type = other DNA
ccaggagttaggggtagaaggaaatgaggagtgattgcttaatagtgtgaggtttccttttgggtggtaaaagtgttttagatccagacagtggttgataatttacaacactgtggattt

SEQ ID NO: 3415 - DNA, 120 bp, synthetic construct
  source 1..120: mol_type = other DNA
tcagttcctctagaaattaatctattgcttttacaaacaaacagcacacacttttaattcagagattacacgaagggtgtatgccagggagagtctggaactggcctcctcacattatcc

SEQ ID NO: 3416 - DNA, 120 bp, synthetic construct
  source 1..120: mol_type = other DNA
agagcagtgaaagcgatggccaaaaaccaaacacacaagagcttagacagcaatgagaaatatcagaagtgtggcgttctagagcagagaataatagaagattcccagttaaatttggat

SEQ ID NO: 3417 - DNA, 120 bp, synthetic construct
  source 1..120: mol_type = other DNA
agagtaataactggtatatgctatgtcactaataaatattggctgtgtgaaatactggctgtgttaaatattggctgtgtgacattttgcatgagtagtcaccactgcacacaggggctc

SEQ ID NO: 3418 - DNA, 120 bp, synthetic construct
  source 1..120: mol_type = other DNA
cgtattgctgctgccaacataaatacctgaagccctggcctcaccatgagtctcttaaatgccattgaccttcggatttctccacataaatgtcaatcaatcatctcatatttaaacaaa

SEQ ID NO: 3419 - DNA, 120 bp, synthetic construct
  source 1..120: mol_type = other DNA
ctttcatcccttagatcttcacgactgtctacttattttgttgtctcagctgaatgtcactttctcaggtggagctccctaacatatgaactaaagtaggtgaatccatgtctctctttt

SEQ ID NO: 3420 - DNA, 120 bp, synthetic construct
  source 1..120: mol_type = other DNA
ccagtaagacaatgagttcccaagacttgcccattgactttcagccctatgagacgtgaacaatgttcacatcatctcggtaaccccacacagagtatatagtttgaacattattaaatt

SEQ ID NO: 3421 - DNA, 120 bp, synthetic construct
  source 1..120: mol_type = other DNA
atttgaaaagaaatgatttgtgcaaaggccccttacacaagtctcatgaagagggcaagtacccaagctccttttatggaggaaataatttgggatccaatgataaagatgggcaatctc

SEQ ID NO: 3422 - DNA, 120 bp, synthetic construct
  source 1..120: mol_type = other DNA
actgtgtaatcaaagtatgcagggggctgagatgatcgatcaaggactcaaagtcagctgttgacagaacaactctgttttaccataattaatattttatgtcgagtgttcaatccctca

SEQ ID NO: 3423 - DNA, 120 bp, synthetic construct
  source 1..120: mol_type = other DNA
tcacattagctgagtgagggaaatacccttttcatccttacaagtggagagaataaaatgatggagtttaaacaacttttgcaaggatgcaaggctagtaaacagtaactcggcctccca

SEQ ID NO: 3424 - DNA, 120 bp, synthetic construct
  source 1..120: mol_type = other DNA
tggagaggttggttagaagtcactattgtccctggatttgagaataaactgtgttcccacactacagtgataattcagtactattgacaattgtgcaattgtaaccaggagaatatcaca

SEQ ID NO: 3425 - DNA, 120 bp, synthetic construct
  source 1..120: mol_type = other DNA
cataatcctgtctcgtctctaagtattttattacaaccccttaacagttgtacttgaaatagtcatctacttgtgtagtctccattcacctgacctagtcactactcaactccccctaat

SEQ ID NO: 3426 - DNA, 120 bp, synthetic construct
  source 1..120: mol_type = other DNA
agccctggttatcatagaatgtctgccacttgtccaagcagtcacaaaatgttctcaggagttttcagaaagcaaccaccactaatctggaatttaaagtaaaaagcaggttactaatcc

SEQ ID NO: 3427 - DNA, 120 bp, synthetic construct
  source 1..120: mol_type = other DNA
ctttctattccacaaagccgccactgtcatcctggcccgttctcaatgagctgttgggcacacctcccagacggggtggtgtccgggcagaggggctcctcacctcccagcaggggcggc

SEQ ID NO: 3428 - DNA, 120 bp, synthetic construct
  source 1..120: mol_type = other DNA
cggggggctgacccccccacctccctcccggacggggcggctggccgggcagaggggctcctcacttcccagtaggggcggccaggcagaggtgcccctcacctcccggacggggcggct

SEQ ID NO: 3429 - DNA, 120 bp, synthetic construct
  source 1..120: mol_type = other DNA
attatttttcaaaatttcattttggtgctccactagcccactccccagtgactgcagtgtggacagtgaagaaattgatgaacctgttgaactgtaccaacttctcaatctgtcctataa

SEQ ID NO: 3430 - DNA, 120 bp, synthetic construct
  source 1..120: mol_type = other DNA
ttcaaggggttacaccagcaagataaaggtggaaaacttggtactattatgtatccatctagagatgctaaagatgatctgggtgcaaacaataccctgtcagtatccacagttcagaat

SEQ ID NO: 3431 - DNA, 120 bp, synthetic construct
  source 1..120: mol_type = other DNA
accatcagaaaccaatttgtgttcccatatgggcaattgattggagtgtttatctagatagactctagacctaattccttccaaagggcccaccttctaatcctataatattggggctta

SEQ ID NO: 3432 - DNA, 120 bp, synthetic construct
  source 1..120: mol_type = other DNA
taaaaacaataacaacaacaacaacaacaaaacccagcatggtactggcataacagtagacacatcaacggatgaaacagaatacagagcccagaaatgaatctacttatttatgaccaa

SEQ ID NO: 3433 - DNA, 120 bp, synthetic construct
  source 1..120: mol_type = other DNA
ccacaacgagatatcacctcacaccggaaagaatggttcttattgaaagggtaaaagataagtgttggtgaggatgtggagaaaagggaacacttggccgggtgtggtggctcacacctg

SEQ ID NO: 3434 - DNA, 120 bp, synthetic construct
  source 1..120: mol_type = other DNA
atagtgattatcagaggctgcagattgggaggaataggaagacattagtcaaagagtataaagtagcagacagacaggaggaataaatgaaaagtttttaaggtgatagatatattaatt

SEQ ID NO: 3435 - DNA, 120 bp, synthetic construct
  source 1..120: mol_type = other DNA
gacagaaagcaaaataatagctcagcagccgcattgaatgggaacagtgaatagtgtgaaaataatgagaaaatattggggcaagtccactgattcccacaggatgttctagaaaagctc

SEQ ID NO: 3436 - DNA, 120 bp, synthetic construct
  source 1..120: mol_type = other DNA
ctgcacctggcccgccatcatccatttttaatggcttttatcaaatacctataagaactatctgatcgccacactaaaatataattcaggaaagcttatttggcacttaatcccagtgcc

SEQ ID NO: 3437 - DNA, 120 bp, synthetic construct
  source 1..120: mol_type = other DNA
aaattttaactgaggatccaccatatgcatgtgcacatacacatgcaatctaggtggggatattcaatcacaaaaggtgtgttcagtgcttcctttgtgcagaagattcttctaatgctg

SEQ ID NO: 3438 - DNA, 120 bp, synthetic construct
  source 1..120: mol_type = other DNA
actgaaaccacatcacttatctccagcagatacagctgaccagaaggtcttatataaagtcttggagaaaagttgcaggagaacaggatgactaaattaggtgttgataagaaaggctga

SEQ ID NO: 3439 - DNA, 120 bp, synthetic construct
  source 1..120: mol_type = other DNA
cacatatagtaagacacgtaaagattaaatgtacaacttaatcaatcattacaatgccaacatccatgaacccaccacccaaatcaagaaacagcatgaggccagcaccagaagctctcc

SEQ ID NO: 3440 - DNA, 120 bp, synthetic construct
  source 1..120: mol_type = other DNA
gtgtggtaggagctaaggttccaggatgaggatctcatgaagatcaatatctatcaggaaaaaaagacacatatacaacatacactccatacaccagaaactttgtgcactattctctcc

SEQ ID NO: 3441 - DNA, 120 bp, synthetic construct
  source 1..120: mol_type = other DNA
ctggagtgaacatctagattaaagaatagtatacgataagagaagatgcacagagaggacctgtatttatgagaggccttagaagctgagcagtctcttcttagaaaggtgatgaactga

SEQ ID NO: 3442 - DNA, 120 bp, synthetic construct
  source 1..120: mol_type = other DNA
ttgattaagggtcatctccccacctgctggttataagaagaacgtgcagggacaatgatggaaaagagaatcaatagttccagggtctctttagccatttttcaattatctcatttaatc

SEQ ID NO: 3443 - DNA, 120 bp, synthetic construct
  source 1..120: mol_type = other DNA
aaatatcacttgataaagatagaaagatgagtcgtttaagaaggaatacatgtctcttttcagaggcagtacccgcaggcagttctcaaacccagaatctgcctcatcagtctcagttca

SEQ ID NO: 3444 - DNA, 120 bp, synthetic construct
  source 1..120: mol_type = other DNA
tactttatcagagctccttggggttcagttagtgaatatagttacatagtagaatgggaataaaaacactgtattcatggtcatgaggtcagaattctggcacccaacccacaccttggt

SEQ ID NO: 3445 - DNA, 120 bp, synthetic construct
  source 1..120: mol_type = other DNA
taattttgtatttttaggagagatgggggtttcaccttgttggccaaactggtcttgaactcctgacctcaggtgatccacagccctggcctcccaattctgggattacaggcgtgagcc

SEQ ID NO: 3446 - DNA, 120 bp, synthetic construct
  source 1..120: mol_type = other DNA
cacaatttatgatgattagcatcaggaggcattttacgcacatacttgcaacactcggacttaccacagcagcaacagaaggtggctatgaagttattacagcaatgtcctatgtattat

SEQ ID NO: 3447 - DNA, 120 bp, synthetic construct
  source 1..120: mol_type = other DNA
attatcacaggagtaggctcattattccaagagtgggctcattatggtgagagtaaatttgttataaaagtgagtttgactctctgtcattcacgtgcatactcttttgcccttctgcct

SEQ ID NO: 3448 - DNA, 120 bp, synthetic construct
  source 1..120: mol_type = other DNA
cgcaattgactaattcaagttgtgtgaaccagaacttctagtttacacagtttccttccaaggtgcacaatatagagtttggcaagctcttgctattcctgcagagttaaaaagaagaca

SEQ ID NO: 3449 - DNA, 120 bp, synthetic construct
  source 1..120: mol_type = other DNA
cgtaagtaagggtgaaaaagttgaaactccttgtcttttgtatgaaccagtagttggaaaagtgtgtcacacctcatgcaggaagttatagacctaagtagggtttattgaagcgtccta

SEQ ID NO: 3450 - DNA, 120 bp, synthetic construct
  source 1..120: mol_type = other DNA
actcagagagaagcttgccacagttacacccagctccagagccctgacttagagagtttgcctgggaggaaaggcaatatattaggaatatattttaggaacatagaatatattttatat

SEQ ID NO: 3451 - DNA, 120 bp, synthetic construct
  source 1..120: mol_type = other DNA
gtcattccagggtaaccctggatatactcaaagctgggcctccttgaggtaacatcaaaagcttaacactgtgggatgaggagatgaagatagactttattaaaataatccagacaatca

SEQ ID NO: 3452 - DNA, 120 bp, synthetic construct
  source 1..120: mol_type = other DNA
acataacattatccattacattcatagacctaaaggaaaggatggctaaagaagtgaaggaaggtgtgatggcaatgtttcatcagagagaataacaataagaggaggtgcagctgggct

SEQ ID NO: 3453 - DNA, 120 bp, synthetic construct
  source 1..120: mol_type = other DNA
aagaccccacctcttaataccacacactagaaaatgggaattgagcttcaaaatataaatctgggggcaggggacacaaatatttagacaatagtataataaaaaggaaccaaatagaaa

SEQ ID NO: 3454 - DNA, 120 bp, synthetic construct
  source 1..120: mol_type = other DNA
tgcatctggaaatttagaagctggaattctctaatgatagagactgcctcttaattcttgtgtggccaagactagcattgtcttcagtcaagatgcaaatgtatacttcctcgcccattt

SEQ ID NO: 3455 - DNA, 120 bp, synthetic construct
  source 1..120: mol_type = other DNA
tggtaagattttgcccggctagtcctcaatctatcatcagacttaagtataaataggagagttgtattgatgcatggataaacctatagacaaacgaacaaaaacagtgggcccagaacc

SEQ ID NO: 3456 - DNA, 120 bp, synthetic construct
  source 1..120: mol_type = other DNA
attcagtgccactccagggatgacagctagtttgtgaaaaggaagcatagcaggtcaatacataatgtgaaaagatttccacccttattagtaatcagataaacacatttcaaatcacta

SEQ ID NO: 3457 - DNA, 120 bp, synthetic construct
  source 1..120: mol_type = other DNA
cattcagatcaaatgctcaaagtggagtaagatatcattgtctttcacagaatcacttaatagactgcagcagatctcccttgaccaaccccccaaaaccagtcaaattcttcattttcc

SEQ ID NO: 3458 - DNA, 120 bp, synthetic construct
  source 1..120: mol_type = other DNA
ccagagctgtgcacctaccctcactttcataccacattaatttcagatccttattgtcatgggtttcccaactacttttttttcttcaggggaaacctccacaatgtagtttctaatatg

SEQ ID NO: 3459 - DNA, 120 bp, synthetic construct
  source 1..120: mol_type = other DNA
agaggtgctctccccacgattccctcttggcgctcatttgtttgccataatttactgtccttcgttcttcacccaacccccaccaccaacaggactctattataaacttttgttctaaac

SEQ ID NO: 3460 - DNA, 120 bp, synthetic construct
  source 1..120: mol_type = other DNA
cccagaattctgcatggtgggtaggagctgtggcttgtcttgaagctggatgtgcttgcatagcaaatgctttatctttatttatgtgtgtttgggttatttaaaaaagaatgtcttatg

SEQ ID NO: 3461 - DNA, 120 bp, synthetic construct
  source 1..120: mol_type = other DNA
atagatgccagccacctatgtggcagaggtcagagtggaagagaggtgcggttaactattccccatataatctttcaattaatctcttgaagtgtccccaaggttttttttttttttttt

SEQ ID NO: 3462 - DNA, 120 bp, synthetic construct
  source 1..120: mol_type = other DNA
agccctgactcttcggtgccatgtagcctggtctaagctcagggacatttctatggtttttgacaaagctgcaaaattttattagccataacatgtttgaacctgtaagatttctaagta

SEQ ID NO: 3463 - DNA, 120 bp, synthetic construct
  source 1..120: mol_type = other DNA
catgggcttgaattctggctccatttcttactattggtatagctttagtcaggtatccaacccttccatgctacaatttcctaattggtaaaatgggggagggagatataataatatacc

SEQ ID NO: 3464 - DNA, 120 bp, synthetic construct
  source 1..120: mol_type = other DNA
tatttacagttactctttccctgtagacctgtgggcatgagccatccttggtttaagtcacttgatagtgactcaaagcacaaagcacagggtaatgcctgttctttccttttttttttt

SEQ ID NO: 3465 - DNA, 120 bp, synthetic construct
  source 1..120: mol_type = other DNA
gtgcatatgcacttaagattgttatgtctctttagagaaataaccctttatcattaagtgatgtctgtctttatccctattaacatttctcgctccaatttctgctttgtctagtattga

SEQ ID NO: 3466 - DNA, 120 bp, synthetic construct
  source 1..120: mol_type = other DNA
ctgtaacacacatgacagcctcccacaaaaaaaaaacattatcctctggctcaaaatattaatagttctcaggttgagaaacctcattttagagcattttttaaacttttgagttcaagg

SEQ ID NO: 3467 - DNA, 120 bp, synthetic construct
  source 1..120: mol_type = other DNA
ttagatctcatttgtcaatttttgcttttgttgcaattacttttgccgatgcctatgtcctgagtagtattgcctaagttgtcttccagggtttttatagttttgcattttacatttaag

SEQ ID NO: 3468 - DNA, 120 bp, synthetic construct
  source 1..120: mol_type = other DNA
gtaaattaaaagatctatacaaagaatgtttacaatatgtacattaggactggggagttcctgggaggagaatcaatcactgctggacatgaggaatatcagtctccagacagtcagctc

SEQ ID NO: 3469 - DNA, 120 bp, synthetic construct
  source 1..120: mol_type = other DNA
gtactatgacttgctttgaataacagaatgtaatggaagtgatgttgtgagttttaagtttcagctcaagacacctactgtttctatcttgcacaggagagctttccagcacctgtgata

SEQ ID NO: 3470 - DNA, 120 bp, synthetic construct
  source 1..120: mol_type = other DNA
aaatctttcactctttttaaatggtcgagctggttctggatttgctcctgagaaaagcaaaacagatgggcagttcaaaattaggtagaccttagcatcagcatggtacttcttatcaca

SEQ ID NO: 3471 - DNA, 120 bp, synthetic construct
  source 1..120: mol_type = other DNA
gtatgctgttcttctgagtctcatttacttattactttaccttacattaaaattatgacctgaagacataagcaactggaacaacgttcactgtgttatggccggatgaagcaggaagag

SEQ ID NO: 3472 - DNA, 120 bp, synthetic construct
  source 1..120: mol_type = other DNA
gcgtgaccctgggaaaagtccttcaactctctgggctttaatgtcctcctcggaaaatgagaacgatattaaaatatgacaagtatatgtaaagagtccaggaatttttcattccaagtg

SEQ ID NO: 3473 - DNA, 120 bp, synthetic construct
  source 1..120: mol_type = other DNA
gacaatatttatgttttgtctgggttcagacatgatgactgagcattcaggtgttctgtctcaatccactgtgctcacagagtacctgtctgattctgatgttctatgaaatcctttatc

SEQ ID NO: 3474 - DNA, 120 bp, synthetic construct
  source 1..120: mol_type = other DNA
ttactcaatgcaaagaaaaactgtataaagtctcatatagttactatagacagccccatctgacattataacccctttttattgccctggccaaaaccacctggagcttttgagcacttg

SEQ ID NO: 3475 - DNA, 120 bp, synthetic construct
  source 1..120: mol_type = other DNA
ccaacctactctttttgttatctatgctgttgtgttcactaaggacgctattctgtttatattatattcagtgactacggcctggaggtctctatgtcgttccatcatgattgcctcaaa

SEQ ID NO: 3476 - DNA, 120 bp, synthetic construct
  source 1..120: mol_type = other DNA
cctttcaggatccatctctgactccctgctcctttatagagatggacagtgggtttgtaaaacaaaagttgaaaagtcagatagttaaaaggggaagtgaactggaaggtactttaaact

SEQ ID NO: 3477 - DNA, 120 bp, synthetic construct
  source 1..120: mol_type = other DNA
agggtgacgtcctctagcaaaatttggcacccaagacaagtaccagaagaaaagaaagactgcatgtattccacatatattcatgtttgaacaaggagtcaagatttatggcaaggataa

SEQ ID NO: 3478 - DNA, 120 bp, synthetic construct
  source 1..120: mol_type = other DNA
gggggaatgacagaaatccaaaaactagtagagcttccacttttcatttcagaagaaatcagttgctctcctctaaggaccattactattaacaaaacagagaccttagaaggaggcatt

SEQ ID NO: 3479 - DNA, 120 bp, synthetic construct
  source 1..120: mol_type = other DNA
tcccatctctaaaatcacatattcccatgtaatacaagggtctttccattatgcattcagcaaatccttctaggagaggtctcatcaacctcctactttattaaacatgcccacagagag

SEQ ID NO: 3480 - DNA, 120 bp, synthetic construct
  source 1..120: mol_type = other DNA
tcctccaaatatttctcctctcaccttttctctgggacttaagctgctatatcccctcagagctcacaaatgcctttacattctttccctgacctcctgattttttttttcttttctcaa

SEQ ID NO: 3481 - DNA, 120 bp, synthetic construct
  source 1..120: mol_type = other DNA
tatgtaatactttgtttccacgtttctgtttagctgtgccagttcacaaagggctctgtgagtcacatgattccacaatattcctcataactgtgttatctcctgagtctcagagtggtt

SEQ ID NO: 3482 - DNA, 120 bp, synthetic construct
  source 1..120: mol_type = other DNA
gcaggaaaagaaatggaagtcagaaaaacattagaataagacaataatgtgggtgtctgaaaaggaacaaatacttattcctcacatagggttagtgacaatgggaaaagggacgggagt

SEQ ID NO: 3483 - DNA, 120 bp, synthetic construct
  source 1..120: mol_type = other DNA
ttttccagaatgagagaggctgagattggattggtaagagaactcttagcactagaagttgtaatatttgactttggttttcaactctctaagagggaatatattccctccttatggccc

SEQ ID NO: 3484 - DNA, 120 bp, synthetic construct
  source 1..120: mol_type = other DNA
tgtaatataaggggtatactgaatggcataatgaccagagtcatgcagaaatctacaaatgctgcccaactcagactccttcctcaagcagcactgtggaaagcaaatttaatgatagca

SEQ ID NO: 3485 - DNA, 120 bp, synthetic construct
  source 1..120: mol_type = other DNA
cacttcatgcacagactggcacatagtaagtagtcgataggtgttaacaatttgtgttattgttattttctggagtccaactaacaaatcccacagtgaatgacatcacagggatgcaac

SEQ ID NO: 3486 - DNA, 120 bp, synthetic construct
  source 1..120: mol_type = other DNA
gaaccaggtataatttgggggcgtttagagatggcttgaagaaatgtatcttgagataaaataagatggtatacagtaggtaaaggacaaggttgaggagggcagagcaatgtttgagaa

SEQ ID NO: 3487 - DNA, 120 bp, synthetic construct
  source 1..120: mol_type = other DNA
tggaagcattgcctttgaaaaccagcacgagacaaggatgccctctctcaccactcttattcaacatattattggaagttctggccagggcaatcaggcaaaagaaagaaataaagggta

SEQ ID NO: 3488 - DNA, 120 bp, synthetic construct
  source 1..120: mol_type = other DNA
attaaagacttaaacataaaacctaaaaccataaaaaccccagaagaaaacctaggcaataccattcaggacataggcatgggcaaagacttcatgactaaaacaccaaaagcaatggca

SEQ ID NO: 3489 - DNA, 120 bp, synthetic construct
  source 1..120: mol_type = other DNA
gtcggggagtcgggggttgggggagggatagcattaggagaaatacctaatgtaaattacgagttgatgggtgcagcaaaccaatatggcacatgtatacctatgtaacaaacctgcacg

SEQ ID NO: 3490 - DNA, 120 bp, synthetic construct
  source 1..120: mol_type = other DNA
acaatgaaatgtaatatgtggtagaaaagctaaaacagagaatagaccaaggaagtccaacctcaggttacagagctagagagaccaacagagaagatgaagggagaaaattatcaaaac

SEQ ID NO: 3491 - DNA, 120 bp, synthetic construct
  source 1..120: mol_type = other DNA
tttgtcaagtggaagcataaagtggaggggaaaggaagggtaacaatgtcaataactttcatcttctaagacggaggaaagagacattgcccatagttaaggaagaagtcacaaagatca

SEQ ID NO: 3492 - DNA, 120 bp, synthetic construct
  source 1..120: mol_type = other DNA
agtgacaaggtttcgtggcctgggggcctgagctgtttcctcttggaaaggccgaggaggctccgccactctcctttggactggtcgcgctgaagctctatcctagggcactggtcgcaa

SEQ ID NO: 3493 - DNA, 120 bp, synthetic construct
  source 1..120: mol_type = other DNA
atctaaaaaagtcaaaatcacagcaggtggggaaatgggggtagtagggagggcgacaaggaggaatgagaaaatgttggtcaaaaggtacaaagaagggcaggttgtggtggctcatgc

SEQ ID NO: 3494 - DNA, 120 bp, synthetic construct
  source 1..120: mol_type = other DNA
acagagagccaactgtattgcctatttgaaaattgcactgggcatggtggttcacgcctgtaattccagcactttgggaggccaaggtgggtggatcacctgaggtcaggagttcaagat

SEQ ID NO: 3495 - DNA, 120 bp, synthetic construct
  source 1..120: mol_type = other DNA
tttggaatactggcaagcaccactgtctccaaaagatatactgttattatctaaggtaaggacaaatgctcaggactggtaggtttttctctagaacacctacacactttcctccaactt

SEQ ID NO: 3496 - DNA, 120 bp, synthetic construct
  source 1..120: mol_type = other DNA
tttgaccctctcattaataaagaatctccagcatgtgctcagtgtgacgatgttgaactgtaagaattatagggcttatgcttcaactagaaaaatcagatctcgatgtctccctaaact

SEQ ID NO: 3497 - DNA, 120 bp, synthetic construct
  source 1..120: mol_type = other DNA
tctctctttcttttccccacagctacacatagagactgaggacaccctggacaacccagcacatgctttccccatttccccaaaagtggcactcccttttgatccctatggtcaatgaca

SEQ ID NO: 3498 - DNA, 120 bp, synthetic construct
  source 1..120: mol_type = other DNA
acaggacaatgtgtttgagaggtgtgcatgttacccaggcttggccaatcagaatgtttcctaaagttgtcaaaactctggtagacaagtctagaaacatatataacagagacagacaaa

SEQ ID NO: 3499 - DNA, 120 bp, synthetic construct
  source 1..120: mol_type = other DNA
atcagtattaaagaaccatgaatgatgcgacaattgaattattttctacctcctctgcccacccttacttcacaccccaaaatgctttcagtgtcttttcaaggtacaatcctccttctg

SEQ ID NO: 3500 - DNA, 120 bp, synthetic construct
  source 1..120: mol_type = other DNA
ggaaaatgacacacatgacttagagttacattctcttcccacccatgttcttccaggccttcagcaccctaatttaaaatcccctaaaacaaaggaaattgtcactagaaagaaaggaag

SEQ ID NO: 3501 - DNA, 120 bp, synthetic construct
  source 1..120: mol_type = other DNA
tcaagaactcatccataaccttagaccctaagatcccagtcaccagccctaagaatcagtccctcagagctatcaggactgggattcagagcaacagtatgtagagtaatttccctagca

SEQ ID NO: 3502 - DNA, 120 bp, synthetic construct
  source 1..120: mol_type = other DNA
ttactagctgtctaccctactccatttccttgctattgacaattactttcttgttctgaaatcagacattatcgtgtatgttctccacagaaaatattctgagatccgtgcagaggtcgg

SEQ ID NO: 3503 - DNA, 120 bp, synthetic construct
  source 1..120: mol_type = other DNA
aaatggtattaaaatgcccactacgtagggttgttgtattgagtagcaactaaaaattgcttgctcctttctgaagtatagagaaactaagaatcctgcggtgacccagggtcttggagt

SEQ ID NO: 3504 - DNA, 120 bp, synthetic construct
  source 1..120: mol_type = other DNA
ataagtgcttcctgaatgggtaaaattgactttcagaatgtttattcctgaagtggatagtgatgggggggaggggataacctaggccaaaagcaacctgaaactatttttatccaataa

SEQ ID NO: 3505 - DNA, 120 bp, synthetic construct
  source 1..120: mol_type = other DNA
acgtcgctgtcgaagcgcgcgtactcctctcggttatagatgtatctggtcacaagacgcacgcgctccgtcccgttggtgaagtagcacatgcccttaaactggaacacgaaatcctct

SEQ ID NO: 3506 - DNA, 120 bp, synthetic construct
  source 1..120: mol_type = other DNA
ttggaaaggacctacacctctgagtcctagatagagacatttattcatggaaagagcacaagcttttgaatttgataaactagattccaattaaactgtggcagtcaccagtttgggcag

SEQ ID NO: 3507 - DNA, 120 bp, synthetic construct
  source 1..120: mol_type = other DNA
cagacattttttttgtgaaggttctcaatccagtgcctggcactgtgacgtcttcaaattgtactggatgaacatctgaggtgaaaatttcctctcgattatagaagagctgaagaacga

SEQ ID NO: 3508 - DNA, 120 bp, synthetic construct
  source 1..120: mol_type = other DNA
tatcaggctcctcttgacagtgactaggggcaatactaatggttataaagcaattagaacaacgcctggcaaacattacttctgacctcaaccaagacaataaatatctccacttctctt

SEQ ID NO: 3509 - DNA, 120 bp, synthetic construct
  source 1..120: mol_type = other DNA
gaccctaccctgcatttacttcaggaatcaagaatcactgtatattctgaaaggttctgtggcttccttaatgccaatggtaataaaactagaaatgctgcccccagaatattgttttcc

SEQ ID NO: 3510 - DNA, 120 bp, synthetic construct
  source 1..120: mol_type = other DNA
cctagtgatgcctgggatatttccagagacagctcttcccccagcctctagattagtagtcaccatgctccttcattcccagaaaaaatttaaatatttctctgtgagatctttataatg

SEQ ID NO: 3511 - DNA, 120 bp, synthetic construct
  source 1..120: mol_type = other DNA
gaaagagcaagcaggaggggaaggagaaaaaaaaggaggaagagtaggccatgatacaagtggttacattcctgagtctttgattagcttaagtaaatctacattttacctgtgaaaaga

SEQ ID NO: 3512 - DNA, 120 bp, synthetic construct
  source 1..120: mol_type = other DNA
tcctttgggtatatacccaatgatatggtttggctgtgtccccacccaaatctcaacttgaattgtatctcccagaattcccacatgttgtgggagggacccagggggaggtaattcgat

SEQ ID NO: 3513 - DNA, 120 bp, synthetic construct
  source 1..120: mol_type = other DNA
gaaccagaggcccaggaggaaaaagtggttttgtggaccaggcccagcgtccccttgctgtgtgcagcctagggacttggtgccctgtgttccagctcctccagccatggctgaaagagg

SEQ ID NO: 3514 - DNA, 120 bp, synthetic construct
  source 1..120: mol_type = other DNA
gcattgcaatacagtgcagaaatatgagagatatggataggtagataaagctgcccttcatcttctcctttacttgggggatgcaagccttgagtttggctttgtttttcagaattgatt

SEQ ID NO: 3515 - DNA, 120 bp, synthetic construct
  source 1..120: mol_type = other DNA
tcagacttgtgtgtgccttgtaacccctttgttctggccaatttctcctatttggaatggctgtatttacccaatacctgtacctccattgtatctaaaaagtaactagcttgcttttga

SEQ ID NO: 3516 - DNA, 120 bp, synthetic construct
  source 1..120: mol_type = other DNA
ccttgtagactctggatattagacctttgtaagatggataggttacaaaatttttctcacattctgtgggttgtctgctcactctgataatagtttattttgctgtagagaagctcttca

SEQ ID NO: 3517 - DNA, 120 bp, synthetic construct
  source 1..120: mol_type = other DNA
ttttggactgagacaatgggattttctaggatctaggatcatgtcatctgtaaagaaagacaatttgacttcttctcttcctatttaaatatgctttatttctttttcttgcctgattgt

SEQ ID NO: 3518 - DNA, 120 bp, synthetic construct
  source 1..120: mol_type = other DNA
tattagtctagctggcagtctgtctatattattaatattttcaaaagaccagatcctggattcgttgattttttgaagagttttttggtgtctctgtcttcttcagttccagtctgattt

SEQ ID NO: 3519 - DNA, 120 bp, synthetic construct
  source 1..120: mol_type = other DNA
taggtctctaagaatttgtttcatgaatctgggtgctcttgtgttggcggatgtatatctaggttagttagctcttcttgttgaattgaaccctttaccattatataatgctcttctttg

SEQ ID NO: 3520 - DNA, 120 bp, synthetic construct
  source 1..120: mol_type = other DNA
ataatctcatagttcttggaggttttgttcattccttttcattctttttttctgtaatattgtctgcctgtcttattttggtaagatggtctttaagttctgagattctttctactgctt

SEQ ID NO: 3521 - DNA, 120 bp, synthetic construct
  source 1..120: mol_type = other DNA
gctctggtggcatgggctcacaagaacatctcctgatcaggagtacagatcagcttgtacagatgcatgaaaaaagcatggtttccctggtggggtagcataatcattcaccatctccct

SEQ ID NO: 3522 - DNA, 120 bp, synthetic construct
  source 1..120: mol_type = other DNA
ggggcaaaaacaataacattgtagaacctttccaagagattaactttctattttcaaagaccaacaattccacccaggtaaattactgcaaaggcatcctgactggtctccttgcctcta

SEQ ID NO: 3523 - DNA, 120 bp, synthetic construct
  source 1..120: mol_type = other DNA
agaaaaccaattcaataaggtacctaataaaaattatccgaagtgaaatacaaagagaaaagaagagtgggggataaaagcaaaacagagcatccacgagctgtagtaccatatcaaatg

SEQ ID NO: 3524 - DNA, 120 bp, synthetic construct
  source 1..120: mol_type = other DNA
tatattaatcatagtttatgaagcaggtttactaattaccaaccccaaaggaggacccccactgtgtggagaatagcaaagatcactactatgccaaccactaggaaaagaagtccagat

SEQ ID NO: 3525 - DNA, 120 bp, synthetic construct
  source 1..120: mol_type = other DNA
ttcactgattcaaataccacctcaaggaatagaatcatccttaaaaattcttaaagaagaaaatgcttttcattctgtcgcttcttactcagacatcttcaaagttttgtgggttttttg

SEQ ID NO: 3526 - DNA, 120 bp, synthetic construct
  source 1..120: mol_type = other DNA
gtccagtttattcctgccaaaatttcactctctgggacagctctgtctgggaaagaagttaaatttgaaggtgtcaggtaagatagaaagaagacaattcaacaaaccacatgactcaaa

SEQ ID NO: 3527 - DNA, 120 bp, synthetic construct
  source 1..120: mol_type = other DNA
atagacctttctggaatagttgtctctgtcactcaaacagaaaaacaaactatactaaattcagaggatgaggggaatcaggagcggcttgtgatggagggagatgaatattagttacag

SEQ ID NO: 3528 - DNA, 120 bp, synthetic construct
  source 1..120: mol_type = other DNA
aagaataataactaagtgaccacaaaggaaatttttttaatcacatgcctggctcttgcaggtggagaaggttgtcttgcccaaaggaagtggttactagaccagagtgtaaccaaatac

SEQ ID NO: 3529 - DNA, 120 bp, synthetic construct
  source 1..120: mol_type = other DNA
gaagcttccagtgttatagtttatattcttcatttctttgaggcacagaagaacccatttcactcttttggagtcaatccaggtttgtggggtaaaggactgtagctgatgaggattgga

SEQ ID NO: 3530 - DNA, 120 bp, synthetic construct
  source 1..120: mol_type = other DNA
tagttttctagccactgtcacagaaaattagtacaaatgcagaagcttagaacaaaacccatttattacatcagctttctaagtcagaagtctaggcagagctcacctgggctttctgct

SEQ ID NO: 3531 - DNA, 120 bp, synthetic construct
  source 1..120: mol_type = other DNA
taggtgctggtgaatctaccagttcacatagatgagaacatagacaataactttataatatattcaagtctattaggtcaagcttactaattgtgttgtttagatcttttatatcctact

SEQ ID NO: 3532 - DNA, 120 bp, synthetic construct
  source 1..120: mol_type = other DNA
tattttgcctcctactttgggatgtgttttcagtctctgttaaggttttggttgctcatttctggcatccccttcacacaggaaatacccagattcagccatttgcagattttgaaacat

SEQ ID NO: 3533 - DNA, 120 bp, synthetic construct
  source 1..120: mol_type = other DNA
cttgtctctggcagtccaagctactaagaagcacaaataaaatatatagtagcagggggagatgggaagggtgagagaatgtaggataaattaccattcaaactgccggtagaaatataa

SEQ ID NO: 3534 - DNA, 120 bp, synthetic construct
  source 1..120: mol_type = other DNA
acagatgttaaatgaaatctgtatgtggaactattggtctcaatgatatatgcaactctggaagttgggtactcagctttatctaatctctccctttgctcacctccaccaggcttgcaa

SEQ ID NO: 3535 - DNA, 120 bp, synthetic construct
  source 1..120: mol_type = other DNA
tacaaaagatctatgaaacaaaaatttgcttttttgaaaagttaaacaaaattgacaaacctttagcaagacaaactaagaaaaaaagagagaagatccagataaataaaatcataaatg

SEQ ID NO: 3536 - DNA, 120 bp, synthetic construct
  source 1..120: mol_type = other DNA
cgatttatcaagcaccttggctgacagaagaatgcgggttaagcttcctgctaccttagcgttatcaatcagtccaagttccattgtataaaatccctagcaagtctttgtttctttgta

SEQ ID NO: 3537 - DNA, 120 bp, synthetic construct
  source 1..120: mol_type = other DNA
atggcatccaaatttaaaaggaagaagtcaaattatccttgtttgcagaggatatgctcctatatttataaaaacttaaagactccacaagaatactattagaactgataaattcaataa

SEQ ID NO: 3538 - DNA, 120 bp, synthetic construct
  source 1..120: mol_type = other DNA
atttcctgagtgatactctacaaacacaagcaaccaaagcaccaatggagaaatgggattacatcaagttaaaaagcttctgaacacaaaggatacaatcaacaaagtgaagagacaacc

SEQ ID NO: 3539 - DNA, 120 bp, synthetic construct
  source 1..120: mol_type = other DNA
ccaaaaacaaaaaaaacccttcaatccccatatgcacagatctttgttagtcacatctgctcatggactcaacaaacagtaattgagtccactgactgcatttcggaaatccacactcat

SEQ ID NO: 3540 - DNA, 120 bp, synthetic construct
  source 1..120: mol_type = other DNA
ttagcctgccactgtttgcatggaaatttactactggtaagcccttgtttctctatccccttactcagctttcttcatttgtatcttcatagcaagaatcaccacctaatactgcatatc

SEQ ID NO: 3541 - DNA, 120 bp, synthetic construct
  source 1..120: mol_type = other DNA
ttgtttttgtttttttaatcctgcttggtattctccgagatttgtaatcggtgattcgttgtctgtcattaattttggcaagttctcacctggcttctacaacatcagactcttgcggct

SEQ ID NO: 3542 - DNA, 120 bp, synthetic construct
  source 1..120: mol_type = other DNA
gaaacattatcttctaccaaagaaaacaatgaagagaatcccaagatgacatctgctcagcagtcctggaaatcatttcttttagattgaaactagagaactaagggcaccaggaagtgg

SEQ ID NO: 3543 - DNA, 120 bp, synthetic construct
  source 1..120: mol_type = other DNA
agcaggaaagaatagggttagcagtagcttcatctacaaggagaaaactcaagagatcttgaatataactgacagaataatagagtactgtgtttaaaaatacagggattggccgggcgc

SEQ ID NO: 3544 - DNA, 120 bp, synthetic construct
  source 1..120: mol_type = other DNA
tgacccagttaacatccctacagctgtccatgtcctcctaaaacaagaaccttgaacttcttccagtagtatagaatccgtgtcctttagcacagttctacaccaaaagataaacaaaat

SEQ ID NO: 3545 - DNA, 120 bp, synthetic construct
  source 1..120: mol_type = other DNA
atattttacataaattctgattccacaatccctaggagtaagtgctcttgctgtttgttgtttgtgttagtgacttgcttgggctagttcttccaagtctgtttccccctagtatgcagc

SEQ ID NO: 3546 - DNA, 120 bp, synthetic construct
  source 1..120: mol_type = other DNA
ggcctgtcctcccacacaggtagaaattctgcaccataagttgaggtgaaggaagttggtgaaagcatactctggccaaaataatactgattttgctgtttttattaggattcagtttag

SEQ ID NO: 3547 - DNA, 120 bp, synthetic construct
  source 1..120: mol_type = other DNA
aaaaattccaggaaaaagaaaactgattgattttttttaaggcacttgtcatctggaagatctttctaaacatgaccccacagaagtcacaaatggataaatttggttatacagaattca

SEQ ID NO: 3548 - DNA, 120 bp, synthetic construct
  source 1..120: mol_type = other DNA
accagactcttctaaaagaacccagagctatgacagattctagagcttgagaaaaaaaataaaagatgatcatagaaagtaaggatatttaagaatggtggatacggccaggcgcggtgg

SEQ ID NO: 3549 - DNA, 120 bp, synthetic construct
  source 1..120: mol_type = other DNA
aagaaattcaacagtatgcaaactgggtagggtatgttctctgaccaaaaaagataaaaataaaaatacctcaactaaattagaaagcagcaccaaactgataacctggaaatcccctaa

SEQ ID NO: 3550 - DNA, 120 bp, synthetic construct
  source 1..120: mol_type = other DNA
gattaaatgtggcaaagacaaataaaagaaagaaggaattaataaaaatgaaaccagacaacaatgaaacagaaaaccagcaaacagaaaaattaacaaagctgggctgggtgtggtggc

SEQ ID NO: 3551 - DNA, 120 bp, synthetic construct
  source 1..120: mol_type = other DNA
gtggtcaagggctaggtacagctatatggtaggcaagtgtttggtgggtcattatgtattatcatgcaaataaagacttactaatagtgtgaagacataagcttgaataagagcaacagc

SEQ ID NO: 3552 - DNA, 120 bp, synthetic construct
  source 1..120: mol_type = other DNA
ttgtccatctggagtaaggaactgcaggaaagaaacaacatccaatctttaacacacttattctctttccatatctctgcctgtatttacgatgaaggcttgttctttttgtgtggcacc

SEQ ID NO: 3553 - DNA, 120 bp, synthetic construct
  source 1..120: mol_type = other DNA
tgttgagccactttttgtgtttctttcctctttctttaactctttttttttttttatgcatttatgttttatatacactttatacatatagcagcctgaaggtaattttttttttttcag

SEQ ID NO: 3554 - DNA, 120 bp, synthetic construct
  source 1..120: mol_type = other DNA
ggcatacataggcctcaaataatgttatctaagggtatgacttatataatctgtacttgggactccagtttcaatgcccaaactctgggaaccaagtgtggcttacactgaacatcattt

SEQ ID NO: 3555 - DNA, 120 bp, synthetic construct
  source 1..120: mol_type = other DNA
aaagtaaataattagcacaaaatcagagtaatgttttcctccaagggaaagatggtaggtagaaggtgcacacacagggcttctgggaagctggataagctttttagtctgtgtcattaa

SEQ ID NO: 3556 - DNA, 120 bp, synthetic construct
  source 1..120: mol_type = other DNA
cctgcagctcagaaggatatgtttggtccagatttcacccctgcagataagcattgaaaaaggcatgaatgtgaaagtgtggttttgagtagcttaatcaaaattgttttctcttgaatt

SEQ ID NO: 3557 - DNA, 120 bp, synthetic construct
  source 1..120: mol_type = other DNA
tacactgtgagctctgggtcccattaaaattctaggagaaggttgaattttttgttttagcaagaactaatctcatcaagtttagaatgcaagctgtatctcgctttctgtgcgccgtag

SEQ ID NO: 3558 - DNA, 120 bp, synthetic construct
  source 1..120: mol_type = other DNA
ctcagaaaagaaaaccaaggaactgctgaatatggttgcctttaaaagagtggccctagagagacatgctgtggatttagggaagaataagcaagtgttacttatgtaatacacacacac

SEQ ID NO: 3559 - DNA, 120 bp, synthetic construct
  source 1..120: mol_type = other DNA
ctctgcttctctcccatctggacagagatgtttgattatacaaggattgccattacagcattgtttggatttgtaaaatactgggaccaacgtcaatatgctccaacaggggataagtta

SEQ ID NO: 3560 - DNA, 120 bp, synthetic construct
  source 1..120: mol_type = other DNA
gcctgatgtttcccattataattagtgtaagatacagactatagtgggcttattccaacttggccgtcacagaaagatcctcttcagctttgttgctgaaggatgtttttctgattttag

SEQ ID NO: 3561 - DNA, 120 bp, synthetic construct
  source 1..120: mol_type = other DNA
aaaatgtaaaagggcaatggatctgcaactctctatgtaaaagaaacaggctgagaaagttgttcaaagtgccgatcatcctatgtgctctttaaaggtggccaaggagggaaacagaaa

SEQ ID NO: 3562 - DNA, 120 bp, synthetic construct
  source 1..120: mol_type = other DNA
ctgacctgcatcctgattgtgagattttgaacttgatggctgatgccatgattgcatgagacttctggtgatcccagattaggggtaagcatatttttcatattggaagaatatgaaaaa

SEQ ID NO: 3563 - DNA, 120 bp, synthetic construct
  source 1..120: mol_type = other DNA
ggttagcagtgccacctagctgacccagacatataagcatattgttatctgccactggtgatttgtgttgtttgtaatgcagcattgttgtgacaacagatgactaatacactaactaat

SEQ ID NO: 3564 - DNA, 120 bp, synthetic construct
  source 1..120: mol_type = other DNA
ggctctgaactaggggagtgtggattctcaaagaattcatgaaaatgttcacaatggagtcttcttatgcatctgttttccctagagcattcaattcaagctcatgaaatatcaggcaag

SEQ ID NO: 3565 - DNA, 120 bp, synthetic construct
  source 1..120: mol_type = other DNA
tctttttaacaatcagacctcacaggaactaatagtgtgagaagatgtttaacatattctaataagatattcctaataaactgccatgagataactgctgtattagtctgttgtcacgct

SEQ ID NO: 3566 - DNA, 120 bp, synthetic construct
  source 1..120: mol_type = other DNA
tggaaagctaggatcatggttggggaaggaaggaggctaaatctgctgcacaatttgaaactagggcatgatagtgtggcaaagaagagatagagcttgaaatagaagtagttacttatt

SEQ ID NO: 3567 - DNA, 120 bp, synthetic construct
  source 1..120: mol_type = other DNA
tgtacattatctattctgtaatgatgccatccctcctagtttccattgcagaggattggatctggaaattgtgttactaagaaaaatgcaggagaaggtttgagtgtccctattcccata

SEQ ID NO: 3568 - DNA, 120 bp, synthetic construct
  source 1..120: mol_type = other DNA
tcttcttcttgggaatttttgttcagcacactgagtcccaatgggtaactgattgcctctttattttttcatggagaaccagaacagaatggaagacttgagcaacatcaaagagttagc

SEQ ID NO: 3569 - DNA, 120 bp, synthetic construct
  source 1..120: mol_type = other DNA
gacatgccaatagctcacagctgttctttggccttcctgtatatttctgcttccattagttgagtttaatgtttaccaaaagttgctggcatttgctcacaaacctgttcatctctattg

SEQ ID NO: 3570 - DNA, 120 bp, synthetic construct
  source 1..120: mol_type = other DNA
caagcctagaaataattcaaatgtcctcgaatggtgaagagttaaacagtggcacatccatattatgaaatactacccagagataaaaatgaatgaactactgagataggcagcaacttg

SEQ ID NO: 3571 - DNA, 120 bp, synthetic construct
  source 1..120: mol_type = other DNA
aagaaaccaccctaatgtagaccaaacctgaaatgttaaaaaaaaacagaaatgaggtcagtggcagagatggctggatttccaccaaaatttgttcactcctcctcctgcttagcaata

SEQ ID NO: 3572 - DNA, 120 bp, synthetic construct
  source 1..120: mol_type = other DNA
ggaagacgctaaaggcaagatactcccacacatttgaagttgtagataggtaggatctagtatttcataattgtccaatctgattatttaaaccttaaataggggcaggactccaagagc

SEQ ID NO: 3573 - DNA, 120 bp, synthetic construct
  source 1..120: mol_type = other DNA
catcccatggctgaagtgattggttgagaaactggaatgccactcaagctaagctttcttcaaattatcaaaatggagctgacatgtttgatctgttgctattcagatgatgagctgaaa

SEQ ID NO: 3574 - DNA, 120 bp, synthetic construct
  source 1..120: mol_type = other DNA
catttggttaagttacggtattaggtaccatgagtggtgcaaaacaattctacttacacaaataagtgaaactaatcagactatcgcagaagtcaggaaagactgctgcacacaatccca

SEQ ID NO: 3575 - DNA, 120 bp, synthetic construct
  source 1..120: mol_type = other DNA
ggctaagtttatgtcaacacctgctcctcgttacctttcctggtaactgagtagagatggcaacaggaatgcctcattttattgtgctatgttttgttgtgcttctcaaatattgtggtt

SEQ ID NO: 3576 - DNA, 120 bp, synthetic construct
  source 1..120: mol_type = other DNA
ggactaatgcagctggtggctttagattgaagctagtgctaatttaccatttcaaaaatactagggcccttaagaattacactaaatctactctgcctgtgctctataaatgaaacaacg

SEQ ID NO: 3577 - DNA, 120 bp, synthetic construct
  source 1..120: mol_type = other DNA
gcactgggaaaccaaaagatacgtttaactttcttgcagtgctctctggaaccaaaatcgcaatatatctgaagtgcactttactctgttaaagtgaacacaaaacatcagcttgaaggg

SEQ ID NO: 3578 - DNA, 120 bp, synthetic construct
  source 1..120: mol_type = other DNA
attcaggaacagcaaaataactgaagcatgttcaggtgtccagaaaaacccactcaactcttttttccaccttatgtgtgtcatatttctgggcaaggagagcagggatcttatctgtga

SEQ ID NO: 3579 - DNA, 120 bp, synthetic construct
  source 1..120: mol_type = other DNA
agagggtaaggcagcaaagaaatcctcatcatgggcttacatccttcctttgatactaaagtggagaagatagcagatattaattagtcttctactccaatcccagatctaggttttaat

SEQ ID NO: 3580 - DNA, 120 bp, synthetic construct
  source 1..120: mol_type = other DNA
tgcagcctgggagtcaggtgatgcaaaggggtcaccataaaaacctgggagaaaaggaggtcagttctcagtaagtccttttgacttaagaaagtggtccaatttcagtttctgcatatg

SEQ ID NO: 3581 - DNA, 120 bp, synthetic construct
  source 1..120: mol_type = other DNA
gcttaggtttggttttactacctattcctgaaccaattactatggcaaggggactgagataatgctcactggtctatgcatcaagacccactgaaaaatgtaattgtcattagtcatcta

SEQ ID NO: 3582 - DNA, 120 bp, synthetic construct
  source 1..120: mol_type = other DNA
cagcttaaggagattttgggctgagatgatggggttttttaaatatacaatctcttgccagtcagaatggtgatcattaaaaagtcaggaaacaacagatgctggagaggatgtggagaa

SEQ ID NO: 3583 - DNA, 120 bp, synthetic construct
  source 1..120: mol_type = other DNA
ttaaataaactacacaataacaaaaaaatagtacggggaaaatactgctgcctaatagtcttctgtgggaaaacacgcaaaattactcccatgtgcagatctgctttcaccatagcccca

SEQ ID NO: 3584 - DNA, 120 bp, synthetic construct
  source 1..120: mol_type = other DNA
cttccttttcacccaatactcaaccttcaagttgtcctactcacccttcaagttgtctgtgaacgtaatttctcgtggctgtgtggcaaggacgctgtcattagctgaactaaggaaaag

SEQ ID NO: 3585 - DNA, 120 bp, synthetic construct
  source 1..120: mol_type = other DNA
agatacaacagtcttcaaagaaattctgtttcctagaaatctcttagtgtttctgtggctcacaggctcctatatgcctggagtgccacagggagaagcttaaatgaatgaagaaaaagt

SEQ ID NO: 3586 - DNA, 120 bp, synthetic construct
  source 1..120: mol_type = other DNA
ttgcattaaaattatgacctgaaaacagaagcaaatagaacaaggttcgctgtattctggctggatgaagcaggaggaggagagggacacaaaaccagttaaagatagaaagagcatcta

SEQ ID NO: 3587 - DNA, 120 bp, synthetic construct
  source 1..120: mol_type = other DNA
ctgtagcatcccatctctactacttacgagccatgtgaccctgggaaaagtcctttacctctctgagttttaatgtcctccttgaaaaatgtggatgatactaaagtatgacaagtattt

SEQ ID NO: 3588 - DNA, 120 bp, synthetic construct
  source 1..120: mol_type = other DNA
atattcatgttttgtctgggtgcagacgtgatgactgagtggccttattttctgtctcaatccatcgcactcacagagtacctgtctgattctgatgttctatgaaattgattatcttca

SEQ ID NO: 3589 - DNA, 120 bp, synthetic construct
  source 1..120: mol_type = other DNA
aagtagaaaaggcaaaggtattgcttggctaccaccagcagagatccctaggaaggtggggtcaagtcaaaatttggggaataccatatacactatggaagcaaaaagaaaaatagctaa

SEQ ID NO: 3590 - DNA, 120 bp, synthetic construct
  source 1..120: mol_type = other DNA
ccaaggacgttgttctgtttatattatatccagagactatagcctggaggtctgtgtggcattccatcatgattgcctcaaagactagggatgtttccatgaatggagtatttttttgtt

SEQ ID NO: 3591 - DNA, 120 bp, synthetic construct
  source 1..120: mol_type = other DNA
ccggtcaggctcgacttatccattaggaacagtgtgggcagtgaaggggaccctccaaactgtaaagctacaagagaacgttttaactccttttaaaattagaagaaaaatgaagtttta

SEQ ID NO: 3592 - DNA, 120 bp, synthetic construct
  source 1..120: mol_type = other DNA
tgacagcccctgtcttgtgtctctgagtcctgagacaccatagatatgtctttattagtctcctcaggctggcatacaaaatactagatggcttaaaaaacgggaatttatttgctcaca

SEQ ID NO: 3593 - DNA, 120 bp, synthetic construct
  source 1..120: mol_type = other DNA
gcgttggaggtcacaacgcggtcaaaaacatgttgagaggacttagctgcaaagttgttaactaagtagaaacctcaaggatgaattttaggatttctccaggaaatcctaaaagataac

SEQ ID NO: 3594 - DNA, 120 bp, synthetic construct
  source 1..120: mol_type = other DNA
attcattccttcctttgtttattgcaatattcatcataagcttatgatgcgccaggcactaagtaggcactcaggaaataacagacgtgtgacgttctgcctttgtggagcatatgttat

SEQ ID NO: 3595 - DNA, 120 bp, synthetic construct
  source 1..120: mol_type = other DNA
ccattatgtattaattcctactttattaaacatgcccacagagagaagggcacaggaataaagcagaggcaatgtgtcgttgctcccaagcagaaggtaaataagacctctttgactatc

SEQ ID NO: 3596 - DNA, 120 bp, synthetic construct
  source 1..120: mol_type = other DNA
tgttacctactaagggatgcctgggtaagccactcagctacctaattcctcaatgacctttatctaaaatctccatggaagcaataaattcccttttgatgcctctattgaatttttccc

SEQ ID NO: 3597 - DNA, 120 bp, synthetic construct
  source 1..120: mol_type = other DNA
aataaggcaataatataagggggtatctgaaaaggaacaaatgcttgttccttacttagggttagtgacaatggaaaacagatagaagtagaagctacagacccatttaggggccccagc

SEQ ID NO: 3598 - DNA, 120 bp, synthetic construct
  source 1..120: mol_type = other DNA
ttttaagtcaaggtgaattatatgcaacagcagtttatccatatttactttggggaggaggtggggagactccgggagaaaataattataaatgcagactgggaattagtaagtgcaggg

SEQ ID NO: 3599 - DNA, 120 bp, synthetic construct
  source 1..120: mol_type = other DNA
agcacttcacacacagtctggcccatagtaagcagtttatagaagttaacaaatttgtgttattgttattttctggagtccaagacaaaatcccatgatgaatgacaccacaaggatgta

SEQ ID NO: 3600 - DNA, 120 bp, synthetic construct
  source 1..120: mol_type = other DNA
ctgtccaaggcctgcccaagactgtaagaacctctcaggaatgcaactataaagaatgtgtatgcaggaactaataataacaaaggaaagcaaagtaatgcttgctttattattggctgg

SEQ ID NO: 3601 - DNA, 120 bp, synthetic construct
  source 1..120: mol_type = other DNA
ttacctaccacgcagagttttactagaaattgactaaggatatgaccaattgagattgttaatcaggatataggaaggtaaggaatccaggaaactgggtctaacccaggatctcactga

SEQ ID NO: 3602 - DNA, 120 bp, synthetic construct
  source 1..120: mol_type = other DNA
aatcgttcagtctcaaagggaggagtttaggtacagtggaacagcactgacggcagaaacactgttctagttcctgggagtacatatacattcatgtggaagaaaacaaacagataaaat

SEQ ID NO: 3603 - DNA, 120 bp, synthetic construct
  source 1..120: mol_type = other DNA
atcaatatgtggttactaattgtgacaacttctatgatggaagagacaggatgctatgagaaagaataacacagtgggtgggaatggcatcacaaactgcaagggagaaataattgaagg

SEQ ID NO: 3604 - DNA, 120 bp, synthetic construct
  source 1..120: mol_type = other DNA
aaaaacaaatctcagtgatgtcactcaataaagagacttaattccacagtttctccagtgactcaggttatatggagtttccatcgtctcatcgtgcatctacttgcaagttccattggc

SEQ ID NO: 3605 - DNA, 120 bp, synthetic construct
  source 1..120: mol_type = other DNA
ggaagaaagggaaaaagactttgatcctctcataaccaggatgtgttcagtgtgacaatgttgaactgaatgttctagaatctgtgttggactgcattaaatacggtcataggctgcatg

SEQ ID NO: 3606 - DNA, 120 bp, synthetic construct
  source 1..120: mol_type = other DNA
ttacttagacaacactcgccaaaccagaagagaggctgggatgtcctaaggccattgcactgaacatcaatattaaagaaccatgaatgatgtgatgactgaattgattttctacctcct

SEQ ID NO: 3607 - DNA, 120 bp, synthetic construct
  source 1..120: mol_type = other DNA
tgggtaatatgaagagtttgatttttttagtaaattgggtgacacttcatctccaccactagcagcctcttttagtcactgaaaatgcctacaggcagtagctaacaaaatgtggcacaa

SEQ ID NO: 3608 - DNA, 120 bp, synthetic construct
  source 1..120: mol_type = other DNA
cccatgttctttaagtccttaagcaccctaagttaaaatcccccaaaacaaaggaaattgtcactagaagacaaggaggccgaggctctgaccctcataatggaggaagcttttagaaag

SEQ ID NO: 3609 - DNA, 120 bp, synthetic construct
  source 1..120: mol_type = other DNA
cagcacgcctgctgtgaggaaggtccctccttggaaccagaatagaaagatacctggagtccaagtcttggattaaggttccttcaacaaatataaatttgacaatcactgagaatccaa

SEQ ID NO: 3610 - DNA, 120 bp, synthetic construct
  source 1..120: mol_type = other DNA
ttgttctgaaatcagacattatcatgtacgttctccataggaaatattctgagatccatgcagaggttggcctgggtgaatgtgcctgtaatgcaaacatatacatatagctgggatttg

SEQ ID NO: 3611 - DNA, 120 bp, synthetic construct
  source 1..120: mol_type = other DNA
ataacttagatggtgtttgctaaggcaattgtctagaaataagtgctcactaagtgggtaaaattgacgttcagaatgtttatgcctgaagtggatagtgatggggggagggagaaaatc

SEQ ID NO: 3612 - DNA, 120 bp, synthetic construct
  source 1..120: mol_type = other DNA
ggtaagagggaaagcccagtccctgcctgagcctgtgaaccaagtgaagagggcagtcggaccgattcaacattgacctctgctcttagatcagggcgttctcgtatgaaatcccatttt

SEQ ID NO: 3613 - DNA, 120 bp, synthetic construct
  source 1..120: mol_type = other DNA
tgtattatttcccttctttacttcctccttcctatcatactaaattcagtccaccatcaactcaggtccctgaatcccactcaagtcaccttttgcccataaatcagtgaaacccaaagt

SEQ ID NO: 3614 - DNA, 120 bp, synthetic construct
  source 1..120: mol_type = other DNA
aatatacataaagggaacaagccttcagtgtataagctaatgaattgttacatgtgtgtacccaccatccagatcaagaggaaaaatattttcagcatccaggaaggctgtctcatgtct

SEQ ID NO: 3615 - DNA, 120 bp, synthetic construct
  source 1..120: mol_type = other DNA
ttaagttttggtgagaagagcaaagttcttagaaggaaatgatggtgagttgcagttctaccactaatgtgctttatgagagtcaacaaattactgaactccttttcacccccaggcttc

SEQ ID NO: 3616 - DNA, 120 bp, synthetic construct
  source 1..120: mol_type = other DNA
taccaggtaaaaagaaacagggaagagacggtagcaagaggtttgcaatagtggcacatgaaagcattgagccactctaatattctgtattattctgtgcatagatttagatcacctgag

SEQ ID NO: 3617 - DNA, 120 bp, synthetic construct
  source 1..120: mol_type = other DNA
caaaaaaaaaacacctaatctaaaaggctttggtttggggcttctgccagttgtgtccccctgatccagccttctctacagttctttgcaatgttcctatccctgctccattactcaggg

SEQ ID NO: 3618 - DNA, 120 bp, synthetic construct
  source 1..120: mol_type = other DNA
ttttctctttaaacagttatctctttaaaatgacaatttagaaagtctgaagagagagtctgtagcattcagaggctgtgctcaaacagtgcctccttcaagcaagtaaccatggggaga

SEQ ID NO: 3619 - DNA, 120 bp, synthetic construct
  source 1..120: mol_type = other DNA
tcatgtccaagtactcaagaattcaagtgtccagctcagctcaaggtcatggttcatgcaaaaaagcaacattagcagtaatattttggggagactactcatatcctcaaataggaaaac

SEQ ID NO: 3620 - DNA, 120 bp, synthetic construct
  source 1..120: mol_type = other DNA
tctgagtatgagtttctttaactgcaaaatgagaatattatctattccatagagtaatgccaaggattaaatgaagtggcaaatatatagcatctaaaatagttttgaacacatagtaga

SEQ ID NO: 3621 - DNA, 120 bp, synthetic construct
  source 1..120: mol_type = other DNA
atattaatcacagtttatgaagcaggtttactaattaccaataccaagggaggaaagggaggacttccactgcatggagaatagaaaagatcatcactatgccaaccaccaggaaaagag

SEQ ID NO: 3622 - DNA, 120 bp, synthetic construct
  source 1..120: mol_type = other DNA
tcacagctcaaactcttgatcacttcattcatattacatgttccaaaaaacaaccacaggaaaacttctccaacagtaactttgcatgaactcatgtgttctgtcaatcgagaaaaatgg

SEQ ID NO: 3623 - DNA, 120 bp, synthetic construct
  source 1..120: mol_type = other DNA
ccatctgcagcagaagtggttcctttggaaccaagcttgaacaggtctaaaaactaggttgttcttctggtttagtgacagagactactatcccagatgaaaatacaatagtcttttagt

SEQ ID NO: 3624 - DNA, 120 bp, synthetic construct
  source 1..120: mol_type = other DNA
tgaccacaaaggaaattttttatcacatgcctggctgttccagacagggaagcttgctttacctgaaggaagtggtcactagaccagaatgtaaccaaatacaggattctgctttaaaaa

SEQ ID NO: 3625 - DNA, 120 bp, synthetic construct
  source 1..120: mol_type = other DNA
cttattggggttttaaattgttgtctgttatgaataaagctgccctaaacgttctggtggtatatgtctgttcatggacaaatgccctcatttctaggagtggaattgctagtaggcata

SEQ ID NO: 3626 - DNA, 120 bp, synthetic construct
  source 1..120: mol_type = other DNA
ggaagtcgcaaaccctttgagaaaattttgggatgggagacaaacatatttctaagaagccttcaatgttacaggttatattcttcacttcttcaaagtacataagggcccactctactc

SEQ ID NO: 3627 - DNA, 120 bp, synthetic construct
  source 1..120: mol_type = other DNA
tagtgggatagtaaaaagagcccatacatacacacatacagagattatactgaggcagattaaaagtttaaatgagaaggaactcagaactgaggaggaaccacccagaacatgcttgct

SEQ ID NO: 3628 - DNA, 120 bp, synthetic construct
  source 1..120: mol_type = other DNA
catttaaaggaaaataattttataaggtatgtacaacagggggtgatagatattcctgggggccatcttagaattctgctttccttctcacctcttcagccctctggccacctgtaattc

SEQ ID NO: 3629 - DNA, 120 bp, synthetic construct
  source 1..120: mol_type = other DNA
ggtatttttttcacccacacctagctttgctggcattgagaagacacacctaagagaataattaatcatacctacaggaccccttcttcactgagacagaatagcaatgaagtcattgtt

SEQ ID NO: 3630 - DNA, 120 bp, synthetic construct
  source 1..120: mol_type = other DNA
agatacaatgctgggacaggagaaatgggccagaagaaagaagtaacaggcctcaaggaagtctgaaactcaacagggaaagacattaaattttaaagctggaaataatgtcttttgact

SEQ ID NO: 3631 - DNA, 120 bp, synthetic construct
  source 1..120: mol_type = other DNA
atttctatgccttcccactagtcttgcattctgaagacctgcagaaatagcaccacatgcatgtggacattgccaaggcttactgcttgtgccttctgcagctacaatatgagtcacatc

SEQ ID NO: 3632 - DNA, 120 bp, synthetic construct
  source 1..120: mol_type = other DNA
aaatcatcacaaaggagttccagacttttcctagtcttcttgacttcttctaagccctcaccaaaatcaccctttatcaccagaattgacatttaaggcaatacaggctttttctcgcct

SEQ ID NO: 3633 - DNA, 120 bp, synthetic construct
  source 1..120: mol_type = other DNA
tagccagaagcagaaagtcaaaatttggctgtctttcctccatagagcacttttggtttctttcccacttaggaattaaattcccagccaataatgcctactttcaggcatagaagtcaa

SEQ ID NO: 3634 - DNA, 120 bp, synthetic construct
  source 1..120: mol_type = other DNA
aacctgtgtcatggaggtttgttgtacagattattttgtcaaacagttattaagcctagtacttattagttatttttcctgatcctctccctcttcccactctccaccctctgataggcc

SEQ ID NO: 3635 - DNA, 120 bp, synthetic construct
  source 1..120: mol_type = other DNA
agagatgaagaaaaatctacaatgccttttttccttaaaatttgttttttacattaataaattgatatcatttttcaaaattagtatttgcatgatatatcctttctgtcttttacactc

SEQ ID NO: 3636 - DNA, 120 bp, synthetic construct
  source 1..120: mol_type = other DNA
tttgcgtaccttacattcattaacatatcctctttctagaagctttactttccctgtcatacttaggtgtatggtccattatgaattcatttttgtgtttggtgtgaggcaaaggtctag

SEQ ID NO: 3637 - DNA, 120 bp, synthetic construct
  source 1..120: mol_type = other DNA
atggcctgtctctggacttaacatcccatgtcctcactcagactacataactttagacccaccctattactatggactccctgtctatttgtattttttcagcaaaacgtctaaaagtaa

SEQ ID NO: 3638 - DNA, 120 bp, synthetic construct
  source 1..120: mol_type = other DNA
cgttttattcaacagaagtgcctttggacattcacacttgatcttccaaaaccacatcagcttctagaacaatgcttctagacagtttcttagtaacccctcaaagacgtgatttcacat

SEQ ID NO: 3639 - DNA, 120 bp, synthetic construct
  source 1..120: mol_type = other DNA
ttctcaaacaaaagcagactttaactcctgctccagtcatgcttctttgcttctcaaacacccataaccacatctcagattgcatcatattttgaacacatggaaggaagagtaagggaa

SEQ ID NO: 3640 - DNA, 120 bp, synthetic construct
  source 1..120: mol_type = other DNA
tgtagctggggagggtaggagagggatgggaaaaagaaaatggaaagatattccctggaaaagaagataattgtctaagaattgttcattttttccttgtcttggcactatgagacactg

SEQ ID NO: 3641 - DNA, 120 bp, synthetic construct
  source 1..120: mol_type = other DNA
agctcgaagagccaaggcaatcctaagcaaaaagaacaaagctgaaggcatcacattacccaacttcaaactatactacagggctacagtaactaaaacagcatggtactggtacaagaa

SEQ ID NO: 3642 - DNA, 120 bp, synthetic construct
  source 1..120: mol_type = other DNA
gcactattcacaatagcaaagacatggaatcaacccaaatgcccatcaatggtagactaaataaagaaaatgtggtgcattatgtagccatgaaaaggaataagatcatgttctttgcag

SEQ ID NO: 3643 - DNA, 120 bp, synthetic construct
  source 1..120: mol_type = other DNA
ttgctaccactgttgtaagtatccagataatttgggggttcattatagacatggaaaaagtattttgtataaggagaatcttcccatgtctgcctttggttttgctctctccccattacc

SEQ ID NO: 3644 - DNA, 120 bp, synthetic construct
  source 1..120: mol_type = other DNA
gagcagaacctaaggagaagcaaatagaaaaagagaaattaggaaataagaaagttagcagttttctttgatagcaagtggaggaattaaacattcctacactgggctgggtgtggtggc

SEQ ID NO: 3645 - DNA, 120 bp, synthetic construct
  source 1..120: mol_type = other DNA
gcatctctcagaatccatgccctgtgggtagttatatgtgaatatcagaatcgccctccactgccagggagacccaaggcttaatcttgtatctaatttggaaacaaaaaaaaatgtata

SEQ ID NO: 3646 - DNA, 120 bp, synthetic construct
  source 1..120: mol_type = other DNA
cacttacatacactggtttattacataggataagacaaaggatacagacgaacagattgataaagaaaaacaaaacacataggacaaagtatgggggaaagagtgcggagcttccacacc

SEQ ID NO: 3647 - DNA, 120 bp, synthetic construct
  source 1..120: mol_type = other DNA
aacagctttaaaaggtttctgtgggattatcattgacctgtttttactttgtcttagtgatagctttgtaggaaagattaatttttccttagcccagcagagagaggtgagactgatgga

SEQ ID NO: 3648 - DNA, 120 bp, synthetic construct
  source 1..120: mol_type = other DNA
ctagcaagctcatctacaaacaaatattcttattcttggaacagagttgccaaaagcagaggcacacagaaaaaaaagtctgtgtttgagagctcaggagagagaggagccaaaagaaac

SEQ ID NO: 3649 - DNA, 120 bp, synthetic construct
  source 1..120: mol_type = other DNA
ccatgatagttcctgttacagtaagccacatcttcagatagagagagaaaaggccacatgtatacttaccttgtatgaatgagcactgttgtttgatgaattccatctcttcccctcttt

SEQ ID NO: 3650 - DNA, 120 bp, synthetic construct
  source 1..120: mol_type = other DNA
agcttcgtatccgggaatgccagtgggtgttcacaaataaaaaatgggagagtcctgagaaggcattccgcatgcttttcaaggaaaagaataaatagaagttaaaggctttatacatcg

SEQ ID NO: 3651 - DNA, 120 bp, synthetic construct
  source 1..120: mol_type = other DNA
ggaagtccacattacatccgcggagcaatggctgggaacgttgcataatagagcggggctcaaattccaaattaagtttctgaattttttccatctggaattttatttgatgattagtct

SEQ ID NO: 3652 - DNA, 120 bp, synthetic construct
  source 1..120: mol_type = other DNA
acttaacaactttgttattgccctgaggatgtgatgtggcaaaggggacaaggattggatagattgtcttactgatggaagttggtaacaaacaaggcaaatcaaaaaagaagccatgag

SEQ ID NO: 3653 - DNA, 120 bp, synthetic construct
  source 1..120: mol_type = other DNA
agaagatgcttgggagaccaagtggttagtaattccagtcatcaagaaaggacagtttaagagaacattccatattagacattttgtatttgtagggcctgtgggtcatccagatgaaac

SEQ ID NO: 3654 - DNA, 120 bp, synthetic construct
  source 1..120: mol_type = other DNA
accaataggaaactaatatatcctgtaatcacgaagcaatatagctcaaacctcaggcttggggaccatatggatttgagttcttatcatagctccatcgcttcctacccatatgaactt

SEQ ID NO: 3655 - DNA, 120 bp, synthetic construct
  source 1..120: mol_type = other DNA
gtacttgatggacagaatgtactaagaaaccaacaaaagcaattcatttcttacttagctacataagctaagtaagaaaatcgcaaatgctgacatccaaggaagctttccaagcataga

SEQ ID NO: 3656 - DNA, 120 bp, synthetic construct
  source 1..120: mol_type = other DNA
gcatctgcaaaaaatcttacagctaacacagcggtgaaagactgaaatttttcccccaaagatcgggaacaaagcaatgatgtccactctcgccatgcttattcaacatggcgttggaag

SEQ ID NO: 3657 - DNA, 120 bp, synthetic construct
  source 1..120: mol_type = other DNA
atccctcattttgcccttttgtagccacagccacttccctcccatttccacttcttcattaacacagcaattattaatttccatctctatagttttggcattccaggagtgttatgtaag

SEQ ID NO: 3658 - DNA, 120 bp, synthetic construct
  source 1..120: mol_type = other DNA
ggtccccagtcaccggatttcatatttcctttttcttagtttaattccctagttagtggacaattctccagaagctttctgagaaaaggtacttgggagataatgttctgcaaatgtcca

SEQ ID NO: 3659 - DNA, 120 bp, synthetic construct
  source 1..120: mol_type = other DNA
tttttaacatgaaggagtgttgaattttatcagaagacttttctgcatctattgagataatcatgtgggttttgtctttagttctgtttatgtgatgaatcacatttactgatttttata

SEQ ID NO: 3660 - DNA, 120 bp, synthetic construct
  source 1..120: mol_type = other DNA
gagcttctaatgtgttgtatctttgttctcactcatgtcaaagagtttcttgatttctgcctgaatttcattattttcccaaaagtcattcaggagcaggttatttaatttccatgtaat

SEQ ID NO: 3661 - DNA, 120 bp, synthetic construct
  source 1..120: mol_type = other DNA
agacaagtctagtggtaatgaaattccctcagcatttccttctctgaaaaggttcttatttctccttcacttttgaagattagtttggccagatatgaaattctgggttgaaattatttt

SEQ ID NO: 3662 - DNA, 120 bp, synthetic construct
  source 1..120: mol_type = other DNA
tccaatgagtggtgtcagccaaagtgtttcatagtacagtgacaggaggatctgtccttgtttgagtgtaccagcagcagtggtagttgaagctgcagcagagtactagcaggtgccggg

SEQ ID NO: 3663 - DNA, 120 bp, synthetic construct
  source 1..120: mol_type = other DNA
tctgtctgcaatggctgtcaggagggaattggtggggggtgaattacactcctatatgctggtgaggcaaggaaaacaaaacccacccagcagacatgtaccagcaaaatgatgtgggga

SEQ ID NO: 3664 - DNA, 120 bp, synthetic construct
  source 1..120: mol_type = other DNA
aagatactcaagagcggaaaatggaaccaagatttttatagccacaaaactgactttcgactatgaagtgcaagaacttcctggtgtggactgtatatgccgtcccaaaattcatatgat

SEQ ID NO: 3665 - DNA, 120 bp, synthetic construct
  source 1..120: mol_type = other DNA
ttaacttcactcacaactcatgcaattacataatggcttttccacaggacaactgcctttccatcagtatgcaccagaaatgctgcctatgttcttacactgactattaaacagatgtgt

SEQ ID NO: 3666 - DNA, 120 bp, synthetic construct
  source 1..120: mol_type = other DNA
catagttcaactagaaagcgggggagaacataggtaaaaagggagaacacaggtaatagggagaatgtaggtaaaaagaatttcaaccgttttcagtagccattttggtggttgtgtatg

SEQ ID NO: 3667 - DNA, 120 bp, synthetic construct
  source 1..120: mol_type = other DNA
aaacactgatcctgcctttccactgtaccactaagtagcccactagtaagtggagggaagtgtctcttcactagtaaatgaagggaactgtctctttgtagcattaataaagcatataaa

SEQ ID NO: 3668 - DNA, 120 bp, synthetic construct
  source 1..120: mol_type = other DNA
aaggtttttaaaaacagtgaaaaggaaacagtgactacctgagcatttgtcttctgaagactgtggagactgcagttggaagacagaaagctttggagatcatgacttataggagtaggg

SEQ ID NO: 3669 - DNA, 120 bp, synthetic construct
  source 1..120: mol_type = other DNA
cacacctcctattgctgagttgggtaaacaccaggaagtcacctatgtggattcctgtctcatctttgggagctttacagaaactccaatgttcaaaagtgaaattgaaaataagtgaaa

SEQ ID NO: 3670 - DNA, 120 bp, synthetic construct
  source 1..120: mol_type = other DNA
aatccaacttcctgcattgtatttgtttcctcttaggttcttcctgcccccttctgtttgtattcgtccttgtcttattgtagaaatattttcacaaccacctgattatccttggttgtc

SEQ ID NO: 3671 - DNA, 120 bp, synthetic construct
  source 1..120: mol_type = other DNA
aaatccaatgctagctagagaaaaataaataaatttagaaaaggttcttcgaaaccaaagttggcacccatggagttaccccccatcggttacagattctcacagcccataagaatgcct

SEQ ID NO: 3672 - DNA, 120 bp, synthetic construct
  source 1..120: mol_type = other DNA
tcctccaagttaaagatgaatctgaccacaaactgcaccttttctgtcccgttggtgaagtaacagtcagcctttgcctgaatcacaaaatcttctggaaaaccaaaaccaaaaccatga

SEQ ID NO: 3673 - DNA, 120 bp, synthetic construct
  source 1..120: mol_type = other DNA
agacttgaaagataattgctattaatgttgggttgtaatttactttcctttctaagttcagaagcctcctccaactctgaactgagccataagaatgaccttcctgggtgaaccccactt

SEQ ID NO: 3674 - DNA, 120 bp, synthetic construct
  source 1..120: mol_type = other DNA
gggacccacccagaacccattctggagaaaggaaaaaaatgagatagtaaaatcgtcagcctcttcagaatgagctcataaaattcagtcagaaagtacccattaagagtataaatcgct

SEQ ID NO: 3675 - DNA, 120 bp, synthetic construct
  source 1..120: mol_type = other DNA
ttctggtgttttgggaaaagaaacttttaagacaggagagacttcaacaaggttgcaagtgaagtgcaaggtatctgtagaaaggagaaactgaagagaaaaaagagaagaaaggggaca

SEQ ID NO: 3676 - DNA, 120 bp, synthetic construct
  source 1..120: mol_type = other DNA
taaagggcaatgtttactcatcatttcacatcatctttcagcatgaaatgtgcccctgatttgcctatactgtgcatgttaagaatgaacccagggtatcatggtaaccacaagttcact

SEQ ID NO: 3677 - DNA, 120 bp, synthetic construct
  source 1..120: mol_type = other DNA
aataatttcttctccatgggagattataacaggtaaagaaaaagagagcaagacgtggaagacatcgctagtgttcatcctctaattcctaggcccatggaaaacgagaaactagacttc

SEQ ID NO: 3678 - DNA, 120 bp, synthetic construct
  source 1..120: mol_type = other DNA
gatggaatgaaccaaagttcacataactagtaagtccctaggctatactttttctgtcacactgtatttcttgggaagccagggaaactttattcctacagctttagcattccggtaatg

SEQ ID NO: 3679 - DNA, 120 bp, synthetic construct
  source 1..120: mol_type = other DNA
agctacagtttaattgaaggaattgtactaggctaagaattttgccagctcaaaatactggtttaattctttctcagtggtgattgacgtctcaaaccagcaagaggtgtaacatgaggg

SEQ ID NO: 3680 - DNA, 120 bp, synthetic construct
  source 1..120: mol_type = other DNA
gcatgaatcaccaggcccagcctatttttttgtccacttaactggtctagtccagggaaagggaattaaagtgttctattggtagtacatttctgaatattttccttgtatctaccttaa

SEQ ID NO: 3681 - DNA, 120 bp, synthetic construct
  source 1..120: mol_type = other DNA
ccatttctttcattaaatcgcgaacgtagtaatgacttaacgctggttacgcattcattacaatcgaagattatattaatttgcgatggtaagtgtcccaggtgtcaggatggccgagtg

SEQ ID NO: 3682 - DNA, 120 bp, synthetic construct
  source 1..120: mol_type = other DNA
gacgaatgtgacctctgcttcccttttgtttgccttctcttgttatgtctttgcccatcatcttatttgttgaaaataatgaatacatctttctgagtggctttatgttaggtgtctttt

SEQ ID NO: 3683 - DNA, 120 bp, synthetic construct
  source 1..120: mol_type = other DNA
atgtttaccaaatgtggcagcatctgaaggtaatcaatatctctaccctcctttcaaacaagacaaagactttaggtgctttaactttgtctgcctcattctcatgtcacttgtggttgc

SEQ ID NO: 3684 - DNA, 120 bp, synthetic construct
  source 1..120: mol_type = other DNA
aaataaggtaagaagacaggtttcagatacttggcacagcaatagcacatagtaagcaccagtgaatgcttagtagtagtagtagtctaattcctaagagtccatggaactctaggttca

SEQ ID NO: 3685 - DNA, 120 bp, synthetic construct
  source 1..120: mol_type = other DNA
ccatgtagttgggagatacaggaattattattcctgttttatgaataaaggacatttgtgggagagaaaggaatcaggccagagttctttctctccaaatgcctattttaccctctgtga

SEQ ID NO: 3686 - DNA, 120 bp, synthetic construct
  source 1..120: mol_type = other DNA
agaaacctctctggtgatgggatcatcttaagtctatgagtgaagactataacaacgggactggagagaagagaatagattctgaattatttagagctaagagcagcagagcttttcttg

SEQ ID NO: 3687 - DNA, 120 bp, synthetic construct
  source 1..120: mol_type = other DNA
gttcatgtaagaaggaaaatattttaaaatatatgtattatgccacaaaatactcctcatcaccaggcaaagctctagtcaccagggaattaagtttcctggacacagacagcccccacc

SEQ ID NO: 3688 - DNA, 120 bp, synthetic construct
  source 1..120: mol_type = other DNA
acagggacacgaccttcaccactaagagtaagtctgattttctcttttttactgaaggagcaagcttacaatttgtagaagatacctgtgtatattccatgctccatttcctggatgaag

SEQ ID NO: 3689 - DNA, 120 bp, synthetic construct
  source 1..120: mol_type = other DNA
actcacaactgcactgctcctcctccatactcaaaagagattctccacttttaaatgtacaatttggacggaatttaaaagtggcaccaataccccagtgttccaatttgcaatataaag

SEQ ID NO: 3690 - DNA, 120 bp, synthetic construct
  source 1..120: mol_type = other DNA
aagcttctaggtttatctatcaatagacaggaagtacagaggcagaagagcatataataccacagggattcagtcaacaaaatccagaccctaagaaactccacaggacaaacaacctat

SEQ ID NO: 3691 - DNA, 120 bp, synthetic construct
  source 1..120: mol_type = other DNA
tgagatgctccctagtctacctaaaaataccaaactgtttctctccctcttccttactcttctttccagaaggaataagagtgaaggagcaagggaacaaaatattattgagctctcagt

SEQ ID NO: 3692 - DNA, 120 bp, synthetic construct
  source 1..120: mol_type = other DNA
tctactttctacagtcttatttattcattgtacgatacctacagatgcctctagaacaacctccgagtatcttggcactgcccctcagttgtaaccatgggcttaaatttttaaaatctg

SEQ ID NO: 3693 - DNA, 120 bp, synthetic construct
  source 1..120: mol_type = other DNA
aatggttttaaaaaggggaattcccctgcacaagctgtcttttctcttgtctgctgccatgtgaaatgtgtctttcaccttccgccatgatttgaggtcttcccagccacatggaactgt

SEQ ID NO: 3694 - DNA, 120 bp, synthetic construct
  source 1..120: mol_type = other DNA
cctatcatctccccttcctattccctcccccataccttcacatacactttacatttttgtttacagttctggagaatcatgaatcttctgaagtcaaatatccattgttggatggctgga

SEQ ID NO: 3695 - DNA, 120 bp, synthetic construct
  source 1..120: mol_type = other DNA
gacacacagagagagaagaggtaaggaatacacagaggaagaagaaagaggagacatggtgagctagatgtgagaacaaaatcataacatgtacaaatttacaagtatttatggagtgca

SEQ ID NO: 3696 - DNA, 120 bp, synthetic construct
  source 1..120: mol_type = other DNA
tcacctcatcccagtcccagccttatcaaacagtttgtttgtttgagtatgtctagaaagagaaaggaaagcaagtgaagggaaaagagtaatgattctggaaagaaaggtgataagcct

SEQ ID NO: 3697 - DNA, 120 bp, synthetic construct
  source 1..120: mol_type = other DNA
gaagatggcactggcaaaggcatgggggtcaaaatcacctcccaggatgtcaatcacacgaccagaatagtgagggattaatgtctcacctgaaagaggcatgaaaaataacacaagaat

SEQ ID NO: 3698 - DNA, 120 bp, synthetic construct
  source 1..120: mol_type = other DNA
actgtacaggcctgcaatgagtctcactcgcctttagtggcggttactctgggatataaaactgcaaaaatgtttctttatcattaagtaaaatacagttgtctcaagggcaactttatc

SEQ ID NO: 3699 - DNA, 120 bp, synthetic construct
  source 1..120: mol_type = other DNA
caccattttgaaatgttacctgtgtgactaccaaggagtcacttaaagtttaaaatagtggtggtggggaggagggattttaagtaggggctcgctaaagttttacaactctattcattc

SEQ ID NO: 3700 - DNA, 120 bp, synthetic construct
  source 1..120: mol_type = other DNA
acatgcgcaagcttaaaaccatatgactgggcctttaatgcccttcttctgactctgaaaatttcctccctactactctccctcctttgagtctctcaatcattttcttttttttctttt

SEQ ID NO: 3701 - DNA, 120 bp, synthetic construct
  source 1..120: mol_type = other DNA
gacaagcttacaaaacacatgcaatgattcatatctgggccaataaatagtccatggatatactgaaacagttctataaccaagcactctatatgccatgcatcttgtcagggagggagt

SEQ ID NO: 3702 - DNA, 120 bp, synthetic construct
  source 1..120: mol_type = other DNA
ggctgataagagaaaagaggttgagaaaggcaatgaaaaattctgtagtaagaggctccaggaaaaggttttagggagtatgagggtgaggagatatgcagaaatgatctaaccatcaat

SEQ ID NO: 3703 - DNA, 120 bp, synthetic construct
  source 1..120: mol_type = other DNA
tctcctagccttaaaagatggtctaaactaccccagatccaggtaaataacggatcaagtccttcttccctaaaacaggtgttattctttctattctatgagcctccaccttatttctta

SEQ ID NO: 3704 - DNA, 120 bp, synthetic construct
  source 1..120: mol_type = other DNA
gcaaatttcataggtttcccaagacaccacacacctcctatatcatgtgataaccccatgaaaaaggctccaccatttgtgtgtggacaagggcaggaaagttctcttgtcttcctttgg

SEQ ID NO: 3705 - DNA, 120 bp, synthetic construct
  source 1..120: mol_type = other DNA
gtgggccgtttggtgtgccggaaacataagaaaccacagtacaaaacaccaattttattataaatatcaagaacctacagggtgtttatgggccagcatatgccttcagttatgttgaaa

SEQ ID NO: 3706 - DNA, 120 bp, synthetic construct
  source 1..120: mol_type = other DNA
cattctgagtacttctccgcaaaccctttgtttcattaaggactgttttacatgaagggtgcaaaagtaggataaaaatgagaaccctagggtgaaacacgtgacagaagaataaagact

SEQ ID NO: 3707 - DNA, 120 bp, synthetic construct
  source 1..120: mol_type = other DNA
tctttgcctcgtcttctatctctactccttggggaggcatccaatggaactggatttgggaactgagaactgcaaggactggtttgtataattatgatgttagtaaaactaacagaagat

SEQ ID NO: 3708 - DNA, 120 bp, synthetic construct
  source 1..120: mol_type = other DNA
acatgggagtatggttatctagagatcgaagactcaaaatctttattgagaacatgtcacaaaatcatactacctccctcctgactacaccaccatctccacccaaggtctcttatcatt

SEQ ID NO: 3709 - DNA, 120 bp, synthetic construct
  source 1..120: mol_type = other DNA
tagaggattcccactttcagcagcatacctgaaatctataaagagaccacaaaaaaagggactgaggtagagaaatctggaggggacacaaagaaccgcagtcattaacctgaaggaaat

SEQ ID NO: 3710 - DNA, 120 bp, synthetic construct
  source 1..120: mol_type = other DNA
taaataaataaagaggaaacagtctcagagaaggtaaatttgttgtcatgatcacaagacaagtaaattgcatcatcaagccaggatcttcggatcactggcgtagctctctttccagtg

SEQ ID NO: 3711 - DNA, 120 bp, synthetic construct
  source 1..120: mol_type = other DNA
aaaccatcagggacactaatacctgagttacctatttggaaattaaaggtgagaagagacagaggaaaaggagaaaagagaaagagacacagctatgccccttggatgctaaagaaatac

SEQ ID NO: 3712 - DNA, 120 bp, synthetic construct
  source 1..120: mol_type = other DNA
ggcctcagtttccttctctgtcagatgaggcagttggtctctatgagctcaaaatttccaggtttgaaattctatggtttctatctaaggatacataggaatagatttataagaaaatgc

SEQ ID NO: 3713 - DNA, 120 bp, synthetic construct
  source 1..120: mol_type = other DNA
caatcccgaacctaaataggctgccctggaactcactaccctgtggttgctctaccagaactttcaggattttattaggaaggctggagatcatgaagtagaaaagcctcctgttagaga

SEQ ID NO: 3714 - DNA, 120 bp, synthetic construct
  source 1..120: mol_type = other DNA
aaggtctgtgggagaacgaggttggtttaggaattggcccctgccttgtactacgtagttttgtcatccaaagtgttttagaagtgaattgaatcatagttacgccttattttgaaacac

SEQ ID NO: 3715 - DNA, 120 bp, synthetic construct
  source 1..120: mol_type = other DNA
tcagccatttaggggaaagcgaaatcgaaagcggccgcctgctcactagataacgcctacttccaaaagtggcctgcccagactattttggtagcaagcgtggaaatcagatctgagaat

SEQ ID NO: 3716 - DNA, 120 bp, synthetic construct
  source 1..120: mol_type = other DNA
ggtaagaaagacacagtgaaaccacttataatttgggaaatctcccctcactgccaaatgagcagtggcaagtaggaagtagaagtggaaacaagggataagagttagacctgaatttta

SEQ ID NO: 3717 - DNA, 120 bp, synthetic construct
  source 1..120: mol_type = other DNA
aggattgtggaccaaaaaaaaaaaaatagactgaccttgtttcccaagatcatagtcaattactctgtgttgggtctacaccacatctgcacatactatgagcccttccgttggagataa

SEQ ID NO: 3718 - DNA, 120 bp, synthetic construct
  source 1..120: mol_type = other DNA
tgattatttgcctcctgctttaatccaagcattaaacttcatgctattctcttgtcaaagaaatttgagagacattgaatgatcaccctcaaaaattcctgagttctggttgggtgcagt

SEQ ID NO: 3719 - DNA, 120 bp, synthetic construct
  source 1..120: mol_type = other DNA
gcagttacagttttcaggggtcgtttagcagggatgatggtaacagtataggagaatgagacttaaaattctatcaacctttattcctaatatttccctcaggatagaactggaggaacc

SEQ ID NO: 3720 - DNA, 120 bp, synthetic construct
  source 1..120: mol_type = other DNA
ctatttgtaacttgcaattcatcatagcgggagcatttacaccacggacatcagcagatgccacatatggaagcctttttgtaaaaaaactgatttaccagcacaccactaaatatgcct

SEQ ID NO: 3721 - DNA, 120 bp, synthetic construct
  source 1..120: mol_type = other DNA
aggtgatgggactctttcctttaaggctaagactgacagataggcaagacacctacacacatgagaattagctaagactatcagcaaactcgcatgtaaaagaattcctttcataatgca

SEQ ID NO: 3722 - DNA, 120 bp, synthetic construct
  source 1..120: mol_type = other DNA
attcaatgccattttgctaacaagtgggcagtcaacaggcatattcaacagaaatactagtaggatctcaggctaaacatacgaattcaaaactctaaaacaatcacatccccctggagt

SEQ ID NO: 3723 - DNA, 120 bp, synthetic construct
  source 1..120: mol_type = other DNA
tagaaatcagcaatgctacaagtcagaagcattgtttttcttcagagagccggtttaacaggacacatatttatcagccaactataaatggataaaaaataattggctccaggccatagg

SEQ ID NO: 3724 - DNA, 120 bp, synthetic construct
  source 1..120: mol_type = other DNA
taaaattagaacttgataactaaaatatacttaaaattgtaagtgaacaaatatatttatcagtaacatggatttaaaaggcagtcgtggatgggagcatcgctggagtccagaagatgg

SEQ ID NO: 3725 - DNA, 120 bp, synthetic construct
  source 1..120: mol_type = other DNA
caacaccagagtcaagaaacttgccagttttagagtgctgagataagaaaaagtgggtggagggttgtactaggggtgtggaaggtatagaatctaattatcaattactgacttggttat

SEQ ID NO: 3726 - DNA, 120 bp, synthetic construct
  source 1..120: mol_type = other DNA
cctgattagctaattttatcagccgagtgtaatcttgactccaaattgagttgtggaaaactcaaggaaaaaaaaataatagacccatttcaccttgaacacagatgggagaaaaaaata

SEQ ID NO: 3727 - DNA, 120 bp, synthetic construct
  source 1..120: mol_type = other DNA
tctttggtcttccttaccaagttcttaactctgctggctctggggcactggacataccatgtaagaagaaaaatgttttaactccattgaacttattcagaagcatcggaaattggttca

SEQ ID NO: 3728 - DNA, 120 bp, synthetic construct
  source 1..120: mol_type = other DNA
gcttttgtgccaaccttcagagactggctgcgtcagactgccctcaagagcatacaaaggaaaaaaagacaaattaaaagcctttaatccaaactcaagacatgaatgaaaaactgtaaa

SEQ ID NO: 3729 - DNA, 120 bp, synthetic construct
  source 1..120: mol_type = other DNA
aaaacaaaaataatcattttattatctctcatgaatctgtgaattactggactttaagagccactgatgtagtccatgaaccaaaacacatattcacggcagccactccacccagcacct

SEQ ID NO: 3730 - DNA, 120 bp, synthetic construct
  source 1..120: mol_type = other DNA
tgctctaattcagttccactcattttatcgtctctatttggcctgttttagggctaaacccagaagcaaaatcttcttcaaaatgaatgtattgacagtcaccatgccagacttggagta

SEQ ID NO: 3731 - DNA, 120 bp, synthetic construct
  source 1..120: mol_type = other DNA
cagcacaaagcactaaaagttatcaaggtattaagtgagagcattctgataagaaaccaccgctagctgggcagattatgctaaagggaaagaaaaagttttttctctgtcttaagtgta

SEQ ID NO: 3732 - DNA, 120 bp, synthetic construct
  source 1..120: mol_type = other DNA
cccctgaaatgtcaatggaaacctagacttccattcctcacccaacagtaatgaagcatctcttcccctctcctctagggtgatgtcagacaatgcctaatggagagtcaggattttcat

SEQ ID NO: 3733 - DNA, 120 bp, synthetic construct
  source 1..120: mol_type = other DNA
agaacagaggaaagaattagctaccttgaagacacagcaatagcaatcacttaatctgaacaaaagaaagaaagaaaatacactggaaaaaatggacaaagcctcagggacccatggggc

SEQ ID NO: 3734 - DNA, 120 bp, synthetic construct
  source 1..120: mol_type = other DNA
acttaagcctggacataacaatattataggaaatataaatcgcctaaatacatcaattttaagagacagagcttggcagaatagatttaaaaatatgactctgtcaggtgcggtggctca

SEQ ID NO: 3735 - DNA, 120 bp, synthetic construct
  source 1..120: mol_type = other DNA
ataggcaagtcaacaatgatagttgaagacttcaatagttttctctcaacaattgattaaacaaatagacaaaaattgagaaaaaacatagaagaataaacaacatcaaaccataagatc

SEQ ID NO: 3736 - DNA, 120 bp, synthetic construct
  source 1..120: mol_type = other DNA
ataaattcaaccagatatataaaatgtgaagtagtgatacatgccatgaaggaaaagagcaagagaatggagaacaaaggggaggggattgctttataataaagggtgaccaaggaggcc

SEQ ID NO: 3737 - DNA, 120 bp, synthetic construct
  source 1..120: mol_type = other DNA
ccagaaatcaacaacaggaaaatatctaaacatttggagacaaaacaacacacttagaaatacatgggtcaaggaggaagtctcaaggaaattttttaaaaatacacacaataaacacaa

SEQ ID NO: 3738 - DNA, 120 bp, synthetic construct
  source 1..120: mol_type = other DNA
ggcaaaccactagcaagactcagaaaaaaagacgacagaagatagaagctaccaacatcagaaatgaaatgggatatcatcaaagattctacagacatcaaaaggataacaaaagaatac

SEQ ID NO: 3739 - DNA, 120 bp, synthetic construct
  source 1..120: mol_type = other DNA
aatctaacaaaacatgcaagacttgcaagctaaaaactatgtaatgctggtgaacgatatcaaagaagatctattcagtctctatctatgtggagagaaatactgttcatggattggaag

SEQ ID NO: 3740 - DNA, 120 bp, synthetic construct
  source 1..120: mol_type = other DNA
atactttttctcagctgcatttgactacctaaaatcctaccgagcacgctgtttggcatgtcttactcctctgaaatcatcatctactttctaaaaaccagaaaattagtttgcttgtga

SEQ ID NO: 3741 - DNA, 120 bp, synthetic construct
  source 1..120: mol_type = other DNA
gaatttcaatattgcagcaaatgacagaagagtgagcgaaagagttcctaatgtgtgacagtcttaatgattctttaaaaggtaaaggattgtatgcatgtgtgtggaaaggagtaggaa

SEQ ID NO: 3742 - DNA, 120 bp, synthetic construct
  source 1..120: mol_type = other DNA
aactggtatgcactttggtacttaagtcatgacttgtggagaacgagaagcaatgtattatagcaacggggttcatatctaacaaacaataagagtgttgaacaaatcccttctatgaac

SEQ ID NO: 3743 - DNA, 120 bp, synthetic construct
  source 1..120: mol_type = other DNA
aagctatctgttgccatagcttcagtggtttctgtatcactacatgcatcttcatcatcacccatcgtactatggtaaggagtgcttggttcatctattttcattaaaccatagtctttg

SEQ ID NO: 3744 - DNA, 120 bp, synthetic construct
  source 1..120: mol_type = other DNA
ggattatggagtaaatgtaaagcataaaactcttaaattttagaaaaatagaaaatatttgagatataggtctaggcgaagaattcttaggcttgacattgagagcatgatctatgaaag

SEQ ID NO: 3745 - DNA, 120 bp, synthetic construct
  source 1..120: mol_type = other DNA
caacaacaacaaaaatccaacaactaagcatactactaccatcctgcccagcaactgtactcctgggtatttagccccaagaaatgaaaacttgcatacacaaatacacaagcacagaca

SEQ ID NO: 3746 - DNA, 120 bp, synthetic construct
  source 1..120: mol_type = other DNA
atgagtggaaagtttgagtgaataaaaattatatctggaattctggtttgcaaattagcctgggaaatgtagcctgactcagtgtgactcagttctataccactgttctcagctctgctg

SEQ ID NO: 3747 - DNA, 120 bp, synthetic construct
  source 1..120: mol_type = other DNA
caaggacttactcggcctatattcatttatcctatgttgaccgtctctggagagatcatttcctcccaaaattctcctcatttttgtttagtcatccagggcttgcttactggttaaaac

SEQ ID NO: 3748 - DNA, 120 bp, synthetic construct
  source 1..120: mol_type = other DNA
gaaaattcttccattctgatcacagatattacagatgtaagagatcacaggctccagtcatctaagggttctccaactagaaatagacctggtatggctgatgctactaatacctgccat

SEQ ID NO: 3749 - DNA, 120 bp, synthetic construct
  source 1..120: mol_type = other DNA
catgtgaccatcacacctggcctaccatggttttcaaatgtaaaattttaaatgaaaaatcttaatcttttggtcattgctgttttgctgtggtctgtctcccatggcatgaggggaaat

SEQ ID NO: 3750 - DNA, 120 bp, synthetic construct
  source 1..120: mol_type = other DNA
agcaacgcttttcagattatgttctcatacagccttttacagccctttacagcttttctgtaaactgggctgagatgtaccactaaatgaaattgaatgataggagtccattgtggttgg

SEQ ID NO: 3751 - DNA, 120 bp, synthetic construct
  source 1..120: mol_type = other DNA
attttaacaatggctcactgctccccttgtgactaatgggcaacacaggcctgtttatgagttcaagtctctgtccctggatcatgtaattttaattgttctgttacttcatttcaatcc

SEQ ID NO: 3752 - DNA, 120 bp, synthetic construct
  source 1..120: mol_type = other DNA
gccacagcaacattttggcttcttatgcccagttctgctctccgttgctttaagcacaaatgacatgcaatttgggatgtaaccatactttttgtttcctagtttcactaaaaatgaggt

SEQ ID NO: 3753 - DNA, 120 bp, synthetic construct
  source 1..120: mol_type = other DNA
tgatgagaggtgtttaggtcatgacgactccatcctcataaatgaattaatgccaattacaaaaaggctaaaagcctgtgaattcaacctgttgcacttgggcgctctctctttctcttt

SEQ ID NO: 3754 - DNA, 120 bp, synthetic construct
  source 1..120: mol_type = other DNA
gaatgctctcatgacttttcctgcacattgctcttggtgccttattcaataatttccctaaggtgcatatatatttaagggtagagctgctatgctttaggatattctcagcttcaactc

SEQ ID NO: 3755 - DNA, 120 bp, synthetic construct
  source 1..120: mol_type = other DNA
tggcccagttgtctactccctctctcaccaataatagcacatggtcttaaatccagtggtgtatataatatcttctcatgtagtcaggaaattccccaacttcctctttattttcaatgg

SEQ ID NO: 3756 - DNA, 120 bp, synthetic construct
  source 1..120: mol_type = other DNA
gaataatgaaagtttgctttatttcattcctatccttccaactttttttttggtctgttgttaaaagcccccctatcccatgcctaagtaataagtaatctcaatattacattccatctc

SEQ ID NO: 3757 - DNA, 120 bp, synthetic construct
  source 1..120: mol_type = other DNA
gagtccacaagataggaaaaaaacgaaaaagccaaataagatgaacctctattcaggccccaatgagaggctgcttgactctgatctttcgttagctggctcaaaattttgttcttaaag

SEQ ID NO: 3758 - DNA, 120 bp, synthetic construct
  source 1..120: mol_type = other DNA
ttgcatcacctcttcctccattctgactcattctttacataaagccagtgtactcttaaaagtaatctcatcatgtcatttcttcctgcttagaattcccagtggcttcacattgctgct

SEQ ID NO: 3759 - DNA, 120 bp, synthetic construct
  source 1..120: mol_type = other DNA
tttcgggttattccattcagggatacatgacgtccctcatttctacctaccagtgggctggtcaagattctcatttatcaagtcagttggagtgggcttaagtaagttctcagccaaggc

SEQ ID NO: 3760 - DNA, 120 bp, synthetic construct
  source 1..120: mol_type = other DNA
ctctggagggattgttaaagaatccaggttcttggggagtgtctcaggagaacactccaggtgatatccttattcttcctattttcaccgtgttggtttttttttggatataacttgttc

SEQ ID NO: 3761 - DNA, 120 bp, synthetic construct
  source 1..120: mol_type = other DNA
gtttgaaatgggaaccagaagctaatctgtgggaaattcttttactcctcagacgtgtaaagatgtgttggagactctcgtaaatatgtattcagtaatgcagcatatacagtgatcacc

SEQ ID NO: 3762 - DNA, 120 bp, synthetic construct
  source 1..120: mol_type = other DNA
ctattggaatatcacacacagtgagcagactcttcttacacttactaaactctcttcgtagatttactaaatttttcaccagtgactcaatggagcgaaaccaggtcccagactcgattt

SEQ ID NO: 3763 - DNA, 120 bp, synthetic construct
  source 1..120: mol_type = other DNA
taaattagtgggagggattcaaattatgagggaaaagaaaaattggttcttctgctgtagggaagggttactgaaaattaaaggacaacctactgagctgaagagagctttggggtttgg

SEQ ID NO: 3764 - DNA, 120 bp, synthetic construct
  source 1..120: mol_type = other DNA
ttggaaatcttttattgagccacctattctgcttctttgcaacaaaatatgttcttacattgaatttttaatttcttgttgtaagtgtaaaagttatatgggctgggtgcagtggcccac

SEQ ID NO: 3765 - DNA, 120 bp, synthetic construct
  source 1..120: mol_type = other DNA
cagtgtgtcagcctccaagcgggagaaattaatccaaaataaatgaagctggatttctaaagtttagagcatcacatccaagattgcatttgggaacattctgttttgtatccatacaca

SEQ ID NO: 3766 - DNA, 120 bp, synthetic construct
  source 1..120: mol_type = other DNA
tttcttgccaaagcaaaggagccatttgttctttacgatggtcaggaaaggaagcatcaaggtcatcaaatgaaaaattttcagcatttcagcctctctgctcagggaaatatctgaatc

SEQ ID NO: 3767 - DNA, 120 bp, synthetic construct
  source 1..120: mol_type = other DNA
gggaagagggcttgaggggacatacgggaactctctgtaattcctgttcagtttttctgtaactgttaaactgtccaaaaaaagtctgtttttataaatggaggcatggttttatatgga

SEQ ID NO: 3768 - DNA, 120 bp, synthetic construct
  source 1..120: mol_type = other DNA
atttcatactctaaagtcgtacaagccaatctgcatttcctctagtggaaactgtatagctggtcatctttccaggacccttttatcaagaaacaatgcagcttctacatttgtgctgct

SEQ ID NO: 3769 - DNA, 120 bp, synthetic construct
  source 1..120: mol_type = other DNA
cctcaacattttgtaacctgaacgttttctcaagagcatgtgttacagtgactgtttaaacagtgtaatttgtcgtttaacggctgcttttcacttgtaaaatatgaacgccccaagggc

SEQ ID NO: 3770 - DNA, 120 bp, synthetic construct
  source 1..120: mol_type = other DNA
tggaaaaaatctcaaccacagggttccctaagctttgcaaacaacaaatagcatccacctatccatcctcagagagcaacagttttactgttatttagaaaaagcaactatttcaggctg

SEQ ID NO: 3771 - DNA, 120 bp, synthetic construct
  source 1..120: mol_type = other DNA
tataataagatcagcttactagacaatacagtgaaatgggggaagctagagaagagaggtgggcagtggcctcttatgctacgtaagagatttgacatcataaagtaagttgccagagtt

SEQ ID NO: 3772 - DNA, 120 bp, synthetic construct
  source 1..120: mol_type = other DNA
tgtggtggtgaagaatacaatgactactaataaaatttggtgccattgccttaattcgtgctaagacaccagtcattttacccaccattggataaaatccaccatttttgcaccatcagt

SEQ ID NO: 3773 - DNA, 120 bp, synthetic construct
  source 1..120: mol_type = other DNA
agataacttgctgatatgtcaatgtcatccttttcagcatctctagacataggcaatctagacaccagaaaatgtgttttctcttctccctttttaaagccaaccatccaccctattcag

SEQ ID NO: 3774 - DNA, 120 bp, synthetic construct
  source 1..120: mol_type = other DNA
agctttgggggggaaatgtagaataactttattatctcaaggtagatagcctaacaataccacgtgctgaagcagaaatgtgaagaaatgggaatttgcatagaatcttggtggaagggt

SEQ ID NO: 3775 - DNA, 120 bp, synthetic construct
  source 1..120: mol_type = other DNA
gttacatattaaaataactgctcctaaatagtgatgtggccttgggcaagctctttcaagtttctgtgagctccagcttttccttatctgtgtggtaaaagaatatgagactatgtctgc

SEQ ID NO: 3776 - DNA, 120 bp, synthetic construct
  source 1..120: mol_type = other DNA
gaacttagtgcttggttatatataggtaggcattgttttctaaaaacactggtttacaaaatggaatgtgcacactacagggaatgtgcaaatgatccttgaggatacaggaaggaagtg

SEQ ID NO: 3777 - DNA, 120 bp, synthetic construct
  source 1..120: mol_type = other DNA
tccagcccagggatcctaattcagcagttctagaggttattcagaaatctgcattttcatgaagtaccctggatgattctaatggatgttgtctgtaacacaactttcagataaatgtcc

SEQ ID NO: 3778 - DNA, 120 bp, synthetic construct
  source 1..120: mol_type = other DNA
agtggcatacatggatatcaagtactgtagtgggttcaaaattggagaaatggattttgaagtcatctttttgcaggtacaagagaagccatattgagtcagtcagagaagagaagacag

SEQ ID NO: 3779 - DNA, 120 bp, synthetic construct
  source 1..120: mol_type = other DNA
ctggtgacagcccttcctggtagcaactactgagcattgcaaggagaagaaattgggatgggtgcctataaagagaaaaactctctttttaaccttcaaatctaaagaaaatcaatccaa

SEQ ID NO: 3780 - DNA, 120 bp, synthetic construct
  source 1..120: mol_type = other DNA
ggggaggggaggagggttgaaaaggtgaagcgcaatagattatcatttaattcagtaagctcatatagaaaaaagaggaggagagtcaaggtgaaacacaaagttttgatatcaaagtgg

SEQ ID NO: 3781 - DNA, 120 bp, synthetic construct
  source 1..120: mol_type = other DNA
ggggatccagtacaccctctgcagtcgctggcccgggtgctaagtcccttattgcccggggccggcagggcctgccggctgctccgagtgcgaggcccgccaagcccacgcccacccgga

SEQ ID NO: 3782 - DNA, 120 bp, synthetic construct
  source 1..120: mol_type = other DNA
gctccctcacccaaaattaatttttgtaaaggtagagaagcaaaaggaagcaaggatctggggagctggcaacaccagaaataagtataaagtgtttttatatttgccaggagagacaga

SEQ ID NO: 3783 - DNA, 120 bp, synthetic construct
  source 1..120: mol_type = other DNA
gaaaagggttcaaaggatacttaacaggagcttcagaaaaatccacacctatgctcgttatattgagacaaataaatatttttaaaacttagaaagaagagtttatcaactgggcacagt

SEQ ID NO: 3784 - DNA, 120 bp, synthetic construct
  source 1..120: mol_type = other DNA
gggtaaatgaatgtgtgtgtgtgtaatatctacttggtaggagaattggcattagagggagggaagtagaaaatcaaaagaacataagagtatgctaaagaacttaggaggcaagatata

SEQ ID NO: 3785 - DNA, 120 bp, synthetic construct
  source 1..120: mol_type = other DNA
cttgtaaatttatttaagatccttatagatgctggatattatacctttgttggatgcatagtttgcaaaattttctcccattctgtaggttgtctgtccactctgttgatagtttccttt

SEQ ID NO: 3786 - DNA, 120 bp, synthetic construct
  source 1..120: mol_type = other DNA
ttaataagaagagtattgaatctataaattgttttgggcagtatggccattttaatgatattgattcctcttatccatgagcatgagatgtttttccatttgtttgtgtcatctctgatt

SEQ ID NO: 3787 - DNA, 120 bp, synthetic construct
  source 1..120: mol_type = other DNA
gcatatggcaaatcctcttaaagcagaaagatatgtaaagattgaaatttaaaaacagggaaaaaagatttacctggtggcaaatatgacacaaaagaaagttgggcaacagtctcaata

SEQ ID NO: 3788 - DNA, 120 bp, synthetic construct
  source 1..120: mol_type = other DNA
agactctctcacattaaaaatgaccaaagagacatgaaaacttactgaaatgcttgattctggattgcaggacaagagactgggagtggctggagttataaggttctttattgggaaaac

SEQ ID NO: 3789 - DNA, 120 bp, synthetic construct
  source 1..120: mol_type = other DNA
cttactaggaaacacaaaaaaagaccaaaatcaataagctgagtgttcaactcaaacgctaggtaaagaggaagagaatacacccaaaggaggaaggaaatagtaaagatagtcataaat

SEQ ID NO: 3790 - DNA, 120 bp, synthetic construct
  source 1..120: mol_type = other DNA
ggggcggggggagaacacctgcccagaaataatgaaaatggctaaaagaagttatctaaacagaatggaaatgataaaataggaaccttggaacatcaaggaagaagatagaacaaggta

SEQ ID NO: 3791 - DNA, 120 bp, synthetic construct
  source 1..120: mol_type = other DNA
tacctcactaatatatacaacggttgtgtacccataataattaaacataaaaattaagaaaaaaaattacactaaatgcaaatgatctaaatacctcaattaagaaacccagttcaggcc

SEQ ID NO: 3792 - DNA, 120 bp, synthetic construct
  source 1..120: mol_type = other DNA
cctgttcgggcgggagtggtggcttttagtacctgattctggtatcatgtttgaaaaagccaaaaaggatactatcgttttatagggacagatttcatatactgcaaaaattcaccaaac

SEQ ID NO: 3793 - DNA, 120 bp, synthetic construct
  source 1..120: mol_type = other DNA
acttcagagccaaaacaaaaaaaattaccagagaaagataaggacgttttataataatagaagggtcagtctatcaagaagacattgcagtcagaaatgtttatgcccaaaacaccagag

SEQ ID NO: 3794 - DNA, 120 bp, synthetic construct
  source 1..120: mol_type = other DNA
aaagatgacagaggaaagtcaagaaactaagcgaaaacttttaaatactctacgagtcaaaaaataaatctcaaaggaaatttaaaaatacactgaattgaaagaaaataagaatacaac

SEQ ID NO: 3795 - DNA, 120 bp, synthetic construct
  source 1..120: mol_type = other DNA
tgagtaagactccatctcaaaaaaaaatggcttgtatccaaaagacaggcaataacaagtactggtgagtatgtggagaaggctttgtacactgttggcaggaatataaattagtacaac

SEQ ID NO: 3796 - DNA, 120 bp, synthetic construct
  source 1..120: mol_type = other DNA
gttcgaggccagcctgggcaacataaggagaccttgtctctttaaaaaaaaaaaaaagtacacaaattaataattcaaactctcatctcaagagcccagaaaaagaagatcaaaatacat

SEQ ID NO: 3797 - DNA, 120 bp, synthetic construct
  source 1..120: mol_type = other DNA
tgggaggctgaggcgagtggatgacttgaggtcaggagtttgagaccagcctagccaacatggtgaaactctgtctctactaaaaatactaaaaattagctgggcgttgtggcacacgcc

SEQ ID NO: 3798 - DNA, 120 bp, synthetic construct
  source 1..120: mol_type = other DNA
aaatttgtcttgaagtgacaaagtcatagaaatggataagagattagtgattgctagacattaaggagggtatgggatggtagggaagtgggtgtgtctagaaaagggcaaggtgaagaa

SEQ ID NO: 3799 - DNA, 120 bp, synthetic construct
  source 1..120: mol_type = other DNA
aaaccccactaaaaccaataagaggatcgagcaaggttgtcccatataagatcaacttacaaaaattattaatttctaatatttgaaaatcatatatcagtatttgaatatcatatatcc

SEQ ID NO: 3800 - DNA, 120 bp, synthetic construct
  source 1..120: mol_type = other DNA
tataaattcagtataaccacaatcaaaattcaagtggggaagacagaactagaagtgagtgtcctcccaaactccccagtaggaaactacaaacttagtttctgttgctactatgcgctt

SEQ ID NO: 3801 - DNA, 120 bp, synthetic construct
  source 1..120: mol_type = other DNA
ggcctaaagataattttcataaatagacattgggattaaatgtcaatcttgtctgtttctttcacatgcatgtgttcgtgggtagggaggcaaagagaacctggaacctaggaacatgct

SEQ ID NO: 3802 - DNA, 120 bp, synthetic construct
  source 1..120: mol_type = other DNA
ttctgattttctggatcctaggagacctacatatacttttccctattccttacctgaaaggggacagcctttcctataaaacaaaaaacctacaaagttagggcagagaaaagcctgcac

SEQ ID NO: 3803 - DNA, 120 bp, synthetic construct
  source 1..120: mol_type = other DNA
aaataaaataaaaatagtgtctgattctgcaaaggagaggaacagactctgaattgtgatggctccaataaggataaagcagtctctggagagctgcctgaacagccagacaacccagct

SEQ ID NO: 3804 - DNA, 120 bp, synthetic construct
  source 1..120: mol_type = other DNA
ttaaatgtctctgagcctcacatcttttgtctgtaacatagagggaaacaatctgtcccttgtgtggttattgtgagaagagaatgagctacaaatataaaggtctgagaccagtgccta

SEQ ID NO: 3805 - DNA, 120 bp, synthetic construct
  source 1..120: mol_type = other DNA
tctaggaaatgtgccatcctacagaataaataaaagggagataatgaggcttcaacccaacttgcccccatcgtttgtcactgtaaccatcccatgccttaatacagtgatactgaaaac

SEQ ID NO: 3806 - DNA, 120 bp, synthetic construct
  source 1..120: mol_type = other DNA
cacggtaacaatgtttgcttccttactttctccaactgagcagcttcctattacactgtcttaccacatgtcttaacctccagtggatccatcctgtgagttatcctactacttgtgtac

SEQ ID NO: 3807 - DNA, 120 bp, synthetic construct
  source 1..120: mol_type = other DNA
agttgaaatctaaggaggctagaatagtgtattacaatttggggttctgaaaatatgattgccaaatttacagcctcatttcaaagcaagcacgctcccctctcaccctcaaacatagac

SEQ ID NO: 3808 - DNA, 120 bp, synthetic construct
  source 1..120: mol_type = other DNA
ataaaaatccaaggaattatgttaaaatgcagatttcctaggctgtatccccagatactttctttcaacagatctggagtggtactaaggggcttgcatctttaacaagcacctcctcca

SEQ ID NO: 3809 - DNA, 120 bp, synthetic construct
  source 1..120: mol_type = other DNA
ttgaccctggttcctgacatagagtgcctaatcgcttagaatttcctagataacaggagtgtcttttgttctaatgaggtactcttggtgggctcctgcaggaggggctggtcaccagaa

SEQ ID NO: 3810 - DNA, 120 bp, synthetic construct
  source 1..120: mol_type = other DNA
aaaaacctcacacagttggtcaaagaagtgttgagtgtgagcatatagaagaaaaaaagttgatttttcctatattcagctcagaacctaagccttggtgacatccagctagtctggcac

SEQ ID NO: 3811 - DNA, 120 bp, synthetic construct
  source 1..120: mol_type = other DNA
tcatcctgccttagtcttagacaacaggtctccttgtctctcttaattctttttctgcagaacaaccagtagatttccgtagattactggagagaataatcgcaatattcccaggatgta

SEQ ID NO: 3812 - DNA, 120 bp, synthetic construct
  source 1..120: mol_type = other DNA
cctgttccctgggggcaggtccctgcattatgaagccactaggaaaatgagataaagctttcctacttttcttcccctgaaaagacagattttgttttttattttttgagaataccaagt

SEQ ID NO: 3813 - DNA, 120 bp, synthetic construct
  source 1..120: mol_type = other DNA
cagattttaaacggcaattcattcttctatcccattgtgaactatacagttgatggattttccatcactaacttgaaactctaaattggcttccttctgctccccagtaggtttcagggc

SEQ ID NO: 3814 - DNA, 120 bp, synthetic construct
  source 1..120: mol_type = other DNA
ttttttcaataaattaagttgcaccagtagaaggatactgtcccacgagggaattgaggtcagaagaactcggagaaaacagcaagcccactggaaagagatgatactcataagaagaac

SEQ ID NO: 3815 - DNA, 120 bp, synthetic construct
  source 1..120: mol_type = other DNA
aaacttgttaattgtcctcatttcccaggttggaaaacaggtccaaagattcacacccaaggtctaaaggctgtaactcctcttcttatacagctgttacacatgcacatgtgtacacac

SEQ ID NO: 3816 - DNA, 120 bp, synthetic construct
  source 1..120: mol_type = other DNA
ctttaaatagtttatattaaagtaagtaagcaataaggccagtggtcttaaaagagaagagagaaatcaccatggacatggtagacagggagtactctcagtcgagagggcctggaatga

SEQ ID NO: 3817 - DNA, 120 bp, synthetic construct
  source 1..120: mol_type = other DNA
aactattgaagaatgctatcttcatcttacccacgagaaaatggaggcagagggaggttaagtggttgcccagatttacccagatactaagtaataaaaccattacttgaactcaggatt

SEQ ID NO: 3818 - DNA, 120 bp, synthetic construct
  source 1..120: mol_type = other DNA
gggcaccagactagagaggatactgagtgcttctagagtacttaagtaacagtatcatagaaggtttcatcagagagcatctaatctaagcccatcattttacagatgaagactttgagg

SEQ ID NO: 3819 - DNA, 120 bp, synthetic construct
  source 1..120: mol_type = other DNA
atttaatattttcttttagattagactctagtacaatgccaagaacagaaactccctcaccaaataattgccctctcaactttattgccaccctgtcatccaaagcaactcccagaccct

SEQ ID NO: 3820 - DNA, 120 bp, synthetic construct
  source 1..120: mol_type = other DNA
gaagttgatctctccttgttcccaaatcatctccaagcacccttcctacagcaccccatgattccttttttcactcaaagcaattcttgtgacccataactgtgtgtgtgtaactgggtc

SEQ ID NO: 3821 - DNA, 120 bp, synthetic construct
  source 1..120: mol_type = other DNA
tcactaagacatagtcacgtcatcagatatttccactcttcccatccatcttgctgggcatagtagcacaagtgttaatattcagtaggtatcagttggtacctgttgaattcatcacat

SEQ ID NO: 3822 - DNA, 120 bp, synthetic construct
  source 1..120: mol_type = other DNA
gtgtctgttatttagactccccctcccaaagggggtgaagaacaaattatggcatctctccaagcttcccctgcctataaaaaggccagttggcaaaagtaaagagttctactttctaaa

SEQ ID NO: 3823 - DNA, 120 bp, synthetic construct
  source 1..120: mol_type = other DNA
gtatatatataaaataaagtgacagattcagagtcactgttcattgtgtgtttgggggctgcacaaagacacctagccaaagaagcaagtgaaagcctgcattctgctcaccatgccata

SEQ ID NO: 3824 - DNA, 120 bp, synthetic construct
  source 1..120: mol_type = other DNA
ttttcttcatttgtaaaatggagagaacaatctccgcttcaagagattgtcttaaatggaacatgcaaagcatcactgatatcgtttaccaaccacacatagcagctgtctttccccact

SEQ ID NO: 3825 - DNA, 120 bp, synthetic construct
  source 1..120: mol_type = other DNA
tatctcatgtgctcaaacgtcttgtaaggccgtcttaatgtacagcaaacttcttgtaaggccgtcttaatgtacagcaaactccttgtaaggccgtctgttttaaaaaaatacctccct

SEQ ID NO: 3826 - DNA, 120 bp, synthetic construct
  source 1..120: mol_type = other DNA
gatcacgtgggccctgctacgccacaaggaggagcttgcttttacttagcagatgatagagatattaaaactggggaatgacaatcattttagcattttggaaaaaatgttctgattgat

SEQ ID NO: 3827 - DNA, 120 bp, synthetic construct
  source 1..120: mol_type = other DNA
acattttaaaaaaagattgctatctggaaatcagaagctgccatcatccctgagctggaatctgtaaatctactcattgccttgtgagagacactgtcatagtcagttccaatctactag

SEQ ID NO: 3828 - DNA, 120 bp, synthetic construct
  source 1..120: mol_type = other DNA
ggggtgggggaagaggcagtgagaaagctctaatgtggcaatcaagtaatctgagaaattaatatatgtgaatattgtccaacagtgtttctgaggctttcaaaattcataccttccacc

SEQ ID NO: 3829 - DNA, 120 bp, synthetic construct
  source 1..120: mol_type = other DNA
cataaccatccctcaccaagactgtggtgaggggtggttaactccattctccccttctataatctcagtttaaatggtaacaagttcaaacacttataactactcttccctccatgtaat

SEQ ID NO: 3830 - DNA, 120 bp, synthetic construct
  source 1..120: mol_type = other DNA
aactctcaacaatgcaattgttcaccaatacttttgtgttgccaaatcaaatgaactagtctctgcaacatctgacactgttggccataccccatctcctaaattggtcaaatttctggc

SEQ ID NO: 3831 - DNA, 120 bp, synthetic construct
  source 1..120: mol_type = other DNA
cattggttgtggccaggtacagtattacctctatggattagagctattcctagagaagggagaatcatatgaaaagtaaccacctcaatacagctattttcaacatatggcatctcagac

SEQ ID NO: 3832 - DNA, 120 bp, synthetic construct
  source 1..120: mol_type = other DNA
attgttaatgatctactttccttgtcatgacccataatgacctgaagtctacttacctacttctatatgtcttttcaggtgaaatctcactcctctcaggaagccttccttgaacccaga

SEQ ID NO: 3833 - DNA, 120 bp, synthetic construct
  source 1..120: mol_type = other DNA
ctagccatccagctcccacatttactcttatttctacctcagtacatttctccatacccatattcatcctcccttttagtgacattactatgatgcagcaatccttacaactactctaca

SEQ ID NO: 3834 - DNA, 120 bp, synthetic construct
  source 1..120: mol_type = other DNA
tgaaactataaaagttactgtaagaaaatactggggaaatgctcaagactttgagcaaacattttttggtttaagacttcaaaaggagaggcaatgaaagcaaaaatacacaaatgggat

SEQ ID NO: 3835 - DNA, 120 bp, synthetic construct
  source 1..120: mol_type = other DNA
tagtaccagccagcagctgtaacactgtcatcaatagaaaacaccatcaattaatattttcatatcacattatagttgttacagacatcttaaaatatcacttacaattatgggagctgt

SEQ ID NO: 3836 - DNA, 120 bp, synthetic construct
  source 1..120: mol_type = other DNA
gatagaaggacacatacaaccggatttggagaataaataatcaaaacggagcatactacgcaatattcaaaacagatttggatgtgaaagtacacagggagacggcatctctcaagtctg

SEQ ID NO: 3837 - DNA, 120 bp, synthetic construct
  source 1..120: mol_type = other DNA
ctcacattatgttgctctgcttctccttgagatcttccattggttccacttcctattcttgcttcctgtatgaagatgtaacccaaagctcaatccttcaccctaaattgtttttatacc

SEQ ID NO: 3838 - DNA, 120 bp, synthetic construct
  source 1..120: mol_type = other DNA
tcaccaatcacatctccttccaaccccgacattttaatttgatgtttattaacatggacggtgccagccactggaagacagagtttctatctaacaacataattctgatcaagtcattag

SEQ ID NO: 3839 - DNA, 120 bp, synthetic construct
  source 1..120: mol_type = other DNA
aggcagactgttttggcaaacataggaatttggactttatcacatagccaataaggaataacacagagttttaaaaagagctatggccagggctatattttggaaagctctctcctggca

SEQ ID NO: 3840 - DNA, 120 bp, synthetic construct
  source 1..120: mol_type = other DNA
gtagaaagtttagcttagagagctgtctgaactaaagattcagacttcagaggctttgagccatggagtcagattacctagagaagttgaacaaaattagaagcaaacaagaatcacagc

SEQ ID NO: 3841 - DNA, 120 bp, synthetic construct
  source 1..120: mol_type = other DNA
gagtataagaggtttaaacggtccactacgaaataaatagagaaggaaaagttatcagctggtaaatatcgtagaaggtagagcggtccagggactcacaggtctcactaaagaaaagtc

SEQ ID NO: 3842 - DNA, 120 bp, synthetic construct
  source 1..120: mol_type = other DNA
atgtcagtcaagtgcttaaccaatggtggggagtccgggagggggattcttggggttcaggaaagaatcctgagagtgggaagatttgtccttcaaaccttttacagccaatgggagcgt

SEQ ID NO: 3843 - DNA, 120 bp, synthetic construct
  source 1..120: mol_type = other DNA
atagaggatcgggaggcagtgattttccggaatgcagggaataaacgagagcaatgtctggctgcccttttcctaaggcctagtattttctcagcctcctaagtttttattccatggccg

SEQ ID NO: 3844 - DNA, 120 bp, synthetic construct
  source 1..120: mol_type = other DNA
gcaaatttgggagacgtattttagcttttgtggtctttgggactaaacagtagtaaataatgttttgctcgtctttccatcgtttggcttgagggagggagtggagtattataagactct

SEQ ID NO: 3845 - DNA, 120 bp, synthetic construct
  source 1..120: mol_type = other DNA
ctcttctgcctggtgactgacaccttggaaatgaagtttatgacgtcatcgttgcggctggccaatagaaaaagctcccgcggagaggtgttccttccccttcgactcagcttcttcacc

SEQ ID NO: 3846 - DNA, 120 bp, synthetic construct
  source 1..120: mol_type = other DNA
tgtgtgcaggttcctaatgcccagggtatgtcattaaatcttttgctttctttgggtgggtgggttgtgtgtggtgtttgttggtgcagggattgttttttcctaacattaaaagtttga

SEQ ID NO: 3847 - DNA, 120 bp, synthetic construct
  source 1..120: mol_type = other DNA
ttttggcaaattccattcagactataaactttctaccaaagaaaatgaaaagatcttacatgtgacgtgttctgcacatgttgttcacaacactgctaagaggccgggcgtgatggctca

SEQ ID NO: 3848 - DNA, 120 bp, synthetic construct
  source 1..120: mol_type = other DNA
ccttgtggaagatggtgctctctcttctatctaggtggattattctgtgtcttatcagcattttatggaattttttatagccataatttgttcttttcctccttaccggcgctcaaccac

SEQ ID NO: 3849 - DNA, 120 bp, synthetic construct
  source 1..120: mol_type = other DNA
gtgtgtgtgtgagagtcggggatcggtagtctccctataagcatttatttttctgtggttctgacctaacatttttttatttaggattatcacaaaattataaaacagcctatggacatg

SEQ ID NO: 3850 - DNA, 120 bp, synthetic construct
  source 1..120: mol_type = other DNA
cttctgttggcattttttaactttctttattgctgtctgtgttctcatagcccactgatgatattgtcctaatggcacaaacgctggaaaagatattcctacagaaggttgcatcaatgc

SEQ ID NO: 3851 - DNA, 120 bp, synthetic construct
  source 1..120: mol_type = other DNA
agtgatgggagcctaggtgcaaaacaataagtctccttatgtgggcacacagcagtctttggttcttggcattttacttttataaaataatagtggaacagaaggtctggtgttttgaga

SEQ ID NO: 3852 - DNA, 120 bp, synthetic construct
  source 1..120: mol_type = other DNA
tatctttatttactttttccacttcatgttttttttcctttagcttcgggcagtacatgaacaactggctgctctgtcccagggtccaatatccaagcccaagaggaaaagagagaaaaa

SEQ ID NO: 3853 - DNA, 120 bp, synthetic construct
  source 1..120: mol_type = other DNA
gacacgtggcgatcagatttgttctctgggccatatagtttgcctgttgctctaaatcaatgagtctagacttgtttttcatggcgtagtagtttttggttttttggtgtggttttgtgt

SEQ ID NO: 3854 - DNA, 120 bp, synthetic construct
  source 1..120: mol_type = other DNA
cccataataagatgcttggggcaatcttaatgtatcctgataaatttctttcattagccattaagaagcctgtgggaaagacaaaggaggaactggctttggagaaaaagcgggaattag

SEQ ID NO: 3855 - DNA, 120 bp, synthetic construct
  source 1..120: mol_type = other DNA
ttccctttttccttccgctccatttggggccctgggggtttcagtcatctccccatttggtcccctggactgtctttgttgattctaacttgtaaataaagaaaatattattcaagtttt

SEQ ID NO: 3856 - DNA, 120 bp, synthetic construct
  source 1..120: mol_type = other DNA
tagtagaatactaaagagtattccaacgattaaatcacaaaactgtgctttctgcatacccccttgtcttgctaaggggagagaagggttgtataaaaagtttagggggttgggatgtgt

SEQ ID NO: 3857 - DNA, 120 bp, synthetic construct
  source 1..120: mol_type = other DNA
tttgaacttatttcaagcctgtctcacttagggattgtaattgtttcaggagtttggttgagttccatcttggttgccaaaggactttattccaaaatagcagtctccagcacaactcaa

SEQ ID NO: 3858 - DNA, 120 bp, synthetic construct
  source 1..120: mol_type = other DNA
ctcagctcgctgcaacagtctgctattgctagtaagtaaaataccgagtattcaatgctcaaatgcttttgttgagaggatatttagtgtgattttatcacactagaatgataccaggaa

SEQ ID NO: 3859 - DNA, 120 bp, synthetic construct
  source 1..120: mol_type = other DNA
acaaaaataagtaattctaacaggacaatgtgcagaggtctagcaagaatttagaaaagagggttctctggtctaagctgagagctattcagatatctcagaacgatgagttccttcctg

SEQ ID NO: 3860 - DNA, 120 bp, synthetic construct
  source 1..120: mol_type = other DNA
aatctattgtcatttttgtgtcctgcccccgaggttaggtggttcttcccttcttactttcctaaacttcaactcttaaaatgtgagccttcatttttatgacccagagggtcacaaaag

SEQ ID NO: 3861 - DNA, 120 bp, synthetic construct
  source 1..120: mol_type = other DNA
gttcagtggcccagaggttgggggacccctgctataaggaacaagcacttatatagagtttactatgtaccagacacttatgagcacttttgcaatttagtcttcataataatcctaaga

SEQ ID NO: 3862 - DNA, 120 bp, synthetic construct
  source 1..120: mol_type = other DNA
aaaaaaagagcagttcttctattagctgccactgtcagacctcatggagtcagttgctattctaattgctgagactatgagaaggtaacactggttaattgatgaatactttcccctctt

SEQ ID NO: 3863 - DNA, 120 bp, synthetic construct
  source 1..120: mol_type = other DNA
tatgacactgtgcttagacttcctcttaaaattctgcattctgttctggacctgtttccaaccacaataacacaacccactgatttactgttcttaaatccatctctgctattcaggctg

SEQ ID NO: 3864 - DNA, 120 bp, synthetic construct
  source 1..120: mol_type = other DNA
ctagatataagcaaacaaggaattcagaagtaaaacttagcaaaaacttccagatattgttaactccaccaacctgagctaaagaatgaggctagagatgaacacacacacacatgcatg

SEQ ID NO: 3865 - DNA, 120 bp, synthetic construct
  source 1..120: mol_type = other DNA
ctgcaattgtgaattctatgtctttttgatataatgacttcttttcttttgggtagatacccaggagtgggactgctagatcaaatggtagaactacttttagttctttgagaaatctcc

SEQ ID NO: 3866 - DNA, 120 bp, synthetic construct
  source 1..120: mol_type = other DNA
tgagttaattttcgtatatgttgagaaacagggatctggtttcgttttattatttttatttttatttttttttgagatggagtcttgtttgtcacccaggctagagtgcaatggtacggt

SEQ ID NO: 3867 - DNA, 120 bp, synthetic construct
  source 1..120: mol_type = other DNA
tgttgattttgtaacctgagactttactgaattcatttatcaaatctaagagtcttttggaggagtctttagcgttttctaggtataagattatgttattggcaaacagagataatttga

SEQ ID NO: 3868 - DNA, 120 bp, synthetic construct
  source 1..120: mol_type = other DNA
acagaatgagttggggaggattctctctttcttaatcttttggaatagtttcaataggattggtaccagttcttctttgaacatctggtagaattcagctgtgaatctggtcctgggcct

SEQ ID NO: 3869 - DNA, 120 bp, synthetic construct
  source 1..120: mol_type = other DNA
gtgtactgggtccccagcagtgccagcccaccagtgctgtgctcgatttctcgctgggccttagctgccttcccacggggcagggctcgggacctgcagcccaccatgcctgagcctccc

SEQ ID NO: 3870 - DNA, 120 bp, synthetic construct
  source 1..120: mol_type = other DNA
ggaaagctgggggtaagggtaggcgtgcgtctgggcttgcgttgactacataagaaggagatttaaaaactataaagactttttaagattttggaaacttagtaccttcttcatttttac

SEQ ID NO: 3871 - DNA, 120 bp, synthetic construct
  source 1..120: mol_type = other DNA
tcaaaaaaaaaaaaaagttattcaattggtgacatacatcaacttgtgagttcaggaatctagtgctctctcctttaatttcctgctattttcaagtataataaagcattacacacacac

SEQ ID NO: 3872 - DNA, 120 bp, synthetic construct
  source 1..120: mol_type = other DNA
agttatctcatctcaggagtgaattcctgatgaaaggatgagtttgactcctttcctctccttcatcctttctctcctccttttttcttctgccttttttcttcatcacagcaagaaagc

SEQ ID NO: 3873 - DNA, 120 bp, synthetic construct
  source 1..120: mol_type = other DNA
gaacagtgccttgttttatgaaaacaatgagatactcacacttgctttgtattttccataactcaggcctggaactggtcacttctccaagaagctctatttcctttgagtgggaaatga

SEQ ID NO: 3874 - DNA, 120 bp, synthetic construct
  source 1..120: mol_type = other DNA
gtcaatattcacttctcacttctattctcccttccttcctaaaagtagccatttttattaatttcttgtttatccttccaatgcagcttttttccccctttggagacatggtctcactct

SEQ ID NO: 3875 - DNA, 120 bp, synthetic construct
  source 1..120: mol_type = other DNA
gcacaagccaccacatctgacccaatccacctttttgaaaaaatatgtatctttcctctttcttaccccaaaggcagtacatagtttaatcattgtattgcactgtgaattttccactct

SEQ ID NO: 3876 - DNA, 120 bp, synthetic construct
  source 1..120: mol_type = other DNA
tttgttttagtcagctggggctttaaacatttattgagtaaccaccatgtttcaggcattacagtaagaacttgtacctgaagcagatccatatactgaaggcccgaggaaaggaataaa

SEQ ID NO: 3877 - DNA, 120 bp, synthetic construct
  source 1..120: mol_type = other DNA
aatgatgcttttctttttcctttgtttgtatttaggtttgtcacacaagacaatagcacatgtcaccgccaaggcctttcctcttctggctttggatttcccaaaatctgaagctcactt

SEQ ID NO: 3878 - DNA, 120 bp, synthetic construct
  source 1..120: mol_type = other DNA
aatagaattctacagtgtttcaatgcccattatgttctgggtgttggaactataagacacagccttctcttgctttagaggagcagttagtggcaaaggcaaattcatacacagtcaact

SEQ ID NO: 3879 - DNA, 120 bp, synthetic construct
  source 1..120: mol_type = other DNA
acatacgaagcataaaaagttttcctcatatgcactgtttctcaggaagtggaaagaagaggtgcctcattaaaataaggcagaccacaaaagggcaatgactggatacaagaagcagaa

SEQ ID NO: 3880 - DNA, 120 bp, synthetic construct
  source 1..120: mol_type = other DNA
taccaattctggacacaccattattgttttgtttaagtaataacagttttgcaatggagaaacaaatattgcagaataatatataatttcaaacatctatttttaaaatttgatgtcaaa

SEQ ID NO: 3881 - DNA, 120 bp, synthetic construct
  source 1..120: mol_type = other DNA
gggtgaccctgcaaaaagggagagtttggatacaaaggacaggagactactggatgtctgttctaaaagagagtgaaagatcaagaatgcaggaggacaacttgttttttaaaataaaag

SEQ ID NO: 3882 - DNA, 120 bp, synthetic construct
  source 1..120: mol_type = other DNA
tttcaacttattctctcttaagaagcccattgagtccccataatctcttggtttctttcttttccaggaccaactgctcacagttcaaaccctcattttgcctctatttacttgtacctt

SEQ ID NO: 3883 - DNA, 120 bp, synthetic construct
  source 1..120: mol_type = other DNA
atttatctctttgtatgttttaaattctgttcacagaaaagtagaccaaaatcttctaggccacatatttagagtgtgtctaggtggacctcccctcttacgagatacctcgcagaccga

SEQ ID NO: 3884 - DNA, 120 bp, synthetic construct
  source 1..120: mol_type = other DNA
aaacccatgaggatctgcagggtgtctcccacaagtcatttctctcagaaggatcattacctaaaatagcagaaaacatacgatcgaggttgctcaatttcaatatgctgggatcctatc

SEQ ID NO: 3885 - DNA, 120 bp, synthetic construct
  source 1..120: mol_type = other DNA
actggtagaaggcgggtccgtaggagcccatgtggtcagctgtgtttggcgagttcagggtcaaggagagagaaaaaaatgtgtctgtctcatccacaatatgtgattgttgagtccctg

SEQ ID NO: 3886 - DNA, 120 bp, synthetic construct
  source 1..120: mol_type = other DNA
tttctggaagttagggattaagttttaattcttgtagaactctatgaagttgtttgagcaacagttattgaggaactagcatgcacccagcacaatggggggccagggaaataaaagaaa

SEQ ID NO: 3887 - DNA, 120 bp, synthetic construct
  source 1..120: mol_type = other DNA
ttattattatttaatttcattgtgtaagaaaaaatgtgtaattgttggagttgtttggtctaaagcaaagtgtaaagagctcccgtggactccccgaggagggcagaggtgctggtcctc

SEQ ID NO: 3888 - DNA, 120 bp, synthetic construct
  source 1..120: mol_type = other DNA
aagtgaggtgggagctggagccatgagatgaaagacgggaaagccatgaaaaactcatgataaagaatgttgcttctttggttaataacagtcgagtatcgggtgttttttttatttgaa

SEQ ID NO: 3889 - DNA, 120 bp, synthetic construct
  source 1..120: mol_type = other DNA
cataggcgcacggggatggaaaaatgtacgttacctatgtgtgcaggaagatataatggtttggtgagcacatggcactgtctttgctgcattctgattgtgtttattgtgaatattgat

SEQ ID NO: 3890 - DNA, 120 bp, synthetic construct
  source 1..120: mol_type = other DNA
ttctctcctccttttcccctgacttttctattgatgacttctcaattcttccctcttttgttctgaactagctcctcagtgtagtcctccatctttctgttttgtttttcagttgcatct

SEQ ID NO: 3891 - DNA, 120 bp, synthetic construct
  source 1..120: mol_type = other DNA
aggaagctgggagaaaaggaaaaatgaaagggagggcaaaagaaatagagtagaaagttgaagtgattagtgtgggtccatacagcttgatggaaaatgttctgactttggatcagaatc

SEQ ID NO: 3892 - DNA, 120 bp, synthetic construct
  source 1..120: mol_type = other DNA
agaggtctcagtgagcttcaaggacaacgtctggcttaacagataaaaatggatggtttgatagataataatggtttataggtgattggaggtaacaggatgattgccaatggcttttcc

SEQ ID NO: 3893 - DNA, 120 bp, synthetic construct
  source 1..120: mol_type = other DNA
gggcttcctcattatttgttttcttggaatgtatatgtatggtccacattccctcctagatggaaagggcctgtaagaagggatcatggatgattgaatctttgttacacaatcttcctt

SEQ ID NO: 3894 - DNA, 120 bp, synthetic construct
  source 1..120: mol_type = other DNA
acaattatggttcctgccaacaagaatggctgtcttggaagtctgtacacagaactaaatacgtggtggaaaaaggagaaggtctattaatgtgcaatataaatgttcatgtggcctgca

SEQ ID NO: 3895 - DNA, 120 bp, synthetic construct
  source 1..120: mol_type = other DNA
ccaggccagttcaagcctctccatgaccatcctgaacaccaatttactgcacgtcaactcactaaaatcaacccatcaactaatcagaaattaatacatcaaatcatcaattccccaatt

SEQ ID NO: 3896 - DNA, 120 bp, synthetic construct
  source 1..120: mol_type = other DNA
taaattgttgtgtaatacacaaaagggaattcttaattctgccctaggtaggagaagctagagagaagatgacgtttgaactgtgccttggaggataaatacaagtctactgatgcggag

SEQ ID NO: 3897 - DNA, 120 bp, synthetic construct
  source 1..120: mol_type = other DNA
aatttaggctcaaatcttccttgtccctaatgctcttctcatctccctagcttccaccctcatctttcttctttactcttcccatgttccttaaagaaaatgttacacttctgtgtttcc

SEQ ID NO: 3898 - DNA, 120 bp, synthetic construct
  source 1..120: mol_type = other DNA
aatcttttttgtttatatagctctcattccaaaagacaatctccctgactgggctagaaagtcatatgtttgtaaataatcagagagaggccaaggaaaaggacagagctggccactgag

SEQ ID NO: 3899 - DNA, 120 bp, synthetic construct
  source 1..120: mol_type = other DNA
aactgatgctaattgattctgggcctcttgttttctgcctcaaaatagagagctctgggattgaggagggaatcatactagcaccataaatggtttgaaggggaaaatgtgaaaacattt

SEQ ID NO: 3900 - DNA, 120 bp, synthetic construct
  source 1..120: mol_type = other DNA
tctactcacacacacacaagggtgacagaaacttgaaggactgctaagagagctcaaggatatttatggcctatttaaacttatgaagcttctgtggaggaaatctgtccttctacactt

SEQ ID NO: 3901 - DNA, 120 bp, synthetic construct
  source 1..120: mol_type = other DNA
ttgtgaaaactaagaaatcatgttcaggacagaacaccagtggtgtgtctatgtaaccatcggatgaggaaattagtatggatcaaccatctcagtggaatctgggtgctattcatcaag

SEQ ID NO: 3902 - DNA, 120 bp, synthetic construct
  source 1..120: mol_type = other DNA
gtgcctggagggcagaaccttgattcaaaaagattattctggaaacttgacttgctcaggacctggtacacttttcttctctcccatttcttccttttggaataagaatttctatcctat

SEQ ID NO: 3903 - DNA, 120 bp, synthetic construct
  source 1..120: mol_type = other DNA
tgggaggcgggtagcctggggcaaattctcaactcttcttgcccactgcctggaaacagatttggtgctgttaggggaggcacagtgggagtgagactggcccttcagattgcatgggag

SEQ ID NO: 3904 - DNA, 120 bp, synthetic construct
  source 1..120: mol_type = other DNA
ttgtacactaggcctcttgaacgtattcctcctatttggctgaaattttgtaacctgggacaaacatctttccaaccagcagcattttcagctcctaataaccaccattctattcactat

SEQ ID NO: 3905 - DNA, 120 bp, synthetic construct
  source 1..120: mol_type = other DNA
catatggtttgcaaatgttttgtcccattccatatgttgtctcttcactctattgattgtttctttggctgtaagaaaaacaaggtttttagtttgatataatcccatttgtctattttt

SEQ ID NO: 3906 - DNA, 120 bp, synthetic construct
  source 1..120: mol_type = other DNA
tcctgcaactttacaagattcctttatttttttttcagtacaatctgtattctgttgcaactagatttctttattacttcatagtttttaagtggagttattatggttttctatttatat

SEQ ID NO: 3907 - DNA, 120 bp, synthetic construct
  source 1..120: mol_type = other DNA
acttaactcgattttattgagcacttagtggcaggattcagagtaaagacccccctgtaggacttacgtccttcagttatcctcagtttttaatgattcatgtttcatcttagctcctgt

SEQ ID NO: 3908 - DNA, 120 bp, synthetic construct
  source 1..120: mol_type = other DNA
cttctattatttttgacaaatgtggtacctctaggcgtgagtttttctttcacttctcatttctccaaccacaaatgctgtcacaggccaacagggagaattcagtgatacatcatactc

SEQ ID NO: 3909 - DNA, 120 bp, synthetic construct
  source 1..120: mol_type = other DNA
taagtctgaaaatgagcttccgtattaattctcattattctgacaacagactctagaatccagccatattctactgtttggagccagccagggactttccaagtattcacagtgaaacac

SEQ ID NO: 3910 - DNA, 120 bp, synthetic construct
  source 1..120: mol_type = other DNA
caccccaacacctgttttttcatgcattcaagggagattttttttctccccaagtttctttcaccttccctttggggttcctggaataaataatacaaaacttgaggttctcttgtgatg

SEQ ID NO: 3911 - DNA, 120 bp, synthetic construct
  source 1..120: mol_type = other DNA
gtttttgtttttgcttcatgcttatgaggatttggcatattgctgcatgagttgagaaatgttcctttattcccccgtcttttggaatcgcttgtgtaaggttagcaaatgccttcactg

SEQ ID NO: 3912 - DNA, 120 bp, synthetic construct
  source 1..120: mol_type = other DNA
tgtctacaggacccataatgacagtacctttttcattcctgatattggaatttcatgccttctgtcttgttttaaaatcttccacagtcttgctaaaattttatcaatcctattagtctt

SEQ ID NO: 3913 - DNA, 120 bp, synthetic construct
  source 1..120: mol_type = other DNA
agattatctaattgttggcacgcaattgtacacagtattcccttatattgtttttcatttctgtaaagtggtagaaaggtctcatcttttattcctgatttgagtaattcaattcctttc

SEQ ID NO: 3914 - DNA, 120 bp, synthetic construct
  source 1..120: mol_type = other DNA
gaaatccaaaaaatgatacaagaagtgaagggagagaccaggtgcagtggttcatacctgtaatccctgggaggctgaggtgggcagatcatttgaggtcaggagtttgaggtcagcctg

SEQ ID NO: 3915 - DNA, 120 bp, synthetic construct
  source 1..120: mol_type = other DNA
aaatgtcttaatttctccttcatttagagtttttggctgacagcttttcccctcagcactttgaataagtctttcaattgcattctagcctccatggttctctttctttctcttccttcc

SEQ ID NO: 3916 - DNA, 120 bp, synthetic construct
  source 1..120: mol_type = other DNA
atgagtcaccgcacctgaccctccatggcttctaatgaaagatcatctgtcaatcttcttgcttgaatgtgataagtcatttctctcttaatggtttcaagatatctttgtcttcaactt

SEQ ID NO: 3917 - DNA, 120 bp, synthetic construct
  source 1..120: mol_type = other DNA
tttcctcaactgttatccactgcctcaggcaattcggttgcctttaattgtttccaataaatattttcatggaaaaggatttttgcaccgggcaagttcccaatcaggtcaaatgagaac

SEQ ID NO: 3918 - DNA, 120 bp, synthetic construct
  source 1..120: mol_type = other DNA
tccttattttaatctggaatggatctgacttgaagcagagtttaagctttttctggctgtcattgtctactgtttcactgacatcctgatcccttaaatttggcagccccagataccatt

SEQ ID NO: 3919 - DNA, 120 bp, synthetic construct
  source 1..120: mol_type = other DNA
gatctgggagataaccgaatgatgtgttatgactaccataatctaccactttgaccagcaaaccatagtcactccttgttgggagaatacaatggatcaaacatacattatgtctgggac

SEQ ID NO: 3920 - DNA, 120 bp, synthetic construct
  source 1..120: mol_type = other DNA
atccccaacttaactttcccttatttgaatctctgaaatatctatggtcactctattgccgcctaacaaggggcaaaatgtatgatggatgagaagtcagaatgaagaaatacaacagtc

SEQ ID NO: 3921 - DNA, 120 bp, synthetic construct
  source 1..120: mol_type = other DNA
ttacttacattccaagcaatggtgaataagagttcccttttctccatatccttgccaacacctgtggtttttttgttttgtttgtttgtttgttttgtctttttcatagtagccatccca

SEQ ID NO: 3922 - DNA, 120 bp, synthetic construct
  source 1..120: mol_type = other DNA
gagatcttagtcataaaatctttgcctagacctatttcctgaagaactttttctatgttttcttctagcagatttatagtttcaggtattacatttaagtctttaatctatcttgagttg

SEQ ID NO: 3923 - DNA, 120 bp, synthetic construct
  source 1..120: mol_type = other DNA
atcgtgctgctataaatatgtgtatgcaagtatcttttttgtataatgacttcttttcctctgggtagatacccagtagtgggattgctggatcaaatggtagttctacttttaggactc

SEQ ID NO: 3924 - DNA, 120 bp, synthetic construct
  source 1..120: mol_type = other DNA
ctccagatctgttctttttggttagtcttgctttggctatgtgggctcttttttggttccatatgaaatttagaattgttttttctagttctgtgaagaatgatggtggtattttgatgg

SEQ ID NO: 3925 - DNA, 120 bp, synthetic construct
  source 1..120: mol_type = other DNA
aaccaatgctgagagaatttgccactaccaagccaccactacaagaactgataaaaggttctctaaatcttggccagtcgcggtggctcacacctgtaatcccagcactttgggaggccg

SEQ ID NO: 3926 - DNA, 120 bp, synthetic construct
  source 1..120: mol_type = other DNA
catagtattccatggtgtatatgtgccacattttcttaatccagtctatcattgttggacatttggattggttccaagtctttgctattgtgaatagtgccgcaataaatatacgtgtgc

SEQ ID NO: 3927 - DNA, 120 bp, synthetic construct
  source 1..120: mol_type = other DNA
tgactgtctgatagaattcagctgtgaatacatctggtcctggactttttcttttgggcagtttttaaattattattttaatctcactacttgctattggcctgttcagagtttctattt

SEQ ID NO: 3928 - DNA, 120 bp, synthetic construct
  source 1..120: mol_type = other DNA
atttcattgttgacctaaagatcattcgggagcagattatttaatttccatgtatttgtatagttctgagaattcattttggattcaatttccagttttattccactgtagtctgagagg

SEQ ID NO: 3929 - DNA, 120 bp, synthetic construct
  source 1..120: mol_type = other DNA
ttctaagcagcaaagcattcaagaggtgactggagtgctgttaaaagcattcagttttaaaagggaaacagcataaaagtttgaaaaatttgcagcctgacaatgcgatagaaaataaaa

SEQ ID NO: 3930 - DNA, 120 bp, synthetic construct
  source 1..120: mol_type = other DNA
ctatcataaatggaattctcttcttcatttctttttcagctatttcattgttggtgaatagaaatgctacttatttctgcatattaattttgtatcctgccaagtctactgaattggctt

SEQ ID NO: 3931 - DNA, 120 bp, synthetic construct
  source 1..120: mol_type = other DNA
tcatgtggtcgtaagaccaacatttgttcaactgcagatgcataattgctctctacttgggggggtcggcaaacaggtcaattgccctctagtggtgtgaacaaatgcgagctttgctgg

SEQ ID NO: 3932 - DNA, 120 bp, synthetic construct
  source 1..120: mol_type = other DNA
attaaagaaaacagagctgctagcccatttatgaaaggaatgattgaggccttggcagaccacttttctatgaccccatgggactgggcaatgctaactaaaacaactttggagcctagc

SEQ ID NO: 3933 - DNA, 120 bp, synthetic construct
  source 1..120: mol_type = other DNA
aaagaacccccttctatatgccccggatgtaaaacggtgaaacattgggcaaatcaatgcaggtcaaaatttgataaaaacagaaaccccataagtaaccaggtgggaaacttcatgacg

SEQ ID NO: 3934 - DNA, 120 bp, synthetic construct
  source 1..120: mol_type = other DNA
taattttactggcttattggacacaggggtggacgtttcaatcattagtgatcaaaactggctagaaatttggccttgggtcactcagaaataaaaaattgtctgcatcagggaagcaca

SEQ ID NO: 3935 - DNA, 120 bp, synthetic construct
  source 1..120: mol_type = other DNA
acacccattattccatccagttgtttattttccccaccaaacactccccttcaggattaataggacagatgaccccaagactgcactttctagaatggatttttttttgctcacatacca

SEQ ID NO: 3936 - DNA, 120 bp, synthetic construct
  source 1..120: mol_type = other DNA
agatggaaattaaaaaattccttgaactgaacgacaatagtgacaacctattaaaacctctgggaaacagcaaaggcagtgctaagaggaaagttcatagccctaaacacctacatcaag

SEQ ID NO: 3937 - DNA, 120 bp, synthetic construct
  source 1..120: mol_type = other DNA
atcttctttcaacttttgcatgtatggggcggcccataaaaattaaaactgataatggtccagtttatgccagctcacaatttcaacaattttgtcacacgtggaatatccaacgttcca

SEQ ID NO: 3938 - DNA, 120 bp, synthetic construct
  source 1..120: mol_type = other DNA
ctacatcatggcaaaagaaatgcctttaaagtcttagctgcaggtagcttcaaatcaggtaatgcaatcaatgactctttcccaaacattccttcctgtgctaaagaacaaagctgggaa

SEQ ID NO: 3939 - DNA, 120 bp, synthetic construct
  source 1..120: mol_type = other DNA
aagatgcactggtattctaacagcaactaaactgcgactgggcgcataaacatatctgcgtcacttctctatcatagaatcaatcaatacatagttgggatgaagtgaaacaacacctct

SEQ ID NO: 3940 - DNA, 120 bp, synthetic construct
  source 1..120: mol_type = other DNA
ttttctccttagttttaccttgcctgggtttgcccatttgttattcatatctatttatcaatcccaaaatactaaaaggatccaggcagggcagctttaattggtggctgcacagagtgc

SEQ ID NO: 3941 - DNA, 120 bp, synthetic construct
  source 1..120: mol_type = other DNA
gcctgacctcctaggacctccatagttgaggtatagttatttggagtcagagattcttaaaccaatcctggttctgcttttttcacttcaccaaaccaaacttgaccagattctttaatg

SEQ ID NO: 3942 - DNA, 120 bp, synthetic construct
  source 1..120: mol_type = other DNA
ccgtcattacctcaaactctgtccttaatttttttgttagaaacatctcttctctacaaaccatgctttgtgttcagcatgctcatctggcatccagtttaagaaggatatcttctggcc

SEQ ID NO: 3943 - DNA, 120 bp, synthetic construct
  source 1..120: mol_type = other DNA
atcccggacggggcggcagggcagaggtgctccccacatctcagacgatgggcggccaggcagagacgctcctcacttcccagatgtgatggcggccgggaagaggcgctcctcacttcc

SEQ ID NO: 3944 - DNA, 120 bp, synthetic construct
  source 1..120: mol_type = other DNA
gaatgtccagcattttgtatttttgcagtagggaacatttcttcactgaattccactttcacattagataatttaatagttttatggagaaagtaaaatgcccgcccccctcccccaccc

SEQ ID NO: 3945 - DNA, 120 bp, synthetic construct
  source 1..120: mol_type = other DNA
ttcatgaattggggagccctcagaacccagaaagattcagaaagctctgtccagcaacatgtgaaggcagtgtttatagataaaaacaggaagtgatactcaaaaccagccaatttatta

SEQ ID NO: 3946 - DNA, 120 bp, synthetic construct
  source 1..120: mol_type = other DNA
atatgttgataataaaatgatccttttatcattatgaactatccttctttctccttggtaatatttctgagtcttatatttctgatattaacacagccaccaatacttccatggttggca

SEQ ID NO: 3947 - DNA, 120 bp, synthetic construct
  source 1..120: mol_type = other DNA
tggccaatatggtgaaactctgtctttactaaaaatacaaaattagccggtggtggtggcgggcccctgtaatcccaattacctgggagtctgaggcagaagaatcccaattatccagga

SEQ ID NO: 3948 - DNA, 120 bp, synthetic construct
  source 1..120: mol_type = other DNA
agcattccacggtatacatgtattttcccattcttttactttttacctgtctttgccttcatatttaaagagggcattatgtagagagcatgaagttggcctgtagatttttttgtgcat

SEQ ID NO: 3949 - DNA, 120 bp, synthetic construct
  source 1..120: mol_type = other DNA
atttctatttgttggaaactttactaaggaatgactgctttgaggtaatggataaggacagagcttgaagggtcagcaattcagtcagccactggagtagttttcacatgaagtgagaag

SEQ ID NO: 3950 - DNA, 120 bp, synthetic construct
  source 1..120: mol_type = other DNA
tatttcattaaaatatgatttattactgagttcttttggtatcccccaaattttgcacctaagccaggtgcatcccctacatcaccctagtcccagccctcttttccattcttcctctta

SEQ ID NO: 3951 - DNA, 120 bp, synthetic construct
  source 1..120: mol_type = other DNA
ccacatgtatatgcagttccatgtgagatacaagcattgcttgcaatagtagagaaccaggaatgatccaggtatcccaggagcaatgtagatatgtggattaatatgatttggatattt

SEQ ID NO: 3952 - DNA, 120 bp, synthetic construct
  source 1..120: mol_type = other DNA
ttgccatggaatgagtccaagtagagacagtaagtagttacaggcacccaccacactgtgttgtaattatgtatagaaatatagatctgactccattatttggcaatggactctggagaa

SEQ ID NO: 3953 - DNA, 120 bp, synthetic construct
  source 1..120: mol_type = other DNA
atggttgtgggaattgaaggttatggaccagttaattggatgttaggacgaggagaggactgagacccagccagtgcggaaagctggtgcagaggacaccaggtctttggaatagaggat

SEQ ID NO: 3954 - DNA, 120 bp, synthetic construct
  source 1..120: mol_type = other DNA
cagagcagatgagcagttataaaaagaaaggagcaaagaacaaaatgaaaagtttatcactgataagtcaagctgcttcctggtctttgaaagtctgggcatcctgaccctacacaatag

SEQ ID NO: 3955 - DNA, 120 bp, synthetic construct
  source 1..120: mol_type = other DNA
cttgccactgtaattgtaagtgtctagagggtatgacctgtgtcttatttttcactgagaatgactccctgacacagtaagtggccaagcaaagagtggtatttgaaactaaacaaaaca

SEQ ID NO: 3956 - DNA, 120 bp, synthetic construct
  source 1..120: mol_type = other DNA
ggaggatccaggtaaacaggagaaaaataaggacagggtagttcatcagaaagaagtggattatagtgcaaatgttattagtaactcaagtcagaggcactgagaagaacccactgaatt

SEQ ID NO: 3957 - DNA, 120 bp, synthetic construct
  source 1..120: mol_type = other DNA
gaaggcagtgtatgaccctcagagctgggtctggacttcaaacttggctcgttgatctgctgtgtaaccttggaaaacttattcatctttttgagcttcagttttttcaaaataatttct

SEQ ID NO: 3958 - DNA, 120 bp, synthetic construct
  source 1..120: mol_type = other DNA
gtttctggatataaaattaatgtacgcaaatcagtagctcttctatacagcaacagcaaccaagtggagaatcaaatcaagaactcaaccccgtttacaatagctgcaaaaacaattaaa

SEQ ID NO: 3959 - DNA, 120 bp, synthetic construct
  source 1..120: mol_type = other DNA
cttcttctgacggcaaatgttttccattatgttccttctcccgagccccacccccatcccagacagtcagatgatctttgatgttttttggtcactatattttaaatcatgttttatgtt

SEQ ID NO: 3960 - DNA, 120 bp, synthetic construct
  source 1..120: mol_type = other DNA
caatttcagacctattgatctcatttgatcttaagagctttgctataaggcaggttatatcatccccatattgaagacaaggaatcgaagtccaagagaggcagtgtcgttaaagctgca

SEQ ID NO: 3961 - DNA, 120 bp, synthetic construct
  source 1..120: mol_type = other DNA
ttcctccgtcatcttaagtgcatcacaggctttatattttcagacctttcatactaactttctgcctagtgagcaatgactcatacaaagctcagtgtccattggttcttttctcagact

SEQ ID NO: 3962 - DNA, 120 bp, synthetic construct
  source 1..120: mol_type = other DNA
cagtaaccaagtgaaaaatctcttcttcctgctgcctccctgtggctggtgtaatattatggcatctatgatccattgtttttctctcaggatactctcaggatatttctttttatatat

SEQ ID NO: 3963 - DNA, 120 bp, synthetic construct
  source 1..120: mol_type = other DNA
aagcttggctgagacaacccatagggagctagaggtttttaatatatcctattctgaataagagacgaattcattcagatcagtggtttcaaaccgtgctctgggcaactcaattgctaa

SEQ ID NO: 3964 - DNA, 120 bp, synthetic construct
  source 1..120: mol_type = other DNA
tgaggttaataaactggagaagttaatttgtggagcatgaaacagatgagcagaacaatcacagcaccttaatttccccagtgtgcccaagaacagagcaggcctgaagatactcaaaca

SEQ ID NO: 3965 - DNA, 120 bp, synthetic construct
  source 1..120: mol_type = other DNA
taagaaatatatttctacatctcctacatgcaaaacaacaggagcaagttgaggaattctcaagaaactggtcgagaagagagagcgcttagctatggaaaagagaaagaaggaagggag

SEQ ID NO: 3966 - DNA, 120 bp, synthetic construct
  source 1..120: mol_type = other DNA
caaaggaccggatcctgggaactggacagttgtgatttggccaagacagaaaagcctgtgaaagagaccaaaaaaacccaagtgcagtgtgaggagaggcccgcagagaagagtcttgga

SEQ ID NO: 3967 - DNA, 120 bp, synthetic construct
  source 1..120: mol_type = other DNA
catgagcttaggaaagttgctgaggtaattggttgagagaggtgttcaaataaaaataacgcaattggcaaaaactgttactaagactttgtagaggcaccaatcagtgacatggcagca

SEQ ID NO: 3968 - DNA, 120 bp, synthetic construct
  source 1..120: mol_type = other DNA
gatttagacataagttgaatagtgtaatggacattgagttaaccgaggtaatgaagtagtgagacacaggtgcccctgaaataaactcacattgagggaagaggctgacaatgtggatca

SEQ ID NO: 3969 - DNA, 120 bp, synthetic construct
  source 1..120: mol_type = other DNA
aagaaacaaacaatcccatcaaaaagtgggctaaggacaggaatagacaattctcaaaagaagatatccaaatggccagcaaacatataaaaaatgctcaacaccactaatgatcaggga

SEQ ID NO: 3970 - DNA, 120 bp, synthetic construct
  source 1..120: mol_type = other DNA
agacgcagcacagaggaggaacttgaaaaaggacgggatttctactactcaagcatgtaggagctcaggatattctgtaaatatgaagattttgagtttttgtaggtgaggtaaaaaaat

SEQ ID NO: 3971 - DNA, 120 bp, synthetic construct
  source 1..120: mol_type = other DNA
gaaaccctcacacttaggaactgacctcacacataggaacagttctcttccttcagcattttagcctcttctcaggcattttgagaggcaacttccagaatcagcatttgccaccttgtt

SEQ ID NO: 3972 - DNA, 120 bp, synthetic construct
  source 1..120: mol_type = other DNA
gcgtccattgagtgatgggcaatggaatttggtgggatggaaatgtttctctaattatctgaggtggtttcaatggctgattatataacctttcgtctttcatttcagttcaacgaggat

SEQ ID NO: 3973 - DNA, 120 bp, synthetic construct
  source 1..120: mol_type = other DNA
tacactttaaccattttctttgtgtgccatcacaaatactccttaaccaaatacggcttggacttttgaatgcatccaatagacgtcatttgtcgtctaagtctgcattcatccaccagc

SEQ ID NO: 3974 - DNA, 120 bp, synthetic construct
  source 1..120: mol_type = other DNA
atatgatttcaatccagggattcaacgatggaaggaggtcatgagaatagcagaaagtcttcaaatcgagatcattatgaaatcctcagacccagagcacataaatcctaccctcagagt

SEQ ID NO: 3975 - DNA, 120 bp, synthetic construct
  source 1..120: mol_type = other DNA
ttactgtgcacttggcttatgggatgaaacatcctcctagttcttttgtctctcagcttctctgaagtctcattgagcaccttctcttcaatttcttttacacagtaagaataggatcag

SEQ ID NO: 3976 - DNA, 120 bp, synthetic construct
  source 1..120: mol_type = other DNA
gggtgcttgcggtgataaccattcaacgtacattctattggtttgtgtgtttcttccaaatgtcccctagttcacaatagaaagggcttaaatagagaagtaaaggagaatttgggaatt

SEQ ID NO: 3977 - DNA, 120 bp, synthetic construct
  source 1..120: mol_type = other DNA
attggaagttctgaacatcactctgcgggcagaagaaaattaaggctgtgtaaaatgtaggaagacagatagtgactgcagatgaaataatctaaatactggacaagactgcagccactg

SEQ ID NO: 3978 - DNA, 120 bp, synthetic construct
  source 1..120: mol_type = other DNA
ggaagacagagttataaggtacagagagcaggggctggccttggatgtgggaggtgttgggtattcgaaaccatgagatggtgaaatttggataaagtgaccataaaacatgggattgag

SEQ ID NO: 3979 - DNA, 120 bp, synthetic construct
  source 1..120: mol_type = other DNA
gagaagatggagaatgggtgaatacgtaggatgctacacagaatgcaggaagcaaacaggtaacaggaaggttattgggaacatgaaggaataacacagaaaatgagaaatgcaaatgaa

SEQ ID NO: 3980 - DNA, 120 bp, synthetic construct
  source 1..120: mol_type = other DNA
agttaattatgaaaaagaaaactaaccattggatctagcaagatggaggttgctgggatttgacaaggaagtttcagtggaatggaggggaggaaaccttggtttagagtgtgacaaaga

SEQ ID NO: 3981 - DNA, 120 bp, synthetic construct
  source 1..120: mol_type = other DNA
cccactgagtttagggtctagaggattactcacctacagaaatgaatcccaaaggaaaaagaaaaatacatggtgtatagactgggctacacagatgtaattggttcagcttaggttact

SEQ ID NO: 3982 - DNA, 120 bp, synthetic construct
  source 1..120: mol_type = other DNA
gaaaacatacagttgatttgaaggcagtgaaataaatggatgagtgtcatgctacattaggttagtgacataaactggaaggaggctcatggtgggtgaagttctaattttgggtcaggt

SEQ ID NO: 3983 - DNA, 120 bp, synthetic construct
  source 1..120: mol_type = other DNA
accacagactgttcacctgacaagaaatatcttgaggaactcacttcacagatccctcaagaaaggaaccactgcaggagaatacccagaaaatcgaaagaattcacagatccttttaaa

SEQ ID NO: 3984 - DNA, 120 bp, synthetic construct
  source 1..120: mol_type = other DNA
tcaggacattacaacaattcacgacagaataactgctctaagaaaggagaaaacagctaattccactggctgaaaaatcttgactaaccagtggtcttcggtctgttcacatgacaactg

SEQ ID NO: 3985 - DNA, 120 bp, synthetic construct
  source 1..120: mol_type = other DNA
tacaagaagctcaaagaccacctgggaaatttatcacagaaagattatcgcccaggcacatagtcatcaggttatctaaagtcaggacaaaggaaagaatcttaagagctgtgaggcaaa

SEQ ID NO: 3986 - DNA, 120 bp, synthetic construct
  source 1..120: mol_type = other DNA
cattctactcaacaactgtagaatatacattcttctcatcagcacatgaaacatcctccaagatagaccacataataggccacaaaacaagcctcaacaaatttaaggtaatcaaaatta

SEQ ID NO: 3987 - DNA, 120 bp, synthetic construct
  source 1..120: mol_type = other DNA
acataataaaaaagaaaactacagaccaatatctctgatgaaaatagatgcaaaaatcctcaacaaaatacaagctaacataatccaacagcatatcaaaaagatcatacatggtgataa

SEQ ID NO: 3988 - DNA, 120 bp, synthetic construct
  source 1..120: mol_type = other DNA
gatcacaaggcagagggcaaaactagaatcactgatgaggttccacatcccgctgggcacacattgtcattgataaacatcttaacaggaaacagggttcgagagcagagaaccagtatg

SEQ ID NO: 3989 - DNA, 120 bp, synthetic construct
  source 1..120: mol_type = other DNA
aatatactgcaaggctatagtcaccaaaacagcatgggaatggtataaaaacaggcacatagacaaattgaacagaatagaagtcccagaaataaaaccaaatacttacagccaactgat

SEQ ID NO: 3990 - DNA, 120 bp, synthetic construct
  source 1..120: mol_type = other DNA
aaaatgtgatatatatatatgtgatatatatatatgtgatctatatatatatagatctatatatatatatatatatatagatcacatatatatatatatgatctatatatagatcacata

SEQ ID NO: 3991 - DNA, 120 bp, synthetic construct
  source 1..120: mol_type = other DNA
gataacatcactatatagatcctaagattggtcttaaagatgcttttcagacttttgtattctaccaaccgactgaccccacctggatttgggactcacaactcaactgatcctatacct

SEQ ID NO: 3992 - DNA, 120 bp, synthetic construct
  source 1..120: mol_type = other DNA
gtcccacctcagcaaacacaacctctccaaatcctgaagagcctctttcagaaagaggactttgagtctttcagtctttctccaaaaaagaaaaggtatatgcccttatgcacaaaattt

SEQ ID NO: 3993 - DNA, 120 bp, synthetic construct
  source 1..120: mol_type = other DNA
atgagaacaactaagggacacaaaataaaatgacaaacacttggatgcaagagtgatgccagggccaaggaaaattaaacatggccaagatggccacaaaacaaactggacaaacaggaa

SEQ ID NO: 3994 - DNA, 120 bp, synthetic construct
  source 1..120: mol_type = other DNA
tgaaaccaatgacgatgagagcagtaatcacaatagctgccatttatcaagtgcttacagtgcaacaaacactgtgccatcactttctcacttgtttgtgccaattctatttactgtcca

SEQ ID NO: 3995 - DNA, 120 bp, synthetic construct
  source 1..120: mol_type = other DNA
atgaattgagaaagaaagctgagatatagcttgtaaaacagctggaattcagatctctcctaagtcctcttcctttcacatattttgtcacctgcctcgagacacacacagttactgtca

SEQ ID NO: 3996 - DNA, 120 bp, synthetic construct
  source 1..120: mol_type = other DNA
atgctaaatattcaaataaaagtaagacataggtcttgtcctcctgatgtttacagttcacagaagagaacacaagtgacaagacaacagcaggcccagatggataagtgcagatatggg

SEQ ID NO: 3997 - DNA, 120 bp, synthetic construct
  source 1..120: mol_type = other DNA
taatttgattgacattaaagggattattggtgagtgatgtcggtggcatccgacttagaaaactcccagataactcttattcctagactggccaatgcaatcatctcttttgtgtgtgtg

SEQ ID NO: 3998 - DNA, 120 bp, synthetic construct
  source 1..120: mol_type = other DNA
agacaaaagtcagaagcttagctccaagtgtgaggacacagagagagtgtctctagggtaggatgcagactgaaggcaaggttgttttttattagttggttcatggttatgttgcttttt

SEQ ID NO: 3999 - DNA, 120 bp, synthetic construct
  source 1..120: mol_type = other DNA
cttggtgactatggcagggaacgtgagctttttccccgcaatcctatactggccccttctactgcataattattttcttctcttgaattttacatgctagtcttctatttacattttaac

SEQ ID NO: 4000 - DNA, 120 bp, synthetic construct
  source 1..120: mol_type = other DNA
aacacatcatctccccaaaactcatgactctgactggttaaaatgagtgtcagtgttctccatctgtcctcgtaacagcatcactggctctatattgtcagatctttaatactaactttc

SEQ ID NO: 4001 - DNA, 120 bp, synthetic construct
  source 1..120: mol_type = other DNA
gttagagtattaggatgggttgaaacctgtcagaagaatgagataaggatgtgtgagtacgtgaaagagattgagtgtaggttatcagacagccaagaaagcagtaaccaagggaaaaac

SEQ ID NO: 4002 - DNA, 120 bp, synthetic construct
  source 1..120: mol_type = other DNA
aaccgaggcttacctgagacatagaaagtgaggtgatgtggttgcttagatttatcttttcatttgtgctgctcctggcactcttattgctatgagattactaaaaagtttcctggaaca

SEQ ID NO: 4003 - DNA, 120 bp, synthetic construct
  source 1..120: mol_type = other DNA
catggtcttgaagtaatttgtccagtctccgacctggcgtcccttcttctccaggtgctcccggattttgctctccagcttccggttcttggtctccatgcttctcactctgtccaggta

SEQ ID NO: 4004 - DNA, 120 bp, synthetic construct
  source 1..120: mol_type = other DNA
attgtgcatttgagtctttgggtactcactcttctgttaatctaactcctcaaataaaatccctagcacaaaagagaggggggaagatccagtcagcaaacagccaacaaacacttttca

SEQ ID NO: 4005 - DNA, 120 bp, synthetic construct
  source 1..120: mol_type = other DNA
cttactcttgactaaaacatgttctcttattggtgaatgaggaagaggaacaaagactaacaaattaaaatgagaggatacacactcagagtggggcacttgaatagggaggggcagact

SEQ ID NO: 4006 - DNA, 120 bp, synthetic construct
  source 1..120: mol_type = other DNA
agatcaagtctttctacagccatgtttgaaagtgaaaattaactttcaggctatatagtctttcttatggcaaacttcaagaagttttaagaaatgcatttctggccaagtgcggtggct

SEQ ID NO: 4007 - DNA, 120 bp, synthetic construct
  source 1..120: mol_type = other DNA
tgagaaaactgatgcctggagtctgtgacctgcctaggaccacagaactcggtagtaggaaaaatcgtatttttaaatccagtcctgagtgggaagatttgaggaaatagctaatattga

SEQ ID NO: 4008 - DNA, 120 bp, synthetic construct
  source 1..120: mol_type = other DNA
gtggaaagtttaatagaaaagaaaagagagaaaaaatccttcctcatgctgagaaagtgggttgcccaaaagagggtctgcggtttgtggtggaatgcagtcggttttgtacagaggttg

SEQ ID NO: 4009 - DNA, 120 bp, synthetic construct
  source 1..120: mol_type = other DNA
tctctctgcaaatatgcattaaaaaaaagttctaatactgagcagtgaattttgagaggaaaggtagaaatgataaagagtacctggtgaggtaggattggcgctaaggcgagtagccct

SEQ ID NO: 4010 - DNA, 120 bp, synthetic construct
  source 1..120: mol_type = other DNA
aaggactttccattgactggaggccagtaaatggagtttgtcatcctcagggctggaatacccttaagaagtggcttattttatttctgcaggggaatactgaggtttaatttcttttat

SEQ ID NO: 4011 - DNA, 120 bp, synthetic construct
  source 1..120: mol_type = other DNA
tagacagttgagaggaattaagaggtcaggccttagttcttcatagaccctctaatatgcatattttaaaaatgcttccatttctattcatttgcagagctactggggtcccagttgggg

SEQ ID NO: 4012 - DNA, 120 bp, synthetic construct
  source 1..120: mol_type = other DNA
gtaatggtggggagagggtcagcaggaaaacatgtgagcaaaggactctgtgtcataaataagtttaaggaaaggtgctgtgcctggatgtgcacataggccagatttatgtttgacttt

SEQ ID NO: 4013 - DNA, 120 bp, synthetic construct
  source 1..120: mol_type = other DNA
ttctcagatggttcccttggaaattgcctttctaattctgggggattattttctataggcctacctgatatgcctatttaaaaagctgggctgatcttacagtgcttgcaaaggtttagt

SEQ ID NO: 4014 - DNA, 120 bp, synthetic construct
  source 1..120: mol_type = other DNA
acctgaaacccatttactagacaaggtttgggaagctctttggtgtatccactatacagaaagggaaggaagacaccatgagtaagatttgtttctcacgagtttcatatatacctggaa

SEQ ID NO: 4015 - DNA, 120 bp, synthetic construct
  source 1..120: mol_type = other DNA
cagaaattttcagttgccccaagactttcccagcctcatgcgatggtgaagttctccatgaaaggaaactggtatgaagagattcttgagattaaagaacagatttgacgtttgctctat

SEQ ID NO: 4016 - DNA, 120 bp, synthetic construct
  source 1..120: mol_type = other DNA
taagagggagaagatgcacacattgagtaaggatgaggagagtgacatgggtttaggaaagttgctggcgtaattggttgagagaggtgtccaaataaaagtaatacaatttgcaaaatc

SEQ ID NO: 4017 - DNA, 120 bp, synthetic construct
  source 1..120: mol_type = other DNA
agataagaaactgctattattgtccagggaaatcataataagggcatgaattagaataaagaaaaacacaggggtaggggagacggaggaaagaggaggatagaagttctggccattcca

SEQ ID NO: 4018 - DNA, 120 bp, synthetic construct
  source 1..120: mol_type = other DNA
gatttctactatttaagcatgtaggggctcaggatattatgtaaataggacgattttgagtgtttgtaggcgaggccaaaaaatccataggttacttgcagaataagtcacgtcaagctc

SEQ ID NO: 4019 - DNA, 120 bp, synthetic construct
  source 1..120: mol_type = other DNA
cttcctgaactgacgttacacatgggaactgttgtcttccttcagccttttagcttattctaagttattttgagaggcaactaattgaatctgaatttgtctgttgttgaggtcacaccc

SEQ ID NO: 4020 - DNA, 120 bp, synthetic construct
  source 1..120: mol_type = other DNA
tctttcttcctttcatttcagttcaacaaggatctgcataaacaggcaatattcctgctttgatttccttgttgggggagttacaggaggacataagtcctttctgtacattgtgacact

SEQ ID NO: 4021 - DNA, 120 bp, synthetic construct
  source 1..120: mol_type = other DNA
gcctagacctcctgagctaataattcatacagtgagaaacgcctccccattgttgaaagtgcaaagcaataggtgtggcactctttcaaacactgatcttttttttacaatccaaaattt

SEQ ID NO: 4022 - DNA, 120 bp, synthetic construct
  source 1..120: mol_type = other DNA
tggtctgctgcttgaaggggaagaagactgcagaatgaggaacacataggaaagtacacagaatacaagaagcaagcaggtaatgggaaagtttttaagaatgcaagggaataacacaga

SEQ ID NO: 4023 - DNA, 120 bp, synthetic construct
  source 1..120: mol_type = other DNA
gtgagactctgtctcgaaaaaaaaaaacagaaaaaagaaaaaaagaaaaacttcagctgaattcaatataaaagagtcaaattgagcaatgaacgattcgtgaatcaggcagcctcccga

SEQ ID NO: 4024 - DNA, 120 bp, synthetic construct
  source 1..120: mol_type = other DNA
gagacaatttgacattctagagatggctgcatgcaaacatttaaaactttcgagagaatacagtgcaccaggtagactactattatgactatcaggaggataataccaagagtttggagt

SEQ ID NO: 4025 - DNA, 120 bp, synthetic construct
  source 1..120: mol_type = other DNA
ggattactatcaagcacccccatcagctttgtaggcttcttttcactgggctccaaattcagtcttgctgactctggtaacttcaaaacattttagcatgcaatagcatttctttgtttt

SEQ ID NO: 4026 - DNA, 120 bp, synthetic construct
  source 1..120: mol_type = other DNA
agtgtggatggcaagggcagtctttctctgatgttctcagaagatccaatcttcaggttctagattgtgaaggggttgattgtcctcagtcagtgaaccataaaaagctttctttacctg

SEQ ID NO: 4027 - DNA, 120 bp, synthetic construct
  source 1..120: mol_type = other DNA
taagcaattaactgtggaaatgaccttccttccttccctccttccttccttccttccttccactctctctctctctttctttctttcctttattttgagacagagtatcactctgtcacc

SEQ ID NO: 4028 - DNA, 120 bp, synthetic construct
  source 1..120: mol_type = other DNA
aaggaaaattcaagacgagagtcagaagttgttcatgaggggaagagaatcagcaaatagcaaagatcagaaagatatcaaaccaaacaggtctcattccctgagctggaattgaaccct

SEQ ID NO: 4029 - DNA, 120 bp, synthetic construct
  source 1..120: mol_type = other DNA
cattttatcctatttaaccccttttatgaccaaatgacacagaaagaccaattcatagcacaaagtacaccaggtttgctacagcttaagattggctcacaaataccttttttttttttt

SEQ ID NO: 4030 - DNA, 120 bp, synthetic construct
  source 1..120: mol_type = other DNA
tcaaaaaaaaaaaaagttcaggcagctgcttgtcagtcatgaaggatcttttccagccatctcatcagctctcaagtttcctgctttggggagaaaaaagttccccatgtcccatgatcc

SEQ ID NO: 4031 - DNA, 120 bp, synthetic construct
  source 1..120: mol_type = other DNA
tgctccttccagggcctaatacttatgcatgtataatccagaaggaactcagttcttcagaaattcagtatcacattttttacctcaaatactggctttgctctcaggtcccttgttcaa

SEQ ID NO: 4032 - DNA, 120 bp, synthetic construct
  source 1..120: mol_type = other DNA
aaacttgatttaacagaggaaattattttacatattggggaactgaccacagaagtaaagtaactcacccaagtcacacaactcctggtagaaacaaaattgcgtagtccccctacccca

SEQ ID NO: 4033 - DNA, 120 bp, synthetic construct
  source 1..120: mol_type = other DNA
ctcattgtgaattttcactctttaggcactaaggatgtaactcagaagacctgggccttgtcctcaagctgcttgaaatccaaaatccaaagagacaaagaaaagaagattgctacatgt

SEQ ID NO: 4034 - DNA, 120 bp, synthetic construct
  source 1..120: mol_type = other DNA
catccagacaaacacagacatgaaaaaagaggctgaaaaggagaagactagaaagtaggaggaaaacaaagaggaagtgggttcataaaagacaacagacaggagaaaacatccaggaaa

SEQ ID NO: 4035 - DNA, 120 bp, synthetic construct
  source 1..120: mol_type = other DNA
ggtgttcagtaaatggtggttattattgttagaatgagagaaagcaaaagagagcctcaggcaaaacagtaaagaacagagaaaacagaacaggaaagaaaacagcatctgtgggctcca

SEQ ID NO: 4036 - DNA, 120 bp, synthetic construct
  source 1..120: mol_type = other DNA
ccattctcctgcctcagcctcccgagtagctgggactacaggcgcccgccaccacgcccggctaattttttgtatttttagtagagacggcatttcaccatattagccaggatggtctcc

SEQ ID NO: 4037 - DNA, 120 bp, synthetic construct
  source 1..120: mol_type = other DNA
ctttcccaagttctctagtttatagcatgtcctttcctgaggaacataaatcacatgttattgtctgcctttcatcctgagaggaaggagataatcacatggccattttatgcttgaagg

SEQ ID NO: 4038 - DNA, 120 bp, synthetic construct
  source 1..120: mol_type = other DNA
gatggaacagacaccaagcctggctttgccactgaacacaatacaggactgataaaggtcagttcttaggaatatgcttcccaaatgtagaaatcaacataagatcccaattttaaataa

SEQ ID NO: 4039 - DNA, 120 bp, synthetic construct
  source 1..120: mol_type = other DNA
tttgatgaaatatggtcataaattatgatgacaagttagttttgggggattttatatattaccagataccaatgccagaggaagagctatgttaggggtcctcagagccaccccaggtga

SEQ ID NO: 4040 - DNA, 120 bp, synthetic construct
  source 1..120: mol_type = other DNA
atatttcttgtaggaaatagaggctgcccatctctcagtgccacatatgagaaagggaagttgtcattttatatatccactgtcaagcatcttggtaaaacagaagaaagcaggctgggc

SEQ ID NO: 4041 - DNA, 120 bp, synthetic construct
  source 1..120: mol_type = other DNA
catcgaaattcaaaatcatgttaaggctatagagaaataggatcctatccccacctagtggccaacactgaaatctgggcttagaacaggaaacaagggaatttgtcaacaatttgggaa

SEQ ID NO: 4042 - DNA, 120 bp, synthetic construct
  source 1..120: mol_type = other DNA
gtgagacgaaggggctgaagttctcatttaatttcaaattaaggcagaaccgcctataagagaaagtgctaaagaattggaaaaatgaaaaagaatttgagaacccagtgggaatggagc

SEQ ID NO: 4043 - DNA, 120 bp, synthetic construct
  source 1..120: mol_type = other DNA
agtaggactctttaacaactcattttggccagtcaaaagggaggtggagcttggaagtgaattgtgaattacaccgatattaagaaaagcagctaattctgaagtagtattaagtggcag

SEQ ID NO: 4044 - DNA, 120 bp, synthetic construct
  source 1..120: mol_type = other DNA
tctgcccaagaccaggtaaaagcctttgtgcttgaaagcccccaacttgaaaaagaggaacagaaattaattggcgtgtttgaattatgaagactgcatatcccacatctgtattaaact

SEQ ID NO: 4045 - DNA, 120 bp, synthetic construct
  source 1..120: mol_type = other DNA
tgtcttgataaacatcttaaacaatagaaaacagggttcgagagcagagaaccggtctgacctcaaattcaccagggtggggtttttccccaccctagtgagcctgagggtactgcagga

SEQ ID NO: 4046 - DNA, 120 bp, synthetic construct
  source 1..120: mol_type = other DNA
agccttcaaatacttcaaaaaacaaaacaatccctcggggagagatttccgagcaaaacaaaacagcccatttgtttttagactcctgctataatgctttgcctaaaggtattggccaag

SEQ ID NO: 4047 - DNA, 120 bp, synthetic construct
  source 1..120: mol_type = other DNA
gagctaagagtcctggagagaggacttttgacattttcccttttctatgcttcatcagccctgagggttgtctttctgtaattcatccaccaaaatggcttactgtggcatttttttttt

SEQ ID NO: 4048 - DNA, 120 bp, synthetic construct
  source 1..120: mol_type = other DNA
gtaatcatgccttgcatggtgccttttccaacatcatgcccctccgtggagctcattagtaaggagcaagtgagattctttttatttatctaatcagtgaattccaaaaactgacaaaca

SEQ ID NO: 4049 - DNA, 120 bp, synthetic construct
  source 1..120: mol_type = other DNA
tttggaattgcctggggaaattttacacaagtccctttgctcacgccccaaatgggttgaatccagatctctaagggtgagcacaggtgggcatgactatttttaacagttcttctagat

SEQ ID NO: 4050 - DNA, 120 bp, synthetic construct
  source 1..120: mol_type = other DNA
aaattgtggtaacagaattgtgattacattttaagagtaaaccagtaaaatctttaacaaagacacaaggagggcccatggatccattatgtacagtagccacagtgcctagggcccaca

SEQ ID NO: 4051 - DNA, 120 bp, synthetic construct
  source 1..120: mol_type = other DNA
atgagcccctgaggttcccagaactgctctcagtcttccctattgagtcaactctgtcttcaaatcctgagaaacccaatatttttacaatcaattccttttggagcttaagctattctg

SEQ ID NO: 4052 - DNA, 120 bp, synthetic construct
  source 1..120: mol_type = other DNA
aacatgacctttacatgagctgctgtacagccagtgtggcttttatctgttgtactttgggaaatcatccatgcctcaggaaccaaaagtccttcaacctagagtaaggcgtttttaata

SEQ ID NO: 4053 - DNA, 120 bp, synthetic construct
  source 1..120: mol_type = other DNA
tctgctgtcagtgccagttcccatgaaactactctgaagatgaaagaaaagataacagaaggccagttataagcacttaaggtgacttctgcttactctaggtttgagttgagaaacata

SEQ ID NO: 4054 - DNA, 120 bp, synthetic construct
  source 1..120: mol_type = other DNA
ttttattttatttcacaagttattttttaaccataagttacagatgctaaaaatataagcccaaagctgaaaagcagctccaagggtgtgacaggccagaggacccaccccacagccctc

SEQ ID NO: 4055 - DNA, 120 bp, synthetic construct
  source 1..120: mol_type = other DNA
taattaaataggcttttgtggattggcctggggacttagccgccgtatataaatgttattcgagtgactgtacagcattgtttccatgcagaaaagccctcggaactcagagcatctgac

SEQ ID NO: 4056 - DNA, 120 bp, synthetic construct
  source 1..120: mol_type = other DNA
tgtttgtaattttatgctagtcacccaggctttgtaaactctgggccctgacaccccagctggacagggcttgcagggtatctggattaagccatacaattctggtaaccacttagctgg

SEQ ID NO: 4057 - DNA, 120 bp, synthetic construct
  source 1..120: mol_type = other DNA
gggtgccggagcccacccccgagacccctgtcttcaacatctgctgatttttgttggcgtttctcttttttgttattttgctttccacactttaaataattaatacaattacttttaaat

SEQ ID NO: 4058 - DNA, 120 bp, synthetic construct
  source 1..120: mol_type = other DNA
tgacagcaatagaaaactaacacatgtcttgaaatgccagccgttttactatttcttacaattctgtgaatagactgggcttacctgggtgattctgctccacatgatgtcagtaaggac

SEQ ID NO: 4059 - DNA, 120 bp, synthetic construct
  source 1..120: mol_type = other DNA
tacacgtctgcattaacctgtgtgacgctggtgtttgtacccaagtgaacctcacccgatggcttccatcctttccaccttcctcaccggcttttgagctccctcaggcatccctgacaa

SEQ ID NO: 4060 - DNA, 120 bp, synthetic construct
  source 1..120: mol_type = other DNA
tgtgcacgtatgtatgtttatctgctcctgcagacactgggctgataaccaactggtacacactgacccagatcagttgctaaagtattgggatacttctgacctggttagtaaatagct

SEQ ID NO: 4061 - DNA, 120 bp, synthetic construct
  source 1..120: mol_type = other DNA
aggaataaatcaggtcatggaggggtcaagaggtcaagcatggatcaaggtcacagaaagatcaaatcagcctcctggctggaataaggggctccttggggggagtctatttgtcctgga

SEQ ID NO: 4062 - DNA, 120 bp, synthetic construct
  source 1..120: mol_type = other DNA
agatgggaagtcattctcttaagggagaggtgggaccaagttctccccaacagcctccacttcctccagggcttcagctctgtcccagggcactgccctcacccctcactcagcccaatc

SEQ ID NO: 4063 - DNA, 120 bp, synthetic construct
  source 1..120: mol_type = other DNA
gaacagatacagctgtgacagttgtgaaaatactgggtagtctgtacatttggtgaagggccacttgcccacaccctacctggtggcccgtctcctgccccagaaactaaaaaggttcac

SEQ ID NO: 4064 - DNA, 120 bp, synthetic construct
  source 1..120: mol_type = other DNA
ggaatcttgaagatcagggatgcagcctctgcttccgagacaccttcagccatcccctactcccctcagtgacaatgggacatacacagaaagtcaagcctacaaggggagttccctagt

SEQ ID NO: 4065 - DNA, 120 bp, synthetic construct
  source 1..120: mol_type = other DNA
ctgcaaagagattagagtcaaaaacctcctctccttccccagccaaaaaattctgatattccccacatctcattctcttttgtctccccacccaaaattggcagaaatccaactcccatc

SEQ ID NO: 4066 - DNA, 120 bp, synthetic construct
  source 1..120: mol_type = other DNA
gagaagagagtcagagacaccaaaacagggagagagatcaggtgggactgaggttaaaggccaggaggtcagaagtcaaggtcatggacacttacatgttcacccttgttccctttggtg

SEQ ID NO: 4067 - DNA, 120 bp, synthetic construct
  source 1..120: mol_type = other DNA
ttcaaaccaggtccaccctatgaaccagacatttggggaagatgagacttcacgaaaagagaagggtgagagctggagagggaagacaggctccaaaagatggaagtggggagtgacatg

SEQ ID NO: 4068 - DNA, 120 bp, synthetic construct
  source 1..120: mol_type = other DNA
actctgccaggagaacgtccctgtgggctttccagacagctctggggttaaagggtctgatggagccccctgagaatgggtagccaggagcatcactcaccacttctcctctttggcctg

SEQ ID NO: 4069 - DNA, 120 bp, synthetic construct
  source 1..120: mol_type = other DNA
ttatgtgcctaattatagcttatctttaagacatatttcaggtagcacctcatccagtaagccattcttgttcagattaggtgcctgtattggtgatcttgtacacagtaccctgccctt

SEQ ID NO: 4070 - DNA, 120 bp, synthetic construct
  source 1..120: mol_type = other DNA
gggaaattgagaagttatgaaaggtagggttcaggaaggggcaaagggggtcaggagaggccacaaaggcagtggccagggagacccgagctctgccaagaactaagtggccttggacaa

SEQ ID NO: 4071 - DNA, 120 bp, synthetic construct
  source 1..120: mol_type = other DNA
tccaactcttcgtgtcagggacttttccctgacttcttatatatcccctctgcccatcagcagctgagagatgccatttacacagacagaagtatgactaatgcatggccatcttcaact

SEQ ID NO: 4072 - DNA, 120 bp, synthetic construct
  source 1..120: mol_type = other DNA
gtggaagaaatggaagtaacaacattgctgtctgggtagggttacggggcacaggaattgagaatgtggcagagccatatgaataatgagacaagggaatcccaaggactttgaggctct

SEQ ID NO: 4073 - DNA, 120 bp, synthetic construct
  source 1..120: mol_type = other DNA
tcactagaggggtcatgtctggacacagacaaaatcccagcagacatttagggttctccctacatccccactctaaaccccctgtcctccaaatcacttagtcacttaccttctctccat

SEQ ID NO: 4074 - DNA, 120 bp, synthetic construct
  source 1..120: mol_type = other DNA
ctgcacttagcccatccattactttcactgagctcctgccaagcctccagcctcccttccctacctatcctcactcccatagaagatctatccccaattacaacacacacccactaatgt

SEQ ID NO: 4075 - DNA, 120 bp, synthetic construct
  source 1..120: mol_type = other DNA
cctgggagagagaagagaggatggccgtaaggaaggacacagccaacagtggcctcggagtgttccccaaaagaagcccctttccagaactatccacaccccacacacaattaaagcatc

SEQ ID NO: 4076 - DNA, 120 bp, synthetic construct
  source 1..120: mol_type = other DNA
ggagtgggaagagaatgcaaaagatggggtgaaagataaggggacatcaagatcttagcatgattttgaaatatcctcttcaacagaataagtgtagattgctctagctctttcctgagt

SEQ ID NO: 4077 - DNA, 120 bp, synthetic construct
  source 1..120: mol_type = other DNA
aaaggttaaaaatcagaggcgacaggaccagcacactcaaccccacttgcttctcctatttccactgcctcagccctgtgaccagcataacttacaggttccaacactgcaggctctcct

SEQ ID NO: 4078 - DNA, 120 bp, synthetic construct
  source 1..120: mol_type = other DNA
aaccttaagaaaccttccacacatttaccccaatacatcataaaagaatctctctaagattgtgggtagatttttatttggggtaagaggagggcatggacccacatgagaacctgataa

SEQ ID NO: 4079 - DNA, 120 bp, synthetic construct
  source 1..120: mol_type = other DNA
tggaagatatgagaacaactaagggacacagaacaaaatgacaaacacttggaagcaagaatgatgccagggccgaagaaaattaaacatggccaacatggctagaaaacaaactggaca

SEQ ID NO: 4080 - DNA, 120 bp, synthetic construct
  source 1..120: mol_type = other DNA
cttttcttttcatgttctaatattataatgatgtgacaagaacttgtagaaccatcaggtccaaaagcatcaacaaccttgtcacttgcagcgtgggctgctgatcagcaacactgacct

SEQ ID NO: 4081 - DNA, 120 bp, synthetic construct
  source 1..120: mol_type = other DNA
acaaggtaagacatttggcaaaggaaggcaggtagtaatcttttcaagcaacatatacatcatatgtgaacagaaaatgacaagtcacagatgggaaatagctcacagccaacagccaag

SEQ ID NO: 4082 - DNA, 120 bp, synthetic construct
  source 1..120: mol_type = other DNA
gcaggaactaagtaaatccccataatctaaacacactgtgcctctccccacggcatgggggaggggaggaaggtgtcctaggagatgattgctgggggtgctgggagaaagggaagaaat

SEQ ID NO: 4083 - DNA, 120 bp, synthetic construct
  source 1..120: mol_type = other DNA
gacacagttccaggaagactggaagaggagacgcagagcagggaacacagctcccagccacaaattcttcataacaactctttttatttttagatgaaaataaaaaggctgatgaatgag

SEQ ID NO: 4084 - DNA, 120 bp, synthetic construct
  source 1..120: mol_type = other DNA
ttttcagttttcaagggatctcataggaccttcataacaaccaggaaagttggcagaacaaggatctttctttctacccatttttcagatacgttccattcagaaaagcccaaaaaggca

SEQ ID NO: 4085 - DNA, 120 bp, synthetic construct
  source 1..120: mol_type = other DNA
taggcatctagttctcctgcagagaacagtagccctgaagatagaaaatagaaatgaaaattcataagaaaaaaaaatgaaggcctagggaataggaagatgacatgctggggccagaag

SEQ ID NO: 4086 - DNA, 120 bp, synthetic construct
  source 1..120: mol_type = other DNA
agggcataaataggggacatttgggatctagaactcagctttccagggctcaaactccctgcaagggaaaggtcacctcaccctcacttgcttctgaacagtacctgaatggatgggaaa

SEQ ID NO: 4087 - DNA, 120 bp, synthetic construct
  source 1..120: mol_type = other DNA
tcaaactccctggaaaacaaaagatcaccttgccctcacttgctcccctatacacatactcttcacaccatcagctccagattggaaaaatcccaaagagagttccagcaaaactttcat

SEQ ID NO: 4088 - DNA, 120 bp, synthetic construct
  source 1..120: mol_type = other DNA
atcttttgtgctgccattctgaccattttctctctaaagcagagaagaattgaatagtcaagttaaatataaatcagccctcagtgtctccagaaatgggctttttccagcctgctgagg

SEQ ID NO: 4089 - DNA, 120 bp, synthetic construct
  source 1..120: mol_type = other DNA
tcaagacaagcatccatccccattcagggtctctaaagtggtcctccacctttcagccctatctgccctcccccagtcacttcaaggacaaagagattcctaccctgatgccaaggaaca

SEQ ID NO: 4090 - DNA, 120 bp, synthetic construct
  source 1..120: mol_type = other DNA
gcgctgcccatcctcatacagtcacctcagtccagaaaacagcgattttaatttgaaagcgattttatgtatgagaggggaaaggagccccaaagagaagggacgcagggcaaaaatcat

SEQ ID NO: 4091 - DNA, 120 bp, synthetic construct
  source 1..120: mol_type = other DNA
cttccttttttttttttttacccctcagggaatgatgattcattcagtcagtgggagccggaagaaactcgttagtgacttatcatcttggaaatttctccatgttgcactcttcctttc

SEQ ID NO: 4092 - DNA, 120 bp, synthetic construct
  source 1..120: mol_type = other DNA
tacagtacttctttgagtctaactgcaagtctctatcctcacaggaaattaaaaatagcagatcggttcctacatctccaccagccccttcaccaccaccaccaccttttttatatttca

SEQ ID NO: 4093 - DNA, 120 bp, synthetic construct
  source 1..120: mol_type = other DNA
aggttgccttggccttgagagacaaaggtaatcctcctcttacctggattaaacagaatgattgccctcaggcagccaagctctgtcttgtccatcctcatgtcacgcattttggacact

SEQ ID NO: 4094 - DNA, 120 bp, synthetic construct
  source 1..120: mol_type = other DNA
tacatatagtcttcctgtgagccccatccaaaccaatccctgtaagtgagtcttctcttctggcattagtgcaaacaattatttatttgggacatgcctatggttctgccagtgggttgt

SEQ ID NO: 4095 - DNA, 120 bp, synthetic construct
  source 1..120: mol_type = other DNA
tgaccaagatatgctctaaagtgtctctcagaatcctaggaatctgacttaagaagataagatggagacacagaagaaggaagggaagccctgaggtcttcagtaaagtctgtaagctta

SEQ ID NO: 4096 - DNA, 120 bp, synthetic construct
  source 1..120: mol_type = other DNA
aataagaaggttgcatggagacaccttcaccatttagtctgtttccaatctccccctagcaaaacttaaagtcctccctgtttgccaaatacagagatagggaaccaggagctgagtgat

SEQ ID NO: 4097 - DNA, 120 bp, synthetic construct
  source 1..120: mol_type = other DNA
gggcttcgggagtctgagggaggggtatgtacaggcacacagacacacaagagacagaagagacaaaaaaagaaaatgagtcttcaaacatccaactagagactttaattctctaatacc

SEQ ID NO: 4098 - DNA, 120 bp, synthetic construct
  source 1..120: mol_type = other DNA
tattcccagcgtaaagccaggtagccagagcgtgcaagggaaagagacaggcaggagagacccctcctaagacgcaggatctgcctgtaaacgcccaaagtcctgaggtttaagaggaat

SEQ ID NO: 4099 - DNA, 120 bp, synthetic construct
  source 1..120: mol_type = other DNA
ccggtgagaattctctgttttttctctaccatcctttccaggccttttcctcacctaatgagtcgtagagacgagggcccagagagtctgtaaagtggctggtgaaagattagtgtccca

SEQ ID NO: 4100 - DNA, 120 bp, synthetic construct
  source 1..120: mol_type = other DNA
tcaaatctaacctatttcgttctttggaggaaaagggttctttctcctttatgatccctgacctttcgatattcccccaaatacacactcattgtgtcagatattccctcatctggtttt

SEQ ID NO: 4101 - DNA, 120 bp, synthetic construct
  source 1..120: mol_type = other DNA
tcctttagctcagtatttcttaaactggtctataaaccatctgaatggtttagtggagtcttacacacacacgcctactcaatcagaaagtctgtggaaaggacctctgatctcttaaga

SEQ ID NO: 4102 - DNA, 120 bp, synthetic construct
  source 1..120: mol_type = other DNA
attccattttcataacattctcgaaatgatgaaatcataaaagtgaaaaacagattactagttgccagaggttgaggcaggaacagtaggcaagtgggtgtggctgtaaaagggccaaaa

SEQ ID NO: 4103 - DNA, 120 bp, synthetic construct
  source 1..120: mol_type = other DNA
aacatcaaacatcaatcgtgtgtcctgatttgggagtgattggggggatggggtgggagagggttagttggtattctcatggcctgattttttttgtttctattccttttatatcactgt

SEQ ID NO: 4104 - DNA, 120 bp, synthetic construct
  source 1..120: mol_type = other DNA
atcatcaacatcagtagcatcgtaggaaaggtcaggttgagttggacgaggtcagccagccaagtggtatagagaggagaacccctccttgagactcctgactcattccacatctctgac

SEQ ID NO: 4105 - DNA, 120 bp, synthetic construct
  source 1..120: mol_type = other DNA
atgaagacaaaaaagggtcacagactcagtcttcaaaaaaatccataaaagaagctttcacccacatgagtatttccttacagattactgaaatgatcccgatgggacacttgggggacc

SEQ ID NO: 4106 - DNA, 120 bp, synthetic construct
  source 1..120: mol_type = other DNA
cattccctacactcaatggggatcgctctgccccttcctcttctctttcctccccatccccttcgtttactctagagtcctcgaagaggcttctgcccacttcccactccagacattctg

SEQ ID NO: 4107 - DNA, 120 bp, synthetic construct
  source 1..120: mol_type = other DNA
acatcgggacctaggtgtgttctcaggactagaaggctaaagcggcagatcttttgcagccttttcccccgggatcctggaatgggggttacggagaagtgaggggggttgatccccaga

SEQ ID NO: 4108 - DNA, 120 bp, synthetic construct
  source 1..120: mol_type = other DNA
aatctgaatttttaacaggcaccctatggggttctaatacaggtagcaccaggactttaaaaaattttgttgaatagtttttcccaaccacagatttgtgccatcttcactcctaggcca

SEQ ID NO: 4109 - DNA, 120 bp, synthetic construct
  source 1..120: mol_type = other DNA
aaaggaaaaatgtagtttaccccatgactttctagaagttagaacagtagagcgattttgagaataagccccggattcatactgctggaagttaaatcacctcctaggccagcatctctc

SEQ ID NO: 4110 - DNA, 120 bp, synthetic construct
  source 1..120: mol_type = other DNA
ataaatattaggtatcgtcattaggatttttcttatctcttaattctctgaagtttaaagtctaagccctttatcctggatgccttctaaccttaaccacttgcttctacagggcccagc

SEQ ID NO: 4111 - DNA, 120 bp, synthetic construct
  source 1..120: mol_type = other DNA
ctggtctaactcatcagcactcttcccctatacatcctctatctctttctatgtcccctctcctttcccatcatccatgtccttttttgccttatcgcttttattattccttttttcttt

SEQ ID NO: 4112 - DNA, 120 bp, synthetic construct
  source 1..120: mol_type = other DNA
ttagcaaatatgtatgaaaataggaaccatctatgaagctggaagagaggataaaaaacagaggtgccaagttagaccccaaactttcccccctaaaacctgagtcgcccaggctgaaat

SEQ ID NO: 4113 - DNA, 120 bp, synthetic construct
  source 1..120: mol_type = other DNA
ccagtcctgggttcttaagacctcagttgactagtatcaggttcaggtgtctccttacagggcaatttttggcatataaattcaaacttgtatattattttccccacgtttacacaaatg

SEQ ID NO: 4114 - DNA, 120 bp, synthetic construct
  source 1..120: mol_type = other DNA
gattgtttataggttggtatactgtgcaaaattaagtataggaccaaaaacagccaagacatttgaaagttggaaagttgatggtaatggtttcctgggattggaaggcagacctcctcc

SEQ ID NO: 4115 - DNA, 120 bp, synthetic construct
  source 1..120: mol_type = other DNA
ttactgggtcaggcaaggtgagagatataaagtatgcaaaagaaaacgttactattttgttgaggaacaagatacatgtggaatagttgacaatgcagaggaacagggtagaggaaggag

SEQ ID NO: 4116 - DNA, 120 bp, synthetic construct
  source 1..120: mol_type = other DNA
gccagcaattgcattttcccaagcccccaagtgcttctgatgttcacacaaggctgaggacactgaagaagatgccccacaaaatgttacggccttgccttatactataaagaatggcaa

SEQ ID NO: 4117 - DNA, 120 bp, synthetic construct
  source 1..120: mol_type = other DNA
aggtccacttcactctagaccaaagtgccaagtcctaagggagctcccaagccaggaacttttctctggagaagaatccatacttctcagggtcttaaaaaattttgttttttatataaa

SEQ ID NO: 4118 - DNA, 120 bp, synthetic construct
  source 1..120: mol_type = other DNA
gttatagggtaagtgagaccttattcttgtattaacttgccccagagtatactctttggaactcggcaatatttctccctatgatgtaccaaggaggttgattactgacacatgctagaa

SEQ ID NO: 4119 - DNA, 120 bp, synthetic construct
  source 1..120: mol_type = other DNA
acctaacactggatactttataaatagtggttgaatagatgcattcatggcaggatctgggcaggaggctagatatttcaggatttcagaggtgatgaattaaggccatgattctccctc

SEQ ID NO: 4120 - DNA, 120 bp, synthetic construct
  source 1..120: mol_type = other DNA
atagtattccatggtgtacgcatactacattttcttttttcttttttttaaggtggtgtcttgctctgtcacccaggctggagagcagtggcacaatctcggctcactgcaacctctgcc

SEQ ID NO: 4121 - DNA, 120 bp, synthetic construct
  source 1..120: mol_type = other DNA
accaactattagaaataacaatttccttgccgggggcaaggagaatacacaaacatcaatatccttacaccacagcaataaacagataaaagatttcattttaggccaggcatcgtggct

SEQ ID NO: 4122 - DNA, 120 bp, synthetic construct
  source 1..120: mol_type = other DNA
ccacacccggccttaaaattcttatggaagagtaaatggccaagaaaaaacaaaacttgaagcagaagaatatgagatcccttgcctaaccatatgtcacaagtttactggttgaaactt

SEQ ID NO: 4123 - DNA, 120 bp, synthetic construct
  source 1..120: mol_type = other DNA
agaatggactaatacagaccctcaaagatatgagacttggctataatggaagtgacataaatcagtgggaaagttcaatggttttgagttaactggctatccaaacaaacacacaaaaaa

SEQ ID NO: 4124 - DNA, 120 bp, synthetic construct
  source 1..120: mol_type = other DNA
atcaaaattccaatgacattttcacagaaatagaaaaaaaatcctaagattcatatggaaccacaaaagacaaggaccaaaatggccaaagcaatcttgaacaaaaggaacaaagctaga

SEQ ID NO: 4125 - DNA, 120 bp, synthetic construct
  source 1..120: mol_type = other DNA
aagtctgggacaacaggaaaaccacaaaagaagaaaaacagctcctgtcttagctgattagccaaccttgcgaccttctaccattgtaacatgctctaccctaactgatcaatcaacttc

SEQ ID NO: 4126 - DNA, 120 bp, synthetic construct
  source 1..120: mol_type = other DNA
agtgcagtggcatgatcttggcttcttgacattggtctgggcaataatttttttggacaaatgagattgcatcaaatgaaagcttctgaacagcaaaggaaacaatcaacagacaaccta

SEQ ID NO: 4127 - DNA, 120 bp, synthetic construct
  source 1..120: mol_type = other DNA
tacacaatggaatactattcagtctttaaaaagaaggaaattctgtcatctgtgacaacatggataaaactagaggatattatgctaaatgaaataaaccaggcacagaaagacaaatac

SEQ ID NO: 4128 - DNA, 120 bp, synthetic construct
  source 1..120: mol_type = other DNA
tttttatttgtcgactataaataaatgcacaagcaataaaggaaaatattgatacatatgaccacgttaaaacatttttaagcttttataagaaatcacataggccgggcgcgatggctc

SEQ ID NO: 4129 - DNA, 120 bp, synthetic construct
  source 1..120: mol_type = other DNA
ttaattttaaagaaaagtgatacaaagcaggcgatgcaaaggtgaggatttgcttaactgggttgctgtgatcatgaaatgagccaatcaatgggacagtgctgaatgaaagttgttgcc

SEQ ID NO: 4130 - DNA, 120 bp, synthetic construct
  source 1..120: mol_type = other DNA
ttgtgtgaagtgctttagaacacttacctggcttagagtaactgctctaggctactgtttttgttgttgatgctgttattatggttgttgttaggtatcacctccagctgcatataaact

SEQ ID NO: 4131 - DNA, 120 bp, synthetic construct
  source 1..120: mol_type = other DNA
cacggcatctggacaaaatataaatgataatgaatacacatcaatattttaaatcaaacacatttagataaagctgactttttgcctgcttttttttgaaattttgggctgggcccagta

SEQ ID NO: 4132 - DNA, 120 bp, synthetic construct
  source 1..120: mol_type = other DNA
agatagttttataaaaattaaactacagttggcattttgtatctgtaggtccacacctatggattcaaccaactgaagaataaaaatatttttaaaatatatatggccagtccgggcgcg

SEQ ID NO: 4133 - DNA, 120 bp, synthetic construct
  source 1..120: mol_type = other DNA
gctatttgagaggtaatatttaacaagctggttaaagtgatttcacttacatgtttccactgcttaaatcctccctacactccaaagcagtacatgcttcagaatccaggcagaggcaca

SEQ ID NO: 4134 - DNA, 120 bp, synthetic construct
  source 1..120: mol_type = other DNA
atcctggaggccaaaaaacgacagtgtttcaagaaagaactggccagcaacgtcagctactagtggcagttcaagtaagaagaaaacgaaacaatggacttaatgacataaagttcattg

SEQ ID NO: 4135 - DNA, 120 bp, synthetic construct
  source 1..120: mol_type = other DNA
atataggaaagcatgtgcttcacacctaagtacctcagcatgcatctcccaaaaataaggagattccataaccacaatacgtaatcacagctaagaaaataatgatcatggccaggcacg

SEQ ID NO: 4136 - DNA, 120 bp, synthetic construct
  source 1..120: mol_type = other DNA
caaaacaggaggtcagtgaatacgagagcatgaccgtgcactaactcgtcggaaaagtagaagtcaactgtgtgcgtatgtgttgagttctcgcttcataaatatgttttaataaaccta

SEQ ID NO: 4137 - DNA, 120 bp, synthetic construct
  source 1..120: mol_type = other DNA
cactaaacaattctgggagcctccttagagttcatgatcatgagtgaggagtgggaaccatttcctgattgtgtgatttcccccaccaccaccaacagttcttggctatcagagtaaaat

SEQ ID NO: 4138 - DNA, 120 bp, synthetic construct
  source 1..120: mol_type = other DNA
agtaggtgggcttgggagtttatgttttcactatgaaatgataaaaacaaggacaggaggcaggctggatttcacccagttagtttcttggaagctgtaaaaagtggcgtttaagaatgt

SEQ ID NO: 4139 - DNA, 120 bp, synthetic construct
  source 1..120: mol_type = other DNA
agataaagaaataaagaaagaaaggcaggcaagaaagtggcttctaaagcagaactggctgcattccaattccagctttgtcatgcactaactgtcctgtctataaccttggcaaggtct

SEQ ID NO: 4140 - DNA, 120 bp, synthetic construct
  source 1..120: mol_type = other DNA
agggactaatgcaaatgtttacaacagtgcgcaaatatttataacagtgcttgggctgtcacctcagacacacttggtggagccttgcaggcccagcagagcagcctctttgattacctg

SEQ ID NO: 4141 - DNA, 120 bp, synthetic construct
  source 1..120: mol_type = other DNA
ttatgaagatgatcaaagaaatcttaaaggagatgcgctttgctgttacttgaagagggaatctgtgggccttccattaaagcttttggatgaaaatgaaattagaggctgtaggccagg

SEQ ID NO: 4142 - DNA, 120 bp, synthetic construct
  source 1..120: mol_type = other DNA
atcctgtggattttaaggatgatgagttggtgctaaatgagctcagagaactttcagtgctcaacattgagaccaatgaggaatgttttgtttgacagactcatggatggtgtggactct

SEQ ID NO: 4143 - DNA, 120 bp, synthetic construct
  source 1..120: mol_type = other DNA
tggggccacagaaaaaagaactgcagaaaactcaggaataaaaatggagacagtgacacttccaagtaaaactactagaagtcttcagaaagtaaggcaagaaaaggaaacttgaggacc

SEQ ID NO: 4144 - DNA, 120 bp, synthetic construct
  source 1..120: mol_type = other DNA
aaaaaaaaaaaagttggttttagaattatttttaaattctccacagacaatacaccttcttattacctgcacctggaacaaccatccccactccctgcccatggtaagctgcagcctgtg

SEQ ID NO: 4145 - DNA, 120 bp, synthetic construct
  source 1..120: mol_type = other DNA
taccctggttgtaagataatacaaaacaggaaatgacagcatcattagagatttaaggtttcttaactttttacgtctaggacaggttttggaagtctggtgaagtctgtggagtgtcag

SEQ ID NO: 4146 - DNA, 120 bp, synthetic construct
  source 1..120: mol_type = other DNA
catgcctgcatgcttccatctgaaccaatgttgaaggctcttctactattcaaagcccctaaggatgtaacatttggagaaaatatgctaaaaagacctggtactcagagacaattttct

SEQ ID NO: 4147 - DNA, 120 bp, synthetic construct
  source 1..120: mol_type = other DNA
tgctaactggttcctgtctgacaatatcggggcatgaatctttgtttcttggtctgtctaaagagcagctattgcttattatttctttcttatatctgctaagagtttggggcacgtatg

SEQ ID NO: 4148 - DNA, 120 bp, synthetic construct
  source 1..120: mol_type = other DNA
tatatatatatatatatattttttttttttttttttttttttttttttgagacagaatcttgctcttttgcccagactggagtgaaatggtgtgatcttggctcactgccaacttctgcc

SEQ ID NO: 4149 - DNA, 120 bp, synthetic construct
  source 1..120: mol_type = other DNA
aggtgggaggattgcttaaatccatgaggtcgaggctgcagtaaactgtgatcatgccactgcattccagcctgggtaactgagcaagactctgtctcaaaaaactaaaaactaggcagg

SEQ ID NO: 4150 - DNA, 120 bp, synthetic construct
  source 1..120: mol_type = other DNA
gagagaaaaaagagtgtcaattaatctaattgatagtcagaggattgcatggctattagtgatggagtcgggatttgggcacgtgtacatttgttggattttgcagcctggcatctatat

SEQ ID NO: 4151 - DNA, 120 bp, synthetic construct
  source 1..120: mol_type = other DNA
actgcttctgaaaacactttgttaacgctagtacgtaacatgaatagctgtgtccattatgtccagggtgaagtcagccaatttcgattctcctctccttaaagttttgtcttgctttct

SEQ ID NO: 4152 - DNA, 120 bp, synthetic construct
  source 1..120: mol_type = other DNA
gaacacgaagtaaacgtttcccagaaagcccagtttaagaaacaattcagggcgaggtgagggcacaaaggtagagaaataaggggaaatgatatttctttaaagaacagagatccctga

SEQ ID NO: 4153 - DNA, 120 bp, synthetic construct
  source 1..120: mol_type = other DNA
aatccacgctctttgtcagagtagccaatgcctctcctgtccaaaatctcatacccttggcccttctcccgtcctcgcgctgaggctggagtcaggtcaaatgtcagaacatctggatgt

SEQ ID NO: 4154 - DNA, 120 bp, synthetic construct
  source 1..120: mol_type = other DNA
ggagaaaggaaatgggataagtgtcatgtcatactaaatatttattttctgcagactgacttcggagtaattcttgagccaggaggggagaggttagtgttcaaattgctgagatcttag

SEQ ID NO: 4155 - DNA, 120 bp, synthetic construct
  source 1..120: mol_type = other DNA
acaaacaaaaaaaaaagaatcaggttagggctcatacagaactttgggcacagctagtaactgaagaccaagggtcacttagatgatgctgagcccagcaaaaagatggggaaaataatt

SEQ ID NO: 4156 - DNA, 120 bp, synthetic construct
  source 1..120: mol_type = other DNA
agaaaaatatcctcaatcctaattttggcccatacagttcccctggttaagatcaaacaatgaactcaaagatcactagacacaaaagaagggcagctaccaagagagtcagcagacaca

SEQ ID NO: 4157 - DNA, 120 bp, synthetic construct
  source 1..120: mol_type = other DNA
ctgaccaagcctttccatctaattacacacttatgagaaatacaccagacagaggaagtttggccacaccatggaatgcagtcagcaaaatctaaactgtacatcattctagatgacaaa

SEQ ID NO: 4158 - DNA, 120 bp, synthetic construct
  source 1..120: mol_type = other DNA
ccagtttctttccttctcatctgagctattattcattgtccataggaaaaaaaattccctaattttggcacggtaggttctgtttattcaccagacttgctaccgtttactcgtcagctc

SEQ ID NO: 4159 - DNA, 120 bp, synthetic construct
  source 1..120: mol_type = other DNA
taaccaaattcaacctattacagttgcctaaatgcagtctcacacacacatatacaaacaataatgtagcagtgtacggtggggcacagggagtagacttgccaaagaaaagttgaacta

SEQ ID NO: 4160 - DNA, 120 bp, synthetic construct
  source 1..120: mol_type = other DNA
tatattcctataggagtactggtctggacttagatgaactttaagctttctataacgcaaaagagaacaccttgatagcagaggagtgaccagaggaaacagtgcactgggctttaacaa

SEQ ID NO: 4161 - DNA, 120 bp, synthetic construct
  source 1..120: mol_type = other DNA
cccacctaaaaatatggcaaacgacttacagtgtctttgtgctgaaaatttaaaaaggttatcaaaagacattaaaagactctcttaaaaattggaggaggaggccaggtggagtggctc

SEQ ID NO: 4162 - DNA, 120 bp, synthetic construct
  source 1..120: mol_type = other DNA
tgggattacaggctttagccactgcacctggccaaaattctacaatattaagaagaaaatgtagcataatatttttctggccttggagtaataaggaatttcattttttttttttttaaa

SEQ ID NO: 4163 - DNA, 120 bp, synthetic construct
  source 1..120: mol_type = other DNA
agactgttactaaaaacaaagacataaaaatgaaggacagataaattcaatcatattaaaattacaaatttctttaatcaaaaagcaacattaaaaaaacaaaggctggacgcggtggct

SEQ ID NO: 4164 - DNA, 120 bp, synthetic construct
  source 1..120: mol_type = other DNA
tcctttgttattactctaatttatttaactaaaggtaaagatcaggtcgccttcaaccatatctattactgaagttatgcaaactcttaggccttccaagagggtttgtggctatcatca

SEQ ID NO: 4165 - DNA, 120 bp, synthetic construct
  source 1..120: mol_type = other DNA
agtgcagtggctgttttgttttttaatgatataaacactcacaaacacaccacacaatccaagtagcagcagcttggcaaaagtcaccatcaaactatgaaatcctactgaaaccatccc

SEQ ID NO: 4166 - DNA, 120 bp, synthetic construct
  source 1..120: mol_type = other DNA
aaaacacaaaaactagcccggcgtggtggcaggcatcagtaatcccaactattcaggaggctgaggcaggagaatcacttgaaccaaggaggcagaggttgcagtgagccaatactgcac

SEQ ID NO: 4167 - DNA, 120 bp, synthetic construct
  source 1..120: mol_type = other DNA
aaactacaatgagatctcatctcactccagtcagaatggcttttatccaaaagacaggcaatagcaatgctggcaaggatgtggagaaaagggaacccttatacactgttggtgggaatg

SEQ ID NO: 4168 - DNA, 120 bp, synthetic construct
  source 1..120: mol_type = other DNA
agacaaagggaaatgtctagtttggggaaagcagtccttcacttcaggatgtccccttcattccacacttattgtactaagctggacactgtgccagactccaagagtaaaacactgaac

SEQ ID NO: 4169 - DNA, 120 bp, synthetic construct
  source 1..120: mol_type = other DNA
ggctttgaagaatgaacaagatttttattagggaacaaaatggaaaccagcattccaggacaagcgtctcaggagaagcaaaagcgcagagttgtgaaagctcttagattttcagaactt

SEQ ID NO: 4170 - DNA, 120 bp, synthetic construct
  source 1..120: mol_type = other DNA
cattcagtttaatggtcaatagctagttgtgggggttggggggcagtggttggagaaaggtgagtcaaaaagcagcactactgcctccggagcaaatgaatgggaataaaggttgatgat

SEQ ID NO: 4171 - DNA, 120 bp, synthetic construct
  source 1..120: mol_type = other DNA
aaacgcatttgtttctttggggatgatgcactggacaggacagaagggagagacgtaaaatggaactgccccctgctttcctgtccaggatctatgtttttggctttttttttgtttttt

SEQ ID NO: 4172 - DNA, 120 bp, synthetic construct
  source 1..120: mol_type = other DNA
ggaagagggcctcaaatggatactgggagaggaggagtaaagaagaaaaacagaagggatggaccccaacactgacttcccatggatatggctggaaaatcagtaaacctgagtaataag

SEQ ID NO: 4173 - DNA, 120 bp, synthetic construct
  source 1..120: mol_type = other DNA
ctccctcccttgcaatcatatgcaaaactatgtgtcaaaataatgtgtgcatctttctggggagggaggctatagctttcatcacattctaaaaggtttcagtcccataggaaaaggtaa

SEQ ID NO: 4174 - DNA, 120 bp, synthetic construct
  source 1..120: mol_type = other DNA
tgcaacccttttgctgtatgagaggaactgggggaagcaacaaatggtaaacataggcagaagggtggtgaatatctctttggtatttctcaagattttcagggaaacccagagagacaa

SEQ ID NO: 4175 - DNA, 120 bp, synthetic construct
  source 1..120: mol_type = other DNA
aggaaataacattaaatatggcagtaataacaaaaaaggctcctgaagtcatcttgaaaatgaccctaacctgtccccatcttgaggctgatgacctaaaaatggcaccagagtccatga

SEQ ID NO: 4176 - DNA, 120 bp, synthetic construct
  source 1..120: mol_type = other DNA
acggtgaaagacagaaagaaaaaatataattggatatccccagtccttcaagtgagaaggagctgcttttactgggagccacaggtactgctttgaaaaattctaagagtctcacgttgt

SEQ ID NO: 4177 - DNA, 120 bp, synthetic construct
  source 1..120: mol_type = other DNA
accccaggctttctagaaatgtcaaaacacatagtgtttacctgcatgccaggtgcaatcttacacatattcatctaatcctaacgacgatgtatacaataggttctatcttcctcacct

SEQ ID NO: 4178 - DNA, 120 bp, synthetic construct
  source 1..120: mol_type = other DNA
tgacaggcttaacctttttgtatgaagttcgtttgccttatcggccttactgtttgatagtttactgtgtctgatttcttcccccgtactttttcaactagtctctagtgatccctgaaa

SEQ ID NO: 4179 - DNA, 120 bp, synthetic construct
  source 1..120: mol_type = other DNA
taatgaattcttggctttctagatacataacgttctttttttttcccttaagtcagaatgtgtagttagttgtggaaatagcctaccagtatgtgtccatgcgtgcagggctaggcctgt

SEQ ID NO: 4180 - DNA, 120 bp, synthetic construct
  source 1..120: mol_type = other DNA
tggctcaaatacatacatactttgttctgactttgtgtgcccttactctttcctcaggtgcacgcttgggctcgttactgctcagaattttagaatcacagatccagcagtgatcaggca

SEQ ID NO: 4181 - DNA, 120 bp, synthetic construct
  source 1..120: mol_type = other DNA
gatctctttcttgcagataggaactgccatttgttttagtttcctggagcctactgtaacaagttcatataaactaagcagaaaattactcttggcgctggaggcacttaagaatcctac

SEQ ID NO: 4182 - DNA, 120 bp, synthetic construct
  source 1..120: mol_type = other DNA
gcacttagtgacaactacatatgctgagcaatgggggaaaaaaaagatactgcctgctttcaaagggttgtctgtaatactaaattctgtgttcatgattcagtcatacccctgaacaaa

SEQ ID NO: 4183 - DNA, 120 bp, synthetic construct
  source 1..120: mol_type = other DNA
tctgttaataaatagtttatatacctatggcttcctgtcctttctgtccattctaatagggaatgttaaagtgctgggtcctttttccatttagagctgccctactcagttgcccacaca

SEQ ID NO: 4184 - DNA, 120 bp, synthetic construct
  source 1..120: mol_type = other DNA
tcccgggcgtggtcggttaagtccccggccgtgacccaggcccggggagctagtctccgcccttcgctcttacggatcccctcggagtacgccgcaccatgcagctcaggctcttccggc

SEQ ID NO: 4185 - DNA, 120 bp, synthetic construct
  source 1..120: mol_type = other DNA
tgtttccttataccagatcctcagtctcactaaagacagcgatatgggagacacccaggggcctggcccgccagcccaaaagatggtcatcgggaagagaaaaagaaaaaaatgctgcag

SEQ ID NO: 4186 - DNA, 120 bp, synthetic construct
  source 1..120: mol_type = other DNA
tagaatggcctcatgcttggcaagggggaggggaacaggtccacaagatgatccagacacattatccaaaaaatcgctttcctctttaataccaacccaccccaggagacagctgtccac

SEQ ID NO: 4187 - DNA, 120 bp, synthetic construct
  source 1..120: mol_type = other DNA
agggagaagcatggagccataaggaagaacctcagtccaacagctccagcccaactaagcccccagttcctggatgtctctggcccaaacttccacccagagttcattcacttcaagccc

SEQ ID NO: 4188 - DNA, 120 bp, synthetic construct
  source 1..120: mol_type = other DNA
agtggtcagaaaggcttcatgggaaaggtgggatttgagccattctagataattctcaaaaaattacaggaagtagatacacagcaggttcaaatgcattaacaccagagtgttgagact

SEQ ID NO: 4189 - DNA, 120 bp, synthetic construct
  source 1..120: mol_type = other DNA
aagaccagcccagtgccaaatgggagtctactgtactactagtaagcagcagttcggctttgagaagtcaacgcaatccaatcataatacaagctaccagaacacctcttaagaaagatg

SEQ ID NO: 4190 - DNA, 120 bp, synthetic construct
  source 1..120: mol_type = other DNA
gtgacaggaaaattctgggagatgagagcaggtcaagagaaactttaggaggcggtgacctatccagtgatggacacattgagtctgggatgacagaggataactgtgtagaaactaatg

SEQ ID NO: 4191 - DNA, 120 bp, synthetic construct
  source 1..120: mol_type = other DNA
gttttgttttcaccctcctagtttaccgtgcaggattgcaaacaccagagagaaaatcagtctctggaatgatgcctttgatggaccaagatgcagctgatgaagcattgaaccaattag

SEQ ID NO: 4192 - DNA, 120 bp, synthetic construct
  source 1..120: mol_type = other DNA
atgacaatgatgaacacagcgctccctattttgctaagcgctgtgctaaactatatgccttaactcatcttaatgtctacaacagcttatatgagggctttaaaccaaggcttggtaaac

SEQ ID NO: 4193 - DNA, 120 bp, synthetic construct
  source 1..120: mol_type = other DNA
gtgacacagtcgtaagtgcttcacagcatttcaagcacctcacatatcacctatcattacctgtgtgaaaagatgttttcaaagatgaaatacttgcaatctctacagatcagcatgaac

SEQ ID NO: 4194 - DNA, 120 bp, synthetic construct
  source 1..120: mol_type = other DNA
agaaaaagtttgtggacccttgaaatggacactcatatttccattttcggggtcaggaaactgtggcacacagaggttatgaaatatgcctatacttgcaaggcccatccgtggtaacac

SEQ ID NO: 4195 - DNA, 120 bp, synthetic construct
  source 1..120: mol_type = other DNA
aagggaaataaaagggtaactttaagggactcatgaagtacaaatatagaagaaaagcaagtcaggatggtcagagtcaaaactaagccaggtactgaccattgctgtgtccgagatgga

SEQ ID NO: 4196 - DNA, 120 bp, synthetic construct
  source 1..120: mol_type = other DNA
gcatatctttgctgtgtcttccccatcctccccttccagaaacctgaaagcaagggttaggatggcagtaaagcttcccaatatgaagcaagtataccaacataaaaacgagaaaagaca

SEQ ID NO: 4197 - DNA, 120 bp, synthetic construct
  source 1..120: mol_type = other DNA
tttctttttctggattagtttccccatcttgcctaaaaatgtcctagtctagtctttttagcagaactccactccctaaacatgtcagaactacacttcccatcaagggtcagaaagaaa

SEQ ID NO: 4198 - DNA, 120 bp, synthetic construct
  source 1..120: mol_type = other DNA
ataggtggcacatttgatgtttctaaattgcctttcctctcatccccagacttaagtaaatccatgtcggggaggcagaaacttgaagcacaactaacagaaaataatatcgtgaaagag

SEQ ID NO: 4199 - DNA, 120 bp, synthetic construct
  source 1..120: mol_type = other DNA
ccaagtttatatgttgtccataaagttgttctgccatttccttgtcctaaaattgttttatacacatttgcagcaagggaccagtggtagagaggttactggagagaaactgttctgagg

SEQ ID NO: 4200 - DNA, 120 bp, synthetic construct
  source 1..120: mol_type = other DNA
gagaccaaaagagcaatcaatcagccatgatttcccatccttctaccctcagccactgaacccaaccacaaaatgttacttgtgtccaaggctttaaaatgaacaggaaaacccaatatg

SEQ ID NO: 4201 - DNA, 120 bp, synthetic construct
  source 1..120: mol_type = other DNA
tgctttccaaggcagagtctagtgacgagacagatggccacttcatgtgctaggaacaaacaacatgggactggcatgaaggcagggaggtttaaggaagaaacatttacagagtgaggg

SEQ ID NO: 4202 - DNA, 120 bp, synthetic construct
  source 1..120: mol_type = other DNA
tccagcgctagttaactttctttattatgatcttatttgtcataattttttgcacaatgcgtttttattttaggactcagtcaaaattttgggccaaggagaccgacgcgctgtcgcctg

SEQ ID NO: 4203 - DNA, 120 bp, synthetic construct
  source 1..120: mol_type = other DNA
gataaggaacttgtccaaggtctcagtatttgtttatttaacaaactctagcaatagagcaggagcccatcacaaaacctagatgtgcttacgtttcaggcacgttctaagcacttgaca

SEQ ID NO: 4204 - DNA, 120 bp, synthetic construct
  source 1..120: mol_type = other DNA
ctcccaggcactgagaggggatcaaattgagaaaaagttcctgcagggtagaggtcagaggttaaagttcatagtcaagtgaggtcagccttccaatatcagggatctgaggatctcagg

SEQ ID NO: 4205 - DNA, 120 bp, synthetic construct
  source 1..120: mol_type = other DNA
cactctgttgtcctctctagttcgtcggtaggatgagattcaagggcttccagcctgagggggagaagaggatctatctgtccatttttcccaaaccctcagtggctttgactattttgg

SEQ ID NO: 4206 - DNA, 120 bp, synthetic construct
  source 1..120: mol_type = other DNA
gaaagtcagccagaggaaggaaaactgggaatgaagagtcagaggtgagaagctaaagtcatgatctcaccaagggatcaagaggtcgatattggcggcttgtgacggtaaacacggcac

SEQ ID NO: 4207 - DNA, 120 bp, synthetic construct
  source 1..120: mol_type = other DNA
taactgaggcaaggaggaggagatgtagggacccagagacaagagaaaagtggagacttcagaaatacatacgccccctacctcccaccacccgcgtctcacctcttcttcttcctcctc

SEQ ID NO: 4208 - DNA, 120 bp, synthetic construct
  source 1..120: mol_type = other DNA
gtcactggaagggaccagaggtgattggaatattcattgagcttggaaaggggttggaatgagagaaccgtttggaagcactggaatacagctttattcctacacgattagacccgttac

SEQ ID NO: 4209 - DNA, 120 bp, synthetic construct
  source 1..120: mol_type = other DNA
ggatttggccctagagtacgggttctccaaatgtaacctcggccctacagatctctgagactatgtcagggggtttgtgagattttataacaaaattaagatgttagtacaatatcgtgt

SEQ ID NO: 4210 - DNA, 120 bp, synthetic construct
  source 1..120: mol_type = other DNA
tgatttttaagaggtcctgagagaaaaaaattttgagaaccactgtcctagagctccaagaaggtgaatgccataagatgtgtgttttttaaaaaagcatttctcgggcctggtgtggtg

SEQ ID NO: 4211 - DNA, 120 bp, synthetic construct
  source 1..120: mol_type = other DNA
cagagcctcactctgttgcccaggctggagtgcagtggtgcgatctcggctcactgcaacctccacctcccaggttcaagcaattctcctgcctcagcctcctgagtagctgagattaca

SEQ ID NO: 4212 - DNA, 120 bp, synthetic construct
  source 1..120: mol_type = other DNA
tggacagcactgcctaagtaactttttaaaatccctacacccaaggaaacatatagattaagtagcatgctcaaagagtcctacagttaggatatagtgccaggttttaacccagatcag

SEQ ID NO: 4213 - DNA, 120 bp, synthetic construct
  source 1..120: mol_type = other DNA
ctgccaagtacttttcattctcactagggactgtttttaggagaatccctttccaaatgttcagtatgaatggttcttacgtatcaatcccattctcctcttcgacttctgtttaccacg

SEQ ID NO: 4214 - DNA, 120 bp, synthetic construct
  source 1..120: mol_type = other DNA
ttcctcagaactaaagaaggttaggtttcttctcctgaaatagggaacccactgtctctccattggtgcgtcacagaaatacccatgtcaaagcccctcaaatttccaggaaacttctag

SEQ ID NO: 4215 - DNA, 120 bp, synthetic construct
  source 1..120: mol_type = other DNA
aggagaaaaaaatagagaaatgcagttattggggagggctaaactgcagtttacccacccctcagaggacaccttttctgatactcaccatttcctagccctccctgcaaactccttttg

SEQ ID NO: 4216 - DNA, 120 bp, synthetic construct
  source 1..120: mol_type = other DNA
aactattgagcactgaagatgttcaaggtatcctggtagaagacagaatggtgaacaagacaagcagtccctgctctcaaattgcctatagtccaatgacagacaagcaaattgtcaaaa

SEQ ID NO: 4217 - DNA, 120 bp, synthetic construct
  source 1..120: mol_type = other DNA
cttgggcaaattatttaactggtttgtgtcctatatttatccatatgcaatacagggataatattaaaacctacaacctatggttgttgagaggaataagtgagattatgcatataaagt

SEQ ID NO: 4218 - DNA, 120 bp, synthetic construct
  source 1..120: mol_type = other DNA
tacataataaaaacaggctttttagaataacacgccctccaaaagaacttctgatggttcgctctcacctacagaacaaagcccagctttcaaggtatttgaacattcagcccctaaccc

SEQ ID NO: 4219 - DNA, 120 bp, synthetic construct
  source 1..120: mol_type = other DNA
taatcctagcttctgaggcctataaggttaaactgttctcatcttcatggaattgttcagtagagtaaaaacagtatgcaatttcacttagtttgtcaaaatccagaaacatacttttga

SEQ ID NO: 4220 - DNA, 120 bp, synthetic construct
  source 1..120: mol_type = other DNA
aattagctgggcctggtggtgggcgcctgtagtctcagctacttgggaggctgagacaggagaattacttgaactcaggaggcagaagttgaaatgagcagagatcacaccattgcactc

SEQ ID NO: 4221 - DNA, 120 bp, synthetic construct
  source 1..120: mol_type = other DNA
ataaaataaaaataaataaatagcacagcaccttgctttgaccccagttgtttgtgaaatacagacaatcttaccacccgggcacttccagggctccctgtctgcatgtccttcactttc

SEQ ID NO: 4222 - DNA, 120 bp, synthetic construct
  source 1..120: mol_type = other DNA
caacaagaaaagcagctgggaaatagtatccacattttacagttggaaaaacaaactcagaaagcaaagaccattctcatcatcacctcggtggagccagtagccctaggaaatattcca

SEQ ID NO: 4223 - DNA, 120 bp, synthetic construct
  source 1..120: mol_type = other DNA
gttttttttttttaactgggtgagggctagaaggagcggtagagattgattcattctagccaaaccacctctcttaacaaaaaaaggaaactgaaccccgattggcgaaatgtcttgctc

SEQ ID NO: 4224 - DNA, 120 bp, synthetic construct
  source 1..120: mol_type = other DNA
ctaaaatctggttggacaacagccacctggatacccaaatgaggtacaggatatgactgaatattatcaatggcctatcttagaagacaatttttaaaatactgctggctaggggtgatg

SEQ ID NO: 4225 - DNA, 120 bp, synthetic construct
  source 1..120: mol_type = other DNA
gtggggttctcatgggggttcacaaggattagataagttattgccctaatatggggcaaactctactaaaaaggagatagctttctatgtgtagattttgaatgatgttccagatttaag

SEQ ID NO: 4226 - DNA, 120 bp, synthetic construct
  source 1..120: mol_type = other DNA
ctatctgtgccgcgtccccagcaaacacacgggttatcgggaagccaagtaaatgaccaataaatattttaatcactgttaaaaaaaataaaaaccttgtactcctacgacttactccct

SEQ ID NO: 4227 - DNA, 120 bp, synthetic construct
  source 1..120: mol_type = other DNA
actcgtagggcttgagacctgtgtgcgtcttcatgtgctcagtcagatggtgcttcatcttgaactttttgttgcacacggggcagtcaaacggccgcagattgaggtgcatgttcacgt

SEQ ID NO: 4228 - DNA, 120 bp, synthetic construct
  source 1..120: mol_type = other DNA
tgcagcagtagtgatggtggtggtagctgaggcccggccttctcggagtagttcagtgcacttgtccacaatgtgccacatttggagcacagaccccactgtaaggaagttgacaatgtc

SEQ ID NO: 4229 - DNA, 120 bp, synthetic construct
  source 1..120: mol_type = other DNA
gtctctgggaagaaaaagagaaaagaataatgataacatctcataacgacacagcccgttacaactcaaaaatatgttcacgctcattatctgtgtaactccccacaacagtgaggtagg

SEQ ID NO: 4230 - DNA, 120 bp, synthetic construct
  source 1..120: mol_type = other DNA
taccccggggatactgggctaaccctgagcaaggggacagctaatgccaatctgtaacagtagaaggacaagaaaaagacagtgatacagtaagaaaagaactttattgtttattaatgt

SEQ ID NO: 4231 - DNA, 120 bp, synthetic construct
  source 1..120: mol_type = other DNA
aggaagccaagggggaaggtgggctgggcagggtacatatctttttcccattcttctcatgcactgacctttgcctttccacatagctagaaacagaaacataaatatgtggaggggtac

SEQ ID NO: 4232 - DNA, 120 bp, synthetic construct
  source 1..120: mol_type = other DNA
tcaacgcctacgtgggaagacataaagtcagagcactcagcccttgaagggactagaagagtaaaaaccctagaaaggactagagagatgccccatccgcctcatacctgacatataagg

SEQ ID NO: 4233 - DNA, 120 bp, synthetic construct
  source 1..120: mol_type = other DNA
ttatagaggaatgggaccacctcagggtggtctgctgtctgcatcttacaaagttcaaggaactagaaggttcaggggaagaaggaaggggaagagagacaagggagggggttgagagaa

SEQ ID NO: 4234 - DNA, 120 bp, synthetic construct
  source 1..120: mol_type = other DNA
tagccccatcccttcacctcacacattttctgaactccttgggtttcagtaacatccagccctgaccaacactgtcttcaccacctgatttcaataaccattagttctatatgctttttg

SEQ ID NO: 4235 - DNA, 120 bp, synthetic construct
  source 1..120: mol_type = other DNA
atcgttataacacatgcgtacaaatgagcacaacgcgccataaaagtgttattgttattactattgttgctgatttgcttttcaagcttcaccacagaactaatgaccagccagaccgtt

SEQ ID NO: 4236 - DNA, 120 bp, synthetic construct
  source 1..120: mol_type = other DNA
ccttagatctaactattaatttttaggacatgcaggggcagaggaatgtgttaaatactaccaaaggtgtgcaataattaaaatccaaactgtgaaactctgcagcaccagcaacctagt

SEQ ID NO: 4237 - DNA, 120 bp, synthetic construct
  source 1..120: mol_type = other DNA
ccccctcaaaagtatagttctcaaccatgaaatctcctgggggtaatcttacctgtttaaaataaagggaaatgtaccctgtttctttcaccaaggcaccatgaataccaccttttcttt

SEQ ID NO: 4238 - DNA, 120 bp, synthetic construct
  source 1..120: mol_type = other DNA
aaaaaaaaaaaaggttttttatagcgacagggtcttactgtgttgcccagatggatcttgagctccttgcctcaagcaatcttcccacctcagcgtctcaaagtgctgggattatgggcg

SEQ ID NO: 4239 - DNA, 120 bp, synthetic construct
  source 1..120: mol_type = other DNA
tggtcaataaaggactttcaagtataaaagcataaagtttgtggggaagtggagtagtagtaggagctcaaggaaaaaagaggtgatgaaagaaaaaaggaatgattcccaactggtaag

SEQ ID NO: 4240 - DNA, 120 bp, synthetic construct
  source 1..120: mol_type = other DNA
agatggtgccactgcactccagcctgggtgacagagcaagactctgtctcaaaaaataaataaataaaataaaatgtggccagctgtggctcaccgcctataatcctagcactttgggaa

SEQ ID NO: 4241 - DNA, 120 bp, synthetic construct
  source 1..120: mol_type = other DNA
atgatgaaaatttttagatacctacttaaagatatatgaaggagtatatacttcttcaaaattatttccctgagtataggtgcagaatttaagactgctgccctggccgggcgcagtggc

SEQ ID NO: 4242 - DNA, 120 bp, synthetic construct
  source 1..120: mol_type = other DNA
gtcctgaccttaattcccacacctaagagaaaagagaaaggaccctatgagccttcagatcaattatttaaacatccagtgtgatgtgaaaggtctggactaaatgatccatgaactcta

SEQ ID NO: 4243 - DNA, 120 bp, synthetic construct
  source 1..120: mol_type = other DNA
aaaaataaaaaaagaagatgttttattgaccctgttccccaggcattggcctgaaggttgggtaatgaaattgaagcccatctggaaacaagggattcgcccaagtgaggctgagggagg

SEQ ID NO: 4244 - DNA, 120 bp, synthetic construct
  source 1..120: mol_type = other DNA
ttgatctccccagctcaagcaatcctcccatcttagcctcctgagtagttgggaccacaggtgtgtgtcaccacgcctggctcatttttgaattttgtagagacagggtctttctatgtt

SEQ ID NO: 4245 - DNA, 120 bp, synthetic construct
  source 1..120: mol_type = other DNA
ttgtcttttgctgcagctgcaaaggagtctcgaaaaagtgaaaaaaccctggactagaatttaaactgatcacttagttgtgtgaagctgtggacaagtcacatgacctttctttagtgt

SEQ ID NO: 4246 - DNA, 120 bp, synthetic construct
  source 1..120: mol_type = other DNA
aaaaaaaaaggtgaagaattcatttgttcgcatgttctcacttacaagtgatgatgagaatacacggacacacggtgggaaacaacacaactgggtcctgtctgggggagtgggggaagg

SEQ ID NO: 4247 - DNA, 120 bp, synthetic construct
  source 1..120: mol_type = other DNA
taagcagagggaatgggtggggatacagatgaaacaagattaaccctgacgtaataattgttgaagctgaatgatgtgtacatggagttcatttttctattgccttaactcttgcatggg

SEQ ID NO: 4248 - DNA, 120 bp, synthetic construct
  source 1..120: mol_type = other DNA
gcgacagagcgagactctgtttcagaaaaaaaaaaaaaaaaaaatacaaaatgttagccgggcgtggtcgtgggtgcctgtaatcccagctactcaatcgggaggctgaggcaggaaaat

SEQ ID NO: 4249 - DNA, 120 bp, synthetic construct
  source 1..120: mol_type = other DNA
atacttggcctatctgtcctttctagtccaggatcacatactgcatttgactgtcacatatctatctgtagtctccttcaatctgggaagttctcagtctttccttgtctctcatgaatt

SEQ ID NO: 4250 - DNA, 120 bp, synthetic construct
  source 1..120: mol_type = other DNA
aattgagcaccagatcttcagtaacagatacacccatatattccttccaaatttattcttttaacatttatgatatgtggggccttctgaaatgtggggctccaggcaggatctcctctt

SEQ ID NO: 4251 - DNA, 120 bp, synthetic construct
  source 1..120: mol_type = other DNA
ctgggcacggtggctcacgcctgtaattctagcactttgggaggccgaggcaggcggatcacgaggtcaagggatcgagaccagcctggccaacatggtgaaaccccatctctactaaaa

SEQ ID NO: 4252 - DNA, 120 bp, synthetic construct
  source 1..120: mol_type = other DNA
ctggccacaaaataaataaggaaataaataaatatatatatgtaaaatatatatatgtaatatatgtaaaatatatatgttatatatgtaaatatatatatatatacacacatatagttt

SEQ ID NO: 4253 - DNA, 120 bp, synthetic construct
  source 1..120: mol_type = other DNA
catcgagttcacatgcatcctgaaacatggagcaaaagacaaagacgactgaaaagaactttagctaaaaccttccaactacattgtcttactctgttttatttctcagacacttccccc

SEQ ID NO: 4254 - DNA, 120 bp, synthetic construct
  source 1..120: mol_type = other DNA
ggaaaacttcatataaactataataaatttccacactgatgagagaaaatgagtatcagaagaagaagaagagttgtaagatcaacaggatatgagaaatgaaaacttgagccaggtgca

SEQ ID NO: 4255 - DNA, 120 bp, synthetic construct
  source 1..120: mol_type = other DNA
cacttgaggttaggaattcgagaccagcctgaccaacatgatgaaaccccgtccctactaaaaatacaaaaaaattagctgggtgtggtggtgcatgcctgtaatcccagttactcgtga

SEQ ID NO: 4256 - DNA, 120 bp, synthetic construct
  source 1..120: mol_type = other DNA
actctgtcacgaagcctgcagtgcagtgacgagatcttggctcactgcaatctctgcatctcaggttcaaatgattctctgcctcagcctcccaagtagctgggatttactggcatttgc

SEQ ID NO: 4257 - DNA, 120 bp, synthetic construct
  source 1..120: mol_type = other DNA
gagccaccacgcccagcctctttttttttttttttttttaaatttaatttaatggagatgagttctctcaatatgttacccagagtagtctcaaattcttgggctcaagtgatccaccta

SEQ ID NO: 4258 - DNA, 120 bp, synthetic construct
  source 1..120: mol_type = other DNA
ttcctaaatagcctctgacagactctcctcgttttagtctattcattctcatttccaggggtacatggtgccaccaattcttgagtcgcttaaagattctatgatgtaaaataaatgtct

SEQ ID NO: 4259 - DNA, 120 bp, synthetic construct
  source 1..120: mol_type = other DNA
ctacagagtataagtgagagatattcagctactgggagtttataaaagacacacaaacatcgcacaagagcaaaagtcaatttgaacatccaccacagccagaggaaaccaaaaccactt

SEQ ID NO: 4260 - DNA, 120 bp, synthetic construct
  source 1..120: mol_type = other DNA
agagaaaaaacgtaattcagaatgatgcttggaggatttttttttttgttccaaggattgagcaggtatgctctgtggcctgcctgagttatctttcatgggcaatggaagaactagccc

SEQ ID NO: 4261 - DNA, 120 bp, synthetic construct
  source 1..120: mol_type = other DNA
ttaatcaatatggaggctaccaactccacattaccttcttttcaaaggcctatttcctttgcctccataactgttgtgggtattcatggccaggcttctaaacctcttaaaactccccaa

SEQ ID NO: 4262 - DNA, 120 bp, synthetic construct
  source 1..120: mol_type = other DNA
tttcttcctcacatctaacacgtatactttctgctccccggctccttcagctgtactcattctttgttgagtctcccacagttaccattgttcctggccaggacttcaatccagcctccc

SEQ ID NO: 4263 - DNA, 120 bp, synthetic construct
  source 1..120: mol_type = other DNA
aagctcagggatttgcccctgcccaggactggcaaattgactttactcacatgccccaagtcaggaaactaaaatacctcttggtctgggtagacactttcactggatgggtagaggcct

SEQ ID NO: 4264 - DNA, 120 bp, synthetic construct
  source 1..120: mol_type = other DNA
tcctttaacagccctcacctttaccttcctaaagaacttctttactttctagacaggtccagcaagacttccccagacatttcacttcagcaagctgccgccctcctccacacttactta

SEQ ID NO: 4265 - DNA, 120 bp, synthetic construct
  source 1..120: mol_type = other DNA
agcatcacacacatatcacaaactttatcagtccttcaggcccaagttgactctttagctgcagttgtcctccaaaaccaccgaggccttgacttactcactgctgaaaaaggaggactc

SEQ ID NO: 4266 - DNA, 120 bp, synthetic construct
  source 1..120: mol_type = other DNA
attaatataaggagataggaatgtcaggcctctgagcccaagttaagccatcatatcccctgtgacctgcaggtatacatccagatggcctgaagcaattaaagatccacaaaagaagtg

SEQ ID NO: 4267 - DNA, 120 bp, synthetic construct
  source 1..120: mol_type = other DNA
aggatatagcagagagagagcttggcgtgagttattactccaggctgtagaatcctggaaaagagctaccatgcagcccacacctggtcgactggaggaccaccttagtggaaaggggac

SEQ ID NO: 4268 - DNA, 120 bp, synthetic construct
  source 1..120: mol_type = other DNA
ttttgttttaaatgtggggacatcagcagtggactttatagtccttggtgccttcttactgagaaatttcctttagcacttatttttattagtttttttagaccaaagaacgccaaacac

SEQ ID NO: 4269 - DNA, 120 bp, synthetic construct
  source 1..120: mol_type = other DNA
tctgttccagttgagtatctcctaaatgtacagatgtcctgtagcttctacttgtggattgtaattctattctgggatagttgcagaacaagattaacccactgttcataaagtagtcct

SEQ ID NO: 4270 - DNA, 120 bp, synthetic construct
  source 1..120: mol_type = other DNA
ggttcaaggaattctcctgtctcagcctcccaagtagctgggattacaggcatgcaccaccacacccagctaattttggatttttagcagagatgggggtttctccatgttggtcaggct

SEQ ID NO: 4271 - DNA, 120 bp, synthetic construct
  source 1..120: mol_type = other DNA
gggtctgatcaccccaaaaggttgatggccttttttttttttcctgcattgctgagagcttgggttattccttgcactgggtaggtcttgatttttcacgcctgaggccgccacaatagg

SEQ ID NO: 4272 - DNA, 120 bp, synthetic construct
  source 1..120: mol_type = other DNA
ttagaactcatatctaataccctggaatataagaggaagttgcatgctgcctcctcggttttatcccaggtagctctagctttcttgctgcccacagaggcctggagcaggagagatgct

SEQ ID NO: 4273 - DNA, 120 bp, synthetic construct
  source 1..120: mol_type = other DNA
aattaaaataaaataaaaactcccacaaggaagaaagtagtcatctttatagagtcctctccatgtagtgttagcacaatcgctcaagaggcacccaatgtagagaaacgacggtgaggt

SEQ ID NO: 4274 - DNA, 120 bp, synthetic construct
  source 1..120: mol_type = other DNA
aatgtacacaaaagtacatcacatatcgcttagcatgtggctgagactcagaaaaaatcctggctttgttttcctgcattgggagtttattgttgtcaaagtgatggttccaagaagtca

SEQ ID NO: 4275 - DNA, 120 bp, synthetic construct
  source 1..120: mol_type = other DNA
ccatgaattctcatgtgtgcatacacacattcaaaggactagataaagattctccagactttgcaatagggaagtcaggtggaagcagggagctagaatggataatgtatgaagaaacta

SEQ ID NO: 4276 - DNA, 120 bp, synthetic construct
  source 1..120: mol_type = other DNA
aagccaaactacaaaagcacattgaaagcatctgcttgcatcgtgtcctctgacattctgttggcacaagcaagtcacacagcaaaggggatggatgtacacttaaataataaggaggaa

SEQ ID NO: 4277 - DNA, 120 bp, synthetic construct
  source 1..120: mol_type = other DNA
tcctaccttccaagcttgcgtgaggctgaagtgtcttatgtacttgtagtttattcaaaggataaagtggtaaaatgccctcatagtgaaaaagtgaaaggtctgtgcatggcagtaaaa

SEQ ID NO: 4278 - DNA, 120 bp, synthetic construct
  source 1..120: mol_type = other DNA
ttaaagttctatttgccagaatattcagggttattgacattcaagggaactgactgacgctagccaaagtcacacgagactgataggtaagctagaatacctgggacattgatttttcca

SEQ ID NO: 4279 - DNA, 120 bp, synthetic construct
  source 1..120: mol_type = other DNA
ggagagaaagcaaagccctttctaacaatgtgaagtttatgatgagaactggagaatgagtagaaattagccccgtaaaagaatgggggcgaagaggcttactgttttatacaaattgct

SEQ ID NO: 4280 - DNA, 120 bp, synthetic construct
  source 1..120: mol_type = other DNA
aaaatactgactactgaggtctgagaaacagtcactggagagagggatttcctactcccatcaagttcatgggtactccatacttgatgttttcttttcttatgtccagtaagatttgag

SEQ ID NO: 4281 - DNA, 120 bp, synthetic construct
  source 1..120: mol_type = other DNA
tagacaaagacagtgaaagaaaggaaagctataggctaatctcactgacaaacatacctggaaaaatcctaaataaaagttttgcaaatgaaaccaagctgtgtgtgtgagcatgtgtgt

SEQ ID NO: 4282 - DNA, 120 bp, synthetic construct
  source 1..120: mol_type = other DNA
aagatggtgccatgcttacttgctgagtcccccatgagctggggtactgcactggggccagcgactagttagacaggaggcagcagcttctcaagaaattccttcacagctgccatctcc

SEQ ID NO: 4283 - DNA, 120 bp, synthetic construct
  source 1..120: mol_type = other DNA
ctccaagtccatgtaaaaaaataaccacggccgtttcccgctcagctccagacacggtggcagcatcgttgagcaggggcacagacatggtgttaccacacatacaccacacggctccat

SEQ ID NO: 4284 - DNA, 120 bp, synthetic construct
  source 1..120: mol_type = other DNA
agcttgaactgaactcaactttgatttgtagagataactgggcattttaaagcaagaatgaaagaacagagagggtgagtggggactcaatgacgtcagagaagtgacagattacaaaaa

SEQ ID NO: 4285 - DNA, 120 bp, synthetic construct
  source 1..120: mol_type = other DNA
aaaagccatgccatagcagactacatcatatataggtatataaccaataaagaattactgtctagaatttacaaagaactccacaaatcgatatgaaaaagacaaccaacccaagagaaa

SEQ ID NO: 4286 - DNA, 120 bp, synthetic construct
  source 1..120: mol_type = other DNA
aaaaaccactgtggagaccatttggcaatatctagtagagttgataatacaactctacttatgagcttatacccagcctctcccacatttgctcaagaaggcatgcagaagtatgttcat

SEQ ID NO: 4287 - DNA, 120 bp, synthetic construct
  source 1..120: mol_type = other DNA
gtgaaaccccgtctctactaaaaatacaaaaaaaaaattagctgtgtgatggctgacgccggtagtcccagctacttgggaggctgaggcagaagaatggcatgaacccaggaggcggag

SEQ ID NO: 4288 - DNA, 120 bp, synthetic construct
  source 1..120: mol_type = other DNA
tcaaaccaaaaccaaaccatcatgtcctatatgataaatatgtaaaatttatctgtcagtttaaaaataataggctgggcacattggctcatgcctgtaatcccagcactttggaaggcc

SEQ ID NO: 4289 - DNA, 120 bp, synthetic construct
  source 1..120: mol_type = other DNA
gcgccaagcctcttcctcccaaaagctcaccctatgcatcttttaaatccagctattcatctatatctttaaaacgtcctgcataattaagtgataaacgtgtttccctgagttctgtta

SEQ ID NO: 4290 - DNA, 120 bp, synthetic construct
  source 1..120: mol_type = other DNA
aactcctgttgattaaaacctgccttgtggagagtcatttgttatttgccaggcaaacaaaccctgttttttttcaggtaacaagagtatggtggaagaaaacagtttaggtcaggcaca

SEQ ID NO: 4291 - DNA, 120 bp, synthetic construct
  source 1..120: mol_type = other DNA
acatggggtttctcaccagaatgaatttgctcatggagaattagatctgagtgccaactgaagtttttgccacacctggcacattcatggagtttctgtgctataagaactttattacat

SEQ ID NO: 4292 - DNA, 120 bp, synthetic construct
  source 1..120: mol_type = other DNA
gccaggatggtaaataagctcctgaaccctgttgtggattggttaatcactctgtggttctctctgtgtacacattaatccatttatatgcctcttctccaatgcacctttttttttttt

SEQ ID NO: 4293 - DNA, 120 bp, synthetic construct
  source 1..120: mol_type = other DNA
ccagatgggcagactgggcagatgcttatactgattagctagatttagctaatgggcagagccgtcacaatgcactggttgaaatggtgcaaaaaaataatgtaaggctttttttttttt

SEQ ID NO: 4294 - DNA, 120 bp, synthetic construct
  source 1..120: mol_type = other DNA
gcctcctgagtagctgggattacaggcacatgccaccacgcccagctactttttgtatttttagtagagataggggttcatgatattggtcaggctggtctcgaactcctgacctcaggt

SEQ ID NO: 4295 - DNA, 120 bp, synthetic construct
  source 1..120: mol_type = other DNA
aaagcaagtttattagagaagttaagaaacgaaagaaggttactccaaaggcagtgcagccctgagggctgctgtttgcccattgttaagttatttcttgattatatgctaaacaagagg

SEQ ID NO: 4296 - DNA, 120 bp, synthetic construct
  source 1..120: mol_type = other DNA
cacgcaccaccacatcaggctcagaagatcacttttaattagcaaacggctcactagcaagatttgaaaaacttcaaaaagctaagtataactctcaaatcgaatgcatttttactttgc

SEQ ID NO: 4297 - DNA, 120 bp, synthetic construct
  source 1..120: mol_type = other DNA
ttgaacccgggagctggaggttgcactgagctgacatcgcaccattgcactccagcctgggtgacagagcgcgactctgtctcaaaaaaaaaaaaaagaaagtgatcacattttgggaat

SEQ ID NO: 4298 - DNA, 120 bp, synthetic construct
  source 1..120: mol_type = other DNA
tagactttaaaataaatttgtttatgtatttgcttataccctgcacaccctaagtgcagtgtagcctcaacatgtccaagcagagcccttgaccttctccacaaaactcctcctcttttg

SEQ ID NO: 4299 - DNA, 120 bp, synthetic construct
  source 1..120: mol_type = other DNA
ctaacaatagggagttaggagctatcagacccctcttaactatgatttacaacccagatcactacaactccgagtagacgaaggacaggccttccaaacattctgtttttattttatttt

SEQ ID NO: 4300 - DNA, 120 bp, synthetic construct
  source 1..120: mol_type = other DNA
ggagtttgagaaataacagtggcttaaacaagagacaagtgaatttttcctgtaagcaaattctgagataaccagtccaggactggtgcagaacttccaagattaccaggaaggcaagac

SEQ ID NO: 4301 - DNA, 120 bp, synthetic construct
  source 1..120: mol_type = other DNA
ggtggccatgtgtcttgcaaaaaaaaaaatctagggtttattaacacgaaaagattggagaaacaatactggggggaaactaacagcctctatcaaaggctcagtgtcagtatcagtatt

SEQ ID NO: 4302 - DNA, 120 bp, synthetic construct
  source 1..120: mol_type = other DNA
aataatcttcaactctgtctcccttgtatttacccagctaacattttacaaattctacctgtgaagagagttacagaggaggtgctgaaatgctgatgcagtcccttttcaaggaactgt

SEQ ID NO: 4303 - DNA, 120 bp, synthetic construct
  source 1..120: mol_type = other DNA
tttttttccttttgtgactaatttttcttaaggagcagtgatcagggaaaggaagatgtttccctagaactcctctagagggcatatcttccctggatctttgacattgattttcggagc

SEQ ID NO: 4304 - DNA, 120 bp, synthetic construct
  source 1..120: mol_type = other DNA
tctccatgctggtcaggctggtctcaactccccacctcaggtgatctgccagcctcagtctcccaaagtgctgggattacagattacaggcatgagccaccgtgcccggctttttttttt

SEQ ID NO: 4305 - DNA, 120 bp, synthetic construct
  source 1..120: mol_type = other DNA
cctgatgttacacaagcattctcagcccaacttgcctcccctcctatttctatctctacctttagctgggtatttggatagttcaggggaaaaaggggtaaagatgagatgacaaaagac

SEQ ID NO: 4306 - DNA, 120 bp, synthetic construct
  source 1..120: mol_type = other DNA
aatctactatagcattctgacaaatgtagtttcctataacaaataatcaaagccttaagtttcaggttacagttttcagagttagtagtagccaattactgccaggcatagtggctcaaa

SEQ ID NO: 4307 - DNA, 120 bp, synthetic construct
  source 1..120: mol_type = other DNA
gtatctgtacctataccaatatctgtacctgtacctatacctacatatgtacttatacctataccatctgtcctcccctgaaagacctcatcaaagttctcatcttgcaatgtttcctgt

SEQ ID NO: 4308 - DNA, 120 bp, synthetic construct
  source 1..120: mol_type = other DNA
cctattgacttttcattagtttaaatccttgaagggtacagcatcactcggattctgtgtccaatagccttagtgggaagattgcttcagaatttggcacgaatcatgtcactgtttccg

SEQ ID NO: 4309 - DNA, 120 bp, synthetic construct
  source 1..120: mol_type = other DNA
tttaccttccattgttggttttctctagtttcttccttttctttttactgtgttctcttcaagctcttgctttttggagttttcccaggatatcaaaggttggggggatggcaacatggt

SEQ ID NO: 4310 - DNA, 120 bp, synthetic construct
  source 1..120: mol_type = other DNA
agagaagagggctataaagaaaagttctttcctgagctttgaatccccactgtcaggcttcaatggagcgcaaaaattcctaaatttggtgagaaatggcaacattaccagggaatgaac

SEQ ID NO: 4311 - DNA, 120 bp, synthetic construct
  source 1..120: mol_type = other DNA
cctttgtttactagtatttcacgttcaggtttccctgaagttaggattcagccttaagagagattctttctctcgtgacaaccagagagcagagtagtattatgtgacagtaagaagtag

SEQ ID NO: 4312 - DNA, 120 bp, synthetic construct
  source 1..120: mol_type = other DNA
tgtgaggacttttactctgagtgagatggggaatcattggatgattttaagcagagagataagatttgttgggtccaccagattttcgtaaccatagcaccattgccttttttttttttt

SEQ ID NO: 4313 - DNA, 120 bp, synthetic construct
  source 1..120: mol_type = other DNA
cttaagaaaactcccaaaaaacagacgtcatatcatgatcttgcccctttctactacttatgaacctccccaaagctattctaagtcccctgctctactcacactgaacaattcatagtt

SEQ ID NO: 4314 - DNA, 120 bp, synthetic construct
  source 1..120: mol_type = other DNA
agatggagttatatcaattgagatggagaaagctgcaaaaggagcaagttcaaagcagggttggacatcaagaggtcagttattagacttccaaatggagattttttttgatacggagtc

SEQ ID NO: 4315 - DNA, 120 bp, synthetic construct
  source 1..120: mol_type = other DNA
aacaaacctttaaacacattttctgaaccggcataaattccaaggaggtaggtctgtagcagatccactacggtagtgtagagaggaggaagggcacaggttatttttaaaaattagtgt

SEQ ID NO: 4316 - DNA, 120 bp, synthetic construct
  source 1..120: mol_type = other DNA
aaaaataatgatgctctgtgaacttccttgagtaaatctcactgtatcacgggtagctcaaactcactttcccaaaattgaacttagcatccatgaaaccaatcctgctgggtccagtgg

SEQ ID NO: 4317 - DNA, 120 bp, synthetic construct
  source 1..120: mol_type = other DNA
tacatatttgaatttttgccttccaggaagagcatccattcctctctgcttgtttgagtcccacccttaaagttagtcaagtccagcttttcccctagaggttattcccacttttaggtt

SEQ ID NO: 4318 - DNA, 120 bp, synthetic construct
  source 1..120: mol_type = other DNA
accgcacccagcctattttgaataggtaataacatttcatttggttcaaaattccaaaggcacaaaggttgttgtatagtgaagtttgcttcctatttctgtcctccagccacccaattc

SEQ ID NO: 4319 - DNA, 120 bp, synthetic construct
  source 1..120: mol_type = other DNA
taggctatctgcgatagcctattgttcttgggcaacaagcctgtgtggcgtgttactatactgaagcatggtaggtaacataacacagtggtaaccatttgtgtatataaacatacctaa

SEQ ID NO: 4320 - DNA, 120 bp, synthetic construct
  source 1..120: mol_type = other DNA
tcacctctggtgcacctcaggtatacgaccttgatctcgttggggtcgaacttcggtggcatggtggaggcagctggtgtcggatgaacccagattcaggatgaccgaagaaagttgcac

SEQ ID NO: 4321 - DNA, 120 bp, synthetic construct
  source 1..120: mol_type = other DNA
tttaatttaaaattttatttatttgtattttttccaagaaataagcttaaatttgaaaaattttaaatattattttgcttttcaaactttttgttaaaaacgaagaaatatacacattag

SEQ ID NO: 4322 - DNA, 120 bp, synthetic construct
  source 1..120: mol_type = other DNA
tgtggtggctcacgcctgtaatcccagcactttgggaggctgaggcaggcagatcacctgaggtcaggagtttgagaccagcctggccaacatgctgaaaacctgtctctactaaaaata

SEQ ID NO: 4323 - DNA, 120 bp, synthetic construct
  source 1..120: mol_type = other DNA
gacttagggataagggaaggaagttatcctatttctaattctgagaaaagcacttcttctgcccctgtcctagcaagtgtacatgccatcttaagaatgatcattctacctttgctctct

SEQ ID NO: 4324 - DNA, 120 bp, synthetic construct
  source 1..120: mol_type = other DNA
ttgttttactttaggagaatgggagtctggtataggaagactatcagtttcaggcacatagaaggcagttcttgactaggagcggaatatagaacaccccataaaaaaatgagaggcttg

SEQ ID NO: 4325 - DNA, 120 bp, synthetic construct
  source 1..120: mol_type = other DNA
ctccttcctggtgagcaccaactagattaagttatttgcagtctcttaaatgactcaactttcacttctgggcattctgcatatgtgcttccctctttctggaatgttctttgtatacta

SEQ ID NO: 4326 - DNA, 120 bp, synthetic construct
  source 1..120: mol_type = other DNA
tttcctttgaccgggtattcccaccaggaagtggacaggatgaagtgtttgaagagattgccatgcttgtccagtcagccctggatggctatccagtatgcatctttgcctatggccaga

SEQ ID NO: 4327 - DNA, 120 bp, synthetic construct
  source 1..120: mol_type = other DNA
actgtgcatcttattttgtttcttgacaggctagaaagcttcaagagggtgggggtgggctcttattcatttccatacatattactatgtactgacttctgcctgcctttttgccccttc

SEQ ID NO: 4328 - DNA, 120 bp, synthetic construct
  source 1..120: mol_type = other DNA
aaaccaacacacaaaaaatccctaagattcctccctatcagcatacagagatcattatttttaggtctgcctagactccactatgtagctgcaccaaaatttatccaccagttccctcta

SEQ ID NO: 4329 - DNA, 120 bp, synthetic construct
  source 1..120: mol_type = other DNA
ggtgttgtcaacctgacccatccatttacaagctccttattgactttttcacctagtgattttatccagcagtgaccatacctggatctttatttcattaaggggtttctaaatggggat

SEQ ID NO: 4330 - DNA, 120 bp, synthetic construct
  source 1..120: mol_type = other DNA
cattttctaaggagtcctagttcctaaatgggtgttattactattttatctcggtttaagtgttttacagtgggagaggttggaggtctctagtacagggtattgctggaaatgaaagcc

SEQ ID NO: 4331 - DNA, 120 bp, synthetic construct
  source 1..120: mol_type = other DNA
gccaaccgccgacggccgccgcccggtgaaggaggggctcagtcctcccaggtgccgcgcgcaggaggggacacgcgtgcgcaaaagggcggtgggtggggcgcgactcgtcacggggag

SEQ ID NO: 4332 - DNA, 120 bp, synthetic construct
  source 1..120: mol_type = other DNA
caaaacacgtctctgggcaacaggacaccctaattatgatacctctaaactgagtagcctttgcttctacaaccataatttctcctaaaatttcaaggccagtatataatatcccaggag

SEQ ID NO: 4333 - DNA, 120 bp, synthetic construct
  source 1..120: mol_type = other DNA
tgctatacttgggtaccatcaaaaaggtaagaccttctacctctgaccttcttcctagttcccttatctaattctggttcccatttcatcctgtttgctcacccattccaggtggacagt

SEQ ID NO: 4334 - DNA, 120 bp, synthetic construct
  source 1..120: mol_type = other DNA
aaataaggataatgcaccccctcatcaagaccatggtcagggattaaatgagatgggtaaagactattcctgtcccaataccaagcacacacaggtatgcaataagtggtctactattat

SEQ ID NO: 4335 - DNA, 120 bp, synthetic construct
  source 1..120: mol_type = other DNA
aaaggataaaaaatggaattgcagttaactaagaggaataaaaagaaggttgttttggcagctgtcccatgtacacccagctgcatccccatctgagaccttgcttgacaactttgcata

SEQ ID NO: 4336 - DNA, 120 bp, synthetic construct
  source 1..120: mol_type = other DNA
catctttagtgaaggcaggatatggagcaggtaatagagctgagggaagataagtaagccaagagtcaatatagcacagtattaatgaaatctcctgcattcgtcttctcttcctcaaat

SEQ ID NO: 4337 - DNA, 120 bp, synthetic construct
  source 1..120: mol_type = other DNA
aaaggattgaggaatggcgtaaggaggaaccgttttttacagcactgaccctatatcatttctcttcttgccccagtttcatttcagggagagagattaagaagaggaaatgtttgtttg

SEQ ID NO: 4338 - DNA, 120 bp, synthetic construct
  source 1..120: mol_type = other DNA
tgtcttctattaccagtgatgctcttcttcccctctatgtgctcaaggctcttagtctctaacactgtttctctgattcacatgtgctctccatttctgcccatttcttacaattgcctt

SEQ ID NO: 4339 - DNA, 120 bp, synthetic construct
  source 1..120: mol_type = other DNA
ctagcagctctgagtcattctgaaagatgtagagaatacagggactagaagcacttatattctcccaacaaatttgcatacatgacaaaaaacaggcaaaaggcagagagacccaaagac

SEQ ID NO: 4340 - DNA, 120 bp, synthetic construct
  source 1..120: mol_type = other DNA
aaattacacccggggaagccttcgcttagatcctcaggctctgccctccctctgatgcacccccgaagaatgcccctgaaggtgagagagaaacttggaaaataaagcaaaagctcattt

SEQ ID NO: 4341 - DNA, 120 bp, synthetic construct
  source 1..120: mol_type = other DNA
atagctagctgaggaaagaagcattttaaaacagagcgagaccctgtggtagaggatggtgaaaatggggcctagccatcttaattgaaaacccaaagcttgagacagactactgaatca

SEQ ID NO: 4342 - DNA, 120 bp, synthetic construct
  source 1..120: mol_type = other DNA
ctttttctgagtctaggtctcaggtcctggtccctgaaatcatcatctcagggtctggagtctaagatatctgtaggtatggagaaccctttttagactggattttcagattttgatatt

SEQ ID NO: 4343 - DNA, 120 bp, synthetic construct
  source 1..120: mol_type = other DNA
ctgagtgatgaggaaaacatcaaggaaatagagggacagagtcttgggagaggggctaggaaggagaaatgaaaacataggggtgaaaagagaagccaagaagatgtggggggataattt

SEQ ID NO: 4344 - DNA, 120 bp, synthetic construct
  source 1..120: mol_type = other DNA
tattatttgtctcccagaccattccttgtcaccacaagtctgtgcctacccactttcccttaatacctcaactcttattatcatttctcttttcttgtctcctctacttattggggtgtt

SEQ ID NO: 4345 - DNA, 120 bp, synthetic construct
  source 1..120: mol_type = other DNA
cagagtttgatcttttttccatctaaaatctgataccttaagcctaatttctagctctttgctgtcgccaatgtgacatctctcttacttcaatagggcctgtgtggcattggggtttaa

SEQ ID NO: 4346 - DNA, 120 bp, synthetic construct
  source 1..120: mol_type = other DNA
atttcttcccccaagtctccagagccttctgtgatgtgatcctctcctcttttcccctttgtataaatgcttgtcttgtgttcctttagagttgccaggtgtctcactttcaactgtgat

SEQ ID NO: 4347 - DNA, 120 bp, synthetic construct
  source 1..120: mol_type = other DNA
gccaccacgcccagctgagaagtagttcatattactaattaatagggcctgactttattccttgcaggccagctcaatctttctgtagcttcaatgtttaaggtgccttatttttcttga

SEQ ID NO: 4348 - DNA, 120 bp, synthetic construct
  source 1..120: mol_type = other DNA
gctttaaaaaatggtagggtagcctggaaaaccaaacgtggtgagagatggaccctgaaagttattgggaatggtgtgatgaggaagggttagaatttgagtcagggctaactagagtgt

SEQ ID NO: 4349 - DNA, 120 bp, synthetic construct
  source 1..120: mol_type = other DNA
tgaaggtcaagggaaaactggattcaggaagtagctaacttctgaggagttgcagaagagctgagtagggtttgggagaattctccggaaggtgtttcaagacaaatggagggagaaaag

SEQ ID NO: 4350 - DNA, 120 bp, synthetic construct
  source 1..120: mol_type = other DNA
ggtctccttttattaccccctgttttctcctctcatcagctgcttctattttctgcaattgtatcaccctttctctttcctccctgatttctcttattttctgtacccctcttgattacc

SEQ ID NO: 4351 - DNA, 120 bp, synthetic construct
  source 1..120: mol_type = other DNA
catgtgtgtacacctgcgtttccaggccagaatggtcacatgctcacagagcatgtttatcatgtgtcctgtggttggcagatctgcccacttattccccatctttctccttatcctgag

SEQ ID NO: 4352 - DNA, 120 bp, synthetic construct
  source 1..120: mol_type = other DNA
gtggctggggggagtaagtgtgtgaatgtgttccttggaattctactgtgtatgaaacacctttgggctgggcaggtgtaagccctgcttggtcagtaagtggggacagaaaagcttaaa

SEQ ID NO: 4353 - DNA, 120 bp, synthetic construct
  source 1..120: mol_type = other DNA
ctctgtacatgtcactgcatgcagcattaataacaggatgttctgtgtttctgtcactctgccccccctttcctctgtgtttctgctattcttttcctgcggcaacaaaagtgtttaata

SEQ ID NO: 4354 - DNA, 120 bp, synthetic construct
  source 1..120: mol_type = other DNA
cagaaaaaatgttactagggaagagatatcctgaaccattggatgcattgcttagtgtgtaccagaaggataattaacacatttgctcctggtttttctttactctggtggcaatctcgg

SEQ ID NO: 4355 - DNA, 120 bp, synthetic construct
  source 1..120: mol_type = other DNA
attcccttgcagccgagcctcagcttcctttttcagcgcttgccatccctctaggctcttggcagactgagctgcatccgcattcacctcccctcctcctcctttccctatccttacttg

SEQ ID NO: 4356 - DNA, 120 bp, synthetic construct
  source 1..120: mol_type = other DNA
tgtgtgagatgcagagggagggggttatctgtgtgcaaaggttgaaggattcaactcaagttggttgggggatgtcatggcacaggggacagaacagaaaagaactagaatagggatctg

SEQ ID NO: 4357 - DNA, 120 bp, synthetic construct
  source 1..120: mol_type = other DNA
tgctctctactcttcatcccctgcccatctccataccgcttttgtattgctatcctacccctcattattccatgcccctagccccctttatcttctgccctcctgcagtgatttttttgc

SEQ ID NO: 4358 - DNA, 120 bp, synthetic construct
  source 1..120: mol_type = other DNA
acatttgtattgtattatatgataggtggctacagaatttctgaccctgaaaatccaccacagcagatttcacgaccatttgagaaaaagaagactgggagactcgtgcatccgagttta

SEQ ID NO: 4359 - DNA, 120 bp, synthetic construct
  source 1..120: mol_type = other DNA
tgtgttcattcattctttgaatcattaaatgtttatcaggcactagccgtgtgccaggcccaggctagacatatctcttctctgtgccttcacttctttacttccactttttcctttata

SEQ ID NO: 4360 - DNA, 120 bp, synthetic construct
  source 1..120: mol_type = other DNA
cattattctgagtcccccatttcttttcgctttctgtactgctaccctgccttacgatctctttccctgccatagaagtcatagacttacagagttgatggggctctggaaattctttag

SEQ ID NO: 4361 - DNA, 120 bp, synthetic construct
  source 1..120: mol_type = other DNA
gagccaccacatctggccaagctttacccattctatatgcaattcttttttcacaatttctgatagtctctgcaggactttccagttcccttcaaattctacattaatatttttggcttg

SEQ ID NO: 4362 - DNA, 120 bp, synthetic construct
  source 1..120: mol_type = other DNA
ataagatcacattcacaggttcagggtagacatgagttttggtgggatactattcaacccagtacaccgtctcaccttatgattgctgtctgtatcccactttcttactgtctctcctct

SEQ ID NO: 4363 - DNA, 120 bp, synthetic construct
  source 1..120: mol_type = other DNA
tctgaggtagaccggttcatggaacgggagcacctcatattccgcgagaacacgcttgccactaaagccatagaagagtatatgagactgattggtcagaaatacctcaaggatgccatt

SEQ ID NO: 4364 - DNA, 120 bp, synthetic construct
  source 1..120: mol_type = other DNA
agagatgtctgggcaggaagattagctttagaaactggaaggcctcaaggagtctgaggtcattggtaggccttgggatgccattaaaggtgtcagaaatattgtgatttagaagattaa

SEQ ID NO: 4365 - DNA, 120 bp, synthetic construct
  source 1..120: mol_type = other DNA
gattatgtcgcccagtctctttgggcttatgcaggagtacccagatgagcagacctcacgaaccctcaccctcattgccaaggtcatccagaacctggccaacttttccaagtgagggaa

SEQ ID NO: 4366 - DNA, 120 bp, synthetic construct
  source 1..120: mol_type = other DNA
acctttatcttctgcattcttggctaggtttacctcaaaggaggactttctgggcttcatgaatgagtttctggagctggaatggggttccatgcagcagtttttgtatgagatctccaa

SEQ ID NO: 4367 - DNA, 120 bp, synthetic construct
  source 1..120: mol_type = other DNA
gtgcttcatttgctgctcattattttgatgatggccctgctttttcctctgcccgtgtcttcctccatgacaccatacccatcccaccattcccgcctctcctttcatttgtccacatct

SEQ ID NO: 4368 - DNA, 120 bp, synthetic construct
  source 1..120: mol_type = other DNA
tttgccccattccatggctatagcaagagtgaggacctctcttccggggtccccaagccccctgctgcctccatccttcatagccacagctacagtgatgagtttggaccctctggcact

SEQ ID NO: 4369 - DNA, 120 bp, synthetic construct
  source 1..120: mol_type = other DNA
agttcctctagatattgatccaagcctcgtatagaaacaaaataagactttctataaatgctcattaatgaacagatttttgggccccagtgtggcattttccacccactctgtgtcctt

SEQ ID NO: 4370 - DNA, 120 bp, synthetic construct
  source 1..120: mol_type = other DNA
gatcacctcttgagaagccttccgtccatctggggagaccagatacacacagttgttaaaagtcactttcaactctattttgtaggttatatatatcatagactatctggggatcatcta

SEQ ID NO: 4371 - DNA, 120 bp, synthetic construct
  source 1..120: mol_type = other DNA
cagcaaatttaatgagaattaaaccctaatattagccccaaggcagccaccgtaggaagttaattcacatctctcctctgcatgtagaagggttggtgatatatgtatgtatcctcttca

SEQ ID NO: 4372 - DNA, 120 bp, synthetic construct
  source 1..120: mol_type = other DNA
cttttcttcctatgtctccagcatgtgttctggggcctggcttagggctgaagagtcaccctatttttaatttctgagcacagttactcaaggtgtgtttgtgagtgtaggtttctgtgt

SEQ ID NO: 4373 - DNA, 120 bp, synthetic construct
  source 1..120: mol_type = other DNA
ggggtgggggggaccctgggcgcactccaaccagagccacctccattttgatccattctaaatgtattttatgtaagatttaattagaagaaaagggcttcttgaaatattttttgaaaa

SEQ ID NO: 4374 - DNA, 120 bp, synthetic construct
  source 1..120: mol_type = other DNA
tgttctcttggctccctaattttcctgtctccttggcagctcctgcatagcttcctcttcctgactcttcagatcttgaaggccttccatcctgtaacctccctttgccctcagtattta

SEQ ID NO: 4375 - DNA, 120 bp, synthetic construct
  source 1..120: mol_type = other DNA
cctacctaaaaagccagtaaatgagaacctgtcagctatagccatcatttctgagatgcgattttctttgggattgagctgcagtgggcagtggctccttacactgtaattttaattctc

SEQ ID NO: 4376 - DNA, 120 bp, synthetic construct
  source 1..120: mol_type = other DNA
ttggacatttgttctaaaccacttgtggtaggtattggtctctctgcaactcagccattaattagaaattagttttgagcctgaattttaaaaagccaagtgttgcccccagcccacaca

SEQ ID NO: 4377 - DNA, 120 bp, synthetic construct
  source 1..120: mol_type = other DNA
cttagtacaccttttcttcacagataaaggaaaatgcaagctcagtttttcttcagattatgaagaaattccaaatccacaggggtttggattaatgaggttttgctgtactgcctcccc

SEQ ID NO: 4378 - DNA, 120 bp, synthetic construct
  source 1..120: mol_type = other DNA
aattgaggttagggtgaggggtcagggtttaggagggtgtgtatgttgggaggacaggctagttgatctgtcctactctgacacacagtcccctctgccccttccttctctcttcttggt

SEQ ID NO: 4379 - DNA, 120 bp, synthetic construct
  source 1..120: mol_type = other DNA
tcactgtccccttttctccactcccagccccatttcctttttttctggagtgtgtggtgaaacagaaaaaaacatgtttaataaacggagattgttcttttatcgctgtgccgactttct

SEQ ID NO: 4380 - DNA, 120 bp, synthetic construct
  source 1..120: mol_type = other DNA
accttatgaaaactagaaatggcatctacaactacaaagctttaatgatcaccaggtcaagcagcaaaaacagtatctaggaggagacacctccaacagtatctagagtcagacacacct

SEQ ID NO: 4381 - DNA, 120 bp, synthetic construct
  source 1..120: mol_type = other DNA
tgttgttgtttgtttttgctttcttggtgtgcgggactgatttgcagaaaccgccactgacttaaaagtttccagttattgctcgtggggagggggttgtttgagaagatgtggctccct

SEQ ID NO: 4382 - DNA, 120 bp, synthetic construct
  source 1..120: mol_type = other DNA
tgtggcaggtagtagatcagtgctcagaaattcttagagaattagaaacttcaggtggtggaatttcagcccgtggaggaaactcctaccatgcccttctttccactacatcctctacag

SEQ ID NO: 4383 - DNA, 120 bp, synthetic construct
  source 1..120: mol_type = other DNA
gccaaccctgcaggaaagtggtttataggccattcatacttaagttgatcacttgcccatggtggacatttttgtggtggtgatgtccattaaggaaaccagattttcaattatttagtg

SEQ ID NO: 4384 - DNA, 120 bp, synthetic construct
  source 1..120: mol_type = other DNA
agttacttaaaattttttaataaactgtgccctgaaacctaaactgacagtggactggattgagtaatttgtgtgggagagaatgtgagaatggagctgcagagccttgggtgtgttcct

SEQ ID NO: 4385 - DNA, 120 bp, synthetic construct
  source 1..120: mol_type = other DNA
tcacatgatctttataatattccccaacttcctgtgttctctgtgtttggttggttgttctacaaacattcagtgcaaagcactatgctagaccctgattaatacactgcccttaaaggg

SEQ ID NO: 4386 - DNA, 120 bp, synthetic construct
  source 1..120: mol_type = other DNA
caacttccacctctgcccgctggacttaaggcagaattgtttcttccctctccttaatccccatgacactttgtccttacttgtatcaaagcaattaaaatagcttgttagagtttttct

SEQ ID NO: 4387 - DNA, 120 bp, synthetic construct
  source 1..120: mol_type = other DNA
cagtagtcactcaataagtgttagctgttatcatgagtgagaccagtagtcatcggttccccacccctttactgcgatcagttctcccagagagagatcacactcataataaaggaaatt

SEQ ID NO: 4388 - DNA, 120 bp, synthetic construct
  source 1..120: mol_type = other DNA
tatgccctcttccaaatttacacactccggggtgattttttttccccacgcagaactcatgttaaaattcctgggtgactttatccactcttctgagttgaaccatttaaatagtgatga

SEQ ID NO: 4389 - DNA, 120 bp, synthetic construct
  source 1..120: mol_type = other DNA
gctatgtgctctgatagctcttaattccccatatttttcaatttcctttattcaataagtacttgcatttggaagggggcgtgagtcgaaagcctatctattgggtactccactgactat

SEQ ID NO: 4390 - DNA, 120 bp, synthetic construct
  source 1..120: mol_type = other DNA
atattcaagggggaaataaaggcccagacatgcaaagaaaaaggagaagatggtttactgaagtgtttaacagatgcccaagccaagaaagagaaaaagaatggtttgcttaacaaggag

SEQ ID NO: 4391 - DNA, 120 bp, synthetic construct
  source 1..120: mol_type = other DNA
ctactctgagtgccttatttaaaattgcagcctatcccctccttccaatcctgatgggccttaccttgctttacatgaattcttcttttcctctatagcactttataattttccagtatg

SEQ ID NO: 4392 - DNA, 120 bp, synthetic construct
  source 1..120: mol_type = other DNA
ataagctatccaagatgtatttatcaggtgttcttctagattgggggttggcaaactcattctatgaaggatcaaatagtaaagtttaggctttgcatgccaagaaacaaaattaaggat

SEQ ID NO: 4393 - DNA, 120 bp, synthetic construct
  source 1..120: mol_type = other DNA
caatgagattttacatattttgtctttgaaaatgtctttacaaaggcaggtattgccaaatactgatatcaatccaagaccatctggttttgattgggtatattcattacttggaaggct

SEQ ID NO: 4394 - DNA, 120 bp, synthetic construct
  source 1..120: mol_type = other DNA
cctggatgtccaggcataagttttctgcagggtcagggccctcatggagaacctctgctagggtaatgcggaagggaaatgtggggtcagagcccccacacaaagtccctagtggggcat

SEQ ID NO: 4395 - DNA, 120 bp, synthetic construct
  source 1..120: mol_type = other DNA
acagactaatacacatacttttcttgatctttgccttttagcatgtcattacattgtaggttaatcacctccaattgaaggttaggtagaagttcctcaattgcacagttaaatgaaata

SEQ ID NO: 4396 - DNA, 120 bp, synthetic construct
  source 1..120: mol_type = other DNA
agatccatgcagcaacatggatggatttggaggctattatcctaagcaagctaatgcaggaacagaaaaccaaataccacatgttctcacttgtaagtgggagctaaacaatgagaacac

SEQ ID NO: 4397 - DNA, 120 bp, synthetic construct
  source 1..120: mol_type = other DNA
agccctgagctcgagaaaatctcaacacctctttgccaccactatgtcaatgaactgctgtatggtaggacaagtcaggatattcaacttctatttgtaacaaaaactgttttagttcag

SEQ ID NO: 4398 - DNA, 120 bp, synthetic construct
  source 1..120: mol_type = other DNA
tctctggacacatttctttggcttctgcatcacatgatttaattaactcattattgataaatggctttccttgcttggctacaaatgaactatgtggaaacttactctctgattgtagct

SEQ ID NO: 4399 - DNA, 120 bp, synthetic construct
  source 1..120: mol_type = other DNA
atttacagaaaatgacgcagagggcagggaaacacattaaatcacaccaaagtggtacaatcaacaaaatcgagactgtaagaaactctaaaggacaaacaaccatttcttcacacacac

SEQ ID NO: 4400 - DNA, 120 bp, synthetic construct
  source 1..120: mol_type = other DNA
ccatcctggctaacacagtgaaaccccgtctctactaaaaatacaaaaattagccggacgtggtggcgggtgcctctagtcccagctgctggggaggctgaggcaggagaatggcatgaa

SEQ ID NO: 4401 - DNA, 120 bp, synthetic construct
  source 1..120: mol_type = other DNA
tggaataaacaagaaacaataaaaacgggagaggagttgaggaggtaaaaacagaagcaagactccatgtgctttgagactgctccttgtatactttgagtcaggtaatgccattaccta

SEQ ID NO: 4402 - DNA, 120 bp, synthetic construct
  source 1..120: mol_type = other DNA
taaaattcacatctgaactagttcctccttccatcctcctcttcgtcttcccctcatatagtcaactaattgaacaaattgggacatttgtcctgaatgttctacatgctggctttgtct

SEQ ID NO: 4403 - DNA, 120 bp, synthetic construct
  source 1..120: mol_type = other DNA
atgagccacctctcccagccaataggatgcattttaaggataaaaaagctgaaactaaaattttaaactttagacccttacatattaaactctcctaaattttaaactctctcagaagta

SEQ ID NO: 4404 - DNA, 120 bp, synthetic construct
  source 1..120: mol_type = other DNA
tttttttctggtcctgtccactgaaatggaccagaagaaatgagcattcctaatgtccatgctgtgctctctaataccattccacattaaaacaagatgtggctcattgggaaactgttg

SEQ ID NO: 4405 - DNA, 120 bp, synthetic construct
  source 1..120: mol_type = other DNA
aatgaaagctttagaagataatgtcacgtcaaaacgactcaggagcatatgtgaaggtgtccccactgaacaatgttgtgacaattggacaactaaaagtataatgataattttggattg

SEQ ID NO: 4406 - DNA, 120 bp, synthetic construct
  source 1..120: mol_type = other DNA
caatatggtgactgtatgacttcatcctttctaatatctcgaatcctagttcagacatccctcagaaattctaatccattcctaaaaacacgctggatagtgaattttcgatagtgggag

SEQ ID NO: 4407 - DNA, 120 bp, synthetic construct
  source 1..120: mol_type = other DNA
catcacaagaaactcaaaatggacaagtgtcccattccttttgcttgtgtcatgcagcttctgataaccctagactgtgccataatgcatttttgaatgtgatttttgtcctcttgctgt

SEQ ID NO: 4408 - DNA, 120 bp, synthetic construct
  source 1..120: mol_type = other DNA
tcttcctccagcttagctccttccagcattattccttctaaatcaatgcattttttgaaaggaacacagtaagctagaaggtggtgatgattgcacagctttccagatccacaattattt

SEQ ID NO: 4409 - DNA, 120 bp, synthetic construct
  source 1..120: mol_type = other DNA
gatttactacatgatgttgtgggatacacatggatagtaaaatgattacaataatgaagcaagttaacatgtctgtcctctcatgtggttactttttcttgtgacaaaagcagctgagat

SEQ ID NO: 4410 - DNA, 120 bp, synthetic construct
  source 1..120: mol_type = other DNA
taattttcaacataattgccaattttcagaaaaagcagttgtgccttaggtgccatcaatggtaaccaccttacaaaatgtgatagccatcctataaaatggctagctgggccctactgt

SEQ ID NO: 4411 - DNA, 120 bp, synthetic construct
  source 1..120: mol_type = other DNA
tcagtgggagtccctttattttatctcctgtgtccttttcatccaactctaagcgtctttgcttttttcctttatggcaagataaatgtttcagacacatgtcatacatttcctgcctca

SEQ ID NO: 4412 - DNA, 120 bp, synthetic construct
  source 1..120: mol_type = other DNA
gagctacaggagagatgctatgcgtggtcatctaccttccaggctgactgggtacagtctttcttcccaatattaatctacttaatagtaataatgtccagttcacatatttttgtgcaa

SEQ ID NO: 4413 - DNA, 120 bp, synthetic construct
  source 1..120: mol_type = other DNA
gtcttatggcttgtaataggcaccatcttacacttcatatgaatccagtaacagagattaaagctcaaagcttcaggtgtggagacctgcatgagtatcaaccggaagcattttagaaat

SEQ ID NO: 4414 - DNA, 120 bp, synthetic construct
  source 1..120: mol_type = other DNA
cccatttccacacagataattgagctctaacatctggataggaagttggcagcaaagacaaggatttctgagaaggggcattcattccaccagtattacttaaatttttttaatccacag

SEQ ID NO: 4415 - DNA, 120 bp, synthetic construct
  source 1..120: mol_type = other DNA
aatcaccatgtctactcctcaccaattccttcccccttccttcccaggttaactactatcttgattttgatgttattattcccatgcatgttcacatatttttagtacatacgtgggtag

SEQ ID NO: 4416 - DNA, 120 bp, synthetic construct
  source 1..120: mol_type = other DNA
ttgtttttctctttgtatactgaagaggataaatttcatattcaagctaatctgttcctcccaaatggtaacagtgcaacactggccaagctgattcagacagcacagcttcccggtgtc

SEQ ID NO: 4417 - DNA, 120 bp, synthetic construct
  source 1..120: mol_type = other DNA
cagtgtcacagctggtaagttgagggtgggaaaccccggcctaacacatatattttctttttatgttctgtaaggattgggatccttttcattttattagacagaaaaggacagttagca

SEQ ID NO: 4418 - DNA, 120 bp, synthetic construct
  source 1..120: mol_type = other DNA
ttgtgtgctacattttacttaatattctatggggcaataagcagaactattcagaaatgatcctgggatctcactctagattgcccaggaaatgtgctagctacaactggagtttcccgt

SEQ ID NO: 4419 - DNA, 120 bp, synthetic construct
  source 1..120: mol_type = other DNA
tgtgggcagatgttgttgaatgtttcccactaccccttccagcccactggaagaatgggttttttaaaaaaacatacactcaagatgagctctattagtcatttcctcatctcacttatt

SEQ ID NO: 4420 - DNA, 120 bp, synthetic construct
  source 1..120: mol_type = other DNA
aatgcgagagaaggttgttccttcagggaatattttcttttggcagggccatgtcactgagtcaggcttactaattatgtcccaaggtgggctcagcctctggcccttcaaggagcttag

SEQ ID NO: 4421 - DNA, 120 bp, synthetic construct
  source 1..120: mol_type = other DNA
taccggagttggccattgtaatttgttttgtcctgtttcacattgtggtggttttattttttactattagctgcttggatctgcattttgttttgtgaggtgtaacactgtgagggcctg

SEQ ID NO: 4422 - DNA, 120 bp, synthetic construct
  source 1..120: mol_type = other DNA
ggacttgggctcaggtgctttcttgagtgtgcaaactggtaagaactaattttttgaatcagatttggggattattcaggcagaaggggatccctaaatggaaacactgacattttaata

SEQ ID NO: 4423 - DNA, 120 bp, synthetic construct
  source 1..120: mol_type = other DNA
gatctattgaactctggttgtctttcttctacctaattgtatacttataccgtttaaccaacctctctttatcccacgtcttccctcctctttccaggccctgataaccaccattgtact

SEQ ID NO: 4424 - DNA, 120 bp, synthetic construct
  source 1..120: mol_type = other DNA
ctgtaggcttcggtatgttgtatatctattttcactagtttcatgaaatttttaaaattttcttagcttattcattgacccattggttgtaggagcatgttgatttccatgtgtttgtat

SEQ ID NO: 4425 - DNA, 120 bp, synthetic construct
  source 1..120: mol_type = other DNA
catgaaaaagaaactctcaagctttacatcttgacttaagccaagagacagaatgtatgctgatccttttatttgccctcacatccaaaatccttggaagtccatcgcaagcctagctta

SEQ ID NO: 4426 - DNA, 120 bp, synthetic construct
  source 1..120: mol_type = other DNA
attcactttcaacttatgtatgtccctataggcaaggtgggttcttgtagcaccacatagttgggtctcgtctctttacccatttaacttctatacatcttttaattggagaatttggtc

SEQ ID NO: 4427 - DNA, 120 bp, synthetic construct
  source 1..120: mol_type = other DNA
cctcaaatattttctttatgcatgttagcatctttttctcttagattgaaggacttcatttgccatttattttaagataggcctggtggtagtgaattctcagcttttgtttgtcaagga

SEQ ID NO: 4428 - DNA, 120 bp, synthetic construct
  source 1..120: mol_type = other DNA
ctccccactttttctctggttgtctttgggaatatttctccctttaagtacttagggacagatctcttgccagggaatccaagatggtggggaaactggttatccacttcaatctcactt

SEQ ID NO: 4429 - DNA, 120 bp, synthetic construct
  source 1..120: mol_type = other DNA
ccagcttccttatatgcagccattttggaaccaaactctcacacattccatggaacatttctagccagcaaggtacaatgactagcaaggaaacaaactttttttttccttcagtatttc

SEQ ID NO: 4430 - DNA, 120 bp, synthetic construct
  source 1..120: mol_type = other DNA
tgctggatgtgctagaagctaatactatgacactggatttctaagaaaagaaaagctctttattataggttgaccaataaggagacaggaatctagctcaactgtatctccctgtgctgg

SEQ ID NO: 4431 - DNA, 120 bp, synthetic construct
  source 1..120: mol_type = other DNA
ggaggaccaccaaccattgtaataccaaagatttttgctacctccccttgaatcaattttgcccctgtggggatgatatcatccctgatatgaaggcatatattgagagaaataagacaa

SEQ ID NO: 4432 - DNA, 120 bp, synthetic construct
  source 1..120: mol_type = other DNA
aggtatgatgttcttgctgtggaaatttagaagccacagggtttaaggattgtagagacatcataagccctattactcccatcttcctactcaattacttcatgtaagctgtggcttact

SEQ ID NO: 4433 - DNA, 120 bp, synthetic construct
  source 1..120: mol_type = other DNA
tcaattacttttgaatagacacaagccatcttgatcaatgctggcatctcacagaaaaaattatccacttcccggtgcccacatcttggcaacttcaaagtcaaggagcaaacaattaag

SEQ ID NO: 4434 - DNA, 120 bp, synthetic construct
  source 1..120: mol_type = other DNA
ctcaccaccaacttactcctcctccttatattttttttacccctcaacattgcaggcactgttgttattctatcaattttggtgttccctactacactgcctttttttgtgagtgtgttt

SEQ ID NO: 4435 - DNA, 120 bp, synthetic construct
  source 1..120: mol_type = other DNA
ctgagccctggtgtcgagctaatggctgaattagtttaaacattttttctgctgataatttctgaccacgaaattcagacctaccatactttacatttatagtgtccttgaggccatgga

SEQ ID NO: 4436 - DNA, 120 bp, synthetic construct
  source 1..120: mol_type = other DNA
atgctaaccaaaaattttcaccctagctccaaactcatgatgtagactgattggagacctgaatttcccagcaaacgctccaaactcatcaagtcagaaaaaggttaccttcttcttctt

SEQ ID NO: 4437 - DNA, 120 bp, synthetic construct
  source 1..120: mol_type = other DNA
tttgactgctgttgggtttgtgttgggaattaaaaggtcatgaatttcaaagtggaaaaaaacctcagaagtcatgaatctagccttctgctctgcataggagatccttcaacagaatcg

SEQ ID NO: 4438 - DNA, 120 bp, synthetic construct
  source 1..120: mol_type = other DNA
tgttgctctccctggacacaccatgatttgtcaagtgctgcaaattagtgagtataaaagtaagcacgatactccacttatgcaacactactgaagagaatagtgaatgtctatgatctg

SEQ ID NO: 4439 - DNA, 120 bp, synthetic construct
  source 1..120: mol_type = other DNA
tatctcacatacctttcacatttttgctttcatgttagactgagtcttacgctatctaggatctgttttctacctggagtcatcctctgttagagatagcagagaatacttaccagaagc

SEQ ID NO: 4440 - DNA, 120 bp, synthetic construct
  source 1..120: mol_type = other DNA
cgttctattttcagcaaattaaaaatagtatgaacactctggagcttatccctcaatttatggtctggaaacttaccaccatccccagcttctggtaattaccattccactctctgcttc

SEQ ID NO: 4441 - DNA, 120 bp, synthetic construct
  source 1..120: mol_type = other DNA
tcggctcactgcagcttccacctcccaggttcaagtgattcttgtgcctcagcctcctgagtagctgagactagaggcacgtaccaccatgcctagctaatttttctatttttagtagag

SEQ ID NO: 4442 - DNA, 120 bp, synthetic construct
  source 1..120: mol_type = other DNA
ccaatccatgaacatgaggtatttttcaatttttgtgtcttttgtaattttaaatatcagtgttttatagttttcaagtgtacaaatctttcacctcctcggttaaatttgcacctagtt

SEQ ID NO: 4443 - DNA, 120 bp, synthetic construct
  source 1..120: mol_type = other DNA
gattttctaactctatcataggtcggtaacctctatacatctggaaaggctagatgtggcaaatgtttccttgtaaaagttttgggggaagctgagagcagctttctcacattatacacg

SEQ ID NO: 4444 - DNA, 120 bp, synthetic construct
  source 1..120: mol_type = other DNA
aggcaggagccactgctcttgaccccaaatcaaacccttagtaatatttgatagtatttcagtgctggccagagcaaatccttgcttattattcgtttatgaaaatggcttgactcttct

SEQ ID NO: 4445 - DNA, 120 bp, synthetic construct
  source 1..120: mol_type = other DNA
ttcagagggactaaaagcaaggtgcaacaaattaagaagtaatgaacagtgtctaatgagaaaaatagagtgtgttttgaactagcctaacccaatttggtcatgctcagcaacagggtc

SEQ ID NO: 4446 - DNA, 120 bp, synthetic construct
  source 1..120: mol_type = other DNA
cctgtggtagctgccttggagggcagcctttctggctaaatgctagttgacctccccatctaatagtgtacatttactgattagagccactcatgtccataaaatgttatatatatatat

SEQ ID NO: 4447 - DNA, 120 bp, synthetic construct
  source 1..120: mol_type = other DNA
ggactatatacataaaacttaagtatgactttaacctcacctggtaaatgcactatacttttgtgacaattaggatataaatatttccctaacttctcccctttctttataacaaagagt

SEQ ID NO: 4448 - DNA, 120 bp, synthetic construct
  source 1..120: mol_type = other DNA
atagagccagacaaatatttctctctaagtgatagtgacattattccttcacagacactacagttgaaagaattggaggtcctaggtcagagacaaagacagattggaatagaagttggg

SEQ ID NO: 4449 - DNA, 120 bp, synthetic construct
  source 1..120: mol_type = other DNA
aagtggagaagaagctgtttcgtacagtagaaattggtaaggacagtggccacagggactcaactgtgagaggaggttaaaaatttatcaggagcagtattttaaacaaaaatcctcaaa

SEQ ID NO: 4450 - DNA, 120 bp, synthetic construct
  source 1..120: mol_type = other DNA
ccaacactaggcatatgtggttttgaaaattacctatttactgagtgttttgtgagtggcagaaacattttcctgccctggccaagggctaaccttagaaaaagataaatgtgatgggta

SEQ ID NO: 4451 - DNA, 120 bp, synthetic construct
  source 1..120: mol_type = other DNA
ctctcctgatcttactgtaacatattatccacattgtgaaaaccagtggtacaccaaagaaagggacaactcaaaatgctagtggtgtgctgctcatcattaaagatgacatgatggaag

SEQ ID NO: 4452 - DNA, 120 bp, synthetic construct
  source 1..120: mol_type = other DNA
caattcctctttatttttgtagatttgtggtgaaatctcatcagtttcttcagggcatccttcatgtccttatttcttaaggtgtaaatgagcgggttgagacttggagtgatgacggtg

SEQ ID NO: 4453 - DNA, 120 bp, synthetic construct
  source 1..120: mol_type = other DNA
ctccatttttggatggttagagaagccaagcagaataaaaccatgtaaagaactataattgctttggtccatagtccttcaatgtctaaatcctagagtgagaaaaggaggaggaggagg

SEQ ID NO: 4454 - DNA, 120 bp, synthetic construct
  source 1..120: mol_type = other DNA
tcatatcttagtgactaagcacctttgatctcctagtttgttatgtaggacatctggtgtttacccttggacgccttgtctctctcattcttaacgccttatcaccaaaactggtaaatt

SEQ ID NO: 4455 - DNA, 120 bp, synthetic construct
  source 1..120: mol_type = other DNA
acttccaactgtggccatgattcaaaagtggatacatttgtgagactaaccggagatggtggttgaaatagccgttttgagaaaatcattttgtgatttctttagcattagcttttcaaa

SEQ ID NO: 4456 - DNA, 120 bp, synthetic construct
  source 1..120: mol_type = other DNA
gagattctcaacaggactcctccttctcgaatatatgacttcaagtaagaggatgaaacctgtcacaaattcttacttcttgttctgagtttaaatcaacctgcaagtaggtcttgacca

SEQ ID NO: 4457 - DNA, 120 bp, synthetic construct
  source 1..120: mol_type = other DNA
tattttacacttgagatatagtatagtgtaatggttagatggatagattgtggagccagactttctgggctgaaatcctggtggctacagttaccagatgtgtgaacttgggaaaattac

SEQ ID NO: 4458 - DNA, 120 bp, synthetic construct
  source 1..120: mol_type = other DNA
tcttcttggaaacagggttcctactgcatggtaaagtaccctggcatagggggtgaatcatgatttttctaaggtatttttcatggcaatcttattccccttaagtaaacatgtgtaggg

SEQ ID NO: 4459 - DNA, 120 bp, synthetic construct
  source 1..120: mol_type = other DNA
ccatttaaagtgaagttattagcagtgcttccacaactggccgcatatcagagtaactgtattggctggcatatgtagaaattttagaaatacagtgtcctgagattcctatgcccttgc

SEQ ID NO: 4460 - DNA, 120 bp, synthetic construct
  source 1..120: mol_type = other DNA
agtatttccatttgccaatttgaaatctttttagacttcctatgcacttaactataaaattcagactccttaccaagaactaccagatgcaccttgcctggctccttttcatccctccct

SEQ ID NO: 4461 - DNA, 120 bp, synthetic construct
  source 1..120: mol_type = other DNA
tcagcattccttgatgatgctatattagcttccagtggctgtttggtgcctggaagggagtctagcatgtaacagggatcaataattgtttgttgactataaagcagttagaacaatatc

SEQ ID NO: 4462 - DNA, 120 bp, synthetic construct
  source 1..120: mol_type = other DNA
aatacttctaaccaaggaagtgaaagatttccacaaaaagaactacaaagcactgctgaaagaaatcatagatgacacaaacaaatggaaaaaccttccatgcttatggattggaagaat

SEQ ID NO: 4463 - DNA, 120 bp, synthetic construct
  source 1..120: mol_type = other DNA
aaatgccactcaaaaccacaatgagataccatcttgcactagtctgaatggctattactaaaaagtaaaataatgacagatattgatgaggctgcagagaaaatggaacacttttatact

SEQ ID NO: 4464 - DNA, 120 bp, synthetic construct
  source 1..120: mol_type = other DNA
ttatgcaatttatgaaaataatatagttttacctctgttcttttcactgcagctttgtgaaggtataattaacaagtaaaaattgcatacacttactatgtgtatgatgttttgacatat

SEQ ID NO: 4465 - DNA, 120 bp, synthetic construct
  source 1..120: mol_type = other DNA
ggacttgattctgttccattggtttgtgtgtctgcttttatgccagtatcatacagttttgattcttatggttctgtaatatggtttcaagtcaggaaatgtgatgcctcagcttttctg

SEQ ID NO: 4466 - DNA, 120 bp, synthetic construct
  source 1..120: mol_type = other DNA
ctttcttttttaaaattactgaatagtattctatagtgtatataaaccacatcttctttatccattttttgttgatggacacttaggttgatttttgctattgtgtatatttttgctatt

SEQ ID NO: 4467 - DNA, 120 bp, synthetic construct
  source 1..120: mol_type = other DNA
tctaggttccttattctattgtattggtctatgtgtctctttttatgccagtaccatactgtttttattaccatagctttgtagtatattttcaaattaagtactataatgccttcagct

SEQ ID NO: 4468 - DNA, 120 bp, synthetic construct
  source 1..120: mol_type = other DNA
tagcatgatttataatcctttaggtatatacccagtaatgggattgctgggtcaaatggtatttctggttctagatccttgaggaatcgccacactgtcttctacaatggttgaactaat

SEQ ID NO: 4469 - DNA, 120 bp, synthetic construct
  source 1..120: mol_type = other DNA
atgttaagaaacaatatgaccttagtggctctgccaaaatcacaatccctcccttcttctgtcacccaagagagataatccctatccaaaattctctctttgtattttgtgggctttctc

SEQ ID NO: 4470 - DNA, 120 bp, synthetic construct
  source 1..120: mol_type = other DNA
tttttggtgccatgtgaaatttaaagtagtttttctaattctgcgaagaaagttaatggtagcttgattgggatagcattgaatctataaattcctttgggcagtatggccattttcacg

SEQ ID NO: 4471 - DNA, 120 bp, synthetic construct
  source 1..120: mol_type = other DNA
ttttggtatcaagatgatgctgacttcataaaatgagttagggaggagtccctctttttctatagtttggaatagtttcagaaggaatgataccaggtcatcttagtacctctggtagaa

SEQ ID NO: 4472 - DNA, 120 bp, synthetic construct
  source 1..120: mol_type = other DNA
gagttcaagttctgaatatccttattaattttctgtctcactgatctgtctaatattgacagtggggtgttaaagtctcccactattattgtgcaggagtctgagtctctttgtaggtct

SEQ ID NO: 4473 - DNA, 120 bp, synthetic construct
  source 1..120: mol_type = other DNA
ccaccatgcctggtcctttcatgagtttttatgcttgcaattcagattaataagtgaatgacagtgagaattcaattctccaatgcctactctcataatctaaagaaagcaaggcagaag

SEQ ID NO: 4474 - DNA, 120 bp, synthetic construct
  source 1..120: mol_type = other DNA
ctgatatgaagttttattttatacaaatcctggagaagctaagtgaggccatgtcagtgttgccagaagacatgagaatcatgccagatctctgtggcttaacattggaacatagtggta

SEQ ID NO: 4475 - DNA, 120 bp, synthetic construct
  source 1..120: mol_type = other DNA
taagcattcatttcttatggatggtgccttctgtgtgtccggtgtaaagggcaaaacaggctccctttcctcaagcctcttgtcattaaagcctgtaaaaattacagtaaaagtattcag

SEQ ID NO: 4476 - DNA, 120 bp, synthetic construct
  source 1..120: mol_type = other DNA
ttctagatgcctgaggaatcgccacaccaacttccacaatggttgaactagtttacagtcccaccaacagtgtaaaagtgttcctatttctccacatcctctccagcacctgttgtttcc

SEQ ID NO: 4477 - DNA, 120 bp, synthetic construct
  source 1..120: mol_type = other DNA
atagggaatcctttccccattgcttatttttgtcagatttgtcaaagattagatagctgtagatatgtggcgttatttctgagggctctgttctgttccattggtctatatctctgtttt

SEQ ID NO: 4478 - DNA, 120 bp, synthetic construct
  source 1..120: mol_type = other DNA
ttatagttcagttgaacctcaatgaggttcaatgagttaggaaaatccatatgaaagaccagagatcagctaattttccccacaagagccagatggaaaatagttcaggttttgcaggcc

SEQ ID NO: 4479 - DNA, 120 bp, synthetic construct
  source 1..120: mol_type = other DNA
acagagcaagactctgtctaaaaaaaaaaaaaaaaagatggatcaaagacttaaatctaagacctaagacctgaaactataaaaattctagaagataacattgaaaaaaaccttctagac

SEQ ID NO: 4480 - DNA, 120 bp, synthetic construct
  source 1..120: mol_type = other DNA
aatgcagggatccaatttcattttcttctaaatggaccatcaattttttctcttcctcactgaggagcaaacttctgttatataccaagtttccttatacccacaagattgtttctggat

SEQ ID NO: 4481 - DNA, 120 bp, synthetic construct
  source 1..120: mol_type = other DNA
ttaaaaaatacttatttagagcccattctctcaatacaggtcagtactatgaaggagaggtacacagtgaaatcaggcctagtccttacagacatgttggtatgccagggagtcaacttt

SEQ ID NO: 4482 - DNA, 120 bp, synthetic construct
  source 1..120: mol_type = other DNA
gtcaacagaacactgccttcttacatcattatccaactttctactttgtcacctctatctcaaaattgacggtctgatagctagtttattttatatttgccccaggttgtgctctacctt

SEQ ID NO: 4483 - DNA, 120 bp, synthetic construct
  source 1..120: mol_type = other DNA
aagataattgattagagaacgagggactaaaatatcctcacaatggagagcatagatacattgaatgtggtgtcaaaacgtgatatcttgatcatcgctgagacctcacacagaaagtcg

SEQ ID NO: 4484 - DNA, 120 bp, synthetic construct
  source 1..120: mol_type = other DNA
cccaaatcctggaatgacgatcgccaacataaaacttttgtcataaaaggaagcacacagctgaaaggaaatggttccttgcaacacgttcagtacttacaagacaagataattcattgc

SEQ ID NO: 4485 - DNA, 120 bp, synthetic construct
  source 1..120: mol_type = other DNA
ttttactttttctgaaataggacatacatgcactctgataaaacagaatgaaacatcttaattcatgagaattcctgtacaaggcgctgatcctgtgtttagagctgagctcctcacagc

SEQ ID NO: 4486 - DNA, 120 bp, synthetic construct
  source 1..120: mol_type = other DNA
atttcacatgtgacactaagaaaatggaatgctataaaatcaatcctcatcaccgtggtagggatgctgttgcttttatcctgagtctttactgccaataagtgatgctgcttccaaagg

SEQ ID NO: 4487 - DNA, 120 bp, synthetic construct
  source 1..120: mol_type = other DNA
gtgactcttggcttctcaatgctagacatgattggagacctttcattgttctattagaaaagtccatgaagaagctgtgaacaggatcagtccagaggagaaaaactcttattttctctg

SEQ ID NO: 4488 - DNA, 120 bp, synthetic construct
  source 1..120: mol_type = other DNA
gaaaaatacaagttttccaaatttcttgtagagtcctaggaactggagcacactgctgaagccattgtagatccactcaaagaggaaagacattattcatgcttattatggcctgaaggg

SEQ ID NO: 4489 - DNA, 120 bp, synthetic construct
  source 1..120: mol_type = other DNA
tcctgaaaacttttggccatgggcttgtttttaaagtaattgcttttttcacccatggttcacaattagcagcagatctagcaatctggaatccttctagccaagttcacactgatcatc

SEQ ID NO: 4490 - DNA, 120 bp, synthetic construct
  source 1..120: mol_type = other DNA
gcataatgagatctgggggacaccatgttagtcaagtgactaaagttaacagcatcgattttaagacaaactatccttatacacttttctgaaatgttgcatcattattggctcctgaat

SEQ ID NO: 4491 - DNA, 120 bp, synthetic construct
  source 1..120: mol_type = other DNA
gaagtaaaagctgaaaaataacagaagtagggtcagtggccagactgactgacgccactgaccaggcctgaatgtaaaagattaacccccaccctaaccgcatgtgcggttaagctctgg

SEQ ID NO: 4492 - DNA, 120 bp, synthetic construct
  source 1..120: mol_type = other DNA
tatgatacttcctgccagatcaaggccttagcatctactgttttgtctactctgaagaatttactacctcacttatagatctgagcctaaatgacacttccctagaagagctttccttga

SEQ ID NO: 4493 - DNA, 120 bp, synthetic construct
  source 1..120: mol_type = other DNA
agagggaaataaaagttgcaaaacacactctgcccttaaaatgtcttcccagaagttaaacaatcactgtaaccactgggcagttcttgtgaggcgttccaaatgtgagtttggaaatgt

SEQ ID NO: 4494 - DNA, 120 bp, synthetic construct
  source 1..120: mol_type = other DNA
ggcagacaagggagcactcagattagactggtcccatcccacaggtaagatagccctgctccgttcaggtctggcagttaccataggctgagaccacctagaggagcatggtgagctttg

SEQ ID NO: 4495 - DNA, 120 bp, synthetic construct
  source 1..120: mol_type = other DNA
gtcatcaaaaaataacccacatcatttctcttcacattttattggcaaatcatattaaacagccaggtctgcattcgataggacagggatgtgcaattttaccatctgcctagaagggga

SEQ ID NO: 4496 - DNA, 120 bp, synthetic construct
  source 1..120: mol_type = other DNA
actccgctggtagtgagttgggagaagtgcataaaggtagattgggtaacaacagagatccaggtaaaaggtggatccctttgtgttctttcattttttgtgttttctgaagatatgatc

SEQ ID NO: 4497 - DNA, 120 bp, synthetic construct
  source 1..120: mol_type = other DNA
cattgccttctggaactagcacatttcttcagcagaggaactgtgatatttctcctctggactactgctgtcttgtgaacaataaatgtttattgaatgactaccacagataaagagtaa

SEQ ID NO: 4498 - DNA, 120 bp, synthetic construct
  source 1..120: mol_type = other DNA
gcgcccagccaacagaggaaggattttctaattgttgacagaatttagtgaaatcaccagagcctggaaaataggaaaatgagttcaaaggtcattaccatcattgaagataaggaaaga

SEQ ID NO: 4499 - DNA, 120 bp, synthetic construct
  source 1..120: mol_type = other DNA
atgatattaacaggaccacaaaaaggggcatttgtagccaagccctatctgagaagccaagtagtataaactcttttggggagctctcattttcccaattcatgatgactcacttatttc

SEQ ID NO: 4500 - DNA, 120 bp, synthetic construct
  source 1..120: mol_type = other DNA
tgtgtctgtctcctaaatgccatgcatgtaggtccatttccacaaagaactaccgtgggtattagtaataaaattatggctacttgtgatatatagtaatgaccacagatgtcatctccc

SEQ ID NO: 4501 - DNA, 120 bp, synthetic construct
  source 1..120: mol_type = other DNA
gtacagtgcctctggagccagaatctgccagggttttattactggattgtgtgatcctgggcaatgaatgaacattcttgtgctacattaaaaaacaatctctgacttgataaaaagaga

SEQ ID NO: 4502 - DNA, 120 bp, synthetic construct
  source 1..120: mol_type = other DNA
ttcatctttatgaaccagcttctgttctggccatctttttccaacctacatcatcttgcatttctttgtgctcctgtcactctgagttcagttttggttcctcaaatcaactgaaagaag

SEQ ID NO: 4503 - DNA, 120 bp, synthetic construct
  source 1..120: mol_type = other DNA
ttttgcccactgaccaagaatgaaattagcatgaaacctggactgcatcaagaacatgtgagaaaaatacttatgaggagaggaaaatgtgtatagttagtgtgtcttcagtcattgggg

SEQ ID NO: 4504 - DNA, 120 bp, synthetic construct
  source 1..120: mol_type = other DNA
tatacacattgaaatttaaggttagcattaattcactgggtcagaacacacagaaattacatgaaattgcaatagggggaatagtttttgaaagaagcagctgagggctggggcggtggc

SEQ ID NO: 4505 - DNA, 120 bp, synthetic construct
  source 1..120: mol_type = other DNA
gttgaatatgccttagttattacaagtggtctttattcttggtgacttagggattcccaagaaatgtgcaatcactcctggcaactcaaagtagtaataagttaacctcaagagaacaat

SEQ ID NO: 4506 - DNA, 120 bp, synthetic construct
  source 1..120: mol_type = other DNA
ttctatgccagccagccagtgccaaggacttcagagataagccacaatacctgcctatgtgtctggttggaacatgaacatggaaacaaaccatttaatcatttactcaataaatcttta

SEQ ID NO: 4507 - DNA, 120 bp, synthetic construct
  source 1..120: mol_type = other DNA
tttggcctggtgttcactttctttatatatttatgaacaatttaataatgaggtgaaatagccttaagtctgatatatgatgcacccacatataaatggaaatggcatgcacaaagacac

SEQ ID NO: 4508 - DNA, 120 bp, synthetic construct
  source 1..120: mol_type = other DNA
agacagatgaaaatgaaaacacaacataccacaacttatggcatgtagcaaaagaagatattagcaagaggaatgtttgtagtaataaatgcctatattaaaaaagaagaaagatcccaa

SEQ ID NO: 4509 - DNA, 120 bp, synthetic construct
  source 1..120: mol_type = other DNA
agcaagaaaacaaagaaccccttttaaaactgagcaaaacacttaatggacatctttcaaaagatgacataaaagactaacagatacataacaaaatttctcaacatcaaggaaatacaa

SEQ ID NO: 4510 - DNA, 120 bp, synthetic construct
  source 1..120: mol_type = other DNA
ctgactagtgtgtccagttcattcctaccaagataaccactctttaagagagccttgtccagaaaagaagttaatttcacgtatgtcagtcacgcgagacgcaagtaaaaaaaaacacgt

SEQ ID NO: 4511 - DNA, 120 bp, synthetic construct
  source 1..120: mol_type = other DNA
gtaagactataacatcatactgaagatatttctgtgaagagttttgtactgagaacaccacaccaggacaacttgaagggcattaattgcaactttgggatttatactcccaaaggcccc

SEQ ID NO: 4512 - DNA, 120 bp, synthetic construct
  source 1..120: mol_type = other DNA
gttagatttaaaacattggcaaaaatgttataagaaggcaattaggttgatgtttctaggttgcatggcaaccagagagccccttcatcagtttatacatgatgaggtcgtaggccaggt

SEQ ID NO: 4513 - DNA, 120 bp, synthetic construct
  source 1..120: mol_type = other DNA
cagccatatatcagagaagggacactttctaacagggatccttttagaacctgactcaagattcttttgtctttgaaatatctaagcagccagccaaaccagaacagccaaactccaaaa

SEQ ID NO: 4514 - DNA, 120 bp, synthetic construct
  source 1..120: mol_type = other DNA
actgttgtgcctcaaagcactcttcctttctctcttacacctcccggtgtttttgttagactctgtaatctttctgtcttccaataataattatacccccatgtaactttggaagcactc

SEQ ID NO: 4515 - DNA, 120 bp, synthetic construct
  source 1..120: mol_type = other DNA
ttcttctacttggattttctaactggcctcatctggaagtagttctctttgtggttatcttgatcttctacttgataacactgataggaaacctgttcatcatcatcctgtcatacctgg

SEQ ID NO: 4516 - DNA, 120 bp, synthetic construct
  source 1..120: mol_type = other DNA
gttgtttttcctagggtcttatccattttgaaaggttgtttccctgcttctttgtgatttgtgtttcatctaacagctcacaaaacatggaatagttcagttcccccatttgttgctctg

SEQ ID NO: 4517 - DNA, 120 bp, synthetic construct
  source 1..120: mol_type = other DNA
catagctcctgtaggaagacagtgctattaaatgaaacaaagcagaatatgtgcttaatttgctttagttggcctagttaatgacatattaaagatagcttaaaactcttaacatccttg

SEQ ID NO: 4518 - DNA, 120 bp, synthetic construct
  source 1..120: mol_type = other DNA
gataagtacccagtgggattattgggatcacatcacatctcacacagacttcacaaaatatgagaacatagattcctcctgcctccgtggaaatcttaccatttgtaatatgtcatgtgt

SEQ ID NO: 4519 - DNA, 120 bp, synthetic construct
  source 1..120: mol_type = other DNA
cttttcacctctcaagttaggttacctgtggctataatttgcattgaggggtgttgacattgaccatcctcttgtgtgcttttcatatgcttcatatatgttattttgtgtagcttctgt

SEQ ID NO: 4520 - DNA, 120 bp, synthetic construct
  source 1..120: mol_type = other DNA
tcacacctaaaaatgttaacatttgctggcacccagtagattggcaggggccaaaaactctcctacaattctagttaccaaaacatgaaaaatattggagcttggtacaatctcctacag

SEQ ID NO: 4521 - DNA, 120 bp, synthetic construct
  source 1..120: mol_type = other DNA
tgcactaggcatcgaggataatgtttacgtatttttcacatggagttttcacaacaatcaagactactgaagccaagactgttttcagttgcttcacataagtggacaggaaaatacctg

SEQ ID NO: 4522 - DNA, 120 bp, synthetic construct
  source 1..120: mol_type = other DNA
tcctaattgatgtagtagatgagggaagtgtaggcatttatgttggtgatttcaaggtgatcaaaatcagagatcagatcagtctgtgcatgatgagggcatcagctaggaagacaatat

SEQ ID NO: 4523 - DNA, 120 bp, synthetic construct
  source 1..120: mol_type = other DNA
tgttccaaacttttctgctgaaactcaaccaattagctactcctgacatttctttcaggcattgaatttataaaacatgagcgattaagagacccctaaaagaggcaatcacaggtggcc

SEQ ID NO: 4524 - DNA, 120 bp, synthetic construct
  source 1..120: mol_type = other DNA
gcttcacacaaaaggcattctctgcctcttgaaactaaagtctgggtggggttgagttcttatgaactctcttgaaagacaagcttttagttatctcagatttctgaactcttttcaaaa

SEQ ID NO: 4525 - DNA, 120 bp, synthetic construct
  source 1..120: mol_type = other DNA
cattgtcagatttctttaaaaagtgaagtacttagcgttcccttgacccatctttgactcctccctagttgctgttctttgagtaataggaaaagcccaacacaacctcctgttatacat

SEQ ID NO: 4526 - DNA, 120 bp, synthetic construct
  source 1..120: mol_type = other DNA
caactctaagaactacactcaggttctcctccattttcctgcccctcccacttttccttccttctctgttctctcactgaatttttatcttcctttcctttctgtaaagtttgaatcttt

SEQ ID NO: 4527 - DNA, 120 bp, synthetic construct
  source 1..120: mol_type = other DNA
atatcactgaagtgacagcatgtcctgttcagagcatcatcacagcaggctcatgatgttggtttgtgcaaatacagttgatcttaagatcaataaaatcactggttatggtggtgtctg

SEQ ID NO: 4528 - DNA, 120 bp, synthetic construct
  source 1..120: mol_type = other DNA
caatgctagctctgaggggtactttattttagttggattttctaattggcctcatctggaagtagttatctttgtggttgtcttgatcttctacttgatgacactgataggaaacctgtt

SEQ ID NO: 4529 - DNA, 120 bp, synthetic construct
  source 1..120: mol_type = other DNA
gaattgtagtaagagaggctttgaaacagtatagcagaagtcagcatctgagatccctcttttttgcaaggcagtgagaaatatataggaagtaaaaggagctggtaaagctgagctatg

SEQ ID NO: 4530 - DNA, 120 bp, synthetic construct
  source 1..120: mol_type = other DNA
attctgctgactttatcttccttctgcatctctgactcttcctttatttctaactaggcatgaaaaatatgaggcatgtgcccttgtccttaaccttacccaagaagtgaagaaccaaga

SEQ ID NO: 4531 - DNA, 120 bp, synthetic construct
  source 1..120: mol_type = other DNA
atttatttatttatttattttttatttatttatttatttatttttattatactttaagttttagggtacatgtgcacattgtgcaggttagttacatatgtatacatgtgccatgctggt

SEQ ID NO: 4532 - DNA, 120 bp, synthetic construct
  source 1..120: mol_type = other DNA
tgttatcctttgtcttttttcataatagacattctaactgatgtaaggtatgaggtgatatctactggtgtgggcctggactttaggtccactggagcctagagcagtggggaccatccc

SEQ ID NO: 4533 - DNA, 120 bp, synthetic construct
  source 1..120: mol_type = other DNA
gaaaacatttgtgaactgggatttccaaagcacacatgaatttgtatggcaagcaactttactgaagaactaacagtgaagccagctttttcccagataggaatgaaggctaacctcatg

SEQ ID NO: 4534 - DNA, 120 bp, synthetic construct
  source 1..120: mol_type = other DNA
tcctcagctatgtcctcttccatgtattggatttgtcatcaagttgattcccctcacaatcacgaaacattgtcagcaataatcaggcctatatgcttccttgttcacattcaagaggtt

SEQ ID NO: 4535 - DNA, 120 bp, synthetic construct
  source 1..120: mol_type = other DNA
gtgtcactcatacctcaaccaaacatttcatatttgcagcaattatgcttattcacataaggttgtaaattcctcaaggctcaaccaatggctgagaagtgttttgggccactgtacctt

SEQ ID NO: 4536 - DNA, 120 bp, synthetic construct
  source 1..120: mol_type = other DNA
aaatctaattgaggtgccaataatttctgactttgtcccagagcaccttaaaggcaatcagttctagcaaaatctagaaaccacctaacataaacttgtcagtatggcccaatcgcccat

SEQ ID NO: 4537 - DNA, 120 bp, synthetic construct
  source 1..120: mol_type = other DNA
tgtcattattttgatgctgaaatggtcactgttttggctagagaggaccccttccagttggctcatatatcttttttatatgtctccatacttcttaaggccaagatgggcagatcacaa

SEQ ID NO: 4538 - DNA, 120 bp, synthetic construct
  source 1..120: mol_type = other DNA
ctgaatttcatcacatctataaagtccttttgccatgtaaagtaacgtataatcacaggctccacagattagggtgtgatcatttgcatcccagggaaaaagcctaccatgatcccttgt

SEQ ID NO: 4539 - DNA, 120 bp, synthetic construct
  source 1..120: mol_type = other DNA
caaggcaatcctaagaaaaaagaacaaagttagaggcatcaccttactcaaatgataccagagggctacagtatccagaacagcatgataccggtacaaaaacagatatatacaccaatg

SEQ ID NO: 4540 - DNA, 120 bp, synthetic construct
  source 1..120: mol_type = other DNA
gcacgagtatgttcattgcagcactgttcacaacagcaaatacatgaaatcaacctaaatgcccatcaacagtagattgggtaaagaaaatgtggtacatagaccccatggaatactatg

SEQ ID NO: 4541 - DNA, 120 bp, synthetic construct
  source 1..120: mol_type = other DNA
caaggagacatgagactcacatcagagttctatggcttaacatgggggatggtggtaagtgcggctctatttggattttgtaattataaaagcccactttatgtagagagaaaaaaaaga

SEQ ID NO: 4542 - DNA, 120 bp, synthetic construct
  source 1..120: mol_type = other DNA
aaaaaagtgtatgaaaagctaaattatttttcatggagtcctgccctgagaacaaggcatcaaatcctctaagtgtataggaaatttgagttcaaaatagatgctttgaaaaaaataaag

SEQ ID NO: 4543 - DNA, 120 bp, synthetic construct
  source 1..120: mol_type = other DNA
accccacttaagacagcaataaaatagggtttggatgagcatttcaatcttgaggaaaacctaacctgtttgcaaaataagcctaaggattggatgacaagtttaccactgggcaaaaag

SEQ ID NO: 4544 - DNA, 120 bp, synthetic construct
  source 1..120: mol_type = other DNA
gtcactaaaacaaaagcactgaaaatttatgctagcaagaatgcaaagtgagggaaactctctttgattgctggaagaaatgcaaagtggtgcaactaatttgaccatttggcaattttt

SEQ ID NO: 4545 - DNA, 120 bp, synthetic construct
  source 1..120: mol_type = other DNA
ttctcactgttggtatgagaagttataggtaaacaagaaaggaaggccagaatgatcatgagggactgtgctagagtcagagttacactgtgacatcatgtttaaacacaagcacgaata

SEQ ID NO: 4546 - DNA, 120 bp, synthetic construct
  source 1..120: mol_type = other DNA
cttactgatctattaatagtctccacttttgggggtggagctcgtgatctccttcattaagtataggctggattcagtgactgttttccaaggaatagagtatggaaaggtaacaattgt

SEQ ID NO: 4547 - DNA, 120 bp, synthetic construct
  source 1..120: mol_type = other DNA
tctttgtctaaacatgcacctacaaaacaaacaacatcaacttccaacctaaccactctggatcagtttaacaaacttcataccctactgacctgtcccctgcatttgaattctaagcct

SEQ ID NO: 4548 - DNA, 120 bp, synthetic construct
  source 1..120: mol_type = other DNA
tcccggactcagccagattgaaaaagatgacaagacaaccagctgcagagaggaggtacccaccctagggtctcctctctgctgagagctgaaaaggcaatggtacggccagctgtgaaa

SEQ ID NO: 4549 - DNA, 120 bp, synthetic construct
  source 1..120: mol_type = other DNA
gctttcactgagagagaccaaattatcgagtaaatcaacataaattggacagatcttaggaaagaaaatgctgagcgtgaagaggcaaagctaaagctgaggctgtagagacagaaagct

SEQ ID NO: 4550 - DNA, 120 bp, synthetic construct
  source 1..120: mol_type = other DNA
gagtagaagagtggttactagaggagctggatagggtagggtgaagaggggaatgaggagagtatgatcaataggtacaaagttagagttagcatgaataagttgtagtgtttcactgta

SEQ ID NO: 4551 - DNA, 120 bp, synthetic construct
  source 1..120: mol_type = other DNA
gaaagaaatgattagaggatttgctgcacttaagaatttgagatctgagataatgaatcccctgagatagaagaagatgatgtccccatggtgcagttaactctactgtttgctcagtgg

SEQ ID NO: 4552 - DNA, 120 bp, synthetic construct
  source 1..120: mol_type = other DNA
gtcgttgaaataatctacaccttctgctcaatcctgcagacttaaaacatcatcaccactgtctttggctcatctctttcccagaggacacacatttaacaaaatttccaagttaacctc

SEQ ID NO: 4553 - DNA, 120 bp, synthetic construct
  source 1..120: mol_type = other DNA
aacacacattctttaatatcagccttggttctggttcctggttctcattcaacatagatcctcctttcagtctcccatattgccccatggaatttcagatggaaacattgaattcttcat

SEQ ID NO: 4554 - DNA, 120 bp, synthetic construct
  source 1..120: mol_type = other DNA
agagcacgctttctctttcaagtataatgcgtcccttctcttctacagaatttttcaaaagttgactgaagtatccttcatgctgtagcatactgagcagtatatattccctggaaatgc

SEQ ID NO: 4555 - DNA, 120 bp, synthetic construct
  source 1..120: mol_type = other DNA
ctgattctaacacagttagttccaaaaggcattcctggctgttccaaattgtgcacggaaatgcttccaggttgtgtttcattattaatatcacttccttgttatctcactgattcgaag

SEQ ID NO: 4556 - DNA, 120 bp, synthetic construct
  source 1..120: mol_type = other DNA
atactagcataggaagcaagaattaagcatagtgggacagctaacataaaaatgcataccacagagagtgtgagctcgttagaacccttttcaccacaggcaatctttatcagaacagga

SEQ ID NO: 4557 - DNA, 120 bp, synthetic construct
  source 1..120: mol_type = other DNA
tattgtttcctatctttaggtgtctgatagagtaaatgtggcctggggctgaggaacaggatggttcattttcagaaacagtgctgcaaggcattactgaaatgctaagaagaataaaca

SEQ ID NO: 4558 - DNA, 120 bp, synthetic construct
  source 1..120: mol_type = other DNA
acatctttaaaaagttgggaccacatgggtttcttgccttgcagaaacactaagagttcatttcgtatttcaaacattcttgacagaacttttccccgtgataaccaccgtatctcagca

SEQ ID NO: 4559 - DNA, 120 bp, synthetic construct
  source 1..120: mol_type = other DNA
tttcattacatcttcaaagtcatcctgtgaggtgtcatacaaagctcctcagggctaacatgtgaatgttgccctttgattatatgctatctcacgccggaagtgtgcaaaacaataata

SEQ ID NO: 4560 - DNA, 120 bp, synthetic construct
  source 1..120: mol_type = other DNA
taataaattcattttagctaactgtaacatttttacttcataaacttcttaatttctttaactttttgattattgaataacacttaaacccatcatacagctgtacaaaagtatgttctt

SEQ ID NO: 4561 - DNA, 120 bp, synthetic construct
  source 1..120: mol_type = other DNA
ttgtctgtgagtggtggtcacccagagctcctccatttctctggacatttccctgaagacatcagactaggaatgactaatcaatgtgatttaattttgaagtatatttaagctctgtaa

SEQ ID NO: 4562 - DNA, 120 bp, synthetic construct
  source 1..120: mol_type = other DNA
acaattgtctgtgtatgacaaaactcgttaccacagccactggcaaaaacgtgattgacaaagaaattttggtaatgtataaaataattattcttgttccactttatacaaataatcagg

SEQ ID NO: 4563 - DNA, 120 bp, synthetic construct
  source 1..120: mol_type = other DNA
ccagaccctattcctgttgatgtctcctgttttatctccacttccatcttcattctagtgtagcttatacttcatttttaccatacacaatattttctttatatgtactgcacttgtaga

SEQ ID NO: 4564 - DNA, 120 bp, synthetic construct
  source 1..120: mol_type = other DNA
ggttaggaagacaatagtagaaaatatcagaatgctttgtggatgtgttatttgtaagctcttcctgagacctcttgggcattgttttccaacaggccattaatccttatcccagatgag

SEQ ID NO: 4565 - DNA, 120 bp, synthetic construct
  source 1..120: mol_type = other DNA
ttctccctttgctacttcaggccttgtgttggttgctaagcctcccaactgttgctagattcagagtagtccatatataatacatatacagaaatcccttgttgatgttcctaaatcctt

SEQ ID NO: 4566 - DNA, 120 bp, synthetic construct
  source 1..120: mol_type = other DNA
gggtggagttttctgtagaggtcaattagctgtagttagtttataatgctgttcacatcttctatttccttgtggacctttatctaattgttctattgttattgaaagtgggatgctgac

SEQ ID NO: 4567 - DNA, 120 bp, synthetic construct
  source 1..120: mol_type = other DNA
taaaaattccctgttctccttccattcatcatttcctcccctcctccccgggagcccctgacaaccactgattttttattgtttccataactgtgctttttccagaatatcatacaattg

SEQ ID NO: 4568 - DNA, 120 bp, synthetic construct
  source 1..120: mol_type = other DNA
tttcagctctttgaccctatttttaaagtagctgatgtaagcctttgtccaacaagttcaacacctagatttgctgctattgattgcatttccccctccttttatgacccatacttcctg

SEQ ID NO: 4569 - DNA, 120 bp, synthetic construct
  source 1..120: mol_type = other DNA
ttctcagagttttatacatctttgggttatggctgataaacgaaacataaagtatcacaggttgtaatggggacctattgtgtttgactagtgtgtaactgccaccacatgtgactcacc

SEQ ID NO: 4570 - DNA, 120 bp, synthetic construct
  source 1..120: mol_type = other DNA
ttgttgcttgcttgtttagtgaatactcccaaataattctctaaagtctgccttctttgtggtgtagggccattaaaatctgtactcaggtagtctagtggccagcaaataattggacag

SEQ ID NO: 4571 - DNA, 120 bp, synthetic construct
  source 1..120: mol_type = other DNA
ctgctgagaaaatgctttttgcattggtcgaggtctgagtcatggtcaaatacagacagactcatgaatgaagtcttccaaaaagccccagccaggtaaattaaagacatatctttataa

SEQ ID NO: 4572 - DNA, 120 bp, synthetic construct
  source 1..120: mol_type = other DNA
aggatgatagcttccagctccatccctattactgcaaagaccaaagtctcgttttttatagctgcatagtattctgtggtatatatgttttctgtatccagtccaccactgatggacaac

SEQ ID NO: 4573 - DNA, 120 bp, synthetic construct
  source 1..120: mol_type = other DNA
cagcactatttattgaagagtttctggcaggcagcaggcagcatataatttggtcttgtttttaattcatttaaccattgtatgtcttttaaatagaatgtagtctgtttacattcaatt

SEQ ID NO: 4574 - DNA, 120 bp, synthetic construct
  source 1..120: mol_type = other DNA
ctggtaggagcgtaaaatgacacagacactttggaacactgttttgtggtttctttaaaagttacacataccttatggcccattcattcaactcttaaatatctgttcaagagaagtaaa

SEQ ID NO: 4575 - DNA, 120 bp, synthetic construct
  source 1..120: mol_type = other DNA
cagccattcacccattctagctgaaagtcttgggtatttatatgggccaaaatttccattatttgtctccccagaaatgtaaaatcatataagccctgtttcttagcctcttagtcacca

SEQ ID NO: 4576 - DNA, 120 bp, synthetic construct
  source 1..120: mol_type = other DNA
aggaatggatccagttgcagctttctacatggtggctagccagttttcccagaaaatattataaacaactctatggaaataaactagaaaatctagaagaaattgataaattcctggaca

SEQ ID NO: 4577 - DNA, 120 bp, synthetic construct
  source 1..120: mol_type = other DNA
tcccttttgatttcttcattaaccctttgtttattcaagagcgtgttggttaatttccacgtatgtaatattttcaaattttatcgtattatttatttctattcatttctactttcatac

SEQ ID NO: 4578 - DNA, 120 bp, synthetic construct
  source 1..120: mol_type = other DNA
ttcatctcataaaagtacagctacccttgtcttttgctttccacttgcatgaaataattttttcaatcaatgtgtgttcttcaagttaaagtgaacctcttacaggcagcctacgtctgc

SEQ ID NO: 4579 - DNA, 120 bp, synthetic construct
  source 1..120: mol_type = other DNA
gcgaaaaattaaggctttcatgctatctatatctactacacaaagtcaaaagtcaaatagagcttacaatgtggcaaaatatttctaacttctgtgacattagttgcttcacctcaactc

SEQ ID NO: 4580 - DNA, 120 bp, synthetic construct
  source 1..120: mol_type = other DNA
actttgtctggtgaaaatggtgtccctgatggctttagcattttggaaggtttaacaggcaaacttctttgaatctcatcatgtttcctcttcattgtgctggtttcatagcaaaggcta

SEQ ID NO: 4581 - DNA, 120 bp, synthetic construct
  source 1..120: mol_type = other DNA
caacgacggatagcggccacctggccactggtcttccttctctaccagacctgtatgtgggaagagagaagtggtggaacaacaggccacatttggcgcattggagatgaaattcttggt

SEQ ID NO: 4582 - DNA, 120 bp, synthetic construct
  source 1..120: mol_type = other DNA
tgacggtcctttatgttgatgttgacgttgtttctgtttgttagttttccttataacagtcaggcccctcttctgcgggtctgctgcagtttgctggaagtgtactccagaccctgtttg

SEQ ID NO: 4583 - DNA, 120 bp, synthetic construct
  source 1..120: mol_type = other DNA
gctgcaaaccagaactgctcctatttggccgtcttcggcttcatccttttgtgtttttaagaacagtcttccctatgaattttaccaaaaagtgtactcagtacagtagtttactaactc

SEQ ID NO: 4584 - DNA, 120 bp, synthetic construct
  source 1..120: mol_type = other DNA
ctcctctctaccaccaacctagtggatataggcatatgtgtcatttagaactgatgttatcatttcacttccaaaagtccttttcagaagatagcctttctatgaatttcaacaaagtgt

SEQ ID NO: 4585 - DNA, 120 bp, synthetic construct
  source 1..120: mol_type = other DNA
aatgtgcaagtatgagcacactagcatgttaccttttgcagtttcatccgtcccagctcctctaaactactgagcaagtatagacagtactataccactcacaaagatggcttaataatt

SEQ ID NO: 4586 - DNA, 120 bp, synthetic construct
  source 1..120: mol_type = other DNA
ctgaacaaatgtggttgtgtctgtcgttcctggtatggcttccagaagtggtccaacaattccattgcgaaaagccatttccagaagacatctattttctatcatttctttttgaacaaa

SEQ ID NO: 4587 - DNA, 120 bp, synthetic construct
  source 1..120: mol_type = other DNA
attagtaatgatgaacaattttttcatctagacagaaatcaatagggaaacactagacttgacatacactttggaccaaatggacctaaagacgttatagaacatttcatccaacagcaa

SEQ ID NO: 4588 - DNA, 120 bp, synthetic construct
  source 1..120: mol_type = other DNA
tttttgaaaagataaaaacaattgacaaaactttagcagaccaactaagaaaaaaaagaagactctaataaaataagaaatgaaagaggagacattaaaattgaaactacgcaagtacaa

SEQ ID NO: 4589 - DNA, 120 bp, synthetic construct
  source 1..120: mol_type = other DNA
ggactgggagaaaatatttacaaaccatacatggctaatatccaaaatatgtaagaaatgcaaacaacttaaatttgttagcaagaaaacaaataacgccatttaaaactgagcaatgga

SEQ ID NO: 4590 - DNA, 120 bp, synthetic construct
  source 1..120: mol_type = other DNA
agacgccaagaagacacataaaaaaaaatagtataagtagttttattacttaaagattccagagagaagagggcaacttgcctcacaggcctaatgggagaaagggcatcccttagagac

SEQ ID NO: 4591 - DNA, 120 bp, synthetic construct
  source 1..120: mol_type = other DNA
gaatttttctgttggcatggtttacagagggtcagatacagcattataacttcttttgtgatgttcttgtatttcgcttgtaactctttctccatgcgagtacgtccaccatgtccaatg

SEQ ID NO: 4592 - DNA, 120 bp, synthetic construct
  source 1..120: mol_type = other DNA
tagtttttctgttgaatgactctcaaatctctcctttttttccagttgtcttgtacatttgagccttagccccacgggaaactgaaaaaaaaaatcggacggctcagtaaaacctcttcc

SEQ ID NO: 4593 - DNA, 120 bp, synthetic construct
  source 1..120: mol_type = other DNA
aaaacattggcaaaaatgttataagaaggcaattaggttgatgtttttaggttgtatggcaaccagagagccccttcatcagtttatacctgatgaggttgtaggccaggtagagagtga

SEQ ID NO: 4594 - DNA, 120 bp, synthetic construct
  source 1..120: mol_type = other DNA
gtataagaggaagagttggctgtggcaggaggggagcagaagggggatggcaaaactatgtaggaatattgaaatgctgggttcctgtattttattgcaaaaactatatcataaaagagt

SEQ ID NO: 4595 - DNA, 120 bp, synthetic construct
  source 1..120: mol_type = other DNA
aagcatataaagggaactgtataaaaattctactaccattatggtgcacactctctggaagtgggatacttttgtcttcaatctgtttgcaagtgagcggttgacaatgcatggacagac

SEQ ID NO: 4596 - DNA, 120 bp, synthetic construct
  source 1..120: mol_type = other DNA
tatctccagccaccatcagaaaattctcctgatcagggcaagttcattgccctcttttatactgttgtcacaccgagtcttaatcctctaatctacactctcagaaacaagcatgtaaaa

SEQ ID NO: 4597 - DNA, 120 bp, synthetic construct
  source 1..120: mol_type = other DNA
ctctgtctgaacagaacacactctctgtcaggaaaaatggcaacataaaagatgaagtatctgtgcatggcttaatttgtcactgggggtaatgctaatacattaagacagcttttaaaa

SEQ ID NO: 4598 - DNA, 120 bp, synthetic construct
  source 1..120: mol_type = other DNA
aatttcaaacttagagaagaattgcaaaaaagtagtacaaagactgacatttaccctataaccagattaagcattagtttacattttcccccaaagctttgttatatcatctatctatct

SEQ ID NO: 4599 - DNA, 120 bp, synthetic construct
  source 1..120: mol_type = other DNA
tgttcctatttctccacatcctgtccagcacctgttgtttcctgactttttaatgattgccattctaactggtgtgaggtggtatctcattgtggttttgatttgcatttctctgatggc

SEQ ID NO: 4600 - DNA, 120 bp, synthetic construct
  source 1..120: mol_type = other DNA
atgagcatggaatgttcttccatttgtttgtatcctcttttatttcattgagcagtggtttgtagttctccttgaagaggtccttcacatcccttgtaagttgtattcctaggtatttga

SEQ ID NO: 4601 - DNA, 120 bp, synthetic construct
  source 1..120: mol_type = other DNA
tttttggttggtaagctactaattattgcctcaatttcagagcctgttatttggtctattcagagattcaacttcttcctggtttagtcttgggagggtgtatgtgtcgaggaatttatc

SEQ ID NO: 4602 - DNA, 120 bp, synthetic construct
  source 1..120: mol_type = other DNA
gagttactgcaccaggccagggggataccattttgattaaggaatccaactttggtggaatgaagagcgtaaatgaaactccagccaataacaaaaagtttcaaacaataaagagcagaa

SEQ ID NO: 4603 - DNA, 120 bp, synthetic construct
  source 1..120: mol_type = other DNA
tagcccattcaagacatttacaccaaatattttattcaatgtttcttgtctaagaagaaggatgttattttacataagtcctgcacagtacccaaatcagcaaatttaatatgggcacaa

SEQ ID NO: 4604 - DNA, 120 bp, synthetic construct
  source 1..120: mol_type = other DNA
tcatgtcctgttcagagcagcatctcagcagtctcatgatgttggtttgtacaaatacaggtgatcttaagatcaataaaatcacttggttatgttggtgtctgccaggtttttctactg

SEQ ID NO: 4605 - DNA, 120 bp, synthetic construct
  source 1..120: mol_type = other DNA
tgtatctccagccaccatcagggaattctcaagatcaaggcaagttcattgctctcttttatactgttgttacacctagtcttaaccctctaatctacaccctcagaaacaaagatgtaa

SEQ ID NO: 4606 - DNA, 120 bp, synthetic construct
  source 1..120: mol_type = other DNA
gtatacttaggtgaggtaagtgcttggagcaactgcattacctaaagagctatggagaacatttgaggcaaatagagaggctctgaaaatgacttgaagtcaatgggtgtataaaagaat

SEQ ID NO: 4607 - DNA, 120 bp, synthetic construct
  source 1..120: mol_type = other DNA
agcatctccccattttccctccctccactgctaacccctgacaagcctcattctactactttgtgcttctatgagttcattttatgtagatttcacacattagatcgtacagtatttatt

SEQ ID NO: 4608 - DNA, 120 bp, synthetic construct
  source 1..120: mol_type = other DNA
ccctgaacccgtgacaggccccagtgtgtgatgttgccctccctgtgtccatgtgttctcattgtttaactaccgcttatgagtgagaacatgcagtgtttagttttctgttcctgtgtt

SEQ ID NO: 4609 - DNA, 120 bp, synthetic construct
  source 1..120: mol_type = other DNA
tataagaattctcttttctccatattcttcccaccacctgttgtcctttgtgtttttcataatagatctaactggtgtgaggtatgaggtgatagctactggtgtgggcctgaactttag

SEQ ID NO: 4610 - DNA, 120 bp, synthetic construct
  source 1..120: mol_type = other DNA
acagagtctgacctagggggccaactggcactggaaagtcctattttgccgttttattgatatcacttctcactctctaaattttttttggctttttaattttctgggctcttttctcct

SEQ ID NO: 4611 - DNA, 120 bp, synthetic construct
  source 1..120: mol_type = other DNA
gcaattttactgtagaactaacagtgaagccagctttttcccagataggaatgatgactaactgcactgaagcatcagcttctttttccctgtaaacttctgtcaggaataccacaaaag

SEQ ID NO: 4612 - DNA, 120 bp, synthetic construct
  source 1..120: mol_type = other DNA
tttgatttacatttctctaatgaccagagataatgagctttttttcatatgtttgttggctgcatcaatgtcttttttagagaactgtctgttcatatccttcgcccactttttgatggg

SEQ ID NO: 4613 - DNA, 120 bp, synthetic construct
  source 1..120: mol_type = other DNA
ttgtaacctctgactcccttcttttaaaaaaactttacttgcaaaccattggggaaactgggtcttaattttgaggggaccaattctccttgcttgacactctgcaaataaatgccctct

SEQ ID NO: 4614 - DNA, 120 bp, synthetic construct
  source 1..120: mol_type = other DNA
ctgtaaaggattttgtttctccttcacttatgaagcttagtttggctggatatgaaattctgggctgaaaattcttttctttaagaattttgaatattcgttctcactctcccctcgctt

SEQ ID NO: 4615 - DNA, 120 bp, synthetic construct
  source 1..120: mol_type = other DNA
ttgcttctagaagctggagtagttgaggaaacatgttctgtcctagagcctgcggaagatgtgcagccctgtagatccaatttagtctttctttctccagatatataagatatttttgtt

SEQ ID NO: 4616 - DNA, 120 bp, synthetic construct
  source 1..120: mol_type = other DNA
aaagtttttgtattgtgcttgagagtggggcaatggtgaagaacagtgactggctatgggtttggggagtcatttggcaggagtgtaaatccttgaaatttgaagatctttcaaattacc

SEQ ID NO: 4617 - DNA, 120 bp, synthetic construct
  source 1..120: mol_type = other DNA
atactaagattcagtatcattaaaatggccacactggtccaaagcaatttatagattcagtgcaattcctatcaaactaccgatgacattgttcacagcattagaaaaaaactattttaa

SEQ ID NO: 4618 - DNA, 120 bp, synthetic construct
  source 1..120: mol_type = other DNA
gaatgcttatacactgctggtgggaatgtaaattaccttagctattgtggaaaatggtgtaatgattcctccaagaacttaaaacagaactactcttccaccaagcaatcccattagcgg

SEQ ID NO: 4619 - DNA, 120 bp, synthetic construct
  source 1..120: mol_type = other DNA
tgtatgaaatgacattaattctctcatactttagggttgcttgttagtgcctagaaggaatacagtctctgtggccagtctccttggatcaacaagagccttgtagtttcccatttttca

SEQ ID NO: 4620 - DNA, 120 bp, synthetic construct
  source 1..120: mol_type = other DNA
tttcatggagtcctgcccttagaacaaggcattaaatcctctaagtgtataggaaatttgagttcaaaatagatgctttgaaaaaaaggaatgtttttgaaaaatgcgaatttttacaga

SEQ ID NO: 4621 - DNA, 120 bp, synthetic construct
  source 1..120: mol_type = other DNA
actgagtaaacagttgatgaatattccctactatacttggagaagataaaatggatgctgggacttagaattggatcaaatcagaacaagtaccaatcaatgttcagtcaaaggtgattg

SEQ ID NO: 4622 - DNA, 120 bp, synthetic construct
  source 1..120: mol_type = other DNA
cttgaggaatcgccacactgtctaagcatttgtctagtaagaaaatgtaatttgaaagtaaggttcagaacatttaaccaaatgttcaagtaatttctaaactgtattgagaaaatggaa

SEQ ID NO: 4623 - DNA, 120 bp, synthetic construct
  source 1..120: mol_type = other DNA
acatctggggaaaaaaaacccactgggatggaaacacatcagtggtatccagggcttagtgtaagggagattagtttattacaaagaagacacacaggggaatttttaaatgatggagtt

SEQ ID NO: 4624 - DNA, 120 bp, synthetic construct
  source 1..120: mol_type = other DNA
ttccaatgtatacacagtcattatgtgacaaaaattgtggtcagaggctacagcaatgggacccatgactacactgacaagtgctcagtatttacatacagaggtatctgatttatccac

SEQ ID NO: 4625 - DNA, 120 bp, synthetic construct
  source 1..120: mol_type = other DNA
agagatcgttggagaaatgtctgattataagatatttctaagcctggtgaagaaatatataagagaagcctggagaagaaccagtaataccagaaatcagggaggggccctgaagagaaa

SEQ ID NO: 4626 - DNA, 120 bp, synthetic construct
  source 1..120: mol_type = other DNA
cctggtgtctgatctctccctgctcctggtgcgtgctctgatctcggagcgtggttgaggccaggcccaggtgctattgcaacctggcctggtgtgcccacacttggggcagcactgaca

SEQ ID NO: 4627 - DNA, 120 bp, synthetic construct
  source 1..120: mol_type = other DNA
ttctttttttttttttttattaagctaactcacctaacttagtgtgggtcacatatcttggcttgataatcccaagctgtgcttagaaacccaggtagcaccaggacatcctgcagctca

SEQ ID NO: 4628 - DNA, 120 bp, synthetic construct
  source 1..120: mol_type = other DNA
agattttgggctgagatgattaaatcaaccaatttatgttgattaactcaataatttggtctctctcggtgaaagcagtgcttcctggctgcaactaattggacatcttgtcccttccca

SEQ ID NO: 4629 - DNA, 120 bp, synthetic construct
  source 1..120: mol_type = other DNA
ttctggatctggttctagatccttgtggaattgccaccctgtcttccacaatggttgaattaattacactcccaccaacaatgtaaaagcattcctatttctccacatcctctccagcat

SEQ ID NO: 4630 - DNA, 120 bp, synthetic construct
  source 1..120: mol_type = other DNA
gtaggagatatttggttatctgaagggcatagctgataacagtaattgactcagcagctcttccttcttattctattattttcacagcctctactcctcttcaccttttatatggcactg

SEQ ID NO: 4631 - DNA, 120 bp, synthetic construct
  source 1..120: mol_type = other DNA
actgacatgggctgtccttgccaggttcctaatggatttccacaatgagaagctgattttatagacattagtaacatttgcactgtcacagagagaaggttgtggcttttaataaaacca

SEQ ID NO: 4632 - DNA, 120 bp, synthetic construct
  source 1..120: mol_type = other DNA
tttatagcctgctttttcacttagcagcatattgtgagaatgttcatggttaggcagggactaggcagtggagttgggtggaattttgcaaaccatacttaggagtttggattctgtttt

SEQ ID NO: 4633 - DNA, 120 bp, synthetic construct
  source 1..120: mol_type = other DNA
cttatactatagatcattcagaataaagtgctttccatatgtgatctcttttagactgtttatcagaaatgacgtcagtgaattaaaagtattagtataggctgggtgaggtggcttaca

SEQ ID NO: 4634 - DNA, 120 bp, synthetic construct
  source 1..120: mol_type = other DNA
agtaccctgtatgcatacattgatctggtaaatgttttctttttcatccttatcaggaaacatgatcagggagtttgcactcacttggagctgacaatactataccatgtcccagagcta

SEQ ID NO: 4635 - DNA, 120 bp, synthetic construct
  source 1..120: mol_type = other DNA
tgaaatctttactatctgggacaatttacatttgctcaccttgtagtaatgagcccttgagaggtaaggagacatttcattatggacctcatcagtaggtcaaatggcctaaaaccccaa

SEQ ID NO: 4636 - DNA, 120 bp, synthetic construct
  source 1..120: mol_type = other DNA
gccagagccatacaacagaaactgatgtctctataggacaggagttaaaacgcatccctttggtttctgtttctgggaataacaatgaaagcacgttaaagaaatatctcctaaaccgtg

SEQ ID NO: 4637 - DNA, 120 bp, synthetic construct
  source 1..120: mol_type = other DNA
cacttacgcctccaagagagaacacttccaactctaatggaggagaaaaatgtcaagcttggttcattaatgggtcagcttgctatgtgagtccaagtcaaaaaggatgaagataaatta

SEQ ID NO: 4638 - DNA, 120 bp, synthetic construct
  source 1..120: mol_type = other DNA
attagagtcatggagggatctgttgaagctacacctgaaattccagctcagatgaaatgtcatccttcaagacccagtactttaaatcaattatctttctatggtgctctgtcctcacta

SEQ ID NO: 4639 - DNA, 120 bp, synthetic construct
  source 1..120: mol_type = other DNA
aaggcttgccgttggcctcagctcagaacatcaatgaattgtcatctcatattgagaacttcctacagggttcagtgaaactttagtagtttgcattacaaacttccaaagtaggtagtt

SEQ ID NO: 4640 - DNA, 120 bp, synthetic construct
  source 1..120: mol_type = other DNA
atggggaaaggaaaagcaatctgaatagacaaaaaacgaaaccagtagttagtggttatgaagtggatgaaaatcgaagggtggggtaagaggcaggttgattctgaacatggaaaaatc

SEQ ID NO: 4641 - DNA, 120 bp, synthetic construct
  source 1..120: mol_type = other DNA
aaagtaagaacaaaaatgttacctacttttcctaacatcacacagcatgaaggtggctgagggagaattcaagctcatcaataacagacagagtgaaaaggaggaatggagaagaggaga

SEQ ID NO: 4642 - DNA, 120 bp, synthetic construct
  source 1..120: mol_type = other DNA
gtattttttcccaaaatacagctggtgaaaatcttatccttgagtagaaaggaatcaaacaagtcatataccacccgtcttcctgtctgtactggaaccatcacaggcttttgaggaact

SEQ ID NO: 4643 - DNA, 120 bp, synthetic construct
  source 1..120: mol_type = other DNA
ggagatacacctcctaagccaaaagtaggagagaaagagctgcattctgttcaggttgagatttcagtttccttcatcaatcaattgggcccttaaattcttcatattgtggatttagac

SEQ ID NO: 4644 - DNA, 120 bp, synthetic construct
  source 1..120: mol_type = other DNA
tagctattatttgtcttctccatttacaaccaaactttttcaattttggaaggaatattaggttcagccactgtgttgcttcagattgcagctaacaacactggtctagcaagtgcttcc

SEQ ID NO: 4645 - DNA, 120 bp, synthetic construct
  source 1..120: mol_type = other DNA
ctggaattagttaaggctttgagggacttgttggaagggcataattgtgttttgaaatgtgaggacatgagacttgggaggggccaggcacagaatgatagggtttggccttgtctccac

SEQ ID NO: 4646 - DNA, 120 bp, synthetic construct
  source 1..120: mol_type = other DNA
cagagttgggtctgtagttaagatcaagagcagttgacagaattggtagcagcacaagagatcatgagccacctaaggtgacctaactgagttgtttctggagatctaattttttttttt

SEQ ID NO: 4647 - DNA, 120 bp, synthetic construct
  source 1..120: mol_type = other DNA
tagaaccgggaggaactccacttctgcctctaccacagaagtttgaagagtaccttgggtagtggtaataaattacaaaactgaagttacttcaaactggtcatgacagtcattagtctt

SEQ ID NO: 4648 - DNA, 120 bp, synthetic construct
  source 1..120: mol_type = other DNA
ggaaactaatttctaatttcttagcagatacatactggcttctcagccaggctactgacctttaccccttacatacacaccttaacttctgtatgaacatggatgtgactgcattgggta

SEQ ID NO: 4649 - DNA, 120 bp, synthetic construct
  source 1..120: mol_type = other DNA
tactagatcttgctgtctgcccttgtctctgcgtattagtgagcgtcctctcctgactcaacaaagaaagtaagagaatgaagtgtatagaactgaaaatgccttgacatattctttttc

SEQ ID NO: 4650 - DNA, 120 bp, synthetic construct
  source 1..120: mol_type = other DNA
agaaaaataaattttggaaagatacagtgagtaccccaccaaatgaaagaaccagtaggaccatcaggttactggagtaaaatgaatcagggtaggcctggggaattcagattggaagta

SEQ ID NO: 4651 - DNA, 120 bp, synthetic construct
  source 1..120: mol_type = other DNA
ctctctctctccccaccccatgaaccttgactaactaacaaacctcaaggcttgcaaaaatcattctcaaaaaatacttttctgatgattattgacatgaaaggggcatgaaagcaggta

SEQ ID NO: 4652 - DNA, 120 bp, synthetic construct
  source 1..120: mol_type = other DNA
tgttaccaggagacatgagactcacagcagatctctctggcttaacatgggagatggcggtaagtgcagctatatctgaatttttttaatagttaaaagctgactttatccaaataggga

SEQ ID NO: 4653 - DNA, 120 bp, synthetic construct
  source 1..120: mol_type = other DNA
atgaaaatgataaaatagttagagatatagtgggaaaaaaagagacccacggggaaacaccatgatagactgagccaaatgtagagctcagctcttcctcccccaggatcataacatatc

SEQ ID NO: 4654 - DNA, 120 bp, synthetic construct
  source 1..120: mol_type = other DNA
aaaaaactctttctgccttctcttgacctccctttccctacagctattgaatcatttcttcctgccttcagcaaagcactattcatgagttttctatgctttctgtctctaagttgtctc

SEQ ID NO: 4655 - DNA, 120 bp, synthetic construct
  source 1..120: mol_type = other DNA
aaggcacacaaggatttttatggtagggaagacattgctattgttttcaacagagaaataggaggattaggcagaggaagggaattaggagaaatttcaccgaaaaagcccatgaagctt

SEQ ID NO: 4656 - DNA, 120 bp, synthetic construct
  source 1..120: mol_type = other DNA
tgcacagaggccaaagatactgctgagcatcctaaaatgcagaagagagaccctgacaacagaaaattatctgttccaaaatgtccagagggctaagggtgagaaattttgatttataaa

SEQ ID NO: 4657 - DNA, 120 bp, synthetic construct
  source 1..120: mol_type = other DNA
tgtgaaaaaagttgagcgctgtgtactctgcttcattttttatgtgcctaagtctctgttaaataatcgcagtgctcctttcacgtcattattcctcagtgtgtagatgagaggattgag

SEQ ID NO: 4658 - DNA, 120 bp, synthetic construct
  source 1..120: mol_type = other DNA
ccagatatcatattagtgttcaagactggaagtgagaaaaggtgaaactaaagtaatctcccctatcctatcaggaaaataaaagcttccccaggaacctcctccccgaaatatgcttat

SEQ ID NO: 4659 - DNA, 120 bp, synthetic construct
  source 1..120: mol_type = other DNA
ctgggggacaatactggtggtaaaacagatatcaactaaggagaggtgagtaagaaaaaatacatgggtgtcttgagtttagggtctacagagcagatcagaataattactgtatttccc

SEQ ID NO: 4660 - DNA, 120 bp, synthetic construct
  source 1..120: mol_type = other DNA
atcatctaaaaattgtacttagcagtactcaatggaaatgaaaagaagtcacaggaaaagtcagaggaggcatgggtaccccataaaaggatgaagacactgagtgatccctcaaaatag

SEQ ID NO: 4661 - DNA, 120 bp, synthetic construct
  source 1..120: mol_type = other DNA
atagagttcaaaccattattaccttcaagtgacaactcagtgtctaaggctcatgtattggttgtcggggctgttatttgagattggagatcactgaagatcagcaaatcaggagacact

SEQ ID NO: 4662 - DNA, 120 bp, synthetic construct
  source 1..120: mol_type = other DNA
agtaataaaagagtggtgaacattttgctgcacatgccacatctgaagaaaacaacaactgctgagcgctagttgaccaattttctatgcattgagccccaggattgcaaaatattctga

SEQ ID NO: 4663 - DNA, 120 bp, synthetic construct
  source 1..120: mol_type = other DNA
atgtaagcattttggcagggacgatactgtggagaaattgcttaggtttgaggtatgcatatattcagctttggtagataccaccaattctggaagttggttgcacaaacttaaactcca

SEQ ID NO: 4664 - DNA, 120 bp, synthetic construct
  source 1..120: mol_type = other DNA
caagtgcccaaggtgattgaattacaacttgatttacattttaggagcatgtaaaaaatcagtcaatacatgtggggtctgtgttggttcagtcatgaaaggtggaacaactcaaagtgg

SEQ ID NO: 4665 - DNA, 120 bp, synthetic construct
  source 1..120: mol_type = other DNA
ccaccttaatcttatggccagcaccatcttgtctgctccttattctacacgtggctgacaaagagaagggaagatggagccaccattttgatcatgcttaatcccaggtagcctttttct

SEQ ID NO: 4666 - DNA, 120 bp, synthetic construct
  source 1..120: mol_type = other DNA
atttacctgcacatgtgctgtatccttttttttttttttttgagacaggatgtcactctctcgcccaggctgcggcgcagtggcacaatcatggctcactgcagtcttgacctccccagt

SEQ ID NO: 4667 - DNA, 120 bp, synthetic construct
  source 1..120: mol_type = other DNA
aatagattttcctagttctgcaaagaatgttgttggtattttgataggaatatcattgaatatgtaaattgctttgggcagtatggccattttaataatattgattcttcctatccacga

SEQ ID NO: 4668 - DNA, 120 bp, synthetic construct
  source 1..120: mol_type = other DNA
tgtccctgcaaaggacatgaactcatccttttttttatggctgcataatattccatgggttatatgtgccacattttctttatccagactatcattgatgggcatttgggttggttccaa

SEQ ID NO: 4669 - DNA, 120 bp, synthetic construct
  source 1..120: mol_type = other DNA
ctgcagaaaagtgacaggatttatggggaaaatacggttaaagggtggactattttaacacctacacaactttgtcactagagcattattaaaactataacaactcccggctggcgcacg

SEQ ID NO: 4670 - DNA, 120 bp, synthetic construct
  source 1..120: mol_type = other DNA
tgtggcattatttctgaggcctctattttgttccattggtctatatatctgttttggtaccagtaccatgctgttttggttactgtacccttttagtatagtttgaagtcaggtagtgtg

SEQ ID NO: 4671 - DNA, 120 bp, synthetic construct
  source 1..120: mol_type = other DNA
ttgtgtatgttgaaccacccttgcatctcagggatgaagctgacttgatcatggtgaataagctttttgatgtactgcttgatttggtttgccagtattttattgaggatttttgcatca

SEQ ID NO: 4672 - DNA, 120 bp, synthetic construct
  source 1..120: mol_type = other DNA
gagtgagtttcttaatcctgagttcgaatttgattaaactgtggtctgagagactgtttgttatgattcccattcttttgcattttctgaggagagttttacttccaattatgtggtcaa

SEQ ID NO: 4673 - DNA, 120 bp, synthetic construct
  source 1..120: mol_type = other DNA
cccccactttcttctggcttgtagggtttctgcagagagatctgctgttagtctgagaggcttctttttgttggtattctgacctttctctctggctgcccttaatattttttccttcat

SEQ ID NO: 4674 - DNA, 120 bp, synthetic construct
  source 1..120: mol_type = other DNA
cagtcacgaatgtttaagtctcgaatttgttaattcttaataaaaatgatacacatttctcatgtgctcacatgatcacagctgtactgttaatataatatgtagctgaatgagaaaata

SEQ ID NO: 4675 - DNA, 120 bp, synthetic construct
  source 1..120: mol_type = other DNA
atggaaaacatgaatcctacaaactggttatgacaatcaatggtagcagtacattttaaagaaatatcactgaccccaaaaatccatcagagactatttcgagcacctctatgcacaaaa

SEQ ID NO: 4676 - DNA, 120 bp, synthetic construct
  source 1..120: mol_type = other DNA
gcccaagggggttcagtgtaattatttgcttggttggtgagtttttgggctctatccgtgagtttttttaggttgtcgtataccaggccagattgatttaggtaaaaacaatactcttca

SEQ ID NO: 4677 - DNA, 120 bp, synthetic construct
  source 1..120: mol_type = other DNA
atgactgcaataggctttttggaactagtgggaaagtcctcgagccatccggtgaaggtgtcgatccaaaccaggagatacttaaatttacggacatggggcatatgagtaaagtctaac

SEQ ID NO: 4678 - DNA, 120 bp, synthetic construct
  source 1..120: mol_type = other DNA
cagaaggcagcatggttatggaggatatagaaagcatatctggagtcagtataaatgtcaatgtgcattcctttagtgagagaatgcggtagttaaagcaatcagttcagcttattcgga

SEQ ID NO: 4679 - DNA, 120 bp, synthetic construct
  source 1..120: mol_type = other DNA
caagtgtaggagctgtctccaggacctttttgagaaagtgaaaggaagaatggggaaaagacttaggatctatgggattagttaagttatcctttgtgagcttgtaaagtggttttggtt

SEQ ID NO: 4680 - DNA, 120 bp, synthetic construct
  source 1..120: mol_type = other DNA
agtgaaatcatgctgcgttctgcattgtagtcattatcttttatctactccaactgcttctctatcatacttgaagcagaagataactgagaagtgaaaagctcttgggaggcagcttgt

SEQ ID NO: 4681 - DNA, 120 bp, synthetic construct
  source 1..120: mol_type = other DNA
atcaatacccacaacagttatggaggcaagggaaacaggcctttgtaaagaaggtaatgtggagtgggtagcctccgtatcaattaagaagggacttacctccactgtaagttacctgaa

SEQ ID NO: 4682 - DNA, 120 bp, synthetic construct
  source 1..120: mol_type = other DNA
cctggggaggaggggcaaggtcagatggatctgtagaaaaagaggattcaaaggactcagagcttggggtggagactgaaggaacacataggagagaaagaagaaatatttggcacgagt

SEQ ID NO: 4683 - DNA, 120 bp, synthetic construct
  source 1..120: mol_type = other DNA
gtgagggtgaggacagggggctagtctcctggagcagtccccctgtcccaggtcttcggcaccaaatgttatgtgtgtccacgtgaagagaccaccagacaggctttgtgtgagcaataa

SEQ ID NO: 4684 - DNA, 120 bp, synthetic construct
  source 1..120: mol_type = other DNA
agtactggaagtcctagccagagcaatcaggcaagagaaataaatcaggcaagagaaagaaataaaagtcatccaaataggaagagggaaagtcaaacgatctctcttcagagatgatat

SEQ ID NO: 4685 - DNA, 120 bp, synthetic construct
  source 1..120: mol_type = other DNA
aatttatatcaaacagcaacaacaaaaaagcctgaatagtcaaagcaaccctaagcaaaaacaaacaaacaaaaaacacaaaaccaaacacacacacacacacacacacacacaaaacaa

SEQ ID NO: 4686 - DNA, 120 bp, synthetic construct
  source 1..120: mol_type = other DNA
tgtggttcatttttgagggatagttttcctggatataagactcttggttcaacgttcttttagaactttggctgtcatccccactgccttctagtctccagtatttctgatgagaagtca

SEQ ID NO: 4687 - DNA, 120 bp, synthetic construct
  source 1..120: mol_type = other DNA
gcatggacataaacaacctgggatgagaatagtttgagcagggctttggatgtcttgtctttgcaatgtcatttgctgatttttgttaaccagtcttcgtcatttggtattatactcagc

SEQ ID NO: 4688 - DNA, 120 bp, synthetic construct
  source 1..120: mol_type = other DNA
tcacactgagctgggtaggaaagcaggctgtggctcaagtgccatagactcttgctcttcttagtgagatttagtagagtatcttgaataagtattacttcatttgttgttttctcttaa

SEQ ID NO: 4689 - DNA, 120 bp, synthetic construct
  source 1..120: mol_type = other DNA
caaagcattaatgtgattaaaggatgtgtgttttatcatatacagtgtctaccattgtctgaggtgctttgattctacaacttaaaactttccagctgctgcagtttctgactgcacaat

SEQ ID NO: 4690 - DNA, 120 bp, synthetic construct
  source 1..120: mol_type = other DNA
ggtgtgagaaaggaaaaatggagcacacattgggaatgttgacgctggattgtgcttttatctgtagttattcatgtttcaggcagttcattcctactttctgagaaattgatgagttgt

SEQ ID NO: 4691 - DNA, 120 bp, synthetic construct
  source 1..120: mol_type = other DNA
tggatcaatgcatccaaattctccacatatccccttgagggcatctgcttccaatagagactggtttcataaaaagtaaaaatctgagccaggggatggccttccttatcaatctaattt

SEQ ID NO: 4692 - DNA, 120 bp, synthetic construct
  source 1..120: mol_type = other DNA
aacatgttttgggggacacagacattcacaatacagtggtaggttacccaaatattgtgtttttaagtaccgtttgataaactgtgtatcactacaggtccctgtaggtcacaataccct

SEQ ID NO: 4693 - DNA, 120 bp, synthetic construct
  source 1..120: mol_type = other DNA
ccaatgcttgtatcctgtgctctgggtgatagcactcatgtcattaaattcagttcattcaagctctgtatttcatattccttgacatccacccccaaacatactcttaaagttctcatc

SEQ ID NO: 4694 - DNA, 120 bp, synthetic construct
  source 1..120: mol_type = other DNA
gccaggaatttcttgtaaaaagatgttagtgacctattgtgtctccagaacctttttcttttccaataagccttttcatggcccacttgaactccttattccttagtgggatgggttcaa

SEQ ID NO: 4695 - DNA, 120 bp, synthetic construct
  source 1..120: mol_type = other DNA
cttctttctttaactcttacagtttcctccatgactgtggtagccccacatgcaattttgaccattgcagatatttcacaaaaatagtgatccaggtggtggtctccgcatcgaggaaga

SEQ ID NO: 4696 - DNA, 120 bp, synthetic construct
  source 1..120: mol_type = other DNA
ctcaaaggtgaatcatgagcaaaatggctaaataaaactggatggatctccccttattaaaaaggatattacgaaggggttagaaatctgttacaagttatcacctcctttagccaaggg

SEQ ID NO: 4697 - DNA, 120 bp, synthetic construct
  source 1..120: mol_type = other DNA
cccaacttatactgtgtataaacatctattccagatagattgtagatttagatgtgaaagggaaaaagtatcttctagaatagggtacggaaacttttttggaaaggccagatagtaaat

SEQ ID NO: 4698 - DNA, 120 bp, synthetic construct
  source 1..120: mol_type = other DNA
atgtaagaataataattaatgttgagagagaaggatagggattataaccatgaagcggcactttggccacctctgagtacatttttctaaaacttgacttgggtgggcttttgggtgttc

SEQ ID NO: 4699 - DNA, 120 bp, synthetic construct
  source 1..120: mol_type = other DNA
gtcagttttcttgaagcactcagagaaaaaatgtagaacatctaaaaccaggtgacatggcaatacctccatgctcatccccaaaataagtagtaaaaacttggaaggccaagtgggaaa

SEQ ID NO: 4700 - DNA, 120 bp, synthetic construct
  source 1..120: mol_type = other DNA
tcaattgccatattagaaattgctgggaggaagaatcaatgtcctcttttttccatgcaatctttttcttttccagttagcctcttcatggcccccttgaactccttattccttaccgta

SEQ ID NO: 4701 - DNA, 120 bp, synthetic construct
  source 1..120: mol_type = other DNA
atagtgtagaagaaaaagacaaccccagagatcatcatctgaagctgaggctgccctgtgaatccaaggagtataaaaccactgaagtggctatcattgatcattctgttttttcttaag

SEQ ID NO: 4702 - DNA, 120 bp, synthetic construct
  source 1..120: mol_type = other DNA
cacctggtggccccaaacatcaacttgctgggaaaactcatacatgagcttacacaatttcagcattatactgactcatttctggcatactgacctcattttaaaagattttgcattcca

SEQ ID NO: 4703 - DNA, 120 bp, synthetic construct
  source 1..120: mol_type = other DNA
tttgggggtacacagacattgaatccatagcattctgccttttgtctcccaaattaatgttattcttacacacacaaaaaaattgatcttatttcagtagcccccaaagtcttaacttat

SEQ ID NO: 4704 - DNA, 120 bp, synthetic construct
  source 1..120: mol_type = other DNA
ttcagttcagactgacagtgtttctgcttatataatcccgtaatctctttatcgagtgagggtccagccacacctttggtggttttttttttttctcagcatgctttctcatcttttgca

SEQ ID NO: 4705 - DNA, 120 bp, synthetic construct
  source 1..120: mol_type = other DNA
tatgagtatggggaactcagactgtctgatgtgtagctaagcttaaacctgttgtaaacttggttaaattcagttaaccactgtcttcaactattttgaaggaagggtgggcctgaattc

SEQ ID NO: 4706 - DNA, 120 bp, synthetic construct
  source 1..120: mol_type = other DNA
aacatgagagcccttaaaagatattctaattttatgtgctggctcaaacagctgggagaagctaagaccatttcttcattgggttgatttaaaaactcaactaaccagggtggagccaaa

SEQ ID NO: 4707 - DNA, 120 bp, synthetic construct
  source 1..120: mol_type = other DNA
tctggagtggacctccagcaaactccaacagacctgcagctgagggtcctgactgttagaaggaaaactaacaaacagcaaggacatccacaccaaaaacccatctgtacgtcaccatca

SEQ ID NO: 4708 - DNA, 120 bp, synthetic construct
  source 1..120: mol_type = other DNA
agccaagctaagcttcataagtgaaagagaaataaaatcctttacagacaagcaaatgctgagagattttgtcaccaccaggcctgccctaaaagagctcctgtaggaagcactaaacat

SEQ ID NO: 4709 - DNA, 120 bp, synthetic construct
  source 1..120: mol_type = other DNA
tgaatgactactgggtacataatgaaacgaaggcagaaataaagatattctttgaaaccaacaagaacaaagacacaacataccagaatctctgggacacatttaaagcagtgtgtagag

SEQ ID NO: 4710 - DNA, 120 bp, synthetic construct
  source 1..120: mol_type = other DNA
gacaaaaaccacatgattatctcaatagatgcagaaaaggcctttgacaaaattcaacaacacttcatgctaaaaactctcaataaattaggtattgatgggacatatcttaaaataata

SEQ ID NO: 4711 - DNA, 120 bp, synthetic construct
  source 1..120: mol_type = other DNA
caatggggaaaggattctctatttaataaatggtgctgggaaaactggctagccatatgtagaaagctgaaactggatcccctccttacaccttatacaaaaattaattcaagatggatt

SEQ ID NO: 4712 - DNA, 120 bp, synthetic construct
  source 1..120: mol_type = other DNA
gtaatgttcaagtttatttgggtatgaaattctaataccatccagagagagttcatgctgcttcaaaataattttaagtgtaattctacaaataaagaaaccatttatatcaataaaaaa

SEQ ID NO: 4713 - DNA, 120 bp, synthetic construct
  source 1..120: mol_type = other DNA
gagctccttttttgttcttggtcaggaaagtttttgatataagaaaacactcaacacaggacaactacagactcagtttaaaaggacttgtttacgtgacaacacagggcagttactcgg

SEQ ID NO: 4714 - DNA, 120 bp, synthetic construct
  source 1..120: mol_type = other DNA
caacttcaggactggtagtcatttatgagatgtgtagctttttgctaatgcaaacaacactgcaacaaaggtctttgtacacccacttctgaatgaatatgtgcaaatttgtgtcaagtg

SEQ ID NO: 4715 - DNA, 120 bp, synthetic construct
  source 1..120: mol_type = other DNA
taacttggaggaggaaaaactagatcaaatttggaagcattggtttgtgttcctagtctacctgtctgtaatcttgagaaactttgattttctcagttttggaattgtcatcagctaaat

SEQ ID NO: 4716 - DNA, 120 bp, synthetic construct
  source 1..120: mol_type = other DNA
aaaaccagcacaagacaagaatgccctctctcaccactcctattcaacatagtattggaagttctggtcagggcaatcaggcaagagaaagaaataaagtgtattcaaataggaaggcag

SEQ ID NO: 4717 - DNA, 120 bp, synthetic construct
  source 1..120: mol_type = other DNA
ggcatggtcaaagacatcatgactaaaacaccaaaagcaatggcaacaaaagccaaaatagacaaataggatctaattaaactaaagagcttctgcacaacaaaagaaactatcatcaga

SEQ ID NO: 4718 - DNA, 120 bp, synthetic construct
  source 1..120: mol_type = other DNA
aacattttcttgatttcttctgtggcatactcattttctagtccctctggttatttttccctggacatgttggcagcagtagaggctaattattttgaatctcggaggcttaaacggaag

SEQ ID NO: 4719 - DNA, 120 bp, synthetic construct
  source 1..120: mol_type = other DNA
ctatttccattacaaagattgtagctattaagatgttgatttttgagaaaatttagctctgaaaggcctaccactcagataatcaaaggttgtttaaatccattagctgggtgtggtggt

SEQ ID NO: 4720 - DNA, 120 bp, synthetic construct
  source 1..120: mol_type = other DNA
agctccagtttttcaccctcaaggggattatcagcctgtttttaacttttgatttaggcgaattccgtattattcttatacagtcagaaaggcaagaactccctgcatcctttctagaca

SEQ ID NO: 4721 - DNA, 120 bp, synthetic construct
  source 1..120: mol_type = other DNA
cccaggtgagaaatgggagaagaaaggaattggatagcaccagtttgaatgaagagtggcattatagagatacaaaatgacaaggtttaaaaaaggagacgtcccagaagtttctagaat

SEQ ID NO: 4722 - DNA, 120 bp, synthetic construct
  source 1..120: mol_type = other DNA
atttgagatgatccttacaggatacataacaacaatggcatttcacatcagcataaatacaaggggtcaagggggaaggtcacaagtttggttggatcagtgaatatgtctgcatggttc

SEQ ID NO: 4723 - DNA, 120 bp, synthetic construct
  source 1..120: mol_type = other DNA
acgatttgaaatatagagctggccaactaagtacatgaaccctactaagtcaggatcacaagaagaatatgacatagggcaactgagaggatcagaaaagtaaatagaggatcctgagct

SEQ ID NO: 4724 - DNA, 120 bp, synthetic construct
  source 1..120: mol_type = other DNA
gtcccccgcctttcctcgttaatttcgggccactttcacctttccctttcaccctaaatcagacttaaaaagaaatgtaagagttagtccattgtttccattttacggattagaaaacca

SEQ ID NO: 4725 - DNA, 120 bp, synthetic construct
  source 1..120: mol_type = other DNA
catgccggccttcgtttgacctgtttttgggaagttctgccttttccttctattttaatctacactctgttgccaccattacatatccatgcatgtagagttgatggtagtatactaaaa

SEQ ID NO: 4726 - DNA, 120 bp, synthetic construct
  source 1..120: mol_type = other DNA
cattgagaaacaaggatgtgaaagctgccctgagaaggtcactgactaaagagttttggattaagacaagatgatatctgaaaagaagtcctaagaagcgaggatagatgtgtttgactt

SEQ ID NO: 4727 - DNA, 120 bp, synthetic construct
  source 1..120: mol_type = other DNA
aagatgaacagtgagatgctttggatagtgatcagcaggggaaaaacctgaggtggaaaaaattctaatttagggacacaaactcagtgggaatttacatgttttgacaaggcagctttc

SEQ ID NO: 4728 - DNA, 120 bp, synthetic construct
  source 1..120: mol_type = other DNA
aaaatatgggtgcttggagaaatgttttgctgatgtgggtggctgctcaagatatgtcccccaagccctagaaatatattttgattcactttcattattacagatatgccagagaaaaat

SEQ ID NO: 4729 - DNA, 120 bp, synthetic construct
  source 1..120: mol_type = other DNA
gaggaagctatccaagaatgaggaaagaaccacttaatggattaaggtaaatagtgcccaatgcttatgcaaaggctgggaattttgtgggttctcaagctatttatgtgccagaatgaa

SEQ ID NO: 4730 - DNA, 120 bp, synthetic construct
  source 1..120: mol_type = other DNA
gagaaaaatcaataaatcaaacctgactcagaactgacacatatgttagaatgattcaagttatggcattaaaacaattatactgtttaccatatgttcaaaaatttagagacgaggaag

SEQ ID NO: 4731 - DNA, 120 bp, synthetic construct
  source 1..120: mol_type = other DNA
caacggcatgtgctcccttcatatctctatgtgacgttttggtaattctcacaatatttcagactttttcgttattattgtatcgttattgtcaggcctctgagcccaagctaagccatc

SEQ ID NO: 4732 - DNA, 120 bp, synthetic construct
  source 1..120: mol_type = other DNA
acctcgccctgcctgagttaaacttctagtggaaaaccccttttatataagccacaagcagtttcagactgtccaatgttattattactaacataaattaatgtaggctttcttttatcc

SEQ ID NO: 4733 - DNA, 120 bp, synthetic construct
  source 1..120: mol_type = other DNA
ttattgttcataaacagccttatgaaaacgtgtgatccttactgagacaccatattgtggtacttaatgtggtactatatttgtcactggagatcaaaataaagtttattggtctgcaac

SEQ ID NO: 4734 - DNA, 120 bp, synthetic construct
  source 1..120: mol_type = other DNA
actgctcaatgaaataaaagaggatacaaacaaatggaagaacattccatactcatgggtaggaagaatcaatatcgtgaaaatggccatactgcccaaggtaatttatagattcaatgc

SEQ ID NO: 4735 - DNA, 120 bp, synthetic construct
  source 1..120: mol_type = other DNA
actagactacaattcaccaagttactgggcttttttggtttgttttaaacttaaatcctcccccagaaactgccaagccaacatgtgttacatgtctatcccattctttttagtggctgt

SEQ ID NO: 4736 - DNA, 120 bp, synthetic construct
  source 1..120: mol_type = other DNA
aaaagtcaggaaataacaggtgctggagaggatatggagaaacaggaacacttttacactgttggtgggactgtaaactagttcaaccattgtggaagtcagtgtggcaactcctcaggg

SEQ ID NO: 4737 - DNA, 120 bp, synthetic construct
  source 1..120: mol_type = other DNA
catttttttaacctgaaatgcatcgactacaagagttagctaaaccaagataataattaactacttcccactgaggcaattccctgagggagaggtccatgaaatcccctgctttgaact

SEQ ID NO: 4738 - DNA, 120 bp, synthetic construct
  source 1..120: mol_type = other DNA
gaggggcaattctaatgggaggacttccagacaggagggatagtgtgatttaagaaaagaaacacagcatggtgatacaacctgattgatttattaagagtaattaagtcagtcgccatt

SEQ ID NO: 4739 - DNA, 120 bp, synthetic construct
  source 1..120: mol_type = other DNA
tagttatttgtggatttgctggagctgtttgtgaggactcatgaagcaagaatgattaacatggttcaagaattgaaccaaatgtgccagggcacagaatgataccctattctgctcata

SEQ ID NO: 4740 - DNA, 120 bp, synthetic construct
  source 1..120: mol_type = other DNA
tgaggggcttaacatataattacctatgttttctcattgaagttattggcaatgctacctcccaggaaatagaggaaaatagtgaagaagagacacaggatgctaactctttagagcagc

SEQ ID NO: 4741 - DNA, 120 bp, synthetic construct
  source 1..120: mol_type = other DNA
tgaagcaggggatgtgaccatcagtgagggattaagggcccttccagccctgagactgttccttgtggaaaaaaaaaatttcctaaaaattagtttcagtcagttctcaaaataaattac

SEQ ID NO: 4742 - DNA, 120 bp, synthetic construct
  source 1..120: mol_type = other DNA
gattagcttctgagctgtttctagatctgcctctgagctgtttctagatccatttgcaaggtggtatcaataacttcatgttagctggttagcaaaagaagctatatagtgcatcgttgt

SEQ ID NO: 4743 - DNA, 120 bp, synthetic construct
  source 1..120: mol_type = other DNA
caccaattcttctgtgatgttcctcagatgctgaaactagcctgttcttatgaattcattaatgagattgcactggctgcattcacaacgtctgcagcatttatctgtttgatctccatt

SEQ ID NO: 4744 - DNA, 120 bp, synthetic construct
  source 1..120: mol_type = other DNA
gagtttgacaaattggttttacagagttaggcaggggatgctccctagttccatgaaacagaatatagataaactgcaaatgaagagttccaacttatgaatgtgtgagataaggaggca

SEQ ID NO: 4745 - DNA, 120 bp, synthetic construct
  source 1..120: mol_type = other DNA
ctttatagtagaatgatttataatcctttgggtatataccctgtaaagggattcctgggtcaaatggtatttttggttctagatccttgaggaatcgccacactgtttccacaatggttg

SEQ ID NO: 4746 - DNA, 120 bp, synthetic construct
  source 1..120: mol_type = other DNA
tttctgagacttgagtcacaaatcagggttctggtgagcttgaccacgccttaatatatattaggagccagttcacatcctcaccctcctccttagaatttggcttgatttattaattta

SEQ ID NO: 4747 - DNA, 120 bp, synthetic construct
  source 1..120: mol_type = other DNA
ttctatccaagcatgaaagtaccaagctctttcgcctagaagaacgctttcaaagcgtatcaaattcacgggtttggagacaaagagaaagatgctgctcttatcgacttacgaaaagct

SEQ ID NO: 4748 - DNA, 120 bp, synthetic construct
  source 1..120: mol_type = other DNA
ttaaataggggattctttccccattgcttgtttttgtcaagtttgtcaaagatcagatggttgtagatgtgtggcattatttctgaggcctctgttctgttctgttggtctatatatctg

SEQ ID NO: 4749 - DNA, 120 bp, synthetic construct
  source 1..120: mol_type = other DNA
tgagataatcatgtggtttttgtcattggttctgtttatgtgatagattccatttattgatttgcatatttgaatcagctttgcatcccaggaatgaagctgacttgatcatggtagatg

SEQ ID NO: 4750 - DNA, 120 bp, synthetic construct
  source 1..120: mol_type = other DNA
agaccgaagctgtttctattccaccatctttccagccacccacactgatttctaaagtagttgttccatattatattccctagataatcaagaattgttataaagggctgggcgtggtag

SEQ ID NO: 4751 - DNA, 120 bp, synthetic construct
  source 1..120: mol_type = other DNA
agtgagtgttaatgatcattctttttctatacagatatatagtttttagtgtgatttattgaaaagacattattttcccccattgatttgccttagcaccttgtcaatatatgggcttac

SEQ ID NO: 4752 - DNA, 120 bp, synthetic construct
  source 1..120: mol_type = other DNA
ggttggatctcaagtgcagaaggttgagttcattacatttatcagttcatggcaccctgtcctcattaatatgtgcacgatctctctcatcttactttatttaaaacatttctttcctgt

SEQ ID NO: 4753 - DNA, 120 bp, synthetic construct
  source 1..120: mol_type = other DNA
ggggcagacgtgttcctgtcatttcctcacctgtcccaattcttggcactaccctgctttctaatacttactactcaaatagaatacaatgttacctcacttttaaactttggagaaatt

SEQ ID NO: 4754 - DNA, 120 bp, synthetic construct
  source 1..120: mol_type = other DNA
aaacttgagtgaacttcctggttggcattattctgcatgtgttatcgtaccattgatggcacaattaagcacatcaatgtaactcactggaagaaaacacctggaagcttattcctggtt

SEQ ID NO: 4755 - DNA, 120 bp, synthetic construct
  source 1..120: mol_type = other DNA
caaagtaggtttagcaatttacacccttaccaaccttgtatatgagctctcagagctttacatacttatccaacgagttactactctaaggatactgacagatacagcacactctacttt

SEQ ID NO: 4756 - DNA, 120 bp, synthetic construct
  source 1..120: mol_type = other DNA
ttggtgtcctctctttttgtccactcatctacctgtctgttcctgtgctaacactgtactgtcttatttcctatacattgtaaatcttgctattagaacaaatctctgaattttattcct

SEQ ID NO: 4757 - DNA, 120 bp, synthetic construct
  source 1..120: mol_type = other DNA
tactgggggcatggttccttgagcccactaaagtactgatctaccccaggagcctttattaaattgacaaagtcccttcttatttcaggtctgctaaacttttcatcataaatatatgct

SEQ ID NO: 4758 - DNA, 120 bp, synthetic construct
  source 1..120: mol_type = other DNA
tgtgaggtgtcaaggtgagggaaaggtgtgccctagaggacagagaggacaagaactaaattagaaacaagtatttgtgtttcgtacaaattaatctcttctatgatgtaagagacaacc

SEQ ID NO: 4759 - DNA, 120 bp, synthetic construct
  source 1..120: mol_type = other DNA
gatacttgattctatgccatagttctagttagttatcatagctttgtaagttttgatatccagtggtgtgacttctccaacttggtttttcttcatgtcattgtggcttttggttgcatg

SEQ ID NO: 4760 - DNA, 120 bp, synthetic construct
  source 1..120: mol_type = other DNA
agtctaaaattcaactcaggaataaaaatttcacttagtggtcatgtcctttgagggtcttttaatctggattagctcctcagtcttttctcttataacgttggcagcttggagttcctg

SEQ ID NO: 4761 - DNA, 120 bp, synthetic construct
  source 1..120: mol_type = other DNA
ccccaaactttgacctactcatttaagtattcactgataatttttgcttaaatttttgcttataatttttattataattgtagcaaaatggtgattttctaagtctaccatctctttcac

SEQ ID NO: 4762 - DNA, 120 bp, synthetic construct
  source 1..120: mol_type = other DNA
gagtttttatggtttcaggtcttagatttaagtatttgactcattttcagttgatttttgtataaggtgagagatgatgatccagtttcattctcctatatgtggcttgccaattatccc

SEQ ID NO: 4763 - DNA, 120 bp, synthetic construct
  source 1..120: mol_type = other DNA
gatgcagaaagattaagcgactaaagtcacctcacaaaggataaatggtagcactagaattaaacccaagcaatctgactgtagttgttatgtacttatatatgatacagtatgccttct

SEQ ID NO: 4764 - DNA, 120 bp, synthetic construct
  source 1..120: mol_type = other DNA
aaaactgtttttaaagacgtaaagtagagctatgagctcaccaaagtccactgaagttcgccaaagagctgagttacttcagctctcatgagaccagtaatttttgcttgacgaaggtat

SEQ ID NO: 4765 - DNA, 120 bp, synthetic construct
  source 1..120: mol_type = other DNA
aacaatcctccttaatatgagggacaaaaaaaaagaccaggctttgaccaagtccttagagcatatttccatttcatgatttatattcaagaaccaagcaacaagctggacagctgcctc

SEQ ID NO: 4766 - DNA, 120 bp, synthetic construct
  source 1..120: mol_type = other DNA
tctcctcccagatgccttctgattgacctagtacactgggttaaaagggaattcaaaaacattaaaaaaaagttcactggttttgattcatctcagtcttttggcctggagattaggcca

SEQ ID NO: 4767 - DNA, 120 bp, synthetic construct
  source 1..120: mol_type = other DNA
acaaaagaaatagggtcaaggttctgacatgtctacaagtcaagtgccatattgttactggagacgtatgtaaaccagtctttagtgtttgctatagagcacaaaggcttgtcataaggc

SEQ ID NO: 4768 - DNA, 120 bp, synthetic construct
  source 1..120: mol_type = other DNA
agggtttctccccttctttcttttcctttcctgtcccctttccccagaaaacatttttttaaaaccagcagttagtgcaactaatgttcacttagcatacagtgcaaacagatggaacaa

SEQ ID NO: 4769 - DNA, 120 bp, synthetic construct
  source 1..120: mol_type = other DNA
tcatcaaagatgtataggcatatcctgggaaaacttcttttccaaagaagatatccagctaaggattgagaatatgatcagctgccgagagaagatgtgttcagaatagaggaccaagca

SEQ ID NO: 4770 - DNA, 120 bp, synthetic construct
  source 1..120: mol_type = other DNA
ttcaggtagcatgagaataatatcttccattaactgcccaaaatcctgggacagaaacttatctgcctcatccaatactatcacctggacatgactgacctttgctactcctttcttaat

SEQ ID NO: 4771 - DNA, 120 bp, synthetic construct
  source 1..120: mol_type = other DNA
tggaaactcccaaaatattgccactctttcctctttggatacctcaacctgcacctccagatataatttctaagatcaattactgagacacacaaagaaatctggtgagattttacgtgg

SEQ ID NO: 4772 - DNA, 120 bp, synthetic construct
  source 1..120: mol_type = other DNA
atggctgactggaagcagctagagtatgctactctcaaagagaggaaagaaagtggcaagtaaatagtagctcttcaggtgaattctctaagagagcatgtcaagattcaccaaggaagt

SEQ ID NO: 4773 - DNA, 120 bp, synthetic construct
  source 1..120: mol_type = other DNA
atcaggctaacagcaaacagaggaaacattataaacttattgggggccttctcagcagaaatcttatgggggacttacattcagcattttttaaggaagagactccaaccaagaatttca

SEQ ID NO: 4774 - DNA, 120 bp, synthetic construct
  source 1..120: mol_type = other DNA
ttaaaacaacagtagtcaaaaaaggataaagaagggctctatgcaatgataaagggtttgatccaaccacatggcttaactatcctgaatatatatgcaaataaaattggagcacctaga

SEQ ID NO: 4775 - DNA, 120 bp, synthetic construct
  source 1..120: mol_type = other DNA
ctagtcccaaagctagaagacaataaataaccaaaattcattagagaactgaatgaaattgagactcaaaaatacatgcaaagtaataaccgaaagctggttcttgtcaaccagatcaat

SEQ ID NO: 4776 - DNA, 120 bp, synthetic construct
  source 1..120: mol_type = other DNA
ggaaatcctagtcagaacaatcaggcaagagaaagaaataaaaagcaacaaaataggaaaagaggaagtcaaattatctccttgctgacaatacgattctatacctagaaaaccttaatg

SEQ ID NO: 4777 - DNA, 120 bp, synthetic construct
  source 1..120: mol_type = other DNA
catctcttcaaatcaccatgccacctcttactaaatgtgactaaaggtttccagaagctagggaaagttctttagcctttctgtggctttgtttcaccatatttaaaaagccccacacat

SEQ ID NO: 4778 - DNA, 120 bp, synthetic construct
  source 1..120: mol_type = other DNA
ccctttacagacatagaggtctggctctatagggacataagtacagttacaaggaactgaaagacttacggaaagtgggcagttaagaaactgaaagtatctttgaagccaaagaaatga

SEQ ID NO: 4779 - DNA, 120 bp, synthetic construct
  source 1..120: mol_type = other DNA
ttagagaatacagaccttgatcctacccacctcctcaaactgtgagagaaggagcagctttgaattgaagaataagagaaatagcttttgggagaagaaccaaatgtcaatgacaacaca

SEQ ID NO: 4780 - DNA, 120 bp, synthetic construct
  source 1..120: mol_type = other DNA
aaataagggaaaagctccatgacattgtctgggcaatgatttttttttttttttgactccaaagcacaagcaacagaagctaaagcagacagatgggattgcatcaaactaacaagtttc

SEQ ID NO: 4781 - DNA, 120 bp, synthetic construct
  source 1..120: mol_type = other DNA
tttttctagcgatagaacttttgcaaatgaaaacacttcttcaccatgcacttatgtaccttttggtcctagagaagaaataatttattttcaaagatgtgctaaccttgtgggttaatt

SEQ ID NO: 4782 - DNA, 120 bp, synthetic construct
  source 1..120: mol_type = other DNA
gaaactgtatactcattggaaaacaatttccctatctccatttcccccatcccctacccttggcaataactttcattctctacttctagaggctaaatgttacaggtcctcacataagtg

SEQ ID NO: 4783 - DNA, 120 bp, synthetic construct
  source 1..120: mol_type = other DNA
ccacatcaattcatttcctccaaataaaaactgatactagtttcttgatacagaaaaagcagaggacttggatagagggaataacagtcactaatttgactgtacctgtattagtccatt

SEQ ID NO: 4784 - DNA, 120 bp, synthetic construct
  source 1..120: mol_type = other DNA
tgaatatatactgtacatacatagtccccagggtgaatgagaactggaactttgctaataccaactctctcccttgcctctctctctgccctctctctatgtatatacatttgtattaac

SEQ ID NO: 4785 - DNA, 120 bp, synthetic construct
  source 1..120: mol_type = other DNA
tggtgttaagaagctgctgttagctctgtgtaaactgtgtggactctttgccagtacagccctcagtgaacacacatctttaatagaaattagcaattgctataacctgtagtcttagaa

SEQ ID NO: 4786 - DNA, 120 bp, synthetic construct
  source 1..120: mol_type = other DNA
ttcacttaaggttaatcaaatttcaaaatgcacattctttttcccattacggtggtataagtaactcattctgtctcttcccctgagaaagttaaaattgtccctgattgcatgtggtat

SEQ ID NO: 4787 - DNA, 120 bp, synthetic construct
  source 1..120: mol_type = other DNA
tccatgacattgatctgggaaagactttttggatatgaccttgaaagtactggcaataaagccaaaaagagacaattttgactacatcaaacaaaaatgcttcagcacagccaagcgaac

SEQ ID NO: 4788 - DNA, 120 bp, synthetic construct
  source 1..120: mol_type = other DNA
tttctcaggtgtataatgccaatgactattggctcccttttctgtttctttatcctcacttcgcacagttcttactgtccttccttttctgttttgagaaaacagggctcaaattgtctg

SEQ ID NO: 4789 - DNA, 120 bp, synthetic construct
  source 1..120: mol_type = other DNA
gctatatttgttcagagctgtgagttaatcattggaagagcatcagaaagtaaagaaaacgaatgggatataaacagaatgtgagaattgcagtggcattgataaaacagatggcaactg

SEQ ID NO: 4790 - DNA, 120 bp, synthetic construct
  source 1..120: mol_type = other DNA
gtgagaaatactaaaacgtatacttcctgtaagatgtgtgttaactgggagcataaaaagtagtaagaaagcaaaaactttcatgcacaaaccctctaggatgttcaatgtcatggtagt

SEQ ID NO: 4791 - DNA, 120 bp, synthetic construct
  source 1..120: mol_type = other DNA
acccaccacacccgtaacaatctttcacctttttgacaaaatcttttttataaaagccgggttttatcaaaaagatgaaagatggtaacaagcgttgacaaggccatggagaacagacag

SEQ ID NO: 4792 - DNA, 120 bp, synthetic construct
  source 1..120: mol_type = other DNA
tataaggtgtaaggaaggggtctagtttcagtttgctgcatatggctagcccattttcccagcaccatttattaaatagggaatcatttccccattgcttgtttttgtcaggtttgttgc

SEQ ID NO: 4793 - DNA, 120 bp, synthetic construct
  source 1..120: mol_type = other DNA
tgaaagtttttagtatgaagggatgttgaaatttatcggaggccttttctgcatctatttagataatcatgtggtttttgtcattggttctgtttatgtgatgaattgcatttattgatt

SEQ ID NO: 4794 - DNA, 120 bp, synthetic construct
  source 1..120: mol_type = other DNA
tttcaagaatggtttagtttctgccttaatttcattatttacctagaagtcagtcaggagcaggttgttcaatttccatgtcattgttggttttgagtgaggttcttaatcctgagttct

SEQ ID NO: 4795 - DNA, 120 bp, synthetic construct
  source 1..120: mol_type = other DNA
gctgatactggtttttcctttctgccccccatgttcatatatttattcaggagtatttaccacctatgataggccaggaattattctcttcttggccctaaagataaagaggtgaacagg

SEQ ID NO: 4796 - DNA, 120 bp, synthetic construct
  source 1..120: mol_type = other DNA
agtcaagacttaatcaagggaggcatcagtaggtatgggaagaaaaagaagacggtcctgagagaatagtgaagaaagacactagacaacttgtatctacctgatctataagcctttttc

SEQ ID NO: 4797 - DNA, 120 bp, synthetic construct
  source 1..120: mol_type = other DNA
gtgtaaattatagggtttagcatgggggtaacaacactgtacaacactgaaaccaacctatctttctttaatgagtaagttgagatgggccgtacatatgtaaagatggcgctgccataa

SEQ ID NO: 4798 - DNA, 120 bp, synthetic construct
  source 1..120: mol_type = other DNA
tatacaacactggaagttttaaattagaatacaaatggacaccatatgtcctagagttctctgttaataatggctgggtcatgctcaccggcattttcttggggatgtgtgaacttgtgc

SEQ ID NO: 4799 - DNA, 120 bp, synthetic construct
  source 1..120: mol_type = other DNA
agcaccaagcctcagcaagataaacgtctggaagatgtcacgcagctagcaggtaaaaaaaaggtaggtttatcactcccaaagctaatatactttcagttgagtggctaaaaatttaat

SEQ ID NO: 4800 - DNA, 120 bp, synthetic construct
  source 1..120: mol_type = other DNA
cccctttcatcttttttaacatttccttccacttctgaggaggaattaacccttctactcattttattcaacaaatgtattttaaggcaaaaatgtggaaaaaagggaactggcacagtg

SEQ ID NO: 4801 - DNA, 120 bp, synthetic construct
  source 1..120: mol_type = other DNA
aaattaaataatttgcctaaagttactcagacttgcagtggtgttattgggttttacatttcactttgtggcctaaacgagtgcactgtgctgatctagattcctggattgaacaagcag

SEQ ID NO: 4802 - DNA, 120 bp, synthetic construct
  source 1..120: mol_type = other DNA
ataatttaaaaagtgaaattaaattaaaaaagaaaacctgtccaagttatgaaatgtgtacctgggaacatcgaagatagaaactggccagaagcggtaatcccacgcctgcaatcccag

SEQ ID NO: 4803 - DNA, 120 bp, synthetic construct
  source 1..120: mol_type = other DNA
cagcacagcgctcaagctctgctaagggacagactgcctctgccagtgaatccctgaccccagtgcctactgactgagagagactccccaacaggggttgacagacacctcatagaggag

SEQ ID NO: 4804 - DNA, 120 bp, synthetic construct
  source 1..120: mol_type = other DNA
caaattcaggaaatacagagaacaccactaagatactcctcgagaagggcaaccccaagacacataatcatcagattatccaaggtcgaaatgaaagaaaaaatgttaaggacagtcaga

SEQ ID NO: 4805 - DNA, 120 bp, synthetic construct
  source 1..120: mol_type = other DNA
tgaattcagctctggaccaagcagacctaatagacatctactgaactctccaccccaaatcaacagaatatacattcttctcagcaccacatagcaattattctaaaatcgaccacataa

SEQ ID NO: 4806 - DNA, 120 bp, synthetic construct
  source 1..120: mol_type = other DNA
acaataaaaaagagggactcctctctagctcattttatgaggccagcatcatcctgataccaaaacctggcaaagacacaacaaaaaaagaaaatttcagtccaatatccctaatgaacc

SEQ ID NO: 4807 - DNA, 120 bp, synthetic construct
  source 1..120: mol_type = other DNA
ttgattttcttctcagaactagaaaaaacgactttaaatttcatatggaaccaaaaaaagagcccgtatagccaagacaatcctaagcaaaaagaacaaagctgggccgggcgcggtggc

SEQ ID NO: 4808 - DNA, 120 bp, synthetic construct
  source 1..120: mol_type = other DNA
ggtctaatatccagaatctacaaggaacttaaacatatttacaagaaaaaacaaacaaccccatcaaaaagtgggtgatggatatgaacagacacttctcaaaagaagacatttatgtgg

SEQ ID NO: 4809 - DNA, 120 bp, synthetic construct
  source 1..120: mol_type = other DNA
tttggtatgtggcctcagaggagaggtatgtactagagatacgaatttgtaacacatcagcatatagaggatagttgaaactactcctatggatgggagagtgtgaagtaggaaaaaaga

SEQ ID NO: 4810 - DNA, 120 bp, synthetic construct
  source 1..120: mol_type = other DNA
caaattgtgctacatgggtcattgttgcctctcataggcatagattgaccctgagacagaatagaattcaccacgcaaagcacaagtatttcacacagagttataggaaaattactgctt

SEQ ID NO: 4811 - DNA, 120 bp, synthetic construct
  source 1..120: mol_type = other DNA
tgacataaaaattacccaaaatgaaagaagcttcctgattcacatactcagtaggctgattgtcacccaaagcatgggacagacaattttattattccctcctttggaactcctcaggtc

SEQ ID NO: 4812 - DNA, 120 bp, synthetic construct
  source 1..120: mol_type = other DNA
gtgggggaagcttacattgcacactacttcgcactgaagaaatattcttcagccaccgaagactgattagtcctccaaatatctattcctttgcatgttatgtgttcttgaagatgtatc

SEQ ID NO: 4813 - DNA, 120 bp, synthetic construct
  source 1..120: mol_type = other DNA
atgaatggatataacatgtagatacttcagccatgtacaagccttaagaccaacataggaaacatctgaatactttattaaatcacagattcaagaacatcccatcccccactgccccgc

SEQ ID NO: 4814 - DNA, 120 bp, synthetic construct
  source 1..120: mol_type = other DNA
ttttgatatatacccattaatgagattgctgtattgaatagtagttctgttttaaattatttgagaaatctccagactgcttttcacagttgctggactaatccacattcccaccaacag

SEQ ID NO: 4815 - DNA, 120 bp, synthetic construct
  source 1..120: mol_type = other DNA
agtattgccagctacatatgttgtacctcgatcaggagtgactacattagtgcctgtgatttagattatatcacactaatgttattgatactagaaagtagtcgtgtgtacccacaacag

SEQ ID NO: 4816 - DNA, 120 bp, synthetic construct
  source 1..120: mol_type = other DNA
cctgattggaacagcttgtaatagacaaggacttaggtggagtcctgagaaggatattaccttagtagtgggggctaaattaatctcagaataaacaatgttctggatctaccttaacaa

SEQ ID NO: 4817 - DNA, 120 bp, synthetic construct
  source 1..120: mol_type = other DNA
acagaattgcagtatcttggatactaataacataagtaaaagtaaaatgtgtgacattaaaatcacaaagcatgagcagggagatggaagtacagtatggcatgactctagcaatacatc

SEQ ID NO: 4818 - DNA, 120 bp, synthetic construct
  source 1..120: mol_type = other DNA
atccctcattagtcctagtggtgttgctgccagtctttaaacaacttcctaccaaagattttcttcagagccatcatcacttctttgttcctaagggtgtagattagtggattcagtaca

SEQ ID NO: 4819 - DNA, 120 bp, synthetic construct
  source 1..120: mol_type = other DNA
aatcccaaagaagaaaggctgcagctcctgaacaccagtcaggccaagtagaagaaactcattcattgtagtgacattctccattgctctgggaagcaaatttaacaataacagaattaa

SEQ ID NO: 4820 - DNA, 120 bp, synthetic construct
  source 1..120: mol_type = other DNA
cactgaggaattggaaaggctaactaggatactcctcccacccatgcctactaagattcttctgctaataattggtccacaatatcataagttctccagtgtaagttctccataaaataa

SEQ ID NO: 4821 - DNA, 120 bp, synthetic construct
  source 1..120: mol_type = other DNA
ataacttacacaaatactttcaaaacaatgaaaaaggagcacttctatatttcttttataaggttagcacaactttgataccaacactttaaaaagaactcaacagaggccaggcgcggt

SEQ ID NO: 4822 - DNA, 120 bp, synthetic construct
  source 1..120: mol_type = other DNA
aatgcagtgccactgcacaataactagaacagttaaaataaaaaagtgatggaaaacaccaagtgtcaacaaggatgtagagcaccctgagcactcatatactcctccagggagtttaat

SEQ ID NO: 4823 - DNA, 120 bp, synthetic construct
  source 1..120: mol_type = other DNA
ttctgccgctgcccagctcaggtctaagcacccagcaagtttgagatttttcgaaataaaataacttaaaaacagtgattttgacttccggataagatggtatatacaggtttctcccat

SEQ ID NO: 4824 - DNA, 120 bp, synthetic construct
  source 1..120: mol_type = other DNA
atttttttctcccaaggcccacgatggaaatcacaagtagaaactattcaatatggacattcctctctgtcttgcttatggaggcatctttagacataactgggaatgtcgtatggagta

SEQ ID NO: 4825 - DNA, 120 bp, synthetic construct
  source 1..120: mol_type = other DNA
cctagcctaaggaaatcccttcttctgccttctcaggcagtaccagcagagaacaatggaaaccccagtagtaccaaataaaactagaacacaaaaataacagctaaaagtctcttaaaa

SEQ ID NO: 4826 - DNA, 120 bp, synthetic construct
  source 1..120: mol_type = other DNA
gcaagctaggaatagagagaaattgtgtcaactcaataaagatcatccataaaaatcttccaggtaaatgctttccttctaagattaggaataaagcgtggatgtctgctctcaccactt

SEQ ID NO: 4827 - DNA, 120 bp, synthetic construct
  source 1..120: mol_type = other DNA
tcagggtctagagctaggcaaggagtccttagattttccaccaaaagcatgacacattaaaggaaaaattttagtttgacctaaccagaaaaaaaaaaaagctctgccaaaagactctat

SEQ ID NO: 4828 - DNA, 120 bp, synthetic construct
  source 1..120: mol_type = other DNA
atattttagaaatggggaaaagattggtagttacagttggagaatgaagttggagaaggagcagaagagaggtgtgtgtggttatgaaaggataccaagaaagatccttgtggtggagga

SEQ ID NO: 4829 - DNA, 120 bp, synthetic construct
  source 1..120: mol_type = other DNA
ggcccagtaatattatgtataaatggcagtgtatatgacaagtacagtctgttttatagatggcaaagtggagactgtgacttactttggactagaaagtcgttacttcggcatctgttt

SEQ ID NO: 4830 - DNA, 120 bp, synthetic construct
  source 1..120: mol_type = other DNA
acacgtcaaacagaacgcatcctctttccaagcatgctctcacagtgtttcaacgtagtgaacagaataaaaaccatctagttgttcaaaccagaaatgtgagaaccacattgatttctc

SEQ ID NO: 4831 - DNA, 120 bp, synthetic construct
  source 1..120: mol_type = other DNA
cactgtgcctggcctcccgtcctttaatgtaagaaaatatctatttatcctttgggtttcagcctatctcaaattaagttagaccctattacgatacccttctataggtttctgtacttc

SEQ ID NO: 4832 - DNA, 120 bp, synthetic construct
  source 1..120: mol_type = other DNA
tctttacaggccatacctctaactcttctctctcatcctctctctcggagagtgacattgtttcttttattttggaaaagtaaaggcagtcagaagagagtatctccaagtttcatccta

SEQ ID NO: 4833 - DNA, 120 bp, synthetic construct
  source 1..120: mol_type = other DNA
aatagatcaggaaatttgaagcttccctcataaatgttttatgtaatgagcccacctgttgcatcctgtaatcttcatagcctatattcaaagaggttcctccgtcactctaacccactc

SEQ ID NO: 4834 - DNA, 120 bp, synthetic construct
  source 1..120: mol_type = other DNA
ccttcccagtagcatcttgagcattaacactttgggattttctctccaaggacttattctctttatatttctcttcccctgtgtatcagtttattccttctttgatgtgcttatgagatc

SEQ ID NO: 4835 - DNA, 120 bp, synthetic construct
  source 1..120: mol_type = other DNA
aagtgataaatgacacctagagtggttcagttacttggcacatatcaaacgaacagataaaaacagtacgcctaggtattaaatacgtagatccttgctgaacactggaatgcatgggac

SEQ ID NO: 4836 - DNA, 120 bp, synthetic construct
  source 1..120: mol_type = other DNA
agcatacactggcaccaatgttagcgggtttaggcaagacagttcttgtgcttccaagtggcttgcttggcttctgggaatggcatcagtagttcaggtatgaagttgaattcttgagcc

SEQ ID NO: 4837 - DNA, 120 bp, synthetic construct
  source 1..120: mol_type = other DNA
tagatgatctattcaacgtgtgattattgactggttattttggttactttacatggaagggccaagtaccagatgtatcaagtcagccatgttggagcctctccagctccattcaagggg

SEQ ID NO: 4838 - DNA, 120 bp, synthetic construct
  source 1..120: mol_type = other DNA
aggggaacttggaatagtataaagatggcctcacaaatcgatgaagaaggaatggttagtcggtctacatagagacaaccagaaccaagactagctgattatctcacaggatatgtaaat

SEQ ID NO: 4839 - DNA, 120 bp, synthetic construct
  source 1..120: mol_type = other DNA
ggaaactcaatagaaagacggaaaaaatacatcacagttacaactgttagtagaatccttggattgatggaaggtcacgcatagataccctggtgtaattcagacagaattttcttacct

SEQ ID NO: 4840 - DNA, 120 bp, synthetic construct
  source 1..120: mol_type = other DNA
tgggagtataaatctgaaaagctcttttacctgtgattctgaactctcaatccgggtgagagaatagaataggagacaggttgggaagctgctcgtattttttatctgttaatgagtgac

SEQ ID NO: 4841 - DNA, 120 bp, synthetic construct
  source 1..120: mol_type = other DNA
aactggtatgaagccaacagacctctgggttgatggaggagaacctgactgtcagtgtcacattgatgaaactagaagaaaagagaaaattcacttggatacaatgtttcttcacatcta

SEQ ID NO: 4842 - DNA, 120 bp, synthetic construct
  source 1..120: mol_type = other DNA
aatccttaatattgaagagaccaacagctaagcttctatacaacttctgaggtttggaagaagtacaacagtactctccttccaagtatctttggcttggtgagaaaattctgagccgga

SEQ ID NO: 4843 - DNA, 120 bp, synthetic construct
  source 1..120: mol_type = other DNA
atttctacattatcacttatctcttcttcaagacccgttcttgtagcatgctctgtaaagcactgtccacttgtgcctcccacttcatggtagttattcttttctatgcacctgttcttt

SEQ ID NO: 4844 - DNA, 120 bp, synthetic construct
  source 1..120: mol_type = other DNA
gaaagatgtcaaatgtttctccccatctctgccctccgtcactgacttactcttcatatgcaatcaatttaatcagttgttatctgtcctcacagagatcctttatgctacacagtcaaa

SEQ ID NO: 4845 - DNA, 120 bp, synthetic construct
  source 1..120: mol_type = other DNA
ctctacaggtgttagatttatgaaagtcctgcacaaaataaaggaaaggtgccctaaaagacccaccgtttaactaaagaaaatgaatctcacacagaggacatgctgcagagagaatga

SEQ ID NO: 4846 - DNA, 120 bp, synthetic construct
  source 1..120: mol_type = other DNA
gaagggactgtcttctctccccatcatgttcctttaccaaatttcatatatccatcctcaccatacaactacccagcatggaaaactgacctgggttagaggactaaagatttgtttatt

SEQ ID NO: 4847 - DNA, 120 bp, synthetic construct
  source 1..120: mol_type = other DNA
tgtgcttctttaacagggaagcctcgggacagactttttcatgggggacagcaaaccaagacaaaaattgttagttgtctcaaagacaaaaaccaagaaccagcattaacataacttcta

SEQ ID NO: 4848 - DNA, 120 bp, synthetic construct
  source 1..120: mol_type = other DNA
ttaggattcttatttgggtttagtcaattagataagtaccacactcatacatctccttaggacaggcctttctctgacttgggctgacaattagtgtactgtgagacaacacccttgaga

SEQ ID NO: 4849 - DNA, 120 bp, synthetic construct
  source 1..120: mol_type = other DNA
acagagtgaaaagtcatcctatgaagcgggagaaaatatttcaaaccatctatctgataggggttaatatctaaaatacataataatcttctcaactcaataatatatacacacacacac

SEQ ID NO: 4850 - DNA, 120 bp, synthetic construct
  source 1..120: mol_type = other DNA
aataagatttctggaaacatttttgcctctagctggaaatgttgacaaggcatgtccataagactcgtagtgacctctgtgtctaacatagagggcttaagaggcctgtcttaagatttt

SEQ ID NO: 4851 - DNA, 120 bp, synthetic construct
  source 1..120: mol_type = other DNA
aggagtgcaaatagtagttacaatgtgccagcaggagtaccatgggattgaattttgagtgtgcatgatcaagggactagaacactaaactggataaatgagaatatattaactagggga

SEQ ID NO: 4852 - DNA, 120 bp, synthetic construct
  source 1..120: mol_type = other DNA
aatatttcaagtacagttgtctgagttgacaccgatactccaagagccaaagcatcaccatggcccaaatgttacaatgagcatacagaagccagattacgaatggagtcatgttaaagt

SEQ ID NO: 4853 - DNA, 120 bp, synthetic construct
  source 1..120: mol_type = other DNA
tctcagctgttacatctttaaatacagaccattctctttgtgctctttttctggacctcctttctaacagatgtgctgggaagttcacaacgtatttcctgcaatcaggcaagagaaaga

SEQ ID NO: 4854 - DNA, 120 bp, synthetic construct
  source 1..120: mol_type = other DNA
aagaaaacctaggcaataccattcaggtcataggcttgggcaaagacttcatgactaaaacaccaaaagcaatggcaacaaaagccaaaatagacaaatgggatctaattaaactaaaga

SEQ ID NO: 4855 - DNA, 120 bp, synthetic construct
  source 1..120: mol_type = other DNA
catagggcccttctgagtgcagggtcctttgtgactgcatgggtcgcaggcccatgaagcttcctttgtaataaaagaaaatttaaaacaaataatatgtacaatcacaaagagacaata

SEQ ID NO: 4856 - DNA, 120 bp, synthetic construct
  source 1..120: mol_type = other DNA
ttcatttgtattatattcacagtgtataaaataacaagaagttgagggctggccaagatggccaacgagaagcacctattgtgcaccgctgtcacagagcaaaatagaagaggcaagtaa

SEQ ID NO: 4857 - DNA, 120 bp, synthetic construct
  source 1..120: mol_type = other DNA
catgagccatccaacccagccctgctaaatattttaatatcagctttgattgcagaaccaatacaggcaatgtaaggttttaattttttatcttgagatctgcttgtctgtgctgtgtca

SEQ ID NO: 4858 - DNA, 120 bp, synthetic construct
  source 1..120: mol_type = other DNA
taatacagttgtcaaaataatagaaaaataaatcaatgggaagaagtgagaattacaaaatagacccatagtaaacttacctttgacaagagagcaaaggcagttcagtggagaaaagca

SEQ ID NO: 4859 - DNA, 120 bp, synthetic construct
  source 1..120: mol_type = other DNA
acctgaccacttcaatcagaggcagttctgcagttaaaggaacactcacacacagagatgagaaaaaaaaaaaaagaactctggcaactcaaatggtcagagtgtcttatgtcctccaaa

SEQ ID NO: 4860 - DNA, 120 bp, synthetic construct
  source 1..120: mol_type = other DNA
cccaacacacaaaatcatcttattttccaaggacaaaatgaaagaaagaatgtaaaaggcagcttgacagaaagggcaggtcacctacaaagggaaccgtatgaggctaacagtggacct

SEQ ID NO: 4861 - DNA, 120 bp, synthetic construct
  source 1..120: mol_type = other DNA
caaaacaacagaatgtgcattcttctcatcaacacaggcacgtactctaaaaatagaccccacaattggacataaaacaatcctcagcaaatgcaaaagaactgaaatcataccaaacac

SEQ ID NO: 4862 - DNA, 120 bp, synthetic construct
  source 1..120: mol_type = other DNA
aattcagcagcacatcaaaaagctaatacaaaatgattaagtaggctttatccctgggatacaaggttggttcaacatttgcaaattaataaatgtgattcatcacataaacagaactaa

SEQ ID NO: 4863 - DNA, 120 bp, synthetic construct
  source 1..120: mol_type = other DNA
aaacaagaatgaaaaaaacaaatgaaacttcacacaggaattccccaaggccactgattcatattacaggtgtggaaaggcatcctgctaattcctaaaatctttctcaacaccagggga

SEQ ID NO: 4864 - DNA, 120 bp, synthetic construct
  source 1..120: mol_type = other DNA
ctcctcagtggtttctaaaaccttgaatgatactccttttataggaagcactccaatgtcagcatctcttttcaatttctttacagttctactagctctctcagtgcctctcacttctgt

SEQ ID NO: 4865 - DNA, 120 bp, synthetic construct
  source 1..120: mol_type = other DNA
tttgatgcattgaaacctgtctttttatttaagttaacatcctactggtggtttcttactaggccaagagatagctatgtggtatgcttaaaaattgccccctgtgagagctgcttggga

SEQ ID NO: 4866 - DNA, 120 bp, synthetic construct
  source 1..120: mol_type = other DNA
ttttgtctgaagcaatgctgaatacaacctcagtcactgaatttctccttttgggagtgacagacattcaagaactgcagccttttctcttcgttgttttccttaccatctacttcatca

SEQ ID NO: 4867 - DNA, 120 bp, synthetic construct
  source 1..120: mol_type = other DNA
ccagtactaaacccactgatctacactttgaggaacaaggaagtgaaaggggcctttaatagagcaatgaaaaggtggctttggcctaaagaaatcttgaagaactcttctgaagcataa

SEQ ID NO: 4868 - DNA, 120 bp, synthetic construct
  source 1..120: mol_type = other DNA
catttctggtggtgagaatctgccacataattcaaacttcagagagtttgtgaactgtagaagagcacatggggttctggttaactattagtgcataacacattaggaccccaaaattca

SEQ ID NO: 4869 - DNA, 120 bp, synthetic construct
  source 1..120: mol_type = other DNA
aaacagagttttaagaaatttatcacccagaaataatatatgaacttactttggatcataaatcgaacaactcacccataaaaaattttttgcataactggaaaaattgaacacggacta

SEQ ID NO: 4870 - DNA, 120 bp, synthetic construct
  source 1..120: mol_type = other DNA
agtccactgctattctcattatcagtgttggaaagctaaaagcttttcttccgatatcaggagcaagtcaaggaggcccactttcacaatttctcttcaatataattctgacattcctag

SEQ ID NO: 4871 - DNA, 120 bp, synthetic construct
  source 1..120: mol_type = other DNA
ctccaataaattgtgttggaaaaacttaatattccacctaaagaagaatgaaattaaaccattgtctcaaacaatacgcaaaaatcaatttaattggattaaaaactgaaaggcaagacc

SEQ ID NO: 4872 - DNA, 120 bp, synthetic construct
  source 1..120: mol_type = other DNA
gaggaagaaaacgaccaccaaaccctctaggcaggggaatatatcaataggaactttaaaaactgaaaagcgaagaaaacaaagacttattaaagcagagaagaatattcaaggattctg

SEQ ID NO: 4873 - DNA, 120 bp, synthetic construct
  source 1..120: mol_type = other DNA
gccaatagacttgcctggtaaaaagtgataaaataaattttttagagagtaataaaattatacaagtgagacatttcaatccacctttaagaacagaagagcattgaagaagaaataagt

SEQ ID NO: 4874 - DNA, 120 bp, synthetic construct
  source 1..120: mol_type = other DNA
ccaacaagagaccctctgtgtttctgcatctcattcctggcagaataattcagagtctgactctctttacctacaggatagtgtgtgagctatcaaatattatataagaaaaaacagcag

SEQ ID NO: 4875 - DNA, 120 bp, synthetic construct
  source 1..120: mol_type = other DNA
acaaacaaggagctgtagctaattaaaataagattagcaaaatgttgatgttgaagctggatggtggctacatggagtacatgggggttcactgtgctcttctcttttatgtatgtttga

SEQ ID NO: 4876 - DNA, 120 bp, synthetic construct
  source 1..120: mol_type = other DNA
gtccaaaataacatcttcattactctccttcaatcaagtgtttcagtttgtttgatacagagaatcttccgaagtgcctgatgcacctccttgttcctcatggtatagatcacaggattg

SEQ ID NO: 4877 - DNA, 120 bp, synthetic construct
  source 1..120: mol_type = other DNA
ttgtggagcctctgggagctaaccactgctacaataatcagcatattccctatgatgatgaagacatagacagcagtgaatacaataaaaaacaagaaatgcagttcagggatgtcatag

SEQ ID NO: 4878 - DNA, 120 bp, synthetic construct
  source 1..120: mol_type = other DNA
ccatggtcactatctcattcttctcattatctcaaccgcccctttcattccccatctcctaatcagtgataccttaccaactgttcctcggataattcttatatattcttcacttattgc

SEQ ID NO: 4879 - DNA, 120 bp, synthetic construct
  source 1..120: mol_type = other DNA
tgcaatacgccaaaagacagttaatgaattcaacctgaaagaaatagtactaggaggaagtgatgctgaactgatgagtgattgcagtggaaaatggaaagaatggaggtgagggcattt

SEQ ID NO: 4880 - DNA, 120 bp, synthetic construct
  source 1..120: mol_type = other DNA
taaacaaaactagaagagcttttttcgatgcaagcgttagctgtcaactacctgtttttgtcaatgatattcaaaattactctcactcttgttttgaggggagaagggggacagggtctt

SEQ ID NO: 4881 - DNA, 120 bp, synthetic construct
  source 1..120: mol_type = other DNA
agattattttatctggtccaaactcattctgaggcttggagtctttctataggattcctgccaggagagaggtgagcatgtaaatcaggcaagaatacctctaataataaatagctcatg

SEQ ID NO: 4882 - DNA, 120 bp, synthetic construct
  source 1..120: mol_type = other DNA
tagtatgagggtgtctcgcttcttcctactctgtaacatatcaactgaagcttggggagcatgaatatctactgttccccatctccaaaagagaagagagaattaaaaaaataagtcagt

SEQ ID NO: 4883 - DNA, 120 bp, synthetic construct
  source 1..120: mol_type = other DNA
tcaataggtaccacccttagtaggggtgttttatatagatcatcaaaatcttgccaatgctgagcctgatttaaggagaaggaaggtggcgtgatgttacaaaatgacgttgaaatggtt

SEQ ID NO: 4884 - DNA, 120 bp, synthetic construct
  source 1..120: mol_type = other DNA
tcatccatgttgttgcaaacaacagaatttccttcttctttaaggctgaatagtattccactatgcatatataccacattttctctatccattcatctgctgagggatgcttaggtttat

SEQ ID NO: 4885 - DNA, 120 bp, synthetic construct
  source 1..120: mol_type = other DNA
tcccatggataaagacaaggatctgtggggagtagatgtttgtattgttaatcaccctggtgagaggttaatcctggggtataaatgaagtctccaaaagtaggtgatatattagcatga

SEQ ID NO: 4886 - DNA, 120 bp, synthetic construct
  source 1..120: mol_type = other DNA
agaaaccacacatttccatgagtctcccatgttactaaaatatttcataagctcgagctcagtgatgttttctgattatttgttccttagactccagcctaggcatccaaggcaatctga

SEQ ID NO: 4887 - DNA, 120 bp, synthetic construct
  source 1..120: mol_type = other DNA
ggtgacaaaaatgtgaccaaaaactcataggaatctaaccctgcatctcccctaaagcaaggaattatttaatatttgctcctacagggttcaaggcaactttatagaatgcaactgcag

SEQ ID NO: 4888 - DNA, 120 bp, synthetic construct
  source 1..120: mol_type = other DNA
cataggttacactaagagtggacaaatagcaatccaaattattctactccattctgttccctgtaacattaatggcatcatcttcagccataacagggctacactctgggagtagatgac

SEQ ID NO: 4889 - DNA, 120 bp, synthetic construct
  source 1..120: mol_type = other DNA
gattcaaaataacagattaattggttttgtgaagcattctccccattggaaagccaagaatgcttggagactcagatcctcagagagcttaaagagagacaacaaacctaagagaggctt

SEQ ID NO: 4890 - DNA, 120 bp, synthetic construct
  source 1..120: mol_type = other DNA
taaagaaagagctggaaaaaagaaaactagagggcaagaggtgataagagaggtcacctcttatcagacaggagacaagttgatggagaaaaagatctgctatgagggaaaattctgtct

SEQ ID NO: 4891 - DNA, 120 bp, synthetic construct
  source 1..120: mol_type = other DNA
gccacagtgcccagcctctttttgcctaaatcttcctaataatttttgatgataatgacctctctttcttctctgccccaatacctcattctttaaataaagcttatgattttggcatgt

SEQ ID NO: 4892 - DNA, 120 bp, synthetic construct
  source 1..120: mol_type = other DNA
tcttctatgctgtggtcacccccatcctcaaccccatcatctacagcctgcggaacacagaggtcaaagctgccctaaagagaaccatccagaaaacggtgcctatggagatttgaaaag

SEQ ID NO: 4893 - DNA, 120 bp, synthetic construct
  source 1..120: mol_type = other DNA
ctactaccagctaaagacagattcctcaagaagtaaggagtggccacaaaagtttcaatgaaggtaagttcttatggaaattcatatgccgcagaggttaagagaacagattctgatgtc

SEQ ID NO: 4894 - DNA, 120 bp, synthetic construct
  source 1..120: mol_type = other DNA
cactttattcaaatgcaacagtatttattgcaaactttctatgtgcctattgctctttggcactgtggagaatatcaagtacatacagggtggtgattctgtccagagagcacttgctgt

SEQ ID NO: 4895 - DNA, 120 bp, synthetic construct
  source 1..120: mol_type = other DNA
tgctgttgttgttgttgttctattctacctttttctttgtccagtctctctcatccttattttctgtacatttatgtaacccagcacattagtctttctggagcaagacttagagccacc

SEQ ID NO: 4896 - DNA, 120 bp, synthetic construct
  source 1..120: mol_type = other DNA
cataaaggctaaatcaaatgagctctggattgagttccagatccactattctgtgcttatttgtcccaaggactatatgcttcttatagctgatactctcacaaagaaccagaaggaaga

SEQ ID NO: 4897 - DNA, 120 bp, synthetic construct
  source 1..120: mol_type = other DNA
tctctgcctctctaggttgtgtgccctcactggccttaactctttccagtcagggaagactaggaaagagttggaagaggaaatattgtagaagaaagaagagaactcaggtacatcagg

SEQ ID NO: 4898 - DNA, 120 bp, synthetic construct
  source 1..120: mol_type = other DNA
ccacaaccttcttaaccaattagaggcactgcagagaagcagcaggagtcagggcacttgcacccaagaatgatagatatatttattcaccacatatgtatggatatagttagagaaaca

SEQ ID NO: 4899 - DNA, 120 bp, synthetic construct
  source 1..120: mol_type = other DNA
gataatatttatttgttgaatgaatttgaacgagtggtagaagactcttctggctggagcacttttaagtcttgcactagcatgggtctggaaatgaactgaaggaggactagagataag

SEQ ID NO: 4900 - DNA, 120 bp, synthetic construct
  source 1..120: mol_type = other DNA
agggtcacttgagaaaatcatgaaatctgggaaaggaagggcaagtcatagaatcctgccactatagaataatgtctgacaaccaagtgatacattctgtttaagtaggcaccaaactgt

SEQ ID NO: 4901 - DNA, 120 bp, synthetic construct
  source 1..120: mol_type = other DNA
actcaagctacgtctcacaaaaaagtatctttctttcccagttatgatttttcttccttcttctgatatcctcacaactgaacatttccttcgaatacacccacccacccataaatgacc

SEQ ID NO: 4902 - DNA, 120 bp, synthetic construct
  source 1..120: mol_type = other DNA
tggctgatttgagacatcctcttatgtttgttataacacagtttcagtatgaggtgtgtagttatagttgtttctctttaacgtgcttgtgacacatttgctttctgactctctaaggga

SEQ ID NO: 4903 - DNA, 120 bp, synthetic construct
  source 1..120: mol_type = other DNA
agaggcttgtagtgatcttaactttcctgagaatgctcagcctaattatgtcccgggtatagaatccaacctcatccttgaaaaactgaaagctgtccacagctataatcctaaaatatt

SEQ ID NO: 4904 - DNA, 120 bp, synthetic construct
  source 1..120: mol_type = other DNA
aaaaaattttttttaaatgggcaaaggacatgaacagacacgtctcaaaagaagacatacatgtagccaagaagcacatgaaaaaaatgcccaatatcactattcattagagaaatgcaa

SEQ ID NO: 4905 - DNA, 120 bp, synthetic construct
  source 1..120: mol_type = other DNA
tgaaaacccgctgaagtggtagagacatattgcataataaggaataacaataaaaatgactgccaacatctcaacagaaacaaagggagtcagaaggctatgaattatctttcaaatgtg

SEQ ID NO: 4906 - DNA, 120 bp, synthetic construct
  source 1..120: mol_type = other DNA
ctagggtttatgtcagtaaaagtaacaaactcaatcgtgtttaaggctcaggtatccagaggttacagttttaatgaggcgaacagtgaacctatcagaaatgtaatgggaagatgctgg

SEQ ID NO: 4907 - DNA, 120 bp, synthetic construct
  source 1..120: mol_type = other DNA
tcatggacaatatagtctttcattgggtagggaagatccactatcaatatagatgggtatcatccaatcagctggggcccagatggaaaaaaaaggcatgaaaggatgctctttatcatt

SEQ ID NO: 4908 - DNA, 120 bp, synthetic construct
  source 1..120: mol_type = other DNA
ttgagttaatcaaacttaaaagcttcttctcctttgaagacgccattcaaattgaaacatcaaaccacagactgaaaaaatagcacagtgcatttatttgacaaaggacttttatgcaga

SEQ ID NO: 4909 - DNA, 120 bp, synthetic construct
  source 1..120: mol_type = other DNA
acatagtagatgtatctattttaggatctttcttgacattgtagtcaagaagtcagctgattgtatttctaagatttggatgaagctgaaggattcacttacaagatgtcccagtcacat

SEQ ID NO: 4910 - DNA, 120 bp, synthetic construct
  source 1..120: mol_type = other DNA
atttgttaaaactgagtcactcagtacagctcccatgcaaaggtaagggaagtaggctctactttgtgaaggggatataagaaaattgggggccatattttaaaacaaccacaaacctga

SEQ ID NO: 4911 - DNA, 120 bp, synthetic construct
  source 1..120: mol_type = other DNA
aagagagtctgacttaattgcaagtaagtcacaagtttattcccctacagcccatcaatttccacatgttcttaagacagttctgaatcaaacagggtctacaatcctggcactgacact

SEQ ID NO: 4912 - DNA, 120 bp, synthetic construct
  source 1..120: mol_type = other DNA
tttaaaaaattaagggaacaaatcttatcctcaaggagagacgtaatgatggaggaaggaatatagaaggagacaaaaaggagggagtcttgatgaaaagggagatgggaggcagctttt

SEQ ID NO: 4913 - DNA, 120 bp, synthetic construct
  source 1..120: mol_type = other DNA
taaccttattgtgtgatcttaacataagagagttctgcaggcctaactcggggaagttttctttcagagaggatatatttctacttctgccaggagctaggtgacaaatttgaccctgaa

SEQ ID NO: 4914 - DNA, 120 bp, synthetic construct
  source 1..120: mol_type = other DNA
ggctttcctgtatttagtaactgagctgtttttacactaaaaaaaaattctatcttagaaacatgaagaagtgaagaggcattatatatacaactcactgttcagtagctcagggtaaat

SEQ ID NO: 4915 - DNA, 120 bp, synthetic construct
  source 1..120: mol_type = other DNA
acaatttattgttgaattaatgaagatcggttaattaatccatgttttacatcagctttctttgccctcaaccaggaagtcagaggcaccaatgtgaggttccacctgctttccagcaca

SEQ ID NO: 4916 - DNA, 120 bp, synthetic construct
  source 1..120: mol_type = other DNA
gataaagcgagcactcaggaggttactagggaaggaaagagactccagggaaagctggagagctgcttaatatactttcgaaagtaagaagagtttcttcaagatttatgaacatgttaa

SEQ ID NO: 4917 - DNA, 120 bp, synthetic construct
  source 1..120: mol_type = other DNA
ttcttttttatatgtaaataataagccatctaagtgtaaaagtggctcatatcttctccagccaaatcagctaggccatggccttgccttgcttctcatgagtgtgcttgacagtcatca

SEQ ID NO: 4918 - DNA, 120 bp, synthetic construct
  source 1..120: mol_type = other DNA
gtaaccatatagtataggttacacagaactcctatcttctggattaagactccgtcttcaaagtatttgggcaccctggttactgaacatgagccagaagaaaatgaactgcttttcctt

SEQ ID NO: 4919 - DNA, 120 bp, synthetic construct
  source 1..120: mol_type = other DNA
gatctattcattctaagtagaccatgaaagggtaaatatttatatcataatccctaaagcaacaattccaataaaacaaaaaaccatactgttgttataggcgtttgaaccagagtgact

SEQ ID NO: 4920 - DNA, 120 bp, synthetic construct
  source 1..120: mol_type = other DNA
ttgttgaacatcatggttgccgacggtcataaataacagttggaacaaacaatagcctaaccaagaacttaaaaacgaaatgtcagggaatgagatgcccataaaggggattgaaaagcc

SEQ ID NO: 4921 - DNA, 120 bp, synthetic construct
  source 1..120: mol_type = other DNA
ataaacttctgtagtttaagctactcggtttgtggtctcagtcacgggagtccaagctgatgatcacagttgtgatgagaactttacaaattgaatcatgggaagtcttgcaatagtgag

SEQ ID NO: 4922 - DNA, 120 bp, synthetic construct
  source 1..120: mol_type = other DNA
atagatcctacatatgagtccttcatcagatgtgagattgaaaccacttcctccagcctggaacttgccttttcattctccccacagggtctttcaaagtgcacacatcttatattttga

SEQ ID NO: 4923 - DNA, 120 bp, synthetic construct
  source 1..120: mol_type = other DNA
tctcaccacttatttcagcgtcttaagaagataccatcagggcaaaggactccttccttaaatagacacagatttccatgtggagtcattattctcttgctggatgtatgtcttttacca

SEQ ID NO: 4924 - DNA, 120 bp, synthetic construct
  source 1..120: mol_type = other DNA
cacgcaagattatctatttagtattccaatggagaacgtatatcctgagcctagtcatgcgaaagtatcagtcagtgaaagacattctatttttaaaaatgaaatgaggccgggagcagt

SEQ ID NO: 4925 - DNA, 120 bp, synthetic construct
  source 1..120: mol_type = other DNA
gattagagcaatattgagatacagtaaatcatcagtgaacatatttgctctagttgctattgctactattcatcttcctgtcccgtgcagcgtcttatggttaccatgattcaagtgcct

SEQ ID NO: 4926 - DNA, 120 bp, synthetic construct
  source 1..120: mol_type = other DNA
gcaatagaagtaatgcattgttctccatctgacactgtcctcattccttcattcactttcatcagtagttctcaattccagagggaaggaaggggattacttactaaactgtaatagtcc

SEQ ID NO: 4927 - DNA, 120 bp, synthetic construct
  source 1..120: mol_type = other DNA
tgacaaatcaattacaagaacactgggaacaatctccaaagacgtgttcgtcgaattctagttagaatatggttgggaagcctcaagaaggcagagacaatgaaaacatgtggaaacatg

SEQ ID NO: 4928 - DNA, 120 bp, synthetic construct
  source 1..120: mol_type = other DNA
ccagaaacaacttgttatggcactcttactgaatcgctttcctggcttttgtaggaagggatggatggaaacttgaggccataatggtggaggaacatcaggatcatgaatcagtctctg

SEQ ID NO: 4929 - DNA, 120 bp, synthetic construct
  source 1..120: mol_type = other DNA
aaaaaaaaaaagaagaagccaggaaggtctgctttgctcctgacctgcctttccagagggtttccatgggaattgagaataatgggctatcaacagaagcaaagtaattttgtcttgaat

SEQ ID NO: 4930 - DNA, 120 bp, synthetic construct
  source 1..120: mol_type = other DNA
acatgcccattacaaagcaaataagtacatgacatgtcataaagcctcatgaaattggtcacatgccaagcacttctcccagtactcacagacctggctaactgcatacaaagaaagggc

SEQ ID NO: 4931 - DNA, 120 bp, synthetic construct
  source 1..120: mol_type = other DNA
cactcttgacctgctggcagtctatgatattcacttacttgcttttgtgggaatcatgccctggaatggaagttccatgagaatttactttgtctttaaaattctgttcactgccttttc

SEQ ID NO: 4932 - DNA, 120 bp, synthetic construct
  source 1..120: mol_type = other DNA
aatagacttctatcatttaagtcactcagtctgtggtcttagtcatgggagtccaagctgatgatcacagtagtgaagagaactttatacatggaatcatgggaagtctcagaatggtga

SEQ ID NO: 4933 - DNA, 120 bp, synthetic construct
  source 1..120: mol_type = other DNA
tggtgcagccaaaatagccaagtagcctttgcattgggattgaagtatttgctctgattctgaggcgagagcccaccctccccacttaatttttatctgaggtgaaattcacataacaga

SEQ ID NO: 4934 - DNA, 120 bp, synthetic construct
  source 1..120: mol_type = other DNA
gagtctttgagttaaaatgctttgaaaatgaaaaaaaaggtagagaccttttttctcatacctgggaggacttggacggacttggtatcacagaggccaacctcctgagagatcaaagtt

SEQ ID NO: 4935 - DNA, 120 bp, synthetic construct
  source 1..120: mol_type = other DNA
gctttctttggacgctgcttgtgcaggacccagcctagctgtttcacaaattgcggagtttgcattcatgatttcattgcaatttaccgaatctttgagaaatactgattataaatcatg

SEQ ID NO: 4936 - DNA, 120 bp, synthetic construct
  source 1..120: mol_type = other DNA
aggagagatatataagaatgaaatacactatgatcaaagggtgacaagatgttaaaatacacccctccttgtccttcggtgctgactggctgtttacctcactgcagagatagaatctga

SEQ ID NO: 4937 - DNA, 120 bp, synthetic construct
  source 1..120: mol_type = other DNA
tgactaccattttaactggcatgagatggtatctcattgtggttttgatttgcatttctctaatgaccagtgatgataagcccttttcatatgtttgtttgccacataaatgtcttcttt

SEQ ID NO: 4938 - DNA, 120 bp, synthetic construct
  source 1..120: mol_type = other DNA
ccacaggacacccctaataagattggcctcccccatatagtgtatctcttatgcttttctacctttgagaaccagcactatttgcttctatcacagtaaaagccacactcagataatttt

SEQ ID NO: 4939 - DNA, 120 bp, synthetic construct
  source 1..120: mol_type = other DNA
gaaatgcattcattattttgtcaagaactgtatgtacctagtatcatcttgttactgcctctagctccattctggcacccacgtgacaggcatttaattccattcattcagtgagtgtcc

SEQ ID NO: 4940 - DNA, 120 bp, synthetic construct
  source 1..120: mol_type = other DNA
caccactttggttgcagaagacattaaatcctccatattcttctgtgtgtccagccattaaagcttattaataacaggggtagaaaatcatatctcattatgcagtgctcctgatgacta

SEQ ID NO: 4941 - DNA, 120 bp, synthetic construct
  source 1..120: mol_type = other DNA
tattatgtacaaagcactgggacattaaactgaatcatgaagtaatgacttcaacctcacaaaacttctcgtcttctaggggaagcttaaaataagaccaaaatggtggaaccattacaa

SEQ ID NO: 4942 - DNA, 120 bp, synthetic construct
  source 1..120: mol_type = other DNA
gaagttaatgtctcttccaaccacaaacagcaaggggttgttttgaaagtccatgaaagctgaacttgattagaataaagcattgatttgatgcagcagccttatgatgcagaacaggct

SEQ ID NO: 4943 - DNA, 120 bp, synthetic construct
  source 1..120: mol_type = other DNA
cccagaaagctttagaaatatgacacatgcctttacatgtttccagtaagttaggaaaagtgattttactatgttgatgcaaaaaggcaggccccagatgagggtgcagacaacattaga

SEQ ID NO: 4944 - DNA, 120 bp, synthetic construct
  source 1..120: mol_type = other DNA
atagacccaatatcttgttgttgggcactaatgaggcactaaacattgggaatggagatttgtgtctggtccaggttctactcatgagacactagtgtctcatctctttttttttttttt

SEQ ID NO: 4945 - DNA, 120 bp, synthetic construct
  source 1..120: mol_type = other DNA
gcacatgtagtacttttctacgatgacctaggccaccttcgtcacagtcttgatgccaacacgacccatgttggtgggtctttggtcattaatattaattgatattaacattattcagtt

SEQ ID NO: 4946 - DNA, 120 bp, synthetic construct
  source 1..120: mol_type = other DNA
ctgaagagttcttagagcaaagaacagcatggaggtggaatagcagaaacatatcttattgatgtctttcttctgagcttccaaccaccctataccttaccttttcttgaatcaccagat

SEQ ID NO: 4947 - DNA, 120 bp, synthetic construct
  source 1..120: mol_type = other DNA
ctttgttaatctttgatgctcctgtccagagagggcctcttaagcaacttgagtgcaataactatttttctattattgcgttaataaaccccaagaaggtccctgcaactctagagagtt

SEQ ID NO: 4948 - DNA, 120 bp, synthetic construct
  source 1..120: mol_type = other DNA
aaaatccttaaatgagttgctatagctgatccatgggaatgcccaaaaagatgttacagatttcactagggcttaatcttagtcctgcagcaccaagtacacactcttcctcctactaac

SEQ ID NO: 4949 - DNA, 120 bp, synthetic construct
  source 1..120: mol_type = other DNA
ggacaggaagtagggagctagtagtcagtgggcataaagtttcagtttaacaaaatagataagcactagagctctactgcacaaaagtagtagttgcctatagttaacaacagtgtactg

SEQ ID NO: 4950 - DNA, 120 bp, synthetic construct
  source 1..120: mol_type = other DNA
cgtgtcaagaattcttaccaaaatgaagcaaaattcgcacacaaaaaaagaataagcaaggatggattccagtccccagtcctcaaatgaagggttgcactgtcctgataatgttctttc

SEQ ID NO: 4951 - DNA, 120 bp, synthetic construct
  source 1..120: mol_type = other DNA
gttgccatgagctcactgtcattttaccttctcagtacttttcccttgctctgatctcacctgccacattcactttaagaatgcacatttctagattattgattttccaactgagttgtc

SEQ ID NO: 4952 - DNA, 120 bp, synthetic construct
  source 1..120: mol_type = other DNA
tgaatgaaaaaaaaaagacctacatttgttctctctggtatgcagacaccagactcttttgtgacccctgaaatcagtttctctgtttctgatgaactctggaggttttgtcactgctgc

SEQ ID NO: 4953 - DNA, 120 bp, synthetic construct
  source 1..120: mol_type = other DNA
aggcaacaaagattagaccctgccaggagggaagcacaccagataaggatggagaattatcttgacaaggggcatgaaaaaaattactggatgacaaaaaaaatacatcaccaaagatca

SEQ ID NO: 4954 - DNA, 120 bp, synthetic construct
  source 1..120: mol_type = other DNA
aacactatcttgttctctggtatctttattaaagcattttcagtgtctgctcatgctctcttctttaacaataatgtgctttctgtgtttattcctgtgacatgcagcagccagcactgc

SEQ ID NO: 4955 - DNA, 120 bp, synthetic construct
  source 1..120: mol_type = other DNA
ctgttgaatgtaatgtcccataaatgtctcttaggacctcttggtctatcgtgttgttcaaatccaaagtttcctttttgattttgtgtctggacaatctatccgttgttgaaagtgggg

SEQ ID NO: 4956 - DNA, 120 bp, synthetic construct
  source 1..120: mol_type = other DNA
gacagatgaggacctattactgccatttgttcaggggtttctgactattttgtagatattttgttctttcttcctcttgctgtattcctttgtaatttaatgatttttttgtgtggtaat

SEQ ID NO: 4957 - DNA, 120 bp, synthetic construct
  source 1..120: mol_type = other DNA
tccccaacacatgttgaactcattttacaaacacatttaactagatgaccacctccactgccccaacacaaaaaagtatcccacgacacctacacatgttaatcaatccaaatcaaaggt

SEQ ID NO: 4958 - DNA, 120 bp, synthetic construct
  source 1..120: mol_type = other DNA
gtgacagttaaacctggcattactcgtaattgcttacatttactacacattcatacagaggccatgctgtggctaggcgtctctgggctaagaatgtcttattcatttagaactagtacc

SEQ ID NO: 4959 - DNA, 120 bp, synthetic construct
  source 1..120: mol_type = other DNA
gaccacctagtcattttccgcaagaaagtaagagatttcccagttttgtgctcatggggagcattcacctgagatataaaactttggctgcttaactcattttaagggaataataacata

SEQ ID NO: 4960 - DNA, 120 bp, synthetic construct
  source 1..120: mol_type = other DNA
ttgggttgaaaagtgctttctgggctgactccgctgttagaacaggtaggaggttgcttggtaaatgttgcaagaatgtgaactcttgtggtagaaatattctgaggctgattcagaggc

SEQ ID NO: 4961 - DNA, 120 bp, synthetic construct
  source 1..120: mol_type = other DNA
cagcttctctctggggtgacaatagcatgtgtagcctcaacagggacactataagaataaaagagtgtgctattactatttatgccatgatcacaggaatacccaggactgtccctgaca

SEQ ID NO: 4962 - DNA, 120 bp, synthetic construct
  source 1..120: mol_type = other DNA
cacaaacctccctgttccctctctatctggctattttcttggtaggaccagaaaaacttttttttatagtcttgccaccatgccatgtagttttcgtacattgcagctatttcaaattac

SEQ ID NO: 4963 - DNA, 120 bp, synthetic construct
  source 1..120: mol_type = other DNA
tgtcattttgggaagaaaatcaaacaagcatctggtgagtataggaacaacagtgcctcacttactaaaaagagactttagcggaacctcatccagttggatctttccaaggttcagaca

SEQ ID NO: 4964 - DNA, 120 bp, synthetic construct
  source 1..120: mol_type = other DNA
acctcttctttgaaaaaaagggactttctcagaacattctgacaacacgagttgtgaatccctggggctgtatggagaaatggcccacgacctttttccatctcttcccccatcactgcc

SEQ ID NO: 4965 - DNA, 120 bp, synthetic construct
  source 1..120: mol_type = other DNA
cacatgggagaatagcaggcatttgactggactgtgccaaaagagttgttcaagtacaatatcaagcaagactgtagttgcaaaaagacataaccaacaacttggtttcaatttgagcac

SEQ ID NO: 4966 - DNA, 120 bp, synthetic construct
  source 1..120: mol_type = other DNA
tgagcatcagtatttgctctaaaatgtgtttagtcaataaagtcaagagaacatgtgtgtggaacactgagaaaagaaggcagaggaaatttgcattcctgcagccatagagggggatat

SEQ ID NO: 4967 - DNA, 120 bp, synthetic construct
  source 1..120: mol_type = other DNA
acagacctcgtgcatcctgcatttcagaggatcctgtctgtgatgctcctcttcacggcattggagctcagtgtcgctatcctttcttctgtcctcttgtgaaaaaagacctgttcagat

SEQ ID NO: 4968 - DNA, 120 bp, synthetic construct
  source 1..120: mol_type = other DNA
atgatgaatcaaggcaaaaacaaggccactgcataattgtaactgaacatagacaaagcacgaacattgtccaaatcgcaacaatgaccaggtaccaccctattcttgccaatatgagtg

SEQ ID NO: 4969 - DNA, 120 bp, synthetic construct
  source 1..120: mol_type = other DNA
gtcttctaaattacaagccatttttttgtgtgtgtggcaagacaagcatttcataatattcttcccgtttccagaagattaataacatttacctctgttccctgacactgcattctcccc

SEQ ID NO: 4970 - DNA, 120 bp, synthetic construct
  source 1..120: mol_type = other DNA
tcgctgggccttagctgccaccccgcggggcagggcttgggacctgcagcccgccatgcctgagcctcctcccgctccgtgggctcctgcgcggcccgagcctccccgacgagcaccgcc

SEQ ID NO: 4971 - DNA, 120 bp, synthetic construct
  source 1..120: mol_type = other DNA
aacaaattctggacacgctgccttaaagaactgggtttcattcttgaagtcagtgaggccaaaaacccaccaattttgaacacagtaggagcacactggaaggccattgacagcggaagg

SEQ ID NO: 4972 - DNA, 120 bp, synthetic construct
  source 1..120: mol_type = other DNA
agagaaggaggcttgaccaaggggcaagccctttcaagtccatatttctgtacacatctgtgcatatacattagtcacaatatttgggaacattagcctaagaaacccactatgatggag

SEQ ID NO: 4973 - DNA, 120 bp, synthetic construct
  source 1..120: mol_type = other DNA
gatttgggagcaacaccaagatctgagaacaaagcctactctgagctgagctttgtctctacctcacctcatgaccttccctaaaattaatattagtggacaaccatattggccttatgc

SEQ ID NO: 4974 - DNA, 120 bp, synthetic construct
  source 1..120: mol_type = other DNA
tgctccacctgcgttgcctctgccagcttcacacaaaaggcattctctgcctcttgaaactaaagtctgggtggggttgagttcttatgaactctcttgaaagacaagcttttagttatc

SEQ ID NO: 4975 - DNA, 120 bp, synthetic construct
  source 1..120: mol_type = other DNA
cctcacttccaggatcttctccagtccctgtttccttcacactctgcctctatgacttttctaaaggtcaggtttgttgatatcacttatgttaaagtgccccaattcctcctaaattct

SEQ ID NO: 4976 - DNA, 120 bp, synthetic construct
  source 1..120: mol_type = other DNA
aagaagtttctgcccaggactagagtttaacttactccttatttcttaatcaagatgcttgtggttgatttttggttaagctatgttcccattcagtgatcagcactcacatatgttcat

SEQ ID NO: 4977 - DNA, 120 bp, synthetic construct
  source 1..120: mol_type = other DNA
cttactggagaagaaagaagcaaaggatgtgttaaagagagtagctttttatcattgtcaaggcgtaacactctatcattttactcaaattctgtattacctcttccttattcctgttct

SEQ ID NO: 4978 - DNA, 120 bp, synthetic construct
  source 1..120: mol_type = other DNA
gagaggagtataattaagctcacatacctgttacccactgcatctataatcaatacaactctccgctaatttcattttacctacatctgaaaaagcttgttaccacagcccccacccttg

SEQ ID NO: 4979 - DNA, 120 bp, synthetic construct
  source 1..120: mol_type = other DNA
gtgggcaaggacacagtgctctctccccaacgtccttccggatccattaaagcaggagtaataggaacaccatctaggggagtgcacattatttctctcaccacctccccaccccagcct

SEQ ID NO: 4980 - DNA, 120 bp, synthetic construct
  source 1..120: mol_type = other DNA
tgatgttgactttcaggtaggattaagtcattaccagaaactaggacagggagtctgaaagccctcatttcaatttgtaaactgccactcactaactacgtgaccttgggcagaaaactt

SEQ ID NO: 4981 - DNA, 120 bp, synthetic construct
  source 1..120: mol_type = other DNA
gaaggaggttaagagcacatcaggagagcttcgaataccttgctggagattctggatttgatgctataataaactggttagcatcgctggctctttttagggggaaagatatcagatagg

SEQ ID NO: 4982 - DNA, 120 bp, synthetic construct
  source 1..120: mol_type = other DNA
ccccttagattagagggctcttagattaaagggctctaagaagagatcagaaatctgagataaccaaaagcttctgttttccaagagagctcttgaatgcccagactccccgagactggt

SEQ ID NO: 4983 - DNA, 120 bp, synthetic construct
  source 1..120: mol_type = other DNA
gtgctaggggtccaaaaattaaaactgtatggtagacaaaagggaagaatgtcttggtccatctcctgtgaagtcagcagtgattaactatgttatttatgtgagaaacccagaaattcc

SEQ ID NO: 4984 - DNA, 120 bp, synthetic construct
  source 1..120: mol_type = other DNA
atcgtgtaagagactcctataccagacggagcccaggctgggaatcaccattccttttaacttttgccaatctgataagtgtggaatgtgtcttttcgtatttatacttctttgattatt

SEQ ID NO: 4985 - DNA, 120 bp, synthetic construct
  source 1..120: mol_type = other DNA
cttctttgccagttcccctaaaccttgcttttttttctccttgaatcttcttcattcctatggatgggtattccttgcgttgaatatgactagggaagaaagggtctccatatgactagg

SEQ ID NO: 4986 - DNA, 120 bp, synthetic construct
  source 1..120: mol_type = other DNA
ggactaaaggaagtcttcaaattgagagtctctctaagcttttgcatactggtacccaacatgactgtgagtgattgtcattgcagtagcaaaagaaaaaaaaaaggcaaattcttgcaa

SEQ ID NO: 4987 - DNA, 120 bp, synthetic construct
  source 1..120: mol_type = other DNA
aatggaatatgaaagtggatattagacacctagagcacaatgggctgatgagctgggtgatgctgcccaacagatttcagggactcacttgcagatggactttagggttctccatctcct

SEQ ID NO: 4988 - DNA, 120 bp, synthetic construct
  source 1..120: mol_type = other DNA
acctcccttccaccctcctagtatctttcccagcctctggtaaccatccttctactctctatctccgtgagttcaattgttttgatttttagatcccacaaataagtgagaacatgcaat

SEQ ID NO: 4989 - DNA, 120 bp, synthetic construct
  source 1..120: mol_type = other DNA
cctgagatttccaggggaatcaatatatacttgagaactaggagcctctcagaagattccagaagtcttcttgataaatacaggacagaagacccatgtttttgagacttttgcaaggtt

SEQ ID NO: 4990 - DNA, 120 bp, synthetic construct
  source 1..120: mol_type = other DNA
tggaaaacttcctggtagtggacgaaggcagctgaagcttgtttttcagcatattactgaggatttttagtaagaatgcatcttcagcatcttaaggactgttgaaaaatgttaggattg

SEQ ID NO: 4991 - DNA, 120 bp, synthetic construct
  source 1..120: mol_type = other DNA
aaccaatttggaaagcaagaaccaggagataacaaagagattcttcctgggctcaagtacgtgtcttcttgaaatccaataggaggcgcctgtgtacctttcctcagtctccagaggccc

SEQ ID NO: 4992 - DNA, 120 bp, synthetic construct
  source 1..120: mol_type = other DNA
actagcctgagcaacatagtgagaccctgtctctacaaaacaaatcaaaaaattagctgggtgtggtggcacgtacctgtagtctcaactactcgggaggctgaggccagaggattgctt

SEQ ID NO: 4993 - DNA, 120 bp, synthetic construct
  source 1..120: mol_type = other DNA
ggattacctgtgggtaaaaatagcctggatcatccaggagcagaaataacattgtttctcttttccatctctctggtttagcactcctgtcctcatccctctgagattttgggcacattc

SEQ ID NO: 4994 - DNA, 120 bp, synthetic construct
  source 1..120: mol_type = other DNA
ctgtctccaataaaatgttttctgcagcatcgacaatctctatggtggttttaaaatcctgtctggtgcttgaactcattttatctccctcctccttcttactctgtcacaaatgatgta

SEQ ID NO: 4995 - DNA, 120 bp, synthetic construct
  source 1..120: mol_type = other DNA
ttcaaaatcagcctgggtaacatagggaaagcccatctctgcaaaataagaaacagaaccaggcatagaggcacacacacccatgatcccagctgctagggaggctgaggtaagaggacc

SEQ ID NO: 4996 - DNA, 120 bp, synthetic construct
  source 1..120: mol_type = other DNA
gagtggagagacaggaagtagaatggcgaaaatgaaaagcccgcgggattccgaaacaatggaaaatgctctcgctggttttgtgcaggcggaatacgcgcttcttggtggaaacttcac

SEQ ID NO: 4997 - DNA, 120 bp, synthetic construct
  source 1..120: mol_type = other DNA
agagctggtctcttgagcccggaggtcaagaccaggcatgggcaacatgatgaaaccttgtctctacaaaaaaatgcaatttagccaggcgtggtggcgcgtgcctgtggttcctgggtg

SEQ ID NO: 4998 - DNA, 120 bp, synthetic construct
  source 1..120: mol_type = other DNA
aagcgattcttgtgcctcagctgctcaagtagctgggattacaagcatgcgccaccatgcatggctaatgtttgtatttttatagtagtagagtcagggtttcgccatattgcccaggct

SEQ ID NO: 4999 - DNA, 120 bp, synthetic construct
  source 1..120: mol_type = other DNA
tccacagtcctttctagctgcattttcctagtgctggctgttcttttggtaggtgtgctgatttgccttgtcacccgtgacaaggagaaaagggtttgatatccatattgagagacattt

SEQ ID NO: 5000 - DNA, 120 bp, synthetic construct
  source 1..120: mol_type = other DNA
gcacagctgtgaataattttttataaccaataaaccctgaatttagaattatgatgaaattaagtaggaaggatgagggaggggaaatatatatgcagggatgagtaatgtatgagaggt

SEQ ID NO: 5001 - DNA, 120 bp, synthetic construct
  source 1..120: mol_type = other DNA
gttcaagcgattctcctgcctcagcctccccagtagctgagattacaggcgcccgccaccacgtccagctagctaattttttctatttttagtagagaaagggtttcaccatattggccg

SEQ ID NO: 5002 - DNA, 120 bp, synthetic construct
  source 1..120: mol_type = other DNA
actcgcaactccaaagaggtgtgtgatgcaacttcccatttccacgggaaaggactgcagagaattcacgttcactttcggaaattaattggatgctataattttgtggtgtgggaggtt

SEQ ID NO: 5003 - DNA, 120 bp, synthetic construct
  source 1..120: mol_type = other DNA
gcagttcgaaccacttcgtagtggttgttttcatttcagttcttcatttgacccagccatccttgactggcagcattctgacctcccactagtgatgtgccggtgggaaacacacaggaa

SEQ ID NO: 5004 - DNA, 120 bp, synthetic construct
  source 1..120: mol_type = other DNA
aaagttatcagttatgaaattcgattcaagaggaaatagcaagtaactgttacataaattgaatagtcaaaaattgtcctacagagaaagtcctaaacccagatattttcacctgaaagt

SEQ ID NO: 5005 - DNA, 120 bp, synthetic construct
  source 1..120: mol_type = other DNA
aaagctaacaaataagagcaagagaatgattatttcaaacattattatagtggttatatcagcatgagaatgagagagatatactatagagtggggtaaatggagtttctaaaataatgg

SEQ ID NO: 5006 - DNA, 120 bp, synthetic construct
  source 1..120: mol_type = other DNA
tccaatccatggacatgaaatatcttttcatgtatttgtgtcttcaccaattaatttcatcaatgtcaatagttggttaaatttgttcctaagcatttattcttgttgatgctattgtaa

SEQ ID NO: 5007 - DNA, 120 bp, synthetic construct
  source 1..120: mol_type = other DNA
ctttaaagaactaaaagtagatctatcatttgatccagtaatcccactactgggtatctacccagaggaaagtaagtcattatatgaataagacacttgcatacacatgtttatagccac

SEQ ID NO: 5008 - DNA, 120 bp, synthetic construct
  source 1..120: mol_type = other DNA
atatatcacatttattgatttgtatatgtttaactacctttgcactccagggataaattccacttgatcatggcgcatgatccttttaatgtactgttggattcagtttgctactatttt

SEQ ID NO: 5009 - DNA, 120 bp, synthetic construct
  source 1..120: mol_type = other DNA
tgattattaaggatataataaaggatgcaaacgaacagccagataaagagataaacagggtgtgatctgaaagggtccagagcacaagagctttccttcccatgaagttgggatgtgcta

SEQ ID NO: 5010 - DNA, 120 bp, synthetic construct
  source 1..120: mol_type = other DNA
ttatttagatgatactttggagttttgtgttggtgctggaaggagttaagatcttagagctattgggatggagtgaatgtgttttgcatgtgagaaggacataaattttgaaattcaggg

SEQ ID NO: 5011 - DNA, 120 bp, synthetic construct
  source 1..120: mol_type = other DNA
attgcattggtgtctgtgtatttgaaggaagaaaaacttcttccaatcttatagactggttttggcaggtacagacattctcctgttgagttgcctagaacagaagatatattcctctca

SEQ ID NO: 5012 - DNA, 120 bp, synthetic construct
  source 1..120: mol_type = other DNA
gaaaaaatttctgacacaaggagataagacaaagagaaggaagaggaagaacagttgcagttctaaggcacaaggtgtcctagatgtttttcctgatgcataggtaccacttgaatagga

SEQ ID NO: 5013 - DNA, 120 bp, synthetic construct
  source 1..120: mol_type = other DNA
tagttaaatgattcttgattgccaggagtttgtggggaggggaggagggttgaaaaggtgaagcgcaatagattatcatttaattcagtaagctcatatagaaaaaagaggaggagagtc

SEQ ID NO: 5014 - DNA, 120 bp, synthetic construct
  source 1..120: mol_type = other DNA
gcgcagaacgaacctgttacttcattttccctaactgccaatcacttttccccacaccttagaccaccccacttccctaactcgtaattatccctaagacttctcttccgggaaacggat

SEQ ID NO: 5015 - DNA, 120 bp, synthetic construct
  source 1..120: mol_type = other DNA
gagtgaaatgaaagaaagtagctcatgaaagagagttgtcttgctgatatgccacccccttttcagatgaaacacacaggagctggtaaaaacgacctctgaatcagctggcctgcccta

SEQ ID NO: 5016 - DNA, 120 bp, synthetic construct
  source 1..120: mol_type = other DNA
acctgcctcggcctcacaaagtgctgggattacacatgctgggctaatttttaaattttttgttgatacagagtctcactgtattgcctaggctgctcttgaactcctgggctcaagtgg

SEQ ID NO: 5017 - DNA, 120 bp, synthetic construct
  source 1..120: mol_type = other DNA
gaaccccaaagggacactgaggttggggtggagtaaaggagtgtaggatagaagatgaaatcagagaaataaaggaagaggcccagatcctacaggatgttaggattttctttacaaaga

SEQ ID NO: 5018 - DNA, 120 bp, synthetic construct
  source 1..120: mol_type = other DNA
aaaaaaaaagaagaagaaatgaaataaaataaataaaaaatactattaaaccatagttggcccaagaagtacagcagctgggcaaagccatgcaaacacagtgagctcagagatgctcaa

SEQ ID NO: 5019 - DNA, 120 bp, synthetic construct
  source 1..120: mol_type = other DNA
taaatgggatttgtgcccttataaaagaggcctgagggagcttgtttgcttcttccatcacgtgaggacacataggaagtgtcatctgtgaggaacaggctctcaccacacaccaaatct

SEQ ID NO: 5020 - DNA, 120 bp, synthetic construct
  source 1..120: mol_type = other DNA
agactcagacttcctttttcaaaagaaggtcctttttcatcatctaggtaaatctgtccacttgtgattttaactctatttttacttgcctccttgaagtctaaatccatcagtaacccc

SEQ ID NO: 5021 - DNA, 120 bp, synthetic construct
  source 1..120: mol_type = other DNA
tttatcttatcaaggattttatatggttgacaattactcacatgcatgtctctcatttcgtggctaccattaaattattacttcccagctgtcttctgacttcttaccattttcttctct

SEQ ID NO: 5022 - DNA, 120 bp, synthetic construct
  source 1..120: mol_type = other DNA
catctctgtgacacttgtttcagcttatcctctttcaacacaaagaaaattttcttctcctttaaaaaatgaaagatcagtatttatgtcaagggtttagacagtatacttttcctaacc

SEQ ID NO: 5023 - DNA, 120 bp, synthetic construct
  source 1..120: mol_type = other DNA
tagagtattttaagcctataaatgtatattcattagacccatccatcacttaatgattttgcaaactactatctcagtcttgatttgcactgttgtcatttttgggaaataacttttcag

SEQ ID NO: 5024 - DNA, 120 bp, synthetic construct
  source 1..120: mol_type = other DNA
caaaggccaacagatggaggaaggaagagaaaacaggacaaaaacactctgtccctgctgacatacatttctcggccattgaaataatgttcagaccactttatcttgtgacataaaata

SEQ ID NO: 5025 - DNA, 120 bp, synthetic construct
  source 1..120: mol_type = other DNA
ttacaactgtcttgtgaataaacatttgggttgttcccaatatgggttatatattgatgttataaacactcaaagacatggctcctcacaatgcatgtaaataagagtggatttgaaaga

SEQ ID NO: 5026 - DNA, 120 bp, synthetic construct
  source 1..120: mol_type = other DNA
gtctaaaatatttagaatgcagggatccaatttcattttcttctaaatggaccatcaattttttctcttcctcactgaggagcaaacttctgttatataccaagtttccttatacccaca

SEQ ID NO: 5027 - DNA, 120 bp, synthetic construct
  source 1..120: mol_type = other DNA
aaagtgctgggattacaggtgtgagctacttcacttggcctctactggtattttcaatacaattgctaactggcacctttataatatggagcctttcagatatgtctgtagcaggacaag

SEQ ID NO: 5028 - DNA, 120 bp, synthetic construct
  source 1..120: mol_type = other DNA
aatttgctctcccaaagagatttcagccacaaattcatttgcatttaaatcctaaaataaagcacatcattatttcagcataaactcttaaaagtcatgcaatccagccgggcatggtgg

SEQ ID NO: 5029 - DNA, 120 bp, synthetic construct
  source 1..120: mol_type = other DNA
accctgggtttcccctcactttggttctttctcaagtttctcaccagcagagctgaaggagaagtggtctttcatccaggtggctggggtaatatagaggaatctgggtataaggttgca

SEQ ID NO: 5030 - DNA, 120 bp, synthetic construct
  source 1..120: mol_type = other DNA
ttatagacatgtgaacttgctgcaaaacaagcagaaaataggaagagaaaatcaggttatctacagaatcactagtcatcaaattcacgttaagaataggcagtaagatttcatgatctc

SEQ ID NO: 5031 - DNA, 120 bp, synthetic construct
  source 1..120: mol_type = other DNA
accctgtctaggaaaagatattttcttcatggattctgtcatgttttgatgctaaagaacctgttttatcggactaatttgctttcgattattctaaatgagttcacagacacaagagca

SEQ ID NO: 5032 - DNA, 120 bp, synthetic construct
  source 1..120: mol_type = other DNA
tgttttaatattagaatcaacagatttaaaattatattttaataaatacgacaaatatgaggaaaaatagaattataaaaactgtacacattcttaattgaaaatatacatataggcaat

SEQ ID NO: 5033 - DNA, 120 bp, synthetic construct
  source 1..120: mol_type = other DNA
tcacatctttaaaaagttgggaccacatgggtttcttgccttgcagaaacactaagagttcatttcgtatttcaaacattcttgacagaacttttccccgtgataaccaccgtatctcag

SEQ ID NO: 5034 - DNA, 120 bp, synthetic construct
  source 1..120: mol_type = other DNA
tgtgaacttatttctttatgttttgaatataaatgtcgcttaagttttgatggtttcattgcttcattagccagtacatctccacaaataatacactgtggttttagtacttcaccatca

SEQ ID NO: 5035 - DNA, 120 bp, synthetic construct
  source 1..120: mol_type = other DNA
tgatttgagaagaagcattaaaagtaattaggccttctttgggggaaatatatccaaggtaataaaaatgtgctttcatataccttgtcacacaacacttattcacagtacactgtaatg

SEQ ID NO: 5036 - DNA, 120 bp, synthetic construct
  source 1..120: mol_type = other DNA
ttgtaggacactgggtgctccaataattgtaaatatatctaaaagagcatgtgcaacttccgtaggccttttagactttaatgaccgcaaaaaagttaactttgtacagagatcttgata

SEQ ID NO: 5037 - DNA, 120 bp, synthetic construct
  source 1..120: mol_type = other DNA
agcaattctcctatctcagcctcccgagtagctgggactacaggtgcgcaccatgacacttgactaatgtttttatttttagtagagatggggtttcaccatgttggccagactggtctt

SEQ ID NO: 5038 - DNA, 120 bp, synthetic construct
  source 1..120: mol_type = other DNA
gcttggaaaaatactttcactcaagtcaacatcatttatactatcaatttgcataccaaatagtgagacagagcagggacccctcttaggggcctgtcagccacccctaaccccaagcat

SEQ ID NO: 5039 - DNA, 120 bp, synthetic construct
  source 1..120: mol_type = other DNA
acagtgagttttcctttcctgaaaatcattatctatttataacacaagttagcactatcgcagttttttctttaactgttttataggtagatgcaacaagactgtaagtttctaaagaaa

SEQ ID NO: 5040 - DNA, 120 bp, synthetic construct
  source 1..120: mol_type = other DNA
tgataactttcaatactagacccttcattctcccaagtctcaccttctttcttagaactaaattattctcaccattatcttgaagtgggtgtggctctggagattcacattccattctat

SEQ ID NO: 5041 - DNA, 120 bp, synthetic construct
  source 1..120: mol_type = other DNA
atatccagtgacataggaggagatgaaagcctacatattattagaatatcatgttgggatttaagattctgtgtcatgctcctttcctccaacttggataccacataataaatttattct

SEQ ID NO: 5042 - DNA, 120 bp, synthetic construct
  source 1..120: mol_type = other DNA
aattacaaaactgaagttacttcaaactggtcatgacagtcattagtctttcagtattcaattcctgggtttgattttttttaacgctggaaagaagctgagtgcagtagctgacatctg

SEQ ID NO: 5043 - DNA, 120 bp, synthetic construct
  source 1..120: mol_type = other DNA
atcaaacatgatcagcgtataacctgaacaatacccaaggaactgaccaaacaccaagtcctaccagaagctacatttttcaacaaagctagaaggggaaattttaaagcaagcttatcc

SEQ ID NO: 5044 - DNA, 120 bp, synthetic construct
  source 1..120: mol_type = other DNA
actttaagtataggattttaccttagaaaggtgatgttatcttgttagaaacaagtgtgaggaaagggggggcaagggtggaaggatataatcatcaaaaattcaaaggtgggtcgggca

SEQ ID NO: 5045 - DNA, 120 bp, synthetic construct
  source 1..120: mol_type = other DNA
ttttggggagatcttctgaaggctcaaaggctttggaatcataaattaaatcagggagaattgtatatcacaccccgtgcaaacaggcttttgtgaaatcattccaggcctctacaataa

SEQ ID NO: 5046 - DNA, 120 bp, synthetic construct
  source 1..120: mol_type = other DNA
tccacacacttaacaaatgctccatttcctccatttccttattccttgttccaacagatttcataacactggcagttgttccagctagataattttatttttcccatcattgtctctaat

SEQ ID NO: 5047 - DNA, 120 bp, synthetic construct
  source 1..120: mol_type = other DNA
gcaattagtattttcattgtacagatgaagacattaatgtcccagagaaggtgtaatatgcccaaggttacacagctaattagtaacagagcctagatagcttcaaaagacagtaatttt

SEQ ID NO: 5048 - DNA, 120 bp, synthetic construct
  source 1..120: mol_type = other DNA
agagcgactcactaaagcttcagggtcacaaattgagcggcaagatacttgcgagacagaaaaccgaggttatgacggatactttggccctaaataaagcctgggtgtatgagcctaggc

SEQ ID NO: 5049 - DNA, 120 bp, synthetic construct
  source 1..120: mol_type = other DNA
ggtagcgcagagatgcccaaggaatatttgttgaattgctgcctggttcccttctccattctctgtttccttctgctgtggtcctcatgttgatttctcacattttggcatttctgagta

SEQ ID NO: 5050 - DNA, 120 bp, synthetic construct
  source 1..120: mol_type = other DNA
gccttgggaagaggttgctctgtatgaaacatattttgtaagatttgcaaaagtatgctagtatagtgaaaattagttaagacagcttcctctccctactccagcttatcctcagataca

SEQ ID NO: 5051 - DNA, 120 bp, synthetic construct
  source 1..120: mol_type = other DNA
ggaccttgcgccccgggttacttctcgccccttttccctatcccccatcttgatgagacaattcaccctcatctgctttctctagtcccctgtacttcttagtctctccgctcaccccga

SEQ ID NO: 5052 - DNA, 120 bp, synthetic construct
  source 1..120: mol_type = other DNA
tgtgcttgattgtacttcatatggtctgtaatggtgctaattgcagagggaaataacattttcttgtggtgttgccttagctagtgtggccccaccttctttccactttgttgatgttag

SEQ ID NO: 5053 - DNA, 120 bp, synthetic construct
  source 1..120: mol_type = other DNA
taaggattgagaatatgatcagctgccgagagaagatgtgttcagaatagaggaccaagcaaattaatggtagctgatttcctgaggaaattaaaacagactttaaaatctgtccatatc

SEQ ID NO: 5054 - DNA, 120 bp, synthetic construct
  source 1..120: mol_type = other DNA
ccaagaacacacaaaaggacagcttctttaataaatggtgatgggaaaactggttatccacatgaagaagaataaaattagacttctatcttacaccatatataaaaatcaactcaaaat

SEQ ID NO: 5055 - DNA, 120 bp, synthetic construct
  source 1..120: mol_type = other DNA
aagtggcaagattacggctcactcagcctcaacctcctgggctcaagtgatccccttgcctcggcttcccaattagctgagaccgcaggcatgcgccaccattccccgctgatctttatt

SEQ ID NO: 5056 - DNA, 120 bp, synthetic construct
  source 1..120: mol_type = other DNA
catttttcacaatgaggatgaacctggaggacattatgctaagagaaatagccagacccaaaaagaaaaatacttcatgatctcacttatatgtggaatctaaaaaaaaagttgaactcg

SEQ ID NO: 5057 - DNA, 120 bp, synthetic construct
  source 1..120: mol_type = other DNA
caattgcactccagcctgggcaacaagagcgaaactccgtctcaaaaaaaaaaagaaagaaaaagaaaattctagatgaatggatataacatgtagatacttcagccatgtacaagcctt

SEQ ID NO: 5058 - DNA, 120 bp, synthetic construct
  source 1..120: mol_type = other DNA
aggcccacgatggaaatcacaagtagaaactattcaatatggacattcctctctgtcttgcttatggaggcatctttagacataactgggaatgtcgtatggagtatatttttcagcttt

SEQ ID NO: 5059 - DNA, 120 bp, synthetic construct
  source 1..120: mol_type = other DNA
tgacctggctccagctagctcctctgtgttctccctttggagggaccggattattccttctcctgatgagaacatctccagagattcctgttttctgggaggtgccagaaattagcaaac

SEQ ID NO: 5060 - DNA, 120 bp, synthetic construct
  source 1..120: mol_type = other DNA
actaaaaataaaataaaataaaataaaataaaataaaataaaataaaattagctgagtgcggcggcgcgcacttgtaatcccagctactcatgagactgaggcacgaaaatcgcttgaac

SEQ ID NO: 5061 - DNA, 120 bp, synthetic construct
  source 1..120: mol_type = other DNA
aaaatagactaatacagttgtcaaaataatagaaaaataaatcaatgggaagaagtgagaattacaaaatagacccatagtaaacttacctttgacaagagagcaaaggcagttcagtgg

SEQ ID NO: 5062 - DNA, 120 bp, synthetic construct
  source 1..120: mol_type = other DNA
ctcacccataaaaaattttttgcataactggaaaaattgaacacggactaggtattagataatattaagaattttagttaaatattttagaagtgataaagttattaaaattatggtttt

SEQ ID NO: 5063 - DNA, 120 bp, synthetic construct
  source 1..120: mol_type = other DNA
tggctaatgtttgtgtgtgtatttttagtagagatggggttttgccatgttggtcaggctggtcttgaactcctgaacttccgcccacctcggcctcccaaagtgatggaattgcaggca

SEQ ID NO: 5064 - DNA, 120 bp, synthetic construct
  source 1..120: mol_type = other DNA
ttactaaactctgaatggaaataaagtattcaataaactcagattgaacttggagtattgttgctttaatctagtgtatttatggaaagcaaatcacaaaggtggactgttgagtaaaag

SEQ ID NO: 5065 - DNA, 120 bp, synthetic construct
  source 1..120: mol_type = other DNA
ttcagaattttcacataatcttccatttctattattattattttttaaatcagtattctgtggctgtgtaataaagtactccaaactcggtggcttaaaacaacatagaactcagctgaa

SEQ ID NO: 5066 - DNA, 120 bp, synthetic construct
  source 1..120: mol_type = other DNA
tattacatatttatttcttgaatctaaatttttacataattttactcactcttttgcatacttcatttgtaatcatatccttaatttattgatatatgtcagacatagctattatacatt

SEQ ID NO: 5067 - DNA, 120 bp, synthetic construct
  source 1..120: mol_type = other DNA
ataagcacgcaagattatctatttagtattccaatggagaacgtatatcctgagcctagtcatgcgaaagtatcagtcagtgaaagacattctatttttaaaaatgaaatgaggccggga

SEQ ID NO: 5068 - DNA, 120 bp, synthetic construct
  source 1..120: mol_type = other DNA
ctcccctcaccattcgagaaaccaataatttttcattgctccatggtttcctacagattggtcgccaagcaacagatgccagccctgccttacctaattcatctttttttcagataacgc

SEQ ID NO: 5069 - DNA, 120 bp, synthetic construct
  source 1..120: mol_type = other DNA
caattttctgcttgtctgtacagcctttgcagtgttaagtatctgtatcgatagcattgccacaccaggaaggtcttgaaccctttgtaaaagcattttcgcaaattaatcagcctggtt

SEQ ID NO: 5070 - DNA, 120 bp, synthetic construct
  source 1..120: mol_type = other DNA
ttattgtattctataaatagtgtggagaccagaggtctgagccttttgcagcctccattttgcaactgaccccctggctccccacctttactcttgtctcttctcaatcctttgtcgcca

SEQ ID NO: 5071 - DNA, 120 bp, synthetic construct
  source 1..120: mol_type = other DNA
tggatagaatgggataaagctatctatgtatcttggtaggattatatatctggaagccacccctcaaatgaaaaacttactatagagaatttggtaaagaagctggttgcaaagttaaca

SEQ ID NO: 5072 - DNA, 120 bp, synthetic construct
  source 1..120: mol_type = other DNA
cgggcatggtggcaggcgcctgtaatcccaactactcaggaggctgaggtacaagaatggcttaaagccagtaaggcttttttccccccaggtttttaaaataaccttaatttttttaaa

SEQ ID NO: 5073 - DNA, 120 bp, synthetic construct
  source 1..120: mol_type = other DNA
tccttttaattacttcatgtattcctatagtacagccaaaagagatgcacatacaccaatggctatcgtcaaaatggaaatatggacacatctgcattcatctctccctttatacttcct

SEQ ID NO: 5074 - DNA, 120 bp, synthetic construct
  source 1..120: mol_type = other DNA
tctgcctcccagcttcaagcgattctcctgagtagcatcctgagtagctgggactacaggcgtgtgccaccatgtgcccggctaatttttttttatttttagtagaggcggggtttcatc

SEQ ID NO: 5075 - DNA, 120 bp, synthetic construct
  source 1..120: mol_type = other DNA
agtacacactagcaaaacaccttttgcagtttctttcctcctacctccctcaactcaacgaacaagtagagagcacactgttcagagaggtggtttaacaattccacttccaaatacagt

SEQ ID NO: 5076 - DNA, 120 bp, synthetic construct
  source 1..120: mol_type = other DNA
taagtgattattttactcttacattagaggttaaatgttacctgtacatttaacatatgctgggcacttctaaacatctagataggctagatgtttcaggtaaggagtatatttgttgtc

SEQ ID NO: 5077 - DNA, 120 bp, synthetic construct
  source 1..120: mol_type = other DNA
gtggttggccattcccctctcaaaacatttcatatgaattttaaccaaaagatatttacaaaatgtaatattttactatctctaaatttaacacgtattagacacttcagaccatctaga

SEQ ID NO: 5078 - DNA, 120 bp, synthetic construct
  source 1..120: mol_type = other DNA
ctcttcccacatcaaggtctggtagaaggaaggccaaccgccccatggccgttaccgttctactcgtcctcatccgggactgcgctgaccttctggccgttaaagccgttatccactgtt

SEQ ID NO: 5079 - DNA, 120 bp, synthetic construct
  source 1..120: mol_type = other DNA
catgatcttggctcactgcaacctccgcctcccgggttcaagcgattcttttgcttctgcttcctgagtagctgggattacaggcgcacaccatcacacccagctaattttttatatttt

SEQ ID NO: 5080 - DNA, 120 bp, synthetic construct
  source 1..120: mol_type = other DNA
tccagagcttatataccttttaagctatatgtctatgtgtaagtgtgcattcatctaaagacataagtgattaacttctttcaatctataactaaggtctcagtcttgaagactttcctc

SEQ ID NO: 5081 - DNA, 120 bp, synthetic construct
  source 1..120: mol_type = other DNA
ttatgttcgtgtgtgtgtgtatacatatatacacacacacacacaatatgtctgtgcccctggttactgacatagaacttctgaaacccttaggtgggcagtaggaaaatcttttgttct

SEQ ID NO: 5082 - DNA, 120 bp, synthetic construct
  source 1..120: mol_type = other DNA
cgcagtttctttgagatccacatctgtggaaggcagagagtagactcaagattgagaagaagtcaagctaggatgcatgcaaggtaggatgcatgcctgacagcctcagctaacactatg

SEQ ID NO: 5083 - DNA, 120 bp, synthetic construct
  source 1..120: mol_type = other DNA
tgaacaaaaaggttacctacagaatgggagggaatatttgcacatcatatacctgtaaaggagctaatttccaaaatatataaaggactcataaaacacaatagcaaaaaaaggagtaca

SEQ ID NO: 5084 - DNA, 120 bp, synthetic construct
  source 1..120: mol_type = other DNA
ggccgggtactcctctgagacaaaacttccagaggaacgatcagacagcagcattcgcggttcatgaaaatccgctgttctgcagccaccgctgctggtacccaggcaaacagggtctag

SEQ ID NO: 5085 - DNA, 120 bp, synthetic construct
  source 1..120: mol_type = other DNA
atttagaagaatgtataactagaataaccaatacagagaagtgcttaaaggagctgatggagctgaaagccaaggctcgagaactacgtgaagaatgcagaagcctcaggagctgatgcg

SEQ ID NO: 5086 - DNA, 120 bp, synthetic construct
  source 1..120: mol_type = other DNA
tatcctaaatatatatgcacccaatacaggagcacccagattcataaagcaagtcctgagtgacctacaaagagacttagactcccacacaataataatgggagactttaacacccccct

SEQ ID NO: 5087 - DNA, 120 bp, synthetic construct
  source 1..120: mol_type = other DNA
tgaggccagcatcatcctgataccaaagcctggcagagacacaaccaaaaaagagaattttagaccaatatccttgatgaacattgatgcaaaaatcctcaatagaatactggcaaaccg

SEQ ID NO: 5088 - DNA, 120 bp, synthetic construct
  source 1..120: mol_type = other DNA
aactacaactatctgatctttgacaaacctgagaaaaacaagcaatggggaaaggattccctatttaataaatggtgctgggaaaactggctagccatatgtagaaagctgaaactggat

SEQ ID NO: 5089 - DNA, 120 bp, synthetic construct
  source 1..120: mol_type = other DNA
atgggcgaaggacatgaacagacacttctcaaaagaagacctttatgcagccaaaaaacacatgaaaaaatgctcaccatcactggccgtcagagaaatgcaaatcaaaaccacaatgag

SEQ ID NO: 5090 - DNA, 120 bp, synthetic construct
  source 1..120: mol_type = other DNA
aagatatggaaacaacctgtatccattgacagatgaatgaaaaaacaaagtgtggcatatatatccaacggaaaattattaggcttagaaaagaagaaaatcctgccatttgcaacaata

SEQ ID NO: 5091 - DNA, 120 bp, synthetic construct
  source 1..120: mol_type = other DNA
caagagttgctagatttgttattgctttgcaattgttctttgcatattctaagaattatttcattgcttgttttaaatattgcaaataacttctctaaatctgtcgttgtgttagtccga

SEQ ID NO: 5092 - DNA, 120 bp, synthetic construct
  source 1..120: mol_type = other DNA
taaatttatctctccctttttttgactttagggactgtgcttgttagcgtgtggcatgccaatggataataatgataatgaaaactatgatgatgacaaaaatgataatgatgatagcag

SEQ ID NO: 5093 - DNA, 120 bp, synthetic construct
  source 1..120: mol_type = other DNA
tcgtgatagtgaataagtctcatgagatctgatgtttttataaaaggcagttcccctgcacacgccctcttacctgccaccatgtaagatatgcctttgcttctcctttgccttctgcca

SEQ ID NO: 5094 - DNA, 120 bp, synthetic construct
  source 1..120: mol_type = other DNA
aaagaaatttctttgctggaaccaaaagggagaaaacattcatcaagtgatattagacaggacataaggagatgttgggagctttgcaaaagaatcaattaaattcaccacacaaggctg

SEQ ID NO: 5095 - DNA, 120 bp, synthetic construct
  source 1..120: mol_type = other DNA
ctgtttcttcaaggttgtatcaataattcacgtcttatttttgagaagaaaaagttaccctttagttcattcaaatgaccttaaattcaattgaaccagaccaggtctcattcaacaagc

SEQ ID NO: 5096 - DNA, 120 bp, synthetic construct
  source 1..120: mol_type = other DNA
taagatgatcctcgtggctgagagagggtagaatcatcttcaactgtgctccaaataactgtatttctggttacaaatcatgtaccttcagtcataacaatgtaaacccaattttgttaa

SEQ ID NO: 5097 - DNA, 120 bp, synthetic construct
  source 1..120: mol_type = other DNA
tggcattaagcagaaagtataccactttcttgatcaaaaattgacgactccaggaattttgaaagacttgaccaaataaataaaggccgagagttacgcatgagaaccaacatgggttgt

SEQ ID NO: 5098 - DNA, 120 bp, synthetic construct
  source 1..120: mol_type = other DNA
cctctctctgtcattggaacaagccttgctcggtcgtcagtgtggatgttcctgggtcccctagaacactcgaaatctccccaaaaataccagagagtagcggtgggtgccctgcccctt

SEQ ID NO: 5099 - DNA, 120 bp, synthetic construct
  source 1..120: mol_type = other DNA
catggtctggatgtgccacagtttgtttattcacctacagaaggaaatcttggttgtttccaagtttgggcaattatgaatgaagctgctatagaaatatatgtgtaagtttttatgtgt

SEQ ID NO: 5100 - DNA, 120 bp, synthetic construct
  source 1..120: mol_type = other DNA
agggcaagatgcagggggacagaaggatttctgcattcttgcaattaggcctgtcttttagtaagcctgcacctctgcactgtgaatcatacaagtgttgcttagatgtttttctcttcc

SEQ ID NO: 5101 - DNA, 120 bp, synthetic construct
  source 1..120: mol_type = other DNA
ccaacatgaaacctcgtctcctttaatacaaaaagcagcccggtgtggtggcacgtgcctaaaatcccagctactcgggaggctgagacagaagaatcacttgaaaccggaaggtgcagg

SEQ ID NO: 5102 - DNA, 120 bp, synthetic construct
  source 1..120: mol_type = other DNA
gcgtttacaatccctgagctagacacaaaggttctccacatccccatcaggttaactagatacagagtgtccatacaaaggttttccagggccccaccagagtagctagatacagtgacg

SEQ ID NO: 5103 - DNA, 120 bp, synthetic construct
  source 1..120: mol_type = other DNA
cccggcagaggaggcgccgagagcgagcaagggctgtgaggactgccagcatgctgtcacctctcaacacaaattgacttgttttcaaatagatttggtgatttttttaaatgcaggttt

SEQ ID NO: 5104 - DNA, 120 bp, synthetic construct
  source 1..120: mol_type = other DNA
aggcatgagccaccgcgcccgaaaagaggtttaaattgattcacagttcaacacgcttaacaggaagcatgactgggaagcctcaggaaacttataatcatagcagcaggtgaaggggaa

SEQ ID NO: 5105 - DNA, 120 bp, synthetic construct
  source 1..120: mol_type = other DNA
tttaatacacactcataaaaattcaggtctaatatgtcaaattattttatttttaaatgctagaaacaccttagtactgtgttattgttagaaaatgaaacagcaggccgggcgcggtgg

SEQ ID NO: 5106 - DNA, 120 bp, synthetic construct
  source 1..120: mol_type = other DNA
ggccatttcaattgactggatctgaatgatttatatacatagtcctgctcagataaaagccagttttgcaaccccttgttctgtgttgggcctggtgagtttccaattactctaaaggac

SEQ ID NO: 5107 - DNA, 120 bp, synthetic construct
  source 1..120: mol_type = other DNA
gggaggggaaggaaacatttttttcctatagcagaaagataacttgtaaatgtaaaataaatgatggatttacaagatcatcatttggcaaccatcatacttctaactgattcaggccag

SEQ ID NO: 5108 - DNA, 120 bp, synthetic construct
  source 1..120: mol_type = other DNA
tataaaatatatatgtatacatatatacatatgagatgtgagataacagtatatctcacacgtatatgagataaaggcatatctcatatgtataagagattaaaagtatatctcatatgt

SEQ ID NO: 5109 - DNA, 120 bp, synthetic construct
  source 1..120: mol_type = other DNA
gagtcatttgtgagcaataactcccctgaggttgcagatataggctttttctcaattggggggttttccccctaaaacttgatgccaattccttttaagtatttcttacatttatacttt

SEQ ID NO: 5110 - DNA, 120 bp, synthetic construct
  source 1..120: mol_type = other DNA
cgatttactgtttattgatttatgaaagtcatggatttttttcagtggcacatggacacccaagaacttaaggaggtcagagaaaatctcaaaagaatatgcaaaatttgtccgtaagtc

SEQ ID NO: 5111 - DNA, 120 bp, synthetic construct
  source 1..120: mol_type = other DNA
caacaaaacacacccacactcacacaatcacttagaaaatgtgcttagaacaatgtcagcgcgtcccagagggcaaataaaaccgtgaaatcggagagtggagatgaaccatgttcccag

SEQ ID NO: 5112 - DNA, 120 bp, synthetic construct
  source 1..120: mol_type = other DNA
gcccttgaatcctaaagtctttcttaattcctctcttgagccaaaatttggagcattgccatttcgtatcccattcagaatgtttttgtagtgaatataaacttattttcctgttaacca

SEQ ID NO: 5113 - DNA, 120 bp, synthetic construct
  source 1..120: mol_type = other DNA
gtgagtcgagatcacaccactgcactccagcctgggcgacagagtgagactccgtctcaaaaaaaaaaaaaaaaaaaaaaattattggacctcgtgagacttactaccacgagaacagta

SEQ ID NO: 5114 - DNA, 120 bp, synthetic construct
  source 1..120: mol_type = other DNA
gatcacgccattgcactccagcctggggacaagagcgagacttcatctcaaaaaaaaaagtagggggatggaaatttgaacatacacacacatgcagggagaataccatgtgaacatgaa

SEQ ID NO: 5115 - DNA, 120 bp, synthetic construct
  source 1..120: mol_type = other DNA
gagaacagaagatggagatgaatgtgatctgagattaaggtgggaaagtaatttaggaataagggatggagtgggtgcactggagaaggtattttgagggaggacacagaagtgagaggc

SEQ ID NO: 5116 - DNA, 120 bp, synthetic construct
  source 1..120: mol_type = other DNA
cctactgctctgccagttgtgtaaaaatatagtacatacaattatgtacagtacataatacttgataatgataataaatgactatgttactggttttgtatttactatactatacttttt

SEQ ID NO: 5117 - DNA, 120 bp, synthetic construct
  source 1..120: mol_type = other DNA
gcatttataaaatctacagtagtgtacagtaatgtcctaggtcttcacattgactcaccactcactcactgactcaccaagaacaactactaccagtcctgcaagacacattcatggcaa

SEQ ID NO: 5118 - DNA, 120 bp, synthetic construct
  source 1..120: mol_type = other DNA
catcacaaaaaaaaaaaaaagaagatttttatcttatgaatatctattattggagatatctctgagaaaaatttacccacttgaacaacaacaatagatccaatatgattttaaatgaca

SEQ ID NO: 5119 - DNA, 120 bp, synthetic construct
  source 1..120: mol_type = other DNA
gactgtcttactaaggaaaggcttgttttaattgatcgtataactctgggttcctgataggaaaattaaaaaaattttaaacaatatttcaaaagatcgctattttaattggtaaaacca

SEQ ID NO: 5120 - DNA, 120 bp, synthetic construct
  source 1..120: mol_type = other DNA
tagctttaacctgtgggtagctgaagtattaaatcaatgaaatgtgtaacttctccaggtctcttatatgaaataaatttagggaactgatgggggaaagagtggcactgagggccactg

SEQ ID NO: 5121 - DNA, 120 bp, synthetic construct
  source 1..120: mol_type = other DNA
aacccagcagcaaaactcagtgaaaagatgaattcgttcacaaaacatccatttaggatttttattgataattgtccttttattggtaaatgttccttccagcaccgccctaatggaaca

SEQ ID NO: 5122 - DNA, 120 bp, synthetic construct
  source 1..120: mol_type = other DNA
ggaaagatccttccagaaaagatagcaaatgttttaccaactactgtctttacttagggaaactactgaactgcctccaattccttaccccatctctgcgtcctattcccaaactccaga

SEQ ID NO: 5123 - DNA, 120 bp, synthetic construct
  source 1..120: mol_type = other DNA
ttcacataattaatcatgcactactctagaccccagtacacacctggaaggtaaggaacatatctaacaaaagactcagacaaccattaacacctctgcttggaaacaagatttttttgg

SEQ ID NO: 5124 - DNA, 120 bp, synthetic construct
  source 1..120: mol_type = other DNA
cctccagactcaagaccacaacatttgttaactatcggcatgatgttccctaacaaatcctaaaagcaagaccttaacaatttcttaaaaaggaatccattcactgcactgatttgggaa

SEQ ID NO: 5125 - DNA, 120 bp, synthetic construct
  source 1..120: mol_type = other DNA
acaacaagttttttgcagcacatcaattaatatcctgaaataaaagtgatagttaatgtaaactagctacagatacaatttttctttcaaatttgtaagactccttaactggtatacata

SEQ ID NO: 5126 - DNA, 120 bp, synthetic construct
  source 1..120: mol_type = other DNA
atcgcttgaacgcgggaggcggaggttgcagtgagccgagatcttgccattgcactccagcctgggcaacagagtgagactcggtctcaaaaaaaaattaaaaaattgttcagaaataaa

SEQ ID NO: 5127 - DNA, 120 bp, synthetic construct
  source 1..120: mol_type = other DNA
gtttctatcaatgaccattaatccttcaactcattaagcctgctcattaacgttatctttcagtaaagtgggctgtacttttaggacatctcgacattctgcaggcttggtgggaggtgt

SEQ ID NO: 5128 - DNA, 120 bp, synthetic construct
  source 1..120: mol_type = other DNA
cggtaagatatatttttcaaagataattctggcaaccatgtggagcatgaattttaggaagaatggaaatgccaggggactggttaggaggctactgtggtaatcttggcaagagagtgt

SEQ ID NO: 5129 - DNA, 120 bp, synthetic construct
  source 1..120: mol_type = other DNA
ttgaatccctcatttgcttaaatgaacctgattgagaataaacactgggaagattgaattttcccagcgtatacattgtttctcagaaaataaaagctgtccctttggcctccacagatc

SEQ ID NO: 5130 - DNA, 120 bp, synthetic construct
  source 1..120: mol_type = other DNA
tgcctgtggaataatacagtggcgacatgctgtaggctatatggacttaacatttaatgagggtggtagagactaaagatatatatttaagaaatagcagcatacagaggatatgtagag

SEQ ID NO: 5131 - DNA, 120 bp, synthetic construct
  source 1..120: mol_type = other DNA
gaattcaagaccagtgtggccaaatgctgaaaccctgtttctactaaaaatacaaaaattagttgggcatggtggcacgcgcctgtaatcccacctactggagagggtgcggcaggagaa

SEQ ID NO: 5132 - DNA, 120 bp, synthetic construct
  source 1..120: mol_type = other DNA
ggaggttgtgggtacaggcatcctggactggaaggcctactccttatttagagtggcactaatcttcaccgtggtgtgatattctctaggagcaccaaacagtctgtgtggagtgaataa

SEQ ID NO: 5133 - DNA, 120 bp, synthetic construct
  source 1..120: mol_type = other DNA
ataatgcagatagtaataatattaataataatagcagctaacatttgttgagcatgtatattgttctaagatattgtcacaagtcctcctatgagttttaactaaatttattctttttct

SEQ ID NO: 5134 - DNA, 120 bp, synthetic construct
  source 1..120: mol_type = other DNA
tctcacagtagcggaaaagctgagatttaaacatgagtattctaattccagagtctgtgttcttataaactactctatactggattatattattttggagtcattattttggcataatac

SEQ ID NO: 5135 - DNA, 120 bp, synthetic construct
  source 1..120: mol_type = other DNA
agctcattgcagtcttgacctcctcaggctcaggccatcttcccttttgggccttccaagtagctgggattataggcgcatgccaccacatctggctaatttttgtatgttttttatagg

SEQ ID NO: 5136 - DNA, 120 bp, synthetic construct
  source 1..120: mol_type = other DNA
ccaagtaaattaaacattccccacagtccaaaagatcccattggaagtagaaaactgagtgggaaatgaggttaattgagaaattaagagattgagacagatagcttcatccttgaggta

SEQ ID NO: 5137 - DNA, 120 bp, synthetic construct
  source 1..120: mol_type = other DNA
agacgtgagccaccgcgttccacctgttgtgagtttctaaccaactctgccttccatttctacaggctatttctaacctttactactttcccaaatgtcccaaatgttctatgaccagct

SEQ ID NO: 5138 - DNA, 120 bp, synthetic construct
  source 1..120: mol_type = other DNA
ctgaggatgaattccacctaaagcctaacccagattacacctgagtaacctccttccgggacacactaacaacatccagcttgtgtcgttactgagagcaaagcacacttttatagcttt

SEQ ID NO: 5139 - DNA, 120 bp, synthetic construct
  source 1..120: mol_type = other DNA
gtacccaaaatatacaaagaactcaatgcataacaataaaagtacaaacaacctgattaaaaagtaggcaaaacatttgaacagattactcaccaaagaagatgtacagatggcaaataa

SEQ ID NO: 5140 - DNA, 120 bp, synthetic construct
  source 1..120: mol_type = other DNA
tggtgcaggatgctgttggtggaagaggctctgcctgtgtgagggcagggatatataggaaatttcagtaccttccactcagtttttctgtgaacctaaaactgctctaaaaaaataaag

SEQ ID NO: 5141 - DNA, 120 bp, synthetic construct
  source 1..120: mol_type = other DNA
tcaagaccagcctgggtaacaaagtgagactccgcctcatctctacaaaataataataataataataataataataataataataataataatagtaattagctgggagtggtgatacat

SEQ ID NO: 5142 - DNA, 120 bp, synthetic construct
  source 1..120: mol_type = other DNA
taattgatataggcctatttggattggccgtttcttcttgtgaagcaatcagtgtagtttttcctttcttttcctctttatcggagactattttaacatataaaggagcaaaaaggctgg

SEQ ID NO: 5143 - DNA, 120 bp, synthetic construct
  source 1..120: mol_type = other DNA
attcatcacctcgaacatttatcatttgtgttaggaacattccaattccactcttttaattatttaaaaatatacaataaattattgttgactacagtcaccttactgtgttatcaaact

SEQ ID NO: 5144 - DNA, 120 bp, synthetic construct
  source 1..120: mol_type = other DNA
atttgattttttcccccattaagttatttgagctcactctatattctgtctattagtcccaaattattattttcagtaagataatgactatggttttaaatgtacataatttgccatgct

SEQ ID NO: 5145 - DNA, 120 bp, synthetic construct
  source 1..120: mol_type = other DNA
aatagcctttgcaatacctacaatgggccttgactaaaatgcttctgtaacacttgtaaaaaaaaatgacctatagtattatatttattttctgtctaattgaatgctgtcttcgatatc

SEQ ID NO: 5146 - DNA, 120 bp, synthetic construct
  source 1..120: mol_type = other DNA
aacttcccattgaatagatgtttcaataatgctattcaaagactggaacttgccacaaaaaaattattaaataattttggagatacagctggaggcagacagggaaaaaagtcttccata

SEQ ID NO: 5147 - DNA, 120 bp, synthetic construct
  source 1..120: mol_type = other DNA
agggacacaatacactgaaagtcaggtattgtccaaggtttctccccagtgtgatagcctgagatatggcctcctgggaagggaaagacctgaccttcccgagccccgacacccacaaag

SEQ ID NO: 5148 - DNA, 120 bp, synthetic construct
  source 1..120: mol_type = other DNA
aaaaatctaatcatgctatttcaaacaatagaacaattctgcccatggtttctagaacagggaaccttagatctaaaagattgggaaaaaattggcaaagaattaaaacaaacaattagg

SEQ ID NO: 5149 - DNA, 120 bp, synthetic construct
  source 1..120: mol_type = other DNA
ggagtaaaacagtatggacccagctccccttatatgaaaatattattagattccattgctcatggacagagactcattccttatgattgggagattttggccaaatcatcactctcatcc

SEQ ID NO: 5150 - DNA, 120 bp, synthetic construct
  source 1..120: mol_type = other DNA
cagacaacccccactgtcacaaatgcctcagcgaatgagccagttaccacaatacagcaattgtcccccgccacaagtggcaatgcagcagtagatttatgtactatgcaagcagtctct

SEQ ID NO: 5151 - DNA, 120 bp, synthetic construct
  source 1..120: mol_type = other DNA
tgtttgtaattcagaaaacatccggcagatggcgtatgttaactgacttaagggccgtaaatgccgtaattcaacccaaggggcatctccaacccgggttgccctctccggccatgatcc

SEQ ID NO: 5152 - DNA, 120 bp, synthetic construct
  source 1..120: mol_type = other DNA
ggatttagagctgtgcaggatgtgctttgttaaaaaagtgcttgaaggtagtatgcttgttaaaagtcatcatcattctctaacctcaagtacccatggacacaatacactgcaggcacc

SEQ ID NO: 5153 - DNA, 120 bp, synthetic construct
  source 1..120: mol_type = other DNA
caagattacaaataataaaattctgtggaaacgacccagacaaaatagttgttcctttaaccaaggaacaagttagacaagcctttattaattcgggtgcatggcagattggtcttgctg

SEQ ID NO: 5154 - DNA, 120 bp, synthetic construct
  source 1..120: mol_type = other DNA
aaaaaattaaaactgacaatggaccaggatactgtagtaaagctttccaaaatccaaaaaatcttatatcagtggaaaattacacatacaacaggaattccctataattcccaaggacag

SEQ ID NO: 5155 - DNA, 120 bp, synthetic construct
  source 1..120: mol_type = other DNA
gagaacaccaggatgtttaatgcctgcaatccaaaattggttggtaaacgtacctactttcagtaccaccagtagatttacttatcacatggtaagtggaatgtcactcaggccacaggt

SEQ ID NO: 5156 - DNA, 120 bp, synthetic construct
  source 1..120: mol_type = other DNA
ggcaggagttgcattgcactcttctgttcagacagtaaactttgttaacgattggcaaaagaattctacaagattgtggaattcacaatctggtattaatcaaaaactggcaaatcaaat

SEQ ID NO: 5157 - DNA, 120 bp, synthetic construct
  source 1..120: mol_type = other DNA
ctgagatagggcgtcgtgggaagggaaagacctgactgtcccccagcctgacacccataaagggtctgtgtagtaaaagaggaaggcctctttgcagttatgataagaggaaggcatctg

SEQ ID NO: 5158 - DNA, 120 bp, synthetic construct
  source 1..120: mol_type = other DNA
agcttaagtacagagaaatacagttatcgtcagctttgtcttccattccaaacgaaaacaatcgcttgcagaactacctcacgtgctcaaaccaaaagcagccggcaaatcccatttcta

SEQ ID NO: 5159 - DNA, 120 bp, synthetic construct
  source 1..120: mol_type = other DNA
atttcaggccaggttttgtgaattctgtaagcttctgttttacatcctccattaggacctagagttcgccaagcagcatttaactttacttctttgatttcctttctgtgttacctttgg

SEQ ID NO: 5160 - DNA, 120 bp, synthetic construct
  source 1..120: mol_type = other DNA
tatctaccagactaatcactctgccaaaatccggcgtcgagaagaaaacttttaagactttaagccccctaccatatctaattctccctgcatgctgatagcatctggccctcaaacttg

SEQ ID NO: 5161 - DNA, 120 bp, synthetic construct
  source 1..120: mol_type = other DNA
tgctccaaggtccacttgccggcgactcggtgagagtttcttgcctccaccaggaaggtcctgagacagtctcaagtctccaacatatatagcagcgataatgactcagaaaaaagtgtt

SEQ ID NO: 5162 - DNA, 120 bp, synthetic construct
  source 1..120: mol_type = other DNA
aactgagttatgtcagctgcacctctaccttcactgacactagtaattatctcagctattgagtttcgaaagcactgcattatttgagagatgtctttcccttgatccctcactcagaag

SEQ ID NO: 5163 - DNA, 120 bp, synthetic construct
  source 1..120: mol_type = other DNA
atacaaaaattagtgaggggtgttggcacatgccagtagtctcagctacttgggaggctgaggcatgagaatcacttgaacccaggaggcagaggttgcagtgagccgaaacatgccact

SEQ ID NO: 5164 - DNA, 120 bp, synthetic construct
  source 1..120: mol_type = other DNA
gccactgcactccagcctgggggacaagagtgaaactccatctcaaaaaaaaaaaaaaaaaattccagatcctcgtgaagcctctttaggcctagagaagtcctcaaactttgccacata

SEQ ID NO: 5165 - DNA, 120 bp, synthetic construct
  source 1..120: mol_type = other DNA
ggaaacttgaaatgaaagagaaaatatgaggcaaacaggttagagtataatttttaaaatattcacttgacaagatttcaagaagctctttaactatgaaggggcatagcccatttggtg

SEQ ID NO: 5166 - DNA, 120 bp, synthetic construct
  source 1..120: mol_type = other DNA
gcctcatgaaaatgcaaaactcacggtaagagatgtcatgtctgcagagtttctgactcagagattagggtgccttccaaaaactctgtatattgttacttagacataatccactttaaa

SEQ ID NO: 5167 - DNA, 120 bp, synthetic construct
  source 1..120: mol_type = other DNA
gccacagccccatcactgttgcaatttcttgttgcatattccctagttttacattttacatggttttgtgaaagtgtaacatttaaaagtaaatgtctattctgttaaagtccatttcaa

SEQ ID NO: 5168 - DNA, 120 bp, synthetic construct
  source 1..120: mol_type = other DNA
ttccatgtgtcaacctaactaacagagagaggttctctaaaagaaaatatgtttatttgtgaacagagcattgcagtgggaataggcatgccatagtaaacgatgtatgtcttcagggag

SEQ ID NO: 5169 - DNA, 120 bp, synthetic construct
  source 1..120: mol_type = other DNA
aatctattttccttcagtggtaaataattttcccatttatattgtggagttctccctgttctttcttttttatttgttattcctttttctgcttctttttctcctcttcttcctgtgtct

SEQ ID NO: 5170 - DNA, 120 bp, synthetic construct
  source 1..120: mol_type = other DNA
aactattagagtacttgtatctgcagctgattggtatttgtaattatctctttcactccatattctctttgctttcggcaagtacctcagcagttaaggctctttgcctgatggggtaaa

SEQ ID NO: 5171 - DNA, 120 bp, synthetic construct
  source 1..120: mol_type = other DNA
ccacatacgtcttgggcttagctctgagctgtgcatgctatagacagaaccagaacagcataacaaattctttccaaactaacagtatatttatacgaagacctccatctcagactaaca

SEQ ID NO: 5172 - DNA, 120 bp, synthetic construct
  source 1..120: mol_type = other DNA
gttaaaaaaaaaaaaaaaagctaggtgtggtggtaagcacctatagtcccagctactcaggaggctgagatgggaggaccacttgagctcaggagttcaaggctgcagtgagctatgaac

SEQ ID NO: 5173 - DNA, 120 bp, synthetic construct
  source 1..120: mol_type = other DNA
caaacaaaaaataatcttggaaacaactacagaaaataacacaattttaaaacggagaccacaatccaaatatgtggatttttctttcagaaactatgatagtcaaaagacagtggaaca

SEQ ID NO: 5174 - DNA, 120 bp, synthetic construct
  source 1..120: mol_type = other DNA
aaataaaaccataatgagatgtcattacacacctgtcagaatggtccctcatcttcagcccattaattaatccctatgagatgaggcagacaatagtgtggtcctacaacactatggcaa

SEQ ID NO: 5175 - DNA, 120 bp, synthetic construct
  source 1..120: mol_type = other DNA
ttccttcttctcgtcctcctcttcagttctcttccgttctcagacattccacttgtaaccgaaccgtgctgattttcagagtcacctgggggagttcttaaattacttacattcttgccc

SEQ ID NO: 5176 - DNA, 120 bp, synthetic construct
  source 1..120: mol_type = other DNA
atttgcttcatgagtggcaacagactcaaaagtagcctaaggtctacgttttgggtggtatgtctaaataatgctgcattgaagcgtgggattaggaagaaccaaggcccttggaattaa

SEQ ID NO: 5177 - DNA, 120 bp, synthetic construct
  source 1..120: mol_type = other DNA
attattggagaggctacgtctgccaatgaagaaatcacattttacgaatccaatgattacactctaaagagttcagaagaacatattgctagatgtgttattctacatttatgctattaa

SEQ ID NO: 5178 - DNA, 120 bp, synthetic construct
  source 1..120: mol_type = other DNA
caagatccagccactgcactccagcctgagagacagagtgatacgctgtgtcaaatatatacgtatatatttataaatatatttatatatatataatatttttatagatatatataattt

SEQ ID NO: 5179 - DNA, 120 bp, synthetic construct
  source 1..120: mol_type = other DNA
ctgcctcggcctcccaaagttctgggattacaggtgtgagccaccgcacccggcccccctctttttttttttttagacaaagcgtcacccaggctggagtgcgatggcgtactctcatct

SEQ ID NO: 5180 - DNA, 120 bp, synthetic construct
  source 1..120: mol_type = other DNA
acctcggatacgaattatttttctcttttcttattaagtagagaactttccccttctttacaatttcaaggatagatttattcttaccatagctcttagcaacgttggatacgaattttt

SEQ ID NO: 5181 - DNA, 120 bp, synthetic construct
  source 1..120: mol_type = other DNA
ttcttttcacctggcagcctctcttcacattctagccccaagaaggaaattccatttctttactcaatggctgcattcttagatcttgttttaaatatctttggttaatgagttctaaag

SEQ ID NO: 5182 - DNA, 120 bp, synthetic construct
  source 1..120: mol_type = other DNA
aaaaacttactgaatggatcagatgatgaaatttcaagtttcctagtggacatctagaattattgactgaaggattggatgagaactgagaactgttcaacattgaagacaacatgtctt

SEQ ID NO: 5183 - DNA, 120 bp, synthetic construct
  source 1..120: mol_type = other DNA
cctgctaatccaagtaacgaagccagggaagaaagcaagaaagaaaggggaaagagagagagcgtactacatttgccctatttcaagagtttgtagtttcttacatctttttttcttttt

SEQ ID NO: 5184 - DNA, 120 bp, synthetic construct
  source 1..120: mol_type = other DNA
atttgaatgagaaggaggatctgttggcagttttgagcttgggtacctaagttttggctaggagtgactactagcacactggctcataaggcaagggaaagcattaaaaaatataggtta

SEQ ID NO: 5185 - DNA, 120 bp, synthetic construct
  source 1..120: mol_type = other DNA
tttttaaatttgactgtgtaaaccattaacatgattctaagaaacaaaactatacagagaagtatcactcaagagaaattttcaagctgctggagattgttacatcatgggaccctctca

SEQ ID NO: 5186 - DNA, 120 bp, synthetic construct
  source 1..120: mol_type = other DNA
ttcccaaggcttccccgaccctaccaaagttacttgttgacatttttgttactcacttactctctctagccactctgagcaatcactgctatgttggctacagtcttatacttcacaaaa

SEQ ID NO: 5187 - DNA, 120 bp, synthetic construct
  source 1..120: mol_type = other DNA
acaaagacttgctaccctgtcctgcccggtttgaatcctgaagtgaaagaagtgagagtgcagaaaaactcctttgtcttctaccagtgctgagctcagactctgggtattgttgagaga

SEQ ID NO: 5188 - DNA, 120 bp, synthetic construct
  source 1..120: mol_type = other DNA
ttagtgcttgttgcaaataattcgccactttttagaagaaaccaagtggtcacataaagtcagaggccactgcaaatgtttcaataaaggagtttaggaaacctacatctcaggccaggc

SEQ ID NO: 5189 - DNA, 120 bp, synthetic construct
  source 1..120: mol_type = other DNA
tgctgtcattatcatcaaatgacttaggcagggtttttgtgctctattttgaatatatatttgtgtgtgtacatatatttaaaattgcttacatatctatataaaaaatggcttatatac

SEQ ID NO: 5190 - DNA, 120 bp, synthetic construct
  source 1..120: mol_type = other DNA
atggaagacatttatggattctagtaggttcatctctttatgtttgcttttagcatgtcattacattgcaaattagtcacttcaaagtgaggcttagtgtgaagctcctcaattgcacaa

SEQ ID NO: 5191 - DNA, 120 bp, synthetic construct
  source 1..120: mol_type = other DNA
aaaaattagcagggtgtcatggtgcatgcctgtaatcccagttactcggtaggctgaggcaggagaattgcttgaacccaggaggcggaggttgcaatgagccgggattgtgcgactgtt

SEQ ID NO: 5192 - DNA, 120 bp, synthetic construct
  source 1..120: mol_type = other DNA
agaaatgaacaactttttttaataaaaaggaaaatctaaattctaccacaaataccaaggtatactctgatagaaggaaaccaaaaacagtctccgtgggctccgtagcttagttggtta

SEQ ID NO: 5193 - DNA, 120 bp, synthetic construct
  source 1..120: mol_type = other DNA
aaattcacggggcatcgcgattgctttattatatatggagaagcaaaggaagtcagacacgaaattcctttgcttatgtgccatgctcttttgctcccccgaatatcaattacgaaatat

SEQ ID NO: 5194 - DNA, 120 bp, synthetic construct
  source 1..120: mol_type = other DNA
gtgagtagctaaagaacagcaacattttcaggaaatgaaaccaagacagcacacattttaagtatgcattctaccaccgagcaacattcttgtgatagccaagctctcttggagatacat

SEQ ID NO: 5195 - DNA, 120 bp, synthetic construct
  source 1..120: mol_type = other DNA
tcactgcaagctccgcctcccgggttcatgccattctcctgcctcagcctcccgagcagctgggactgcagctattaggatgcattaacgaggattgagagtcagctggaaaatggatgt

SEQ ID NO: 5196 - DNA, 120 bp, synthetic construct
  source 1..120: mol_type = other DNA
gcaaatatcttttaaattatgttgattaaggttaaaactttctaggcttacatcaaagctgtgtgtgggtcatggcatcatttctaactgtatgtagatatcgacttgtagcccagcgta

SEQ ID NO: 5197 - DNA, 120 bp, synthetic construct
  source 1..120: mol_type = other DNA
tgggttttggcagcagttatttttattgcatattaaatcgactttcacaggaaatgtacacaaaatatgtaatagaagacaccgaataactccccccattcctcaaaccaaaacatctag

SEQ ID NO: 5198 - DNA, 120 bp, synthetic construct
  source 1..120: mol_type = other DNA
acatccccatgaagcagtagaactctggccattgtaatccatgagggaatccatattttggagacccctttccaggaaaagggaatagctaagacccacgacctcaaagcttcacacaca

SEQ ID NO: 5199 - DNA, 120 bp, synthetic construct
  source 1..120: mol_type = other DNA
tcactcagtgggtgtgatgtggtggatgttggtcccagaagttcggcgcataagttgcaccatttcccgtgaacacccgtgggaggtcatgactgatccctgcttctacagagatcccga

SEQ ID NO: 5200 - DNA, 120 bp, synthetic construct
  source 1..120: mol_type = other DNA
tgcaaaatctgtatcttcctgaatatgtgaataaattatgtatcaacttcttggttccttcccaacttttgtctcctgtccccacccccgctagaattaacggagtgaggctcagttgtg

SEQ ID NO: 5201 - DNA, 120 bp, synthetic construct
  source 1..120: mol_type = other DNA
accctttttgtccaaaactgacaccgctttgagagcgaccagcggctttttccatctctgaaaataattttctcaactgtgtattttgaaagtctcggagtttcgccagaagcgtctttc

SEQ ID NO: 5202 - DNA, 120 bp, synthetic construct
  source 1..120: mol_type = other DNA
gggatcgaacccagagcctcatgaatgttaagcatacgctctaccactgagctacacccccacttacaatgccgttttcttactgatttattatatgctattatctaaaggtgagggctt

SEQ ID NO: 5203 - DNA, 120 bp, synthetic construct
  source 1..120: mol_type = other DNA
gatttttaaaacgagcataggacttgaatagacatgtctccaaagaagacatacaaatagccactaggtatgtgaagaggtgctcttaacatcactaatcatcaaggaaatgcaaatcaa

SEQ ID NO: 5204 - DNA, 120 bp, synthetic construct
  source 1..120: mol_type = other DNA
gagttgataagtgtgtttattaccgattgtggaaatagcattataaatgtatgcatatgtcctcactcatatgcttaccttcaacgtgtaggggttttgcatatatcaactgtacttcaa

SEQ ID NO: 5205 - DNA, 120 bp, synthetic construct
  source 1..120: mol_type = other DNA
atagtattgagacaagcgtggaggaagaaagcagccaagcgccgcgtctctgccaagctttctctaggccctggggaagagagaaggctctaggtgagtggtttcaaagtgtatatccca

SEQ ID NO: 5206 - DNA, 120 bp, synthetic construct
  source 1..120: mol_type = other DNA
cgcgatcgcggctctctgcaacttccgcctaccgggatcaagcgattgtcctgcctcagcctcccgagtagctgggagtacaggcgcccgccaccacacccgtttaatttttgtattttt

SEQ ID NO: 5207 - DNA, 120 bp, synthetic construct
  source 1..120: mol_type = other DNA
atctcggcctcccaaaatgctgggattacaggcatgagccaccatgcccgggccaaattggaatttagcacccacatttatcttaactcagtagttcctaagtaaaagagatttgtaagg

SEQ ID NO: 5208 - DNA, 120 bp, synthetic construct
  source 1..120: mol_type = other DNA
gtgaccttcagatttttgtggaaatttattaacaatgtttgactctcgagttttgagagcccaaagaaagtttttgatagaaactttcttttcttggtgatatactctccttgattgtga

SEQ ID NO: 5209 - DNA, 120 bp, synthetic construct
  source 1..120: mol_type = other DNA
aaaagaaaagggtgattttgtgttgtgtttgttaaattcatgaaacaagtaggacaagaccataaattgaaaaaccaagcccattccaaattacgaatgcctccggtagtacctatgcca

SEQ ID NO: 5210 - DNA, 120 bp, synthetic construct
  source 1..120: mol_type = other DNA
ggtgacgggttcaatcgtactccagacatcagcaacacgcaatacacccttgtcccaaacctgcactgtactccctgaatctaaaataaaagttgaaattaaaaaaaaaaaaaaagctcc

SEQ ID NO: 5211 - DNA, 120 bp, synthetic construct
  source 1..120: mol_type = other DNA
ctaacaaatttaaataaaagggcattttttgttcagtctggaggaggaaaagttaactggcagacgtaggcagcagatagtaaagttggcacagttagtaaggttggtagactgagccaa

SEQ ID NO: 5212 - DNA, 120 bp, synthetic construct
  source 1..120: mol_type = other DNA
tggggatgggggctactgtgaaaggaaaggataaagaaaactcagccaagtaaagattttctactcacatatctatttaccattcttttgtctatatgtcttttaaaagaagacatacaa

SEQ ID NO: 5213 - DNA, 120 bp, synthetic construct
  source 1..120: mol_type = other DNA
aaaggtcaacttgtttttgcgattgtctgttgtttttcaataactaacgtataggaatagattgaaatagagatttctccaaaacagcactggatgaacacctcaaggggttcatacaac

SEQ ID NO: 5214 - DNA, 120 bp, synthetic construct
  source 1..120: mol_type = other DNA
attatggaatgttctcttgcatcttcaaattcttcctccttcgtctctcttaccctctgcctacaaaggcttcaagaaagagatgcaagacaatactgagggatacgaacaaaagtagct

SEQ ID NO: 5215 - DNA, 120 bp, synthetic construct
  source 1..120: mol_type = other DNA
tataataacaatattaaaaaagtgcacaataaatctaatgtgcttgaatcatcccaaaatcatcccccccaacccctgctccctcatccatggaaaaaactgtctttcatgaaacggtct

SEQ ID NO: 5216 - DNA, 120 bp, synthetic construct
  source 1..120: mol_type = other DNA
tggttcgatgtggttcgaaatgtatgtagaagaaataatttaagacaattatattacaagtaggagaggcaaagtgacaaaaaggtaaagatgacacacatcactttaactgataaaata

SEQ ID NO: 5217 - DNA, 120 bp, synthetic construct
  source 1..120: mol_type = other DNA
ataaaccaaacagagttgaaaatatgtaaagaaaaaaagaatttttaaaaaatagacaaatccacaattacattagagacttcaacacttctctcataataatcgatagaacaactaaac

SEQ ID NO: 5218 - DNA, 120 bp, synthetic construct
  source 1..120: mol_type = other DNA
gacaggtaggagaatcgcttgaaccgggaggtggagggtgcaatgggccgagatagcaccatttcactccagcctgggcaacaagagcgaaactccgtcgcagactttttctcccccttg

SEQ ID NO: 5219 - DNA, 120 bp, synthetic construct
  source 1..120: mol_type = other DNA
taaaaatacaaaaattagccaggcgtggttgcacatgcttgtaatcccagctactcgggaggctgaggcagaattgcttgagcccaggaggcggaggtgacattgagccaatatcgtgcc

SEQ ID NO: 5220 - DNA, 120 bp, synthetic construct
  source 1..120: mol_type = other DNA
tttgaacctgggaggcagaggttgcagtgagccaagatcgcaccattgcactccagcctggaggccaagagcaagacttcgtttaaaaaaaaaaaatcaggaatcttcgaatccaagaaa

SEQ ID NO: 5221 - DNA, 120 bp, synthetic construct
  source 1..120: mol_type = other DNA
aaaggaaataggtttaattgagtcacatagctgaggaggcttcgggaaacttacaatcatggcggaagggaaatgggaagcaaggaccttctttacatgacagcagaagaaagaagtatg

SEQ ID NO: 5222 - DNA, 120 bp, synthetic construct
  source 1..120: mol_type = other DNA
atggtgaaaccccacctctactaaaaattagctgggcatggtgacgcgcacctgaaatcccagctacttgggaggctgagtcaggagaatcacctgaacccaggaggcagaggctgcagt

SEQ ID NO: 5223 - DNA, 120 bp, synthetic construct
  source 1..120: mol_type = other DNA
tcaaaaaacaaaacaaaacaactttaacatcagagtcacttgagggcttattcaaacacaggcggctggacgccaccctcagcaattctgactcaatagatctgaggttgggcctggaat

SEQ ID NO: 5224 - DNA, 120 bp, synthetic construct
  source 1..120: mol_type = other DNA
aaacgattctcctgactcagccttttgagtagctgggattacaggcgtgcgtcaccacgcccggctaattttgtatttttaatagagacggagtttctccatgttagtcaggctggtctc

SEQ ID NO: 5225 - DNA, 120 bp, synthetic construct
  source 1..120: mol_type = other DNA
tgaaagactgttttgtaataattttcaggaggtaactttcattttctgagactggctccgtgagcatgctggtagtagtggttagtatcatggagcgccttcagctgctctgagtagaag

SEQ ID NO: 5226 - DNA, 120 bp, synthetic construct
  source 1..120: mol_type = other DNA
tctccagcctggggtttgtgagcattagtagtagtagacatattgcatagagggtggataaagactaaaaagggtccttttagatttgggaattacaaacctattcacgatatttgttta

SEQ ID NO: 5227 - DNA, 120 bp, synthetic construct
  source 1..120: mol_type = other DNA
ctgtagctctcttctgactaacaacaacacgactgaaacacagttttttttgtaaaaactgtgggatgagcttatttaacacagaattcctctgaggaattaaacatttaatcctgaaga

SEQ ID NO: 5228 - DNA, 120 bp, synthetic construct
  source 1..120: mol_type = other DNA
aaaataaaaattgaaattacataaaaatataaatattgactttttttaatgcaactactgcaaaaggtaacactacaaaatggctgtcatttaaaacttgtattatctcttgattggaca

SEQ ID NO: 5229 - DNA, 120 bp, synthetic construct
  source 1..120: mol_type = other DNA
tttttcctggatacaaacatggaaacagcttaagatttggaaattctagacaaggttgccaggctaaagaaatgtcttctcagcaagaaaatttagaatgttcttgtaattgggcctggt

SEQ ID NO: 5230 - DNA, 120 bp, synthetic construct
  source 1..120: mol_type = other DNA
acctgatcaacatggcgaaaccctgtctctactaaaaatacaaaaattagccgggcatggttgcgggggcctgtaatctcagcttacttgggaggctgagatatgagaacagcttgaact

SEQ ID NO: 5231 - DNA, 120 bp, synthetic construct
  source 1..120: mol_type = other DNA
cgagacagggtcccgctctgttgcgtgggctggagtgcagtggtgcaatctcggctcgcggcaacttctgcctccccggctcagtggatcctcccacttcaacggagggagagggagtct

SEQ ID NO: 5232 - DNA, 120 bp, synthetic construct
  source 1..120: mol_type = other DNA
atatgaatcacaacacagtgtttaaaatgtgcgtaaacgggtctaggagtgcgctgcactattgtgaaaagttcattctgaaagctgggcgcagtggctcatgcctataatctcagaact

SEQ ID NO: 5233 - DNA, 120 bp, synthetic construct
  source 1..120: mol_type = other DNA
acagctaattttattagcttttgtctgaaatgcaaaagatgagaaagaaaattcccgtttgtttgctccacatacttctcttagaagcctatggaaagccaactttccccctgaagaaac

SEQ ID NO: 5234 - DNA, 120 bp, synthetic construct
  source 1..120: mol_type = other DNA
agtaggatgaggaggggtccaactaacctagtgactagagtagttagccatggattccagttaaacatgctttgataccaggggatgttattttctctttcttgttggcatctatctaga

SEQ ID NO: 5235 - DNA, 120 bp, synthetic construct
  source 1..120: mol_type = other DNA
ggtgggctccatgagaccaggattttcttctggatggcgaacatagtcttaacatcaaatcctgggatataaagccttaatccttatgacatgccataataccatcgagctgaattaggg

SEQ ID NO: 5236 - DNA, 120 bp, synthetic construct
  source 1..120: mol_type = other DNA
atgggctcctcggaaaagtggctggatgatatcttgtacctgttggagagactttagctactgtaataaattagcttgtgatatttctgccaaattggtatcccttagcttaggcaagat

SEQ ID NO: 5237 - DNA, 120 bp, synthetic construct
  source 1..120: mol_type = other DNA
tttcttccgttgagtacgcgggattgtagggcagatctggctgtggaaaggagactgtgggtaataagtttagaggcatgactggaagtctggctgcatcccgggccgctgagtcagctt

SEQ ID NO: 5238 - DNA, 120 bp, synthetic construct
  source 1..120: mol_type = other DNA
gacaaacaggtgaaacggctctgggatatttgggagggctggagcaggggcttcagttaatgcctttttcagattttgaaaagcctgttcttctgtgtccatctaaactagccggctatt

SEQ ID NO: 5239 - DNA, 120 bp, synthetic construct
  source 1..120: mol_type = other DNA
tccaacaggagaggattagtattattttccagtggttgtgatggtgacactaaaagattttcctctgacagaggggtagttagcaggagttgggcagtggggggcgctgtatttcctagc

SEQ ID NO: 5240 - DNA, 120 bp, synthetic construct
  source 1..120: mol_type = other DNA
tctaaaaacgctcccggtgactcatcaggccctgtgcgacttcagtcatcttagacaagtttatgggtttctgagcagctcctttgatacctgcaaggagataccggtgaaaatcgtcca

SEQ ID NO: 5241 - DNA, 120 bp, synthetic construct
  source 1..120: mol_type = other DNA
cagagtgtccggagtttgcctttttaaaggcggaccccataatcctctgagaagcctagagaaaaattctgcagcatacattggagggggctccaatccttacagggccgggaagaggag

SEQ ID NO: 5242 - DNA, 120 bp, synthetic construct
  source 1..120: mol_type = other DNA
gtcacttggacatggggtatgacaatctaaatgccagcaatcttcatggtgccagaaatcccaaacaggcgaatgttcctcacactcgttcccgttcccgtaacaacacctgatttgttt

SEQ ID NO: 5243 - DNA, 120 bp, synthetic construct
  source 1..120: mol_type = other DNA
aaccagaaccaaaaggcgcctaacagaaaaaccagggctctgtcctccagcgccctggaaaagcgggcagtgtcaaagacagggatgccctcgtcagggctgcctccctctcaccaaaca

SEQ ID NO: 5244 - DNA, 120 bp, synthetic construct
  source 1..120: mol_type = other DNA
tgttaactacgtgtgcagccaccttttccttagtgctattcctgaaggaaataatgtatacagtgatctatttccaagacaaagtgccttaaattggcttaggtcagcaaagtacagaag

SEQ ID NO: 5245 - DNA, 120 bp, synthetic construct
  source 1..120: mol_type = other DNA
gcttgccaagtatccccctgtgaatttctgcttagcactgtgatatcagaattagaaattgtgcagggttctaatctggagatatgggatgttcagtagctaagaaggaagttattcctt

SEQ ID NO: 5246 - DNA, 120 bp, synthetic construct
  source 1..120: mol_type = other DNA
aactaattaggacagggggataattctaagcaacaaagaactgtaagtgaatgaacacgaattatctccctgtatgagagagaaatgcagaggccaacacaattcccttgaataggtggg

SEQ ID NO: 5247 - DNA, 120 bp, synthetic construct
  source 1..120: mol_type = other DNA
ttaggattgggaaatcgagtgtctgttgttggaaacagactctcactgtgggagaagaaggaaggtaaagaatagtcctgttgatactgatgggaattagaggcatcagtatgaaattgt

SEQ ID NO: 5248 - DNA, 120 bp, synthetic construct
  source 1..120: mol_type = other DNA
caggcaaaatttgtaagttaatgttaaagtataggtaaaaatttgatgaggatcaggatatttacgtagtctcagagtatttccctgtagattatttattaattacaatgaggaaaatga

SEQ ID NO: 5249 - DNA, 120 bp, synthetic construct
  source 1..120: mol_type = other DNA
catctgaaagagacagagtttctttctcagagtcaggaggtaatgaggggctgctctggtagggaaagaaatagtgaagttcttttttggagaaaagcagcaaaaaaaaaagagagtgac

SEQ ID NO: 5250 - DNA, 120 bp, synthetic construct
  source 1..120: mol_type = other DNA
gtcccagctacacctactcaggaggctgaagaggaggcaggaaaacagcttgaggtcaggagttggaagccccagtgctctacgattgccctggtgaatagccactgcactctagtctgg

SEQ ID NO: 5251 - DNA, 120 bp, synthetic construct
  source 1..120: mol_type = other DNA
ctactaaaaatacatacattagccgggcatggtggtgcagtggcgtgcacctgcagtcccagctactagggaggctgaggctcgagaattgcttgaacccgggaggtggaggttgcagtg

SEQ ID NO: 5252 - DNA, 120 bp, synthetic construct
  source 1..120: mol_type = other DNA
gtcaccatgtatagaacagtccacacaagaaaagcagaacacgcattcatttcaaattcatacgtaacgtagatcaagatagaacatacctcataccttgggcctcaacaaatttaaaag

SEQ ID NO: 5253 - DNA, 120 bp, synthetic construct
  source 1..120: mol_type = other DNA
tatttttctataaccttgtaactactaaggaaattaaatttgtgatataaaaactttaaaaaaaaaacagactcttcaggttcaagaaagtttcactgtataattcgtcgcccccgccct

SEQ ID NO: 5254 - DNA, 120 bp, synthetic construct
  source 1..120: mol_type = other DNA
ttcctcggtgtccacgataggtgagagggctcattccctgtaggagaagtgagctgaaaacactttccccgcaagatctccctcgttttactcaaggtagtcgcggcgttgagaacgcct

SEQ ID NO: 5255 - DNA, 120 bp, synthetic construct
  source 1..120: mol_type = other DNA
ttacattttatgcattagattgctttttttgtttgtttttgttttttgtttttgatggagtctcgttgtgtcaccaagcttgagtgcagtggtgccatctcggctcactgcaatctccgc

SEQ ID NO: 5256 - DNA, 120 bp, synthetic construct
  source 1..120: mol_type = other DNA
ctggaatttgacattccactagtagcaccctaatccctcatgccttgctctcctgtgcagcatcctttgtggcaaacatgacactatttccttaaagtgcctggagagaaccagtagata

SEQ ID NO: 5257 - DNA, 120 bp, synthetic construct
  source 1..120: mol_type = other DNA
cacttgtggctgtgctttctgcgcaggttgacagggagagactggaggagaaatcagtggacagatgctttcgctctgttctttggcccagaaaacaaaactaaagtaaaaaaaaacaaa

SEQ ID NO: 5258 - DNA, 120 bp, synthetic construct
  source 1..120: mol_type = other DNA
gtaactttctttttctgagtattgtggagcgtctgcagctgctgtgagtagaagatactaggtactaacgggggatacaaattatttagaatacagtatacgacttgaaatggaaggcgc

SEQ ID NO: 5259 - DNA, 120 bp, synthetic construct; identical to SEQ ID NO: 2014
  source 1..120: mol_type = other DNA

SEQ ID NO: 5260 - DNA, 120 bp, synthetic construct
  source 1..120: mol_type = other DNA
cagatggaacttcctctggggtcttcaacctgtctgtctccatttcttctctttcatctgcttacaaagtttttcaagccccatcctccttaagaaaagatgatgagccacagtctagga

SEQ ID NO: 5261 - DNA, 120 bp, synthetic construct
  source 1..120: mol_type = other DNA
caacaatatatagaaaatgaaggctgggcacggaggctcacgcctgtaatcccagcactttggaaagctgaggcgggcagatcacgaagtcaggagatcgagaccatcctggctaaaaca

SEQ ID NO: 5262 - DNA, 120 bp, synthetic construct
  source 1..120: mol_type = other DNA
ccgggaggcagaggttgcagtgagccaagactgagccactgcactccaacctgggcaacaagagtgaaactctgtcaggaagtgaagggaagggaagggaagggaagggaagggttctgt

SEQ ID NO: 5263 - DNA, 120 bp, synthetic construct
  source 1..120: mol_type = other DNA
aaagtttccgtttgtttgctccacatatttctcttagaatgaagccgattgaaagttaacttcaccctgaagaaactcctcctggcgtttgcaacgatctcctgtatgtctcacgtccag

SEQ ID NO: 5264 - DNA, 120 bp, synthetic construct
  source 1..120: mol_type = other DNA
tttagtgaaagcttgtagggcttctgcaacctggttaggaggagttagaaaaagaaacagaaaaagacttgagccttttagcttctgatctgaaatcagacttgggccacacaggtctat

SEQ ID NO: 5265 - DNA, 120 bp, synthetic construct
  source 1..120: mol_type = other DNA
agagaaaagaaaggaaagtagcttagtggtaaaaataaaggcactgttcctgatttgtggtcaacccaagatcaactcaccccaaggtggactctccatcacgttagacttcctggagca

SEQ ID NO: 5266 - DNA, 120 bp, synthetic construct
  source 1..120: mol_type = other DNA
caaaaaaaaaaaaaagtaaaatttccctgcagatctgtctgctaactgggcctggaagaaatacctcagaaacaataagcaaagataacaatattttgattcacaaataccattccctac

SEQ ID NO: 5267 - DNA, 120 bp, synthetic construct
  source 1..120: mol_type = other DNA
tgataattgtgctgtgttaaggaactgatcttgttttaagaaatacacattgatgaatttagggattaaaaagatataatgtctgaaaatcatcaaatagtttagagaaataatctttga

SEQ ID NO: 5268 - DNA, 120 bp, synthetic construct
  source 1..120: mol_type = other DNA
ttaaaaaaaaatagacaaatccacaattactttggagacttcaaaacttctctcataatgattgatagaacaactaaacagaaaatcagcaagaatgttgaagaactaggccgggcgtgg

SEQ ID NO: 5269 - DNA, 120 bp, synthetic construct
  source 1..120: mol_type = other DNA
aagatagaaattttcagcagagagatgacacagtttaccaacatcaggaataaaaagaggacatcactgtagactcagctgacatcaaaaggatgaaggaggctgggaatggtggcccac

SEQ ID NO: 5270 - DNA, 120 bp, synthetic construct
  source 1..120: mol_type = other DNA
ccctcctggatgctagttatagatactttcactggacaaaagaatcaagaagtaaagacatgccagcctgatagagtgttaggctggtggactgggaataaacattgtagtttcttgtct

SEQ ID NO: 5271 - DNA, 120 bp, synthetic construct
  source 1..120: mol_type = other DNA
ttgtttgggtcaggagaccactgttgcgatcctgttctttccccctcgttacttttttgtcttccttctgctgtcgcaatcgccttatgtgatgttgaggctcacagcatagaggttgga

SEQ ID NO: 5272 - DNA, 120 bp, synthetic construct
  source 1..120: mol_type = other DNA
ggagctatgattgcaccactaccctcgagcccggacaatggagtgagaaaagcaagcaagcaagcaagcaagagaaagtgggagtgagggacggagggagggaaagagggaaggaagggg

SEQ ID NO: 5273 - DNA, 120 bp, synthetic construct
  source 1..120: mol_type = other DNA
gacgggatttctagaataaaaataggaaactgagtaataggtttcactgaatgagagactagagaagcgttacacacaaaattcatatgtattcatgtgtgtgcgtgtctgcctgtctgt

SEQ ID NO: 5274 - DNA, 120 bp, synthetic construct
  source 1..120: mol_type = other DNA
taatatagagaccgggctcggtggctcacgcctgtaataccagcactttgggagaccgaggtgggcggatcacctgagatcgggagttcaagaccagcctgaccaacatggagaaacctc

SEQ ID NO: 5275 - DNA, 120 bp, synthetic construct
  source 1..120: mol_type = other DNA
gctattgaatagaagacaaatcatgcttggaattaccctagaccttccctttcaacagaatgtaaaggaatcattaccgtgttaggcaagaaaacattcagtgctaccatttgactaatc

SEQ ID NO: 5276 - DNA, 120 bp, synthetic construct
  source 1..120: mol_type = other DNA
tatttttccagcagtttaactgcggagctatggagttgactcaaggtacaaacccggttttttctaattgcaaaatgtttcttgaatataccaccaccacatatatacactcatacagta

SEQ ID NO: 5277 - DNA, 120 bp, synthetic construct
  source 1..120: mol_type = other DNA
attatgtaggcatttccttttctcttttttcggattttctttttctggcttgctcttcaatggcatgtcataaaggaacagaagattagtggacactttaacacggtagtgggcttatag

SEQ ID NO: 5278 - DNA, 120 bp, synthetic construct
  source 1..120: mol_type = other DNA
tctgccagactggagtgcagtggcaatctcctctcactgcaactttcacctcctggctcaatcagttcttccacctcagcctagaagttttatatcaattcaaaagtgtcaagacattgg

SEQ ID NO: 5279 - DNA, 120 bp, synthetic construct
  source 1..120: mol_type = other DNA
aaaacacaaatgggagagagatagagggcaaggaaaagcatccttaagatgattcggacttggatggacgggaccgtagagtgaatctaagcgccacatctctccgtcgcttcctctggc

SEQ ID NO: 5280 - DNA, 120 bp, synthetic construct
  source 1..120: mol_type = other DNA
ttagtattaacatgcttgcagagtatttccctgtggatttctgcttagtactgtaataccagaatcagaaactctacaaagagctctctaatctggaggtatgggttgttccctagctta

SEQ ID NO: 5281 - DNA, 120 bp, synthetic construct
  source 1..120: mol_type = other DNA
gctctaccgctgagctataccccctctggaagacttgccttttagagaatattttgatgactattattgtctgagtctgggctctgtgtcatgataatctttatgttttcaattccactc

SEQ ID NO: 5282 - DNA, 120 bp, synthetic construct
  source 1..120: mol_type = other DNA
ttgacgggtgtggtggccgcccctgtagtcccagctattcgggaggctgaggcaggataatcgcttgaattcgggaggcggacgttgcagcgagccaagatcgcaccaccgcactccagc

SEQ ID NO: 5283 - DNA, 120 bp, synthetic construct
  source 1..120: mol_type = other DNA
aaattctcccttctcaaatttcttttccctcttccttcaagggctgtactcttctatcaagagtaacgtagatggatactaaaacagaagggtcagtaccgtctcgggggatttaggtgc

SEQ ID NO: 5284 - DNA, 120 bp, synthetic construct
  source 1..120: mol_type = other DNA
gagtactaccttgtttttatggaattcagggtgtccagatttcaacctacctagcagagtgaagctctatgagtctaatatcttggctttcttccacatcagcaagcctctgaaattcgg

SEQ ID NO: 5285 - DNA, 120 bp, synthetic construct
  source 1..120: mol_type = other DNA
gtgcttcacaaactttagcatcagagtcacttgaaggcttattcaaacacaggaggctgagccccatccatactcagcagttctgattcaatagacctaaggttgggcctgaaatttatt

SEQ ID NO: 5286 - DNA, 120 bp, synthetic construct
  source 1..120: mol_type = other DNA
acaaatcagtcttatggaacatcagtagggaatgttgatccgtattggtttctgcttctcgcacgttgaaggcctctaattccccgacagtcttcgtgtggttatccagcgccctgccac

SEQ ID NO: 5287 - DNA, 120 bp, synthetic construct
  source 1..120: mol_type = other DNA
tagggtctccttctattatgcttggcaagaatcaagttcaggttttcgtttcttttaatttctcccagatacgacacaaagccattgaaattcagccttttcctgcctaaaacgcttcat

SEQ ID NO: 5288 - DNA, 120 bp, synthetic construct
  source 1..120: mol_type = other DNA
tcttgggacttatcgtgtgtcctttgaattacataagaagatgagaagaaaacctatttctcagcaccaaatttctagtgactattaactctttctcattctggtttgcctatataagag

SEQ ID NO: 5289 - DNA, 120 bp, synthetic construct
  source 1..120: mol_type = other DNA
gggactacaggcgcgcaccaccatgcctggcaatttttctttttctttttttttttttttagtagagacagggtttcaccatgctggccaggctggtcccaaactcctgaccttgtcatc

SEQ ID NO: 5290 - DNA, 120 bp, synthetic construct
  source 1..120: mol_type = other DNA
tttaaaaattctttttatcccagaagctaaagcagaagacttgtagtatcttttgattggacagcattgtctagagacgatgttatctatttaggtgctgttctgggagaatcccagagc

SEQ ID NO: 5291 - DNA, 120 bp, synthetic construct
  source 1..120: mol_type = other DNA
acaggacaaaaaaggcccattatcccaacacaaaatttcaagagaggagttgaagtaaaaaaaaggaaaatggggcacatccacctgagtcttgacagaataattaatttagaaatactt

SEQ ID NO: 5292 - DNA, 120 bp, synthetic construct
  source 1..120: mol_type = other DNA
actacagcctgggcgacagagcgagactccgtctcaaaaaaaagaaagttattttcccagcagtttaactgcagagctatggagttgactcaagatacaaaccgaggtgtttctttcttt

SEQ ID NO: 5293 - DNA, 120 bp, synthetic construct
  source 1..120: mol_type = other DNA
tttgtaaggtcagtgtatcttccaacgcctaattcggttgtcttcaatatcacccgtcattcactcacctcctcccaatccaaaaatataaattctgctgtaatttatgtatgaaaatag

SEQ ID NO: 5294 - DNA, 120 bp, synthetic construct
  source 1..120: mol_type = other DNA
ataatataaaatatacatgtatctctctctctatatatatatatagagagagagagagagagaagattccagcgagtgagagagagagagagagagacagggtcccactctgccagcctg

SEQ ID NO: 5295 - DNA, 120 bp, synthetic construct
  source 1..120: mol_type = other DNA
agaggggtagaggacaaggaaaagcatcctcaagattattaggatttggatggacgggatgttagagtgagtctaagcactcacctctccgtcgcttcttctggatatgagggaagagag

SEQ ID NO: 5296 - DNA, 120 bp, synthetic construct
  source 1..120: mol_type = other DNA
ctgaaaatagaaggcgatttccttttaacgagatagtattgagatgcttgcagagtatccccgcgtggattctgcttagctctgtgataccagcatcagaaactgtgcaaagagctctaa

SEQ ID NO: 5297 - DNA, 120 bp, synthetic construct
  source 1..120: mol_type = other DNA
ttctatggtttctgattatttcatttacaactagaaataggctggagggccaggagtagtacttgcttccatagtgcgtggttcaccttagtgactgctgggactgcttagaaagaatag

SEQ ID NO: 5298 - DNA, 120 bp, synthetic construct
  source 1..120: mol_type = other DNA
tacctcagatgcaatgagcaaagataattctatatattgattttcaaataccactccctactaaaaggaaccagcgatactgatagaaagtagctactggtgtcaactacactgactccg

SEQ ID NO: 5299 - DNA, 120 bp, synthetic construct
  source 1..120: mol_type = other DNA
tatagactgtatattagagaatactattttatcaatgttaagttctctaaatttgataattgtgctgtggtaagaaattgaccttgttcttaggaaatacacattgaagtatttaggaat

SEQ ID NO: 5300 - DNA, 120 bp, synthetic construct
  source 1..120: mol_type = other DNA
tgccttgagtggttttgaggctcatgaagtctaaataacgtaatattgaaattaacatcttggcaaaattcaacagcccttcatgctaaaaactctcaataaactaggtattgatgtgat

SEQ ID NO: 5301 - DNA, 120 bp, synthetic construct
  source 1..120: mol_type = other DNA
gcgatccccatcaagctaccaatgactttcttcacagaattggagaaaaactattttaaagttcatatggaaccaaaaaagagcctgcattgccaagacaatcctaagccaaaagaacaa

SEQ ID NO: 5302 - DNA, 120 bp, synthetic construct
  source 1..120: mol_type = other DNA
caaccccatcaaaccccaacaaaaagtgggcaaaggatatgaacagacacttctcaaaagaagacatttatgcagccaatggacacatgaaaaaatgctcatcatcactggccatcagag

SEQ ID NO: 5303 - DNA, 120 bp, synthetic construct
  source 1..120: mol_type = other DNA
aaaaaaaaaaaacagaaattaacgtcttggggtcacgtgtttacttctcatgtgacaggcaacgaaaagagagtaggacacctgaatgtgctttgtactaaggagtggtattaagaactc

SEQ ID NO: 5304 - DNA, 120 bp, synthetic construct
  source 1..120: mol_type = other DNA
aaaaccacatgcaacctgttattcattgccaaggggttcttgattgtactacagcatgaaggcaactgaggaggttcatggagtagcccagaataatgttcaagacatgaaataaatagc

SEQ ID NO: 5305 - DNA, 120 bp, synthetic construct
  source 1..120: mol_type = other DNA
tgagccgagatcgcgctactgcactccagcctgggcgacagagcaagactctgtctcaaaaaaaaaaaaaaaaagaaagaaagaaagaaagaaagaaaattatctagactgtttgatggt

SEQ ID NO: 5306 - DNA, 120 bp, synthetic construct
  source 1..120: mol_type = other DNA
attcctctcagaagtccttaattttttttttttttttttgagatggagtctcattgtgtcacccaggctggagtgcagtggcatgatcttggctcactgcaacctccgcctccgaggttc

SEQ ID NO: 5307 - DNA, 120 bp, synthetic construct
  source 1..120: mol_type = other DNA
gggacagaggtggcctgatattatatcggaaaccaaggatttcccaattcttgagatatccttcagctcacactttcattagggttagcaaagggttttggatctttaaaatctatcaca

SEQ ID NO: 5308 - DNA, 120 bp, synthetic construct
  source 1..120: mol_type = other DNA
aggtgaagctgagatttcgctcttctaacaagctctccggtgccaccaactcttgtgtggaccaagagtctgaaagatatccttacgatagagggcgcacctgtcttaggtaaaattact

SEQ ID NO: 5309 - DNA, 120 bp, synthetic construct
  source 1..120: mol_type = other DNA
aaaccgttgtgaaatagggttactttctgtttaagcaaggaaaataaagtaaagcaatgggaaaaaaattaaaagcaaaaggaatggaggtgccggggattgaacccggggcctcgtgca

SEQ ID NO: 5310 - DNA, 120 bp, synthetic construct
  source 1..120: mol_type = other DNA
gagagtagcttaaatgggcagaaagacaagataaggggatgtggtgaataacagaattatccaatcctattatcagcccatctgagattaaagggacgtcaatcatacttgaatacttta

SEQ ID NO: 5311 - DNA, 120 bp, synthetic construct
  source 1..120: mol_type = other DNA
tagtggattttttagacaaatgtagcatactcaaactaacccttgtagagacagaaagtctaaacagaccagttaagaaaaatagtttaacaggcatactcaataaaaagggcaccaagc

SEQ ID NO: 5312 - DNA, 120 bp, synthetic construct
  source 1..120: mol_type = other DNA
ccctgactttactcataataagtgaaagacatactaaattagattggatagcatactttgttgtcaaggttgccgagaaattagtcttttcatagagtactggtgggaatggaaaatggt

SEQ ID NO: 5313 - DNA, 120 bp, synthetic construct
  source 1..120: mol_type = other DNA
gagaaaactatggtacatcaatataatgtcactgtaaaaaggaatactaaatgatcagcttcaatctctccttcccctatgaagaagggcatatatgtatttgaacttcactgggacact

SEQ ID NO: 5314 - DNA, 120 bp, synthetic construct
  source 1..120: mol_type = other DNA
aggtaggaggaacccttttggagtcaggacaaatatcaaatacttacatcagaaactattccatttaaggagctacattttgattggatttgttcatagaggaatttatacctcaaggca

SEQ ID NO: 5315 - DNA, 120 bp, synthetic construct
  source 1..120: mol_type = other DNA
tgtaatcccagcactttgggaggccgagagggtgcactgcttgagcccaggtgttcaagaccagcctaggcaacatggtgaaaccccataaccataaaaatctacaaaaactagccgggc

SEQ ID NO: 5316 - DNA, 120 bp, synthetic construct
  source 1..120: mol_type = other DNA
agactctgtctcaaacaaaaaagatggttgtattactgacataaagacaggtatacagactaatggaacagagagcccagaaataaatccttgcatatatggatgaataattttgacaat

SEQ ID NO: 5317 - DNA, 120 bp, synthetic construct
  source 1..120: mol_type = other DNA
ggggcaggcctcaaggaacagaatctacctcctgccttcctttcacctgccccaaggcagaactctaatattaccccatctttttcattatgggtcttaagaccctcccctgggagggtc

SEQ ID NO: 5318 - DNA, 120 bp, synthetic construct
  source 1..120: mol_type = other DNA
acaataatagataaatcttgaggacattatggcaagtgaagtaagccagtcacaaaagaacagacactgtatgattccactaataagaagtatctaaagtagacacaattatagaaacag

SEQ ID NO: 5319 - DNA, 120 bp, synthetic construct
  source 1..120: mol_type = other DNA
agagatgattcaagtcactaaaatcagaattgaaatggaaacattactgtggggcgcagtggctcacacctgaaatcccagcactttcggagaccgaggtgtgtgcatcacgaggtcagg

SEQ ID NO: 5320 - DNA, 120 bp, synthetic construct
  source 1..120: mol_type = other DNA
ggagccttgctcactgctagagcagcagtccgagatcgaacagcgaggtggcagcctggctgggggagggggtcctccattgctgaggcttgagtaggcaaacaaagtggcccagaagct

SEQ ID NO: 5321 - DNA, 120 bp, synthetic construct
  source 1..120: mol_type = other DNA
agaacacctcttctcctccaaaggatcgcagctcctcaccagcaatggaacaaagctggatggagaatcactttgatgaattgacagaagtaggcttcagaaggtcagtaataacaaact

SEQ ID NO: 5322 - DNA, 120 bp, synthetic construct
  source 1..120: mol_type = other DNA
cctccaagaaatatgggactatgtgaaaagaccaaatctacgtctgattggtgtacctgacactgacagggagaatggaaccaagttggaaaacactcttcaggatattatccaggagaa

SEQ ID NO: 5323 - DNA, 120 bp, synthetic construct
  source 1..120: mol_type = other DNA
agacaaagaaggccattacataatggtaaaggggtcaattcaacaagaagagctaactatcctaaatatatatgcacccaatacaggagcacccagattcataaagcaagtccttagaga

SEQ ID NO: 5324 - DNA, 120 bp, synthetic construct
  source 1..120: mol_type = other DNA
gcagaattctaccacaggtacaaagaggagctagtccgatttcttctgaaactattccaaacaatagaaaaagagggactcatccctaactcattttatgaggcaagcattatcctgata

SEQ ID NO: 5325 - DNA, 120 bp, synthetic construct
  source 1..120: mol_type = other DNA
acgtggttacagtaaccaaaacagatggtactggtaccaaaatagatatatagaccaatggaacagaatagagccctcagaaataataccacacgtctacaaccatttgatctttgacaa

SEQ ID NO: 5326 - DNA, 120 bp, synthetic construct
  source 1..120: mol_type = other DNA
cacttggacacaggaaggggaatgtcacacaccagggcctgtcgtggagtgggttagtggggagggatagcattaggagaaatacctaatgtaaataacaagttaatgggtgcaggatac

SEQ ID NO: 5327 - DNA, 120 bp, synthetic construct
  source 1..120: mol_type = other DNA
ggtggcatttctccatgtcttatatatctcagttattatttattcaaatattgcctctgctctattgtctttcatccattaaaaattctaattaaatatatattagatctccttatcctc

SEQ ID NO: 5328 - DNA, 120 bp, synthetic construct
  source 1..120: mol_type = other DNA
tgtgaagtctaggttaaagttttattccttcagagaggattttcttttgcttcttcagaaacctagatgtgctgaaatacagcccaccttaaaccagtgtcaaggtttggggtcttatgg

SEQ ID NO: 5329 - DNA, 120 bp, synthetic construct
  source 1..120: mol_type = other DNA
gccactgcgctcggccctccctttttttttttttttttttttggtctataaatcttcttccaccatgtgactgcgctgagtctctgtgaatctgttgtgattctgggggctgcccgattc

SEQ ID NO: 5330 - DNA, 120 bp, synthetic construct
  source 1..120: mol_type = other DNA
actatcaccgtaacttgatgtaaacttgaacttagtatacagtaaggctgagcttataaaatgttcattcaggcttacgtcaagttatggtggtagaatatggtaaatgaacttatgtga

SEQ ID NO: 5331 - DNA, 120 bp, synthetic construct
  source 1..120: mol_type = other DNA
ccatacagaaaggtagtcgccatctcaaaactctcatatatagcaaaggactttggtcttcccaagatagccatttggttgtgcctaagtcattccccagaactttgatgtgcctcgcac

SEQ ID NO: 5332 - DNA, 120 bp, synthetic construct
  source 1..120: mol_type = other DNA
ccgcttcctgcctggggactagactgctttcgcaggactaacaaattagccacaagattataaattatggtttaggagtcatgcagctggaggctgcaagattctaaacctcccccaatt

SEQ ID NO: 5333 - DNA, 120 bp, synthetic construct
  source 1..120: mol_type = other DNA
gtccaccgattccctgcaggccaatgtgcagcgtctgaatgagtattgctccaaactcatcctcttccccagaaagccctcggcccccaagaagggagacagttctgctgaagaacagaa

SEQ ID NO: 5334 - DNA, 120 bp, synthetic construct
  source 1..120: mol_type = other DNA
tttaaaactagctaagtgctgcttcaagtcagccagatacgaaggcttcaatttatttaacacaataaagaacttctatttggatccaaagcttacattatgctttaataaaagttaccc

SEQ ID NO: 5335 - DNA, 120 bp, synthetic construct
  source 1..120: mol_type = other DNA
gaattgagagagaatgaaagtgccacaaaaacaaaagaaaaaaaattgaggcgagtcgtggacatgatagacatgattttgcaaacaaggcacatctaggagaaaaggcgggagaaaaat

SEQ ID NO: 5336 - DNA, 120 bp, synthetic construct
  source 1..120: mol_type = other DNA
aatccagaaatgagcttctggaacaaatcctaaatccttttttgtctgtcttcttctgattcgctctcatccttaagggacctgtttctccttcaaaacctgaaaacatctaacctatag

SEQ ID NO: 5337 - DNA, 120 bp, synthetic construct
  source 1..120: mol_type = other DNA
tgatttcaagaaagccacaagtcctccggatgagtgttacaatcgttagatgcggtgtagccagagttcattccctctgacgttcggatgtgttatagagtttcttccttctggtggttt

SEQ ID NO: 5338 - DNA, 120 bp, synthetic construct
  source 1..120: mol_type = other DNA
ccgcacttctcagccgttgggtggccgatgggattgggcgccgtggagcagggggcggcgctcgtcggggaggctcgggccgcgcaggagcccatggcggggaggggcgtctcaggcatg

SEQ ID NO: 5339 - DNA, 120 bp, synthetic construct
  source 1..120: mol_type = other DNA
gggtctgctgtacgcagattttcctatttctttaggtcttcatttttgaaggctcttgtgtcaataaaatttgtttgatttgtatgcttttcctttttttttttttttttttttgttgtt

SEQ ID NO: 5340 - DNA, 120 bp, synthetic construct
  source 1..120: mol_type = other DNA
tgagtttagtaggacttagatacagggtactcctgggtgcagcaggatagctctagagatccatgccgcctcctgtctttaaactgtttctaagttaattttctggctttttgcctactg

SEQ ID NO: 5341 - DNA, 120 bp, synthetic construct
  source 1..120: mol_type = other DNA
tattttatagggagaggtatctgactggttgttgactgcttctggagttgcagctcagtctagaaagacattaccagctgccatgagtagcaggaacaacctatgggtataaacacaggt

SEQ ID NO: 5342 - DNA, 120 bp, synthetic construct
  source 1..120: mol_type = other DNA
gtgctagtgggtgactcatttaaagtttgtatggctttatggagattcttagtccaggaacttaaagagccaacctgaaacagtgcacacatctgggtctttaacaggccattatttctt

SEQ ID NO: 5343 - DNA, 120 bp, synthetic construct
  source 1..120: mol_type = other DNA
gatagtctccaaatctgtaagagactctagggtagcatgttatcattaatatagtgaaacagggagaccaaggcaggcaaagagattatagacagctcctgtgtaaccatactgtgagag

SEQ ID NO: 5344 - DNA, 120 bp, synthetic construct
  source 1..120: mol_type = other DNA
actggtgcgtttacaatccctgggctagatacaaaggttctcctcgtccccattagattagttagatacagagtttccacatacaggttctccaaggccccaccagagcagctagataca

SEQ ID NO: 5345 - DNA, 120 bp, synthetic construct
  source 1..120: mol_type = other DNA
tcatcattctgaattattttttctgttaaactgtgaatgtcaggtgttcacctaggcaagaactttaaagttaaacacatgggcatttttgccaataactcaggaattttagctgttttc

SEQ ID NO: 5346 - DNA, 120 bp, synthetic construct
  source 1..120: mol_type = other DNA
tgtttgcactgataggtaatccaataaagactgtggaacacaattttgggtaaagcagtttctataccagtttgatttttaaaatcctcatttatccacatccccttttttctgtgcttc

SEQ ID NO: 5347 - DNA, 120 bp, synthetic construct
  source 1..120: mol_type = other DNA
aactctatagttgcagcttaaccatttaaaatccgcattttttttgttgtaatttccccatcagttaaaaaatgtgcacaagaaagggccatacataataggtaaccagctggagtccta

SEQ ID NO: 5348 - DNA, 120 bp, synthetic construct
  source 1..120: mol_type = other DNA
acccagcctctaaactgcttttaagcttattttctggctatttgtctactgtgtttgagtgatgagactgtttttcttagtaggttcctagatactctcccggatgtttgggttcttagg

SEQ ID NO: 5349 - DNA, 120 bp, synthetic construct
  source 1..120: mol_type = other DNA
atctgaagttcaagttctgatccctgtgcacccaaattacgtctttctcctccaggtagaaagctatcaaaatccagctttttcctgggcacgctctttatagcatatgcagctgactct

SEQ ID NO: 5350 - DNA, 120 bp, synthetic construct
  source 1..120: mol_type = other DNA
atttttttgtccatgttctgtttcaacttatgtagattattataaattgatgtaacccacgtgagaggaaaatgtgaatataaaaatgcaaagccctaacatttactcacacacatacac

SEQ ID NO: 5351 - DNA, 120 bp, synthetic construct
  source 1..120: mol_type = other DNA
tttgaaaatggggagagagagttgcacatattatacacaatatgtatgtgtattgcatcaaacacttataatgtgtcttgtacaggttccagtttccagttatttaaagggattaagaac

SEQ ID NO: 5352 - DNA, 120 bp, synthetic construct
  source 1..120: mol_type = other DNA
gctgtatctttaggcaatctttgcagtttttgcagtagatgttaagctacctttctaaaatgcagtgggacattttgttgtttttgtgttctgcaacagtttatgtaaacctgtattgga

SEQ ID NO: 5353 - DNA, 120 bp, synthetic construct
  source 1..120: mol_type = other DNA
aggaactttttattaagctggatctttgaagtcagcacttaaaaagcccccttccccaccatgttacattccctttgtgtgctatataagcatctgtctttggcggttggccgcgtggcc

SEQ ID NO: 5354 - DNA, 120 bp, synthetic construct
  source 1..120: mol_type = other DNA
gaatttttgcaagtgggccaatgccataaattgatctgaacattactgcaaagaaagcacagtgagagcaggatcaagcaagttttcatcatttttaattgagctccagtcgcttcttga

SEQ ID NO: 5355 - DNA, 120 bp, synthetic construct
  source 1..120: mol_type = other DNA
tgtggggggcagcatggactcaccatgttactcaagctggttttgaactcctggtctcaagcaatcctcccgccttgacttcccaaagtccttggattacaggcatgagcctcagcccct

SEQ ID NO: 5356 - DNA, 120 bp, synthetic construct
  source 1..120: mol_type = other DNA
acactgcctaatgtcctttgatgcacaaaagtttcttttgattaaattccatttatcatctatttgttgtctttcagatggagctgtcacccaggctggaatgcagtggcatgatctaag

SEQ ID NO: 5357 - DNA, 120 bp, synthetic construct
  source 1..120: mol_type = other DNA
tcccgcactggggccacgggcggagctgcccgccagtcccgtgccacgcacctgcactcctcagcccttgggcggtcgatgggaccgggcgccgcggagcagggggcggcgcccatcagg

SEQ ID NO: 5358 - DNA, 120 bp, synthetic construct
  source 1..120: mol_type = other DNA
ttctccacattgtggaaggtttgttttttttgctgtttgcaatgattcctgctgctgctcggtttttgcatgcgcattgcctttgtgggctgtgataattgctgtgaaagtctgcagttt

SEQ ID NO: 5359 - DNA, 120 bp, synthetic construct
  source 1..120: mol_type = other DNA
gaaatctcgccattgcactccagcctgggcaacagtgagactccatctcaaaaaaaaaaaaaaaaaaaaactcaagtgttgtactccatagtttccctttaatgaaaagctgattgcttt

SEQ ID NO: 5360 - DNA, 120 bp, synthetic construct
  source 1..120: mol_type = other DNA
ttcaataaacatttatggaatgcaaatgccaatcactatgccagctacatgcatacaaagatgaggaagaaccatctggttccctttctctcaatttgtaccaacatcactagatctgtg

SEQ ID NO: 5361 - DNA, 120 bp, synthetic construct
  source 1..120: mol_type = other DNA
ttaatgtctaaaaaggttctgatgggaaataagaccttcattttgagtaaagcattttccatattcagggcaatgaggaagtctttcccctgtatgaatgttgggatagttaatgaagtg

SEQ ID NO: 5362 - DNA, 120 bp, synthetic construct
  source 1..120: mol_type = other DNA
ttgcaggatttaagggatcatcacttttccatcttcccaggaacagtgagtgagatgctacttcttcagtactttttggaaccctgaagtcatgcttagctttctaaacctatactcagt

SEQ ID NO: 5363 - DNA, 120 bp, synthetic construct
  source 1..120: mol_type = other DNA
tcttgtgtatagtagttccttgctatatacctggtataaagacgaataagatgccctcttgaaggccacaacctagagatgtccttcagttacaaggcagtgtggtaaatactataagag

SEQ ID NO: 5364 - DNA, 120 bp, synthetic construct
  source 1..120: mol_type = other DNA
aaacccgtctctactaaaaatacaaaaattagccgggcgtggtggcacgggcctcccagctactcggaagacttaggcaggagaatcgtttgaaccggggaggcagaggttgcagaaagc

SEQ ID NO: 5365 - DNA, 120 bp, synthetic construct
  source 1..120: mol_type = other DNA
tactagtgtagttactttgtttttatgtaactaggtaggtcttatgtaatgtcttatttgtctgaatgaaagattattgtgtctttagcagaggaaaagagataatctctccgcactgaa

SEQ ID NO: 5366 - DNA, 120 bp, synthetic construct
  source 1..120: mol_type = other DNA
ggaaagtaccttggccttttaccccaaatctacacaattttacacagtggcagtgctttttcctctaacgctataatagaattctgcaggagaattctttcagggagttcaccttttgtt

SEQ ID NO: 5367 - DNA, 120 bp, synthetic construct
  source 1..120: mol_type = other DNA
tttatttatttatttattaattattttttttgagacggagtctcactctgttgcccaggctggagtgcagcgggcaatgtgggctcactgcaagctccgcctcccgggtttaggcgattc

SEQ ID NO: 5368 - DNA, 120 bp, synthetic construct
  source 1..120: mol_type = other DNA
cagagaccaatcgctagtaacctctgcctttaattaggcgttttttggcccaaatctcgcggcttcgtaaaaatatcgcgatgcttccgcttttaatgtttttagtttggacaagccctt

SEQ ID NO: 5369 - DNA, 120 bp, synthetic construct
  source 1..120: mol_type = other DNA
ttcggtcgctgggtcggctctccagtgtctgatgtttactgaaatcttgatcgtggttagcctcccccaggacttcattgtttggaagatggtgaggaacaaaacaaaaccctaacaaaa

SEQ ID NO: 5370 - DNA, 120 bp, synthetic construct
  source 1..120: mol_type = other DNA
ccacagacttccttggtttcatatcctatttttgatagagagaaaattagtagtgagaagtacagtgaacactggttccccagtctccctccaatacatgagatttgtatattttctttc

SEQ ID NO: 5371 - DNA, 120 bp, synthetic construct
  source 1..120: mol_type = other DNA
gtgcagtggcatgatcttagctcacagcaacctatctcccaggttcaagtgattctcgtctcagcctcccgagtagctggaactacacgcatgagccatcacactcagctaatttttttt

SEQ ID NO: 5372 - DNA, 120 bp, synthetic construct
  source 1..120: mol_type = other DNA
cggctgtgccgtattttttctttcttcctttatggcatgttaaactcctgatgtcttgattttatgggtttgttttggttttttttgagatggagtcttgctctgctgcccaggctggag

SEQ ID NO: 5373 - DNA, 120 bp, synthetic construct
  source 1..120: mol_type = other DNA
taggttcaaatctttctaattctcacttttttctattattctttttgtgcatcagaaccctaaaatgggtttggcaatcacatcccatacaaatccaagttcttcacatcctctaaacaa

SEQ ID NO: 5374 - DNA, 120 bp, synthetic construct
  source 1..120: mol_type = other DNA
gtatactctttggtctgcatctcaggtaactaaaggaattagcaaatggctctcatttaccatctgacagttatttgctcttaatttcatagtgcctttaagtgttaggctgttacatgc

SEQ ID NO: 5375 - DNA, 120 bp, synthetic construct
  source 1..120: mol_type = other DNA
aatctagcctcatggaagctactttctatagccctggttctattatttcccttaaaacctgatgaataaatgaagaattaggacatgatatcaccaactcatgaacctcagccatggaac

SEQ ID NO: 5376 - DNA, 120 bp, synthetic construct
  source 1..120: mol_type = other DNA
tgatatgcacccagcactagaatacacctttcattagaatgaagagaacagacaaagccctcagaaaagatacaaaggcagagacattgattagaacattatctcataacagaggtgggg

SEQ ID NO: 5377 - DNA, 120 bp, synthetic construct
  source 1..120: mol_type = other DNA
gtccgcaggggtagggcagtcattggggaggtaagagcccaatattctttcccataccacaaagacactgcccagaatccattctggggggctgaggttactccaccttttctgcacact

SEQ ID NO: 5378 - DNA, 120 bp, synthetic construct
  source 1..120: mol_type = other DNA
gtgcctggcagatacgctgaattgaggttttcttacacgctcatcatcccttattctgaaaattccaggggccccaagtttcatagaattcagaatattacaggttttagacaggcagca

SEQ ID NO: 5379 - DNA, 120 bp, synthetic construct
  source 1..120: mol_type = other DNA
cctcacatcttgttcaggaggaagagtcccaaacattacctctcagaaatttaagcccacaaatttttactcccacaaaagacaggcaactgatagaggtaaccaagaaccccagaaccc

SEQ ID NO: 5380 - DNA, 120 bp, synthetic construct
  source 1..120: mol_type = other DNA
ccttaccctaatatggttttgtctctcatcacctacctgagtataactgagcctctcttaattctgaaagaataaaagagcaaagttatggaagtcatgagggtttccaggaaatacata

SEQ ID NO: 5381 - DNA, 120 bp, synthetic construct
  source 1..120: mol_type = other DNA
ttcttatacctcaggaggtaagaactattactgttctgttacagatgaggaaattacttgttgaatccttactaagtggtagaggcaggcccagaacccaggcagcctgactcctgactg

SEQ ID NO: 5382 - DNA, 120 bp, synthetic construct
  source 1..120: mol_type = other DNA
ccaggaactaggacaggggctaagttaaactgtctagcgtacacggacagtctttaaaatcagccactacagcttttcccaccttctcttcctgagctatgatcctctagaccaaaatag

SEQ ID NO: 5383 - DNA, 120 bp, synthetic construct
  source 1..120: mol_type = other DNA
gctcactgcaacctccgccacaagagtttgagcaattgtcctgcctcaacctcccaagtagctgggattacaggcatgcaccaccacgcccagctaatttttgtatttttagtagaaatg

SEQ ID NO: 5384 - DNA, 120 bp, synthetic construct
  source 1..120: mol_type = other DNA
ctttatttcccccattacagaaaaaaaaaaatgagataatgaagggggaaaggattctgaaatgtataggaagcaatagacataaactacccttatattcagcccaggtccctgtaaggc

SEQ ID NO: 5385 - DNA, 120 bp, synthetic construct
  source 1..120: mol_type = other DNA
ggtggcctctcccttctttcatacacaaaaagtagcatactcttgtcaggcgcggtggctcacgcctgggcaacaagagtgaaactctgtctcaggaaaaaaaaaaaaagtagcatactc

SEQ ID NO: 5386 - DNA, 120 bp, synthetic construct
  source 1..120: mol_type = other DNA
atatatataatatacgtatgtatatgtgtgtgtatatacatagatatatataatagttttgtaaactacagtcaccctactgacctatcaaacactagcttttatttcttctatcaaact

SEQ ID NO: 5387 - DNA, 120 bp, synthetic construct
  source 1..120: mol_type = other DNA
gagtcttgatctgcctcccaggctggagtgaaatggtgcgatctcagctcactgcaacttccacctccgggttcaagagattctcctgcctcagcctcccaggtagctgagattacaggc

SEQ ID NO: 5388 - DNA, 120 bp, synthetic construct
  source 1..120: mol_type = other DNA
gtattgccccattaagtaatatttatcctgcttttccagtgacttccaacataaacactttttgatattcatggagcccctcctcccttactgagtccatgacttctttctttctctcct

SEQ ID NO: 5389 - DNA, 120 bp, synthetic construct
  source 1..120: mol_type = other DNA
atgaatctttaaaaaaatatgctaagtgataggccgggcgtggtggctcacacctgtaatcccaatactttgggaggctgaggtgggtggatcacctgaagtcaggagtttgagactagc

SEQ ID NO: 5390 - DNA, 120 bp, synthetic construct
  source 1..120: mol_type = other DNA
taaggaaaaaaaaacactcaagtccatcttgcaaaaccccaatcctggatgagactgaccatctgcttactcagtgcccacgccagagcagtcaagatttgagaaagcaaagctgataag

SEQ ID NO: 5391 - DNA, 120 bp, synthetic construct
  source 1..120: mol_type = other DNA
ccggccagtatatggtttcttgtggcttcagtgttctccctcacctagaaaccttacaacatatactcctttccatatgtattttgaaaatatgtctaacttctagtttctttaaccaac

SEQ ID NO: 5392 - DNA, 120 bp, synthetic construct
  source 1..120: mol_type = other DNA
cttggctcactgcaaccacttcctcctggttttgggcaattccttgcctcagcctcccgcgtagctgggactacaggcacaccgccatgcctggctaatttttgtatttttagtagagac

SEQ ID NO: 5393 - DNA, 120 bp, synthetic construct
  source 1..120: mol_type = other DNA
tgcttctcttctagctgagcgatcaggctgctgaggtgggagatgttgcaagagaactgggtgatggcaccattgatgctattgtagatggccaagtctagctcctcaaggcgggccagg

SEQ ID NO: 5394 - DNA, 120 bp, synthetic construct
  source 1..120: mol_type = other DNA
taggagggggagaggtgctctccccacgattccctcttggcgctcatttgtttgccataatttactgtccttcgttcttcacccaacccccaccaccaacaggactctattataaacttt

SEQ ID NO: 5395 - DNA, 120 bp, synthetic construct
  source 1..120: mol_type = other DNA
tgggcccgacgtctcttctttaaatctttcactctttttaaatggtcgagctggttctggatttgctcctgagaaaagcaaaacagatgggcagttcaaaattaggtagaccttagcatc

SEQ ID NO: 5396 - DNA, 120 bp, synthetic construct
  source 1..120: mol_type = other DNA
acgtccaactgcgttttgtctgagagccgatgggagtaagagtgtctgcagcttgtcgatgtgtacgcggttttatgcacttcttttaaactgtcaaaaggatgtctccgtgtacaatgt

SEQ ID NO: 5397 - DNA, 120 bp, synthetic construct
  source 1..120: mol_type = other DNA
ggagtggccgggccgatgcctgcgcctgtgccccctaagcgagagcgggaatacggccggctcaccgaggctcgcggccacgctagtggggcaggaaagggtagccgagggtcagagtcc

SEQ ID NO: 5398 - DNA, 120 bp, synthetic construct
  source 1..120: mol_type = other DNA
gaaaaagaaaggtttaattatcagatggtaacatttctgtgtgtcaataacaagcccagttctgctacctctcacttgtgcccaagcaagttggtttaccattcatttacctcagtttct

SEQ ID NO: 5399 - DNA, 120 bp, synthetic construct
  source 1..120: mol_type = other DNA
cttcatcttctcctttacttgggggatgcaagccttgagtttggctttgtttttcagaattgattgtgtttatcttaccaaccctttattacctctggaggcaggtgacctgggggtaaa

SEQ ID NO: 5400 - DNA, 120 bp, synthetic construct
  source 1..120: mol_type = other DNA
tactttttcactgattcaaataccacctcaaggaatagaatcatccttaaaaattcttaaagaagaaaatgcttttcattctgtcgcttcttactcagacatcttcaaagttttgtgggt

SEQ ID NO: 5401 - DNA, 120 bp, synthetic construct
  source 1..120: mol_type = other DNA
acatgggaagccccgtccctactaaaaatacaaaaattatccacgcatggtgtcgcatgcctataacctcagctactcgggaggctgaggcaggagaatcgcttgaacctgggaggcaga

SEQ ID NO: 5402 - DNA, 120 bp, synthetic construct
  source 1..120: mol_type = other DNA
ttaagaagccaacgtattagatgagacagaatgggaaatggagaaaaagacaaaatatcaataagaatttaacattaatataaggtccgggcgcggtggcttatgcagggtaatcccagc

SEQ ID NO: 5403 - DNA, 120 bp, synthetic construct
  source 1..120: mol_type = other DNA
atttaaaactttgacagtattcagtattaatgagaatgtgaggaattccagtacactgtgagaatgtaaattgggagaacaccattgaaagcaatttgacaattgggctgggcgcggtgg

SEQ ID NO: 5404 - DNA, 120 bp, synthetic construct
  source 1..120: mol_type = other DNA
aaacacatggtatgaaacatgccataaagtggaatgaatcagaatatggaagatgaagagtgatggttattactttatattgggtcatcagggtggaatctctctgatgaggtagccaaa

SEQ ID NO: 5405 - DNA, 120 bp, synthetic construct
  source 1..120: mol_type = other DNA
ctatgtgatatttacacatgcaataaaattgtatagaactaaacacacacaaacagatgagtgtatgtaaaaatggtgaaatctgagtaagattggtggattttatcaaaaataatttcc

SEQ ID NO: 5406 - DNA, 120 bp, synthetic construct
  source 1..120: mol_type = other DNA
ttttgaatatgagcagaccatgcctggtaaacacactagacaagattcctgcccttatggagctgacaggccactgggggctggatggaggccgagatggtagctgtctccaagatagtc

SEQ ID NO: 5407 - DNA, 120 bp, synthetic construct
  source 1..120: mol_type = other DNA
ccttggctcgcaggcagccgccttctgactatgtcctcacatgaccttttctctgtgtgcatgcacctctgatgtctcttcttcttcttataaggacaccagtattatcagcttagggcc

SEQ ID NO: 5408 - DNA, 120 bp, synthetic construct
  source 1..120: mol_type = other DNA
ctgaagaagatttcaatgcttttgtgagctctggaaccatttctcttccctttctgggctaaactccttgaataagcggatccctccgctttccttgcaggtgaccactccctccagatc

SEQ ID NO: 5409 - DNA, 120 bp, synthetic construct
  source 1..120: mol_type = other DNA
gaaacttcgaatcatggcggaaaacaaagggggagcaggcatatcgcctagcgagaatggagcaaggaggccccaccggaccccacctccaatattggggattacatctcaatgtgagac

SEQ ID NO: 5410 - DNA, 120 bp, synthetic construct
  source 1..120: mol_type = other DNA
ctcaacttcccaggctcacaggatcctcctacctcagcctcctgaatagctcagactacaggcacacgccaccatgcctggctaattttttttttttttttttgtagagatggtggggca

SEQ ID NO: 5411 - DNA, 120 bp, synthetic construct
  source 1..120: mol_type = other DNA
agctggaactacaggtgggtgcctgtttaactttttttttttttcattttggttactctttcctgtttttgaaatctttgcgtaccttacattcattaacatatcctctttctagaagct

SEQ ID NO: 5412 - DNA, 120 bp, synthetic construct
  source 1..120: mol_type = other DNA
cagcaactcatatgttgaagcggttttaacagctttaaaaggtttctgtgggattatcattgacctgtttttactttgtcttagtgatagctttgtaggaaagattaatttttccttagc

SEQ ID NO: 5413 - DNA, 120 bp, synthetic construct
  source 1..120: mol_type = other DNA
tagcctggtagctcagcagttgccccggagttttttcctttacctttcttctgtgttaggtccccagtcaccggatttcatatttcctttttcttagtttaattccctagttagtggaca

SEQ ID NO: 5414 - DNA, 120 bp, synthetic construct
  source 1..120: mol_type = other DNA
tgaacctggaaggcagaggttgtggtgagccgagattgcatcattgcactccagcctgggcaacaagcgccaaaccccgtctcaagaaaaaaaaaaaagaaatttttaaaaatccagcca

SEQ ID NO: 5415 - DNA, 120 bp, synthetic construct
  source 1..120: mol_type = other DNA
tgagctctttgattagtttgctaagcagcatctcgggaacagcccccgtgctatgtgttctttcttgtcatggatatgtgttttttcttgtcatgctatgtgttctttcttgttcaaggc

SEQ ID NO: 5416 - DNA, 120 bp, synthetic construct
  source 1..120: mol_type = other DNA
acaaaaaatggatactcgatccacctggggtctctcttgtcttctacttactaattgatttaaagtaattttgcaggggcagtttttttgttttggatggccaaacgcagggatgggagg

SEQ ID NO: 5417 - DNA, 120 bp, synthetic construct
  source 1..120: mol_type = other DNA
gaccacatatatacgtagcgtgtctggaagaaatactcagatataaattactactttagtcaatcttaatattaattatttgtcaactatgcttaatgtgcctctctagtctctcaagac

SEQ ID NO: 5418 - DNA, 120 bp, synthetic construct
  source 1..120: mol_type = other DNA
acctgtctcacttaggaagctgtgagaactgcccacacaaggcttgaaaatggaactttactgggtcagaatgacgagggggaaaaaaaaaatacctcacactggcagcggtgggattcg

SEQ ID NO: 5419 - DNA, 120 bp, synthetic construct
  source 1..120: mol_type = other DNA
taggaattggcccctgccttgtactacgtagttttgtcatccaaagtgttttagaagtgaattgaatcatagttacgccttattttgaaacactgtaattcagagaacgtaaaaccttat

SEQ ID NO: 5420 - DNA, 120 bp, synthetic construct
  source 1..120: mol_type = other DNA
aataatgagcaagactgatcattaatgtcctgctcttgagtcctactttgttccaagctgtgttcctattaatccattccctctcagctttaaaatcacccttatatactttgttttgtg

SEQ ID NO: 5421 - DNA, 120 bp, synthetic construct
  source 1..120: mol_type = other DNA
ggggaatgataaagaataaattcaaccagatatataaaatgtgaagtagtgatacatgccatgaaggaaaagagcaagagaatggagaacaaaggggaggggattgctttataataaagg

SEQ ID NO: 5422 - DNA, 120 bp, synthetic construct
  source 1..120: mol_type = other DNA
cccaaaattctcctcatttttgtttagtcatccagggcttgcttactggttaaaactaggagcacttgcctcatcaagagcagaataaatgttctatgcttcccagagaactctcaaaag

SEQ ID NO: 5423 - DNA, 120 bp, synthetic construct
  source 1..120: mol_type = other DNA
ctggaagtgttctgctctttaatctccctggaatgctggaatcacatttttgtccaactaggcctttagttttcagtttaaacatcacttcctgggagaagtcttctctaatcccctgga

SEQ ID NO: 5424 - DNA, 120 bp, synthetic construct
  source 1..120: mol_type = other DNA
tttattgcaaagagcaaaaaaaaaaacaacactctacaatatggaagaagagccgagcgggttgtggatgctggctccggcagcctgcttttattctcttagctggccccacccacatcc

SEQ ID NO: 5425 - DNA, 120 bp, synthetic construct
  source 1..120: mol_type = other DNA
acagtgcagtggtgggctgaagggctcctcaagtgccgccaaagtaggagcccaggcagaggaggcgcccagagcaagcgagggctgtgaggactgccagcacgctgtcacctctcagta

SEQ ID NO: 5426 - DNA, 120 bp, synthetic construct
  source 1..120: mol_type = other DNA
aatacatgggccctctacagtgagatagccccagattttctgaagaaaactaacatttaaggacaaccttagaatacgaagtatttaatattttatgattcctgttactctgcttacagg

SEQ ID NO: 5427 - DNA, 120 bp, synthetic construct
  source 1..120: mol_type = other DNA
aaaaatagtgtctgattctgcaaaggagaggaacagactctgaattgtgatggctccaataaggataaagcagtctctggagagctgcctgaacagccagacaacccagctcttaggctt

SEQ ID NO: 5428 - DNA, 120 bp, synthetic construct
  source 1..120: mol_type = other DNA
cactggaaagagatgatactcataagaagaactaaaagagatttactagaacttgataagccgtcgggacaaagagagctgagacttcgtctgtctgacaacatatgccgggcccggcaa

SEQ ID NO: 5429 - DNA, 120 bp, synthetic construct
  source 1..120: mol_type = other DNA
atgcaacttcatggggtaaagaatatggcgctcttggtgcaaactcttgggcatctgctaggatgtgagaacggtagtaatagcaggaaggggtgaaaagcttgtcttctccactgtctt

SEQ ID NO: 5430 - DNA, 120 bp, synthetic construct
  source 1..120: mol_type = other DNA
gaaaacgagaacgattatcatgcgaacgccagcataacccagatagcactgaaaaagtctaagtagactgttacttcaatgacagatagaaggacacatacaaccggatttggagaataa

SEQ ID NO: 5431 - DNA, 120 bp, synthetic construct
  source 1..120: mol_type = other DNA
taatgagatttatggtcactttttagtttcctcaaaatgtgcagaaacaataagaattttcactttatagaaacgaaaggaggtagcctccttagaaatgtctaaagttgactataatta

SEQ ID NO: 5432 - DNA, 120 bp, synthetic construct
  source 1..120: mol_type = other DNA
ccctctgttgcccaggctggagtgctgtggtgcgatctcagctcgctgcaacagtctgctattgctagtaagtaaaataccgagtattcaatgctcaaatgcttttgttgagaggatatt

SEQ ID NO: 5433 - DNA, 120 bp, synthetic construct
  source 1..120: mol_type = other DNA
ccatggaccacccaagggctgagaaatgcgagcacagggcgcaggactggtagccagctccacctacagccccggtgcaggatcctctaagtgaacccagctgggctcctgagtctggtg

SEQ ID NO: 5434 - DNA, 120 bp, synthetic construct
  source 1..120: mol_type = other DNA
aatggagaaacaaatattgcagaataatatataatttcaaacatctatttttaaaatttgatgtcaaagtaatacatgcatttattatataattgttggattttttttttgtgggggtgg

SEQ ID NO: 5435 - DNA, 120 bp, synthetic construct
  source 1..120: mol_type = other DNA
tgaagggggaatatcaactgggccaaatgacattgagaggctgagcaaattgaagcctgaaaattgaacattgggagagcattgggaacattatggcagacgggagacaggactagattg

SEQ ID NO: 5436 - DNA, 120 bp, synthetic construct
  source 1..120: mol_type = other DNA
gagagtctgaactcagacacgcctagccctgccctcacctgatggtccttctttacccaccctgataactgaacacaaagggcatatacccttgggagttctagggccctgcctaccgct

SEQ ID NO: 5437 - DNA, 120 bp, synthetic construct
  source 1..120: mol_type = other DNA
gaacctgggaggcggaggttgcaatgagctgagatcatgtcactgcactccagcctgagcaacacagtgagacttcgtctcgaaaaaaaaaaaagtgaagggagaaatattcaatgaagc

SEQ ID NO: 5438 - DNA, 120 bp, synthetic construct
  source 1..120: mol_type = other DNA
tcttatatcagacaaaacaaactttaaagcaacagcagttaaaaaagacaaagagagacattatataatggtaaaaggccttgtctaacaagaaaatatcacaatcctaaacatgtgtgc

SEQ ID NO: 5439 - DNA, 120 bp, synthetic construct
  source 1..120: mol_type = other DNA
atgggagatattacagctgacaccacagaaatacaaaagatcattcaaggctgctatgaatacctctatacacataaactagaaaacctggaagagatggataaattcttagaaagatgc

SEQ ID NO: 5440 - DNA, 120 bp, synthetic construct
  source 1..120: mol_type = other DNA
acagggttaaaaacaaaaattacacaatcatctcaatagatgcagaaaaagcattcaacaatatcaagcatccttttatgattaaaattcttagcaaaatcgggatacaagggacatacc

SEQ ID NO: 5441 - DNA, 120 bp, synthetic construct
  source 1..120: mol_type = other DNA
ggagaatcaaatcaagaactcaaccccgtttacaatagctgcaaaaacaattaaaatacttagaaatatacctaaccaaggaggagaaagacctctacaagtaaaactacaaaacactgc

SEQ ID NO: 5442 - DNA, 120 bp, synthetic construct
  source 1..120: mol_type = other DNA
aaccactgtggaaaacagtgggggagatttcttaaagaactaaagtagagctaccctttgatccagtaatcccactactgggtatctacctagaggaaaaaaagtcattaaacaaaaaag

SEQ ID NO: 5443 - DNA, 120 bp, synthetic construct
  source 1..120: mol_type = other DNA
tgggatttgacaaggaagtttcagtggaatggaggggaggaaaccttggtttagagtgtgacaaagaaaggagcgcagttaggagtattctctattcattcacctattcatattcagata

SEQ ID NO: 5444 - DNA, 120 bp, synthetic construct
  source 1..120: mol_type = other DNA
ggtctttcggatggtttgcatggagttgctgctgtccagggcatcacgaaggctgaagtcctcgccatcttccagcaggcggcggtaggtggcgatctcagcctccagctttaccttgat

SEQ ID NO: 5445 - DNA, 120 bp, synthetic construct
  source 1..120: mol_type = other DNA
ttctcactctgtccaggtaggaggccaggcggtccttcaggctttgcatggtctccttctcgttctggatgcctcccattcctgccagaaccccagccatccctgccgccaggcctccag

SEQ ID NO: 5446 - DNA, 120 bp, synthetic construct
  source 1..120: mol_type = other DNA
aaggtgagaagtcatagaagctggcttttgacagaataatgcaggcacatttactgaaaccatgatttttaaagcaggaagaaatcatagttctcaaattaaggaaagtgagcatatttc

SEQ ID NO: 5447 - DNA, 120 bp, synthetic construct
  source 1..120: mol_type = other DNA
atcagactcaaagttcgttattcttttgttttcttattttttcaaatctcacgtcttcagaagaaaagtatcatcttggagaagacttgctgcttctgatggcaggcgactagcatcatc

SEQ ID NO: 5448 - DNA, 120 bp, synthetic construct
  source 1..120: mol_type = other DNA
ctcccgggttcaagctattctcctatctcagtctctcgagtagccgggactacaggtgccggccaccatgctcagctaatttttgtatttttagcagggacggggtttcagcatgtaggc

SEQ ID NO: 5449 - DNA, 120 bp, synthetic construct
  source 1..120: mol_type = other DNA
gtcatactgacctctctgttcagaacacttttctgtctctccatagccttttagggaaagctcaaagtatttagtattgtcaagatacggctcacagtttgttcttacttcctaccaata

SEQ ID NO: 5450 - DNA, 120 bp, synthetic construct
  source 1..120: mol_type = other DNA
tgtgggaatggactacaaaagggtgtaacgaccgaaaaatatgctgcattgaggtcagtttttggagactgtatactacacaaagtaacgattttttcctttgtagcctcatctttatcc

SEQ ID NO: 5451 - DNA, 120 bp, synthetic construct
  source 1..120: mol_type = other DNA
ctattctttaacaggccataagctccttagaggagtgcattttgtactctcagattccccaggtagacctactgtatatggcacagaaaagggtctcagttaatgttggctgacagaagg

SEQ ID NO: 5452 - DNA, 120 bp, synthetic construct
  source 1..120: mol_type = other DNA
gcagcctccaagaccgcggtgccaccaaaccaagcgccggacgcggtggcgcgcgcctgtaatcccagctccccgggaggctgaggtcggcggatcgtgggtgctcgggggttcggagct

SEQ ID NO: 5453 - DNA, 120 bp, synthetic construct
  source 1..120: mol_type = other DNA
tgctatattcagaactgaggccgatctctttccctcactgcaaaacctccttgcaatggtcccttgtgcctatcccgatagtcctgaatagtcttccttacattgctttcagaagtatca

SEQ ID NO: 5454 - DNA, 120 bp, synthetic construct
  source 1..120: mol_type = other DNA
gctgtaaaagggccaaaaggaatccttgtggtgatggaaatgttttgcatcttgactttatcaatatcaatatcaatatccggattgtgattttgtgctatagttttgcaagatgttacc

SEQ ID NO: 5455 - DNA, 120 bp, synthetic construct
  source 1..120: mol_type = other DNA
gactgcttcataagggaaggattgtttataggttggtatactgtgcaaaattaagtataggaccaaaaacagccaagacatttgaaagttggaaagttgatggtaatggtttcctgggat

SEQ ID NO: 5456 - DNA, 120 bp, synthetic construct
  source 1..120: mol_type = other DNA
tctttccactgcttactcctaacctataaaactagctgcaatcccaccaccctccggtggtgggactcccttttcggactcagcccgctcggaccagagtgaataaacagcttgttgctc

SEQ ID NO: 5457 - DNA, 120 bp, synthetic construct
  source 1..120: mol_type = other DNA
tctgttttaacctccaaattctttcatccaggaacgaaatctctgagtaaacagcaaattgtggataagttaactttcaattttcataggaggcattttctgcatagaaaccctgttcct

SEQ ID NO: 5458 - DNA, 120 bp, synthetic construct
  source 1..120: mol_type = other DNA
ttatttctttcttatatctgctaagagtttggggcacgtatgacttctctacaagtttccaaacaaagatcgtggtgctcctgatcttatttcaccaacaaatggaatatgtgatttttt

SEQ ID NO: 5459 - DNA, 120 bp, synthetic construct
  source 1..120: mol_type = other DNA
tcttcgaatgctaccagtttctttccttctcatctgagctattattcattgtccataggaaaaaaaattccctaattttggcacggtaggttctgtttattcaccagacttgctaccgtt

SEQ ID NO: 5460 - DNA, 120 bp, synthetic construct
  source 1..120: mol_type = other DNA
tggaggtggggtggggaagaccctatttgaagtgggctttgaagaatgaacaagatttttattagggaacaaaatggaaaccagcattccaggacaagcgtctcaggagaagcaaaagcg

SEQ ID NO: 5461 - DNA, 120 bp, synthetic construct
  source 1..120: mol_type = other DNA
tcctactcttttctttctcctttgtccttctcattcctgaccccttcaggattctcagtcttccctccgggaggtagggattctacggagagagaagggttgtggggcttgttctgttgc

SEQ ID NO: 5462 - DNA, 120 bp, synthetic construct
  source 1..120: mol_type = other DNA
gcaggggggcgggtgtgcaggccgggcgccgtggctcacgcctgtaatcccagcactttgggaggccaaggcaggcggatcacaaggtcaggagttcgagaccagcctggccaatatggt

SEQ ID NO: 5463 - DNA, 120 bp, synthetic construct
  source 1..120: mol_type = other DNA
tgcctgtgatcccagctactcgggaggctgaggcgggagaattgcttgaacctgggaggcggaggttgcggtgagtcgagatcgcgatattggactctagccaactccatctccaaaaaa

SEQ ID NO: 5464 - DNA, 120 bp, synthetic construct
  source 1..120: mol_type = other DNA
gccaagtacttttcattctcactagggactgtttttaggagaatccctttccaaatgttcagtatgaatggttcttacgtatcaatcccattctcctcttcgacttctgtttaccacgga

SEQ ID NO: 5465 - DNA, 120 bp, synthetic construct
  source 1..120: mol_type = other DNA
tggggttctcatgggggttcacaaggattagataagttattgccctaatatggggcaaactctactaaaaaggagatagctttctatgtgtagattttgaatgatgttccagatttaaga

SEQ ID NO: 5466 - DNA, 120 bp, synthetic construct
  source 1..120: mol_type = other DNA
ttttaggacatgcaggggcagaggaatgtgttaaatactaccaaaggtgtgcaataattaaaatccaaactgtgaaactctgcagcaccagcaacctagttaatcattaaataaatttca

SEQ ID NO: 5467 - DNA, 120 bp, synthetic construct
  source 1..120: mol_type = other DNA
ggaatgggtggggatacagatgaaacaagattaaccctgacgtaataattgttgaagctgaatgatgtgtacatggagttcatttttctattgccttaactcttgcatgggtttgaaatg

SEQ ID NO: 5468 - DNA, 120 bp, synthetic construct
  source 1..120: mol_type = other DNA
ctgggactacaggcacgcaccaccaagcccagccaatttttctatttttaataaagagacagggtttcaccatgttggccaggctggtctcaaattgctgatcccaagtgatctgcccat

SEQ ID NO: 5469 - DNA, 120 bp, synthetic construct
  source 1..120: mol_type = other DNA
ttttttttttttgagatggagtcttgctgtgttgcccaggctggagtgcagtgacacgatcttggctcactgcaacctctgcctccagggtagctgggactacaggcgtgcaccaccatg

SEQ ID NO: 5470 - DNA, 120 bp, synthetic construct
  source 1..120: mol_type = other DNA
actcactgcaggtgtatggcttctcaccagtgtggattcttttgtgctgcctcaggactgaactatgatggaaggccattccacatacctcacatttgtgaggcttctctccagtgtgaa

SEQ ID NO: 5471 - DNA, 120 bp, synthetic construct
  source 1..120: mol_type = other DNA
ccggtgcatagaaagctgatttctggtcttgaatgctttcccacactcattacacacatggggtttctcaccagaatgaatttgctcatggagaattagatctgagtgccaactgaagtt

SEQ ID NO: 5472 - DNA, 120 bp, synthetic construct
  source 1..120: mol_type = other DNA
gacccaaaccaggtcagattctctaatcctggactttagaattgtgatctgacggcaggtaaggccagctctaagagtagctcagtctttagcacttaaatttgagaactagtggtggtg

SEQ ID NO: 5473 - DNA, 120 bp, synthetic construct
  source 1..120: mol_type = other DNA
agctattctaagtcccctgctctactcacactgaacaattcatagttcatattattttattcctcaatgctttctcacatgttattccttctgcctagaatgactctcacctgtctcaat

SEQ ID NO: 5474 - DNA, 120 bp, synthetic construct
  source 1..120: mol_type = other DNA
agagaaaagggtttttcaggggtctagtaacatgtaaaagaacatgtttggggactttctcagaaaagtcacactcagaaggaaagagaagttctgggaaacagtcatttgggtgtgctc

SEQ ID NO: 5475 - DNA, 120 bp, synthetic construct
  source 1..120: mol_type = other DNA
gaacgcagtgaaaacaaggccatattttggaggtagtgatgtattttcaaggaggaggaaaggggcctcagctcacttgggcctggctcattagtgtgatatctgcttgcggcaggtttc

SEQ ID NO: 5476 - DNA, 120 bp, synthetic construct
  source 1..120: mol_type = other DNA
agtagttcatattactaattaatagggcctgactttattccttgcaggccagctcaatctttctgtagcttcaatgtttaaggtgccttatttttcttgatagtttatcaacacatcgcc

SEQ ID NO: 5477 - DNA, 120 bp, synthetic construct
  source 1..120: mol_type = other DNA
ttccctactggtttttaccatatcttcttcacaactgggaaagtctgtcactcatagtgattcataagctttattttttagctttagctttagaaattgaaaggttattcctcttaagtt

SEQ ID NO: 5478 - DNA, 120 bp, synthetic construct
  source 1..120: mol_type = other DNA
ctaccatcagcttttatacaaatcttaaccacttttcctcctcacatacgccaccaaagagcacaaggcttcaatgggaaaacttttgcttcttcttttgtcactgctttattttatatt

SEQ ID NO: 5479 - DNA, 120 bp, synthetic construct
  source 1..120: mol_type = other DNA
tgtatcacagaccctcctcttcttacctcctgcatctttttactcaggtttctttaacagtcttccactgctgtcctggtttcttcctactggtcagatccagttctcaaacaagctgtg

SEQ ID NO: 5480 - DNA, 120 bp, synthetic construct
  source 1..120: mol_type = other DNA
tctccatggctaataatcttgcctccttcaagtgttttcttataggtcatcttcccaaggaggtctactctgagtgccttatttaaaattgcagcctatcccctccttccaatcctgatg

SEQ ID NO: 5481 - DNA, 120 bp, synthetic construct
  source 1..120: mol_type = other DNA
tgcaaaggggttgcagaaatattacccttttgctccttttttcccatgtagaggaacctctagataggaatggacagaagttttgtgacaaatatatgaaaaagttacttttaaatatta

SEQ ID NO: 5482 - DNA, 120 bp, synthetic construct
  source 1..120: mol_type = other DNA
actggcttttaatctgatagattcagccaccccatttcattagagtttgtaaaattgtaatttttctaattcaataattttttcacatttattagttagaactcctctataaagaaaaac

SEQ ID NO: 5483 - DNA, 120 bp, synthetic construct
  source 1..120: mol_type = other DNA
ccttatgacatacgcaggaccaccagccaagctgctcccagatttctggtcttcagaagctggggaatggctttgagggaggaaactgcaacagatgtttggttctaagttttataacta

SEQ ID NO: 5484 - DNA, 120 bp, synthetic construct
  source 1..120: mol_type = other DNA
ggataaaattagaagagaatctaatgatttcagactcttggatctcatacctagactactttggatataaatgcagcctttccagcccagtcgggtcttctatttattcaaagacaaagg

SEQ ID NO: 5485 - DNA, 120 bp, synthetic construct
  source 1..120: mol_type = other DNA
acacttgatggagatatgaaagcctgataatgttaagtaattttatggcccttctgccatctgtcaaaattacaaaattcatttcctggggcttttgaaaaaaatagcaaatatttcagg

SEQ ID NO: 5486 - DNA, 120 bp, synthetic construct
  source 1..120: mol_type = other DNA
catcttaaccaaagaaaaaaaagttcagtggttgtcaggggttggaagtggagaaggatgaccaggccgagcacaaagggtatttttagggcagtgaaaatactacgtatgattatgtaa

SEQ ID NO: 5487 - DNA, 120 bp, synthetic construct
  source 1..120: mol_type = other DNA
agaaaagcgaagcacgcgttaccatggagactgcggaatggaaaagcgttcggtttcttgtttcctagccgcgaatggggtcgtggttccttcgacctcgcctggggagaaaggggacgg

SEQ ID NO: 5488 - DNA, 120 bp, synthetic construct
  source 1..120: mol_type = other DNA
taccttattctatattacacagaaatggcagcctgtttttccccagctttgccaacataataattagcaaaactttttaattatatgataatatatttcaggaagaaaacactgacaacc

SEQ ID NO: 5489 - DNA, 120 bp, synthetic construct
  source 1..120: mol_type = other DNA
cccagtaaatcttattcccattccttcgttcatactatgtgatgttgtagaatttattgcaaggcccattgtaccacatccttgcagcaaatttatgactcagaaattactatttctatc

SEQ ID NO: 5490 - DNA, 120 bp, synthetic construct
  source 1..120: mol_type = other DNA
ctttgtgtatttttccagccacagaactgagtcattcattacccaaagctaaaccctgcctacatggtaacgcttttgtaaatgggattctttctctctgacatccctttttcctgcagt

SEQ ID NO: 5491 - DNA, 120 bp, synthetic construct
  source 1..120: mol_type = other DNA
agaattcgcggtgggctcctgcgccgccggagcctccccgacgattgccgccccctgcttcacggcttcccgtcccatccaccgcccaagggctgagaagtgcgggcgcacggcgcgcgg

SEQ ID NO: 5492 - DNA, 120 bp, synthetic construct
  source 1..120: mol_type = other DNA
ggaacaaactccaaacacgtctgactatcagaaggaacaaactccagacacgttttttagaactaacaccctgagggtctgcagcttcattctagaatcatgccaagaactcacaaattt

SEQ ID NO: 5493 - DNA, 120 bp, synthetic construct
  source 1..120: mol_type = other DNA
actggtaagaactaattttttgaatcagatttggggattattcaggcagaaggggatccctaaatggaaacactgacattttaatactgcaagtgggggatgatgaacagacaaataaca

SEQ ID NO: 5494 - DNA, 120 bp, synthetic construct
  source 1..120: mol_type = other DNA
tatctatgttcatcagggattttggcctgtagttttgtttttgatttgatttctgacacagattttgctgtatccttgtctggttttcacatcagggcaatgctggccttgtagaatgag

SEQ ID NO: 5495 - DNA, 120 bp, synthetic construct
  source 1..120: mol_type = other DNA
ttacttttttgaatttgctgagacttcttttgtgacttaagatatggtctgttctggagaatgtgccatgtgcaagtgaaaagaatgtgtactctgtagcagctgggtgaaatgttctat

SEQ ID NO: 5496 - DNA, 120 bp, synthetic construct
  source 1..120: mol_type = other DNA
agtctcctgagtagctgataccatagacacatgccaccatagccagctaagttttgtattttttgtagagatgaggttttgccatgttgcccagagtggttttgaactcctgagctcaag

SEQ ID NO: 5497 - DNA, 120 bp, synthetic construct
  source 1..120: mol_type = other DNA
tcatgttctctaatcttgtacctagatacttatatatttcttaagtttggaaagttttgagttatttctttggataagctttctaatttttgctctttctgaattccctcttgagcacca

SEQ ID NO: 5498 - DNA, 120 bp, synthetic construct
  source 1..120: mol_type = other DNA
tggcgtctcctttggctgagttaaagaagagtgtttctagggttggggaaggaagtcccacctccccactttttctctggttgtctttgggaatatttctccctttaagtacttagggac

SEQ ID NO: 5499 - DNA, 120 bp, synthetic construct
  source 1..120: mol_type = other DNA
tctattcttttaacatacagtctctcttgtttaataaaactgaaagtaaagaatagatagaaatagtcctacctcagttcaggtcaggttttgttgccaacagagttatgaaaactttta

SEQ ID NO: 5500 - DNA, 120 bp, synthetic construct
  source 1..120: mol_type = other DNA
ttatgttattgttaccaggcaaaaggggctcactgctggatgtgctagaagctaatactatgacactggatttctaagaaaagaaaagctctttattataggttgaccaataaggagaca

SEQ ID NO: 5501 - DNA, 120 bp, synthetic construct
  source 1..120: mol_type = other DNA
tacagaggctctttggaggaccaccaaccattgtaataccaaagatttttgctacctccccttgaatcaattttgcccctgtggggatgatatcatccctgatatgaaggcatatattga

SEQ ID NO: 5502 - DNA, 120 bp, synthetic construct
  source 1..120: mol_type = other DNA
agtccttatgacaccatgaagtttacagtgtcttcatgctttccttatcctgatttcactgtcctctctcatatttttttatgtttaccaaggtatgtacaactgacaattttagagtca

SEQ ID NO: 5503 - DNA, 120 bp, synthetic construct
  source 1..120: mol_type = other DNA
ttacttttgaatagacacaagccatcttgatcaatgctggcatctcacagaaaaaattatccacttcccggtgcccacatcttggcaacttcaaagtcaaggagcaaacaattaaggcac

SEQ ID NO: 5504 - DNA, 120 bp, synthetic construct
  source 1..120: mol_type = other DNA
atgtgattttaagagaggcatatgtattgaggagttgttcctctttgaagctatgacataagcatcacttgatcatgataaatccttgcattattgaaggagttaagcttgaggtaaaaa

SEQ ID NO: 5505 - DNA, 120 bp, synthetic construct
  source 1..120: mol_type = other DNA
gcggatcacttgatgtcaggagtccagaccagcatggcctacgtggggaaaaattttgtattttctactaaaaatacaaaaattagctgggcggtgtggtgcgtgcctgtagtcccaact

SEQ ID NO: 5506 - DNA, 120 bp, synthetic construct
  source 1..120: mol_type = other DNA
gagcttggttcatctttaattctaaaaatgataacctatattcacctgtcattgttattctgtctaccccttagtccattaatttttcacactagtgattttaccgcaatgacctagaac

SEQ ID NO: 5507 - DNA, 120 bp, synthetic construct
  source 1..120: mol_type = other DNA
ccaaatatatgcttagatttctcttcccagacaaagcacattgttagctgttcctaccactacatgctcttttattaccatgctttttcttgttgctctccctggacacaccatgatttg

SEQ ID NO: 5508 - DNA, 120 bp, synthetic construct
  source 1..120: mol_type = other DNA
tgtaggatggctatgaggaggattacatgctatgctaaatatttagcatgatgcttggtgcatagagagcattcagtaacttcaaaatccactaactgctcttgttgaagtttaatcctc

SEQ ID NO: 5509 - DNA, 120 bp, synthetic construct
  source 1..120: mol_type = other DNA
tctaaaggctacctatgttgatatggtttagaccttgaggactgatgccccacagaggtgattaagtaaagctatgactgtggtcagaggcatatccaaataataatttcatgaaaagtt

SEQ ID NO: 5510 - DNA, 120 bp, synthetic construct
  source 1..120: mol_type = other DNA
gacagggtttcctttttttgttacgagtgaatagtacaccacattttcttgatttattcattcattgatgaacacaaagtttgattccatatctttgctattgtgaataatgctgccata

SEQ ID NO: 5511 - DNA, 120 bp, synthetic construct
  source 1..120: mol_type = other DNA
tatttgtttccctgactgtacaggagctctttaatttgatataatctcatttatttatatttgcttttgttgactgtgcttttgaggtcatatccaaaaaatcattgaccagatcaatgt

SEQ ID NO: 5512 - DNA, 120 bp, synthetic construct
  source 1..120: mol_type = other DNA
agacagtttcacttcttcatttccaatttgtatgcctttttttctttttcttgcctaactgctctggctaggacattcagtactatgttgaacagaagtggtgagcgtgggcatctttat

SEQ ID NO: 5513 - DNA, 120 bp, synthetic construct
  source 1..120: mol_type = other DNA
cagttttctcacgctggtcaacaaataggccttcatcacacactaatttgtaatgtcattcttttcatatttactgttgtaatgtaaaacacactagggtctgttttgaggcaatgttgt

SEQ ID NO: 5514 - DNA, 120 bp, synthetic construct
  source 1..120: mol_type = other DNA
caatcctcaccctccttcctcctgccaccctcaggtaggcccaggtgtctgttgttcccctctttgtgtctgtgtgtactcaatgtttagctcatacttataagtgagaacatgtggtat

SEQ ID NO: 5515 - DNA, 120 bp, synthetic construct
  source 1..120: mol_type = other DNA
gatagttttctttcttcttattttttgggggatatacctgtatttttcagctaatgtaaaacaacagagtagaaactctagttgatatttgctcttaagcattttagttcagagggacta

SEQ ID NO: 5516 - DNA, 120 bp, synthetic construct
  source 1..120: mol_type = other DNA
tcttggctcactgggctcactgcaagctctgtctcccgggttcacgccattctcctgcctcagcctcccgagtagctgggactacaggtgcccgcgaccacgcccagctaattttttgta

SEQ ID NO: 5517 - DNA, 120 bp, synthetic construct
  source 1..120: mol_type = other DNA
aagattggaattgttttaattgcatctgtgttctgaggaatggagcagcagcagcagaagaaaaggtgttcttttacttaaaacaacaaattctattttctaatgcaaggtgagtgtatc

SEQ ID NO: 5518 - DNA, 120 bp, synthetic construct
  source 1..120: mol_type = other DNA
gcaggaggatggcatgaacccgggaggtggaggttgcagtgagctgagattgtgccactgcactccagcctgggcgacagagacagactccatctcaaaaaaaaaattaacttatgtatt

SEQ ID NO: 5519 - DNA, 120 bp, synthetic construct
  source 1..120: mol_type = other DNA
aatcagagttgaacttcttgtggaagaatctggagatgtccatatgaaaggaaaataggcaataaactagattgtattatattgcatttttccaacactaggcatatgtggttttgaaaa

SEQ ID NO: 5520 - DNA, 120 bp, synthetic construct
  source 1..120: mol_type = other DNA
gaaagggacaactcaaaatgctagtggtgtgctgctcatcattaaagatgacatgatggaagagaaaatatatatttttagattctagcagtgtgtctttctagatctatctagattggc

SEQ ID NO: 5521 - DNA, 120 bp, synthetic construct
  source 1..120: mol_type = other DNA
tcagggacataaaggagctaagtagaatggttgtaattttgtttgcatctacaaaatgtttgtatataataattatatttatggatctccatgacctaggaattacttgcatttgtaaaa

SEQ ID NO: 5522 - DNA, 120 bp, synthetic construct
  source 1..120: mol_type = other DNA
acatagatctaggaaagataaatttctgaggaaaaagtacattggtgtatgaagctgggaatccaggagagatgcaagaatgatggctgtgttacccaccaatgtaattaagtagaagat

SEQ ID NO: 5523 - DNA, 120 bp, synthetic construct
  source 1..120: mol_type = other DNA
aagggtactaagtttcagttagaaaaaaggaaccagttttagtgatctcacagaatggtgactacaataaacaataatgcattgtttatttcaaaattactaagagtagattttaagtgt

SEQ ID NO: 5524 - DNA, 120 bp, synthetic construct
  source 1..120: mol_type = other DNA
ctcaggaggctgaggcgggaggatcacttgagcccaggagtttgaggttgcggtgagctatgattgcaccactgcactccaccctgggtgctggagcaagatcctgtctcaaaaacaaac

SEQ ID NO: 5525 - DNA, 120 bp, synthetic construct
  source 1..120: mol_type = other DNA
ctactttctacaaattgttttaccaatccaggcatactgtttctccaagagattaaggatgaacattactgtgatccagagggagttcctttgccattctacttctcgacttttgtagaa

SEQ ID NO: 5526 - DNA, 120 bp, synthetic construct
  source 1..120: mol_type = other DNA
tagttttgttattgtctcagaggtcactatttacacattaaattctagagtaagtatatactatgaaaatttttgtgagttggcttataatcataggttttaacagcttccttaaattaa

SEQ ID NO: 5527 - DNA, 120 bp, synthetic construct
  source 1..120: mol_type = other DNA
tattcaattttcatttgaaaaacaaaaatgtatataaattgtcatgcccacccatgtttctggtttaaatacattcctacacagtgacttttctagtcccttgctccttattctgtgatt

SEQ ID NO: 5528 - DNA, 120 bp, synthetic construct
  source 1..120: mol_type = other DNA
ctatttttcctggattacccaatggattactatcttgtttctctgctttaattcattcccctttcaatctattctccatatggcggccaaaagcgttctttaaaaaaaccacacgttggc

SEQ ID NO: 5529 - DNA, 120 bp, synthetic construct
  source 1..120: mol_type = other DNA
tggatctgatcccccttttttgccacgtaactgaatgaatcaattcaacaaatttgattagcaatagaaatatagcaaacaactaaatagacaaaacagtaaagtccctgacttaatgga

SEQ ID NO: 5530 - DNA, 120 bp, synthetic construct
  source 1..120: mol_type = other DNA
ggaaaaatacaaaaccaaaacaatctacctatttaccttctcgtgaacttatgaaatcaaatattttaagccttattttccccaaaccgtatatgattctctcaatagttgcagaaaaat

SEQ ID NO: 5531 - DNA, 120 bp, synthetic construct
  source 1..120: mol_type = other DNA
tctacagtaatcaaaacagcaaggtactggcacaaaaataggcacctagaccaatggaacagaataaagaacccagaaataaagcagcatacctacaaccaactgatcttgaacaaagtc

SEQ ID NO: 5532 - DNA, 120 bp, synthetic construct
  source 1..120: mol_type = other DNA
ttcacaattgcaaagacatggaatcaagctaggtgcccattaatggtggattggataaagaaaatgtggtacatatacaacatggaatgctacacagccataaaagagaacgaaataatg

SEQ ID NO: 5533 - DNA, 120 bp, synthetic construct
  source 1..120: mol_type = other DNA
tgtattttactaagcataatgccaacaaggttgatccatgttgttgcaagtggcagaatttccttctttttgatggatgcttggtttgtttccaagtgttggctaatgtgaatgatgcta

SEQ ID NO: 5534 - DNA, 120 bp, synthetic construct
  source 1..120: mol_type = other DNA
gagttttgataagaattgcattgaatctgtcaattactttgggtattatggacattttagtagtattaattcttctattccatgagcatgaaatattttaaacatttatttgtattttct

SEQ ID NO: 5535 - DNA, 120 bp, synthetic construct
  source 1..120: mol_type = other DNA
cttttcaaataaggctttctttgggtatatatccagaactgggattcctggatcatatgatatttctatttttaattttttgaggaacccccttactattttccataaaggctatactaa

SEQ ID NO: 5536 - DNA, 120 bp, synthetic construct
  source 1..120: mol_type = other DNA
tcaagattgctttgtctgtttagagtcttttgtgattccacataaattttaagattgtttctctatttctacgaaaaatgtcattggaattttgataagaactgtattgaatttattgat

SEQ ID NO: 5537 - DNA, 120 bp, synthetic construct
  source 1..120: mol_type = other DNA
tagccctctcctagcctcccacccactgacaagccccagtgtgtgatgttctcctccctgtgtccatgtgttctcattattcaactccaacttataagtgagaacatgcggtgtttgatt

SEQ ID NO: 5538 - DNA, 120 bp, synthetic construct
  source 1..120: mol_type = other DNA
acacatgaagtctttgcccatgcctatgtcctgaatggtatttcccagttttcttgtaggatttttatggttttaggtcttacatttaagtctttaatccatcttgagataatttttgta

SEQ ID NO: 5539 - DNA, 120 bp, synthetic construct
  source 1..120: mol_type = other DNA
gttaatggtagcttgattgggatagcattgaatctataaattcctttgggcagtatggccattttcacgatattgattcttcctatccatgaacatggaatgtttttccatttgtttgtg

SEQ ID NO: 5540 - DNA, 120 bp, synthetic construct
  source 1..120: mol_type = other DNA
aagatgatgctgacttcataaaatgagttagggaggagtccctctttttctatagtttggaatagtttcagaaggaatgataccaggtcatcttagtacctctggtagaatttggctgtg

SEQ ID NO: 5541 - DNA, 120 bp, synthetic construct
  source 1..120: mol_type = other DNA
taccgttatgtaattcccttctttgtcttttttgatttaaagtctgttttatcagagactaggattgctactgctgcttttttttttttttggctttccatttgcttggtaaatattcct

SEQ ID NO: 5542 - DNA, 120 bp, synthetic construct
  source 1..120: mol_type = other DNA
cccctgaatagctggaactatggaactatgagcatgcaccaccacacttggctaatttttaaatttctgtaggataggtgtctcactacatagcccaagttggtcttgaacttctgggct

SEQ ID NO: 5543 - DNA, 120 bp, synthetic construct
  source 1..120: mol_type = other DNA
tgttgataaattaggctgattaaaaaataatgtgaacacttaaattacctttaatggagtgcagccttgagaagaagataccacgtggtccaagtctatatcaaatttgagtttaaaata

SEQ ID NO: 5544 - DNA, 120 bp, synthetic construct
  source 1..120: mol_type = other DNA
ccttctgtgtgtccggtgtaaagggcaaaacaggctccctttcctcaagcctcttgtcattaaagcctgtaaaaattacagtaaaagtattcagaatgggttaagcaatttgaccgtcag

SEQ ID NO: 5545 - DNA, 120 bp, synthetic construct
  source 1..120: mol_type = other DNA
aactagtttacagtcccaccaacagtgtaaaagtgttcctatttctccacatcctctccagcacctgttgtttcctgactttttttttttttttttttttttttttttttgagacggagt

SEQ ID NO: 5546 - DNA, 120 bp, synthetic construct
  source 1..120: mol_type = other DNA
tcttttggctgcataaatgtcttgttttgagaagtgtctgttcatgtccttcacccactttttgatggggttgtttgtttttttcttgtaaatttgtttgagttcattttagattctgga

SEQ ID NO: 5547 - DNA, 120 bp, synthetic construct
  source 1..120: mol_type = other DNA
tgaataccctttatttctttctcctgcctgattgccctggccagaacttccaacactatgttgaataggagtggtgagagagggcatccctgtcttgtgtacataggccaaaattcttaa

SEQ ID NO: 5548 - DNA, 120 bp, synthetic construct
  source 1..120: mol_type = other DNA
aatgaaccaggatcctcatctctcaccttatacaaaaatcaactcaagatggatcaaagctgagtgcggtggctcacgcctgtaatcccagcactttgggaagccgaggcaggtggatca

SEQ ID NO: 5549 - DNA, 120 bp, synthetic construct
  source 1..120: mol_type = other DNA
cataaaaaggaatgaattaatggcattcacaacaacctagatgggattggagactattattctaaatgaagtaactcaggaatggaaaaccaaatattgtatgttcttgctcataagagg

SEQ ID NO: 5550 - DNA, 120 bp, synthetic construct
  source 1..120: mol_type = other DNA
atccaactttctactttgtcacctctatctcaaaattgacggtctgatagctagtttattttatatttgccccaggttgtgctctaccttctttttccattttccttctgctgaatattc

SEQ ID NO: 5551 - DNA, 120 bp, synthetic construct
  source 1..120: mol_type = other DNA
cctggtgatacaaaaagacaagaagcctcctcattgccccttttatgtccctgttgctcaaagtgtagataaaagggttaagcataggagtcaccaaactgtagaacagggacatgaatt

SEQ ID NO: 5552 - DNA, 120 bp, synthetic construct
  source 1..120: mol_type = other DNA
tcagatggagaaatgaataattttaaagaatgcccaagaactacccatgctaactaacacgtgttaatttctttcatccaaaatctgttggccctggtcatgttctggttcaatttgtga

SEQ ID NO: 5553 - DNA, 120 bp, synthetic construct
  source 1..120: mol_type = other DNA
tctaccattttatttccctacattactcagatcccttgccttgaatctgatgttaatgatttctagattttaatatcagtacacatatgtttttaatcagtggaaatgctcacaaatgca

SEQ ID NO: 5554 - DNA, 120 bp, synthetic construct
  source 1..120: mol_type = other DNA
agaaaaccaacatggaagcaatcatacttctcatgtctctgataagagaagtatggggaacctttaaccaaaggaaaatttaaaaaaaatgcaagttaactatctagttcattcactgtt

SEQ ID NO: 5555 - DNA, 120 bp, synthetic construct
  source 1..120: mol_type = other DNA
taactttgtcctgtcttcctattcagaaaaattttcctctagaatctgtgcaaaagtaactgacacacctgcagtatgtgacaacataagagatgttctcaactttttcatgaggtgaaa

SEQ ID NO: 5556 - DNA, 120 bp, synthetic construct
  source 1..120: mol_type = other DNA
ccatgttcctctttcctgtggtctgtccagaaagcccaaatatctcaaagagtttttcttcacttattgcattgttctgtctattttgttacccaatataaggattggcacattggatat

SEQ ID NO: 5557 - DNA, 120 bp, synthetic construct
  source 1..120: mol_type = other DNA
gttctaaaggtactttaaaaaaagtactttatagggttgccactcactctataaagctgtgaaactttgttctctgtacagataatagagttgaaatttcttggtaagggtcattatagc

SEQ ID NO: 5558 - DNA, 120 bp, synthetic construct
  source 1..120: mol_type = other DNA
tattttttttccctattatagctttaattttaaaacatgatcctttctgatggtattagtttccttacatcatcctgctggtgtggaagtgaaaagtgaatgataaattcttactacaca

SEQ ID NO: 5559 - DNA, 120 bp, synthetic construct
  source 1..120: mol_type = other DNA
aactatacactaaagtgtatgtagtaataaaaaggttgggaaaaatttcatagatatgaaaactacatttatatattacatatgtgtaaaagtaaggcaaatgtaaatgaatgatgactc

SEQ ID NO: 5560 - DNA, 120 bp, synthetic construct
  source 1..120: mol_type = other DNA
actatcaataatttttatttcaaataaaattcaactttaggttattatggctttaagatagtgtctaatgggaagcaaataaacattaatgcaagacttttcaaggtgaaatagacttag

SEQ ID NO: 5561 - DNA, 120 bp, synthetic construct
  source 1..120: mol_type = other DNA
tcccttccctccctccctctctctttctctttcttttctttcctttctctctttctttctttctctttcttttctttcttttttctcctctttctttcaccctccctgtctttctttctt

SEQ ID NO: 5562 - DNA, 120 bp, synthetic construct
  source 1..120: mol_type = other DNA
accataggctgagaccacctagaggagcatggtgagctttgggggaatgggcgtctctggccatgctccactgcagccgttcctgtgtcagaccctctgggcttttcacaggctgaagtc

SEQ ID NO: 5563 - DNA, 120 bp, synthetic construct
  source 1..120: mol_type = other DNA
aatgtttctgcttctaaaattggcatattcatcaaaagatgaaactctcagagtttgcaaaagctcgtgaagcaaccattctcatttgctatatacagtgatctatctgggaatgtggaa

SEQ ID NO: 5564 - DNA, 120 bp, synthetic construct
  source 1..120: mol_type = other DNA
aattaaggggtcattccacatgcctgaggtagaacttgggacaaatatggaatttgacaaaagggaaaaacaaggagaaatgctatccaggggaataaagagatgaattgaaatagaatt

SEQ ID NO: 5565 - DNA, 120 bp, synthetic construct
  source 1..120: mol_type = other DNA
agatgggtggagcacctgaggtcaggagttcgagaccagcctggccaacacaaagaaaccccgtttctactaaaaatacaaaaaattagctgggcatggtggcgggcatccgtaatccca

SEQ ID NO: 5566 - DNA, 120 bp, synthetic construct
  source 1..120: mol_type = other DNA
cagccaacagaggaaggattttctaattgttgacagaatttagtgaaatcaccagagcctggaaaataggaaaatgagttcaaaggtcattaccatcattgaagataaggaaagactaag

SEQ ID NO: 5567 - DNA, 120 bp, synthetic construct
  source 1..120: mol_type = other DNA
ccaattcatgatgactcacttatttcgcactcctaaaaaaatgtaagataggaaagcaatcaatgtttgtttattgaatactcttactggagctgaattaaatttaatgaatagctcagc

SEQ ID NO: 5568 - DNA, 120 bp, synthetic construct
  source 1..120: mol_type = other DNA
tcatatattcaagttgattttcttcagtctgtaaaagtcatcagttatttagttatattacctaagtgcacctaagtttcttcagtctactttgcatgtttaaatgaaatgtcatcgagg

SEQ ID NO: 5569 - DNA, 120 bp, synthetic construct
  source 1..120: mol_type = other DNA
aaaatcactgttaaaggttagctgttaggtacagtgcctctggagccagaatctgccagggttttattactggattgtgtgatcctgggcaatgaatgaacattcttgtgctacattaaa

SEQ ID NO: 5570 - DNA, 120 bp, synthetic construct
  source 1..120: mol_type = other DNA
gaggcagggatgtaggtgagatgttcttgagagatccttcccactcatggtaatataatacactgtattagacgccactcaccttttttctaaatgtccaagagatattcacgcctttct

SEQ ID NO: 5571 - DNA, 120 bp, synthetic construct
  source 1..120: mol_type = other DNA
gaggtcaggagttcaagaccagcctggccaacatggtgaaacctagtgtctactaaaaatacaaaaaattagctgggcatggtggtgggtgcttgtaatctcagctactcgggaggcaga

SEQ ID NO: 5572 - DNA, 120 bp, synthetic construct
  source 1..120: mol_type = other DNA
catgtcccggcaaaggacatgaactcattcttttctatggctacatggtgtatatgtaccacattttctttatccagtctgtcactgatgggcatttgggttggttccaagtcttagctg

SEQ ID NO: 5573 - DNA, 120 bp, synthetic construct
  source 1..120: mol_type = other DNA
tgagaatgatggcttccagcttcatccgtatccctgcaaaggacgtgaactcattcttttttatggctacatagtattccatgctgtataattgtattaatagcacatccaggggtgcag

SEQ ID NO: 5574 - DNA, 120 bp, synthetic construct
  source 1..120: mol_type = other DNA
tatatatatatttttttatcattgggattaaattttggcctggtgttcactttctttatatatttatgaacaatttaataatgaggtgaaatagccttaagtctgatatatgatgcaccc

SEQ ID NO: 5575 - DNA, 120 bp, synthetic construct
  source 1..120: mol_type = other DNA
atccaacagcaacagaatactcattcttctcaagtgcaaatgggacattatccaggatcaaatattagggaacaaaataagtctccacagttttaagaagatcgaaatcatatcaagtat

SEQ ID NO: 5576 - DNA, 120 bp, synthetic construct
  source 1..120: mol_type = other DNA
gaaatagaaaaagcaatttaaaaattcatatggaatgacaaaaacccctaagtagctgaagcacttttgagcaaaaagagcaaagctggaggcatcacactacctgtttcaaaatatatt

SEQ ID NO: 5577 - DNA, 120 bp, synthetic construct
  source 1..120: mol_type = other DNA
aatccttatatactaatggtagtaatgtaaattaatacagccattattgaaatcagcatggaggttcctcaaaaaaagatagaattaccatatgatccagcaactatatttctgagtaca

SEQ ID NO: 5578 - DNA, 120 bp, synthetic construct
  source 1..120: mol_type = other DNA
agaaagttcaacttatattgaaaataaacactgaggcaacataaaatcataagaattcactacagatatttgcactaccatgttcattgtagcattattcacaatagctgagatatggaa

SEQ ID NO: 5579 - DNA, 120 bp, synthetic construct
  source 1..120: mol_type = other DNA
ccttgaatgctctaaagtattcccacattctgctaaaaagcagatcttttggacaaactcaggctctcttttctgtagcaatgacaatcacagttatttccagactctgttctccatagt

SEQ ID NO: 5580 - DNA, 120 bp, synthetic construct
  source 1..120: mol_type = other DNA
ccatgatttctcaaaaggtaatgatcatttcattatcaacaatatggaaaagtgtacagatatctttgtacctgtctggagcatctgcacagacttggcccaagttcaacgttcctagct

SEQ ID NO: 5581 - DNA, 120 bp, synthetic construct
  source 1..120: mol_type = other DNA
agaactcagtaacttgaaaagctattacttgtatccacagctggacaaatatctcaatgaagcatacaaaggaaactgtataaaaattctactgccataatggtgcacactatctggaat

SEQ ID NO: 5582 - DNA, 120 bp, synthetic construct
  source 1..120: mol_type = other DNA
ctgggcttcagaaagtgcttaggacatgtggagcccatcttatggttgtatctctctttttcattccagtcatgtgcatgtatctccagccaccatcagaaaattctcaagatcaaggca

SEQ ID NO: 5583 - DNA, 120 bp, synthetic construct
  source 1..120: mol_type = other DNA
aatataacatactttgtctgaacagaatgcactctctatcgggaaaaatggcaacataagataaaagatgaagtatctgtacatggcttaatttgtcactggggttaatgctaataaatt

SEQ ID NO: 5584 - DNA, 120 bp, synthetic construct
  source 1..120: mol_type = other DNA
ttcatccatgttataacaaatggcaggattttctttttattggctgaataatatttctcgctgtgtgtgtgtgtgtgtgtgtgtgtatgagatcacattttctttatccattcctccatc

SEQ ID NO: 5585 - DNA, 120 bp, synthetic construct
  source 1..120: mol_type = other DNA
agtcatagcctgaggcagcattaattttctctaaatgtacttggtttttcccacttttagaatttcaaataattgcaatcatgcagtgtgtaatctttgggtgtggcttgtttcatttag

SEQ ID NO: 5586 - DNA, 120 bp, synthetic construct
  source 1..120: mol_type = other DNA
gcatttgaggttttcattgtatagctattgtccatattttgttaaagtcacctctatgtatttcatgtttttagataccactataaattgtatagaaatatgactgatttttttccatcg

SEQ ID NO: 5587 - DNA, 120 bp, synthetic construct
  source 1..120: mol_type = other DNA
atttcctggattttgataactgattgaattctgctagtccccacaggttgtaggatcactggtcaaattcctctccaataagatagagaagtttagacatatgattatatgactatttaa

SEQ ID NO: 5588 - DNA, 120 bp, synthetic construct
  source 1..120: mol_type = other DNA
tcccaaattagactacctaacaagctatatctcaaatttggcctctagcatactgaagaattggggaagaggtttcaggtaactcaagataacccattcccttccctgcagatacagctc

SEQ ID NO: 5589 - DNA, 120 bp, synthetic construct
  source 1..120: mol_type = other DNA
ctttttattttttgtagagacatggtctcacttcattgcccaggctagtctcgaacttctgggctccagagatccacccaccttggcctcccaaagtgtcaggattacaggtgtgagcca

SEQ ID NO: 5590 - DNA, 120 bp, synthetic construct
  source 1..120: mol_type = other DNA
gtataagaaaaataactgactgtggaaggaatgaaatagagggcatgtggcaaagctggaagaggcaaagaattcagagaaaatggggtatttaaatggtgggttgctatgcctgacaca

SEQ ID NO: 5591 - DNA, 120 bp, synthetic construct
  source 1..120: mol_type = other DNA
aaataacctgaaaatgctgaaaagaaaactaaagttccttatttattaacaaagaaagattttgtgttttatggaaattatcttccttagctaggttaggaatttccttcaattaccatt

SEQ ID NO: 5592 - DNA, 120 bp, synthetic construct
  source 1..120: mol_type = other DNA
agagcatcatcacagcaggctcatgatgttggtttgtgcaaatacagttgatcttaagatcaataaaatcactggttatggtggtgtctgacaggtttttctactacaaactttactgtt

SEQ ID NO: 5593 - DNA, 120 bp, synthetic construct
  source 1..120: mol_type = other DNA
tgccacctgctggctgtggcttcttgggtaagtggttttaccaactcagcacttcattcctccttcaccttctgggtacctctgtgtggacaccgccaagtagatcactttttctgtgaa

SEQ ID NO: 5594 - DNA, 120 bp, synthetic construct
  source 1..120: mol_type = other DNA
tctctacaatatgtcttttaatttcttgctttttgggcagaatacttttgtcttctatctttagtttagttaaatacacagcaaaatacttcaaatccttttctccaacaatgcttattc

SEQ ID NO: 5595 - DNA, 120 bp, synthetic construct
  source 1..120: mol_type = other DNA
tagtgtgacttgcaattgcattgattctgctgactttatcttccttctgcatctctgactcttcctttatttctaactaggcatgaaaaatatgaggcatgtgcccttgtccttaacctt

SEQ ID NO: 5596 - DNA, 120 bp, synthetic construct
  source 1..120: mol_type = other DNA
tactacactttctttattcactcattcattgacagacacttagattgattcaataccttggctattatgaatttgctgtcataaagatgggtgtatagatagcttttcaacatagtgatt

SEQ ID NO: 5597 - DNA, 120 bp, synthetic construct
  source 1..120: mol_type = other DNA
ttttgatttgcatttctctgatggccagtgatgatgagcattttatatatttaatttaacttaattttttgagatggagtcttgctctgtttcccaagctggagtgcagtggtgggatct

SEQ ID NO: 5598 - DNA, 120 bp, synthetic construct
  source 1..120: mol_type = other DNA
gtattatcacagataggacaacaggaatgagttttctcactttatcaaactgaagggaagaaaataggtggcttgtataacttctggcaacttgtatgtgaaaaaatcagggtaaggaca

SEQ ID NO: 5599 - DNA, 120 bp, synthetic construct
  source 1..120: mol_type = other DNA
taagggggatttattgcttataaaaccaaaaagttcagcagtagtgtgggcttcaggtatagcttgatcagtgctctggatcaatatctctgcagtttcctcagctatgtcctcttccat

SEQ ID NO: 5600 - DNA, 120 bp, synthetic construct
  source 1..120: mol_type = other DNA
atcatagtctctattgtctgcatgagaaaactgaccacaacagagctagtaagtgatgaagcttggattcaaatgtgggctttctaacttcatagtttgttcttaatcactaggcaattg

SEQ ID NO: 5601 - DNA, 120 bp, synthetic construct
  source 1..120: mol_type = other DNA
agctggagtagttgagaaaacagattctctctgaaagcctacagaagaaatgcagccctgtagacccaatttagtattcctatctccagatacatgatatttttgttattttaaacacca

SEQ ID NO: 5602 - DNA, 120 bp, synthetic construct
  source 1..120: mol_type = other DNA
tttgtattgtgcttgagagtgaggcaatggtgaagaacagtgactggctatgggtttggggagtcatttggcaggagtgtaaatccttgaaatttgaaaatctttcaaattatcttgatt

SEQ ID NO: 5603 - DNA, 120 bp, synthetic construct
  source 1..120: mol_type = other DNA
taaagaaaaccccataatcttggtccaaaagctccttgatctgataaacaactttagataagtttcaggatataaaataaatgtacaaaaatttagcattcccatacatcaacaacatct

SEQ ID NO: 5604 - DNA, 120 bp, synthetic construct
  source 1..120: mol_type = other DNA
agtggaaacagacagtctacaaaatgagagaaaatatctgcatacaatgcatttgacaaaggtctaatatctggcatctagaaagaacttaaacaaatttataagaaagaaacaatgccg

SEQ ID NO: 5605 - DNA, 120 bp, synthetic construct
  source 1..120: mol_type = other DNA
cctaaaccccaaattaccttcaaccttcatgagtttttacatttgaaagttaaatcgataacttaatgacaataattcaactctctcatgcttatccccctcatctaacccaaaacaaaa

SEQ ID NO: 5606 - DNA, 120 bp, synthetic construct
  source 1..120: mol_type = other DNA
aaaactttgcctcttgaaaaaaaaaaaaaagtgtatgaaaagctaaattatttttcatggagtcctgccctgagaacaaggcatcaaatcctctaagtgtataggaaatttgagttcaaa

SEQ ID NO: 5607 - DNA, 120 bp, synthetic construct
  source 1..120: mol_type = other DNA
ttatatgtgatctttggaaaaaaaaagaacatcttaaagttcagaatggggccaggtgcagtggctcatgtttgtaatcccagcactttgggaggccgagacaggtggatcacaaggtca

SEQ ID NO: 5608 - DNA, 120 bp, synthetic construct
  source 1..120: mol_type = other DNA
tctcctacctcagcatcctgagtagctgggattacaggcatgcaccaccacttctggctaacttttgtatttttagtagagacagggtttcaccatgttgccaaggctggtctcgaattc

SEQ ID NO: 5609 - DNA, 120 bp, synthetic construct
  source 1..120: mol_type = other DNA
tatgtccatgtaaaaatttgcatgcaagtatttatatcagtgttattcataattactcaaaactgtaagcaacccatgcccttcaataggggaaaaataatcttgggtatttccatacaa

SEQ ID NO: 5610 - DNA, 120 bp, synthetic construct
  source 1..120: mol_type = other DNA
acaaatatagaagcaatgacagatatgtgtgtattcagggcttactgtgtgaacacacattacctagccctttctgctgaaataatctagaaacaaagttaccctcacagcagtgtgcgc

SEQ ID NO: 5611 - DNA, 120 bp, synthetic construct
  source 1..120: mol_type = other DNA
tctgggtgcagttgcaggtgcgcaagctgtggctgtggatctgggcatctccacacttttggggacccgggaaagaacccttgcccccgtgcagactcggaggtgcctgctcctgctgcc

SEQ ID NO: 5612 - DNA, 120 bp, synthetic construct
  source 1..120: mol_type = other DNA
accacattgcaggcgacaaaaaggagtgaagagctgctgcccttcggggagcccagacctaagagctccctgagtcagggctgtgacagcctctttggctctgtggttcctggtgtctct

SEQ ID NO: 5613 - DNA, 120 bp, synthetic construct; identical to SEQ ID NO: 4549
  source 1..120: mol_type = other DNA

SEQ ID NO: 5614 - DNA, 120 bp, synthetic construct
  source 1..120: mol_type = other DNA
tacattgtatatctatatcaaaacatcatatctcataagcatgtacaattatatgtgaactaaaaggaaaatggaactaaataaagtaaaataaaatggtcctgcaacattttagccaga

SEQ ID NO: 5615 - DNA, 120 bp, synthetic construct
  source 1..120: mol_type = other DNA
aaaatagcttctatggattcaagaaagaaatgattagaggatttgctgcacttaagaatttgagatctgagataatgaatcccctgagatagaagaagatgatgtccccatggtgcagtt

SEQ ID NO: 5616 - DNA, 120 bp, synthetic construct
  source 1..120: mol_type = other DNA
ggccactgctcccggccaactgatgtctatttcttcttgtagataattagtaacatcttccgcggaatttgacttcagtttttctagagtccttttaacttctgtttcaaaaactacttt

SEQ ID NO: 5617 - DNA, 120 bp, synthetic construct
  source 1..120: mol_type = other DNA
tgtattactatatactcctattaaatattacaatttttatttgccttttgaaaatatttttaattcttctttgagtactttaattagtcttcttttttcattccaaaggcacattctttt

SEQ ID NO: 5618 - DNA, 120 bp, synthetic construct
  source 1..120: mol_type = other DNA
atttttgcatataattcttaggaaatcctgatttttcactgtgtctagatttcactcatgcctctgaaatgaatgttttttacaggacttgaaggtagtatatacattagccaaggacgg

SEQ ID NO: 5619 - DNA, 120 bp, synthetic construct
  source 1..120: mol_type = other DNA
acggaaatgcttccaggttgtgtttcattattaatatcacttccttgttatctcactgattcgaagactcattattatagtatgtaaaaggaaagtatcagaaactttttcatacttttt

SEQ ID NO: 5620 - DNA, 120 bp, synthetic construct
  source 1..120: mol_type = other DNA
acccttttcaccacaggcaatctttatcagaacaggaatctcacacaccaagtggtccagtttattgagaccacacagtggcaattgtaatgtggcagtggcctctgagacagcatagat

SEQ ID NO: 5621 - DNA, 120 bp, synthetic construct
  source 1..120: mol_type = other DNA
aatggtaggagaaaaaggaggagaaaacctggagtcataagaatcatcaagatagcattgtccagctccaactagttagttaaataatcatatcatctccaagggaggcaagaagacttt

SEQ ID NO: 5622 - DNA, 120 bp, synthetic construct
  source 1..120: mol_type = other DNA
gtgaatgttgccctttgattatatgctatctcacgccggaagtgtgcaaaacaataataacactctttccaactagtccttagtgaaccctctgtgtcaaacacccccatatgctttcta

SEQ ID NO: 5623 - DNA, 120 bp, synthetic construct
  source 1..120: mol_type = other DNA
atttactaaaaaacacttttctctgtttaataataaattcattttagctaactgtaacatttttacttcataaacttcttaatttctttaactttttgattattgaataacacttaaacc

SEQ ID NO: 5624 - DNA, 120 bp, synthetic construct
  source 1..120: mol_type = other DNA
tccgcaattttattaaatttatattatttgggattttgttattaactttattaagtatattttgtctgtgagtggtggtcacccagagctcctccatttctctggacatttccctgaaga

SEQ ID NO: 5625 - DNA, 120 bp, synthetic construct
  source 1..120: mol_type = other DNA
tcctctattctaatgtcacaatttccaaagttatcagaaacctgcatttaagaacatccgttagagttgtatagctgactataaaccaccttttgaagaggattaaaacaagacaattgt

SEQ ID NO: 5626 - DNA, 120 bp, synthetic construct
  source 1..120: mol_type = other DNA
ccctatatggtagagtacatttgtttacaaatgccatggtaacatcaggaagctaccctgtatgttctagaaaggggaggcatgaataatccaccccttgtttaacatatcatcaagaaa

SEQ ID NO: 5627 - DNA, 120 bp, synthetic construct
  source 1..120: mol_type = other DNA
ttaggttttcaattgttacagggttccaaagagaagaaaacatgggttaggaagacaatagtagaaaatatcagaatgctttgtggatgtgttatttgtaagctcttcctgagacctctt

SEQ ID NO: 5628 - DNA, 120 bp, synthetic construct
  source 1..120: mol_type = other DNA
tcaagagaattccatgatatttgacttctggttgtgttcagccaatgagtcaccagctgaggattagagtgaggcagcagctagtttgaagtattttcccctaccctctccttcagatgg

SEQ ID NO: 5629 - DNA, 120 bp, synthetic construct
  source 1..120: mol_type = other DNA
aattatttgctattttcccttgtgatttcctctgagccattcattatttaggaatgtgttgtttcatcgccacttacttgtgtatttcacaatattttgcctgatattgatttctaattt

SEQ ID NO: 5630 - DNA, 120 bp, synthetic construct
  source 1..120: mol_type = other DNA
tgtgtgttttacattctatgggttttgacaaatgtttaataacatgtattcccccattcagtatcataaagaatggtttcactgccttaaaaattccctgttctccttccattcatcatt

SEQ ID NO: 5631 - DNA, 120 bp, synthetic construct
  source 1..120: mol_type = other DNA
gaccctatttttaaagtagctgatgtaagcctttgtccaacaagttcaacacctagatttgctgctattgattgcatttccccctccttttatgacccatacttcctgtgtctttcttca

SEQ ID NO: 5632 - DNA, 120 bp, synthetic construct
  source 1..120: mol_type = other DNA
aactgtcggctcatgttctttgctcactttttaatggggttgtttttctttcttataaatttggaaaactaaatattttaaatactagaaatggcaactgtggaaaccagattctccctg

SEQ ID NO: 5633 - DNA, 120 bp, synthetic construct
  source 1..120: mol_type = other DNA
tattttggtatttcaggagatttgattttttttgttctgatgcttatatttacacattagtccctcttttaggcatcattgattggttttctaaaatgagcactatatttatttatttat

SEQ ID NO: 5634 - DNA, 120 bp, synthetic construct
  source 1..120: mol_type = other DNA
tacctgtgcaggtttgttatataggtaaattgtgtgtcacatgggtttggtgtacagattattttgtcacccatgtaataagtgtggtaaccaatgggttggttttgatcctcacctccc

SEQ ID NO: 5635 - DNA, 120 bp, synthetic construct
  source 1..120: mol_type = other DNA
ttcttttgctatgcagaagctctttagtttaattatattctatttgtcaatttttggttttgttgtgattgcttttggagtcctcgtcttgaagtcttcgtgaaagtcgatgtccagaat

SEQ ID NO: 5636 - DNA, 120 bp, synthetic construct
  source 1..120: mol_type = other DNA
ctttagcagttctcgtaggacaggtttggtagtgatagaatgagcattattgaaatagttaataacctcttctttcctccatttctccagcatctatttcaaaatgacaattgatacaat

SEQ ID NO: 5637 - DNA, 120 bp, synthetic construct
  source 1..120: mol_type = other DNA
agtttattttgcatatgctatcatcagcaaaggtgattatatactctagattgcagtcatttttagggctggcctatattcagtctatggttattcataggttgcagccattcacccatt

SEQ ID NO: 5638 - DNA, 120 bp, synthetic construct
  source 1..120: mol_type = other DNA
tattgttcaattcccacctatgagtgagaacatgtggtctttggttttctatcctcgtgatagtttgctgggaatgatggtttccagcttcattcatgtccctgcaaaggacatcaactc

SEQ ID NO: 5639 - DNA, 120 bp, synthetic construct
  source 1..120: mol_type = other DNA
gtgtaaggaatggatccagttgcagctttctacatggtggctagccagttttcccagaaaatattataaacaactctatggaaataaactagaaaatctagaagaaattgataaattcct

SEQ ID NO: 5640 - DNA, 120 bp, synthetic construct
  source 1..120: mol_type = other DNA
cttcttttttaatatcggcatttattactataaactttcctcctgctaagaacttcttttgttacatcccataagttgtggtacgttgcattttcattttcatctgtcttaagatatttt

SEQ ID NO: 5641 - DNA, 120 bp, synthetic construct
  source 1..120: mol_type = other DNA
ccaataatatcccccgttgatagtacaaattacaaatacatttttaaaataaagacatgatttcgacatttaaaccaaagtaactatggctaacctaaatacattcattcatcaagtaca

SEQ ID NO: 5642 - DNA, 120 bp, synthetic construct
  source 1..120: mol_type = other DNA
taaggagcttccgcacagcaaaagaaactataaatagaataaacagacaacttacggaaggtgagaaaagattcacaaactatgcatacaacaaaggtctaatatccagaatctataagg

SEQ ID NO: 5643 - DNA, 120 bp, synthetic construct
  source 1..120: mol_type = other DNA
cggaggccgttagggtgtggagggcgcgggaaggtgggtcgcctgccactggggcgcgggcagatcggaccgctctgtcccaactggtcgagaccgacctagtcctgacgacaggaacaa

SEQ ID NO: 5644 - DNA, 120 bp, synthetic construct
  source 1..120: mol_type = other DNA
attacacaccttgtgaagcctacttctgtcattcatcaatctccttctccagttttgtgcccttgctggagaggagttgagatcattttgagtagaagaggcattctggtttttggaatt

SEQ ID NO: 5645 - DNA, 120 bp, synthetic construct
  source 1..120: mol_type = other DNA
ctaggttctgtgggagtgggacctgctgagcgagaccacttggctccctggcttcagcctcctttccaggggagtaaatggttctgtctcgctggggttccaggcatcactagggtagga

SEQ ID NO: 5646 - DNA, 120 bp, synthetic construct
  source 1..120: mol_type = other DNA
ttatatctgaaagtgtcttctaaataggaacattctggtctaaaatctttcattccttctaactcctctctaccaccaacctagtggatataggcatatgtgtcatttagaactgatgtt

SEQ ID NO: 5647 - DNA, 120 bp, synthetic construct
  source 1..120: mol_type = other DNA
acacacataacaacagttataatctgaggtatcttctaaacatgaccattttggccttgaagtagtccttcctttcttctctctgcctttatttcagtagacaagtataggcatgtgtca

SEQ ID NO: 5648 - DNA, 120 bp, synthetic construct
  source 1..120: mol_type = other DNA
tagataagtaaaagaaaatgcacaaacataagatataatggttaatcttgcctcactgtaagcacactggtggcacagagctctctgcacagcctcctcctcctcctctcctgaactggc

SEQ ID NO: 5649 - DNA, 120 bp, synthetic construct
  source 1..120: mol_type = other DNA
ctaggtcggtctcgaccagttgggacagagcggtccgatctgcccgcgccccggtggcaggcgacccaccttcccgcgccctccacaccctaacggcctccgctgcgagttggggcggtc

SEQ ID NO: 5650 - DNA, 120 bp, synthetic construct
  source 1..120: mol_type = other DNA
ttatccaggatcaaatattaggtaacaaaataagactcaacaattttaagaagattgaaatcatatcaagtatcttttctgaccacaaaattatgaaagtagaaatgaatagaaataaat

SEQ ID NO: 5651 - DNA, 120 bp, synthetic construct
  source 1..120: mol_type = other DNA
aagtagctaaagcacttttgagcaaaaagaccagagctggaggcatcacactacctgattaaagatatattacaaagttatagtattcaaaacagaaaggtactggcataacaacagaca

SEQ ID NO: 5652 - DNA, 120 bp, synthetic construct
  source 1..120: mol_type = other DNA
gattgaaatttgtattttaaaaatatgttggagaccagcctgaccaatatggtgaaaccccatctctactaaaaatacaaaaaaattagccggctgtggtttgcacctgtagtcccagct

SEQ ID NO: 5653 - DNA, 120 bp, synthetic construct
  source 1..120: mol_type = other DNA
agaggccaaatatctggattgaccacctgaagaaactgggagaggagaactcaaaattgtgataagggtgactaagtcctgcttctggcatgaggaagttcaattatatattgaaaatga

SEQ ID NO: 5654 - DNA, 120 bp, synthetic construct
  source 1..120: mol_type = other DNA
atcatgctgaagatatttctgtgaagagttttgtactgagaacatcataccaggacaactccttgaagggcattaattgcagctttgggatttatactcccaaaggctgcagtcaatgaa

SEQ ID NO: 5655 - DNA, 120 bp, synthetic construct
  source 1..120: mol_type = other DNA
actgtaataaggaactcaggcagctgcattcggaaagaaaattaggtcggcatcagcaaaagtatccacagcatttgagttcaagtatcttatggcatattacctttcatcttagggaga

SEQ ID NO: 5656 - DNA, 120 bp, synthetic construct
  source 1..120: mol_type = other DNA
taactacaaggtgaattttctggattttatacaatgttcacgtatctttctactaatattagttaatgtctgttcagaagctccattaaaaattgtggaaaacccagaaaatacaaatta

SEQ ID NO: 5657 - DNA, 120 bp, synthetic construct
  source 1..120: mol_type = other DNA
acttggattttctaattggcctcagctggaagtagttctctttgtggttatcttgatcttctacctgatgacactgacaggaaacctgttcatcatcatcctgtcatacgtggactccca

SEQ ID NO: 5658 - DNA, 120 bp, synthetic construct
  source 1..120: mol_type = other DNA
attgtttttcctagggtcttagccatcttgaaaggtggtttccctgcttctttgtgatttatttttgttctaacagctcacaaaacagaatagttcagtctcacatttgttgctcttttt

SEQ ID NO: 5659 - DNA, 120 bp, synthetic construct
  source 1..120: mol_type = other DNA
atgaggtcaggagaccaagaccatcctggctaacaaggtgaaaccccatctctactaaaaatacaaaacaattagctaggcatggtggcacatgcctgtagtcccattgaagctaaactt

SEQ ID NO: 5660 - DNA, 120 bp, synthetic construct
  source 1..120: mol_type = other DNA
cctcttattttggtttgttacaatttgtgatgttaaaagtctaaaaatgtgtgcgtggttaatactatctattgttcattaacattgtggtttcttccttttcttaatgctataatgttc

SEQ ID NO: 5661 - DNA, 120 bp, synthetic construct
  source 1..120: mol_type = other DNA
ttacagtcccaccaacagtgtaaaagtgttcctatttctccacatcctgtccagcacctgttgtttcctgactttttaatgattgccattctaactggtgtgaggtggtatctcattgtg

SEQ ID NO: 5662 - DNA, 120 bp, synthetic construct
  source 1..120: mol_type = other DNA
atcgcaccgaatctataaattaccttgggcagtatggccattttcgcgatattgattcttcctatccatgagcatggaatgttcttccatttgtttgtatcctcttttatttcattgagc

SEQ ID NO: 5663 - DNA, 120 bp, synthetic construct
  source 1..120: mol_type = other DNA
ggtctattcagagattcaacttcttcctggtttagtcttgggagggtgtatgtgtcgaggaatttatccatttcttctagattttctagtttatttgcacagaggtgtttatagtattct

SEQ ID NO: 5664 - DNA, 120 bp, synthetic construct
  source 1..120: mol_type = other DNA
tgtgtctctgcatgtgagatgggtttcctgaatacagcacactgatgggtcttgaccctttatccaatttgccagtctgtgtcttttaattggagcatttagcccattcaagacatttac

SEQ ID NO: 5665 - DNA, 120 bp, synthetic construct
  source 1..120: mol_type = other DNA
agttggattttctaattggccttatctggaagtagttctctttgtggttattttgatcttctgcttgatgacactgataggaaacctgttcatcatcatcctgacatacctggactccca

SEQ ID NO: 5666 - DNA, 120 bp, synthetic construct
  source 1..120: mol_type = other DNA
accattcttttattcactcactctgttagcacttgctgagcatgtactctaacaaagtcgtggagatcctggtaacaggtaggaataaaacacattcagcttaaataccattcacttttg

SEQ ID NO: 5667 - DNA, 120 bp, synthetic construct
  source 1..120: mol_type = other DNA
accatcttcatctgaaataattgcgttatacctagagcaatttaaactgacagtcatagtcaaatgatgtggaaaaatgactaaaggagaattcagtataatgtaacgtacttgcaatgc

SEQ ID NO: 5668 - DNA, 120 bp, synthetic construct
  source 1..120: mol_type = other DNA
atttttctgtgcctggctcattttacttagcaaagtgtcctcaggtttgccatgtgtttgaaaatattaggacttccttcttattttaaggcagaatagtattctattgtatataaacta

SEQ ID NO: 5669 - DNA, 120 bp, synthetic construct
  source 1..120: mol_type = other DNA
cctatcaacctgtcatctaggttttaagccccatatgcattagatatttgtcctaatgctctccctctccttccccctgaacccgtgacaggccccagtgtgtgatgttgccctccctgt

SEQ ID NO: 5670 - DNA, 120 bp, synthetic construct
  source 1..120: mol_type = other DNA
tggtagagatgggatttcaccatgttggccaggctggtctcaaactcctgacctcaggtgatctgccgacctcggcctcccaaagtgttggaattacaggcataagccactgcgcctggc

SEQ ID NO: 5671 - DNA, 120 bp, synthetic construct
  source 1..120: mol_type = other DNA
ctgcagataactagacagagcccatccctttgtttcggcccatccctttgtttcccttaaggaatacttttagttaatctataatctatagaaataatgcttatcactggcttcgtgtca

SEQ ID NO: 5672 - DNA, 120 bp, synthetic construct
  source 1..120: mol_type = other DNA
atataagtgtcatgtggggaagtatgttgagattaggtagcattctgttttttaactagctttcatccactagttttattagtaagcatcccttaatattccttcccagaaacaattatt

SEQ ID NO: 5673 - DNA, 120 bp, synthetic construct
  source 1..120: mol_type = other DNA
tttctcccattctgtaggctgcttgtccagaaggtttcttttgctgtgcagaagctctttagtttaattagatcccatttgtcaattttgtcttttcttgccattgcttttggtgtttta

SEQ ID NO: 5674 - DNA, 120 bp, synthetic construct
  source 1..120: mol_type = other DNA
ttaaagtcaggtagcatgatgcctccaactttctccttcttgcttaggattgtcttggttatacgggctctgttttggttccatgtgatatttaaagtagtttttttctaattctgtgaa

SEQ ID NO: 5675 - DNA, 120 bp, synthetic construct
  source 1..120: mol_type = other DNA
ttctctaaactgattaatttagttaggaagtcttctatcttttcttcaaggttcttagcttccttgcattgggttaaaacatgctcctttagcttggaggagtttgttattacccacctt

SEQ ID NO: 5676 - DNA, 120 bp, synthetic construct
  source 1..120: mol_type = other DNA
aggaacagataactttgtttatcttaggtcaaatgacaaaaactttgaataaagcaatggggtttcctaatgaacaattcactagaaatgcatggagtagataacaccaagagatggtaa

SEQ ID NO: 5677 - DNA, 120 bp, synthetic construct
  source 1..120: mol_type = other DNA
tagtcttggtccaaaagctccttgatctgataaacaacttcagaaaagtttcaggatacaaaagcaatgtacaaaaatttagcattcccatacatcaacaacattcaatctgagggctaa

SEQ ID NO: 5678 - DNA, 120 bp, synthetic construct
  source 1..120: mol_type = other DNA
gaaacagacaacctacaaaatgagagaaaatatctgcatacaatgcatttgacaaaggtctaatatctggcatctagaaagaacttaaacaaatttataagaaagaaacaatgccgttta

SEQ ID NO: 5679 - DNA, 120 bp, synthetic construct
  source 1..120: mol_type = other DNA
aaccccaaattaccttaaacctttatgagtttttacatttgaaagttaaatcgataacttaatgacaataattcaactctctcatgcttatccccctcatctaacccaaaacaaaacaag

SEQ ID NO: 5680 - DNA, 120 bp, synthetic construct
  source 1..120: mol_type = other DNA
ctttgtctcttaaaaaaaaaacgagtatgaagagtataaattatttttcatggagtcctgcccttagaacaaggcattaaatcctctaagtgtataggaaatttgagttcaaaatagatg

SEQ ID NO: 5681 - DNA, 120 bp, synthetic construct
  source 1..120: mol_type = other DNA
gaatgaattacattcatggctaggtttagaatatgggttccgttactggaagatgtgttgaagtcttttaaatagtgagaagctaatgccaaaatagccttaaaactatgtcagaagagg

SEQ ID NO: 5682 - DNA, 120 bp, synthetic construct
  source 1..120: mol_type = other DNA
attacaggtgtgagccaccgtgcctggcctcttacaagactcttcatggagagagaaataaaatagaaattaggttgtatgaataacattgaatcttgaagcctttaaaaatcacactga

SEQ ID NO: 5683 - DNA, 120 bp, synthetic construct
  source 1..120: mol_type = other DNA
aaaaaaatgaaaaaactgacctgttcttatcaaagacatgatttcccacatttaaaaaaccttgtaatagttgatttacagttaagttgactgatggaaatctcactgatttaagaaaat

SEQ ID NO: 5684 - DNA, 120 bp, synthetic construct
  source 1..120: mol_type = other DNA
taaacaagcaaaaatatcaccaagatgtgggaagatcctagaatggtatgacagtggcaaatcaacctcactttatataaatatgtaagctaacaacactgaaaagggtagagaagaagt

SEQ ID NO: 5685 - DNA, 120 bp, synthetic construct
  source 1..120: mol_type = other DNA
aaatacataaatgagaagaagggagaaatcttccttactagtctattaatagtccccactttcagatgtggagctcatgatctcctttgttaagtgtaggctggactcagtgactgtctt

SEQ ID NO: 5686 - DNA, 120 bp, synthetic construct
  source 1..120: mol_type = other DNA
tggcgctggcctgcaggtgcctcttggcaggaacagcctgggcaccgtcaacagtggcaggaggcccacaggctcctgggcagaaagggacgggtccccggtgaggccccaccttcaact

SEQ ID NO: 5687 - DNA, 120 bp, synthetic construct
  source 1..120: mol_type = other DNA
tgagatgatcatatggcttttccttttaattctgtttatgtggtgaatcacatttgtagatttgcagatgttcaaccaatcttgcatgccagaaatagagccttcttgattgtggtgtat

SEQ ID NO: 5688 - DNA, 120 bp, synthetic construct
  source 1..120: mol_type = other DNA
ccaatttatgttgattaactcaataatttggtctctctcggtgaaagcagtgcttcctggctgcaactaattggacatcttgtcccttcccatctgtgtaacacattttttatacatgct

SEQ ID NO: 5689 - DNA, 120 bp, synthetic construct
  source 1..120: mol_type = other DNA
tgtgggagtgtaaattaattcaaccattgtggaatgccacagtaaacatacatgtacatgcatgtttatagtagaatgatttataatcctttgggtataaacccagtaatgggattgctg

SEQ ID NO: 5690 - DNA, 120 bp, synthetic construct
  source 1..120: mol_type = other DNA
agtaccatgctgtttttaaaacctgttttataaaaaagggaattattgtgagacttcaatgagccagtgcatacacatctagattttggacagtgcctgaaacataggaaggatctaatg

SEQ ID NO: 5691 - DNA, 120 bp, synthetic construct
  source 1..120: mol_type = other DNA
catggtaacataattctctgtggtagacaccactcgcctttattctaagtgtcctagagatatccatgcctttctttgtgttgtgtttcaaggaagtctggtgcaaagactgatacatgc

SEQ ID NO: 5692 - DNA, 120 bp, synthetic construct
  source 1..120: mol_type = other DNA
cccttagtgataactctccattcccctcccccatcccctagtaactttcaacctaccttatgtctgtatgaatttgcatgttccagatatttcatattattggaaacatacaatttttgc

SEQ ID NO: 5693 - DNA, 120 bp, synthetic construct
  source 1..120: mol_type = other DNA
tgtaatggcacgatctcggctcactgcaacctccgcctcctgggttaaagcaattctcctgcctcagcctcctgagtagctgggattacaggcacccaccaccatgcctggctaattttg

SEQ ID NO: 5694 - DNA, 120 bp, synthetic construct
  source 1..120: mol_type = other DNA
tcgaattgcttttaaaaggaatagaattgtttggacttgaattataatagaaaagtaattttagacaacttataaaagcataaatctcacaaacatcattgaagagatatacatatgtgt

SEQ ID NO: 5695 - DNA, 120 bp, synthetic construct
  source 1..120: mol_type = other DNA
ctatcgagtactgttctaattcatccactaggtgctgtatttgaatggccttcagggtaagaatgggctctatagcaagtctaaatttcaccataaatgaggtggaatttatggcaagtt

SEQ ID NO: 5696 - DNA, 120 bp, synthetic construct
  source 1..120: mol_type = other DNA
atagccactggtcaaacatccagtcttccatcaataagtgtcccatgcaatgactggataaaatagtttcccatcaaaagatcaaccagttatttaatgtcaagttgatgacactggact

SEQ ID NO: 5697 - DNA, 120 bp, synthetic construct
  source 1..120: mol_type = other DNA
gaccagccgcagtggtagtcctcttctaagtttcctccagatacagaggcccactatagccctgtaagagcttttcccagatcttttttaatcaattaattaattaatttttttatactt

SEQ ID NO: 5698 - DNA, 120 bp, synthetic construct
  source 1..120: mol_type = other DNA
gagctgctggaccatttattcctagttaaaattcttcattgttggaggatttcccctagggtcattaagcattttgtacttctaggcagcacttgtctatatgccaaatgggctcccatg

SEQ ID NO: 5699 - DNA, 120 bp, synthetic construct
  source 1..120: mol_type = other DNA
gagaatatatagattttctagaatgcacagcatagtaaagacaaacatgagtaaaattatggtgaaatttaagccatgagggtcagtgcatcttaatgccctgtgacattgtacttgagg

SEQ ID NO: 5700 - DNA, 120 bp, synthetic construct
  source 1..120: mol_type = other DNA
agaatgagagagaaaaaagagaagataaagggagaagatccagggagagaagaggggaaggaaaagagagaaacatgggagacagagagtgaaataaatcaagatacaaggtcacagaga

SEQ ID NO: 5701 - DNA, 120 bp, synthetic construct
  source 1..120: mol_type = other DNA
ccacggaatgtgtccttcttgttgtcatggctgtggattgttatgtagcagtgtgtcatccactgcaaaataccatgatcatgcacccaaaactttgtctgcagctggctatcttggcat

SEQ ID NO: 5702 - DNA, 120 bp, synthetic construct
  source 1..120: mol_type = other DNA
actaagtagtacgtttcatgcctttctatttcgttctttttttgttctattttcctacaagctccaccagtgctttcagtcccaacaagatttctaaagttttgagacagaaacttcttg

SEQ ID NO: 5703 - DNA, 120 bp, synthetic construct
  source 1..120: mol_type = other DNA
ccaagacaatggggaaaatgtctccagggcatgtcagaggtcttcacagcagcccctcccatcacaggcccagaggcctaggagggagaaacagtttcctgggccaagcccagagccccc

SEQ ID NO: 5704 - DNA, 120 bp, synthetic construct
  source 1..120: mol_type = other DNA
aggctttgagggacttgttggaagggcataattgtgttttgaaatgtgaggacatgagacttgggaggggccaggcacagaatgatagggtttggccttgtctccacctaaatctaatct

SEQ ID NO: 5705 - DNA, 120 bp, synthetic construct
  source 1..120: mol_type = other DNA
cgcccagcctctaatttctttttttaaaatttaatttaatattaagttccgggatgcatttgcaggacgtgcaggtttgttacataggtaaatgtatgtcatggtggtttgctgcaccta

SEQ ID NO: 5706 - DNA, 120 bp, synthetic construct
  source 1..120: mol_type = other DNA
atagcaggattctacttaggggtagacagagcagtgaactttctgtggatcagagacctgggttttgattctatgcttgtactgtcagagtatgcatattccatgtagattgtagcctgt

SEQ ID NO: 5707 - DNA, 120 bp, synthetic construct
  source 1..120: mol_type = other DNA
tcaggatccacctctatgacaaggaggagctcagataatccataatattccaattcttaccactattaaaacagttctatttagcatccaatactaggttcataattctgaacatcagaa

SEQ ID NO: 5708 - DNA, 120 bp, synthetic construct
  source 1..120: mol_type = other DNA
agtaccccaccaaatgaaagaaccagtaggaccatcaggttactggagtaaaatgaatcagggtaggcctggggaattcagattggaagtaacaggtaaccccatttggacaataccatc

SEQ ID NO: 5709 - DNA, 120 bp, synthetic construct
  source 1..120: mol_type = other DNA
aaaaaatacttttctgatgattattgacatgaaaggggcatgaaagcaggtataagcccccaactgagattttaaaatagaaagctgttgccttagccaaaacaaggtaacgaggatgtg

SEQ ID NO: 5710 - DNA, 120 bp, synthetic construct
  source 1..120: mol_type = other DNA
acaatttatcaagaactccaaatttaaaggcaattagttaattaaaaacttgaaagatctaactctttgagtttaaactggactcattagaaaacaaatggaagaaaaaggtatctaaat

SEQ ID NO: 5711 - DNA, 120 bp, synthetic construct
  source 1..120: mol_type = other DNA
agtgctgggattacagatatgagccaccgcaactggccctgaacctacttttaacatccaggaaaaatagccatatcattgttgtcctaaagtaattaaaaattctctctattctagttt

SEQ ID NO: 5712 - DNA, 120 bp, synthetic construct
  source 1..120: mol_type = other DNA
ctttgtttctgagttcaccctcactctcctgctgtgtaattttgcatactctataggtcattaccatagaatacaagcatgctgccattacatccatcttacagaaaaaaactctttctg

SEQ ID NO: 5713 - DNA, 120 bp, synthetic construct
  source 1..120: mol_type = other DNA
cctggctggtggcttttcagtgtagagttccatggttctaaattcttgacttcaggaactctccaaattatataaaatggcaaactcagaaccagttatttatacttgaaatacattttt

SEQ ID NO: 5714 - DNA, 120 bp, synthetic construct
  source 1..120: mol_type = other DNA
tttaaaaccatacataatgaaacaaaaggacactaaaaacattttatcaaatatgtttgtatatgttcctgtgcttttgtgtttctatgtgcacacctatgctttgtgcactagaatgac

SEQ ID NO: 5715 - DNA, 120 bp, synthetic construct
  source 1..120: mol_type = other DNA
agaagtctggaaagagattggagaggatagaaagctctgaggccaagtgaaatacagtaatgcagatggagaagattacatctcttcctttacagactggcaaagttcttgagtgaaaaa

SEQ ID NO: 5716 - DNA, 120 bp, synthetic construct
  source 1..120: mol_type = other DNA
atgaagtctcccttgacactgctgttggtcatgcccatcaccctgttcagaactaggagaaacacattacaagaattcagggaggataatgtgttggccattgggcaaaatatcaatctt

SEQ ID NO: 5717 - DNA, 120 bp, synthetic construct
  source 1..120: mol_type = other DNA
ctggtcttgtgtgttgaatgaagaggtagttgaatctgaatggaaagagtggtgatcagggtaagaagggctctttagtgagactaagaggcatcaaaccaacatagaatgtttatcttc

SEQ ID NO: 5718 - DNA, 120 bp, synthetic construct
  source 1..120: mol_type = other DNA
tcatgaaccagctccttatttgtaggaatatgtttgttttaggcttgtagaagaattttattttaccatgatgcaaaatttaacatgggcactatataatctcccctcacccagatgaac

SEQ ID NO: 5719 - DNA, 120 bp, synthetic construct
  source 1..120: mol_type = other DNA
tctgtccagaggtcattctgtgtgtatcctgtttgtctcttgcatcaccatagcaaatgttcaacaaattcttaaatcctccaatccagtgtcccacagctctccaagcaggttatcttg

SEQ ID NO: 5720 - DNA, 120 bp, synthetic construct
  source 1..120: mol_type = other DNA
tacagcattatttcttttgtttctgcttatatttattcaatgttatctttgggagattcatttatgtggttgcgtataccaatacagcactatatttttactgcattgtatttcattgta

SEQ ID NO: 5721 - DNA, 120 bp, synthetic construct
  source 1..120: mol_type = other DNA
taaacaggatccgaaaaccctttcagcaagcattatgaatatgttgaaaattttctctttgaaattgaggaaaagacaaggacaccttctatttccatttccattcaaactactttgttg

SEQ ID NO: 5722 - DNA, 120 bp, synthetic construct
  source 1..120: mol_type = other DNA
aagcagctttgcagggacatactctcctccctttggaattcaggcataacttaccagcattattaactttaaaacagagatcttaattaagactgacaaaacagattccttatagcaata

SEQ ID NO: 5723 - DNA, 120 bp, synthetic construct
  source 1..120: mol_type = other DNA
tttaactaatagtctgacactttttaagatctcataagagacatttactacttaattttttctgaagcctgccacctgaagactttatttacataacaagaaccttggcttccacaactc

SEQ ID NO: 5724 - DNA, 120 bp, synthetic construct
  source 1..120: mol_type = other DNA
aatggtagttttgcttttagctctttgaggaatagccatactgtttccacattggcttaaccaatttatactcccatcaacagcgtataagtgttcccttttctctgcaaccttgccagc

SEQ ID NO: 5725 - DNA, 120 bp, synthetic construct
  source 1..120: mol_type = other DNA
gctgttggtgtatagtaatgctagtgatttttgtatatggatttgtattctgaaactttgctgaagttgtgtatcagctgaaggagcttttatgctgaggcaatggggttttctagatat

SEQ ID NO: 5726 - DNA, 120 bp, synthetic construct
  source 1..120: mol_type = other DNA
tttgcttcacccactttttgatggggttgtttgttttcttcttgtaaatttgtttaagttccttgtagattctggatattggccctttgtcagatggatagattgcaaaaattgtctccc

SEQ ID NO: 5727 - DNA, 120 bp, synthetic construct
  source 1..120: mol_type = other DNA
tagtagacatgtggcattatttctgaggcctctattttgttccattggtctatatatctgttttggtaccagtaccatgctgttttggttactgtacccttttagtatagtttgaagtca

SEQ ID NO: 5728 - DNA, 120 bp, synthetic construct
  source 1..120: mol_type = other DNA
tggggtttttatcattggttctgtttatgtgatggattatgtttattgatttgtgtatgttgaaccacccttgcatctcagggatgaagctgacttgatcatggtgaataagctttttga

SEQ ID NO: 5729 - DNA, 120 bp, synthetic construct
  source 1..120: mol_type = other DNA
aagaatctatttatttctgccataattttgttatttacccagtagtcattcaggagcacattgttcagtttccatatagttttacagttttgagtgagtttcttaatcctgagttcgaat

SEQ ID NO: 5730 - DNA, 120 bp, synthetic construct
  source 1..120: mol_type = other DNA
atatttaggatagttgcattgatccctttaccattatgtattgcccttctttgtcttctttgatctttgttggtttaaagtctgttttatcagagactgggattgcaacccttgaagtct

SEQ ID NO: 5731 - DNA, 120 bp, synthetic construct
  source 1..120: mol_type = other DNA
tatttcttggatgctttgttcattccttttcattctcttttctctaatcttggcttcatgctttatttcattaatttgatcttccatctcttgtatactttcttccacttgattgattca

SEQ ID NO: 5732 - DNA, 120 bp, synthetic construct
  source 1..120: mol_type = other DNA
tcacatgatcacagctgtactgttaatataatatgtagctgaatgagaaaatagttaattgaaaaagtgattatgatgtgaataatgctttttagtaatttctttgtcaattaaatattt

SEQ ID NO: 5733 - DNA, 120 bp, synthetic construct
  source 1..120: mol_type = other DNA
tgaatccgaaaaaggagtcagcaaagggagatggggtggggcagttttctaggatttgtgtaggtagtggaaaattactgttaaagggggttgttctcttgcaggcaggggcaggggtca

SEQ ID NO: 5734 - DNA, 120 bp, synthetic construct
  source 1..120: mol_type = other DNA
aaagattgtgatatgtctgcaatgctagcagagaagtcattagagaggctacagaaggttgtggcagaggttgaattgcctgctattccagttccaagagcaatagtggaggcagaaaat

SEQ ID NO: 5735 - DNA, 120 bp, synthetic construct
  source 1..120: mol_type = other DNA
ctgtccagtcctttttaagttagaggctgagcttggtgaggtgtgttttttaaagagcattagtccattttacctttcctgaagattgaggacagtaaggggtatgaagtttccactgaa

SEQ ID NO: 5736 - DNA, 120 bp, synthetic construct
  source 1..120: mol_type = other DNA
ggaagcctctttcagcccagaaggcagcatggttatggaggatatagaaagcatatctggagtcagtataaatgtcaatgtgcattcctttagtgagagaatgcggtagttaaagcaatc

SEQ ID NO: 5737 - DNA, 120 bp, synthetic construct
  source 1..120: mol_type = other DNA
caggaagggcacatgtatgttgatggaggattatactgagataggtaacactaggagaagaaatttgtgccttggagggggatacttggtacccctttcagtagagatgttgaagaagca

SEQ ID NO: 5738 - DNA, 120 bp, synthetic construct
  source 1..120: mol_type = other DNA
gaggtttagaagcctgaccatcaatacccacaacagttatggaggcaagggaaacaggcctttgtaaagaaggtaatgtggagtgggtagcctccgtatcaattaagaagggacttacct

SEQ ID NO: 5739 - DNA, 120 bp, synthetic construct
  source 1..120: mol_type = other DNA
agggtgggagagtggaggttgaggaagaattgggacctggctcggcctggtgaggagcagcctggggaggaggggcaaggtcagatggatctgtagaaaaagaggattcaaaggactcag

SEQ ID NO: 5740 - DNA, 120 bp, synthetic construct
  source 1..120: mol_type = other DNA
gctggagaagagtgaagagactgcttacctgatttgaaattggtgagatgttccttgggctggtctgaggacctgaggttgtaggtggatttcctcacggagtgagggtgaggacagggg

SEQ ID NO: 5741 - DNA, 120 bp, synthetic construct
  source 1..120: mol_type = other DNA
aagaaacattcctcaaaatattgagagctatgtatgacaaacctgcagccaacatcatactacatgggcaagagctggaattattccccttgagaaccagaacaagacaaggatgtcccc

SEQ ID NO: 5742 - DNA, 120 bp, synthetic construct
  source 1..120: mol_type = other DNA
aagctgtgccctgaccaccttgggcacatgtcatcaggacttcctgaggctgtcacaagtgcttcctcaaccttggcaaaataaactttctaaattaatggagacctgtctcagactttc

SEQ ID NO: 5743 - DNA, 120 bp, synthetic construct
  source 1..120: mol_type = other DNA
ttctcaaaaaacttaaaacataactactatttgactcagcaatcccattacttatatatccaaaggaatataaatcatttagccataaagacatatgcatgtatatgttaactgtagcac

SEQ ID NO: 5744 - DNA, 120 bp, synthetic construct
  source 1..120: mol_type = other DNA
tttttcttgttgctcagattgcataatctctatcagcctatcttcaagttcactgattctttcttccatcagttcaaatctactgttgagctcctctagtgaagttttcactgtgctttt

SEQ ID NO: 5745 - DNA, 120 bp, synthetic construct
  source 1..120: mol_type = other DNA
gcactgaagagtggtagcttttacttttctttgcttgcctctcccagtgttggacctctgtttatgagtgagctagggcaaaggtgataagagttccagtattcttggctcaacatgctt

SEQ ID NO: 5746 - DNA, 120 bp, synthetic construct
  source 1..120: mol_type = other DNA
aaagttgaggcatttttttgtcctgaaatggcttatatttaagtgactgttaggaaccaaccatgttgcaaatgtttagaaaatgatcagtttcataatctatgtggagaaggataaatt

SEQ ID NO: 5747 - DNA, 120 bp, synthetic construct
  source 1..120: mol_type = other DNA
cattttggtttagatccttgtcttagtcaaattaaaaaagaaaacaaaacctattagagtctactagatcaatgcactctttgtggcttaaatttgtttgtgtaagttctactactagct

SEQ ID NO: 5748 - DNA, 120 bp, synthetic construct
  source 1..120: mol_type = other DNA
gttcagaatgaaagtgaactagctaaaactcaacccaatgtctttcattttcagacactaggaattcgtcaaagcaaccagatcaccagggactagcaacaatatctaataacccccttc

SEQ ID NO: 5749 - DNA, 120 bp, synthetic construct
  source 1..120: mol_type = other DNA
tcagctctgcaccaaagaattcagatgccacagagcattttaagaccactgatgccctcctcactgatccatttcttaatgctatagggaagaaaatgtcttccaatcttatagcacagg

SEQ ID NO: 5750 - DNA, 120 bp, synthetic construct
  source 1..120: mol_type = other DNA
atccatatccaatctagtcctacattttattttagtagcaaaattttgagaaagtccagattcctgcagcaaatagctacaaatagaagtatattttagaccagtaacctaatatgtctt

SEQ ID NO: 5751 - DNA, 120 bp, synthetic construct
  source 1..120: mol_type = other DNA
tgtctccagaacctttttcttttccaataagccttttcatggcccacttgaactccttattccttagtgggatgggttcaaggtgggagtaacaatggagtaaaatatatggagaagttt

SEQ ID NO: 5752 - DNA, 120 bp, synthetic construct
  source 1..120: mol_type = other DNA
catgcaattttgaccattgcagatatttcacaaaaatagtgatccaggtggtggtctccgcatcgaggaagactcacaggacagggggaaagtatcatgcaattagtgacaccaattaac

SEQ ID NO: 5753 - DNA, 120 bp, synthetic construct
  source 1..120: mol_type = other DNA
ctaaataaaactggatggatctccccttattaaaaaggatattacgaaggggttagaaatctgttacaagttatcacctcctttagccaagggttcatagagaatgcaggttttatacct

SEQ ID NO: 5754 - DNA, 120 bp, synthetic construct
  source 1..120: mol_type = other DNA
gacttgaaacaaacccacagatctgtggaaatttatttatgacaaagacaacactacagaagaatagagaaaaattataattttcaatatatggtgctggaccaatgggatattaattaa

SEQ ID NO: 5755 - DNA, 120 bp, synthetic construct
  source 1..120: mol_type = other DNA
ggtgcaaccactctggaaaattttggcagtgtttcaaaaaacctgagtacaaatatacaatgaggatatatatacatatgcaagatgagccaaaatacatgcataaaatattctaagcag

SEQ ID NO: 5756 - DNA, 120 bp, synthetic construct
  source 1..120: mol_type = other DNA
atttttcatcctcaagaactacaaaaatatcaaaatcaaatattctagatttttcattttatttaagttttctactttctcaagggagaaagagggtataaggaataaaattaatcactc

SEQ ID NO: 5757 - DNA, 120 bp, synthetic construct
  source 1..120: mol_type = other DNA
atatcaatataattgtaacatatataatccaaaagaaatcagtgcatagcatgttatttttagtgttggcactttagtttataatttcattttaaatatgagttttgtacatataccaat

SEQ ID NO: 5758 - DNA, 120 bp, synthetic construct
  source 1..120: mol_type = other DNA
atgaaaagttgaaaggcacacccaccaaaggtaattcttttgtctttgccccagatactgaccaacatttgtgggactatatttgtggtataacagagatccaagatggccaaatttcta

SEQ ID NO: 5759 - DNA, 120 bp, synthetic construct
  source 1..120: mol_type = other DNA
gtggaataaacaacagacacttatttctcaaagttctggaggctgggaggtttaagataaaggagtaggaggtgcagttcctgatgaggccctacttcttgacttgcagacggctgcctt

SEQ ID NO: 5760 - DNA, 120 bp, synthetic construct
  source 1..120: mol_type = other DNA
aggtggcagcccagataatctctaaaacacctttagggtctttcttcccttgtcttgaagagtaatatcacacattcacatctgaatagctctatggtccagtcccaaagaatctaagaa

SEQ ID NO: 5761 - DNA, 120 bp, synthetic construct
  source 1..120: mol_type = other DNA
gaagctggaatgtccaaatttaaggtgccagaaaatttagtttttggtgaagtctctcttgctgacagacctttcactgtattctcacattgtgtagataaaactctgatctttcttcct

SEQ ID NO: 5762 - DNA, 120 bp, synthetic construct
  source 1..120: mol_type = other DNA
tgtggattaagccaaatttatcaacatgagagcccttaaaagatattctaattttatgtgctggctcaaacagctgggagaagctaagaccatttcttcattgggttgatttaaaaactc

SEQ ID NO: 5763 - DNA, 120 bp, synthetic construct
  source 1..120: mol_type = other DNA
gcgcctctcgtcctccaaaggaatgcggctcctcaccagcaacggaacaaagctggagggagaatgactttgacaagtttagagaagaagtcttcagaggatcaaactactcctagcaaa

SEQ ID NO: 5764 - DNA, 120 bp, synthetic construct
  source 1..120: mol_type = other DNA
agaaactctacaagccagaagagagtgggggccaatattcaacattcttaaagtaaagaattttcaacccagaatttcatatccagccaagctaagcttcataagtgaaagagaaataaa

SEQ ID NO: 5765 - DNA, 120 bp, synthetic construct
  source 1..120: mol_type = other DNA
caaatgtgaaagaacagaaattataacaaactgtctctcagaccacagtgccatcaaactacaactcaggattaagaaactcactcaaaaccactcaactacatggaaactgaacaacct

SEQ ID NO: 5766 - DNA, 120 bp, synthetic construct
  source 1..120: mol_type = other DNA
gatgaacattgatgcaaaaatcctcaataaaatactggcaaactgaatccagcagcacatcaaaaagcttatccaccatgatcaagtggccttcatccctgggatgcaagactggttcaa

SEQ ID NO: 5767 - DNA, 120 bp, synthetic construct
  source 1..120: mol_type = other DNA
atttccaagtcaatcctaagccaaatgaacaaagctggaggcatcatgctacctgactgcaaactatactacaaggctacagtaaccaaaacagcatggtactggtaccaaaacagagat

SEQ ID NO: 5768 - DNA, 120 bp, synthetic construct
  source 1..120: mol_type = other DNA
ttgctgggtatatacccaaaggattataaatcatgctgctagaaagacacacacacacatatgtttattgcggcactattcacaatagcaaagacttggaaccaacccaaatgtccaaca

SEQ ID NO: 5769 - DNA, 120 bp, synthetic construct
  source 1..120: mol_type = other DNA
aagatattctttacacatattagtgtatgtggggtagttgtgtatgtgttcatgtgttttaatagatacatttatttatatatgcatattgataggttagtagagagataacatcctgtg

SEQ ID NO: 5770 - DNA, 120 bp, synthetic construct; identical to SEQ ID NO: 4715
  source 1..120: mol_type = other DNA

SEQ ID NO: 5771 - DNA, 120 bp, synthetic construct
  source 1..120: mol_type = other DNA
atatcccccttatcattttttgtcgtgtctatttgattcttctctgttttcttctttattagtccagttagtggtctattttgttaagcttttcaaaaaaccagctcctggattcattga

SEQ ID NO: 5772 - DNA, 120 bp, synthetic construct
  source 1..120: mol_type = other DNA
agggcaatcaggcaagagaaagaaataaagtgtattcaaataggaaggcaggaagtcaaattgtctctgtttgcagatgacatgattgtatatttagaaaaccccatcgtctcagaccta

SEQ ID NO: 5773 - DNA, 120 bp, synthetic construct
  source 1..120: mol_type = other DNA
acctctcaaaagaaggcatgaaggcatttatgtggtcaacaaacatatgaaatgaagctcatcatcattggtcattagagaaatgcaaatcaaaactacaatgagataccatctcatgcc

SEQ ID NO: 5774 - DNA, 120 bp, synthetic construct
  source 1..120: mol_type = other DNA
tgttggcagcagtagaggctaattattttgaatctcggaggcttaaacggaagtatgagagtgaggcagtaatggcatgaaagctccctgaagagctatgtattctatggatggccatca

SEQ ID NO: 5775 - DNA, 120 bp, synthetic construct
  source 1..120: mol_type = other DNA
agataatcaaaggttgtttaaatccattagctgggtgtggtggtgcacacctgtaattccagctgctctggaggctgagacaggagaatcgtgtgaacctgggaagcggaggttgcagtg

SEQ ID NO: 5776 - DNA, 120 bp, synthetic construct
  source 1..120: mol_type = other DNA
atgaagtatatggaaaaccaggggaacaggctacatatacttctttaataactttactgttttcctcgggtaaagtatataattaattttattcataactttccaaacttaccccagaaa

SEQ ID NO: 5777 - DNA, 120 bp, synthetic construct
  source 1..120: mol_type = other DNA
aggctctattcctaaagactcactgtcccaggtgagaaatgggagaagaaaggaattggatagcaccagtttgaatgaagagtggcattatagagatacaaaatgacaaggtttaaaaaa

SEQ ID NO: 5778 - DNA, 120 bp, synthetic construct
  source 1..120: mol_type = other DNA
atgagtatatcatcaagaaattacaaataaaatgctctggacgaccagtaagaaaggagagcaggaaatacttaaggacatttttatatttgagatgatccttacaggatacataacaac

SEQ ID NO: 5779 - DNA, 120 bp, synthetic construct
  source 1..120: mol_type = other DNA
ataaaacaactgtaatacatctggggattcataattaggtaagtatataataattgttaatagtcattgaattattagtatatgacaagaactgagctatgtttgcaatgtacactctat

SEQ ID NO: 5780 - DNA, 120 bp, synthetic construct
  source 1..120: mol_type = other DNA
atgccggccttcgtttgacctgtttttgggaagttctgccttttccttctattttaatctacactctgttgccaccattacatatccatgcatgtagagttgatggtagtatactaaaac

SEQ ID NO: 5781 - DNA, 120 bp, synthetic construct
  source 1..120: mol_type = other DNA
tttgcttctcctgatgccactcaccctcatcctgggcacttatgtgttcattgctcaggcagtaatgagaatctgctctgctgaaagtcgctggaaggctttcaatacctgtgcctcaca

SEQ ID NO: 5782 - DNA, 120 bp, synthetic construct
  source 1..120: mol_type = other DNA
attttttttgccataaatgttttgccttagtcaatcttatgctcttgtggtacacaacaatgaggcctaggtcaatgcaaatagaacttactctggggggaaagatgaacagtgagatgc

SEQ ID NO: 5783 - DNA, 120 bp, synthetic construct
  source 1..120: mol_type = other DNA
ttgaaactactgtgttgcattggaataaacatggatatattatgttgagaaaatcacatgtatttttaaattaaaatatgggtgcttggagaaatgttttgctgatgtgggtggctgctc

SEQ ID NO: 5784 - DNA, 120 bp, synthetic construct
  source 1..120: mol_type = other DNA
agtgtcagaaaagataatgctaaacatagaaaaatctttcacgacttgcagaatgatgtgatttggctctgtgtccccatccaaatctcatctcgattgtaatccccatatgttgaggga

SEQ ID NO: 5785 - DNA, 120 bp, synthetic construct
  source 1..120: mol_type = other DNA
tagagacgaggaagatactttaaaaaatcaaacttctagagatgaaaaccacaacgtttaaatatacataatacctaaaagcactgaatgtaattcatagtacactaaacattgagaagt

SEQ ID NO: 5786 - DNA, 120 bp, synthetic construct
  source 1..120: mol_type = other DNA
acggatggaccactccatatgcacttcctcccctctgaggtccataaaagccccaggatcagcaatagcatggtagaggacaactgagagatgacgagatgaccagctgcagagagtagc

SEQ ID NO: 5787 - DNA, 120 bp, synthetic construct
  source 1..120: mol_type = other DNA
ttgctccacccactggctgttccaccatctctccctctcttcaggcctctctattttctaagacacaacaatattgaaatgagaccaattaataatcctacaatggcctttaagtattca

SEQ ID NO: 5788 - DNA, 120 bp, synthetic construct
  source 1..120: mol_type = other DNA
tagttactgtatcatcaggaacaggttttgaaaattattgtttatgctgagaaaacaactatctgaatataactaataaccattattactagattgattctaggaacatagataaattta

SEQ ID NO: 5789 - DNA, 120 bp, synthetic construct
  source 1..120: mol_type = other DNA
catttgccaagtagaatatacaatatattaaatttttgatattaaaagttttaaaaaattttctttcaatgctaagaaggtagattttatgttaagtgtccttatcatgatttcaaaaat

SEQ ID NO: 5790 - DNA, 120 bp, synthetic construct
  source 1..120: mol_type = other DNA
aaaatagcatggtactggtaccaaaacagatatagaccaatggaacagaacagaggcctcagaaataatgccacatatctaccagtatctgatctttgacaaacctgacaaaaacaagca

SEQ ID NO: 5791 - DNA, 120 bp, synthetic construct
  source 1..120: mol_type = other DNA
aataacaggtgctggagaggatatggagaaacaggaacacttttacactgttggtgggactgtaaactagttcaaccattgtggaagtcagtgtggcaactcctcagggatctagaacta

SEQ ID NO: 5792 - DNA, 120 bp, synthetic construct
  source 1..120: mol_type = other DNA
aaaattattcatctgggggattgttaaaatgagggctggattatcagtttcagagtaattttagaaaagacaccatgtttgaagaaagtttagctctctaagtcatggttttattctgag

SEQ ID NO: 5793 - DNA, 120 bp, synthetic construct
  source 1..120: mol_type = other DNA
agtataaattataaggaatcttaaatgaatgcaatctgggctccaaagagtgacaattcttcttgggtcgacagttaaactcaggtgaattataaatggaaagagacaatgtagctgtgt

SEQ ID NO: 5794 - DNA, 120 bp, synthetic construct
  source 1..120: mol_type = other DNA
tgaggacctgcaacccaggggacctgcaacccagaagacctatggtagtgctcgaaacagcagactattattttctattgtgtaggaaaatagttaatctgtcttctttaaaaggcacag

SEQ ID NO: 5795 - DNA, 120 bp, synthetic construct
  source 1..120: mol_type = other DNA
ggaaaaaagagctctttctctgcctttgaaaccctagagtgggtggaattaaatcatgttagagatcatttcgtttatatacaggtaggaaactgaggggcttaacatataattacctat

SEQ ID NO: 5796 - DNA, 120 bp, synthetic construct
  source 1..120: mol_type = other DNA
caaaactaccatccaatatttggagcaagttaagccaggcattaagattggcagcactggggattaagctatatcttatggaggaccaggaaaactgtaggagcaagaaagctagagaaa

SEQ ID NO: 5797 - DNA, 120 bp, synthetic construct
  source 1..120: mol_type = other DNA
tttcttcaaatggatttgattgaaaatgtccaaccccaagttgtcataagaattttgagaattaaacgttctttgacggtgaacctttgtcacttagttgcaagatctccaaagctcagg

SEQ ID NO: 5798 - DNA, 120 bp, synthetic construct
  source 1..120: mol_type = other DNA
tctcttgttcagtgcattcttcaggttttcttcttcatagctctggcctcatcagaagtggccattctcacagtgatgtcttatgacaggtacgcagcaatctgtcaaccacttcattat

SEQ ID NO: 5799 - DNA, 120 bp, synthetic construct
  source 1..120: mol_type = other DNA
gagaaagacaattagtttggagtctggcctgtataatttaaaacttgttattaacaaataaggttggagatagatgaagctaactgggttaatattatggtgcatatatggtatttccag

SEQ ID NO: 5800 - DNA, 120 bp, synthetic construct
  source 1..120: mol_type = other DNA
caattgctcagtaatggggaatgtttttataggacttttttgaattaatggttataatatctacatatgcatataccttagtaagttttttttctttaatctgccacatgagattttttc

SEQ ID NO: 5801 - DNA, 120 bp, synthetic construct
  source 1..120: mol_type = other DNA
gcctgtaatcccagcattttagggggccgcagcaggcagatcacgaggtcaggagattgagaccatcctggctaacatggtgaaactccatctcaactaaaaatacaaacacttagctgg

SEQ ID NO: 5802 - DNA, 120 bp, synthetic construct
  source 1..120: mol_type = other DNA
ttgaatctataaattactttgggcagtatggccatttttcatgatatttattcttcctacccatgaggatggaatgtttttccatttgtttgtgccctctctccttgagcagtggtttgt

SEQ ID NO: 5803 - DNA, 120 bp, synthetic construct
  source 1..120: mol_type = other DNA
tgatagattccatttattgatttgcatatttgaatcagctttgcatcccaggaatgaagctgacttgatcatggtagatgagctttttgatgtgctgctggattcggtttgccagtattt

SEQ ID NO: 5804 - DNA, 120 bp, synthetic construct
  source 1..120: mol_type = other DNA
gcacccaagggaatctactgttctgtggtttgcgaaatccatgggaaaagcgtagtatctgggctggagtgcactgttcctcatggctcagtccctcatggcttcccttggctaggggag

SEQ ID NO: 5805 - DNA, 120 bp, synthetic construct
  source 1..120: mol_type = other DNA
tcacccaggctggagtgcagtggtgcaatcttggctcactgcaacctccgcctcctggttcaagcaattctcgtgcctcagactctcaagtagctgagattacaagtgtgtgctgctatg

SEQ ID NO: 5806 - DNA, 120 bp, synthetic construct
  source 1..120: mol_type = other DNA
agtcttctgcatttccatatacactttagaattagcttgttaattcgtactaaaaagaagcatgctggcatttttattaggattgcatcaaatctatagatcatttctgagaaaatagaa

SEQ ID NO: 5807 - DNA, 120 bp, synthetic construct
  source 1..120: mol_type = other DNA
gatttatttaggatatatacctggaagcaaaattgctcaggtccaatatatgagagacttaatttgaatttttatacccagaatgtgctccagaatgcttccatgaggctacactcctac

SEQ ID NO: 5808 - DNA, 120 bp, synthetic construct
  source 1..120: mol_type = other DNA
ttgttttattgggtcacaatataaatttgatcagatagattatgctaacaaggtgatttatggtgcctatttttgctctggtgggctggggtctgagtagctgaggtcagttacacaggt

SEQ ID NO: 5809 - DNA, 120 bp, synthetic construct
  source 1..120: mol_type = other DNA
attcttcaaagtaggtttagcaatttacacccttaccaaccttgtatatgagctctcagagctttacatacttatccaacgagttactactctaaggatactgacagatacagcacactc

SEQ ID NO: 5810 - DNA, 120 bp, synthetic construct
  source 1..120: mol_type = other DNA
aaatttcattgactctatatgttagcaaaaaaataaagttactaaagataactcctcaaccattatcaaggtaaatatccatgtttatttagatcttctctaatgtatttcagtaaagtt

SEQ ID NO: 5811 - DNA, 120 bp, synthetic construct
  source 1..120: mol_type = other DNA
ttacctagaagtctagctagagctgttggctggtcctccatatggttctccatatgacctttctacatggctaggttgggctcctcacaaaatgatggctaggttccaaggataatctga

SEQ ID NO: 5812 - DNA, 120 bp, synthetic construct
  source 1..120: mol_type = other DNA
tacctgaagttacatttcctttcaatccctaatattattaatttgtgcattatcagctattattcttaaaagattttgccagaaatttgacatttaatatctttccctctattgttctta

SEQ ID NO: 5813 - DNA, 120 bp, synthetic construct
  source 1..120: mol_type = other DNA
actgagaagaaatattgacagtagtcattcttatcttatttcttaacctatagtggaaatttaaagtatttcatcaagtatgatatatactgtagcttttatgtagagtcttttcttcag

SEQ ID NO: 5814 - DNA, 120 bp, synthetic construct
  source 1..120: mol_type = other DNA
aaatagacatgagattgtcttctcagcacattacatcggaaggcacatgttgatctgtcccattactggtgatattagctataatcagttggctaagatggttctgccaggtttctccat

SEQ ID NO: 5815 - DNA, 120 bp, synthetic construct
  source 1..120: mol_type = other DNA
ttgtctattcctgtccttagcccaatttttgataggattctttgttttcttcttgctgatttgtttgggttcttcgtagattctggatattagtcctttgtcagatgtatagattgtgaa

SEQ ID NO: 5816 - DNA, 120 bp, synthetic construct
  source 1..120: mol_type = other DNA
tgctcattttacagatgcagaaagattaagcgactaaagtcacctcacaaaggataaatggtagcactagaattaaacccaagcaatctgactgtagttgttatgtacttatatatgata

SEQ ID NO: 5817 - DNA, 120 bp, synthetic construct
  source 1..120: mol_type = other DNA
tagttttccaggaggtctggcattagagatccattaatttttaaagggttaaatgttcctgtttcttttttggaaatatgtgatttagagtgcattgattctccaagtttggctcttgga

SEQ ID NO: 5818 - DNA, 120 bp, synthetic construct
  source 1..120: mol_type = other DNA
aacaatttacactcaaggctttatgctgagttgtcttgttctaatcaagcatgaaggtgtcaagcacaaagcacgtggcaaacgaaagacactcccgcctcattctgaaaacaaatactg

SEQ ID NO: 5819 - DNA, 120 bp, synthetic construct
  source 1..120: mol_type = other DNA
ctatattaatgatccctcttgcaggaggtgtaggagaaagaatgctgcgtcagtacaagaacaagactttttggtcaaaagttgataccgtttaaattccctctcccagcgcttcatgca

SEQ ID NO: 5820 - DNA, 120 bp, synthetic construct
  source 1..120: mol_type = other DNA
ggtgggcagaaggcaatacatttacacactacagatgatccatagaaaattaagctccagaactcctaacatcaccaaagctggtactggctaatactatgaaatgcgaatctgtgcttt

SEQ ID NO: 5821 - DNA, 120 bp, synthetic construct
  source 1..120: mol_type = other DNA
actgcagctgcatatcaactcctccaatataaagaaaaagaaaatggtatttaactgactaataagtttcatctaccagctctgggcttcagtattgggtagaaagaaaacagagacttc

SEQ ID NO: 5822 - DNA, 120 bp, synthetic construct
  source 1..120: mol_type = other DNA
cctgcctcattttagcatgaatgtagaaacaaaaataacccagttgagaaattttggctggccattcaactcgctgagagcagttaaagaaaatgatcatctggtttagctgaagcctgg

SEQ ID NO: 5823 - DNA, 120 bp, synthetic construct
  source 1..120: mol_type = other DNA
tctctgttctggttgtgctcatgctgtgttaattgcaaaggtgtctttcaaacttcaaaacgtttgaaagtcaatagagaaactgtaataatagtttattaggctgtccaaagtgaagag

SEQ ID NO: 5824 - DNA, 120 bp, synthetic construct
  source 1..120: mol_type = other DNA
ctgcagctgctaccacaatttgcatcttcaaaatggttatggaggttcaagatggctgactggaagcagctagagtatgctactctcaaagagaggaaagaaagtggcaagtaaatagta

SEQ ID NO: 5825 - DNA, 120 bp, synthetic construct
  source 1..120: mol_type = other DNA
aaacaaagaaaaaagaaatttaaaaattcttaaaattcttggcacaaagtctccaagacacatgggttgtgtaaaatggcaaaacctgtgaatgactggcattaatgagagagaaaaaga

SEQ ID NO: 5826 - DNA, 120 bp, synthetic construct
  source 1..120: mol_type = other DNA
aacagtagtcaaaaaaggataaagaagggctctatgcaatgataaagggtttgatccaaccacatggcttaactatcctgaatatatatgcaaataaaattggagcacctagattcataa

SEQ ID NO: 5827 - DNA, 120 bp, synthetic construct
  source 1..120: mol_type = other DNA
cctagagaactagaaaaacaagaactagtcccaaagctagaagacaataaataaccaaaattcattagagaactgaatgaaattgagactcaaaaatacatgcaaagtaataaccgaaag

SEQ ID NO: 5828 - DNA, 120 bp, synthetic construct
  source 1..120: mol_type = other DNA
ttacacttaagaactggaacaggccaaggatgccaactctcaccattcctattcaacatagtgctggaaatcctagtcagaacaatcaggcaagagaaagaaataaaaagcaacaaaata

SEQ ID NO: 5829 - DNA, 120 bp, synthetic construct
  source 1..120: mol_type = other DNA
ctggccagacatttaaaatacatttttcaatggaagtattcaaactacagtaaaataggagaatcaggtggaatagtggaaccaactgcttataaatttactgtacacataaaaatcatc

SEQ ID NO: 5830 - DNA, 120 bp, synthetic construct
  source 1..120: mol_type = other DNA
gctctatagggacataagtacagttacaaggaactgaaagacttacggaaagtgggcagttaagaaactgaaagtatctttgaagccaaagaaatgaaaaagatgtagagaaaaaagaca

SEQ ID NO: 5831 - DNA, 120 bp, synthetic construct
  source 1..120: mol_type = other DNA
tatgggcacccaatatgcagttaggaacatgcctggaaaataagcatatgagcaaaataagaagatgtagagaatttttgtggtaagaaaatgacctcaaagtgcaagatattttatatg

SEQ ID NO: 5832 - DNA, 120 bp, synthetic construct
  source 1..120: mol_type = other DNA
cataattatttttgtaagtaagagaaacatacagtttcactttgctttacaaaacagtcttttgggtaacagtgtataaattacttatactccaaatcacggttgccacacacaacaata

SEQ ID NO: 5833 - DNA, 120 bp, synthetic construct
  source 1..120: mol_type = other DNA
atccatgataccattaccacaatcaaggtaatagacgtatctatcaccttccaaagttccgttgcatccctttgctttttttttttgttttttttttataagaacacaacatgagattta

SEQ ID NO: 5834 - DNA, 120 bp, synthetic construct
  source 1..120: mol_type = other DNA
aacaagataaaagtatacatcctctgcccaactagtaacatgagaatatccttgcataatgtacctctgccccatataatattttacttagttatgtatgcagtctagtatcattgagca

SEQ ID NO: 5835 - DNA, 120 bp, synthetic construct
  source 1..120: mol_type = other DNA
aattttattacatatatatgttactaatttgtacatagctttataagtatatatacaagtatacataagtttataatatgcatctagcttttcaaaactacatgaaaagaatctatgaaa

SEQ ID NO: 5836 - DNA, 120 bp, synthetic construct
  source 1..120: mol_type = other DNA
tttggaagtatttaatacatatgccctgatggagcatcttactcttcaaagaaaacagttttgaggcacctaagcaattatgtacttattgactttgcgaaaacatttataacatcttaa

SEQ ID NO: 5837 - DNA, 120 bp, synthetic construct
  source 1..120: mol_type = other DNA
ttatcagtagtgttcaacttcaaatgcacatcttctgattatgagaatggtggttcttccatcaccttatagctatttccacatccatttacaattcaagctcttccaatactggaagtg

SEQ ID NO: 5838 - DNA, 120 bp, synthetic construct
  source 1..120: mol_type = other DNA
tccattgatttttgacaaaagtgccaatagcacacaatggagaaaagacagttccttcaacaactaatgttggaacaattggatatttgcatgccagtagaatgaaattggaccctaatc

SEQ ID NO: 5839 - DNA, 120 bp, synthetic construct
  source 1..120: mol_type = other DNA
caaattctgtcatttgtgacaacatggatgaacctggagaacgttattttaagtgaagtaagctaggaacagaaagacaaatgctacatgatctcacattatgcagaatttttaaaagtt

SEQ ID NO: 5840 - DNA, 120 bp, synthetic construct
  source 1..120: mol_type = other DNA
gtgtttaggggtgaatgtttgcagcttctgaagccccagtgggcgtgtgttacagggtgctcttaatttgctgtctacaggtggcttgtgttagcccaattagaccttctaccttgtccg

SEQ ID NO: 5841 - DNA, 120 bp, synthetic construct
  source 1..120: mol_type = other DNA
agaattgcagtggcattgataaaacagatggcaactgattttgattaaagggttatgagtttgaattaaaacaaaatatggcgtgagatttggttgaatttagaatagaagtaaaagctg

SEQ ID NO: 5842 - DNA, 120 bp, synthetic construct
  source 1..120: mol_type = other DNA
gatggcttccagcttcatctatgtccctgcaaaggacatgatcccattcctttttatggctgcatagtattccatgatatatatgtactacattttatgtattctatcattgatgggcat

SEQ ID NO: 5843 - DNA, 120 bp, synthetic construct
  source 1..120: mol_type = other DNA
aatcatttccccattgcttgtttttgtcaggtttgttgcaattcagatggttgtagatgtgccgtcttatttctgatctgttggtctatgtgtctgctttggtaccagtaccatgctgtt

SEQ ID NO: 5844 - DNA, 120 bp, synthetic construct
  source 1..120: mol_type = other DNA
ccgtctctgccaggttttagtatcaggatgatgctgggcttataaaattagttagggagaagtccctccttttgaattgtttgaaatagttccagaaggagtggtaccaactcctttttg

SEQ ID NO: 5845 - DNA, 120 bp, synthetic construct
  source 1..120: mol_type = other DNA
tgagaagaatgtatattctgttgtttcaggctggaagggcttgcagatatctatcaggttcacttgatccagagccaagttcaagtcctgaatatccttgttagttttctgtcttgatga

SEQ ID NO: 5846 - DNA, 120 bp, synthetic construct
  source 1..120: mol_type = other DNA
ctcactaccaccaccaccaccatttcaggcagtaccatgtgatttaaggaggaatagaaaacattaggtggaatgatggaggagaaagtagattttgaattgaactataaagaatgaaga

SEQ ID NO: 5847 - DNA, 120 bp, synthetic construct
  source 1..120: mol_type = other DNA
tatgttttatctgattctgttttctaaatttttagcgaaaaaagtttcccaaatttaagatactctataaaatagtaatatgttttggggacttagttttagaaaaatccctcaggaaat

SEQ ID NO: 5848 - DNA, 120 bp, synthetic construct
  source 1..120: mol_type = other DNA
ataaaagagaaagacaatggccaggtgggaggcacatgtagagaaggcttttcgtcttccctctgaggactggatcctcaagatggtggagattatgcaaatgtaggaaagtacgataca

SEQ ID NO: 5849 - DNA, 120 bp, synthetic construct
  source 1..120: mol_type = other DNA
ccatttatgtcaaaccagagaagcagcattcttttgcaaaccatagctcctacctaccatgcaacacagatataaatacatccaatgtttcacctgcagatcaaatctttttaaatatac

SEQ ID NO: 5850 - DNA, 120 bp, synthetic construct
  source 1..120: mol_type = other DNA
ataagtaatatttatcattcccattctctggatgagagcaccaagcctcagcaagataaacgtctggaagatgtcacgcagctagcaggtaaaaaaaaggtaggtttatcactcccaaag

SEQ ID NO: 5851 - DNA, 120 bp, synthetic construct
  source 1..120: mol_type = other DNA
ctttcatcttttttaacatttccttccacttctgaggaggaattaacccttctactcattttattcaacaaatgtattttaaggcaaaaatgtggaaaaaagggaactggcacagtgtta

SEQ ID NO: 5852 - DNA, 120 bp, synthetic construct
  source 1..120: mol_type = other DNA
aattaaggatagtagttataaccaacatatattaaatgcttattataacataaccattcaacaatcattgtattacccagttcacatgcccacacacactaaaaacgcacacgcacacaa

SEQ ID NO: 5853 - DNA, 120 bp, synthetic construct
  source 1..120: mol_type = other DNA
aagctaaggaccactggcttaaaattctcactgccagcacagcagtctgaagtcgaccctggatgatcgagcttgttgtggggaggggcatccaccattagtgaggcttgagtaggcagt

SEQ ID NO: 5854 - DNA, 120 bp, synthetic construct
  source 1..120: mol_type = other DNA
ttcagaaggtgggaaataacaaactccattgagctaaaggagcatgttctaacccaatgcaatgaagctaagaaatttgacaaaagattacaggaaccgctaactagaagtttagagaaa

SEQ ID NO: 5855 - DNA, 120 bp, synthetic construct
  source 1..120: mol_type = other DNA
ttcacactaacaatattaatcttaaatgtaaatgggcggctgaatgtcccaattaaaagacacagactggcaaattgaataaagtgtcaagacccatcagtgtgcagtattcaggagacc

SEQ ID NO: 5856 - DNA, 120 bp, synthetic construct
  source 1..120: mol_type = other DNA
aaacctcacaactacatgaaacctcacaattacattaacaacctgctcctgaatgactactgggtaaataatgaaattaagggaggaataatgaagttatttgaaaccagtgagaacaaa

SEQ ID NO: 5857 - DNA, 120 bp, synthetic construct
  source 1..120: mol_type = other DNA
aaaaaaagacctattcacaacaaacccatagccaatatcataatgaatgggcaaaagctggaagcgtactctttgaaaacctgcacaagtcaaggatgccctctctcaccactcctattc

SEQ ID NO: 5858 - DNA, 120 bp, synthetic construct
  source 1..120: mol_type = other DNA
tgcactccagcctgggcgacagagcgagactccgtctcaaaaaaaaaaaaaaaaaaaaaaaaaagaacaaagctggaggcatcatgttacctgacttcaaactagactacaaggctacag

SEQ ID NO: 5859 - DNA, 120 bp, synthetic construct
  source 1..120: mol_type = other DNA
caaagacttcatgactaaaacaccaaaagcaatgcaacaaaagccaaaattgacaaacgggatctaattaaactaaagagcttctgcatagaaaaaaaaaaaaaaactatcatcggactg

SEQ ID NO: 5860 - DNA, 120 bp, synthetic construct
  source 1..120: mol_type = other DNA
gcatgcggggcttaaaaccgagatgacgtgttgatcagtgcagcaaaccaccatggcacatgtacacctatgtaacaaacctgcacattctgcatatgtatccctgaacttaaagtaaag

SEQ ID NO: 5861 - DNA, 120 bp, synthetic construct
  source 1..120: mol_type = other DNA
tatgtttttcttcctgctttcatttctgtctgctaatctacatatttttaaagctcagcttaaatgcctcttttctcttcaagtgaaatgcttctgtcccttcctggaaaatctataggc

SEQ ID NO: 5862 - DNA, 120 bp, synthetic construct
  source 1..120: mol_type = other DNA
ttcaaattttctcaaaatatactatccaatttcttactaaaaactgaaatcacatagcaaacgtgaaaatcagtgtggctaaagctcaatcaataatagctagcatgcaaggttattaga

SEQ ID NO: 5863 - DNA, 120 bp, synthetic construct
  source 1..120: mol_type = other DNA
tctagtgagaaacaacccacatgcttcccctattaacacaggaaatgcagttctctagattttgcttcttggccatgtaagaaatatcagtctttggactccaaaattccagatgtagaa

SEQ ID NO: 5864 - DNA, 120 bp, synthetic construct
  source 1..120: mol_type = other DNA
atgttcaaatttggagtatggatctcaccaccctggtaatgagcctagtacctggcttgataggcagttttttaacccatcctcccccatccctgaagcctctggtagtccacagtgtct

SEQ ID NO: 5865 - DNA, 120 bp, synthetic construct
  source 1..120: mol_type = other DNA
cttttggtgacttagccaaaaatcttttgccaaggccgatgttgagaagagtatttcctaggttatcttccatgatttctataatttgaggtcttacatttaaatctttaatcaattttg

SEQ ID NO: 5866 - DNA, 120 bp, synthetic construct
  source 1..120: mol_type = other DNA
ataaaatatataaagcaatgattttaatacactgtacaagacagggttgggtatgtcccatgacccatcagcctgattggaacagcttgtaatagacaaggacttaggtggagtcctgag

SEQ ID NO: 5867 - DNA, 120 bp, synthetic construct
  source 1..120: mol_type = other DNA
aagctgaagtaaattattaccagcagaactttactacaagaaatagttaaggaaagtctttagacaacaacaacaaaaaaatgatacgagatgaaaatcagtgtctccatgaagggacca

SEQ ID NO: 5868 - DNA, 120 bp, synthetic construct
  source 1..120: mol_type = other DNA
aaatgatattctagataaaaactgttgtgagaaaaattatcatcagtactttcctgctgaaggaaacacaaaaggaaaaaaaataggcaaaaataaagattatctcatatggaatttcag

SEQ ID NO: 5869 - DNA, 120 bp, synthetic construct
  source 1..120: mol_type = other DNA
gaagaagtgattgagtttctgagagccacaaaaactcaggtgtgcagtcatgacagaatgcatcagagcgtaaaagaagctgatgagccaggccgcagctgccaacagaatacacacctg

SEQ ID NO: 5870 - DNA, 120 bp, synthetic construct
  source 1..120: mol_type = other DNA
tctaggttctggcaaaaattcagatgtagctcagtggggatttcatcacttcttctaagatacataaaagccacaagagagtaacacatgtcttctgacaacccaaactttcagtgaaag

SEQ ID NO: 5871 - DNA, 120 bp, synthetic construct
  source 1..120: mol_type = other DNA
agatatatcaaaacttttggcatatagctaaagaaataaatagagggaaattgtcagccttaaatgcatatgttagaaaaaaagaaatattgaaaaaccaataacctaaactttcatttc

SEQ ID NO: 5872 - DNA, 120 bp, synthetic construct
  source 1..120: mol_type = other DNA
cgccactgcactccagcctgggcgatagagcgagactccatctcaaaaaaaaaaaaaaaacaaaaaaacttaacagaaaggaactgcagactaacctgtcttgtgactatagatgcaaaa

SEQ ID NO: 5873 - DNA, 120 bp, synthetic construct
  source 1..120: mol_type = other DNA
atcccagtacaagtccctgatttttaaaatataaaattgtcaagctgattttaaaagttacatagaaatgcaaaggaatggggaacctgaaaaccccctggggctgggttctcacctgca

SEQ ID NO: 5874 - DNA, 120 bp, synthetic construct
  source 1..120: mol_type = other DNA
aacatacagacaatttatagaaaaggaaatatgaatagatcttaaagataggaaaagatgctcaacctcattaaaaataagaaaaatgcaaattgaaatatgacatgcaggcaagcgcta

SEQ ID NO: 5875 - DNA, 120 bp, synthetic construct
  source 1..120: mol_type = other DNA
aactagaacacaaaaataacagctaaaagtctcttaaaaaattgccattggatgcacagcctacaaaattaggtcaggacctgtgtgctaggtctaaacagagtgactatctgctaaaat

SEQ ID NO: 5876 - DNA, 120 bp, synthetic construct
  source 1..120: mol_type = other DNA
aaaaaacaaatttgataaaatccaacacccatttatgataaaaactctcagcaagctaggaatagagagaaattgtgtcaactcaataaagatcatccataaaaatcttccaggtaaatg

SEQ ID NO: 5877 - DNA, 120 bp, synthetic construct
  source 1..120: mol_type = other DNA
ttcagggtctagagctaggcaaggagtccttagattttccaccaaaagcatgacacattaaaggaaaaattttagtttgacctaaccagaaaaaaaaaaaagctctgccaaaagactcta

SEQ ID NO: 5878 - DNA, 120 bp, synthetic construct
  source 1..120: mol_type = other DNA
tatcagcatcaatatcctgattgtgaaactgtgctgcaatttgttaccatggggaggaaccatgtaaagggaaaacagcatctttgtgtattttttcttacaactgcatattgtaatcat

SEQ ID NO: 5879 - DNA, 120 bp, synthetic construct
  source 1..120: mol_type = other DNA
agtgtatatgacaagtacagtctgttttatagatggcaaagtggagactgtgacttactttggactagaaagtcgttacttcggcatctgttttacagattatacttgtcatacgcactt

SEQ ID NO: 5880 - DNA, 120 bp, synthetic construct
  source 1..120: mol_type = other DNA
acccaaaactggaagtagcccaaatgtcctttaatggagggatggttgaattctttactgaattacaaaaatcaacacgtcaaacagaacgcatcctctttccaagcatgctctcacagt

SEQ ID NO: 5881 - DNA, 120 bp, synthetic construct
  source 1..120: mol_type = other DNA
tatcctttgggtttcagcctatctcaaattaagttagaccctattacgatacccttctataggtttctgtacttccatttgtctgataatcattattatccttcttcagctactttctcc

SEQ ID NO: 5882 - DNA, 120 bp, synthetic construct
  source 1..120: mol_type = other DNA
tccaagtttcatcctagtatctacccacagttttgtaactgtgttcatatactgtgcattcactctgtttctaatggtttcataattgatactcctgatgaagaccacctcttccacctg

SEQ ID NO: 5883 - DNA, 120 bp, synthetic construct
  source 1..120: mol_type = other DNA
aaactgattgtgatagatactaaaaggttactcacctatttttttttacttctccctcacttccttttccctttatttcgtctctttgtaacacaaatatacacacactaccactatctc

SEQ ID NO: 5884 - DNA, 120 bp, synthetic construct
  source 1..120: mol_type = other DNA
ctaaaaatgattaattataaactgaggtctacagatattgaaatggaaagatttaagcaaattatgatcaaacagggaagactaaacagtggagataaatttggttaacatacttttagg

SEQ ID NO: 5885 - DNA, 120 bp, synthetic construct
  source 1..120: mol_type = other DNA
gtttgggtagggttctctggttttgattctgggtgtgtacaatagtgcagtctctgtatgatttcttcatctgtaaacagtgtcagtggtgtctgtgatttctttggtggcttaggatat

SEQ ID NO: 5886 - DNA, 120 bp, synthetic construct
  source 1..120: mol_type = other DNA
ggaggtgggattactccctagggctcttgcctcggtctcagaagcagagtaagatgcagtgcgttgggatctgtgctgtcaaaatggtgccgtgctgcagttagttaggacttagggttc

SEQ ID NO: 5887 - DNA, 120 bp, synthetic construct
  source 1..120: mol_type = other DNA
ctcagccaacttggaggtattttggggaaaaaaaagaagtaatgatttttcctaacttatgagatattaagacctacaataacatcatattacttaaattacagcttattcaatggaaaa

SEQ ID NO: 5888 - DNA, 120 bp, synthetic construct
  source 1..120: mol_type = other DNA
acttttgccaagcaacaaaaatggaaactcaatagaaagacggaaaaaatacatcacagttacaactgttagtagaatccttggattgatggaaggtcacgcatagataccctggtgtaa

SEQ ID NO: 5889 - DNA, 120 bp, synthetic construct
  source 1..120: mol_type = other DNA
aataggagacaggttgggaagctgctcgtattttttatctgttaatgagtgacctgactgcttgcgagtattaaagttagatgcccaggatttagagctggtttcctatttttatgatgg

SEQ ID NO: 5890 - DNA, 120 bp, synthetic construct
  source 1..120: mol_type = other DNA
caagtactttgcaaataatgttagaaaaaaccttcaaaatatatttctgcctttcagtaaacagtataaatttagtcaaatattaaacctcattataattatcttacttataatccctca

SEQ ID NO: 5891 - DNA, 120 bp, synthetic construct
  source 1..120: mol_type = other DNA
ctgacttgggataggaaaggaaagttgtaacagaatacggatgtattcttctcaaccagagaagatgtaagttagcaacatgttctaaatccccagaagaaagaaatacgttaatgataa

SEQ ID NO: 5892 - DNA, 120 bp, synthetic construct
  source 1..120: mol_type = other DNA
ccccttctttctgacacttctctcctatttctacattatcacttatctcttcttcaagacccgttcttgtagcatgctctgtaaagcactgtccacttgtgcctcccacttcatggtagt

SEQ ID NO: 5893 - DNA, 120 bp, synthetic construct
  source 1..120: mol_type = other DNA
agatgtcaaatgtttctccccatctctgccctccgtcactgacttactcttcatatgcaatcaatttaatcagttgttatctgtcctcacagagatcctttatgctacacagtcaaatac

SEQ ID NO: 5894 - DNA, 120 bp, synthetic construct
  source 1..120: mol_type = other DNA
aaagtcctgcacaaaataaaggaaaggtgccctaaaagacccaccgtttaactaaagaaaatgaatctcacacagaggacatgctgcagagagaatgagctactgaaacacactagaatg

SEQ ID NO: 5895 - DNA, 120 bp, synthetic construct
  source 1..120: mol_type = other DNA
gtacttcttctatcttccaagtcaaccttctttggtccttcagttccagttttgttgatgagagaatgcctgtgtggagaagacactatccacctgaactatctcagactatcacttctg

SEQ ID NO: 5896 - DNA, 120 bp, synthetic construct
  source 1..120: mol_type = other DNA
atataagatgacagtaatagaaaatgttactccaaaagagaaaaaatgggaggcacataacagttacatagcaattgtgaaacccatttggggacatttttctcactccgtcctctagag

SEQ ID NO: 5897 - DNA, 120 bp, synthetic construct
  source 1..120: mol_type = other DNA
atgtttctatttatttgagtcttcttcaattcctttcatcaatgtttttacagttgccagtgtacaagtcattcacttccttggttaagtttattgctaagcattttattcttttttatg

SEQ ID NO: 5898 - DNA, 120 bp, synthetic construct
  source 1..120: mol_type = other DNA
aattgaaatcagggccttgaagaaatatgtgcaacactctgtttattttgaaattttttacagtagacaaaatacaaaaacaacccaagtattcattggcagatgaatggataaagaaaa

SEQ ID NO: 5899 - DNA, 120 bp, synthetic construct
  source 1..120: mol_type = other DNA
aaagaatctgttggaactttcactattttgatggtttttatgtcagcttgactgaggatgtccacactttatttaattgagcagttttctggatgtgtcagtgaggatgtttttagatga

SEQ ID NO: 5900 - DNA, 120 bp, synthetic construct
  source 1..120: mol_type = other DNA
aatatatggtagcattgaaccactggaagctagtagttggcaattgctgtaatcatcagtgagtcaaaaaggtagccaagtagtcttgacctacaggaagctgtggtgatggttaatata

SEQ ID NO: 5901 - DNA, 120 bp, synthetic construct
  source 1..120: mol_type = other DNA
cattgatatggcaaatgcattcttgtttcttgggagcatcccaagagtgactgtttcaggagatctattaagaagttgtaaggtttcttttaacgtaccttcgaagttccagaacatcat

SEQ ID NO: 5902 - DNA, 120 bp, synthetic construct
  source 1..120: mol_type = other DNA
aattacactgtgctttctcagctgttacatctttaaatacagaccattctctttgtgctctttttctggacctcctttctaacagatgtgctgggaagttcacaacgtatttcctgcaat

SEQ ID NO: 5903 - DNA, 120 bp, synthetic construct
  source 1..120: mol_type = other DNA
tttttgcaatctatccatctgacaaaaggctaatatctagaatctacaaagaacttaaacaaatttacaagaaaaaagcaaccccatcaaaaagtgagcaaaggatatgaacagaaactt

SEQ ID NO: 5904 - DNA, 120 bp, synthetic construct
  source 1..120: mol_type = other DNA
acagtgaccacaaagcattaaatcaaacatagggcccttctgagtgcagggtcctttgtgactgcatgggtcgcaggcccatgaagcttcctttgtaataaaagaaaatttaaaacaaat

SEQ ID NO: 5905 - DNA, 120 bp, synthetic construct
  source 1..120: mol_type = other DNA
caaactgggaggttagacacccccccccatatatacccctagaaaacggtctaaatccacggggctgagcaatgactatctgcaagccccatttccatggaacatcacaggataagaccc

SEQ ID NO: 5906 - DNA, 120 bp, synthetic construct
  source 1..120: mol_type = other DNA
agtcacccttacactgggactattgagccagtagcagttctgcaatgccctgggacaaagctcccaatggaaggggtgggttgtcatctttgctttctcacagtcttcatccttgtgtcc

SEQ ID NO: 5907 - DNA, 120 bp, synthetic construct
  source 1..120: mol_type = other DNA
ttctagacaagaagatcatccccaacacacaaaatcatcttattttccaaggacaaaatgaaagaaagaatgtaaaaggcagcttgacagaaagggcaggtcacctacaaagggaaccgt

SEQ ID NO: 5908 - DNA, 120 bp, synthetic construct
  source 1..120: mol_type = other DNA
aacaaagattgaactcaacattggatcaaatagatctgatagacctcagaactctccaccccaaaacaacagaatgtgcattcttctcatcaacacaggcacgtactctaaaaatagacc

SEQ ID NO: 5909 - DNA, 120 bp, synthetic construct
  source 1..120: mol_type = other DNA
actcctccccaactcattctatgaggccagcatcatcctgatacaaaaacctgaaagaaacacatacatgaaaggaaaacttcaggccaatattcttaatgaacatagatgcaaaaattc

SEQ ID NO: 5910 - DNA, 120 bp, synthetic construct
  source 1..120: mol_type = other DNA
attcaatgctatttctatcaaactaccaaagacattcttggtagtttctaaactaaagtttagaatactagaataaactagtttattctagaaaaacactttaaaattcatgtgaaacca

SEQ ID NO: 5911 - DNA, 120 bp, synthetic construct
  source 1..120: mol_type = other DNA
aaagcaaacatgtgatttctaaatggtgaaatttcagtgaaggaaacgatttactacagaccactctgactgctaattttctcagaagctaggaatatatgttttaccatatggattttt

SEQ ID NO: 5912 - DNA, 120 bp, synthetic construct
  source 1..120: mol_type = other DNA
aaaagaagagaaactactgaatctatcagaggaaatactattcttatccagggattcacagatttcctaggaaagaaagagtctaagatcaactggtgaataaaagcacaataacatttg

SEQ ID NO: 5913 - DNA, 120 bp, synthetic construct
  source 1..120: mol_type = other DNA
cttggtaagaaaattctgagctggaaggattctgattgtgattagtgttccatacattattttgtcttttgtctgaagcaatgctgaatacaacctcagtcactgaatttctccttttgg

SEQ ID NO: 5914 - DNA, 120 bp, synthetic construct
  source 1..120: mol_type = other DNA
cactgatctacactttgaggaacaaggaagtgaaaggggcctttaatagagcaatgaaaaggtggctttggcctaaagaaatcttgaagaactcttctgaagcataaataaacaattaaa

SEQ ID NO: 5915 - DNA, 120 bp, synthetic construct
  source 1..120: mol_type = other DNA
ggactgacccttcaaggtccctgcatgcacttttgtaaatctaaacaattttattctgacttctctccatgcttcttttgtcttctaacttcaccttctttggtccctcaattccagttt

SEQ ID NO: 5916 - DNA, 120 bp, synthetic construct
  source 1..120: mol_type = other DNA
acagcacattaaaatgatcatacaccatgactaagtgggattcatccttaggatgcaagaatgggttaacatacacaaattaataaatatgatatgccacattaacatactgagggataa

SEQ ID NO: 5917 - DNA, 120 bp, synthetic construct
  source 1..120: mol_type = other DNA
cacaaaagactccaaatagccaaggctatcttgagcaaaaagaacaaagctggaggcacaactacctgaactcaaaatataccacaaagctatagtaatcaaaacagtatgatactggca

SEQ ID NO: 5918 - DNA, 120 bp, synthetic construct
  source 1..120: mol_type = other DNA
tatggggaacatatagagattcctcaaaaaacataaaggtagaaataccatatgattcagtaatcccacttctgggtatatgtctaaaggaaataaaatcagtatttcaaaaccaaacat

SEQ ID NO: 5919 - DNA, 120 bp, synthetic construct
  source 1..120: mol_type = other DNA
tccccaaattaatatgagacatcaaacttcaaatctaggaggctcaaggaataccaagaagcataaatgccagaaaaactatggctaggaatatcatttttaaactatggaaaattaaac

SEQ ID NO: 5920 - DNA, 120 bp, synthetic construct
  source 1..120: mol_type = other DNA
tggttttaatttgcacttctctgatgactagcaatgttgagctttttttatatgtttgtaggttttgtaggctgattgtatgtcttcttttaaatgtaagacctgaaactataaaaattt

SEQ ID NO: 5921 - DNA, 120 bp, synthetic construct
  source 1..120: mol_type = other DNA
tagccagggtagcttatgttgtttgcaactgaaaccacaccaagaaaattcacttctctcaattactcactcctgattttagttacatatgcacacagacacacagaatagagcctgata

SEQ ID NO: 5922 - DNA, 120 bp, synthetic construct
  source 1..120: mol_type = other DNA
gcaaaatgttgatgttgaagctggatggtggctacatggagtacatgggggttcactgtgctcttctcttttatgtatgtttgaaatgttctacaagaaaagaagtttaaaagaaaagga

SEQ ID NO: 5923 - DNA, 120 bp, synthetic construct
  source 1..120: mol_type = other DNA
agagtccccagtggaggtgtccgaagtccaaaataacatcttcattactctccttcaatcaagtgtttcagtttgtttgatacagagaatcttccgaagtgcctgatgcacctccttgtt

SEQ ID NO: 5924 - DNA, 120 bp, synthetic construct
  source 1..120: mol_type = other DNA
aaattcagtaatagtttcgtttcctgtggagacaatttccatgtcgatcgtccaagtttctgcttggcaataattgggggagaaattttagcatgtctctgcatcttctataccaagcct

SEQ ID NO: 5925 - DNA, 120 bp, synthetic construct
  source 1..120: mol_type = other DNA
tcaggaggcggagcttgcagtaagccgatatcgcgccactgcaccccagcctgggcaatagaacgaaactccatctcaaaaaaaaaaaaaaaaaaaaaaaaaaaaagagttggccaggca

SEQ ID NO: 5926 - DNA, 120 bp, synthetic construct
  source 1..120: mol_type = other DNA
tgcagtggaaaatggaaagaatggaggtgagggcattttaggtaaaaggaaaaccatgagtacacactgaggcaagaaacaacattggatgtgaggaggagaaagaggtagcagggggta

SEQ ID NO: 5927 - DNA, 120 bp, synthetic construct
  source 1..120: mol_type = other DNA
ggagctaaataatgtgtgcacatgaacacagaattcagaataatagacattggagacttggaaaggtgaggtgggaaggggtgagggatgagaaattacctaatgggtataatgcacact

SEQ ID NO: 5928 - DNA, 120 bp, synthetic construct
  source 1..120: mol_type = other DNA
ctggtattctagagaaatactgcgggacttcttgaaatgatttttaataaaagactttttgactctctgggttaattgaaagttgctagtgattacaggataaacagctataaaaaccag

SEQ ID NO: 5929 - DNA, 120 bp, synthetic construct
  source 1..120: mol_type = other DNA
ttgaaatggttatgtagcgtttcaatatccttcctgaccaaattactgcccaacaactttgtctgccactactcccttttttgaagcttccacagaaatcaggctgatatatttatttct

SEQ ID NO: 5930 - DNA, 120 bp, synthetic construct
  source 1..120: mol_type = other DNA
attccacatcttggctattgtgaataatactacaatgaatatgaaagtgtagatctctcttcttatttcctttgaatatatacacagacaagggattgctgggtcatacaacggttctat

SEQ ID NO: 5931 - DNA, 120 bp, synthetic construct
  source 1..120: mol_type = other DNA
aagatccttttagtatactgttaaatttggtttgatagagaaacacaacttcagagataattcaagtttaagatgggaaagtctgactaatcttaattcttacagatattttagcaaact

SEQ ID NO: 5932 - DNA, 120 bp, synthetic construct
  source 1..120: mol_type = other DNA
aaaatatttcataagctcgagctcagtgatgttttctgattatttgttccttagactccagcctaggcatccaaggcaatctgaatccatagaaactttaataacagtacatcatggacc

SEQ ID NO: 5933 - DNA, 120 bp, synthetic construct
  source 1..120: mol_type = other DNA
accaaaaactcataggaatctaaccctgcatctcccctaaagcaaggaattatttaatatttgctcctacagggttcaaggcaactttatagaatgcaactgcagtgaataataagaatc

SEQ ID NO: 5934 - DNA, 120 bp, synthetic construct
  source 1..120: mol_type = other DNA
acgtaggatccagtcaaaaatcatgaatgacattttattgccatggcttttggtcttcttcaatctggaacgatgtcatctcccatctttgctttgtctttaaagacatggatatttttt

SEQ ID NO: 5935 - DNA, 120 bp, synthetic construct
  source 1..120: mol_type = other DNA
caaataaattgattactggattatatcaatatacataagaagggtaaaattgcattattactttttgtagatgtactagaacatctacagtgatgggaaaaaatcatgagaaaaaagaag

SEQ ID NO: 5936 - DNA, 120 bp, synthetic construct
  source 1..120: mol_type = other DNA
aactagagaaatgctcacccctctaaatagttgaactgtttaatgctataggagcttaaaaagagaggatctttctcattttttttctcctccttgaacactgtgaaatttatggtaaaa

SEQ ID NO: 5937 - DNA, 120 bp, synthetic construct
  source 1..120: mol_type = other DNA
cgccacatctctcgctctggatgtgctctccagatgttcttcttcctcttctttggcgccacggagtgctgcctcctggcagccatggcctatgaccgctatgcagccatctgtgaaccc

SEQ ID NO: 5938 - DNA, 120 bp, synthetic construct
  source 1..120: mol_type = other DNA
tccttatcagactagcaaggtaataaaattttcagccacaacaatgatccttaaagtcatttgacatttgtacgtcctaggtaaggcatttgtttcttgggtggtactactggttagtac

SEQ ID NO: 5939 - DNA, 120 bp, synthetic construct
  source 1..120: mol_type = other DNA
cccagaggaaggtggaagaagaggctctatacatcactgttaacagaaactgctacccagcacagatatgagccaaaaactaccaagacacggaagagcaaatataagggctatgatatg

SEQ ID NO: 5940 - DNA, 120 bp, synthetic construct
  source 1..120: mol_type = other DNA
agtgtgcaatttgataagttttgacccatgtatgcaccatgacattataggcgcaatcacgaaatgaacatatccagcccccgtgctccctcacactccattgtaatctctctctttcac

SEQ ID NO: 5941 - DNA, 120 bp, synthetic construct
  source 1..120: mol_type = other DNA
tgggtctcacatgatctgatggttttagaaatgggagctgccctacacaagctctcatttttcctgctactatccatgtaagatgtgatttgctcctccttgccttccaccatgattgtg

SEQ ID NO: 5942 - DNA, 120 bp, synthetic construct
  source 1..120: mol_type = other DNA
gggagggagggtagaagtcagatggaagggaagggagaaggagagaaagaagaaacagaggcaggctgaagaactgagcagagaaaagagaaagaacaaaaaagacctcagaggaagact

SEQ ID NO: 5943 - DNA, 120 bp, synthetic construct
  source 1..120: mol_type = other DNA
ttgcctatctccctcctcatcacccaatcccatttcctgcaagaagaggcaatattattaatctgtctcatctaccataaccaccacctggtttgtgcaatagcattttctggatgtttc

SEQ ID NO: 5944 - DNA, 120 bp, synthetic construct
  source 1..120: mol_type = other DNA
aagggtaaaaatactgccctaggcaatcatgatgcctcttatttactgcctttcaaatagaaactttctaaagcagccattgggaaatagttcatttttgcaatggaccacagataccta

SEQ ID NO: 5945 - DNA, 120 bp, synthetic construct
  source 1..120: mol_type = other DNA
tacagaaaggactactgggggtcttggatggccctccaatgctgttgtctctccagttcctcttggataattctggtgtccatgaattattatgttgccacatttggatgccccataagg

SEQ ID NO: 5946 - DNA, 120 bp, synthetic construct
  source 1..120: mol_type = other DNA
acctagggaggaagggcaggaggtatacagaaaacctctctactctctgttcagttttactatttaaagaaaaggaaagaagaagaaaacttcaaatacctccctataatcctatactaa

SEQ ID NO: 5947 - DNA, 120 bp, synthetic construct
  source 1..120: mol_type = other DNA
aacagaaactcagtgtttgggtagagtggagaggcttgtagtgatcttaactttcctgagaatgctcagcctaattatgtcccgggtatagaatccaacctcatccttgaaaaactgaaa

SEQ ID NO: 5948 - DNA, 120 bp, synthetic construct
  source 1..120: mol_type = other DNA
acatacaaatgggtgaagatttcatgataaagttgtcaaaagtaatggaaacaaaaacagaaatagacaagtggaacttaattaaactaaagagcttctgcacagccaaagaaaccatca

SEQ ID NO: 5949 - DNA, 120 bp, synthetic construct
  source 1..120: mol_type = other DNA
ctaggtgacaaaatcatttgtacaccaaaccccaatgacacgcaatttacccgtgtaacaaacctgcacctgtgccccttgaaactaaaataaaaattaggggaaaaaaaggagaagaga

SEQ ID NO: 5950 - DNA, 120 bp, synthetic construct
  source 1..120: mol_type = other DNA
aattaatatatatacattaaaaataaaattcaccagatatggtgaattaaagaggacagcaaatccttccttcctccacctcacaaataaattataaaaccagaaaaattgtcaaaaaca

SEQ ID NO: 5951 - DNA, 120 bp, synthetic construct
  source 1..120: mol_type = other DNA
aaataagaatataaacttgtcaatatagtatctaaaatgagacatgcaaagaaacaggaaagtataatcaagtcttagagaaaagactgcagttaatggaaactgactgtaagtgggact

SEQ ID NO: 5952 - DNA, 120 bp, synthetic construct
  source 1..120: mol_type = other DNA
atataagctagaaattaaaagcttctaaagaagaacataaaagaaaatatttatgaccttagaataggtaaagatttcttaggattcaaaaagcacttaactgcaaaaagataattgatg

SEQ ID NO: 5953 - DNA, 120 bp, synthetic construct
  source 1..120: mol_type = other DNA
caggtggatcacctgaaatcaggagttcgagatcagcctggtcaatgtggtgaaacaccgtctctactaaatatacaataattagctgggcatggtggtacatgtctataatcccagcta

SEQ ID NO: 5954 - DNA, 120 bp, synthetic construct
  source 1..120: mol_type = other DNA
acattgtagtcaagaagtcagctgattgtatttctaagatttggatgaagctgaaggattcacttacaagatgtcccagtcacatgttgcacgtttttagtagggagccttagtttctcc

SEQ ID NO: 5955 - DNA, 120 bp, synthetic construct
  source 1..120: mol_type = other DNA
gcagtggtgacctttttatatgccaaagggaactcagttgctggcacacttcctttgaatcttcacattccttcttaaccattagtagctgtggccaattagctgtctataggttatggg

SEQ ID NO: 5956 - DNA, 120 bp, synthetic construct
  source 1..120: mol_type = other DNA
cttctgcagagatattaactgtctagcagggttcttttaagaagcagatattccaggaaattatttagcacagtgttagtatataggacatcaacagatagtaactgtcaaaactataag

SEQ ID NO: 5957 - DNA, 120 bp, synthetic construct
  source 1..120: mol_type = other DNA
tcctgccattgtctgtgctcagaaaaccctcagtttctgcctcttacctgccagggtggtgccgcatcccacccccatcattgagcttgcctcatgtgtctcagcacagtcttttacagc

SEQ ID NO: 5958 - DNA, 120 bp, synthetic construct
  source 1..120: mol_type = other DNA
tgagctgtttttacactaaaaaaaaattctatcttagaaacatgaagaagtgaagaggcattatatatacaactcactgttcagtagctcagggtaaatataattgcatatgcaaagata

SEQ ID NO: 5959 - DNA, 120 bp, synthetic construct
  source 1..120: mol_type = other DNA
tgaagatcggttaattaatccatgttttacatcagctttctttgccctcaaccaggaagtcagaggcaccaatgtgaggttccacctgctttccagcacattcttggtttcctcacttct

SEQ ID NO: 5960 - DNA, 120 bp, synthetic construct
  source 1..120: mol_type = other DNA
ctcatccttgcctcttatggagccactgcccaggcagtgctgaggattaactctgccacagcatggagaaaggcctttgggacctgctcctcccatctcactgtggtcaccctcttctac

SEQ ID NO: 5961 - DNA, 120 bp, synthetic construct
  source 1..120: mol_type = other DNA
tgacaagtctttactgtctcccaggttttggatggagcatggggttttctgccccacaccctttaggatatagctgaagaatataatgaggaatagctggattctagaactgactcctca

SEQ ID NO: 5962 - DNA, 120 bp, synthetic construct
  source 1..120: mol_type = other DNA
acaaccaaaatgcaggctctattgttttcaatttagcagcctttcaaatgtatatggttctggccacattaaagttgcaaataacactttttttgagactgaaataaaggtgaaatattg

SEQ ID NO: 5963 - DNA, 120 bp, synthetic construct
  source 1..120: mol_type = other DNA
tgacaattactgaataaactaataataataaatggatctattcattctaagtagaccatgaaagggtaaatatttatatcataatccctaaagcaacaattccaataaaacaaaaaacca

SEQ ID NO: 5964 - DNA, 120 bp, synthetic construct
  source 1..120: mol_type = other DNA
cctgttccttcctcctcagctcttaaaaaccaacggtccacaatcatggtgaaaaccagcagacatgaaatcactggaggggacacaatagggttacagatcctttaatcccttatttcc

SEQ ID NO: 5965 - DNA, 120 bp, synthetic construct
  source 1..120: mol_type = other DNA
aaataatacaacatgcaaagaaacaataaagtaaggcccatacacagaaaaacaagcagttagtagaaactgtctctgggaccaggctctgaaggaggtgtctgcctcagtgcatccaaa

SEQ ID NO: 5966 - DNA, 120 bp, synthetic construct
  source 1..120: mol_type = other DNA
ttttcttcccgttgattcttttaccatcttcctcctcttactgattttgcgtgaaggggggttttgatggaggtaaggtagctgataagaaatgaggtagtgagaaaactagtgaggggt

SEQ ID NO: 5967 - DNA, 120 bp, synthetic construct
  source 1..120: mol_type = other DNA
actgatattctcttttcttttcttacatacagcttacagctttaggtcttacattatggtttatgataaattctgaattaatttttatgtatgatgccacgtatggattgaagttctgtt

SEQ ID NO: 5968 - DNA, 120 bp, synthetic construct
  source 1..120: mol_type = other DNA
gagtcattattctcttgctggatgtatgtcttttaccacttctcagtctgcatatctcctggtgatgatttgtttcatcttttttgtgtctccaaaaacctctttattttgccatctctt

SEQ ID NO: 5969 - DNA, 120 bp, synthetic construct
  source 1..120: mol_type = other DNA
ggggatcaccccagaggagtaattcttgagatgtggtccccaacacctttttaggggaagggaggccaacataatcttcaggtaatacttgaagtattgaagtgagtctgtgtttctcac

SEQ ID NO: 5970 - DNA, 120 bp, synthetic construct
  source 1..120: mol_type = other DNA
agagacgtttccacaaaaaactaaagaaccataagccagatgctcacctccaagggaactgttggcccagggtaaaggcacataaaatgcccaaattgtatcccctgcctgaacatagca

SEQ ID NO: 5971 - DNA, 120 bp, synthetic construct
  source 1..120: mol_type = other DNA
gagtaaaaaactgacaaatcaattacaagaacactgggaacaatctccaaagacgtgttcgtcgaattctagttagaatatggttgggaagcctcaagaaggcagagacaatgaaaacat

SEQ ID NO: 5972 - DNA, 120 bp, synthetic construct
  source 1..120: mol_type = other DNA
gccagcgttagatctctccacagtgagcaacgccagaaacaacttgttatggcactcttactgaatcgctttcctggcttttgtaggaagggatggatggaaacttgaggccataatggt

SEQ ID NO: 5973 - DNA, 120 bp, synthetic construct
  source 1..120: mol_type = other DNA
accaacatggcacatgtatacatatgtaacaaacatgcacgttgtgcacatgtaccctaaaacttaaagtataataaaaaaagaaaaataaaataaaataaaataaaataattagctgga

SEQ ID NO: 5974 - DNA, 120 bp, synthetic construct
  source 1..120: mol_type = other DNA
gacagagggcacagagaaagctctcaatactcatggccaccaggagacagagacccactgtgtcggagaaataggagacaggatccagaaacacagccacctgcaatgccgcctggtgat

SEQ ID NO: 5975 - DNA, 120 bp, synthetic construct
  source 1..120: mol_type = other DNA
ctgttagctctcaggcctcctccctggacctttgcacatgctgttctcctgcttggaagagcctctgtgcctcagtgagctcggtctcctccttccagtctctgcctcagggtcaccttc

SEQ ID NO: 5976 - DNA, 120 bp, synthetic construct
  source 1..120: mol_type = other DNA
tttaggttgggccctaatccaataggactggtgtcctcatgagatgaggagattaggattagttaaacacacagggacaaccatgtaagcatgcagggaaaagacagccatctacaagcc

SEQ ID NO: 5977 - DNA, 120 bp, synthetic construct
  source 1..120: mol_type = other DNA
aggagaggagatttatagataaaatagtttcatgggaagaagtgacttcccctccagccagaagaaaagatccgctatggaggtggcatgtggcctcaggggcagagtcatgcttcccat

SEQ ID NO: 5978 - DNA, 120 bp, synthetic construct
  source 1..120: mol_type = other DNA
agaccacacctcagtaacacagtggctcaaatcctacttctaacagaaaaacacaccctctgcccatctacacagccagggcacctgtgaaccagggaccagaacacagaagtagctcac

SEQ ID NO: 5979 - DNA, 120 bp, synthetic construct
  source 1..120: mol_type = other DNA
atagacttttgttcacatgtggctcaacttgagaaaaatgagatggatgcaaggctcctttcgttggtttctctagcaattcatgcatttctagcttgaagttgcttcttatccctgcag

SEQ ID NO: 5980 - DNA, 120 bp, synthetic construct
  source 1..120: mol_type = other DNA
attgtggatcttgaatttttttattatatgtacccaaattattttttcattattattattttttaaattatactttaagttctgggatacatgtgcagaacttgcaggtttgttacatag

SEQ ID NO: 5981 - DNA, 120 bp, synthetic construct
  source 1..120: mol_type = other DNA
atggataaattgcaaaaattttctcccattctgtaggttgcctgttcactctgatgatagtttcttttgctgtgcagaagctctttagtttaatttaattaatttgtcaattttgtcaaa

SEQ ID NO: 5982 - DNA, 120 bp, synthetic construct
  source 1..120: mol_type = other DNA
cactgtctcaaattcttggtttcaagagcatcctctgttcccactctctcatgatacctaatactggtgattatcaggctcaagtcctgcctatagtcatgtatctgaaacacaattggg

SEQ ID NO: 5983 - DNA, 120 bp, synthetic construct
  source 1..120: mol_type = other DNA
ttcattattttgtcaagaactgtatgtacctagtatcatcttgttactgcctctagctccattctggcacccacgtgacaggcatttaattccattcattcagtgagtgtcctttccagc

SEQ ID NO: 5984 - DNA, 120 bp, synthetic construct
  source 1..120: mol_type = other DNA
aagacattaaatcctccatattcttctgtgtgtccagccattaaagcttattaataacaggggtagaaaatcatatctcattatgcagtgctcctgatgactaacaaagttgaataattt

SEQ ID NO: 5985 - DNA, 120 bp, synthetic construct
  source 1..120: mol_type = other DNA
agaatggcaattctagtccttgaaggattgtctaaaatcacagatataaaattaataaggcttaaataaagggtatgtacttaaagggaatgcaatttttattcaaattacaaagaggta

SEQ ID NO: 5986 - DNA, 120 bp, synthetic construct
  source 1..120: mol_type = other DNA
tggctggatttggaggatgttccaggataatgattgagaataatgcatggccttttgtatggtctttatttgggattccacaggtaccaggaaagtctcactgggtcccattcccctcat

SEQ ID NO: 5987 - DNA, 120 bp, synthetic construct
  source 1..120: mol_type = other DNA
ctgatggccaccaggagacagagacacacctcaaaggagaagggagacaatatggccaggaaatcagggataaaaaacacgactccatgataagttagcagagtcacctgtaagaacccc

SEQ ID NO: 5988 - DNA, 120 bp, synthetic construct
  source 1..120: mol_type = other DNA
ggaacctccaccttccaggttcaagcgattctcctgcctcggcctcctgactagctggaactacaggcacccaccaccatgcccggctaatttttttgtatttttagtagagatggggtt

SEQ ID NO: 5989 - DNA, 120 bp, synthetic construct
  source 1..120: mol_type = other DNA
ctgatccagggctgagaccttggggacataattgtccctcctttctttctcctcctcctgtagcttgatggagatacctctcactggacctctctgaatctggttcgtcagatgcgtgac

SEQ ID NO: 5990 - DNA, 120 bp, synthetic construct
  source 1..120: mol_type = other DNA
ctaaggtagaactgtctgtaccttctttgggtttacattgtgataactgcaaggagaaaaataaattgggctgagtggatagaaaatgataagggtaatggatgtttcctagtgggataa

SEQ ID NO: 5991 - DNA, 120 bp, synthetic construct
  source 1..120: mol_type = other DNA
ccaacatcccctgtccagggcccactgcctgagccttggacatttcggctgagctggctaggcctctgagaatcagccctgatgacccttgatgccccactatggagtccagaacactga

SEQ ID NO: 5992 - DNA, 120 bp, synthetic construct
  source 1..120: mol_type = other DNA
ggcaggggagggagactccatctcaaaaaaaaaatggaagaaattctgtcatatatgacaacatagttgaacctgcagatcattatggtaagtgagattagccagtcatagaagaataaa

SEQ ID NO: 5993 - DNA, 120 bp, synthetic construct
  source 1..120: mol_type = other DNA
gctgggaccacaggcgtgtgctgccacatctggctaggtttcttttttaattttctaatttttttctttttgtagagatgggagtctccctttgttgccctgtgctggtctcaaattcct

SEQ ID NO: 5994 - DNA, 120 bp, synthetic construct
  source 1..120: mol_type = other DNA
taatgtggccctttcttcacctcagtaagaaaagcttggccctagccctcacagtttgaaaagagtgtcctcctattacaggcatgggtatgtattgggacttctgtgtccacatttcac

SEQ ID NO: 5995 - DNA, 120 bp, synthetic construct
  source 1..120: mol_type = other DNA
ttctgatgaactctggaggttttgtcactgctgctgcactgctttacttgattccaggaattcgtcctttgtcctctgtggaagttttagttcaggtctcatttttttcccttaagcaca

SEQ ID NO: 5996 - DNA, 120 bp, synthetic construct
  source 1..120: mol_type = other DNA
gacatgtttaacttcacccaccaggcacccatctcactaagaagactttgatgttcatgagaaatgaatttctgctgcctacaggaaggagataggacttctctgaaccgttgaggctcc

SEQ ID NO: 5997 - DNA, 120 bp, synthetic construct
  source 1..120: mol_type = other DNA
gatggttgaaaattgtgtgaccttcccccttcactctctctctttctcctgccaccatgtgaagaaggtgcttgcttccccttggtgttctgccataaatgtaagtttcctgaggcctcc

SEQ ID NO: 5998 - DNA, 120 bp, synthetic construct
  source 1..120: mol_type = other DNA
tccagtggtaacatcatgcaaaattatattataatatttttaatgtgggtgtttatcactgtaaacttctctcttagaactattttgctgcatcccataagtttagggatgttgtatttc

SEQ ID NO: 5999 - DNA, 120 bp, synthetic construct
  source 1..120: mol_type = other DNA
ccatttgttcaggggtttctgactattttgtagatattttgttctttcttcctcttgctgtattcctttgtaatttaatgatttttttgtgtggtaatatgctttgattttactcttttt

SEQ ID NO: 6000 - DNA, 120 bp, synthetic construct
  source 1..120: mol_type = other DNA
ctcagagatatctgccaacgtcagtgttggggtctcttctgaaggacgctgtctgtgagattgggaaaggtacccagcagccttgtttctgtggcccaatactttttccaccagactcct

SEQ ID NO: 6001 - DNA, 120 bp, synthetic construct
  source 1..120: mol_type = other DNA
atgagaattctcactacgccagggttttgaggcacccctgttcccaggttccttcctagaaccctggtcgccttgggatgactgggggattctagttgactacccaaggaaatctgaagc

SEQ ID NO: 6002 - DNA, 120 bp, synthetic construct
  source 1..120: mol_type = other DNA
cttgggttgaaaagtgctttctgggctgactccgctgttagaacaggtaggaggttgcttggtaaatgttgcaagaatgtgaactcttgtggtagaaatattctgaggctgattcagagg

SEQ ID NO: 6003 - DNA, 120 bp, synthetic construct
  source 1..120: mol_type = other DNA
aggtatcaggggttaggacttgaacatatctttctgaggtcacaccaggtgacccttcttccctaacagaccatccagatcctctgtggctttgcagttatgagcatggggatccttttg

SEQ ID NO: 6004 - DNA, 120 bp, synthetic construct
  source 1..120: mol_type = other DNA
tataaacagcaagcatctattactcacagttctggaggctggaagtccaagatcgtgacaccgacagatttggtgtctggtgaaggctgttgcttgttcatagatagagcgttctcgctg

SEQ ID NO: 6005 - DNA, 120 bp, synthetic construct
  source 1..120: mol_type = other DNA
agctgagtcaggttctcatgagattctaggggtggcttggcctcctatatccacttcccccaacattggcctgtagccacatatggcctggactttggcccagcttccagcatgcccaat

SEQ ID NO: 6006 - DNA, 120 bp, synthetic construct
  source 1..120: mol_type = other DNA
ctcaaaggatcagatgcccttcttcatccccaccctcagcctcccctgagccctccaggaaagcagcctgtgtggatcccctaaacaagggcaggagcaccagccctacagagcaagcag

SEQ ID NO: 6007 - DNA, 120 bp, synthetic construct
  source 1..120: mol_type = other DNA
atggctggaggaacctcctcagggtgccagtggactgggtaaagccatcagggggcttggaggtcagggaagctgtgatttatcaagcactgtgggcattgcaatattttctctgttcgg

SEQ ID NO: 6008 - DNA, 120 bp, synthetic construct
  source 1..120: mol_type = other DNA
caacaacttggtttcaatttgagcaccttaataaacaaactgatttaactgtcatagtctcaagggatgggtttttccaagcaagaactctagggtcagggtagcgaattgctcaagaaa

SEQ ID NO: 6009 - DNA, 120 bp, synthetic construct
  source 1..120: mol_type = other DNA
aggctctaggaaaaaactctttcttgtctcttccagctttggggaactccaggcattctttggcttctggacacgtctttctaacctctgtctccatcctcatgaggccttcccctctgt

SEQ ID NO: 6010 - DNA, 120 bp, synthetic construct
  source 1..120: mol_type = other DNA
agacctcgtgcatcctgcatttcagaggatcctgtctgtgatgctcctcttcacggcattggagctcagtgtcgctatcctttcttctgtcctcttgtgaaaaaagacctgttcagatgt

SEQ ID NO: 6011 - DNA, 120 bp, synthetic construct
  source 1..120: mol_type = other DNA
acaacaaaatgaagagctgcctgggagagatgaacccatggtccccgtcttcacgctaagatgcaaaagagcagagcttccagcttccaactggagctcccacacaaaatactggggaaa

SEQ ID NO: 6012 - DNA, 120 bp, synthetic construct
  source 1..120: mol_type = other DNA
gcattgatatttatactacaactctccaaacactatttcacaaatcaagcttctatagcaaaagtaggaaaacgttttaagaaattttattttaccttgtcaatgaccaaaaacactcaa

SEQ ID NO: 6013 - DNA, 120 bp, synthetic construct
  source 1..120: mol_type = other DNA
ctttcctcaactgtcaactctgagtgctaagaacctaaaagatatctctgctttactgcacagcaaggtctttgttgtgagttgggttgtgtcctctcaaaatttgtatattgaagttct

SEQ ID NO: 6014 - DNA, 120 bp, synthetic construct
  source 1..120: mol_type = other DNA
ataatagcttccaccttccaccctgcagagcaattgtaaacttcataacacatgcgaagcgcttgactcaaaaaacaggaagcactaaggactgttaatttaactggcatctcattactt

SEQ ID NO: 6015 - DNA, 120 bp, synthetic construct
  source 1..120: mol_type = other DNA
cttcctttattctctggtggatcccatttctcgccattgttcagtgctctctatgccccaccatgctgtcctactctcttcatcctctgccttctcccatgctgtctgcctacctatagt

SEQ ID NO: 6016 - DNA, 120 bp, synthetic construct
  source 1..120: mol_type = other DNA
taaacctcctaatttacatgtaacaaattgcattagttacaatattaactcaaaatggatcatagatctaagcataaaatataaaaatatataatgcttagactaaaacataggagaaaa

SEQ ID NO: 6017 - DNA, 120 bp, synthetic construct
  source 1..120: mol_type = other DNA
tttttttaatgtgtaatacagcattgtttactataggtaggatgttatgcatcgaatctctagaatttaatcatcttccatacccgaaattttacacaagctgaaaagcaactcctcatg

SEQ ID NO: 6018 - DNA, 120 bp, synthetic construct
  source 1..120: mol_type = other DNA
tgctgagcatgtaggcctaaaattttacacacaaactgagtccctatgaggaaagggcaagccctctgccctctgcccttcctatgtctgcatatccagaactgcctcaggtggagaggg

SEQ ID NO: 6019 - DNA, 120 bp, synthetic construct
  source 1..120: mol_type = other DNA
ggcatccctcagtccaagtctgtgcaagaaaaagttccccagaggcagggatcttatccattcagactttaagtgtgggctctgatggttactgtgggacccaccaggcactggagtttt

SEQ ID NO: 6020 - DNA, 120 bp, synthetic construct
  source 1..120: mol_type = other DNA
tggggtgttctctaaagctctcaggtgccatgtaattttgggagtattttgtcttatagggtggatatggacaaagacatggatatcctgctcgcccaggagtaaagggacatcattgcc

SEQ ID NO: 6021 - DNA, 120 bp, synthetic construct
  source 1..120: mol_type = other DNA
agtgagccttttgtctgttataaggctggttccttcctgaggaaccagccctttagccctgccctaaagaaaataaaggagcagggctcctatacagggctctcactgtaaagcaactga

SEQ ID NO: 6022 - DNA, 120 bp, synthetic construct
  source 1..120: mol_type = other DNA
atgaccttcaacacaggtcccaggggagatggaggaattcaggggaatgggcgcatcccatgaaatgaggttatacctgtttggtataataaaattacaggttaaatctataaatataaa

SEQ ID NO: 6023 - DNA, 120 bp, synthetic construct
  source 1..120: mol_type = other DNA
agctttcagtgtttaagatttagcaggacttggtgtcctttttagatacaggagtcaaagccctgtaactcaacagaacaaggactttaaaagcaatacagaacattgtatggatgttaa

SEQ ID NO: 6024 - DNA, 120 bp, synthetic construct
  source 1..120: mol_type = other DNA
gttgctgctgttgttgctgctgttgtttccttgagacaaggtctctctctctgtgtcacccaggctggggtgtagtggcatgatcacagctcactgcagccttgacccacccaggctcaa

SEQ ID NO: 6025 - DNA, 120 bp, synthetic construct
  source 1..120: mol_type = other DNA
ctgagctttaaaaatcctttaaaatctcattgctgtaaccgagtacacccattttcctgagacatcaattattattttttttctttccttttcttgttccttcagttccccactccctac

SEQ ID NO: 6026 - DNA, 120 bp, synthetic construct
  source 1..120: mol_type = other DNA
agagaatttccaagacaaaccccatttcagctacttatgtaggaataaggcccaggttgaagattgctctctatcatcctagaagcaggaaaaaaactcaaaactcatcttccctgttgg

SEQ ID NO: 6027 - DNA, 120 bp, synthetic construct
  source 1..120: mol_type = other DNA
gatggttgcctgacattcctgggcgagggtccctctcctgacctattcatgtctgactaattacctattgtaacagtttgaacaataaagatagctcaaggccagacatggtggttcatg

SEQ ID NO: 6028 - DNA, 120 bp, synthetic construct
  source 1..120: mol_type = other DNA
caaaccccacaagctttgcgttgttgcagattgtccctctcagaatattttacaagatggtgaagtgcctaatgaacatttcttttgtcataaagtgagtttggatcctgaagaagccat

SEQ ID NO: 6029 - DNA, 120 bp, synthetic construct
  source 1..120: mol_type = other DNA
tctctgccttctcaggtgacattagttctcctaggggatattaactctcccaagtgacctcttcccttccaagtgacctgtttcctcaggtgacctcagctctgccaggggacttctgcc

SEQ ID NO: 6030 - DNA, 120 bp, synthetic construct
  source 1..120: mol_type = other DNA
gccactaagcagtgcctccagccaggccccaggggcattcccacccctcctctcctggccgagaccacatgatggggtcactggatgggacagtgaaaggccttggggtctggaagcaac

SEQ ID NO: 6031 - DNA, 120 bp, synthetic construct
  source 1..120: mol_type = other DNA
cagggaattctgggcagactgggccaagacccatcttggaagagccaaaggagccagggaagccacaagccctcaggaagccccttattctgggaaccacatttctgctgagatgagtcc

SEQ ID NO: 6032 - DNA, 120 bp, synthetic construct
  source 1..120: mol_type = other DNA
cacacccaggtgggcttcagcaccaagtctcctcctgtgtcaccctgcggggcagtaaatagtgggaagtgcccagacctcaccagccctgctccctgggccttcctccagcccctcctc

SEQ ID NO: 6033 - DNA, 120 bp, synthetic construct
  source 1..120: mol_type = other DNA
gatatcccccagcattgagaccctccccaaggggatgggctgcttctccctggcccacagcccagctccagcagcccatgggtatagccctcctgaaacaggagcctcatcctccctcac

SEQ ID NO: 6034 - DNA, 120 bp, synthetic construct
  source 1..120: mol_type = other DNA
aaggccaagctgatgatgttaccaagctcaaactaccactggccaccttggtgagggtggggcagaaacacgtggaccagccaccaacctcatccattcaaggaagcagaaatggtcagg

SEQ ID NO: 6035 - DNA, 120 bp, synthetic construct
  source 1..120: mol_type = other DNA
ttgcttccctcatcctttccatctcatctcctctcagcatctggcaatcccaggtcctgagcctgtgccaaggcgggacacaaaggacaccactgacaacaagccaggtgactagcgggg

SEQ ID NO: 6036 - DNA, 120 bp, synthetic construct
  source 1..120: mol_type = other DNA
acagcccttgtgtggtccccagcccacctcacaggttctaggctggccaccctgtggcctctgtactgtgtatctggacccaggctctgtgggaagggtacctggtctgacaaacattcc

SEQ ID NO: 6037 - DNA, 120 bp, synthetic construct
  source 1..120: mol_type = other DNA
ccgtctgaatttctgaacctttacgataggtcttgaagttaggtattgttagccatcttacttaattcttcttttttagagggttttttatttctaatctaggtccactgcattgccaca

SEQ ID NO: 6038 - DNA, 120 bp, synthetic construct
  source 1..120: mol_type = other DNA
gaaggactgtgcttgttataatgtgctggggcctttggataaccactgactaagtgggccaagtggccttttggcttaggctgaagcaggataataataacgttatctattcatagaatt

SEQ ID NO: 6039 - DNA, 120 bp, synthetic construct
  source 1..120: mol_type = other DNA
gtcaggctggaaatgcccaccacaagacaaataagcatgtgaaatattataaagcctgcctgaaattggtcacatgccaggcccttctcccattactcacaaacctggctaaccacatgc

SEQ ID NO: 6040 - DNA, 120 bp, synthetic construct
  source 1..120: mol_type = other DNA
acctttgttctccaactctctcattgacacagacagttttcatggcatggttttggtggaggcaccaggcaattcctctgccctaaggttctgagatattctgagtcccacatggggcag

SEQ ID NO: 6041 - DNA, 120 bp, synthetic construct
  source 1..120: mol_type = other DNA
tgacctcttgggggcaaatcccagctctttttcatagtagctgactctttctttgcctcagcatccccatctaagtaagggctgctgctatgggatgaattgtattcttctaaattcata

SEQ ID NO: 6042 - DNA, 120 bp, synthetic construct
  source 1..120: mol_type = other DNA
ccaaggcaccaagcaggagcagttgggctctggtccccaacaaagaaaggagatttatagataaaagagtttcaaggggagaggtgacttacccttcaacaaagagaaaatgcccatttt

SEQ ID NO: 6043 - DNA, 120 bp, synthetic construct
  source 1..120: mol_type = other DNA
gcgttagatacaaactaaatatgaatatagaagctgtgaaatcagaagacccaaaaggattttcctagaagtcatagactacacctcagtaatacagtggctcaaatcctacctttaaca

SEQ ID NO: 6044 - DNA, 120 bp, synthetic construct
  source 1..120: mol_type = other DNA
gcagtgcaatggtgcaatctcggctcgctgcaacctcagcctcctgggttcaaacgattctcctgcctcagcctcctgagtagctgggattacaggcatgcaccacaacacctggctaat

SEQ ID NO: 6045 - DNA, 120 bp, synthetic construct
  source 1..120: mol_type = other DNA
ttttttctttaaatgtttggtagaattcaccagtagagacatctgggcctgggccttttttgtgggaagatatgcaatgacagttttaatgtctttacttcttgtaggcttatacagatt

SEQ ID NO: 6046 - DNA, 120 bp, synthetic construct
  source 1..120: mol_type = other DNA
tctagttgttccatcaatgattgataatggagtgttgaaatcttcaactatttttaatgatttgtttatttatcccctcaattctgtcattttcatgttttatgtatttgggggatgtgt

SEQ ID NO: 6047 - DNA, 120 bp, synthetic construct
  source 1..120: mol_type = other DNA
gtatgaggaacatgaattaaaaagaagaagaatgaacagagtttcagagacctgtgggacacaatccagtgtaccaaaacacataaacgagaattttcaggagaggatagaataaaagga

SEQ ID NO: 6048 - DNA, 120 bp, synthetic construct
  source 1..120: mol_type = other DNA
gaatagagcaataaaaaacacgatataaagaaaataagtagcaaaatgacaggtcaaaatcctatactatcagtaattacattaaatgtaaatatattaaacaccccctttaaatggcag

SEQ ID NO: 6049 - DNA, 120 bp, synthetic construct
  source 1..120: mol_type = other DNA
tacaatgcacaggacagcacccccaacaaaggatgatccagtcaaaatcgtcagtagtactgaggtggagggcactgatctttagatcttgtgactaggctttttctttctgagtaacat

SEQ ID NO: 6050 - DNA, 120 bp, synthetic construct
  source 1..120: mol_type = other DNA
cctcctggcttgcagacaactccctacttgctgcctcctcacgtggcctttcctcttttataaggaaactaatcctatttggccctcacctttgtgacctcatttaactataattacctc

SEQ ID NO: 6051 - DNA, 120 bp, synthetic construct
  source 1..120: mol_type = other DNA
ctcagtgtggctattggctttccttcggccacagtcagctgaacaaatatagggagagagtaggactatagttggatttaaataggaaagcaatttagctgaaagagtgtaacaagtgaa

SEQ ID NO: 6052 - DNA, 120 bp, synthetic construct
  source 1..120: mol_type = other DNA
cttgtctggtctgtaccccattacaaggttctccaggaacagacatcaccacctctgcctagatcctgaaatttcacaaatgtaggttctttcttacccgttctttttattcctctattt

SEQ ID NO: 6053 - DNA, 120 bp, synthetic construct
  source 1..120: mol_type = other DNA
tgtttcttaatttgggaaacagatatgacgatagttagcatttattaaaggatgacagttaacaactgctatgtgccaggccttgttctaacagcttttcatatttagcccacttaacat

SEQ ID NO: 6054 - DNA, 120 bp, synthetic construct
  source 1..120: mol_type = other DNA
tttaagagtttatttgagcagtgatccagaagtggctagggagctccccagagagaacatgaggaggaggctttttaggacaaatagataaaagcaaagataatatttcattggttacag

SEQ ID NO: 6055 - DNA, 120 bp, synthetic construct
  source 1..120: mol_type = other DNA
gcgcatcgctggctctgggttccgccgaatgcgtcctcctggcggtgatggctctggaccgcgcggccgcagtgtgccgcccgctgcgctatgcggggctcgtctccccgcgcctatgtc

SEQ ID NO: 6056 - DNA, 120 bp, synthetic construct
  source 1..120: mol_type = other DNA
ttggtctctgcaatcagaagtctcaagttgacaagaaaatcatagtccctaccctgcaggagagggtacatccagaaaaagcgaccatggactctattctcagaaatcagtccaacttag

SEQ ID NO: 6057 - DNA, 120 bp, synthetic construct
  source 1..120: mol_type = other DNA
gttcaaccattattgagtgatataaataaagcactggacttaacaaagacagaaatacagaaatcagtagaacatggatcccaacctaaaacttactctcttgtcataaaggaaaggaga

SEQ ID NO: 6058 - DNA, 120 bp, synthetic construct
  source 1..120: mol_type = other DNA
acacttctactccccaccacaatggctccccctcttccactatctatctggtcctctagctcctattcagtagccagtgtccctctctttcttggaacttcttttttggaattaccaagt

SEQ ID NO: 6059 - DNA, 120 bp, synthetic construct
  source 1..120: mol_type = other DNA
taattttctcctgataagagaccactgaccatggactggttctggctagtttacagaagctgtgcatttgaatgcctttgtgtccctgcttcaccttttcatgtataaggcctaactgta

SEQ ID NO: 6060 - DNA, 120 bp, synthetic construct
  source 1..120: mol_type = other DNA
ctgcatccacctttaaacacggggcttgcaacttagctcacacctgaccaatcaggtagtaaagagagctcactaaaatgctaattaggcaaaaacaggaggtaaagatatagccaatca

SEQ ID NO: 6061 - DNA, 120 bp, synthetic construct
  source 1..120: mol_type = other DNA
agatctgtgttaagcattgccttaattccaggttctctccatagtgcatattttcttatataatgtaatgtgttagatcattaacaacttcagatgaatgagttttgtgaagctctcctt

SEQ ID NO: 6062 - DNA, 120 bp, synthetic construct
  source 1..120: mol_type = other DNA
gaacaccccaatctctctgccatctccacgccactgagcatgccttttcctccaactctatccccaccaccatgaatttataagaacacacggtgtaaacagtatcttcgtcaaaaagcc

SEQ ID NO: 6063 - DNA, 120 bp, synthetic construct
  source 1..120: mol_type = other DNA
atttccagcatggggttactgtgagggcaaatctaatatactctcagaaaaaactaattcaggggattccctacccagagatgacctggattctgggaaatagtgccctttcaagaaaac

SEQ ID NO: 6064 - DNA, 120 bp, synthetic construct
  source 1..120: mol_type = other DNA
acaggttataaagaccttgcaaataaaaggaagcagtaaagaagccagccaaaacccaccaaaaccaagatggcaacgaaagtgacttctggtcattctcactgctcattatatgctaaa

SEQ ID NO: 6065 - DNA, 120 bp, synthetic construct
  source 1..120: mol_type = other DNA
aaatagaaggatcatacctgcaaacaacgatacagatgaatgtgctagaacctattgagtgaaaaaagtgttagaaacaaatgcttattccacggtgccgcaaagaaatagcactcagac

SEQ ID NO: 6066 - DNA, 120 bp, synthetic construct
  source 1..120: mol_type = other DNA
acttgagagacataccgtatattcactttattaaaggtaaagtaataatatctaaaacaaatgttccaaagaaaactaaacataagcaaaactgaatatagtatctagaactacatatgt

SEQ ID NO: 6067 - DNA, 120 bp, synthetic construct
  source 1..120: mol_type = other DNA
aacatctctgtgaggagacactgactctgcaagttgcctgaggagcaggaatgagaggtggactattcattatatgtcttatcttattattgttgctattttttagttttgcaactgtgc

SEQ ID NO: 6068 - DNA, 120 bp, synthetic construct
  source 1..120: mol_type = other DNA
taaacaagattcaatacgcttcagagaaagataatagaatacaaaatagataaaggtaatagaatacggaatctctgtaacatattactcacatcatcaagtgtaaaacaggaaatcacc

SEQ ID NO: 6069 - DNA, 120 bp, synthetic construct
  source 1..120: mol_type = other DNA
gggttcaagtgattatcctgcctcagcctcccaagtagctgggattagaggcatgcaccaccacgcctggctaatttttgtatttttagtagaaacgttctttggttcaagacggccagg

SEQ ID NO: 6070 - DNA, 120 bp, synthetic construct
  source 1..120: mol_type = other DNA
aaataaacatccaggagtcattactggatatgaataaagaaaataaacagtaaacgaataggaggagagggacagctcttacaaaattcaaaataacaaacataggagaaatgatgaaag

SEQ ID NO: 6071 - DNA, 120 bp, synthetic construct
  source 1..120: mol_type = other DNA
tatcatgtttcccaggctggtctcaaactcctgggctcaagtatcctcccaccttggcctcccaaagttctgggattacaggtgtgagccaccatacccaacaattgtggcttctttcat

SEQ ID NO: 6072 - DNA, 120 bp, synthetic construct
  source 1..120: mol_type = other DNA
gtgcaatcacggctccctacagccttgacctcctaagtatattgaacaatatacttaaaatgtgtgcattttattacatgtaaattctatcttaaagaagtttattttattttatgtttt

SEQ ID NO: 6073 - DNA, 120 bp, synthetic construct
  source 1..120: mol_type = other DNA
ctgaatcatctccttctttcttaatcatcattagcaccagtggctaattaattgtctgtgaactgtgacgctctggagtcttgggagaattaacaagccatttctctccatgggatggga

SEQ ID NO: 6074 - DNA, 120 bp, synthetic construct; identical to SEQ ID NO: 72
  source 1..120: mol_type = other DNA

SEQ ID NO: 6075 - DNA, 120 bp, synthetic construct
  source 1..120: mol_type = other DNA
aggaagcattccctgattcactcaaccaccctactcattttctttacagatctatctctcacctctagccccctaccccaatatttttgccttatttgcctgcaatgtttcaagttttct

SEQ ID NO: 6076 - DNA, 120 bp, synthetic construct
  source 1..120: mol_type = other DNA
gcaggacatttcatttgcaggagaaatgtttgttcttagtttaataagtcataattttttttgaaagacctaaatcacctgactgatctttctagcagttgagtcatttcacatacagaa

SEQ ID NO: 6077 - DNA, 120 bp, synthetic construct
  source 1..120: mol_type = other DNA
aagaagaccatcatcttactgggctgctctgtccagttcttcatcttcctgtccctggggaccactgagtgcatcctcctgacggtgatggcctttgaccgctacatggctatcttcaag

SEQ ID NO: 6078 - DNA, 120 bp, synthetic construct
  source 1..120: mol_type = other DNA
aatatttaatttctatatttttattttcttttcaatttggtttttaactctcttctcccctacaggttctccaaatgcaccatgcctatttctggttatgtaacccctctccgattgtta

SEQ ID NO: 6079 - DNA, 120 bp, synthetic construct
  source 1..120: mol_type = other DNA
ccaggcacaaacatgaaatccaattgtaagtaataaagtgctgcaatggagcctggatggagcaagggcctcagaaaaaagggagcagcagtgtaagccccaacttctatgaaatcttat

SEQ ID NO: 6080 - DNA, 120 bp, synthetic construct
  source 1..120: mol_type = other DNA
ccaacaaaaagcacttcccatgaagtaacaggatctttttaattgtctgcctctcaaagtacacagtaaggaaagtgagggtcagggttttggctcacttatccttatactcttagtgcc

SEQ ID NO: 6081 - DNA, 120 bp, synthetic construct
  source 1..120: mol_type = other DNA
caagtttatgccccagtaagaatcagttccagtgctcttcattaattgccaggcaaaatagccatagtaatgtagtaactagaataaaatttaaattaggttagttataaacaccctatc

SEQ ID NO: 6082 - DNA, 120 bp, synthetic construct
  source 1..120: mol_type = other DNA
aatatcctctataataaactggtaaattgaactaaagagctttcatgtattctgtgaactgctctaataaatcatcaaacccaaggaggggattgtgggaacccccagtagggttcccag

SEQ ID NO: 6083 - DNA, 120 bp, synthetic construct
  source 1..120: mol_type = other DNA
gccaccatagttactgccttcataagtccatttttaccagcactagggtggcctgtggagaagactgcttagtgtgaactggcctatagtcactgtttacttggtttagaagaggtttag

SEQ ID NO: 6084 - DNA, 120 bp, synthetic construct
  source 1..120: mol_type = other DNA
ctgatgcaacatggaatataaggaaacccagccaatttcgttccaaattcttggcccacaacatgtgagatacaataaggtttgtgttcatttaagccattaaatttggggagactttgt

SEQ ID NO: 6085 - DNA, 120 bp, synthetic construct
  source 1..120: mol_type = other DNA
acacagttctcctcaagacctatggactcctggtctgagcctaataaagactgtttattccaaaaaacacctctgtattataaattcttctgtgtaatagtgtgttactgtgcatctctt

SEQ ID NO: 6086 - DNA, 120 bp, synthetic construct
  source 1..120: mol_type = other DNA
gtggtggtcgtacaatgcgagagcatcaacatttctggcaagttctacagaaacaagttgaagtacctgggctttctccgcaagcggatgaacaccttctggaggccctgccatttctcg

SEQ ID NO: 6087 - DNA, 120 bp, synthetic construct
  source 1..120: mol_type = other DNA
taaagaccagtctgatcaatatggtgaaaccctgtctctactaaaaatacaaaaattagccaggcgtggtggcatttgcctgtagtcccagctactcaggaggctgaggcaggagaatcg

SEQ ID NO: 6088 - DNA, 120 bp, synthetic construct
  source 1..120: mol_type = other DNA
ttttcttcctgttgacagaaagaagcaatgagtgacctcttttacctaccacagtgatgactattgttggcatatttcctatagatattcccctgccccttttaccataatttgtggcta

SEQ ID NO: 6089 - DNA, 120 bp, synthetic construct
  source 1..120: mol_type = other DNA
tacaagtctcttgtcccgtctgtgactgttcactttttggtaaaattgggataattttatctctttgtagggtcactgtgagaaccagatgttcagggagttgtttatcaccatgctttg

SEQ ID NO: 6090 - DNA, 120 bp, synthetic construct
  source 1..120: mol_type = other DNA
gagatcgtgccattgcactccagcctgggctataaaacgtgactctaaaaaaaaaaaaaaaaaaaaaaaattagaatggtggtgacatcttgaggggtgacaaattgagaaaattgagag

SEQ ID NO: 6091 - DNA, 120 bp, synthetic construct
  source 1..120: mol_type = other DNA
gagcaataattgagcctacagagacaacttatcagaaaattcattcaatataccttacgagatcatccaatagataagagacaactctagaacagcattcagaacatagtggcactcaat

SEQ ID NO: 6092 - DNA, 120 bp, synthetic construct
  source 1..120: mol_type = other DNA
ttctgccccgatcggcaggtggatgattttgtctgtgaggtcccagctctaattcgactctcctgtgaagacacctcctacaatgagatccaggtggctgttgccagtgtcttcatcttg

SEQ ID NO: 6093 - DNA, 120 bp, synthetic construct
  source 1..120: mol_type = other DNA
ctcacccaagaacacacagtgtccacagcatcagaactaaaatccaggccccataattttcagtcaggcaactctcaaatacacactgttgctttcacaccataatcaaatatcccagta

SEQ ID NO: 6094 - DNA, 120 bp, synthetic construct
  source 1..120: mol_type = other DNA
ccagactccttgctcttaaccttgccttttggtaaaaataatgcctcccaggcccaggtgaaaagcttcaacttctcaacaagctttgaggaaatcatttcaatctaaaactatatctaa

SEQ ID NO: 6095 - DNA, 120 bp, synthetic construct
  source 1..120: mol_type = other DNA
aattccacttttcaaatcactgtagtaagacctttttttcatgaccccctctatctgctttctcttactggcacctagaaatgtctacacttttctcctgtttatcatctccctacagcc

SEQ ID NO: 6096 - DNA, 120 bp, synthetic construct
  source 1..120: mol_type = other DNA
aggagcttggagaaagtaacaccttctaggcagttaacatttttctactggaccccaaatttttaaacaaaggttctcttccttaactaattgcaaatttggggtttttttgtttttgtt

SEQ ID NO: 6097 - DNA, 120 bp, synthetic construct
  source 1..120: mol_type = other DNA
catatttggctaatttttttatttcttgtagagttggggtctcactttgttgcccaggctgttcttgaactcctaggttcaagtgatcttcctgcctcagcctctcaaagtgctgggatt

SEQ ID NO: 6098 - DNA, 120 bp, synthetic construct
  source 1..120: mol_type = other DNA
atgcctttctttctattggtgcaatccttggtgtaagtatctggttttattgcaccaggcaagcagaccccagtttggttctataacagaaaaggctaaagacaaaaataagcatgttgt

SEQ ID NO: 6099 - DNA, 120 bp, synthetic construct
  source 1..120: mol_type = other DNA
tatctgtaaaggtacaactctactaatggagaagacagtttaaatccacataacaaaccttactaaaccactttgttccatattttcctggtcactttcccataacttgcctgcccatct

SEQ ID NO: 6100 - DNA, 120 bp, synthetic construct
  source 1..120: mol_type = other DNA
caactccaacctgactctgatacagcatcacaccacagatagcaggccctgaaggaaatcaaagtattttaccccaaaatatacttatttgacattttgaaatgactctgcaaagccatt

SEQ ID NO: 6101 - DNA, 120 bp, synthetic construct
  source 1..120: mol_type = other DNA
agagtgagaccatgtctcaaaaaataaataaaatttatcaaaacttacgcacacacttacagaccatacataagccactcaaagtcaagagaaagcttaacaaaagatgcagaattaaat

SEQ ID NO: 6102 - DNA, 120 bp, synthetic construct
  source 1..120: mol_type = other DNA
ggaattacaggtgcctgccaccacacccggctaatttttgtatttttagtagagacagggtttcaccatgttgcccaggctggtgtcaaactcttgacctgaagtgatcccccagcttca

SEQ ID NO: 6103 - DNA, 120 bp, synthetic construct
  source 1..120: mol_type = other DNA
aaggctagggtgctcagctcagagggcggacaaagaacatgttaaagtgaagtgaacactggctttgcagcaggcagaccagatgcagcagactgcttttaccaaagcagcctgcaacac

SEQ ID NO: 6104 - DNA, 120 bp, synthetic construct
  source 1..120: mol_type = other DNA
cattccagagttagaaagtgatctgaaccctacccaaaggcaggtctgaaaggcaaagcctgcctcacagtgcacagggagcaagtcctcccagaactgccaagcggtagcctctccacc

SEQ ID NO: 6105 - DNA, 120 bp, synthetic construct
  source 1..120: mol_type = other DNA
tgatgccaactattcattttccaaactgcaggcttatctactccatagacttcttctcttttcctagcggatatttcactgtgggaagaagagagactcaaattaagtccaactggtcca

SEQ ID NO: 6106 - DNA, 120 bp, synthetic construct
  source 1..120: mol_type = other DNA
catgtcctgcttcattctgctaagccctcaatggatcaataaaacacctcttttcaccctccgctttaatgccttttcatgaacttggagtcctctgaacctcccttcttggattgaagc

SEQ ID NO: 6107 - DNA, 120 bp, synthetic construct
  source 1..120: mol_type = other DNA
ggggagccacatgtgagaaagtatagaagggcaagtaagatggaaagagattatgacagtggagaaaaggagaggcccctttggggtggaaagagcacttgttgggagacccctgctgga

SEQ ID NO: 6108 - DNA, 120 bp, synthetic construct
  source 1..120: mol_type = other DNA
caaaaggaaaaagtggggaaggagagaaaagtcagtgcacagagcttccaataaatcagagagatgtgtcaacccagttggaacatccctctctttggcattgcaccagcccctaatgac

SEQ ID NO: 6109 - DNA, 120 bp, synthetic construct
  source 1..120: mol_type = other DNA
caagagtgatataggaggagaaaactatggcaagagaggcaaaggcaaaggctgcatcctgctggctggacagaatcatggtgacaggagcagtgatgaggcacaggacctagagggaaa

SEQ ID NO: 6110 - DNA, 120 bp, synthetic construct
  source 1..120: mol_type = other DNA
gccctcctctccaatccaacccctctgacctagcaaacctcaccctgtgtcccctatcccttatgtccacccaacttgcccagaccacatcactttttcctgggattcacacaggaaagc

SEQ ID NO: 6111 - DNA, 120 bp, synthetic construct
  source 1..120: mol_type = other DNA
ctacacacccttcccagattcccaccccttcctttcttcagctgaatctggaggcctatgaggggctccttctaggaaggaaaggaagagcttccaatacgaggaaggcactctctccaa

SEQ ID NO: 6112 - DNA, 120 bp, synthetic construct
  source 1..120: mol_type = other DNA
tctcttcatctactctctttcatgtattttctagccacacgatgctccctatgcccctgaagtagccttcctctatttctctagctgataaaatcctatttgtccttcagtattcaaatg

SEQ ID NO: 6113 - DNA, 120 bp, synthetic construct
  source 1..120: mol_type = other DNA
agagtcacatcctgtaaggaatttgcccaccacctcctcacctggcagacgaaaggaaactggttcctcccaatgtggtaaccatcgagccccagggggaagacagcagctaaagccagt

SEQ ID NO: 6114 - DNA, 120 bp, synthetic construct
  source 1..120: mol_type = other DNA
aagatggagtgaatggtctatccataggttgggaaatgctgaggcatgtccccaaagttgtagtctttgtttttgtttgttctttaagtttttctgtctttcttacagcaaaggaaaatg

SEQ ID NO: 6115 - DNA, 120 bp, synthetic construct
  source 1..120: mol_type = other DNA
ttaccccagcaatgcaccattaaaaatagtactaaccaccgcctattccctctccaaatacaccagtctcccctacccacgccttaggggttgtattcactctcacttaaccctttctcc

SEQ ID NO: 6116 - DNA, 120 bp, synthetic construct; identical to SEQ ID NO: 117
  source 1..120: mol_type = other DNA

SEQ ID NO: 6117 - DNA, 120 bp, synthetic construct
  source 1..120: mol_type = other DNA
aaacaccacatggccctgagggaaggaacatgtggagcaaggcaaaggagacaaaagcaagagtgaaagagaacatcagggactctttaaatccttctgtttttgatgtaattgagcctc

SEQ ID NO: 6118 - DNA, 120 bp, synthetic construct
  source 1..120: mol_type = other DNA
atgtgtgtgggtgtgggggaaggggtgcaatccaattctgactcaatcacttctacttgaatggatggtttgtgttactgttgtcagattggacacatgtacattcaaaatctttaacta

SEQ ID NO: 6119 - DNA, 120 bp, synthetic construct
  source 1..120: mol_type = other DNA
atgaagaataaataaataactttgttcctcatgccttgctcacttttctctccaactttctagagagatagaggagtgagatacgcaaagggcacaggcaaggtacagcagttgctacta

SEQ ID NO: 6120 - DNA, 120 bp, synthetic construct
  source 1..120: mol_type = other DNA
aatcgcttgaactcaagaggcagaggttgcagtgagcagagatcacgccactgcacttcagcctgggcgatggagtgagactctgcctttaaaaaaaaaaaaaaaaaaaggcagccaggc

SEQ ID NO: 6121 - DNA, 120 bp, synthetic construct
  source 1..120: mol_type = other DNA
cttcaggaggctgaggagggtgaatcatgaggttaggtgttcgagaccaacctgaccaacatggtgaaaccccatgtccactaaaaatacaaaaacttatctgggcatggtggcacgcac

SEQ ID NO: 6122 - DNA, 120 bp, synthetic construct
  source 1..120: mol_type = other DNA
gtatgatgaataatctcaaaatcaaaatatccaagatgaagctcaattttttcttactcccaaacagctcccagtaaatgagactgaagccttggaattacatcagaccctttcaaatca

SEQ ID NO: 6123 - DNA, 120 bp, synthetic construct
  source 1..120: mol_type = other DNA
cccacagctacatttctctaaaaccactctaacccactctccatttccacatattgcccctaaagatgttttctctaaactagggtttctcattctctgcactattaacattttgagcaa

SEQ ID NO: 6124 - DNA, 120 bp, synthetic construct
  source 1..120: mol_type = other DNA
gccactagatccagccaaatccctgttttctgtcagcctcctctagctccctgctataagacagaagcaacgattggcaagtcctgggctcagggcaccaacaagtctttctggctttgg

SEQ ID NO: 6125 - DNA, 120 bp, synthetic construct
  source 1..120: mol_type = other DNA
taagcaactctaaaacactaacataaatcaccaagaaaatgaaatgcaattctgcccagacacagtgctcctgtaaaggtgtgcttgagtatacaagcatccatattatcattaatgccg

SEQ ID NO: 6126 - DNA, 120 bp, synthetic construct
  source 1..120: mol_type = other DNA
atgagatctgaagaaagtatcatgtgtgtgcagacaagggatgcagtcagagccaacagacagagacatcctatgaatcgtcacctcagatcatatgctatcaactcaggcacagatgcc

SEQ ID NO: 6127 - DNA, 120 bp, synthetic construct
  source 1..120: mol_type = other DNA
gcaaagatggggtaaagaaacataaaggaaccaggaaaagacaaggcaaggactgggacagacagcatgatgtcaacctcaagaggcaaatgggcagacagacaaaggatcagagaagaa

SEQ ID NO: 6128 - DNA, 120 bp, synthetic construct
  source 1..120: mol_type = other DNA
ttttcaaagagtttcacgcgggtagggttgtggagtgtggctgatgggtgcgttcggaagaaagtggggaaacgctgccggtttgacagggctggtgagctggagccataggaaagctgt

SEQ ID NO: 6129 - DNA, 120 bp, synthetic construct
  source 1..120: mol_type = other DNA
caaagccatattatgaaaattccttcctcacctctgcaaaccccttctccccaccttccatttgtttcctccctcttctcttttcagagctagtgataagtaaagagagaacaggaacaa

SEQ ID NO: 6130 - DNA, 120 bp, synthetic construct
  source 1..120: mol_type = other DNA
ggttaataggaacaatgaggacatacaagaacatataagatacatatcaacagggcaaggcatgccccccattttgtttcctgatttcttatctaccttttcttgcaaccgtttccctct

SEQ ID NO: 6131 - DNA, 120 bp, synthetic construct
  source 1..120: mol_type = other DNA
cccctcacacacctatcccagacacacacctatttctaggtgtatagtgatgttctaaaaatgaatataaatccttggatcaccccaaggttgatatttggtaagatcaccaaattctca

SEQ ID NO: 6132 - DNA, 120 bp, synthetic construct
  source 1..120: mol_type = other DNA
cagaggatcagtgtctcctaataccttaaatccaccaccagtttctccaaaccccgacacttctgcgagactcccgcagcggggcagaagggtctgccttgcagcatgcttaaccatctt

SEQ ID NO: 6133 - DNA, 120 bp, synthetic construct
  source 1..120: mol_type = other DNA
gctggggaggcaggaagggggcggggagggaagcgagcgccgaggtgggagcgacagtcggaggggcggggaggggaggggggatgcaacctcgaggaggaaaggaacgaaagaggaagg

SEQ ID NO: 6134 - DNA, 120 bp, synthetic construct
  source 1..120: mol_type = other DNA
gaaggggagggcattgcagtgcgcgcggtaagggtttctcatctcacctgagtgtggcgttcgattcactggcagcaggaaagacggggatcagagaagagttaccactggcgcccagct

SEQ ID NO: 6135 - DNA, 120 bp, synthetic construct
  source 1..120: mol_type = other DNA
gtttagagaaagggaaaattggagtatttaaacctgaagaaggtgagagaggtgagattcataaaggaaaagagaaaacgtgaggtctaagaatcgggagcaggaagatttttttaaaag

SEQ ID NO: 6136 - DNA, 120 bp, synthetic construct
  source 1..120: mol_type = other DNA
tcattttagaatttttttgtcatcatctgccactaatgatcctcaaagagaataactgacaagatgaattatcaatgttataggccaatgatcagtggcctaatgaagggaggatgaaat

SEQ ID NO: 6137 - DNA, 120 bp, synthetic construct
  source 1..120: mol_type = other DNA
aagtcgggccgagcagaaggggttgccagaccgggatgatatgtgggactgatgggatagtgatgaggaccagaaatgaggagatgcagggaaagggaagtggagcgaaggagggccgga

SEQ ID NO: 6138 - DNA, 120 bp, synthetic construct
  source 1..120: mol_type = other DNA
gggagagctcccgggcggagggaagaaggagggtgcaagggaaggcagggcggggggaagagaggggaagaccggggagagggcgcctcccacaacccgagccccgggagccgccccgga

SEQ ID NO: 6139 - DNA, 120 bp, synthetic construct
  source 1..120: mol_type = other DNA
ggggggacaaaaaaaaagctgctttctggctggtcctagggggaaaaatggtaggaagaaaccaaacactgagagactgactagaattgagattctcaacctccaacccttttttacaat

SEQ ID NO: 6140 - DNA, 120 bp, synthetic construct
  source 1..120: mol_type = other DNA
ttataggctcagataattaaacacaggttttcactacgtgaatgtcctgggggacttttgagaatctgggtgaggaacaattcttcaacatgtaggtagtgctttgaagaatatcttaca

SEQ ID NO: 6141 - DNA, 120 bp, synthetic construct
  source 1..120: mol_type = other DNA
ggaagggggaaatgaaagaatagagaaaactatacggtagtagtcaggatgtggtggaagcaaattgcagttttctaattgagaatgtaatcttggtctttaaagaacagagttctggag

SEQ ID NO: 6142 - DNA, 120 bp, synthetic construct
  source 1..120: mol_type = other DNA
gtgtctcctctataaatcatttttaactgatttataaaggtttaaagaaaaccttcctagcaagttgcatcagtatagctaaaatctgttacttgtttgggaggcagaggcatttgaggg

SEQ ID NO: 6143 - DNA, 120 bp, synthetic construct
  source 1..120: mol_type = other DNA
ctggcctcccatactttctttctacttccttttctctcttctgcctcatcttccatccatccctgagagcatatagcccagaatttaacactctgggagccctgaaaacatattaaccaa

SEQ ID NO: 6144 - DNA, 120 bp, synthetic construct
  source 1..120: mol_type = other DNA
gaatcctttgcatcatatttaatatcactaaaataggatatttttgtgaaactgtttgatccttcccctcagtttccatttgtgtgttctctttcttcccgtcttgataggcacaggcac

SEQ ID NO: 6145 - DNA, 120 bp, synthetic construct
  source 1..120: mol_type = other DNA
ggatcctacccctgtctcaggagtgcacagagccaataaccaaattacaacattgacattgtgaagttgcctctagaaataatttctcaataagtacacctttatataataagtgaatga

SEQ ID NO: 6146 - DNA, 120 bp, synthetic construct
  source 1..120: mol_type = other DNA
gcaaaaatatattttcacgttaaatgtatggctatttacactagatgaggtaaagaaagactataaatagcttcacatctcgttttgtcacagaatgaatgcaagtcaggccaggctttg

SEQ ID NO: 6147 - DNA, 120 bp, synthetic construct
  source 1..120: mol_type = other DNA
aagctcagaaagtttgaatgaacttcataagatcacacagccaataaataccagagcttggcctcaaagtcaagtctcaggtccttctgcccttcactaacagtgctccagccatggtcg

SEQ ID NO: 6148 - DNA, 120 bp, synthetic construct
  source 1..120: mol_type = other DNA
agtctattaatctagcggtctctgttgtttgttgaagacctactaggtattggtaaaatgggttgctttgttccatgggccataatagtgacacattctaaacacatttaagtcattcca

SEQ ID NO: 6149 - DNA, 120 bp, synthetic construct
  source 1..120: mol_type = other DNA
agtgtagtggcgcaatctcagttcactgcaacctctgcctcccaggcctgtcccagcctcccgagtagctgggactacagatgcctgccaccacgcctggctaatttttgtgtttttagt

SEQ ID NO: 6150 - DNA, 120 bp, synthetic construct
  source 1..120: mol_type = other DNA
ccacccccggcctgaatttgttaacttcttaccaacattttacaaagaagattgaaggtaatgtgggttctaagactgaagagtacaaggtaagctggtggttaatggggaggagggatg

SEQ ID NO: 6151 - DNA, 120 bp, synthetic construct
  source 1..120: mol_type = other DNA
aaaaaaagaagaagaagaagaagaagaaaagaaaaaaggctaggcgcggtggctcacacctgtaatcccagcactttgggaggctaaggtgggcagatcacgaggtcaggagttcgagaa

SEQ ID NO: 6152 - DNA, 120 bp, synthetic construct
  source 1..120: mol_type = other DNA
tcttacctggttgtaagatttttttctcatttagtcaataaatatttatggaatagggcagtttgggatcacacacatgagctaagcatgatgtcagccttcatagctcctacaatgtgg

SEQ ID NO: 6153 - DNA, 120 bp, synthetic construct
  source 1..120: mol_type = other DNA
gaaataaatacaatcatagacaaatgttttcagaatgtgaaaatgctataggaacacactttttctccagtggctggcataaaagtgttggtatgctataccaccaagtcattagatatg

SEQ ID NO: 6154 - DNA, 120 bp, synthetic construct
  source 1..120: mol_type = other DNA
taaaaatactaatctcgtagttaacagattgctgtgacctagagcaagtaaaggtgtaattatcagcctataggggttagagtggcaagaagatgcctgagggtgagcctacagcctaaa

SEQ ID NO: 6155 - DNA, 120 bp, synthetic construct
  source 1..120: mol_type = other DNA
ctaggctacataattatccctccataacgtgttctctgccagaataataatgaaaaaaaagtactgtggtggccagaccccaagatgattggcgaagtgaaagttgcccagttccaaaat

SEQ ID NO: 6156 - DNA, 120 bp, synthetic construct
  source 1..120: mol_type = other DNA
gaggggcaagcctcagtgcctgactcacttgactcacaagaagctgaatgtttttccttttgaaagataaaaatattggtgaatctcagactaacaatagggaatacacaaaaatggaaa

SEQ ID NO: 6157 - DNA, 120 bp, synthetic construct
  source 1..120: mol_type = other DNA
agctgcctcacattgattcggatcagtgttctcatttctccgacctacctaggaagcatctggctaaattgatgtaaattagacattttatagtctatcggtcattgagcctcagtggaa

SEQ ID NO: 6158 - DNA, 120 bp, synthetic construct
  source 1..120: mol_type = other DNA
atctcaaaaaaaaaaaaaaaaaagaaaagaaaaaaaccccacataataggttgacagtggaaccacagaaaaaaggaaaaggttgggttttttttctgctttttattttctattttatta

SEQ ID NO: 6159 - DNA, 120 bp, synthetic construct
  source 1..120: mol_type = other DNA
agcatgttactttataagaatcaatttttatttaaaaaatttttttgagatagggtctcactctgtcgcacaggttggagtgcagcagcacgatcagtgctcactgcagcctctctctct

SEQ ID NO: 6160 - DNA, 120 bp, synthetic construct
  source 1..120: mol_type = other DNA
atcaattaaaataatatttaaatgctgaaagaaatgagcagctcccagggtgatacagggtggtttcacttcttggacacatctacactgagctctattcctggcaatacctgatgttcc

SEQ ID NO: 6161 - DNA, 120 bp, synthetic construct
  source 1..120: mol_type = other DNA
actctcctacctgaatatgcaacagggagaaagagcgtcccaggacattttaggtttttgaagaaaaaaaaacccctttggtaaaaagccagagatccacagcggccactttttccatgg

SEQ ID NO: 6162 - DNA, 120 bp, synthetic construct
  source 1..120: mol_type = other DNA
cattctttgggaacaagaaactaacaaatcccaagtgacctatcacatatacaaacatacagggcagagtttggattcgcggtagaagaaagggaggttagacattaagaagaatggtct

SEQ ID NO: 6163 - DNA, 120 bp, synthetic construct
  source 1..120: mol_type = other DNA
gttgctcaggctggagtgcagtggcatgatctcggctcactgcaacctcagcctccctggttcaagcgattctcctgacttggcctcccaagtagcggagactacaggcgcctgccacca

SEQ ID NO: 6164 - DNA, 120 bp, synthetic construct
  source 1..120: mol_type = other DNA
agaagagaatttgggaaacaaggtatgaacaaggactgaatagtgagaagtgatggagagacagttaaagtagatggagtgacaaaagcaaaacctctaagggtagaataggcagcaatt

SEQ ID NO: 6165 - DNA, 120 bp, synthetic construct
  source 1..120: mol_type = other DNA
cccccccttctctagggtggttcatctctacagaaatggcaaggaccaagatggagaccaggcacctgaatatcggggccggacagagctgctgaaagatgctattggtgagggaaaggt

SEQ ID NO: 6166 - DNA, 120 bp, synthetic construct
  source 1..120: mol_type = other DNA
tcctagtgaataagcaagtaaatcaaatgtctaaatataattatagaaaggagatgtcactttttggctgtacctccactatttcattctgcagaattgcagaatttctttttttttttc

SEQ ID NO: 6167 - DNA, 120 bp, synthetic construct
  source 1..120: mol_type = other DNA
acaccaaaaaaggaagacaagccggttgcggtggctcacacctataatcccaaaactttgggaggccgaggcgggtggatcacctgaggtcgggagttcgagactagcctgaccaacatg

SEQ ID NO: 6168 - DNA, 120 bp, synthetic construct
  source 1..120: mol_type = other DNA
tctcaaaaaaaaaaaaccacatacaaaccagagataatattataatgagcctccaagtgcctaccaccttgctgcagcacttgtcaatccagggaccacccacctcaccggctccccact

SEQ ID NO: 6169 - DNA, 120 bp, synthetic construct
  source 1..120: mol_type = other DNA
aattttcctgattgtttcataaatatactcttacagttggtttcttttagcgagattcaaatgagacccacctgttgacctttgcccttagggtttcccagggtctgaattttgttgacg

SEQ ID NO: 6170 - DNA, 120 bp, synthetic construct
  source 1..120: mol_type = other DNA
ctcagaattttttttttttttttgagacagtgtctcactctgtcacccaggattggttgcagtggcacgatcatggctcattgcagcctccacctcccaggctcaagtgatcctcctgac

SEQ ID NO: 6171 - DNA, 120 bp, synthetic construct
  source 1..120: mol_type = other DNA
tcctataccattaccactgtcctagttcaggttcatgttgttttttactttaattgttatcacagtctcttaacatttctccctatgttctccagtcctgtaggtgctaaatctgacgtg

SEQ ID NO: 6172 - DNA, 120 bp, synthetic construct
  source 1..120: mol_type = other DNA
acaactgaggccaggagtagttcagtgacttactcaaaccgatataacttataagtggtagagctgaggcctctgtatcatacctagcagctccatgcaacttgggagagtgtgagcttc

SEQ ID NO: 6173 - DNA, 120 bp, synthetic construct
  source 1..120: mol_type = other DNA
ccagaacatgcaggaactaaaatgttgcctttttctattttaggaaaacttcgagcagagataggtgagttccagtcatcgtttctcccaattcttgccttttggttttttggcataacg

SEQ ID NO: 6174 - DNA, 120 bp, synthetic construct
  source 1..120: mol_type = other DNA
cacacatctttacacacccaaagaggaggaatagtatctttgttttggaggacttgactatgaaaggtcttaactcctttttgtaccatgaatctctctggcactccagtgaagtctaaa

SEQ ID NO: 6175 - DNA, 120 bp, synthetic construct
  source 1..120: mol_type = other DNA
ttaatttcaacatactaataaacataaacagtatttcaagatttctgcaataactctaatgggaatgaaaacatctgtggcttccattggtaattaagtcacaggtactgctcatattgt

SEQ ID NO: 6176 - DNA, 120 bp, synthetic construct
  source 1..120: mol_type = other DNA
tttgtttctttttgttttcagggcaattccttgaagagctacgtaagttctcttctctctgttataagcagagaataaaaagccaggaaagggagacagaagcaacaagaggaagaggcg

SEQ ID NO: 6177 - DNA, 120 bp, synthetic construct
  source 1..120: mol_type = other DNA
gtatggtaactttgcaaatggtggttgtttcttccaagactccagccctgattgcgcaaaactgaaaggcatgtgaagggaaggaagaggaagagtgcaaaacattgaagagagagctga

SEQ ID NO: 6178 - DNA, 120 bp, synthetic construct
  source 1..120: mol_type = other DNA
agctcagtcagaaaggccatttatttatgtttcaagatgctcactgcctcctttgttttgtctcctttgcaggccttctctcttaggcctcttctcctgggggtatggatcctgggggga

SEQ ID NO: 6179 - DNA, 120 bp, synthetic construct
  source 1..120: mol_type = other DNA
atgcgtctgtgatagctgagggacttggggctccgaaacaacttcccacactgactgcagctgttagtcagcttgggattgtgaacaaactggtggctatagaggtaggagcgcctgctg

SEQ ID NO: 6180 - DNA, 120 bp, synthetic construct
  source 1..120: mol_type = other DNA
tagacaatccacagacacccacataataatgcatcatgaacactgggccacttgagggtgaaaagaggtgttattaataatcaagctgggatgagaagtataaaccaggactgtcctgga

SEQ ID NO: 6181 - DNA, 120 bp, synthetic construct
  source 1..120: mol_type = other DNA
cttgctcaagcttggtgattagctctggcttatgcagaaagattctggctgatgtgtgggaatgagaaagagttgagttggtcccaggtatggccccttcacatctgatggggacaacag

SEQ ID NO: 6182 - DNA, 120 bp, synthetic construct
  source 1..120: mol_type = other DNA
aaaaggaaaggaaagatgaagagaaagggagaaagataagatgtgggggagaggaaagaggatatgcagatatgcagaatataaacaggaaagcaaagcgaaggaaaaaatgctgccact

SEQ ID NO: 6183 - DNA, 120 bp, synthetic construct
  source 1..120: mol_type = other DNA
tgttaatgttagactcagtaccattggaaatcatgtagctggggtaaccaggctaggatctgtcacagatcacctcgagtgagtctctttattctttctgacttggtttcatcagaaatg

SEQ ID NO: 6184 - DNA, 120 bp, synthetic construct
  source 1..120: mol_type = other DNA
gctgaggttgctaagatttacaatataaattattttgagagagataccacattcatacaacttttattacaatatattgctgtaattgttctatcttattactagttattgttgtcaatc

SEQ ID NO: 6185 - DNA, 120 bp, synthetic construct
  source 1..120: mol_type = other DNA
ctttctttcctctctctccctttcctttcctgtctttcaaaaccattcgcactccttttatgaggcatgcagatcttggattattcttccactttccagccaactgcacttcaaaacagc

SEQ ID NO: 6186 - DNA, 120 bp, synthetic construct
  source 1..120: mol_type = other DNA
tccagccacgtgagttttccgcctgtcagccaagcaaaatggccttcctgcagtcgcacggccctttggtctctgctcagggcttcggggaccctttccagccattgccctgcacctacc

SEQ ID NO: 6187 - DNA, 120 bp, synthetic construct
  source 1..120: mol_type = other DNA
aagcctgggcgcgattgctcacacctgtaattccggcactttgggaggtcgaggctggtgaattacctgaagtcaggagttcaagaccaccctggccaacatggcgaaacctcgtctcta

SEQ ID NO: 6188 - DNA, 120 bp, synthetic construct
  source 1..120: mol_type = other DNA
gaaggatgaagaaaagatttcttttatttttttatttttatttttttgagacagagtctcgctctgttgccccggctggagtgcagtggcgccatctcagctcactgcaacctccaactc

SEQ ID NO: 6189 - DNA, 120 bp, synthetic construct
  source 1..120: mol_type = other DNA
caatggtgtgatcttggctcactgcaacctccacctcccaggttcaagcaattctcgtgcctcagcctccccagtagctgggattacaaccacatgccagcacgtccgactaatttttgt

SEQ ID NO: 6190 - DNA, 120 bp, synthetic construct
  source 1..120: mol_type = other DNA
agaaactgaaagtaaatgcgtgactttaatggaacagaacttgtttctccctccatgctcccaatccctttagatccctttatctcacctcagccactttaagacaaaaggtgattagag

SEQ ID NO: 6191 - DNA, 120 bp, synthetic construct
  source 1..120: mol_type = other DNA
agctagcaaggaaacaggaacctaattcctataatcacttcttctccccttgtcttcttccctttcttcgtgtgtaagcgcattatactatctctgtaagcacaaaaattgcctaaaatt

SEQ ID NO: 6192 - DNA, 120 bp, synthetic construct
  source 1..120: mol_type = other DNA
gtcaatgagggagtgaaggtaagccgcccgaaaagtagataatttttacttccactttctttttctttcctgagcactagttataaaaatatccttttaaaatctaaaatattggccagg

SEQ ID NO: 6193 - DNA, 120 bp, synthetic construct
  source 1..120: mol_type = other DNA
atggccacttgggggtggcacctctctggtgtctcagacacaaattgagcaatcagaaaaggctgggatgtctgtggtctgagttgggcagaggtggctgaccctggaacctgacatcaa

SEQ ID NO: 6194 - DNA, 120 bp, synthetic construct
  source 1..120: mol_type = other DNA
tcatgcctcagcctcctgaatagctgtgactacagacacatgccaccgtgcctggctgatttctgtatttttagtagagacaggatttcaccatgttggtcaggctggtctcttactcct

SEQ ID NO: 6195 - DNA, 120 bp, synthetic construct
  source 1..120: mol_type = other DNA
tcaaagaaaaaaaaaaaagagtaaacaaaatttaattttcctaatggaaaaaattatggtgcattctataacaatagaggactcacagaaaactttgcaggtagatatatcaatagagca

SEQ ID NO: 6196 - DNA, 120 bp, synthetic construct
  source 1..120: mol_type = other DNA
aggatggtctcgatctcctgacctcgtgatccgccctcctcggcttcccaaagtgctaggattacaggcgtgagccaccgcgcccggcctctgtaccattttctccactttgaggcagag

SEQ ID NO: 6197 - DNA, 120 bp, synthetic construct
  source 1..120: mol_type = other DNA
ctacttgtctagcttgagaaaaaaagtagttgttggcattttgattaggaggtattacatttgaaaatttactctgcaaatgtgctgtatagtcttcctatttgagaatgttcttctgta

SEQ ID NO: 6198 - DNA, 120 bp, synthetic construct
  source 1..120: mol_type = other DNA
tttgggaatttatatgctactatatgctatttcttttcttttcttttcctttacttttttgttttttttgagagggaatttcactcttgtcgcccaggctggagtgcaatggcgcgatct

SEQ ID NO: 6199 - DNA, 120 bp, synthetic construct
  source 1..120: mol_type = other DNA
gggtgcgcttgagagggccgtgatcgattgagcaagcaggggttatgtgactaggggctgcatgtcccagtaattagatcggaacaaacaggatagggattttcacagtgcttttttttt

SEQ ID NO: 6200 - DNA, 120 bp, synthetic construct
  source 1..120: mol_type = other DNA
atttggaactactttgatgaattttttatttccaggtggtttaattttttttttttttttcttttgagaaggagtctcgctctgtcgcccaggctggagtgcagtggcgcaatctcggct

SEQ ID NO: 6201 - DNA, 120 bp, synthetic construct
  source 1..120: mol_type = other DNA
tttatctcatttcctcttttggaagagatgagaagtttatttccactcatgtgcccttttgtcaactgatttgtattgaggtgcgtggttcagcctccagaacagtaggtgggcttatgc

SEQ ID NO: 6202 - DNA, 120 bp, synthetic construct
  source 1..120: mol_type = other DNA
ctccctgtagagaggggaaagggccctgtctttcacacaagcctggcccaaatggccacactgccagtggaaacacagtcacccctgatagccctagaaaggctcttctctggcacacgt

SEQ ID NO: 6203 - DNA, 120 bp, synthetic construct
  source 1..120: mol_type = other DNA
agtgccctctgctggttctctgagacctgtggctgggatcatctctgataaggtttgggtgtttgtcccctccaaatctcatgttgaaagatccccagtgttggagctggggcctagtgg

SEQ ID NO: 6204 - DNA, 120 bp, synthetic construct
  source 1..120: mol_type = other DNA
tgtttttaagtttttttttccatgcatttgttattttatgaattggtctgaatgatgaggccaggcaagtgtatacatcttttcactggtagaaaaatctgtagcaaagcctgtgccctt

SEQ ID NO: 6205 - DNA, 120 bp, synthetic construct
  source 1..120: mol_type = other DNA
tcggcctcccagagtgctgggattacaggtgtgagccactgcgcctggccaatttgtttttttttttaaataaacatagacagcatctcggtatgttgcccagactggtcttgaaccctg

SEQ ID NO: 6206 - DNA, 120 bp, synthetic construct
  source 1..120: mol_type = other DNA
aagcaatcctcccgtctcactctcccaagtggctggaatcactggcgcatgccaccacacctggttaatgtttgtttgtttgtttgtttgtttgttgagacattgtctcgccatgttacc

SEQ ID NO: 6207 - DNA, 120 bp, synthetic construct
  source 1..120: mol_type = other DNA
gatgccaattgtttcagcatcattattgaaaggagattcccttcttcattggatgacctttgtacttgtattcaaaatcaagtgactctatttttgtccttccatttctggcctctccat

SEQ ID NO: 6208 - DNA, 120 bp, synthetic construct
  source 1..120: mol_type = other DNA
aagactcaagttaccatctggtatgacttctttcaacctgggaaactccttcagtatttttcttgcagtagagttatgtttgcaacaaattatcctagttttattttatctggagacacc

SEQ ID NO: 6209 - DNA, 120 bp, synthetic construct
  source 1..120: mol_type = other DNA
agccctgtccaggtgctgggaacaggagagcctgggaggtcctggctagggagaaaggggagcggggtctctgtcctcggccctgtggccacacgggggcgccgctgcgctgctctcgga

SEQ ID NO: 6210 - DNA, 120 bp, synthetic construct
  source 1..120: mol_type = other DNA
ttgcactccagcctgggcgacagagtgagactctgtctcaaagaaaaaaaaaaaaagttagtgaaatcatgattgtgaaggaacaatggcaaatggagagaaagagcagagagacagaca

SEQ ID NO: 6211 - DNA, 120 bp, synthetic construct
  source 1..120: mol_type = other DNA
tgtcctactggaaaaggatggatttctagaaatgtcccaatggcttggaacactcaatttctctgtgtgcactgcaagcaaactgacagtttgacttttcaattctattcaatacctgaa

SEQ ID NO: 6212 - DNA, 120 bp, synthetic construct
  source 1..120: mol_type = other DNA
gtggtctgcaggcctggtgaggaaggacaatgacagacggggaggcagaaaggcacacatatgaccagacctccccctgggtcctgctcccattcctctgtccatcgctcttgctctgtc

SEQ ID NO: 6213 - DNA, 120 bp, synthetic construct
  source 1..120: mol_type = other DNA
gtcaaaccacagggacaaaatgtttttagatgtctccaaattcctcacttccctcctctaaattcaggtgggtcacttcatactttctcccaaccgcaggttcccaataggcaggtccta

SEQ ID NO: 6214 - DNA, 120 bp, synthetic construct
  source 1..120: mol_type = other DNA
agtaattgggatctcattcactttcagccaccatttgccctagatgtccttcactcaaaacaagtttttagcttgtgtttttggagtggaaactcacatggctactaagaaacaactcta

SEQ ID NO: 6215 - DNA, 120 bp, synthetic construct
  source 1..120: mol_type = other DNA
agttgtcctgcacttctggaatcatctttttggtcatggtggctactgctgtactgtccttctgaggtcagtgagatagggtgttcacagcctcacttgaaaggaaacaagagacttgtc

SEQ ID NO: 6216 - DNA, 120 bp, synthetic construct
  source 1..120: mol_type = other DNA
aaatacctgagcttttcaatgagaatgaacagggccttttaccctctggcaactgtgtatttcccattgacatgtttcttgtcctcagaatggtttttcctttttgcaggtggtttattg

SEQ ID NO: 6217 - DNA, 120 bp, synthetic construct
  source 1..120: mol_type = other DNA
atgatagctgatgacatcattttaaaagtcacagtactacagagatgtttggacactcatcagaggcagacctgctgtgggaaagtcaaggccttggtgcggaaacctaagattctgcaa

SEQ ID NO: 6218 - DNA, 120 bp, synthetic construct; identical to SEQ ID NO: 228
  source 1..120: mol_type = other DNA

SEQ ID NO: 6219 - DNA, 120 bp, synthetic construct
  source 1..120: mol_type = other DNA
ttatttcatcaacaacatcatgttgactaggatggatgagtaggagatgggaagtatgctgaaggccttggcaaaacacgtgctctccagcagatggaagataaaccacacagagattca

SEQ ID NO: 6220 - DNA, 120 bp, synthetic construct
  source 1..120: mol_type = other DNA
ctgccacctctgaatgtccaactcattagcatttgaggccaatgatgtgcctcagtggggctatatttctttaggtgactaaagcaacactcgctgctaagtgattagttgagccacttc

SEQ ID NO: 6221 - DNA, 120 bp, synthetic construct
  source 1..120: mol_type = other DNA
gtctcctggttccccttgtcccattgtaagtgttagtggaattgtccagcaaccaatcctgagggaatttgatttccaagggcccagaaacctcaggaaggaagatttgaaccatgctcc

SEQ ID NO: 6222 - DNA, 120 bp, synthetic construct
  source 1..120: mol_type = other DNA
atctgtatgttaaaagtttaatgccacagtgtatgggatacaagtaaagaacaggaagttattaacagagtctgagtaaaaagtgcctggtgtaattctgcggccaagacagtgactttg

SEQ ID NO: 6223 - DNA, 120 bp, synthetic construct
  source 1..120: mol_type = other DNA
agctgtgttgcaactcattaaagagaacattgttattaaaggtatttgcaagaaaaacttagagatactatagtatctcctttctctgtctcaaacttttttcccctcaatacccaaggc

SEQ ID NO: 6224 - DNA, 120 bp, synthetic construct
  source 1..120: mol_type = other DNA
agctgtctgagtagctgggagtacagacatgcaccaccatgcctggctaaaatttttgtatttttggtagagacaagggttttgccatgctgcctaggctgatctcgaactcatgaaatc

SEQ ID NO: 6225 - DNA, 120 bp, synthetic construct
  source 1..120: mol_type = other DNA
cctctccctctcccctctccctctcccgtctccctctccctctcccgtctccctctccctctcccgtctccctctccctctcccgtctccctctccctctcatgccgagccaaagctgga

SEQ ID NO: 6226 - DNA, 120 bp, synthetic construct
  source 1..120: mol_type = other DNA
tccgggaggtgaggggctcctctgcccggccgcccctactgggaagtgaggagcccctctgcccggccagccgccccgtccgggagggaggcgggggggggggggtcggccagccgcccc

SEQ ID NO: 6227 - DNA, 120 bp, synthetic construct
  source 1..120: mol_type = other DNA
tgcccagcggctcattggggatgggccatgatgacaatggcggttttgtggaatagaagggcgggaagggtggggaaaaaattgagaaatcggatggttgcggggtctgtgtggatagaa

SEQ ID NO: 6228 - DNA, 120 bp, synthetic construct
  source 1..120: mol_type = other DNA
aattatgtcgcctctgtataagcctgaaggaggccctcaaaatgaaaacacagttttgggaaaccctaaacagagaaccctccaatcatgctcagatttctgactaaggaactgtaaata

SEQ ID NO: 6229 - DNA, 120 bp, synthetic construct
  source 1..120: mol_type = other DNA
ggatgagagggacggagggaagggctggagaagcaggaggtgaggagaaggagcagagggacagaatttgaaagcagcagaattcttagctttaaacacattgttttataaatttttaat

SEQ ID NO: 6230 - DNA, 120 bp, synthetic construct
  source 1..120: mol_type = other DNA
aaaggttcctgataattcaggggttaccaagattctactactcactgcagctaataaaaaaaaaaaagaaagaaagaaactggtctctgtcctatttcatatgctcaggtacaacttttc

SEQ ID NO: 6231 - DNA, 120 bp, synthetic construct
  source 1..120: mol_type = other DNA
ttgggcgggtgagtgcggggtccagagagaaacggcctctgtggggaggagtgaggggcccgcccggtgggggcgcaggactcagggagccgcctccggaggagggtctggcgggtctca

SEQ ID NO: 6232 - DNA, 120 bp, synthetic construct
  source 1..120: mol_type = other DNA
cctgtagatctcttgggatggcctcgcacaaggttgggaggaaagtggacccaatgctaggatatcgccctccctctagtcctgagtaggaagaatcttcctggctttcgagatccggta

SEQ ID NO: 6233 - DNA, 120 bp, synthetic construct
  source 1..120: mol_type = other DNA
ttcccagagcagtctccccagcccaccatccccatcgtgggcatcgttgctggccttgttgtccttggagctgtggtcactggagctgtggtcgctgctgtgatgtggaggaagaagagc

SEQ ID NO: 6234 - DNA, 120 bp, synthetic construct
  source 1..120: mol_type = other DNA
actgtgactgatacgaatttgttcatgaatattttctctatagtgtgagacagcttccttgtgtgggactgagaagcaagatatcaatgtagcagaattgcacttgtgcctcacgaacat

SEQ ID NO: 6235 - DNA, 120 bp, synthetic construct
  source 1..120: mol_type = other DNA
tatctccacttctttcagtacatttttgtacctattttttatagcttgttttcttaaaatgtccactcgttgcctttggttatgtttctttaattacctacaatctataacaatcaaccc

SEQ ID NO: 6236 - DNA, 120 bp, synthetic construct
  source 1..120: mol_type = other DNA
tgcacacatgacttcattacagggcattggatgttgatattcatcaggtcagctggggcccaagacactactcttctgccaacaggccgcaatcctctgcattagagagagggtaaagat

SEQ ID NO: 6237 - DNA, 120 bp, synthetic construct
  source 1..120: mol_type = other DNA
acaagtaaataaatgcatggtgttcccatttatcagtgctcactgcatcttacaagtgtatcagccccacttcagctgatagtaccaggaaaccttaatacccacatacaaaataatgat

SEQ ID NO: 6238 - DNA, 120 bp, synthetic construct
  source 1..120: mol_type = other DNA
aaatgagccagaaacaaaaagacaaatataatatttcacttatgtgatgcagctaaaataggcaaattcatagaaacagagagtaaaatagaatttaccagaaattgagggtagggagaa

SEQ ID NO: 6239 - DNA, 120 bp, synthetic construct
  source 1..120: mol_type = other DNA
ggagaaccaaggaagacagtagcctggctcagtccaaggccaaaggcctgaggggccagaggaggaggtgggaggataaagggttgactggtgcaacactcaagagtccaaagaccatac

SEQ ID NO: 6240 - DNA, 120 bp, synthetic construct
  source 1..120: mol_type = other DNA
caaacatgcttgtcaaaatattacctacaaaaagataagatgaaagcagatggatctaaaagaactcagttacatcacctccttatctgagatgggatgcagcttgtaaaagtgtgtcaa

SEQ ID NO: 6241 - DNA, 120 bp, synthetic construct
  source 1..120: mol_type = other DNA
cgaaaacaaaaacaaaccaccaccaacaaaatggaaatcagcaccacgcaaaggacagctccagggaccaacagtcacactgagtccaggaaggttcaacaatacaatagcagtgatatt

SEQ ID NO: 6242 - DNA, 120 bp, synthetic construct
  source 1..120: mol_type = other DNA
agggtgcacatccagtgaaatgcagttgatggatgggccaaggtaataatccagctccttccttcagctgggggaggcagatgggtgagtcagctacgcatgaggtgtatggtgttccta

SEQ ID NO: 6243 - DNA, 120 bp, synthetic construct
  source 1..120: mol_type = other DNA
acatgttgtttattcattcattagtcaatgggcattttcttttaaaccaaataggaaaaacaaaggaagaattaaacaccaaaaatatacatgttactactagcttttataggactacta

SEQ ID NO: 6244 - DNA, 120 bp, synthetic construct
  source 1..120: mol_type = other DNA
ctctatttggggaaacctgcaaccaccatcttctgaagctctgcccatgtcaagaggtctgtgcatacctctctcttccatcccccagttttccaactttattttgctcaagttcctgac

SEQ ID NO: 6245 - DNA, 120 bp, synthetic construct
  source 1..120: mol_type = other DNA
gaatagataactggtggaagagggtaaatcttttattttagaaattatgcagctagtatatgaaaagaaatgaaagactgagacttttgcaatttgtaatgaattaacagatttagccac

SEQ ID NO: 6246 - DNA, 120 bp, synthetic construct
  source 1..120: mol_type = other DNA
gggacagtgatctctccagaagtggagatgacaccattcctcctctaacatggtccaatctcgtgcttgttctgctttacaggaaagttgactcatactggtgtccagtgaagaaaccca

SEQ ID NO: 6247 - DNA, 120 bp, synthetic construct
  source 1..120: mol_type = other DNA
aagaaaaacattgtatacccatattcaaagcagcattattcacgatagccaagacaacacacaccaacacatgaatgaagaaaatgtggtatatatcgacaacggaatatcattcagcct

SEQ ID NO: 6248 - DNA, 120 bp, synthetic construct
  source 1..120: mol_type = other DNA
acaggcagtgaaaagtagtccagttgacatatgagaggattagtcatggtaaaagaaacaagagatggctgaactaaacataatcactatataaatatactgggaagagtgaaagagaac

SEQ ID NO: 6249 - DNA, 120 bp, synthetic construct
  source 1..120: mol_type = other DNA
gctgatacttgctttactcatcctcattcccagttcatttattcttcattaattcagtccaatctccccaggggtcacttaaccccagaagcagactgatctctattcttcttaatcagg

SEQ ID NO: 6250 - DNA, 120 bp, synthetic construct
  source 1..120: mol_type = other DNA
cctttctctgagggaagatgatgctcccacatttttctccctcctatggcacttttcccagcccctgccagtcccctcccatgacttcatgaagatcagcacttgccctgtgcccactat

SEQ ID NO: 6251 - DNA, 120 bp, synthetic construct
  source 1..120: mol_type = other DNA
ggacatcaacattgaaagcaggaattttgagaaattagcatgtgattttcacaacctttttctggccaatgccccagtgacctacaaggaaacctttactgcccacagggaaccagaact

SEQ ID NO: 6252 - DNA, 120 bp, synthetic construct
  source 1..120: mol_type = other DNA
taggggtgtagatggagatgtggctcccattcccctcccaaataccccaatgtccatcccctgttccaggaccttgttacctacatgtctatctgtgcaggagctatgaggggaccctgc

SEQ ID NO: 6253 - DNA, 120 bp, synthetic construct
  source 1..120: mol_type = other DNA
gctcctgggtcgtggggctaggaggtagctctccaggatgggcaggctgggaggcagatgaggcagccctggccttgaggccttcctttcctgcctaatgcccaccccaggttcaggctt

SEQ ID NO: 6254 - DNA, 120 bp, synthetic construct
  source 1..120: mol_type = other DNA
tcctggaagtaacttcacatcaatgtttaacacacaggtctgctgtcccgaccttcctgaggaggcaggaaatgcacacgggcaaagggacaagaatgaggatttcagacgcaaggaaaa

SEQ ID NO: 6255 - DNA, 120 bp, synthetic construct
  source 1..120: mol_type = other DNA
ccagaatgaaagaaaatatttgcaaatcatatatatctgataagagattaatatccagaatacataaagaactcctacaactcaaacaggagacattcaactaatacaaaagtaggcaaa

SEQ ID NO: 6256 - DNA, 120 bp, synthetic construct
  source 1..120: mol_type = other DNA
aggtcccaaggcggagaggggcggagggaccagggagggatggtccagcacccgtgggctggagtggggggtcctcaagagggtggggctgaggatgaaggagtagggaaggggccaccg

SEQ ID NO: 6257 - DNA, 120 bp, synthetic construct
  source 1..120: mol_type = other DNA
ggaggagaggagaggagagaaagtgcaggacaagaccagaaaatgcagggggcgggtgatgagcgatcccgaggaggactgaaaagagacgtggaagcagggttgaggtgtggcgggaac

SEQ ID NO: 6258 - DNA, 120 bp, synthetic construct
  source 1..120: mol_type = other DNA
tgtagcacctgccccagctgatccgctaagacgacaaatctcttagacgtttcagctttacaatctccttctcctcccttttactcaaagctaggtcccctttcttatggtcacttcctg

SEQ ID NO: 6259 - DNA, 120 bp, synthetic construct
  source 1..120: mol_type = other DNA
ttgtgattatgctaaaagccactgaccagtacatttttttttttttaaccaggaacacatgcactttattgaatgccattgtagaagagtgtgtgaggataaagcgctgatacagaactc

SEQ ID NO: 6260 - DNA, 120 bp, synthetic construct
  source 1..120: mol_type = other DNA
aggctaggttggacctaagcttcaatatcttttaaagctctctacgtgcttccaatgtgtaggcaagttttagaaccactgttctagcccatggtttgaacctccctgatgggtaccaac

SEQ ID NO: 6261 - DNA, 120 bp, synthetic construct
  source 1..120: mol_type = other DNA
tcccccaccaagtctcccaggccttctgtccaatgccctctccctccaccccacctccagccccttctgctctgccccatcaactacgttttcttcctcaggactcgccttagacctctg

SEQ ID NO: 6262 - DNA, 120 bp, synthetic construct
  source 1..120: mol_type = other DNA
gggtggggggagcgtgttgaagaaaaaagggaagagagaggaaggaaagaggagaaaaaaggtgaagaagagaataacatttaaaatatagagttttattatttctaacttttatttttg

SEQ ID NO: 6263 - DNA, 120 bp, synthetic construct
  source 1..120: mol_type = other DNA
tccagggttcaagtgattctcctgcctcagcctccctagtagctggaattacagtcactcgccaccatacccatctaattttttgtgtttttagtagagatggggtttcgccatgttgga

SEQ ID NO: 6264 - DNA, 120 bp, synthetic construct
  source 1..120: mol_type = other DNA
ggaatcctggcccaacagcgcagagtgtgctttgttaaggtggggatcaggtagcggagggaaggcaaggacactcagggaataaatggcagaggaagaaggcgcgcgagggaagaccca

SEQ ID NO: 6265 - DNA, 120 bp, synthetic construct
  source 1..120: mol_type = other DNA
acaaagagatgctgaaaaaaagtgctggacaatccattccctcctgggaccagacaggaagccagaggcaccgtggatgtcaaattccagcaaagaaacaattacagcaaaatctccatg

SEQ ID NO: 6266 - DNA, 120 bp, synthetic construct
  source 1..120: mol_type = other DNA
gagcctttcaaatgggaattacggcacatcctcaccatcacatcccacagacactccatcctcttcctttcttagtgcaatgaaatcccagtctcccaccatttcctactagcccctcaa

SEQ ID NO: 6267 - DNA, 120 bp, synthetic construct
  source 1..120: mol_type = other DNA
cctctcctgaatcctgggtttaccttcctaatttcagctaagtagctatattaaccagttatttaagactcacagggcccctctctaccatggcacctaacagggtcttccctcctcaaa

SEQ ID NO: 6268 - DNA, 120 bp, synthetic construct
  source 1..120: mol_type = other DNA
caggtggggagagaagggcgggtggagggccaggtgctgagtggtgtgtggcctcgctctgtgctcaacaaagctcctgctgtggtcatttcctgtttatttgtctggatctctccttgc

SEQ ID NO: 6269 - DNA, 120 bp, synthetic construct
  source 1..120: mol_type = other DNA
gcagtttctagaactccggcaaatctgtagctttcactaggggcagcccggcatgcctatggctgtggatagaggcctgaagtgattacagaatcacagagctgcccagagtaagagagg

SEQ ID NO: 6270 - DNA, 120 bp, synthetic construct
  source 1..120: mol_type = other DNA
cagtctcactggactcacctgtggagtgggagaattgtcactgtttcctgatatcttgtcattgctgagctttaaattctggaatagtttacttaaatggcttagtttggatctcataaa

SEQ ID NO: 6271 - DNA, 120 bp, synthetic construct
  source 1..120: mol_type = other DNA
aactgtgtccttgctgggcacacaggcccctaccacatgtacatggcgtgggagtcatggctaaggcagggtgagactcctatttgaggccaggaaaagctaatgaccctacatttggtt

SEQ ID NO: 6272 - DNA, 120 bp, synthetic construct
  source 1..120: mol_type = other DNA
tgttctactcttccacgcttgccttggggttttcagagcagcatctttgtgagtcctggagtgctagggaccaggaggggagaggaggcaatagcctcctttaatttggcaacagctttt

SEQ ID NO: 6273 - DNA, 120 bp, synthetic construct
  source 1..120: mol_type = other DNA
atacataatgctattgtatacttaataggctaaagtataaatataacttttatgtacactacaaaaacaaaaaaattgtgtgacttgttttgtttgcatgatctgaaaccaaatctgcaa

SEQ ID NO: 6274 - DNA, 120 bp, synthetic construct
  source 1..120: mol_type = other DNA
aagtcttaattattagaacataagaggcccaaaccactgttgttatagatatgtaaaactatgcagtacaaaattaaacaacccccaaccaattaagagtggagataaattatcaatatt

SEQ ID NO: 6275 - DNA, 120 bp, synthetic construct
  source 1..120: mol_type = other DNA
tgtcatcagactaaggcgccgctcccctcattgtagccattccctgtgggccccaagccattcctgtcaatcctaactcttgtagctcctagatcactgtcaccctctccagcagtgctg

SEQ ID NO: 6276 - DNA, 120 bp, synthetic construct
  source 1..120: mol_type = other DNA
gggtagccacaggctctgaagacactgatgctataatttgatcatatgctataatgtaacatcagtgaaccactcattgcatgtgtgcctgctttccaggcatggagtccattctgtagt

SEQ ID NO: 6277 - DNA, 120 bp, synthetic construct
  source 1..120: mol_type = other DNA
agcctgaaatctattgtcacatttgatctgagaccacacctgccccagctttttccaaccaatgattgaccaaagcaggaaaactaaggcaagaatattcctactctgaaggctggctga

SEQ ID NO: 6278 - DNA, 120 bp, synthetic construct
  source 1..120: mol_type = other DNA
acccttctctagtaatcgttcccacttcctatgctgaaagatgctacagaagcctcactcctacgatgcagcaggaatcccactcaggagctttgcaggaactagccagcatgtccccat

SEQ ID NO: 6279 - DNA, 120 bp, synthetic construct
  source 1..120: mol_type = other DNA
tcagcaagggaacctatagccatttactcaggagactgtacattggggaagggaaataggcagaactaggggggatcattttcattgcatgtaagctgatattgatgcccagatgcccac

SEQ ID NO: 6280 - DNA, 120 bp, synthetic construct
  source 1..120: mol_type = other DNA
gggcgaatgagcagcaggtagaaagtgcactggcatcgttggcaaaacatttgcacttcagaaggtgaagataaaccttacagagcttcaggaaaggtcactgtagtgaagttttatgag

SEQ ID NO: 6281 - DNA, 120 bp, synthetic construct
  source 1..120: mol_type = other DNA
aatgtccaactcatcagcatttgaggcccaccatgtgccctagtggggcactatttctttaggtgactaactagccactatgtaacaagttgactacatttagctacttccatcctagaa

SEQ ID NO: 6282 - DNA, 120 bp, synthetic construct
  source 1..120: mol_type = other DNA
gacactgaggcaggacattcctgggagaccagggactcctctgacggacagcagtggctcaaagactcctccatggctttgctcaactctcctgagattgcctgtggtctaggacacatc

SEQ ID NO: 6283 - DNA, 120 bp, synthetic construct
  source 1..120: mol_type = other DNA
ctccgtcaaaaaaaaaatctgctataattctgcagccaaggcagttgctattaactcttaattccttcaactcagtgttttcagaacacatcaacatcacatattacacatttattgtaa

SEQ ID NO: 6284 - DNA, 120 bp, synthetic construct
  source 1..120: mol_type = other DNA
agagtataaaggaacaaccagtgatggaatagcaaatatgaatggaaaacacaacaggattgctcaaaaaaacttgaaagcacaaaattgcagtgccatttagaatcatagtggtgtcca

SEQ ID NO: 6285 - DNA, 120 bp, synthetic construct
  source 1..120: mol_type = other DNA
atactacaggctacagtaaccaaaacagcatggtaatagactaatggaagagagtagagaactcagaaataaaaccgcatatctaaaaccatctgatcttcaacaaacctgatgaaaaca

SEQ ID NO: 6286 - DNA, 120 bp, synthetic construct
  source 1..120: mol_type = other DNA
aagacatggaatcaacctaaatgcgcatcaacaatagactggataaagaaaacatatgacatgtacaccatggaatactatgcagccttaaaaaggaaggagatcatgttttgcagggac

SEQ ID NO: 6287 - DNA, 120 bp, synthetic construct
  source 1..120: mol_type = other DNA
gaggccacctcttcagtcatgcagaactgtgagtcaattaaacctctttcctttataaattacccagtctcaggtatttctttatagcagtgtgagaacagacaaatacaacttctaact

SEQ ID NO: 6288 - DNA, 120 bp, synthetic construct
  source 1..120: mol_type = other DNA
cctgtcacttgattttaagaggtaaggtgaatctccatggctgaagaggatgtattttattatcattcacaatgatcgctttacttgaacttcaatttccaactgtgtcacaattaaaca

SEQ ID NO: 6289 - DNA, 120 bp, synthetic construct
  source 1..120: mol_type = other DNA
aattaatttggggaataggaacagctccagtctacagctcccagggtgagcaatgcagaagacgaatgatttctgcatttccaactgaggtaccaggttcatctcactggggactgtcag

SEQ ID NO: 6290 - DNA, 120 bp, synthetic construct
  source 1..120: mol_type = other DNA
catgacaaagaagttaaaaaccttgaaaaaagatgagatgaatggctaactagaataaccaatgcagagaagtccttaaaggacctgatggagctgaaaactacggcacgagaactaagt

SEQ ID NO: 6291 - DNA, 120 bp, synthetic construct
  source 1..120: mol_type = other DNA
tgtaagtgaaggagaaataaaatccttgacagacaagcaaatcctgagagattttgtcaccaccaggcctgccttacaagagatcctgaaggaagcactaaacatggaaaggaacaactg

SEQ ID NO: 6292 - DNA, 120 bp, synthetic construct
  source 1..120: mol_type = other DNA
gatcaatgagacagaaagttaacaaagatatccaggaattgaactcagctctgcaccaagcagacctaatagacatctacagaactctccaccccaaatcaacagaatatacattcttct

SEQ ID NO: 6293 - DNA, 120 bp, synthetic construct
  source 1..120: mol_type = other DNA
ccgaattctaccagaggtacaaggaggagctggtaccattccttctgaaactattctaatcaatagaaaaagagagaatcctccctaactcattttatgaggccagcatcatcctgatag

SEQ ID NO: 6294 - DNA, 120 bp, synthetic construct
  source 1..120: mol_type = other DNA
ccttaagctgataagcaacttcagcaaagtctcaggatacaaaatcaatgtgcaaaaatcacaagcattcttacacaccaataacagacagacagccaaatcatgagtgaactcccattc

SEQ ID NO: 6295 - DNA, 120 bp, synthetic construct
  source 1..120: mol_type = other DNA
tgcagtctacccatcaaacaaccccataaaaagtgggcaaaggatatgaacaggcacttctcaaaagaagacatttatgcagccaacagacacatgaaaaaatgctcatcatcactggcc

SEQ ID NO: 6296 - DNA, 120 bp, synthetic construct
  source 1..120: mol_type = other DNA
gaggaccaggatgccatgaaaatggacttggctaaaaataggtcatttaacccttggctgactggcatctctctagattttcagttatacaatgttcaatctgctgtgcaaggtaattcc

SEQ ID NO: 6297 - DNA, 120 bp, synthetic construct
  source 1..120: mol_type = other DNA
ctgtttcaaactgttttctcctaagcacccaaggctctgtgatgtctgaaacagttaatcattaattttaaaagataagcttatcgtggaattagaaaaaaaaactattttaaaattcat

SEQ ID NO: 6298 - DNA, 120 bp, synthetic construct
  source 1..120: mol_type = other DNA
ggttgtggagaaataggaaggcttttacactgttgctggaaatgtaaattggttgaaccattgtggaagacagtttggtgattcctcaaagatttagaaccagaaataccatttgaccca

SEQ ID NO: 6299 - DNA, 120 bp, synthetic construct
  source 1..120: mol_type = other DNA
atgctgctcttatgatgctgagggaattctcatgagatctgatggttttatgaggtatttttccccacttcgatctgcaattctctctcctgccaccatgtgaagaaggacgtgtttgcc

SEQ ID NO: 6300 - DNA, 120 bp, synthetic construct
  source 1..120: mol_type = other DNA
ttaattataagacattacacatgtaacttagttttaaaaggtaaggagaatgtccatggctgaagaggatgcattttattaccattcacaatgatcactttacttgaacttcaatttcca

SEQ ID NO: 6301 - DNA, 120 bp, synthetic construct
  source 1..120: mol_type = other DNA
ccctcatatgcttacgtgcctgacattccagaagcttcacaagaccaaggtggagccagtggaatgttttaggtggagaaatgacacactctgactcacaggagcaggaccactgtgcag

SEQ ID NO: 6302 - DNA, 120 bp, synthetic construct
  source 1..120: mol_type = other DNA
ctggggtgatttttcttctagaagagtccacggggacaggtaaggagtaggaggcagggagtccagttctgggacggggattccgtgatgcaaagtgaagagagagggacggggcccatt

SEQ ID NO: 6303 - DNA, 120 bp, synthetic construct
  source 1..120: mol_type = other DNA
gagtgaggcctgtgagtgacaccggccgggggcgcaggtcactacccctccacatcccccacggaccgcccgggtctccccgagtctctgggtccgagatccacgccgaggcagcgggac

SEQ ID NO: 6304 - DNA, 120 bp, synthetic construct
  source 1..120: mol_type = other DNA
tggcaaggagacatttaaatgagagtccatggaaatatacattatggctgcccccagggatgtttgaatagtatgtgtccagatacaagcaggtgagaagaggaggaggcagggctgcta

SEQ ID NO: 6305 - DNA, 120 bp, synthetic construct
  source 1..120: mol_type = other DNA
tttcctcctttcctccctcagagctttctccctccctccatttttttcataaactccaagtgtttaggccaaaaggaagcattatttgaactttatgctaaaagtataatgccgtaattt

SEQ ID NO: 6306 - DNA, 120 bp, synthetic construct
  source 1..120: mol_type = other DNA
tctttctttctttctttctttctttctttctttctttctttctttctttctttctttctttctttctttctttctttctttctttctttctttctttcttttcgagatggagtctccctc

SEQ ID NO: 6307 - DNA, 120 bp, synthetic construct
  source 1..120: mol_type = other DNA
gaaaaatcttgttcctagattggagtaaacaatttctgcctaccctagccaaacaaattattgtcatgatgctaagctagtgtatagacagaggtgtgagattcacatttttctaactgc

SEQ ID NO: 6308 - DNA, 120 bp, synthetic construct
  source 1..120: mol_type = other DNA
tgggagatgataaatatttgttgatttgagctgctaagttgtaggtgacttgttatgcagcagtagataactaatacagcttcacaagagaggatgaatcactgaactttttcatttgct

SEQ ID NO: 6309 - DNA, 120 bp, synthetic construct
  source 1..120: mol_type = other DNA
aggataagtatatgacattttctccaccggaatgaattcatgaactgatatgcatagtagttgcataaaaccaaatatttcctaacttgctttgcattttccatttcatgatttttgtgt

SEQ ID NO: 6310 - DNA, 120 bp, synthetic construct
  source 1..120: mol_type = other DNA
gactccgtctcaaaaaaaaaaaaaaaggttaaaaaagaataccaaatgtctcaataaaatatacacatagcttagatgtgaataattcataataataggcaagtgcatgggccggccatt

SEQ ID NO: 6311 - DNA, 120 bp, synthetic construct
  source 1..120: mol_type = other DNA
ctcagtggctgaggctgaccgcgggcttggggacagggtctcccacctccagtggatacacagctgcgacctggacccggaccggagcctcttcgcgcggggatgaacataccctacgat

SEQ ID NO: 6312 - DNA, 120 bp, synthetic construct
  source 1..120: mol_type = other DNA
ttctaccctctggagatcacactgacccaggagcgggatggggaggaccaaattcaggatgcagagtttgtggagaccagacttgcagggtacagaaccttccagaagtgggcagctgca

SEQ ID NO: 6313 - DNA, 120 bp, synthetic construct
  source 1..120: mol_type = other DNA
tgagatccttgggatagtgtagacaggagcccatgggggagctcagccaccccaaaattcctcctttagtcacatcacctgtgggctctgaccagattttgtttttgttccaccccaaac

SEQ ID NO: 6314 - DNA, 120 bp, synthetic construct
  source 1..120: mol_type = other DNA
actcaacagcatacatttcacccaatttagtggcatgttctttaccctttgcctttttgagcttggcaatgcaaaccacatacttgagacccaggacactgtctccccagtgatggcgga

SEQ ID NO: 6315 - DNA, 120 bp, synthetic construct
  source 1..120: mol_type = other DNA
tgtggaaacagctttggaactgggtaacaggcagaggttggaagagtttggagagttcagaagacaagaaaatgggggaaaatttgcaacttcctagagatttgttaagctgttgtgacc

SEQ ID NO: 6316 - DNA, 120 bp, synthetic construct
  source 1..120: mol_type = other DNA
cttttgcaatgtgagaagaatgtgagctttggctggctagggacaggatgcaatgatataaatatttatccccagatacctcatgttaaaatctgatccccaatgttggacttagggcct

SEQ ID NO: 6317 - DNA, 120 bp, synthetic construct
  source 1..120: mol_type = other DNA
tttgatttattcacctaccctcagccactattcctccttctgtccctttatatcagtcttttccagttctagaagtgacattaggtttggctgctgtgctggcctagactgcatgcagca

SEQ ID NO: 6318 - DNA, 120 bp, synthetic construct
  source 1..120: mol_type = other DNA
tgcctggtcagccatttcaatattctatcaaagtttcccctgaatagtacatttccctgtgcactgttggctttttaaggctgtaaagtgtgttttcttgtgtaaagaaatgtgactcaa

SEQ ID NO: 6319 - DNA, 120 bp, synthetic construct
  source 1..120: mol_type = other DNA
aatggaatgcactgtagtaagggaataaaagacataattatctcaaaagatacagaagaaacagttgacaaaaatgttaacaccactcatgttcataagtttcaacaaaataggaatgga

SEQ ID NO: 6320 - DNA, 120 bp, synthetic construct
  source 1..120: mol_type = other DNA
gacattcttacatttttttgtcaattgatcttcaatgaagttgcataggtaatatgatgtgacacttatcgccatataaaatataagctcaaacaaattagagacctaaacagctaaaat

SEQ ID NO: 6321 - DNA, 120 bp, synthetic construct
  source 1..120: mol_type = other DNA
ctgtgagagacctatgaagagcataaaaagacaagctacagaatgagagaagatatttgcaggcaacatattctgtaaagactgtattcagaatatatgaagaaattttaaaactcaaca

SEQ ID NO: 6322 - DNA, 120 bp, synthetic construct
  source 1..120: mol_type = other DNA
tctctgaaggctgctcaggggacacactttcaaaatggcaaagatcaattatggttcctagtgggacacaacccctagcctattcctattcagcactgtcttgctctctattttccctca

SEQ ID NO: 6323 - DNA, 120 bp, synthetic construct
  source 1..120: mol_type = other DNA
ttatctggatggagctgaggctgccctgaccaagaacagcaccacccatctgtgtccccaagaccaggaagttaggaggaaccacacaacaaggtcaggaactatcccacctccccagtc

SEQ ID NO: 6324 - DNA, 120 bp, synthetic construct
  source 1..120: mol_type = other DNA
ggcacaaagagagaacatgctggtgaggcctaggcaaggagttgaatccagatcgcctggctgcagagtctagttgccctcagtggagccagcgaacccaggagctgacaccagagactg

SEQ ID NO: 6325 - DNA, 120 bp, synthetic construct
  source 1..120: mol_type = other DNA
agctccaccccagggctgctgcttggtgaggctgcaagcccttcctgtcccattcctaacagggattccacccaggccactgccatcgcagctcacaggggatcttcttcgcctgtggag

SEQ ID NO: 6326 - DNA, 120 bp, synthetic construct
  source 1..120: mol_type = other DNA
gacatgggatgaaaacagggaccacagctgccctgacagagggctggtccccactccccaaatagcccagggacatctgcttatcaactggtccatattatctgcaaggaaacacaggga

SEQ ID NO: 6327 - DNA, 120 bp, synthetic construct
  source 1..120: mol_type = other DNA
cccacctcaccaaaaaatgtagtttaggctagcttgcaacatagataattgtaccctttcttatcaactaagtgcagccattagggacataagtcaaatgtttaaagagtcctgagacaa

SEQ ID NO: 6328 - DNA, 120 bp, synthetic construct
  source 1..120: mol_type = other DNA
ttggtgagtgcattcctttccactccaattagaaaggggatatggaatgattcacattcatgtgggatccacaacacatttatttatcatttgcctcagggctattgtaactcctctgcc

SEQ ID NO: 6329 - DNA, 120 bp, synthetic construct
  source 1..120: mol_type = other DNA
aacaggtgaaaatggtccacctgggttgagcttgaatcccttgctgacacccacagaaaacacccaagtctgaagtggcactgaactaccaaacagacaaatggcagttagccagccttc

SEQ ID NO: 6330 - DNA, 120 bp, synthetic construct
  source 1..120: mol_type = other DNA
ctggtttccaaaggagggtacccttaaaagtagacaaaagagagcccattgaactacacattactttagtcaccagagaagtttggagagcatgttcccagagaccacatcgtgagaaga

SEQ ID NO: 6331 - DNA, 120 bp, synthetic construct
  source 1..120: mol_type = other DNA
catttccattattctatacaggttacgtacatctgctttatttccttccattttcataatattggccatacgtagggtttctagtttctcaacgtgtattcttttctttattttagtttc

SEQ ID NO: 6332 - DNA, 120 bp, synthetic construct
  source 1..120: mol_type = other DNA
ccctcattctttcggcctccaataccccgactctactaaaaatacaaaaattagctgggcgtggtggtgcatgcctgtaatcccaactactcgggaggctgaggcaggagaattgcttga

SEQ ID NO: 6333 - DNA, 120 bp, synthetic construct
  source 1..120: mol_type = other DNA
tgttctgaaaacattgagttgaaagaattgacttaaattcctaattccttaaacagattttttcaaagtaaaatatgcttggtttttataaaaatgaaagagaaaagaataccaaagttc

SEQ ID NO: 6334 - DNA, 120 bp, synthetic construct
  source 1..120: mol_type = other DNA
aaaactcagagatactgttgtatctcctttctctgcctcaaactgttttcccctcaacacctaaggctctgtgatgtctcaaacttttagtcattaatttaaaaagtgaagcttatcata

SEQ ID NO: 6335 - DNA, 120 bp, synthetic construct
  source 1..120: mol_type = other DNA
gcaattattaaaagtcaagaaacaacagatgctggcaaggttgcagagaaataggaaggcttttacactgttggtggaaatgtaaattggttcaaccattgtggaagacagtgtggcaat

SEQ ID NO: 6336 - DNA, 120 bp, synthetic construct
  source 1..120: mol_type = other DNA
attggcggagggacttcatgggaggtgatcgaatcatggggatgattcccccaagctgtggaagtcagcggttgaacctatttttcctaatgctcccctcagcactgccctcccataata

SEQ ID NO: 6337 - DNA, 120 bp, synthetic construct
  source 1..120: mol_type = other DNA
taatttgttacacaatagtaaataactaatacattttcacaagagaggatgtattattacacattaatttgcatttgctctaaatttatcatcatcatattactatttttgagacagggt

SEQ ID NO: 6338 - DNA, 120 bp, synthetic construct
  source 1..120: mol_type = other DNA
ctctgtataagcctgaaggaggattcaaaatgaaaacacaggtttaggaagaccggaacagagattccatccacatcatgcccagatttctgattaagaaactataaacaacaaatgagt

SEQ ID NO: 6339 - DNA, 120 bp, synthetic construct
  source 1..120: mol_type = other DNA
gaggagcaggaggtgaggaaaaggagcagaggaaagaattccaaagcagcagaactcttaggtttaaacacattgttttatagattttaatacatccatctacagagcttcgctgggtgt

SEQ ID NO: 6340 - DNA, 120 bp, synthetic construct; identical to SEQ ID NO: 356
  source 1..120: mol_type = other DNA

SEQ ID NO: 6341 - DNA, 120 bp, synthetic construct
  source 1..120: mol_type = other DNA
gtatgcctacgatggcaaggattacctcgccctgaacgaggacctgcgctcctggaccgcagcggacactgcggctcagatctccaagcgcaagtgtgaggcggccaatgtggctgaaca

SEQ ID NO: 6342 - DNA, 120 bp, synthetic construct
  source 1..120: mol_type = other DNA
gcaggggatggaaccttccagaagtgggcagctgtggtggtgccttctggagaggagcagagatacacgtgccatgtgcagcatgaggggctgccggagcccctcatgctgagatggagt

SEQ ID NO: 6343 - DNA, 120 bp, synthetic construct
  source 1..120: mol_type = other DNA
gctgtgctatgaggtttctttgacttcaatgtattgagcatgtgatgggctgtttaaagtgtcacccctcactgtgactgatatgaatttgttcatgaatatttttctgtagtgtgaaac

SEQ ID NO: 6344 - DNA, 120 bp, synthetic construct
  source 1..120: mol_type = other DNA
cagagtttttcattgtagtttactttctgttggaactcctcttctgctctctctcctactcttcttcctgccctgagttgtagtaatcctattgctggctccaaaccaaactcatggatt

SEQ ID NO: 6345 - DNA, 120 bp, synthetic construct
  source 1..120: mol_type = other DNA
ggagtaaagatttgagggatgtgaggagttgtctacacggatgtctcagaaagttcttttcaggcagggaaaccttcagtgcagatgcactagggcaggaaattgtctgtgttcctggaa

SEQ ID NO: 6346 - DNA, 120 bp, synthetic construct
  source 1..120: mol_type = other DNA
attagaaggcagtaaatgaaaatggacagacttaaacccaatgaggtcaacaatgacattaaacgtaatggactcagacactccaattacaagacaaatagtgcagagggataaaaataa

SEQ ID NO: 6347 - DNA, 120 bp, synthetic construct
  source 1..120: mol_type = other DNA
ccacaatgcacaggacagaccacaagggattctctgtctcaaattcttaatagggctgctgttgagaaacccgcccgagaggtaagtgctgtaatgtcctcaccatttcacagattaaga

SEQ ID NO: 6348 - DNA, 120 bp, synthetic construct
  source 1..120: mol_type = other DNA
agcaggaaagcagagtgttcatggatttcgaattccatcaaagaaatacaactttggcaaaatatccaagtcacttttctaagccccaggcagcagctcaaaacaaacaacaccaaaaac

SEQ ID NO: 6349 - DNA, 120 bp, synthetic construct
  source 1..120: mol_type = other DNA
aaaactcttaaaagaaaatactgagggaaagtcttatggtcattagaattggtagtggtttcttggctggtgaccaaaagtacaagcaataaaaggaaaatgacaaataagacttcatca

SEQ ID NO: 6350 - DNA, 120 bp, synthetic construct
  source 1..120: mol_type = other DNA
cagtcatgctcatagcagtgctattcccaatagccaaaaggtggacgcaacccaagtgtccatcagaggatgattggaaaaacaaaatgtggtgcatatacacatggaatattaatcagc

SEQ ID NO: 6351 - DNA, 120 bp, synthetic construct
  source 1..120: mol_type = other DNA
agtgacctcttctgaaatctatcccctgccattcccaccaccgccaccaatcttctaacccaagcatatttttcttaatggcaattatcagtgatactatgacaggttttatttgtttat

SEQ ID NO: 6352 - DNA, 120 bp, synthetic construct
  source 1..120: mol_type = other DNA
ggcatgtgccaccaagcccggctaattcttttgaattttttgtagagacagggtttctctatgttgcctaggctggtcacaaactcaggggctcaagcaatctgccagcctgagcctccc

SEQ ID NO: 6353 - DNA, 120 bp, synthetic construct
  source 1..120: mol_type = other DNA
gtatttttaacattcaaaataaaacatttgaagtaaaataacaatgaaaagtggctgaacactgtggtgggcacctgtagtcccagctactcaggaggctgagataggagaatggctcga

SEQ ID NO: 6354 - DNA, 120 bp, synthetic construct
  source 1..120: mol_type = other DNA
aggactttgctgacttaagcaaaacattttctctccaaatgaattatcctgattggataatctcttactcccactgaaattagccccagagttgcatttgagcatttgggtcaaagacag

SEQ ID NO: 6355 - DNA, 120 bp, synthetic construct
  source 1..120: mol_type = other DNA
atgttaatcttattgaggatccattgtacctgaaaagttccttctctgttattgctttcaagatggtctgtttgtcattggtgtagactggttgattataacgtctctcagtgtggactt

SEQ ID NO: 6356 - DNA, 120 bp, synthetic construct
  source 1..120: mol_type = other DNA
gaaacatcttcagccaaaaagaaataagaaaagaaaattcaatctttttatctgggctctctgtgtgttttggggcatgccctcaacactctgctgggcagtttacaatactgctttggc

SEQ ID NO: 6357 - DNA, 120 bp, synthetic construct
  source 1..120: mol_type = other DNA
acaaagctctgctcctgagttccagttgatttttctggacttgctaggttgcaataaacctttgatgatttttcagggttccaatgcagttgattctttatcaacccaatcagaatatct

SEQ ID NO: 6358 - DNA, 120 bp, synthetic construct
  source 1..120: mol_type = other DNA
tgtagatattttgaaattgggtattatggagacagtgcaacagtttcatttatatgataatgttttgttttacctttattcatcaaagagagatttgtcagctgcaaatttctagtttga

SEQ ID NO: 6359 - DNA, 120 bp, synthetic construct
  source 1..120: mol_type = other DNA
atattttaagataacctctttctggaatgcctctttccatttactcacttctcttcttctaggaatttaattagagaagaattaaattaaacctcattcaaccaccatatacactgtgga

SEQ ID NO: 6360 - DNA, 120 bp, synthetic construct
  source 1..120: mol_type = other DNA
gggtgcaatccacaaaatacaaacaacaggaaactctaccagacaatattaatttcaaagggataacctatagaacaaataagaacaaaaaacttatttttaaaggtaaaactaaactat

SEQ ID NO: 6361 - DNA, 120 bp, synthetic construct
  source 1..120: mol_type = other DNA
gccccaggacccctggcaaggctgtctcattactgagtgtgcattcagctccacgtcgctggagacaatgtccacagtttattttttgagtcctggatgaacctgacaggacatagctga

SEQ ID NO: 6362 - DNA, 120 bp, synthetic construct
  source 1..120: mol_type = other DNA
tccccctttctgggcagcactggtttttttaattatttttgcattcacagtagttctgaaattgcaggatgctgagacccagcactggtcagttacaccgtctcttcttcaccattaaat

SEQ ID NO: 6363 - DNA, 120 bp, synthetic construct
  source 1..120: mol_type = other DNA
gatgggagcagccagaagggcccaagagggacatttccaagaaagtaaaattaatagaaagttcaaagtctctaatttcttaacagagtcacagaaatggaacagatatcaaagttaaat

SEQ ID NO: 6364 - DNA, 120 bp, synthetic construct
  source 1..120: mol_type = other DNA
ggactctccctagaaaggcagagaagactctcatttttctcagaaagtcctgcacaaatatttactctttccattatgtgcaattgtaacttcgaataaaataaaaacaaaagcttcagt

SEQ ID NO: 6365 - DNA, 120 bp, synthetic construct
  source 1..120: mol_type = other DNA
tttgtgctatgtcaacgcatctagacagagctctcattctcccttgaacctcaactctatccgttcccagacacttgaaataaaacacagaccagaaatgtctatttaaaagctaaatat

SEQ ID NO: 6366 - DNA, 120 bp, synthetic construct
  source 1..120: mol_type = other DNA
ccaggaccaaaggacaagacctgggaaaaacccagtgccctcccctcctctcaagcctggccagctctgacagcaggaggactccccaaagagaggctctggccctggctccatgtcctt

SEQ ID NO: 6367 - DNA, 120 bp, synthetic construct
  source 1..120: mol_type = other DNA
acaccacaggtgagagcaggagcgaccacagacctgcactgcccctgctgtgggtgcctcctggacagggccctcttgctgcagggcaggggatgaaccatcccatctgcccaggcctga

SEQ ID NO: 6368 - DNA, 120 bp, synthetic construct
  source 1..120: mol_type = other DNA
atttgtgtgaacattgatccatctcatagaccatgttaacggaaaaagcaagcaaatgcataacaaaatcagcaagaaacaatttataaaaagtctaaaagtaaagccaggcaagggggc

SEQ ID NO: 6369 - DNA, 120 bp, synthetic construct
  source 1..120: mol_type = other DNA
tctgaacattctgctttaggtccagcactagagaaagaggactcatctttatttagcaccttccacaatctgtagagaaatctgaaacattgcaaaagaagatatatgaatggccagttc

SEQ ID NO: 6370 - DNA, 120 bp, synthetic construct
  source 1..120: mol_type = other DNA
ggcatccaaattggaaaggagaaagccaacttagccttattcgcaaatggcataatcttttactcagaaaaaactaaatattggccgggtgcggtggctcatgcttgtaatcccagcact

SEQ ID NO: 6371 - DNA, 120 bp, synthetic construct
  source 1..120: mol_type = other DNA
attcacagaaatagaaaaaattatgaaattcatatggaatcataaaatatcccaaatagccaaagcaatcgtgagcaagaagaacaaagctagaggtatcacacttcctgaattcagaat

SEQ ID NO: 6372 - DNA, 120 bp, synthetic construct
  source 1..120: mol_type = other DNA
gtggagaaatgggaactgttgtacactcttgggaaagtaagtacagcaattatggaaatcagtataatgatttctcaaaaaacaaaaaatagaactactattggatccaacaactccact

SEQ ID NO: 6373 - DNA, 120 bp, synthetic construct
  source 1..120: mol_type = other DNA
aaaacaaaacaaaacaaaaaagagtgaatttaaaatgttctcaacagaaagaaatgataaatgcttgaggtcatggataccctaaatatcttgactgatacacacattctatgcatgtat

SEQ ID NO: 6374 - DNA, 120 bp, synthetic construct
  source 1..120: mol_type = other DNA
acctgagatttcaaaagatagagtgaggcaattgaaaatagatgatatagggtcatttccaagcctctgagtgtcccctggccaccacagaaaaatgaagatgttcccattccctttcag

SEQ ID NO: 6375 - DNA, 120 bp, synthetic construct
  source 1..120: mol_type = other DNA
cacaggagatactgagcctgatgctctgatggaagctctgagttgagattttattttatacttaggtgcctctgagtcattagagttttttgcctgactccactctggccccatttcaat

SEQ ID NO: 6376 - DNA, 120 bp, synthetic construct
  source 1..120: mol_type = other DNA
actcaatgggagaagtggtccaaatgacctaatcagcaattgctggaaaccaaagtaacagtatacaattctatgtgttaatatcatataccaagagagaaaatgtatagatatcagtag

SEQ ID NO: 6377 - DNA, 120 bp, synthetic construct
  source 1..120: mol_type = other DNA
aaaaaaacaccaacagcgataatatcatacactgtcatggtgctatgtgttaatccgtgtccttagcactttcaaaatatgaattcatttaattgtcacgatacatctatggggtgtgcc

SEQ ID NO: 6378 - DNA, 120 bp, synthetic construct
  source 1..120: mol_type = other DNA
ggtcatatctccaagtacgccgccccacgccaccctcccgtggtccctgtccctctgtcccctccccagctccccctacaccgtaagaagctcccaggtaagcggctccagggccgggcg

SEQ ID NO: 6379 - DNA, 120 bp, synthetic construct
  source 1..120: mol_type = other DNA
cctcagacgaccgttagcattttttagcaatagagtaattttaaattaaggtatgtacatagttctttcatacataatgctattgtacacttactaggctacagtagagtgtgaatataa

SEQ ID NO: 6380 - DNA, 120 bp, synthetic construct
  source 1..120: mol_type = other DNA
agtcttaattattagaatataagaggcccaaactactgctgttacagatatgtaaaactacacagtataagtttaaacaacccacaaccaattaacagtgaagataaattaacaaccttt

SEQ ID NO: 6381 - DNA, 120 bp, synthetic construct
  source 1..120: mol_type = other DNA
attagagccccatttgcctcactgtaaccattccctgtgggccccaggctgttcttctcaatcctgagtcttgtagctcctggttcactgtcaccctctccagcattgctgtctccttga

SEQ ID NO: 6382 - DNA, 120 bp, synthetic construct
  source 1..120: mol_type = other DNA
gcaaggtggccacaggctctgaggacacagatactatcattttatcatatgctgtgatgtaatatcagtggaccactcatcgcatatgtgcttgctttccacgcttggagtctaccctgt

SEQ ID NO: 6383 - DNA, 120 bp, synthetic construct
  source 1..120: mol_type = other DNA
gaagtctgaaatctattgccacatttgctctgagactatgcccacccctggctttttccagccaatgattgaggaaagtagggcagaaactaaggcaggacatttctcttctgaaggctg

SEQ ID NO: 6384 - DNA, 120 bp, synthetic construct
  source 1..120: mol_type = other DNA
cacccttctctagtaatggttcccactttcaatgctggaagatgctacacaatcctcacccctatgatgccacgggaatcccactcaggaggtttgtaggaactagccagcacatcccca

SEQ ID NO: 6385 - DNA, 120 bp, synthetic construct
  source 1..120: mol_type = other DNA
cggcaaagaaacatatagccatttactcaggaggttgtacactggggaaaggaaacaggcagaactagggggattattgacactgggtgtgaactgacattgatgctcagatgcccacag

SEQ ID NO: 6386 - DNA, 120 bp, synthetic construct
  source 1..120: mol_type = other DNA
caaaacaagggcactccagaaggtgaagataaaccttacaaagcttcaagagtggccactcggccaggcgcagtggctcacgcctgtaatcccagcactttggaaggccgaggtgggtgg

SEQ ID NO: 6387 - DNA, 120 bp, synthetic construct
  source 1..120: mol_type = other DNA
agcatccatcatgaggtgaaaatggtccacctgggttgagcttgaatcccatgtttacacccacagaaaatacccaagtctgaagtggcactgaacaaccaaacagacaaatggaagtta

SEQ ID NO: 6388 - DNA, 120 bp, synthetic construct
  source 1..120: mol_type = other DNA
ttaaaaggatacaaaagacagcccactgaactacacattccgattgtcacgagagaagttttgattagtatgtgcccagagaccacctggtgaaaagaggattctcctcctctccaggcc

SEQ ID NO: 6389 - DNA, 120 bp, synthetic construct
  source 1..120: mol_type = other DNA
tttgggggtagtttgtcacaaagcaatggataactaatgaagccctcttacatttccattattctatagaagttaactacatctgttttattttctcctattttgataatattagccaca

SEQ ID NO: 6390 - DNA, 120 bp, synthetic construct
  source 1..120: mol_type = other DNA
ttatcattatctagtatggttaaagtccatacaatgtatcatgcaaccaacccattcctaatcatccactctgggagctttggggctttcttgcctatgtgcacaggagacatgcacact

SEQ ID NO: 6391 - DNA, 120 bp, synthetic construct
  source 1..120: mol_type = other DNA
tgatttgtaaggagataaaagcaagggctgctttgtcacggtgagctacttcttgcaggaatcgggatctgcatctgcagactatatgaagacaaacaacatagattaaaagcacagtca

SEQ ID NO: 6392 - DNA, 120 bp, synthetic construct
  source 1..120: mol_type = other DNA
atctggctcatgataaggtttcaggtatcttgatggtatccaaattggctgttgattttggcctggagaaatacaagcatagcccctaccccaagttattattttacctattttccaatt

SEQ ID NO: 6393 - DNA, 120 bp, synthetic construct
  source 1..120: mol_type = other DNA
tcatctgtatgaaattgtgagaattttaaataactgtgtggagtgaaccatccatgaagaatcagaaatcacattaataggcatatcaaaagcagtcaatacctcaattacagctacaag

SEQ ID NO: 6394 - DNA, 120 bp, synthetic construct
  source 1..120: mol_type = other DNA
aagtgatcataacattgaagtaatatttctcgagtgggggcagcacaaactatatcatccacatagtgaataatgtaacattgtgaaaattttttacaagtaggttcaattgcttgcccc

SEQ ID NO: 6395 - DNA, 120 bp, synthetic construct
  source 1..120: mol_type = other DNA
gaaatgtctgctcctgtatctaccaaacctttacatttctttccctgaatagttatttcacaggtaggatgttcattagtaatttgattcacccaataagcttctttgccttgtttattt

SEQ ID NO: 6396 - DNA, 120 bp, synthetic construct
  source 1..120: mol_type = other DNA
cttcatcaaaataataaggagggggtgcagaagggtagggatgaatctctccttcctttgctgctttagctttagctggcaaataaacatgctctgtaacctcttctgttacttcgctat

SEQ ID NO: 6397 - DNA, 120 bp, synthetic construct
  source 1..120: mol_type = other DNA
agcagcccagggtagctttacaggtttgtgttttacaccagtgctgggcaccctggtagatacttgattataattccttaaacagagttttccaaattaaaatatacctgttttttatag

SEQ ID NO: 6398 - DNA, 120 bp, synthetic construct
  source 1..120: mol_type = other DNA
agaacttaagcaaatttacatgaaaaaaaacttcaataaaaagtagacaaagaacttgaacagacacttctaaagaagacatacatgtggccaacaaaaatacgaaaaaaagctcaacat

SEQ ID NO: 6399 - DNA, 120 bp, synthetic construct
  source 1..120: mol_type = other DNA
ttcaaaaacctgaaacaatagttataattttgcttttaacatatattcaaaacatttgatactgttcccttccagaggtgcatcttaattccctctcctgagtgtggcttggacttaatg

SEQ ID NO: 6400 - DNA, 120 bp, synthetic construct
  source 1..120: mol_type = other DNA
gtggcatgatcaccatgtactgcagtgtcgacctcctggggtcaagggacccactgatctcagcctcctgagtagctgggactaccgtcatgaactactatgcctggctaattttctaat

SEQ ID NO: 6401 - DNA, 120 bp, synthetic construct
  source 1..120: mol_type = other DNA
taagccgagatcccgccactgcacccaagcctgggctacagagcgagactccatctcaaaaaaataaataaataaaattaaaaatgaaggggctgtgtaggaaagaatgctggtgaggac

SEQ ID NO: 6402 - DNA, 120 bp, synthetic construct
  source 1..120: mol_type = other DNA
taaaaattactaagtgttcctataaaatatacacaacacttagcagtggatacttcctaaaaacagacagtgcatgagcactagtgaggggcattgcgactacattgaacagttgcaact

SEQ ID NO: 6403 - DNA, 120 bp, synthetic construct
  source 1..120: mol_type = other DNA
gtcgggtttctagagaagccaatcggtgccgccgcggtcccggttctaaagtccccacgcacccaccgggactcagattctccccagacgccgaggatggtgctcatggcgccccgaacc

SEQ ID NO: 6404 - DNA, 120 bp, synthetic construct
  source 1..120: mol_type = other DNA
cagatcaccaagcgcaagtgggaggcggcccgtcgggcggagcagctgagagcctacctggagggcgagttcgtggagtggctccgcagatacctggagaacgggaaggagacgctgcag

SEQ ID NO: 6405 - DNA, 120 bp, synthetic construct
  source 1..120: mol_type = other DNA
tctgcccgagcccctcaccctgagatggggtaaggagggagatgggggtgtcatgtctcttagggaaagccggagcctctctggagagctttagcagggtcagggtccctcaccttcccc

SEQ ID NO: 6406 - DNA, 120 bp, synthetic construct
  source 1..120: mol_type = other DNA
gacacagctgtgctatggggttctttgaatttgatgttttgagcatgcgatgggctgccaaagtgtcatccattactgggacagatatgaatttgttcatgaatattttttctatagtgt

SEQ ID NO: 6407 - DNA, 120 bp, synthetic construct
  source 1..120: mol_type = other DNA
ctcttcttccttccctgagttgtagtaatcctagtgctggctccaatccaaactcatggatttacaaagcagagtctaatttagattcatacgtggttggaaaattgtacccataagcct

SEQ ID NO: 6408 - DNA, 120 bp, synthetic construct
  source 1..120: mol_type = other DNA
tccacatgcataattggccttgatgcactggcaaagagggtcacccccacactacatccctagtctggagagtaagggctatcattgtgctgaagcccaaagggaatcatcatctaaaac

SEQ ID NO: 6409 - DNA, 120 bp, synthetic construct
  source 1..120: mol_type = other DNA
caagtgagctgagatcccgcccctacactccagcctgagcaacaagagtgaaactccatctcaaaaagaaaaaaaaaaaattaaaaggataagcaccctcccacatcagagataactctc

SEQ ID NO: 6410 - DNA, 120 bp, synthetic construct
  source 1..120: mol_type = other DNA
gggcgtgttggtgcgtgtctgtaatccaagctactcagaaggctgatgcaggagaatcgtttgaacctggaaggcagaagttgcagtgagctgagatcctgccatcgcactccagcctgg

SEQ ID NO: 6411 - DNA, 120 bp, synthetic construct
  source 1..120: mol_type = other DNA
tccacctaccacatcaaaccaaatcattgtcatgatgctaagctagttgtacagacaaagatgtgagactcacatttttctaattgcaaagcaccctgattaggcaaatatttttgtaga

SEQ ID NO: 6412 - DNA, 120 bp, synthetic construct
  source 1..120: mol_type = other DNA
gtctccaccaaaaaaatatgaaaaccagtcaggcgtggtggcgcgtgccttcaatcccaggcactcggcagactctaaattattcaatgcctcagacactaactttccaaggaataggag

SEQ ID NO: 6413 - DNA, 120 bp, synthetic construct
  source 1..120: mol_type = other DNA
cttttgtaaagcacctgtgaaattgaaggacaaatttatcaccttgattgtgatcatgggaacctgactcccagcagtcacaagtcaggagaatgttcctgctgaggacagatgtcaaaa

SEQ ID NO: 6414 - DNA, 120 bp, synthetic construct
  source 1..120: mol_type = other DNA
aattcaggatttggtctggctgcctgtaatagcctatgtgcatatgtgtgagcaaagaaacgacccaaaactggaactgatatttaaatggggaaatttaatacccaggacaattcttag

SEQ ID NO: 6415 - DNA, 120 bp, synthetic construct
  source 1..120: mol_type = other DNA
tctgcatataccagctcacctttgtcttctgccatgagtggaagcagcctgaggccctcactaaatgcgcaaacatttccagacatcagaatcttgagccacatgaaccttgtttatata

SEQ ID NO: 6416 - DNA, 120 bp, synthetic construct
  source 1..120: mol_type = other DNA
tgaagtgtagtctttattccagcatcctctcctcttcagaagaattgtatgtatcgtcataacagcatcgtcctgatccatcaggtaaaagagaggatgctacctagtggagttattctt

SEQ ID NO: 6417 - DNA, 120 bp, synthetic construct
  source 1..120: mol_type = other DNA
cctcatatcaaagtcacagcaagactcacaggaaaagagtgccatacaccagtgtcaccaataaacataaatgaaaacatccttaacaaacattggcagataatacaaagccacataaaa

SEQ ID NO: 6418 - DNA, 120 bp, synthetic construct
  source 1..120: mol_type = other DNA
gcgtggtggcaggctcctcgggaggctgaggcagaaaaatggcatgaacccggtaggcagaagttgcagtgagcggagatcgtgccactgcactccagcctgggtgacagagcgagactc

SEQ ID NO: 6419 - DNA, 120 bp, synthetic construct
  source 1..120: mol_type = other DNA
ctttatacaaaaaaaaaaaaaaaaacctcaaaatgaatcacaggctttaatgtaaaacacacagttaaaattacaaacattgagccaggtgtggtgtcacaggcctgtactctcacctac

SEQ ID NO: 6420 - DNA, 120 bp, synthetic construct
  source 1..120: mol_type = other DNA
caaaatttaatgaacataaatattttactgctccatcaaaggcattcttaaatgggactgcagtttggagccactgccttggttctgctaaggtgctgggtgtgctaccgaccttggcat

SEQ ID NO: 6421 - DNA, 120 bp, synthetic construct
  source 1..120: mol_type = other DNA
ccaactaggttccctcatcctcttgcttccaggcaggtcctgcatccactcctgctgcacagagggctcccatccctgccttggtcggtttcacaggtgctcctctaactctctctgcca

SEQ ID NO: 6422 - DNA, 120 bp, synthetic construct
  source 1..120: mol_type = other DNA
caggaagccaagatatgcacctcaggtgactacatttttttactgttctgcacttgctggagaatgaccccaaaagataagatcaatttgttgactaccaacttatttggctgagccatg

SEQ ID NO: 6423 - DNA, 120 bp, synthetic construct
  source 1..120: mol_type = other DNA
taacataactaaaaatgaaacacaagtgcctctgcattatgtgtgggtgctctctccctttattttatttggggtgaggttattttagggcatggcccagggtaaattcctgcaaggcct

SEQ ID NO: 6424 - DNA, 120 bp, synthetic construct
  source 1..120: mol_type = other DNA
ttggggtgggggtggaaggagctgagagttggaaataggcaaaaagctgcagaggtgagggtagtgcagggtgggattgagagaatttcccccgactactgtactgatcccttcatctcc

SEQ ID NO: 6425 - DNA, 120 bp, synthetic construct
  source 1..120: mol_type = other DNA
aaaacaaaaatttgtgtgacttgtttgttgccatggtctgaaaccaaatctgcagtgtctctgaggtacgtctgtagtttccctttctctcttcctgctggcccggaatgaccttgtttc

SEQ ID NO: 6426 - DNA, 120 bp, synthetic construct
  source 1..120: mol_type = other DNA
caaatttaaaacaagattagcagccttttagaaaaaaaaacaaaacacatgggaggttgcaaaggcaatctaaatgatactctaataaaaatccttcatgaaaatgacatttcaaccatc

SEQ ID NO: 6427 - DNA, 120 bp, synthetic construct
  source 1..120: mol_type = other DNA
cttgactgttgatgacttcaacatgtggtgggttgagtaatggtcccgaaagaggtccagtcttagtccttggaacctgtgaacaggttgcattacatggtaaaagggactttactcatg

SEQ ID NO: 6428 - DNA, 120 bp, synthetic construct
  source 1..120: mol_type = other DNA
cacatcaattccaacaatccttcgacccccaccctgggaataccaatccagtgattctgccatctactcactgtccctcatcgttggtgtcttctctaacttcatgacccaaaccacatg

SEQ ID NO: 6429 - DNA, 120 bp, synthetic construct
  source 1..120: mol_type = other DNA
cacagaaattccatagcacaggatgcagctgagctgctatgggtctcacccgtgctgagctgagaggatgccctggttaggggaagctatggcaggtggggtgatagaatgccctgcaca

SEQ ID NO: 6430 - DNA, 120 bp, synthetic construct
  source 1..120: mol_type = other DNA
cctcagaaacgtgatggtgagagggacctgcatcattaagaagtgtcggggtgttgtcctctgcaggctggatgtgatggtagtaaagatgacccagagttacatttattaataaccctg

SEQ ID NO: 6431 - DNA, 120 bp, synthetic construct
  source 1..120: mol_type = other DNA
caccattagagagctgaaggatgtgggatggtgttggggttgtctattgtctctacataatccagcaacctgtccctgaggaaccctgatgaggactaaagaatgaatgagattactcca

SEQ ID NO: 6432 - DNA, 120 bp, synthetic construct
  source 1..120: mol_type = other DNA
caagcccaacagcattcatcatgaagtgaaaatggtccacctgggttgagcttgaatcccacgtttacacccacagaaaacacccaagtctgaagtggcactgaacaaccaaacagacaa

SEQ ID NO: 6433 - DNA, 120 bp, synthetic construct
  source 1..120: mol_type = other DNA
ccacaggcacaactaagtgccagcctggaggaaacactctgagggttgcatgccatctttcaggacatggtgcgttgtttaaatcagagatgtctctacagttctgtgttcgcaagagga

SEQ ID NO: 6434 - DNA, 120 bp, synthetic construct
  source 1..120: mol_type = other DNA
tcgtctgacaggtgtgtcccctaataaaatgctgtaactttaatcctatgatggcacttgctttttggagcatttggactacaaaatcattttcgtctgcacaccagtgacctcttactt

SEQ ID NO: 6435 - DNA, 120 bp, synthetic construct
  source 1..120: mol_type = other DNA
ccatacactctagcgggctttcttgcctatgtgcccaggagacaggcacactgatgtttatggcaaaaactggaatcagccacatatacatcaataggaaatatacatcaataggaaatt

SEQ ID NO: 6436 - DNA, 120 bp, synthetic construct
  source 1..120: mol_type = other DNA
cgagttaagcattttgggctactgcatcaaaccaaagttactggcattatgctaagctagatgtgttgactgaagtatgagattcccatttttgtaaatgagaagcaatctgattatgca

SEQ ID NO: 6437 - DNA, 120 bp, synthetic construct
  source 1..120: mol_type = other DNA
ctaaaaagaacttaagcaaatttacatgaaaaaaacaacttcattaagaagtggacaaagcacatgaacagacacttctcaaaagaagacatacaggtggccaaaaaacatattttaaaa

SEQ ID NO: 6438 - DNA, 120 bp, synthetic construct
  source 1..120: mol_type = other DNA
aaataatagtttgaattttgcttttaacatatatgcaaatcctttaatactgctcccttccagaggtgcagctgaattccctctcttgagtgtggcttggacttaatgatgcacttctga

SEQ ID NO: 6439 - DNA, 120 bp, synthetic construct
  source 1..120: mol_type = other DNA
atgttaatttgcatttgctctaaatttatcatcatcattattattatttttgagacagggtctcactctgtcacccaggctggagtgcagtggcatgatcaccatgcactgcagtgtaga

SEQ ID NO: 6440 - DNA, 120 bp, synthetic construct
  source 1..120: mol_type = other DNA
aggattcaaaatgaaaacacagctttgggaagcccggaacagagattccatccacatcatgcccagatttctgactaaggtactataaacagataaatgggtgttgtttggccaggcgtg

SEQ ID NO: 6441 - DNA, 120 bp, synthetic construct
  source 1..120: mol_type = other DNA
aaggaattggaaagcagtagaattcttaggtttaaacacattgttttatagatttttattacatccatctacagagcctcgctcagtgttctttgcagttggcctttaatacctaatgta

SEQ ID NO: 6442 - DNA, 120 bp, synthetic construct
  source 1..120: mol_type = other DNA
tttttttctagaagagttcagggaaataggtaaggagtgggaggcagggagtccagttctgggacggggattccgggatgaaaaatgaagagggacggggcccatgacgagggtttctcc

SEQ ID NO: 6443 - DNA, 120 bp, synthetic construct
  source 1..120: mol_type = other DNA
gaccccggcctggggcgaaggtcacgacccctcctcatcccccacggacgtcccgggtcccccccgcgagtctccggctccaagatccaccccgaggctgcgggacccgccagatcctcg

SEQ ID NO: 6444 - DNA, 120 bp, synthetic construct
  source 1..120: mol_type = other DNA
gcaaagtgcctgaattttctgacacttcctgttagacctctcccccagacacatatgatccaccattccgtctctgactataaggccaccctgaggtgctgggccctgggcttctaccct

SEQ ID NO: 6445 - DNA, 120 bp, synthetic construct
  source 1..120: mol_type = other DNA
ctgactcctttctggcctctcataggacattttcttcccacagatagagtgagctactctgaagctgcaagtaagtatgaagtgggctgatccctgatccttgggatattgtggtcggga

SEQ ID NO: 6446 - DNA, 120 bp, synthetic construct
  source 1..120: mol_type = other DNA
aagagataaagagaaaacagctgggcccgggggaccactgccatcaagatgcggagaccggtagtggccccgaacagctgggctcgctgatatttattgcatacaagacaaagggcaggg

SEQ ID NO: 6447 - DNA, 120 bp, synthetic construct
  source 1..120: mol_type = other DNA
aaattttcagatcgttcaagctcttgccgtcttcccagggctctttcctcattgtattttccatcttttctgcaatctttttaaaggaaccagattctgaaatttgccaagaggcagggt

SEQ ID NO: 6448 - DNA, 120 bp, synthetic construct
  source 1..120: mol_type = other DNA
ccttttcagtgacctgaaaaagatagagggcacacttactgtgataacccagagtatcagtcaagggggcttgaccttcaaggagttatgggaaagcttaataaagggtggtgtcccagg

SEQ ID NO: 6449 - DNA, 120 bp, synthetic construct
  source 1..120: mol_type = other DNA
cgtctccgcccggcagccacccactccgggagggagttggggggtcagccccccgcccagccagcctccccgtccgggaggtgaggggcgcctctgcccggccgcccctactgggaagtg

SEQ ID NO: 6450 - DNA, 120 bp, synthetic construct
  source 1..120: mol_type = other DNA
ataaaaaaaaaaaaaagaattgaggagcaagcttcacattcagaatccagtggctgaggaagtatccatatccctaagagaaagaaccttgggacaccatgactgttacatgctgggaca

SEQ ID NO: 6451 - DNA, 120 bp, synthetic construct
  source 1..120: mol_type = other DNA
tagaggttaactacatctgttttattttctcctattttgataatattagccacacataggtttctagtttctcaacacctattcttttctttattttagtttcttttctcctttgttcca

SEQ ID NO: 6452 - DNA, 120 bp, synthetic construct
  source 1..120: mol_type = other DNA
attatcattatctagtatggttaaagtccatacaacgtatcatccaaccaacccattcctaatcatccactctggggggctttcttgcctatgtgcacaggagacatgcacactaatatt

SEQ ID NO: 6453 - DNA, 120 bp, synthetic construct
  source 1..120: mol_type = other DNA
acacagatcactcatgctattgtttgtggcttaagaatgcctttaagtggttttccaccctgggcgggccaggtgtcccttgccctcattcccgtaaacccacaaccttccagcttgggt

SEQ ID NO: 6454 - DNA, 120 bp, synthetic construct
  source 1..120: mol_type = other DNA
aattcaagctaaccatttcgggctacagcatcaagccaaagttattggcatcatgctaagctagatgtgttaactgaagtatgagattctcatttttgtaaatgaaaagcaatcagatta

SEQ ID NO: 6455 - DNA, 120 bp, synthetic construct
  source 1..120: mol_type = other DNA
gggggagggtggtgatgggaggatcattagcaaaaatagctaatgcatgccagggttaatacctaggtgatgagttgacaggtgcagcaaaccaacatggcacacatttacctatgtaac

SEQ ID NO: 6456 - DNA, 120 bp, synthetic construct
  source 1..120: mol_type = other DNA
ggaaacctctcctggattcctgacgattggaaactgtgggagatgagaaacatttgttgtttcgagctaagttttacgtaatttgttatgcaacagtaaataatatattttcacaagaga

SEQ ID NO: 6457 - DNA, 120 bp, synthetic construct
  source 1..120: mol_type = other DNA
gcgggcggatcatgaggtcaggaggtcgagacaatcctggctaacaaggtgaaaccctgtctctactaagaaaaaaaaaattagagcatagtggtgggcgcctgtagtcccagctacttg

SEQ ID NO: 6458 - DNA, 120 bp, synthetic construct
  source 1..120: mol_type = other DNA
gacattgttttatggattttaatacatcaatctacagagcctaggagggtgtccttggcagttgtcttttaatacctcatgtgggtctgcctaaaaactattttttatgttaatcaggtt

SEQ ID NO: 6459 - DNA, 120 bp, synthetic construct
  source 1..120: mol_type = other DNA
tggggagtcccagccttggggattccccaactccgcagtttcttttctccctctcccaacctacgtagggtccttcatcctggatactcacgacgcggacccagttctcactcccattgg

SEQ ID NO: 6460 - DNA, 120 bp, synthetic construct
  source 1..120: mol_type = other DNA
ctgcgacgtggggtcggacgggcgcttcctccgcgggtaccggcaggacgcctacgacggcaaggattacatcgccctgaacgaggacctgcgctcttggaccgcggcggacatggcggc

SEQ ID NO: 6461 - DNA, 120 bp, synthetic construct
  source 1..120: mol_type = other DNA
acggagctcgtggagaccaggcctgcaggggatggaaccttccagaagtgggcggctgtggtggtgccttctggagaggagcagagatacacctgccatgtgcagcatgagggtctgccc

SEQ ID NO: 6462 - DNA, 120 bp, synthetic construct
  source 1..120: mol_type = other DNA
ctcctctagccacatcttctgtgggatctgaccaggttctgtttttgttctaccccaggcagtgacagtgcccagggctctgatgtgtccctcacagcttgtaaaggtgagagcttggag

SEQ ID NO: 6463 - DNA, 120 bp, synthetic construct
  source 1..120: mol_type = other DNA
tctccttgtggtatcaagagacaaattttcagacctgtccaggtcttgccttcctcccagggctttttccttaatggtattttcgatttttctccaatctttttaaaggaaccagattgt

SEQ ID NO: 6464 - DNA, 120 bp, synthetic construct
  source 1..120: mol_type = other DNA
ccctaagagaaagaaccttgggacacgatgatggttatatgctgggacaattccatcagcccttctgcaaaggagcctatagccatttaatcaggagatgggataagtattaacattggg

SEQ ID NO: 6465 - DNA, 120 bp, synthetic construct
  source 1..120: mol_type = other DNA
ggcaatatcacataaattgggaaggatgaacaacagcaggaaagtacgctgaattccctggcaaaacatgtgcactacagaaggtgaagataaaacttacagagcttcaagagtggccac

SEQ ID NO: 6466 - DNA, 120 bp, synthetic construct
  source 1..120: mol_type = other DNA
aatactctgctcgtgagcattgcagaccaatgataggcaccaatagggcactatttcttaaagtaactgactagcccctaagtgacaagttgaatagcttgagcaccatccatcctggaa

SEQ ID NO: 6467 - DNA, 120 bp, synthetic construct
  source 1..120: mol_type = other DNA
aggagaagtgtgtgtggaaaccaggaatccacttggggacgtcctggtttcccttgtccgttgtgtgagcggaatcatccagcaacccagcctgagagggtttgatattcaagagcccag

SEQ ID NO: 6468 - DNA, 120 bp, synthetic construct
  source 1..120: mol_type = other DNA
ccctcagagctttctccctccctccactttttcataaactctatgtggttaggctaaaaagaatcactatttgaatcttatgcttaaagtataatgccataatttacaggataaaagtaa

SEQ ID NO: 6469 - DNA, 120 bp, synthetic construct
  source 1..120: mol_type = other DNA
tcctacctcagcctctgagtagctaggattacaggcacctgccatgatgcccggctaatttttgtatttttcgtacagactgtgcttcaccatgttggccaggctggtctccaactcctg

SEQ ID NO: 6470 - DNA, 120 bp, synthetic construct
  source 1..120: mol_type = other DNA
gtagcttctgaggaaaaagaaagatagttatgattgtaaaggcattattatacggcaccagtcgtgggactctttggtctagctactgtattttctcaactttcttgcaactcatcaaag

SEQ ID NO: 6471 - DNA, 120 bp, synthetic construct
  source 1..120: mol_type = other DNA
tgcatgcctgtaatcccagttgctcaggaggctgaggcaggagaatcacttgaacctggaagtcggaggttgcagtgagccaagatccagccactgcattccagcctgggtgacagggtg

SEQ ID NO: 6472 - DNA, 120 bp, synthetic construct
  source 1..120: mol_type = other DNA
gctctgaaaaggactgggttcttcctgagaatagagactcacagtgtgagagggattcagtgtgaggggcttcctccattgtgggctttgaaaatggtgggatcatggtgaaagaacact

SEQ ID NO: 6473 - DNA, 120 bp, synthetic construct
  source 1..120: mol_type = other DNA
tccttatgataaacaggttagaaaagaataccaggtgtcccaataaaatatgcacatagcttagatgtgaataattcctaaatataggcaggtgcatgagatggtcattgtggctcatgc

SEQ ID NO: 6474 - DNA, 120 bp, synthetic construct
  source 1..120: mol_type = other DNA
ggctccgtcgaggctgaggcggggctcagcggcctgggctgaccgcagtcgctgggaatgggtctcacacccttcaatgggtacacagctgcgacgtggactcggactgcagtctcctca

SEQ ID NO: 6475 - DNA, 120 bp, synthetic construct
  source 1..120: mol_type = other DNA
gtgctgggctctgggcttctaccctgtggagatcacactgacccagtagtgggatggacaggaccaaatgtaggatgcagaggttgtggagaccacacctgcagggtacagaaccttcca

SEQ ID NO: 6476 - DNA, 120 bp, synthetic construct
  source 1..120: mol_type = other DNA
aaaattcctcctttagtcacatcatctgtgggctctgaccagattttgtttttgttccacccgaaacagggacagtacccagggctctgatgtgtctctcaaggcttgtaaaatgacaac

SEQ ID NO: 6477 - DNA, 120 bp, synthetic construct
  source 1..120: mol_type = other DNA
ctgcaataaacgtagctgaaaatgtgaaaatgtctttggaactgggtaacaggtagaggttggaagagtttggagagtttagaagacaagaaaatgggggaaaacttgcaacttcctaga

SEQ ID NO: 6478 - DNA, 120 bp, synthetic construct
  source 1..120: mol_type = other DNA
tgggaaattatcatattttgcaatgggagaaaaacatgagctctggctggctagggacagaatgtaatgatataaatatttacccccgatacctcatgttaaaatctgacccccagtgtt

SEQ ID NO: 6479 - DNA, 120 bp, synthetic construct
  source 1..120: mol_type = other DNA
cattatataaccctttgatttagtcacttaccctcagccattattcctccttctgtccctttatatcagtcttttccagttttagaggtgacatcaggtttgtctgctgtgctgacctag

SEQ ID NO: 6480 - DNA, 120 bp, synthetic construct
  source 1..120: mol_type = other DNA
gctgccatcagtctggcttgccagccatgtatgatcaaagccttcccactagagaatcacatagccatctgctgcctctgtctgttttcttgaccaacagtcaaaacagagatgataaga

SEQ ID NO: 6481 - DNA, 120 bp, synthetic construct
  source 1..120: mol_type = other DNA
atatccagaatctacaaagaacttaatttacatgaaaaaaacaaacaactccatcaaaaagtgggcgacggatatgaaaagacacttctcaaaagaagacatttatgtagtcaacaaaca

SEQ ID NO: 6482 - DNA, 120 bp, synthetic construct
  source 1..120: mol_type = other DNA
aacaagtactgaggttaggaattttaaaaaggaaatgaggccactctcggaagatcccctcagtttagcagaacagctagatcaatttttagaaccaaatttttatacttgggctgagat

SEQ ID NO: 6483 - DNA, 120 bp, synthetic construct
  source 1..120: mol_type = other DNA
aaggtaaaactggggagacaaataatgtaaaaggaaaaaagagtacaagacaaagtgagagaatgctgagaggttggcagggctgggggaagtttctggggacttaagcaacaaggaggt

SEQ ID NO: 6484 - DNA, 120 bp, synthetic construct
  source 1..120: mol_type = other DNA
aaaaacaggaagggagggcggagccagaaatgccttttctaatgagagtacccatcagggaaggctccataggctggcagatcttcaaaccagcagctcttggcccaaagccaaacccag

SEQ ID NO: 6485 - DNA, 120 bp, synthetic construct
  source 1..120: mol_type = other DNA
atatccctaaggtgatattaaaaccccaattttcaaaagaggaggaaaagctaggcaagataggagccacttaaactaagaatggaaggtgagtgctccctgatgggagagaaataataa

SEQ ID NO: 6486 - DNA, 120 bp, synthetic construct; identical to SEQ ID NO: 511
  source 1..120: mol_type = other DNA

SEQ ID NO: 6487 - DNA, 120 bp, synthetic construct
  source 1..120: mol_type = other DNA
atatacacacacacatacacacaaggcttctggaacagtggatgaaagctttgtatatctatctatccatctatctatctatttatctatctaaactccataggagtacctagaggagtg

SEQ ID NO: 6488 - DNA, 120 bp, synthetic construct
  source 1..120: mol_type = other DNA
ccgtaagtcaaatgctcagagtcttgagacagttgccatgtattatgggtggctgcaacaaaatgcagcaaaaaatgcagcaaaaagaccctaaagaacatacctgaagtcttaatacaa

SEQ ID NO: 6489 - DNA, 120 bp, synthetic construct
  source 1..120: mol_type = other DNA
ccacactcatggtggaggagtgggggactggagaagaaagggcagagacaatgaggcacatggccaaaccctgctcccctctaatggagatgcagggaatagggctggtccgctccactg

SEQ ID NO: 6490 - DNA, 120 bp, synthetic construct
  source 1..120: mol_type = other DNA
cccctccctggccctcctccatgcctttctgtgtgggctgagtgccaggttacctccccaccgagctctgctgacccctattcctcacccctgcccccagccagatccagtggggacaga

SEQ ID NO: 6491 - DNA, 120 bp, synthetic construct
  source 1..120: mol_type = other DNA
acaagatgggagtaagggaggatcagtgcatcttttccagaaacagtgccaggaaaacgacattcacatgcaaaaagaaatgaagttggactcctgacttacaccacatatacaagttaa

SEQ ID NO: 6492 - DNA, 120 bp, synthetic construct
  source 1..120: mol_type = other DNA
caaaaaagaaattgtcaccgcgtaccaaacaataatatagaattagaaagaggctggggtcctggtcagagagaaaaaaaccaaggcctgaggaagggccttcagagaggagtggtgctg

SEQ ID NO: 6493 - DNA, 120 bp, synthetic construct
  source 1..120: mol_type = other DNA
aactgcagatagaaaggggtagcagggagcagggagggcaacaggacccagggggccatgagaaaggaagctgaggaagtaggagggaacttggtgtccttagatcattggagtccacag

SEQ ID NO: 6494 - DNA, 120 bp, synthetic construct
  source 1..120: mol_type = other DNA
tttaacaattacttagttttcccatccacattcactgattatttatttcgagcattatcatttattgagcacagcagggactggggtcttgtccccaccttagagggattatttacactg

SEQ ID NO: 6495 - DNA, 120 bp, synthetic construct
  source 1..120: mol_type = other DNA
actcgcttgaaacagcaccgcggtggattcggagccgggtgagcagggaactgcgcctcagcccctcccacgggccgcccactgattccaggatccgaaaacgcttccagctgctccgtc

SEQ ID NO: 6496 - DNA, 120 bp, synthetic construct
  source 1..120: mol_type = other DNA
gttgtactgcttggctgttttacacacccacatatccactaccacaatgaagataaagaaataacatttccatagtcccctaaagaatagccacgcgataaaattccacgcagtccttaa

SEQ ID NO: 6497 - DNA, 120 bp, synthetic construct
  source 1..120: mol_type = other DNA
ctggagtactgatttcctttttcccagggccaaagtctaaaactcagaagcaagtctaaaaactcaggctgactttcagatctgaagaaatctcaagaatatttgtgtggaagaacattc

SEQ ID NO: 6498 - DNA, 120 bp, synthetic construct
  source 1..120: mol_type = other DNA
caacaaaagccaaaattgacaaatgggatctaattaaactaaagagcttctgcacagcaaaagaaactaccatcagggtgaacaggcaacctacaacatgggagaaaatttttgcaatct

SEQ ID NO: 6499 - DNA, 120 bp, synthetic construct
  source 1..120: mol_type = other DNA
gcacctgtatacatatgtaactaacctgcacattgtgcacatgtaccctaaaacttaaagtataataataataataataataataataataataataataataataaagaccaaaaaaaa

SEQ ID NO: 6500 - DNA, 120 bp, synthetic construct
  source 1..120: mol_type = other DNA
gtgtgtgtgtgcccgtgtgtgtgaatctgtgtgtgagagtgtgtctaaatatgtgtgtgaatgtgtgtgcgactgtgtgtgcctgtgtgtatcagttagcgtgtgtatctgtatatgaga

SEQ ID NO: 6501 - DNA, 120 bp, synthetic construct
  source 1..120: mol_type = other DNA
caattgtgagccaacaaatctatggctagggaaacagtcaactccatttctgcaaatgtttcagatgttccttcttgctgagtaatgttctagttttaccccagccttaatattttaagt

SEQ ID NO: 6502 - DNA, 120 bp, synthetic construct
  source 1..120: mol_type = other DNA
agggatccacatggctcactcctcatgccattcagttctctgctcaaatgtcccttagtcaagttctcaggaacctcttatccaacaaaatatatctcctgccatcctcaccaccaccaa

SEQ ID NO: 6503 - DNA, 120 bp, synthetic construct
  source 1..120: mol_type = other DNA
ctgaggctctgccaggcagaggttcatccggatcctcccagtggggacacaggtgttttccatctttctgcttcactacattttttatattttctgtaattgagcagattctactttcta

SEQ ID NO: 6504 - DNA, 120 bp, synthetic construct
  source 1..120: mol_type = other DNA
tcacactgagggaccatccacatccagggtacgctgaggaggggctgaggtgagaatccagcccctgcctaggctctgggtgagaggtgggcaggacagtcagctactgagtattactgg

SEQ ID NO: 6505 - DNA, 120 bp, synthetic construct
  source 1..120: mol_type = other DNA
gctaggcattgtgttaaaggagctggggctgaggtaagaggaaccaaaccccccttgccttcaaggttaagccgtcttgctcaggcagagatcagtaaggaaactctttatttatttatt

SEQ ID NO: 6506 - DNA, 120 bp, synthetic construct
  source 1..120: mol_type = other DNA
tcaatcgtgtgttttccaggagaattaccaagtgttctcttttctaaatatcacatacttgagctcacatggacagtagaggaagttctgagcctgctgaagccacaattggtacattgg

SEQ ID NO: 6507 - DNA, 120 bp, synthetic construct
  source 1..120: mol_type = other DNA
agaacaattttgcatcatgtaacatcatatggaaaagctgtagtgaccccactcctatatgcatattctagggaaactcacatatctctgagagcaggaggcaatgtcccaggatgttca

SEQ ID NO: 6508 - DNA, 120 bp, synthetic construct
  source 1..120: mol_type = other DNA
tactttgaattaatgtttgtgaagtgaatccacaggaactgagcaaaataagaaaagagttattgagtgtgaggaaagctgcacagaggtacagacagatggagagatgacaatactgag

SEQ ID NO: 6509 - DNA, 120 bp, synthetic construct
  source 1..120: mol_type = other DNA
gaagttttgaaacaggaagagctactctatcatgatagtcatcagatcaatggctgctggggaaagggggctaatttgaaggcagaaaaatagagaacttcgtgtatcttcatagtggca

SEQ ID NO: 6510 - DNA, 120 bp, synthetic construct
  source 1..120: mol_type = other DNA
ggacaaaggatctgaatagacattccccaagaggaggcatacaagtggccagcaggtgtgtgaaaaacacccaacatcactaaataccaggaaaatgaaaatcaaactacaatgagatat

SEQ ID NO: 6511 - DNA, 120 bp, synthetic construct
  source 1..120: mol_type = other DNA
tttaaaaaatatttttaaaataaactcaacacaatatgggacattttaaaaagtacaaaaatatgaccatgataaaaattggcaaatatttcctttttattaagatccactttgtaagtt

SEQ ID NO: 6512 - DNA, 120 bp, synthetic construct
  source 1..120: mol_type = other DNA
ttcctccgcattgatcacttggtcctccctgcatttcagtaaggttgctagaatggaggcatttgtccatgattcacagatgaatcagaggccctatgagtagagagcttctcctgaagt

SEQ ID NO: 6513 - DNA, 120 bp, synthetic construct
  source 1..120: mol_type = other DNA
gtgtgttcctgccttgctttgtcctttcatgccttattctcactgtgccatgtctccttctcagttgaacagatgcagtaggagactcgctcattctggaatgtgaccatctgcccttca

SEQ ID NO: 6514 - DNA, 120 bp, synthetic construct
  source 1..120: mol_type = other DNA
gagtataactggataccttgaacaaggatatggggtcactggaaagagaggaccggctgtccctctccgctaagaaataattaactgttagatgagggggaatttctgttcaagggctct

SEQ ID NO: 6515 - DNA, 120 bp, synthetic construct
  source 1..120: mol_type = other DNA
tattcaggtccacctgacttgaaaactcatattgaccttacttaagtactgattcccgatttacaatccatgccacaaactttattgtcatatctaaagaagttgccacagcagccttta

SEQ ID NO: 6516 - DNA, 120 bp, synthetic construct
  source 1..120: mol_type = other DNA
ttggaagtggattcttccccagtctccaggaaggaatgcaggccttcccgtacattgatcttagccccatgagactgtgtggacttgcaacccacatgactgtgacatgataattaggtg

SEQ ID NO: 6517 - DNA, 120 bp, synthetic construct
  source 1..120: mol_type = other DNA
tcccagtcagagccagtccctcttctggtgccccaaacatcatcccttctcatctacttaaagttgtcagttcatcaactagtatctttttttatctttatcatcaactttttccctctc

SEQ ID NO: 6518 - DNA, 120 bp, synthetic construct
  source 1..120: mol_type = other DNA
tggctacaggtgacagcctctgcagtgtctcatggagaggcctttatctcctgtagcgaaagggcagatagcgtggaatggcagctgaagacatcattacgagggccacagtgctccaga

SEQ ID NO: 6519 - DNA, 120 bp, synthetic construct
  source 1..120: mol_type = other DNA
tggggaaggttaatagagggtggtgtcccagggttaggacaggcagccaacaagggcgctgcttgatatctatgataggaatgaaagaattgaggagcaggagggtgaaggtgtttgacc

SEQ ID NO: 6520 - DNA, 120 bp, synthetic construct
  source 1..120: mol_type = other DNA
ccccgtctctattaaaaatacaaaaattagccaggcatcatgtcaggtgcctgtaatcccagctactcggggggccaaggcaggagaatcacttgaacacagaaggcagaggttgcagtg

SEQ ID NO: 6521 - DNA, 120 bp, synthetic construct
  source 1..120: mol_type = other DNA
gatcatgtcatccacagcagagacacatgccccctgttagaagcaacttttagtgttccttgtcctgattcaatagaatgtttgaccacgggataccaagcaactacggggttccaagtg

SEQ ID NO: 6522 - DNA, 120 bp, synthetic construct
  source 1..120: mol_type = other DNA
caggtttggctccatgtccaatctcttagattcactcaatggggtatttcgcatattttatctcccaacactgggctgtgcaggatacgaggttctggtttccaaaggagtgtaccccta

SEQ ID NO: 6523 - DNA, 120 bp, synthetic construct
  source 1..120: mol_type = other DNA
accatgcactgcagtgtcgacctcctgggctcaagggatcctctgaccttagcctcctgagtagctgggactatagtcatgaaccaccatgccaggctaattttctagtttttttgtaga

SEQ ID NO: 6524 - DNA, 120 bp, synthetic construct
  source 1..120: mol_type = other DNA
cgtctctacacttttttttttaattagctgggtgtggtggcacttgtctgcagtcctgtctactctgaagactgaggcaggaggattccttgagcccaggagtttgaggctgcagtgagc

SEQ ID NO: 6525 - DNA, 120 bp, synthetic construct
  source 1..120: mol_type = other DNA
aagtgttcctaagaaatatacacaccacttagatgtggatacttcctaaaaacaggcagtgcatgagcactggtgatggacattgtgactgcatcgagcgcttgcaactttgaggtgaat

SEQ ID NO: 6526 - DNA, 120 bp, synthetic construct
  source 1..120: mol_type = other DNA
actgagtgtcgggtttctagggaagccaatcagcgtcgcgcggccccggttctaaagtccccacgcacccaccgggactcggagtctccccagacgccgacgatggggtcatggcgcccc

SEQ ID NO: 6527 - DNA, 120 bp, synthetic construct
  source 1..120: mol_type = other DNA
ataccgcggctcagattacccagcgcaagtatgaggcggccaatgtggctgagcaaaggagagcctacctggagggcacctgcatggagtggctccgcagacacctggagaacgggaagg

SEQ ID NO: 6528 - DNA, 120 bp, synthetic construct
  source 1..120: mol_type = other DNA
ccatgtgcagcacaaggggctgcccaagcccctcatcctgagatggggtaaggagagagatgggggcggccatgtctcttagggaaagcaggagcccctctggagacctttagcagggtc

SEQ ID NO: 6529 - DNA, 120 bp, synthetic construct
  source 1..120: mol_type = other DNA
gggctctgatgtgtctctcacggcttgtaaaggtgagaccctggggaggctgatgtgtgtgggttgttggggtaacagtggatatagctgtgctatggggtttctttgacttggatgtat

SEQ ID NO: 6530 - DNA, 120 bp, synthetic construct
  source 1..120: mol_type = other DNA
gctggctccaatccaaactcatgcatttataaagcagagtctgatttagatttatatggggttggaaaattggacccacaaggctaggattatctttcctgaacagaaaaatatggctgt

SEQ ID NO: 6531 - DNA, 120 bp, synthetic construct
  source 1..120: mol_type = other DNA
tcctttgaaagcttctttctggctgctgtgctgagaacagaattgagaggtggggaaccagtgatgcagtggggaaaatggtgggaaaggagtacagtattctaggatggacacgttgct

SEQ ID NO: 6532 - DNA, 120 bp, synthetic construct
  source 1..120: mol_type = other DNA
aataccagacaaacattcatgaaagaccacatggagacgccatttagaaaaattacaggatatgagtctcctgagacatagagtacacgtagacagctcacaaggtctttttcccttttt

SEQ ID NO: 6533 - DNA, 120 bp, synthetic construct
  source 1..120: mol_type = other DNA
ccaggccacttggctacagggtcttggctcccctggttaagtcagggacccagtagccgaccacaaacaatcccagctgcacggtgccttcatggtctgtggcgccccctggtgttgaca

SEQ ID NO: 6534 - DNA, 120 bp, synthetic construct
  source 1..120: mol_type = other DNA
agcagaaaattcctatatcatattgtgttcttcttcatcatgaaggtcccctgaagggaccttctcccttcagcagtgcatagtgaggccatttccgtgcaaaaagatagaatctcctgg

SEQ ID NO: 6535 - DNA, 120 bp, synthetic construct
  source 1..120: mol_type = other DNA
aagaattaatatccagaatatgtaaagaactacaattcaacaatagcaaaacaatctcattcaaaaataagtaaaagacatgaatagacaattctccaaagaagatatacaataaggaca

SEQ ID NO: 6536 - DNA, 120 bp, synthetic construct
  source 1..120: mol_type = other DNA
agaatgggcagttatggtttaatgggtacagtttctgtttgggatgatgaaaatgttctggaaatggatattggcggtggttacacaacattgtaaatgtgcttactgccaccaaattgt

SEQ ID NO: 6537 - DNA, 120 bp, synthetic construct
  source 1..120: mol_type = other DNA
gtccagcatagggaagcagttcctttagaattttagtcacaattaatggaagggtactgaaacctgctatttcccagttgaataacaggtcctggggatatagaaggtcttgccacaagt

SEQ ID NO: 6538 - DNA, 120 bp, synthetic construct
  source 1..120: mol_type = other DNA
agactggtagatagactacatcagacccttgccagtaatcttgagacgaaagtatgcactaacatgtgtatacactgccatgggattgttgcaagctttcccttgtaagagcaaaccaaa

SEQ ID NO: 6539 - DNA, 120 bp, synthetic construct
  source 1..120: mol_type = other DNA
gtgttgttgctgtggcccctgcttaacaagtagaaaacaaattgataaaatgtgtcactcacaccatcaaaatgtcacccacagccctctctgaaggctcagggactatgggggaaatgt

SEQ ID NO: 6540 - DNA, 120 bp, synthetic construct
  source 1..120: mol_type = other DNA
ggatcagtgtgttctgctacttctctgcttagcattcctgatatacctgctttacataggcaccatgtggcaccgtggtgtgtgcctgtgccactttgaatcacatttgggtatctattg

SEQ ID NO: 6541 - DNA, 120 bp, synthetic construct
  source 1..120: mol_type = other DNA
gaggtttacagctgattaaacaacttaataatgcctgcaagaacaaacgcctatgacagacaacagaatgtccacatgtcctgacgtcacattataatatatgcttttaagattattata

SEQ ID NO: 6542 - DNA, 120 bp, synthetic construct
  source 1..120: mol_type = other DNA
gtccttaaaggaacagcattaactccctcttctggaagtgtgaattcttgatatcatgtaatgaaaatggtacctcacttgtggctttcctccccccgaatccataacctctacttatta

SEQ ID NO: 6543 - DNA, 120 bp, synthetic construct
  source 1..120: mol_type = other DNA
gataagaagaagctatttaaagcactagagtagctgcttttttaaattatggttaaaaaaatatataataaaatttaccattttgccatttttaagtgtatagttctatgacattaagta

SEQ ID NO: 6544 - DNA, 120 bp, synthetic construct
  source 1..120: mol_type = other DNA
agtgaaggaggaaaatatgacattctgagttggagaattggaagattaaacttggaatgatgtcagcactgagattctgggatcatattgtacaactggccccatctcagcactaacact

SEQ ID NO: 6545 - DNA, 120 bp, synthetic construct
  source 1..120: mol_type = other DNA
tcacttaaaaacaaataatatttgtgttatagaagcaagacctttttagtcacaagttaataattttaaagaaaagattcaacatgtaaatttatctggaaaggccaggggtgaggctgc

SEQ ID NO: 6546 - DNA, 120 bp, synthetic construct
  source 1..120: mol_type = other DNA
ccagagcagtcagacaagggaaagaaataaaggtcatccaaatcggtaaagaggaagccaaactgtcactgtttgctgatatgattgtatacctaggaaactctaaagactcctccaaaa

SEQ ID NO: 6547 - DNA, 120 bp, synthetic construct
  source 1..120: mol_type = other DNA
aattgttcttcaacaaagcaaacaaaaacataaagtggggaaaggacaccttattgaacaaatggtgctgggataattggctagccacatgtaggagaatgaaactggatcctcaactct

SEQ ID NO: 6548 - DNA, 120 bp, synthetic construct
  source 1..120: mol_type = other DNA
ggagccaccgtgcctggcctgaacagagaacacttctacactgctgataggaatgtaaactagtacaaccactatggaaaacaaggtggagatttttttagagaactaaaagttgaacta

SEQ ID NO: 6549 - DNA, 120 bp, synthetic construct
  source 1..120: mol_type = other DNA
tcatttattgaagaaactgccctttcctcagtatatgttcttggtgattttgttaaaaataaattgagtggctgggcacggtggctcacgcctgtaatcccagcactttgggaggctgag

SEQ ID NO: 6550 - DNA, 120 bp, synthetic construct
  source 1..120: mol_type = other DNA
gataatattagttttgtctttcattccactaatatgctctatcatgtttattgatttgtatggaaagtctacagtttttttatgttgattttatattctgtaaatttactaaatttgttt

SEQ ID NO: 6551 - DNA, 120 bp, synthetic construct
  source 1..120: mol_type = other DNA
gattcaagctcattactcattattggtatgctcaggtttttaatttcttcttggttcattcttggtatattttatgtgtccaggttaaacttcagttgcctttataatctaatgagagct

SEQ ID NO: 6552 - DNA, 120 bp, synthetic construct
  source 1..120: mol_type = other DNA
ttaaggctgttttctttccttgactgaaatgccataagcagtgagttttatctcaacacctgtagaaatgtcatcatgttcaaagtaggcagaaaaaaaaagagagagagagagagaact

SEQ ID NO: 6553 - DNA, 120 bp, synthetic construct
  source 1..120: mol_type = other DNA
ttgatatatcctatggtggtgaaaatggattcaaccaagctgttgggctatctactgaagtcctctccaaagtgaaatttattcaaaagaagaaattagtagggatacattgatgaaatc

SEQ ID NO: 6554 - DNA, 120 bp, synthetic construct
  source 1..120: mol_type = other DNA
attggagagaaattaaattgctacattttgcagtgacccatttacatggcattctcagcttagactgcataagaagaaatatatgtggtgaaatgttggaaccatttctctcttggtctc

SEQ ID NO: 6555 - DNA, 120 bp, synthetic construct
  source 1..120: mol_type = other DNA
ggaaatgctattcacaaggattattttccttcctggaattgactttttaatttccctggaattaataaatgttttatcccttcatgtgcttaatttctgttgtactcattataaaatctc

SEQ ID NO: 6556 - DNA, 120 bp, synthetic construct
  source 1..120: mol_type = other DNA
gtttttgggatttcttcttttccacccaccttctaaaatttcattgtgatgtgtcttggtgtgggtctgttttcatctactatagtaagaacttggttggggccattacaagttaaattt

SEQ ID NO: 6557 - DNA, 120 bp, synthetic construct
  source 1..120: mol_type = other DNA
accacctgcttaacctctctgagtctccctttccctgtctatacaaagatatcacatatcgggcttctcatgggtttgcattgaagatcaaatttgactctctcagtaaaacacatggta

SEQ ID NO: 6558 - DNA, 120 bp, synthetic construct
  source 1..120: mol_type = other DNA
aaaagcagctcttgacttctgacactgacagtaggtttcagtactgttagaagctgtcctactgctcaacactaggccatattattcttttcttggacataaaccatattacacaacatc

SEQ ID NO: 6559 - DNA, 120 bp, synthetic construct
  source 1..120: mol_type = other DNA
gagttcaagaccagcctggccaacatggtgtattcaccaaaaaatacaaaaactagccaggtgtggtggcgtgtgcctgtaggcccagctacttgggaggctgaggtggaagaatcacct

SEQ ID NO: 6560 - DNA, 120 bp, synthetic construct
  source 1..120: mol_type = other DNA
tttagaggaagtgattatgtcatgaggtcagaactcccatgaattgaacttgtacccttataaaagagattctagaaagctgtcttggcccttctgccatgggaggatgcagtgagagga

SEQ ID NO: 6561 - DNA, 120 bp, synthetic construct
  source 1..120: mol_type = other DNA
gtgcaatctgtggaacccttgtgggctgctgaaaccccttcatagatccacaaggttaaaagtatttttataatacaatgaagacattatttgtactaaagtaaaacttgacaagaaggg

SEQ ID NO: 6562 - DNA, 120 bp, synthetic construct
  source 1..120: mol_type = other DNA
aaaatgtgattttttgataacttgtagttaaatgtgtcaacactggaagacataatgtggtgaaattttgtttctttttttaaaagtcatgtattatacaagaagcattcaatgtggaag

SEQ ID NO: 6563 - DNA, 120 bp, synthetic construct
  source 1..120: mol_type = other DNA
ataaaattatcttcagagtcctcactaattcctaagagcatgcagagatctgaaaccaaaacgtttgagaaacgatgacgtaactcctagctctggattaagggagaatgtgtgacaaag

SEQ ID NO: 6564 - DNA, 120 bp, synthetic construct
  source 1..120: mol_type = other DNA
tgtacactggtcattcatttagccaatatttgttgagtgctggctgtatgaaatgctagttttacatctggaaactaaaaacaggcaaaaattgctggccttgaggggcacatgttttag

SEQ ID NO: 6565 - DNA, 120 bp, synthetic construct
  source 1..120: mol_type = other DNA
tgaatctcagatgtcagacattcaagtgaggttgttgtgttggcagatggatatgcaagttggaaatgtaggagaaatgtctgggctgggaaaatagatttaggagttaatgccatatta

SEQ ID NO: 6566 - DNA, 120 bp, synthetic construct
  source 1..120: mol_type = other DNA
tcacgactgctcctggcaactggacattgctgctgcaactcacaccacacttactaaaatgtgtgcacagtaccagcttatgtcaccaggctgagtcagaatccagcaagtggttatctg

SEQ ID NO: 6567 - DNA, 120 bp, synthetic construct
  source 1..120: mol_type = other DNA
catcatatcccacagattgggggcttagtccccaagactactccacatcagacaccaatcgcagaagttcccaccacccactctgggcttcactaatttgctggagtagctcacagaatt

SEQ ID NO: 6568 - DNA, 120 bp, synthetic construct
  source 1..120: mol_type = other DNA
ccataaaagtctaaaaaagtatccatgctactcaaactctgatctatgaatagctgatatcaaaccatttcttcacaaactctcccaaaaaggagaaaggaacactgcccaacatattct

SEQ ID NO: 6569 - DNA, 120 bp, synthetic construct
  source 1..120: mol_type = other DNA
aatggtgaaagactggttgctttcctcctaagatcagcaattaaaacaagaatatccactcccactatgtctattcaacattaccaaaggttctagctaagataattagacaagaaaaaa

SEQ ID NO: 6570 - DNA, 120 bp, synthetic construct
  source 1..120: mol_type = other DNA
caaaacatcgcataaagtaatggtaatcaagacagtgtggtacttgcataagatagacatagatcaatagaatagaactgaaattcagaaataaaaccatgtgtctactgtcaactgatt

SEQ ID NO: 6571 - DNA, 120 bp, synthetic construct
  source 1..120: mol_type = other DNA
tattgagaaaaattagatgtcatcaaaattaaaatgtttatgcttcaaaggacactatcaagaaagtgatccacaatatatacatatatcaaaacatcacattgtaccccatgtgtatta

SEQ ID NO: 6572 - DNA, 120 bp, synthetic construct
  source 1..120: mol_type = other DNA
gaggctgaggcaggagaattgcttgaacctgggaggcagaggttgcagtgagccgagaccacaccactgcactccagcctgggcaacagagcgagactctgtctaaaacacacacacgca

SEQ ID NO: 6573 - DNA, 120 bp, synthetic construct
  source 1..120: mol_type = other DNA
ttttatttgtacataatatttgcacatatttatggggtacatgtgatattttgatacacacatagtatctaataatgaagttagggtacataggatatccgtcacctcaagcatttattt

SEQ ID NO: 6574 - DNA, 120 bp, synthetic construct
  source 1..120: mol_type = other DNA
cttgaccatttttaaggggattttttttttttttttactgttgaattgtgttccttgtacactctggatattagtcccctgttggataatttgaaaatattgttcccatctacagttggt

SEQ ID NO: 6575 - DNA, 120 bp, synthetic construct
  source 1..120: mol_type = other DNA
aaatatttaaaaaaaactgaagaggaaggaattattcttaactcattttatgaagcctgcattgccctgataccaaaagcagagaagaatacaaaaaaaaaagaaaattacaggccaatc

SEQ ID NO: 6576 - DNA, 120 bp, synthetic construct
  source 1..120: mol_type = other DNA
atataattaagttgtggcatattcatgtcatggaaatgaactacagtgtcacacatcaacatggatgaatccaaaaataataatgagcaaaagtagtcagtcatatacagtataattcta

SEQ ID NO: 6577 - DNA, 120 bp, synthetic construct
  source 1..120: mol_type = other DNA
cttattttcacacagaagtggtctacattgatttttaaatctctttaagggattagggagcctctgaaatgcaaaggaaactaaactgatagtaatgtaaaatgaacagtgacctatcat

SEQ ID NO: 6578 - DNA, 120 bp, synthetic construct
  source 1..120: mol_type = other DNA
aagggcagagacttctctttattcaccttcagtaactaacataatgcctagcatgtaggaggctctcaaaattaagtttctcattcaaataaattgtacagagcaagttacacttttagg

SEQ ID NO: 6579 - DNA, 120 bp, synthetic construct
  source 1..120: mol_type = other DNA
catgcccttctggcataatttttggtaattttgtttcattggggggttgtagtacttgtctaaatggtttgttcttaaattctccagcctttcctgtttgatgtatgtgcctttctatgt

SEQ ID NO: 6580 - DNA, 120 bp, synthetic construct
  source 1..120: mol_type = other DNA
gaggactacagcagggccatttcccccatgggaaaccactgcattcctatggtagaaaataatgaatgctcttttaataagaggatctttcctttcatatgaacaagcatacttttcctg

SEQ ID NO: 6581 - DNA, 120 bp, synthetic construct
  source 1..120: mol_type = other DNA
gatgctgaaatttaggctcataaggaatgaaaactgtaatttatatctacaaatatgatgcctctatattgttggaaaggatctgatatcaaatatttggtctcactgacctcttaggaa

SEQ ID NO: 6582 - DNA, 120 bp, synthetic construct
  source 1..120: mol_type = other DNA
cttagcacagctatcagagtggatggtggtgggagggctagcaggaaactagtaaacaactacaagctgccccttcagggaaagtttctacttggaatataagttacagattaatgaaaa

SEQ ID NO: 6583 - DNA, 120 bp, synthetic construct
  source 1..120: mol_type = other DNA
ttcgcaattaattatgacgtcacagccaatcgtcaacgcgaaagcctgacgctctagccggctctatctcgctgccccgccgcgggcgcagagctggcgctctagcccacggagttggtt

SEQ ID NO: 6584 - DNA, 120 bp, synthetic construct
  source 1..120: mol_type = other DNA
gtaggaaagaaatggaggagtgattgcaaagctctggagagttttgtgcccaattccaagagggaaaagagatgtaaaccatcgacgtttgagaggcgtgatcgcctgattcctgtggga

SEQ ID NO: 6585 - DNA, 120 bp, synthetic construct
  source 1..120: mol_type = other DNA
agtggtcagcatcttatactgcagtcttcaaccgcagtcaaggtagctttctttggagagaattagtcacacatgacttagagaacatgggctttctgaatgcttttaagacctcatttt

SEQ ID NO: 6586 - DNA, 120 bp, synthetic construct
  source 1..120: mol_type = other DNA
atccatgtaagggctagcttacagttagaaattctcaggagagagttttctctctttctacctactgagacagtcaaattccccttctatagagttgaattttttcttttcttgttcact

SEQ ID NO: 6587 - DNA, 120 bp, synthetic construct
  source 1..120: mol_type = other DNA
tcctgtctggttgcaatgttttgctcccagaagagaatcagatcatcatgtggggattaccattgttcctggagtactcctacccttagttgaatttccttattaaagttatatttttct

SEQ ID NO: 6588 - DNA, 120 bp, synthetic construct
  source 1..120: mol_type = other DNA
atagaaagaaagaaaaaagtaaagtcacaaggaatcctactccacagagataaccaaattatactgtatatctgtgcttgtgtatatgtatgtggctctgtatatgtgtgttgctatata

SEQ ID NO: 6589 - DNA, 120 bp, synthetic construct
  source 1..120: mol_type = other DNA
cacatcgcttgactcttaagtgtgtttccaactgctcccacttcccgttttctttagagaaacccagaccaaacaaggaaagggaaataggccacggtagggtcattactattgctcctt

SEQ ID NO: 6590 - DNA, 120 bp, synthetic construct
  source 1..120: mol_type = other DNA
agttaggatataggtgttgctgcttggggtggttatgtgtgtaagtaataaacgaaagggaaattgaggattaaggagccaggaagatgttgggaggaaatcaaaggtagtgtaagaaag

SEQ ID NO: 6591 - DNA, 120 bp, synthetic construct
  source 1..120: mol_type = other DNA
gctttccagaagcccccagatgttcatagttctgtcacttttttggtggtgctgtggtatcagggaaagaggtagggaagggctagaactggaattgcctaggtctgacagcaagaagtg

SEQ ID NO: 6592 - DNA, 120 bp, synthetic construct
  source 1..120: mol_type = other DNA
ggaatttgcgccctaactttgcttgctaatcctggtttagagctatcccactaaaatatttaatcctaattcttagtccttgcctgtgagatatgaggtcttacaggagacctcagagct

SEQ ID NO: 6593 - DNA, 120 bp, synthetic construct
  source 1..120: mol_type = other DNA
gggcccagaccagagtcaagcctcttgttttaggagaaacctcagtggacaggcagggtagcccagtccttagatctgtggggaaggccctgagcccttctggagctaggagtggcaaga

SEQ ID NO: 6594 - DNA, 120 bp, synthetic construct
  source 1..120: mol_type = other DNA
gcgcttggggccgtcagggggcgcgggcgtccctggtggggccagttgtacgctgcggcggtcggcggagatgagcaggcggcggtgtgcggtcccagggtccagggtcaggtcggctgg

SEQ ID NO: 6595 - DNA, 120 bp, synthetic construct
  source 1..120: mol_type = other DNA
tttttgagaggcacctaaccttcagggatctgttgtttgaatgtatgaaaaaggaagagggaaaatggctggaatatgaggaatcgaggatagacattgttataggctgaactgtgccct

SEQ ID NO: 6596 - DNA, 120 bp, synthetic construct
  source 1..120: mol_type = other DNA
aaacatggatgtgagctctgggcttcattccctggggcatccttccctatctctcccctcctcaggtgagttctgtctgagttagcagtgtccctcctcacctttcagagtgatctcacc

SEQ ID NO: 6597 - DNA, 120 bp, synthetic construct
  source 1..120: mol_type = other DNA
gatgtggagaggagccagaggccccagcggctgttctcccgcacctcgcctccacccctggccgctcctgcctggggccttgggaggagccgaaataacaataacaaacaacacagggct

SEQ ID NO: 6598 - DNA, 120 bp, synthetic construct
  source 1..120: mol_type = other DNA
tcggtgccggtcgccggcggagtcccccagcggcgggccagacacgcgcggcagaagctgtgctcgcacgccagaagcaccgggtcctcgaaggagcccccgcacagaggacacgtcgcc

SEQ ID NO: 6599 - DNA, 120 bp, synthetic construct
  source 1..120: mol_type = other DNA
tccttactttcttcgtaagtctctctttctggttctttctctctgtttttccccgtgtgtgattttattaccagttttctctttccttccttctttggaatgtacccggtattatctatt

SEQ ID NO: 6600 - DNA, 120 bp, synthetic construct
  source 1..120: mol_type = other DNA
caaacacacgtacattcatcttggaacaaccctcccggctcagtgctcataaaacacacagatacccaagcataagactacagttgtgactgaaatctattttgtaaaagatgcacttct

SEQ ID NO: 6601 - DNA, 120 bp, synthetic construct
  source 1..120: mol_type = other DNA
tcatgtctcaacccaaaggtaacattcagagaggacttcttttaccacttgtatctcaagtggtctttctcaaaggtattcactatctctttacccatatttattatcttcatgctattt

SEQ ID NO: 6602 - DNA, 120 bp, synthetic construct
  source 1..120: mol_type = other DNA
ccttcttttccttctcttcatttttttcttctatcctttcatttatccttcagtctctctcctccatattagcaacatcctcatgcttttaaaagccccactagtctttagaagctttcc

SEQ ID NO: 6603 - DNA, 120 bp, synthetic construct
  source 1..120: mol_type = other DNA
actaggctcaaacagccggcaggaggcagagccaggactgaaattcaaacctgctggctccaaagtctatattcttttccttaaatattaatttctttcttttgagactttactttctct

SEQ ID NO: 6604 - DNA, 120 bp, synthetic construct
  source 1..120: mol_type = other DNA
actgacttccacaatggttgaactagtttacagtcccaccaacagtgtaaaagtgttcctatttctccacatcctctccagcacctgttgtttcctgactttttaatgattgccattcta

SEQ ID NO: 6605 - DNA, 120 bp, synthetic construct
  source 1..120: mol_type = other DNA
aagaaagtcattggtagcttgatggggatagcattgaatctgtaaattaccttgggcagtatggccattttcacgatattgattcttcctacccatgagcatggaatgttcttccatttg

SEQ ID NO: 6606 - DNA, 120 bp, synthetic construct
  source 1..120: mol_type = other DNA
atcaggatgatgctggcctcataaaatgagttagggaagattccctctttttctattgattggaatagtttcagaaggaatggtaccagttcctccttgtacctctggtagaattcggct

SEQ ID NO: 6607 - DNA, 120 bp, synthetic construct
  source 1..120: mol_type = other DNA
actcaggacttgctttatgaatctgggtgctcctgtattgggtgcatatatatttgggatagttagctcttcttgttgaattgatccctttaccattatgtaatggccttctttgtctct

SEQ ID NO: 6608 - DNA, 120 bp, synthetic construct
  source 1..120: mol_type = other DNA
cagctcctttaagcacttctctgtattggttattctagttattcattcttctaaattcttttcaaagttttcaacttctttgcctttggtttgaatgtcctcccatagttcggagtaatt

SEQ ID NO: 6609 - DNA, 120 bp, synthetic construct
  source 1..120: mol_type = other DNA
cctctgtcacccctttctttgactaggaaagggaactccctgaccccttgtgcttcctgagtgaggcaatgcctcgccctgcttcggctcacgcacggtgcgcgcacccactgacctgtg

SEQ ID NO: 6610 - DNA, 120 bp, synthetic construct
  source 1..120: mol_type = other DNA
atgagaagagttgggagagagcaacaacagcagatgcaaagaccctgaagtgggaaagatcttgaacgtatgaagtgggatgacaatggtttgatgtgagattggagaggtactaagagc

SEQ ID NO: 6611 - DNA, 120 bp, synthetic construct
  source 1..120: mol_type = other DNA
tggtttattggcttcaaggtcaatcaccataggtcagtagtgctgcagctactgctagcatagcagccacgggcccagctgccctacccccatgcacatttcatgtttattggggctcat

SEQ ID NO: 6612 - DNA, 120 bp, synthetic construct
  source 1..120: mol_type = other DNA
taattgcaaggctgttacagaaatgggctacatacttaatgagctttggatgttgagatgggatcacaagagagggggtaaagacaaagtgatgagatattttgtttcagttggaccaca

SEQ ID NO: 6613 - DNA, 120 bp, synthetic construct
  source 1..120: mol_type = other DNA
aagtgtaatgtatggtaggtaccacgaagcaacataaagctgggaagaaagacacaaatgctagcatagttttctctctttgggatgactgccttatacaactctggggaatgccattag

SEQ ID NO: 6614 - DNA, 120 bp, synthetic construct
  source 1..120: mol_type = other DNA
gtgctgtgaactgtgcagcccgatgtaagcatatctgacattaggagtggtggagaaacaaaaagaacaaggatagttcattttaacacagtaataattttataattttataattttcaa

SEQ ID NO: 6615 - DNA, 120 bp, synthetic construct
  source 1..120: mol_type = other DNA
ctatgctgaaaggagaaaggcaaaggctacagaaaagtgaacactgaagaggaattaggcaagaacaaagcctaccaagttagaagaagggaatgagagggcgaaacaacagcaccagaa

SEQ ID NO: 6616 - DNA, 120 bp, synthetic construct
  source 1..120: mol_type = other DNA
gtgatatgagtggtgcaaaccaggtggggggcggggctgcccataggctgagggctcctctgggagagggcagcttagggaagcttttacagcggatgtctgggaagaagggaaccactt

SEQ ID NO: 6617 - DNA, 120 bp, synthetic construct
  source 1..120: mol_type = other DNA
agagggacatggagcttgtcatactgagggcataactcaatcctgttacactaggcaagtctcagagaattttcaagtggaagtgaaacacactctggtgacacaggttgtagagattgt

SEQ ID NO: 6618 - DNA, 120 bp, synthetic construct
  source 1..120: mol_type = other DNA
aagaagaagaagaagatttgaaccaaaaggtagagaagcacaagacaagaggccgtgaaaaagcaagtcatgcattggtgagtatgtgtgtggagggcagggatgaggaaaatttcagaa

SEQ ID NO: 6619 - DNA, 120 bp, synthetic construct
  source 1..120: mol_type = other DNA
ggaccaactggctatggtgaaaccccatctctactaaacaaaatacaaaaaattagccgggcatggtggcaggcacctgtagtcccagctactgtggaggctgaggcaggagaatggcat

SEQ ID NO: 6620 - DNA, 120 bp, synthetic construct
  source 1..120: mol_type = other DNA
gacaatagacaaataaagcaggatccctgaatttttaggaagctctcagttggggtagaggtgagaaacacacataaacagatcgtcttgattgtggagattagtgcagtgatcaaagta

SEQ ID NO: 6621 - DNA, 120 bp, synthetic construct
  source 1..120: mol_type = other DNA
aacaatgagtataaaacaggcagcaggatcaggtctgggaagggggacaagatgacttcatgaccccagagtttctataggaatatgctttgggagcttgcagacccctggctcctcaag

SEQ ID NO: 6622 - DNA, 120 bp, synthetic construct
  source 1..120: mol_type = other DNA
aagaaagggagggaaagaaggaaggaaggaagcaaggaaagaaggaaggagggagggagggagggaaggaaagaaggaaagaaagagagagagaaaaagaaaatagggtcttttcatcaa

SEQ ID NO: 6623 - DNA, 120 bp, synthetic construct
  source 1..120: mol_type = other DNA
tattctttcatttactttgaacccttccttcatttacatccctttaggaaccaggccctgtagtgctcaaggagggtgggagagtgaaacgaaaaggagtgagatgctgcttctgttctc

SEQ ID NO: 6624 - DNA, 120 bp, synthetic construct
  source 1..120: mol_type = other DNA
aggaacccataatcatcccaaactggcgcaaatggtgggttttactgtccagaggtcatttcgtctctgcgtttccaacctcctcgcccttttactttttttgggctcactcaggaaact

SEQ ID NO: 6625 - DNA, 120 bp, synthetic construct
  source 1..120: mol_type = other DNA
tcccgggaaccgctctcgatgagcgcctggcactgggagccgctgctgtgcagctccacgaagccggtcaagggctccacctccaggaagccccgcctgggaaccagctccaaggccaag

SEQ ID NO: 6626 - DNA, 120 bp, synthetic construct
  source 1..120: mol_type = other DNA
ctgctaaatatttcagaatggggacctcattctatctactgatttatcaaatctcattaattaatttcccttgctgatatgaggggttgggagagaagggggacgtgggaatgtaaggaa

SEQ ID NO: 6627 - DNA, 120 bp, synthetic construct
  source 1..120: mol_type = other DNA
aggtgaaactcaagaaagtacacctgaacaagtcggagcgccctctgtttcctggcagaggtgtaatttggggaggaactgaggaaatggaataaatgaattcattcatttattcattta

SEQ ID NO: 6628 - DNA, 120 bp, synthetic construct
  source 1..120: mol_type = other DNA
taggggcagcaaatactacagaggtggagctgcctccttcttgtcccactttttcctccctgtctctaggagtgaagaaatacatttgtaattttctattacttctgaatacttcaaagt

SEQ ID NO: 6629 - DNA, 120 bp, synthetic construct
  source 1..120: mol_type = other DNA
atgtggctagcagctactaaattggacagtgcagagctagcccctttctcactgcctgacaaaggtaggtgctcaggacaaagagtgccttgaggcttcaccctttagcttcagaaggcc

SEQ ID NO: 6630 - DNA, 120 bp, synthetic construct
  source 1..120: mol_type = other DNA
tagagcacaccagtctccccaactccaaacctgatgaagtggaaagggctgggctcctttattgaaattccaaactagaaccaaactattcttgacctgaagagcctagaaaggtgctgg

SEQ ID NO: 6631 - DNA, 120 bp, synthetic construct
  source 1..120: mol_type = other DNA
tccccagaatgtcactgattttgaatttattttctcttcttctgtaggcaggaggagacaccagtgtgcaccagagaaggagaagtcagagatgacagtccctgcctgaggccatctctg

SEQ ID NO: 6632 - DNA, 120 bp, synthetic construct
  source 1..120: mol_type = other DNA
aaaaaaaaagaagacctggcggttaagggatagtgagctgggagtcagaaagtcagggctagggatatggggcgggagtgaggtagggcatagggagatatggaaatgaagatgggagat

SEQ ID NO: 6633 - DNA, 120 bp, synthetic construct
  source 1..120: mol_type = other DNA
gtgtgacaaagaactgaatttttaatttcatttttactaattcaaatttaaattaaaaatagaggccaggcacggtggttcacgcctgtaatcccagcactttgggaggctgaggtgggc

SEQ ID NO: 6634 - DNA, 120 bp, synthetic construct
  source 1..120: mol_type = other DNA
aacgagcttcttgagatcgttcaactgtggctcagtggaggcaacatagtgtttccccgcttccgttccctcatgacccagccagtaaatccgtgatagcaggaaattcttctcctcctc

SEQ ID NO: 6635 - DNA, 120 bp, synthetic construct
  source 1..120: mol_type = other DNA
ctcggccttaaaaacctgtacttgcgattctaagaccagcgcgggttttccgtgccccaccttgtctgccggtggagactgagcagtcagcccgctgtaatagcgaggccgacgcgggag

SEQ ID NO: 6636 - DNA, 120 bp, synthetic construct
  source 1..120: mol_type = other DNA
tcactgaactcctgggctgatgggggaacagggaagaaacctcaaatgcctacctgataattctgggcagcttcttcgatcaagctgacattatgggatttgtggtccttggattcacga

SEQ ID NO: 6637 - DNA, 120 bp, synthetic construct
  source 1..120: mol_type = other DNA
atgctttgggcatcttgtatgcaaagttcaagccttggtagagcatctggaaagtaggggaagggcaattctctacctcaggtgctttggctcctcacagaattttgtgaaaatgtggag

SEQ ID NO: 6638 - DNA, 120 bp, synthetic construct
  source 1..120: mol_type = other DNA
ggctatgttccccaccgctctgctacctcacgtctccttggcccttgaaggcatttgacattatgactctgatttatagatttattttgcttatattacctcatttaagtctcacctgta

SEQ ID NO: 6639 - DNA, 120 bp, synthetic construct
  source 1..120: mol_type = other DNA
caaaggacttccaagccaattctgaggcatagagtttataaaaattagccatagaacaggaaatgatgcagagcctcatgcacatgagacagctgtcacacacaagaaagcagacacaga

SEQ ID NO: 6640 - DNA, 120 bp, synthetic construct
  source 1..120: mol_type = other DNA
atagtaaatcaaaaaatggacagagaatgaaatggacatttgcagagcaataaaaccaattaaccaataaatacttgaaaacagtaatcttgaaaatgcacgctcaactcattggctcat

SEQ ID NO: 6641 - DNA, 120 bp, synthetic construct
  source 1..120: mol_type = other DNA
tgccctccagcctgggcgacagggtgaggctccgtctcaaaaaaataaataaataaataaataaatcctatgtcagggtttttcaatgatagcactgttgacattttaggctggataatt

SEQ ID NO: 6642 - DNA, 120 bp, synthetic construct
  source 1..120: mol_type = other DNA
atgtggaaaaatgggactcttcatatgtggctggtttcagtgtgaatgggcactatctttttcaaaagcctcaaggcaaatgacttaaaatgcatttgaacggtgactagaaagaatatt

SEQ ID NO: 6643 - DNA, 120 bp, synthetic construct
  source 1..120: mol_type = other DNA
tatatagcagtcaatataacattgggctgaattgctcaaccaaaggatcagtcatgagattaaaaaccccaacaaaatgtaaagctccctttcttccttagagaaacccattaaaacata

SEQ ID NO: 6644 - DNA, 120 bp, synthetic construct
  source 1..120: mol_type = other DNA
tgtattttgagccaaatatgggtggccatggcccatgacacagccctcaggagatcctgagaacatgtgcctgaggtggttagggcacagcctggtttcatacatacatttttgggagac

SEQ ID NO: 6645 - DNA, 120 bp, synthetic construct
  source 1..120: mol_type = other DNA
ggtttgtagggcatgactccccaggccccttaggtagaaatttgggcaagagaaggaaaaaggtcagagtttagtcctcagaggtaaaataagcccatcagagcggacctttgtctaatc

SEQ ID NO: 6646 - DNA, 120 bp, synthetic construct
  source 1..120: mol_type = other DNA
agatcctgaattttagtagaacagctgatgacaactagtttaagacctccacaaaggaactgttttctcaacttgataatacagcttcttcatctccttgtcccatgacttcaccctgca

SEQ ID NO: 6647 - DNA, 120 bp, synthetic construct
  source 1..120: mol_type = other DNA
caactcgtcctccattggcctcttccctttcatctaaacttatctttcattccttaactgtcttttccagttggcctgataccctgtgacccagatttgccaaacagggttgtcagattt

SEQ ID NO: 6648 - DNA, 120 bp, synthetic construct
  source 1..120: mol_type = other DNA
cttccactatttaatttatgtaaaatatcctagtcaatgtttttaacccgagtgtttttaaacattgctttttaaaaaataaaaaacttttaaaatattgaaccatttacgggggcttta

SEQ ID NO: 6649 - DNA, 120 bp, synthetic construct
  source 1..120: mol_type = other DNA
gaaaactaataaaagtgtgtaccggtgggccagggacgggggtagtggtaggtggaatgaatgaagaagggcaaggtggtcacagtcctacttaatctataccttttaatatattatttt

SEQ ID NO: 6650 - DNA, 120 bp, synthetic construct
  source 1..120: mol_type = other DNA
tcgcctctctggggcttgattatttttgcttgtttgctagatgcatttgaggcctaggatgctattatcttcttcccagaatgattgtttttgacactagcagtttagagtcactttgaa

SEQ ID NO: 6651 - DNA, 120 bp, synthetic construct
  source 1..120: mol_type = other DNA
acagaggtgccaaatgctgccttagaaatctgtaagccagctaagagttctgcagtctcaactaaacaaaacttttttattccattggtttggggtgtactgttcttagggcttttgcca

SEQ ID NO: 6652 - DNA, 120 bp, synthetic construct
  source 1..120: mol_type = other DNA
cccctcgggacggtcacgagcagagctcccaaggggaccgctggggactgggcgggggctctgcttctcacctgttccttctctatccactgagccctgacacgtaggaccagcgctact

SEQ ID NO: 6653 - DNA, 120 bp, synthetic construct
  source 1..120: mol_type = other DNA
gcaaatttttagtgctattaattttggagaagcctctgtgaagagtttcctatgtaagcctgagatttcagggcatttcaagttttcttgggcagtgactaatcttaaatactcttttaa

SEQ ID NO: 6654 - DNA, 120 bp, synthetic construct
  source 1..120: mol_type = other DNA
gtaatcctaaccgtggttaaaatatgttacttttgcaaattttacaaaacacttagcatgaccatattgaacacattgcttggaattccagggtcttggaaagaaccagtgcaagggatg

SEQ ID NO: 6655 - DNA, 120 bp, synthetic construct
  source 1..120: mol_type = other DNA
ctgagatcttgaacccctgctcctccccaaccctgtttttctgagaactgcctcatcaaacatagagcatagcaactttcctgagatttctctaaatttcctcttattcaggtcactgtg

SEQ ID NO: 6656 - DNA, 120 bp, synthetic construct
  source 1..120: mol_type = other DNA
tccttttatggatgatcaaataagtgagagggaacccaggagccagtggagaggagaattttaaggaggggactgctgatgatctaaagtttgagtcatcagtttggatgtgaactgaga

SEQ ID NO: 6657 - DNA, 120 bp, synthetic construct
  source 1..120: mol_type = other DNA
acacaggaaaaagtctccctcttgcccctggtttccacacatctagtttctctctccagaagcaaattttactagttcattgatatattcttccagagatgttctttgcataaaaagcaa

SEQ ID NO: 6658 - DNA, 120 bp, synthetic construct
  source 1..120: mol_type = other DNA
ttattttaatttgtattttcttcatgagattgagattatcttttaatatgctttagagacatttggtatttctttttctatgaaatgtctgctgagatacctctgcccaattttcttctt

SEQ ID NO: 6659 - DNA, 120 bp, synthetic construct
  source 1..120: mol_type = other DNA
aaaggtcattggatgtgagcaggacaagaactgaaaggccttggtgttaaatgatcatgtacatagtctttgaaatcaccaggatcatggtaatttcacagccagatgaagggcaagttc

SEQ ID NO: 6660 - DNA, 120 bp, synthetic construct
  source 1..120: mol_type = other DNA
gtgccaagactaattatatatatatctcacaagatcacacaacccacagcaaacagtggcaaagtgggattgagggaggaggctctgaaatgaggttttcaacaagcgtcttggaccctt

SEQ ID NO: 6661 - DNA, 120 bp, synthetic construct
  source 1..120: mol_type = other DNA
gaaaacagtccaaactcctgccaaactctctctactgatggcaaatcagaggagactcaaattgtaagtttatagtggtctggcttttggccatgacaatgacaccttgcccttttaatt

SEQ ID NO: 6662 - DNA, 120 bp, synthetic construct
  source 1..120: mol_type = other DNA
tggcacctcagagtagctcaacaatggacatctctctttgtttcttctgcttcatcctgttttggacccttgtcttgcttttctgtgtatattttgaggctgatgtttccatgcattaat

SEQ ID NO: 6663 - DNA, 120 bp, synthetic construct
  source 1..120: mol_type = other DNA
ctatgcttgcctataagccaaggtattttagagattttatccttaccatatattttaatgtcaggtattttgatagaatcctcacaatactcttatttttcagaattcgtgcagatattt

SEQ ID NO: 6664 - DNA, 120 bp, synthetic construct
  source 1..120: mol_type = other DNA
ttttattagttaggaagaaaataaacaagggtctgggatgaacagtaatgggtggcccatgtccatttggtcagtgagggcctcatagaggaagtgaccttgaagctgagggctggcaga

SEQ ID NO: 6665 - DNA, 120 bp, synthetic construct
  source 1..120: mol_type = other DNA
tgaaggaaggaggaaggtcaaagatgacttcatgagtttctggtttgagaaactgaatagatgatgtgaaagataataacttggtagaacaggtttgaatgcaacaccaagagtttcatt

SEQ ID NO: 6666 - DNA, 120 bp, synthetic construct
  source 1..120: mol_type = other DNA
ataatatttgaggaaggaacatcagcagtatgggtgggatcaggatggatgtgaaaggtttgaaaagaaacaagatggtgtgatgcagtgtgggagagcgcttacaagagaaactatgta

SEQ ID NO: 6667 - DNA, 120 bp, synthetic construct
  source 1..120: mol_type = other DNA
tgtcttaaatacacagaaatttgtttaatatgagtgtgctgctctgttttatttttaaaggtttattaattcctggcttacttggaatttcatatagtatgttgtgtgaaggatgactcc

SEQ ID NO: 6668 - DNA, 120 bp, synthetic construct
  source 1..120: mol_type = other DNA
ccttttttgtcagattttaaaaatttaatatgatttaacctgaatgacagaattttaaaatattcatttagacaagacaggtcttcgactattttctagatttcaacttgtctttttttc

SEQ ID NO: 6669 - DNA, 120 bp, synthetic construct
  source 1..120: mol_type = other DNA
ctcacttggaagcatgagatggattgctaggaaaaaagatttggttttggaattctaagatctgaaggctccagaaaggaaagctaaggacatagtctgagatagaaaagggttgaggag

SEQ ID NO: 6670 - DNA, 120 bp, synthetic construct
  source 1..120: mol_type = other DNA
ccccgaaccatgggcagccatttaaagcatttgttgttatttttgcttctcttataggtcatcaaaaacctgaaagcaaaatttttttagaaactcaaatcattctttaactccatagct

SEQ ID NO: 6671 - DNA, 120 bp, synthetic construct
  source 1..120: mol_type = other DNA
catgttaaatgagaaccagtcctgctctgcctggatcacagtagggatcaaaggagaccagtgtctcgtcaactgaaaattactacacaagccataggcctctgtttctttttattttat

SEQ ID NO: 6672 - DNA, 120 bp, synthetic construct
  source 1..120: mol_type = other DNA
accctgaggccttccccaagggctgggattctccccgataggaggcagcccatctgcatcacccttctgggaggtgtaagagggaggggcctgtgtgatatgtggtgacttgtggtagat

SEQ ID NO: 6673 - DNA, 120 bp, synthetic construct
  source 1..120: mol_type = other DNA
tcagcagtgacaccacctcacatgtggagcccagctgagttcctgcagtacttgttgtctgtaccactcacctggcacttatttattattgttgtggaagacagactcaaagacagcctc

SEQ ID NO: 6674 - DNA, 120 bp, synthetic construct
  source 1..120: mol_type = other DNA
caattgtatattagtcatttttgtataagcctcacttctttgggtgagcagggatcatattctgtctgtgtcctcatgtctagaacagtgtctggctcatagctggtgtccagtaaaatt

SEQ ID NO: 6675 - DNA, 120 bp, synthetic construct
  source 1..120: mol_type = other DNA
ccctaaaaaggacatgaactcatcctttttcatttcatctttttttaaaaaaaccacttccccttttgaaatgaaatatggaatgataaaaaaattttaaataaattccacttcaccatc

SEQ ID NO: 6676 - DNA, 120 bp, synthetic construct
  source 1..120: mol_type = other DNA
agataattggccaaacaagtctatgaggtcacctgtcaaggaagaccttatcaaagagggacaatagtaattaactgaaaccatcaggtcctctcggagattcagaagggatccatgatg

SEQ ID NO: 6677 - DNA, 120 bp, synthetic construct
  source 1..120: mol_type = other DNA
ttatcttgaagttaccaggttttaggatctatccacttcccctgtgctgactccatactccgaaagcaagtaaacttcaagtaaaattaccctaggggagaagcaggtactgacagacca

SEQ ID NO: 6678 - DNA, 120 bp, synthetic construct
  source 1..120: mol_type = other DNA
gatgatgttaaggagactgtcagtgaagggcatgattatgcaaaataaaatacaatagtgacaagaacaagaaaataaaacatggtcactcttccatcccatttctcagatgtcactaca

SEQ ID NO: 6679 - DNA, 120 bp, synthetic construct
  source 1..120: mol_type = other DNA
ttaaagtcatacaactggttgacaggctggttcaagaacccaggtcttctgacttcaaatccagtgccctttctatgcagctacttctgtgccaagcacggatggtggtgagcagaactg

SEQ ID NO: 6680 - DNA, 120 bp, synthetic construct
  source 1..120: mol_type = other DNA
agtgttattattaccaaaaacatgtatagtgcctacgtgggccaacagtgtggaaccacctgggaacttgttagatatacgctctcagaatctgcatcctaacaagatgcccaggtgatt

SEQ ID NO: 6681 - DNA, 120 bp, synthetic construct
  source 1..120: mol_type = other DNA
ttgttatgactattgtcatagtcataacatagtcatagtgcaaatcctgcaaaattttctctcctttccgaggacttctcattctctcccatcctgacataggctccttacctggctcat

SEQ ID NO: 6682 - DNA, 120 bp, synthetic construct
  source 1..120: mol_type = other DNA
gaaagaaagtgagaaggaaggagggacgagccagataccacagggtcaagataaatactgttgttggctattaattaacaatgttcatcatcaaaaacttatcacatattacaaatgttg

SEQ ID NO: 6683 - DNA, 120 bp, synthetic construct
  source 1..120: mol_type = other DNA
cctgggctcaagggatcctcctacctcagcatcttgagtagctgggactacaggtgtttgtcaccatgcctggctaattttctttttttttttttttttttttttgtagagatggggttt

SEQ ID NO: 6684 - DNA, 120 bp, synthetic construct
  source 1..120: mol_type = other DNA
tcatcccgttgcctcaagatgtccccatcctggctctccaattgtgctaagaggatgctctgctgttcctctagaaacttcctcaggtgtgcgaactcagaaatcacctgttgtctcttg

SEQ ID NO: 6685 - DNA, 120 bp, synthetic construct
  source 1..120: mol_type = other DNA
cttcctcttgatttgtctctaagactttggatcaggactttccccctttatcctgtgccattagaggctgtgacttggttttcccacttgagtctttcttcaggtttaacattctattgt

SEQ ID NO: 6686 - DNA, 120 bp, synthetic construct
  source 1..120: mol_type = other DNA
gcacaccacgcacaactgcatctcatcatcctcacagaagaagtagatcttctctccgtgctcttggcagacatcctcctctcccaaacccagtgtggacaccagctggaggcgctcaat

SEQ ID NO: 6687 - DNA, 120 bp, synthetic construct
  source 1..120: mol_type = other DNA
atattccctatgatggggaggagaaagaaaactactaacggccagaatttatttacaatgacggtacaacttacattgatacaagcaatttggccagaatttatttacaatgacggtaca

SEQ ID NO: 6688 - DNA, 120 bp, synthetic construct
  source 1..120: mol_type = other DNA
ctgtattggacaaactagttcctgggctgcactcgtggcaggaagagcagagattggatgggaaggggaggtaataaagtgattagagtaaaaagggagcaaccacaaggggctaggctg

SEQ ID NO: 6689 - DNA, 120 bp, synthetic construct
  source 1..120: mol_type = other DNA
tgtgacctcatggtgtgctctgttctccaccctagggaccagaaggagccaggagtaaagaactggcttacttggccgccactgggaaattctgggtaattcgagacgccctggaatttg

SEQ ID NO: 6690 - DNA, 120 bp, synthetic construct
  source 1..120: mol_type = other DNA
ggtggagtgcaaagaactgtagccttggcttcactcactatggaaagaaagctccaatgccgagtgggatcttctgcagattatgggcagggtaaacttgttctcccaggatccagactg

SEQ ID NO: 6691 - DNA, 120 bp, synthetic construct
  source 1..120: mol_type = other DNA
ctgagttgtcttattcattcctgcttccaatactttttgcacatagtctcttcctcctagaatactcttctcccttcctcccacctctctctctgtttttaagtatacaattcaggggca

SEQ ID NO: 6692 - DNA, 120 bp, synthetic construct
  source 1..120: mol_type = other DNA
tagattcttgaggagttgccacactgtcttccacaacggttgaactaatttacactcccaccaacattgtaaaagcattcttatttctccacatcatctccagcatctgttatttcctga

SEQ ID NO: 6693 - DNA, 120 bp, synthetic construct
  source 1..120: mol_type = other DNA
tcacatctgtgggcactaagtccttttctctccctctctattcaactggaaatttatctttcaaggcacattgtaaatgttttctgctttccaaaccttcccttaggcctacaggcagag

SEQ ID NO: 6694 - DNA, 120 bp, synthetic construct
  source 1..120: mol_type = other DNA
ctgaccttgaggagagtaggctgatggtgtggctacatctggatccctcacgcctctcttttcatgctataaagttatggaggaatcacagtgtgaggatttctggtaccttgaccaagg

SEQ ID NO: 6695 - DNA, 120 bp, synthetic construct
  source 1..120: mol_type = other DNA
cagaggggctggagacttgcccaagtcatacactgtggtcatgttaaggggtttagggtcagacagtcttggatttgaatgttggctcttccaattgtgtgacttgagtgagtctcttag

SEQ ID NO: 6696 - DNA, 120 bp, synthetic construct
  source 1..120: mol_type = other DNA
gtatctaacaccatttaaaatgtaatttaaagggggaatactttctgtagactatgataagcatggaaaccaggaataccagcctgttctttcattcattcattttttacacacatctct

SEQ ID NO: 6697 - DNA, 120 bp, synthetic construct
  source 1..120: mol_type = other DNA
tgcaggtgtgagatgaagacttttgtgagtcctgaggccatttctcctgaccttgtcaagaagatccgtgatttccacaggaaaatactcaccctcccagagatgatgaggatgttctca

SEQ ID NO: 6698 - DNA, 120 bp, synthetic construct
  source 1..120: mol_type = other DNA
ttttaaaaatcacatttatttttaaattggtgcttaatttagaagttgtttccataagcatcacctcactcactctggtataggtaagtgcttttcaaacttaatatgcagaaacgtctc

SEQ ID NO: 6699 - DNA, 120 bp, synthetic construct
  source 1..120: mol_type = other DNA
cggagacggcggctctccgggatccagctccgcccctggccagtgtgcggcccgggggctccctgtgcccgcgtgaggcgagagaacaggggacttgagtctcgaacagcggttgttttt

SEQ ID NO: 6700 - DNA, 120 bp, synthetic construct
  source 1..120: mol_type = other DNA
cctctcaagttgaacactcacattctcacccttccaccccaacctctgaaaaaaatctgccttcaactccaatccaggttccctgtagtgtaagacaataccctgtgtacaagaacactt

SEQ ID NO: 6701 - DNA, 120 bp, synthetic construct
  source 1..120: mol_type = other DNA
ttaagaaaattcaaacattttcaaagtgtataaataaaaacctctttccccacccactcaacacttccccttgccactccccatagttaaacattgatatcaattttttgtatatcctgc

SEQ ID NO: 6702 - DNA, 120 bp, synthetic construct
  source 1..120: mol_type = other DNA
tttttgtaggtgttcctgaattccaagtgctgagttctgtccactactgggcaggaggcaaagagatcccacaaaataattgctgggctgctggactatgtgaggagcagtcacactgat

SEQ ID NO: 6703 - DNA, 120 bp, synthetic construct
  source 1..120: mol_type = other DNA
gaactaatttacactcacaccaacagtgttaaaagcattcgtttttcttcacaaccttgccagcatctgttgctttttgactttttagtaatagccattttgactggtgcgagatagtat

SEQ ID NO: 6704 - DNA, 120 bp, synthetic construct
  source 1..120: mol_type = other DNA
aaatgctttttctgcatctattaagatgatcatatggtttttgttctacattctattgataatatgtatcatgcttatttattcatattgaaacatctttgcatctctactataaatccc

SEQ ID NO: 6705 - DNA, 120 bp, synthetic construct
  source 1..120: mol_type = other DNA
tgtttccattttcatttgtttttagattttttttttaattttcatcttaatttctttttttttttttttttccagatggagttttgctcttgtctcccaggctggagttcaatggtgtaa

SEQ ID NO: 6706 - DNA, 120 bp, synthetic construct
  source 1..120: mol_type = other DNA
tgtatctgatataagtatagctactccttctcactttttgtctccatttgtatggaatatctttttccatccctttactttgtctatatttgtctttactggtaagaaactttactgagt

SEQ ID NO: 6707 - DNA, 120 bp, synthetic construct
  source 1..120: mol_type = other DNA
aggctttgctaatttttttatctaggcaaagtaaattgaattttttaaaattattttttctttatttttgtctgactaggttatttcaaaagagctgccttcaagctctgagactctttc

SEQ ID NO: 6708 - DNA, 120 bp, synthetic construct
  source 1..120: mol_type = other DNA
tatagtagtgtgatccctgtatgatttatttggcagtatacaacatcagtggtatctgtgacttcctcattgacttaaggtgcacttattagtgaaggctgtggtgaagtttggctggga

SEQ ID NO: 6709 - DNA, 120 bp, synthetic construct
  source 1..120: mol_type = other DNA
aatgcagacccgggtggttgagctctcagaataatgactacaggtttgccaccgggagggcaggacccctctcaggtggaagagcaaggacaagtagccacagggagtgcagtcttctca

SEQ ID NO: 6710 - DNA, 120 bp, synthetic construct
  source 1..120: mol_type = other DNA
actgttgtaacctagaaacatcctggcacatcacgggtacttaataaatgaattcaggagacatatgaagcctggagataacagatttgagagaatacagaaaataggaggaaaagtcaa

SEQ ID NO: 6711 - DNA, 120 bp, synthetic construct
  source 1..120: mol_type = other DNA
tcagaaaggacaagaaaaacagttgactgtgttaggatgcaaggctgaatctctgcacattctatttcctctgaggcagtgcttattttccaaggaagaatttttgggtgtgctatactg

SEQ ID NO: 6712 - DNA, 120 bp, synthetic construct
  source 1..120: mol_type = other DNA
tgttctggattcttaaaactcccctcacaaggaccaatctagagataatttattgatcagtgatcacagcttgtaccccaaagccgtgtatgtctggatccttccctaagaccacagata

SEQ ID NO: 6713 - DNA, 120 bp, synthetic construct
  source 1..120: mol_type = other DNA
ccagggcgatgcccactctccggggccgcagtgctgggaaaagctcagcctcggggctggtgttggcccagatgccggaggaggagaggcgcagcgcccacacgccatcctctggccgca

SEQ ID NO: 6714 - DNA, 120 bp, synthetic construct
  source 1..120: mol_type = other DNA
tggatcaccagtccctgaaaaatctgttccattttcttcataatccagaaaaaaagtcctctttttcaagtaactcttgatatgcttcttggtaatccggatcagctgcagtgaaaggaa

SEQ ID NO: 6715 - DNA, 120 bp, synthetic construct
  source 1..120: mol_type = other DNA
tgctaactgtcagatgatgtcaggtaattacacaggtgagctcccatgtaagagaaatttggggctgggcacggtggctcacgcctataatcccagcactttggaaggccgaggcgggtg

SEQ ID NO: 6716 - DNA, 120 bp, synthetic construct
  source 1..120: mol_type = other DNA
agacattaataaagaagctacaaccacctaaggtttaaccactgctaactcagttctgctatgggattttatcctgtgaactagatgaagctctcagggcctcgtttgctcccagacagg

SEQ ID NO: 6717 - DNA, 120 bp, synthetic construct
  source 1..120: mol_type = other DNA
ttatctgagaattctccggtcttttttttaaccactcgagcaatgggtttcccaacccagaacttcttccgtggatacctaagaagatgacatacataacaagctgttactcagctcttc

SEQ ID NO: 6718 - DNA, 120 bp, synthetic construct
  source 1..120: mol_type = other DNA
gcagggctggatatgcatggtaaggagtttcacttttgctccacgtacagtggaaacccaccaagggtttcaagtaggggcatgatatgtgtgatccgctctacatgtggctgagactgc

SEQ ID NO: 6719 - DNA, 120 bp, synthetic construct
  source 1..120: mol_type = other DNA
gctgacattctagcagggggaagcagacaataatcaatgtagcaaatacatcatactacgtgagtgatacgcaccacgggaaaagagagcagagtgaagggggatgggagcaggggccgg

SEQ ID NO: 6720 - DNA, 120 bp, synthetic construct
  source 1..120: mol_type = other DNA
atccctttaatgtcttcttgatgctcccagcccataggtttgtctttcctttcctatcacctctatcaaaaggtctcttctattttacacattttgtcctgctgcttctccctctcacct

SEQ ID NO: 6721 - DNA, 120 bp, synthetic construct
  source 1..120: mol_type = other DNA
ggattgctttggccatttggggttttttgtgactccatatgaattttagttttttttctatttttctgaagaatgtcattcgtattttgataacagggattgtattaaatctgtagactg

SEQ ID NO: 6722 - DNA, 120 bp, synthetic construct
  source 1..120: mol_type = other DNA
gtgtttgaggtgacagatatactaattactctgagttgattattatatattatatacttgtatcaaagtatcactctaggccaggcacagtggctcacgcctgtaatcccagcactgtgg

SEQ ID NO: 6723 - DNA, 120 bp, synthetic construct
  source 1..120: mol_type = other DNA
ccccatggcctgggacaaactcctcccactctctggacctcagtgacttcatcagtaggggctgaactggaaggtctaaaatccctgccagtcctcattctgtacatctgaattcacaac

SEQ ID NO: 6724 - DNA, 120 bp, synthetic construct
  source 1..120: mol_type = other DNA
tggcagcagtaaggattatcatctccatgtttcagatgacaaaactgagcccccaagtcttctaaggtcctgcaagtgaatggcagggctgggacccaccgtcctggtccctggcgccct

SEQ ID NO: 6725 - DNA, 120 bp, synthetic construct
  source 1..120: mol_type = other DNA
tggtgctgagctgggggcagccatgcacactgagggcctggaggggtccttggacttggctgtctctagcttactgtttccctctccctaggcctaatgactcaccactggccctgaccc

SEQ ID NO: 6726 - DNA, 120 bp, synthetic construct
  source 1..120: mol_type = other DNA
actgccaggctgacacccatcctccctgtgagcagcgcctagaaacacctcccagctgccgcctacttgcccaggctcaccctgccctacacgggcgcaccgcctcagggcttcctgaaa

SEQ ID NO: 6727 - DNA, 120 bp, synthetic construct
  source 1..120: mol_type = other DNA
caccagctcctacaaggttcacacaatgtcaacgagaagaggaccttatagatctagtccaacttcctcattgtacagataaggatatggaaacccagaaagattagcttggtagagtga

SEQ ID NO: 6728 - DNA, 120 bp, synthetic construct
  source 1..120: mol_type = other DNA
ggaggctgtggcagaaggattacttgaatctgggaggtggaggctacagtgagccatgattgtactactacactccagactgggcaacagaataagagactgtctcaaaacaaacaaaaa

SEQ ID NO: 6729 - DNA, 120 bp, synthetic construct
  source 1..120: mol_type = other DNA
aacctgaattacaggcaaatcaatactattaatgattatgtatggtgaaagtccatcacaacagagttcagtggcctctgtcagtagtgacattaatgggacagaaataaaacccccagt

SEQ ID NO: 6730 - DNA, 120 bp, synthetic construct
  source 1..120: mol_type = other DNA
gggttgggaacttattttgcaatttacttgcaaaataagaacaataaaaggactatgaagagctcagctacagctcttcttccatgcaaaacaggacacctcatcacccaggctccatgc

SEQ ID NO: 6731 - DNA, 120 bp, synthetic construct
  source 1..120: mol_type = other DNA
ctggctcaagcaatcttctcatctcaggctcccgagttgctgcaacaacaggtgcatactaccacacttggctaatttttaaaggtttttgtagagaagagttgccactatattgcccag

SEQ ID NO: 6732 - DNA, 120 bp, synthetic construct
  source 1..120: mol_type = other DNA
acaatgttagttgtatagaaccatttgtttttgagagtctgccataaccagataaatgaaacacagtaccacttctatgaccaatcccttcccttgcttatacagactccttctgaggaa

SEQ ID NO: 6733 - DNA, 120 bp, synthetic construct
  source 1..120: mol_type = other DNA
gaaaaaataaaccagaagctagctgcaattctatagaaccaggaagatgcaacaaacaagccctgcaatgtcctggtaccctcctcacaggcagaactgcagacactccctacctttctc

SEQ ID NO: 6734 - DNA, 120 bp, synthetic construct
  source 1..120: mol_type = other DNA
cagtgactgtggatgatgcgttcttgtggtcacacttggcttactttccccacggagccgagcatcagtggtgctctgaagcacagtgcaggccacaaaaactaccagggctctgaacgc

SEQ ID NO: 6735 - DNA, 120 bp, synthetic construct
  source 1..120: mol_type = other DNA
aagtggcaaactccctgtcctaccagaacttacatccagtgacctgaggaatcctttagaagctgaaatcagatccaactgtgggatcatcaaaccctcaagggtttcctgatttacata

SEQ ID NO: 6736 - DNA, 120 bp, synthetic construct
  source 1..120: mol_type = other DNA
gcacgtcaccagcaaatcatcgtatccaaggtttcgctccagcaacttacagaaaccaggagaagaaaaagctgtgtctgagaaaatggttgttgtggagtaaattgtaatagtgagaat

SEQ ID NO: 6737 - DNA, 120 bp, synthetic construct
  source 1..120: mol_type = other DNA
ccccaaaagttcacgtgttggaaacgtaattgccaatgtaacggtattaagaggtggggtctttaagacgtgactgggtcatgagggtgtaactctcatgaatggattaatgcctttctt

SEQ ID NO: 6738 - DNA, 120 bp, synthetic construct
  source 1..120: mol_type = other DNA
cctacctaattctctggccattagatacactgaaccaggaagacagccccttcttcactccccactctccacccattcccttgtacatgctcttctctccagtccagcgcatccttgaag

SEQ ID NO: 6739 - DNA, 120 bp, synthetic construct
  source 1..120: mol_type = other DNA
ttagacattcttgcccacacacattacctagatatctcttggcctccctccacacacacacaattttggggggaagaacaaaattccatttctataaagctggcaaaatctaattcatcc

SEQ ID NO: 6740 - DNA, 120 bp, synthetic construct
  source 1..120: mol_type = other DNA
ccttgatacgatgggatgataatggcaatctacctctgtggtcttcctcccagttacccataagcccagtcttaggagaaaaacatcaaattccaatagaggggcatcctacaacataca

SEQ ID NO: 6741 - DNA, 120 bp, synthetic construct
  source 1..120: mol_type = other DNA
catccaggccccgcttacttctggttccgcagactagaatggatgggagtctgagtaggataccagaaagcgagaaagacccaagaggagggggagaatgtaaggacaagcaaacaggag

SEQ ID NO: 6742 - DNA, 120 bp, synthetic construct
  source 1..120: mol_type = other DNA
aaagcgggccgagacttgggttccccaggtccttggtggggaggtttccaggaggctcgggcgcgcccccgtccacggccccggaagctgacgtcgccgaagcgtacgccgctgcccagc

SEQ ID NO: 6743 - DNA, 120 bp, synthetic construct
  source 1..120: mol_type = other DNA
ttcacagaccattctgggcagactccagccacaaatccaccaccccacttaaaattctctatcctctcagcacacttagaggggcatggaagactcttgcaggggctggggctcctgaca

SEQ ID NO: 6744 - DNA, 120 bp, synthetic construct
  source 1..120: mol_type = other DNA
gctttggagcagctttgtagctttgtgcccctctacagcttcctgcttcatttaaggttctgaagcagagttgaaattccttcctccagctctccatttctgtggtcataccagatggag

SEQ ID NO: 6745 - DNA, 120 bp, synthetic construct
  source 1..120: mol_type = other DNA
ttgaagtctcagcataaaccttgtgatgggtaaggaaaatatattagtttttttcccctaagtttagtataaacatattgagctaaatcataccattcagaatctcaggattttaagaat

SEQ ID NO: 6746 - DNA, 120 bp, synthetic construct
  source 1..120: mol_type = other DNA
ctgggattacaggcttgatacaacgcgcccggccgacactgtagcattttctaataggcctacgtaaaaattatctaattctctagggtagtttaactttgatttagtattttagggtat

SEQ ID NO: 6747 - DNA, 120 bp, synthetic construct
  source 1..120: mol_type = other DNA
gtgtacctatggtatcacatttagaggtatatgatctcatcccactattagtgatggtagatttgatggaagattcaggtattgtcagcctgatccctccattccccagtttgtgagtta

SEQ ID NO: 6748 - DNA, 120 bp, synthetic construct
  source 1..120: mol_type = other DNA
aaaaggtttttgcttcaggtactctcctattttcctgctccacatttacagcaaaattagaaaatattgtctgtacctgccctctgtttccttttctctccttctttaatcaaaaactgt

SEQ ID NO: 6749 - DNA, 120 bp, synthetic construct
  source 1..120: mol_type = other DNA
cggtcccagtgaacttttcttcttattattatttttgtagagatggtgtctagctatgtcgcccaggcttgtctcaaactcctggcctcaagcaatcctactgcctcaacctcccatagt

SEQ ID NO: 6750 - DNA, 120 bp, synthetic construct
  source 1..120: mol_type = other DNA
gacggggcggccgggcagaggagctccccacttcctagatggggtggcagccaggcagaggctgtaatcttagcactttcggaggccaaggcaggcggctgggaggtggaggttgtagcg

SEQ ID NO: 6751 - DNA, 120 bp, synthetic construct
  source 1..120: mol_type = other DNA
tgtgaggggagactatttcccaggggttgtataatctacattccctttagtggcagatgaaattcccattaaaccacatctgcaacttcacttggaattgtcagacttttgactttttgc

SEQ ID NO: 6752 - DNA, 120 bp, synthetic construct
  source 1..120: mol_type = other DNA
tgtcatcttttgagaagagagaagcatttgttttttcattctaaagtagctaaacgtatcaatctttatgttttggactcttggtctagtttaataagtcctaccttgtcttgagattac

SEQ ID NO: 6753 - DNA, 120 bp, synthetic construct
  source 1..120: mol_type = other DNA
ttgtaatattagatggtggtaggtactatgaattaacacaaaccaagaaggggaacagggagtggggagaaaatattacaattttaaatagggaggttagagaagtccttacagagaaag

SEQ ID NO: 6754 - DNA, 120 bp, synthetic construct
  source 1..120: mol_type = other DNA
gatgcacactcttgcgttgcagcctgggactctacatttcaagcaagatattcttacacataacaaagcttgaaaagcattgctttaagctttcctttgtctctccaagtacctccaaat

SEQ ID NO: 6755 - DNA, 120 bp, synthetic construct
  source 1..120: mol_type = other DNA
gcacaatcttggctcactgcaacctccgcctcctgggttcaagcgattcttctgcctccatttcccgagtagtcgggacaggcacatgtcaccacacccagctaatttttgtatttttag

SEQ ID NO: 6756 - DNA, 120 bp, synthetic construct
  source 1..120: mol_type = other DNA
gtatcattagcgtataaaatccccacgtggtggtgtgttttttgctattacaatgaggaaaaggtcaccataagctaaaccttgagcctagctgtgtatgcaagaccctggagaatttcc

SEQ ID NO: 6757 - DNA, 120 bp, synthetic construct
  source 1..120: mol_type = other DNA
acaagttatatgggatatattgaacctctaatatgtgccaggtgctatcataggttctggtgatacagtaatgaaccaaacaaaggccccaaccttcatgagtttatgtctcagtgaaat

SEQ ID NO: 6758 - DNA, 120 bp, synthetic construct
  source 1..120: mol_type = other DNA
gaatccacctgtgaaatcatcaccacaattaaaataatgaatatatctgtcaccccccatagcttttccctgctcctttgaattcaacccatcctataatccatccccaggcaaatactg

SEQ ID NO: 6759 - DNA, 120 bp, synthetic construct
  source 1..120: mol_type = other DNA
ccttgattttagcttagcgaaactagtgttggttttctgacttacagaactgtaagatcataaatttctattataaatatataatatatattatattatcataaatttatatttatagat

SEQ ID NO: 6760 - DNA, 120 bp, synthetic construct
  source 1..120: mol_type = other DNA
atgaggactcaagtgtatatccaatagaaaactgcatgtcacctaaagatcctggattttgagctggatgtcataactggatgagatatttccctagggggtgaggtgagttttttctaa

SEQ ID NO: 6761 - DNA, 120 bp, synthetic construct
  source 1..120: mol_type = other DNA
taaactgattcaaagattcatatgaaaaataaagaaagaataccaactaaacctcagacaaggggagcttgagaaaaactggctttgccaaatatgaaaacattctaaagcctcaataac

SEQ ID NO: 6762 - DNA, 120 bp, synthetic construct
  source 1..120: mol_type = other DNA
ataggagtccagtttgggacaaaccttttggaggacaattaggcaatcaatacctttcaaaattgtttgtgaatacagccttaaacctttcaatttcattttttgaaactcattctacag

SEQ ID NO: 6763 - DNA, 120 bp, synthetic construct
  source 1..120: mol_type = other DNA
tttctactttaggtgtgattgacatgcatttgtagatgtgttagtgcagattgcacttcatggcacaaggtcctatttggagccataacagcagcttcttaatgaaagaaggaaggtggc

SEQ ID NO: 6764 - DNA, 120 bp, synthetic construct
  source 1..120: mol_type = other DNA
tcagcctagctccccctttaaaaagtctttcatctatttagagtttaacaagtcttttttttttctctttaaaaactatgctagtatttttattcgaattgttattgctttgttagtgtt

SEQ ID NO: 6765 - DNA, 120 bp, synthetic construct
  source 1..120: mol_type = other DNA
caagtggtggttcagtaggccttggtagctccccagagtttgcatctgtaggtagaggtcactgttagtgataaagttgtggtttgatttgtttttcaaaatgtaggtgatacctactgt

SEQ ID NO: 6766 - DNA, 120 bp, synthetic construct
  source 1..120: mol_type = other DNA
gggaaaaaaaaattacatatatgagcaccctttgaaatgcttacagcagagctagctgcctaaaattaacattcatctaacactgcaagccagaacgtgttctgagtagtgctctggaag

SEQ ID NO: 6767 - DNA, 120 bp, synthetic construct
  source 1..120: mol_type = other DNA
tctagaacttctttatcttgcataactgaaactttgtaactttgaccatcaaccctccattccccgtccccaccagtccctggcaaccaccattctactctgtttatgtaagtttgactg

SEQ ID NO: 6768 - DNA, 120 bp, synthetic construct
  source 1..120: mol_type = other DNA
tgtataaaatctatgtaatttttctttcagaatttaacaaggaaaatattatttcctctggggtcctagtatgtttcttcttgcctgctaaagaaacatcaggccaggcttggtggctca

SEQ ID NO: 6769 - DNA, 120 bp, synthetic construct
  source 1..120: mol_type = other DNA
gatcttccttattaactagaatggaaattgttccacacaaccattattaaactacacatggtcaaatgcagttggatttcactctggaatcactttgcatctcccttttttcattgaggt

SEQ ID NO: 6770 - DNA, 120 bp, synthetic construct
  source 1..120: mol_type = other DNA
gtaaaggaccaaccaaactgtatctgagtcctcttgctctatgactacggtgtggcctatttgcaagagatttggaccaagagtcaagagagacaaggtgttattctcatttactgaatt

SEQ ID NO: 6771 - DNA, 120 bp, synthetic construct
  source 1..120: mol_type = other DNA
aagacatgaaggggaagcatttgtccttataaattgaaactgcaggccaggcacagtggttcacacctgtaatcccagcactttgggaggccaaggcaggcagatcatgaggtcaggaga

SEQ ID NO: 6772 - DNA, 120 bp, synthetic construct
  source 1..120: mol_type = other DNA
tgtctccttattgttttctctgtctatcatcttactgaaatttgacaagtgctggaaagggattgtttagaagggagagaggttattctggttagtgtatgttgaaaggtattctatgga

SEQ ID NO: 6773 - DNA, 120 bp, synthetic construct
  source 1..120: mol_type = other DNA
tatctgaatgttttcatttcttattttgtgtatttctacctttttctttttcttttgagctggagtctcgcactgttgccctggctagagtgcaatggtacaatcttggctcactgcaac

SEQ ID NO: 6774 - DNA, 120 bp, synthetic construct
  source 1..120: mol_type = other DNA
gattttgtatatctctgtaaggttggccttagtaattctgttatctaggtattttgtactaatacttattttctgacttcttgatatgtcacggactaaaagaagtcagtcacagattcc

SEQ ID NO: 6775 - DNA, 120 bp, synthetic construct
  source 1..120: mol_type = other DNA
agttaatacacctttgcctaccattatcttaattttaaattttaaaaaaatgtaaagctttatcttaattttctttttttaatttaatttttaaaatatattttaaggtatacaacatga

SEQ ID NO: 6776 - DNA, 120 bp, synthetic construct
  source 1..120: mol_type = other DNA
ctgagctttgaagagagcagtggttctcccagcacgcagctggagatctgagaacgggcagactgcctcctcaagtgggtccctgacccctgacccccgagcagcctaactgggaggcac

SEQ ID NO: 6777 - DNA, 120 bp, synthetic construct
  source 1..120: mol_type = other DNA
agattttgtcaccaccaggcctgccctaaaagagctcctgaaggaagcactaaatatggaaaggaacaaccagtaccagccgctgcaaaatcatgccaaaatgtaaagaccatcgagact

SEQ ID NO: 6778 - DNA, 120 bp, synthetic construct
  source 1..120: mol_type = other DNA
agcagaactgaaggaaatagagacacaaaaaaacccttcaaaaaattaatgaatccaggagctggttttttgaaaggatcaacaaaattgatagaccgctagcaagactaataaagaaaa

SEQ ID NO: 6779 - DNA, 120 bp, synthetic construct
  source 1..120: mol_type = other DNA
aataaaagacagagagccaaatcatgagtgaactcattcacaattgtttcaaagagaaaaaaacacctaggaatccaacttacaagggatgtgaaggacttcttcaaggagaactacaaa

SEQ ID NO: 6780 - DNA, 120 bp, synthetic construct
  source 1..120: mol_type = other DNA
accccatcaacaaatgggcaaagatatcaacaggcacttctcaaaagaagacatttatgcagccaacagacacatgaaaacatgctcatcatcactggccatcagagaaaaggaaatcaa

SEQ ID NO: 6781 - DNA, 120 bp, synthetic construct
  source 1..120: mol_type = other DNA
tttggaggtggagccattaggaagtgatcatgcaatgaaggcaaaaccctcattaatgaaatgaatgcccttataaaagggaccccagagagctccttgccccttccaccatgtgaggac

SEQ ID NO: 6782 - DNA, 120 bp, synthetic construct
  source 1..120: mol_type = other DNA
tctcatataggaaactccaggtccagaaggcttcattgatgaaatgtatctaacaaataatttggaaataacatcaattttacacataccttttagaaattaaaggaggcaacaactttc

SEQ ID NO: 6783 - DNA, 120 bp, synthetic construct
  source 1..120: mol_type = other DNA
cctaatacccagttccaaagtcaattccacattttcgggtgtcttttcagtagcacccactctactggtactaatttactgtattagtgcgttttcatgctgctcataaagaaataccca

SEQ ID NO: 6784 - DNA, 120 bp, synthetic construct
  source 1..120: mol_type = other DNA
aataaaagggccaagtgtggtgcctcatgcctgtaatctcagcactttgggaggccaaggtgggaggatcactttagttcaagagtttgagactagcttgagcaacatagttagacccct

SEQ ID NO: 6785 - DNA, 120 bp, synthetic construct
  source 1..120: mol_type = other DNA
ggggtgagggtgggaggcaaggattaaatagaaaaggggcataaggaaagtttttagggaaaagaaactgtcctctatctgggcaatgtggtagttacatgactataaataattaccaat

SEQ ID NO: 6786 - DNA, 120 bp, synthetic construct
  source 1..120: mol_type = other DNA
gacaggaagtgaggaaaaggagcaagggaaaggactctaaagcagtggaggagcctagcagggggttcttgacatgcattcggtatttaatacattttgtgggactgccaaaaactaatg

SEQ ID NO: 6787 - DNA, 120 bp, synthetic construct
  source 1..120: mol_type = other DNA
atcagcttcgccgcgatcccggcactacgatcccggcactacagtcccggcgcaaccacccgcactcagattctccccaaacgccaaggatgggggtcatggctccccgaaccctcctcc

SEQ ID NO: 6788 - DNA, 120 bp, synthetic construct
  source 1..120: mol_type = other DNA
caagtgggaagcggacaaatactcagagcaggtcagggcctacctgagggcaagtgcatggagtggctccgcagacacctggagaacgggaaggagacgctgcagcacgcgggtaccagg

SEQ ID NO: 6789 - DNA, 120 bp, synthetic construct
  source 1..120: mol_type = other DNA
cagagcccctcaccctgagatggggtaaggaggggtgtaagttgtctcctctcagggaaagcaggagaccttcagcagggcagggctgaggcctgggggtcagaacccctcacctccctc

SEQ ID NO: 6790 - DNA, 120 bp, synthetic construct
  source 1..120: mol_type = other DNA
tgaggcagaggggacatgattctgttgaggggttctctggatttagacatcttgaccatgtggtaggctgttcagagtgtcaccaggtacagtgactgccctggatttgtttatgattat

SEQ ID NO: 6791 - DNA, 120 bp, synthetic construct
  source 1..120: mol_type = other DNA
ttaccctatttccagggctctttcttggattgtattttctatcttttccccaacctttttaaaggaactagattctgaaattagcagagaagagggatgccacaagttctcatcttaggt

SEQ ID NO: 6792 - DNA, 120 bp, synthetic construct
  source 1..120: mol_type = other DNA
tttgaatgagatagttttaagcagaataaagacatgccacaacttctcttttaaaaggatcactgtagctgctctgctgagaacagaatccaaaggccggcgatgagcaaggcaggtggg

SEQ ID NO: 6793 - DNA, 120 bp, synthetic construct
  source 1..120: mol_type = other DNA
caacaagcccacagcaaacctggtgctcagccagatttgatatcactgagatcagtagttggagaatgcccaggatggggaggggtctcagacccacatttaagtgttgctttattctgg

SEQ ID NO: 6794 - DNA, 120 bp, synthetic construct
  source 1..120: mol_type = other DNA
gagaactgctccactactgctcctcagccatctttaccaaaatgcagtatttactgtcccagcctctctgtgtcatctcatcctgattagaagcccacatgtggttatctaaattgtgca

SEQ ID NO: 6795 - DNA, 120 bp, synthetic construct
  source 1..120: mol_type = other DNA
cattggtctagatgtacttgtattccagcatctacctcggtgtcagattaatggcaggaattaatcagtagcgaatggggattccatttccggtaatagggtgaactaggttttaaagct

SEQ ID NO: 6796 - DNA, 120 bp, synthetic construct
  source 1..120: mol_type = other DNA
tcaaaataataataataataataataataataataataataataataatgacaagcttgaaaatgcctacagaatgtattaacctaaaaatgacctgtttttcaaaagaactaaagttag

SEQ ID NO: 6797 - DNA, 120 bp, synthetic construct
  source 1..120: mol_type = other DNA
cttatagaatgcaaaaatatctggcacctaacctggtaaagtcatgtctggcattaaataaaaacaatcaccaggcatataataaaaacaagaaaatacaactcagaaggcagagaaaac

SEQ ID NO: 6798 - DNA, 120 bp, synthetic construct
  source 1..120: mol_type = other DNA
aaaattgaagaagccacaaataattggaaagatatccttgttcttggatcagaagaatcatattgcgaaaatgtccatactacccaaagcaatcaacagatttaatgtaacccctatcaa

SEQ ID NO: 6799 - DNA, 120 bp, synthetic construct
  source 1..120: mol_type = other DNA
atagccattaacaaaaagacaagagataatcagtgttggtaaactgtagagaaagggaacccttatacatggttggtaggaatgtgaattggtaaaagcataatggaatacaatatagat

SEQ ID NO: 6800 - DNA, 120 bp, synthetic construct
  source 1..120: mol_type = other DNA
aacctaatgtacagtgtgaaaggaaaaataatctcaggtccccaaaatcactaagccaaagtgatttgggcttacaacaggatggcaactattggtatacttgaaatttactaagagaat

SEQ ID NO: 6801 - DNA, 120 bp, synthetic construct
  source 1..120: mol_type = other DNA
cacctgtcagaatagttattatcaaaaagataagaggtaataagtgttaatgagggtgtagaggaaagggaatccttatacatggttggtgggaatgtaaattggtataagcattatgga

SEQ ID NO: 6802 - DNA, 120 bp, synthetic construct
  source 1..120: mol_type = other DNA
ttatattaaatgaaataagccagacacagaaagacaaatattatataacctcatatttgcaatctaaaacaagtgaaactcctagaaacagaggtagaacggtggttaccaggggcttga

SEQ ID NO: 6803 - DNA, 120 bp, synthetic construct
  source 1..120: mol_type = other DNA
gcagtggtgaggatgtggagaaattggaattcttgcacactgctggtaagaatgtaaaatggtgcagcctcttaaagaatagcttggcagttcctcaaagtttgaatgtagaatgagtat

SEQ ID NO: 6804 - DNA, 120 bp, synthetic construct
  source 1..120: mol_type = other DNA
tcctgactgcaagggatttagggaaattattaagactatggtgtttctagttgggcagcctataagactgttgtttaatattagaatcaatagatgaaaaatagatgagctgaagtctga

SEQ ID NO: 6805 - DNA, 120 bp, synthetic construct
  source 1..120: mol_type = other DNA
taatgccattgatctgcctaaatgcattcttttaaatacctataaaaaggagggccagaagcgagttttattcacagaggacaaataataatacattttaaaaaatattttatttttgat

SEQ ID NO: 6806 - DNA, 120 bp, synthetic construct
  source 1..120: mol_type = other DNA
caagtgatctgccctcctcggcctcccatagtgctgggattacaggtgtgagccaccatgcaaaacgctggttttgtcttttgtggggtatatacccagcagtaggattgttgcatcata

SEQ ID NO: 6807 - DNA, 120 bp, synthetic construct
  source 1..120: mol_type = other DNA
cccgcctgggcctcccaaagtgctgggattacaggcatgagccaccacgcatggcctgtatgtcttcttttgagaaatgtctattcaaatcttttgcccatttttttacttagactttta

SEQ ID NO: 6808 - DNA, 120 bp, synthetic construct
  source 1..120: mol_type = other DNA
ttttatgtcagtaccatgctgttttggtgattatagctctgtagcataatttgaagtcaggtaatgtgattcctccagttttgatctttttgcttaatataattttggctattctgggca

SEQ ID NO: 6809 - DNA, 120 bp, synthetic construct
  source 1..120: mol_type = other DNA
agggataaatcccacttggtcatgataaatgattttttttttaatggagtctcactctgtcaccaaggctggagtgcagtgccacaatctcagctcactgcaacctccacctcctgggtt

SEQ ID NO: 6810 - DNA, 120 bp, synthetic construct
  source 1..120: mol_type = other DNA
attatttgttttcttctaattttgtgtttgttttgctcttgcttttctggttaaggttcattgttaaattgcttatttgaagtttttcctcttttttcatgtaggcacttatagctatca

SEQ ID NO: 6811 - DNA, 120 bp, synthetic construct
  source 1..120: mol_type = other DNA
aacagcacccagggggatggtgttaaaccatgagaaaccacccccattatccaatcctcttccaccaggctcaacctccaaaatttaggattacaattgaacatgagattttggtgggga

SEQ ID NO: 6812 - DNA, 120 bp, synthetic construct
  source 1..120: mol_type = other DNA
agcctgagctatacctggggccctttgagctgaagctggagctggagcagctgggatttggagagcagtttcctgaggttgtgcagggcagcaggaccctgagcctggcccaggaaacca

SEQ ID NO: 6813 - DNA, 120 bp, synthetic construct
  source 1..120: mol_type = other DNA
tggaataatgcaaagtgggagcaagcatctacatagcaggagtagaccaaggcaagcgggtggtgtggagaggtgctacacacttttaagcaaccagatttcagaagaactcactatcat

SEQ ID NO: 6814 - DNA, 120 bp, synthetic construct
  source 1..120: mol_type = other DNA
gtacttactcttaacagtgagttttttacctttagatgattctttgttgctcattaatgtctgtttctttctgaccaaagtactcccttaagcgtttcttatgggaccagtctagtgttg

SEQ ID NO: 6815 - DNA, 120 bp, synthetic construct
  source 1..120: mol_type = other DNA
ctttgttactgttaatagtgctgcaatgaacatacacttgcatgtgtctttatggtggaatgatttatattcctttaggtaaatatccagtaatgggattggtgagtcaaatggtagttg

SEQ ID NO: 6816 - DNA, 120 bp, synthetic construct
  source 1..120: mol_type = other DNA
tgcctccacctttgttctttttgtttaggattgccttgactactcaggctttttggttccatatgaattttaagttttttctagttctgtgaaaaatgtaattgatagtttgataggaat

SEQ ID NO: 6817 - DNA, 120 bp, synthetic construct
  source 1..120: mol_type = other DNA
ctccaaggatctctgcagccacaggacgcattccttctccacttagatcttgtctgtgaagtatccaattgccttccatttctacttggtgtagaatgtagggggcaatgaatgaaactg

SEQ ID NO: 6818 - DNA, 120 bp, synthetic construct
  source 1..120: mol_type = other DNA
tggcaactttgttgaacagctgctcctatcaggatcagttcgtaaaaagccaagcactgctcagccttttattatgcctcttactgatttatgccttcatttggcattcaagaacttgct

SEQ ID NO: 6819 - DNA, 120 bp, synthetic construct
  source 1..120: mol_type = other DNA
aagtgacaaactttggatacctttttaacattgtttctaaatattgtaaacatgaatcttctggacctcagagggaacaaggaagcaatgatattaataatgaatcataatctggaacac

SEQ ID NO: 6820 - DNA, 120 bp, synthetic construct
  source 1..120: mol_type = other DNA
ttgtccacatgggcaactacgaagctggcacaactatacttctttgttcactttggtcaccaccatttgttctgctgttgggctgcccatgtgtaggcaggtttcacgaaaatatcaggt

SEQ ID NO: 6821 - DNA, 120 bp, synthetic construct
  source 1..120: mol_type = other DNA
gggtgttaaacgaaatagttcctcacagcaatgcccaaagtcatccttggtcacaataaaggagaataaagggaaaaaagtatgattattgtattagattgtggggttgcaggtgagttt

SEQ ID NO: 6822 - DNA, 120 bp, synthetic construct
  source 1..120: mol_type = other DNA
tcggggagcatctcaggatgtcctcctcaaggagatgacatgtcaactgagcccagaggacaacaggagttgacagggaagagtatttcctagagcgagaaactggaggcagctgtagtg

SEQ ID NO: 6823 - DNA, 120 bp, synthetic construct
  source 1..120: mol_type = other DNA
gcccatgagtgacaattcagcacaggaaatttggttctgtgagcagcatctattggcaggatgaccagcaattcttgtgtgtggtttgcaaagatcttaacggagaacaaatgttactta

SEQ ID NO: 6824 - DNA, 120 bp, synthetic construct
  source 1..120: mol_type = other DNA
ctataactatagccatttctagattaatacctcttgtcagcaaagcaagacagaggtattctctggtcatgaagaaaattccagaaaagagctctgaatcaaaggccaaaatcctggcat

SEQ ID NO: 6825 - DNA, 120 bp, synthetic construct
  source 1..120: mol_type = other DNA
ccatgctcagtgctttcatttttttcagtatactcacattactgattatccttcattttacttatgatcaaagcaagagttgaaggaatgtccttggttcaaggctacaccctaggagac

SEQ ID NO: 6826 - DNA, 120 bp, synthetic construct
  source 1..120: mol_type = other DNA
attaattgtcttaaggaatggcctccagctccatccatgctgctgcaaaggacattatgtcattcttcgtggttgtgtagtattctattccacggtgtatatgtacattttctttttttt

SEQ ID NO: 6827 - DNA, 120 bp, synthetic construct
  source 1..120: mol_type = other DNA
tttagtttaattaaggcttatttggcaatttttggttttgttgcagttgcttttggagtcttcatcatgaagtctttgccagggctgatgctcaaaatggtatttcctaggttttcttct

SEQ ID NO: 6828 - DNA, 120 bp, synthetic construct
  source 1..120: mol_type = other DNA
tcctatttggatgccttttctttctttctctcacttgactgctccaaatagaacttccagtactatgttgaataggagtagtgagagtgggcatccttgtcttgttccagttcctaaaga

SEQ ID NO: 6829 - DNA, 120 bp, synthetic construct
  source 1..120: mol_type = other DNA
tttcaaagaaccaacttttgctttctttgattttttgtacggtttttctcatctccattttgttcagttcagctctgattttgggtattctcttctgctagctttggggttggtttgctc

SEQ ID NO: 6830 - DNA, 120 bp, synthetic construct
  source 1..120: mol_type = other DNA
ctgtccaacttgccactctctgcctattaattgaggcatttagctcatttacattcaaggttaatattgatatgtgcagatttgatcctatcatcatgttgttatttggctgttatgtag

SEQ ID NO: 6831 - DNA, 120 bp, synthetic construct
  source 1..120: mol_type = other DNA
taggaggttaaggtcaccaagcctctagactgtttcgccaggacccaacccaggtctggcttctgtttggttttggagtatgtgttatccccactccatcatgctgcctctccaacctgc

SEQ ID NO: 6832 - DNA, 120 bp, synthetic construct
  source 1..120: mol_type = other DNA
tttagaaatcattccaaatttcatgagggtaaatcaattgtaagggccattaaggttggcaagtggcagaatatggatgcaaacctagggcccttcactcctcctccagtgcactttcca

SEQ ID NO: 6833 - DNA, 120 bp, synthetic construct
  source 1..120: mol_type = other DNA
aagtcctctttcctcacctggagaagaaagaagacagcaaaaaaaattaggtcaaccccacaatcaaggtagagctgctctaaaatctgaggtagccaatgaccaacacaaaccacctca

SEQ ID NO: 6834 - DNA, 120 bp, synthetic construct
  source 1..120: mol_type = other DNA
caccatctaaggcagcaatcctcaaatgctagtgtgcacaaggatctaaggcacttgccgaaaatgtagattcctgcaccaaccccagagaaccagaagcaatccctctagggtagagct

SEQ ID NO: 6835 - DNA, 120 bp, synthetic construct
  source 1..120: mol_type = other DNA
gcatgttgttccttttgtctacagtaccttctacctctggctcaaatgcactctggtcactgatgcacctccagttctcacagcttagtaaattatggtgtagtgatcacgtctatgtcc

SEQ ID NO: 6836 - DNA, 120 bp, synthetic construct
  source 1..120: mol_type = other DNA
tgagttacgggggctgctaaaactctagtaatagcaacagctgtctgccttccattctcctgctatggcacacacttctttccttcagaatcacacccccgagatatatgattcataacc

SEQ ID NO: 6837 - DNA, 120 bp, synthetic construct
  source 1..120: mol_type = other DNA
gaaaagctgacatgaccagaactagaacacagcccagggaatgcaagtctgggtagatcatggtactcgaagcccaaggatcatttgaaagaggtttaaaaaaataaaaaaaggagtaaa

SEQ ID NO: 6838 - DNA, 120 bp, synthetic construct
  source 1..120: mol_type = other DNA
tattgctcaggctggagtacagcgatgcgatctcggctcactgcaatctctgcctcccaggttcaagcaattctcctgcctcagcctcctgagtagctgggactacaggcatacaccacc

SEQ ID NO: 6839 - DNA, 120 bp, synthetic construct
  source 1..120: mol_type = other DNA
agggaagagaaagtgatgttactaaccctccatgtaatgataatctccaaatagctcttcccagcagttccatacttaagggtcaggatctccattcagggatctttctgtggtgctcta

SEQ ID NO: 6840 - DNA, 120 bp, synthetic construct
  source 1..120: mol_type = other DNA
gcaaaaccccatacaaatacaaatacaaaacgttagctgggcatgttggtgcatgcctatagtcctagctacttgggaggctgaggcattagaattacttgaacgcgggaggcggcagag

SEQ ID NO: 6841 - DNA, 120 bp, synthetic construct
  source 1..120: mol_type = other DNA
cgtcaggcactattagggaatgaaaaacaaaaccaatctccatgctaaagtagctctccagtgtagcacagttcagatatgaaaatatcaataatccaacaatactagttaaacatataa

SEQ ID NO: 6842 - DNA, 120 bp, synthetic construct
  source 1..120: mol_type = other DNA
acatctggctattgtagtgtcatggaaactctcctctctggtgaagagtatctagagacacccatgagttttattatctataccctgtactggtttgaacagtgtcccccaaactcatgt

SEQ ID NO: 6843 - DNA, 120 bp, synthetic construct
  source 1..120: mol_type = other DNA
tgacagatgtgacttctgaaattaggccattaaaaacaatgtagctttctccctgctctcgctctcaaatcacttgctctgggggatgctagcagccatgccatgaagacactctaaaag

SEQ ID NO: 6844 - DNA, 120 bp, synthetic construct
  source 1..120: mol_type = other DNA
ctctgtgtgaaggctactaactgctctttcagtaagcttttttctggctgatttggatgcttaatttgcaccaagggaaagcttaatatccctgaaagcagcactcaaccaacggcaaaa

SEQ ID NO: 6845 - DNA, 120 bp, synthetic construct
  source 1..120: mol_type = other DNA
aacttgtatcctaaagatgatatcacatgggcctactgaacactaatcttacgactttttaggaatttagagatgatcactccatgagacactgaaatggtgtctagcttggcaaggtag

SEQ ID NO: 6846 - DNA, 120 bp, synthetic construct
  source 1..120: mol_type = other DNA
atgcaaattcttgaattttcacctgagggaggtgttggaggaataaattgttctacgggacaaaatcaggtgcaatatcaaaattccatgtacccactctagttgactgaatacagtgaa

SEQ ID NO: 6847 - DNA, 120 bp, synthetic construct
  source 1..120: mol_type = other DNA
tcacagccacaccaagcttctagctactgctcagcacacacttaccacctggtttccctgtgcttctcatttgtaattttggattttagtctagttcagacattccttcaattcacatta

SEQ ID NO: 6848 - DNA, 120 bp, synthetic construct
  source 1..120: mol_type = other DNA
tcattcgacatgagatttgggaagggacacaaatccatatcacagactgtataaagaacccctccagtccaggcgtagtggctcatgcctgtaatcccagggctctgggaggccaaggtg

SEQ ID NO: 6849 - DNA, 120 bp, synthetic construct
  source 1..120: mol_type = other DNA
ggacaatatatactatctgatttgtaatcatggaaaatactcagtaaaaatggccaaaattcaaaagtctgaaaataccaagtactgagagaatgtgaagcaatagggactctgcactgc

SEQ ID NO: 6850 - DNA, 120 bp, synthetic construct
  source 1..120: mol_type = other DNA
cattacagacgtgagccaccgcacctggctcgcttccattatatttctattggacagcactgctctggagaaaaattaagattctccttttacaggatatttttaaaaaatatttaaatg

SEQ ID NO: 6851 - DNA, 120 bp, synthetic construct
  source 1..120: mol_type = other DNA
gaacccgattgctgttaataggaagttttttttggtgatgtttcccacccacaattttaatgacttttctatcttaaccaagtgcttaacatgcactgtggctgcaacttttccattttg

SEQ ID NO: 6852 - DNA, 120 bp, synthetic construct
  source 1..120: mol_type = other DNA
taaactttcctagtatctaaagtctggttccaggcctctttcaacttttacaagtaactaaaatttatatacatctctgaaatgccatgccgaaactctttttactatcctaagctcctg

SEQ ID NO: 6853 - DNA, 120 bp, synthetic construct
  source 1..120: mol_type = other DNA
acaagaaggaagtctgctttgggaaagggctgttaccctctttgtttataaactaagtttctcccaaagttagttcagcctacgcccaggaatgaacaagaacagcttggagcttagaag

SEQ ID NO: 6854 - DNA, 120 bp, synthetic construct
  source 1..120: mol_type = other DNA
tttttgcatattcctgtgttgaaaatcctttggtataaatcaacatcaaaactcggtgttattccacttttcttgaactgtaatcctttttaaacaaggaatataccttttcttgtttag

SEQ ID NO: 6855 - DNA, 120 bp, synthetic construct
  source 1..120: mol_type = other DNA
atagttttacctagacagtctcccttttttccttccatattcagcataaaatccccttaatatcagtctctaggcaagcacattcttcacagtccttagaactggacctcctcttgttaa

SEQ ID NO: 6856 - DNA, 120 bp, synthetic construct
  source 1..120: mol_type = other DNA
caaaagtccgcagtccctacacaaacactatctgctcctgcggagaaactcaagtcacagccccagaagtggaaagaacaggccttggctctcacccagttaacaagcgtttatccagcg

SEQ ID NO: 6857 - DNA, 120 bp, synthetic construct
  source 1..120: mol_type = other DNA
gcgcccgagcctggggcctgcgctcgccggccggctccgcaagccgcgtcccagcgccccgcgactgcgtcaccggccccccgcacgtaaccacagctgcctccgcccgcctcgggcccg

SEQ ID NO: 6858 - DNA, 120 bp, synthetic construct
  source 1..120: mol_type = other DNA
agcacatagatctaccaaatttccttccttccagtaggtccctggagaaggatgggggtcgggaggagaaaaggttatggggatagttaaatcaacttacccatggctaaaagtatggat

SEQ ID NO: 6859 - DNA, 120 bp, synthetic construct
  source 1..120: mol_type = other DNA
tctctttctaacaagagaaagcagaggtaagagacaagatagatcaattgggggttgtgtgtcagtttactaacaagaaaaaaaaggttgatggctgggagtcacaagttttgaaaatgg

SEQ ID NO: 6860 - DNA, 120 bp, synthetic construct
  source 1..120: mol_type = other DNA
ggggcacacagtatgtgtgatcagttgtcctctagcctgaaaaagagcaatggtgagaagtgccctaaaatttctctctgacttttgcaatacatgtgagtcttatgggtgaatattggt

SEQ ID NO: 6861 - DNA, 120 bp, synthetic construct
  source 1..120: mol_type = other DNA
aagaagcctggtgagctcaaggtaaaggcaggcaatcccatgtaggctgctctgaagggtatttgcctatgagggaattaactgtacactatttaatccaccagttccggttcattagaa

SEQ ID NO: 6862 - DNA, 120 bp, synthetic construct
  source 1..120: mol_type = other DNA
acattccagatttatagggttgttagggtcttagagttcaggccaaattgggataagtgagacatagaaaagctacgagaaagagacagaaggaaatcctgaggccatctttagtaagat

SEQ ID NO: 6863 - DNA, 120 bp, synthetic construct
  source 1..120: mol_type = other DNA
caccaacattcctcttgtgaccatttgaattctccctccttctccctcatcagactcaatgcccctttaaaaaataatttgtaattatgctgaactgaaaattacaggtaatataaccta

SEQ ID NO: 6864 - DNA, 120 bp, synthetic construct
  source 1..120: mol_type = other DNA
ccccaaccatggaaaacaagaagatgtgcctatttccaaaatatcctcagagtgtgttaacagcttcatcaagaaccactgccctaaaatatagagtgaaaaaaagagaaaagattaccg

SEQ ID NO: 6865 - DNA, 120 bp, synthetic construct
  source 1..120: mol_type = other DNA
tttaactttttattatttgtactttcctttttgtttcgttgttttttgtttgcttgttttgagacagaatctcactcacccaggctggagggcagtagtgatcacagcacactaactcaa

SEQ ID NO: 6866 - DNA, 120 bp, synthetic construct
  source 1..120: mol_type = other DNA
cccagcctttgttaaaccattttcaatgaaactggaagtctgtgttaattcatacatatggtgggtgagagaaaggcttccttataccacactgaccctgctgatacaacatcttccctc

SEQ ID NO: 6867 - DNA, 120 bp, synthetic construct
  source 1..120: mol_type = other DNA
gtttactttcaactcttccttttatgaaagatatctctgagcatgtgatgctgtttaatagcattttactcaccagtagaacttctttgaaaatctttgaaaacccacatttgcagttac

SEQ ID NO: 6868 - DNA, 120 bp, synthetic construct
  source 1..120: mol_type = other DNA
ccatctctacaaaaggtaattttttttaattaaaaacattcagtataccatgctgtatacaggtgtactgtcatgtaggctttgttattccatttctagagcacaaggaaagtagattta

SEQ ID NO: 6869 - DNA, 120 bp, synthetic construct
  source 1..120: mol_type = other DNA
aaatatatttatcgattaagttgttcgtcttatatggatgcagttcacagtgcccccataacgattacaatagtaacatcaaagatcactgatcacagatcatactagatataataatga

SEQ ID NO: 6870 - DNA, 120 bp, synthetic construct
  source 1..120: mol_type = other DNA
gatgtttattaactaatgcaagacaggggataccaaaccgtaacaggaatgtgtgatttgttcctatgccaccagtctggaactctctgtacttatcctcaaggagagtgagatatgtgg

SEQ ID NO: 6871 - DNA, 120 bp, synthetic construct
  source 1..120: mol_type = other DNA
tcagtatccatagagctggaaaagaacttcagcaattttccccgacagtactttgccctaaggaaaatccttaaacagctaattggtgagttgttcccaaaaggaaactagaagaaacca

SEQ ID NO: 6872 - DNA, 120 bp, synthetic construct
  source 1..120: mol_type = other DNA
attattatctgtttactttagggtcagggtgagaagtgagccattgctttctccccttccttaggtgacaccatggattgagaaagttaaccaaaccaggttgttctggggacctttaag

SEQ ID NO: 6873 - DNA, 120 bp, synthetic construct
  source 1..120: mol_type = other DNA
agaaacaccttggtttctaggatggttttgtgtggagggggaggtaggactgggctggatgagagagcacagctgtgacttcctcctaactgtcagggtggggagctggttcccagagga

SEQ ID NO: 6874 - DNA, 120 bp, synthetic construct
  source 1..120: mol_type = other DNA
tatagggaagggccagataggcaacttcatttggcttgtgtgcatctggcctggaactggtgttaagccaggcttttgcttgtttgttgccatccctcaccctttgccatttcccttttc

SEQ ID NO: 6875 - DNA, 120 bp, synthetic construct
  source 1..120: mol_type = other DNA
tcagggttcattgatcttctacccctccaattcatgtccctctgcttctgacttcagtaactgatagtcactatgagtcacaggacaccagacagaagaactggaagatagaagaggtca

SEQ ID NO: 6876 - DNA, 120 bp, synthetic construct
  source 1..120: mol_type = other DNA
cttcctgtaccaggtgagtctgcgacaagggccccacggggacggtgctcggcgtcccagagtgactgctcccctcccgcaggccgcccattgtgtccttgcccaggaccccgagaacca

SEQ ID NO: 6877 - DNA, 120 bp, synthetic construct
  source 1..120: mol_type = other DNA
ctgtcaaagaaatgagagttcaggaggctggagtttgaggtaggagggcaaaacatgagactggagggggaaacaggccagttcttgaagtcttgttagggagtttgaactttatcttaa

SEQ ID NO: 6878 - DNA, 120 bp, synthetic construct
  source 1..120: mol_type = other DNA
gaatgatgccactgctgctgtttttaaacaaggggagaaatatggggcagcggagagtgtttgtatcctctaggcccactcatagtcagaaaagactcaggtcttttcccagtctcaaag

SEQ ID NO: 6879 - DNA, 120 bp, synthetic construct
  source 1..120: mol_type = other DNA
ctgttggggtcacacttgctaatgttcccttggccaaagcaaggcacagtgccaatgccagattcaatgtggaaggggctacactggagtttgaacgctgggaggttcattagttccctg

SEQ ID NO: 6880 - DNA, 120 bp, synthetic construct
  source 1..120: mol_type = other DNA
tcaggatgagcggcagacaaaacagtatctggaatctggttcacttgtgagtctttgtggtttctttatttgttgtgggtttctatcaatatataactctaaagatcacagccctcttcc

SEQ ID NO: 6881 - DNA, 120 bp, synthetic construct
  source 1..120: mol_type = other DNA
atctttttcatcatcccaaacagaaacctgtttccattaaacagtcacttccaatttttccctattccagcccttagcaaccactaatctgtttctgcctttacggatttgtctattctg

SEQ ID NO: 6882 - DNA, 120 bp, synthetic construct
  source 1..120: mol_type = other DNA
atgtataaaagcttttaattttcatgatcttgcagctacttcctcaagaaccaaactgtctctctcagaccttatcttctgcctccatcctgattctttttggagcttgttctaaccctg

SEQ ID NO: 6883 - DNA, 120 bp, synthetic construct
  source 1..120: mol_type = other DNA
ctaggtttgtgtgtatggaaattacctgaggaaagtcaaattttccttcagcttccacagtctatactccctagcaatataccaagttcatctttctttacatgctcagttgattttaac

SEQ ID NO: 6884 - DNA, 120 bp, synthetic construct
  source 1..120: mol_type = other DNA
agtctcctgacaaacagcatgctggaagcatcagcccttcccactgcctttgctttctgttgatgacccattcttcatggagagtggtgtttctcttgtccttaactcaactataacttt

SEQ ID NO: 6885 - DNA, 120 bp, synthetic construct
  source 1..120: mol_type = other DNA
ctccctgttgagtatttaccttctttcaaatgttctgcccataaacaatatgtaaagcttaggtatggctatacatccagcatggatgagtcttcaaaacatactattcagtggctgggt

SEQ ID NO: 6886 - DNA, 120 bp, synthetic construct
  source 1..120: mol_type = other DNA
gatcaaatacttttgcagttaaattttgatggaaaataccagttgcctttcacagaaattacatcaatttactccccatacaaaacaagacacaaaatagtgtctgattaccttaccttc

SEQ ID NO: 6887 - DNA, 120 bp, synthetic construct
  source 1..120: mol_type = other DNA
aactctgcactctccaggtcctaatccaaacaagtacaacaggaggctgagtttgcagtggagagtgaaatagcatgatagttacaaaattgtcaggacttgtatgtggttggatgctat

SEQ ID NO: 6888 - DNA, 120 bp, synthetic construct
  source 1..120: mol_type = other DNA
ggctctgtctgatagctatgttttgtaactatgtgttttatgccttatatttttctcagcacttgaacattgcctggcacataatatttgctccacaaataactgccagaggcatgagtt

SEQ ID NO: 6889 - DNA, 120 bp, synthetic construct
  source 1..120: mol_type = other DNA
ggggctgtagcccagagaaaaccaatcaacctaccaaatagagccccagaaagaaacctcctcctcgcccctccgccttcctctgtgttcctgccgctcctccattccttctttggaaga

SEQ ID NO: 6890 - DNA, 120 bp, synthetic construct
  source 1..120: mol_type = other DNA
aagcagagtcaaaaatcacacgctatgtagtacacaaataaagtggaagctgtcgatacacgtataaatataaaggatttttgcttacacaaaaaatattccaatgtcccaatatgcaac

SEQ ID NO: 6891 - DNA, 120 bp, synthetic construct
  source 1..120: mol_type = other DNA
tcagttcatcgtggcttttgtggagcagggctacacattgtgggtaatctgtggggtttcagttacctattgcaagacattgtttactcttctcactccatgtcctttatatggtgcagt

SEQ ID NO: 6892 - DNA, 120 bp, synthetic construct
  source 1..120: mol_type = other DNA
catcattgcctgtccctgggatttctgccaaaatttcccaacacatttctttgccttcagtcttgttctcctccaaagactgcctgcaaccagagaggtctttgtaaaggaaaatgtcat

SEQ ID NO: 6893 - DNA, 120 bp, synthetic construct
  source 1..120: mol_type = other DNA
gctctgcaaactataagatataaataatttgcctctctataataattttactcacaaattactacctgagtaatctcgttaatcgtccctaatctcatcctaatccccagaaactgtgag

SEQ ID NO: 6894 - DNA, 120 bp, synthetic construct
  source 1..120: mol_type = other DNA
aattatttcatcacccaagtattaagcccagtacccatagggaatttgaggttcacagacacacagaggagaaggtgatgtgaagacagaggcagagattggagtgatgcagccacaagc

SEQ ID NO: 6895 - DNA, 120 bp, synthetic construct
  source 1..120: mol_type = other DNA
tgtggctgatgtttgtaaactgtgttgaacctgtaatgaggccttcatttccctttaggctttggttaaaagtgtgtcacaattgtggatcaatgattaagttaaacttctcatgaagtg

SEQ ID NO: 6896 - DNA, 120 bp, synthetic construct
  source 1..120: mol_type = other DNA
atcttggctcactgcaacctctgcctcccaggttcaagtgattcttctgcctcagcctcctgagtagcccatctaattttgtatttttagtggagacggggtttcaccatgctggccagg

SEQ ID NO: 6897 - DNA, 120 bp, synthetic construct
  source 1..120: mol_type = other DNA
ctttcctaaggagaaaggatggaggaaaggagcctggtctcttcaggatttttttcatatttaggcccttctagcctgggaatgaaaggacaccacacattagtgagcaattatggaggc

SEQ ID NO: 6898 - DNA, 120 bp, synthetic construct
  source 1..120: mol_type = other DNA
gctttcctgaaactggctttgctcttcctcctttcttttctcacagatcctttccttccttctcaaagcactttttgtagtagcttctattcatctggctcatgtatttctttctcacta

SEQ ID NO: 6899 - DNA, 120 bp, synthetic construct
  source 1..120: mol_type = other DNA
gaaaccttgacctattgacagatgtaagagggtggcctttgagagttctgaatccctacctcataggattctggatatctggacactttcttcttacgctgtttctgcatcgaccttagg

SEQ ID NO: 6900 - DNA, 120 bp, synthetic construct
  source 1..120: mol_type = other DNA
gctagtcatatgcaaagattgaaacggggcccccttccttacaccatatacaaaaattaactcaagatagattaaagacttaaatgtaaaacccaaaactataaaaactctagaagacaa

SEQ ID NO: 6901 - DNA, 120 bp, synthetic construct
  source 1..120: mol_type = other DNA
aataccacatattctcacttataagtggaagttagattataacacatggacacaaagaggggaacaacagagactggggcctattggaggctgggaggagggcaaggattaggaaaaata

SEQ ID NO: 6902 - DNA, 120 bp, synthetic construct
  source 1..120: mol_type = other DNA
tgtaacaaattactgctatgaagtggcttaaaacaacgcaaatttattatcttacagttctggaggtcagaagtctgatatgggtctctctggcctaaaataaggggtcatcagggctgc

SEQ ID NO: 6903 - DNA, 120 bp, synthetic construct
  source 1..120: mol_type = other DNA
gccaccgcgcccggcctacctttctattatcttaaagtctccaaatggtaccaccatctcaaggtgcaatggctgtaatttaagcaacgactttgcgggggtgatggagggagacaaaaa

SEQ ID NO: 6904 - DNA, 120 bp, synthetic construct
  source 1..120: mol_type = other DNA
ggcttctttcacttaccgtaacattttcatggttcgtctgggttgtagcatgtggcagtacttcacgtcttttttattactgaataatatttcattgtatggatatatcacaatttgcct

SEQ ID NO: 6905 - DNA, 120 bp, synthetic construct
  source 1..120: mol_type = other DNA
tgcaactctcacagggactttgtgaaattatgctggcaagtaaaagtcagcttctgacatttactactttgtctcacagtgtgaaatactatcgcattgtagggccgatttgcattttcc

SEQ ID NO: 6906 - DNA, 120 bp, synthetic construct
  source 1..120: mol_type = other DNA
ttttatatatagtttcaagattttcatttttcatttttcattcattgatactgtatagaaacacaattgatttttatattttgattttgtatcctgccaatgtgataaaattctttagtt

SEQ ID NO: 6907 - DNA, 120 bp, synthetic construct
  source 1..120: mol_type = other DNA
acttcttgtcaattctcaagtgtcagcagccacctctagttgcaacagagtggactttgcttaatcttattgccctctcaacctctctagggcattctataggtagaatcctcctttttg

SEQ ID NO: 6908 - DNA, 120 bp, synthetic construct
  source 1..120: mol_type = other DNA
tatttttaggccttatttatttattagtaaaaaaaaaaacagaataatgagttcttctctgacaactgtacaggattgtaaggatcaagtgtgtttatgtgtatgaagcaccatgaatat

SEQ ID NO: 6909 - DNA, 120 bp, synthetic construct
  source 1..120: mol_type = other DNA
agttttaacattattgagccttactattattgaaataattcttttcccaaaacaccagactacactcaaactccagaagatgcccctaaccaagactaatattctgacatcaaaggaaat

SEQ ID NO: 6910 - DNA, 120 bp, synthetic construct
  source 1..120: mol_type = other DNA
catgccaagactggcctaaagtcgtgtcttctgctcaaacaggtccttctatggcaatgaccatgaaatacatggctaataaagtattaggggcaggaagagggggaagaagaatgcagt

SEQ ID NO: 6911 - DNA, 120 bp, synthetic construct
  source 1..120: mol_type = other DNA
aagcctgttttttaatcacaggaagcagggctattttatgtcttattcttattattctgctgtatggtgtttctgcttgatctttcatggtgacttgtatcttgtaaatagttttgttgt

SEQ ID NO: 6912 - DNA, 120 bp, synthetic construct
  source 1..120: mol_type = other DNA
ggatttaccggtggtaataagaatactaggaatatagtacatattatgaggcaacttagctggccttgctaaggaccagctcaggtctgatactgtatgtatatacagtatatatatcca

SEQ ID NO: 6913 - DNA, 120 bp, synthetic construct
  source 1..120: mol_type = other DNA
tggggttacaaacagaaggcctcaacttacttcaatttgaaaaacctgaacaaggaatctctggtgtctggatccttatttgtctcacaaaattgaattgtgagctgtgacattttctcc

SEQ ID NO: 6914 - DNA, 120 bp, synthetic construct
  source 1..120: mol_type = other DNA
tggtgagacctcaggagccttttactcctggtggaaggggaagggggaccaggcatgtcacatggcaaaagaggaacagggtgggaggagccagattcttctaaacaaccaactctcttt

SEQ ID NO: 6915 - DNA, 120 bp, synthetic construct
  source 1..120: mol_type = other DNA
tttctaaagagtgaatagaagtaattgcagcagagaaatgaaaactatagatggtactaagtggaaattctcaaactggatagaaaaataatgacagtgctctggatgaggtcaacagaa

SEQ ID NO: 6916 - DNA, 120 bp, synthetic construct
  source 1..120: mol_type = other DNA
attttcttaaaagagagcaggagtggctattcttatacaaaacaaaaacagactttaaagcaacaacagtaaaaaaaaaaaaaaagacaaagaaggacattatataatgatagaatgata

SEQ ID NO: 6917 - DNA, 120 bp, synthetic construct
  source 1..120: mol_type = other DNA
cgaggttgcagtgagctgagattgcgccactgcactccagcctgggcaacagagtgagacttcatctgggaaggaaaaaaaaaatctgaataagcacaaattgaaaacctaatgtcacac

SEQ ID NO: 6918 - DNA, 120 bp, synthetic construct
  source 1..120: mol_type = other DNA
ttgataaaatctagcattgctttatgataaaaaccttcaacaaaataggcatagaagggacttacctcaaagtcatgaaagtcatatatgacaaactcacagccaacatcatagtgaatg

SEQ ID NO: 6919 - DNA, 120 bp, synthetic construct
  source 1..120: mol_type = other DNA
agaggcagacaaatcacctgaggtcaagagttcgagactagcctagccaacatgataaaacaccatctctactaaaaatacaaaaaaaattatctgggcgtggtggtgggcacctgtaat

SEQ ID NO: 6920 - DNA, 120 bp, synthetic construct
  source 1..120: mol_type = other DNA
tttttaaaaaccacagtagatgtttgtgtggatgtggtgaaaagggaacacttttgcactgctggtgggaatgtagattagtaaaaccactttggaaagcagtatggacattatttaaag

SEQ ID NO: 6921 - DNA, 120 bp, synthetic construct
  source 1..120: mol_type = other DNA
gatagaaatttatgagctgatttacaaatttatatgaaaacataaaaggtctagaataactcatgcaatttattttttaaaaattttagagaaagagtctttctatattaccccatgttg

SEQ ID NO: 6922 - DNA, 120 bp, synthetic construct
  source 1..120: mol_type = other DNA
cttctgggaatcgggtccccatctctagaatcatcaaggtgatgactggtcctttattttcacaagtgctttacgttacagaaatttcagcaagcagggactatgactgggtaagcatga

SEQ ID NO: 6923 - DNA, 120 bp, synthetic construct
  source 1..120: mol_type = other DNA
atctctttggcatccacaaacacagaaatgtacaaacactttcccataatcaacctcaaagacatgtaaacagttgatggacaaaatagtaacaatgtgttaatacccttcagcccaagg

SEQ ID NO: 6924 - DNA, 120 bp, synthetic construct
  source 1..120: mol_type = other DNA
gtggactagagtgcagataaagcttaatccgtagagaagcatcagccactcatactagccgggagagggtttagacaaaattatgaagtacttttgtttcgcctcactttctcatgggct

SEQ ID NO: 6925 - DNA, 120 bp, synthetic construct
  source 1..120: mol_type = other DNA
tcttttaggaatttatcccaaggaaataattacatatctttctaaaaacgcatatataggccgggcgcggtggctcatgcctgtaatcccagcactttgggaggccgaggcaggtggatt

SEQ ID NO: 6926 - DNA, 120 bp, synthetic construct
  source 1..120: mol_type = other DNA
aaaaattgccccaagattgtgaaattgctaatgagcgtaagggaaaagtttgtgatatcatgaaagcaggttacaaggagacctaatgggtccctaccactattaccaattatgtgtgaa

SEQ ID NO: 6927 - DNA, 120 bp, synthetic construct
  source 1..120: mol_type = other DNA
cctctccattaaacatgtcttctccacgtgcagaaaatgtggtctcgtagcttcccttctcagtgctggattgctggcatttcattttccttatcagagacatgaatatctttgttcttc

SEQ ID NO: 6928 - DNA, 120 bp, synthetic construct
  source 1..120: mol_type = other DNA
gggtatgtagtgagtgacagacacaggataaatgctgtaagtcagtgtttgatgaaagatactggtgttccaggatgtcagagtctcctgggtgccagtagggaggtggtcagggacttt

SEQ ID NO: 6929 - DNA, 120 bp, synthetic construct
  source 1..120: mol_type = other DNA
accaagttgctgctatgaaaagggatttgaaaattcccagaggagcctttcagcctctttccatggctctttatgccctttcaaaggcacagccagagacatcagaaatgaaattgtata

SEQ ID NO: 6930 - DNA, 120 bp, synthetic construct
  source 1..120: mol_type = other DNA
aaatggaccataagagaagggggcaaggggggagaaagagagtgaaaggagccagggaggagagaaaaatggaaaacatcctgttaggaatgtgtgtgtttgtgttgatgtgtgtgcgtg

SEQ ID NO: 6931 - DNA, 120 bp, synthetic construct
  source 1..120: mol_type = other DNA
gttttgatttgcatttccctgatgataagtgatgttgagcatttttcatgtacctgctggccatttgtatgtcttcttttgagaaatgtctattcatgtcgtttgtccactttttaatag

SEQ ID NO: 6932 - DNA, 120 bp, synthetic construct
  source 1..120: mol_type = other DNA
attaggaggataaccttaaaacatttgagcaagaaaatttttctttttttcttttttctttttttttagctgtacctgctggaatggaaaatatttcttaaatgagacaaatatatgaaa

SEQ ID NO: 6933 - DNA, 120 bp, synthetic construct
  source 1..120: mol_type = other DNA
ctatgataacaatgccttcttctggaatacctcctaaaggacctggccgaggctgtttcaagtttttttaataattagaaggagcacactctaaaataacaataaaaagtatagtaaata

SEQ ID NO: 6934 - DNA, 120 bp, synthetic construct
  source 1..120: mol_type = other DNA
acacaacttcatgacaataccttttaaaatttaggtgcaatgaaatgagttcttgaaaaacacagttgaacaaagccaacagaaaactaagtagaaaatataaatagtcctctatccatt

SEQ ID NO: 6935 - DNA, 120 bp, synthetic construct
  source 1..120: mol_type = other DNA
gaactgcaatatcagtcaactgacccacaaagagctggttggtttgtgtacagcatttgcaagatgagtggacaacatcctgtttggaagtctacccctttgatcaaagaagttaaaaac

SEQ ID NO: 6936 - DNA, 120 bp, synthetic construct
  source 1..120: mol_type = other DNA
agagacagagacagcatatggctatgtagcaaattctctcatgggaaggtcttgaaaatagatagctggcaaattagactgataccagtacccctaggaggcagcaaatgggtcttggca

SEQ ID NO: 6937 - DNA, 120 bp, synthetic construct
  source 1..120: mol_type = other DNA
gcactataatagaacctggacgggagatattgcaaccatttgcatcactgagtcacatttcttcacaccaggaaacacatttgcccaaaatgtccaacaatgttcagaaaaatattttgc

SEQ ID NO: 6938 - DNA, 120 bp, synthetic construct
  source 1..120: mol_type = other DNA
gtcgtgtgctcagagtgcttccagatgtcgcctcctgcacttcatctgcctgctcatttgtatcctttacaactgctattgtttgaatgtttccccagaaaagcgtctgttggaaactta

SEQ ID NO: 6939 - DNA, 120 bp, synthetic construct
  source 1..120: mol_type = other DNA
cacatatctccccaagtggcctccctcacaatctgctcacaatgtaattccttgtgggccccaacatctttaccctaaaacagagttttgttgacttttcccctgacaatgtaaagtaac

SEQ ID NO: 6940 - DNA, 120 bp, synthetic construct
  source 1..120: mol_type = other DNA
cttatgatttgccacaattgaagcctgccagtaacaatatgaacctgtgatcaattaagcagctgaccaatcattacctcctcctccttgcccttattacccagtaaatatgaagggcta

SEQ ID NO: 6941 - DNA, 120 bp, synthetic construct
  source 1..120: mol_type = other DNA
ctgtgcatctggaaaagtcacagacactcagcgccagactgtgaaagcagccaggagggaacatataccctgcaaagccacaggggcagagctgcccaagatatggggacctacctcttg

SEQ ID NO: 6942 - DNA, 120 bp, synthetic construct
  source 1..120: mol_type = other DNA
cctagactttcctatattagaaggattttgattacaaattcaatttctacaatcaatatatggctgaccacattttctatctcttctcaggtcagttttcataagttttccctctcaagg

SEQ ID NO: 6943 - DNA, 120 bp, synthetic construct
  source 1..120: mol_type = other DNA
accagggcaggggatacagagcgtaaggaagtctggccttgaaagcagggaacaaagagccaggatgctgagcaagttaacccttaaagaggaactctttttatatctaacactacttca

SEQ ID NO: 6944 - DNA, 120 bp, synthetic construct
  source 1..120: mol_type = other DNA
tcttcatgaactctaaagatttgctattggatccatttctggttgcatgtctttctgttgattttacccttttgttattatgaagcgcctctttttctctctggtaatacatattatttg

SEQ ID NO: 6945 - DNA, 120 bp, synthetic construct
  source 1..120: mol_type = other DNA
ggctccttggtctggcggtaacgccagtgcctgagaaggcacccatcactcagcagatcgggaaagggagtctccctttgcccgggggagttagagaagcctctgctccaccacctcttg

SEQ ID NO: 6946 - DNA, 120 bp, synthetic construct
  source 1..120: mol_type = other DNA
aaccagagaaacaaaataaactagaataacatctttaaagttctggaagaaataaaaggtcaactaagaattctatatccagtacagatgtccttcaagataaatgcaaaataaggagat

SEQ ID NO: 6947 - DNA, 120 bp, synthetic construct
  source 1..120: mol_type = other DNA
acattgatgtaataatcctcaacaaggtacttgcaaaccaaatccagcagtccatcaaaaagctaatctcaatgatcaagtaggcttcatatccaggatgcaagattggttcaacacgtg

SEQ ID NO: 6948 - DNA, 120 bp, synthetic construct
  source 1..120: mol_type = other DNA
taaattactacaaaactgtcaacacttagccacttctgcttcctcaggaaggtcggggcagcagatctgtgtgttaaatatctatgtgaagttatttccaggaagaagtttcatctgtgg

SEQ ID NO: 6949 - DNA, 120 bp, synthetic construct
  source 1..120: mol_type = other DNA
ggctttcctctcccccatttcactagagtcactcccctgccagctctgtcctgggaaaccctctctgtgctatggatgcaggcgtttcctgttggcgtattgtgtcctgactttcctctc

SEQ ID NO: 6950 - DNA, 120 bp, synthetic construct
  source 1..120: mol_type = other DNA
tttttttcagggaaagccctgatgcttcagagtctatggcaaccgttccgtatgttgcggctgctgctgtttttgttatcattattattattctctgtgtcctttggtgcaagaagaaaa

SEQ ID NO: 6951 - DNA, 120 bp, synthetic construct
  source 1..120: mol_type = other DNA
ggcagctgtcatccctgttttcatcctacttctaggtgtttccttgtccaggccctgaaggacacagtccctcagggacacagtgctcagggaccatgttttttgggctttgttctgtgc

SEQ ID NO: 6952 - DNA, 120 bp, synthetic construct
  source 1..120: mol_type = other DNA
gtgagggcagtggcctgggtggaagccctgctaggaacagggcaggaaggtcttgcagcctcagcaagcagcagccctggggtggaggtgcatttccaggggtgagtggaccaggcagga

SEQ ID NO: 6953 - DNA, 120 bp, synthetic construct
  source 1..120: mol_type = other DNA
ccaggtctcaccagcactttccctcttgatgcctcagtttcctcatatattaaatgggaaactaacagcacttatttcttgtggtcagggattgacaactgttagttgctatgaggtgtt

SEQ ID NO: 6954 - DNA, 120 bp, synthetic construct
  source 1..120: mol_type = other DNA
ggagatggatattccccaccctgttgctcaatccttcctgactgctgggtgcaccaaaatctcagaaatcaccactaaagaattaattcaggtaaccaaacaccacccacccctaaaaac

SEQ ID NO: 6955 - DNA, 120 bp, synthetic construct
  source 1..120: mol_type = other DNA
gatagtctgccctccatgtctgtgtgtttcacatctgtgaatttaactacctgaggatcgaaactgttgttgctgctgatgtatactatgtagttaggcctacctacagcggttacatct

SEQ ID NO: 6956 - DNA, 120 bp, synthetic construct
  source 1..120: mol_type = other DNA
tggaatacttagtctgattttatctctacttgttgcattttctctgctgcttggcatgccacatattctggatgatgtgttatagaggctctggattttgccatcttcctccacagactg

SEQ ID NO: 6957 - DNA, 120 bp, synthetic construct
  source 1..120: mol_type = other DNA
aacatacgtgtacatgtgtctatatagcagcatgatttatagccctttgggtatatacccagtaatgggatggctgggtcaaatggtatttctagttctagatccctgaggaattgctac

SEQ ID NO: 6958 - DNA, 120 bp, synthetic construct
  source 1..120: mol_type = other DNA
ggctgggctaaattaattccaatatctcctcacactatgaagcctttggcatttctacatagcatgcaatccccaagcagctgttctctggtgggcttcttacagtatcacctggagcat

SEQ ID NO: 6959 - DNA, 120 bp, synthetic construct
  source 1..120: mol_type = other DNA
ttatgtatttactatactttttatggtgattttagagtgtgctctaattattttttaagttaaattaaaacagcgtcaggcaggtcctttaggaggtattccagaagaaggcattgttat

SEQ ID NO: 6960 - DNA, 120 bp, synthetic construct
  source 1..120: mol_type = other DNA
actgaaggagagagagacacacaaaacccttcaaaacgttaatgaatctaggagctgtttttttgaaagaattaataaaatagaacactatctagactaatagagaagaagagagagaag

SEQ ID NO: 6961 - DNA, 120 bp, synthetic construct
  source 1..120: mol_type = other DNA
atgagaacagcagtttcttaagctgataaggaacttcagcaacgtctcaggatacagaatgtgcaaaaatcgctagcattcctatataccaacaacaggcaagcagagagccaaatcatc

SEQ ID NO: 6962 - DNA, 120 bp, synthetic construct
  source 1..120: mol_type = other DNA
aattccctatttaataaatggtgctgggagaactggcttgccatatgcagaaaattgaaactaggcccgttccttaaactatatacaaaaattaattcaagatggattaaagacttaaat

SEQ ID NO: 6963 - DNA, 120 bp, synthetic construct
  source 1..120: mol_type = other DNA
aactgacccaggaacagaaaacaaaacaccatgtgttctcacttataagtgggagctgaatgatgacaacacatggatacatgggggagaacaacacacactggggtctgttagagggca

SEQ ID NO: 6964 - DNA, 120 bp, synthetic construct
  source 1..120: mol_type = other DNA
catgtctgagttattgttcaccttcctataagcctccctgtgttcagccatacagaagctctctgactcttcccttttgggttttgatggaagccatatttcttaggcatgattcattac

SEQ ID NO: 6965 - DNA, 120 bp, synthetic construct
  source 1..120: mol_type = other DNA
gcctctgtagactccaccgctggaggcagggcatagccgaacaaaaggcagtagaaacctctgcagacttaaatgtgcctgtctgacagctttgaagagggtagtggttcttccggcatg

SEQ ID NO: 6966 - DNA, 120 bp, synthetic construct
  source 1..120: mol_type = other DNA
gagaaaggttgggttacccacaaagggaagcccatcagactaacagcggatctctcagcagaaactctacaagccagaagagactgggggccaatattcaacattcttaaagaaaagaat

SEQ ID NO: 6967 - DNA, 120 bp, synthetic construct
  source 1..120: mol_type = other DNA
gcaccacaccgcacttattccaaaattgaccacatagttggaagtaaagcactcctcagcaaatataaaagaacagaaattataacaaactgttgctcagaccacagtgcaaccaaacta

SEQ ID NO: 6968 - DNA, 120 bp, synthetic construct
  source 1..120: mol_type = other DNA
catgattatctcaatagatgcagaaaaggcctttgacaaaattcaacagcccttcatgctaaaaactctcaatacactagatattgatgaaacgtatctcaaaataataagagctattta

SEQ ID NO: 6969 - DNA, 120 bp, synthetic construct
  source 1..120: mol_type = other DNA
tcatgactaaaacaccaaaagcaacggcaacaaaagccaaaatagacaaatgggatctaattaaactaaagagcttctgcacagtaaaagaaactaatatcagagtgaacaagcaactta

SEQ ID NO: 6970 - DNA, 120 bp, synthetic construct
  source 1..120: mol_type = other DNA
aatgggtgcagcaaaccaacatgtatacctatgtaacaaacctgcacattgtgcacttgtactctagaacttaaagtataataaaaataaataaataaaattaaaaaggaaaaaatatat

SEQ ID NO: 6971 - DNA, 120 bp, synthetic construct
  source 1..120: mol_type = other DNA
attgttgcaaaaatcctcaacaaaatactagcaaataaaaatcgacaacacattaaaaagatcattcctcatgaccaagtgggatttatcctagggatgcaaggatggttcaaaatatgc

SEQ ID NO: 6972 - DNA, 120 bp, synthetic construct
  source 1..120: mol_type = other DNA
gcagcggtgagctgtgttcataccactgcactccagactgggcgacagagcaagaccctgtctcagaaaaaagggaaaccctggacattcctacacctgaggcctcttcaatggctgctg

SEQ ID NO: 6973 - DNA, 120 bp, synthetic construct
  source 1..120: mol_type = other DNA
tccatccagcctagtggagcatagtgtgggctagataaggatgatatgaaataatgaatgcaaaacaccagcacaggaagcggaatatggcacatgtgcaaaacactgcccattccttgt

SEQ ID NO: 6974 - DNA, 120 bp, synthetic construct
  source 1..120: mol_type = other DNA
aattcctcagggggctgtttctcactttgttctctgccctcacatccctccactccttccacactccctatttttaggttatacatttatttctctttcacgcaggaaaaaaaggaggac

SEQ ID NO: 6975 - DNA, 120 bp, synthetic construct
  source 1..120: mol_type = other DNA
gctcttcttctatcttcaatgtctagctaatatcttgattcaccttgaaatatacaccggatgatggactttagtgtggtgtgggcagtgaagtcacacatgcccttttgtcctcccgag

SEQ ID NO: 6976 - DNA, 120 bp, synthetic construct
  source 1..120: mol_type = other DNA
cttttatgacagtaaatttcccctattctccactcaatattattatctttgactttcatctttgccaagctaagatatattaaacttccatcccatttcctaatccacattttaattttg

SEQ ID NO: 6977 - DNA, 120 bp, synthetic construct
  source 1..120: mol_type = other DNA
aatccttcttcactgcccaattgtagacacttcatgtattgttccagctaggttgtgacaatgaggaaagaggagtccaagggtgaagaaaacaaaattgttggaatacaaggggaggag

SEQ ID NO: 6978 - DNA, 120 bp, synthetic construct
  source 1..120: mol_type = other DNA
ggattttatcgaatactttttctgcattttattgaaacgattatttcagagagagagagagagagggagggagggagggagagagagagagagagagatggggtgaaggaacaggctggg

SEQ ID NO: 6979 - DNA, 120 bp, synthetic construct
  source 1..120: mol_type = other DNA
ttcaacagtttaaaaaaatcaataaaataggaaagtggacaaaacacatgacaaatatttcttttaaaatgatatgtagatgggaagtgaggacacaaaaatgtggtccatatgcggagc

SEQ ID NO: 6980 - DNA, 120 bp, synthetic construct
  source 1..120: mol_type = other DNA
ctgcatatattttatatctcacaaaaaaagaaaagagatcagactcctcccagaaaaacaatgaaagaaggaggtgtcacaccaagatcagtcaaacctccttcctacatttgtaaatcc

SEQ ID NO: 6981 - DNA, 120 bp, synthetic construct
  source 1..120: mol_type = other DNA
atgtttggccaaatatctgggctccttcgtgacccagtcatgttgagaaatcaaattaatcctcacaaggaacaaatcagataatattcacttggatattagactagagccttggacata

SEQ ID NO: 6982 - DNA, 120 bp, synthetic construct
  source 1..120: mol_type = other DNA
aaagacttcttcggacatgactagaacccaagaggtgggtacctggtagagttatatgggaagaatggagcaatgggtttggcagttggggtggggaaacagggaggaagggaatgaaaa

SEQ ID NO: 6983 - DNA, 120 bp, synthetic construct
  source 1..120: mol_type = other DNA
attttctcccaatagcaaaggtgaaggatgtactcggagaggagggaacataccaagaagagaaggaaggaatatatattgaaaagaatacaaaacaaaaataaacagaccaagacgtgg

SEQ ID NO: 6984 - DNA, 120 bp, synthetic construct
  source 1..120: mol_type = other DNA
gatccccctcaacaccatcctttctggaagtgttattctgaacatgttctcggatttgtttttatcagtggagaaagagaggatagaagagcactcacccagcagagccagagggaggca

SEQ ID NO: 6985 - DNA, 120 bp, synthetic construct
  source 1..120: mol_type = other DNA
ggggaacacttttgatccagacgctttgacaacctcgttcagtctcctctggagagagccgccaaaccctttgctgatgagctgagactgaccggggaactgtgatctcggatgtggttg

SEQ ID NO: 6986 - DNA, 120 bp, synthetic construct
  source 1..120: mol_type = other DNA
cttgacagcgcccagagtccgcggcttccatccagtcccctcttcccctgcgaggccgagagggtgcagagctggtggcttcaggaggtggctgtgagcgcgggtctggggccaagagca

SEQ ID NO: 6987 - DNA, 120 bp, synthetic construct
  source 1..120: mol_type = other DNA
ggtcgcttgcactttgcagcaaactggagagtgagatgacaggcaaggagtactggccctcacatggaaacctatatcacactgcccaaagggaataggaaaggaaccacagcgaggtcc

SEQ ID NO: 6988 - DNA, 120 bp, synthetic construct
  source 1..120: mol_type = other DNA
gggtcacgcagacctgggaaccagatcttagggcctgcagacctccctctgccttgagatcagactccaccgccagtaactgggaggaaacatctgtactccaggatttagagacaccga

SEQ ID NO: 6989 - DNA, 120 bp, synthetic construct
  source 1..120: mol_type = other DNA
ggttatgggtgtttagatgaggtgaagtgctattctccaaacaccttatcaaggttatagaatatcaatttcatgtaccactgttgatgttgaagttgatcacctggtatattagcttcc

SEQ ID NO: 6990 - DNA, 120 bp, synthetic construct
  source 1..120: mol_type = other DNA
gcagcgtgccagtctcaagaaaattctggagaaaatggtgacaggatagacaattagatcacaggctgcctgcacatcaagtaaaaacaaaaatcctatgctaggcacacactattaaaa

SEQ ID NO: 6991 - DNA, 120 bp, synthetic construct
  source 1..120: mol_type = other DNA
aaatctacttgagtagactttaattccaagtttgtgaatagcttttcttcaaaacatgctgaacttggtaaaagagccagcaatttagggaaactatgtgcacttctgatcttgtccatt

SEQ ID NO: 6992 - DNA, 120 bp, synthetic construct
  source 1..120: mol_type = other DNA
ctgaatctaatacctgtctctgtataggcaaaactgttgatattggcaaactttataatatacctcctataaaaatccagcttgatccatcaaaacccctgcctaatatcaaacaatatc

SEQ ID NO: 6993 - DNA, 120 bp, synthetic construct
  source 1..120: mol_type = other DNA
caaggccagctgcagtggctcatgcctgtaatcccaggacattgagaggctgaagtgaacagatcatttgaactcaggagtttcagactagcctgggcaacatggcaaaacccagtctct

SEQ ID NO: 6994 - DNA, 120 bp, synthetic construct
  source 1..120: mol_type = other DNA
acataccccaacactggagcacccagctgtataaagcaattattattagagctaaagagaaagatagatctcagtacaatcatagccagagacttcagcagcccccgtttcagcatagga

SEQ ID NO: 6995 - DNA, 120 bp, synthetic construct
  source 1..120: mol_type = other DNA
aatcaggtgccagttcttttctactgtgtgtctagtcacattggtgtagacgtccaggcaggaggagaagcaagttgtaggatcagctacatctgggcttccaaaggtaatctcaggtgc

SEQ ID NO: 6996 - DNA, 120 bp, synthetic construct
  source 1..120: mol_type = other DNA
acaagaacaaaaaaaataccaagatatgggatgtatgaaatcaggcatcaacccatgaaaaggtgaaagggcaacaggaccagaaaggaagagggtcacctgggtgggtggacagcagag

SEQ ID NO: 6997 - DNA, 120 bp, synthetic construct
  source 1..120: mol_type = other DNA
gcaaattgtctctaaattcatccaagggagtggagttccttcccctactccttatccccttccacaccatcctttctggaagtgttattgtgaacatgttctcggatttgtttttatcag

SEQ ID NO: 6998 - DNA, 120 bp, synthetic construct
  source 1..120: mol_type = other DNA
cgtggacaccactccatccgacatggcaacacttttgatccagccgctttgacaacctcgttcagtctcctctggagacagccacccagacctttgctgatgagctgggactgaggggaa

SEQ ID NO: 6999 - DNA, 120 bp, synthetic construct
  source 1..120: mol_type = other DNA
gccagccgcgcctcgggtccaggcctccctgtgtccacatctggtctcccggcttttcacaacagtgaccttgacagcgcccagagtccgctgcttccgtccagtccgctcttcccctac

SEQ ID NO: 7000 - DNA, 120 bp, synthetic construct
  source 1..120: mol_type = other DNA
cattcagcctgggctccctggaacctgctaccctgcccaggagctgtcaacacctggagtgcagtgcaggaagaatgcaggggcgcttgatggggaggtgagtgagtgcagatggggttc

SEQ ID NO: 7001 - DNA, 120 bp, synthetic construct
  source 1..120: mol_type = other DNA
tttcctaaacacacacgtggttctgtcctggccagatcagtggacttccagtgtccttcctgagtcacaccgaggtgaattgcatagaccagaaacccacattttaaaaagaataaaata

SEQ ID NO: 7002 - DNA, 120 bp, synthetic construct
  source 1..120: mol_type = other DNA
agaaccacaggcatgcgccacctcgcctggctacattttttttttttttttttttttttttttttttttttttttttgtatttttggtagggacgggctttccccgtgttgtccaggctg

SEQ ID NO: 7003 - DNA, 120 bp, synthetic construct
  source 1..120: mol_type = other DNA
accaaacaaggaaatcttttctctaacgttcttcctgatgactctagaaacccaactgaatggaatccatctggcacattcaagttggcctcctatttttaataactgtattgaaaaaca

SEQ ID NO: 7004 - DNA, 120 bp, synthetic construct
  source 1..120: mol_type = other DNA
ttatgaggaaaactacagcaataatctcttctgtaacttttattaatagtaatgttagactcagaaatggtggcctccatgttcttccgcccgctgttggtggccgccacccttcggacc

SEQ ID NO: 7005 - DNA, 120 bp, synthetic construct
  source 1..120: mol_type = other DNA
ttgactctaattcagcctatcgccaaaagaaaatgtttgatctacaggactggacccaggaagatgaaaggaacaaagatgctgctaaggcagatctcaactacactggcctcgatggaa

SEQ ID NO: 7006 - DNA, 120 bp, synthetic construct
  source 1..120: mol_type = other DNA
gataaagctttattcttcagtgttaacatacagtatatctaataactagcctcattagtagaccagtatattaaaacactgttttatgtaaaaagtgtttatcttcagcaccaaatacat

SEQ ID NO: 7007 - DNA, 120 bp, synthetic construct
  source 1..120: mol_type = other DNA
ttagccgggatggtctcgatctcctgacctcgtgatccgcccgcctcggcctcccaaagtgctgggattacaggcgtgagccaccgcgcccggcctgaaggacacccttagagaagtgca

SEQ ID NO: 7008 - DNA, 120 bp, synthetic construct
  source 1..120: mol_type = other DNA
ggcatgagccactgtgcccagcggaaagataaagtatttttcatacaaacaaatgctgagagaatttgccactaacaagccagcactataagaactactaaaagatgttctaaatcttga

SEQ ID NO: 7009 - DNA, 120 bp, synthetic construct
  source 1..120: mol_type = other DNA
agccctcaaaaccatgcacatacgtggaaattaagtaacctgctcctgaatgatcaatggatcaacaatacaatcaagatggaaatacaaaaattctttgaactggcctgtgtggtggct

SEQ ID NO: 7010 - DNA, 120 bp, synthetic construct
  source 1..120: mol_type = other DNA
gattgaaatggtaatttaggctctacctctccccctccccctccccctccccctccctctccctctccccacagtctccctctccctctctttccacggtctccctctgatgccaagccg

SEQ ID NO: 7011 - DNA, 120 bp, synthetic construct
  source 1..120: mol_type = other DNA
cccggccagccgccccctccgggagggaggtgaggggctcctctgcctggccgcccctaatgggaagtgaggagtccctctgcccggccaccaccccgtctgggaggtgtacccaacagc

SEQ ID NO: 7012 - DNA, 120 bp, synthetic construct
  source 1..120: mol_type = other DNA
aaaagcccagaaccagatggatgcacagcggaattctatcagacattcaaaaaatggtacctataccactgacactattccaaaaggtagagaaagagggaatcccctctaaatcattct

SEQ ID NO: 7013 - DNA, 120 bp, synthetic construct
  source 1..120: mol_type = other DNA
caggaggcgggtgagcggagatcgtgccactgcatccagcctgggccacagagcgagactccatctcaaaaaaaaaaaaaaaaaaaaccctcagcaaaatcagcatagaagggacatacc

SEQ ID NO: 7014 - DNA, 120 bp, synthetic construct
  source 1..120: mol_type = other DNA
aaccaagtacttatagtcaaccgaacttcaacaaagcaaacaaaaacataaactggggagaggacaccgtattcaacaaatggtcctgggttaattggcaggccatatatagaagaatga

SEQ ID NO: 7015 - DNA, 120 bp, synthetic construct
  source 1..120: mol_type = other DNA
cgtggaatactattgagccataaaaaggaatgaaataatggcattcgcagcaacctggatggaaatggagaccattattctaagtgaagtaactcaggaatggaaaaccaaacatggtat

SEQ ID NO: 7016 - DNA, 120 bp, synthetic construct
  source 1..120: mol_type = other DNA
atagatataaacataagagctaaagttgccagccttctaaaacagtgctacgcaataggctataatatgagtcacaaatgtgagccacatcggtaatctttaattttctggtagccacat

SEQ ID NO: 7017 - DNA, 120 bp, synthetic construct
  source 1..120: mol_type = other DNA
gcgcctgacgaaaagtagatgctcaaccaacagttaggggctgaataaatctagagaccagaacctcttaaagttgagtctggggctgacaggtcggtattttcccaatatatgattttt

SEQ ID NO: 7018 - DNA, 120 bp, synthetic construct
  source 1..120: mol_type = other DNA
caaaaacactgagaggctgcgtactgggagcacagtatgtctgtggggtccacccagacctgggaaccaggtcttagggcctgcagacctccctctgccttgaggtcagagtccactgcc

SEQ ID NO: 7019 - DNA, 120 bp, synthetic construct
  source 1..120: mol_type = other DNA
tttttgatgcctttcacaatatcgggaagtactgaccagatatattgtaaaatatccctcaaactgaatttagttggggtgtagatcatggttagactatggttatggatgtttagatga

SEQ ID NO: 7020 - DNA, 120 bp, synthetic construct
  source 1..120: mol_type = other DNA
ttatctgttgtcaggataaactggtacatgaataaacaaaattgccattaggggtcgcaccagtctcaagaaaaatctggagaaaatggtcacaggatggacaattagatcacaggctgc

SEQ ID NO: 7021 - DNA, 120 bp, synthetic construct
  source 1..120: mol_type = other DNA
cccttgaacctggactgttaaaacttatccccttaatggccgggcaccatagctcacgcctgtaatcccagcactttgggaggctgaggcaggcagatcacgaggtcaggagatcgagac

SEQ ID NO: 7022 - DNA, 120 bp, synthetic construct
  source 1..120: mol_type = other DNA
atttgctttcaaaaaaaaagaaatcaccacttgcacagtttttatgtaatgtgaaatatgaatatccacaattacatgaaaagctgttaaaaataatcctcccagtccgggcatggtagc

SEQ ID NO: 7023 - DNA, 120 bp, synthetic construct
  source 1..120: mol_type = other DNA
cgacttagaggttgctcagacaactgctctcccggacgaggatgatgacctgtgagaatgaagctggagcccagcgtcagaagtctagttttataggcagctgtcctgtgatgtcagttg

SEQ ID NO: 7024 - DNA, 120 bp, synthetic construct
  source 1..120: mol_type = other DNA
tatgagccaagaatgatgcttgcaaaattttgcaagaacaacacttatgaaaatgaaaaataatcactcttcttgttaccaaaaatcttggtagctgcagaaggtgggatctttcctcac

SEQ ID NO: 7025 - DNA, 120 bp, synthetic construct
  source 1..120: mol_type = other DNA
ggaaaaattaaaaattaagttttttttcattaaagatatgttatttccgatcaagagatcaagaccatcctggccaacatggtgaaaccccgtctctactaaaaacacaaaaattagctg

SEQ ID NO: 7026 - DNA, 120 bp, synthetic construct
  source 1..120: mol_type = other DNA
tagatggaaccctccttttactcctctcggaggccctggcccttacccagacctgggcgggtgagtgcggggtcgggatggaaacggcctctaccgggagtagagaggggccggcccggc

SEQ ID NO: 7027 - DNA, 120 bp, synthetic construct
  source 1..120: mol_type = other DNA
ggagacgctgcttcacctgggtaagagggtccacagggctactctcccatctccttcttgggctaggactgtgcccacagctgacagacctcaaacagtagaagaaacagggatggaggc

SEQ ID NO: 7028 - DNA, 120 bp, synthetic construct
  source 1..120: mol_type = other DNA
gggagcccttctggagcccttccgcagggtcagggctgaggcctgggggtcagggccccttacgttcccctcttttcccagagccggcttcccagcccaccatccccatcgtgggcatca

SEQ ID NO: 7029 - DNA, 120 bp, synthetic construct
  source 1..120: mol_type = other DNA
ggagctactctaaggctgagtgtaagtgcggggcgggagcgtggaggagctcgcccaccctataattcctcctgcaccacatctcctgtgggctctgaccaggtcttgtttttgttctac

SEQ ID NO: 7030 - DNA, 120 bp, synthetic construct
  source 1..120: mol_type = other DNA
aagctaagatcatagctagaaatacagataattccacagcacatctctagcaaatttagcctattcctattctctagcctattccttaccacctgtaatcttgaccatataccttggagt

SEQ ID NO: 7031 - DNA, 120 bp, synthetic construct
  source 1..120: mol_type = other DNA
ccatttcttcctgtgtgacacgcggtggggcttcacctgtctgagctccagttcctcatcttgtacgtggcactgttttcttgggagagtcattataaagctaatataaagtacctgtac

SEQ ID NO: 7032 - DNA, 120 bp, synthetic construct
  source 1..120: mol_type = other DNA
tttggactcctatatcctactttttatcccactcctatatactactcataaggagtatagaactattttccttctctacttggtctgcccatttctacttcctgccatatcggcaggcta

SEQ ID NO: 7033 - DNA, 120 bp, synthetic construct
  source 1..120: mol_type = other DNA
ggaattgggttattaccaaaaaaaaaatgttggaagatgaaagagcaggttctttatgcctcctggcttgaccctggaacaatttagaaccagcccagtgaggcatgtactccccatgag

SEQ ID NO: 7034 - DNA, 120 bp, synthetic construct
  source 1..120: mol_type = other DNA
aagaaggaaagaaggaaagaaaggaagaaaggaagaaagaaagaaaggcaaatgatcacttagaggattttgtttggtagttaaaaccattttgaaacagagggagggaagaaatcacct

SEQ ID NO: 7035 - DNA, 120 bp, synthetic construct
  source 1..120: mol_type = other DNA
ttttctattcgacaaaaccgccatcgtcatcatggcccgttctcaatgagctgttgggtacacctcccagacggggtgacggccgggcagaggggctcctcacttcccagacgggccggg

SEQ ID NO: 7036 - DNA, 120 bp, synthetic construct
  source 1..120: mol_type = other DNA
tgactgcacggaattctgaatgaattgaattggataatacatgtaaatccttgtggtgggaatttgggtgccattttctttgcattatgaaaatccaggtcaactcttctttcttctccc

SEQ ID NO: 7037 - DNA, 120 bp, synthetic construct
  source 1..120: mol_type = other DNA
ctggtgttagagccaggtgactctgtccaaagagtaggttctttttccccacagaggcaaacaggaaacgtttcctttcctaactagctctgcctagtgcctggaatcttactgagtcag

SEQ ID NO: 7038 - DNA, 120 bp, synthetic construct
  source 1..120: mol_type = other DNA
tctcactttagcagctatgttaaagattttttagcccttgaactgctgtctgaaattctttttctttcttttttttttttctttttttgagacagtctcactctgtcgcccaggctggag

SEQ ID NO: 7039 - DNA, 120 bp, synthetic construct
  source 1..120: mol_type = other DNA
actttttctcttgaagttgacatttttctttcaaatggtatatcatatttttaaacaatactatctactttttcccctttgctttatgtatttaattttatatattaactgattcttatt

SEQ ID NO: 7040 - DNA, 120 bp, synthetic construct
  source 1..120: mol_type = other DNA
ctgtagcattgtgtaaccatttcacatcaaaaccacttttcttgagcactgatgagtaagtaagcttgatacatcatttcagttcctcagatgagcaaaaatcattagttttatatcatc

SEQ ID NO: 7041 - DNA, 120 bp, synthetic construct
  source 1..120: mol_type = other DNA
gctacctgtgagttttgtcaaaattatcaggggttttttgtttgtttgttttttgacatggagttttgctcttgttgcccaggctggagtgcaatggcgccatctcagctcactgcaacc

SEQ ID NO: 7042 - DNA, 120 bp, synthetic construct
  source 1..120: mol_type = other DNA
agatttcgccattgcactccagcctgggcaacaaaagtgaaactctgtctcaaaaaaaaaaaaaaaaaaaaaacccttctgtctcaaaaaaaaaaaaaaaaacccttctgtctcaaaaaa

SEQ ID NO: 7043 - DNA, 120 bp, synthetic construct
  source 1..120: mol_type = other DNA
gagtgcaatggcgggatatcggctcactgcaacctccgcctcccaagttcaagcaatcctcccacctcagcctcttgagtagcagggattacaggcatctgccaccacgcctggctaatt

SEQ ID NO: 7044 - DNA, 120 bp, synthetic construct
  source 1..120: mol_type = other DNA
aaaccctgtctctactaaaaatacaaaacttgccaggcgtggtagagggcgtcagtaattccaactacttgggaggatgaggcaggagaatcgcttgaagccaggaggcggaggttgtag

SEQ ID NO: 7045 - DNA, 120 bp, synthetic construct
  source 1..120: mol_type = other DNA
gaggcagtgtgttattgctctccattatgagtcaagcatgagagcagccttatcaatgaagaggcacacaaacagcgtaggcacctagcactcttgattagagtgtcagttattgacagg

SEQ ID NO: 7046 - DNA, 120 bp, synthetic construct
  source 1..120: mol_type = other DNA
tcaagtcaagaaaatgtatctcaactaggaaatgtttttgtgaccacaaaggggaggaaccaggaagttgtggtaaactgtagcggaagttaaagctaaaaaaaaaaatgagagagaacc

SEQ ID NO: 7047 - DNA, 120 bp, synthetic construct
  source 1..120: mol_type = other DNA
tcgtagtccccttcagtgctaagaacagaaaagaagctgttgcttttctctgctataggtgttgctgttgaaaattcatcccacacaattgatggagataattttcactgctttagtcac

SEQ ID NO: 7048 - DNA, 120 bp, synthetic construct
  source 1..120: mol_type = other DNA
ccttactggcttaaggcatttaagcacaaactctaacagatcactggctgaccattaagctatgctgatccaggggcaacccctaagaattcaggcttaaaaataaaaataagaattaaa

SEQ ID NO: 7049 - DNA, 120 bp, synthetic construct
  source 1..120: mol_type = other DNA
accagccaaaaatagaaatgacatcttaaaagcaatgagaaaaaactcatctcatacaaatacactcatacacacagacacaataatcttaatagctaacctcatcagtaacaatggagg

SEQ ID NO: 7050 - DNA, 120 bp, synthetic construct
  source 1..120: mol_type = other DNA
cttacataaacaaagactagggagatttatctcttgcagatatgtcttacaagaaacactaatgtaatactaaagtaagttcttcagactgagaagaaatgacaccagataataatccca

SEQ ID NO: 7051 - DNA, 120 bp, synthetic construct
  source 1..120: mol_type = other DNA
acctgagttcaggagttccagaccagcctgggaaacagggcaaaaccccgtctctactaaaaatacaaaaattagctgggcatggttgtgctcacctgaaatcccagttactcaggaggc

SEQ ID NO: 7052 - DNA, 120 bp, synthetic construct
  source 1..120: mol_type = other DNA
atcaggacttcctaaggctgtgtcaccgacacacatcctcaaccctgacaacataaactttctaaattaactgagacctgtctcagatattcagggttcacactcccctggaccccctga

SEQ ID NO: 7053 - DNA, 120 bp, synthetic construct
  source 1..120: mol_type = other DNA
tctccatgttgttcaggctggtctcgaactcccaacctcaggtgatccgcctgtcttggcctctcaagtgctgggattacaggggtgagccaccgcgcccagccgggagcccctatttta

SEQ ID NO: 7054 - DNA, 120 bp, synthetic construct
  source 1..120: mol_type = other DNA
tctttttattttatttatttataattttttggctaattttggctattttgtgtctgtgtgtgtatttttagtagacatggggtttcaccatgttgggcaggctggtctcgaactcctgac

SEQ ID NO: 7055 - DNA, 120 bp, synthetic construct
  source 1..120: mol_type = other DNA
ctgctctggccgggctcgaggagcccttcagcccactgctgtgctgtgggggcccctctctggggctggctgaggccggagccgtctccctctgcttggggggaggtgtggagggagaga

SEQ ID NO: 7056 - DNA, 120 bp, synthetic construct
  source 1..120: mol_type = other DNA
aaacccactgggagggataaacaactccagacgggaggaacaaacaacttcgggtgcaccacctttatgaactgtagcactcactgtgaaggtctgcagcttcactcctgaggccagcaa

SEQ ID NO: 7057 - DNA, 120 bp, synthetic construct
  source 1..120: mol_type = other DNA
agccactgaacctggcccagatcatccttttaagtgttctttttcatttgtaggtttaacattggctttggggtgagaaagaaaccaagactcacccagagtcataagcccaacaagaga

SEQ ID NO: 7058 - DNA, 120 bp, synthetic construct
  source 1..120: mol_type = other DNA
ggctcggtggggctcatgcccatggatccttgcttactgccagtgcagcagtcttaagattggcctggcatgctgcagcttgttgggggggtgggagggcgtccgccattcctgaggctt

SEQ ID NO: 7059 - DNA, 120 bp, synthetic construct
  source 1..120: mol_type = other DNA
agagcagaaaagctgaaaattccaaaaaccagattgcctcttctcctccaaaggatcacagctcctcaccagcaagggaacaaaactggatggagaatgagtttgacaagttgacagaag

SEQ ID NO: 7060 - DNA, 120 bp, synthetic construct
  source 1..120: mol_type = other DNA
aggagacccatttcatgtgcaaagatacaaataggctcaaaataaagggatggaggaagatctaccgagcaaatggaaagcaaaaaaaaaatcaggggttgcaatcctcgtttctgacta

SEQ ID NO: 7061 - DNA, 120 bp, synthetic construct
  source 1..120: mol_type = other DNA
agaactgatggagatagagacacaaaaaacccttccaaaaaatcagtgaatctaggagctggttttttgaaaagatcaacaaaattgatagactgctagcaagactaataaagaagaaaa

SEQ ID NO: 7062 - DNA, 120 bp, synthetic construct
  source 1..120: mol_type = other DNA
ataaacagaaccaacgacaaaaaccacatgattatctcaatagatgtagaaaaggccttcgacaaaaattcaacaacccttcatgctaaaaactctcaataaactatgtattgatgacat

SEQ ID NO: 7063 - DNA, 120 bp, synthetic construct
  source 1..120: mol_type = other DNA
acataggcatggataaatgcttcatgactaaaacaccaaaagcaatggcaacaaaagccaaaatagacaaatgggatctaattaaactaaagagcttctgcacagcaaaagaaactatca

SEQ ID NO: 7064 - DNA, 120 bp, synthetic construct
  source 1..120: mol_type = other DNA
caatttttattcaaaatacaaataatagggctgggcgcggtggctgacgcctgtaatcctagcactttggcaggccgaggcgggcagatcacgaggtcaggagttcaagaccagcctggc

SEQ ID NO: 7065 - DNA, 120 bp, synthetic construct
  source 1..120: mol_type = other DNA
ggaaaatcccatccctaaattatttaaagtttttgttttccctcagctactatttctgttctaccttatgcaaactaatgagaaaccattgtcccaagactggtggcctcctggcatggt

SEQ ID NO: 7066 - DNA, 120 bp, synthetic construct
  source 1..120: mol_type = other DNA
catcatcatagtggtgacaatttttaggaaactttttttgtttttttctgtgtgaacctaactcatctaataagggagtgtgtgaacatttccatgttggtccattttttatgtgcctaa

SEQ ID NO: 7067 - DNA, 120 bp, synthetic construct
  source 1..120: mol_type = other DNA
ggccaagctaactttgggagaaatttcgtttacagtttaaatgataatagcccttcccaaaactaacctgtctttgtaaaaatgatgaaaggccaccaggttagggaggatgagaggggc

SEQ ID NO: 7068 - DNA, 120 bp, synthetic construct
  source 1..120: mol_type = other DNA
aggactcaagcaatcctcctacctcagactcgaaaagtgctgggattacaggtgtaagctgccatgcccaacccaaactatcttgaaaaagccttcaaatttgagaggaggctgatataa

SEQ ID NO: 7069 - DNA, 120 bp, synthetic construct
  source 1..120: mol_type = other DNA
ggtttatttttcacagttcatggggctgggaagttcaggtatcaaggcactggcagttaaggtgcttggtgaaggtcctttttctgttcccagttcacagatgtcccaccttcattttct

SEQ ID NO: 7070 - DNA, 120 bp, synthetic construct
  source 1..120: mol_type = other DNA
gctaggactataggcatacaccaccacacccagctaattttttttttttttttgagatggagtctcgctctgtcacccaggctggagtgcaatggcacgatctcagctcatggcaacctc

SEQ ID NO: 7071 - DNA, 120 bp, synthetic construct
  source 1..120: mol_type = other DNA
gcctcagcctcctgagtagctgggattataggcacctgccaccatgcccggctaatttttgtgtgtgtgtgtttttttcagtagagacggagtttcactatgttggccaggctggtcttg

SEQ ID NO: 7072 - DNA, 120 bp, synthetic construct
  source 1..120: mol_type = other DNA
ccatggtattcagatatttggtcaaacattgtggatggttttgtgagggtattttggatgtttcaaattggtgcattttgaataaagcagactgccctccacaatgtgagtgggcctcat

SEQ ID NO: 7073 - DNA, 120 bp, synthetic construct
  source 1..120: mol_type = other DNA
agatgaatgcatcatgcccagccgatttcttttgtttgtttgagatggagtctcgctctgtcaccccgagtggagtgcagtggcataatcttggctcactgcaacctccacttcccaagt

SEQ ID NO: 7074 - DNA, 120 bp, synthetic construct
  source 1..120: mol_type = other DNA
aaaaaaaaaaaaagatggctgattttggccaagtgcagtggctcatgcctgtaatcccagcaatttgggaggctaaaggcaggcagatgcagatcacttgaggccaagagtttgagacca

SEQ ID NO: 7075 - DNA, 120 bp, synthetic construct
  source 1..120: mol_type = other DNA
atctgggtgtggtggcatgcacctgtggtcccagctactcaggaggctgaggtaggaggatcacttgagcctggcaggttgaggctgcagtgagtggtaattgcgccactgcactccagc

SEQ ID NO: 7076 - DNA, 120 bp, synthetic construct
  source 1..120: mol_type = other DNA
gttgaacagtctaaaagacaactgccctagtatcctcaaagatccaattccaagaagaaaaaaactggatgattgtagattaaaaagaaaggggtgagaaaaggacataaaaaaatgcaa

SEQ ID NO: 7077 - DNA, 120 bp, synthetic construct
  source 1..120: mol_type = other DNA
cagagcaaaactccatctcaaaaagaaaaaaaaagttcaaatggttgagaaaagacaacacttgtatactgttggtaggaatgtaaattagtacagctattatggaaaactgtatggcgg

SEQ ID NO: 7078 - DNA, 120 bp, synthetic construct
  source 1..120: mol_type = other DNA
accgtggaatgctattcagcctttaaaaagaaattttgtcatttgagacagcgttaatggaattggagaacattatgctgagtgaagtaagccaggcacagaaagacaaatactgtatgt

SEQ ID NO: 7079 - DNA, 120 bp, synthetic construct
  source 1..120: mol_type = other DNA
acacagtaacagaaaacattcctggctgcagctcattaatatttcttctttgttctcctgaggaatcaaaagattctcatttatgatatgtcaaaaggcacataaagaaacatatccaaa

SEQ ID NO: 7080 - DNA, 120 bp, synthetic construct
  source 1..120: mol_type = other DNA
ctccaaattattccttaaccctctgacatctggggcttctgattccacctctccaaagaaatgctcccaccaagaccatggaggcccctctcgttgctggtggatactcgttcattttcc

SEQ ID NO: 7081 - DNA, 120 bp, synthetic construct
  source 1..120: mol_type = other DNA
actactgattttttgtgtttgttttgttttggcagtctgacataactttatactaatgcagcttctagccctgtcccccactccttcctgatcagtatcccaatgtccctcctatatgga

SEQ ID NO: 7082 - DNA, 120 bp, synthetic construct
  source 1..120: mol_type = other DNA
ccccacccctagactctcccaaatacccctgatgaaacccctgaggtggaaaaagataaagacaagcaaagataaacagcacaggaagcagaggtacaaatagaattctgatttttctcc

SEQ ID NO: 7083 - DNA, 120 bp, synthetic construct
  source 1..120: mol_type = other DNA
tgccttaactaaaaatttgtatcaacatgaagtcctagaattatactgcatgagcccccaggatttggagaacatcattcacccttcttaatccaaaaacttgggtgcctgaaggtgggg

SEQ ID NO: 7084 - DNA, 120 bp, synthetic construct
  source 1..120: mol_type = other DNA
gatgggactcccaggtgcctggggaaccaaaacaagaaaaaaatggaggagagttttgagcaagaactaaagccaaggaaagatggggaagaggcaaagactaggaataacaataatctt

SEQ ID NO: 7085 - DNA, 120 bp, synthetic construct
  source 1..120: mol_type = other DNA
ggtagatccctgccagaacctgagggaaatgagcactcagtactttcctcaatgtcccaccttctctctttcccttacccaccctccccgtcatacctgcaactgcctaggcagaagaga

SEQ ID NO: 7086 - DNA, 120 bp, synthetic construct
  source 1..120: mol_type = other DNA
caaaaaataataataataattacgatgacttgtccaaggagaaaactggaagccttggggctcactgccactctgctcactcaccaccaccagtttttgtgtttctggctgacttcagtg

SEQ ID NO: 7087 - DNA, 120 bp, synthetic construct
  source 1..120: mol_type = other DNA
caagcgattctcgtgcctcaacctcctgagtagctgagaccacaggcgtgcggctccacacctggctaactttttgtatttttagtagagatagggttttgccatgttggccaggctggt

SEQ ID NO: 7088 - DNA, 120 bp, synthetic construct
  source 1..120: mol_type = other DNA
gctttaaataccacttatatccatcaatggttccccaaatttaaatctttcccaaattcaaatttccgtcctcttctctcccctaagctgctgactacttacccactgcctattcaacat

SEQ ID NO: 7089 - DNA, 120 bp, synthetic construct
  source 1..120: mol_type = other DNA
tctggcacctggttaagtgttcagtacatatttgttgaatgggtaaatgaatgagagctggagggaaatccaaactcaggggtgcctgtgccacagcaaacactctccctctcacaccac

SEQ ID NO: 7090 - DNA, 120 bp, synthetic construct
  source 1..120: mol_type = other DNA
cctcagcctctgaagtagcagagactacaggcacataccaccacacttggctagttttctttatcttttgtaaagatggggtttcactatgttgcccagactagtcttgagctcctggtc

SEQ ID NO: 7091 - DNA, 120 bp, synthetic construct
  source 1..120: mol_type = other DNA
gtcagtctgctccttattctgtcccttcccctggcctcttgcacatatccaccatagaggggttggcttcaggaaaggtgagcaaaatgattctgcatctttggtctcccccatgtcctc

SEQ ID NO: 7092 - DNA, 120 bp, synthetic construct
  source 1..120: mol_type = other DNA
caactatgtaagtgtgtacacgtgcatatatgcatgcatgcaagtacgtgcacatgtgtgcatgtttgtgtgttaatgtgactgtgaacatgtgtgcaaacatgcctgtgtatattgatg

SEQ ID NO: 7093 - DNA, 120 bp, synthetic construct
  source 1..120: mol_type = other DNA
tcattagttgctccttggacatctcatagctccaaggaggacgtcgaggaaagtccagaactgggaattcaggaaaaagtccaagtgtgaggaaatcttcaggattcaagagtacatccc

SEQ ID NO: 7094 - DNA, 120 bp, synthetic construct
  source 1..120: mol_type = other DNA
cttcttccgatgttcagtcctcccagacaccctatttgggaccctcccggatgtgcgtggggggagtcactccttcagggagcagtggggacggcgccccgtgctagctggagggattcc

SEQ ID NO: 7095 - DNA, 120 bp, synthetic construct
  source 1..120: mol_type = other DNA
cggcggtctgagagtcctgggtgccgacctgttgggacccaaattccttgtgggaacgatgataaggagcaggtttacagatcataagtgcaaaagcgggcgagaagggaaacccaagcg

SEQ ID NO: 7096 - DNA, 120 bp, synthetic construct
  source 1..120: mol_type = other DNA
gatgttgcagattgcgatgactgggatgacagtttgtatccagactttgactgaaaaggtacaggtgcagctttctctaaactagtcctctggccagcagttaaggtgagggattggttc

SEQ ID NO: 7097 - DNA, 120 bp, synthetic construct
  source 1..120: mol_type = other DNA
tacaatagttacaacgatgcagtttggaaacaatgatagacataagtcaataggacttatgtcccgaagagtccaataacaggcccatacatgtgtggacacttcatttatgatgaagat

SEQ ID NO: 7098 - DNA, 120 bp, synthetic construct
  source 1..120: mol_type = other DNA
gtcaagtaaatgcaagataaaaatataccactttgaaattagaactcttgtgtactgctgctgggattataaaatggtgaaactactatagaaaacaatatgaagaggttcctcttaatt

SEQ ID NO: 7099 - DNA, 120 bp, synthetic construct
  source 1..120: mol_type = other DNA
catcaatatgaatatatgtaacactactgaactgtacacttaaaaatagttaagatggtaatttttatgtgttttttaccacaataaaaaccgaacaaaacaaggcatgatgattcatgc

SEQ ID NO: 7100 - DNA, 120 bp, synthetic construct
  source 1..120: mol_type = other DNA
aactgggttgtgcacttaaaactggtgtgtctttatgtatgctgttcttcaataaaaaaaatttttttaatcacggtttatcaggattcagctgcccattagacacctttctgtgtctct

SEQ ID NO: 7101 - DNA, 120 bp, synthetic construct
  source 1..120: mol_type = other DNA
actgtgaggctcttctaacaccctcagtcagtgacacacccatcccatccaccacttcccccgtgtggggtccagagtggtgttgcatcactggtgcgcggcatacgcgctttcttctga

SEQ ID NO: 7102 - DNA, 120 bp, synthetic construct
  source 1..120: mol_type = other DNA
tttctgtgaaaacagcagtgaacaggttcagttttgaactggccctgaggaaatgggtcaggagttgtattggcaagagggaggggtgagagctgttggagaactgagaatgaggttttt

SEQ ID NO: 7103 - DNA, 120 bp, synthetic construct
  source 1..120: mol_type = other DNA
gccatgatggtgacatagacttgggtagtagagttggagaaaagtagacatttgaaaattacaggtcaaaataaaagtatcagatttctccaggtagttctggcttatgtaactgccatt

SEQ ID NO: 7104 - DNA, 120 bp, synthetic construct
  source 1..120: mol_type = other DNA
atctgcttgcctcggcctcccaaagtgctgggattacaggtgtgagccaccacgcccagccggaagaaacttcttaaaagttaacttataactcctcaacttatgggcaagcatttaagt

SEQ ID NO: 7105 - DNA, 120 bp, synthetic construct
  source 1..120: mol_type = other DNA
atggtggctaggatagacctctctgaggaatctgtagatgaagggcccagaacttagccttgaggaactctgacattgaattgctaagtgaagaaggacaaggataagccagacaaggag

SEQ ID NO: 7106 - DNA, 120 bp, synthetic construct
  source 1..120: mol_type = other DNA
actctcagaggctgaggcaggagcactgcttgagctcagaagtttgagaccagcctgggcaacatggtgagaccctgtgtctgcaaaaatgtttaaaaagtacccaggcctggtggcgtg

SEQ ID NO: 7107 - DNA, 120 bp, synthetic construct
  source 1..120: mol_type = other DNA
tctccctgcttctgtcatttctgcccattctttgctgcctgccccctcccacctcccgcccaggttgttctcagcacagcctccagagtcatcctttttatttaacaatttaaaaaatgt

SEQ ID NO: 7108 - DNA, 120 bp, synthetic construct
  source 1..120: mol_type = other DNA
tcacatcactctgctcagaactctgcagtgacttccatttaaatcaacagaagaagccaaaatccttaagataatttaaaagacctttcccaatccagaccctgctttacttctcttttc

SEQ ID NO: 7109 - DNA, 120 bp, synthetic construct
  source 1..120: mol_type = other DNA
tttagccctgaggcacttcaacatttagacttcaggagaagcccattagatgcaaaggaaacctatagagagtagtgtccctgaagaaaacaaaggagggagggagcgaccaagtctatc

SEQ ID NO: 7110 - DNA, 120 bp, synthetic construct
  source 1..120: mol_type = other DNA
ccatgtgtttacgcgactggagcaagcggacgccggccccgctccgtcattgcaggccacgcctccactgaaccagggccacgcccccgagatgacggcgaagctcgcacgtgcgcagcc

SEQ ID NO: 7111 - DNA, 120 bp, synthetic construct
  source 1..120: mol_type = other DNA
cacaactaaccccagtaggtacacagtaactaattttaaaagcacttattggatgcctactgtataccaggtactgtgtggaggaagtgggaatgtagagataaaagataagactttccc

SEQ ID NO: 7112 - DNA, 120 bp, synthetic construct
  source 1..120: mol_type = other DNA
tggccatgatctaggtgagaagtggtaaggggataagccaaggcctgaagaataaagagttactaaggaggcggcattgatcggaactgagaactgattaaatgaagggagaagtaaggt

SEQ ID NO: 7113 - DNA, 120 bp, synthetic construct
  source 1..120: mol_type = other DNA
gccacacttaatctttttcagttccttggggattatactttctcacaatgaaactcttcggaggcttttcctgtccctataatgaagtggataagagtgattaaagtacaaaagattttt

SEQ ID NO: 7114 - DNA, 120 bp, synthetic construct
  source 1..120: mol_type = other DNA
ctcgttaactctagttttttggagaagtagatgcaccataaaactttcctgaataaatgattactttgaaatacatggaattctagtctgagaatattttaatgtagtagatggcggata

SEQ ID NO: 7115 - DNA, 120 bp, synthetic construct
  source 1..120: mol_type = other DNA
ctcctctctaaaaattattatttttttaattaggcaggcatggtggcgcttgcctgtagtcctagctactcaggaggctaaagtgggaggatcacctaagcctaggaatttaaggttaca

SEQ ID NO: 7116 - DNA, 120 bp, synthetic construct
  source 1..120: mol_type = other DNA
gccataccaaacctttccctgtctctcagtgtgtgtgctttctcacagctgggcctgtgcacagcactggaattacaccatgtgtctgactaacttctcatactcctcattacttcagtt

SEQ ID NO: 7117 - DNA, 120 bp, synthetic construct
  source 1..120: mol_type = other DNA
ctcttggaaacatgtttacctgtagcttaactccctttatagttctttgaagagctggcagtagaagataaacaggctggggaagaagagaaagtgctcaaggagaaggagcagcagcag

SEQ ID NO: 7118 - DNA, 120 bp, synthetic construct
  source 1..120: mol_type = other DNA
tagcaccttctggccatggtggagtaatttcccgcttttaaactagctcttctcggtctgtcttacttatactgttaaaatcatctttttagaatacatgcccaggctgggcacagtggg

SEQ ID NO: 7119 - DNA, 120 bp, synthetic construct
  source 1..120: mol_type = other DNA
gtgagccaccacgcccggccaagaactatcattttttatttaagtttctggtgggtttatcgggatgcaacctgtcgtaaatggaggagcatgtgtatggttaacacagtagactctcta

SEQ ID NO: 7120 - DNA, 120 bp, synthetic construct
  source 1..120: mol_type = other DNA
gcaaacctttattcttttctttttttgggggagtagttggggtggtggttcgtttgtttttgtttttgtttttgtttacacaggatcttactctgtcactcaggctggagtgcagtggtg

SEQ ID NO: 7121 - DNA, 120 bp, synthetic construct
  source 1..120: mol_type = other DNA
tacatttatagggacataacgcgttgtcacatttcataaatacacattcataccatttgtcttgtaccattcctggtagcagaaattaataaaggacctcagggagaccaggggctgggt

SEQ ID NO: 7122 - DNA, 120 bp, synthetic construct
  source 1..120: mol_type = other DNA
ctcaacctaccaggctcaagtgatcctcccacctcagcctcccgaatagctgagactatgggtggcaccaccatgcctggctaatttttgtattttttgtagagacagtattttagcatg

SEQ ID NO: 7123 - DNA, 120 bp, synthetic construct
  source 1..120: mol_type = other DNA
aaaagggcctggagggaaaagaagagatttctcagtggtggccaggtcctaatagcttttattccccagcaagggcaagaccacactcctcaagcacattgccaaccgagccctgagcat

SEQ ID NO: 7124 - DNA, 120 bp, synthetic construct
  source 1..120: mol_type = other DNA
cccttttcctctttcccttctcattcttccaaggccaatagggaggctcaaggcttacctctccctccttactatctgtgttgtgagaacttagggtctttctctatttatctccctact

SEQ ID NO: 7125 - DNA, 120 bp, synthetic construct
  source 1..120: mol_type = other DNA
gaagaccttgctgatcgtctcccatgaccagggcttcttggatgatgtctgcactgatatcatccacctcgatgcccagcggctccactactataggggcaattacagtaagtaggattg

SEQ ID NO: 7126 - DNA, 120 bp, synthetic construct
  source 1..120: mol_type = other DNA
acagaaaccactctttaagaacttggattttggcatcgacatggattcaaggagtgagttggcggggttgcctcagggatgtgtagcaggagccacagggagagtctctggggacctctt

SEQ ID NO: 7127 - DNA, 120 bp, synthetic construct
  source 1..120: mol_type = other DNA
aaaattagctgggtatgttggtgcacgactgtagtcccagctactcgggaggctgaggtaggagaattgcttgagtccagggggcagaggttccagttagccgaggtcgtgccactgcac

SEQ ID NO: 7128 - DNA, 120 bp, synthetic construct
  source 1..120: mol_type = other DNA
gcaaactctaccattttatttgaacttttgtaatatattgccatctagtgtgttagaaagtttgtagccatttctgctctctctagcagtgttgagaggccattttctcatatccagaga

SEQ ID NO: 7129 - DNA, 120 bp, synthetic construct
  source 1..120: mol_type = other DNA
aaaagttgatgtatggagctgcagcacctttttcccttgccctcctcttaactactttgtcttcccttgcagacccatggggaaatgagaaagaaccaccggctggtaagttggcattgg

SEQ ID NO: 7130 - DNA, 120 bp, synthetic construct
  source 1..120: mol_type = other DNA
gagtgagctttccttcccagaagtctcccgagagacatatttgtgtggcctagaagtcctctgtggtctcccctcctctgaagactgcctctggcctgcagctgacctggcaaccattca

SEQ ID NO: 7131 - DNA, 120 bp, synthetic construct
  source 1..120: mol_type = other DNA
aggctagagtgcactgtaccctcaacctcctgggctcaagcaatccttccacctcagcctcctgagtagctgggactacaggcatgtgccgccacactcaactaatttttttttttttaa

SEQ ID NO: 7132 - DNA, 120 bp, synthetic construct
  source 1..120: mol_type = other DNA
gtgacaggagatatatccagttccagagggaatagggagagctgtgtggctaagatttaactgtttggacatttaatttggggaaattgttttccagccaagtgaataaataatactgga

SEQ ID NO: 7133 - DNA, 120 bp, synthetic construct
  source 1..120: mol_type = other DNA
ttttgccatgttggccagtctggtctcaaactcctgacctcaggtgatctgcccacttcggcctcccaaagtgctgggattacaggcgtgagccaccgcacctggcctatacttttgcat

SEQ ID NO: 7134 - DNA, 120 bp, synthetic construct
  source 1..120: mol_type = other DNA
cagccaattttttaatttttttgtagcaaagaggtcttgctttgttgcccgggctggtctcagactcctgggttcaagttatcctcccacctcagcctcattaaagccaaagcctgaagg

SEQ ID NO: 7135 - DNA, 120 bp, synthetic construct
  source 1..120: mol_type = other DNA
aaaaaaggtttgctgagcagcagtaagtgtagaatcaatgctaacattaatttgtactgggctaagatagtaggattttgtgatttttcaacattaggtctactgcccaggagtaggaat

SEQ ID NO: 7136 - DNA, 120 bp, synthetic construct
  source 1..120: mol_type = other DNA
cacgcgcctcggcctcccaaagtgctgggattacaggcgtgagccaccacgcctggccgaattttcataaatgatttgaaagaaaatgagctcattctttctttttttttcagacggagt

SEQ ID NO: 7137 - DNA, 120 bp, synthetic construct
  source 1..120: mol_type = other DNA
ccacacacaccaagcctgggcaaggggaaggtaaaactacccactttgggcctacatgcagtgaggcctttcagatactgataaaacattgttgccccctcatgtggccaatgctggaaa

SEQ ID NO: 7138 - DNA, 120 bp, synthetic construct
  source 1..120: mol_type = other DNA
tcagatgatcctgatgaatgctaacagacttgaaaaccgccattctcaacccacatgttaaaacatgttaatatcttcaactgccccatatctgccacacacactccccccagagtgatg

SEQ ID NO: 7139 - DNA, 120 bp, synthetic construct
  source 1..120: mol_type = other DNA
ccaactcctgacctcaggtgatccacccacctcgccttcccaaagtgatgggattacaggcatgacccaatatgcctggctttttttttttttttttttttttgagacagggtcttgctc

SEQ ID NO: 7140 - DNA, 120 bp, synthetic construct
  source 1..120: mol_type = other DNA
atacaaaaaaattagccaggcatggtggcaggtgcctggaatcccagctactcagaagactgaggcagaagaatcccttgaacccaggaggcagagattgcagtaagccaagactgcacc

SEQ ID NO: 7141 - DNA, 120 bp, synthetic construct
  source 1..120: mol_type = other DNA
ggggtttggggtacagggcgaatcttctcaaaaagtgaagccaactgggtctcctcttcagcagtccaggaacgtttccagtctctctcctccccagactggaggaaaatatgtacatca

SEQ ID NO: 7142 - DNA, 120 bp, synthetic construct
  source 1..120: mol_type = other DNA
actgccaccactgatgccaccgccagggccttcgtggggacgatgtcctccacccccacccatgctaccaccagggccttcatgggggcgatgcccacttcccatgccaccgccagggcc

SEQ ID NO: 7143 - DNA, 120 bp, synthetic construct
  source 1..120: mol_type = other DNA
cccccagtcccctggggctggccctgaagattacccagcatctgcttgatcttgtccgaatagtctggttgtttcagtagttcctctgaaggatgactgtttgggctaccctgtgaggat

SEQ ID NO: 7144 - DNA, 120 bp, synthetic construct
  source 1..120: mol_type = other DNA
gcctggatatatcgctcctgactattgcttccaggggtgacaagaggtgagggcagaaccaggggccgggggcacacccagggcaccttctcctccatgttatcatggctcagacgccgc

SEQ ID NO: 7145 - DNA, 120 bp, synthetic construct
  source 1..120: mol_type = other DNA
tttcttctactttaccttttatactctgtcactgaaacctacttctgggagcccataccttggcagccgtaggtgacagtactttttttttcttcttaattttgatgcctggaacagggg

SEQ ID NO: 7146 - DNA, 120 bp, synthetic construct
  source 1..120: mol_type = other DNA
agtacatcttccccactttagactcacgctgtggcgggatgatcttcactttgatctctttggtggcattaggtgttgtgttgagtggcttgtatttcttctctgcagggggagtggcat

SEQ ID NO: 7147 - DNA, 120 bp, synthetic construct
  source 1..120: mol_type = other DNA
catccagtcgctgacaaggactgaggccaatttccggagctctgcaggtgacagaaaggggaaatgcctaaataatgtaaagtaacattcttccaggaacagaaaatgggaggtttgaga

SEQ ID NO: 7148 - DNA, 120 bp, synthetic construct
  source 1..120: mol_type = other DNA
aaagagaaaagtgaagggacaatccaaggatgggaaaagatattaaggtaattaagtggaagtaatagagaaaagcccatgagagagcagaagtggcaccctaccttcatcctcacttga

SEQ ID NO: 7149 - DNA, 120 bp, synthetic construct
  source 1..120: mol_type = other DNA
acagccacatcagtcagtttgagtttttcatccattagactaaaccaaaaaaggaagaatcagggtttaaagactaaaggtacctgcttgagatggtctacagtgagcggtagatgctgc

SEQ ID NO: 7150 - DNA, 120 bp, synthetic construct
  source 1..120: mol_type = other DNA
cttgggaccgtggacgtccaaatctccagtttccattatggtcagaaacaagtgatcatcttttcctatcccttatcctaaaattgttacattttaatcctattgcactgactatctttc

SEQ ID NO: 7151 - DNA, 120 bp, synthetic construct
  source 1..120: mol_type = other DNA
gccaaacactacacaagtttttactgtctctaagttaaaaggaagctagtggtttgtgctttcaaaagcaaagatgcgaatctggtcctctcctcaaaaatcacgctgtacaagatcccc

SEQ ID NO: 7152 - DNA, 120 bp, synthetic construct
  source 1..120: mol_type = other DNA
aaaacatagcataacaatctcagcctttttgtcctcccaacaaaaacgtcagtaagtttccaaatgtgtaggtcctaacaacctaggcgagcagcagcagaagcagggaggaggcagcca

SEQ ID NO: 7153 - DNA, 120 bp, synthetic construct
  source 1..120: mol_type = other DNA
aatcttgataaaatgtaagtgggttttctcatgatggccttccttcaggaagattagttcttatttaaaattaaggaccccaagtgtcttataacctagtttccttgctttgaagtcagt

SEQ ID NO: 7154 - DNA, 120 bp, synthetic construct
  source 1..120: mol_type = other DNA
cctacccctcagtcattttgcaaacctgatacatgagctcctcaaaagcttatctgccttccaataaagatgcaaaatgatataccaccctgactcatagaaaaagaccccagactagaa

SEQ ID NO: 7155 - DNA, 120 bp, synthetic construct
  source 1..120: mol_type = other DNA
gcacacttcagtgtcattaggcccgtttatctccaagttactcttgcaagcccttgtgtctttcccatctccctctacacacatatatacatacacacacgctcacacacatcctcaaag

SEQ ID NO: 7156 - DNA, 120 bp, synthetic construct
  source 1..120: mol_type = other DNA
cccaccaaaaaatatcaagttaaaatgttaatcactcttttgcttttaaatacctatgcaatctgcaacaattataagacattctttacctccccaactattatcttgtatgtactggca

SEQ ID NO: 7157 - DNA, 120 bp, synthetic construct
  source 1..120: mol_type = other DNA
gtggattcaaaaaagtaaacgctggatgagtgaatttgggtggtttgggaagggagggtggttgattatttttgaagttatgtagtgacggtccttcggccacagatttcaagtcccaag

SEQ ID NO: 7158 - DNA, 120 bp, synthetic construct
  source 1..120: mol_type = other DNA
gcaaactttaacaatgcgatctaagagtcgtagtgactggccaaaaaaaaccgcaattttggggtctaattcgattgtgacgcagttgaaattagcttctcccccatgccttccctttca

SEQ ID NO: 7159 - DNA, 120 bp, synthetic construct
  source 1..120: mol_type = other DNA
tggggcacggtgagataggaaggcttgcccagctgccactccctaaagtgggactgaagagtggtgacagaggtcaacacagaaataataacagccttggtagctttaaaactagcgtta

SEQ ID NO: 7160 - DNA, 120 bp, synthetic construct
  source 1..120: mol_type = other DNA
agccacccactacactcccacccaggaataacttgtatgatctttcatttcagaataccaggagcgatatggttctcgccccgtctgggctgactaccgccgcaaccacaagggtggtgt

SEQ ID NO: 7161 - DNA, 120 bp, synthetic construct
  source 1..120: mol_type = other DNA
ccacacccagccagcgaaatggctatttctagtgggagagccaatatccaaagattcgtttgtattcattacagttattaccaaatatattggcccactttcttcctgaggttttcttta

SEQ ID NO: 7162 - DNA, 120 bp, synthetic construct
  source 1..120: mol_type = other DNA
aattacataactgagagagagaaatgttacaaatttagtagcatgggtgattctgcttgcattctactctacaatgtacctgcttttttttcaagagtctcatttcctagttaatttgct

SEQ ID NO: 7163 - DNA, 120 bp, synthetic construct
  source 1..120: mol_type = other DNA
ttgttcagtggctcctgcttatagcctaaaaggtctggctgaaccttttggaaatcttggcttgctgggggctaaagtaattaaatgtggacaaaagaaaacaacaaatacagccaggcg

SEQ ID NO: 7164 - DNA, 120 bp, synthetic construct
  source 1..120: mol_type = other DNA
cccctgagtagctgggattgcaggcacatgccaccatgtccggcaaatagagatggggtttctccatgttggtcaggctggtctcgaactccggatctcaggtgatccagctgccttggc

SEQ ID NO: 7165 - DNA, 120 bp, synthetic construct
  source 1..120: mol_type = other DNA
ttaggtataaggaagatgacttagggctagaaaatggatataaatgctcacacctgttcaagatggtagcacccagcatgttcttcctgacgttacattgtcccctgtcctttctcctga

SEQ ID NO: 7166 - DNA, 120 bp, synthetic construct
  source 1..120: mol_type = other DNA
tttgggaagccaaggtgggctgatcacttgatcccaggagtttgagaccagcctgggcaccatggtgaaacctcgtctttaccaaaaaatacaaaaattagctgggtgtggtggtgcaca

SEQ ID NO: 7167 - DNA, 120 bp, synthetic construct
  source 1..120: mol_type = other DNA
caaggtctacaggcggggctcctggaaataaagactccgagaggcggtgcggcgagaggaggggcggaagtgacgtcgtgtggggcgggtccgaccgcgcacaatgggccatggagttcc

SEQ ID NO: 7168 - DNA, 120 bp, synthetic construct
  source 1..120: mol_type = other DNA
gtttatattctcaaagacagttcagcccgaccgtgagtgccacatgctcttccatcccatacttaattccttccttcctcagcccttcccccatctttgactatctcttgcagatagata

SEQ ID NO: 7169 - DNA, 120 bp, synthetic construct
  source 1..120: mol_type = other DNA
tctgactttttttttttttttttcaaagcagagtctcctgctgttgcccaagctggagtgctatggcaggatcttggctcactgcagcccaaccttctgggctcaagcgatactcctccc

SEQ ID NO: 7170 - DNA, 120 bp, synthetic construct
  source 1..120: mol_type = other DNA
ttttcaacccaaacatagccagctcattttcacctccttgttttcacatagttcattactcatctggtcagtcagtatttattaagggtccagaataatatgcattccctgtcctcatgg

SEQ ID NO: 7171 - DNA, 120 bp, synthetic construct
  source 1..120: mol_type = other DNA
taatcccagctactcgggaggctgaggcaggagaattgcttgaaccccggaggcagaggttacagtgagccgaggtcctgctacagcactccaccctgggggacgaagcgagactcttgt

SEQ ID NO: 7172 - DNA, 120 bp, synthetic construct
  source 1..120: mol_type = other DNA
caaaacaaacaaacaaaaaaaaagagtaagagccaagaaatatctggagagagagcatcccagacagaaggtaccaccagtgtatggccgtgaggtgggagtgtgcctgaaagagcaaat

SEQ ID NO: 7173 - DNA, 120 bp, synthetic construct
  source 1..120: mol_type = other DNA
cagtctggctaacatggtgaaaccccatctctactaaaaatagaaaaaaaaattagccaggtgtggtggtgctcgcctgtaatcccagctactcgggagactgaggcaggggaattgctt

SEQ ID NO: 7174 - DNA, 120 bp, synthetic construct
  source 1..120: mol_type = other DNA
accgctgtgccccaccatgtcagaggcagttgtggacacaagctccgtgatcaccaccaaggacttcaaggagaagttgtggaggaggcagaaagtggaagagacgcccatgctaacggg

SEQ ID NO: 7175 - DNA, 120 bp, synthetic construct
  source 1..120: mol_type = other DNA
accggcgcccagccaggttcagtcatttttaatgatctcagatgaccaagccagcctttggagggttctctgtcttacttctgactttacttgtggtgtgaccatattcattataatctc

SEQ ID NO: 7176 - DNA, 120 bp, synthetic construct
  source 1..120: mol_type = other DNA
cccatctctacaaaaaatacaaaattagccaggcgaggtggctcatgcctgtaatcccagctacttgggaggctgaggcaggacaatcacttgaatctgggaggtggaggttgcagtaag

SEQ ID NO: 7177 - DNA, 120 bp, synthetic construct
  source 1..120: mol_type = other DNA
ccacctttcaggacactacaagcagtgtggtgtggttggagtgctgggcatgtgcttgttggggggtgggggtgatgaggatgggctggtagacattacaacaaggtcaaggcaagggat

SEQ ID NO: 7178 - DNA, 120 bp, synthetic construct
  source 1..120: mol_type = other DNA
ctattattaaacctattttgggtttatacaaattaatgacttaaccaaattcacacagccagtaaatagtagagtccacatttgaacccatagccatttgcacccagtgaactttttttt

SEQ ID NO: 7179 - DNA, 120 bp, synthetic construct
  source 1..120: mol_type = other DNA
ccacgcctggctaatttttaaaaatatttttgtagagatgaggtcttgctatattgcccaggctggtcttgaactcctgggctcaagctatccacatgagccaccatgcccagcccccat

SEQ ID NO: 7180 - DNA, 120 bp, synthetic construct
  source 1..120: mol_type = other DNA
tcagcctcccaagtagctaggattacaggtgcacactgccatgcctggctaattttttgtatttataatagacacagggtttcaccatcttggccagaccggtcttgaactcctgacctc

SEQ ID NO: 7181 - DNA, 120 bp, synthetic construct
  source 1..120: mol_type = other DNA
atttaagcccaggttgatgctgcagtgagctgtgatggcaccactgcactccagcctaggcaacagagcgagactctgcctctcaaaaaaaaaaaaaaattgcctacagcattcagtaca

SEQ ID NO: 7182 - DNA, 120 bp, synthetic construct
  source 1..120: mol_type = other DNA
gcccaaaatttaaatgttacttttagaagataacactcagagtttataacatttccaaccagataatgaaattgatatggagaaaccaaacctcagaggcactaaaatgctgtccagatt

SEQ ID NO: 7183 - DNA, 120 bp, synthetic construct
  source 1..120: mol_type = other DNA
gatctttctccctagctctgtgtttggcctactccttctggctttcctcaacagtgttccacattcccctcaaattcccttttggtgtgctggcattgccatggtgctgctcctgcaagt

SEQ ID NO: 7184 - DNA, 120 bp, synthetic construct
  source 1..120: mol_type = other DNA
tttgtgccagagcaggagctgctgcgttccttgcgcctctgccccccacaccctaccgcccgccttctgttggctgctgaccctgggggcagcccagctcaacgtcgtcgcaccaggtaa

SEQ ID NO: 7185 - DNA, 120 bp, synthetic construct
  source 1..120: mol_type = other DNA
tttatctagagaagcacactcttgcttgctgtcaaactttagaccaccatggaaggtctaagggcatcctgtgccagggaaactttttaaggaattttatctatgggataaaccccatat

SEQ ID NO: 7186 - DNA, 120 bp, synthetic construct
  source 1..120: mol_type = other DNA
tatctactccctcattccctccaggaacctccagctctccccagtgacttctaccctttactctgggcgtgcctttgccaagatgtcaaagcttaccaacatctctggatccactaatta

SEQ ID NO: 7187 - DNA, 120 bp, synthetic construct
  source 1..120: mol_type = other DNA
taagtattcactcctccctaccctcaaatcaagtaggccacattcactgtctactcctgccttcccattcacatgcctgatatttccacaggcaaccaagactccaagcagggagaacag

SEQ ID NO: 7188 - DNA, 120 bp, synthetic construct
  source 1..120: mol_type = other DNA
gagcctgcagtgcgcaagcgcgggacatctccgtttccctccctcagccccttccccccctacccccccgccccggcctcctttccccttcacgaagccggctctggggcgcgctcaccc

SEQ ID NO: 7189 - DNA, 120 bp, synthetic construct
  source 1..120: mol_type = other DNA
tgtctgtcattagaggggcccgaaatgataatagcttccatttatgtactgctttctaggtcgctacgttttgtttacattcattatttcatataggcctcataacccagtgaggcttta

SEQ ID NO: 7190 - DNA, 120 bp, synthetic construct
  source 1..120: mol_type = other DNA
ccagcctgggcgacggtgagacttcgtctcaaaaaaagaaaaaaaagtaaaatgtctgctaggttttgggaggtgccggtatttatgtcacataaaacagtttgctcggctgggcgcggt

SEQ ID NO: 7191 - DNA, 120 bp, synthetic construct
  source 1..120: mol_type = other DNA
atgtatgagagactgagacaagaggtaagtcagtgcaaaagtggccttcgtctacagtgggaaggatgtgggtaatccttggacgtacagggatagtcaactggattcttttttggaacc

SEQ ID NO: 7192 - DNA, 120 bp, synthetic construct
  source 1..120: mol_type = other DNA
agctagactccgtctcaaaaaaaaaaaaaaattagaaaactgaaaaataggattatcttttctttcccactgggttgatgccatcttcttccacctagcttcccaagctcttccttcagt

SEQ ID NO: 7193 - DNA, 120 bp, synthetic construct
  source 1..120: mol_type = other DNA
cctcacttgactgtttaaggacagggatcctgtttagtttatgttaatgttaaaaaaaaaatagagactgggtatattagaaaaacctctgagcttcagtttcttcctatacagtgccta

SEQ ID NO: 7194 - DNA, 120 bp, synthetic construct
  source 1..120: mol_type = other DNA
tgggtggggtaaagggtagaacatttgtgtgcctcccccaactggcattaacctttctccctgcagctgatgccttcacactcacctccaacgcctgtgaagaagctgctagtgggagcc

SEQ ID NO: 7195 - DNA, 120 bp, synthetic construct
  source 1..120: mol_type = other DNA
gtcaaaagttatctttcctctttgactgcagggctaggtgtaaaggtgcctggctctattattatatacccaaagggcagatacacctctgtatgttattcaagataccaaataagctat

SEQ ID NO: 7196 - DNA, 120 bp, synthetic construct
  source 1..120: mol_type = other DNA
catctctctacatagtctccacctgcgtgggcacaggatgttctcctcacctgtctcatgaactctttggtggtcaagacaagttcgtggtagagcagccagcgtggctgttgctcaaag

SEQ ID NO: 7197 - DNA, 120 bp, synthetic construct
  source 1..120: mol_type = other DNA
gatctcctctgaacagctgtacctgggacaggaaggggaaagcatgagttcaaagcaagacacataggaacagatatggtggagtggggagtgatcactgtgtgatggatgtttcctcat

SEQ ID NO: 7198 - DNA, 120 bp, synthetic construct
  source 1..120: mol_type = other DNA
taggtcatggatccctagaaagaggtgtgatggatggaacagagtcccttcaaaggacagtgactccagcccctccctcctctctcaggtagcccaatcacctaagctcttgagcagcaa

SEQ ID NO: 7199 - DNA, 120 bp, synthetic construct
  source 1..120: mol_type = other DNA
ctagcctctgtcacatggcatccaggatggtccttttaaaatacaaacctgtcacatcactccccatccttcagtggcttcctatcctactctagaattcaatccaagccccttaaaagc

SEQ ID NO: 7200 - DNA, 120 bp, synthetic construct
  source 1..120: mol_type = other DNA
ccatctcaaaaaaaaaaaaaaaaaaattagcttggggtggtggtacacacctgtaatcccagctacttgggaagctgaggcacaagaatcacttgagcctgggaggtggaggctgcagtg

SEQ ID NO: 7201 - DNA, 120 bp, synthetic construct
  source 1..120: mol_type = other DNA
ttcactactagttgtgggaagcataggggtgaagagtgtgggtttctccaactgacctttcgtgccccaggtggtgtgggctggaagatacgggcctgcatgtcagagggcagattggca

SEQ ID NO: 7202 - DNA, 120 bp, synthetic construct
  source 1..120: mol_type = other DNA
actgaggccaggacaagttagccataccctctagttcagtcaagagtctgcttagactcagcagctgctcttactagaaaaagttgaaggatatgttttaggctgggcatggtggtagct

SEQ ID NO: 7203 - DNA, 120 bp, synthetic construct
  source 1..120: mol_type = other DNA
ggggtaatagacctgagctgctgtgattcaaatagcctagaagctcctggtgtcctgtgggacaactgctgctggcatcattcttgactgtttcttcttttggagacaggagcaagttaa

SEQ ID NO: 7204 - DNA, 120 bp, synthetic construct
  source 1..120: mol_type = other DNA
ctctgagctgagcattccaagtgttttcaaatggtcttcacacggtatttcaagtctcggcagcaatgctctgctatcctggttgttttctaaaccctggagatgaatggggaaagaaga

SEQ ID NO: 7205 - DNA, 120 bp, synthetic construct
  source 1..120: mol_type = other DNA
aaaagcaggaaggctgggcacagtggctcatgcctgtaatcctagtactttgggaggctgaggtgggaggatggcttgagctcaggagttcgagaccagcctgggcaacatagtgtgaca

SEQ ID NO: 7206 - DNA, 120 bp, synthetic construct
  source 1..120: mol_type = other DNA
gctggatcacttgaggtcaggagttcgagagcagcctggccaacatggtgaaaccccatctctactaaaaaattagccaggtgtggtggcgcatgcctgtaattccagctactctgaagg

SEQ ID NO: 7207 - DNA, 120 bp, synthetic construct
  source 1..120: mol_type = other DNA
cttcagggacgctgccccaagccgcgcctcctcccagcgccgctgctcctccccaggggctcctgattcctcctccactagatccacagctcgggctggctacagagagaggggatatgt

SEQ ID NO: 7208 - DNA, 120 bp, synthetic construct
  source 1..120: mol_type = other DNA
caaagatagaaaccagtgagggggccaacaggaggcaatcttcagccccagttagatgttctttggtcttaaacggaatgactgtagtttgaggaagggagaaaaactgattataaaaag

SEQ ID NO: 7209 - DNA, 120 bp, synthetic construct
  source 1..120: mol_type = other DNA
aacatttaccctttttaagaaggaactgtagcttgttcctagttgttgaggaaaagctcttctttatagacaaattctagccaatacacgtaacaggaatgacagaatcaaaaaatcacc

SEQ ID NO: 7210 - DNA, 120 bp, synthetic construct
  source 1..120: mol_type = other DNA
cccatagtattaaccatttttcaatctgaatagtgtctatgagtgttctttgttctattctttcaacttccctatgtgcttaaatatttttgtaatcgaaaaagaaaaattacagctggg

SEQ ID NO: 7211 - DNA, 120 bp, synthetic construct
  source 1..120: mol_type = other DNA
gcttgattcctccaccagggaggcacaggttgtagtgagctgagatcgcaccaccacactccagcctggcaacagagtgagactccatctcaaaaataaataaataaaaataaaaaataa

SEQ ID NO: 7212 - DNA, 120 bp, synthetic construct
  source 1..120: mol_type = other DNA
gctggctcctaacaaccaagcccctcttctagaaacctgaccaccccatcagcatccacactgtgcttcctctgtatcctctctccctatacactctatcagaaagtctttccttttgtc

SEQ ID NO: 7213 - DNA, 120 bp, synthetic construct
  source 1..120: mol_type = other DNA
gtcttccagtaacctataagatcggttcttctccagcagggcccgggcctctcgctctgctgcccgagctggcttttctaccactgcctttcgtggtacctgtcagtagaggggaagata

SEQ ID NO: 7214 - DNA, 120 bp, synthetic construct
  source 1..120: mol_type = other DNA
tcatctctaaaaataaaaataaaaataaaagatattagccgggggtggtggcgcgcgcccgtagtcccagctaccggggaagatgaggtgggagggtcgcttcaaccagggaggtcgacg

SEQ ID NO: 7215 - DNA, 120 bp, synthetic construct
  source 1..120: mol_type = other DNA
ggggtaattcttttttcttcatttcgcctctgtccagtttctctgacgccccctgatggtcagtctgtgagtgcttcgctcacgcattcattcaacaagtgaaattaatttaatggatgc

SEQ ID NO: 7216 - DNA, 120 bp, synthetic construct
  source 1..120: mol_type = other DNA
ctacaaaaaattagccaggtgtggaggtgtgcacctgtagtcccagctactctggagactgagacaggagaatttttttttttttttttggagacagagtctcgctctgttgcccagact

SEQ ID NO: 7217 - DNA, 120 bp, synthetic construct
  source 1..120: mol_type = other DNA
ttgaatgcattgttttctgtttctgagatggactgtgagcacccctggcacctcggagcttcctaactctgttttcctgggtcacaactggaaactttttaagacctttacctaacaggc

SEQ ID NO: 7218 - DNA, 120 bp, synthetic construct
  source 1..120: mol_type = other DNA
gtaatattttaacccttttcttctattcattcatttgttgtcattcattctagaaataattccgtgtctactagttgacaggtacaggatattgcagtgaatccagctgatgtagtcagc

SEQ ID NO: 7219 - DNA, 120 bp, synthetic construct
  source 1..120: mol_type = other DNA
catctccaccctccagggagttctgtgccccttctcaggacttggcgctcactcttggatgacctaggatgcaccagcacgtttaaccccacccacaccagggactttggattagggtag

SEQ ID NO: 7220 - DNA, 120 bp, synthetic construct
  source 1..120: mol_type = other DNA
aatttcactctgtcacccaggctggagtgtagtggcgtcatctcggctcactgcaacctctgcttcccgggttcaagtgattctcctgcctcagactcccgagtagcagggattacaggt

SEQ ID NO: 7221 - DNA, 120 bp, synthetic construct
  source 1..120: mol_type = other DNA
aaagagacaagctggaattccaactcaggcctgtcgacccaccctgtgattttgaccagattacagcactcaggaagagttctcgttttgaaacctgaagactcaatgtgtacttcactg

SEQ ID NO: 7222 - DNA, 120 bp, synthetic construct
  source 1..120: mol_type = other DNA
agaactggctggggagcgagtctcagacaaaagcaaggttttcatacccacagccccttgctgtcctatgcaaaacccaggaccctgggcacctgttccctcctactctcctcattcctc

SEQ ID NO: 7223 - DNA, 120 bp, synthetic construct
  source 1..120: mol_type = other DNA
gcttgggcaacagagcaagactctgtctcaaaaaaaaaaaaaaaaaaaagtctacttgattgcccccaaggtgcccagagcctgaccaaagcctacagggtgctcccagtatgccaccct

SEQ ID NO: 7224 - DNA, 120 bp, synthetic construct
  source 1..120: mol_type = other DNA
cccaagttctcagaagggaccgcttaggtttctgtaactgacagatttacccacatttctgggaacccatttttgttttcttctcatatcctcttttggaataataacctctgtacttta

SEQ ID NO: 7225 - DNA, 120 bp, synthetic construct
  source 1..120: mol_type = other DNA
gggccccaaagcttcatgcttccctctgctcattcttccccagaggcacaagcctctctcagtaggaagtgacttttctgaacacctcacccgggtagcatttccggacttctgtttttt

SEQ ID NO: 7226 - DNA, 120 bp, synthetic construct
  source 1..120: mol_type = other DNA
ggggcagactcggggttcaaaagccttctctctgatctttggccggcccggttccatctcccctctcccctccatcctaggatgtccctattcagctctgccctccttcccacggggcag

SEQ ID NO: 7227 - DNA, 120 bp, synthetic construct
  source 1..120: mol_type = other DNA
gggggcagttggggctgggggtgggggagacagaggggctggtggtgggggctggagctccactgcttcctcttcctgctgtctcaggcctccagtcccagcgtcctctggtgggagggg

SEQ ID NO: 7228 - DNA, 120 bp, synthetic construct
  source 1..120: mol_type = other DNA
tggggctctgatcccgcatctccccagggctgggtctccgctcccgggcctccagaggcccaggctttctctctgctagcagctcttcactccgttgttgttgctgctgctgctgctgcc

SEQ ID NO: 7229 - DNA, 120 bp, synthetic construct
  source 1..120: mol_type = other DNA
gggtgttggggaggcaaggaggggcggagagcgaacaggtctagaggagaagggaaaccagggaagaggggaaaggagggcggcggcagcagccgggcgcgtctcagcgcgggccccaaa

SEQ ID NO: 7230 - DNA, 120 bp, synthetic construct
  source 1..120: mol_type = other DNA
atcccttcccccagctcgccgacccagggcggtggcccgtgactcaggcccctcgtgggactttgggaggaagcggcagctgctccgagcggggcccgcccttcccatctcctgccgctc

SEQ ID NO: 7231 - DNA, 120 bp, synthetic construct
  source 1..120: mol_type = other DNA
gaagtggaccttggagttcagtggctgaaactcagaatttagggtatggagctggacccagagaataaagtctcaagtagtagaaggggcatctccttcagtccatggatttgggcctct

SEQ ID NO: 7232 - DNA, 120 bp, synthetic construct
  source 1..120: mol_type = other DNA
ggcctttgggtatgggctcccagtaccgcatcaccagctgtggaaggataaggggctgggtatcccagtggcctagtctgcccgaccttgggagacccagacccagatctgcccccacca

SEQ ID NO: 7233 - DNA, 120 bp, synthetic construct
  source 1..120: mol_type = other DNA
tcccttactgctttcaagagccttaatgcttcctctctaggctgtgcccatctcacttttccatccctagtttctgccctcttccctaggcctcctgcaaacctggggaagaggatttat

SEQ ID NO: 7234 - DNA, 120 bp, synthetic construct
  source 1..120: mol_type = other DNA
tactgttttaccacaaaataaattaatgtatggaatacattgtacagaatacaatatacagaataaattctgtaacttactataaagttgagttgttgactggccagttgctaagaatgg

SEQ ID NO: 7235 - DNA, 120 bp, synthetic construct
  source 1..120: mol_type = other DNA
tttgagcttggaggtgatcacaacagagctgtgggtactaaggcactgcactattctttctgatttccctacaccctgcctacttctttgtaattatcactttattaaactctcccccaa

SEQ ID NO: 7236 - DNA, 120 bp, synthetic construct
  source 1..120: mol_type = other DNA
ggagctgggcgcggtggctcatgcctgttatcccagcactatgggaggcctaggtgggtggatcacgaggtcaggggttagagaccagcctgaccaacatggcgaaaccccgtctctact

SEQ ID NO: 7237 - DNA, 120 bp, synthetic construct
  source 1..120: mol_type = other DNA
agttgcggtccaggctggagtgcagtggtatgatcacagctcactgcaacctcgaacttctgggcaaatggtcctcttgcctcagcctcctgagtagttgggactacaggcatgcgccac

SEQ ID NO: 7238 - DNA, 120 bp, synthetic construct
  source 1..120: mol_type = other DNA
aaacattttcatcacccccaaataaaactccatacccatgaagttactccccattttctcatctcccccaccccacagccactggcaaccacaaatctgctcttgttctctatgggttta

SEQ ID NO: 7239 - DNA, 120 bp, synthetic construct
  source 1..120: mol_type = other DNA
atctcctgacctcatgatccacccgcctcagcctcccaaagtgttgggattacaggcgtgagccaccaggcccagttaatttttttttttttttagacggagttttgctcttgttgcaac

SEQ ID NO: 7240 - DNA, 120 bp, synthetic construct
  source 1..120: mol_type = other DNA
caagaatcagatcctccatgcaggtgatgccatatttaccaagagataaagcaatcaaagtgtcatctgtcaaagcaatttgcttcttattgatttttgccataaccatgctggtagatt

SEQ ID NO: 7241 - DNA, 120 bp, synthetic construct
  source 1..120: mol_type = other DNA
ggtgagccaccacgcctggcctttttttttttagatggagtcttgttctgttgcccaggctggagtgcagtggcacgatctcagctcactgcaacctccacttcccgggttccagcaatt

SEQ ID NO: 7242 - DNA, 120 bp, synthetic construct
  source 1..120: mol_type = other DNA
aagccgacatcgagccactgcacttcagcctgggcaacagagtgacaccttgactcaaaaagataaaaggccagtcatggcggctcatgcctgttatcccagcactttgggaagtcaaga

SEQ ID NO: 7243 - DNA, 120 bp, synthetic construct
  source 1..120: mol_type = other DNA
gagcaataactgcaacagtctggctaaagatagctgccacttatgacatctgagcatgaaactagctaattttaaaatggccatttaatacatgcatgtaagaaatcttgtatcccctaa

SEQ ID NO: 7244 - DNA, 120 bp, synthetic construct
  source 1..120: mol_type = other DNA
agtgagccgagatcgcgccactgcactccagcctgggctacagagcaagactccatctcaaaagaaaaaaaaaaagaaaaaaaaaaaagaaatactcttgctagaggccaggcacagtgg

SEQ ID NO: 7245 - DNA, 120 bp, synthetic construct
  source 1..120: mol_type = other DNA
agcaaagaaagagaaaggaaaaaaagaaagaataaagaaaaataaaaagaaatgaaatacttcagcaaagaaaatcaaaggaaaaagccgggcgcggtggctcacgcctgtaatcccagc

SEQ ID NO: 7246 - DNA, 120 bp, synthetic construct
  source 1..120: mol_type = other DNA
agaagaaaccagccttgcgggactaaggacggcagcagtcagcatcaaagctcagcccagcccctcaatcagctctgctgcctagcatttagagagagctcacaaaatgtcttttaaatc

SEQ ID NO: 7247 - DNA, 120 bp, synthetic construct
  source 1..120: mol_type = other DNA
gctccggggtgaacctagatctacctgctggttccaccttttggatctgggaggcatgaattggtgtctcaagaagctggggagaggcaggctcaggaatggctgtaagggattcagctg

SEQ ID NO: 7248 - DNA, 120 bp, synthetic construct
  source 1..120: mol_type = other DNA
ctcagaggtgacaggctggtctgtggaggcggaagcctgtagctcaggggctgtggggacaactgtttcaggagtcttgacagaggatctatctgttcttcccctagtagcctgagacgt

SEQ ID NO: 7249 - DNA, 120 bp, synthetic construct
  source 1..120: mol_type = other DNA
tcccctagtaacctgagatgtgggctcagaggtgacaggctggtctgtggaggtggaaggctggagctcaggggctgtggggacaactggttcaggggtcttgacagaggacctatttgt

SEQ ID NO: 7250 - DNA, 120 bp, synthetic construct
  source 1..120: mol_type = other DNA
ggtgccactgcactccagcctgggggacagagcaagactctgtctaaaaaaaaaaaaaaaaaaaaaaaaaattagctaggtgtgttggcaggcgcctagtagtcccagctacctgggagg

SEQ ID NO: 7251 - DNA, 120 bp, synthetic construct
  source 1..120: mol_type = other DNA
caccttgggttcccctctgccttcacttacctttctgatgcctcctggggctcactggggatccccttccacctgactggctcccagaaggtacgggggctgaggtaggtcccggaaggt

SEQ ID NO: 7252 - DNA, 120 bp, synthetic construct
  source 1..120: mol_type = other DNA
agaaaggatttagataaactcatgaataataaatctgaacaggttattaaaggtaagctgggaataagggtggtagttataacatttaacgtttgtctcaaaaaggtcatagccttaggc

SEQ ID NO: 7253 - DNA, 120 bp, synthetic construct
  source 1..120: mol_type = other DNA
ggggtacctgtgctattttgactcatgcatacaatgtacaatgataaaaccaagataattgggatatccactatctcaaacatttatcatttctttgtcttggaaacatatcaaatctct

SEQ ID NO: 7254 - DNA, 120 bp, synthetic construct
  source 1..120: mol_type = other DNA
ctacaggtgcatgccaccatgcccagctaaattttgtattttgagccactgcacccagcctatatacacattttctttttttttattattagagatgaagtctcactctgttgcccatgt

SEQ ID NO: 7255 - DNA, 120 bp, synthetic construct
  source 1..120: mol_type = other DNA
catttagtttgatttcatatctgcctattgtgaacagtgctgcaatagtgtgtgtgtgttttttttaagagacattgggggtgggggttgagggatgggctattgcccagactgggctca

SEQ ID NO: 7256 - DNA, 120 bp, synthetic construct
  source 1..120: mol_type = other DNA
tgggtagcttgtaggtccagatcttcagaatctggtcggggaggaatataagacagtttaaaacaaaaatcatacctgacactaaactccttaaataatctctacctttctctccccaac

SEQ ID NO: 7257 - DNA, 120 bp, synthetic construct
  source 1..120: mol_type = other DNA
ctgttccatatagcaggctggctctctttcagatgtgccaaagtcagcgctgctgagacttcttcctcgtcatctgtatcgctgttgataaccatggaagcttggcttttctccagaggg

SEQ ID NO: 7258 - DNA, 120 bp, synthetic construct
  source 1..120: mol_type = other DNA
aatgagttgacaattgtacactcattattcctgtctcctcattctccctgccaatatacaaacttacctacttcctcctccgagtcctcagccaacagaagcctctggggttgagtttct

SEQ ID NO: 7259 - DNA, 120 bp, synthetic construct
  source 1..120: mol_type = other DNA
cgtagagacagggttttgctatgctacccaggctggtctctaactcctagtctcaagtgatccttctgccttggcctctcaaagcacgggaattacaggtgtgagtcactgcacccagct

SEQ ID NO: 7260 - DNA, 120 bp, synthetic construct
  source 1..120: mol_type = other DNA
ggcgtgagccactgcgccccgttgtttttctttcttttttagcccatgctttttatacttttaccagaccacctcagtttgatcagatgcaactgcaaaaaatgataataaaagatgaca

SEQ ID NO: 7261 - DNA, 120 bp, synthetic construct
  source 1..120: mol_type = other DNA
tatcctgcctgttccacagtggtcaatggatttgtgcttactctaagatctctcgctatattgtaaccattactttccatttctgccttcacactcacccacctccaggactggattagg

SEQ ID NO: 7262 - DNA, 120 bp, synthetic construct
  source 1..120: mol_type = other DNA
cccaccacccacttcccgcgcagttccaaaccgcgaccagagagtctggcgccagctgccggcaacggatagaggggctgtgtcatagacgtccgacgtgtctggtaaggccagagcgcc

SEQ ID NO: 7263 - DNA, 120 bp, synthetic construct
  source 1..120: mol_type = other DNA
ttatctcacaataagacatgaagaaaatggtaactataacacttgcataattcataaagtcctttctgttggttatctcaattctgtgcacaacagtcaaataagcagattttacaaacg

SEQ ID NO: 7264 - DNA, 120 bp, synthetic construct
  source 1..120: mol_type = other DNA
ccttgctgcaattttgtttctctttcaaaacaatggctcgaaaatttccaaggaaatagcaagagggcgattcccttcttgaagtatttgagggagcagaagcttactgaagttcatgcc

SEQ ID NO: 7265 - DNA, 120 bp, synthetic construct
  source 1..120: mol_type = other DNA
cttaatcaagatttgcccctctcaagtttgttacatttatatatataacaattgtagctagcatttgcctttggaaagctgggaatcatttttcttggcaggcacattttggagaaacta

SEQ ID NO: 7266 - DNA, 120 bp, synthetic construct
  source 1..120: mol_type = other DNA
ctgcggcggcagctctttcctcagacccccagccttttgtgcgccgcgcggtggggcggtgcccagcttgggggaaggagagcggcgcttatcgaagtgtggtcgacctccatccgccca

SEQ ID NO: 7267 - DNA, 120 bp, synthetic construct
  source 1..120: mol_type = other DNA
accggcacctaccacggggacagcgacctgcagctggaccgcatctctgtgtactacaatgaagccacaggtaagggcaggagcccgggcagctcaggttcccttccctgtctcccactt

SEQ ID NO: 7268 - DNA, 120 bp, synthetic construct
  source 1..120: mol_type = other DNA
ctggaatgggcactctccttatcagcaagatccgagaagaataccctgatcgcatcatgaataccttcagtgtggtgccttcacccaaagtgtctgacaccgtggtcgagccctacaatg

SEQ ID NO: 7269 - DNA, 120 bp, synthetic construct
  source 1..120: mol_type = other DNA
tcaggcttctcagttcccttagccgtcttactcaactgcccctttcctctccctcagaatttgtgtttgctgcctctatcttgttttttgttttttcttctggggggggtctagaacagt

SEQ ID NO: 7270 - DNA, 120 bp, synthetic construct
  source 1..120: mol_type = other DNA
gctctccttaaattgacacttaatattgagtccctgtcctacggattcaaccaactggatattgggaaaagagttgtactggacatgtatagacttctcattattccctaaacaataata

SEQ ID NO: 7271 - DNA, 120 bp, synthetic construct
  source 1..120: mol_type = other DNA
ggggtagaggggggtggtggttgttgggggtaggggggtggggattggatgggaggattgcctgagcctgggaggtagaggctgcaatgagccctgaccctacccctgcaccccagcctg

SEQ ID NO: 7272 - DNA, 120 bp, synthetic construct
  source 1..120: mol_type = other DNA
caccttagcctcccaagtagctaggactataggcaagagtcaccatacctgagtctagcattcattttttttctctttttttttgaaacagtctcactctgtcacctaggctagagtgca

SEQ ID NO: 7273 - DNA, 120 bp, synthetic construct
  source 1..120: mol_type = other DNA
ccagtttagacgaatgggctataggcagaacacacacggccagggttctttctggtgccctaccacctgtttccccaaacaaagacatcaggacccacatacaataaatcactgaagaga

SEQ ID NO: 7274 - DNA, 120 bp, synthetic construct
  source 1..120: mol_type = other DNA
caggcactattctaaacactgcaaatatttgctcgagcccctcaacaattcaacagggtagtttctaattattaacccaattttaagatgaggaaacaggtatagagaggttgattactt

SEQ ID NO: 7275 - DNA, 120 bp, synthetic construct
  source 1..120: mol_type = other DNA
taggctgtttctccctaagcccctcactacaccccaccccttagtccctggttctatttcctcctttcttggtgcccacatgacctccagacctggggcagcttctctagcagcatgtcc

SEQ ID NO: 7276 - DNA, 120 bp, synthetic construct
  source 1..120: mol_type = other DNA
ctgtctgcttggccagtccagtggagtccagtgtttctctgatgagcccccgtttaatctatttttcccacgtgtgcccccttctagagtataaataccttgagggcactgagcacatgt

SEQ ID NO: 7277 - DNA, 120 bp, synthetic construct
  source 1..120: mol_type = other DNA
gatcctcccgcctccccctctagagtagctgggactacaggtgtgaaccagcacacccggctattttttgtactttttgtagagacagggttttctatgttgcccaggctgatctcaaac

SEQ ID NO: 7278 - DNA, 120 bp, synthetic construct
  source 1..120: mol_type = other DNA
tctacccttctattttaataccagttaggctgaaagcaggctgctatgttgggattaactttccatcagaattctgaaggcattcctccatggttttctagctttttaagaaatctgggc

SEQ ID NO: 7279 - DNA, 120 bp, synthetic construct
  source 1..120: mol_type = other DNA
tgcatgtgcttgacttttttttttttttttggagatggagtctcgctctgtcacccaggctggagtgcagtggcatgatctcatctcactgcaacctctgcctcccaggttcaagtgatt

SEQ ID NO: 7280 - DNA, 120 bp, synthetic construct
  source 1..120: mol_type = other DNA
aagttatagtcatttcatgcccctgttactggtaaactatctaggtcctcacctgtgctgggccagcccccatcacatcctctagtctactctcttcagataatagacttccaatggcag

SEQ ID NO: 7281 - DNA, 120 bp, synthetic construct
  source 1..120: mol_type = other DNA
aggagaggagagaagaaagaagagaagagaaggaaagaaaggaagaaagaaagactaatcaagtgcaatagtgagaagtaggtaaagagtagaacaaggagttcaatctgtaactgactg

SEQ ID NO: 7282 - DNA, 120 bp, synthetic construct
  source 1..120: mol_type = other DNA
tcactgtgccttctggattcaagcgattctcacgcctcagcctcccaagtagctggaactgcaggctcaaaccaccacacccggctaatattttttgtatttttggtagagacagggttt

SEQ ID NO: 7283 - DNA, 120 bp, synthetic construct
  source 1..120: mol_type = other DNA
tttgggtaaaggtctcaaagtacagttgattttcattgttcttggtagttctgttctataaagtagccatgaatgctgaattagttaatacctaatttgttcctagaagaaatacaggct

SEQ ID NO: 7284 - DNA, 120 bp, synthetic construct
  source 1..120: mol_type = other DNA
tgggccggatctgagctcggatccactttctcagtcagatgcctttgcacgggcacagcctgctccaaacatatgatcagccttattgatcatatcccttcttggccttctctttttttt

SEQ ID NO: 7285 - DNA, 120 bp, synthetic construct
  source 1..120: mol_type = other DNA
gcggccttcttcagttcgtaatctctctgtgccttggccatctcgatctcactcaggtactgagcagacaccttttcctgcttggctttagcttcctgtccaagcagagatcaggtagga

SEQ ID NO: 7286 - DNA, 120 bp, synthetic construct
  source 1..120: mol_type = other DNA
tgggcccccctcattttgacatccttccagatggttccctgcccctaggccaacctccacagtcatgtgggccatgatggccctctggtggccctctaacgtctccagggcaatgtgggc

SEQ ID NO: 7287 - DNA, 120 bp, synthetic construct
  source 1..120: mol_type = other DNA
actcacaggggttctggggtcactggctgggaagggaacaacagtacttaccggagaccaccatggcctcatttgggccacaagtgaaaaacatggttcaggctggagctggaggagagg

SEQ ID NO: 7288 - DNA, 120 bp, synthetic construct
  source 1..120: mol_type = other DNA
gttctgtgactccaggaaaaggggctcctgggcccagggaggtgcgcgggctggggactcggccacggcgcctcccgccggtccttgccatctgaaggccgggaggagtggggagtcggc

SEQ ID NO: 7289 - DNA, 120 bp, synthetic construct
  source 1..120: mol_type = other DNA
ccctcttcagccatcaggatctggcagaagacgatggtgagcagcagaaagagaagccttttggctgggttcggttcctcgactggcagctggcgccggacctaaggggagacaaaacag

SEQ ID NO: 7290 - DNA, 120 bp, synthetic construct
  source 1..120: mol_type = other DNA
tggtctcgatttcctgacctcgtgatctgcctcgctccctccgtccttcttctagtagtctcaagttgctattgttgccatctttacgtccacgagttcccaatgtttggttcccactta

SEQ ID NO: 7291 - DNA, 120 bp, synthetic construct
  source 1..120: mol_type = other DNA
gccataaaaagaatgcaatcctggaaaaaaaggaaaacataccacgtacacctaccaacacacatgtacacagtaaaggtgcaaagactgtatagggacagttcagcaaaactactctct

SEQ ID NO: 7292 - DNA, 120 bp, synthetic construct
  source 1..120: mol_type = other DNA
agctttcttgaagatcctaagaaaggccaggcacggtggttcacacctgtaatcccaacactttggcaggccgaggcgggtggatcatttgaggtcaggagttcgagaccagcctggtca

SEQ ID NO: 7293 - DNA, 120 bp, synthetic construct
  source 1..120: mol_type = other DNA
aagaggatgaaaagatctgagatgactccagagatttgaaatacatctggctcagatctttctaccatcattttaagcctggtgcacaaagtgaatacatatatgatctcttccactgga

SEQ ID NO: 7294 - DNA, 120 bp, synthetic construct
  source 1..120: mol_type = other DNA
ggggaaatgaaggggatgccaggatcttgttttgccactacctcccacatctggaatctgggcctccagctgggtctagttatcctcgctgtcctcccggcacagagagacctttctttg

SEQ ID NO: 7295 - DNA, 120 bp, synthetic construct
  source 1..120: mol_type = other DNA
acaatccctgacataggagtgagtcaggcctgctgcctcacctgggtactgctgcactgctgaccacaggcccagaacgggggacggcaagaatgggcactggcggaggcagaatgggca

SEQ ID NO: 7296 - DNA, 120 bp, synthetic construct
  source 1..120: mol_type = other DNA
cccagctaatttttatttattttggtagagacagggtcttgccatgttgcccaggcaggtctcaaaattctgggctcaagcgatcctcccgcctcaacctcccaaagtgttgggattaca

SEQ ID NO: 7297 - DNA, 120 bp, synthetic construct
  source 1..120: mol_type = other DNA
gggagcaccaaggcaaggtcacaaaagtggcacgatgaccctaccctgggatgcagctcagcctgacccagcccaactcaacccagctaccctggaggctgctatgagctgagccgggag

SEQ ID NO: 7298 - DNA, 120 bp, synthetic construct
  source 1..120: mol_type = other DNA
aagctgggccggccagacagtagctctgctttccctcatgttttctctccacgtctcacggattccctagagtgtctgggcctcaggccaccgtcatcctagctcctgggccctggctct

SEQ ID NO: 7299 - DNA, 120 bp, synthetic construct
  source 1..120: mol_type = other DNA
tagtcatttgtctatctttttgattgccaggagaggcacgtgccattgagatgcagccgtcttaatactggtaacctcttgacaaggcctaaaattattattaaattgtcaccattaaaa

SEQ ID NO: 7300 - DNA, 120 bp, synthetic construct
  source 1..120: mol_type = other DNA
tcaaaaaaaaaaagaaagaaagaaagaacgaaactacagtagacactcttttgtgtccagattcttttgctcagtataatatttttgtgattcatccatgtcatggcatgattcagtagt

SEQ ID NO: 7301 - DNA, 120 bp, synthetic construct
  source 1..120: mol_type = other DNA
gctactcaggaggctgagccaggagaatcgcttgaaccagggagtcggagattgcacagtgagccaagattgcaccactgcactccagcctggcgagactccgtctcaaaaaaaaaaaaa

SEQ ID NO: 7302 - DNA, 120 bp, synthetic construct
  source 1..120: mol_type = other DNA
gtaatgggagttagatgtgaacctaggtctatttcattccaaagcctagtggcatacctatttgtcagagcatagatgctagagcccatctacctgggttcaactccatgtttgtttgtt

SEQ ID NO: 7303 - DNA, 120 bp, synthetic construct
  source 1..120: mol_type = other DNA
ctttttgtctttggggttttacactgctctgatgttcatgtccttgcttatgtcttaaattgagactctgaatgggttgtgtacacactccccaggatacagtaacctttttgggtattc

SEQ ID NO: 7304 - DNA, 120 bp, synthetic construct
  source 1..120: mol_type = other DNA
tcagtttctcagtttcattagccacatttcaagagcacgataatcccatgtggccagtgattaccatatttgaaaacacggaaatagaacatttccatcattacagaaagatttgttgga

SEQ ID NO: 7305 - DNA, 120 bp, synthetic construct
  source 1..120: mol_type = other DNA
gtggatggagtgatgggggaaagcttttgttgaggcagaaccagcaggaatgtggggtagtcacacaaacacagatacaattcctggtttccctactagacacttcccaggctctcaatt

SEQ ID NO: 7306 - DNA, 120 bp, synthetic construct
  source 1..120: mol_type = other DNA
ttacaactcaggcttatataacatcggctctgccccaaattcctgccgtgtagaacacataaaaatccaaccctgcagtctgaccagtcttgcctaggttctccttacataatcataacc

SEQ ID NO: 7307 - DNA, 120 bp, synthetic construct
  source 1..120: mol_type = other DNA
gaagagaatgcatgcaggatggtcaaacctcagaaaatatccaccacattcgcattttctcttacctccattttctactttttctaattatccacaacaggggtgactaacatatcttcc

SEQ ID NO: 7308 - DNA, 120 bp, synthetic construct
  source 1..120: mol_type = other DNA
gaaatgaagaccccagaaatgctcagagaaaacaatttttttgattagtttcgatgaagaatggacagccaaggctgggtgcagtggctcacacctgtaatcccagtactttgggaggct

SEQ ID NO: 7309 - DNA, 120 bp, synthetic construct
  source 1..120: mol_type = other DNA
gcttatacagaaaggcaaaggaaggctagagtaatagttctaagttttatgattggctttgggggaaagacattctggtttctttgacctgccttggaggagagaggggagcaggagaag

SEQ ID NO: 7310 - DNA, 120 bp, synthetic construct
  source 1..120: mol_type = other DNA
gatcagaggcatttcagaaatgttaatctcacacttaagtgctagacagattggaggcaggaggaaaaacaggaagcagcagggaggttggaaaggagaattatttcataagccaggtgt

SEQ ID NO: 7311 - DNA, 120 bp, synthetic construct
  source 1..120: mol_type = other DNA
cagtgattacatggggacaatgggaatgaggaggaagaatgagaggcatttgctagaaaatgtattcaaactgatggctggtctgaaagggagttgtaggctggggtgatgagagacagg

SEQ ID NO: 7312 - DNA, 120 bp, synthetic construct
  source 1..120: mol_type = other DNA
gagaaagactgaagaaaacaggatagggaagggaaaaaggctaagcaaggatgtgagcttcagcctgagctcatggggaagctcagggcagcaaattgcaccagtcaattgcacttggag

SEQ ID NO: 7313 - DNA, 120 bp, synthetic construct
  source 1..120: mol_type = other DNA
ttatgtgctgctcattctggcttgtcctctgtgttctggttattttttgttgtccaacaaattgcctcaaaattttgtggcatgagacaaccctttattacgttcacggattctgtgggc

SEQ ID NO: 7314 - DNA, 120 bp, synthetic construct
  source 1..120: mol_type = other DNA
agctgtcattgggtcaacaataacagcaacttgaggaacctcttgagggcagggatcaggcctgttacgtttgtttactttatctttatatcctgagcattggcccaggaataagtatct

SEQ ID NO: 7315 - DNA, 120 bp, synthetic construct
  source 1..120: mol_type = other DNA
tgtgatccacccccgcgcccactgcacaccaccaaccaacctttgactttatctctttagttgatttctcagagattgcagatcaggaagggcctttggaaaccacagcttccacttccg

SEQ ID NO: 7316 - DNA, 120 bp, synthetic construct
  source 1..120: mol_type = other DNA
tccttgtagcactcaccacaactagaaataaatcatcatttttgtcctcttgtgtttaatgtctgcctagctacctgacgtaaggtctgtgactggttttcttgtttactctgatggccc

SEQ ID NO: 7317 - DNA, 120 bp, synthetic construct
  source 1..120: mol_type = other DNA
tgccgccaaaatgagcctcacagatgtacgcatgtctgtccctggcttagaactccagtggcttcccaccaggcttttagaaatatactcaaaattcttatatggtgtattagtcagctc

SEQ ID NO: 7318 - DNA, 120 bp, synthetic construct
  source 1..120: mol_type = other DNA
ctttacttcgttgtaggtggccgccattttgctctgtactcacatggcctcttcgtgcatgtggggagagagagctctcttgtgcatcctgttccttttataagaacaccagtcccatca

SEQ ID NO: 7319 - DNA, 120 bp, synthetic construct
  source 1..120: mol_type = other DNA
aaaagaatatgttacatagcaggacagtttattatgaatgtcatgtaacaacaatctactgagaattaaaaagaaactaaagtgttcctctcctctcccacctctgggcaaccaggactt

SEQ ID NO: 7320 - DNA, 120 bp, synthetic construct
  source 1..120: mol_type = other DNA
gaggcaggaggattgcttgagcccagatgttcaagaccagtctgggcaacatggtgaaaccctgtctctgcaaaaaatacaaaaattatctgggcatagtggtgcacgcctgtaatccta

SEQ ID NO: 7321 - DNA, 120 bp, synthetic construct
  source 1..120: mol_type = other DNA
gagacatcactgtcgaggtgtgggtcacaagcttacccctcccatgaggcagggttaccagctttcctatcgtttgaagaatttagcaatctgagtttattattgctgtcattctaattt

SEQ ID NO: 7322 - DNA, 120 bp, synthetic construct
  source 1..120: mol_type = other DNA
gcctaatttttttttttttttttcaggcagagtctggctctgtcgcccaggctggagtgcagtggcgcgatctcggttcactgcaagctccgcctcccgtgttcccgccattctcctgcc

SEQ ID NO: 7323 - DNA, 120 bp, synthetic construct
  source 1..120: mol_type = other DNA
ccttctaggtggaagttttaaaagctagtgtatgcttttccacatttttttttctccttcaactatagtaattggtgatattccacatagtggctgctctgtcaacctgggtcctggagt

SEQ ID NO: 7324 - DNA, 120 bp, synthetic construct
  source 1..120: mol_type = other DNA
cagcaatttgggaggcccagtcagatggatcacctgaggtcaggagtgcaagaccagcctggccaacatgctgaaaccccgtctctactaaaaatacaaaaattagttggccttagtggt

SEQ ID NO: 7325 - DNA, 120 bp, synthetic construct
  source 1..120: mol_type = other DNA
gagggattcagggtcctatcacagagactcaaatgttaagatgttggtctttaagtggatgggctcggggatatttgggctgttatgtggggaagtgacatggtcagatttttagctaaa

SEQ ID NO: 7326 - DNA, 120 bp, synthetic construct
  source 1..120: mol_type = other DNA
gatgtttctttttgagagtttggcggtagaatttgtcacaattctttacagcctagaggcaagtttgcaggaacggacggggtttgctccatggtgggactggaaaacatgccgctctgg

SEQ ID NO: 7327 - DNA, 120 bp, synthetic construct
  source 1..120: mol_type = other DNA
cgagggtcccgagttgggaaagggaaaggagagagagtccctgtatggagagggagagttccctgtatgggccaccaaaatgtttcaggggagcaacggctatctgggctggcggctcag

SEQ ID NO: 7328 - DNA, 120 bp, synthetic construct
  source 1..120: mol_type = other DNA
ccagacatgggcattcttatcctcattttgactgagtaactgggcacagagaggctgttatgcatcccaattgcagagctaggcagcggcaagcccactttcacacagcgccagctgcct

SEQ ID NO: 7329 - DNA, 120 bp, synthetic construct
  source 1..120: mol_type = other DNA
tcttgcaattcgcaaagtgaggaactgaaaagtcagctctcagggaagatttcactgtataaagtcaggtaaaaatggggaagaggcatactgggtcagagagacagggagcccttctat

SEQ ID NO: 7330 - DNA, 120 bp, synthetic construct
  source 1..120: mol_type = other DNA
tgtgcaaccatcaccatcagccacattcagaactttttcatcttcccccactgaaactccacccagcaaacaataccttcacattccccactttccttagccctggcaaccaccattcta

SEQ ID NO: 7331 - DNA, 120 bp, synthetic construct
  source 1..120: mol_type = other DNA
aaaaaaaaaaaaaaggtggaatcataaaatatttttcctcttgtgattggcttttttttttttttgagatggacttttgttcttgttgcccaggctggagtgcaatggcacaatcttggc

SEQ ID NO: 7332 - DNA, 120 bp, synthetic construct
  source 1..120: mol_type = other DNA
cctgcactccagcctggggggtacaaagtgagacgccatctcaaaaaaaaaaaaaatccaccctttaaaaatgtacaatgaaatgtgttttttttttttttttttttgagacagagtctc

SEQ ID NO: 7333 - DNA, 120 bp, synthetic construct
  source 1..120: mol_type = other DNA
ctgtctttttgattctagccatcttagtgggtatgaagtggtatttcatggtggtttagatttgcattttcttggtggttaatgatgttgaatatctttttttttttttttttgagatgg

SEQ ID NO: 7334 - DNA, 120 bp, synthetic construct
  source 1..120: mol_type = other DNA
gtaagggtccaacttcattcttttgcatgtgcatatccagtggtctcagcattagtatgccttgttacggaggaataaattttcagcttcgtaagaaaaggaccatgggcctggcaaggt

SEQ ID NO: 7335 - DNA, 120 bp, synthetic construct
  source 1..120: mol_type = other DNA
ttctccaaagtttcatttgctgtctctgctgtatgatcccaatcatttcattgtttgtgagcagcaaaactcaaatctagggagcctcatgtcccttctgcttctgactcctccctcact

SEQ ID NO: 7336 - DNA, 120 bp, synthetic construct
  source 1..120: mol_type = other DNA
ctgtcagtggttggaaattggtcatgggaggaagtatctacaccacggaataactacacacggataactgctacaaatcagggatccccatctcccccacaagctggtttgctaacacat

SEQ ID NO: 7337 - DNA, 120 bp, synthetic construct
  source 1..120: mol_type = other DNA
tcatgccactttggggcactccatctgaggcctggaatcagaggccttccgcagcttgtgtagatgctgccaaaaggctgagctcggtggcccatgcctgtaatcccagcactgtgggag

SEQ ID NO: 7338 - DNA, 120 bp, synthetic construct
  source 1..120: mol_type = other DNA
gattctcttgaggttcaatccagggctagagattgtgattaaagagatacccagattgggtatgcgtgtaaagggcaagagctatgagaccaatgtgacatttaggattaattagtccct

SEQ ID NO: 7339 - DNA, 120 bp, synthetic construct
  source 1..120: mol_type = other DNA
taaagggtgtgtgcgtgcacgcaggtgtgtttgtagttaaccttcctttagctcagcttaggaaacagcttttgtaaaactgcgtaactagtagtaggtgagagaggaatacgaatgata

SEQ ID NO: 7340 - DNA, 120 bp, synthetic construct
  source 1..120: mol_type = other DNA
agttcagagcctttattttttatttatttatttattttttgagatggagtctcactctgtcaccctggctgaagtgcaatggcatgatctcagctcactacaacctttgcctcccaggtt

SEQ ID NO: 7341 - DNA, 120 bp, synthetic construct
  source 1..120: mol_type = other DNA
gacacatttcctgaaatcatttctctagtcttttacgaaatgtctgcatttatgctggaatcatagagctgaactatcattgagataaaaattccagtctttaccccaatttacaattcc

SEQ ID NO: 7342 - DNA, 120 bp, synthetic construct
  source 1..120: mol_type = other DNA
cagagttaagccccattgttaattatatggtttggtgagggaaagagttttttttgtttttgttttggctagactaatgtaaacacagttcaaatgttgctccttcactggggacagaaa

SEQ ID NO: 7343 - DNA, 120 bp, synthetic construct
  source 1..120: mol_type = other DNA
acattagacctgggctgtccctcagcatctttgctgcacattgcatgaaacttttcagttatttcatataacttccaggtgtttgaaatacgaaatgcgtaagagacatgttcctgagat

SEQ ID NO: 7344 - DNA, 120 bp, synthetic construct
  source 1..120: mol_type = other DNA
ctgacctcaagtgatctacccaccttggcctcccaaagtgctgggattataggcgtgaaataccacgccccgcctgcacatcattctgggtggctgaatcctccactctcctggttctct

SEQ ID NO: 7345 - DNA, 120 bp, synthetic construct
  source 1..120: mol_type = other DNA
ctctcattttttccccctcttgaaataggtttgttggagaaaatggattttttttgtactgtacagctttccagtctgggttttgctgattctaccctggaggtgctatgtaagacactc

SEQ ID NO: 7346 - DNA, 120 bp, synthetic construct
  source 1..120: mol_type = other DNA
ttagtgggaagaaaatataaacatattttaaaaataaactcattgtctgtttatactaatactttctttatttttttaaaaatttttttaccagctctaggatcaaggaaaaagatactt

SEQ ID NO: 7347 - DNA, 120 bp, synthetic construct
  source 1..120: mol_type = other DNA
ttcttagatatagagtagcatccagatttccccacttctcttttttttaaatgaacattgggataaaattgacatacagtttgacctttctttacttaacaataggtgctgtcaatcagc

SEQ ID NO: 7348 - DNA, 120 bp, synthetic construct
  source 1..120: mol_type = other DNA
gcccagccaaaatttatcactctttctcttcaattgcagctgaagatttagccatagttatgcaagtcttttccactcccaagctgtagaagaatttatttccctttaatattgtgtggt

SEQ ID NO: 7349 - DNA, 120 bp, synthetic construct
  source 1..120: mol_type = other DNA
gtgaaccacggcgcctgtcctggagcccagtttttgttgataacccatgtttcctgtttccacccctcccctgctcttgatttccattaggaatttctacctttctaactggaaaagact

SEQ ID NO: 7350 - DNA, 120 bp, synthetic construct
  source 1..120: mol_type = other DNA
cagcactttgggaagctgccggacggatcacctgaggccaggagttacagacttgcctggccaatatggtaaaaccctgtctctactgaaaatacaaaaattagcaggtgtggtggcagg

SEQ ID NO: 7351 - DNA, 120 bp, synthetic construct
  source 1..120: mol_type = other DNA
gcagtgagctgaggttgtgccattgcacttcagcctgggtgacaagagcaaaactctgcctcaaaaataaagataaaaataaaagccgggcgctgtggctaacacctgtaatcctagcac

SEQ ID NO: 7352 - DNA, 120 bp, synthetic construct
  source 1..120: mol_type = other DNA
tggagattattttaggaatgtcatctctggtatggaattctacttgtcccctgtagaattctgggctggcctacccatggttcaagcttccactgaagctgtgttgacccctagtccagt

SEQ ID NO: 7353 - DNA, 120 bp, synthetic construct
  source 1..120: mol_type = other DNA
cctccaggatatggggcatcctttctgaaatgggagtcttatgacctatagtcagacaaggtaggtcaaagacagaaagatgggcaaagattcctgccttggagagataaaggagcagat

SEQ ID NO: 7354 - DNA, 120 bp, synthetic construct
  source 1..120: mol_type = other DNA
taatcccagcagtttgggaggccgaggtgggcagatcacttgaggtcaggagttcaagaccagcctgtccaatatggtaagatcctgtctctactaaaaaaaaaaaaaatttagctgggt

SEQ ID NO: 7355 - DNA, 120 bp, synthetic construct
  source 1..120: mol_type = other DNA
ctgccagtcctgtgccgtgtgcttgcactcctcagcccttgggtggtcgatgggactgggcgtcgtggagcagggggtggtgctcgtcggggaggctcgggccgcacaggagccctttga

SEQ ID NO: 7356 - DNA, 120 bp, synthetic construct
  source 1..120: mol_type = other DNA
tcttcttcattctttctcaatctcttcttctttttttaattgagatggagtctcactctatcacccaggctggagtgcagtggcgtaatctccgctcactgcaacctccgccgccgtccg

SEQ ID NO: 7357 - DNA, 120 bp, synthetic construct
  source 1..120: mol_type = other DNA
aattggagatttcacataaaaatccagattttatcctgggcaacatgggcaacacagtgagaccctgtctttacaaaaaataataaaaatcagctgggtgtggtggttcacacctacaat

SEQ ID NO: 7358 - DNA, 120 bp, synthetic construct
  source 1..120: mol_type = other DNA
gcagtgagccgagatggcatcactgcactccagcctgggtgacggagtgagactccatctcaaaaaaaaaaaaaagttaatatttaatgcattgatgtaaagctaacttcaggaccactt

SEQ ID NO: 7359 - DNA, 120 bp, synthetic construct
  source 1..120: mol_type = other DNA
ttctagggaactgtgagtaaatgtcttcctccatgaaagtgattcctgtgtctgcacgtcttgccacacctgattaaaacaaaccctggctacctttacaacccccaggtccatccagcc

SEQ ID NO: 7360 - DNA, 120 bp, synthetic construct
  source 1..120: mol_type = other DNA
aagccagagatttttatctgttttctttatggtaagttcctagaactgaaaacagggcctggcatgtatttactgaaaaagtgattaagtgctctccagttgatggctggagttcagacc

SEQ ID NO: 7361 - DNA, 120 bp, synthetic construct
  source 1..120: mol_type = other DNA
gatgcaattgcatataattccaggaactgtgagtagtaagaacccccttatcagctgtcctatttttagatatcatgattcctactgaaacattcagtggcttaagctctgcccagcatg

SEQ ID NO: 7362 - DNA, 120 bp, synthetic construct
  source 1..120: mol_type = other DNA
tggcagacgtagcctgctgcctccccaaactctatcgtcctcttctccttcaaccatggaaacttgattttgtctgtggcatccatgtgcctctttgaaacactcacctcctcagactgc

SEQ ID NO: 7363 - DNA, 120 bp, synthetic construct
  source 1..120: mol_type = other DNA
atcagctctggactgcctgctcaagtcttcttcataactgggaaaaataaacacctatgaagttaggccattgtattgagtttttgttactcaagaaccaaacacaatatttattgagat

SEQ ID NO: 7364 - DNA, 120 bp, synthetic construct
  source 1..120: mol_type = other DNA
gagctagacacagggtgctgattggcgtgtttacaaaccttgagttagatacagagtgccgattggtgtatttacaatccctgagctagacataaaggttctccaagggcccactagagc

SEQ ID NO: 7365 - DNA, 120 bp, synthetic construct
  source 1..120: mol_type = other DNA
tttccttccttacaggctatttctccatattgcttcccagatacaaaattcataaatgtatacaagccatacccatgttacccactccctcaggccctgccaaggccttgagaaactaga

SEQ ID NO: 7366 - DNA, 120 bp, synthetic construct
  source 1..120: mol_type = other DNA
ccatgatggtagaaaagggaagtctaaaaagagtttgggtctgaactggggcctaggaaaagttaatggggcagtgattttggccttttctacccacctccttgtaataatattatttta

SEQ ID NO: 7367 - DNA, 120 bp, synthetic construct; identical to SEQ ID NO: 1456
  source 1..120: mol_type = other DNA

SEQ ID NO: 7368 - DNA, 120 bp, synthetic construct
  source 1..120: mol_type = other DNA
ggaagcctagcagagaggatagctggagagtacatttcaaagtcactgccatataaacaggaattaaaaccctgatagtgggtgggatcgcctgggagagtacggaggaagaggaggatg

SEQ ID NO: 7369 - DNA, 120 bp, synthetic construct
  source 1..120: mol_type = other DNA
aggggtgactatactcagctcttctcggggctcacgaaacactttacaaaacatctttctgtatctcatttgagggtttttgcctacagtcattgccaaggccacttatctgtagttttc

SEQ ID NO: 7370 - DNA, 120 bp, synthetic construct
  source 1..120: mol_type = other DNA
ttcccacttagcagtggccgttctgctgtttcctagtcaaattccatgctgcttactgataagctgggggcactggcttctgctcttgctctttcttctggaaacattattctgttcctt

SEQ ID NO: 7371 - DNA, 120 bp, synthetic construct
  source 1..120: mol_type = other DNA
aacattcattgcttgttttgtgcttctacatatttttgactctgggagattttaaaggtctatttctaatatttgttctaggtgcatagatttgtttattcaacaagcattccaggcacc

SEQ ID NO: 7372 - DNA, 120 bp, synthetic construct
  source 1..120: mol_type = other DNA
ttgcaaaaatgtaaatcgctcactggtgactgccaggattttgatgatctaataaaatgactggcatatgaggtggggaaaatgtaccctcctgtgatcagccagaggtttcagcagcag

SEQ ID NO: 7373 - DNA, 120 bp, synthetic construct
  source 1..120: mol_type = other DNA
tcatataacgaagattccactttagtccaactcttccattttacagtgaaaggagaagattaaaacccagaaaatggaaaccctcatttatgttaaagctgagaaatcaagtgtcccttc

SEQ ID NO: 7374 - DNA, 120 bp, synthetic construct
  source 1..120: mol_type = other DNA
cagtattccctatccctaacttttcataaagtcctgagtttcttaatcacaatgttttcatccaaggaggcttttaggaacaggaccccagggttagggcaggaatacactattgttatt

SEQ ID NO: 7375 - DNA, 120 bp, synthetic construct
  source 1..120: mol_type = other DNA
atctagttttatttttctttaagagactgggagtcttgctatgtttctcaggcgggtctcgaatttctgggcataagcgatcttcctgcctcagcctctcaagtagctgggaattacgcc

SEQ ID NO: 7376 - DNA, 120 bp, synthetic construct
  source 1..120: mol_type = other DNA
ttgacttcccagctgcctttaactgtaccctgagtcagaacccaacaggccacagctgtagccctgttcatcttttgcatttatattcagtttctgggaatatctttggggatattctcc

SEQ ID NO: 7377 - DNA, 120 bp, synthetic construct
  source 1..120: mol_type = other DNA
tcttcctggaactgggtgtcatttcaggacagagaataccgggagtcataaattggccctgaagcaaacgaaagtcttccaatcctgcatgacatagcagattgttttgcttggggcttt

SEQ ID NO: 7378 - DNA, 120 bp, synthetic construct
  source 1..120: mol_type = other DNA
ggcagcatagttaatctagacacccagcattctcagtccacttccatggccttctcttcccattgcctgggtctcaaaaggcccaggacaatctcatgaggtggaccgagcagtatttgg

SEQ ID NO: 7379 - DNA, 120 bp, synthetic construct
  source 1..120: mol_type = other DNA
ggaatccctgacctccctccatccccactgttgtgtgtgtggggttctatgtgggagcagggcttctcctcactactccaaggacccccaaaccacatcccttccacagcatctgggaat

SEQ ID NO: 7380 - DNA, 120 bp, synthetic construct
  source 1..120: mol_type = other DNA
gtcagcagaaagcagagccaagcagcatcttctgcctcataaatttcaaacatgagacctcatgggaactgaaaggatttatgacataggccaggtatttaggagaaatggacactaaga

SEQ ID NO: 7381 - DNA, 120 bp, synthetic construct
  source 1..120: mol_type = other DNA
acatcttccttgactccatcttctttttgatcacctttttatggcttcctgaactgatctcatggattttttatctgcatcaaaaatggaaatggattagatgttgcgatttttagggta

SEQ ID NO: 7382 - DNA, 120 bp, synthetic construct
  source 1..120: mol_type = other DNA
cctattgggtctgcttccctggagtaccctaatacagatgggtttgtgttattgagagccctatttgctgcctccttcacaagatgctagctgaactcttgagcatgggcatcagcattg

SEQ ID NO: 7383 - DNA, 120 bp, synthetic construct
  source 1..120: mol_type = other DNA
ggggattacttgaggtcagaagttcagaccagcctggtcaacatagtgagagtccatatctacaaaaaagaaaagattagccgggaatggtggctcacgcctgtagtcccagctactcaa

SEQ ID NO: 7384 - DNA, 120 bp, synthetic construct
  source 1..120: mol_type = other DNA
gtgtgtcttgagcagaggttgagattctctagggtctggaaatttggtgctttctccccacgagtgaggagacccccacttctgcccagagcattcccaggctgaaggattgctggagaa

SEQ ID NO: 7385 - DNA, 120 bp, synthetic construct
  source 1..120: mol_type = other DNA
cctgggaggcggaggttgcagtgagccgagattgtgccactgcactccagcctgggtgacagagcgagactgtgtctaaaaaaaaaaaaaaaaagaaaaattagccagatgtggtggtat

SEQ ID NO: 7386 - DNA, 120 bp, synthetic construct
  source 1..120: mol_type = other DNA
caactcttgggctcaagcaatcctcccacctcagcctcatgagtagctgggactacagccatgtggcaccatgcctggctaatttttaaaatttttttagtagagacaaagtcttgctat

SEQ ID NO: 7387 - DNA, 120 bp, synthetic construct
  source 1..120: mol_type = other DNA
tgggttgataggttaagtaaccatggtccagtattggttattgcaatcaaaccaacagctacaggtggcttggattgttttagatggaattggtctcaaatttaaaaggtcactttgtca

SEQ ID NO: 7388 - DNA, 120 bp, synthetic construct
  source 1..120: mol_type = other DNA
acaaaaaattgaaaataagtggcttaaacaaggtagatatttatttctctgctttatccacgaggtctgagatgaaacgtccagggcaggtgtggaggctccctggcatgatggacccag

SEQ ID NO: 7389 - DNA, 120 bp, synthetic construct
  source 1..120: mol_type = other DNA
ctggcttggaagtgcagggtggtgcgaagagtgggagggaggcagggttaggtgaggaaaaaacagaaaacacaaattaatttgacaatgatatgttaacttaaaaatcacaactttagg

SEQ ID NO: 7390 - DNA, 120 bp, synthetic construct
  source 1..120: mol_type = other DNA
tttattttatacatttaaaacactattctgccgggtgtggtgacctgcacctgtagtcccagctactcaggaagctgaggcagcaggatctcttgaactcaggaggtggaggctgcagtg

SEQ ID NO: 7391 - DNA, 120 bp, synthetic construct
  source 1..120: mol_type = other DNA
tggtttatgtgtgaccctgccacccttaacccccagcagcaggggatgtcagctttctttcagggaagaacacagactccttttgagagactatagtgagataattttgtaaactgaaaa

SEQ ID NO: 7392 - DNA, 120 bp, synthetic construct
  source 1..120: mol_type = other DNA
catgatccatctgcctcagcctcccaaagtgctgggattacaggtgtaagccaccgcgcctggccagctgtaatacatttaaatgctaagtctccaccctaaggtgcacatgggtcatat

SEQ ID NO: 7393 - DNA, 120 bp, synthetic construct
  source 1..120: mol_type = other DNA
gcctcaggaaactctttatcaaagcctagaaaagccaaaggtgggcccgagagggaagaaagagacaaagagatgggaagaagatggaagtaggacacttagagtgggaaggaaaaagag

SEQ ID NO: 7394 - DNA, 120 bp, synthetic construct
  source 1..120: mol_type = other DNA
ggcttcaatgctcagcccctcttattccttctagcaagagcttcttgcaaatacctcaatttttttttttatcttctgcagctgatgctcaaactgtcaacttgttacttgagaccatga

SEQ ID NO: 7395 - DNA, 120 bp, synthetic construct
  source 1..120: mol_type = other DNA
tctcgggttcaagcaattctcttgccatagccacccacatagctgggactacaggcacccaccaccaagcccggctagttttttgtattttagtagagaggggtctcaccatgttggcca

SEQ ID NO: 7396 - DNA, 120 bp, synthetic construct
  source 1..120: mol_type = other DNA
gcagtgatcactattgtacaatagttacttaaactcaggaggcagaggctgcagtgagccaagatagctccactgcactccagcctgggtgacagagcgagactctgtctcaaaaaaaaa

SEQ ID NO: 7397 - DNA, 120 bp, synthetic construct
  source 1..120: mol_type = other DNA
actcaccaaactcaggagaatgttatacttacgattacaggcttgttacaaaggatacaaatcaggaggaccagactaatgaagacacacgtagggcggggtctgggcgggtcttccatg

SEQ ID NO: 7398 - DNA, 120 bp, synthetic construct
  source 1..120: mol_type = other DNA
gagataattctaattattattgtttttcaaatgttagccagttgaaccatttatcataatcaaggtgataatatggcttattttctttggcctacagagatgataaatttgaatatattt

SEQ ID NO: 7399 - DNA, 120 bp, synthetic construct
  source 1..120: mol_type = other DNA
agagattctgtgaagggttaaaacaaacagtccaaattcacagtgctgcaaatgtctgtaattgcataatctgcaaaatatattcttcaagaaatcctctgtgcacttggtttcccttaa

SEQ ID NO: 7400 - DNA, 120 bp, synthetic construct
  source 1..120: mol_type = other DNA
ggaaggagaattgcttgaacctgggaggtggagggtgcagtgaaccgagattgtgccaccgtactccagcctgggtgacagagcaagactgtctcaaaaataaaaataaaaaaagaaaat

SEQ ID NO: 7401 - DNA, 120 bp, synthetic construct
  source 1..120: mol_type = other DNA
gggtgcacagaagtcaagaattgaggtttgagaacctctgcctaggtttcagagcatgtatgtaaatgcctagatgtctaggcagaagtttgctgcaggggtggagcccttatggagaac

SEQ ID NO: 7402 - DNA, 120 bp, synthetic construct
  source 1..120: mol_type = other DNA
atgtacaacatgcttttgctcctccttcactttccaccatgattatgaggcctccacagccatgtggaactgtgaatccattaaatctctcttccttccttcccttccttccttcctttc

SEQ ID NO: 7403 - DNA, 120 bp, synthetic construct
  source 1..120: mol_type = other DNA
ctgggcccaggtcacaggtataacctgcaataagaagagacaagagtctgagggctgaccatctgtgggcccacaagttaaggaaaccaaagtttgggtgcacaaatcattactggaaag

SEQ ID NO: 7404 - DNA, 120 bp, synthetic construct
  source 1..120: mol_type = other DNA
agcccagcaggtctcagcctcattttacccagcccctatttaagatggagttgctctgattcaaacatctccgacaaaaccactgattgggtatagagtcccaaccagccagttattgaa

SEQ ID NO: 7405 - DNA, 120 bp, synthetic construct
  source 1..120: mol_type = other DNA
gactcctgatgttggaactgttaatgagaaacacactttgtcttttgacatacagtttttctctcagctgctgaacctggattctacctacacaggttcattgtgtatgcatgcttctat

SEQ ID NO: 7406 - DNA, 120 bp, synthetic construct
  source 1..120: mol_type = other DNA
aggagattcaacctttttagaagctcactgttttgagtaagagccactgtttgccagatcccagccccctctgcctctaccatctgcctcatctcttctatagctgcagaggaattaaca

SEQ ID NO: 7407 - DNA, 120 bp, synthetic construct
  source 1..120: mol_type = other DNA
gcagttatgatttaatgtccaagactttgttattggttcaagtttatcatgcatggatgcttcttctgcttggatgagttttgtgcgtgcagcttgtcaactctcaggcaaacaaacaga

SEQ ID NO: 7408 - DNA, 120 bp, synthetic construct
  source 1..120: mol_type = other DNA
caaaaattctggcagcaaaaatggatgatgtggccaggcatgctggctcacacctataatcccagcactttgggaggctgagatgggtggatcatctgaggtcaggagtttgagaccacc

SEQ ID NO: 7409 - DNA, 120 bp, synthetic construct
  source 1..120: mol_type = other DNA
ggctacagtccccatgcaagtccaaaatccagtggggcagtcaaatcttaaagctccaaaattatctccattgactccatgtctcacatccaggtaacactgatacaagagatgggttcc

SEQ ID NO: 7410 - DNA, 120 bp, synthetic construct
  source 1..120: mol_type = other DNA
aacactttgggaggccacggcaggcagatcacttgaggtcagtagttcaagaccagcctggtcagccaacatgatgaaaccctgtctctactaaaaatacaaaattagctggacgtggtg

SEQ ID NO: 7411 - DNA, 120 bp, synthetic construct
  source 1..120: mol_type = other DNA
ttccccttataaaaccatcagatctcatgagacttattcactaccatgaaaacagtataggggaaaccacccctgtgattcagttatctcccaccaggtccctcctgcaacacatgggaa

SEQ ID NO: 7412 - DNA, 120 bp, synthetic construct
  source 1..120: mol_type = other DNA
gactactaacgttccttgggttttctgtgagtgtgaccagtctcctcagctcccagctggcacataaaggagatgtgttcttttcttgccgatgtgaggctacaggatctcatgaggaac

SEQ ID NO: 7413 - DNA, 120 bp, synthetic construct
  source 1..120: mol_type = other DNA
actctgactcaaaaaacaaacaaacaaacaaaacaaaacaaaaaaacaaagtgtgtagtacctcccccttcactttccctctctcccactccaccgtgtgaagaaggtgtttgcttcccc

SEQ ID NO: 7414 - DNA, 120 bp, synthetic construct
  source 1..120: mol_type = other DNA
gacaagatgtgaacttcatgtctcaattgatgatcacgtggttgtgtggtggtgcagattgtgtttttgatgtgcagcaggatttgggcagtacagaggatgatgtcagcatatcaccat

SEQ ID NO: 7415 - DNA, 120 bp, synthetic construct
  source 1..120: mol_type = other DNA
cttcatatcatcctttataatactatgccaatctgatcatggccaggttcaacttcttttttaaaggcttcccagagactactgaatcttatgacccaaatctctttgcatggcagacaa

SEQ ID NO: 7416 - DNA, 120 bp, synthetic construct
  source 1..120: mol_type = other DNA
tcgattcactcttccttttgtgagagatttctctgtagcatgtgatgctgtttgatacatgttacccacagtaaaacttcttttgaaattggagtcaattctctcagaccctgctgcttc

SEQ ID NO: 7417 - DNA, 120 bp, synthetic construct
  source 1..120: mol_type = other DNA
tttccaaaagattttcaatgtattttgcccagatatgtcagaaaaatcactatccattgcagctataaccttacaaaatttattcttaaataataagacttgaaagttgaaatcactcct

SEQ ID NO: 7418 - DNA, 120 bp, synthetic construct
  source 1..120: mol_type = other DNA
tttaattaaaaaatgacttaaaatatatgctatgtggcatacagcgtatctaatttagtggttctgtggtatcacctcaaagaaattagcagttttacaccagagcaaattaaagtgatg

SEQ ID NO: 7419 - DNA, 120 bp, synthetic construct
  source 1..120: mol_type = other DNA
ggaggtctgtagatggctgctctgggagtgtctgtcttatgtggttgagataaggactgaaatatgccctggtctcctgcagtaccctcaggcttactaggattgggaaattccagcctg

SEQ ID NO: 7420 - DNA, 120 bp, synthetic construct
  source 1..120: mol_type = other DNA
ctttacttttttttttgagacagagtctcactctgtctctcagactggagtgcagtggcatgatcttggctcactgcaacttctgcctcctgggttcaagcaactctcctgcctcagcct

SEQ ID NO: 7421 - DNA, 120 bp, synthetic construct
  source 1..120: mol_type = other DNA
ccccttcattcatgaagggtatttttgatggctacaggatactgggctgacagttattttcctttggcacttgaaaaaaatgtcatttccttttggttttcatggtttctgaaaagcaat

SEQ ID NO: 7422 - DNA, 120 bp, synthetic construct
  source 1..120: mol_type = other DNA
gagtgtagtagtgcaatcttggctcactgaaatctctgcctcctagctcaggtgatccttccgcctcagccccccaagtggctgggactacaggcatgtgccaccacacctggttaattt

SEQ ID NO: 7423 - DNA, 120 bp, synthetic construct
  source 1..120: mol_type = other DNA
agtctcagaattttttctaagaggctgatttgagcataataagactccagtcttctccttcgccagctctacatgtgaaaaactctttctctactgcaattcccctgcctttataaattg

SEQ ID NO: 7424 - DNA, 120 bp, synthetic construct
  source 1..120: mol_type = other DNA
ccatgacagtttacaaatgccatggcaatgtcagcaagttaccctatatggtctaaaaaggggggctgggtgccctggctcacgtctgtaatcccagcactttgggaggccgaggtaggc

SEQ ID NO: 7425 - DNA, 120 bp, synthetic construct
  source 1..120: mol_type = other DNA
ttgattctatcctgtaaactgtccttggagttttccccaggtgactgccctctgacttcttcactttgtgaatcagtccttcacatcttcctctcttagtagcccagaaaccccaggttc

SEQ ID NO: 7426 - DNA, 120 bp, synthetic construct
  source 1..120: mol_type = other DNA
cagttataaaaccaaagcaaagtagccataggtacaaacaaaagtataaagacaagtttaacattaatgtaataaatagtgtttttctgaaatgaagttgctgctggcaacagaccatgt

SEQ ID NO: 7427 - DNA, 120 bp, synthetic construct
  source 1..120: mol_type = other DNA
tttgaacccgggaggcagaggttgcagtgagccgagagcgtgccattgcactccagcctaggcaacagggcgagactctgtctcaaaaaaataaaaataaaaaataacaggacatgatgg

SEQ ID NO: 7428 - DNA, 120 bp, synthetic construct
  source 1..120: mol_type = other DNA
tctgggtaggaagcagccacttgccattaagtggcaattaaattgctattgcaatttaaggtaaatcgcagcccctctgggcctagttttcttttttctcactctttttttggcgataga

SEQ ID NO: 7429 - DNA, 120 bp, synthetic construct
  source 1..120: mol_type = other DNA
cctaacactctctagattgtaaaggcctggaaggtggggagtgggttccattactgaatgcatctttcatagctctcgctgtcagagccctgccctatgcaaactcttttatttttattt

SEQ ID NO: 7430 - DNA, 120 bp, synthetic construct
  source 1..120: mol_type = other DNA
ccttaactctccctctcagacgcagagccctgctttctcccctcccatttgatactctgcttcctcttgcatgctgtgagaggcggcctcattactcctcttccctcctccagtccctcc

SEQ ID NO: 7431 - DNA, 120 bp, synthetic construct
  source 1..120: mol_type = other DNA
ttctgtttcacagttctcagcctcccctccctttctccacagccaggctgctcagtccctctctgcgggggcctagaggctcggtgaggggagcgggacttggttgccatggtcacattg

SEQ ID NO: 7432 - DNA, 120 bp, synthetic construct
  source 1..120: mol_type = other DNA
tgggaattctctcaccattgtccccatctgaccatcagcctcctctccctcttctggtcccttgcccttttcttccccaaccacagctgagctgtttcatctctctcccagagctacgtc

SEQ ID NO: 7433 - DNA, 120 bp, synthetic construct
  source 1..120: mol_type = other DNA
ctctagctccttctgctctccccagtggacccctctgtctggcactgccatgccacttagctggggtcagcgtgggcctggggtgtggaatgtcccaccagggtatgacgggctgtagct

SEQ ID NO: 7434 - DNA, 120 bp, synthetic construct
  source 1..120: mol_type = other DNA
ggcctgagggaggcttgccctgaggactcctgagtccccctcccactccactccgttgggagcccaggggaatcagggcctgggcgtctggacccccgggtcccttagaacgcccttcag

SEQ ID NO: 7435 - DNA, 120 bp, synthetic construct
  source 1..120: mol_type = other DNA
ctggctccctccgcctcccccgcccctcgccccgccgccgaagaggccccgctcccgggtcggacgcctgggtctgccgggaagagcgatgagaggtagggagagcggcggcggaacccg

SEQ ID NO: 7436 - DNA, 120 bp, synthetic construct
  source 1..120: mol_type = other DNA
tgtcttttggtcacaggagcatgtggtgtctgtcatttcatgttcacaggtgtctgaaggtggctattcactgagcgatggggttggacttgaaggaatgccaaggtgtggacgggttga

SEQ ID NO: 7437 - DNA, 120 bp, synthetic construct
  source 1..120: mol_type = other DNA
ctgcctcttacattcctgccctagtgcattgtgggagcagctggaggaggacaaagggatgggggagtatcccccactcctcctacctcctggggtgacctgccttccttgtctttagac

SEQ ID NO: 7438 - DNA, 120 bp, synthetic construct
  source 1..120: mol_type = other DNA
actcttgttatattgtattctattgttatattctattatatattctctccttctagacgtacacacaggtatatatacaaacatgggtgcttgtttattctattttcaaaaggtgggata

SEQ ID NO: 7439 - DNA, 120 bp, synthetic construct
  source 1..120: mol_type = other DNA
ttctaagccgttgtttatggggatattttgcccattcctgattggagaaatggggctttaggaagttatttaactgatctctgccctagtttcttcatgtgttaaatatggatagtaata

SEQ ID NO: 7440 - DNA, 120 bp, synthetic construct
  source 1..120: mol_type = other DNA
caaggaggaggagtacttgcaggtggatctacaacgactgcacctggtggctctggtgggcacccagggacggcatgccgggggcctgggcaaggagttctcccggagctaccggctgcg

SEQ ID NO: 7441 - DNA, 120 bp, synthetic construct
  source 1..120: mol_type = other DNA
agctggtgcaggatgctcagcctgacctggctcctgcctgcatcacttgtttcttggcgcctccttggccacgctgcctttcttcttgttgctggaacaagccagggctcgttcccacag

SEQ ID NO: 7442 - DNA, 120 bp, synthetic construct
  source 1..120: mol_type = other DNA
ggagtgtggagaatgggcatccaggatcccttctcctgctgggaagctgtcactctgaggagggggctagccagcattgtctcctccatgccaatgagccagtggagagatacaagaagg

SEQ ID NO: 7443 - DNA, 120 bp, synthetic construct
  source 1..120: mol_type = other DNA
gactatgtgggatggagcaaccacagcttctccagtggctatgtggagatggagtttgagtttgaccggctgagggccttccaggctatgcaggtgagtgagtccggctctcgaggaggg

SEQ ID NO: 7444 - DNA, 120 bp, synthetic construct
  source 1..120: mol_type = other DNA
ccttctccccagatgtggtgaacaattcctctccggcactgggaggcaccttcccgccagccccctggtggccgcctggcccacctcccaccaacttcagcagcttgggtgagcaatctt

SEQ ID NO: 7445 - DNA, 120 bp, synthetic construct
  source 1..120: mol_type = other DNA
aaacaaacaaaaaaaaaacggttgatagttatggactgggcagatgagggttagaatctcattgtgggacagggaagttacctccatgctcttgagcttcactttctctgcctgtaagat

SEQ ID NO: 7446 - DNA, 120 bp, synthetic construct
  source 1..120: mol_type = other DNA
caacaaaacatctgtttaccatccatccatctattcatacgtcccatctgtccatgcattcattatccagccagccgtccgtcactctgcagatccttgttttatcctgtctgtctctta

SEQ ID NO: 7447 - DNA, 120 bp, synthetic construct
  source 1..120: mol_type = other DNA
gggttgaaagggttgggagggcttggccccagggggagccaggctgaaagccacgggagagcagctaagtgaaggggagggagctgtggtgaacgggacaagggtttggaaggtggaggg

SEQ ID NO: 7448 - DNA, 120 bp, synthetic construct
  source 1..120: mol_type = other DNA
tggtagctgtcaagatcttacggccagatgccaccaagaatgccaggtgaggaccagggatggcatctggaagaagggaggggaggccgtgaagagtggggagccatctagagagaacaa

SEQ ID NO: 7449 - DNA, 120 bp, synthetic construct
  source 1..120: mol_type = other DNA
gtcggttcccttctcagctacccaatgctgctgcatgtggcagcccagatcgcctccggcatgcgctatctggccacactcaactttgtacatcgggacctggccacgcggaactgccta

SEQ ID NO: 7450 - DNA, 120 bp, synthetic construct
  source 1..120: mol_type = other DNA
cttccgggaccagggccggcaggtcagagtggaggagagggaagatgggtccgaggcgggggacagaaggggcagagttgtcatcttggagactaaagaatatttgttccctgactctca

SEQ ID NO: 7451 - DNA, 120 bp, synthetic construct
  source 1..120: mol_type = other DNA
catagccttggggttggacatctctagtgtagctgccacattgatttttctataatcacttggggtttgtacatttttggggggagagacacagatttttacactaatatatggacctag

SEQ ID NO: 7452 - DNA, 120 bp, synthetic construct
  source 1..120: mol_type = other DNA
tgaaactaatgtgcttctttttcatgtatttaataacaagatctaaaaacaggtgtaataaactgacattttccaaatactaatgagcataagccatatttgagatttctacaacagtca

SEQ ID NO: 7453 - DNA, 120 bp, synthetic construct
  source 1..120: mol_type = other DNA
ccgataggttagagtttagaggccagatcccagaataatgagcgatggaagccacggcagtgagcctgataacccaaatctctgagctgtctttcaagcagaaacacctggagttaattt

SEQ ID NO: 7454 - DNA, 120 bp, synthetic construct
  source 1..120: mol_type = other DNA
agtacttcctgccacgtggccttcgtggcatgctgttccctcacctggaacaatgttccctgcagtctgtgccttattaactcctgcttgtccttcagcagtctttcctgacttccccaa

SEQ ID NO: 7455 - DNA, 120 bp, synthetic construct
  source 1..120: mol_type = other DNA
acgcctggccctggctctctgttctttctctccaggatgctgcctgagaggaggaggtcatgagctccctatcacaggaattttcttttttgaactaccatgcccactaacatgctggcc

SEQ ID NO: 7456 - DNA, 120 bp, synthetic construct
  source 1..120: mol_type = other DNA
cggggtttcacccgctcaggctagtctcgaacttctgacctcaagtgatccacccgcctcggcctcccaaagtgttgagattataggtgtgagccactgcctccggccgatttatttatt

SEQ ID NO: 7457 - DNA, 120 bp, synthetic construct
  source 1..120: mol_type = other DNA
ctttctctttccttctttccccctccctaaccctcccttcctctcccctccccaattctcccctctccagttctcccctgtcctctcctctcttcccctctccttttgggacagggtctc

SEQ ID NO: 7458 - DNA, 120 bp, synthetic construct
  source 1..120: mol_type = other DNA
ggggtctccctctgtcacccaggctggtgcgatcatagctcactgtagcctcaaactcctagtctcaagcgatcctcctgcctcagcctcccaagtagctgggggtcacagctctgagcc

SEQ ID NO: 7459 - DNA, 120 bp, synthetic construct
  source 1..120: mol_type = other DNA
cagcttctggtgtctcccctcgctcaattaaaagccagctcctctcctttcggcttccccacggtgcctttcgggatttgtagtcagacgcgcttcagccggctctaaggagagcaaagg

SEQ ID NO: 7460 - DNA, 120 bp, synthetic construct
  source 1..120: mol_type = other DNA
gatgagtgacatgggaaaggagaccacagaaaaggtggggttattgtggggactgatggatctggaatcagttagaaaggtcaggggtgacactggcatggatggtgaggttgcacttct

SEQ ID NO: 7461 - DNA, 120 bp, synthetic construct
  source 1..120: mol_type = other DNA
aatgcagtaaagaatttgtcttaggaagatactaatttcactctgtggaacagtgttccaagggtcagcaagttcagaacaggcagagatggtggcttttatgggcctcctttttgtttt

SEQ ID NO: 7462 - DNA, 120 bp, synthetic construct
  source 1..120: mol_type = other DNA
acaagtacgccgaggagcgatgggaggtaagcacttgggagtgtgtgtgtctctgcttgtgcttctacttcccatggcccttggggcatggtctccctgttctcttctgttcttcaggtg

SEQ ID NO: 7463 - DNA, 120 bp, synthetic construct
  source 1..120: mol_type = other DNA
gaaggtatgagtgattctctgttgaacttcctgcaacatctgcgtgagtttgggcttgttttccagaggaaggtatgagcgcctagataagtggcttccagggaagaaacagggtggtgt

SEQ ID NO: 7464 - DNA, 120 bp, synthetic construct
  source 1..120: mol_type = other DNA
tctgtgtttgaagagaaatgaaggctttgggtgtgagaataggtagacccttgaggggaaaaaaacatggagggaggaggtatagatctggatttgtgcctcggcactgccacatcctaa

SEQ ID NO: 7465 - DNA, 120 bp, synthetic construct
  source 1..120: mol_type = other DNA
gacagttttttgttgttttggggtgagtcggtagtaaacaaatcgtcccaaatcaatgcactttggatttggctaggtgagggaataattcacagtaatttgtattaggcctttctgaat

SEQ ID NO: 7466 - DNA, 120 bp, synthetic construct
  source 1..120: mol_type = other DNA
aggcccctgtgcaggtggagatcgccgcggccctggcgggactccttgctggctcttgggcgcgctgatgcccatcatctccctgagtttctgagccctatctctcatgtgtcagtggtc

SEQ ID NO: 7467 - DNA, 120 bp, synthetic construct
  source 1..120: mol_type = other DNA
gtggtgggtacgagagggcttcttcaaaccagaatatcaggttagtatctggcagggaggggtcctaaattgtctccaggacagagtggcccttgaatacaactggacctcagagttgag

SEQ ID NO: 7468 - DNA, 120 bp, synthetic construct
  source 1..120: mol_type = other DNA
attttctttctctttacttaccccaatttctcttgtctaaatctcaccttcttccactcgcccattcccacctttcaattcccatggaattaccctcattcttctgggtctgttatctca

SEQ ID NO: 7469 - DNA, 120 bp, synthetic construct
  source 1..120: mol_type = other DNA
gaatgcttgcatcgtgggggtgttgtaaaaattaaatgagaattcacataggtgcttggcaagatacctggccatggcttaagtgctcagtgaatatttattagaagtgtgactgcacga

SEQ ID NO: 7470 - DNA, 120 bp, synthetic construct
  source 1..120: mol_type = other DNA
ggtttttacggtaaatgttctgaagagctcagagaaagggaagacagatgagctggaattgtcagtggaagcttcttgtaggagctggtgctccccctgaggaatgtacagcatttgtga

SEQ ID NO: 7471 - DNA, 120 bp, synthetic construct
  source 1..120: mol_type = other DNA
gcgtggcaccatgcccggcacgtgccaccacacccagctaattttttgtatttttacaaaaattagtaattaattttttttaagtaatgtaatttttaagtaatgttatttagtagagac

SEQ ID NO: 7472 - DNA, 120 bp, synthetic construct
  source 1..120: mol_type = other DNA
ggtggtaccaccctatgttaccccatcctttgggggctctctgtccccctaatcctcctcctagtttcttatttctctagaggccttcagtctttactcttgccgctttttctccagggt

SEQ ID NO: 7473 - DNA, 120 bp, synthetic construct
  source 1..120: mol_type = other DNA
ggggaggggggactgactggttattctaagacttcacgaatgtcctcccggcagggactggtgtgtctcccggcagctgtggtggggccatcagattccagcctacctggttgtagagga

SEQ ID NO: 7474 - DNA, 120 bp, synthetic construct
  source 1..120: mol_type = other DNA
ctaccccctgtcacttttggaaacgggcagcgaccttctgctgttctgggtgggccgcatggtcatgttggggacccagctcacagggcagctgcccttcagcaaggtaagagcccttca

SEQ ID NO: 7475 - DNA, 120 bp, synthetic construct
  source 1..120: mol_type = other DNA
ccttccagcgggcgacttgcacctgtcagtctctgaggtccagagctgccgacatttctgcaacaagatctggaatgctcttcgctttatcctcaatgctttaggggagaaatttgtgcc

SEQ ID NO: 7476 - DNA, 120 bp, synthetic construct
  source 1..120: mol_type = other DNA
agccttttaaaaacctctgtcccctgttgataagcaaaaaactcaatgatttttttccctaaactacatgtttccctggaaatcctgtccctgtgtactgcagagaattgctgtcctgga

SEQ ID NO: 7477 - DNA, 120 bp, synthetic construct
  source 1..120: mol_type = other DNA
tttaaattctaatttatttttggttggccatttcaatcacagcaactaaacaggcatcaaacactgatcatctaaaacctcttaaatgacgcctcactttttgtcatgttccttgagata

SEQ ID NO: 7478 - DNA, 120 bp, synthetic construct
  source 1..120: mol_type = other DNA
gaaggggaggcagggactcagaggcaacaaaaggtaaggctgagggaggcccccagaaggctccacccctgagggaatgtgggccaggaggggcctcattcctggatcctcacctccttt

SEQ ID NO: 7479 - DNA, 120 bp, synthetic construct
  source 1..120: mol_type = other DNA
catggaattcaagggcctggcccttccacgcccagagtacattctgtccagcagctctgagtagcctgtcctgggctgggtcctctgtggtgctagatgtacaatgccatttaatcctac

SEQ ID NO: 7480 - DNA, 120 bp, synthetic construct
  source 1..120: mol_type = other DNA
tttcttctgctgggcataagtagtgcagagatctgcaataatgggagcccacacctccttcaatcttattttcctgccattctgatgcattgtcaaacttcatgtccaaggtctgcacca

SEQ ID NO: 7481 - DNA, 120 bp, synthetic construct
  source 1..120: mol_type = other DNA
cttttcctcctctgaaatggaagctcctttcttttcaaggatactaccagaaagttgcccacctcctttctacttgcatcctattggacagaacgtgatcacatggccacagctagctgc

SEQ ID NO: 7482 - DNA, 120 bp, synthetic construct
  source 1..120: mol_type = other DNA
aggctggtcttgaactcctgacctcaggtgatccacctgacttggcctcccaaagtgctgggattacaggcgtgagtgagccactgcgcctggccaagataatcttgagaaggtggtcag

SEQ ID NO: 7483 - DNA, 120 bp, synthetic construct
  source 1..120: mol_type = other DNA
ccaccccaattacctgtgtggatccatgggccaggggaaccatgtcctgggggtgttctgcctatgtctctttctttggtttttgagcccctggccccaatgcttaagcaaagggaaatg

SEQ ID NO: 7484 - DNA, 120 bp, synthetic construct
  source 1..120: mol_type = other DNA
cataggaggaatttgtcagaaaagactccttcagcttcagttgcaaagtcatacccggccctgcggatccagaagtacagcttaggacccagcagtcagggctgattcctccggagacac

SEQ ID NO: 7485 - DNA, 120 bp, synthetic construct
  source 1..120: mol_type = other DNA
gagtagaacaaggagttgggtctataatggactgtgaacactgcttccccagccttggtggctttctagatgagaaatctggtcatgggaacttccattgctgaacattctgttttactt

SEQ ID NO: 7486 - DNA, 120 bp, synthetic construct
  source 1..120: mol_type = other DNA
cccaggctggggtgcagtggtgcaatcttctcctggctcagcctcccgagtagctgggattacaggcacccgccaccacagcaggctaatttttgtatttttagtagagacaaggtttca

SEQ ID NO: 7487 - DNA, 120 bp, synthetic construct
  source 1..120: mol_type = other DNA
gggacaggttaatcccctgggacaacttggcgacctctctctggggatggagattctggtgttggtggaggccccggcacaactggctctcccgggactcataataggccccagagcctt

SEQ ID NO: 7488 - DNA, 120 bp, synthetic construct
  source 1..120: mol_type = other DNA
atccatctcaagttaatttctgtgtatggagcgaggtggaagtcaagattcattttttcttcttatgaatatccagaaccattatttccaaggaccctcccctgtccctgccattgaacg

SEQ ID NO: 7489 - DNA, 120 bp, synthetic construct
  source 1..120: mol_type = other DNA
tacctggctgctttctcgaaaggttttcatctttcttcctcatgatctaatctctctgttcagggcgagaggcattccttccagagatcacccctccttcttccatcatcctcctcccct

SEQ ID NO: 7490 - DNA, 120 bp, synthetic construct
  source 1..120: mol_type = other DNA
acgtggaagcactcaactcagctctaggcaatgaaggaccagttctgtggagccacattcacctgggcttgaatccttgtgcaagttacttaatctgtctgtgctccggattcttcatta

SEQ ID NO: 7491 - DNA, 120 bp, synthetic construct
  source 1..120: mol_type = other DNA
gaaggaaggaccagggctaagtggtctgcaggcaccttccagccctcacggagcccaggtctggacagctggaacccctgcccctcaccctctcttcctagtcccaccctcctccctgac

SEQ ID NO: 7492 - DNA, 120 bp, synthetic construct
  source 1..120: mol_type = other DNA
ttccaaatgttccctgatgtgggcaaaattactcctccctgtacagaaccaccgtcctagaggcttgggtccctggggaaagggggggggggaaggggaccagtgaaaagggggactgtc

SEQ ID NO: 7493 - DNA, 120 bp, synthetic construct
  source 1..120: mol_type = other DNA
tctgtgtccctggtgaggggtgtgacatatgtccctgtggttctgtgtcttgtctctgtcactgcctctgcactctccacatattgttgtatgacctctgaacatcatgaagcacctttc

SEQ ID NO: 7494 - DNA, 120 bp, synthetic construct
  source 1..120: mol_type = other DNA
gctgcacccatccagagggggtttcttcaagtttgcataaagacactgtagaggctgccagccctggatggtgggggtaggcacctgacattcattgagcaccgtgcacggaattcacag

SEQ ID NO: 7495 - DNA, 120 bp, synthetic construct
  source 1..120: mol_type = other DNA
atggacaagttcgacgaacaaaacataccctaaagataagatgaaattatgaaattagttcacttagtcaagaaacggactgctactgaacccggggagcagagatgctgaacacagggg

SEQ ID NO: 7496 - DNA, 120 bp, synthetic construct
  source 1..120: mol_type = other DNA
ggaccagtcaacacccagacagataactagatcctggaaccccagagtctgcatcatgcagtcacagaaccacaggtacaatctagattaaatcatccgagggcagcacaggtgcagtcc

SEQ ID NO: 7497 - DNA, 120 bp, synthetic construct
  source 1..120: mol_type = other DNA
ccttccttccttccttttctttcttttcttccttttctttccctttctctttctttctttctctgtctctctttctttcttctttcgacagagtctcactctgtggcccaggttggagtg

SEQ ID NO: 7498 - DNA, 120 bp, synthetic construct
  source 1..120: mol_type = other DNA
tctaggctggagacagcgatgaacaaaacaataaaaatccctgccaggccaggccaggccaggccaggtgcagtggctcacgcctataatcctaatattttaggaggctgagatgagagg

SEQ ID NO: 7499 - DNA, 120 bp, synthetic construct
  source 1..120: mol_type = other DNA
tggattcaacaaacatttaaatagcttctgtgctccagagtcttccatggtccatacttcctttaatcctcacattaagctggtgcagtcagcatcatggttatttacagtcgagaacat

SEQ ID NO: 7500 - DNA, 120 bp, synthetic construct
  source 1..120: mol_type = other DNA
cattcagcccccttctctcccctcattctcaattcctttcagagacttgggcttctctattaccctcacacccttcttgtcctgcccatatttctttcaaggactaagctccccaggccg

SEQ ID NO: 7501 - DNA, 120 bp, synthetic construct
  source 1..120: mol_type = other DNA
cagaatggtgaataaagaccttttcaagcactgaaatgaagctggattttatctgcttagacggatcagaaaagatgccttaaagccagaaggccttgagatggagagttgaggagatgt

SEQ ID NO: 7502 - DNA, 120 bp, synthetic construct
  source 1..120: mol_type = other DNA
aagaccacaggaaccccagaagagtcagaaaaaactgaagattccagaacaacagttgcctcagacaagctcctgacaaaaactacaaaaaacatacaagagaccatatcagccaatgag

SEQ ID NO: 7503 - DNA, 120 bp, synthetic construct
  source 1..120: mol_type = other DNA
gagcctacagaaaatggagacaggactcctttggccaatgagaagaccacgccatctctagcagagcctacagaaaatggacaaaggaccccatttgccaatgagaagaccacatcatcc

SEQ ID NO: 7504 - DNA, 120 bp, synthetic construct
  source 1..120: mol_type = other DNA
gagcctacagaacatgaagaaatgaccccattggccaatgagaagaccacactatccccagcagagcctacagaaaatggagaaaggaccccatttaccaatgagaagaccacaccatcc

SEQ ID NO: 7505 - DNA, 120 bp, synthetic construct
  source 1..120: mol_type = other DNA
aaagggaaaaacacaccagtcccagaaaagcctacagaaaacctggggaacaccacactgaccactgagaccataaaagccccagtaaagtccacagaaaacccagaaaaaacagcagca

SEQ ID NO: 7506 - DNA, 120 bp, synthetic construct
  source 1..120: mol_type = other DNA
cagtacaatgatgcagaggatgagggtggccccaattcctacccggtctacctgatggagcagcagaatcttggcatgggccagatcccttccccacggtgatcttggagtaggcgccca

SEQ ID NO: 7507 - DNA, 120 bp, synthetic construct
  source 1..120: mol_type = other DNA
tattttcctgtctcttccaccaaaagccagctgtagctttatctcgtaaaagttacccatcttctctactgtccccattctctctcctcccaccttcaccccagattcaagttttcctcc

SEQ ID NO: 7508 - DNA, 120 bp, synthetic construct
  source 1..120: mol_type = other DNA
tttgctgccaggctcctaaacgtaactccatccagaatcaaacagcagggccacaggtcactcgctatctgctcctttgggcatccccatttgctgaaagctggaaacctatcatggtca

SEQ ID NO: 7509 - DNA, 120 bp, synthetic construct
  source 1..120: mol_type = other DNA
ggagtcgcagcgggggctccggttccccgagactgcggccctccctcgttcctccaggttccgctttgcgggcggcttctgatctcttgcggacagctcagattagtggctcgaggccgc

SEQ ID NO: 7510 - DNA, 120 bp, synthetic construct
  source 1..120: mol_type = other DNA
ttgttctctcccgctccctccttcttccctcatattgtcatggccttaagatacccctccctggagagggagcgtccagaagttacggcctcccctgcctggtggcaactataaatgcca

SEQ ID NO: 7511 - DNA, 120 bp, synthetic construct
  source 1..120: mol_type = other DNA
taaattaaaatcctcagtagggctttcataatccccggatagagacagggagggatccttcggatcccagggatacgggaactgtgggtgatattagcctgaagagaagtacaatccaaa

SEQ ID NO: 7512 - DNA, 120 bp, synthetic construct
  source 1..120: mol_type = other DNA
acctcctgccttcttcatgggcttcttccccttccagtttttccttctccttctacagggtccttcccaacaccagccaaataagccctaagcagtgtgcacaggaagcacccagaggag

SEQ ID NO: 7513 - DNA, 120 bp, synthetic construct
  source 1..120: mol_type = other DNA
ctcaaaatagcttcctgtcccaatctcacctctgaaaggacttactaatttaaatatatctactatgaactgaacagtgtcccccctaaatatgtttaagtcttttttctattttttttt

SEQ ID NO: 7514 - DNA, 120 bp, synthetic construct
  source 1..120: mol_type = other DNA
aacataatttatctagaatttggctcataagttttaaaacaaactgtatgaaaatatgacagtgcatttactgttaactcctgcttatgttttagaaagctcttatggaaagaaaaaaaa

SEQ ID NO: 7515 - DNA, 120 bp, synthetic construct
  source 1..120: mol_type = other DNA
attcatgtggttgtgcaaccatccctggtaatttcttcttgattctctgtcccggaactactaaactcaggctgggtttagcataatcgttgcctgtgtacttgaaaagtggagagttgc

SEQ ID NO: 7516 - DNA, 120 bp, synthetic construct
  source 1..120: mol_type = other DNA
caatttgctcagaagcgctacttttccatattcagaagggcactgtcacagtacggcttccattttgaaaaaccagtctgcaggtatttctttgctttgggcctctcatttcttttttgg

SEQ ID NO: 7517 - DNA, 120 bp, synthetic construct
  source 1..120: mol_type = other DNA
gtcacttccacccagacaaggggattcttctgatcagtccagatgacctggatgaagttttctttctttctttctttttttttttttttgagacagagttttgctcttgttgcccaggct

SEQ ID NO: 7518 - DNA, 120 bp, synthetic construct
  source 1..120: mol_type = other DNA
cctctgaggttaccacaccctccaccacagcatctgtgccactgtggcctcaaccaccggctctgagagcagcacggcctctgagatcatcacgtcctctacaatgtctgtgtcagccac

SEQ ID NO: 7519 - DNA, 120 bp, synthetic construct
  source 1..120: mol_type = other DNA
agccatgaccacagccatgaccacaggttctgagactgctgtggtctccaccaaagctcctgtgacaaccacacagtctgggttctccacagccaccgtaatgcctgctaagaccactac

SEQ ID NO: 7520 - DNA, 120 bp, synthetic construct
  source 1..120: mol_type = other DNA
ctctaccacagcctctggggccactgcaacctccaccactgtctctgccactttcgtgcccaacaaggtcactgacatttctactcagaccatcaccaaaacagttgtgtcaggtactaa

SEQ ID NO: 7521 - DNA, 120 bp, synthetic construct
  source 1..120: mol_type = other DNA
gtgttcctagaagtgaaattgataggaagcctattgcattcctatttaatttatacaagcagagaacttctaggctgaatggacaaaagactaatttgaattataaaaacagaatcacgg

SEQ ID NO: 7522 - DNA, 120 bp, synthetic construct
  source 1..120: mol_type = other DNA
aaaaaaaaaaatcacatcccaggagggactgcggagattagtgccaccatcaaggacttgaaagacacaggggtggtgattcccaccatatccccattcagttctcccatttggcctgtg

SEQ ID NO: 7523 - DNA, 120 bp, synthetic construct; identical to SEQ ID NO: 1622
  source 1..120: mol_type = other DNA

SEQ ID NO: 7524 - DNA, 120 bp, synthetic construct
  source 1..120: mol_type = other DNA
cctggctatggccactgctgaatgcccaatttgccagcagcagagaccaacactgagccctcagtatagcaccattcctcaggatgatcagccagctgattactggattactggctggac

SEQ ID NO: 7525 - DNA, 120 bp, synthetic construct
  source 1..120: mol_type = other DNA
ggactacaaatgacccagacccttcagaaatggaagtttgggtcactccaccaggaaaaaaccatgacctgctgagatgcttgctaaagggaaagggaatacagaatgggtagcagaaga

SEQ ID NO: 7526 - DNA, 120 bp, synthetic construct
  source 1..120: mol_type = other DNA
atcatatcaccttgctccagtctaagaccaaacaattatgttcattctctggcactttccatcagcaagccggttgcatctgattctatcctcttcgttctgagcaccctcacctctatt

SEQ ID NO: 7527 - DNA, 120 bp, synthetic construct
  source 1..120: mol_type = other DNA
cctgggtacatccactatgggagcatcatctaccacctcagcccccagcttcaggaccactacaggatccacccgtgagccaaccagcaacacctcccagtaaacaggcccaatgtccac

SEQ ID NO: 7528 - DNA, 120 bp, synthetic construct
  source 1..120: mol_type = other DNA
cctgatggacagcggccgactgctgctttcgcagtctgatttttactgtctcacatagtgtagtataaagaccagggagaaggagaaagacagaaaatataaacgatagatatagcagga

SEQ ID NO: 7529 - DNA, 120 bp, synthetic construct
  source 1..120: mol_type = other DNA
attcacacaagccacaaacagttaacataatttacaatcaacttacctgagtttcttatttcagagtctctgacccctccctaagggaagaacaatatgtgactcaccagccatgagcaa

SEQ ID NO: 7530 - DNA, 120 bp, synthetic construct
  source 1..120: mol_type = other DNA
cacaccaccaccaacacaaaacacttctggtgaccaaattaagaggggaagttcttcccacactaagcaagcaatcagttctgcagcagacaccagctcggtgtcctccgattcagtgct

SEQ ID NO: 7531 - DNA, 120 bp, synthetic construct
  source 1..120: mol_type = other DNA
tatgcatgtaatcccagctattctggaggatgaggcaggagaattgcttgaacctgggaggcagaggttgcagtgagccgagatcgtgctactgcactccagcctgggtagcagagaaag

SEQ ID NO: 7532 - DNA, 120 bp, synthetic construct
  source 1..120: mol_type = other DNA
agttaactactaatatatatatttttctcttttagaaggatctttctttaccctgacaaatagaggcatttataacctccatgacaacagccttgaccttggtttatacctggactcagt

SEQ ID NO: 7533 - DNA, 120 bp, synthetic construct
  source 1..120: mol_type = other DNA
gtaacttcaaactctacaaactgagtagatcagaaaatcctgttagactcactcagtgccctccagttcttcatctttgggaagagtctccctccctacttctttgcctctttcaaatgc

SEQ ID NO: 7534 - DNA, 120 bp, synthetic construct
  source 1..120: mol_type = other DNA
atgctagtgccactgcagccttgatctcgacagataacattccaagaaaaataaatttatagtcatgattctcaaatcataagtgaaaacagacaccctgagtgaaaaccagcaaggaag

SEQ ID NO: 7535 - DNA, 120 bp, synthetic construct
  source 1..120: mol_type = other DNA
tctccatgtccagcgatgttgttgcaaatgactggatctcattctttctttatggctgaatgatgctctactatgtatatgtaccacgttttcttttcttttcttttctttttttttttt

SEQ ID NO: 7536 - DNA, 120 bp, synthetic construct
  source 1..120: mol_type = other DNA
gacagtctttctcagtttctcttgcagcttaacatggctgtgtgactgcgttcaggctgagggtgtgtaagcagacaacaataattttttttttacaataatctttcatgaagttaacaa

SEQ ID NO: 7537 - DNA, 120 bp, synthetic construct
  source 1..120: mol_type = other DNA
ccacaagaactggttgttgaaaagatcctgtcacctcctccattccttctttccagcttcctctctctcgctatatgatctgtgcaaaccggctccccttctccttcggccacgagtgga

SEQ ID NO: 7538 - DNA, 120 bp, synthetic construct
  source 1..120: mol_type = other DNA
gtgaggtcctactctcttggctcagttcattagggcttctttcatgctaaagcaggcccacaggacttcctgaccagaaaacaaattcttgagctgcaacaggtttctaacccgatccct

SEQ ID NO: 7539 - DNA, 120 bp, synthetic construct
  source 1..120: mol_type = other DNA
atcccagcactttgggagggtgaggcaggcaggtcattgaggtcagaagttcaagaccagcctagctaacgtggcaaaaccctgtctctactaaaaatacaaaaattagctgagtgtgtt

SEQ ID NO: 7540 - DNA, 120 bp, synthetic construct
  source 1..120: mol_type = other DNA
atgcatatagtcacctggcttcttgttgtacatgcagactcctgggccccatctcaaattctaattcatttagtctggaatgatttgcttaagaatattttcaacatgctcccttaagta

SEQ ID NO: 7541 - DNA, 120 bp, synthetic construct
  source 1..120: mol_type = other DNA
ggagccagcacagccaccaactctgggtccagtgtgacctccagtggggtcagcacagccaccatctcagggtccagcgtgacctccaatggggtcagcatagtcaccaactctgagttc

SEQ ID NO: 7542 - DNA, 120 bp, synthetic construct
  source 1..120: mol_type = other DNA
accaactctgggtccagcacgacctccagtgggaccagcacagccaccaactctgagtccagcacagtgtccagtggggccagcacagccaccacctctgagtccagcacgacctccagt

SEQ ID NO: 7543 - DNA, 120 bp, synthetic construct
  source 1..120: mol_type = other DNA
gcattcttcaggaaggaagagacctgggcacccaagacctggtttcctttcattcatcccaggagacccctcccagctttgtttgagatcctgaaaatcttgaagaaggtattcctcacc

SEQ ID NO: 7544 - DNA, 120 bp, synthetic construct
  source 1..120: mol_type = other DNA
ttcaccccaactcacagcagtagaaactgctccatcttccaccacttattgggtttctccagtgtcagcaaaccaaagaattggatcttaccaatgcggctataggaaaacagcctgttg

SEQ ID NO: 7545 - DNA, 120 bp, synthetic construct
  source 1..120: mol_type = other DNA
tgaagatccggctagcagcagaagccaaaattaaatgtctagagaaggaattgcaactagaaaaagacgtgtacctctccatgtctctcctcacatccaacttagcaaacaaaattgaag

SEQ ID NO: 7546 - DNA, 120 bp, synthetic construct
  source 1..120: mol_type = other DNA
ttgagatcgggagttcgagaccagcctggacaatatggtgaaaccccatctctactaaaaatacaaaaattagctaggtggtgtgcctgtaaccccagctacttgggaggctgaggtagg

SEQ ID NO: 7547 - DNA, 120 bp, synthetic construct
  source 1..120: mol_type = other DNA
ccccacgttgcaggtgaccagaggccccatattgagctcaccatttactgttcctctcaaaaaaataaggagaagactatttccttagtagatactagggcagaatatactttaattcat

SEQ ID NO: 7548 - DNA, 120 bp, synthetic construct
  source 1..120: mol_type = other DNA
cactcgtttcagagagcacagggttgggggtaaggtcacagatcaacaggatcccaaggcagaagaatttttcttagtacagaacaaaatgaaaagtctcccatgtatacttctttctac

SEQ ID NO: 7549 - DNA, 120 bp, synthetic construct
  source 1..120: mol_type = other DNA
tggcgttgtcaacattaaatgattcatattgtccagggggtatgctgaaataagtgcaattattatcctcccaataagtgcaactattatccacccagcacaaagcccatgaaagagtct

SEQ ID NO: 7550 - DNA, 120 bp, synthetic construct
  source 1..120: mol_type = other DNA
tgacctcaggtgatccacctgcctcagcctcccaaagtgatgggattacaggcatgagccaccgtgcctggccacgtccatgtgcttttataacagaatgatttatattcctttgggtat

SEQ ID NO: 7551 - DNA, 120 bp, synthetic construct
  source 1..120: mol_type = other DNA
atggtattgggtgctcatctatggaatggagatgggccatcaatcctcagaagatgcaaggcccagagcccacagtgaagattttttgtttgtttgttttgttttgttttgttttgtttt

SEQ ID NO: 7552 - DNA, 120 bp, synthetic construct
  source 1..120: mol_type = other DNA
acctaccttgaataaatggcatgattatttgcaacaaggaagaatgctagcaatgagtcccttaagcccagaattacatactgcattaggctctgttatgacgtgaacaaacaaaggata

SEQ ID NO: 7553 - DNA, 120 bp, synthetic construct
  source 1..120: mol_type = other DNA
aagagcaaaactccgtctcaaaaaaaaaaaaaaaaaaaaaaaaaaatatatatatatatagtgacctagtcctggtacagtggctcacacatggggaggccatggtgggacgattgcttg

SEQ ID NO: 7554 - DNA, 120 bp, synthetic construct
  source 1..120: mol_type = other DNA
gcacaagggatatgtgatggatagcaagagactgatttttatatactatgctataatataataaaatactcattgggcatgttacagaacggacactgtgtgcaggaatcttttggttgg

SEQ ID NO: 7555 - DNA, 120 bp, synthetic construct
  source 1..120: mol_type = other DNA
agatgagcacgtgaaattgtcagggccagttttgagaggtggagtgtaggaatacagcctgttgcacggcaacagggacgccattttgaagcaaagctgccattgagaggtgacagggtg

SEQ ID NO: 7556 - DNA, 120 bp, synthetic construct
  source 1..120: mol_type = other DNA
tgcttttgtgagctgtaacactcatcgtgaagatctgcagcttcattcctgagccagcgagaccacaaacccaccagaaggaagaaactgtgaacacatgcgaacatcggaaagaacaag

SEQ ID NO: 7557 - DNA, 120 bp, synthetic construct
  source 1..120: mol_type = other DNA
acctcatctctacaaaaaagaaaaccaaaattagttgggagtggtagcatgtgcctgtggtcccagctacttgggaggctgaggcaggaggatcactacagcccaggagttagaggctgc

SEQ ID NO: 7558 - DNA, 120 bp, synthetic construct
  source 1..120: mol_type = other DNA
ttccaggttcaagtgattctcctgcttcagcctcccgagtagctgggattacaggtgcgtgccaccacacccagctaatttgtgtgtgtgtgtgtatttttagtagagatggggtttcac

SEQ ID NO: 7559 - DNA, 120 bp, synthetic construct
  source 1..120: mol_type = other DNA
tatttccaaaaataaacaacaaatgactcaaatgaatgggcattttgagctagaggaaggagaaaaggggggagtccctggtgagcaatttaccttgtgattgattcacatagttgtgct

SEQ ID NO: 7560 - DNA, 120 bp, synthetic construct
  source 1..120: mol_type = other DNA
aatcagcagaaagaatagaggaggcagtggcttatttaaccaaggagaaaaatcccatggcagccaacccaccttatctgtctgtctgcctattttagaatattcaagatttgtcaacaa

SEQ ID NO: 7561 - DNA, 120 bp, synthetic construct
  source 1..120: mol_type = other DNA
ggtgatcaataaaagcttttcaagcaaaaaattattacagaccatatgacatcccagaaaagacaaaactataaaggcagtcaagagtcaatggttgccaggggttacgagggtggggtg

SEQ ID NO: 7562 - DNA, 120 bp, synthetic construct
  source 1..120: mol_type = other DNA
acagcttttcaaaattgtttttgaacgtatacacaacagaaaatttgaagatgggcactcaagcacataggacatttctacacaaatggtggctccagatagctgaagaagcttaagcag

SEQ ID NO: 7563 - DNA, 120 bp, synthetic construct
  source 1..120: mol_type = other DNA
cctgtttggacatgacaacctccttttataatggcgaagagcacaggctctgcagctggactgatagtttaattcctgactccatcacttactaactttgtgagtttggccaaattactt

SEQ ID NO: 7564 - DNA, 120 bp, synthetic construct
  source 1..120: mol_type = other DNA
tgtgattaaagttccagaactcattcttcttataactgaaagtttgtacccttgactgttgtttttaatctttaaattgaggcttaaaatatatgcagtaaaatgtgcagagtggacaca

SEQ ID NO: 7565 - DNA, 120 bp, synthetic construct
  source 1..120: mol_type = other DNA
gccgggcgtgtgtcctgatgctcttatcaccctccaaatccccagcttcccctagatagactgctattgacctttaccatccatttgtttccttttcttctcttcttccttctttcttct

SEQ ID NO: 7566 - DNA, 120 bp, synthetic construct
  source 1..120: mol_type = other DNA
cccatttctgcaaaagccagtactgatcccaattccactgaccatgattctgatgctgtcttagaagcaaatctgtattagtctcccccagctgtggttgtgagcacatgtggtggggcg

SEQ ID NO: 7567 - DNA, 120 bp, synthetic construct
  source 1..120: mol_type = other DNA
caacccttcttcggatgctgcctgattccaaatccatgtataatcccctgagaacttccctggtagaaacaaaccggagttcggccactgaggggttggctctgacattggatcagcaat

SEQ ID NO: 7568 - DNA, 120 bp, synthetic construct
  source 1..120: mol_type = other DNA
ctccttcccctcccatctcactttacctttcttgggtcctttccatcagcatccaaacaagctcagttctgtatgcacaagtatcatccaaggagacgattaaaaacttgggtttccagg

SEQ ID NO: 7569 - DNA, 120 bp, synthetic construct
  source 1..120: mol_type = other DNA
tccttctaatgaaaagaaagatttaggttagaccactccccctacacacttactgtctcacattcccgctcacaattctccccaaatgactgtatcaaatttttggtgttaaactagcat

SEQ ID NO: 7570 - DNA, 120 bp, synthetic construct
  source 1..120: mol_type = other DNA
ttttgtattattttatgatacagtcagtcaaagtgcagccacaagaggagaggcttacaggccctagagacaggaggcatggcactgccatgcgggaccacctgagaaagacatcaaggt

SEQ ID NO: 7571 - DNA, 120 bp, synthetic construct
  source 1..120: mol_type = other DNA
agacccattctttttattctggaggatttcagatttttaaaactactgttctaaaatctcatgatatggtgtcatagtatggattctttcattgtgttaggaatttgcacagtagaaagt

SEQ ID NO: 7572 - DNA, 120 bp, synthetic construct
  source 1..120: mol_type = other DNA
aggccggagccagctccctcagctttcagggaggtgtggagggagaggcacgggcgggaacccgggctgcctgcggcacttgcgggccagcactagttccaggtgggcgtggcctcgggg

SEQ ID NO: 7573 - DNA, 120 bp, synthetic construct
  source 1..120: mol_type = other DNA
actctttgagtccacactgcgtttatgagttgtaacactcactgcgaaaatctgcagtttcactcctgaggccagtgagatcacgaacccaccagaagaaacgccgaacacatctgaaca

SEQ ID NO: 7574 - DNA, 120 bp, synthetic construct
  source 1..120: mol_type = other DNA
ggctttaaatacaatgtatatttaaatgacttccagtttcacgtcttttgatctgatttctcctctaagaactaagtgcaggtttccaactgccaacagtctcctggatatctaatgggc

SEQ ID NO: 7575 - DNA, 120 bp, synthetic construct
  source 1..120: mol_type = other DNA
agggtgagagggagtatggggtggagggagtatgggctgaaaatgaatgaatagaataccagtgattttgtgagacaatgttttgtctgcaatatgtattattgaagttccagaaaaaaa

SEQ ID NO: 7576 - DNA, 120 bp, synthetic construct
  source 1..120: mol_type = other DNA
agcctccccgatgagcgccgccccctgctccagggcgcccagtcccaccgaccgcccacgggctgaggactgtgagcgcatggcgtaggactggcaggcagctccacctgcggccccggg

SEQ ID NO: 7577 - DNA, 120 bp, synthetic construct
  source 1..120: mol_type = other DNA
cgagcccactgagaggaaggaacaattccacacgcatgggcttaagagttgctaacactcactgtgaaggtttgcagcttcactcatgagccagcgagagcacaaacccaccagaaggaa

SEQ ID NO: 7578 - DNA, 120 bp, synthetic construct
  source 1..120: mol_type = other DNA
ttgaggccaggagttagagaccagcctgggcaacgtggtgaaaccctgtctctactaaaaatacaaaaattagctgggcgtggtggcgcatgcctgtggttccagctactcaggaggccg

SEQ ID NO: 7579 - DNA, 120 bp, synthetic construct
  source 1..120: mol_type = other DNA
taatcacaacacaatatttactaactacaaagggagaaaaaccagcctggatacaccttcttaatcaagtaatccaagagaacatcatcaatgatgggacacattgatattatctgtcac

SEQ ID NO: 7580 - DNA, 120 bp, synthetic construct
  source 1..120: mol_type = other DNA
ccaccctggtctcctatttattcatgaatcacatcgagctcattaacaactcagggtatttgtacttatgctatcaatctgtgatgtccttctcctggcctttcaaattgctgccttctt

SEQ ID NO: 7581 - DNA, 120 bp, synthetic construct
  source 1..120: mol_type = other DNA
atggcttctactgcagccttcaccacaggctctgagaccaacacggcctccaccacagactcagggactactatagcctccactaggaccttcaccacaggctctgacacaaccacaggc

SEQ ID NO: 7582 - DNA, 120 bp, synthetic construct
  source 1..120: mol_type = other DNA
accgtgggctctgagaccaccacagcctatactgcagattctgagaccactgcagcctctaccacaggctctgagatgaccacagtcttcactgcaggctcggaaaccatcacaccctct

SEQ ID NO: 7583 - DNA, 120 bp, synthetic construct
  source 1..120: mol_type = other DNA
agcttctactgaaggttctgagaccactacagtcactaccgcaggctctgagaccaaaacagcctatactacaggctctgagaccaccacagcctctaatacaggcttggagaccaccac

SEQ ID NO: 7584 - DNA, 120 bp, synthetic construct
  source 1..120: mol_type = other DNA
atccatcatgggctctgagaccactatggcctctaccataggctctgagaccaccaaggtctccactgcaagctctaaaatgaccacagtcttcactgaaaactctgagaccaccatagc

SEQ ID NO: 7585 - DNA, 120 bp, synthetic construct
  source 1..120: mol_type = other DNA
agcctctaccgcaggctctgagaccacaacagtctatatcacaggctctaagactaccaccgcctctactgaaggctctgaggccactacagtttctaccactagctctgagaccaccac

SEQ ID NO: 7586 - DNA, 120 bp, synthetic construct
  source 1..120: mol_type = other DNA
taattgcctctactctggtctcacctctttttttttaagtgcccaccacttccattgcaatcagaaccacaatatagtaaaccacaagtgcatcatatctgtcacatcttcctccagcaa

SEQ ID NO: 7587 - DNA, 120 bp, synthetic construct
  source 1..120: mol_type = other DNA
gcaccatatttgaagtcttttatccctcgccccctcccactcttcccccaaagtccccaaagtccattgcatcattcttatgtcttcgtatttccatagcttagctcccacatatcagtg

SEQ ID NO: 7588 - DNA, 120 bp, synthetic construct
  source 1..120: mol_type = other DNA
tagcctgatataaggaccagagagaatgcttaagtcagagaaagtgagaagcaaagtagaaaaagaggagggaaaagatggagttggggccaaagtgaagggaaatactgacagaacaag

SEQ ID NO: 7589 - DNA, 120 bp, synthetic construct
  source 1..120: mol_type = other DNA
ccaattctgagctgagtgatgtgacactggtagcttaaaatatgctgggttggaaatacttacaccacagcaattgtcaaacactacaaatcagcacttttccctcggagagcctgttat

SEQ ID NO: 7590 - DNA, 120 bp, synthetic construct
  source 1..120: mol_type = other DNA
ttaattttcatttatcaatgtatttatttttttcttttagagaaaccttttcttccccctgagatattgtggtatttattacccccatggccacagccacagccttggtctggacctgaa

SEQ ID NO: 7591 - DNA, 120 bp, synthetic construct
  source 1..120: mol_type = other DNA
gaaaatatcttggtgaccttgaggtaggcaaagatacttagatacttaagcaagacacaaaaagcactagctattaaaagaaagtgtgatgatttggacttcattaaagcctagtatcag

SEQ ID NO: 7592 - DNA, 120 bp, synthetic construct
  source 1..120: mol_type = other DNA
agacaggggaagctgagaatgttctgtgtatgatctgggtggtgattacaagggtgtatagatatgtaaaacttcattaaaatgtgcacatgagatctgtgcactttatggtatgtaagt

SEQ ID NO: 7593 - DNA, 120 bp, synthetic construct
  source 1..120: mol_type = other DNA
agaatagcatgcagaaccacccacacaccagaggaaaccaaatctttcctttctcagtcaactagacataggaaacccttcatgtgactgtgattatggagagagaggttaggaatgtag

SEQ ID NO: 7594 - DNA, 120 bp, synthetic construct
  source 1..120: mol_type = other DNA
gacttgtagatcgcaatgatgtcttgtatgttaccctaaaggtttgggtgttttcatttccccattgcactgtcacgatgataaatggctgagattccttttgaaagctaggaggaagat

SEQ ID NO: 7595 - DNA, 120 bp, synthetic construct
  source 1..120: mol_type = other DNA
tctatggttgttttcagcccctagatctgactcaacgcatggagctggaggccacgaggggcattgtaatagggcctgtggtaggcagaataacagcccctcaaaaacatccacgtttca

SEQ ID NO: 7596 - DNA, 120 bp, synthetic construct
  source 1..120: mol_type = other DNA
aggaggggctacttctgctggcaaggaaagctctgcgggatttggaggttcaaagtttttcagactcatcaaaatctacccaggtgtctccactccaattctgggcttccgttaacaaat

SEQ ID NO: 7597 - DNA, 120 bp, synthetic construct
  source 1..120: mol_type = other DNA
atagaggcgctccccttttgtttttgaagaatttatagaagcttttccaccggggagcttcagctaggtcttctcatcagtgctgtgtgccagacaagccagatgatcaaggaagtacct

SEQ ID NO: 7598 - DNA, 120 bp, synthetic construct
  source 1..120: mol_type = other DNA
cttctttgaaagagaaaaagaagaggtggcattctgtgaaggaacatcaaggaccagacatccagcttcccctgcagcccaggtccccctagcggtgcttctcttcagattgaggaccta

SEQ ID NO: 7599 - DNA, 120 bp, synthetic construct
  source 1..120: mol_type = other DNA
taacctaaggcatcgacacacagttttgggattcttccctcaaatctaaattggcaatccttatgttagtccagacaacaccaaggcaagaacatatgtggagggtgaagggcagcacct

SEQ ID NO: 7600 - DNA, 120 bp, synthetic construct
  source 1..120: mol_type = other DNA
taagggctttaggggctggctctggggtcagactgccttgatttaaatcgttgttccactacctactaactgtctgacctggaactagctgcttaacttctctaaacctcaatttaccta

SEQ ID NO: 7601 - DNA, 120 bp, synthetic construct
  source 1..120: mol_type = other DNA
ctaatagggaatgagaaatcaggagagggacaaagcaagacagagacagcaggtgagaaccagcaagagagagggctagaaaagctggtacatgttcagaggaaattgatgaggagagaa

SEQ ID NO: 7602 - DNA, 120 bp, synthetic construct
  source 1..120: mol_type = other DNA
ctgtcctgggcagggagaatgtgctcccagtttttgcaagggcaggactggcttgccctgctacggtctagatcctcagcagctcccccaaaaccaggcctcagagggcacacatgccag

SEQ ID NO: 7603 - DNA, 120 bp, synthetic construct
  source 1..120: mol_type = other DNA
tgcttcagcccaagagtttgagaccagcctgggcaacatggcaagacctcatctctacaaaacatacaaatattagtcgggtatagtaatgcacacctgtagttctagctacttgggagg

SEQ ID NO: 7604 - DNA, 120 bp, synthetic construct
  source 1..120: mol_type = other DNA
tcactttaaggtgtagtgggacacaattttttccccaataagaacacttcaatcagctgagtgagtagaaaatagaggctggaaaccagcaaaaatggtgttgtaatgcccctgcaaaga

SEQ ID NO: 7605 - DNA, 120 bp, synthetic construct
  source 1..120: mol_type = other DNA
aaactataaggctacagactatacgattcccttcatatgacattctgaaaatggcaaaattatagggaaagaaacaagatccatgttgccagggtttgggaagtgggagaagggttggct

SEQ ID NO: 7606 - DNA, 120 bp, synthetic construct
  source 1..120: mol_type = other DNA
tgagcaaccctcatctgaaaatccaaaatgctccaaaatccaaaacttgctgagcaccaacatgacaccacaagtcaacatacacaaactttgtttcatgcacaaaattatttaaaatat

SEQ ID NO: 7607 - DNA, 120 bp, synthetic construct
  source 1..120: mol_type = other DNA
cagcactttgggaggccaagacaagtggattgcttgagcccaggagtttaagaccagcctgagcaatatgacaaaactttgtctctacaaaaaaaaaaaaagttagctgggtgtggtggc

SEQ ID NO: 7608 - DNA, 120 bp, synthetic construct
  source 1..120: mol_type = other DNA
attgacatgaggaaaagctaggggaaaaatatacgggaactctgttaattatttttgtaattctctgtaagtctaaaattatctcaaaatgaagttttaaaaattctaaaacaaagccaa

SEQ ID NO: 7609 - DNA, 120 bp, synthetic construct
  source 1..120: mol_type = other DNA
aacaatgatcttctaaagagtgggcaaggcagggataagggtcagagaaggaggaaaagatgtgggtattctcattcaggcctgacctcaccacaagtggactaattttgtgcagtgata

SEQ ID NO: 7610 - DNA, 120 bp, synthetic construct
  source 1..120: mol_type = other DNA
ctgagagccccccttcccctcatgacagcctcttctgccctgcccggccactcctttgagtgacagggggtaattgagaagctgctcctccctccaggaaggaagacccggagctctggc

SEQ ID NO: 7611 - DNA, 120 bp, synthetic construct
  source 1..120: mol_type = other DNA
ctccgtctcaaagaaaaaaaaaaaaaagagagagagagagggaaaggaaggaaggaaggaaggaaggaagacttgaaccctattagaaaaatgtggagcgtcagcagtagggagggatga

SEQ ID NO: 7612 - DNA, 120 bp, synthetic construct
  source 1..120: mol_type = other DNA
tcacattaaatgagattactttttagtaggactaagccaaagcatttccactaagcacccagagaccagccctaaagactcaagaataagagaaaatgatgtaactgcagatggaaggac

SEQ ID NO: 7613 - DNA, 120 bp, synthetic construct
  source 1..120: mol_type = other DNA
agagaaagggaagagaggctgagagtgagaaacataagaacacaaacatggtaagacacagcgggagtcagggcaaagcatgaaccgttaggtacagatggatgtaaaagaggaaatttt

SEQ ID NO: 7614 - DNA, 120 bp, synthetic construct
  source 1..120: mol_type = other DNA
acatttgatctaaaacccaagcctcctgcttctggcctgctgcttgagggggaagggctggtcctttttggccatcctgacctacggattaagtgcatgtcgaaattttaacaagtggcg

SEQ ID NO: 7615 - DNA, 120 bp, synthetic construct
  source 1..120: mol_type = other DNA
cacatttttggcaagtattgatctctagtagtcagtgtcaggatctgaagaaaacagtgacatctagcagactcccagagccagggaaacaggctgggcagaagtgataaattacaaacc

SEQ ID NO: 7616 - DNA, 120 bp, synthetic construct
  source 1..120: mol_type = other DNA
atatttattcagtgcctagcatgagctcaacactctacgtctcccagtctgtctatctcagtctacctgtaagctgaaggatacaacttatctcttaagaggactatgcccgcgttctcc

SEQ ID NO: 7617 - DNA, 120 bp, synthetic construct
  source 1..120: mol_type = other DNA
aagagattttttgagaactcgccatgttggcttaaacgtaaatatatatgaaacagaaaatgaagtataaactccttatgcttatagctctactgttccaataacgttagaagtaacagc

SEQ ID NO: 7618 - DNA, 120 bp, synthetic construct
  source 1..120: mol_type = other DNA
atgagatgagcagtgtgccggagctcagtgaggtgagcttcttgtgattccagctaaatgggatcctaaatgatatgacacataaacatcatctagaacatgcagacttctgcgaatatc

SEQ ID NO: 7619 - DNA, 120 bp, synthetic construct
  source 1..120: mol_type = other DNA
aggaggattgcttgaggcctggagttcaagaccagcctgggcaacatagtgagacctcgtctctacaaaaaaattaaaaattagctgggtatggtagtgtatgcctgtagtcccagctac

SEQ ID NO: 7620 - DNA, 120 bp, synthetic construct
  source 1..120: mol_type = other DNA
actctggtccagtcccctgtctttctaaacaagaatgtttggtgaagcaacagtgattcaacactctcccttagcgaggtattgtttgacaccttagaaaacacgtagttatttttcaga

SEQ ID NO: 7621 - DNA, 120 bp, synthetic construct
  source 1..120: mol_type = other DNA
ctctttcttccttagtggggcataagtaatgctgcatcttgcattcaacgtcatcttagatgggatgaaatacacattttggaataaacgaataaatgtatgctttcttttggtgctatt

SEQ ID NO: 7622 - DNA, 120 bp, synthetic construct
  source 1..120: mol_type = other DNA
gattactcactttttatctcatttggactgaatctcaagtgatgaactgttctgcactgtctctacaaaaatcactcacaggtatgaacacttttatccttcagtcttctcttctttagg

SEQ ID NO: 7623 - DNA, 120 bp, synthetic construct
  source 1..120: mol_type = other DNA
cccctcacctcccggacagggcggctggccgggcgggggctgcccccccacctccctccctgacggggcggctgccgggcggagatgctcctcacttcccagacggggcggctgccgggc

SEQ ID NO: 7624 - DNA, 120 bp, synthetic construct
  source 1..120: mol_type = other DNA
gagagggagaccgtggggagagggagagggagagggaggagagggagagggaggggagggagagggaggagagggaggagagggagagggaggagagggagagggaggagagggagaggg

SEQ ID NO: 7625 - DNA, 120 bp, synthetic construct
  source 1..120: mol_type = other DNA
ctctgcgagatgggcgcctctctggagattgagcgccacttctgagggcctggagaagttgacttgttttgcatcccacggggtcacccccacctccccctttccttgcactcactgaca

SEQ ID NO: 7626 - DNA, 120 bp, synthetic construct
  source 1..120: mol_type = other DNA
gttatatttttctcatagcagagtctttcaaacaatacgcaatgacaatcaaaatagcaaagtagctgtggaaacagtgtccatggcgaccaatggtcccatcttttctttctttctttt

SEQ ID NO: 7627 - DNA, 120 bp, synthetic construct
  source 1..120: mol_type = other DNA
caggcctcagcagagagaagctgaagtgattactgcattcctatgagctgtgggaggaataaatcgtggaaagaaatcctcatttgcaactgtatggcattaggggtgaggggtctcgga

SEQ ID NO: 7628 - DNA, 120 bp, synthetic construct
  source 1..120: mol_type = other DNA
tgcaagacacacatgagatttcaaagacttagtacaaaaacagtaaaatatctcactaataatttttatgtttattacttgtcaaaatcacaatattttggatatgctgtgttaaataaa

SEQ ID NO: 7629 - DNA, 120 bp, synthetic construct
  source 1..120: mol_type = other DNA
acttaagtgacttttattaaaacttatattaacaaagaagacaatagtgtcataataatttatttaaaaagaattaaaggccaggcacagtggctcatgctgtaatcccagcactttggg

SEQ ID NO: 7630 - DNA, 120 bp, synthetic construct
  source 1..120: mol_type = other DNA
agcactttgggaggtttagatgggtggattgcttgagcccaggagttcaagaccagcctggggaatatagtgagactctgtccctacaaaaaacaacgagaaaaaattagctaggcatgg

SEQ ID NO: 7631 - DNA, 120 bp, synthetic construct
  source 1..120: mol_type = other DNA
acttatgcatgggttattttcaatcaaatgcagatcacaaacacagtaatggtgacatgtgaaacccatgtatacaaaggcccaactttacatatatttgggacccaaagggctgactgt

SEQ ID NO: 7632 - DNA, 120 bp, synthetic construct
  source 1..120: mol_type = other DNA
acagtcagctgattgtaccactgcaccccagcctgggcaacagagggagaccatctctaaataaaataagacaaaaacaacaacaaaaaaaaaacagaagaagaaaatataccaaaatgt

SEQ ID NO: 7633 - DNA, 120 bp, synthetic construct
  source 1..120: mol_type = other DNA
atgagcattaatagcagggaatgtaaattagcctatttgttttggctctgctttgcttctgatcattagaggccagcaaaaatagaatgagaactgcaaactccctcttgttcccggaag

SEQ ID NO: 7634 - DNA, 120 bp, synthetic construct
  source 1..120: mol_type = other DNA
ctagatctcctaactcaacgcacatggcagagtgaccccctatattccaccctaatgagtggtttgctcgctggaggcgttgaaccatgccacatcctgggaaccacaatgaaaatcatt

SEQ ID NO: 7635 - DNA, 120 bp, synthetic construct
  source 1..120: mol_type = other DNA
gagaggcagttgccccattcctgattcccacgcgttctacctctgcggtatctcagtgctctttttgtctttttagatctcaatatgtggttaacaatcctttatataaaattacctctg

SEQ ID NO: 7636 - DNA, 120 bp, synthetic construct
  source 1..120: mol_type = other DNA
ggaaactgggggggtcgcggcatcgggagcccactcactgcatgcaaggcctggggcatgcagggtccacgtcagggccagctcgctgggggaacgcatgctgtcagcacgcagctagga

SEQ ID NO: 7637 - DNA, 120 bp, synthetic construct
  source 1..120: mol_type = other DNA
tgcggaagtgggtggatcacttgagattaggagttcgagaccagccttaccaacatagtgaaaccccgtctctactaaaaatacaaaaattagccaggcgtggtggcatacgcctgtaat

SEQ ID NO: 7638 - DNA, 120 bp, synthetic construct
  source 1..120: mol_type = other DNA
ctttccttaggaagttccatcaaagtaagggattagatcaggagagataaagatgtgggatcctccaaagagtgaggagaatgaaaatcccaggaggttgctgtgtaggagaactaggga

SEQ ID NO: 7639 - DNA, 120 bp, synthetic construct
  source 1..120: mol_type = other DNA
gcatcgaagtgcttttacttctaggaagagagaattaggggttggtaccggactatagcttttgttctgtctttggctttttaaattacatatctgtaatttatatacacacacatatat

SEQ ID NO: 7640 - DNA, 120 bp, synthetic construct
  source 1..120: mol_type = other DNA
atacctctcataaatgtataagcctctcagtttttccttccaatgcattgcagattgtccttatttagccctttcccctgggaacctgagactgagagcagtgcaagctatgcttttttt

SEQ ID NO: 7641 - DNA, 120 bp, synthetic construct
  source 1..120: mol_type = other DNA
ccaccaagcccatccataaggttatattttttaatgtcctgcctcctcctctttttttttcttctctttttgttttcaaataactaaagatgcacagaaagttgcaaaattagtaccgag

SEQ ID NO: 7642 - DNA, 120 bp, synthetic construct
  source 1..120: mol_type = other DNA
tggctgttttcagagaaggatatgggtctggagattttagggacttgaattttcaggaaaagaaagtagggcagatgcaggtagaggacccagagctagttttcctcactcagccatatt

SEQ ID NO: 7643 - DNA, 120 bp, synthetic construct
  source 1..120: mol_type = other DNA
ggaataagtgacaatgttgaaggtaggatttgggtggcacacaacagtatctgctacactagccttcaagatcagtatgaaggtatatttatcaagacaaaagctggaacatgttttatt

SEQ ID NO: 7644 - DNA, 120 bp, synthetic construct
  source 1..120: mol_type = other DNA
aggatgatatcattatgctagggtgatagtagcaagcctcattgttagtcacctaagaagttaagacaataagaaatcattcaaaaaataaaatggtggcaggacgaggtggctcacgcc

SEQ ID NO: 7645 - DNA, 120 bp, synthetic construct
  source 1..120: mol_type = other DNA
gagacacccacccccaccacctctaaaaaaaaaaaaagaaaagaaaataagtcgattagaggttaccaggggctgggcggaaaggagaatggggagttattgcttaatgggtaatgagtt

SEQ ID NO: 7646 - DNA, 120 bp, synthetic construct
  source 1..120: mol_type = other DNA
gaccttgtctcataataataataataatgattaattaatttaattaattatttttttaaattttttattttttgaggcgcagtttcagtcttgttgcccaggctggagtacaatggcatg

SEQ ID NO: 7647 - DNA, 120 bp, synthetic construct
  source 1..120: mol_type = other DNA
aaatcagataaaaccagtaagattagtataaacatcatgctgtgctgggggtgggggtcgcaggtttggaactgagctctctagaagccaattcaaagagggaaacacaatcatcacatg

SEQ ID NO: 7648 - DNA, 120 bp, synthetic construct
  source 1..120: mol_type = other DNA
gaaaattaagaaaataaaattaaaataggttacaacagaatactcatggccagaacatacctgtcttcatgttcccctgcagggaacaatgactaaacagctcatgattcttgtcccttg

SEQ ID NO: 7649 - DNA, 120 bp, synthetic construct
  source 1..120: mol_type = other DNA
agagcgagtctcaaaaaaaaaaaaaaaaaaaaaattagccgggggcgtattcccagctactcaggaggctaaggcaggagaatcctttgaagccagcaggtggaggttgcagtcagccaa

SEQ ID NO: 7650 - DNA, 120 bp, synthetic construct
  source 1..120: mol_type = other DNA
aggctggagtgcagtagtgcgatctcagctcactgcaacctctgcctctggggttcaagtgattctcgtgcctcagctttccgagtagctaggattacagttgcccgccactacgcccag

SEQ ID NO: 7651 - DNA, 120 bp, synthetic construct
  source 1..120: mol_type = other DNA
cttcagatacaggtaaaatgccaaatccctaagaaggcctagaaggctctgcagtgtcagcaccagcacccccaccccttggcccctctctgtggtcactttcttgggtcctgcagatgc

SEQ ID NO: 7652 - DNA, 120 bp, synthetic construct
  source 1..120: mol_type = other DNA
aaacaaacaaaaaagtggccaacagaggaggtagtagttttgtcactagctgtcatgtggaaccccaggacctagcctttggtttcaaatactgtttttcatttatagaaactaggaccc

SEQ ID NO: 7653 - DNA, 120 bp, synthetic construct
  source 1..120: mol_type = other DNA
ctgtttctctaaaataataactggtagcagctggcgccagggacaggcagatcccaatagatagaaaaaacctgaaactggtgatcagcagcttcctgataagatctcaggagttgggcg

SEQ ID NO: 7654 - DNA, 120 bp, synthetic construct
  source 1..120: mol_type = other DNA
tgacatgagatgatgtcagaggcaataatgaaagagaagggagtttcaatagtaggtaccaagacaataaattaaccaaaaatatcactaaaaagaagagctaaccaagtcaacccaatt

SEQ ID NO: 7655 - DNA, 120 bp, synthetic construct
  source 1..120: mol_type = other DNA
taatagccaaacaacaacgacaacaacaacaacaataaaaaatggaaatggcctaaatgtccctcaacggatgaatggaaaataaaatgtgatatatacagccatacgctagaataaaaa

SEQ ID NO: 7656 - DNA, 120 bp, synthetic construct
  source 1..120: mol_type = other DNA
caaacaatgcaattatactcttgtagttatttttaaatgtacaattaagttattatcagctgggcgcagtggctcatgcctatactcctaacactttgagaggccgaggcgggcggatca

SEQ ID NO: 7657 - DNA, 120 bp, synthetic construct
  source 1..120: mol_type = other DNA
tagcatttcttgtcagacaggtctggtgttgatgaaatccctcagcttttgtttgtctggaaaagtctttatttctcctttatgcttgaaggatattttcactggatatactattgtagg

SEQ ID NO: 7658 - DNA, 120 bp, synthetic construct
  source 1..120: mol_type = other DNA
gtacattcttcagcatgtccattgtatttttcaactattgaatttctgcctgattctttttaattatttcattctccttgttaaatttatctgatagaattctgaattctttctctatgc

SEQ ID NO: 7659 - DNA, 120 bp, synthetic construct
  source 1..120: mol_type = other DNA
tgtctgggagccagggattggagtcaaaaactttggtaatttacctgatgttctgttctactgtggctaagcgggcgctgacaccacaatacaaagtccctcccactcatccctcccctt

SEQ ID NO: 7660 - DNA, 120 bp, synthetic construct
  source 1..120: mol_type = other DNA
ttttggcccaggtatctaaaaatgacatctgggagttgggcctggaatgggggcctcatgacttggcccagtgccctatcctactgtggctgagctggtatccaagatgcaagaccaagt

SEQ ID NO: 7661 - DNA, 120 bp, synthetic construct
  source 1..120: mol_type = other DNA
actttaggaggctgaggtgggaggatcatttgaggccaggagttcaagatcagtctgagcaacatagtgggaccccatctctataaaaatttaaaaattacccaggtgcagtggtgcagg

SEQ ID NO: 7662 - DNA, 120 bp, synthetic construct
  source 1..120: mol_type = other DNA
tgcttaaatgagtttaagtctaaaatcaatatttaggccgggcgcagtggctcacgcctgtaatcccagcactttgggaggctgaggtgggtggatcacaaggtcaggagatcgagacca

SEQ ID NO: 7663 - DNA, 120 bp, synthetic construct
  source 1..120: mol_type = other DNA
gaaagagaaaaaaaaaacacctgctgcatcagtcacaactgccatcctgaggccaagaagaactaaatggtctcaaaattatttcacaacttgttgctaccacctttccacagtggggct

SEQ ID NO: 7664 - DNA, 120 bp, synthetic construct
  source 1..120: mol_type = other DNA
gggaacttctgtttcctaacttctggataagcgccctcctaggataggagaaatgaatgactcttgctactccagccaccacttccactaattaaccactaataaaaatgtaaaaatcag

SEQ ID NO: 7665 - DNA, 120 bp, synthetic construct
  source 1..120: mol_type = other DNA
tgccttggcctcccaaagtgttgggattacaggtgtgagccaccatgcccggcctactcttaattttttttttaagtgctcaagctaattttttaattactatttgtagagatgaggtct

SEQ ID NO: 7666 - DNA, 120 bp, synthetic construct
  source 1..120: mol_type = other DNA
acgcacagagcattttaatgctgagaagggcttcatgaggttgttgaaaaatgtcagtgaggctctgggagggctacagccggagtgtagattagactctgggtgtagccgcatggctca

SEQ ID NO: 7667 - DNA, 120 bp, synthetic construct
  source 1..120: mol_type = other DNA
caggagagacaatactgtgaccaaaggctgagactgtgtcatcacttgggaatgaaagcatcaaatgccaccccaggtgggattgttggcttcaaggtttttttctccctttcctttctc

SEQ ID NO: 7668 - DNA, 120 bp, synthetic construct
  source 1..120: mol_type = other DNA
gttccaagaagagccaggagggcggaggactccaggaggaaatgggttattgatacctgggtatagatgaatattcccccagctgcctcctggataccgattaatattcccccagctgcc

SEQ ID NO: 7669 - DNA, 120 bp, synthetic construct
  source 1..120: mol_type = other DNA
ctaaatgtgtaccctcctgcctttacccctttccttaattcctgtttcctgggggacctccagtccctcctgcccaagggcatcacggcctccatacctgggagatgaagacagaccagg

SEQ ID NO: 7670 - DNA, 120 bp, synthetic construct
  source 1..120: mol_type = other DNA
ggaaaatccctttccctgctttttcaccttctagaggcatcctgtgttctttggctcatggtccccttcctccatctccaaagccaaaatcagccatttcttacactgtatcactcagac

SEQ ID NO: 7671 - DNA, 120 bp, synthetic construct
  source 1..120: mol_type = other DNA
ctggtcaatgtaatacatttttgctgattccagacttggagtttcaacagttctaaattcaggaccagacagcaccaccctgataggagggaatgggttaagtgctacagtaggggtgaa

SEQ ID NO: 7672 - DNA, 120 bp, synthetic construct
  source 1..120: mol_type = other DNA
agtccccacagtttactgagccatctgtccaggatccagggacagcagggagcctgcttcaacctctgagggtgccccagtgtctccctcacccagggaatcatctgagcactgagggaa

SEQ ID NO: 7673 - DNA, 120 bp, synthetic construct
  source 1..120: mol_type = other DNA
gagagccatcggggcccccagtcagtgtcaaggaggagacagacatgcaagggtgaccagaagagctggacttgctgccacaaggctgaaggatgattttgccactggattgggaactgg

SEQ ID NO: 7674 - DNA, 120 bp, synthetic construct
  source 1..120: mol_type = other DNA
gcaccttgtagactagagccagatccggaggagtagctgacctgggaataccccgttcctggcttaaaagatcctgcagaaccaccctgggcaatgctggatccgctggagctaccactg

SEQ ID NO: 7675 - DNA, 120 bp, synthetic construct
  source 1..120: mol_type = other DNA
ggcagaggggctgaaataaaggaaagggcactcgaggactaagatttggtcaccagcttcttcgtgagagcccaggctggggtcaggaatggaaaccctatttcctatctcagcactggc

SEQ ID NO: 7676 - DNA, 120 bp, synthetic construct
  source 1..120: mol_type = other DNA
tagaaagtgtaaagcattatatattatgaattattactgccactcatcctgatccctccaccaacaaccagactgccatcctctgtgatgtccctgttctctcctcagaaagaaattctc

SEQ ID NO: 7677 - DNA, 120 bp, synthetic construct
  source 1..120: mol_type = other DNA
ctagaatttccaaagtacatatcacatacattatttaatttgagacacacagactagagttaggtgtcattaaccccacttcagagtttcagaaactggggctcaggaagtttaagaaac

SEQ ID NO: 7678 - DNA, 120 bp, synthetic construct
  source 1..120: mol_type = other DNA
taccaggccagccacatacctattacgtgttccatcacctggggaactttctccttctcagaaatggggcaccacattcccaaaaccaactccctgacctgtcgcttctgggggcctctg

SEQ ID NO: 7679 - DNA, 120 bp, synthetic construct
  source 1..120: mol_type = other DNA
gctaacctcttggctttgggcggctcttcaaacctttctgaacttccatctcctcatctgtgaaatgggggtattttaaataacacttatttcacaaggtttttgtgaacatcaaatggg

SEQ ID NO: 7680 - DNA, 120 bp, synthetic construct
  source 1..120: mol_type = other DNA
ctggctgccgtcagaacttggccaagacagccaggctggaggaggcacagtctctcctggcctcctgccaggtctccagccgcccacgtggactggcggtgcagccacgtccctcctcct

SEQ ID NO: 7681 - DNA, 120 bp, synthetic construct
  source 1..120: mol_type = other DNA
ggacatgcatgtggaggacagtggtgtgggagaagggacaggctgcttggatcaggattgtagatgacctacaacaccaggttaaaagaatttggattctataggaattgcagtaaatgt

SEQ ID NO: 7682 - DNA, 120 bp, synthetic construct
  source 1..120: mol_type = other DNA
cttaggcttggaagaaggaaaatggagtgagcacgaggaagagaaaaagcctggaaaagcagcttattttgtgctgaggagagaaggaaaggggccacccagagctgctctggggctcca

SEQ ID NO: 7683 - DNA, 120 bp, synthetic construct
  source 1..120: mol_type = other DNA
ccctgtaggtgctggagggattcactgatggccttggcggaggtggcagtgggcatgtgcacttggctctgacacagccactcatgcaacaccctgtgcaatctcggcctgggcctgtgt

SEQ ID NO: 7684 - DNA, 120 bp, synthetic construct
  source 1..120: mol_type = other DNA
tgagggaaaagagctctccttgtctgctcattatgtgcacctgttaaatagtcattctttccactagggctattagtggtttttattgttactggtcacccagaattagagtcacagctt

SEQ ID NO: 7685 - DNA, 120 bp, synthetic construct
  source 1..120: mol_type = other DNA
cactggaaggcagctccctgagggcagggccctgatccctttgactggctgtggtatcctctcctgtagaccgctggctcatgaaataatcagggagagaatgtgtaaatgatgatcgtg

SEQ ID NO: 7686 - DNA, 120 bp, synthetic construct
  source 1..120: mol_type = other DNA
tttttatcaaattttattgtcatgatgtatatgtttgtcctccctaaacacagagccccttgagggcagggaggactgaaactgcttcctgggactgtcaccatcacatagcaccccaca

SEQ ID NO: 7687 - DNA, 120 bp, synthetic construct
  source 1..120: mol_type = other DNA
gctttttccctagacaacatcaggggctcagttcctttccctcctttctctcttctttaagaatttctcttagctggacatggtggcacatgcctgtggtcccagctactcaggacgctg

SEQ ID NO: 7688 - DNA, 120 bp, synthetic construct
  source 1..120: mol_type = other DNA
gccactgtgcctggcccttttttaattttaattttttttttttttagagatggggtcttgctgtgttgcccaggctggctttgacctcctgagctcaagcaatcttccacctcagcctct

SEQ ID NO: 7689 - DNA, 120 bp, synthetic construct
  source 1..120: mol_type = other DNA
ctatggcacatgcgcagtagaaagtagttgcaatagtgtgtagcaaatactttgcatcctaggttggattccccagaagcaggccctgagacaaagattcaagtaaaagagatttattta

SEQ ID NO: 7690 - DNA, 120 bp, synthetic construct
  source 1..120: mol_type = other DNA
ggcaggaggaccacttgagcccaggaggttgagactgcaatgagttatgattgtgccactgcactttagcctgggtgacagagtgagaccctgtcttaaaaaaaaaaaaaagtaatgagg

SEQ ID NO: 7691 - DNA, 120 bp, synthetic construct
  source 1..120: mol_type = other DNA
actgccaaggctattacgttggcgctcgctcatgtcattattaggaaatatgcatttttactgtctttgatgttatttaaacttgcctgtaaattctgtctctctcaattttaagttctg

SEQ ID NO: 7692 - DNA, 120 bp, synthetic construct
  source 1..120: mol_type = other DNA
accgcgcctggcctctcatatgtagtttttaatgagagttaccacataagcaaactgggttctaagtggtgaaatttaaggttatgcaacctcagtttcttttaacccctcttcatccct

SEQ ID NO: 7693 - DNA, 120 bp, synthetic construct; identical to SEQ ID NO: 1807
  source 1..120: mol_type = other DNA

SEQ ID NO: 7694 - DNA, 120 bp, synthetic construct
  source 1..120: mol_type = other DNA
aggagattcattctagcggggggcacatattaatctggaaactgattcccttaaaactggtcctgccgacacacccctgggaaggtttgcatataccactaggggtatccaagccatagg

SEQ ID NO: 7695 - DNA, 120 bp, synthetic construct
  source 1..120: mol_type = other DNA
ataaataaaaataaataaaaaagaccctaagtgttagttaaagcagcagcctagattcagaattaagaaaacatgatttttatttttccgtttcatggaagcagcagctgtctactgata

SEQ ID NO: 7696 - DNA, 120 bp, synthetic construct
  source 1..120: mol_type = other DNA
caaaaaagtcactctcaaagagctctcggtaggtttgtaaatacttaactgatggtaaaatgtcatgaacccctacccccgatggatctgaaccgttcacttgacccactttaaactgac

SEQ ID NO: 7697 - DNA, 120 bp, synthetic construct
  source 1..120: mol_type = other DNA
ctggagcagtcaatacccacttggcatctccgtaatcacagagatgtccaccttcatcccttgcaactattggaagccaaagaatgggagcaaaccacgcgatgggcgttgggaagcacc

SEQ ID NO: 7698 - DNA, 120 bp, synthetic construct
  source 1..120: mol_type = other DNA
aacacccttctaattggcccccttgctcccactgtttatccctccccctcacacaaagcctgtcctccaccagcaaaagaggtcttaaaatatacatcacgcgggcctggtgtggtggct

SEQ ID NO: 7699 - DNA, 120 bp, synthetic construct
  source 1..120: mol_type = other DNA
catgggtgcacgccaccatgccctccaatgttttttatttttattttttatatagatggagtctccctatgttggctggtctcaaactcctgggctcaagcgatccgctcacctcggcct

SEQ ID NO: 7700 - DNA, 120 bp, synthetic construct
  source 1..120: mol_type = other DNA
ctaatacagtgcctagctctgacattcctgttgaacgagtgaatgtttcatcttccccactcctagcatttatcatcttccagaagaaaagagttttaaaacaaaagttgagaataaaga

SEQ ID NO: 7701 - DNA, 120 bp, synthetic construct
  source 1..120: mol_type = other DNA
agaccttcctgctgcaaggtggcctgggaaggagagggttaaacctagcccggatagagcctccctcaccatcctctttccacacctctagcccaggaaccagcccaggatgggccctag

SEQ ID NO: 7702 - DNA, 120 bp, synthetic construct
  source 1..120: mol_type = other DNA
caaaacattaaatgattacaacttaaagtgattcaaaagatgtacaaatatgtgtgtatatagataagagaccaaatgtggcaaatgttaactgctatatttagttagagaagatacatt

SEQ ID NO: 7703 - DNA, 120 bp, synthetic construct
  source 1..120: mol_type = other DNA
ctagccagggactcctgggtctgctgcagctcctgctccagctgctgggccaccttgctcagctgctgccgctctgcctcccctaaaaggagggggtgctgggtcaggcctctcccagca

SEQ ID NO: 7704 - DNA, 120 bp, synthetic construct
  source 1..120: mol_type = other DNA
agtacagaacgcacagcttccgtcaattatctaaaggacccttgccccaagaatgcattaaatgactatctttttaagcaacctgttaagcttatttctcacaactgtgttttgctcact

SEQ ID NO: 7705 - DNA, 120 bp, synthetic construct
  source 1..120: mol_type = other DNA
ctttctgttctcctggaggtagggggcacccgcgatggattgaacctgggtggtaggtcattataactagtttaattccgtgcaagtttgaaatttttcataatttttaaagctaaatta

SEQ ID NO: 7706 - DNA, 120 bp, synthetic construct
  source 1..120: mol_type = other DNA
aggtcaggagttcaagaccagcctggccaacatggtgaaaccccgtccctactaaaaatgcaaaaattagccgggtgtagtggaggacactggtggaggatgcctgtaatccagctactc

SEQ ID NO: 7707 - DNA, 120 bp, synthetic construct
  source 1..120: mol_type = other DNA
ctgcaggatggcctgctcctggctctgggatgtcactttttcctggagtgaggccacctgggggaggagagagagctaggcagggccctctagagctaaaagatgaggggggcactggaa

SEQ ID NO: 7708 - DNA, 120 bp, synthetic construct
  source 1..120: mol_type = other DNA
gccactatgaccggctaattttttgtatttttagtagagacgggatttcacatgttgcccaggctggtctcgaactcctgacctccagtgatccacctgcctcggtctcccaaactgttg

SEQ ID NO: 7709 - DNA, 120 bp, synthetic construct
  source 1..120: mol_type = other DNA
cctcctgcagggcgaggatgtgtgtgaggctctgcacccgcacctgcagcagctccgcggtggcatgcaggctgtcccggtcctcctgcaagtgctgcgggcagaggaaagcagcccctc

SEQ ID NO: 7710 - DNA, 120 bp, synthetic construct
  source 1..120: mol_type = other DNA
cagcattcacaacaaaacccaggtgtctctccacacctgcaggccaggggacccggcctctgcctacctcctgagctcaccctggaggctctcccactgctccccgctccggccacgggg

SEQ ID NO: 7711 - DNA, 120 bp, synthetic construct
  source 1..120: mol_type = other DNA
ttgcttattacttgaaaaaacaatttttttttgtttgtttttttggagatggagtttcactttgttgcctagactggagtgcaatggcacgatctcagctcactgcaaacgctgcctccc

SEQ ID NO: 7712 - DNA, 120 bp, synthetic construct
  source 1..120: mol_type = other DNA
cctagcttcttgtttctaagtttctttcataaatctcctttgtccattttctgattggattgctggtctttcccttaccaatttctaggcacacattttatattagggatattacccttt

SEQ ID NO: 7713 - DNA, 120 bp, synthetic construct
  source 1..120: mol_type = other DNA
atgtgtgtttattttcaccaaaggtctcatcactctactactcactactcatggagggtcttttctgcaatacctgttctttgcttggaagctactgcccagctctccgttatgaatttg

SEQ ID NO: 7714 - DNA, 120 bp, synthetic construct
  source 1..120: mol_type = other DNA
tggaagaacacacagggacttctcaattctaatttaagggcaagaagtttgagggaggaatgggcatagagaggtcgtaagcttccagtatcaatatggtgaggccaggtgctagttaaa

SEQ ID NO: 7715 - DNA, 120 bp, synthetic construct
  source 1..120: mol_type = other DNA
tggtagccaaactagaaatagagtctctgtctcctgacacccagtctagtattccttcttcatcatgctgcttcttctaatgtaatcctattctggagcaaaatggcagaatgatatccc

SEQ ID NO: 7716 - DNA, 120 bp, synthetic construct
  source 1..120: mol_type = other DNA
ccagccatctatgttcccctggacaagaggagaaacaaagacactccaattcaattttcaggccaccttccaaagagaaagcccctacaataacaaagtcataatccttgaattatagcc

SEQ ID NO: 7717 - DNA, 120 bp, synthetic construct
  source 1..120: mol_type = other DNA
aggctgttctgatctcttcatctgtcccttcacctggcccctgtacccccttcccctttggaccccttgaaccctcccaggacccccgctcagccccttcccgcccccaaccgactcttc

SEQ ID NO: 7718 - DNA, 120 bp, synthetic construct
  source 1..120: mol_type = other DNA
caagtttgacaggaagaagctactcttctccgaattacacagaggtgatgtgttcgtattgcacgtagacgtgtgtataacaggacctccttccccgcgccccgccaccccgacacacac

SEQ ID NO: 7719 - DNA, 120 bp, synthetic construct
  source 1..120: mol_type = other DNA
tggggatgttctgaggccactagaggccaagtttagacttgattcagtttccagctttgctgaggcactctgttcctgggttagggcagttctatgttgaataatgtttttaataatctg

SEQ ID NO: 7720 - DNA, 120 bp, synthetic construct
  source 1..120: mol_type = other DNA
ctggagctgggggagagtgagcatgtttgaaaactggaccttagggcggggcacggtggctcacgcctgtaatcccagcactttgggaggctgaggcgggcagatcaggaggtcaggagt

SEQ ID NO: 7721 - DNA, 120 bp, synthetic construct
  source 1..120: mol_type = other DNA
gttggggtggaccaaagagcctgcctgttcccgccccacctggggaaatggggaccacgccttctgctccaccacaacgcaatcggaggaaatctgttcaccgagtgttggcggaactgg

SEQ ID NO: 7722 - DNA, 120 bp, synthetic construct
  source 1..120: mol_type = other DNA
acctaaggtccactgccaaggcaccatcggacacacctgcccatgagtagacacagcagcgagcaaataggtctgataaataccccccttcccttccctccccaggagggaatgactaca

SEQ ID NO: 7723 - DNA, 120 bp, synthetic construct
  source 1..120: mol_type = other DNA
aactgggctggcctggttcagtgtgaatcaaaccgcttaacccacacatggtacatgtgattttcttttgtgagccttacaccaagccaaactattgtcaaagcatcatttctatagaaa

SEQ ID NO: 7724 - DNA, 120 bp, synthetic construct
  source 1..120: mol_type = other DNA
ggaccgaggagtacagtgcagtgaagtgagggctcccatagcctggggtaccaaaatggggccctggggccagaggaaaggacactggtccccctgagaaaggagacccagcagcctcaa

SEQ ID NO: 7725 - DNA, 120 bp, synthetic construct
  source 1..120: mol_type = other DNA
atccccctcccacccttacctcctgaagattttcattgttgtcagcttcctccacccacttctgcagcaagggccgcagcttacacatgttcttgaagctaagctgcagagcctcaaagc

SEQ ID NO: 7726 - DNA, 120 bp, synthetic construct
  source 1..120: mol_type = other DNA
gaaatagataagctgctaagttctgggttaattaaaaaggaagagcatcatgtctcagaagctaaattcagtatatactctccccagcttgctttgagggtcccacaaactataacatgg

SEQ ID NO: 7727 - DNA, 120 bp, synthetic construct
  source 1..120: mol_type = other DNA
attaaaaaaaaaataaagcagtctataggagtagggtaaaggagggaaggagattatggaggagggtgacacttttaaagacagagaaggtgattgtttgagcaaaggacaagagtctaa

SEQ ID NO: 7728 - DNA, 120 bp, synthetic construct
  source 1..120: mol_type = other DNA
gttgtgattgattcaggatgtttcttaaggataggatgtaggacatgaaagaaactgaggatgactgggtttggccttgagcaactgggtgatcagggtggagcagttcagggagccatc

SEQ ID NO: 7729 - DNA, 120 bp, synthetic construct
  source 1..120: mol_type = other DNA
actttcaggaacaataatcctggaatgagcactgtttttaccctcaggctatgcttaaccctaaggccaaaatcttgggtctgataagggtcaaattttcaagcaggactaagggtggga

SEQ ID NO: 7730 - DNA, 120 bp, synthetic construct
  source 1..120: mol_type = other DNA
gcgccccaagccgggggcctggtgaaatgagggcttgcgaagggactactcaacccctctctccctccccagtcccacccactagccttgacctctggccccgccccctggatgggtgga

SEQ ID NO: 7731 - DNA, 120 bp, synthetic construct
  source 1..120: mol_type = other DNA
ccccccacccccccatccccccacccctccgtcttccagaatcagactccagactctcctcatctaacagactaaggggttggtccctacttccccttcaagggaccagactttggactg

SEQ ID NO: 7732 - DNA, 120 bp, synthetic construct
  source 1..120: mol_type = other DNA
cccaaaacttgatctcagtggagggcctggggtaagtctgggggctccagagggggctctgggccagggctccccacagcttcgaaggccagaaggccaggtctggactgggcacgctga

SEQ ID NO: 7733 - DNA, 120 bp, synthetic construct
  source 1..120: mol_type = other DNA
ggtcagcctcctgcatgcctagactcctagccggcccccttctggggtgctcagggctgatgggaggttgaggcaggctttccttccttctcactgtcctgttatgcctgaagggtaggt

SEQ ID NO: 7734 - DNA, 120 bp, synthetic construct
  source 1..120: mol_type = other DNA
ggttctaagtcctggctctgactccctggctaatggcacctccccctcctgtgcctcagtttcctcacctagtaaagaggatttggactcaatgaactctaaacttccttccaactcaga

SEQ ID NO: 7735 - DNA, 120 bp, synthetic construct
  source 1..120: mol_type = other DNA
gacagggaaaagtggtggcaaagacctcccagacaaactggctgcctctggtcctatcaagctgccgtacatcctccacaccagggctttaggcaccattccactgtgttccatggtgac

SEQ ID NO: 7736 - DNA, 120 bp, synthetic construct
  source 1..120: mol_type = other DNA
gctactggctatatgcccacggcaaatgtaatggaacctctccaagccttgctttcctcatttggcaactggacacaattatagtctctaccacacaagtaaagataacatgagataatc

SEQ ID NO: 7737 - DNA, 120 bp, synthetic construct
  source 1..120: mol_type = other DNA
atcaggatctcagtgaagtgggatggtatctgagtgcctagcacagtgccccacgcagagctcaatgcatcttagctgaacaataacgaatgcagctgcacatcttcaggcccatattga

SEQ ID NO: 7738 - DNA, 120 bp, synthetic construct
  source 1..120: mol_type = other DNA
gtcatgtagcctcctggcacaatagcatgaagtgagctgagaggtcatggaacaaaaaggctcacagaccaaatgtaaatgctcaaataacatcgtttattaaataaatgtaaaacacat

SEQ ID NO: 7739 - DNA, 120 bp, synthetic construct
  source 1..120: mol_type = other DNA
cacctccatactcctgcagttccacctcccagtgccttcctgagatggtcccctgaagggaagacccatcctccccttctccaaacaccacttaaaccacttaaaccctttcattaaacc

SEQ ID NO: 7740 - DNA, 120 bp, synthetic construct
  source 1..120: mol_type = other DNA
aaggacctcctacggccaagtttaagcttcaagtgggagacatgggacaattacttaccagatacaaccagtttcagaggaagccctacctaccctctaagcctgaccttatcttgcaac

SEQ ID NO: 7741 - DNA, 120 bp, synthetic construct
  source 1..120: mol_type = other DNA
gtggggggccgaagcgggcggatcacctgaggtcaggagttggagaccagcctggccaacatagcgaaaccctggcgcgcacttgtaaacccagcttctcgggagactgaggaaggagaa

SEQ ID NO: 7742 - DNA, 120 bp, synthetic construct
  source 1..120: mol_type = other DNA
ggtgggggctgtccagtcccggtggagttctgggtgggcccaaacagtctgcaactttggaaatttactgaatggatttctttctgtgtaattggaactccaccatgtaactttttgtgg

SEQ ID NO: 7743 - DNA, 120 bp, synthetic construct
  source 1..120: mol_type = other DNA
tgggttagggtgttggaaacttcaatggttttgtggggattttcacagagcaaggtttggtatctagttagtctagcatttattagctaatgatgtcctttggtatttattaaagtcacc

SEQ ID NO: 7744 - DNA, 120 bp, synthetic construct
  source 1..120: mol_type = other DNA
ttactccaggctgtagaatcctggaaaagagctaccatgcagcccacacctggtcgactggaggaccaccttagtggaagagggacaatcagggcctctggcctgccatgtgcacaagca

SEQ ID NO: 7745 - DNA, 120 bp, synthetic construct
  source 1..120: mol_type = other DNA
gaatttaccatataacactctttttacataaattctgcctcccccgctttttttttttaaagtgaactttttttttgtctttggactagactgtctaaggccacaagattagaagttacc

SEQ ID NO: 7746 - DNA, 120 bp, synthetic construct
  source 1..120: mol_type = other DNA
ctgctctggcgaggcgttccacccggggaatttcctacccgggagcgctctttggatcgcgtcactcaggctggccagagtccaccgcagggatgctccacagggcaggcctaagccacc

SEQ ID NO: 7747 - DNA, 120 bp, synthetic construct
  source 1..120: mol_type = other DNA
ctgtggagagagggagagtacggggtgcagggtagatgagagtagacaattctgattatttgaggagggtttgtggtttaggaagtgagcttctcaccgattttatttatttattttgag

SEQ ID NO: 7748 - DNA, 120 bp, synthetic construct
  source 1..120: mol_type = other DNA
caccatgttagccaggatggtctcgatctcctgaccttgtgatccgcctgcctcagcctcccaaagtgctgggattacaggcttgagccaccgtgcccggtgtgccctgctaattttttg

SEQ ID NO: 7749 - DNA, 120 bp, synthetic construct
  source 1..120: mol_type = other DNA
caggatacatgtgcagaatgtgcaggtttgttacataagtatacatgtgccatggtgatttctgcacctatcaacctgtcatccaggttttaagccccgcctgcattgggtatttgtcct

SEQ ID NO: 7750 - DNA, 120 bp, synthetic construct
  source 1..120: mol_type = other DNA
ctgggctgcctgttttaaaacttcctataaatgcatgcataggtatggcctcttttgtgtctggctttttgtatttggcataatatctatgtaatccatccatgttgttgcacctatcag

SEQ ID NO: 7751 - DNA, 120 bp, synthetic construct
  source 1..120: mol_type = other DNA
tagtctcgaactccttacctcaggtgatccgcccgcctcggcctcccaaagtgctggaattacaggcgtgggccaccaagcccgaacaaatgtcttaagtttgttttctttctttcttta

SEQ ID NO: 7752 - DNA, 120 bp, synthetic construct
  source 1..120: mol_type = other DNA
ttggccaggctggagtgcagtgatgcaatcttggctcactgcaacctctgccttaagagctcaagcaattctcttgcctcctgagtagcagggactacagttgcatgccaccatgcccag

SEQ ID NO: 7753 - DNA, 120 bp, synthetic construct
  source 1..120: mol_type = other DNA
aaggtggtctggaactcctggcctcaagtgatccattggccttggtctcccaaagtgctgggattacaggtgtgagccaccatgcccggcctttttattttattttattttatttgaaac

SEQ ID NO: 7754 - DNA, 120 bp, synthetic construct
  source 1..120: mol_type = other DNA
catattatatcagaaactgcagtttaacctccccccacccctggagaattctgcttttcgaatcaggcctttctctttttctgtctgtcttaagtctcaacattgagtagctgtgatttt

SEQ ID NO: 7755 - DNA, 120 bp, synthetic construct
  source 1..120: mol_type = other DNA
aaagagaagactgctccacaaggaatgtacagttttgatatgtgcagggctcaggtcttcaggggataaataagttcctaaatgcgccatcaacaggaatttccttcaggataaatagga

SEQ ID NO: 7756 - DNA, 120 bp, synthetic construct
  source 1..120: mol_type = other DNA
actctatctagctgctctggtggggccttggagaacctttatgtctagctcagggattgtaaatacaccaatcggcactctgtatctagctcaaggtttgtaaacacaccaatcagcacc

SEQ ID NO: 7757 - DNA, 120 bp, synthetic construct
  source 1..120: mol_type = other DNA
tcctgcctcgcctccgaaaactctagttttacagatatgaaccatagcgctagctcttactgtctttcttcaacacgtcctcccatccttccctcctttctccactctgcatttgacccc

SEQ ID NO: 7758 - DNA, 120 bp, synthetic construct
  source 1..120: mol_type = other DNA
cagcggcaggtgtgagttccccgccgctggagaccagaagcctgaaggcagctccgcccaccccagcccacagcgccgttattccgtttctatatcagtaaacacttgtcattttccgta

SEQ ID NO: 7759 - DNA, 120 bp, synthetic construct
  source 1..120: mol_type = other DNA
aatcctagcactttgggagggtgaggcaggcagatggtttgagcctaggagtttaagaccagcctgggcaaaatggtgaaaccccttctccaccagaaatacaaaaaattagccgggtga

SEQ ID NO: 7760 - DNA, 120 bp, synthetic construct
  source 1..120: mol_type = other DNA
tgtgaagtttatctcagcctcaaagaagtaattcagcaaggatcagtggtttcacttaacagtctggctctgaggctggctgtggccctgttatccatggtgagcaccatgggaatgcag

SEQ ID NO: 7761 - DNA, 120 bp, synthetic construct
  source 1..120: mol_type = other DNA
tctaggcctggtgatcatttaatcaaaagagactaacacctgctccctgatgcttacaatctgaaagacaataaagaaaaatatagtaacagtagtgaattatatggatgtgttccagca

SEQ ID NO: 7762 - DNA, 120 bp, synthetic construct
  source 1..120: mol_type = other DNA
caaagtgataggtgataaaaagaaaaaataggccaggtgcggtggctcacgcctgtaaccccagcacttcgggagaccgagatgggtggatcacgaggtcaagagatcgagaccatcctg

SEQ ID NO: 7763 - DNA, 120 bp, synthetic construct
  source 1..120: mol_type = other DNA
tgtgggggtccttccagagaggagctgagatacgcctacctggaggggcccctgggcctggaggggctcctcagtgtgactgggtgaagtgttttcagaggaccagggttgaggttgggg

SEQ ID NO: 7764 - DNA, 120 bp, synthetic construct
  source 1..120: mol_type = other DNA
ctgaccctttgctcatcacaatagtgaaaaaaaacacagccctgggtggagatttaagatgctaatgagtcatgagatgtatgaacaagcatgtacagctactgcacacgtgcacccaga

SEQ ID NO: 7765 - DNA, 120 bp, synthetic construct
  source 1..120: mol_type = other DNA
atctcttcaaagatttttgttcaccttgagggacacattagatctacttttgccaacagtccccattcctccaggctctgtgtgttctgagactcctctgagtctcagaggagtgtgttc

SEQ ID NO: 7766 - DNA, 120 bp, synthetic construct
  source 1..120: mol_type = other DNA
aatcctcaccactttaaggcttaaggttttcttttccatcactgagtctctccctttcctctcattcttccacttacaaatctccaaaacaattctcacgcactgtgactttgctccctt

SEQ ID NO: 7767 - DNA, 120 bp, synthetic construct
  source 1..120: mol_type = other DNA
tcccaaacaatactgttttacaattagagtttttgttgttgttgctgtttttaaataaaaagaaaggaagtttgggtgcagtggctcatgcctgtaatcccagcactttgggaggccaag

SEQ ID NO: 7768 - DNA, 120 bp, synthetic construct
  source 1..120: mol_type = other DNA
accaatgcactcctgcctgggtgatgagtgagactctgtctcaaaaaaaaaaaaaaaaaaaagaaagaaaaatacctcctaccaacaactttcctcccttacaatctagtccagggttac

SEQ ID NO: 7769 - DNA, 120 bp, synthetic construct
  source 1..120: mol_type = other DNA
atatcaatatccttttaaagacagaggctggcctgtcagttctcactgtctgccctgggcctctgtctaccaaacacgacactgtcattggtgttaatagcaaactccagactaggattt

SEQ ID NO: 7770 - DNA, 120 bp, synthetic construct
  source 1..120: mol_type = other DNA
ccatcctctaattagtccagtgaccaccaaatttccattacttttaccacctcgatgcaaaatgcttttgcagcacaaatttcaccatcacatagaatttgcttgtgttggccgggcgca

SEQ ID NO: 7771 - DNA, 120 bp, synthetic construct
  source 1..120: mol_type = other DNA
tgggaacttggaagcaatggctgttttctgccttgctccctttaacaatgccagtcattaccatatgtttagctctaacttttggtccaactttgtttaaaatgctgatttcccagcctg

SEQ ID NO: 7772 - DNA, 120 bp, synthetic construct
  source 1..120: mol_type = other DNA
cttcccacctccttatgaataatcatgtaagacccccataaagggagtttctgcagcaataatcaatgctgtctcatccttaggagcagcccaccctgaatcctctctctcagggcatac

SEQ ID NO: 7773 - DNA, 120 bp, synthetic construct
  source 1..120: mol_type = other DNA
cttgggaggctgaggcaggagaatcgcttgaacccaggaggtggaggttgcagtgagctgagattgcactccagcctgggcaacaggagcgaaactctgtctcaaaaaaacaaaaaacaa

SEQ ID NO: 7774 - DNA, 120 bp, synthetic construct
  source 1..120: mol_type = other DNA
acaagagtctctctctgtcacccagtctggagtgcagtggcatgatcttggctcattgcagtctctgaatcactcgggttcaagtgattcttgtgcctcaacctcccaagtagctgggac

SEQ ID NO: 7775 - DNA, 120 bp, synthetic construct
  source 1..120: mol_type = other DNA
gcttgtccctggctgaagacaggcccctcctgcagaggccaggcatgaatgcacatctgagtaagactctattatgactcaagaataacaaacataaataaataaacatgataacataac

SEQ ID NO: 7776 - DNA, 120 bp, synthetic construct
  source 1..120: mol_type = other DNA
aattcttccttgtgcaagatccaagagccctctcttggggtctgaatcaagactcctttcctgtaacaaaaccttagcattaggtaatctgtggtttacttttttttttttttttttttt

SEQ ID NO: 7777 - DNA, 120 bp, synthetic construct
  source 1..120: mol_type = other DNA
gacatgttttgcacagtaaaggatggcctctctcttctcgctgaaacagcccttcccgccctacttactcacactcctgctccatttgaaatagccaattgggatcagcttagattgtgc

SEQ ID NO: 7778 - DNA, 120 bp, synthetic construct
  source 1..120: mol_type = other DNA
attaatttagctttgtaaaccaaaaagtgactgaggcagatctcaatcaattcggtgttcattttgccaaggttgaaaatatgctgggggaaaagaaacataagccacaataggacctgt

SEQ ID NO: 7779 - DNA, 120 bp, synthetic construct
  source 1..120: mol_type = other DNA
taatttctagtgattccaagtgagaaaaatgggagaaatttttcttttgaaaatgttactttggagacttatagccagggaagaattcaggatctagtctgaataaattgtagacaaata

SEQ ID NO: 7780 - DNA, 120 bp, synthetic construct
  source 1..120: mol_type = other DNA
ttctagccaaagccttggtaaaataatcagtgtcaaaattatgtcctgttaagaaagaaaacagatttttattaaactcatgcaactaagtatattgccataaatcatgaatactcagaa

SEQ ID NO: 7781 - DNA, 120 bp, synthetic construct
  source 1..120: mol_type = other DNA
ttacttttcctttaacaaaagccctatttccatgccttcttatgtttctaccaaaaaccacattctacttttctttgcatgttgcttgtagaattatttatcttatatctagtaatttaa

SEQ ID NO: 7782 - DNA, 120 bp, synthetic construct
  source 1..120: mol_type = other DNA
cccaggctattagaattttatttaatttaatttttttcttatgtggcaccaaggttggcaagaggaaggaggggctgatagaaataaataggggaggccgggcgcagtggctcatgcctg

SEQ ID NO: 7783 - DNA, 120 bp, synthetic construct
  source 1..120: mol_type = other DNA
cgcacccggctgagaagtgtttaattttaactaccagaagtgtttgaagtgatttttttgctcttaatttagtcaagggaatttttgaagactagccatgacactactatgtgtcctttt

SEQ ID NO: 7784 - DNA, 120 bp, synthetic construct
  source 1..120: mol_type = other DNA
ggttggattgaaggacgcaaaatactgatcctgggcatgtctgtgagggtgttgccaaaggagattaacatttgagtcagtggactgggaaaggcagacccaccctaaatctgggtgggc

SEQ ID NO: 7785 - DNA, 120 bp, synthetic construct
  source 1..120: mol_type = other DNA
aagccatggggtgggggctgttaggggtggaggcagtagtgtctccttcacccccacctggggtcttctcctgaaggacagactatcacatcccagaattggtgagtcctctactgtgtc

SEQ ID NO: 7786 - DNA, 120 bp, synthetic construct
  source 1..120: mol_type = other DNA
tgtttccttggcttcctgttcagttttccttaggcctcagctgctgctattgctgctggctgctctccacattctcctaaattccagatgggtgtgaggaggtaagggcgggaagaaata

SEQ ID NO: 7787 - DNA, 120 bp, synthetic construct
  source 1..120: mol_type = other DNA
tgggctgactgcttggttcaagtcttctttataatatacaaagttgttttagctttttgaccgtagctttgtaatgccatggagtagcctatagtccatacaggtaggtttggccttaag

SEQ ID NO: 7788 - DNA, 120 bp, synthetic construct
  source 1..120: mol_type = other DNA
tagtatggttaagggggtaacaacatcaaaacaatgtacagcatatttaaatctagcaaggacaaaagaggtctttatttgggggaggaggttgagcacagtgacagaacaataggaaaa

SEQ ID NO: 7789 - DNA, 120 bp, synthetic construct
  source 1..120: mol_type = other DNA
gttcatgcattctacagtaaaataatctttttttctctttttttccttcaactttgctctagaaaaaagaagtgtccaaggcctatttttttagccctagctattcagacagtgttatct

SEQ ID NO: 7790 - DNA, 120 bp, synthetic construct
  source 1..120: mol_type = other DNA
ggagcttcagcgccctttgtggctttcttagccctgccggcacctgtgtagaaggtgccatctcaggccagcgcggtggctcaaacgtgtaatctcagcaccttgagaggctgaggccag

SEQ ID NO: 7791 - DNA, 120 bp, synthetic construct
  source 1..120: mol_type = other DNA
agcaagggtgcacaccactcagcacctgcccctccacctgtccttctctccccacctgcctctgccccagcacagcaggtcctcagaatccaaaaagagaacctaacctgcatgttctct

SEQ ID NO: 7792 - DNA, 120 bp, synthetic construct
  source 1..120: mol_type = other DNA
aatataatgatatgtcatgacaaatccactagaatttctaaattaaaatcactgactattccaaatgttggtgcgaatatggaccatcaagagctgtcacacactttgtctagcagtgtg

SEQ ID NO: 7793 - DNA, 120 bp, synthetic construct
  source 1..120: mol_type = other DNA
aacccccttctgcagtgatggagtgtctatatctgagctattcattatggcacagatacagacattcatattctgtgaattctgagtacttgaaatatatggctggtgcaaataagaaac

SEQ ID NO: 7794 - DNA, 120 bp, synthetic construct
  source 1..120: mol_type = other DNA
ctgagctgaagtataggttgcctggaaagctttaccttttgatccagaataagaagctttaccattgctagacccatctgtgaaataatgaaaatgcttagcaggctgcagattgtttac

SEQ ID NO: 7795 - DNA, 120 bp, synthetic construct
  source 1..120: mol_type = other DNA
aatttgattcacccaataagctgctttgccttgtttatttgtgcttccaaatcctcctgtttgtttaatttcacttttcccattcccacatacggcacaatcaggagctgtgctatacac

SEQ ID NO: 7796 - DNA, 120 bp, synthetic construct
  source 1..120: mol_type = other DNA
actaaaggaagggtattgttctccacctgaagtgattttttcccaagctctaatgcacactcctctaagctgctctacggcatcatcctgtatgaccacttgtgcgtctaaaccagccca

SEQ ID NO: 7797 - DNA, 120 bp, synthetic construct
  source 1..120: mol_type = other DNA
cagcttggtgggggagaccctaacccagcagagctagaggaattaaagatacacacacagaaatatagaggtgtggagtgggaaatcaggggtttcacagccttcagagccaagagcctt

SEQ ID NO: 7798 - DNA, 120 bp, synthetic construct
  source 1..120: mol_type = other DNA
tctttctttcctccttccttccttccttgttttttgtttttgagacaggttctcactctgttgccgtgtctggagtgcagtggtgcgatcttggctcactgcaacctctgcctcccaggt

SEQ ID NO: 7799 - DNA, 120 bp, synthetic construct
  source 1..120: mol_type = other DNA
cctcctgagtagctgggactgcaggtgtgcaccaccatgtccagcttaacattttattttatctgatagtagagtgaagcacttgcattacaaaaataaaatacatacaaattacaacaa

SEQ ID NO: 7800 - DNA, 120 bp, synthetic construct
  source 1..120: mol_type = other DNA
aaattcagtgctcatttggccagggataaggccctcacaccctttgctttgaggatccaagcttagaatgtggctgtctctgggacatttcatgctaaagaaagcccagcaagtgtagac

SEQ ID NO: 7801 - DNA, 120 bp, synthetic construct
  source 1..120: mol_type = other DNA
ctggaattcagagaaacagtggcagcctctctctctccatcccccatcccagtaaatctaaggcaagggcctagggctcttgcactttattttcaccatgcattttccttctctggttaa

SEQ ID NO: 7802 - DNA, 120 bp, synthetic construct
  source 1..120: mol_type = other DNA
gagccaccgtgcctgaccatcagctcgggattttaagaaacatgatccttaaaagtaggaagaaagcacataatacctgcaaagccctgggcaaaaatcctcttttacttcagtaatgat

SEQ ID NO: 7803 - DNA, 120 bp, synthetic construct
  source 1..120: mol_type = other DNA
gccagctaccgctcctggccgagattgcgttttctaaagagtaaaacagagtaaatctcttcggcttaactctgtctcttaatactctgaaattttgttcttgcagtgagaacaaaaaaa

SEQ ID NO: 7804 - DNA, 120 bp, synthetic construct
  source 1..120: mol_type = other DNA
gcaaaagtatcttccatcacactttgttttctttagtttgatccaccattccctcatcaagaggtaagttctctccatccccttaaacatgagcagatctgatatctgcgttagccaata

SEQ ID NO: 7805 - DNA, 120 bp, synthetic construct
  source 1..120: mol_type = other DNA
accacaagtgcaaaacaccatcatagcaacatataaattagtgtttgattaaataactagacactatggtttagtaaaattgacacataatacccaccacccgggggtcagcccccccgc

SEQ ID NO: 7806 - DNA, 120 bp, synthetic construct
  source 1..120: mol_type = other DNA
cgtccgggaggtgaggggcgcctctgcccggccgcccctactgggaagtgaggagcccctctgcccggccaccaccccgtctgggaggtgtgcccaacagctcattgagaacgggccagg

SEQ ID NO: 7807 - DNA, 120 bp, synthetic construct
  source 1..120: mol_type = other DNA
gtacgtgtatgggtacatacacacagacataaatatcattgtaaaaacataaggaagaaatgcttataacatttactgtctttatttctgcaactgatcacatggttacagctggttatt

SEQ ID NO: 7808 - DNA, 120 bp, synthetic construct
  source 1..120: mol_type = other DNA
gtgatatctccagttactggaaaatctgaggcaactggggactggagcaggccctcagcaaactgcagcagccctacagaaaagtggtcagactattgaaagagaaaacaaaagaagaga

SEQ ID NO: 7809 - DNA, 120 bp, synthetic construct
  source 1..120: mol_type = other DNA
gaccagtgacgcaataaagcaaccacataagcaagtctgcaaagtaaccagctaacaccatgatgacaggatcaaatccatacatatcaatactaaccttaaatgtaaatgggctaaatg

SEQ ID NO: 7810 - DNA, 120 bp, synthetic construct
  source 1..120: mol_type = other DNA
gcagtaaatgcccacatcaaaaagttagaaagatctcaagtcaacaacctaaaatcaaacctataagaacttaagaatgaagagcaaacatatcccgaagctagcagaagacaagaaata

SEQ ID NO: 7811 - DNA, 120 bp, synthetic construct
  source 1..120: mol_type = other DNA
aaaaaactctcaataaactaggtgttcaaggaatatacctcaaaacaataaaagccatctatgacaaacccacagccaacttcatactgaatgggcaaaactagaagcattctccttgaa

SEQ ID NO: 7812 - DNA, 120 bp, synthetic construct
  source 1..120: mol_type = other DNA
tttgatttaatcattacacatggtatacatatatcagtacatcacaaaacatctcatgaatgtattatgatttgtcaatttaaattatacatatatatgttttagaaaggtattattttc

SEQ ID NO: 7813 - DNA, 120 bp, synthetic construct
  source 1..120: mol_type = other DNA
gaaagcaaaggaaaacttgccgatgaaaagagtgcccaaatgagacacagtcctatggaaatcacgatggtaatttgagaggttcattaatgtaagacacgttgatgcctgatatagagt

SEQ ID NO: 7814 - DNA, 120 bp, synthetic construct
  source 1..120: mol_type = other DNA
acaggcaacatcataaatcaatgcatagaagttacacactggtttggccttaaaaggaggaatatcctgatgagggagcttacaagtcgtagatagagataaaagattctctgatttgcg

SEQ ID NO: 7815 - DNA, 120 bp, synthetic construct
  source 1..120: mol_type = other DNA
gggatgcaaataaaagtccagaaacaggaattattcctaagcaagaaactgtaaatatattttgtgtccattatgtaatgattcctaagggtctggagaagtaggttgtgccttcactgc

SEQ ID NO: 7816 - DNA, 120 bp, synthetic construct
  source 1..120: mol_type = other DNA
attccatggtgtatttgtgacacattttctttttttcttttcttttttttttttttttttgagatggagtcttgctctgtcgcccaggctggagtgcagtggcgcaatctcgctcactgc

SEQ ID NO: 7817 - DNA, 120 bp, synthetic construct
  source 1..120: mol_type = other DNA
ccttttggttttgatttgcatttctttgatgaccagtgatgatgagcattttttcatgtgtctgttggctgcatagatgtcttcttttgagaagtgtctgttcatatcctttgcctactt

SEQ ID NO: 7818 - DNA, 120 bp, synthetic construct
  source 1..120: mol_type = other DNA
ttgagtagtggtttgtagttctccttgaagaggtccttcacatcccttgtaagttttattcctaggtattttattctctttgaagcaattgtgaatgggagttcactcatgatttggctc

SEQ ID NO: 7819 - DNA, 120 bp, synthetic construct
  source 1..120: mol_type = other DNA
ggatcggtggtgatatcccctttatcattttttattgtgtctatttgattcttctctctttttttctttattagtcttgctaatggtctatcaattttgttgatctttccaaaaaaccag

SEQ ID NO: 7820 - DNA, 120 bp, synthetic construct
  source 1..120: mol_type = other DNA
accctatcgttatgatgttagctggttattttgcctgttagttgatgcagtttcttcctagcatcgatagtctttacaatttggcatatttttgcagtggctggtactggttgttccttt

SEQ ID NO: 7821 - DNA, 120 bp, synthetic construct
  source 1..120: mol_type = other DNA
cctttagctcggagaagtttgttattaccaatcttctgaagcctatttctgtcagcttgtcaaagtcattctccatccagctttgttccattgctagggaggagttgcgatcttttggag

SEQ ID NO: 7822 - DNA, 120 bp, synthetic construct
  source 1..120: mol_type = other DNA
ggtacaatctctcatgttttcccttggctaggaaagggaattccccgagcccttgtgcttccctggtgaggcaatgccttgccctgcttcagctcacactctgtgggcagcacccactgt

SEQ ID NO: 7823 - DNA, 120 bp, synthetic construct
  source 1..120: mol_type = other DNA
accatctcttacctctgagaagcaaagaggggctggaagttgagttcagtcaccagtggccattgatttaattaatcttgcgtacacaatgaaacttccatagaaacctctagagattgg

SEQ ID NO: 7824 - DNA, 120 bp, synthetic construct
  source 1..120: mol_type = other DNA
ccctattccctgctacctctgctggtccatggaaaaattgtcttccatgaaattggtccctggtgccaaaaagttggggaccactgatttaagctataacaataataaactacgatactg

SEQ ID NO: 7825 - DNA, 120 bp, synthetic construct
  source 1..120: mol_type = other DNA
gtgtcagaattgagtcaaattctaggactcccagttgctgttggagaatcagaaaattatttggctggaggaaaaccccatcaccatcccacagagagaaacttacagtatattggggga

SEQ ID NO: 7826 - DNA, 120 bp, synthetic construct
  source 1..120: mol_type = other DNA
atcaaattgtaacacaattatcacagtggtcctaaggtgatgtacatcctcagcttatgaagataacaggattaagagattaaagtaaagacaggcataagaaattataaaagtattatt

SEQ ID NO: 7827 - DNA, 120 bp, synthetic construct
  source 1..120: mol_type = other DNA
aatacgagtgaccacagcccatgacacttccctcaggagaccctgagaacatgtactcaatgtggttggggtacaggttggttttatacattttaggaagatatgagacactaataatat

SEQ ID NO: 7828 - DNA, 120 bp, synthetic construct
  source 1..120: mol_type = other DNA
tcctatatcactgccagactctgagctagtatgaggtgacacagaaaggctgggattgtgcagaatgcattttagtaaacatggctgagtgtcagtagtgatgtccagttgccaggtgca

SEQ ID NO: 7829 - DNA, 120 bp, synthetic construct
  source 1..120: mol_type = other DNA
gcactcattcttttccatagtcaatcactcccttggtgcttcatccatgcttgaggttttaagtatcctttatgtggtgtgacctcttaaatctatttctccagcccagtcctttcccct

SEQ ID NO: 7830 - DNA, 120 bp, synthetic construct
  source 1..120: mol_type = other DNA
tgattttacttcaatggcgttccccagatgcagaacttttctgtcctatgtctggctgacaacaaaggtcagttgaatgatcagtgtagagcacctcctattctaaagccagtatcttta

SEQ ID NO: 7831 - DNA, 120 bp, synthetic construct
  source 1..120: mol_type = other DNA
tcaggtgcctttgcagaaagagatgccagaggctcttgaagtcacaaaggagaggtgtgaagaaatcctgcatctcagtcccacacaggcagctgtctcaggctacagaacacaatagtc

SEQ ID NO: 7832 - DNA, 120 bp, synthetic construct
  source 1..120: mol_type = other DNA
tccagaaggacttctgctttctctgataagagatgtgaccccccattcccctccttaccccagctcagggtgaggggctcttgcagcccctcgtgctgcatatggcacgtgtatctctgc

SEQ ID NO: 7833 - DNA, 120 bp, synthetic construct
  source 1..120: mol_type = other DNA
tgcggagccactccacgcacgtgccctccaggtaggctctcagctgctccgccgcacgggccgcctccaacttgcgctgggtgatctgagccgcggtgtccgcggcggtccaggagcgca

SEQ ID NO: 7834 - DNA, 120 bp, synthetic construct
  source 1..120: mol_type = other DNA
ctcggcctctggggagaatgtgagtccgggtgggtgactggggactttagaaccgggactgcggagacgctgattggcttctctagaacccgacacccaatgggagtgggaattggggac

SEQ ID NO: 7835 - DNA, 120 bp, synthetic construct
  source 1..120: mol_type = other DNA
gtccagaacatctcctgaatacaaagaagcagggtttgttactgtctattgcaaccgggagcctgtagtcatcacctcaaagttgcgagggctccatgcagtcccaatgctcttcaccag

SEQ ID NO: 7836 - DNA, 120 bp, synthetic construct
  source 1..120: mol_type = other DNA
catcatttctgttgttaattgttcctttctgtatatctgggtcaccatctagtatcatttcccttcagcctgaagaacgtcctttaaaattacatgtagtacaggacccctaggaaatga

SEQ ID NO: 7837 - DNA, 120 bp, synthetic construct
  source 1..120: mol_type = other DNA
gtggtaatagatgggtaactgtataagaaattgccataccactttacaaattggctgccacatttcttgcattcctaccagcaatagcagacattcctattttttccatattcttgccag

SEQ ID NO: 7838 - DNA, 120 bp, synthetic construct
  source 1..120: mol_type = other DNA
aaaaggcaggaaacaggaagagaggatggcagcacgttggctaaaggttctttggagattgtattggattccaaagacaaaacccaaaagagcaatggtgaaaagaatgaaaaatgtgag

SEQ ID NO: 7839 - DNA, 120 bp, synthetic construct
  source 1..120: mol_type = other DNA
gtagtttcctctccaactctcatgttaacagatgaagaaaaggctcatattcatgcagaaactgctcttctaatggagaaaaacaaataagaaaaagaacttcaggaaagacagcaaggg

SEQ ID NO: 7840 - DNA, 120 bp, synthetic construct
  source 1..120: mol_type = other DNA
gctttctgcttctcagatttggaaactcagtcctgttttcagaggttctggaccagctcttactggacttcgtaacttaggaaatacttgttatatgaactcaatattgcagtgcctatg

SEQ ID NO: 7841 - DNA, 120 bp, synthetic construct
  source 1..120: mol_type = other DNA
aggccattacacagcctactgtaaaaatgcagcaaaacagcggtggtttaagtttgatgatcatgaagtttctgatatctctgtttcttctgtgaaatcttcagcagcttatatcctctt

SEQ ID NO: 7842 - DNA, 120 bp, synthetic construct
  source 1..120: mol_type = other DNA
agagacctagaaccagaaatactatttgaccccttgggtatctacccaaaggaatataaatcattctactataaagacacatgcacacgtatgtttactgcagcactatttacaatagca

SEQ ID NO: 7843 - DNA, 120 bp, synthetic construct
  source 1..120: mol_type = other DNA
ccctcaaggcttccggacttgcaagactgtcttcgctgagcacatcagtgatgaatgcaagagacatttctataagaactggcataaatctaagaagaaggcctttaccaagtactgcaa

SEQ ID NO: 7844 - DNA, 120 bp, synthetic construct
  source 1..120: mol_type = other DNA
gagttggaggccattatccttagcaaactaaggcaggaacagaaaaccaattaccacatgttctcacttataagtaggagttatatgatgagaacacatggacacgcagaagggaacaac

SEQ ID NO: 7845 - DNA, 120 bp, synthetic construct
  source 1..120: mol_type = other DNA
acattttatagaggataaatggttgcaagatttctctatttatgggtactagtacatttttaactgaaagtggactgtgaaatgttaagaagagttaaattctgaaggaaattgagacac

SEQ ID NO: 7846 - DNA, 120 bp, synthetic construct
  source 1..120: mol_type = other DNA
tgaggattcagggagatcgagatgggctgggcaggaaggttcttacttggaacctggaggatgagcaatgacattcctctctccaccttaaagctcatcctgggcatctgcctcctggga

SEQ ID NO: 7847 - DNA, 120 bp, synthetic construct
  source 1..120: mol_type = other DNA
ggatagatgtttgtggggcaaaccagaagccccatcatttgctccagcccagcaataaactctttcttccctcaaataaaaacacaacctgacttttacgatcatcaattctttgtttta

SEQ ID NO: 7848 - DNA, 120 bp, synthetic construct
  source 1..120: mol_type = other DNA
agggtggtttatgactgagtaggacccaaagatgccagcaaagtaggcctctacattaaaaaaaaaaagagagagaaaaattaaacagagaaatttaaaagtttataaataatgtttact

SEQ ID NO: 7849 - DNA, 120 bp, synthetic construct
  source 1..120: mol_type = other DNA
aatatctactttcacctcaatgtaaactttcaaaattaagaccaagtggagcacggtgccctctgaagcactgtctgtcacacactaaggagctaagaactcctgtggcctcctttagaa

SEQ ID NO: 7850 - DNA, 120 bp, synthetic construct
  source 1..120: mol_type = other DNA
tgcatagagctagccccagcactgccttggttgggccggttgtttttgtcaaactctaagtctccctcagaatccctgtacttctccactgcaatgtattgacagggttgtgaccttgtc

SEQ ID NO: 7851 - DNA, 120 bp, synthetic construct
  source 1..120: mol_type = other DNA
atgtgctctcatgctattcaggggaggtggtcaatcactctgattgtaaatgtcagcagcaggagtaggaatgctgctctttgaaactgcttgctggtcttgggctggggaacttttgag

SEQ ID NO: 7852 - DNA, 120 bp, synthetic construct
  source 1..120: mol_type = other DNA
acaggcttgttctttattctgccatctcaaaacttctgtggacctcttccagaatactttcattttcttttttttctgtttgagaatttccacttagtatcttacgtggtttcagcaggg

SEQ ID NO: 7853 - DNA, 120 bp, synthetic construct
  source 1..120: mol_type = other DNA
aaaaacccatctctacaaaaaacacaaaaattagccaggtgcggtggcacacagctgtagtcccggctacttggaaggctgaggtgggaggatcacctaagcctggggcggtcgaggctg

SEQ ID NO: 7854 - DNA, 120 bp, synthetic construct
  source 1..120: mol_type = other DNA
ctcagtctgcaaggggaaatggtatacacagcatcagactttagcaggttccataaggccaggtaagttgcctaataatttgtactatactcctaatgttcttattaccactggagagtc

SEQ ID NO: 7855 - DNA, 120 bp, synthetic construct
  source 1..120: mol_type = other DNA
agcaaaaggagcacttaacagttaagaacaacaacagagaacaatgttcataagagacaaagcaccgtgaaagaacaagaaaatacaacagacagcagaatcatacaatcatataactga

SEQ ID NO: 7856 - DNA, 120 bp, synthetic construct
  source 1..120: mol_type = other DNA
tagctttaggtcagtcttggtacaatcatacagtggctaaattagtagatctagtgtaaaatggcctggaactgaattctagcctcatatcttcaaaattatggaactttgggcaagtaa

SEQ ID NO: 7857 - DNA, 120 bp, synthetic construct
  source 1..120: mol_type = other DNA
ctttgagtaggactaaggtatgaaaagagcaatgatggtgtgctcaatggctatattactaaacacaagaatgttttcagctcgatctacctgagctacatggagatttgataactaaat

SEQ ID NO: 7858 - DNA, 120 bp, synthetic construct
  source 1..120: mol_type = other DNA
gtcagaagaaaattgagggcccagcaatactcttcacttatatggttaattggttttataaaacagtgctaatataattcagtgaggggaagaaattatcttttcatcaaacagtgcaga

SEQ ID NO: 7859 - DNA, 120 bp, synthetic construct
  source 1..120: mol_type = other DNA
aatgagaaggacaaaaatgtcaccaactaataaataaattgtgatatatccatacaatggaatgtaattcagcgatgaaaaagatgtgaagtactgatacaagctacgacccacacaaac

SEQ ID NO: 7860 - DNA, 120 bp, synthetic construct
  source 1..120: mol_type = other DNA
ctgtcccgaatcagaagggctgtctaatcattccctttcttttccttccaacaccccagcaagattattgcctaatttacagccatgcacgttgaagaatcagtacaatttggagacttt

SEQ ID NO: 7861 - DNA, 120 bp, synthetic construct
  source 1..120: mol_type = other DNA
tgtcccaccatctctccagggccccatttcttaggcaagtctctctcactggaaaatgtaaactggaactatacagggaaggggatcctgggagatatagtgcctggcttctcctctgca

SEQ ID NO: 7862 - DNA, 120 bp, synthetic construct
  source 1..120: mol_type = other DNA
ggataaataaattattaactatgctgctattttatttatttaaaaatgtgagttcgtggtctgagtaatttacctcagtatgactcaagaagggcactggaagtccgttgatctggccag

SEQ ID NO: 7863 - DNA, 120 bp, synthetic construct
  source 1..120: mol_type = other DNA
gtttctatgaccagctgacttaagaggaaaattctgagcttcttcataaacatgccagcttagtgtgttggtgtgaggcagcagtagagtgtgtctgcagtgtgggcaactcaggaatga

SEQ ID NO: 7864 - DNA, 120 bp, synthetic construct
  source 1..120: mol_type = other DNA
ctgggttttatcttgaagatcacatcctatcaggatgggtaatgtccttcaggatgaagcatacacttaggctatggcagcagctgttacatagtgccaagtctccaacaggtagagtaa

SEQ ID NO: 7865 - DNA, 120 bp, synthetic construct
  source 1..120: mol_type = other DNA
ccattcctgagttactccacttaggataatggcctccagctccatccaagttgctacataaggcattatttcattcctttttatggctgagtagtaatccatggtgtacatacaccacac

SEQ ID NO: 7866 - DNA, 120 bp, synthetic construct
  source 1..120: mol_type = other DNA
gtgaatggcaggagaaatcttttagggaatcagtatcacaaacaaaggctcagaagaaagaacacacagggagtctgggggaactgtcagcagttcagggtagagattagagaaagagga

SEQ ID NO: 7867 - DNA, 120 bp, synthetic construct
  source 1..120: mol_type = other DNA
atgaaaacaagcttgaagaaatagtgaaagcagaagatttgcctaacagtatgacactcgaatgaaaaaaaaaccagataggtttagtggtgctgcttctttacagatgcaggaggtttg

SEQ ID NO: 7868 - DNA, 120 bp, synthetic construct
  source 1..120: mol_type = other DNA
tctcataggttgacatcccactttctctttaccagtgtgaatgtcaagttctcttactatctccgtcactctcctctcacaccatccaggaggccccactagggagtggcaggcagagag

SEQ ID NO: 7869 - DNA, 120 bp, synthetic construct
  source 1..120: mol_type = other DNA
caaccaggaaaaggccagggtggtgccaagtatgaggaagtcacagagtaacacacacacatacacacatacatacccatacctgcttatatacataaatatgtacagatacatacatat

SEQ ID NO: 7870 - DNA, 120 bp, synthetic construct
  source 1..120: mol_type = other DNA
cagtgagctgagatcgcgccactgcactccagcctgggtgacagagagagactccgtctcaaaaaaaaaaaaaaaaaaaaaaaaaaaaaaaaaaagtctgtttcttttctgatttgcaaa

SEQ ID NO: 7871 - DNA, 120 bp, synthetic construct
  source 1..120: mol_type = other DNA
ctccctctgtcattggtcacagaacaagtcagtcatgatccagattgaaggagaaacctggagcaaaatggccccagcgcttccccacctgagagggatcagctgaggccccgccccccc

SEQ ID NO: 7872 - DNA, 120 bp, synthetic construct
  source 1..120: mol_type = other DNA
ggagatctcccactttatgaagctcatcctccactgactctgatggcttctctagaacccgagaccaactgataaaggcgtcccatctggacgcccttatcagtcctgggggaaaaacaa

SEQ ID NO: 7873 - DNA, 120 bp, synthetic construct
  source 1..120: mol_type = other DNA
ttctcatttcacactgactgcctcacagagtgaagacgatgagaagtatcttcatactatattcccacgttcgtctatcggagtcacagtcatatattacatatgcagatatttttccta

SEQ ID NO: 7874 - DNA, 120 bp, synthetic construct
  source 1..120: mol_type = other DNA
ggaagttaataagatatttttgcttggtaggtagaagaaattatagagctgttttgcacagatataaaatgaaaatttaaaaaaattgattcagcaaaagtgcgtacatataaacttcta

SEQ ID NO: 7875 - DNA, 120 bp, synthetic construct
  source 1..120: mol_type = other DNA
acatatcagctggctttggtgtagctactggataagaatttctgaatatccaggactcaaggttggtgactgctcagcagacctagcagtttttatacctgtatgtgtcacgtggcacct

SEQ ID NO: 7876 - DNA, 120 bp, synthetic construct
  source 1..120: mol_type = other DNA
agagtacatggagcgtggatcaggagtgcacagagaagataccagcagacctgccctctccattgcactcaaaatcacactggatttcctagctagtgcaatcaggcaacagaatatatc

SEQ ID NO: 7877 - DNA, 120 bp, synthetic construct
  source 1..120: mol_type = other DNA
actccactcctaggtgtataattttgacagatatgtgcccattgtgccaacagactagtgctagaaggcttgtaacagcattgcttgtaattttaaaaaatctgacaacaaatgaaatga

SEQ ID NO: 7878 - DNA, 120 bp, synthetic construct
  source 1..120: mol_type = other DNA
tgatttaagtgtaaatagtgtcttgtggacaaggcaacattacaaaaacaaaatgcagcacccgctgtctctgtctttttgttcagccatgcatcgtgtgaatgacagcttcattgttac

SEQ ID NO: 7879 - DNA, 120 bp, synthetic construct
  source 1..120: mol_type = other DNA
tggaatttccttttagtttgtaaactagaaacaaggtaggcatttacttcttgttgatattccccaaacttcattgtacacaacagcttctctcaaataggatctcacagaatcagttca

SEQ ID NO: 7880 - DNA, 120 bp, synthetic construct
  source 1..120: mol_type = other DNA
ttaatttggaatcatttattaattccacagtcaagttaataaaatggttaaaaataaattttacatgaattttctcaaaattcattacttgatccatttattcattctaaacccatgtca

SEQ ID NO: 7881 - DNA, 120 bp, synthetic construct
  source 1..120: mol_type = other DNA
tcatgaggagctggagaggtcccagagcatatagaccttgattgaattggaaccagagagaagtcaggtaaaactctccattgggcagtataatatgtttgttttaatttgctagagctg

SEQ ID NO: 7882 - DNA, 120 bp, synthetic construct
  source 1..120: mol_type = other DNA
tgagccagaatgttctaggcctttccatgggattcagtttctgccatggtggataaggggagagctcttggtgtagggtttggtctttataatgaaccatgctgtttgggcagcgggttt

SEQ ID NO: 7883 - DNA, 120 bp, synthetic construct
  source 1..120: mol_type = other DNA
atagaaccctatgagagatcattaaaaattcttagttactattttcatgaatatccttctctatccttccaatttcaacttccgagtgtcgttagatccaaagtgagaatcttttttttt

SEQ ID NO: 7884 - DNA, 120 bp, synthetic construct
  source 1..120: mol_type = other DNA
gcagaattttttcttctctgggaagactcacatttcgcccaaaggccttcaagtgattcaaaaagtcccacccacattttttagggtaatttccttttcatgaaatcaactgatatcaga

SEQ ID NO: 7885 - DNA, 120 bp, synthetic construct
  source 1..120: mol_type = other DNA
acaactagtatttataaatacttttttgttgtttttcactaaccatcccatattcccattgctttcagcaagtccctcagctgatcaggtttcttttcctgcttgaatgacttaaacctt

SEQ ID NO: 7886 - DNA, 120 bp, synthetic construct
  source 1..120: mol_type = other DNA
attaatagcagaatagagcaagtggagaaaagaatctcagtgcgtgaagactggctttctgaaataagacaagaagacgagactagagaaaaaagaatgaaaaggaatgaacaaaacatc

SEQ ID NO: 7887 - DNA, 120 bp, synthetic construct
  source 1..120: mol_type = other DNA
gaaaaaaagccagggttgcaacccttgtttctgacaaaacagttgttaaaccaaaaaagatagaaaaagacaaagaagggcattacataatggtaaagggttcaattcaacaaggagatc

SEQ ID NO: 7888 - DNA, 120 bp, synthetic construct
  source 1..120: mol_type = other DNA
ctcccaaattgctgggattataggcgtgaggccaccgctcctcgcctaggttttttttaaattaataaaatcaatagacccctagctaggctagtaaagaagaaaagagagaagattcca

SEQ ID NO: 7889 - DNA, 120 bp, synthetic construct
  source 1..120: mol_type = other DNA
ctcactactggtattcaacatagtattggaagttctggtcaggacaatcaggcaagagaaataaatgaaggtattcaaataggaagataggaagtcaaactattcctgtttgcagattac

SEQ ID NO: 7890 - DNA, 120 bp, synthetic construct
  source 1..120: mol_type = other DNA
ggagtctctaccctgttgtccaggctgggatgcaatggtgtgatctcagctcactgcaacctccgcctcctgggttcaagtgattctccttttctcagcctcctgagtagctgggattac

SEQ ID NO: 7891 - DNA, 120 bp, synthetic construct
  source 1..120: mol_type = other DNA
aacagcaaaagaaactatcaacagagtaaacaacctacagagtgggagaaaactttttgcaaactatgcatccaacaaaagtctaatatctataaggaacttaaacaaatttacaagaaa

SEQ ID NO: 7892 - DNA, 120 bp, synthetic construct
  source 1..120: mol_type = other DNA
ctgtggattttgcctgttgctgagtaggtctgtttcaattatgcaaaccagcactgagaaaataatcacagagtggtcaggggcccactggaaccactgtgagaatggttcatggatgtt

SEQ ID NO: 7893 - DNA, 120 bp, synthetic construct
  source 1..120: mol_type = other DNA
tttacagcttccccctcttgattttacagttcttcctcttcaaatctccttaacatatctttagtttgttactcttcttaatcagttagaagggacaacttatccgagtaaggggaggag

SEQ ID NO: 7894 - DNA, 120 bp, synthetic construct
  source 1..120: mol_type = other DNA
actccaatagcatctatataaacgctgggatcaaaagactcacaagaacacttcttgtactacgatgcctggttgttaattcttttggcgaatgaaatgccagggtgaaagagatagcca

SEQ ID NO: 7895 - DNA, 120 bp, synthetic construct
  source 1..120: mol_type = other DNA
atagcatatggactctgttttaaggggacaagagtcccattcccaccagttaatacaactactttttggagttatcatgatctttacaagaatttgctatatctttccaatctgaggaag

SEQ ID NO: 7896 - DNA, 120 bp, synthetic construct
  source 1..120: mol_type = other DNA
ccaaacctgggtatgatatgttctaacagagttttgaccacgttactggctgttgcacttggaaaagggatggcttctacccagtgggtaagatgatctactattactggtaaatactta

SEQ ID NO: 7897 - DNA, 120 bp, synthetic construct
  source 1..120: mol_type = other DNA
ccgttatgcatttttcctttgattactcaggaggaaccatctataaacaggtgtttcccagtctgaaagggtgtttcatttaaaacaggtctaacttctgtttgataactaattaaatct

SEQ ID NO: 7898 - DNA, 120 bp, synthetic construct
  source 1..120: mol_type = other DNA
tccatgcattggagcaggcatatatatggtggtttgtaaaacttttctatgatctgttctagtatttgaccaaacaaatttggagattctgtaaatccctggggcaaaactgtccatcga

SEQ ID NO: 7899 - DNA, 120 bp, synthetic construct
  source 1..120: mol_type = other DNA
gatcataagtgggtgatttctttttcttttttccattcagggcattctctttaaagtgaccttccttcccacacttgaagcatttattctgccctattcctctttttattcccttgttcc

SEQ ID NO: 7900 - DNA, 120 bp, synthetic construct
  source 1..120: mol_type = other DNA
agaagggagaaaatggaagttttggatatcatttttacattgttctaactcacgttgaagtcttcctgagggagggcattcaagctggggatgaccccaagaatcagggttataaggagg

SEQ ID NO: 7901 - DNA, 120 bp, synthetic construct
  source 1..120: mol_type = other DNA
gtgcttgttacctttcacaccctttaacctccagaatatcccgaccaccaaggaaatactgttgcccttgtgactttttttacctcagtctgtgcacagttacctggtcattgcggtact

SEQ ID NO: 7902 - DNA, 120 bp, synthetic construct
  source 1..120: mol_type = other DNA
acttttattcttaacaaattttctctctttttttctaggtttgtttagctagtggtttatcaattttgtttatgtttttgaagaacaaacttttcactttgttgatcatttacatggttt

SEQ ID NO: 7903 - DNA, 120 bp, synthetic construct
  source 1..120: mol_type = other DNA
cacttttggtttccatagataacctcttgccattcttttaccttctgtctctatggattgtggtgaggtggtattaccggtgagtttttctgtaagcagaatgtagttagatcatgtttt

SEQ ID NO: 7904 - DNA, 120 bp, synthetic construct
  source 1..120: mol_type = other DNA
acttgtgtatgttttcatggtgataatgtggaaatgttgaaaatgtcgtttcaattccaggtttaggactttcttgagcatttcctgtaggccctgtctagtggtaatgaagcctttcag

SEQ ID NO: 7905 - DNA, 120 bp, synthetic construct
  source 1..120: mol_type = other DNA
ttgctcattctttttttgtgtgtgtttttgtcttattgaattatttcactatgtatatcttcaagttttggaattcttccttctgcctgacctagtatgttgttgaagctttcaaatgta

SEQ ID NO: 7906 - DNA, 120 bp, synthetic construct
  source 1..120: mol_type = other DNA
ggcagtggtgggctgcttctctgggtcccaagcagtgtgcactgttagcggcagatgcgataggctgggtgggatgcccataggtggtgtttgcaggtaggtgacagctaaggtgattgc

SEQ ID NO: 7907 - DNA, 120 bp, synthetic construct
  source 1..120: mol_type = other DNA
ttttcactttcgctttttcaattttctcttcttctgtggttttcaacaaatacgtgctttttttttaacccagaattatagagtgaacgtgagaaacaatctctagggagggctttttga

SEQ ID NO: 7908 - DNA, 120 bp, synthetic construct
  source 1..120: mol_type = other DNA
agaggatgtggagaaataggaacacttttacactgttggtgggactgtaaactagttcaaccattgtggaagacagtgtggcaattcctcaaggacctagaactagaaataccatttgac

SEQ ID NO: 7909 - DNA, 120 bp, synthetic construct
  source 1..120: mol_type = other DNA
ctggataagtggtcaagcattattctggatgatttgtgaggatgtttgttggatgagattaacacataaatagccagactttgaataaagtagattaatgtctataatgtgggtgggctt

SEQ ID NO: 7910 - DNA, 120 bp, synthetic construct
  source 1..120: mol_type = other DNA
aaaataacaacaaaaaaaaatccaggtttgcttgtggtgatcacctgagtccatgaaataagtagacattggggctgtagcaatgcagagataggtggaatcaagacatagtcctcttgc

SEQ ID NO: 7911 - DNA, 120 bp, synthetic construct
  source 1..120: mol_type = other DNA
ctcttgaagggactgaaggtttttctttatttctagattgggaggccccagcaggcttctaaaagaggtccctgctttatctcagatgcaaatgctcgagtgttacaaaagaacttgaat

SEQ ID NO: 7912 - DNA, 120 bp, synthetic construct
  source 1..120: mol_type = other DNA
tgaaagcgttcagtcatatgttgccgaaactattcctgtttatggattgcactgggataattgttaatgaccaaagaggattctggtaatgtgccaggatcttttcactgttatgattct

SEQ ID NO: 7913 - DNA, 120 bp, synthetic construct
  source 1..120: mol_type = other DNA
gaatgtttcccccaaaaagcacctgttggatatttcatcccgaatgcaacatttttaagaaataggacttttgagaggtgattggaccatcagagctctgccttcattaatggattaagg

SEQ ID NO: 7914 - DNA, 120 bp, synthetic construct
  source 1..120: mol_type = other DNA
gagatgaatgcatagttgactatttttttcctctcctggctgctctttcccctgtacacattgaagtcctcaaaagcctgttaggaaaaagcatgggccacagatgctacaatgatttgt

SEQ ID NO: 7915 - DNA, 120 bp, synthetic construct
  source 1..120: mol_type = other DNA
aaatatgttatttattagtcactggttcattcagccactcttcgtgcctactgggtaccagataaagttctcgtcctggatcactgctccaagaattaaaatttgtcacttttccccacc

SEQ ID NO: 7916 - DNA, 120 bp, synthetic construct
  source 1..120: mol_type = other DNA
cccaaaagggaattccggcctggaatgggagtgcatcggattttacaggcaggcttgaggagatggtgtctgatttatgtagggcccacaggttggttgtaccaggtgtgatatttacat

SEQ ID NO: 7917 - DNA, 120 bp, synthetic construct
  source 1..120: mol_type = other DNA
cctggcctctaccccatggtggagagaacaacagagaatatcacctctcataactgatgatatacagcctcccttttctttctgtgagaaaaatcctcttttaaacagggtttgaaaacc

SEQ ID NO: 7918 - DNA, 120 bp, synthetic construct
  source 1..120: mol_type = other DNA
tctgcctccctcgtccctcgcctctcaattctgttctcagcacagccgtcagagagatccttttaaaacagaagtcatatcatggctctcttctgctcaaaactgtcctctaactcccca

SEQ ID NO: 7919 - DNA, 120 bp, synthetic construct
  source 1..120: mol_type = other DNA
tgaatggctctgaaaatttgtctcagaatgcacagagacccccgtgtgcaggggccgccctgggcgatgtgtgagcctctgtggtcacagctcccactggacaagtttccactgaaggga

SEQ ID NO: 7920 - DNA, 120 bp, synthetic construct
  source 1..120: mol_type = other DNA
gaagaaaatgtcctgtgagggcactgggaggaagcagggccatgagatcttagaggaacctcctagtcttggacccaaaaggaatttccagaagtatgactacagacccagggcaggatc

SEQ ID NO: 7921 - DNA, 120 bp, synthetic construct
  source 1..120: mol_type = other DNA
tctgatgggaagagtcagaaaattcaggcgctttgcatctttcatgggacaccctaggaccacccatgtgaccagcctgagaatggacaggacacctggggtggggaaggggcacagaac

SEQ ID NO: 7922 - DNA, 120 bp, synthetic construct
  source 1..120: mol_type = other DNA
tggcctcaactgaaaatgaaaccgggtaaacgcgcctggggctctcgccggtcgagggtctgggcgggtcccgcggcctcagggaggcggatctcggacccggagactcggggcgacccg

SEQ ID NO: 7923 - DNA, 120 bp, synthetic construct
  source 1..120: mol_type = other DNA
acactgtctgcctgagtcctggacaaggatctgtctgtggaaaccagggagagacccccaggctgcgcccagccccttccccttcacttctcgtcctggaatccctgtccctgaactgga

SEQ ID NO: 7924 - DNA, 120 bp, synthetic construct
  source 1..120: mol_type = other DNA
cacctcctgcccatatctgttctccccacagtgctcagcagtcctgctaatgtgactcaggtcatgtcatttcttcacttgcaatggttgggttttggtctaccattttgctatacgttt

SEQ ID NO: 7925 - DNA, 120 bp, synthetic construct
  source 1..120: mol_type = other DNA
agttgtggcgctgtagagaaccgtttcttttccctaaaaactttctttctgcccctttctatttaatccttgcctcccaccctcaccccttcccttcactcaaccaccactctgttttct

SEQ ID NO: 7926 - DNA, 120 bp, synthetic construct
  source 1..120: mol_type = other DNA
atgcctggtccttctattggtttcttatttcattttcttgccatgttgcactgatttggatgcctcttaggtgtttaaacaagaatgatgagagctcacatgtatgtttacaaggaactt

SEQ ID NO: 7927 - DNA, 120 bp, synthetic construct
  source 1..120: mol_type = other DNA
ccatagaatactatacagccataaaaaagaatgagattacgtcctttgcaggaacatggatggagctggaggccattattcttagcaaactaatgcaggaacagaaaactatataccaca

SEQ ID NO: 7928 - DNA, 120 bp, synthetic construct
  source 1..120: mol_type = other DNA
aactgtttaaagataagaaaaagttttttatcgtgggacttacaacctatatagatatattacatataatatctataccataaaagatggacattttatagaggataaatggttgcaata

SEQ ID NO: 7929 - DNA, 120 bp, synthetic construct
  source 1..120: mol_type = other DNA
attttattttactggcagcacaataaaccaggacctgctgaaactagaaatcacatccactttccagtgttaaaaagcccagtccaggcaggtgagaaggagacagtcctcattagcact

SEQ ID NO: 7930 - DNA, 120 bp, synthetic construct
  source 1..120: mol_type = other DNA
aatcttgggctcaagccaacctctttgcttagcctcctgagtagctggaactacaggcatgggccattccacccagctaacctattaatatttttactgtttctttttaaagccagctcc

SEQ ID NO: 7931 - DNA, 120 bp, synthetic construct
  source 1..120: mol_type = other DNA
gggtaacaagagcgaaactctgtcaaaaaaaaaaaaaagatatgaagagcttatatacttaaacatgaaattgctttaagtgtttgccattcactgttcacatgcatgccagcagcttct

SEQ ID NO: 7932 - DNA, 120 bp, synthetic construct
  source 1..120: mol_type = other DNA
agggggaacaacttaaaataaaccagaaaacaccttcatattaatcattcttctcatatacttgaaatttgtacttaatacatccgagagaacgcctggatattctggcagaattttata

SEQ ID NO: 7933 - DNA, 120 bp, synthetic construct
  source 1..120: mol_type = other DNA
gccaggccttactccccatgcagagaggaggctctggccgtgaaggcgcctgtggagaggtgaggacccgctccctctacactgatggccaagagcctgcagatggcagggaaggcttcc

SEQ ID NO: 7934 - DNA, 120 bp, synthetic construct
  source 1..120: mol_type = other DNA
tgcaaaagagttattatagtctcagtctctcattccttcctcatttattatctgaataatttctaagtaagagattcaccctcctgtactgtttgtttactactagaaacttgctttttg

SEQ ID NO: 7935 - DNA, 120 bp, synthetic construct
  source 1..120: mol_type = other DNA
ggaaaatagagttggaaaactgggaggtagaggagagaggtacgcatagacctcttgctataggccgagtgtgtgacgatagtggttgtgtgtggatgcctaccagagggtctttaaggg

SEQ ID NO: 7936 - DNA, 120 bp, synthetic construct
  source 1..120: mol_type = other DNA
taatgacattttattagatgcagaaattactgcagatgaaattcaacactccatctcacccacatttcttcagttatctccacttctaagaacttgtgatcagtactcgctttggcagca

SEQ ID NO: 7937 - DNA, 120 bp, synthetic construct
  source 1..120: mol_type = other DNA
ttttcaagccatttggagcttgtcttgagctaatgagattaagctcatgtcctcaagaaaaatgttttactctgctgtttttaagggtgcttctatagaaagagtttgagaatcattaat

SEQ ID NO: 7938 - DNA, 120 bp, synthetic construct
  source 1..120: mol_type = other DNA
aaagaatacagtctatacaaaaatagtttagaaaatgtaattttcacagttaccacattataatattgaaaatgtctagttttcaacttcaaaaaacatggttatgcatgtatgaaagta

SEQ ID NO: 7939 - DNA, 120 bp, synthetic construct
  source 1..120: mol_type = other DNA
tcataggtaaatagaaaagcaagtattttttggggggtggtaatttgtaactcctcttttgttttctctatttaatttaaaagaaaatgcccatcaaccgatgaacggataaacaacatg

SEQ ID NO: 7940 - DNA, 120 bp, synthetic construct
  source 1..120: mol_type = other DNA
acggcttatgccattatttctgcatatcagagacttttagtactttcactaattttctactgctatctagaaggcagagccaggtgtgcaggatggaacatgaaggcagactaggagcgt

SEQ ID NO: 7941 - DNA, 120 bp, synthetic construct
  source 1..120: mol_type = other DNA
cagccctaggaacatgatacacctcatgggtagctgactgacccacccatctgccacccccagctgaaggaagcagctagactgtacccttcacccatccttcagttgtattccactgga

SEQ ID NO: 7942 - DNA, 120 bp, synthetic construct
  source 1..120: mol_type = other DNA
tttaagatgcacagacagttagaaacatcacctagacctttctttaaaaaatcactgctattatattgttgaacctttgtagactgcagtgcaaatggtggtccctggagctgtcttgtg

SEQ ID NO: 7943 - DNA, 120 bp, synthetic construct
  source 1..120: mol_type = other DNA
attaggatttcattcaaaggaaacatagaaacttttaggtgatttatgtgactcatgagctggaagtttgcagccctgagttcatctttttctttccgcattttgtccagcacaattggc

SEQ ID NO: 7944 - DNA, 120 bp, synthetic construct
  source 1..120: mol_type = other DNA
gatcctccctcactcaaggcctgctgcagcctcccgctgaggtcttgaaaccatcaggagcagttgttctttggcctccgggacaccgcagggctgagttgctccctgcctggaggtggt

SEQ ID NO: 7945 - DNA, 120 bp, synthetic construct
  source 1..120: mol_type = other DNA
acactctggggtccgaagtccgaactgctggggctcaactgtggcgtcagttatggaatgtggacccctccctagggagtctcccaggctcaaagtcttccctcaactccagaaatgcaa

SEQ ID NO: 7946 - DNA, 120 bp, synthetic construct
  source 1..120: mol_type = other DNA
gtggtggcctccccagaagcacctggcaactcacctgcacagggccagggtcccagctccccacaccccagccaccacaccttcttctgcttttttttttcccattattgtttctttctt

SEQ ID NO: 7947 - DNA, 120 bp, synthetic construct
  source 1..120: mol_type = other DNA
ggttctagtggagtaggatgaactgacagatacacagcaaagctccacatacttttccttttctttgtgcctgcaaagttcttgttcagtgtctctctctttcagctactactgctggtt

SEQ ID NO: 7948 - DNA, 120 bp, synthetic construct
  source 1..120: mol_type = other DNA
aatttgtagttatgcttatatacatttcaacattttaataaagtattttttatggttagctataaaatttttaaaaagattctgttcctctagaaccactcttcgtaccacagtctctat

SEQ ID NO: 7949 - DNA, 120 bp, synthetic construct
  source 1..120: mol_type = other DNA
gaaagcaggtgtgaggactgaaccaactgcacggtatgtaaagacatacttggtacatagtagatacaaagttagctttggtctttggtgaattcatgaatatgattgtattaaaatgta

SEQ ID NO: 7950 - DNA, 120 bp, synthetic construct
  source 1..120: mol_type = other DNA
taacatgaagtttgacaacccaaaacaacaaatacttatcatctcccacagtttccagtggtcaggaatctgggagagatttccttgagtgcttctggctcagggcctctcacaaggttt

SEQ ID NO: 7951 - DNA, 120 bp, synthetic construct
  source 1..120: mol_type = other DNA
cgtagtgatgtctctgattcaataaatgcaccgtgccctgaaagatggcacccattcctcagtgtttcctccaagctggttctgagttgtgcctgttgaaggcctgtccaatgttctgtg

SEQ ID NO: 7952 - DNA, 120 bp, synthetic construct
  source 1..120: mol_type = other DNA
ggaattacgtggttctcagtgtcctgtggtcaagaattctatctgatcagggccagcaacactaaaagttgcttcgagaagggggcatatatttctgctgtggatgacatgaacttactc

SEQ ID NO: 7953 - DNA, 120 bp, synthetic construct
  source 1..120: mol_type = other DNA
gcatggcagctgcaatcaagaccactacttggtcaagtctgaagtaatcctgttcattctttaggtcctattgggcttctgcaaggacagaatacacggagataataggcaactccagca

SEQ ID NO: 7954 - DNA, 120 bp, synthetic construct
  source 1..120: mol_type = other DNA
attttccacagttctgttatgtatgtgtttcagtcgatactgtactgagtaaagcaaggactgccagtggggagtggcggatgtcttgaatttggtgaatgcctttatattgttacaaag

SEQ ID NO: 7955 - DNA, 120 bp, synthetic construct
  source 1..120: mol_type = other DNA
ctgtgaatacactctactccactctgggtaacataaggaggcctcccttcttaagaaaacccaaacaagcactgcatagctacacggcagagtctacaaacatttaacacaaaagaagaa

SEQ ID NO: 7956 - DNA, 120 bp, synthetic construct
  source 1..120: mol_type = other DNA
tgtcacatcccaggcccaacctgctgagattagtcgaggaaggtctggaggtcagtgtcgtgaggggtgggaagactgagggtgtgggggccagttgtggagtggcgggagccccaggtg

SEQ ID NO: 7957 - DNA, 120 bp, synthetic construct
  source 1..120: mol_type = other DNA
tacctggagttctttgtctcaccaccaagagaattaaggagcatggatacaaagggtgaggttggagcaaaagtttaataagcaaaagaagaaagctctcccccacggagagggggcttg

SEQ ID NO: 7958 - DNA, 120 bp, synthetic construct
  source 1..120: mol_type = other DNA
ggctccaaatgctcagctgaaattctgaggctaatttcagtggagttagaggcttatcccttaggagtggcaatggctggctttaagattcgagaagtagtgtttacatctcaaaagaga

SEQ ID NO: 7959 - DNA, 120 bp, synthetic construct
  source 1..120: mol_type = other DNA
aatctcaagtacagaaaatataaaaaggtataaagaagcagaaggatggaaactgccagtgtctccactgggaggatcgggatgaaacgttgcctggcagagcctcagacttcagaggga

SEQ ID NO: 7960 - DNA, 120 bp, synthetic construct
  source 1..120: mol_type = other DNA
ccttggatttctagatgctggaaatccaagtggtgactagacaaggtccctgcctcgaagaacatgacaaccaatgaaacaaatgaaaacaattctaataccggtgataattgttatgga

SEQ ID NO: 7961 - DNA, 120 bp, synthetic construct
  source 1..120: mol_type = other DNA
gtcaaagcaaattacatcattataagatgtttaatgatgaagtcaaagtccacagagtcagcaagcaagtgtaaaaacctcaggagtctaaggacagtctacatttctccccagaaatgg

SEQ ID NO: 7962 - DNA, 120 bp, synthetic construct
  source 1..120: mol_type = other DNA
ctcgagaagctgaggtgggaggattgcctgagtccaggagttggagcctgcagtaagctgtgatcaggacactgcagactgtcagagtgagaccctgtctcaaaaacaaacaaacaaaac

SEQ ID NO: 7963 - DNA, 120 bp, synthetic construct
  source 1..120: mol_type = other DNA
gagaaagagtaattcatgcagagccagctgtgcgggagaccagagttttattactcaaatcagtctccccaaaaactctcatcagtttttaaggataatttggtggataggggggccagt

SEQ ID NO: 7964 - DNA, 120 bp, synthetic construct
  source 1..120: mol_type = other DNA
gtgctttgagaataaatggaacagggtcccctgtgtccccactcatttgcgttttcctttttattacagccaaccgcttttgtaaatattgttacacatctctctattccactgaaaaca

SEQ ID NO: 7965 - DNA, 120 bp, synthetic construct
  source 1..120: mol_type = other DNA
cagtctctggagtcactgtcaaaactttggtgaggaatcttccaggttttcccctacttcaaatatatattaatattatgtaagtgatattagtggcattttcgcccaggctggaatgca

SEQ ID NO: 7966 - DNA, 120 bp, synthetic construct
  source 1..120: mol_type = other DNA
caaaaaaactctcctttactttttctctccccttttcttcctatctcttccctcatttcttcaacacgtccccccatccttccctcttttctccattctctgcatttgatccccggtata

SEQ ID NO: 7967 - DNA, 120 bp, synthetic construct
  source 1..120: mol_type = other DNA
ggaccctgcagtggcgcctaaagtctgagagagggaagtcgcctctgtgctcgtgagtgcatggggtataaggcaagtgctgagggagaaaacgtagttgatggggtagagcagacgggg

SEQ ID NO: 7968 - DNA, 120 bp, synthetic construct
  source 1..120: mol_type = other DNA
acacatcggaatcacctagggaactttaaaagatactaagatttaggtccaacctgggtttactgatttaacaacctaggttgtggctgtggcctgggaacatggatattaaaaactctc

SEQ ID NO: 7969 - DNA, 120 bp, synthetic construct
  source 1..120: mol_type = other DNA
ggaaagaggaaatcagaagggaccaaggatggtgatgttcttaagagaaactgaggaggaagagaggatgatatggtggcagacgtatagagagtctttgtagatctctcacattggagg

SEQ ID NO: 7970 - DNA, 120 bp, synthetic construct
  source 1..120: mol_type = other DNA
catggggctgggcccggtctttctgcttctggctggcatcttcccttttgcacctccgggagctgctgctggtgagtggcgttcctggcggtcctcggcggagcgggagcagtgggacgt

SEQ ID NO: 7971 - DNA, 120 bp, synthetic construct
  source 1..120: mol_type = other DNA
cccagtgctgcccctatgcctccccgttcccaaatgtccctgactctaactttctggtgctgccttttatccgggggggtcttccctccatcccactcccctccagacccccaaggggaa

SEQ ID NO: 7972 - DNA, 120 bp, synthetic construct
  source 1..120: mol_type = other DNA
ttctttgtgctacaaacaatcccattatgctctttcagttatttttaaatgtacaataaattattgttgactgtactcaccctgctgtgctatctactagatcttattcattctaattat

SEQ ID NO: 7973 - DNA, 120 bp, synthetic construct
  source 1..120: mol_type = other DNA
atagtttgaaaatattttctcccattcttggatggtctcttcattttgtttattgtttcctttgctgtgcagaagcctttttacttgatatgatcccatttatgcaattttactttggtt

SEQ ID NO: 7974 - DNA, 120 bp, synthetic construct
  source 1..120: mol_type = other DNA
ggattcgtttcttgatttctttttcagattatttgctgttagcactgatttttgcatgttgattttgtatcctgcaactttactgaatttgttcttcagttctaatggttttttggtgga

SEQ ID NO: 7975 - DNA, 120 bp, synthetic construct
  source 1..120: mol_type = other DNA
gcccctggtaaccaccattctactttttgtttctatgaatttgaccactctaggtacctcatttaagcagaatcatgtaatgtttgtctttttgtttctggcttatttcacttataatat

SEQ ID NO: 7976 - DNA, 120 bp, synthetic construct
  source 1..120: mol_type = other DNA
ttcggggttgattgctttttcactctgattgtgccctttgatgcatagatgttttgaattttcatcagtctactttgtcagttctttctattctatctgtgctttggtgtcatatccatg

SEQ ID NO: 7977 - DNA, 120 bp, synthetic construct
  source 1..120: mol_type = other DNA
gaagtttcacctgtgatttcctcttccccagagccccacagtcttcgttataacctcacggtgctgtcctgggatggatctgtgcagtcagggtttcttgctgaggtacatctggatggt

SEQ ID NO: 7978 - DNA, 120 bp, synthetic construct
  source 1..120: mol_type = other DNA
ttggcacatcgtgtcctgattttcctctattgttagagccactggataaagacagagggtcagggactggaccatccagtgttgtaatcagggcaagtagaggaccctccgacagaatcc

SEQ ID NO: 7979 - DNA, 120 bp, synthetic construct
  source 1..120: mol_type = other DNA
ctatttttgttattattattttctatgtccgttgttgtaagaagaaaacatcagctgcagagggtccaggtgagaaaagcgggcagtttctggagatggtaaggcccctgtctgggcagt

SEQ ID NO: 7980 - DNA, 120 bp, synthetic construct
  source 1..120: mol_type = other DNA
gatttaatctgtgctctgtggcctcaccttgccctccctgagccaatttccctttctaaaggtggtcactgcctggtaagtttggagtaagggacggtcagaatcatttcccctacagtc

SEQ ID NO: 7981 - DNA, 120 bp, synthetic construct
  source 1..120: mol_type = other DNA
cagagcaggaaggcctcgcagcctcaccaagcagcagccctggggtggagctgcgtttccagggttaagcggaccaggcaggagtagcggttactcaagagcaggtcacaggcttgggtt

SEQ ID NO: 7982 - DNA, 120 bp, synthetic construct
  source 1..120: mol_type = other DNA
ggcggctggaattgaattccctgcctggatctcacaagcactttccctcttggtgcctcagtttcctgacctatgaaacagagaaaataaaagcacttatttattgttgttggaggctgc

SEQ ID NO: 7983 - DNA, 120 bp, synthetic construct
  source 1..120: mol_type = other DNA
taaacagacacttctagtctgttttatttcatgtgtctgggagcggataaagtgtgaggttcagggagaaagagaggtctgtctcaatgccttggcacggcatgaagacaatctcccctc

SEQ ID NO: 7984 - DNA, 120 bp, synthetic construct
  source 1..120: mol_type = other DNA
attttaaaagtcaaatatttgcataggatttctctagagaaatgagtcctctctgcatcttctcaatttctgccttcctagaggcaaccattttcaacatttttagctaagtctttcaac

SEQ ID NO: 7985 - DNA, 120 bp, synthetic construct
  source 1..120: mol_type = other DNA
tggtctcgaactcctgacctcaggtgattcacccgcctcggcttcccaaagtgctgggattacagaggtaagccactgcacccagccgtattactcttttaagaaattacagactttgga

SEQ ID NO: 7986 - DNA, 120 bp, synthetic construct
  source 1..120: mol_type = other DNA
tcatcaagtttgactgttttagacacctcatgtaaatggaattatgcagtacttggagttttttttttttttttgattggcatatttcacttagcaatgactttaaggttcatatacgtt

SEQ ID NO: 7987 - DNA, 120 bp, synthetic construct
  source 1..120: mol_type = other DNA
cctggggagcaggtacatgtgggagtcagagcatgggtaggtggcagaaatagggcagagcagtgacaagaggctggtgtgagtggagacaagtgagctgggctgagaggagtgggatga

SEQ ID NO: 7988 - DNA, 120 bp, synthetic construct
  source 1..120: mol_type = other DNA
cattactagacaagctgaaacatagactgaaatggagggtttacggttttccttgctacaaattttgttggcccacaatctgtcatgcttactgcataagggagccagccacagggtggg

SEQ ID NO: 7989 - DNA, 120 bp, synthetic construct
  source 1..120: mol_type = other DNA
aggcacatgaggaatggggagagtggcaggatctcctattgccagaaaatcgtacttgtacccactgcattcccagccctggtgtatgcatctctaggaaatcagaatgaatttggctat

SEQ ID NO: 7990 - DNA, 120 bp, synthetic construct
  source 1..120: mol_type = other DNA
tgagctatatccctggttactacagcatttcctgatcttgcctaacaggattacttccctgaactgtaaaattcctgcagcattgtatacagagaaagaataggagacatggcaatcatg

SEQ ID NO: 7991 - DNA, 120 bp, synthetic construct
  source 1..120: mol_type = other DNA
tcactcaggcaagcttccagcttgcttgtctatgtctgcagctcaattttacaggctgctctttgttagaaaagaaaatgatttgggggctgcttttcattaaaaggaaaaccttaccaa

SEQ ID NO: 7992 - DNA, 120 bp, synthetic construct
  source 1..120: mol_type = other DNA
catgttacaaactacagcataatatcacaagggacactgacattgatatggtcaagacacagaacagttctaccaccacaaggagccctcatgttacccttttataatcacactgacctt

SEQ ID NO: 7993 - DNA, 120 bp, synthetic construct
  source 1..120: mol_type = other DNA
tgtaaaagtgttccctttttaccacatccacaccaacacctattatttttttatttttcaattatggccactattacagaagtaaggtggtattgcattgtggttttcactggcatttcc

SEQ ID NO: 7994 - DNA, 120 bp, synthetic construct
  source 1..120: mol_type = other DNA
gttgcctgtaggtttgtcataaatggcttttactaccttcaggtatgttccttgtatgccaactttgttgaagcttttaatcataaagcaatgctggattttgtaaaatgtttgtcaaat

SEQ ID NO: 7995 - DNA, 120 bp, synthetic construct
  source 1..120: mol_type = other DNA
ttctatatatatattctatatatatattctatatatattctatatatatattctatatctattctatatattctatatatctattctatatattctatatatctattctatatatgttct

SEQ ID NO: 7996 - DNA, 120 bp, synthetic construct
  source 1..120: mol_type = other DNA
atcctatatatattctatatattctatatatatatcctatatatatcctatatatatcctatatatcctatatatatatatcctacatatatatcctacatatatatatcctatatatat

SEQ ID NO: 7997 - DNA, 120 bp, synthetic construct
  source 1..120: mol_type = other DNA
atatcctatatgtatatcctatatatatattctatatacattctatatatatattctatatacattctatatatatattctatatatattctatatatatattctatatatatactatat

SEQ ID NO: 7998 - DNA, 120 bp, synthetic construct
  source 1..120: mol_type = other DNA
aaccaaggaacataatgaagctggttggttgctcctaagttcagtggacaaagtgataaaagaagataatgaactcagggattctgtctcccagcttcagaagcagatactgagcctcaa

SEQ ID NO: 7999 - DNA, 120 bp, synthetic construct
  source 1..120: mol_type = other DNA
attaaaaagcttagggagattgggatggtggaatggattagtcagtttagacctactcatcccaactgggaaggtctagaagatttacccttgaccagtgccttgtgaaataggtttgtg

SEQ ID NO: 8000 - DNA, 120 bp, synthetic construct
  source 1..120: mol_type = other DNA
ggcataggaatagttagcagctggcagaacccccacactggcatgctgactggtagagtgagggatattatggtgggataggccaaatggaagccatcggagctgcctttacctggaaaa

SEQ ID NO: 8001 - DNA, 120 bp, synthetic construct
  source 1..120: mol_type = other DNA
atgtccaggctgctgtgcaagctgctctgccctttgggctatatgacccagcaaacccaatgatgtttgaggtgtcagtggtagatagggatgctgttggagcctttggcaggcccacat

SEQ ID NO: 8002 - DNA, 120 bp, synthetic construct
  source 1..120: mol_type = other DNA
ttttcccagccacttctgtcatcgcccaatgggccaatgaacaaagtggctatggcagtagggatggagggtatacataggcttagcaacatagactttcactcaccaaggctgacctgg

SEQ ID NO: 8003 - DNA, 120 bp, synthetic construct
  source 1..120: mol_type = other DNA
cagaggtaaggaagagtatgcatggaatacaggcgatccattaggatgcctcttagtattaccatgccctgtgattaaggtcaatgggaaactacaacagcccgatccgggcaggactac

SEQ ID NO: 8004 - DNA, 120 bp, synthetic construct
  source 1..120: mol_type = other DNA
attaatacttaataaactcttatatatatatatacacacacacacgtatatgtgctattagttctgttcctctagagaaccgtgactaatacatgtatctatcgagataacaatattatt

SEQ ID NO: 8005 - DNA, 120 bp, synthetic construct
  source 1..120: mol_type = other DNA
tcgtcttagtacttcttttgctgtattccagggttttaataggttgtgtcactattatcattcagttcaaagaatttttaaatttccatcttgattttaatgttgactcaaagatcattg

SEQ ID NO: 8006 - DNA, 120 bp, synthetic construct
  source 1..120: mol_type = other DNA
cagcataattcacctacacttagttttctagataattgagttgggtggccccattttaataatgacaaacatgaaattctaaatgcaatatcatcttggagagattatttgattttttcc

SEQ ID NO: 8007 - DNA, 120 bp, synthetic construct
  source 1..120: mol_type = other DNA
gatttagtgtatctgccagaagaaatttctaagcagcaaagtgttcaagaggaagcagagcataaaagtttgaaaaattcgcatcctgatgatgcaatagaaaataaaaacccattttct

SEQ ID NO: 8008 - DNA, 120 bp, synthetic construct
  source 1..120: mol_type = other DNA
ttcattttcagatactcaatgggattgaaaagttgaattgtgtgctttcttgcagtgagcacagaggaatttgctgtcccatgccactgggacatttttaggagcaccattctcttccag

SEQ ID NO: 8009 - DNA, 120 bp, synthetic construct
  source 1..120: mol_type = other DNA
tagataggtagacagaagcatggatagatggatggatattctttttctgtgtttttctatttctgttctttctctgtgttttgtctctttctcttgctctgtctgtatcttccactgttc

SEQ ID NO: 8010 - DNA, 120 bp, synthetic construct
  source 1..120: mol_type = other DNA
tggcggcgcccccgtgtggccacaggactgaagacagaggaccccgctcccctttctccccagccaggacgtcccaggctctccccctgttccccgcacctggacgggactctgcacaga

SEQ ID NO: 8011 - DNA, 120 bp, synthetic construct
  source 1..120: mol_type = other DNA
ggaggatacgtgcacaacttagctgggagtctgaagatggtggtgggttacaaagagctcagcgatgagcctggcccaagattctgaccccttgccctggatcctgagggttccaccctt

SEQ ID NO: 8012 - DNA, 120 bp, synthetic construct
  source 1..120: mol_type = other DNA
atttaagtcaacttgagttgatttttaatagggtgagagataagaatctaatttcattcttctgcatacgggatatccattttcccagcccttttactgaagagggtgtccttttcccaa

SEQ ID NO: 8013 - DNA, 120 bp, synthetic construct
  source 1..120: mol_type = other DNA
gtgccagagagggtggcgcatcccaaccccatgggacagaagctcctgcactggaaacccttctgaccttgccctatgtgtctgttcatggggctctttatttgtgtcttttaaaatatc

SEQ ID NO: 8014 - DNA, 120 bp, synthetic construct
  source 1..120: mol_type = other DNA
tcatcaggaagtcttccacacagaaatgacttcattaatttgatctctgtcattctttcttttcattcatgtattattatccatagagatttctatcctgtgggttttttatttaatttt

SEQ ID NO: 8015 - DNA, 120 bp, synthetic construct
  source 1..120: mol_type = other DNA
ctacttcacacttaggctacgtgataagcccattgcttctaggctacaaattatatagcatgttaccgtatggaacattgcagccaattctaacacaatggtaagtatttgtggatctaa

SEQ ID NO: 8016 - DNA, 120 bp, synthetic construct
  source 1..120: mol_type = other DNA
tgagatggtatctcattgggttttgatttgcatttctctgatggccagtgatggtgagcattttctcatgtgttttttggctgcataaatgtcttcttttgagaagtgtctgttcatgtc

SEQ ID NO: 8017 - DNA, 120 bp, synthetic construct
  source 1..120: mol_type = other DNA
aaattaccccatgcagaatttgaaatgcaaacgaccattggaggcttagaggtcttcgggttcaaaccgtcagagaatagctcattttaaactcatcctcccacagtaaacaagtataaa

SEQ ID NO: 8018 - DNA, 120 bp, synthetic construct
  source 1..120: mol_type = other DNA
aaatagaggaaaagatgggcaaactatttcaaaattcccagaaagattaatcataagaagagagaaaacacaaatgaacactatgagaagggacattataaaactgtagattttattaaa

SEQ ID NO: 8019 - DNA, 120 bp, synthetic construct
  source 1..120: mol_type = other DNA
ctttattagcagtatgataacagattaatacactgtcttatattttttagataataaagagtaaacaccttccaactaattttatgaggcaacataagtcagacaaggacctaaacatga

SEQ ID NO: 8020 - DNA, 120 bp, synthetic construct
  source 1..120: mol_type = other DNA
tgggaattgacatgctccttctaaaatgtatacaaaaatgtgaggagcttaaaatagccagaacaatattggaagagaacacaattggaggacttaaactatcagatatcaacagatatt

SEQ ID NO: 8021 - DNA, 120 bp, synthetic construct
  source 1..120: mol_type = other DNA
cataccactctgactttcctcagtgttttctggtatgaaattggctgttaatctcaatgaggatcccttgtacatgatgcattatttgtttcttgctgctgtccaagttctctctgcttc

SEQ ID NO: 8022 - DNA, 120 bp, synthetic construct
  source 1..120: mol_type = other DNA
tattttttgttccttttttcatttctattcctcaaagtctatgatttaagatgacttggcttcgagtttgctgattctttcttctacctgttcaagtctgctattgaacatctctaatga

SEQ ID NO: 8023 - DNA, 120 bp, synthetic construct
  source 1..120: mol_type = other DNA
gacggggcggctggccgggcggggggctgaccccccccacctccctcccggacgtggggctgacccccccacctccctcccggatggggcggctggccaggcagaggggctcctcacttc

SEQ ID NO: 8024 - DNA, 120 bp, synthetic construct
  source 1..120: mol_type = other DNA
ccggacggggtggctggcctggcagaggggctcctcacttcccagtaggggcggctgggcagaggcgcccctcacctcccggacggggcggctggctgggcggggagctgaccccacctc

SEQ ID NO: 8025 - DNA, 120 bp, synthetic construct
  source 1..120: mol_type = other DNA
ctgcactccagcctgggcaccattgagcactgagtgaaccagactccgtctgcaatcccggcacctcgggaggccaaggctggcggatcactcgcggttaggagctggagaccagcctgg

SEQ ID NO: 8026 - DNA, 120 bp, synthetic construct
  source 1..120: mol_type = other DNA
gtcactaaaatctattctgttagcttcatggtcagctagtgatttgacagaggtttccttaaacagctggagccaaaaaaataaataattaatgccctcccaggttttgcagatggactc

SEQ ID NO: 8027 - DNA, 120 bp, synthetic construct
  source 1..120: mol_type = other DNA
atcttatgtatctacccatgtgcttaccatttctggtgctcttcattacatatttgcttttggtataattttctttttgcctgaaggactgaaacacttattacagttcgtgtctgctgg

SEQ ID NO: 8028 - DNA, 120 bp, synthetic construct
  source 1..120: mol_type = other DNA
cataaagagctggttggtttgtgtacagcatttgcaagatgaatggacaacaccctgtttggaagtctacccctttgatcaaagaagataaaaacagaacagctcttgtgggctgaattg

SEQ ID NO: 8029 - DNA, 120 bp, synthetic construct
  source 1..120: mol_type = other DNA
caactaaaactacatcaattagccaggcatggtggtgcacgcctgtaattccagctactcaggaaactgaggcaggacaatggcttgaacctgggaggcagaggctgcagtgagccgaga

SEQ ID NO: 8030 - DNA, 120 bp, synthetic construct
  source 1..120: mol_type = other DNA
gaactggaatggactgatgggagacactcgctgttactagcatggtatagctccctgcataggccagcacagcaggaaaacctaatgtcccttccaaaatgagaaatatttggtataaat

SEQ ID NO: 8031 - DNA, 120 bp, synthetic construct
  source 1..120: mol_type = other DNA
tgccatccccatcctctggggaagaaaagggggctggaagttgagctcagtcatcaatggccaatgatttcaccaatcttgcctacacaatgaaacttccatagacacctctagacagtg

SEQ ID NO: 8032 - DNA, 120 bp, synthetic construct
  source 1..120: mol_type = other DNA
tctgggatgaaaagtgaagggagagggactgagcccatgctgagggtttttctctggtttctcagacagctccggggccaagattcggggagacattgagacagagcgtttgatataaaa

SEQ ID NO: 8033 - DNA, 120 bp, synthetic construct
  source 1..120: mol_type = other DNA
attacctggaaatgcgactgaaatcttccttcctgaggggtctgggctcttggaaatcaaaccctctcaggttgggtggctggacgattctcctcacacttacaatgggacaaggggaac

SEQ ID NO: 8034 - DNA, 120 bp, synthetic construct
  source 1..120: mol_type = other DNA
ttagggtctggttggtcacctaaagaaatagagccctaccagggaagatcattgggttcaaatgctgatgagtaggacatttagaggtggcagtgtctggatctaccttggtaggaggga

SEQ ID NO: 8035 - DNA, 120 bp, synthetic construct
  source 1..120: mol_type = other DNA
ggttctccagatctcttaagactgtactatagaggcctggggaattataatagccctgaggcaaactatgaattaaagtgttgtggatcccacatgaatcactttatatccacttttgtg

SEQ ID NO: 8036 - DNA, 120 bp, synthetic construct
  source 1..120: mol_type = other DNA
tcagaggtttccctttggccttcagcacaatgagagcccttactccacagactagggatgcagtgtgggggtgactccagctgccagggcatcagtgtcaattatgcactaggagaatgg

SEQ ID NO: 8037 - DNA, 120 bp, synthetic construct
  source 1..120: mol_type = other DNA
caaattcccccagcctcattattccctcttctacatgttccggggcaactaagtcaggtctagcttgtgagataccggcatcattttttcccagtctacatggatcaccccagcagtggg

SEQ ID NO: 8038 - DNA, 120 bp, synthetic construct
  source 1..120: mol_type = other DNA
tatctaccctttcgctacaggaaacaagggcctctccatgagacactgcagaggccctcacacatagccagtgacagctgttagaatccctcagattctcattctccttttatagggcat

SEQ ID NO: 8039 - DNA, 120 bp, synthetic construct
  source 1..120: mol_type = other DNA
ggagcctcagtgggcctttaaaggagagacaatcctgtctttgtttctcctgttctctcaattattgaatcgaagaagccaatggcaagtatggtctgagagcaaacgtagcaatagatt

SEQ ID NO: 8040 - DNA, 120 bp, synthetic construct
  source 1..120: mol_type = other DNA
tacagggcagactccaagcctggaaagcaggcacataggcaatgagtggttcactgatattacgtcacagcatatgataaaatgatagtataagtatcctcagagcctgtggcctccgtg

SEQ ID NO: 8041 - DNA, 120 bp, synthetic construct
  source 1..120: mol_type = other DNA
tgcaattttaaggtccttaatcttcatcacatcagtattttcccttttgccatgtaatgcaacctactcgtgggtgcccaggattgagattggacgtctttgggaaccattactcggccc

SEQ ID NO: 8042 - DNA, 120 bp, synthetic construct
  source 1..120: mol_type = other DNA
ggttcgtccattttggagttataacctaaggcagaaactcagatggttcaaatgtcctcttcatgaagcaatgttatcagcgtatcatttagattgtcttgcaagagtctcatttgttgt

SEQ ID NO: 8043 - DNA, 120 bp, synthetic construct
  source 1..120: mol_type = other DNA
acaaatttttcagtttcccagtgcatataaaagttatatttacacttgactgtagtctcttaagtgtacaatagcattatgtacaaaatgaactatgtacataccttaatgtaaaactac

SEQ ID NO: 8044 - DNA, 120 bp, synthetic construct
  source 1..120: mol_type = other DNA
atgaaaccatctgagccagtttcctcatctgcaaaccagtgacataattcctgccttgcagagtttcagaagaataagtgagaaaagacacagtgccaagagaaacagacacaagacctg

SEQ ID NO: 8045 - DNA, 120 bp, synthetic construct
  source 1..120: mol_type = other DNA
tggcacgtgggtacaagggtgttgggaagtgtcatcctccagtgctgacttgagtgtgtgtgtgtggctgcacacgtgtgtgcatgtgtgcacaagtgggaattggagtgtgtgtacacg

SEQ ID NO: 8046 - DNA, 120 bp, synthetic construct
  source 1..120: mol_type = other DNA
aagaaatgcatgagatctaaactaagccatttgggtaaactgtctcagaatttaaagcatcagcagtcacaagctatcagtatcagtgacgattctttcactccatggtctagtccaacg

SEQ ID NO: 8047 - DNA, 120 bp, synthetic construct
  source 1..120: mol_type = other DNA
tgtgtcttctttctttgtcatctctttcctgccaggaccctgactgtcccacagaagaagtgacaagaatttatttatgacatgacaataacacatgtattcatggtgttaattcgattt

SEQ ID NO: 8048 - DNA, 120 bp, synthetic construct
  source 1..120: mol_type = other DNA
atcttcagaaaacactatgcagaagataactgtagagcaagacatctatttagggtgagtgagtcacagtggagatctgggagggagaccctgtaaccctttcattccaagaaaagaaag

SEQ ID NO: 8049 - DNA, 120 bp, synthetic construct
  source 1..120: mol_type = other DNA
acccagtgtcatggtcctgagtgttgctaccctgctgttctcatctgtgaatgcagccagaccactttcttcctctgatataaataacttggaggatctgtcaccagacacctcatatct

SEQ ID NO: 8050 - DNA, 120 bp, synthetic construct
  source 1..120: mol_type = other DNA
acatccaatgtcatttgtgagattgctttgattcgctcatgtagaatgttactctgctgctttgcagagaggcttgccacacatttcaaatctctgctcctcatttcacaccatctggct

SEQ ID NO: 8051 - DNA, 120 bp, synthetic construct
  source 1..120: mol_type = other DNA
gagtggaagtgaggacggtgagggggtccctgggcagtcagagattttgtgtccctgcgtcctttccttccatctcaaccagagaccacttgtgaaagcccaagaacaaatgtcattaaa

SEQ ID NO: 8052 - DNA, 120 bp, synthetic construct
  source 1..120: mol_type = other DNA
gtgacctcgggagaagctctctaccactagggacttttaaactcatctgtgaatcctggataaacacagacattccggtaaccttactgaaatgaagtgaggaccaatgagttgacaggt

SEQ ID NO: 8053 - DNA, 120 bp, synthetic construct
  source 1..120: mol_type = other DNA
aaaatatgtgtacagggacacagtttagcccataagagtctgcgccatccttggcggtgcatattataagaaataaaagagaatacaaccctttggctggactctgttgatattttgaaa

SEQ ID NO: 8054 - DNA, 120 bp, synthetic construct
  source 1..120: mol_type = other DNA
tgtgctatcgaatattagaatttattcctcctatttaactgtatctttgtacccattaagctacctcattttatctcccagatcccccacacacccttcccagcttctggtaactattat

SEQ ID NO: 8055 - DNA, 120 bp, synthetic construct
  source 1..120: mol_type = other DNA
tgttgaatgtatcattctgtggcttgctttatcgtttaatatggtctatgaggtgaacccacacacccatagaaacagttcatttgttttcagtgctggatagcatttatgagacgaata

SEQ ID NO: 8056 - DNA, 120 bp, synthetic construct
  source 1..120: mol_type = other DNA
acactctactccactctgggtaacatgaggaggcctccctaccttcctaagaaaacccaaacaagcactgcatatctacacggctgagtctacaaacatttaacacaaaagaagaaagac

SEQ ID NO: 8057 - DNA, 120 bp, synthetic construct
  source 1..120: mol_type = other DNA
gatcaccctgtgaccccacatttggtcccttcctgggtgtcttccattcccaggactcccaggaaataaaatgctgcaagattggggtggggagctgtccagggtaggtcaggtgtgttc

SEQ ID NO: 8058 - DNA, 120 bp, synthetic construct
  source 1..120: mol_type = other DNA
caggcccttagcttgagttactccatattgctttgtttccctgactgcccacgtatcgggggacagaattttccattgcgggcatgtctgggcaagtctcctgtgcagcctttcttattt

SEQ ID NO: 8059 - DNA, 120 bp, synthetic construct
  source 1..120: mol_type = other DNA
gccaccagtcaccacagcctaggcaggggttgggctctcacctcggcccctcctctgcacgtcctggatgtggatggtccccgagtgtgaactagcctgggctctgaccctgggtgctct

SEQ ID NO: 8060 - DNA, 120 bp, synthetic construct
  source 1..120: mol_type = other DNA
cacttacagtcaaagcaaattacatcgttgtaagatgtttaatgatgaagtcaaagtccacagagtcagcaagtaagtgtaaaaacctcaggagtccaaggacagtctacgtttctcccc

SEQ ID NO: 8061 - DNA, 120 bp, synthetic construct
  source 1..120: mol_type = other DNA
ccaggagttggagcctgcaatgagctgtgatcgggacactgctctagcttgaccatcagagtgagaccctgtctcaaaaacaaacaaacaaaacaaaacaaaatacatacacacacacag

SEQ ID NO: 8062 - DNA, 120 bp, synthetic construct
  source 1..120: mol_type = other DNA
ataatttggtggatggggggggccagtgaatcaggagtgctgattggttggctccggtatgaaatcatagtgagtggaggctgttctcttaggctgagtcagttcctgagtggggggcca

SEQ ID NO: 8063 - DNA, 120 bp, synthetic construct
  source 1..120: mol_type = other DNA
ggctcactgctagaacgaacattcttgagactttagatctaagccagcctgatttctgaaagccttggaccgtttccaaaatcaaatcaatactccaggaacaagatctgcctcgacttt

SEQ ID NO: 8064 - DNA, 120 bp, synthetic construct
  source 1..120: mol_type = other DNA
taactcttctttgggagacaattgaaatgttctttatcttcactgtggtagtggagatgtgggtgtgtacaacagctaaaattcaacaagttgaacactttaaatagatgcagtttattg

SEQ ID NO: 8065 - DNA, 120 bp, synthetic construct
  source 1..120: mol_type = other DNA
tattccgtttctgtatcagtaaacacgtttcattttccgtagaccagggaagggtgatgggtgatcccagtcctcgcagtgaattccgggccacaaaattcaaaacgcttgcgggcaaag

SEQ ID NO: 8066 - DNA, 120 bp, synthetic construct
  source 1..120: mol_type = other DNA
tgcctctctgtctcaaactatgcttatgatctttagcagtgaaaataatctctctaaggtggggacaggaccccagtccctgctgtgcttaataaattatgaggatcaaaataaattatc

SEQ ID NO: 8067 - DNA, 120 bp, synthetic construct
  source 1..120: mol_type = other DNA
ccaattctcttagtagaggctttccagacagaattcttattattgagaattgagaattcacatgccacacataatttatcgttttaaagtgtacagatcagtggcttctagcataatcac

SEQ ID NO: 8068 - DNA, 120 bp, synthetic construct
  source 1..120: mol_type = other DNA
agactatggctgtgggattgaaatagcgttgaaggagctgactttgactcccggagatgaaggagaaagaggaaatcagaagggaccaaggatggtgaagttcttaagagaaactgagga

SEQ ID NO: 8069 - DNA, 120 bp, synthetic construct
  source 1..120: mol_type = other DNA
actaaatttcgacggggtcttctcacgggtttcattcagttggccactgctgagcagctgagaaggtggcgacgtaggggccatggggctgggccgggtcctgctgtttctggccgtcgc

SEQ ID NO: 8070 - DNA, 120 bp, synthetic construct
  source 1..120: mol_type = other DNA
tcttgggacccggaggtggtgcttcttgctgctgtggggactgtggggggtcctgactctcaagctgaggggttggagtctgcaggctccgggcagaggattcttcctgcgacttctgtc

SEQ ID NO: 8071 - DNA, 120 bp, synthetic construct
  source 1..120: mol_type = other DNA
cccatctcccctccccaacccagacctaaaacaggctgttgggccagctgttccttgaccttccttcttttcttttggttccttgaccccagtgggctctcactccccacaccgcatatc

SEQ ID NO: 8072 - DNA, 120 bp, synthetic construct
  source 1..120: mol_type = other DNA
tttggaagaacctccacattatttcccacagtggttatactagtttacgttcccaccaacagtgtacaagggttctcttttgctacatcctcgccaggattccttattgcctgtcttctg

SEQ ID NO: 8073 - DNA, 120 bp, synthetic construct
  source 1..120: mol_type = other DNA
ttctatttctgtgaagaatgtcattggtgttttgatagcaattgcattgaatttgtagattgctttgggtaggatggatattttaacaaaattgattcttccggctgggcacggtggctc

SEQ ID NO: 8074 - DNA, 120 bp, synthetic construct
  source 1..120: mol_type = other DNA
ttccttgtatactcagtttttttagagtttttatcatgaagggatgttaaacttatcaaatgctttttcagtatcaattgaaatggtgatatggcttttgtcctttattctgttgatacg

SEQ ID NO: 8075 - DNA, 120 bp, synthetic construct
  source 1..120: mol_type = other DNA
cattgcaggcgtgccattttgtatttctagaagcagtatacaggggcttcagtttctctacctccttgccaaacttgctgtgtgtgtgtgtgtgtgtgtgtgtgtgtgtgtgtgtgataa

SEQ ID NO: 8076 - DNA, 120 bp, synthetic construct
  source 1..120: mol_type = other DNA
tccaattttatattatttgaacatccagttcccccagcactatttgctgaaaagatggacttactctttgagaccctgtcacctgcccaccccagtggacactagctggtccatccaatt

SEQ ID NO: 8077 - DNA, 120 bp, synthetic construct
  source 1..120: mol_type = other DNA
ggacacagagaccgaggacttgacagagaatgggcaagacctcaggaggaccctgactcatatcaaggaccagaaaggaggtgagagtcggcaggggcaagagtaatgggaggccttctc

SEQ ID NO: 8078 - DNA, 120 bp, synthetic construct
  source 1..120: mol_type = other DNA
ccctcctggccccatgacccaggagtccacccttgacatccccctcctcagcatcaatgtggggatcccagagcctgaggccacagtcccaaggcccatcctcctgctagcctggaggaa

SEQ ID NO: 8079 - DNA, 120 bp, synthetic construct
  source 1..120: mol_type = other DNA
ctgggacaggggatggaagctggggtatttgggaggggaatgggagctgcatctccatctacacccataagtgcttcccaagccagggctggggcaaggccttcgaatatccagctgtgg

SEQ ID NO: 8080 - DNA, 120 bp, synthetic construct
  source 1..120: mol_type = other DNA
aagagggccccatccaggaggcacccacagcaggggcagtgcaggtctgtggtcactcctgctctcacctgcggcgtctcccgtggagggattgtcacttctggttccctgtgggcagga

SEQ ID NO: 8081 - DNA, 120 bp, synthetic construct
  source 1..120: mol_type = other DNA
tcttgggtcttgtccttttgtcttggggccctttcactccctgcacggtgagtggtgggcacaggacaggggctgatgttgatggagtgatgggagagaactgacaggggctgggaaaag

SEQ ID NO: 8082 - DNA, 120 bp, synthetic construct
  source 1..120: mol_type = other DNA
ttttgtctttctctttattcccacgttcgccctttgttcagtccaatacagggttgtggggcccttaacagtgccatattaattggtatcattatttctgttgtttttgtttttgttttt

SEQ ID NO: 8083 - DNA, 120 bp, synthetic construct
  source 1..120: mol_type = other DNA
agtgacagccaagaacctgcaggtgacagagaaggcttcccctcaactgtctcctatcaggttcttccaggcatcaaggaatagacctgggacattgcctccagtgacatgaacacaccc

SEQ ID NO: 8084 - DNA, 120 bp, synthetic construct
  source 1..120: mol_type = other DNA
tccttgaaattttattgtctggctgagttttccatagtttgcattttgctggctccaccccaaggcatagtttaatatggacctgttttatctgtactttctacaaattggtagttggct

SEQ ID NO: 8085 - DNA, 120 bp, synthetic construct
  source 1..120: mol_type = other DNA
atccgagtttttacttgggcaaaatccactgcccacctgtgatttgtccacctttctccatgcatgttgtccttcattcaagtttacatttctggtgttttgaaacaattctctctaagc

SEQ ID NO: 8086 - DNA, 120 bp, synthetic construct
  source 1..120: mol_type = other DNA
ttctatctctgcccaactatatacagattgtttcacagggaagtcctactaaaccttcaaagaaggttattggacttatttaaaatattcaagagaatggagcaaaatacagaaagctag

SEQ ID NO: 8087 - DNA, 120 bp, synthetic construct
  source 1..120: mol_type = other DNA
gaaatcatgtccttcacagcaacatggatggaggtggagaccattattctaagcaaattaatgtaggaacagaaagccaaataccacatattctcacctataagtggcagctaaacattg

SEQ ID NO: 8088 - DNA, 120 bp, synthetic construct
  source 1..120: mol_type = other DNA
gacatatcagggctgggcagctgtggggggccctcccagagaaggcctgagatacacctgcctgcaggtgctcctgggcctggagaagcccctcagtgtgactaggtgaggtgttgtcag

SEQ ID NO: 8089 - DNA, 120 bp, synthetic construct
  source 1..120: mol_type = other DNA
ctgtgtgagttcacacaggtcttgagacctctgtgtcctccttagaagagtgaagtgagcacccagtgcctagaccttggttgtgctaagtcattctctgataaaaggattcagggctcc

SEQ ID NO: 8090 - DNA, 120 bp, synthetic construct
  source 1..120: mol_type = other DNA
ttctagctttgcaactctttaaatctattattgttattgttattgggtttttttgtttgttttgtttttgttttttttttgagatggagtctcgctctgtcgcccaggctggagtgcaat

SEQ ID NO: 8091 - DNA, 120 bp, synthetic construct
  source 1..120: mol_type = other DNA
tcttcttgatggtcttgccattcccagacccaaagtgctccatggcctccacaatattcatgccatctttcaccttgccaaagaccatgggcttgccatccaaccactcagtcttggcag

SEQ ID NO: 8092 - DNA, 120 bp, synthetic construct
  source 1..120: mol_type = other DNA
tatctctcatgaacataggtgcaaaaatcctcagcaaaatgctagcaaatcaaatccacaatgtatgagaagaacaatacaccatgcctaagtaagatttatcccaggtatgcaaagtta

SEQ ID NO: 8093 - DNA, 120 bp, synthetic construct
  source 1..120: mol_type = other DNA
ctggtccagaatttgccatttaaaacacaataccacttacattagcacccccaaaaatgaaacacttaggtacaaatctaagaaaatatgtacaagatctatatgaacaaaactacaaaa

SEQ ID NO: 8094 - DNA, 120 bp, synthetic construct
  source 1..120: mol_type = other DNA
gttatcagaggctgggaggtcggggaattggggagatgttagtcaaagaacacaagatttcagttaggaagaataagttcaagagatctattgtaccttatggtgactaaacttaataac

SEQ ID NO: 8095 - DNA, 120 bp, synthetic construct
  source 1..120: mol_type = other DNA
atctatgtgtcttagtccgtttcctgccgctataacagaatactacagactgggtaatttattttgttgttttttcagacagggtctctctctgtcgctcagactggagtgcagtggcat

SEQ ID NO: 8096 - DNA, 120 bp, synthetic construct
  source 1..120: mol_type = other DNA
tttggtggggacattccactttagcactaggtattctggtttatgtatttttttagcttaattccttcatttctacaattatgagatccacgattatccactatatttggttttctttct

SEQ ID NO: 8097 - DNA, 120 bp, synthetic construct
  source 1..120: mol_type = other DNA
ggccaacatggtgaaaccctgtctgtactaaaaatacaaaaattagctcggcatagtggcacacgtctgtaatcccagcttcttgggaggcagaggcataagaattgcttgaacccggca

SEQ ID NO: 8098 - DNA, 120 bp, synthetic construct
  source 1..120: mol_type = other DNA
gcagctgtccactctccagcaatcctgccttctggggcatggttttctaaggaccttcctgttcctagatgatcaaaattgggaccagccactcccttctgagccactcctgcctctggg

SEQ ID NO: 8099 - DNA, 120 bp, synthetic construct
  source 1..120: mol_type = other DNA
ttttgctgggggagggtcttgcctccatggatcaggggcatggctgctgaaggctgctttgacaacttcttaaaataagacaatgatgtttgccatttgccgcatggattattcctttca

SEQ ID NO: 8100 - DNA, 120 bp, synthetic construct
  source 1..120: mol_type = other DNA
ctttcctttctgtctggcagcagccactgggtaaaccaagatggtgcatacaagtacatccagaagctatggaagaagcagtctgatgtcatgagctttcttctgagggtccgctgctgg

SEQ ID NO: 8101 - DNA, 120 bp, synthetic construct
  source 1..120: mol_type = other DNA
ggagcgaaccagttcctggtggccgttggacagctcacacagctccctgccaggtcacccgccatggtcctccctctgccctggctctctcggtaccatttccttcgcctccttctgccc

SEQ ID NO: 8102 - DNA, 120 bp, synthetic construct
  source 1..120: mol_type = other DNA
gagagccttggaggaggcgcctaagtttcccccagtgcccacagcaccctccggcgctgaaaatacacgcaccacccaccaggagccttgggatcataaacaccccagcgtcttcccagg

SEQ ID NO: 8103 - DNA, 120 bp, synthetic construct
  source 1..120: mol_type = other DNA
gatgtacaaacagaaaacaagggaatgggagagtgggattttttcagcctgtgaggtttacccgatgcaggtaggtgtcagaatcctcaggcatgtcataattaaaagcaatgttcaccc

SEQ ID NO: 8104 - DNA, 120 bp, synthetic construct
  source 1..120: mol_type = other DNA
agtggtgcaatcgcaagtcactgcagcctccaccctcctgggtttaagagatccttccacctcagcatcccaagcagctgggaccacaggtgcacaccaccacgcccagctacttttttt

SEQ ID NO: 8105 - DNA, 120 bp, synthetic construct
  source 1..120: mol_type = other DNA
aaggacatccagaaggtcaaagagcttccggttcttctcgttgtccttcagtttcacgtagtactgctgcaacccatgcagcgtcaacttcgtctcatcatccacgaagatctccattgg

SEQ ID NO: 8106 - DNA, 120 bp, synthetic construct
  source 1..120: mol_type = other DNA
gaaggggaggaaagtaacaaagacagaaattaccacaactccaaagcccaactttcctaacactttttatactatcctgggggaagatagttaatatgaagacccagaggacaaaatagg

SEQ ID NO: 8107 - DNA, 120 bp, synthetic construct
  source 1..120: mol_type = other DNA
gcaaggagatgtgggtgggaaggagtagggtatcggggattgaggtgccaaaggcccccacccctggaggtggggaaggggaggattcatttgtgctgatgctcttcttttggacatgcc

SEQ ID NO: 8108 - DNA, 120 bp, synthetic construct
  source 1..120: mol_type = other DNA
tccagatatcagagtccatctatgactctctggattacttttctatcaagtcaggcaaatatgacatccctacctggagcccacctttatagctcaccatatagaattgccaaagatcat

SEQ ID NO: 8109 - DNA, 120 bp, synthetic construct
  source 1..120: mol_type = other DNA
ctctgtttgagctaaaccaatttttagcatgtttccaaactaaaactaactttagagggcacctaatttaaaaattttatgtcccccccaccaaacactgagggtgattgcctaaagtta

SEQ ID NO: 8110 - DNA, 120 bp, synthetic construct
  source 1..120: mol_type = other DNA
gtcacgacgctaatcctatggtaaatctaaaatcattaatgaggccaggtgcagtggctcactcctgtaatcccagcactttgggaggccgaggtgggtggatcacttgaggtcaggagt

SEQ ID NO: 8111 - DNA, 120 bp, synthetic construct
  source 1..120: mol_type = other DNA
aggaactcaacactctgttacaccacagcaaactaaagcttctccaaaattaaagagactattggcctacaagtttcttatccctccaacttgccacaccctcactctcaggtctcttta

SEQ ID NO: 8112 - DNA, 120 bp, synthetic construct
  source 1..120: mol_type = other DNA
agtaacaaaccccttgcatctaccaaccgctcaccttcaatgatcctagctctgtccttatttttcttaatctgtaacaattcatgacatttgaatacctgccacagaccacttctcctg

SEQ ID NO: 8113 - DNA, 120 bp, synthetic construct
  source 1..120: mol_type = other DNA
gaaaacaaggggtgaagagtaggggattgaggaacagcaaaggaaaacaaagatactatttctaacagaagagctggaggggggaaaaaaaaaagcaagacttaatcacgagcacagcct

SEQ ID NO: 8114 - DNA, 120 bp, synthetic construct
  source 1..120: mol_type = other DNA
ctgaggcctccaatatgagaagaacccattggaagaagggagcaaaacgaacacaatggcgccgaggacaccatcttggattgggtccccccttagcttcccttccttcccccaggagct

SEQ ID NO: 8115 - DNA, 120 bp, synthetic construct
  source 1..120: mol_type = other DNA
gtccgaggtagctgatgccctagggccagtgagtcaggaaggtgttctgaatccgagcgggaagacggggtctggattcggccccaagtgttaatagtagggcttgagggttatactaca

SEQ ID NO: 8116 - DNA, 120 bp, synthetic construct
  source 1..120: mol_type = other DNA
ccttgtgccacatgttgtcctaggatctggggacacaacggtgaacagccctgttctcacagtgtttacattacaggaaagaaaacacataaacacaaatataatgtcaagtatcgataa

SEQ ID NO: 8117 - DNA, 120 bp, synthetic construct
  source 1..120: mol_type = other DNA
aggcaaaaggaggctgcttcaactcaccaatttatttgccaataattattttattgatactttttttattgttacaatgggaaagtaaggtgtcaaggatatagaaaggaagggcatgca

SEQ ID NO: 8118 - DNA, 120 bp, synthetic construct
  source 1..120: mol_type = other DNA
gcatgccctgcacctggcgccttgtagcctgctccacctcagcagacaggttcccctgggagcccatggcctggggggtagggagaggggtggaagagagaaagggaaaagcagaaacag

SEQ ID NO: 8119 - DNA, 120 bp, synthetic construct
  source 1..120: mol_type = other DNA
cccaattttctttccaaactcctaagggaggaaagaggagactcactctttctggcatctgccaccttctcagctgcccgcttctcagcttgcagaagctgctggataccttgggactga

SEQ ID NO: 8120 - DNA, 120 bp, synthetic construct
  source 1..120: mol_type = other DNA
agtttcccctgggagatctggccaagaactacccggtcggggcggaacgacatccggtaacgcccctcacagttcacttccgtcctccacctgcgtctctgcttgcgccatttcctccag

SEQ ID NO: 8121 - DNA, 120 bp, synthetic construct
  source 1..120: mol_type = other DNA
cccagatggtgagtctgctcagtggggaacaaggtcataagcagctgaccagacctgaaatgaaagccaaccaatagttgagaaataagctggttatttggtcatcaggacctagggaag

SEQ ID NO: 8122 - DNA, 120 bp, synthetic construct
  source 1..120: mol_type = other DNA
agtgattctcatgcgtcagcctcccaagtagctaggattacaggcgcatgccaccacgcccagctaatttttatatttttagaagagatgggttttcgccatgttggacaagctgatctc

SEQ ID NO: 8123 - DNA, 120 bp, synthetic construct
  source 1..120: mol_type = other DNA
ctttataggtagagccctgcttactagaataaaagctgaaaccttctttccccatctagagatttccttctggagtaagaacattacaggaaaacctctagatccagatgaacaacccta

SEQ ID NO: 8124 - DNA, 120 bp, synthetic construct
  source 1..120: mol_type = other DNA
caccacacccaactccattgtattgaattttaagaagctggtgagactgatattatcccatttacagatgaggaaagcagggcccaaaaggttcgggaacttgtctgaaatctcacagct

SEQ ID NO: 8125 - DNA, 120 bp, synthetic construct
  source 1..120: mol_type = other DNA
ctcttgaccttgtgatctgctcacctcagcctcccaaagtgttgggattacaggcgtgagccacagcgcctggccaaaatgtttttatgtttatttttcttagtatgaaactccagcgta

SEQ ID NO: 8126 - DNA, 120 bp, synthetic construct
  source 1..120: mol_type = other DNA
aattcatgggacagatggcctggggaggaatgaaacttggaaggcggtatcacggtaaactacctttatctgtgatgattttatttccttaaaataaattatactacaaacatgacagta

SEQ ID NO: 8127 - DNA, 120 bp, synthetic construct
  source 1..120: mol_type = other DNA
ttttaaagatagatagaagaaaatgtttgcaatatgtataacacatacagtatatagaaccctcatatcaatatatataatttccaaagaaaaagtggataaagaatatgagcaattcat

SEQ ID NO: 8128 - DNA, 120 bp, synthetic construct
  source 1..120: mol_type = other DNA
ccataggatttggtctcttgttttagacagttattatctgatcctctctctctctctcttttttttttttttttttttttttgagatagagtctcaccctgtcacccaggctggaatgca

SEQ ID NO: 8129 - DNA, 120 bp, synthetic construct
  source 1..120: mol_type = other DNA
gcctggccaggatgcctgggttggcagtgaaggaagtagcatggcactcagctaaccttgggccagatgcagcaaggttgggactgaagaaaaggggagttcaggaacgtcggttcctct

SEQ ID NO: 8130 - DNA, 120 bp, synthetic construct
  source 1..120: mol_type = other DNA
taccatgcatgtggtaaactatcagtctgtatttatcagtgatggttatttcctaatacccaggaggcatccatgtgagccacccttccattgctttaagaccaagggagcgagtgacca

SEQ ID NO: 8131 - DNA, 120 bp, synthetic construct
  source 1..120: mol_type = other DNA
gatttggtgatgtgccctggccctgccctgggggaggggacccagaggccatggctgcagccctggtggccaggggcccccctttggaggaacagggggctctgaggaggtacttgaggg

SEQ ID NO: 8132 - DNA, 120 bp, synthetic construct
  source 1..120: mol_type = other DNA
ctgggggaggatggggaatacaagcagaatggctggaggaagagccctgtgggggagtggaatttcagttgctaaaattaggagcaggggaaggaggtggaaagagcaaaattatgtaac

SEQ ID NO: 8133 - DNA, 120 bp, synthetic construct
  source 1..120: mol_type = other DNA
ttaggatccctaagctggaggttgagaagtaaattacagaaaactctggtgaccaaatttgctcctccacccaggagatttctcactggtttttaagcacatcatttccccttctgcaag

SEQ ID NO: 8134 - DNA, 120 bp, synthetic construct
  source 1..120: mol_type = other DNA
gagtgctgcagtacagacaaggagtaagaaaacggccatcatcttgtgaattaatacctactgtgtgttaaccagcccttttcctaacaccacaaatcctctcaacgtctgtccaaaagg

SEQ ID NO: 8135 - DNA, 120 bp, synthetic construct
  source 1..120: mol_type = other DNA
agattgttgggttcaggaactagacgattacaaattttgagaaaaccgtttccatttaatagaggggcagaaatcactttacataggttgaggaatgagtgggaggtgaggaaaaggagg

SEQ ID NO: 8136 - DNA, 120 bp, synthetic construct
  source 1..120: mol_type = other DNA
tatcccaaaaacaaacaagaaagggagagatagtgaaaacataagcaagaagtggggagagaatatagtaaagatagaggaagtgggatagagtacagataaaaggatcagtcttggaaa

SEQ ID NO: 8137 - DNA, 120 bp, synthetic construct
  source 1..120: mol_type = other DNA
aaggcataattcttccaagtgatgctggggtttgaggtacaaccttactcctgggtggctaaaatggaggagggaagaagaggctgtaaaaccagtagacttgagaaacttggagaattg

SEQ ID NO: 8138 - DNA, 120 bp, synthetic construct
  source 1..120: mol_type = other DNA
ggtcgaagaaagagcaaccttcaccacagagaggagtagcatcattaggggaaagccaggtttcaaaatgcccagaggaaaatgctttcaaacatagaagacaggatttgaaaatgtgaa

SEQ ID NO: 8139 - DNA, 120 bp, synthetic construct
  source 1..120: mol_type = other DNA
actttgcgaggctaaggtgcaaggattgcctgaggccaagagttgaaggctgcagtgagctatgatggtgccattgcactccaacctgggcagaaaagtgagactccatctcttagaaaa

SEQ ID NO: 8140 - DNA, 120 bp, synthetic construct
  source 1..120: mol_type = other DNA
ggctgaagcaggagaatcgcttgaacccaggaggcagaggttgcagtgagatgagatcagtcattgcactccagcctgggcaacgagcgaaaccgcctctcaaacaaacaaaaaaaaact

SEQ ID NO: 8141 - DNA, 120 bp, synthetic construct
  source 1..120: mol_type = other DNA
ggtaccttctctgatccctttgcctccatgtccctcctgccttaggacaatgcccagcatgtgttaggcacgcagatactcactaaatggaggaatggatgaataattcataaagcagga

SEQ ID NO: 8142 - DNA, 120 bp, synthetic construct
  source 1..120: mol_type = other DNA
cagttctcctgcctcagcttccctagtagctaggattacaggcgcgtgccaccatgctcggctaattttttgtatttttagcagtgatggagtttcaccgtattagccaggattgtctct

SEQ ID NO: 8143 - DNA, 120 bp, synthetic construct
  source 1..120: mol_type = other DNA
attataggagtattggccataacccttatgatgggtcaggaagggatcacccctttctgcccctacagaaataatagctaagactagtaaagcataaaaggcaaaggggcaggtcctcaa

SEQ ID NO: 8144 - DNA, 120 bp, synthetic construct
  source 1..120: mol_type = other DNA
ctgggactgcagatgcgcaccagcacgcctggctaatttttgtatttattatagagatggggtttcaccatgttggccagctggtctcaaactcctgacctcaagtaatccgcccacctc

SEQ ID NO: 8145 - DNA, 120 bp, synthetic construct
  source 1..120: mol_type = other DNA
agcgtccgggcccaggggctccgcacagcaggtgaggctctcctgccccatctccttgggctgcccgtgcttcgtgctttggactaccgcccagcagtgtcctgccctctgcctgggcct

SEQ ID NO: 8146 - DNA, 120 bp, synthetic construct
  source 1..120: mol_type = other DNA
tcagttgttcagtgcccacttcctcagggattgagacctctgatccagacccctgatctcccacccccatcccctatggctcttcctaggagaccccagcaagcagaactcactgctctg

SEQ ID NO: 8147 - DNA, 120 bp, synthetic construct
  source 1..120: mol_type = other DNA
taaattatttatttatggaggatggagagaggggaataatagaagaacatccaaggagaaacagagacaggcccaagagatgaagagtgagagggcatgcgcacaaggctgaccaagaga

SEQ ID NO: 8148 - DNA, 120 bp, synthetic construct
  source 1..120: mol_type = other DNA
gcccccagctccttctccccgcagggacccaaacacaggcctcaggactcaacacagcttttccctccaaccccgttttctctccctcaaggactcagctttctgaagcccctcccagtt

SEQ ID NO: 8149 - DNA, 120 bp, synthetic construct; identical to SEQ ID NO: 2296
  source 1..120: mol_type = other DNA

SEQ ID NO: 8150 - DNA, 120 bp, synthetic construct
  source 1..120: mol_type = other DNA
cccggctgatggtaggcagaacttggagacaatgtgagaaggactcgctgagctcaagggaagggtggaggaacagcacaggccttagtgggatactcagaacgtcatggccaggtggga

SEQ ID NO: 8151 - DNA, 120 bp, synthetic construct
  source 1..120: mol_type = other DNA
cctttggttctggccagaatgctgcaggacttgagaagacctcacctagaaattgacacaagtggaccttaggccttcctctctccagatgtttccagacttccttgagacacggagccc

SEQ ID NO: 8152 - DNA, 120 bp, synthetic construct
  source 1..120: mol_type = other DNA
tgggcacttagtgaattctggcttccttcaaccagtttccagctgttctatccccttccattctctcagtgggtgaaatcgaagagactgaggacaataaagaacaaggaaccgaactgc

SEQ ID NO: 8153 - DNA, 120 bp, synthetic construct
  source 1..120: mol_type = other DNA
cacacttactcacttttgggaagggggacctaaagtgtgaaaaaaaggtgaggattttccgtctcaccctaaatgggacaccctaagtggggcatcggtttttcctcctccccagaactt

SEQ ID NO: 8154 - DNA, 120 bp, synthetic construct
  source 1..120: mol_type = other DNA
tctcgcccctccggagctgcaccaggccgccgaaccccacgctcgtgtaccagagaggcccgtacccttgtctcctggccgggtccagcactggagtcaccgtctcggcgccctcgagca

SEQ ID NO: 8155 - DNA, 120 bp, synthetic construct
  source 1..120: mol_type = other DNA
cagcagggagctgggagcccctgagggtctgaagcggggaaggagagacagtctgctcttacccagtccttgctgggcctgtgccccggggtcggccgtctccgttacctggttgggtgg

SEQ ID NO: 8156 - DNA, 120 bp, synthetic construct
  source 1..120: mol_type = other DNA
aagccagtcagcagagctgaaatgagaacacagatctccaggtttccaatgtggtttgcattcttctataccctcaaggtaggtgctggaggaagagctgatcccgtctctgaggtcaag

SEQ ID NO: 8157 - DNA, 120 bp, synthetic construct
  source 1..120: mol_type = other DNA
gaagctggaagtggctccaatcatctccccttcttggtaacatctctatgtgtttccgtaatactaataataatatagctgacccacaaaatgcacttaacatgtttatgccactgattt

SEQ ID NO: 8158 - DNA, 120 bp, synthetic construct
  source 1..120: mol_type = other DNA
ctgacttgagatttgtatgtaaaatttgccttcctcaggccagaaaagaaatggggaaataaatactgaactccagtcaatgttaagcttctgaagggtttagatgtaaaatgtactgat

SEQ ID NO: 8159 - DNA, 120 bp, synthetic construct
  source 1..120: mol_type = other DNA
accaacttgtcaccaactttctgtccttgatctatccacagggctcatgtagatctagtatggctgcctttaactctcatgtttgttaatcagacagccaagcagcctgctgcatagagc

SEQ ID NO: 8160 - DNA, 120 bp, synthetic construct
  source 1..120: mol_type = other DNA
cagcatctgcctgtgggaagcagctctccacaccagccaagggggcccccacactcccgcgctgctctgcggctcagggagcagcccacctgctgggtgtgctgatatcaccctcccttc

SEQ ID NO: 8161 - DNA, 120 bp, synthetic construct
  source 1..120: mol_type = other DNA
cgggctcctgcttctggcagtggtccttctgtccgcctgcctgtgttggctgcatcgaagaggtgagcgctgcactccctccctccccctgcagcagtgccccctgtgcccccaccccca

SEQ ID NO: 8162 - DNA, 120 bp, synthetic construct
  source 1..120: mol_type = other DNA
cccccacttctgtgtctcagtcctctcagtccatctcgagcctccgttcaaattgatcatcatcaaaacttatgtggctttttgacctttgaatagggaattttttaaattttttaaaaa

SEQ ID NO: 8163 - DNA, 120 bp, synthetic construct
  source 1..120: mol_type = other DNA
gcacacaggctcagggagggaaggggcctcagaggagcatccctgcctcccaaggacattgcctcttggggcctccagccaggaggagacaccacctcccagcatctcacctttctccac

SEQ ID NO: 8164 - DNA, 120 bp, synthetic construct
  source 1..120: mol_type = other DNA
attcttcctataccaactctcactctcaccctctgccatcattctccagccagttcagtagtaacttgtctagctgaaatgtaaaccatcatggtgaaattaagctcattaatgaatgca

SEQ ID NO: 8165 - DNA, 120 bp, synthetic construct
  source 1..120: mol_type = other DNA
atggtgaaacctcgtctctactaaaaatacacaagttagccagcagtaatggcatgcacctgtaatcctagctacttgggaggctgagacaggagaatcatttttacccaggaggtggag

SEQ ID NO: 8166 - DNA, 120 bp, synthetic construct
  source 1..120: mol_type = other DNA
ctgtcacctggatggaccatgatcaagatgagcaacagcatccaggccatgtcggaagatgtcccagttggcgaaggggatctgagcagtgaggtctgggtggaggaggaaggactcact

SEQ ID NO: 8167 - DNA, 120 bp, synthetic construct
  source 1..120: mol_type = other DNA
gtgatccaccagcctcgccctcccaaagtgctgggattcctgttttggttttttgagacagggtctggctctgtctcacccaggctggagttcagtggcgccatcacggctcactgcagc

SEQ ID NO: 8168 - DNA, 120 bp, synthetic construct
  source 1..120: mol_type = other DNA
cctgggcaacatggcaagaccctgtctctacaaaaaaatttaaacttagctggacatagtggcacacacctatagtaccagctactcaggaagttgaggaaggaggattccttgagccca

SEQ ID NO: 8169 - DNA, 120 bp, synthetic construct
  source 1..120: mol_type = other DNA
tatatttttttgagatggagtcttgctctgtcacccaggctggagtgcagtggtgcaattttagctcactgcaacctccgccctctgggttcaagtgattttcctgcctcagcctcccta

SEQ ID NO: 8170 - DNA, 120 bp, synthetic construct
  source 1..120: mol_type = other DNA
aattagtcgggcgtggtggcgcatgccggtaatcccagctactcgggaggcggaggcaggagaatcactgggagacggaggtagtggtgaactgggatcgtgccattgtactccagcttg

SEQ ID NO: 8171 - DNA, 120 bp, synthetic construct
  source 1..120: mol_type = other DNA
cttgtgatccgcccgccttggcctcccaaagtgctgggattacaggcgtgagccaccgcgcccagcctggctcattttatatgaatacatgttgttgttgttgctgttgttgttgtgaga

SEQ ID NO: 8172 - DNA, 120 bp, synthetic construct
  source 1..120: mol_type = other DNA
acaaattattttacctccctaagctaccggaacaaccacacatgccacacaacctgggaaggaccaactcagccattctccagcagcgaagtggctgccaccccagggatatctaactag

SEQ ID NO: 8173 - DNA, 120 bp, synthetic construct
  source 1..120: mol_type = other DNA
ggcatcctgctctcccagctcttttctatatctaagacttctaaacatttgtcatagctaaaaatgttccagattccaaagacagtatgtggggtttttttttcagtccatctagaataa

SEQ ID NO: 8174 - DNA, 120 bp, synthetic construct
  source 1..120: mol_type = other DNA
tctggtctgacttctttaacaacaagctgtgggctggctggatgtagttgaggccaataaactcccaactcagaccatgaaaacaggtgaaaacacaaaagtccacaatccagcacaggt

SEQ ID NO: 8175 - DNA, 120 bp, synthetic construct
  source 1..120: mol_type = other DNA
catgcaaccacactgtaatagagatatagataattctcattatcctggaaaattcctccatgcccctttttggtaaatccctttcccctcctagatgcaaccattttaccatttttaacc

SEQ ID NO: 8176 - DNA, 120 bp, synthetic construct
  source 1..120: mol_type = other DNA
ttctattttttgtttttcttattatggctcaatctgctatgaaacttcttgtacccatctcgcaaatgccttttcaataccctaagtgtgcaacttcacagttatttcaccttgtccact

SEQ ID NO: 8177 - DNA, 120 bp, synthetic construct
  source 1..120: mol_type = other DNA
gtccccaatctacatctccccctcaggcctctttcttgagacctaagtccacactatctaactgctctctaggcggcttaccctgaatactccacaggcatttcaaagtcatcagtgtcc

SEQ ID NO: 8178 - DNA, 120 bp, synthetic construct
  source 1..120: mol_type = other DNA
tcccatctctccccatctacataccttattcttttactccatttctcttccttccccatttctctctgggtgagagaatgaaggaaggctagtgactagtcacctcttccctttaggggc

SEQ ID NO: 8179 - DNA, 120 bp, synthetic construct; identical to SEQ ID NO: 2329
  source 1..120: mol_type = other DNA

SEQ ID NO: 8180 - DNA, 120 bp, synthetic construct
  source 1..120: mol_type = other DNA
caaagcaagactctatctaaaaaaaaaaaaaaaaaagaccagcactgtggctcacgcctgtaatcccagcactttgggaggccaaggtgggcagatcacgaggtcaagagtttgagacca

SEQ ID NO: 8181 - DNA, 120 bp, synthetic construct
  source 1..120: mol_type = other DNA
agagaagaaaagtctatctgggtatgatgatgactcctaatatcttctctctggtggttgatctggtcatttgataagatctctaggcaggaggtcttaagacaattgcacttcttttgc

SEQ ID NO: 8182 - DNA, 120 bp, synthetic construct
  source 1..120: mol_type = other DNA
ctttgaacttgctgttccctccacctgaaatgttcttctcccattgtgatattgttataataaaaatatatatttttgggcccgggtgtggtggctcacacctgtaatcccagcactttg

SEQ ID NO: 8183 - DNA, 120 bp, synthetic construct
  source 1..120: mol_type = other DNA
ctcaaaaaaaaaaaaataaaaaaaaaaaaaaggtcaggcacggtggctcaggcctgtaatcccagcactttgggaggccaaggtgggaggattacttgagcccaggcagtcaagaccagc

SEQ ID NO: 8184 - DNA, 120 bp, synthetic construct
  source 1..120: mol_type = other DNA
actgagcccttcaacttggggattagataactggtaattatgggtagagtgtcagaactgaattaaactgcaggactcccagttaatatctaccaagaactgaagaattgattggtgtgg

SEQ ID NO: 8185 - DNA, 120 bp, synthetic construct
  source 1..120: mol_type = other DNA
atctctaggcccagtcagcatctcttgttcatcctctgatcccatgtccagctatggttctggattcaacactagcagcaacagtggcgctgactccactttaggatcaataaatatttt

SEQ ID NO: 8186 - DNA, 120 bp, synthetic construct
  source 1..120: mol_type = other DNA
ctatttattttattattttattgtattttttgagacagggtctcactctgttgcccagactggagtgtaatggcacggtcatggctcactgcagccttgatctcctgggctcaagcgatc

SEQ ID NO: 8187 - DNA, 120 bp, synthetic construct
  source 1..120: mol_type = other DNA
agccactgcgcctggccacctagcacctttaatatacttatttatttgtattgtctgccttccccaattagatcaaccatgaagacaagagttttcatttgttgggttctctgggcctag

SEQ ID NO: 8188 - DNA, 120 bp, synthetic construct
  source 1..120: mol_type = other DNA
cagtgtgcaaacctgatgtcagcctcactccctggctcttctgtccacaaacgctgtttctttaagtaccactttcagttcctccaaagaatctacttaaactcttaaattcctgatctc

SEQ ID NO: 8189 - DNA, 120 bp, synthetic construct
  source 1..120: mol_type = other DNA
accccacaggaggaaaagctttcggactgctgaaggcccagcaggaagagaggctggatgagatcaacaaggtagaaggaagaactaagggggcagagccagggggatggggcgtggatg

SEQ ID NO: 8190 - DNA, 120 bp, synthetic construct
  source 1..120: mol_type = other DNA
atgatgctgggcaagagatctgccatcctaaaaatgtgagtgtcaatttccaacctcccctgtacttacctgttttctcctcccccatccctacccttgtccacaggctcaacatttcta

SEQ ID NO: 8191 - DNA, 120 bp, synthetic construct
  source 1..120: mol_type = other DNA
ataagctttgtcactttgacaaatcactcagcctctgtgaggcttttttctaaaaatggggataaagtgacctatgctattgtgcctgacatatcataagccctcaataatgtttaaaac

SEQ ID NO: 8192 - DNA, 120 bp, synthetic construct
  source 1..120: mol_type = other DNA
tcttaaatcttactgagcctctgactaaaattctcatctgatttccgcaaacttttctgccttcacttttcataatgaataagccgcctcctttatttagccatatcagcctaggcacag

SEQ ID NO: 8193 - DNA, 120 bp, synthetic construct
  source 1..120: mol_type = other DNA
gcttcccgagtagttgggattacaggcgcccgccaccacgtagggcaaatttttgtatttttagtagaaatggggtttcatcatgttggccaggctggtcttgaactcctgatctcgtga

SEQ ID NO: 8194 - DNA, 120 bp, synthetic construct
  source 1..120: mol_type = other DNA
cccctcaacacggctcaacggccgacgctgggggcccgcctccttagccaatcggggtcctagtgcccttaagtccctcctctttatgcaaataacctccgcatgctccgcgcgcccggc

SEQ ID NO: 8195 - DNA, 120 bp, synthetic construct
  source 1..120: mol_type = other DNA
gtctgctttttcatttttcctgttcctcgtctcctttctcccccaaccccgtttttcttcttgggcctctgcccccttacttcgttgtctacatcctttttttttttgccattcctgttt

SEQ ID NO: 8196 - DNA, 120 bp, synthetic construct
  source 1..120: mol_type = other DNA
cttgcttgaatttgtcctgttgtaagtctctgaaacgattttggtggagagagaagagattattacttgtagggaattactctttgtagacaggcacaaagggcagagtgtttatactag

SEQ ID NO: 8197 - DNA, 120 bp, synthetic construct
  source 1..120: mol_type = other DNA
gccaccacaatcagcgcgatttcagagattattaagggcaggggaaggaatcccttctaagagaagtttggaggaagtaggtaataaaatattcaacatgtataaatgtgtcccaggata

SEQ ID NO: 8198 - DNA, 120 bp, synthetic construct
  source 1..120: mol_type = other DNA
ccacccatattcagtttcatggaggcacatgagcaagtttaagtctcagtcttatatgatggagtgtagtggtgccagaactgacctccttggggaataagcagttattctgtagggggg

SEQ ID NO: 8199 - DNA, 120 bp, synthetic construct
  source 1..120: mol_type = other DNA
gcggaatgatgccgcctttcgtgagtcttggtgtcttgtcttggaacgattacactggaagctggagagctaggaatcaggacttagtctttgacctatgagatagaagggagggtggga

SEQ ID NO: 8200 - DNA, 120 bp, synthetic construct
  source 1..120: mol_type = other DNA
gacaagacttcattggtggatctagacttcggagggaaggatattggcattggtagtccatcttgttacatagttccagactacctcccaagattggagggcagaatgcttgggttacta

SEQ ID NO: 8201 - DNA, 120 bp, synthetic construct
  source 1..120: mol_type = other DNA
gacgtggtctcaaagaagaccaggataatgagtttgtcaccacccagagagatcaaccccaaagcctgggtcgttgcatcctgcaagtagcgacagttgatttgttgtaaaagagatgat

SEQ ID NO: 8202 - DNA, 120 bp, synthetic construct
  source 1..120: mol_type = other DNA
tgagcctagggagtttgagaccagcctgggcaacaaagcaagaccctgtcggccaggcatggtggctcacacttgtaatcccagcactctgggaggccgaggcgggcagaacatgaggtc

SEQ ID NO: 8203 - DNA, 120 bp, synthetic construct
  source 1..120: mol_type = other DNA
tgtccagttgtctccattgtcacgccaatttcccctagtccaagttttttctttgctgattcctttgtccatgtgtgctttgagcctctctcatcttgtctttcctcctttcctaggagc

SEQ ID NO: 8204 - DNA, 120 bp, synthetic construct
  source 1..120: mol_type = other DNA
aaatgaatgaatgaatgaaagaagcagtggtccttcatttgccaggatttatttggggtgggttgattctcttgtagggaatctgagtggataaccttgttatataagagcaggcaaggc

SEQ ID NO: 8205 - DNA, 120 bp, synthetic construct
  source 1..120: mol_type = other DNA
cccccaggcagtgatgaagtggccaagatacaaactccaccacccaagaaggagccccctaaggaggagactgcacagctgacggggccagaagcaggccgaaagcctgcccgcggagtc

SEQ ID NO: 8206 - DNA, 120 bp, synthetic construct
  source 1..120: mol_type = other DNA
cctccagccaagtctctggctcccaagaaacctcccacaggccctttgccaccaagtaaggagcctttgaaagagaagttgatcccagggcctctgtcccctgtggcgcgcggaggcagc

SEQ ID NO: 8207 - DNA, 120 bp, synthetic construct
  source 1..120: mol_type = other DNA
gtattcattgctggttctttgctttccagtctgtgcatctgtatgcataggaatccttagaaggactcaaaaacacctggactttaatagggaagagaataggttgtaagcagaagttgg

SEQ ID NO: 8208 - DNA, 120 bp, synthetic construct
  source 1..120: mol_type = other DNA
gtgtcaccccactctgtcctggcttcctataattcccaattcccacccaattcatgttttgcttctggcccttctcatctgtaggaatctttgccacctcctcatagctctggattcttg

SEQ ID NO: 8209 - DNA, 120 bp, synthetic construct
  source 1..120: mol_type = other DNA
atcgacctggtcccccagtccagtttggcactagtgacaaggtctgtgtgggctggatctgggtatcctgagttgggtggagagaagggaaggactaaaggtgggacatagaggacacat

SEQ ID NO: 8210 - DNA, 120 bp, synthetic construct
  source 1..120: mol_type = other DNA
ccacaatttattttcagatcacagcccctatacctaccccccggcccagcccctccctcagcactgctctctgggttagctctcaagggccagtttctggatttctccacaatgcaagct

SEQ ID NO: 8211 - DNA, 120 bp, synthetic construct
  source 1..120: mol_type = other DNA
gattatcaaaaactgagcagcaaccttgggggacctggatcatcacggactcccccaactggaaggtgaaacggaatagggatgtggactttccaagtgcttccttactttggaaccagg

SEQ ID NO: 8212 - DNA, 120 bp, synthetic construct
  source 1..120: mol_type = other DNA
tatggcttcctttgcatatctagggccttggtgggacatctgtaacattactgggttatcaaccagtgtcttcacatggactctccagcaggcctgttaaatgtccgtgagctcatgttc

SEQ ID NO: 8213 - DNA, 120 bp, synthetic construct
  source 1..120: mol_type = other DNA
gagaaagcagccagaaaaatccgacttttatttcttaaatactgtgaaggaagaggggggaaacggtcccctgatgaggaagggccatagagcaaagagctaaggatcatcagcaaaggc

SEQ ID NO: 8214 - DNA, 120 bp, synthetic construct
  source 1..120: mol_type = other DNA
aggactgctagcaaacagactaaggtcaagtcctgtatggttatgcaacaaccaagagcaagtctgaatcccagaaaaagtttcctcattaaacgaggggaggggagactgaataacaag

SEQ ID NO: 8215 - DNA, 120 bp, synthetic construct
  source 1..120: mol_type = other DNA
gggattcaccccacgagacatacgacgctgagggacagaaagcagatttagaacacaaaaccctcaaccacctttagaaatagattagatccaggttacagaatgtcagtttagaaaaga

SEQ ID NO: 8216 - DNA, 120 bp, synthetic construct
  source 1..120: mol_type = other DNA
atcgcagctggggctggagccgttgtagtggctggaaatgcccatggagaagcatcactacgtccaccatagagaagttctggcacagaagagaaagcaaggccccaaagaatcctgggg

SEQ ID NO: 8217 - DNA, 120 bp, synthetic construct
  source 1..120: mol_type = other DNA
acaggaagatgaggtgaatggcaagccagccactcacctgcaagaagtcagtcatgccttggagaaaggcagggacaccaggcatcgccacagtgatggtgggagaagccacaccagacc

SEQ ID NO: 8218 - DNA, 120 bp, synthetic construct
  source 1..120: mol_type = other DNA
aacctgaagacacaagacactacagcagccccattccaggaaagcaggaaccaagaaaatatggaaagaactggaaagtgccagtgagcagactaggaaaggagtttaaactctgagtgg

SEQ ID NO: 8219 - DNA, 120 bp, synthetic construct
  source 1..120: mol_type = other DNA
ctgcctttccctccatctaaacagggagaggtactcccttcaccacacaaacacacctccaaagacaaaccaacccccacaccccccacatctgtctacttaagcttctgctctggtccc

SEQ ID NO: 8220 - DNA, 120 bp, synthetic construct
  source 1..120: mol_type = other DNA
ggcagaaaatatcaagctggagtccatctcactaataaaagcaataatgcctactgagaataccatgtcctccaaaactttcagttatatccttggaagtttacatgtagaccaaatctt

SEQ ID NO: 8221 - DNA, 120 bp, synthetic construct
  source 1..120: mol_type = other DNA
caaagccttcctcagattcccaccctcacagtcaacagggaccacatgtgccctctttctccctggtctcccagagccctggcccaatccttctctggaccagcagagcttctattctct

SEQ ID NO: 8222 - DNA, 120 bp, synthetic construct
  source 1..120: mol_type = other DNA
gctaacccttcaactaagacctccaagtaatcctttccctcccttgccatggttcatttccttctccccatacttcacttaggattccccacccactaaagattccctccatctctcact

SEQ ID NO: 8223 - DNA, 120 bp, synthetic construct
  source 1..120: mol_type = other DNA
ttcccagcctccacaagttaagagagtagaatcctttaattgaaaagagatgccatgagactaagtctgaaacaaactccccagataccaggcaccaagaggattggcagaaatgagaga

SEQ ID NO: 8224 - DNA, 120 bp, synthetic construct
  source 1..120: mol_type = other DNA
accccgtcccagaagatgccccagaagggaggtgagtctgaggaggagcccgttccaccaggtggataacctttcccccaacatctgcagaaaaatagacacacaccaaaacatagtatg

SEQ ID NO: 8225 - DNA, 120 bp, synthetic construct
  source 1..120: mol_type = other DNA
gacatcagtgacccctttccaaacacaagatgataccagtttatttaccagactctcctgtgatttccaagattaaaaaatggcaaagaagatggggtctggtatcaggttaatgaagaa

SEQ ID NO: 8226 - DNA, 120 bp, synthetic construct
  source 1..120: mol_type = other DNA
cacacagattcttccttcctctgtatttccctctgcattaagttctatccatgtggaggacagaacaaaatcagcctcactcacaaaacatcagaaaacgttctactggaatacgaacaa

SEQ ID NO: 8227 - DNA, 120 bp, synthetic construct
  source 1..120: mol_type = other DNA
ccagtcagattaggaaggaagcacgagaccagagactagtgtcatcaccggtcacggcaggacaagcgccccagaggtcggaaaatcctgggacaacgcgaaagcggtggtcgccccaca

SEQ ID NO: 8228 - DNA, 120 bp, synthetic construct
  source 1..120: mol_type = other DNA
ccctattgccctcgctgcgccctttcttctgtgcctccggaagttactctttcagtaggcgtttgggggcggcactggtcaattttgttctcggttgcttggttgggctagatttcggtt

SEQ ID NO: 8229 - DNA, 120 bp, synthetic construct
  source 1..120: mol_type = other DNA
ccacacctggctaattttatttttatagagatggggtcttgctatgttgcccagcctggtcttgcagacttggcctcccaaagtgctgggattataggtgtgagctactgtgcctaacca

SEQ ID NO: 8230 - DNA, 120 bp, synthetic construct
  source 1..120: mol_type = other DNA
tttgagaacttattacccaccagaaactaagtgctttgcaaacattactattaattatagcaaatatatactttggacttaccatgtgcaagtctttgctaagggctttatgtgcattat

SEQ ID NO: 8231 - DNA, 120 bp, synthetic construct
  source 1..120: mol_type = other DNA
gctctcctcataactcctgagaaaccctggacatgccagggtgtactatggagtggttgcatccggaagagggggaggaagtcccaaacactaagtaatccaggtttgggttggaaaaca

SEQ ID NO: 8232 - DNA, 120 bp, synthetic construct
  source 1..120: mol_type = other DNA
caaagtgtgagaatccacccaccaagagctggcctcttagctggtatatctactatgcttggcccacggaattcagtggctgtattaattgccctctggagaaagatgtgcctaaccaat

SEQ ID NO: 8233 - DNA, 120 bp, synthetic construct
  source 1..120: mol_type = other DNA
accacatcctcccgaaaagtgtgtggaggaattcaagtccctgacttcctgcctggactccaaagccttcttattgactcctaggaatcaaggtaaggggttaaaatctcataaaacagg

SEQ ID NO: 8234 - DNA, 120 bp, synthetic construct
  source 1..120: mol_type = other DNA
tgtcacctgtggggccctatccagaccccctaatccacttgcctagcagccccactcttccctcgatggctcagatcctgagatccaaggaacaccctgggtttcccaaccactctctta

SEQ ID NO: 8235 - DNA, 120 bp, synthetic construct
  source 1..120: mol_type = other DNA
ccaatggggctcctggcccagggacgctcagtcccccttcaggggacacccctggtctcctggtgccacctgaatccacatgatcccatctgagtttgggactggcccctccagcctcca

SEQ ID NO: 8236 - DNA, 120 bp, synthetic construct
  source 1..120: mol_type = other DNA
actgctgccccaagggacctcaaggaataggaattctctttgttaggaggtggaatgaaagtgtccagcaaactccagccagcagcgttcgtcccttgatttagagggctatgatttcta

SEQ ID NO: 8237 - DNA, 120 bp, synthetic construct
  source 1..120: mol_type = other DNA
ttctggtcccagttcaactaagtgtacaagcttgataatcgtgggccttcctatcacactggcctcttccagcaaaaccctacccattctcatctctagaggccttgacttcccttatca

SEQ ID NO: 8238 - DNA, 120 bp, synthetic construct
  source 1..120: mol_type = other DNA
ttcagcagcagactagggtcagactttaccaaagtcagaactcgaggttcatgtaagtccttagatcccgctcccaagccctgtctttctcctccctccttctctcctccctccagctca

SEQ ID NO: 8239 - DNA, 120 bp, synthetic construct
  source 1..120: mol_type = other DNA
gcgacagagtgagatgagtgagactttgtctcaaaaaaaaaaaaaaaaaaaaaagggacaaattgccttccttcctacttaacagtgagggatccaggctggtccaaaggtggtggtgag

SEQ ID NO: 8240 - DNA, 120 bp, synthetic construct
  source 1..120: mol_type = other DNA
cagtatccggtgagtcatcttatcctcagcctcaagggatctcccttgtccatgtcttcctgatgctccttctgccactgcttctgctgctggtgccttcattattcttcttttctttct

SEQ ID NO: 8241 - DNA, 120 bp, synthetic construct
  source 1..120: mol_type = other DNA
cgcaaagctccgggttcagtttcccgcgctggaactttttcaatagtaaacgagcaaagctccgcgcgcccaggtggcgcgagcactaggatctgtcggttggggtcctacttttacata

SEQ ID NO: 8242 - DNA, 120 bp, synthetic construct
  source 1..120: mol_type = other DNA
ccctccctaatttccactccccccaccccacttcgcctgccgcggtcgggtccgcggcctgcgctgtagcggtcgccgccgttccctggaagtagcaacttccctaccccaccccagtcc

SEQ ID NO: 8243 - DNA, 120 bp, synthetic construct
  source 1..120: mol_type = other DNA
ccctataaaccccgacgaacctgtgctaaagtggcaaaactggggcccaagtcctgagtctgccaccgtccagcaatataacgttgggctagtcaatttgtgtctttttcttttttttga

SEQ ID NO: 8244 - DNA, 120 bp, synthetic construct
  source 1..120: mol_type = other DNA
atcttggacctggagcctggtgaggcaccctcagggttgttttgtgtgtgtgcgtgcactatttttctcttcaaatctctattcacttgcctgaattttgaaatttcctttggttctctg

SEQ ID NO: 8245 - DNA, 120 bp, synthetic construct
  source 1..120: mol_type = other DNA
actgcctcttcctcaaggaacaaacaacaaatggctctgatggtttgtagcctgcctaattggaagaaaggcaacacagaagtttgagagcccatctagtccagagaaggggcctctgga

SEQ ID NO: 8246 - DNA, 120 bp, synthetic construct
  source 1..120: mol_type = other DNA
atggggctcatgctgctgcctctctgacctctgccctggcctaggctctacggtttcaagatccatccgatggcctaccagctgcagctccaagccgccagcaacttcaagagcccagtc

SEQ ID NO: 8247 - DNA, 120 bp, synthetic construct
  source 1..120: mol_type = other DNA
actcccacactcaggaaccagacgttgtgggtgaggacatgctgtccctcctgccaagtaataacttccttcccagccaggatcctgccccaagtaggaatatagctctgcatttacagc

SEQ ID NO: 8248 - DNA, 120 bp, synthetic construct
  source 1..120: mol_type = other DNA
aaaccagaagaatcttggaaggaggggtctaaggttctagggggccagcagagctcacttttctagcctcttgaaggactctgggttagaagtaaattaggtctgggtgaaggatgggaa

SEQ ID NO: 8249 - DNA, 120 bp, synthetic construct
  source 1..120: mol_type = other DNA
tctgcccagacaggctgacctgagaaaggcacagtggttcctccattccttccccatcatctgagtgttccagtatcccccatccctctcaatccagtcacctgcctattgacatctagc

SEQ ID NO: 8250 - DNA, 120 bp, synthetic construct
  source 1..120: mol_type = other DNA
gggcttggtagcgcatacctgtaattacagctactcgggaggctgaggccggagaatcacttgaacctggaaggtggaggtggcgatgagccgagattgcaccattgcactccagcctgg

SEQ ID NO: 8251 - DNA, 120 bp, synthetic construct
  source 1..120: mol_type = other DNA
agaccgagactgtctccaaaaaaaaaaaaaaagaaactttctctttaaaccagaaagactcaggaactcagagccacatgccagagttacctgctgctggggccctggactcctgccatt

SEQ ID NO: 8252 - DNA, 120 bp, synthetic construct
  source 1..120: mol_type = other DNA
ttctgtctgtgcttgatggaaatggcatcgtacgcatctgcttttacctatatagtgttttgcacacgtgttaacaaatctgtgtggcctgtactctgacggaaaataccaaaccaatga

SEQ ID NO: 8253 - DNA, 120 bp, synthetic construct
  source 1..120: mol_type = other DNA
agagacataccaaacagtttacacacaaatttatttgggagaaacatccagggactaggggacaagagaggaaacctggtgggcagtagggctgggggtacagagtagcagtaagtgtgc

SEQ ID NO: 8254 - DNA, 120 bp, synthetic construct
  source 1..120: mol_type = other DNA
catcaatagtgggatggggaaatcagctgtgatatgcgcatgctatggagtagtatacagcaggtcaataaaacaaggaagctgtttacaaactgatatcggaacattcagttcccctaa

SEQ ID NO: 8255 - DNA, 120 bp, synthetic construct
  source 1..120: mol_type = other DNA
aggacaggcaagggcacctggagatctggagggtccccgtcaaagctgcgcaccttgatagggtagaagctattcagctacagattgaggagagaaggttagtggaagtggagacagagt

SEQ ID NO: 8256 - DNA, 120 bp, synthetic construct
  source 1..120: mol_type = other DNA
tggactcagtcttgttctatcctgtggattctggttttctcatccagcacactccctaaccctccctattctatgttgccctcagatccagagaggattccttcagtatctctattcagg

SEQ ID NO: 8257 - DNA, 120 bp, synthetic construct
  source 1..120: mol_type = other DNA
caataggggaatgagaaaaggaactgtctttcctattaattggacagatgtttattgaatcactgcatcagatgctggggatacaaccctgcacaaagtctccaccctcacagggcacag

SEQ ID NO: 8258 - DNA, 120 bp, synthetic construct
  source 1..120: mol_type = other DNA
aagcgtcgggccccagcggacatccggagcccgaagcggctccccaggaaggcggcgccgtagcgccactctccctcccaggcgaattctggagaccgcggccccaggcgtctcacccat

SEQ ID NO: 8259 - DNA, 120 bp, synthetic construct
  source 1..120: mol_type = other DNA
attgtattagagaaaagccagagtagtggagaactgcagaggaacgcggggcacctacataaatgtcttgaatgaatgagtgcacagagtgatagacaaaaagaatcagagggccgggct

SEQ ID NO: 8260 - DNA, 120 bp, synthetic construct
  source 1..120: mol_type = other DNA
gggatacctgagggtaagcaaccgagtgacgaaacaaagaaggcggggcctgaggacagaacgccaaggttaggggaatggagccaggcaaacgaggggcggggctgtagatgacccggt

SEQ ID NO: 8261 - DNA, 120 bp, synthetic construct
  source 1..120: mol_type = other DNA
gcccctcaggtcatccactgttgtctacaattacatgcagtaagatgggggaaagtggcagtaggggcagttcagcagagtccctaatggccatgtccagggaggggtgtcctttgtccc

SEQ ID NO: 8262 - DNA, 120 bp, synthetic construct
  source 1..120: mol_type = other DNA
ccagcctgggtgacagagcgagactccgtctcaaaaaaaaaaaaaaaaaaagaatggagtcggctgaggtgggtggattgcctgagctcaggagtttgagaccagcctgggcaacatggt

SEQ ID NO: 8263 - DNA, 120 bp, synthetic construct
  source 1..120: mol_type = other DNA
cagagacttgatgacatggcaaggtgggtgtgcagggtttgctgcataagacgtggggagcaggcccttcctcactcttcaccaagataacaagaggtgagcaatgaaaattgggggtac

SEQ ID NO: 8264 - DNA, 120 bp, synthetic construct
  source 1..120: mol_type = other DNA
ctggactccctccccaccctccacttccgcatccaccacccactctacaaaagctgccacttccaatgcttatagggtatccccagtccccctatgtgagccctggccattcaagaaccc

SEQ ID NO: 8265 - DNA, 120 bp, synthetic construct
  source 1..120: mol_type = other DNA
agaacagagcagtgggaagggagagctcagagggagacgggtgacaactggcccacccctatccctgcactggtagcattcttaccctccccttgctatagcacagcccttgacctagcc

SEQ ID NO: 8266 - DNA, 120 bp, synthetic construct
  source 1..120: mol_type = other DNA
cccttgtttttttcttaacctacttcacttggttagggaactatctggagaggatggggatagaacactggagatagtgcactgaagataatgggcaggaaacattcactttccctgatc

SEQ ID NO: 8267 - DNA, 120 bp, synthetic construct
  source 1..120: mol_type = other DNA
gaaggaagagcagaagtaccccccagcttagatgcaaataactccaagccttcccagaaataggagatgacaccagaggttctgaggcagcacagggagcagcatgtgattgtgtggggt

SEQ ID NO: 8268 - DNA, 120 bp, synthetic construct
  source 1..120: mol_type = other DNA
gcgctctttccacggctgcttcatggaggtaggagactttgaggccaggctgcctgggtccaaataccagctctaccacttactgtgaggtccaggaaaggttttctgtgccccagtttc

SEQ ID NO: 8269 - DNA, 120 bp, synthetic construct
  source 1..120: mol_type = other DNA
tcacagctttactttcctctttcaagccttaatgaaatatgtaccaggctagtgttttgcaaacttttcttactgcaacctttgtaagataaacattttatattgtggctcagtgcacac

SEQ ID NO: 8270 - DNA, 120 bp, synthetic construct
  source 1..120: mol_type = other DNA
accccagtgggcctctcctcgctgctgtttcccacctggtgatctgacaaggcagcttcttaacccggttgaggagggtgtctgctgtcccccggtgcaggggctctgggcgaagcaggg

SEQ ID NO: 8271 - DNA, 120 bp, synthetic construct
  source 1..120: mol_type = other DNA
tgagacagagaggagggaagtcacgcccacagtgggctcctctgccatgtggggccacccgttgaaggaagctctgacttccatcctcacaactacatcccttcctcaactcctgcagcc

SEQ ID NO: 8272 - DNA, 120 bp, synthetic construct
  source 1..120: mol_type = other DNA
atacaaaaaggtaaatggcaaaacaaaacaagatgactaaaagcaaatttcaggcaggctttgctcagacctgctctcaaatctggacttagccactttcttgctctatgactccgaatg

SEQ ID NO: 8273 - DNA, 120 bp, synthetic construct
  source 1..120: mol_type = other DNA
caggcacagtggctcacacctataatcccagcactttggaaggccaaggcaggcagatcgtctgcagtcaggagttcaagactagcctggccaacatgatgaaaccctgtctctgctaaa

SEQ ID NO: 8274 - DNA, 120 bp, synthetic construct
  source 1..120: mol_type = other DNA
ggaagattgttctagcagaatattccattagaagtggtagggaggaaaaattcctcaggtggacagttcactaatggaggtgagaagggatacagcaatgtgcaagcaaacacccagtgt

SEQ ID NO: 8275 - DNA, 120 bp, synthetic construct
  source 1..120: mol_type = other DNA
tctgaagcagaagcaactctcagtgctgactctctctcctctctcttttcacttacacagtcagtgattgcatccactctcctttcactgctgagccacctcaaaccctaacttctctcc

SEQ ID NO: 8276 - DNA, 120 bp, synthetic construct
  source 1..120: mol_type = other DNA
cccgccaccatgcacagctaattttttctgtattttttctaaattaaaaataaataaaataaaaaactaagacaaaactgagcagtgggagctacttttagacagggtggtcagggaagg

SEQ ID NO: 8277 - DNA, 120 bp, synthetic construct
  source 1..120: mol_type = other DNA
agacagagtctcgctctgtcacccagactggagtgcagtggtgctatcttggctcactgcaacctctgcctcccaggttcaagcagttctcatgccttagcctcccaagcagttaagact

SEQ ID NO: 8278 - DNA, 120 bp, synthetic construct
  source 1..120: mol_type = other DNA
attcttgtacatctatattgtttatacatgtgcaggagttttcctagtatgtatacatatatagaattgttgtagggtatatgcatcttttctagataaaagcagccaggcatagtggct

SEQ ID NO: 8279 - DNA, 120 bp, synthetic construct
  source 1..120: mol_type = other DNA
ctattttcttcctctggaattatggaagaattatgtcttccatctccagacataattccatcacatttaaaggcagtctctctgtctactcaagttaatcaagccttttcaattggccct

SEQ ID NO: 8280 - DNA, 120 bp, synthetic construct
  source 1..120: mol_type = other DNA
aatctaagaaggaaagaaaagcatcagaaataagagtagttgactaagaagagaatgtgggtaggagcgggcagtttgtaggagacagtaacacaatgagacaactgataaaaaggaaga

SEQ ID NO: 8281 - DNA, 120 bp, synthetic construct
  source 1..120: mol_type = other DNA
gtttcgcgcagttggagctacgggtacagcagtggtccgaaactagtggaagaccactagaacgcggagaatcagaaaattaccgggcatggttcaataatttttttctgtctcattatt

SEQ ID NO: 8282 - DNA, 120 bp, synthetic construct
  source 1..120: mol_type = other DNA
aataaaaaaagaaagaggtaaacgaaaagcttttcaataaatggaaagctacaccatggtcctggatacgaaaattcagcacagtaagatatgcggaatatttgtaaaaagaaaataaat

SEQ ID NO: 8283 - DNA, 120 bp, synthetic construct
  source 1..120: mol_type = other DNA
gcatgagcaaccgagtccggcctggaatattctatttatttatttatttatttatttattatttatttatttttttgagacggagtctcgctctgtcaccaggctggagtatagtggcat

SEQ ID NO: 8284 - DNA, 120 bp, synthetic construct
  source 1..120: mol_type = other DNA
gtgatccacccaactcatggctgacctttcttaggagtgaaagagacctcagaatgtacttccagactgacaagagctagacaggcaggaccacttctctgcatggttttttgcatggaa

SEQ ID NO: 8285 - DNA, 120 bp, synthetic construct
  source 1..120: mol_type = other DNA
gttctgcagccctgcagcaggctccttcaccaccctggtagcccaagtccaagtgggcaggccagccccagaccctggaaaaccaggaagggaatccaggctcagactgctggggaacta

SEQ ID NO: 8286 - DNA, 120 bp, synthetic construct
  source 1..120: mol_type = other DNA
ccatcacatctggctattttttcttgaaagaaagggtgaattactataaagggtgtgaggggaaagtgtggttatggctggtggtctgctctgtagttggttgcccatgcgtgagcaggg

SEQ ID NO: 8287 - DNA, 120 bp, synthetic construct
  source 1..120: mol_type = other DNA
taggattacaggcatatgccaccacgtccagctaatttttgtatttttagtggagccggggtttcaccatgttggccaggatagtctcaatctcctgacctcgtgatctgcccgccttgg

SEQ ID NO: 8288 - DNA, 120 bp, synthetic construct
  source 1..120: mol_type = other DNA
tgacttctcttctgtatccctgatggctccttctccccagatgcctcgattcctcagttcaaacccgaaatccaggtctatgagaacatccatttggcccgtcttgggtgaggaacagct

SEQ ID NO: 8289 - DNA, 120 bp, synthetic construct
  source 1..120: mol_type = other DNA
cacaccctatttctcgggggcagagggagtgtctactcaggctggcaggcccagtgggggtatgttatttattgggccggggccatgctgggatgtctgtgaaccatgggcgagtctggg

SEQ ID NO: 8290 - DNA, 120 bp, synthetic construct
  source 1..120: mol_type = other DNA
ggtgtcctctcccagcgaagctggccacaaagaggggcagggaggcgaggaggctggtgagctgctgtggggaagcggctatgttgcacaggtcctgctcgcagcagtggtgccacagag

SEQ ID NO: 8291 - DNA, 120 bp, synthetic construct
  source 1..120: mol_type = other DNA
ataggaaaatagaaattgacattgaccaaagggcccagcacagaagcaacacgtgaaataagggataggggagacaggggcggatcaaagatgcagcaagggggagacagttattctcaa

SEQ ID NO: 8292 - DNA, 120 bp, synthetic construct
  source 1..120: mol_type = other DNA
ttatccctgccagctttactaccttggaggaaagaaataaccacgggtggggctggagggcctgctgatgtgcttgcactggggagaaatcactagaaaggaaggcatggatgggatttg

SEQ ID NO: 8293 - DNA, 120 bp, synthetic construct
  source 1..120: mol_type = other DNA
tgcgatgaaaccccagtttgttgggatcttgctcagctccctgctaggggctgccttgggtaaggaggcggccagctagcttctcacacaggccttctgccagccggctccaccgagggc

SEQ ID NO: 8294 - DNA, 120 bp, synthetic construct
  source 1..120: mol_type = other DNA
cagtgcagtcactcgcacctgtaatcccagcactttaggaggccaaggtgggaggaccacttgagcccaagagttgagaccagcctgggcaacatagggagaccctgtctctacaaaaaa

SEQ ID NO: 8295 - DNA, 120 bp, synthetic construct
  source 1..120: mol_type = other DNA
atacttgaaatactaaaaattattttatagaatgtccctcgatatttatttatctgatatttgccatgatgagattgaggtcatgcattttaagcaagaatactgcagaagtgatgttgc

SEQ ID NO: 8296 - DNA, 120 bp, synthetic construct
  source 1..120: mol_type = other DNA
ccccatctccatgtacctctcctatcctttctggagagccctcaagccaggccgcaccttcttcttggcaatacatcaggggtgtggcctaaatttaggatatgagttgttgtgtgccac

SEQ ID NO: 8297 - DNA, 120 bp, synthetic construct
  source 1..120: mol_type = other DNA
cttctcttttcttagtctgatcttccttctgcacatccttacccaccactcccccagtcctggttctatcacttgctggccatggacctgttactgtctctgttttttgtttttttgttt

SEQ ID NO: 8298 - DNA, 120 bp, synthetic construct
  source 1..120: mol_type = other DNA
agggtagagctgttgctttgtgaaaggcccacgccctacatatcttccatcactccaccccgtttggaggtgagtcaagagggacagaactatgaagaaaaacatggggctggagataga

SEQ ID NO: 8299 - DNA, 120 bp, synthetic construct
  source 1..120: mol_type = other DNA
atagggaagcctggtcttggtggcacaggagagctgagccagttggggctgggggtgttgggatcccgagtggtgggtagggccgggaagtgggtagagcagggtgtaaaggtcctgacc

SEQ ID NO: 8300 - DNA, 120 bp, synthetic construct
  source 1..120: mol_type = other DNA
gcgcttggtgtggccttgttgctccagtccagcagcagcaattgtcctaggtgtggctgtgtgcacctgctccaaagcacctccccagtcaaaacctgccaacttgggcagggtaccaag

SEQ ID NO: 8301 - DNA, 120 bp, synthetic construct
  source 1..120: mol_type = other DNA
cgctcgcagcttctcctcaccacatcctaaccatggctgtgtttctgcagctgctaccgctgctgctctcgagggcccaagggaaccctgggggtaagcgatccctgggagagttgtgat

SEQ ID NO: 8302 - DNA, 120 bp, synthetic construct
  source 1..120: mol_type = other DNA
aagagctagacctagagctctggtcctggcttggcgaagaatgggagaggtcaaaggtgggagcgaggccgctgactggtgagtagagccccaccagagcagatgagctggaagtgcagc

SEQ ID NO: 8303 - DNA, 120 bp, synthetic construct
  source 1..120: mol_type = other DNA
agactgggagttgggagacctgggttccaggctgtctctgccactggtcttacttctaaacttactcccatctctcctataacctccatgtctccctcaccaccagtgtcctctctatac

SEQ ID NO: 8304 - DNA, 120 bp, synthetic construct
  source 1..120: mol_type = other DNA
ctgtattccatgcccagcgctgccacgtgaatgtactctgctcacttccttcctggattacccatagccccacctcatcctcctacccttgctttcctccctgaagtcagagagatccta

SEQ ID NO: 8305 - DNA, 120 bp, synthetic construct
  source 1..120: mol_type = other DNA
gcccagtctaaaaggtcaattctattttattggttctgagagggaggattcacccagtggatccttttccctacactctcccctcccccaatattgaggctctctcccaactactgccta

SEQ ID NO: 8306 - DNA, 120 bp, synthetic construct
  source 1..120: mol_type = other DNA
aaattaatcacccctgttcccagtcctgctgttgtaacttcttattttctcctgtgttctttcatgtaagatggacagcccattgagggcaggggttagggctaatttcctaagcctccc

SEQ ID NO: 8307 - DNA, 120 bp, synthetic construct
  source 1..120: mol_type = other DNA
cggcaatgactcctcaggtggcagttctagcagctgtagccccagtcgttgcctcagtttacctcccagcaccccgtgctccctttgagctttggccagatccagagcgggaaggccagc

SEQ ID NO: 8308 - DNA, 120 bp, synthetic construct
  source 1..120: mol_type = other DNA
gggcgctggcactactcccggctccaggacccggttccccgtctatgtcccaaagtccaccccgcctagctccgcgcccaaataccggctccccatactctctgtctggtgcaggcatgg

SEQ ID NO: 8309 - DNA, 120 bp, synthetic construct
  source 1..120: mol_type = other DNA
caggaggggcttatttgagggcctttgccacttgctcataggcgagctcgatctcctcatcatctggacaggtggaagcgaattcttcccgggcgtaggcattgctcaagtaccgatgca

SEQ ID NO: 8310 - DNA, 120 bp, synthetic construct
  source 1..120: mol_type = other DNA
actgatgtcaggcccatgttgcacaaactaaaccatagctttgagactatgacaaaaacatgggaaccagcagttttgatcttccacaagaggaagtgaagactgaagttataaagaaag

SEQ ID NO: 8311 - DNA, 120 bp, synthetic construct
  source 1..120: mol_type = other DNA
agtagctgggattacaggtgcctgccaccacaactggctaatttttgtatttttttcagtagagaccagtcatgttggccaggctggtctccaactcctaacctcaggtggtgcgctagc

SEQ ID NO: 8312 - DNA, 120 bp, synthetic construct
  source 1..120: mol_type = other DNA
ttgatgtaggcagaaaatttggcaaatatgtccagcccagctgtgttggactcagggttcagagctgccagcttggggtacctgaaagccaatgggaaaaatgaggtaagatgtcttcct

SEQ ID NO: 8313 - DNA, 120 bp, synthetic construct
  source 1..120: mol_type = other DNA
gaagggtgtggaacttcagtgaggccagagttgtaggctagaagcctggatttctgggttcctgaagggagtagagtctgaagacaggagaggtgggtggggtttgggagccagagtttt

SEQ ID NO: 8314 - DNA, 120 bp, synthetic construct
  source 1..120: mol_type = other DNA
cttctccaacccccaaatcccaaaatgccctaaccgagctcttctcctccgtctgatctctctcccacccatccttgtggtagctacgttaaactcacgtcttcttgccacctccccttc

SEQ ID NO: 8315 - DNA, 120 bp, synthetic construct
  source 1..120: mol_type = other DNA
caatcagacctacttgcacccaaactaggcctccccaccagcccaacgcaccccacacccagctcctccagctcggtcctctcccgggctggatcagagagccgctgactcaccgaccgg

SEQ ID NO: 8316 - DNA, 120 bp, synthetic construct
  source 1..120: mol_type = other DNA
ggaaacataaagccgaggcaaggggctttgttgcagggaggggtctgttcctgtagcttggtcagctttgtgcttccacttatgtttcctattggggccccttcctgtgccctttgtcct

SEQ ID NO: 8317 - DNA, 120 bp, synthetic construct
  source 1..120: mol_type = other DNA
tggcagcctctcccggcctctcttttctctcctacagctttatagctacagctgccttgatatcaatattgactttggctggctggcatgactacccacagggtatcgtgccttaattta

SEQ ID NO: 8318 - DNA, 120 bp, synthetic construct
  source 1..120: mol_type = other DNA
tctgccagaatttgatgtaattcgaatgcttccacctctgcttgaagggtttaaataataaattaggccctgtcgtgccattatgggggtggtcataccctgtacccaggaaacaggcac

SEQ ID NO: 8319 - DNA, 120 bp, synthetic construct
  source 1..120: mol_type = other DNA
tctgtactttagttaaatacccgagaattcacctcctgtgtccacagctctccacgcccctcagccctgccccgcagccctgtagcagaagtacttagtgctttgcattctgcgcgccac

SEQ ID NO: 8320 - DNA, 120 bp, synthetic construct
  source 1..120: mol_type = other DNA
atacttgggcattgcctactatgatactagtgactccactatccacttcatgccagatgccccagaccacgagagcctcaagcttctccagagaggtggggatggaaccatgaattcctc

SEQ ID NO: 8321 - DNA, 120 bp, synthetic construct
  source 1..120: mol_type = other DNA
acacgatatttggcagggacaaatcacatccaaactatagcactgactcaatatattttacagttgcttcacagaggctccctcttttgtttttatgaattcatttcattatttaacaaa

SEQ ID NO: 8322 - DNA, 120 bp, synthetic construct
  source 1..120: mol_type = other DNA
gtaaagaatgatagccttttctttcctcccccacagcctcccaggagcacagagagcctaaaagacctgaaatcatatttttgccaagtgtggattttggtatctccttccttttgcttt

SEQ ID NO: 8323 - DNA, 120 bp, synthetic construct
  source 1..120: mol_type = other DNA
tcccagacgccatgactgccactgagaaaatcctcttcctctcttccattattccctttgactgcctcctcacagtgagattggtcctgggggataagggctgggaggcggcacaagtgc

SEQ ID NO: 8324 - DNA, 120 bp, synthetic construct
  source 1..120: mol_type = other DNA
gagacctgaccaatatggtaaaaccccgtctctactaaaaatataaaaattagctgggtgtgttgtgcgcctgtaatcccagccactcaggaggctgaggcaggattgcttgaatccagg

SEQ ID NO: 8325 - DNA, 120 bp, synthetic construct
  source 1..120: mol_type = other DNA
atatcagctcactgcaagctctgcctcctgggttcacaccattctgctgcctcagcctcctgagtagctaggactacaggtgcccaccacgatgcctggctaatttttgtatttttagta

SEQ ID NO: 8326 - DNA, 120 bp, synthetic construct
  source 1..120: mol_type = other DNA
ttgagttttttgtgttttgtttgtttgtttatttgtttcgttttgttttgagacggagtcttgctctgtcacccaggctggagtgcagtggcgcgatctccgctcactgcaagctctgcc

SEQ ID NO: 8327 - DNA, 120 bp, synthetic construct
  source 1..120: mol_type = other DNA
ggtcaggagtttgagaccagctggccaacatggtaaagccccatctctactaaaatgcaaaaattagccaagcgtgttggtaggtgcctgtaattccagctactcaggagactaaggcag

SEQ ID NO: 8328 - DNA, 120 bp, synthetic construct
  source 1..120: mol_type = other DNA
ttcaggattaagattagcatcttaagcagtataatgatgttcagggtccatcacgtttaccccagttttaatttccagactcaccttccaaagccccttctaagtcctttcctactggat

SEQ ID NO: 8329 - DNA, 120 bp, synthetic construct
  source 1..120: mol_type = other DNA
tgcactgtcacatcatgttagaattagcagtcagtgaatctgcttgcctccatagctatgaactctatctagtagctatacctgttacctcagtgtctgacacatggtcttgtacatagt

SEQ ID NO: 8330 - DNA, 120 bp, synthetic construct
  source 1..120: mol_type = other DNA
agagatacctaagtgtttagtgcagcgcatgtgctttctaaagtggggatggctatttacagactggcctacactgttctggtgggagccctcagtgaccaaggagcagaggtacctgaa

SEQ ID NO: 8331 - DNA, 120 bp, synthetic construct
  source 1..120: mol_type = other DNA
cttgaacctgggaggcggaggttgcagtgagctgagatcgcaccactgcactccagcctggacaacagagcaagactctgtctcagaaaaaaaaaaaaagatgtaaataataatactatc

SEQ ID NO: 8332 - DNA, 120 bp, synthetic construct
  source 1..120: mol_type = other DNA
gagatcgagatcattctggccaacatagtgaaaccctgactctactaaaaatacaacaattagctgggcatggtggcgcatacctgcagtcccagctactcgggaggctgaggcacgaaa

SEQ ID NO: 8333 - DNA, 120 bp, synthetic construct
  source 1..120: mol_type = other DNA
atggctcagatgctgcatcggctcctgggtcacatcaagaacgtgcctgtgagcccagggtggagggcagggaggtggggaaggaggttgagggctgatactgggcagtgggcttcttga

SEQ ID NO: 8334 - DNA, 120 bp, synthetic construct
  source 1..120: mol_type = other DNA
gttggccaggctggtctcaaattcctggcctcaagtgatctgcccatctcggcctcccaaagtgctaggattataggtgggagccaccgtgcccagcctagtatgtgtcatctatatctt

SEQ ID NO: 8335 - DNA, 120 bp, synthetic construct
  source 1..120: mol_type = other DNA
gaactaagtttttattttttgcttgcatttatttatttatttatttatttatttatttatttatttttgagacgggattttgctcttgtagcccaggctggagtgcaatggtgtgatctc

SEQ ID NO: 8336 - DNA, 120 bp, synthetic construct
  source 1..120: mol_type = other DNA
aatctctgattctttcttcatttattagccagaaatttctgtaaagagaaacttccttttatgtactatttggttgccaagtgatagaaatcatatagaaatacagaaaattgcttgata

SEQ ID NO: 8337 - DNA, 120 bp, synthetic construct
  source 1..120: mol_type = other DNA
tgttcttcttgtatcattacagactcatggccttttatagctatatttctctttctcccgactctgtacaaactcctttgttttagagtttgcacaaccctctatcaaagcacctaccac

SEQ ID NO: 8338 - DNA, 120 bp, synthetic construct
  source 1..120: mol_type = other DNA
gaagtatctggagggtgagagttaaaggaggactgcagggagaattggggcccaaggagagctgaggaacaggacagagggtgccaggtcctaagaaacagtacttatctcctcaggtgg

SEQ ID NO: 8339 - DNA, 120 bp, synthetic construct
  source 1..120: mol_type = other DNA
ggggttagaaagatggggaaggagaggaggaccaagagatgcaaagtccacagctttgaacccctgtacccagtttctctcagaggagaagctgcactatcgtagtgcccgaaccaagga

SEQ ID NO: 8340 - DNA, 120 bp, synthetic construct
  source 1..120: mol_type = other DNA
attttctgaccccgctcttcatgaaaggaccatcacccacatccctgtgcttccacctcacatgttcttattctccactggagagccatgctctaatggaactttccgtggcccaaattc

SEQ ID NO: 8341 - DNA, 120 bp, synthetic construct
  source 1..120: mol_type = other DNA
tattgatgaatttggaaagggaaccaacacggtgaggggagaaactgatgaggggagaaactaaggaggggaaaatggaggaggatgaaggagcatgacagtgaggctgggcctctggaa

SEQ ID NO: 8342 - DNA, 120 bp, synthetic construct
  source 1..120: mol_type = other DNA
tcaaggatttgctaaagaagaaccaaatggaaaagtgcgtatatggccccagtgtctttaccctctctgcatcttctcctgcaactcttctccccttttcagggactcagccttcctcca

SEQ ID NO: 8343 - DNA, 120 bp, synthetic construct
  source 1..120: mol_type = other DNA
ctgctgccgctggggacaagccgccaagacccaggggcccagagcttcttcctttgggtgagtatcagcccaacaagaggtcccaggggaactctctcaatagatctgccctttatattt

SEQ ID NO: 8344 - DNA, 120 bp, synthetic construct
  source 1..120: mol_type = other DNA
aacagatttacactcagagcctggtcgccccccgttagcccagattcaaaaggtgaacatctgtttgcagaatctgattcatgagaaggtgagtttattgttttcagtttagacttttgg

SEQ ID NO: 8345 - DNA, 120 bp, synthetic construct
  source 1..120: mol_type = other DNA
aagtgatcctcctgcctcagcctcccagagtgctgggattacaggcgtgagccactgcacccagccccagtctcgaagtttctaagaaaggaaagggatgtgatggagaaagaaaacctt

SEQ ID NO: 8346 - DNA, 120 bp, synthetic construct
  source 1..120: mol_type = other DNA
tccccctgcagtcacagtcaccatcaccacggaatccggggccgctgaatctgggacctccagccacaggcggccccaggccgactcattcagttccaggtgagccctggagagaggata

SEQ ID NO: 8347 - DNA, 120 bp, synthetic construct
  source 1..120: mol_type = other DNA
catatgcacagatgtatgtatacatatatacattatatatataatatatatattatatattatatattttatatatatatataaaactgggggttaggtgggtgggggctcagggaataa

SEQ ID NO: 8348 - DNA, 120 bp, synthetic construct
  source 1..120: mol_type = other DNA
gaaactacatctctactaaaaaaaaaaaaatacaaaaaattagccaggtgtggtggtgggctcctgtaatcccagctacttgggaggctggagcaggagaatcgcttgaacccaacaggc

SEQ ID NO: 8349 - DNA, 120 bp, synthetic construct
  source 1..120: mol_type = other DNA
ggaagaacaacacagcagtgagagtgattcccctttctcctataagaagagaggtgcagcctgaccacccttcagttcctaagtgagggccctggcccccacttaccagggcagccatgc

SEQ ID NO: 8350 - DNA, 120 bp, synthetic construct
  source 1..120: mol_type = other DNA
aggtgctgaaggtggtggggagccccaggagggatctagctccccctggtggtggggccaggaaacggggaagaagggaggggccagacctgcagggctgacaggcacatctcaggctcg

SEQ ID NO: 8351 - DNA, 120 bp, synthetic construct
  source 1..120: mol_type = other DNA
agaccccatctctacaaaaaaatacaaaaattagccagatatggtggtgctcatctgtagtcccagctactcaggaggctgtggcaggaggattgcttgaatcgaggctgcagtgaggca

SEQ ID NO: 8352 - DNA, 120 bp, synthetic construct
  source 1..120: mol_type = other DNA
gcatgaaagcctaagaaagcagaggccacgtgccaaagcatgaatcatgcattaaactcatggaaagtgctgccattttagaaagagtgggaggcaagtctgctagttatcttttttttt

SEQ ID NO: 8353 - DNA, 120 bp, synthetic construct
  source 1..120: mol_type = other DNA
tccatggggctgcctctccgctgctccacaaggtggcgagcctggattttggcagcgttgatctcctcacccatgctgcccgtggtgtccaggacaaagctcaggctggaggctggggtg

SEQ ID NO: 8354 - DNA, 120 bp, synthetic construct
  source 1..120: mol_type = other DNA
gctttgtggaggggaattctggagtaaatcttagggcgtggtggtcagtcaccacagcacatggtggatcccctgatccctccagccagtcccccaaaactgcctatgacaagggagaaa

SEQ ID NO: 8355 - DNA, 120 bp, synthetic construct
  source 1..120: mol_type = other DNA
ccctgtgtgaccttggggaagctgcttaactgagccaggcgttgcttggactgggggacctcagtccttgtggagattaagtaacatcataccctctgggacttcagaatgtgacacagt

SEQ ID NO: 8356 - DNA, 120 bp, synthetic construct
  source 1..120: mol_type = other DNA
ttcctggaagttggcaggaagtcctgggctgcattggcacgagacacctcacctaaggctgctcggaaccgccgagaagaaccaggtccaaagtaggcggcaaagaggtcatcagcaagg

SEQ ID NO: 8357 - DNA, 120 bp, synthetic construct
  source 1..120: mol_type = other DNA
ctggctgcgtccccagccctgccgcagaaacactccccatgctcaggaagcctgagtcctctcaggccctcccctacctggttgctgggtctcctgggcagggctggcccgggcttgacg

SEQ ID NO: 8358 - DNA, 120 bp, synthetic construct
  source 1..120: mol_type = other DNA
atgatattgcccccctcccagggctcttgggagaaccaagtgagattaaccacgtccactcaaggctctctagctcttggcctccatgactggttttctctgtgtctgtgcagtttactc

SEQ ID NO: 8359 - DNA, 120 bp, synthetic construct
  source 1..120: mol_type = other DNA
attagttgtcaacaccactgcactcggaccagcccagaccagggttttgatggaggaaggggatggtgtgggaaatgcccacccaggccacacaccttggcttcatctgcctcctggact

SEQ ID NO: 8360 - DNA, 120 bp, synthetic construct
  source 1..120: mol_type = other DNA
cagggctcacggctggaggtctagccttgagccctcgctgtgcctgtgaggactgggaaggggatgggttggcttaggtctcaaggccaactctggcaaaactgagcccagggctctgct

SEQ ID NO: 8361 - DNA, 120 bp, synthetic construct
  source 1..120: mol_type = other DNA
aagaggcagggggaggagcgtcctcagccagccccatccacgctgtgctcctgcttagcccagcccaaccctccatacctgcccttctttggccttctccacctcgctgggatccaggtt

SEQ ID NO: 8362 - DNA, 120 bp, synthetic construct
  source 1..120: mol_type = other DNA
acatcctcatctgagagaggccaaaggtcagaggtcagagggagtggagctctgccccccacaactccctccagaccctcaaagccccgccttgccttgctggagactgatcttgtcagg

SEQ ID NO: 8363 - DNA, 120 bp, synthetic construct
  source 1..120: mol_type = other DNA
cagcctcaccaggaaaggcggaggcacattgatgagggccccccgggagtccatgatgctgatggcctccagcccgtgccgctgcccaacttcatagtcattttggtcatgtgcgggggt

SEQ ID NO: 8364 - DNA, 120 bp, synthetic construct
  source 1..120: mol_type = other DNA
cagcctcccaaagcgctgggattacaggcatgagccaccgtgcctggctatttaactttttaaaaatgcacgaagggctgggcccaagtccttcctttccagggccctgactatcccaac

SEQ ID NO: 8365 - DNA, 120 bp, synthetic construct
  source 1..120: mol_type = other DNA
ccctctgaggggagtactttccttctttccttgagggggagagaggactaagggaacacaagagcaggcaacaagccttgtaatgctgcagatggcgaggaagacaatcagctggggaca

SEQ ID NO: 8366 - DNA, 120 bp, synthetic construct
  source 1..120: mol_type = other DNA
gaaagcagaggcttcaggcaaggagtcagtggactaaataaagaagcagggaggccggacgcggtggctcacgcctgtaatcccagaactttgggaggctgaggtgggtggatcacctca

SEQ ID NO: 8367 - DNA, 120 bp, synthetic construct
  source 1..120: mol_type = other DNA
gccaaacaggatagcaaaagttctaattgttaaaataagttactaaacaggaacaaaatagtacctggaaacagatacaagcaaatttagtgtttgtgaaagttggcacttcctatcagt

SEQ ID NO: 8368 - DNA, 120 bp, synthetic construct
  source 1..120: mol_type = other DNA
gttttcatgtaaacaaacttggaggccaggtatggtggttcatgcctgtagtcccagcactttgggagactgaggcaggaggattgcttgagcccagaagttcaagaccagcctgggcaa

SEQ ID NO: 8369 - DNA, 120 bp, synthetic construct
  source 1..120: mol_type = other DNA
gttacttgcaaaatgcacaatcaaacattatattcccagtgctcagagcagaggtggcacatagttgggcccagtaaatattttttgaccacattaatttagtacataagacaccagaaa

SEQ ID NO: 8370 - DNA, 120 bp, synthetic construct
  source 1..120: mol_type = other DNA
aggcggagtttggagcttgcagtgagccgagactgtgccactgcactccagcctgggtgacagtgcaagacccgtctcaaaaaataaataaataaataaataataaaaataaatttaaaa

SEQ ID NO: 8371 - DNA, 120 bp, synthetic construct
  source 1..120: mol_type = other DNA
gaactataaatttctatgggtacgtgtatatgtaagtaaataggaaagatctgggaagatacacatcaaagtgataacaatggctaaatcttaggaggaagtaggtgtggagggggatgg

SEQ ID NO: 8372 - DNA, 120 bp, synthetic construct
  source 1..120: mol_type = other DNA
ccctcccaggcaacacatccttcagtcctgcccttccccaccccacccactctgggcctgggcagcagtgcctactcaccccatactctggcttgaagaagccctgctgctcccaccaag

SEQ ID NO: 8373 - DNA, 120 bp, synthetic construct
  source 1..120: mol_type = other DNA
ctgccatttctaggaaaaaaagaaagtgagttgcatggaaggccccagggaagcccctatcctccaactcctcgcccttcctcacctggctgatgagagagaggcctggctcctgagtat

SEQ ID NO: 8374 - DNA, 120 bp, synthetic construct
  source 1..120: mol_type = other DNA
agaacatcaataaatatgtattaagtacttctccagggaatgagaggaaaacacgaacagatggacagaaccctgacctggtagagttaacattcttgtaggggaacaacaaatgagcaa

SEQ ID NO: 8375 - DNA, 120 bp, synthetic construct
  source 1..120: mol_type = other DNA
ggatttgatcactcttttcccacatctgatgtactaccttcttgtctcattgtccattccagtcctcgcttccctcctctgaatttctcccctccccctcttctgtacaaccccctcacc

SEQ ID NO: 8376 - DNA, 120 bp, synthetic construct
  source 1..120: mol_type = other DNA
accctagttccctaagatcgccgccccggcagccggcgcccacgtgttcccccctttgtgacagggagcgtttccgggcctgcgggtcctggcgggggcggccgtgccccgcctgcgagt

SEQ ID NO: 8377 - DNA, 120 bp, synthetic construct
  source 1..120: mol_type = other DNA
cttgaacctgggaggcggagattgcagagctaagatcacaccactgcagtccagcctgggtgacaaagtgagactccatctcaaaaaaaaaaaaaaaaaaaaaaaattagccgggcatgg

SEQ ID NO: 8378 - DNA, 120 bp, synthetic construct
  source 1..120: mol_type = other DNA
ccagcctacttatcctccccttctcaagagaggatagctgttccctattactcctctcatccactcatcccttaaaaaaaacccacaaaaccatcattagtaaaaaaacaaaaccccttc

SEQ ID NO: 8379 - DNA, 120 bp, synthetic construct
  source 1..120: mol_type = other DNA
tgactgggagaagtcaaggacttgaggatgtcagaaaaggtagaaccaaaagggggcattcctaagccctggagtaggaaagacaactaacagagtagtttattttcaaccccacatctc

SEQ ID NO: 8380 - DNA, 120 bp, synthetic construct
  source 1..120: mol_type = other DNA
gtagagaaagggtctcactgtgaatgtcacccaggctagctattttcaaacatttattgctttggaaccagagcccatatgtggataaaggtaggtagcattactcttgatgatgcaggc

SEQ ID NO: 8381 - DNA, 120 bp, synthetic construct
  source 1..120: mol_type = other DNA
gcggagatcacaccactacactccagcctgggtgacaaagcaagactccgtctcaaaaaaaaaaaaatacaaaaattagctgggcattgtggtgtgcacctgtaatcccagctactcagg

SEQ ID NO: 8382 - DNA, 120 bp, synthetic construct
  source 1..120: mol_type = other DNA
tctcaaggaaaaaaaaggagaaagatcttctttctcatcccaacagaaaagtcactttaaagccacacacatattggctcacacctgtagtcactgcactttgagaggctgaggtgggag

SEQ ID NO: 8383 - DNA, 120 bp, synthetic construct
  source 1..120: mol_type = other DNA
agatacaaaaaatgagccaggcgttgtggcgcatgcctgtaatcccagctaccagggaggctgaggcaggagaatcacttgaacccgggaggcagaggttgcggtgagccgagatcacgc

SEQ ID NO: 8384 - DNA, 120 bp, synthetic construct
  source 1..120: mol_type = other DNA
ctaggattacaggcgcacaacacaacatctggctaatttttgtatttttagtagagatggagtttcaccatgttggccaagctagtctcaaactcgtgacctcaggcatccacccgcctc

SEQ ID NO: 8385 - DNA, 120 bp, synthetic construct
  source 1..120: mol_type = other DNA
ttgagaaatcaatcaataaatgtattcagaatagtggttagtcaatacgtcttcggatattatttttctttctttaagcacctatcatataactggcctatgctaggtattagatacact

SEQ ID NO: 8386 - DNA, 120 bp, synthetic construct
  source 1..120: mol_type = other DNA
ttgtattgttttccaatacacgatacaatctctaagcttatctgtaaatttaaggcacaaggcatttatttattgctaaattttaaaatttttcttagagatggggtcttgctctattgc

SEQ ID NO: 8387 - DNA, 120 bp, synthetic construct
  source 1..120: mol_type = other DNA
agtactaaagatgaagataaaaactccggacctaactccagcctaggggtacaaaggccagatcccccgccccaaccatgcgaggtccccgagggcgcccccttttgacgtcacggtacc

SEQ ID NO: 8388 - DNA, 120 bp, synthetic construct
  source 1..120: mol_type = other DNA
aaaaaaaaaaatgaccgggagcagtggctcacacctgtaatcccagcactttgggcggccaaggcaagtggatcgcctgaggtcaggagttcgagaccagcctggtcaacatggcgaaat

SEQ ID NO: 8389 - DNA, 120 bp, synthetic construct
  source 1..120: mol_type = other DNA
atccgcccgcctcggcctcccaaagtgctgggattacaggcgtgagccactgtgcccagctggtaaaaatattttttcatggactgagacttcataaaacttgtatttgtcatcttgcat

SEQ ID NO: 8390 - DNA, 120 bp, synthetic construct
  source 1..120: mol_type = other DNA
ccaatttaatcattcacagtgacctcacaatcagagaacacatgctctctccatgaactctccccttcaaggtacattcacagcctaaataccagaagtaattttctttacgaacaaatt

SEQ ID NO: 8391 - DNA, 120 bp, synthetic construct
  source 1..120: mol_type = other DNA
ggaactcccctgggtgctggagggattccagtcaggtcaaaccgccccagcaggttgttgtcctttgtcatggccctctcgccctcatacacctggatcagcaccccgggttggttgtca

SEQ ID NO: 8392 - DNA, 120 bp, synthetic construct
  source 1..120: mol_type = other DNA
cagccgtgggctcattgatgattcttagcacattaagtccagcaatcacacctgcatccttagtagcctgacgttgagagtcattgaaataggctggcacggtaatcactgcattggtga

SEQ ID NO: 8393 - DNA, 120 bp, synthetic construct
  source 1..120: mol_type = other DNA
caaactcctgacctcaggtgatccgcccgcctcggcctcccaaagtgctgggattacatacgtgagccaccgtgaccagctctctgcctggctaatgttttaattttgtgtacagatggg

SEQ ID NO: 8394 - DNA, 120 bp, synthetic construct
  source 1..120: mol_type = other DNA
accaccgcacccggcctatatacattttgcttatctatctctcgatggatacagattacagaatttacagaataatgttgctatgagcaagcctatacaaatacatggagacgctactgt

SEQ ID NO: 8395 - DNA, 120 bp, synthetic construct
  source 1..120: mol_type = other DNA
gcactccaccctgggcgacagagcgagactccgtctcaaaaaaaaaaaaaaaattaaaaataaataaataaaaataaaataaagggtttagtgtctatccctctccacaccgcagattcc

SEQ ID NO: 8396 - DNA, 120 bp, synthetic construct
  source 1..120: mol_type = other DNA
ccctggaatattcccgacctggcagcctcatcgagctcggtgattggctcagaagggaaaaggcgggtctccgtgacgacttataaaagcccaggggcaagcggtccggataacggctag

SEQ ID NO: 8397 - DNA, 120 bp, synthetic construct
  source 1..120: mol_type = other DNA
cgacgacggcatcttcgaggtgaaggccacggccggggacacccacctgggtggggaggactttgacaacaggctggtgaaccacttcgtggaggagttcaagagaaaacacaagaagga

SEQ ID NO: 8398 - DNA, 120 bp, synthetic construct
  source 1..120: mol_type = other DNA
caagtgtcaagaggtcatctcgtggctggacgccaacaccttggccgagaaggacgagtttgagcacaagaggaaggagctggagcaggtgtgtaaccccatcatcagcggactgtacca

SEQ ID NO: 8399 - DNA, 120 bp, synthetic construct
  source 1..120: mol_type = other DNA
gatgctgattgggtttagcctgagggtacagaaaaagtttaacacctgggagggtagccttaaagtgatgtttgtgtaagattggtctcaaaagaggtgggaggggggcggggatgtttc

SEQ ID NO: 8400 - DNA, 120 bp, synthetic construct
  source 1..120: mol_type = other DNA
aaataaataaatagtatctaagggcgatgaaaatgttttggaaccagagttgacggttgcataacattgtaaaggtcaaggctgcagtgagccatgactgtaccactgcactccagcctg

SEQ ID NO: 8401 - DNA, 120 bp, synthetic construct
  source 1..120: mol_type = other DNA
aaaaaattgtttgcctgcataccctagcacagagtactgtaccttgaaatattcactttgtaacctcaagaaaagacgttgagggagctgtggaattagcaaagagaatgcagtgccacc

SEQ ID NO: 8402 - DNA, 120 bp, synthetic construct
  source 1..120: mol_type = other DNA
gggcaccagaggagggctggagcaggttcacaggctgggactacggaggagcccagcaaccgagaatcactcctgagggtctaattttcttactctcctgatgcctcacggggcgaggga

SEQ ID NO: 8403 - DNA, 120 bp, synthetic construct
  source 1..120: mol_type = other DNA
cccttaatgctcgcagaggccaacactgtattcatttgttttcctctttagagaataaaacaattaggtctaaccacaaaattaaaagcaaacaaaacccagttaggttgatgagccaat

SEQ ID NO: 8404 - DNA, 120 bp, synthetic construct
  source 1..120: mol_type = other DNA
tttctttccatgctgctagaaatggccagggttctctttgtcattgaagcatttgtcattcattcagttaagaatgcctgcctctagatttcatatcaattaactcttttgctttcattt

SEQ ID NO: 8405 - DNA, 120 bp, synthetic construct
  source 1..120: mol_type = other DNA
tgtgggtttccagtctagtccacagaggcttcacttaaaagctaggtcaactatagcactgtagactctgactagtgtgactgattgaagaaaaacagcatttatattggatttttctgc

SEQ ID NO: 8406 - DNA, 120 bp, synthetic construct
  source 1..120: mol_type = other DNA
ccaggaagaggtgttttgatagtggacaggtgtgtgtgtgcaggtgtgcatatgaaaagtgccaattgagcaaagtgtttaaaaacaggattattccttcatcagtaacttcttcctttc

SEQ ID NO: 8407 - DNA, 120 bp, synthetic construct
  source 1..120: mol_type = other DNA
cctgaggtgttaagaggagctagtaactagaacctgggtcccaacccctcctgctttccagcatcactccacacagtttgcttaaagagggccacctgccaaacagctgtagtatgtgat

SEQ ID NO: 8408 - DNA, 120 bp, synthetic construct
  source 1..120: mol_type = other DNA
gggcccctgtcccctccagtgaatcccagaagactctggagagttctgagcagagggcggcaccctgccctctgattggtccaaggaaggctggggggcaggacgggaggcgaaacccct

SEQ ID NO: 8409 - DNA, 120 bp, synthetic construct
  source 1..120: mol_type = other DNA
cgagcccacggccgccgccatcgcctacggcctggacagaacgggcaagggggagcgcaacgtgctcatctttgacctgggcgggggcaccttcgacgtgtccatcctgacgatcgacga

SEQ ID NO: 8410 - DNA, 120 bp, synthetic construct
  source 1..120: mol_type = other DNA
caccggcaaggccaacaagatcaccatcaccaacgacaagggccgcctgagcaaggaggagatcgagcgcatggtgcaggaggcggagaagtacaaagcggaggacgaggtgcagcgcga

SEQ ID NO: 8411 - DNA, 120 bp, synthetic construct
  source 1..120: mol_type = other DNA
tttgggcttaattgtgggccttaagagaaattgcaggtgcccgtcttgattagagtggggcttgtttcagggaaaagtcggatggcagctgcaaaacggtattggaggggtggttgaggt

SEQ ID NO: 8412 - DNA, 120 bp, synthetic construct
  source 1..120: mol_type = other DNA
atagtgtattgtatatttcaaaatttcaaatgttcttgtcacaaaaatatttgaggtgatatgttaattagcttgatttaattactccatattgtgttaataactactttgtaccaatat

SEQ ID NO: 8413 - DNA, 120 bp, synthetic construct
  source 1..120: mol_type = other DNA
agacgaggtttccgccatgttgggcaggctggtctcgaactcctgacctcaggtgatctgcctgccttggcctcccaaagtgctgggattataggcgtgagccactatgcccggcccttg

SEQ ID NO: 8414 - DNA, 120 bp, synthetic construct
  source 1..120: mol_type = other DNA
aaaccactgaactgggctggccacggtggctcacgcctgtaatcccagcactttgggaggccgaggtgggaggatcactgaggttcaccagttcaaaaccagcctgggccaacatggtga

SEQ ID NO: 8415 - DNA, 120 bp, synthetic construct
  source 1..120: mol_type = other DNA
tgacctcgtgatccacctgcctcggcctctcaaagtgctgggattacaggcgtgagccaccgcgcccggcctaatttttaaataaatagagacgggggttgggtgtcactatttgcccag

SEQ ID NO: 8416 - DNA, 120 bp, synthetic construct
  source 1..120: mol_type = other DNA
gggggaactcggctagcggccccacagcccctgctgactcaaaacaactgtgagtggggttgggcgagtgattgcaaaatgggggtggcggtcgcccggggataggaagggagtgatgat

SEQ ID NO: 8417 - DNA, 120 bp, synthetic construct
  source 1..120: mol_type = other DNA
gccaccacactcggctaatttttctgtttttagtagaaggggtttcaccatgttggccaggatggtctccatctcctgacctcgtgagccgctgtgcccggccactttttcttttttgag

SEQ ID NO: 8418 - DNA, 120 bp, synthetic construct
  source 1..120: mol_type = other DNA
ataattctgtttattttcaaattgtcttgttttcaccttgttagaatgaactctggaagcccagccagggacaatgcaccttcacagagattctgcactaatctgagtgaaggtctaagg

SEQ ID NO: 8419 - DNA, 120 bp, synthetic construct
  source 1..120: mol_type = other DNA
attacaggcatgcgccaccagtcccggctaatttttgtatttttagtagagggtttcaccatgttggccgggctggtcttgaactcctgaccaagagatctgcccaccttgacctcccaa

SEQ ID NO: 8420 - DNA, 120 bp, synthetic construct
  source 1..120: mol_type = other DNA
aaagctgtagataatggggtcccactatggtgctcaagctggtctgaaactcctgggctcaagtgattgtcttgccttggcctccgaacacttctgccttggcctcccaaagtgttggaa

SEQ ID NO: 8421 - DNA, 120 bp, synthetic construct
  source 1..120: mol_type = other DNA
aaccctgtctctactaaaacaaaaaaaggacaaaaattagctgggtgtggtgatacatacctgtaatcccaactactcgggaggctgaggcaggagaatggctttgaaccagggagtcca

SEQ ID NO: 8422 - DNA, 120 bp, synthetic construct
  source 1..120: mol_type = other DNA
ggccagaacattaccaataactttgaaacaaacctgtctgattcaatttctctttttcttcttcctacttggagaattaactgggtatatcatcctctggcttttcttaatagttttact

SEQ ID NO: 8423 - DNA, 120 bp, synthetic construct
  source 1..120: mol_type = other DNA
ttctcctgcctcagcctccggagtagctgggactacaggtgcccggctaatttttttgtatttttagtagagacgggtttcattgtgttagccaggatggtcttggatctcctgacctcg

SEQ ID NO: 8424 - DNA, 120 bp, synthetic construct
  source 1..120: mol_type = other DNA
agatcatgccattatgctctagcctgggcaacaagaatgaaactacatctcaaaatacatacatacatacatacagttaaccgagcatggtggcatgcgcctgtaagcccagctacttgg

SEQ ID NO: 8425 - DNA, 120 bp, synthetic construct
  source 1..120: mol_type = other DNA
ctgggattacaggtgagccaccgcgcccagccatgcccagctaatttttaaattttttatacagtgaagttttcactatattgcctgactggtgtctaactcctgaaatcaaatgatcta

SEQ ID NO: 8426 - DNA, 120 bp, synthetic construct
  source 1..120: mol_type = other DNA
gagcaacttcagtaataaacagtcctccttcccatcctcccaggctgaactccccagcttgcagttactctaatagcggctagcctgctacttcagctactgtaggcagtgagcctccta

SEQ ID NO: 8427 - DNA, 120 bp, synthetic construct
  source 1..120: mol_type = other DNA
ccaacaactagtggtacgtaatgtttacatattagttgtatgtaacattaatatatgtttacatactggtagtatgtaagcatatgtaatgtgcctggcctctcatttcttatttttgca

SEQ ID NO: 8428 - DNA, 120 bp, synthetic construct
  source 1..120: mol_type = other DNA
tattttccaaagactatataaagaaacaaattatcctaagggttaaagtacctgctgactcttgaaatgttaaactttattgcctccagtcaggtgaacctcaggtggaagtgggtcaca

SEQ ID NO: 8429 - DNA, 120 bp, synthetic construct
  source 1..120: mol_type = other DNA
acctcgtgtcttcaaaaaatacaaaaattagcaggtgtggtggcacacacctgtggttccaaccactcatggggctgaggtgggaggattgcttgagcctgggaggtcaaggctgaagtg

SEQ ID NO: 8430 - DNA, 120 bp, synthetic construct
  source 1..120: mol_type = other DNA
tttcttatttgtttgtttttgagacaagtttcttgccctgtcgcccaggtttgagggcagtggtgcggtcttggtgcactacagcctctacctcctgggctcaagtgaccctctcacctc

SEQ ID NO: 8431 - DNA, 120 bp, synthetic construct
  source 1..120: mol_type = other DNA
atttgagtctgttgtggttttgttgttgttgttgttgttgttggaaagatgtccaagccattgctttgatcttccttcccaatcctttcttgggcaaaaattattagatggctatgggtg

SEQ ID NO: 8432 - DNA, 120 bp, synthetic construct
  source 1..120: mol_type = other DNA
agaccccatgactattgcatcttcagtgtggaatgtaaaaaacaccttcccccaccccccaaaaaagaaaaaaaaaattgactaatcagatcattgtaactatgcaataagccttaccat

SEQ ID NO: 8433 - DNA, 120 bp, synthetic construct
  source 1..120: mol_type = other DNA
aaatggaccaatcagctctctgtaaaacggaccaatcagctctctgtaaaatggaccaatcagcaggatgtgggtggggccagataagggaataaaagcaggctgcctgagtgagtagtg

SEQ ID NO: 8434 - DNA, 120 bp, synthetic construct
  source 1..120: mol_type = other DNA
catagactaatattctttggaatcttcagctctagacgggccacttcctcaacatttgcagttggataaactcttttttttttttttttttttttttaaatttatttttttattgataat

SEQ ID NO: 8435 - DNA, 120 bp, synthetic construct
  source 1..120: mol_type = other DNA
ggcacggctggccggtcgggggggctgaccccccacctccctcccagatggggcggctggccgggcggggggttgaccccccccacctccctcccggacggggtggctgccgggcggaga

SEQ ID NO: 8436 - DNA, 120 bp, synthetic construct
  source 1..120: mol_type = other DNA
agggagacagagggagagggagggagagccggtggataaactctttaaactagattctaagcctggtacagtggtatgtgcctgcagtcccaactctatctactctaggaggctgaggca

SEQ ID NO: 8437 - DNA, 120 bp, synthetic construct
  source 1..120: mol_type = other DNA
cgggagtattgcctgaggtcaggagttcgagaccagtctggccaacatggtgaaaccgggtctctactaaaaataccaaaaaattagccgagcgtggtggcaggcgcctgtaatcccagc

SEQ ID NO: 8438 - DNA, 120 bp, synthetic construct
  source 1..120: mol_type = other DNA
tgaggtctcactctgtcacctaggttggtgtgcagtggtgcaatcatagctcactactgcctcgaactcctggggtcaaagagatcaagccatcctcccatgtagctaggactataggtg

SEQ ID NO: 8439 - DNA, 120 bp, synthetic construct
  source 1..120: mol_type = other DNA
tgggtgcaggggctcaagcctgtaatcccagcactttgagagaacatggccggcagattgcttgagctcagcagtttgagaccaacctaggcaatatagtgagactttgtctctactaaa

SEQ ID NO: 8440 - DNA, 120 bp, synthetic construct
  source 1..120: mol_type = other DNA
taagttacaaacattttgattgatagtcagtcatggtggtgcacctagtccttactctgaaaccaaatatcctgccatctggggactttcaccagccctgtcggttatcttaccgcaaca

SEQ ID NO: 8441 - DNA, 120 bp, synthetic construct
  source 1..120: mol_type = other DNA
ttcggcagtggcagtggtagttgttctggtttcgggcattgatgacgactgagccatctgggagctcatagggctgaggggagaggacaggacctcagggagggaacagggaaaatgccc

SEQ ID NO: 8442 - DNA, 120 bp, synthetic construct
  source 1..120: mol_type = other DNA
atcatccttgctccataccaacatggtagaggccacctggcagccggccttgtgagcacaaagggagtagaaaagaaatactactcctgtctcaacatcgctcactactgccccaaggtt

SEQ ID NO: 8443 - DNA, 120 bp, synthetic construct
  source 1..120: mol_type = other DNA
ctgtcatgggaggaggaagggtcaacaaagacaaacttgtcttgggggttttaggaacccacgttccgatgggagagggaggatctaatggggatcccgagtaggggatggggtcccaga

SEQ ID NO: 8444 - DNA, 120 bp, synthetic construct
  source 1..120: mol_type = other DNA
acaggggcggggccgattttaaagagccgggcgcggaaaaaaaaaggccgcctgtcgtcgtggagagaatgagtcacagatttactgagttaacaaaatatctttaataaaatctttttg

SEQ ID NO: 8445 - DNA, 120 bp, synthetic construct
  source 1..120: mol_type = other DNA
ttttaatcttttttctttgttttgagacggagtcttgctgtcgcccaagctgaagtgcagtagcgcaatctcggctcgctgcaacctccgcctcctgagttcaagcgattctcctgcttc

SEQ ID NO: 8446 - DNA, 120 bp, synthetic construct
  source 1..120: mol_type = other DNA
cttcccaaagaacagcagcaggtctgtgactttgtccaggacgaccaccctgtgccagaagttagggcaggttgagggtgagaggcctggcaatgctgagagtgaaattggcttcgtaat

SEQ ID NO: 8447 - DNA, 120 bp, synthetic construct
  source 1..120: mol_type = other DNA
ccagttaagggtccagaagagccccaggaccccatagatttgcagattgaagacagaacgttggattaggcctttggatgagtagccctggaagacgcacatcagccctgggcacgagga

SEQ ID NO: 8448 - DNA, 120 bp, synthetic construct
  source 1..120: mol_type = other DNA
agggttgtggaatctgggtacagggaactcactgtgctatcatctctacttttgcatatgtttaaaaattcccataataaaaagtaaaaagtcacaaattaaaaagcaaccctttctagc

SEQ ID NO: 8449 - DNA, 120 bp, synthetic construct
  source 1..120: mol_type = other DNA
tgcagcacagctcatgttcccagctcagacgaggtgaagatatgacaggtttgagaagagtaaattcccagcagcccagcgccactcccggggaacctcacaggggaattttggaagcag

SEQ ID NO: 8450 - DNA, 120 bp, synthetic construct
  source 1..120: mol_type = other DNA
cacccctactagtcccgcctccatgtcccctgcttcctcttaccgtggggttgcatgatgtatttattggcactttctcacagccgggggagctgatgttggatgcccagagcacatact

SEQ ID NO: 8451 - DNA, 120 bp, synthetic construct
  source 1..120: mol_type = other DNA
attgtctttcatatctgtgtcctcagggcctggtgcagggctaggcatactgtaggtgctcactggataaacagaactgaataaatcaggctcacaggacccttagaggaaactggggtc

SEQ ID NO: 8452 - DNA, 120 bp, synthetic construct
  source 1..120: mol_type = other DNA
agccacccccagggcactgtaggcagggtgaggacagtgaggttcagccctagcccctcaaatctttccccttacagaggccctccctgcctttccacacaccacccaatgtccccagat

SEQ ID NO: 8453 - DNA, 120 bp, synthetic construct
  source 1..120: mol_type = other DNA
atgttcccttctactctgtacctttgctcttactgtgcctctctctcagggctctctttccaccagaaatcccatccatgactccctgttcaaatccagctccatctcacctcctccagg

SEQ ID NO: 8454 - DNA, 120 bp, synthetic construct
  source 1..120: mol_type = other DNA
accgtaaactccgcctctgggctcaagcaattctcctacttcagcctcccgagtagctgggatttcaggtgcccaccaccacacctggctaatttttgtatttttagtagagacggggtt

SEQ ID NO: 8455 - DNA, 120 bp, synthetic construct
  source 1..120: mol_type = other DNA
aaaatacaaatttaataaataaatttaataaataaaataaaaataaaaattagccgggcgtggtggcgggcaccatgtgctgtaattccagctactcgggaggctgaagcagagaagcgc

SEQ ID NO: 8456 - DNA, 120 bp, synthetic construct
  source 1..120: mol_type = other DNA
cgttctcagcaactgagatgatgttgctggacaggatgcagctgaagatgttgaagtacaggagatacggcttatctctgtgggaggggagggaccatgtgcatcagggcctggtcaggt

SEQ ID NO: 8457 - DNA, 120 bp, synthetic construct
  source 1..120: mol_type = other DNA
cttctcgcctttgtactcacttgttctcccccatgccacagtaggccccagtagagttcctggggtagaggacttgccgggggtctccatacaaccaggctgcagacagaggcacagatg

SEQ ID NO: 8458 - DNA, 120 bp, synthetic construct
  source 1..120: mol_type = other DNA
gctccagacacaacaatccccccagggcaccacccatctggggcaggagtttctctttttcacaagtttcctactaatattttagcaaatacaaagcaaatactggattccacactgcac

SEQ ID NO: 8459 - DNA, 120 bp, synthetic construct
  source 1..120: mol_type = other DNA
ggagggctgggcagtcagggttccttgtgggcactgaggagggagagccgagggctgggcaggagtctgggaaggagcgggtggggtccactttccccaggtgcgctggactctgtccct

SEQ ID NO: 8460 - DNA, 120 bp, synthetic construct
  source 1..120: mol_type = other DNA
agcccccgggccccatcctcctcccaggaccctgactccctccctccatggctcccggttcccgggccctcccctcagggacacagtactctccttagttcctctccctggagccagccc

SEQ ID NO: 8461 - DNA, 120 bp, synthetic construct
  source 1..120: mol_type = other DNA
gcctgcttcccatcctattctggcccttggacccacattccctctagccaagtatgctttctccccaccccaacacaaaaatcgcagtttattaccaaacccaacatttattgagaacaa

SEQ ID NO: 8462 - DNA, 120 bp, synthetic construct
  source 1..120: mol_type = other DNA
agacccggacgggaatgatgttggggtcacacaggtggttgatgaagcggctgatgttgccatagtaacgggcatctatgcagtacacctctccatcctggggcagggggatggcactct

SEQ ID NO: 8463 - DNA, 120 bp, synthetic construct
  source 1..120: mol_type = other DNA
aggggctgcttgccagagaagttgagagatgacatgatggaaagaaactggatggtctgttgaacaggcaagtatggttagaggactatcttttttaaaggccaaagaatggtcaggcac

SEQ ID NO: 8464 - DNA, 120 bp, synthetic construct
  source 1..120: mol_type = other DNA
gcctggcagtcagcagtggccatgtatccccttcccaccaggtgttaaggtgctcccggtgacttactcgcagatgaaggtcccctgtgggatggtctgcagggcgcggaccccccagcc

SEQ ID NO: 8465 - DNA, 120 bp, synthetic construct
  source 1..120: mol_type = other DNA
aacagtgggtggtgatggtcctagggtgacgggtaatcagtatggtggtgtccccagggctactgggagctcatatgataccttgctgtgacctaggaaaaggatccctcccctggtggg

SEQ ID NO: 8466 - DNA, 120 bp, synthetic construct
  source 1..120: mol_type = other DNA
ccctctttgttccgcagctcagggttggccccacgtgacaggaataacctgaagaggggacaggatgcccaatgcagggtctgaggctgcaagaagtgggggcaggggcatcaagggcgg

SEQ ID NO: 8467 - DNA, 120 bp, synthetic construct
  source 1..120: mol_type = other DNA
ctcaaaaaacaaacaaacaaaaatgggactagtagcgtctaccatctgatgccagagagaaaataaagtaattgttctctttccaaaaaatacagccaggagctggtcatggaggtgcat

SEQ ID NO: 8468 - DNA, 120 bp, synthetic construct
  source 1..120: mol_type = other DNA
aacttgataaagagaaagaaacgagaaagaaaagaatgaagagaaatacaaatgaggaagaagaaagcaatgaggacagacacgagcagtgtgaggtcagatgtaggaaaggcggcccaa

SEQ ID NO: 8469 - DNA, 120 bp, synthetic construct
  source 1..120: mol_type = other DNA
ctgtgcaagccaaggctaacaggtataagcactcagaacaggacccagcacctatgagtcaccacatccccatcgttatgggttacatgtgtcttttccccaccacactaagtccttcag

SEQ ID NO: 8470 - DNA, 120 bp, synthetic construct
  source 1..120: mol_type = other DNA
gtgccctgggagcagggaaacgacatggtcaggttactggggccccctctgccacagggcatgctacctgtctgccccactggtcactcaccgccgtgcagaagtagccgcagcccgggc

SEQ ID NO: 8471 - DNA, 120 bp, synthetic construct
  source 1..120: mol_type = other DNA
tggctccttggcccgcggaggctcccgcttgcgccgtttccgagacggcttcacccatgggctgtcttttcgccatttcttcttggccttgcgccggccactggaaccactctgggaagg

SEQ ID NO: 8472 - DNA, 120 bp, synthetic construct
  source 1..120: mol_type = other DNA
tgattccgcctctagatctatcagtttacaagaaatatgggcagagaggatgtgtcaatctccacccaatcagccaactcctaaatgtgaaaaattctgtaggacaactgagctggtttc

SEQ ID NO: 8473 - DNA, 120 bp, synthetic construct
  source 1..120: mol_type = other DNA
aggtgtgggcctcatttggatcttgacaaaaaccatttgtgagagctgaggaaatgtgaagactgacaggatatttgatggtattaagaaatcggtaagtttttttaggtgtgaaaacag

SEQ ID NO: 8474 - DNA, 120 bp, synthetic construct
  source 1..120: mol_type = other DNA
attccgtctccccccacaaaaaaaaggagttatagacagcatggggcaatgacttagtggatattcagaagataaaaaggacagaaagcagaaaaacagggaacaaggaggactggacag

SEQ ID NO: 8475 - DNA, 120 bp, synthetic construct
  source 1..120: mol_type = other DNA
aaaacaaagcttaataaagttaaaagaccttttatatgtggccatatacacagcaggactgtttacaacagctgaggtgcggaagcaactcaagtgccactgacagatgaatggataagc

SEQ ID NO: 8476 - DNA, 120 bp, synthetic construct
  source 1..120: mol_type = other DNA
tcaagcgtttctctcacctctgcctcctgagtagctggaactacaggcacatgccaccacgcccggctaatttttgttttgtttttttttttgagacagagttttgctcttgttgtccag

SEQ ID NO: 8477 - DNA, 120 bp, synthetic construct
  source 1..120: mol_type = other DNA
ctattctttacaaaatgaattgcaactataaaaattaatgtttatcatagtgagaaaggaaaggtagctcatagcaacctgtgctatgtgaagcaggcaaaattgatcaggctcagcgag

SEQ ID NO: 8478 - DNA, 120 bp, synthetic construct
  source 1..120: mol_type = other DNA
tcacagatcaagcacagcctaatatttgacacacagcagccccttgcttaaatatgtgaatgagtaaatggagtagaagccttaagtgaaactgtaaaagagctcaccaaaggtttatgg

SEQ ID NO: 8479 - DNA, 120 bp, synthetic construct
  source 1..120: mol_type = other DNA
agagagttggggggtccaggatgcctgggccctgggaagagagagtaggctccggggcctacctcttcctctgtggggccccccccttccgcggcctcggctgcccggaggggccgcacg

SEQ ID NO: 8480 - DNA, 120 bp, synthetic construct
  source 1..120: mol_type = other DNA
tcctctggcctggttgggcttttcccgcctctggttgcttttctgcctttctagtttttgggttaccagatagaaggcttggcctcagttttggcctcgcctttttgctctttctaacga

SEQ ID NO: 8481 - DNA, 120 bp, synthetic construct
  source 1..120: mol_type = other DNA
agctcacttgtcacactcctctcccatgtttagggctgggctccttcaggcaagggatatgcagagttgtgacctctaggtattaagaacgcagcatcacagggagaggctgtctagggc

SEQ ID NO: 8482 - DNA, 120 bp, synthetic construct
  source 1..120: mol_type = other DNA
gtgttgctccttgaggtgccgcctaatggcaggcttgtgggcgaagcgcacgtcgcagtaggagcagcggtagggccgcgctcccgagtgcaggttgaggtggtcgtgaagggtggactt

SEQ ID NO: 8483 - DNA, 120 bp, synthetic construct
  source 1..120: mol_type = other DNA
tttctccaccacgtgctccatctgcaggtaggaggcggctgtaaggtagttgacgatgtccctaacagcgaattccaaggcgcccgtgtagcaggagaggagcaagtcggccacgatgcg

SEQ ID NO: 8484 - DNA, 120 bp, synthetic construct
  source 1..120: mol_type = other DNA
cacacgggcagggcctgggcagcgcgcaggcgcggggatgcacgggacgcgcgcgcgcgcggggccggctccgcgtgggcgtaaggggggaggggcgggggcggctcgtgccgtgtgttc

SEQ ID NO: 8485 - DNA, 120 bp, synthetic construct
  source 1..120: mol_type = other DNA
attttaatgatgtgatttattatgttagtatgattctactctaatcttccaccgctccgtcccccttattcctcacctctcctccagactgacaaggtccagctctaaacaaaacttccc

SEQ ID NO: 8486 - DNA, 120 bp, synthetic construct
  source 1..120: mol_type = other DNA
ttctctgatttgtatgcccgcacccagttccctctgttgaatctaagagtctgttctaaactgctctctttgtatttaggccttgtagatttgaggaagaacacctgattttgtgtcaga

SEQ ID NO: 8487 - DNA, 120 bp, synthetic construct
  source 1..120: mol_type = other DNA
tgcgtaaaaacaagcagaggtgcacaaactcttttccatgtagtctggtggagagatgatgtggagccatttcccatgcatcccatccagggggtttacaatcatctagatccttgtccc

SEQ ID NO: 8488 - DNA, 120 bp, synthetic construct
  source 1..120: mol_type = other DNA
gagcactacccttggctactcatagaggtaaggagtggccttgataatccaaaaccgtagcaaacattggacatttgtctaagacattcaaagtattttaggctgtgggcttacttttta

SEQ ID NO: 8489 - DNA, 120 bp, synthetic construct
  source 1..120: mol_type = other DNA
atcccaagtttaaaaaaaaaattgttcattttatttttttcatggagtcattcgtgagagcagaaatacaaaaagctgtcaagttaagaattagagtttgtagggccgggtgcagtggct

SEQ ID NO: 8490 - DNA, 120 bp, synthetic construct
  source 1..120: mol_type = other DNA
tctgtcgccaggctggggtgcagtggcacaatctcggcttactgcaacctccacctaccaggttcaagtgattctcctgcctcagcctctggagtagctgggactacaggcgtgcgctac

SEQ ID NO: 8491 - DNA, 120 bp, synthetic construct
  source 1..120: mol_type = other DNA
aagaaattgtcaaagccatcccaaccttcagcaaccaccaccctaatcagtcagcagctatcgatatcaagataaaatcctccaccagcaaaaatgttacaactcactaaagactcagat

SEQ ID NO: 8492 - DNA, 120 bp, synthetic construct
  source 1..120: mol_type = other DNA
cccgcccacctctttttttttttttgtagagatgaagtcttgctgtgtttcccaggctggtctcgaactgctaggctcaagcgatcctccagccttagcttcccaaattcctctcagcct

SEQ ID NO: 8493 - DNA, 120 bp, synthetic construct
  source 1..120: mol_type = other DNA
tttcaagcacaaaatgtattacattaggataatgtcttgggggtagaaatagaactatgaaaataagaattcagaagaaatagaacaatgtgaaatttctgactgttaaagaagattata

SEQ ID NO: 8494 - DNA, 120 bp, synthetic construct
  source 1..120: mol_type = other DNA
caaggggtacataatttgcaaaattcttttaatgtgagcaaaagggtttgaagattacatgcttcttgaaatcagcatgcacatgagtcatctggagttttaattcggagtctgagtcag

SEQ ID NO: 8495 - DNA, 120 bp, synthetic construct
  source 1..120: mol_type = other DNA
gtctgttctataaaccctcactcctttcctgtcttgaccttttcctctgttgatgcctttggccttctaggcctttatctcattctctctgggtggtaccatgtgctctttagagattgg

SEQ ID NO: 8496 - DNA, 120 bp, synthetic construct
  source 1..120: mol_type = other DNA
acgttaagtaaaggagtttactcttttttttttgagatggagtctcattctgtcaccctggctggagtgtagtggcgtgatctcggctcactgcaacctccgcctcctgggtgtaagcaa

SEQ ID NO: 8497 - DNA, 120 bp, synthetic construct
  source 1..120: mol_type = other DNA
aaaaaaaaaaagaagactatagttaatgaacaagcaatcggccgggcgcggtggttcacgcctgtaatcccagcactgtgggaggccgagacgggtggatcacgaggtcaggagatggag

SEQ ID NO: 8498 - DNA, 120 bp, synthetic construct
  source 1..120: mol_type = other DNA
cctggaatctcagtagcttaacacaacagttttatttctcactattgctctctgttgggtcagtaggagtgttagagtctctgatcatcatagtcactcaggcatccagatcaaaggagg

SEQ ID NO: 8499 - DNA, 120 bp, synthetic construct
  source 1..120: mol_type = other DNA
ttgcaccattgcactccagcctgggcaacagagtgagactccgtctcaaaaaaaaaaaaaaaaaaaagagtgatgtcactgttgtgtgcagtggagttcgattcccccaggccctcctga

SEQ ID NO: 8500 - DNA, 120 bp, synthetic construct
  source 1..120: mol_type = other DNA
gactactagaaggggagagagggagggagtgtgggttaaaaaattacctaattggttctatgactacctagtgcaatatacccatgtaacaaacctgcacctgtaccccctgtatctaaa

SEQ ID NO: 8501 - DNA, 120 bp, synthetic construct
  source 1..120: mol_type = other DNA
aataaatgaataaattagctgggcatggtgatgcatgcttcttgtcccagcttcttggaaggctgaggtgggaggatcatgtgagcccaggagtttgtggttacagtgagctgtgattgc

SEQ ID NO: 8502 - DNA, 120 bp, synthetic construct
  source 1..120: mol_type = other DNA
tcaggctggtctcaaactcctgacctcaggtgatccacctgccttggccacccaaagtgctgggattacaggcgtgagccactgggcctggccttgaataggtatcatatgtacccagtg

SEQ ID NO: 8503 - DNA, 120 bp, synthetic construct
  source 1..120: mol_type = other DNA
aggattctcccatgtgagccccaggctatccttttgtcaagagggtactggtacccagaactgggaaggggatgaatatctccccactccccaggataaaggaaaacattagagaggaat

SEQ ID NO: 8504 - DNA, 120 bp, synthetic construct
  source 1..120: mol_type = other DNA
tggaaataggatgggggagggcattggcttgaccttacttggatagctcattgtttaaaaaaaaaactcctggatccttcctctggggagcttgagacaagtgcacaagtagctagaagg

SEQ ID NO: 8505 - DNA, 120 bp, synthetic construct
  source 1..120: mol_type = other DNA
atggtggggcaaggacagatccactaaaaccaccaagaggcttgcagagcaatgctgaatccccatctaaagtcacacattaaggctgtgaaccaggccaagccagactagttttccaat

SEQ ID NO: 8506 - DNA, 120 bp, synthetic construct
  source 1..120: mol_type = other DNA
ttttgccaatggaatatgaatggaagagtggggtgggaggcagacttgatggagaccctgtttcaaccatgcagacaaggacaatttccaaaggcatgaaccacagatggaaggaagctg

SEQ ID NO: 8507 - DNA, 120 bp, synthetic construct
  source 1..120: mol_type = other DNA
acattgatttcttgctaggtatatcagttagacatggtttggctttgttataaccaagctagaataacagcagcttaaatggtctgagcataagtggtccaggtcaatcctattagctct

SEQ ID NO: 8508 - DNA, 120 bp, synthetic construct
  source 1..120: mol_type = other DNA
gtactttttttcctgcattagtagaaatgcaatgaattaaaataacaaaggtttattttttggtcatattacttatccactgagagtcagccgagtattgcgctttttttttcttttttg

SEQ ID NO: 8509 - DNA, 120 bp, synthetic construct
  source 1..120: mol_type = other DNA
tggaaggagggagaaaagatacttgaggggcaggggaggcactagcagctctgccacagcagccactttggagtccctaacaccaggatgtcctgattttcatgcacttagccctgtcca

SEQ ID NO: 8510 - DNA, 120 bp, synthetic construct
  source 1..120: mol_type = other DNA
aaaagtattgtcaatcttcctatttatcaagaagttctaaaaaaattagtttcacccccctcggaagtttatcttcaagaagacagaactgttctaggctctcaggaagtaaaacccact

SEQ ID NO: 8511 - DNA, 120 bp, synthetic construct
  source 1..120: mol_type = other DNA
tgtacccatccccagcatcacggctgtgcaagagcagcggacagtggcagaccccaggagccacccggtctctgtctaaggcggtctgcaaacgtgaggctccctgtgggctttgctcag

SEQ ID NO: 8512 - DNA, 120 bp, synthetic construct
  source 1..120: mol_type = other DNA
cataataatattcctggattttggtaaattgaggtctacaggtcacacatcacaagtctgcaagggccaggccccaggcagctggtgctaagcttcagatgtagcataaagcctccacac

SEQ ID NO: 8513 - DNA, 120 bp, synthetic construct
  source 1..120: mol_type = other DNA
cagtgagccgagatcgtgccactgcactccagcctgggtgacagagtgagactctgtctcaaaacaaacaaacaaacaaacaaacaaaaaacaaaaaaaacagcccctggaatctgataa

SEQ ID NO: 8514 - DNA, 120 bp, synthetic construct
  source 1..120: mol_type = other DNA
aatgtacaaatcttaactattcagctcaatgatttgttacaatgcatccactcatctaatcaccacccaagacagaatgaggttccctcttgtcccctcccacaaggtaactgctcttct

SEQ ID NO: 8515 - DNA, 120 bp, synthetic construct
  source 1..120: mol_type = other DNA
atggccccttctcaatgagctgttgggtacacctcccagacggggtggtggccgggcagaggggctcctcactttccagtaggcgcggccgggcagaggcgcccctcacctcccggacag

SEQ ID NO: 8516 - DNA, 120 bp, synthetic construct
  source 1..120: mol_type = other DNA
aacaaaatacgaaaaccagtcaggcgtggcggcgcgcgcctgcaatcgcaggcactcggcaagctgaggcaggagaatcaggcagggaggttgcagtgagccgagatggcagcagtaccg

SEQ ID NO: 8517 - DNA, 120 bp, synthetic construct
  source 1..120: mol_type = other DNA
gcacttccttctcccacatgcttggggccaccaatcccacccagaagacaaagggtgagtgtttgaggtggggtttctggttgagcagggtgctggatctgggccggagcaagggaggat

SEQ ID NO: 8518 - DNA, 120 bp, synthetic construct
  source 1..120: mol_type = other DNA
gatggcgcacgcctgtaacccagctacttgggaggatgaggcaggagaatcgcttggatccgggaggtggaggttgcagtgggctgagatcacgccattgcactccagcctgggcaacta

SEQ ID NO: 8519 - DNA, 120 bp, synthetic construct
  source 1..120: mol_type = other DNA
tctgcctcctccagggccctttgtttgctctcttaccatctcccctttggcttcagggccctttacgctgcctctcacttgccccgcacagatcttcagctttgagatcaatgtgagcgt

SEQ ID NO: 8520 - DNA, 120 bp, synthetic construct
  source 1..120: mol_type = other DNA
ccaccttgcccggccctatgcaatgaacatttctaaggtggaaaggcttttaaagtttgaacaagcaatgatgccacatctctatctgaatggcaaatgtctgagtttatcaaaacaatc

SEQ ID NO: 8521 - DNA, 120 bp, synthetic construct
  source 1..120: mol_type = other DNA
ttacaggcatgagccaccacacctggcccagtttcttatttataaaatagggccagtgtggtggcttatgcctgtagtcccagcactttgggaggccaaagcgggtggatcacttgaggt

SEQ ID NO: 8522 - DNA, 120 bp, synthetic construct
  source 1..120: mol_type = other DNA
caggttcaagcgattctcctgcctcctgagtagctgggattacaggcatgtgccaccacacccggctaattttgtatatttagtagaggtgcggtttctccatgttggtcaagctggtct

SEQ ID NO: 8523 - DNA, 120 bp, synthetic construct
  source 1..120: mol_type = other DNA
caaattcctggtttcaagtgatcccctcaactcagcttcccaaagtggtaggattacaggtatgagccactatgctcagcccgtcttcacaaattttttaaaattaatttttaaattttt

SEQ ID NO: 8524 - DNA, 120 bp, synthetic construct
  source 1..120: mol_type = other DNA
tcgggggtaagctgattcctctttaaaactctggcccaaggaagacaaaatttaaagcccactcccttcctccttagcatcactggaccaaggtcaaatgctacaaaaacattttattga

SEQ ID NO: 8525 - DNA, 120 bp, synthetic construct
  source 1..120: mol_type = other DNA
gctgggattacaggcatgtgccaccatgcccggcaaatttttgtatttttagtagagacatggtctcgccatgttggctaggctggtcttaaactcctggcctcaaggcgatctgcctgc

SEQ ID NO: 8526 - DNA, 120 bp, synthetic construct
  source 1..120: mol_type = other DNA
aaagtggggatgaaagtttgtctggggcattgcagttttagacaggaagaccagggaaggcctcactgagaaggtgacatttgagccaagacttaaaaaggtacgaaagtgagccatgtg

SEQ ID NO: 8527 - DNA, 120 bp, synthetic construct
  source 1..120: mol_type = other DNA
agcagctcattgcttccgcgatggcaacgaccactccctgtggagggtcaatgtgggtaaggcaggggatgcaccagcctcctgatcctgaagccacagatcctaccacctcacccagcc

SEQ ID NO: 8528 - DNA, 120 bp, synthetic construct
  source 1..120: mol_type = other DNA
aacctgctaggtgtccctgggtctgcttattctttttttgttgttattgagatggagtcttgctctgtctcccaggctggagtgcagtggcacgacctcagctcactgcaacttctgcct

SEQ ID NO: 8529 - DNA, 120 bp, synthetic construct
  source 1..120: mol_type = other DNA
gctgaggcagcacctgggggatgtcctgaattttttacccctctagccatggccactgagccctctgctgccctgccagaatctgccgcccctccatcttctacctctgaatggccaccc

SEQ ID NO: 8530 - DNA, 120 bp, synthetic construct
  source 1..120: mol_type = other DNA
cctcttgtctggaggtaagcgagggtaaccttcccttcctgctgtctccagcatccctccttggccttttggggccaggcttcatcagcctttctcttcaggtgtgaccaccactccatg

SEQ ID NO: 8531 - DNA, 120 bp, synthetic construct
  source 1..120: mol_type = other DNA
acggcgcccagcccgaggagtgggcactcggctccggacactgtaactcttgctctctaccttgctcacggggcctcaggcttcagtgcttacctcgatgtctcatacctctgcagcggg

SEQ ID NO: 8532 - DNA, 120 bp, synthetic construct
  source 1..120: mol_type = other DNA
attccagcccctctgaacaacagggccccaggaaaatctccaggtcctattctgtcctccttcccttttacttgaagcagtttcttgactggtaattcctccatgaacctcagcccttga

SEQ ID NO: 8533 - DNA, 120 bp, synthetic construct
  source 1..120: mol_type = other DNA
ctcttctgcaggattgcacaacatgggcggggacccaattactgtcattgatgagatccgggacttgctatacattggcaaggatcgcaaaaacccaagggaggattatctgggtgagta

SEQ ID NO: 8534 - DNA, 120 bp, synthetic construct
  source 1..120: mol_type = other DNA
gcacagaatcccagtagtggggacttgggggaggtgaggtcaaggtgaaatgggagtaggggaaggaaaaaatggccataagagatggtggtttgtgaaagttgagctttccctctctac

SEQ ID NO: 8535 - DNA, 120 bp, synthetic construct
  source 1..120: mol_type = other DNA
agcagctgaagtgacgcagtctattcgtccagaggaagagctgctccctgcacaggatatcaaagctctgtttgtgtctgaggaggagaaaaagctgactcggaaggaggtctacatcaa

SEQ ID NO: 8536 - DNA, 120 bp, synthetic construct
  source 1..120: mol_type = other DNA
agctgcgacaacacctgtgttccagatccttttggggcaagggagtggggaacaggcactggccatgttgttacactgagatcaaacctgacagccgtttttaaaggtttaaccccaatc

SEQ ID NO: 8537 - DNA, 120 bp, synthetic construct
  source 1..120: mol_type = other DNA
ctcccatcctgtgatctctgtgcctcaacactgctggctactccctctttctcaaagtgtgtgtccttttgcttcagtggcccaggcccctgcggtgctgctcccagccctccgacccct

SEQ ID NO: 8538 - DNA, 120 bp, synthetic construct
  source 1..120: mol_type = other DNA
tttctgtgtgaatagggagaggctttctttatcaagaggaaccaacttcttcctggcatctagtattttgaggagaacacatgagaacagcagaagcgatgggaagaacagatttgggaa

SEQ ID NO: 8539 - DNA, 120 bp, synthetic construct
  source 1..120: mol_type = other DNA
cgatcactagaagacacaaagctggggagatgcagactgaagatcaaaggggggttttaccttctcccctcagaccctgtggagactcaatattccctctatagcccagctcctacagcc

SEQ ID NO: 8540 - DNA, 120 bp, synthetic construct
  source 1..120: mol_type = other DNA
cgcacctgccattgtggcttgttttgttttgtttttgagacagaatcttgctctgtcgtccaggctggagtgcagtggtgtgatctccactcactgcaacctctgcctcctgggttcaag

SEQ ID NO: 8541 - DNA, 120 bp, synthetic construct
  source 1..120: mol_type = other DNA
aatctttctgcttgtgctcacctttaacttcccctcaagggttcgagaacgcttgaagcctgagttcttggtctcagccttgatggcactgatggctcctgacttcaccagctgctttgc

SEQ ID NO: 8542 - DNA, 120 bp, synthetic construct
  source 1..120: mol_type = other DNA
aaaagaaaacagggtggcaaagatgcagagataagaaggctttgggaatgcatcttttggaagtagtgaatagttctactttactagacaaggctgccaaactaaggttttgaggctttt

SEQ ID NO: 8543 - DNA, 120 bp, synthetic construct
  source 1..120: mol_type = other DNA
cccaagacatctttctccactgttaccacccggggttcacacgccgtccacactgtacccaaccccaccccttcaggtctgcctactcttgtctttggctttccctaccccttgcttaaa

SEQ ID NO: 8544 - DNA, 120 bp, synthetic construct
  source 1..120: mol_type = other DNA
gcattgagtccaaacctccttcaccctcctcacagtaggatctagcttaaccttgttcatctgtgcctgtactcctgtccatcccagcctgaaggggtgctggacagattacagcccagt

SEQ ID NO: 8545 - DNA, 120 bp, synthetic construct
  source 1..120: mol_type = other DNA
gtcatgagaaacagttggggagaaggggaggtggtcagagacaagctcagcctcattggggctctgatctcttgccttaggtcttgctggagaacacaaatctctcggctacaacctcct

SEQ ID NO: 8546 - DNA, 120 bp, synthetic construct
  source 1..120: mol_type = other DNA
ggatgtgggctggctaggatgggtctgaggggaagaaagggacatcttttgggaggagtgctaattgagagccctctggttgtatctttatcactgctacccctgactcttccaggaagc

SEQ ID NO: 8547 - DNA, 120 bp, synthetic construct
  source 1..120: mol_type = other DNA
gcagtttgggtgaagaagaggagcacctgagcttctggggcatgcttccacgagggctccatgtgggagaggaagtgcgggccatgagtctgcggagggactggctaacttcatgctctc

SEQ ID NO: 8548 - DNA, 120 bp, synthetic construct
  source 1..120: mol_type = other DNA
tgggatgagatgttgggggatagccttccattctgggtctcagaaaagactgggtaaagttggaggggtagggaagggggtggggatgtgggttccttcccacgttcccacccctgacct

SEQ ID NO: 8549 - DNA, 120 bp, synthetic construct
  source 1..120: mol_type = other DNA
gtcctgcacatgtcagagctcctgaatcgcggcctgggtgtgcaccatagcggcatcctgcccatcctcaaggagatcgtggagatgctcttcagccgtggcctggtcaaggtgcatgtg

SEQ ID NO: 8550 - DNA, 120 bp, synthetic construct
  source 1..120: mol_type = other DNA
atatcatactctgagcttatatttcattcctgggtatatatcacaaagaaattctcaccctggtctgtgagagaacatgtacacccatcctttgtttgtggtggcatggtgttggtagta

SEQ ID NO: 8551 - DNA, 120 bp, synthetic construct
  source 1..120: mol_type = other DNA
attccaggcacatgccacacaggcctggctaattttttttttttttttatgctttgtagagatgaggttttgctatgttgcacaggttggtcttgaacttctgggctcaagcagtctgtc

SEQ ID NO: 8552 - DNA, 120 bp, synthetic construct
  source 1..120: mol_type = other DNA
tcagcaggaagggtggtggttgtgaagaatcaggagcatcacaacgcattgggagtgatcctacaggtgagggtgatgggaatttggactccagagggtgggagggagcaagccctctct

SEQ ID NO: 8553 - DNA, 120 bp, synthetic construct
  source 1..120: mol_type = other DNA
ggcttctgggggagagaagatcttaccccagatcttaagatctgctccctcttcaggaaggatcctccccttgcagccgtgaccactgctgtccaggaactgctgcgtctggctcaggcc

SEQ ID NO: 8554 - DNA, 120 bp, synthetic construct
  source 1..120: mol_type = other DNA
tgtcctggagcaggaaggcaggccttaacctctccttctttcctgcagggaatagaacgtgtccgggctgtggccaagcggattggtgaggtccaggtggcttgtggcctgaaccagacg

SEQ ID NO: 8555 - DNA, 120 bp, synthetic construct
  source 1..120: mol_type = other DNA
gtcacggtcattctggagcaggcagaggaggaggcagaagatgggcagtgggggtggtgggaggagagaaggcaggctgttgccctggatgctagacctgtggtcttggtgtttggggat

SEQ ID NO: 8556 - DNA, 120 bp, synthetic construct
  source 1..120: mol_type = other DNA
gaggcaggagttacaggctgaaggtctgacacaagcattagtgagatgctcccctcgaagaatagtcttgtttcttctaaggactgattctcaccccggctttggctctcctaattttag

SEQ ID NO: 8557 - DNA, 120 bp, synthetic construct
  source 1..120: mol_type = other DNA
ccaccggcgcccctccacgccgccaacgagtccccgggcgtgcgtgcccttggagggagccaatccgcggccggcgtggggcccggcctggcggaggtgatgctggtatgtgcgtcgcca

SEQ ID NO: 8558 - DNA, 120 bp, synthetic construct
  source 1..120: mol_type = other DNA
catgacaggccttgtacatcagtgttgtttccatcttacactgaggcgatgggctggtagagaatatcatagagagagggaatggtgtattggagatagtggatgaggcagggaggtcag

SEQ ID NO: 8559 - DNA, 120 bp, synthetic construct
  source 1..120: mol_type = other DNA
tcatgagtttgataccagcatgggcaacatgacataaccccatctctacaaaaaatacaaaaattagccaggcgtggtggtacgcgcctatagagctactggggaggctgaggtgggagg

SEQ ID NO: 8560 - DNA, 120 bp, synthetic construct
  source 1..120: mol_type = other DNA
catatataatttaaatgatgtttataaagcagatacctatctagccactccctaggtcaaactatagaatatgaccagtatcccacatatatccctctctgatcaaaatgtctctgatca

SEQ ID NO: 8561 - DNA, 120 bp, synthetic construct
  source 1..120: mol_type = other DNA
cttcccagtaggggtggctgggcaggggcgcccctcacctcccggacggggtggctggccgggcagggggctgacccccccacctccctcctggagggggcggctgccgggcggagatgc

SEQ ID NO: 8562 - DNA, 120 bp, synthetic construct
  source 1..120: mol_type = other DNA
gtttttattctctctttgagttttgtttccttatgcgcccagttacttttgaaaatgttctgggcagatttgcctagattaataaatgccctccatgttccaattacttttttttttttg

SEQ ID NO: 8563 - DNA, 120 bp, synthetic construct
  source 1..120: mol_type = other DNA
cccacgtcagcctcccaaagtgccgggattacaggcttgagccatctcgcccggcctacttagatgttatattagtggtaattcctgttatcctgtgagctctttagtgtctaaacaatt

SEQ ID NO: 8564 - DNA, 120 bp, synthetic construct
  source 1..120: mol_type = other DNA
gaccagagtatgtgactgtgtgcgtcaggggtgctggggggagggcacaggttgggggagacagggaacttgggaaacagaaataaaaacaaaagaaagaatttccctgcccccacatcc

SEQ ID NO: 8565 - DNA, 120 bp, synthetic construct
  source 1..120: mol_type = other DNA
gctgggatacccctaaacattcacattaaaacaaaaaaaacccaaagctaaaaaacaactgggcaggagctaaataaaaatctaattttgagaggctgtatctggctcaggcctcctact

SEQ ID NO: 8566 - DNA, 120 bp, synthetic construct
  source 1..120: mol_type = other DNA
tagtggactggtgagtctttccctggcctctggcagattatggagcaatgacccaaagtgggatttcctcccagctcatgcttagtttcctagtgaaggccagtggctctcattcttctc

SEQ ID NO: 8567 - DNA, 120 bp, synthetic construct
  source 1..120: mol_type = other DNA
tgttggaatgaaagtaagagacaagtgtcttagaagcctgtcattgttttgtgagggcctttaaatatcctgtactcgtgggccatgttgggcccttgtacgcccaggtatacatgagct

SEQ ID NO: 8568 - DNA, 120 bp, synthetic construct
  source 1..120: mol_type = other DNA
cacgtttctcccttggtctctgtcctttttggtcagctgtctcttgctctgtgacccgctccctctccctctccctctcctgacaggtgcccttgaaagatgcgaagagctgtggcctcc

SEQ ID NO: 8569 - DNA, 120 bp, synthetic construct
  source 1..120: mol_type = other DNA
acctggaagatctcagcccgattctcagatggcctggaatccaacagcagcacccagtttgaggtgaagaaatatggtgagagctggaaactggagggacaggcagctgctttcctgaag

SEQ ID NO: 8570 - DNA, 120 bp, synthetic construct
  source 1..120: mol_type = other DNA
tcagactcaaaaccaggaaacacccaggagacctggtttctctccaactctgtctctgtgactcggcccttttccctggctgagtttatttatttctttgctcgttctgctcattccttc

SEQ ID NO: 8571 - DNA, 120 bp, synthetic construct
  source 1..120: mol_type = other DNA
tgaaagtccgtcagtagctccaatgagaatgtcagtctcaggcaggagggttaaatgagcctgagatgctttaaaaacctgtttttttaaaatttggttatatttaatgttaaattttta

SEQ ID NO: 8572 - DNA, 120 bp, synthetic construct
  source 1..120: mol_type = other DNA
attggtccaaattatgggaaaatgagcacgtttttcagtgtaagtagtgttacctttttgatagtatagtttctgttttagttttgtcttgtatttattattttgatgggtacaattaac

SEQ ID NO: 8573 - DNA, 120 bp, synthetic construct
  source 1..120: mol_type = other DNA
aaaaatgaataaattatttggcttagacttttgtttttttagtataatgtctgaggcctgtgttgtttgtggaagtcgcattgttgaggctgtagttcctgtagggtcttttttaggctg

SEQ ID NO: 8574 - DNA, 120 bp, synthetic construct
  source 1..120: mol_type = other DNA
gtgtaccttggtctagtaattgttgaagttgaagaaaaagaccacacagagtgggctccagagcaaacttaaggctgtaatagtttttaaataaatacacagaataaccttagctctctg

SEQ ID NO: 8575 - DNA, 120 bp, synthetic construct
  source 1..120: mol_type = other DNA
gttctgcctacaaaagtttgacaaactgtgggactatttaacataccctggggcaaaactttccaatgatatttggctgcaggttttttgttattaacggcaggaatggtaaaggcaaat

SEQ ID NO: 8576 - DNA, 120 bp, synthetic construct
  source 1..120: mol_type = other DNA
ccattgtgtccctagctttctctgggcgccccgcttacctgtagaggttaaaacttttatgtccttgggagtcctttgttcgttggtcctctgtttcacatgcttgagcgtttcctcacc

SEQ ID NO: 8577 - DNA, 120 bp, synthetic construct
  source 1..120: mol_type = other DNA
cttccagaggggaaggatgagtagggaggatgtggtagttaggagggctcagggtctgaccactctcttttgcctgccctcctttacctgcctaggccttggtccgtgagatgtcaggct

SEQ ID NO: 8578 - DNA, 120 bp, synthetic construct
  source 1..120: mol_type = other DNA
gttgaggacagggtgattgccaacagggcatggatttagcttgggggcagtgaggataccgggactgaaggaagctctcccactctgaccgcccccacctgccgcccctgccagctggag

SEQ ID NO: 8579 - DNA, 120 bp, synthetic construct
  source 1..120: mol_type = other DNA
tctgcccctcggctccttgctgaacccacgtgtggtatttggggccagagatccgaattccgggattacgagtggaaggtgggcagctctctccagcagcctctcttatgttgctggtct

SEQ ID NO: 8580 - DNA, 120 bp, synthetic construct
  source 1..120: mol_type = other DNA
ctttgatggcccctctgatctctgcccctgtgcccacgcttcctttccctcaggcctatgtgtggccaccccagtccagctccgggtgttccgcgagttccacctgcacctccgcctgcc

SEQ ID NO: 8581 - DNA, 120 bp, synthetic construct
  source 1..120: mol_type = other DNA
atgatccctgatggggactttaacagctacgtcagggttacaggtgggagtgccctttagtcccttcccagtggccaccttcggattcatgtgggacttgtggatccctgcttggtccca

SEQ ID NO: 8582 - DNA, 120 bp, synthetic construct
  source 1..120: mol_type = other DNA
gtgcgggcatgctggggctggcccgagaagcgcctgtcggaggactctctttgccccttccccctcctgtttgacatcttttctccccttactaggggggtttggtgggcaatgatgaga

SEQ ID NO: 8583 - DNA, 120 bp, synthetic construct
  source 1..120: mol_type = other DNA
tccccgggctctggcgggggtgggtagtcctcagaccaagggcttgcttgagtcctggctcaacctccctaggacacggtgattgccctggatgccctgtctgcctactggattgcctcc

SEQ ID NO: 8584 - DNA, 120 bp, synthetic construct
  source 1..120: mol_type = other DNA
ccactcctcagcccaggcctcttccctgaaccatgggccccactcgtcccactcccacagcacctcagacgaggcatgtcccaaagcccttcttcattctgtgtctcttgtctggctggt

SEQ ID NO: 8585 - DNA, 120 bp, synthetic construct
  source 1..120: mol_type = other DNA
cgcagggagccgggtggccatcccagccctcctcacaatgcttccctgtgcagtggaagcaaacgaggactatgaggactatgagtacgatgagcttccagccaaggatgacccagatgc

SEQ ID NO: 8586 - DNA, 120 bp, synthetic construct
  source 1..120: mol_type = other DNA
aatattaaagcgtattttcctttacaaagtgatggtggccatagatgatagttgtatttgtcttttcacgaccttatttggctaaaatagttatcaaccctcttacggctctcaaaacat

SEQ ID NO: 8587 - DNA, 120 bp, synthetic construct
  source 1..120: mol_type = other DNA
gcagtgaagactggggcaaggtcaccctctgggaagtgaagtcaccagagaccttgcggagcagctttgagagttctctgagtaggaaggtaacagaatgtgaaggacactggagagaag

SEQ ID NO: 8588 - DNA, 120 bp, synthetic construct
  source 1..120: mol_type = other DNA
ttctccgagaagacagcagagctgctttccgcctctttgagaccaagatcacccaagtcctgcacttcagtatgaagcaaaccggagaggcgggcagggctggggggagacagggaggct

SEQ ID NO: 8589 - DNA, 120 bp, synthetic construct
  source 1..120: mol_type = other DNA
gttgacataaccttagactctctgagccctgatgacccttgggctgttcagctctgctagaacctcccagatgacccgctaggagtctagtgcttcacaggaccaccccgagcagaactg

SEQ ID NO: 8590 - DNA, 120 bp, synthetic construct
  source 1..120: mol_type = other DNA
gtagatgagggcatctggggcagaaggagaatatacaaaggcccagaggccgggggcaggacagggtacctttggggacattgcatgtaattgaccacattcggagtttggatttggaag

SEQ ID NO: 8591 - DNA, 120 bp, synthetic construct
  source 1..120: mol_type = other DNA
gtcatgttctgcctgtgcctggaaacacaagaaacttgactgcagagagaagaaagaggagagaggaacagagcgaggaaactgcccgtctccggggctttttctgttccctatccttgg

SEQ ID NO: 8592 - DNA, 120 bp, synthetic construct
  source 1..120: mol_type = other DNA
atggctggggctcttgagctataagtggcacctcagggccctgacgggcgtcttgccatgctgctcctgggcctgctgctgctgctgcccctgctggctggcgcccgcctgctgtggaac

SEQ ID NO: 8593 - DNA, 120 bp, synthetic construct
  source 1..120: mol_type = other DNA
ctgctgaactcacactgtttctccacagcgcatgagagcccagcccggcacccctgtggccattgaggaggaattctctctcctcacctgcagcatcaactgttacctcaccttcggaga

SEQ ID NO: 8594 - DNA, 120 bp, synthetic construct
  source 1..120: mol_type = other DNA
tggccagggcggtgggcaccctcactcagctctgagcactgtgcggctggggctgtgcttgcctcaccggcactcaggctcactgggttgctgagggagcggctggaggctgggcagctg

SEQ ID NO: 8595 - DNA, 120 bp, synthetic construct
  source 1..120: mol_type = other DNA
ccctgtaaacacagtgctgcgagatcgctggcagagaaggcttcctccagcggctgggtggtgaaggaccctggctcttctctcggggcgacccctcagtgctcggcagtcatactgggg

SEQ ID NO: 8596 - DNA, 120 bp, synthetic construct
  source 1..120: mol_type = other DNA
tcattgcctgggggtgggatacgtgccctcatcagggtcctggtgtccacagggcccccatccccatccgtagttccccagtccctgtgaggcactgacccagccagaactctccagaga

SEQ ID NO: 8597 - DNA, 120 bp, synthetic construct
  source 1..120: mol_type = other DNA
tggctccctctacctcctctccctgtcccacacaccccacagaccctacctgtggtgaaggtgatgctggctggggaagtgaggttggggccccgcaggccacgcactgtggcggtgtag

SEQ ID NO: 8598 - DNA, 120 bp, synthetic construct
  source 1..120: mol_type = other DNA
ctccagcacaggctcaccaccccttttcctctagtccccaggaatggaagtcgctctgcagattcctccaggcccaccaccaactcgcccacccccaccgctggctgaggcactaggtcc

SEQ ID NO: 8599 - DNA, 120 bp, synthetic construct
  source 1..120: mol_type = other DNA
ctggaccacgaaggaatcaaaggggccctgggccacgctccacgagaggcgcatggagtctggggttgtgtcggtcacggtcagcactcctaggcggggctcttcaggaggctcaggggc

SEQ ID NO: 8600 - DNA, 120 bp, synthetic construct
  source 1..120: mol_type = other DNA
agtactttgttaaaggtatcccatctgcagctcaagcctgcagcccctcaccttttggtggctcctcaggcctctaggccttattcacctttcccctttcctgtgccacttctcctctag

SEQ ID NO: 8601 - DNA, 120 bp, synthetic construct
  source 1..120: mol_type = other DNA
taaaattgccaaataaagtacctctgcctgtgatattttctggatgtcctttatttactgtgacgtgtgtttgggtgccttgtttaggggtagaggtgaagtctgagctttgcctcattc

SEQ ID NO: 8602 - DNA, 120 bp, synthetic construct
  source 1..120: mol_type = other DNA
tgtgccccgaggacaggtagtgaaaggatcagtgttcctgagaaacccatctcgtaataatgtcccctgctccccaaaggtggacttcacccttagctcagaaagagacttcgcactcct

SEQ ID NO: 8603 - DNA, 120 bp, synthetic construct
  source 1..120: mol_type = other DNA
ccaggatgactttgtgatcccagacatctcagagtgagcgctcccaatgtgggggctgcccccaagctacaccaccccaattcctgttaggctctccacctcccacacagaggcacgtcc

SEQ ID NO: 8604 - DNA, 120 bp, synthetic construct
  source 1..120: mol_type = other DNA
cctgtttctttctatgccccagctggtgaatggacagagccacatttccctctcaaaggcagagttccaggacgccctggagaagctgaatatgggcattactgacctccaggggctgcg

SEQ ID NO: 8605 - DNA, 120 bp, synthetic construct
  source 1..120: mol_type = other DNA
aggcaccccacaagtccttttcccaacatgcccccctccctttttttttttttaaccgctattgctattatggcttatttgtggtgtttggtctgttttcagaagtgtcttttgcatctg

SEQ ID NO: 8606 - DNA, 120 bp, synthetic construct
  source 1..120: mol_type = other DNA
taaatatgagattgggccattattaactttcataatttggagtgtttagggcctattattggattaattattttgggatgtgggccagctgtactaaaattggtccaaattatgggaaaa

SEQ ID NO: 8607 - DNA, 120 bp, synthetic construct
  source 1..120: mol_type = other DNA
tattctagctaagcagttatgttattagaagctgagaagggggtgtttgttaaagtaacagggcagaagaaaggcggatttaagatacgagcttaatacagtgtagcaggtataggtagt

SEQ ID NO: 8608 - DNA, 120 bp, synthetic construct
  source 1..120: mol_type = other DNA
gtgtaataaaagtaggatgtgtaccttggtctagtaattgttgaagttgaagaaaaagaccacacagagtgggctccagagcaaacttaaggctgtaatagtttttaaataaatacacag

SEQ ID NO: 8609 - DNA, 120 bp, synthetic construct
  source 1..120: mol_type = other DNA
tctctaacaggctggatagttctgcctacaaaagtttgacaaactgtgggactatttaacataccctggggcaaaactttccaatgatatttggctgcaggttttttgttattaacggca

SEQ ID NO: 8610 - DNA, 120 bp, synthetic construct
  source 1..120: mol_type = other DNA
acttactttcagtttttcccattgtgtccctagctttctctgggcgccccgcttacctgtagaggttaaaacttttatgtccttgggagtcctttgttcgttggtcctctgtttcacatg

SEQ ID NO: 8611 - DNA, 120 bp, synthetic construct
  source 1..120: mol_type = other DNA
gctcacatcctggtattttgtgtcatctcccttctccttggatcttagcaagaccaagcgacaccttgtgcctggggcccccttcctgctgcaggtttcttccagaggggaaggatgagt

SEQ ID NO: 8612 - DNA, 120 bp, synthetic construct
  source 1..120: mol_type = other DNA
gcaccctccttctactttgtggccttctactaccatggagaccacccagtggccaactccctgcgagtggatgtccaggctggggcctgcgagggcaaggtgaccggggtcaggagagat

SEQ ID NO: 8613 - DNA, 120 bp, synthetic construct
  source 1..120: mol_type = other DNA
gcctgacggctggactgcagcctttctctctaccaggactaagctgtcccaaggagaagacaacccggaaaaagagaaacgtgaacttccaaaaggcgattaatgagaaatgtgagttgc

SEQ ID NO: 8614 - DNA, 120 bp, synthetic construct
  source 1..120: mol_type = other DNA
tgaccctgcttccatttccctgtaccccagctccctgttccctttgctcttagtgtaggaagagggtccagtgatctggggaggtctgtgccagcgtgcagctggcgtgggccagagggc

SEQ ID NO: 8615 - DNA, 120 bp, synthetic construct
  source 1..120: mol_type = other DNA
aggagctggtctatgaactcaaccccttgggtgagtgaccctctacctccagccattggtttcctaagtgggtacaggtggtgggggatgtggacagcaggacaggctgccaacttcccc

SEQ ID NO: 8616 - DNA, 120 bp, synthetic construct
  source 1..120: mol_type = other DNA
ccctcctttcctgccctccaggctcacagcctttgtgttgaaggtcctgagtttggcccaggagcaggtaggaggctcgcctgagaaactgcaggagacatctaactggcttctgtccca

SEQ ID NO: 8617 - DNA, 120 bp, synthetic construct
  source 1..120: mol_type = other DNA
gcaacccatccgaccccatgccccaggccccagccctgtggattgaaaccacagcctacgccctgctgcacctcctgcttcacgagggcaaagcagagatggcagaccaggctgcggcct

SEQ ID NO: 8618 - DNA, 120 bp, synthetic construct
  source 1..120: mol_type = other DNA
aggaggcagacacctcagggttggtgtcccgtgcttccgtcctgggtgtttttccccctgcttgctttcgcttgctctccccatctctgggtacctgttgtttcctttacccgcctcagt

SEQ ID NO: 8619 - DNA, 120 bp, synthetic construct; identical to SEQ ID NO: 2765
  source 1..120: mol_type = other DNA

SEQ ID NO: 8620 - DNA, 120 bp, synthetic construct
  source 1..120: mol_type = other DNA
gaccctcagggtttgagagggagtctttcctaatgctggttttattcagcttgaggggctgcctttgtttttttgttgaacttcctatcttttttttaatattaaagcgtattttccttt

SEQ ID NO: 8621 - DNA, 120 bp, synthetic construct
  source 1..120: mol_type = other DNA
aggtcagaaccaagggtggtccagaagctaacccttagcttagggacagtttcacagagaacacgtccatgatgcaagactctgctgagggcctggagcagtgaagactggggcaaggtc

SEQ ID NO: 8622 - DNA, 120 bp, synthetic construct
  source 1..120: mol_type = other DNA
gcctgtttgctctgacaccaacttcctaccctctcagcctcaaagtaactcacctttcccccttctcctcaccccctcttaggcttccaggttaaggttctccgagaagacagcagagct

SEQ ID NO: 8623 - DNA, 120 bp, synthetic construct
  source 1..120: mol_type = other DNA
tttggcagcaaagtgtcagtgttggcagtgaagtgtcagtgtgtgttgctagggctgagagcagtgcccctgcccgatgcagttctgggcaggccaggttgacataaccttagactctct

SEQ ID NO: 8624 - DNA, 120 bp, synthetic construct
  source 1..120: mol_type = other DNA
aggggcattgccaggcagggacagggaaggcttcctggagcaggtggcctccaagtggggctctgaagactgagaaggagccaggaaaagagcaggggtagatgagggcatctggggcag

SEQ ID NO: 8625 - DNA, 120 bp, synthetic construct
  source 1..120: mol_type = other DNA
gggactttggactttgaggggggcatgcccagttgtgctgggaatccatactttccctggctggagtagaacctgtggactgtagtcctgagggcagtcatgttctgcctgtgcctggaa

SEQ ID NO: 8626 - DNA, 120 bp, synthetic construct
  source 1..120: mol_type = other DNA
ggcacctcagggccctgacgggcgtctcgccatgctgctcctgggcctgctgctgctgctgcccctgctggctggcgcccgcctgctgtggaactggtggaagctccggagcctccacct

SEQ ID NO: 8627 - DNA, 120 bp, synthetic construct
  source 1..120: mol_type = other DNA
acagcgcatgagagcccagcccggcacccctgtggccattgaggaggaattctctctcctcacctgcagcatcatctgttacctcaccttcggagacaagatcaaggtgcctcacagccc

SEQ ID NO: 8628 - DNA, 120 bp, synthetic construct
  source 1..120: mol_type = other DNA
accggcactcaggctcactgggttgctgagggagcggctggaggctgggcagctgtgggctgctggggcaggactccacccgatcattccccagattcagcagcgactgcaggaggagct

SEQ ID NO: 8629 - DNA, 120 bp, synthetic construct
  source 1..120: mol_type = other DNA
ggaccctggctcttctctcggggcgacccctcagtgctcggcagtcatactggggtgcgagagaggtgggcagcagctcagcctccccccgctggggagcgaaagtttcttggtctcagc

SEQ ID NO: 8630 - DNA, 120 bp, synthetic construct
  source 1..120: mol_type = other DNA
atccgtagttccccagtccctgtgaggcactgacccagccagaactctccagagatgttcccaaaaccatgggcatagtcctcccagtccctccagaagtctgtctgtccatccatgcgg

SEQ ID NO: 8631 - DNA, 120 bp, synthetic construct
  source 1..120: mol_type = other DNA
ctggctggggaagtgaggttggggccccgcaggccacgcactgtggcggtgtagttggtgtggaggacaaggtcatgcagggggtagtccaccgcgctgcctggggtctccgcctgcaga

SEQ ID NO: 8632 - DNA, 120 bp, synthetic construct
  source 1..120: mol_type = other DNA
tgacgcaggcaggggcagggaggcttctccctacgagtccccccctcgcctctgctccagcacaggctcaccaccccttttcctctagtccccaggaatggaagtcgctctgcagattcc

SEQ ID NO: 8633 - DNA, 120 bp, synthetic construct
  source 1..120: mol_type = other DNA
gctctggtcgccgtccacgagcaaggcctggggctgcccgttcgtgtcctcatactggaccacgaaggaatcaaaggggccctgggccacgctccacgagaggcgcatggagtctggggt

SEQ ID NO: 8634 - DNA, 120 bp, synthetic construct
  source 1..120: mol_type = other DNA
ccactccggcctgcccactcctgcagtcatctttgtcttcagcccaaatgcacaaggaaacccacacaagctggcttgctatagccaggcacagcagcctcacctgtcattcccagggca

SEQ ID NO: 8635 - DNA, 120 bp, synthetic construct
  source 1..120: mol_type = other DNA
gacaggggattagctgggagaacagagggcagagcagaggcttgcccgggtggggctggggccgatgggtggggatctgtaccccgtccccacagtgagggtttgggaagagaattacgg

SEQ ID NO: 8636 - DNA, 120 bp, synthetic construct
  source 1..120: mol_type = other DNA
gagacggtttggtgtctggggctggaaaagacagtgaggtgcatggagagtgggatggaggcaaaggggccacggagcttcctgggctgctatggctctgtgagccggtcccaggaacgg

SEQ ID NO: 8637 - DNA, 120 bp, synthetic construct
  source 1..120: mol_type = other DNA
cagctggatctgaagcactttctgagccactaaaatactccttaagggagcctgaagactaacaaatgagcacacgagcaacatggaggttccagatcacaatgggagaaggaagctaca

SEQ ID NO: 8638 - DNA, 120 bp, synthetic construct
  source 1..120: mol_type = other DNA
agccccagccacaagcagttctgtggtgctgaccagacccctgtcccattccccaccagtcatcaccaaagagcaagaggtggccctcccacagctcccaccctggggctcccatcattc

SEQ ID NO: 8639 - DNA, 120 bp, synthetic construct
  source 1..120: mol_type = other DNA
acctctcaccagggccaccaactgcctattggcttccctgcctctaggctccctgccaccccatccccatctttagcccccacagatgagcttcacacaggcacagctgctggggccatc

SEQ ID NO: 8640 - DNA, 120 bp, synthetic construct
  source 1..120: mol_type = other DNA
ccttaaagacattgtatttaatgaaatgaaccattcaaaaaagacaaatattgtatgattgcacttatatgaggtacctagagtcaaattcatagagacagagagtagaatggtgttgcc

SEQ ID NO: 8641 - DNA, 120 bp, synthetic construct
  source 1..120: mol_type = other DNA
ctccaggccccccacggtgacctcgctctcctcgcccctgacacgcaccacctggggccgcccgtccctgtccttgtactgcacagtgaaggagtcgaagcggccctgggggatggtcca

SEQ ID NO: 8642 - DNA, 120 bp, synthetic construct
  source 1..120: mol_type = other DNA
ctggacagacacgtgtggggagagtgaggtccctgggttctcagttcagcatagaaaggatgtgtcacaaaacacaaagtgcccaagagcaggacgatgctgcccacagcgcctccagca

SEQ ID NO: 8643 - DNA, 120 bp, synthetic construct
  source 1..120: mol_type = other DNA
catccttctttgcttactttccggttttctgcttgtgcccacaattgtgagccccatgaaaacatgaacttgtgtgtgtcactttccagcttccgcctatgaaagaaaaaggcagccctg

SEQ ID NO: 8644 - DNA, 120 bp, synthetic construct
  source 1..120: mol_type = other DNA
tgcaaaagaagcccggctggtgagaatatttttgttttcatgaagttgcagagaaagcaacatcttctagggccatcttcctcactcacaaacactcacctgtcacacccacggtggaca

SEQ ID NO: 8645 - DNA, 120 bp, synthetic construct
  source 1..120: mol_type = other DNA
gcaccgccttgggctgcccatccccattcctgtactggaccaggaagtggtcaaactggccctcgggaaccgtccaggacaggctgagggagtcaggggtggcatctgtcatggtcagct

SEQ ID NO: 8646 - DNA, 120 bp, synthetic construct
  source 1..120: mol_type = other DNA
ctcacgtgccatgctctttctagcctcctggcctttgcaccagctgtgattatctgacacacttcaccttctctctaaagctgtcaccaagctaaggcatgcctggcctcaggtcctggc

SEQ ID NO: 8647 - DNA, 120 bp, synthetic construct
  source 1..120: mol_type = other DNA
agtgtcaggagccaaagtaattctcatttcctttgacccaataatcccagttctgggcatctgtcctaagaaaattattaaagcaggaaaaagttatagcatggaagaactcacgatggg

SEQ ID NO: 8648 - DNA, 120 bp, synthetic construct
  source 1..120: mol_type = other DNA
tgaatttttctaatgttcattttccaataatttccctattccccctgtttcccaacactcagatggtcctctgaacatgcatatggaaatgaggcctctcccccaggaatcggggatgcc

SEQ ID NO: 8649 - DNA, 120 bp, synthetic construct
  source 1..120: mol_type = other DNA
aaaatgtgctggaatattctattctatctaacaaatcaggcaacccgtgggatgtgtttctttccagtcttcttgccatgcctgttactttcaaatggttgtgattagcatccttacaaa

SEQ ID NO: 8650 - DNA, 120 bp, synthetic construct
  source 1..120: mol_type = other DNA
ttgtactgcacggtgaaggagtcgaagcggccctgggggacggtccaggagaggctcagcgagtcaggggaggatcctgtcactgttagctcccccaggagcggctcctcagggggctcc

SEQ ID NO: 8651 - DNA, 120 bp, synthetic construct
  source 1..120: mol_type = other DNA
tgcctggtgggcctccttttaaccaagggactctgggattctcttagacacaccaagggcccacagtctggatgctggtgccccaagcttagaatatcatttttctgctttgaatgttca

SEQ ID NO: 8652 - DNA, 120 bp, synthetic construct
  source 1..120: mol_type = other DNA
tccacctgggcttggaaattccacctaatcctgagcatttttagaaaccaacttagattttatagctgagggtagagagatgagaccacatgagggcatctttgcagctgagttgtctct

SEQ ID NO: 8653 - DNA, 120 bp, synthetic construct
  source 1..120: mol_type = other DNA
tcgaactcctgacctcaagtgatctgcccccttcggcctcccaaagtgctgggattacaggcatgagccaccgtgcccagacaggttgtgtgagtctcttgaggacacacagctcaaatg

SEQ ID NO: 8654 - DNA, 120 bp, synthetic construct
  source 1..120: mol_type = other DNA
cagatatcttcatggctcatccccacacttcctttaagtctttgttcaaaagccaccttcttctgtgggccttccctgattactctatttaaaatttcagttttctcaattgcaatgtat

SEQ ID NO: 8655 - DNA, 120 bp, synthetic construct
  source 1..120: mol_type = other DNA
aaatttttttaaattagctgagtgtggtggcgagcacctgtggccccagctacctggggggctgagatgggaggatggcttgagcccaggagtctggggctgcagtgagctatgatcatg

SEQ ID NO: 8656 - DNA, 120 bp, synthetic construct
  source 1..120: mol_type = other DNA
ctagtgattctagtggaggaagtgggtggggcagagatgagccagactggccagaagtcgatatttgattgaaggaggatggcagggtctttgtactattctttctgtttatacatttga

SEQ ID NO: 8657 - DNA, 120 bp, synthetic construct
  source 1..120: mol_type = other DNA
cacaagcaggtctgtggtgctgaccagacccttgtcccattccccaccagtcatcaccaaagagcaagagggtgaccctcccatggctcccaccctggggctcccatcatccactcacct

SEQ ID NO: 8658 - DNA, 120 bp, synthetic construct
  source 1..120: mol_type = other DNA
gtcagcaatcgaaagaccagcttttgctgcacatgggtgaatttcaaaagcattgtgctaattgcaagaaatgaaacacaagagactgcgtattgtgattccattacatggagagtcaaa

SEQ ID NO: 8659 - DNA, 120 bp, synthetic construct
  source 1..120: mol_type = other DNA
ctgtacttgcggccggcatccagaggggtgacagtgacagagcgctcatggccctccacgggcaccacctggggcccgtctttgtccttgaactggaccacaaaagagtcgaactggccc

SEQ ID NO: 8660 - DNA, 120 bp, synthetic construct
  source 1..120: mol_type = other DNA
ggggcaggggagggcttggactgaaccctcggaaaggggcacagctgggctgggctcctctggttcccaatttctgagacttcaggaggagggcagagaaggaagggcagcctctgtagg

SEQ ID NO: 8661 - DNA, 120 bp, synthetic construct
  source 1..120: mol_type = other DNA
acgggcaccacctggggctgcccgtccctgtccttgtactgaaccacaaaggagtcgaattcaccctcagggactgtccatgagaggcccacagagtcaggggttatatccgtcactgtc

SEQ ID NO: 8662 - DNA, 120 bp, synthetic construct
  source 1..120: mol_type = other DNA
taatgtttcctttgtaatcctatacagcttattttacagatttaaaaacattgccttcaggtggggtaggggtttcaccagatgccacagcacaacaatcatggagaacctgtgcccagg

SEQ ID NO: 8663 - DNA, 120 bp, synthetic construct
  source 1..120: mol_type = other DNA
cggggactcagtggctggaggggtctcttcttgttgtggggctgggacagagatggtagggggctgttagtaaagaatcccccttttcttatagtaatgatgtctagttatttatttttt

SEQ ID NO: 8664 - DNA, 120 bp, synthetic construct
  source 1..120: mol_type = other DNA
atccgcctgttgtcactaccttcagagtctgacccctccttgccacctccaagcaccactggctcctcctggattatcacaacattctctcaggtcatcgccttctgccctcacccccct

SEQ ID NO: 8665 - DNA, 120 bp, synthetic construct
  source 1..120: mol_type = other DNA
agtgaccaccaagtattgaacatctactatgtacaggtaccaggctgggcattttctctcatttcatttgccttctaaccttacttgttcctgcagcacccattccctgctcctttttgc

SEQ ID NO: 8666 - DNA, 120 bp, synthetic construct
  source 1..120: mol_type = other DNA
taataaaataaaaaaataaaaatcatacagctgagaacagaggaagacaggaaggaactcagtttgtcagattcccaaactccatttatctctactgcaccgacttggtcagtgcctgac

SEQ ID NO: 8667 - DNA, 120 bp, synthetic construct
  source 1..120: mol_type = other DNA
aaagaaagaaagaaagaaagaaaaagagagaaagaagaaagagaaagctttgtggtcaggcgtggtggctcacgcctgtaataccagaactttgggaggccgaggcaggtggctcacttg

SEQ ID NO: 8668 - DNA, 120 bp, synthetic construct
  source 1..120: mol_type = other DNA
cctcgtggaggccgtacaggtgcatcttgtacttgtgcccgggctctaggcctcccacggtgacctcactctccttgcccccaacacgcaccgcccggggccgcccatccctgtccttgt

SEQ ID NO: 8669 - DNA, 120 bp, synthetic construct
  source 1..120: mol_type = other DNA
ctttgggatagcagattgaggaaagaattggcaagaatgacaacccagaggaagggagggaggtggggagcaaaaaagattactgggaagtgagagagtcagggagaaattgcagctcac

SEQ ID NO: 8670 - DNA, 120 bp, synthetic construct
  source 1..120: mol_type = other DNA
gaccatggcccaaaccagaccatgaaggagcccagtaaaaactgaggggtgagaacacagtgaccgaatggtgaggacatctgtggggaggacagccccaggtggaaggatgagtccagg

SEQ ID NO: 8671 - DNA, 120 bp, synthetic construct
  source 1..120: mol_type = other DNA
ggaccccagctggttttgggctgaagggaagtgtgcatggggctgagaaggggtcacatgggggctgaggtggctgctactcaccagtggtgccatcggccgtgagggggccataccgct

SEQ ID NO: 8672 - DNA, 120 bp, synthetic construct
  source 1..120: mol_type = other DNA
ccctcctcacccccactctgtgtgcatctctctctagcctccatcttccctctttgctctcattcccagcccagattccagaaagtgatgtctacactgattgcagccatgtcctcacct

SEQ ID NO: 8673 - DNA, 120 bp, synthetic construct
  source 1..120: mol_type = other DNA
ttggcctcccaaggtgctgggattataggcaggatcaaccctgctagcctttaccagctcttaactcacttctccagctagtctcagcagccacccggttatttgcaagataaatatcta

SEQ ID NO: 8674 - DNA, 120 bp, synthetic construct
  source 1..120: mol_type = other DNA
atttccctctcaatctctgcttcttcccttgtgacagtttctccatccctcacaaggtcttggtctctctgcacaccaggatctttgcgggggtttcaggtccccctggttctgaatgag

SEQ ID NO: 8675 - DNA, 120 bp, synthetic construct
  source 1..120: mol_type = other DNA
aggagggggtggaggcaccagagcctggcggacgtcccctggcagcacttcctcatgtgcccccggcccctcgggcacccgcatgcgcagttggaagtaggcaaaggtgtcaggctgggc

SEQ ID NO: 8676 - DNA, 120 bp, synthetic construct
  source 1..120: mol_type = other DNA
tgatgtgtcccttcaaggtcaaggccaaattgtggaaaacagtaaccactaaccacagtcttcagccactctcaccacagtgagtcagaacgggaatcactgttttcaattcccagccca

SEQ ID NO: 8677 - DNA, 120 bp, synthetic construct
  source 1..120: mol_type = other DNA
ggtggcgctccaggtcctgcaccgtgccgcggaaacggctcagctcggccgtcaggttgccccaaggccgccgtgggggctgggacaggcttggcctgggcggggactcctcctcccttt

SEQ ID NO: 8678 - DNA, 120 bp, synthetic construct
  source 1..120: mol_type = other DNA
agcctgggctcctgaggaggaggatccaaggctgggaaaccagggcccttccctaacctctggccagccatacctgtgttggccctgacagaagctgggtagctgactgcccggccccgc

SEQ ID NO: 8679 - DNA, 120 bp, synthetic construct
  source 1..120: mol_type = other DNA
tgccaacgtcaccaacaccaagaaaatggcaagaatttaggccctagcagtgtgatcccagagtcccctctcatgggcaccccctatttatctgtcagagtcccctctcatgggcacccc

SEQ ID NO: 8680 - DNA, 120 bp, synthetic construct
  source 1..120: mol_type = other DNA
cttagaataccccagcctaggaagccttgggttggcctcaactcaagacccatgaaatccttacccttcccagaatttatttgttcattttctctgtgtgtgtgtatgtctctttctctt

SEQ ID NO: 8681 - DNA, 120 bp, synthetic construct
  source 1..120: mol_type = other DNA
cttgggaagttttagagtttatctcaatattaacctcgtggctccagatgaactctaccttggctggtccttggagcttatctcaccctcattgctgtttttagactagacccaagcaaa

SEQ ID NO: 8682 - DNA, 120 bp, synthetic construct
  source 1..120: mol_type = other DNA
aagaaaagaaaagaaatagatggcacttgccaaggcagaaggtacgatgccagggaccagctacagacagcagaaagcatggtctgagggtgggtagcccaggcccaagaggagtgtctg

SEQ ID NO: 8683 - DNA, 120 bp, synthetic construct
  source 1..120: mol_type = other DNA
atttgtgggatgatgcaggaaaacatgagttggatggtagaaatgtcagaagatttgcagctggggaaacgaccatatcttaaaagcccagtctgcacaaagggaggccccaaataagtg

SEQ ID NO: 8684 - DNA, 120 bp, synthetic construct
  source 1..120: mol_type = other DNA
atgaaaaaagcaagaatcacaggaaggtaaaggattcagagaataaagacttagggaaaaggggcgaagaaactgggaggttttgcctgaggaatgaagacatcaggctggtgtctccaa

SEQ ID NO: 8685 - DNA, 120 bp, synthetic construct
  source 1..120: mol_type = other DNA
atgctctccctccactcttcctcaggctcaggtcttccccatggctcctgttcacagaatcacagtcccagagtacactggggaaggctgcctgctcaccttctccgcagtcttcgccag

SEQ ID NO: 8686 - DNA, 120 bp, synthetic construct
  source 1..120: mol_type = other DNA
agtcctcgccgctgtagcccgcattgcaaacacacacgccgttctcgcagcgcccgcgacctctacagtcgcgtgggcaggcgcgcgagccgcaatcggttccagtgtaccccggccagc

SEQ ID NO: 8687 - DNA, 120 bp, synthetic construct
  source 1..120: mol_type = other DNA
tccgcacatctgtctgacctggagtaggaggggagaggcaagtctcagtctctctcctgggagagaggctgagcctatgtagtgctcctatgtgcaggcccctagccaggctagcctcat

SEQ ID NO: 8688 - DNA, 120 bp, synthetic construct
  source 1..120: mol_type = other DNA
cctaaaggataccctccctgggcaagtctgttctctacctctctgatatcatttatttaccctgctcctcacccccttttctattgtgttcccctacactggtttttttgttttgttttg

SEQ ID NO: 8689 - DNA, 120 bp, synthetic construct
  source 1..120: mol_type = other DNA
cgcccaggctggagtgcagtggtgcgatctcggctcactgcaacctctgtctcctagctcaagtgattttcctgcctcggcctcctgagtagctgggattataggtgcccacctccatgc

SEQ ID NO: 8690 - DNA, 120 bp, synthetic construct
  source 1..120: mol_type = other DNA
gtagcggggattacaggcatctgctcccacacccagctattttttgtatttttagtagagacggggcttcactatgttggccaggctggtctcaaactcctgaactcaggcaatccgccc

SEQ ID NO: 8691 - DNA, 120 bp, synthetic construct
  source 1..120: mol_type = other DNA
aacaaaataagccaaaatcaggaaacctagttttttaaattgtcaaaagacaaacaggtactccagaaaagaatatagccaaagagccaataaacattttatttattttacctgggctca

SEQ ID NO: 8692 - DNA, 120 bp, synthetic construct
  source 1..120: mol_type = other DNA
tgtacgttaaaaccacaataagatgccactaaatatcctccagaatgcttgtccctcttcaaagaggctgtcattgcttgatattggcaagaatgtgaagcagctggaattgtcatctgt

SEQ ID NO: 8693 - DNA, 120 bp, synthetic construct
  source 1..120: mol_type = other DNA
tgtagggattattgaccggaaggagtcatatttctggaaatattttgtatcttaatctgggtggttacatagatatatacatattcaaaaactcattgagctgcacacttaagactttgg

SEQ ID NO: 8694 - DNA, 120 bp, synthetic construct
  source 1..120: mol_type = other DNA
ttctcttttaaaacattctgtatccacgctgaccaatatggtagccaggagggatatgaggctctgcaacacttgagatgtgaccagaacgaccaagtaagtgaattttactcagtattt

SEQ ID NO: 8695 - DNA, 120 bp, synthetic construct
  source 1..120: mol_type = other DNA
gcttccactcttgccctctacagtctcacaaacgcaatcaggatgtccctatcctcaaaatgcttcagtgtctcccttccaaattctcttagaacactgacaaacagccctaccatcatg

SEQ ID NO: 8696 - DNA, 120 bp, synthetic construct
  source 1..120: mol_type = other DNA
tactcaaacatttcacatcagtagaataaataaattgtggtttattcacaccgtggaataaaataaagcaggaatgaactatagttatatgcagtagtgtgatggatcttactaagatga

SEQ ID NO: 8697 - DNA, 120 bp, synthetic construct
  source 1..120: mol_type = other DNA
aatcctgtcactttgtgtctaaggccatgctaatcactcccacaccctgggaatgcttgcacaaagatgtgtacacatgtacacttacaaatatattaatgtgtgctcatccacaagtac

SEQ ID NO: 8698 - DNA, 120 bp, synthetic construct
  source 1..120: mol_type = other DNA
ataaaagatgttccacagatgggggttctggtcctgcccccatgcctccctctgaccctcctgctacaccctcagttgaatctggcaatgagaggtgaaggtagaaggattctaggagtg

SEQ ID NO: 8699 - DNA, 120 bp, synthetic construct
  source 1..120: mol_type = other DNA
cccagagcctgggctcagctgctctagcccgacatttgggattccgcaagcactttccttccaaggttcagctggccaccagttcagcctagtcctatcttcccgctagccccagcacct

SEQ ID NO: 8700 - DNA, 120 bp, synthetic construct
  source 1..120: mol_type = other DNA
cagtggtttcctctcagcctatatccttcctcatggccagcccccttcccctccctcccccatgctcctctcccatctcttcccagccactgctctagcttggatctctggatcgcaccc

SEQ ID NO: 8701 - DNA, 120 bp, synthetic construct
  source 1..120: mol_type = other DNA
tacgtgagggagcccatatgtgcttgattctgccacatgggtgacggcccaggtgtctgcacaccaggtcagatccccatggtggcaggtgtgtggtgttcctgggtcagggcgtgcctg

SEQ ID NO: 8702 - DNA, 120 bp, synthetic construct
  source 1..120: mol_type = other DNA
gcaagtcaacactgaaatgtgaaaggactgggagagaggagggggaaagggtaaggagcccaggcgtgaaggcagggaagcccagtggtcagagctggggttggcttcactgaggtgtct

SEQ ID NO: 8703 - DNA, 120 bp, synthetic construct
  source 1..120: mol_type = other DNA
gaaggaagggtttggacccttaaaacttcctttgcctagagacatgggtgtggggagaagggaggaggaaggacatttctatctcgtgacaaaagaaagtcacacaattgttttgttctc

SEQ ID NO: 8704 - DNA, 120 bp, synthetic construct
  source 1..120: mol_type = other DNA
actcaccgtccttctcaatccttcctgccaccacaatccctcagccaagagaggtctgatgtctcatccacaccaaagtgccagctgtcccttgccaatcagcagaggagcaggatgtcc

SEQ ID NO: 8705 - DNA, 120 bp, synthetic construct
  source 1..120: mol_type = other DNA
atcccagcactttgggaggccgaagtgggcagcctggccaatatggtgaaaccctatctctattaaaaatacaaaaattagccgggtgtggtggcgtgcacctgtagtcccagctacttg

SEQ ID NO: 8706 - DNA, 120 bp, synthetic construct
  source 1..120: mol_type = other DNA
ataacactagagaaacaaaataaaaaatatgcagcagctcaccacccaccccacaactgaacctcacacaatcccctcaaacaaagaagccaggactgggggttcacaggaatgagagga

SEQ ID NO: 8707 - DNA, 120 bp, synthetic construct
  source 1..120: mol_type = other DNA
tcctgctgcttctcacctgtgggtccagcagctctctggatgccctgctcctctcccccttccccctcagctcccaggctggatctccctgttggaactgcccccatacccagcagggaa

SEQ ID NO: 8708 - DNA, 120 bp, synthetic construct
  source 1..120: mol_type = other DNA
acccgccctacctgtctctcctgggccctctgagggatcttcctccggcctctctggtggcgctggacccagccactcaactcgtcagcaagcctggggaaatggaggagctcaggacct

SEQ ID NO: 8709 - DNA, 120 bp, synthetic construct
  source 1..120: mol_type = other DNA
catacaaaaaagacagtgcatcacctagagcctagaactcagtaagcacttaatagtcactatttctaccagcattatcaccatcatctactctccactggaaaaataatggagcaggag

SEQ ID NO: 8710 - DNA, 120 bp, synthetic construct
  source 1..120: mol_type = other DNA
ggaaggtcaaaaaagaatgacagatgagttggcagaaggagactatgctctcaaaccccaaggaatgatttacccaaagctcacatggccattcccctgccttcctgacccacctacata

SEQ ID NO: 8711 - DNA, 120 bp, synthetic construct
  source 1..120: mol_type = other DNA
cctgccaaagtgctgggattacaggcgtgagccactgtgcctggccttttttttttaattaattaattaatttttatttttattttttggtttttcttttttcttttttttttttttgag

SEQ ID NO: 8712 - DNA, 120 bp, synthetic construct
  source 1..120: mol_type = other DNA
gaacatggagagacaggttctatcttggtctggacatctgtgggaggcaggatgaggcaaaagctggatatcatgtaaacactgaagggttaagagggttaagatgggaggctgggcatg

SEQ ID NO: 8713 - DNA, 120 bp, synthetic construct
  source 1..120: mol_type = other DNA
agcccacaggtcaacagtccaccactacctctggtccataccgttcactttggtacttaattatatgatcactaagattgctttttaaaacttcaatttatatttttgaatagataatac

SEQ ID NO: 8714 - DNA, 120 bp, synthetic construct
  source 1..120: mol_type = other DNA
tatgtctcatgtccattgagggtaaagtacaggccctcaaaaaatacctaagtatggaggagaatctgactctaataacactatgcaatgcaaagccaccaacaatccttacaatccttt

SEQ ID NO: 8715 - DNA, 120 bp, synthetic construct
  source 1..120: mol_type = other DNA
aagctccataacaacaacaacaacagaatcaacatgtccaacgctgaattcatcatcttccctgaccagaaagcccctgcttttgcagtctccatccagtgaacagtaacatcacccacc

SEQ ID NO: 8716 - DNA, 120 bp, synthetic construct
  source 1..120: mol_type = other DNA
gaatgaccacacctgtattgactggtacttgtctttctcccattaccaaatcacagggtttgaaagtcagcatggtggtcaggtcttgttcatctttgcattcccagcatgctgctcagt

SEQ ID NO: 8717 - DNA, 120 bp, synthetic construct
  source 1..120: mol_type = other DNA
tctcccgtagtagagccaaggattgggggcaggctgttttattacctgaggaatcatcagaggtggggataacgttgatctggacggtttcaaatgaggatgttgggtcatctcccagga

SEQ ID NO: 8718 - DNA, 120 bp, synthetic construct
  source 1..120: mol_type = other DNA
gaggaagagcagggggaagatggctcagacttcacctgaagatctggaggaaagggagttagaaattatcaggaagcagagcttaagaagagtccaaaaagtacccaaggacatgtcggt

SEQ ID NO: 8719 - DNA, 120 bp, synthetic construct
  source 1..120: mol_type = other DNA
gagacggttcccaaggcccgcctctccccatcaccaactaatcagttgactctttcaaaaaagggggcgtcccggaagctctaccgaccagtaagagacctgggtgctgagcacgtgaat

SEQ ID NO: 8720 - DNA, 120 bp, synthetic construct
  source 1..120: mol_type = other DNA
ctcggccttgagtgaaggatgccagtgtgagcctgacaggaggtccagagtgcccaggcagctgaagctctgcttcctcaccttgacacatggactccaagcatttctctatgagctccc

SEQ ID NO: 8721 - DNA, 120 bp, synthetic construct
  source 1..120: mol_type = other DNA
tctccttccaaagctaaatggctactgaatgctgccctcggagccttgccccacgcggagagggcagccggagaggggcgcggtgcgggaggcgggggtagggggcggaacaactgggaa

SEQ ID NO: 8722 - DNA, 120 bp, synthetic construct
  source 1..120: mol_type = other DNA
aatcccagctacttgggaggctgaggtgggagaatcgcttgaaccagggagtcggaggttgcagtgagccgagatggtgccactgcaatccagcctggcgacagagcaagattcccgcct

SEQ ID NO: 8723 - DNA, 120 bp, synthetic construct
  source 1..120: mol_type = other DNA
tgtcttctcccctggctctgtgcccctttagtttatcctacattttacatgtataactggtgtgacctgctccactggatgttgcaggttctcctcctaatagaagatgtagagacctat

SEQ ID NO: 8724 - DNA, 120 bp, synthetic construct
  source 1..120: mol_type = other DNA
ttctctttttaaaaatatggcccatcaagaggtaagcacaaacttaaagttttagaagagttccccagagaagatagccatggacctgtagattccccctagtcttaacttgagaaacac

SEQ ID NO: 8725 - DNA, 120 bp, synthetic construct
  source 1..120: mol_type = other DNA
ttgcagggaccaacatcaccaatacctccagaaatcgtgtgaatgcaaatgggacatacttaccccgtcttgctacacagaaacctctcgaaaagtgagactctgggttaagaaggtcaa

SEQ ID NO: 8726 - DNA, 120 bp, synthetic construct
  source 1..120: mol_type = other DNA
ctggcttgaggtagtttgccagctagtggttgtttcatcttgttcctgcacacagagcatatgatgcttgccctctaaatggatgaagtagaatttttttcttattcattcagtagccct

SEQ ID NO: 8727 - DNA, 120 bp, synthetic construct
  source 1..120: mol_type = other DNA
ctcttccatttattatctgcatgagagacaaaaattctagctttccaaaagctaaataaatttccccttctgtttagctttggtggtttctgtggcttttagttttgctgggatttgtgt

SEQ ID NO: 8728 - DNA, 120 bp, synthetic construct
  source 1..120: mol_type = other DNA
gcttaagtgatcctcccaccgcagcctcatgagtagctgggactgcaggttcatgccaccatgtctggctaatttttttttttttttttagagacgaggtttcactatgttgcctgggct

SEQ ID NO: 8729 - DNA, 120 bp, synthetic construct
  source 1..120: mol_type = other DNA
tcatcctcccaaatagctgggaccacaggtgtgtgccattatgcccagataattttttaattttttgtagagatggggactccttatgttgtccaggctggtctcaaactcctgaactca

SEQ ID NO: 8730 - DNA, 120 bp, synthetic construct
  source 1..120: mol_type = other DNA
gccgtcacacccagccaaatatttggttttctatgtttgagttagttcacttaggataatggcctccagcttcatccacgttgttgcaaaggacatgatttcattttttttttttttttt

SEQ ID NO: 8731 - DNA, 120 bp, synthetic construct
  source 1..120: mol_type = other DNA
tcgctctgtcgccaggctagagtgtagtggtgcgatcttggctcaccacaacctccgactcctgggtttaaatgattctcctgcctcaggctcccgagtagctgggactacagacgcgtg

SEQ ID NO: 8732 - DNA, 120 bp, synthetic construct
  source 1..120: mol_type = other DNA
gtgagaagttttgttaagtggagagagaagtggaacactgagggagtgagctgggtcagggaagagtttttaaatttaaaaataaatgcattattttatacatataaaattataatttat

SEQ ID NO: 8733 - DNA, 120 bp, synthetic construct
  source 1..120: mol_type = other DNA
gaggaagttcccttctgaaagtttctgttttctcactgaaataggaagaaaagtcatcatcttgtgaagttgtggtctcagatttggggaatgtgaactgagtagggaaaggcgagctgg

SEQ ID NO: 8734 - DNA, 120 bp, synthetic construct
  source 1..120: mol_type = other DNA
agatggcaccattgcactccagcttgggcaacaagagcaaaattccgtccaaaaaaaaacaaaaacaaacgaacaaaaaaacaggccaggggcggtgcctcaagcctgtaatcctagcac

SEQ ID NO: 8735 - DNA, 120 bp, synthetic construct
  source 1..120: mol_type = other DNA
gcgagaagagcaaaactccatctcaaaaataaataaataaataataaaaagaagaaaatgaaatgagcggtggaagtagagtgatcaggtgctgaatcttccattgtagagggggaatga

SEQ ID NO: 8736 - DNA, 120 bp, synthetic construct
  source 1..120: mol_type = other DNA
tttccattctccctgggtggtccttaaagtgtctgtaaacctgtgattcccaaccttagctgccctttggaatcacctggttatgtcttaaatactgatgccagagttccacccccagag

SEQ ID NO: 8737 - DNA, 120 bp, synthetic construct
  source 1..120: mol_type = other DNA
actgagcccagagattctgatttaattgttttaggatgcgacatgggctttcagatttttcagtgctccccagtggattctaatgtgtaacctggggtaagaaccgttgctccaaggaat

SEQ ID NO: 8738 - DNA, 120 bp, synthetic construct
  source 1..120: mol_type = other DNA
acgtctgcatgtaaaatacaggttggaaaagcatttgattagctgagttgagtgaatgagcttttcaaaggaaagtctcagagaaggaaaaaaaatcagagatggacacttaggggaagg

SEQ ID NO: 8739 - DNA, 120 bp, synthetic construct
  source 1..120: mol_type = other DNA
gttgcataaatgcataaattaggttaggaccctgtcctgtgggtgtacaaccaaagacccaagcccactgctggcagcatcccctaatcaccactcccctcagaaaagaggcctattggt

SEQ ID NO: 8740 - DNA, 120 bp, synthetic construct
  source 1..120: mol_type = other DNA
tcccaaatgtccttaaaaaaagcaaaaggaaaggttctgggattagcaagaaaataggcagatacctgggtggaggagggacaaaaatgtacttgcaaaaaacaggagtgtgggggcctt

SEQ ID NO: 8741 - DNA, 120 bp, synthetic construct
  source 1..120: mol_type = other DNA
gatggcaatgatgccagtaggccagaagcaacagatggtggtcagcaccgcgatgggcatgtagtcgtgtggcgggcgcctcggctccagtagggccagccctgggccctggggcggcgg

SEQ ID NO: 8742 - DNA, 120 bp, synthetic construct
  source 1..120: mol_type = other DNA
ggctggcgccggcgggggcggggcggcggcagcgggcggcggcgggggaagtgggccctcgaagcgagtctcctgcaggtaagggtcgggtggcatgcggggcaaggtagcgcagccggg

SEQ ID NO: 8743 - DNA, 120 bp, synthetic construct
  source 1..120: mol_type = other DNA
attttgctcccttgacaacccccatctggtcatgtctccatatttcctcacaggatgtctccatgccagccagtgattgtccatctgtcactcccaatgatgccatccctgcaaaacctg

SEQ ID NO: 8744 - DNA, 120 bp, synthetic construct
  source 1..120: mol_type = other DNA
tggccccagtttcctcctctttagaagagataaatacttgtgtgtgagagagaattgtgcagagttcagaactgcgatggtctgaaaagttcccagggtttggtgaacctaccaacctag

SEQ ID NO: 8745 - DNA, 120 bp, synthetic construct
  source 1..120: mol_type = other DNA
gagagaggggctcagacatgctgagaaatccttatctctagagaaacgtctttaaatgctaagtaaaagccctagcaagtaaaagccctgaggcactagggtgtcggttaggggtcacag

SEQ ID NO: 8746 - DNA, 120 bp, synthetic construct
  source 1..120: mol_type = other DNA
ccagacttgggataagtaaacagcgggtggagcgaggcctacggacccaggccaggtgggagtctgcactcttcaaggggcctgggctgctgctcacgggtattaaagaactccgcgttg

SEQ ID NO: 8747 - DNA, 120 bp, synthetic construct
  source 1..120: mol_type = other DNA
tcaaggggtgcatctcatctgctactcgcagggtaggcgactcccctgcccctaactcctaagccctatctgaggcttgatccttatctgagggacacttcctagcgtccctttttctga

SEQ ID NO: 8748 - DNA, 120 bp, synthetic construct
  source 1..120: mol_type = other DNA
ttacatttattgagttatttgaacaggctctgttcagaattttttttttttttgagacggagtcttgttctgttgcccaggctggagtgcagtgcaccatcttggctcactgcaacctcc

SEQ ID NO: 8749 - DNA, 120 bp, synthetic construct
  source 1..120: mol_type = other DNA
atttagctgaatgtgggcacacgcttgtaatcccagctactcaggatgctgagtcaggagaattgcttgaacccgggaggcagatgttgcagtgagcggagatcctgccactgcacttca

SEQ ID NO: 8750 - DNA, 120 bp, synthetic construct
  source 1..120: mol_type = other DNA
tgggagtcatatcccaaccccttgtatcaagccagtcactaagtcctgctgactcttctcctctccatccctatcaccccctcccccactttataaaaacttttaattttgaaattctta

SEQ ID NO: 8751 - DNA, 120 bp, synthetic construct
  source 1..120: mol_type = other DNA
gtaaaaccatcacccatcagcaccatccatctccagaacttctttttccccaaactgaaaccgtatacccattaaaaaatagactgggtgtggtggctcacgcctgtaatcccagcactt

SEQ ID NO: 8752 - DNA, 120 bp, synthetic construct
  source 1..120: mol_type = other DNA
ccttgtgatccgcctgcttcggcctcccaaagtgttgggattacaggcgtgagccactgcgcctggccaatatatatctctctctatatatagatagatatatattttttgagttggagt

SEQ ID NO: 8753 - DNA, 120 bp, synthetic construct
  source 1..120: mol_type = other DNA
taggaggccaaggctgcagtgagccgagatctcaccattgcactcctgcctgggtgacagagtaagaccctgtctcaaaaaaaaaaaaaaaagttaccaaaatagcaaaaagcagtcatt

SEQ ID NO: 8754 - DNA, 120 bp, synthetic construct
  source 1..120: mol_type = other DNA
tcacctcatgaagtacattatatccagtaaggtagttttgagtgtcctccctgctacctgtctccccagtaggccttgggttcctttgggaccttagcccaccttgatttcttcctttct

SEQ ID NO: 8755 - DNA, 120 bp, synthetic construct
  source 1..120: mol_type = other DNA
gcctcccctacctcatgtcctctcatttgggggattgctccgtgctgtccctttctctcaaggccgaagttgggaagtgagaaaccatgtttttaacttgtggctgcttttgctgctgct

SEQ ID NO: 8756 - DNA, 120 bp, synthetic construct
  source 1..120: mol_type = other DNA
aggaattttggctgagacaatagggccctgtctgttctggcatggggggtggtggctgactcaattctgttccccctaagccctaacaaatgtcatgaagagaggggggcagttttcccc

SEQ ID NO: 8757 - DNA, 120 bp, synthetic construct
  source 1..120: mol_type = other DNA
gttatgtgacggtgtgggtatatgaggggagtagcagtgtgtgaaaggtgtggagtttccaggtgcttggtttgtgtgtacggtgtgaaggtatatagctaggggttttttttgtttgtt

SEQ ID NO: 8758 - DNA, 120 bp, synthetic construct
  source 1..120: mol_type = other DNA
gggcggaggtcgtgcggtgaggcaagaacatgccattgcattccagcctgggtagtaagagcgaaactccttctcaaaaacaaaaacaaaaaaaaacccaaaaaaagacaggagggtcat

SEQ ID NO: 8759 - DNA, 120 bp, synthetic construct
  source 1..120: mol_type = other DNA
gctgggaggcgcatctgcagcacttacaggtgagggatggggagatgggaccccaagaaccccaactaggacccgtactcagggtcctgagccgggcgctgtgttccaggaccatgtacc

SEQ ID NO: 8760 - DNA, 120 bp, synthetic construct
  source 1..120: mol_type = other DNA
ctgaagagctgcagccagaacaggtggctgagctgtggggccggggtgaccggatcgaatctctcagcgaccaggtgctgctgctggaggagaggctaggtgcctgtgagtcctcacact

SEQ ID NO: 8761 - DNA, 120 bp, synthetic construct
  source 1..120: mol_type = other DNA
actgtactatggggacagaaaaccagaaatgtggagactgaactggtatcccagagagtgcacgaccctgggcatctgggcaagggcaggcatgagacctctgaattagaagggtccagc

SEQ ID NO: 8762 - DNA, 120 bp, synthetic construct
  source 1..120: mol_type = other DNA
cccccaaccctggacaaccatccctgggcttgccagctgccacttctgaggcccttctcctatacaaagccttctccaatccccagttcagacatctcctcagcacccctccagcccccc

SEQ ID NO: 8763 - DNA, 120 bp, synthetic construct
  source 1..120: mol_type = other DNA
cagccagcaggccagcccggcagagccagcccacagtagctcgcgcttggcaatgggcacacagcggcctggcagtacctccatcatcccttgggcagggtgggagtgggtgaggatcgg

SEQ ID NO: 8764 - DNA, 120 bp, synthetic construct
  source 1..120: mol_type = other DNA
tccatgcccctggccacaaatccattctggccacctgcaggggatggggcaagggacaatcagcctggtttctggaggagagtggggtaggcaaggcacagaaggcagggctgggggctg

SEQ ID NO: 8765 - DNA, 120 bp, synthetic construct
  source 1..120: mol_type = other DNA
tttgccttgtaaaaatgtggctaccataaaaaaattacattgtggcttgcattatatttctgtagaacagtactggtctatacattaagttaaactcttaaaatgatgcatatgatagtc

SEQ ID NO: 8766 - DNA, 120 bp, synthetic construct
  source 1..120: mol_type = other DNA
cccatgatgggaagggctatgctcaaaggtaagcctattgccaagcgagaaggtaacaggcaatagaggaaacaggagaccctgccagttggaataccgtaggctttctgagctgctcca

SEQ ID NO: 8767 - DNA, 120 bp, synthetic construct
  source 1..120: mol_type = other DNA
tatacccacccatagagccacagttaatgacagagatggcggttctgatcacaaattagatagttatcctcttgagtagaagtgactactaaaagaagtcactgagaaagtaacgaacac

SEQ ID NO: 8768 - DNA, 120 bp, synthetic construct
  source 1..120: mol_type = other DNA
tgagacatggacacaagaatgaagaatgggcaattctgatagaaaataacacaccatttctacacagcctatggatagcattgggacaacctagttgcacacaagccattaaacatgtca

SEQ ID NO: 8769 - DNA, 120 bp, synthetic construct
  source 1..120: mol_type = other DNA
tgggcagcctgttttgccaatcgtctcccagaaactctggcatctcctccccacatctaccagtgtcctcttgcgagccccgccccagggctctccctcggtctttgcccccatctctgg

SEQ ID NO: 8770 - DNA, 120 bp, synthetic construct
  source 1..120: mol_type = other DNA
acctaattctgctcctttagtcacagtgagggtcagtgattgtaggaaaagcccaaactccccggggtccaacctgggaagaagaccctatttctgatgggcaaattataaagaggaaag

SEQ ID NO: 8771 - DNA, 120 bp, synthetic construct
  source 1..120: mol_type = other DNA
aaccttttcccgcccctaccctttgggccaatcctttcttttgaattctttgtgactggcaggcattcagaccaatagtgattaggaaaccttgaagcctgcccaacgatcgtgggcagg

SEQ ID NO: 8772 - DNA, 120 bp, synthetic construct
  source 1..120: mol_type = other DNA
agggcacgaaaatttgtatgtgtttgttggggagaggagaaaggagagggttgagtgtgttgaggatggacagagctttaggtgttggaagatcagacaagcaggaaggctaactaagtt

SEQ ID NO: 8773 - DNA, 120 bp, synthetic construct
  source 1..120: mol_type = other DNA
tggatctgggacagggtcacccagcctccagctggcaggattccctcttcctgtttctcgccatcttcttctttttttggctgctcagtatttgagctatgtctgcttcctgcccacctc

SEQ ID NO: 8774 - DNA, 120 bp, synthetic construct
  source 1..120: mol_type = other DNA
ttcagttctgcacgctcctcctcttcctcctggttttctggggccttcctgaggagaaagattggggggaatgcggcacgttgtcgttccaccccccgacccctcttcgcttgctgcctg

SEQ ID NO: 8775 - DNA, 120 bp, synthetic construct
  source 1..120: mol_type = other DNA
tgttagggataaggccagaatggggcaggaaattagagcctgtgctgtcctgcaccctagtcccagggtctgtagggcttggggagaggtctcaccgatgatgctgatgctgacagcacg

SEQ ID NO: 8776 - DNA, 120 bp, synthetic construct
  source 1..120: mol_type = other DNA
acccttctcattaggcaccaggggcttcccatccaagtgccagctaagagtccctgcagggtagcttccctctgacacacatgtccccacctggggaaagagtggtgacctcagaatcct

SEQ ID NO: 8777 - DNA, 120 bp, synthetic construct
  source 1..120: mol_type = other DNA
gcacttcctcgggttctgggaaaagttctaggacgactggggtgtggggttaaagtgctttctgcagggagggtcagtggggttgagggagtggctcaccccacagactgaggaccagca

SEQ ID NO: 8778 - DNA, 120 bp, synthetic construct
  source 1..120: mol_type = other DNA
gatgttacttttcccccacatctggctttttgcaacctcctccctctccctaccccttgattttggtgtgacaaaaagatacctcatttatggggaaattgaggaagatacatatacaag

SEQ ID NO: 8779 - DNA, 120 bp, synthetic construct
  source 1..120: mol_type = other DNA
ccacagattccagagcatacaagtggggtggggaagggaaagtgggggagcccaggagagaaacagaatagttgcaagtgggagtatgtgtgtgtgaggtgtgggagagggagagagaaa

SEQ ID NO: 8780 - DNA, 120 bp, synthetic construct
  source 1..120: mol_type = other DNA
cagagagggaagagtgtaatagagcccgtgatggtagaggatgaaccacaactctcaactcttgtggggacatgctactatactccaattatccacaaaataacattccaacacacagaa

SEQ ID NO: 8781 - DNA, 120 bp, synthetic construct
  source 1..120: mol_type = other DNA
ggctgtcacatggcatgaccccagagtcaccattgtcatggagtaccatgttgtgcagcatggcagctcagggtcttggagaggaatgggaaggagcccagtgctgggggccagcctggg

SEQ ID NO: 8782 - DNA, 120 bp, synthetic construct
  source 1..120: mol_type = other DNA
gtttccttgggaggagtgggagtggggaaagagaaaagttgaggagctagagaaacagagcagggggcctgagaacaaggagggaggagggtcagtctgcggagggaggaagcggattgg

SEQ ID NO: 8783 - DNA, 120 bp, synthetic construct
  source 1..120: mol_type = other DNA
tccccgatgtcttgcttccctcggcctcccgggacccccccgctacccccaccggggtctccgccaccgggaggctcgccagggcccccaggctccccactcaccaatcccaggcccccc

SEQ ID NO: 8784 - DNA, 120 bp, synthetic construct
  source 1..120: mol_type = other DNA
gcctcaccttcctacctttcaccccgcctgggccccccagataccagtctgcagtccagaggggaattatatttattcacacaaccaaaacatcagacagactcagcagcagtggggagg

SEQ ID NO: 8785 - DNA, 120 bp, synthetic construct
  source 1..120: mol_type = other DNA
acaggagtagagccccaaagagaacaggggccaagagaccaggaggcctgggtttgcctcctggggggatgtcttacctggtgactgaggatagtgctgtaaagctgttctctgtcctcg

SEQ ID NO: 8786 - DNA, 120 bp, synthetic construct
  source 1..120: mol_type = other DNA
agtgggggctggaaggggtgggggtgagctgggggctggatgcctgggtactgagcaggaagctgggttcctggtcagcccccccacgggccccgcccatccctgtcaacttcctccatt

SEQ ID NO: 8787 - DNA, 120 bp, synthetic construct
  source 1..120: mol_type = other DNA
caaatagagtacgggaagggttcattttggaaacttatagtttagtgcagacaaggggcaggggaaattttattttgggcataagagatatagatatggaacaatgagaggctgaggtag

SEQ ID NO: 8788 - DNA, 120 bp, synthetic construct
  source 1..120: mol_type = other DNA
gtgtgcggtttctcccttggctactagattcttgctttcagataataccctaaattatcatagggcccctaaatatacttattcttgcttttaaactatacttacatcctccatccaatc

SEQ ID NO: 8789 - DNA, 120 bp, synthetic construct
  source 1..120: mol_type = other DNA
ggaatgttggaggcagaaccgcaagctcccagggccacccaatcacagggccagtcatccgttgagaccctgcctccgcgcccggcagccactccgtatcttcctcgcattatcgcaggg

SEQ ID NO: 8790 - DNA, 120 bp, synthetic construct
  source 1..120: mol_type = other DNA
gggtcggtgagaccgggagacagtctccccccacgagattcccccccctttccacagacactgtgttccatgccagttccccagtaagctggagcggagggccagtgtggtgttgagggt

SEQ ID NO: 8791 - DNA, 120 bp, synthetic construct
  source 1..120: mol_type = other DNA
catctgttggtaagacagagtaatgggtcaatctaaaggacacaacaagggggaagggacaacatgtaagctcagagagaatcaaaacctgaggtgttgggaagctaagttctggctctg

SEQ ID NO: 8792 - DNA, 120 bp, synthetic construct
  source 1..120: mol_type = other DNA
actcagagaccagagctggcacgtggagggtgggcctgtttcttcagcctttgggtaacagcaaggatcagtgaaggttgatttgccctttcatcccttccatcacctccagaccattct

SEQ ID NO: 8793 - DNA, 120 bp, synthetic construct
  source 1..120: mol_type = other DNA
atcccagcactttgggaagctgaggcaggtggatcatatgaggccaggagttcgagaccagcctggccaacatggcaaaaccccctctctactaaaaatataaaaattagtggctgggtg

SEQ ID NO: 8794 - DNA, 120 bp, synthetic construct
  source 1..120: mol_type = other DNA
tattctttcatgtactatgaattgtctgatacaaagactattaggtattctcagtctggtagagaagataaaccatccctttgttggagggctatgacagaggttaggataatgtgctta

SEQ ID NO: 8795 - DNA, 120 bp, synthetic construct
  source 1..120: mol_type = other DNA
gatcatggcagtactggtcataggctggactgtggggtaaggagagggggactcaggacctccctaaaacctgactcttttcttcaccctagaaagaattccccatattttgtgccctct

SEQ ID NO: 8796 - DNA, 120 bp, synthetic construct
  source 1..120: mol_type = other DNA
gcctttaggagctggtggggtcaggcagtcaggacccccatagccactgaggcaggcacagcgtggtgggaagcctggcttaggggagggcagacacaggcctccgtggtggcagtgatg

SEQ ID NO: 8797 - DNA, 120 bp, synthetic construct
  source 1..120: mol_type = other DNA
caatgtcagtgtatcaggaaccaaagcttaagattagtctaattccatgcatctgaggtccataaatacatatacaaacacacacagagttaaaataacctatctgaggccacccaccac

SEQ ID NO: 8798 - DNA, 120 bp, synthetic construct
  source 1..120: mol_type = other DNA
tcctttgagcagttctgtccatcgtagcctggggcacactgcagacaaagaggattagacagggaaccagtggatgagcccaacccagcactacaagggacccagctcaagatagtctgt

SEQ ID NO: 8799 - DNA, 120 bp, synthetic construct
  source 1..120: mol_type = other DNA
aaaaaaaaaaaaaaaaaaaaagaataagtaaagctgagtaatgggtgcccagaggtttactactgatcagtatactgcttttgtttatgtttgaaaatgttcataataaaaggttaaaaa

SEQ ID NO: 8800 - DNA, 120 bp, synthetic construct
  source 1..120: mol_type = other DNA
atgacagctataaaacattgatgaaataaattgaagaggacacaaaaaaatggaaagatatcctgtgttcatggattggaagaatgaatactgctaaaatgtctgtgcttaccaaagtga

SEQ ID NO: 8801 - DNA, 120 bp, synthetic construct
  source 1..120: mol_type = other DNA
cagctggaaacttgaagccactaaaaaaaaaattcagccgggcacggtgggtcacacctgtaatcctcaaacacaaggtcaggagtttgagaccagcctggccaacatggtgaaaccccg

SEQ ID NO: 8802 - DNA, 120 bp, synthetic construct
  source 1..120: mol_type = other DNA
tgcagtgagctgagatcaagtcactgtgatccagcctgggcaacacagcaagactctgtctcagaaaaggaaaaaaaatgcaaaaaatagcagatgctggcaaggatgcagagaaagggg

SEQ ID NO: 8803 - DNA, 120 bp, synthetic construct
  source 1..120: mol_type = other DNA
ctctgtctccaaaaacgagagagaaaaaaaaaaagaaaccaaaaaactcacatgtaccccatagatacgtatgactaccgtttgtcaataacaaaagaaaataaaatggcaaccacacac

SEQ ID NO: 8804 - DNA, 120 bp, synthetic construct
  source 1..120: mol_type = other DNA
ccgttctggcaaggcctggactcacatgggttcacgtgatcctggcacaggctgccttggaatccaggggggcagtggcagaaataggaggggccgctgtcgacacagaggcctccattg

SEQ ID NO: 8805 - DNA, 120 bp, synthetic construct
  source 1..120: mol_type = other DNA
ggagttaataactcctggcactgaagaaattagaccatcgagttttacctctctcctcaccctttctgccagaatattggagacatacccctaaagcttatcataatgttaaagcaactg

SEQ ID NO: 8806 - DNA, 120 bp, synthetic construct
  source 1..120: mol_type = other DNA
ggggtgggagggagcgtgaggcaggacatagcatcagattctcagcccagagatggtcctctgcccactccagctcctcgaaatcccttacttcaaaaaccttctcctgaatggcctggg

SEQ ID NO: 8807 - DNA, 120 bp, synthetic construct
  source 1..120: mol_type = other DNA
gttcaattaaattttaaaaaatatgacacaagcataccctccttagttcttccattctcctgtggaccccagccccatgacacagtgggcactcaccagacacacagtagtcagtgctgg

SEQ ID NO: 8808 - DNA, 120 bp, synthetic construct
  source 1..120: mol_type = other DNA
tacttattttctgtctttctttagaatgaaagctctacgagagcagttgctttatctcttttgctttgtgtttcccccagggcctggaacagtagccacacaaagtaggtgctcagcaga

SEQ ID NO: 8809 - DNA, 120 bp, synthetic construct
  source 1..120: mol_type = other DNA
ttcattgggccaaagccacatccttcattgggccaaagccacttcttatgcttgccttactcactccctatgaacccatgaacctgtccttcaatgggtccctattgcctttaagatatt

SEQ ID NO: 8810 - DNA, 120 bp, synthetic construct
  source 1..120: mol_type = other DNA
tcctaatctcgggtgatccacccgcctcggcttcccgaagtgctgggactataggcgtgagccaccacgcccagcctctgcttatctttcaagactcatctcagccatcacctcctccat

SEQ ID NO: 8811 - DNA, 120 bp, synthetic construct
  source 1..120: mol_type = other DNA
gggaggcacagcatggcgccttcccttgccaggaaaggtgaacttgcagagcttcccagagaagacacctggggcaggtgagcgtggggtgacaggagatgatgcagaaaaggtgaagct

SEQ ID NO: 8812 - DNA, 120 bp, synthetic construct
  source 1..120: mol_type = other DNA
cgcagtgtgtggccctgctccttgaggtgtgaaaggccagggaacagggtgcttgctggggacctgcgggaggactacaaggctttctggtggccattcctgtgtatacagagggcgggg

SEQ ID NO: 8813 - DNA, 120 bp, synthetic construct
  source 1..120: mol_type = other DNA
ccttgaatctctacatgggagagtttctataatcagagggagcattctgggttgacctgagcaaaggctgcagcacagaaagtttatgaactgctcttctaccctctcttgctgggctgc

SEQ ID NO: 8814 - DNA, 120 bp, synthetic construct
  source 1..120: mol_type = other DNA
tggtggcaggtgggccccgaatagccaggctgacacaggcagagtgtggagcctgtgagggggttggtgctgcattgggcatccccatggcacggctggctcagacacatgtcttccaag

SEQ ID NO: 8815 - DNA, 120 bp, synthetic construct
  source 1..120: mol_type = other DNA
cagaggcactggaaggagcccagggtgttatggcaggaggtgcctttggggcagggtcctgggtcctggaagcactcgttgacatcacgttcacaggcatggccctcgaagcccggtggg

SEQ ID NO: 8816 - DNA, 120 bp, synthetic construct
  source 1..120: mol_type = other DNA
atccttcccttcccggtgcccctcccaccactgcagtcttcccaggtgatataatggctccctccactcagaatgggagccattcagatgctcagaatgcaaaagtctggaggacccctg

SEQ ID NO: 8817 - DNA, 120 bp, synthetic construct
  source 1..120: mol_type = other DNA
tgctctccctccccctttctctccagtctcccactcctgcaaggcacactcactggcaggtcccttgtcccagagacaggctcaggcaggtgcctccattggcacagggttctgggaaac

SEQ ID NO: 8818 - DNA, 120 bp, synthetic construct
  source 1..120: mol_type = other DNA
tgagacacatagcagcagcagcagcagcagcagcagcagcagtgaagggggctgcattccacagccccttctccaagccccggtccctgtccctcttcaggcagggaccctcagagctct

SEQ ID NO: 8819 - DNA, 120 bp, synthetic construct
  source 1..120: mol_type = other DNA
tggtgttgaggcactcatggctgctgctggtgcacctgagagccttcccctaccggggaatatacttcaccagcaccactttcttcctttttttagctttttattttaaaatacttttaa

SEQ ID NO: 8820 - DNA, 120 bp, synthetic construct
  source 1..120: mol_type = other DNA
atgtctggtgtttatgcatttttgggcacgagtaccagtgtatcacattaggaagcccgtgagccagcatcatttataatggtcacccagtattctactagttcatttaaaccaatttcc

SEQ ID NO: 8821 - DNA, 120 bp, synthetic construct
  source 1..120: mol_type = other DNA
atgtcaacattctttttaactgtttaatggctattcgtgtttcctgtccatgcttttgtgagtttcctgtccatgcttttgtcccattgtcctattggtgtcattgtcattttcccatca

SEQ ID NO: 8822 - DNA, 120 bp, synthetic construct
  source 1..120: mol_type = other DNA
taggccactgtagccatagagataagcaagagtgccaggtgcagcggtggctcatgcctgtactcccagcactttgggaggccaaggtgggagaatcacttgatcccaggagttcaagat

SEQ ID NO: 8823 - DNA, 120 bp, synthetic construct
  source 1..120: mol_type = other DNA
aaaaaaaatatgtatatccagaatctgagcacttctcatctcttctcatccctattgccaatatcctagtccaagcctatgtcatctcttgcatctcctaacttgtcttcctgctgctgt

SEQ ID NO: 8824 - DNA, 120 bp, synthetic construct
  source 1..120: mol_type = other DNA
gaggaggataccattacctccacccacagtgagatgtggagctcagagaagttgagtcacttgtacaagttcatatagctactaagtgtgtttcagatgtgagttattcacatccaaacc

SEQ ID NO: 8825 - DNA, 120 bp, synthetic construct
  source 1..120: mol_type = other DNA
ggtcaataagagatggcacctgtagtttcaaaaataagtaccaaattaaactgctcatcaccacacccctaccatctctaattaggagtattgtgatagtatcctacctggctcccttgc

SEQ ID NO: 8826 - DNA, 120 bp, synthetic construct
  source 1..120: mol_type = other DNA
caacttaaaattgatcatagacctaaatgtaagtgcaaaactataaaactattagaaaaaggcctaaaagtagatattcatgatgttgggctaggcaatgatttcttacatatgatactt

SEQ ID NO: 8827 - DNA, 120 bp, synthetic construct
  source 1..120: mol_type = other DNA
aatagacatttcaccaaagaagatacataaatggccatcaaatacatgaaaacatactgtttggggttcacttagcttcttgcatcaatcagttaatatcttttgccaaatttgggagtt

SEQ ID NO: 8828 - DNA, 120 bp, synthetic construct
  source 1..120: mol_type = other DNA
agccttcaagtagctggtaccacaagtacacaccaccatgtctggctaattaaaaacattttttttttccaaggggctgggaccacaagtacacactaccattcctgggtaattattatt

SEQ ID NO: 8829 - DNA, 120 bp, synthetic construct
  source 1..120: mol_type = other DNA
tgattccaacatttaagtcaacttgggtgttgatgtctgttaattgtcttttcttattcaagattttcccgattcttggtatgacaagtgattttcgcttgcatcctgcacattttggat

SEQ ID NO: 8830 - DNA, 120 bp, synthetic construct
  source 1..120: mol_type = other DNA
ttttccatatgactcagcaattgggttcctaggtatctacctaagaaaaatgaaagcaggccgggtgtggtggctcacgtctgtaatcccaggaatttgggaggccgaggtgggcggatc

SEQ ID NO: 8831 - DNA, 120 bp, synthetic construct
  source 1..120: mol_type = other DNA
gctcaggtttggaatgggggctaagtgcaaaggaatatgaaatttctttttggtgtgatggaaatgtttcaaaattagattgtggtgatagttttacaactctataaatatactaaaatc

SEQ ID NO: 8832 - DNA, 120 bp, synthetic construct
  source 1..120: mol_type = other DNA
gtgagtcaaaatggcatcactgcactccggcctgggcaacagagcgagacactgtctaaagaaaaaaaaaattcaggaccactctggttccatctctactcccaacctccataccagatt

SEQ ID NO: 8833 - DNA, 120 bp, synthetic construct
  source 1..120: mol_type = other DNA
ggtgtctttttgtctgttccaggattccatatttcttttccttttttttttgagtcgaaattttgctcttgttgcccaggctggattgcaatggtgtgatcttggctcactgcaacctcc

SEQ ID NO: 8834 - DNA, 120 bp, synthetic construct
  source 1..120: mol_type = other DNA
ttactgaggctccatttatgccatatttgggcagtgcgagcctcaagttgataaaatactaatatctttgatgcctttcttgttttctggtgataagatgttcaggctcatcttgtacat

SEQ ID NO: 8835 - DNA, 120 bp, synthetic construct
  source 1..120: mol_type = other DNA
aggcatggagtcggtgggaagttggaggtagccagagctaggcttttgacaggcaggcatgatggagggaatgagggaaataggagttgagatgcaagatagctcttacaacaatgcttc

SEQ ID NO: 8836 - DNA, 120 bp, synthetic construct
  source 1..120: mol_type = other DNA
cagccatattaaaactcttgtgtaataaattcgcagatatggaaatccttcattttccacaaaaaaaccccatcctgtgtagataccaggtgacctcatcacaagagtcaaaatgaaagt

SEQ ID NO: 8837 - DNA, 120 bp, synthetic construct
  source 1..120: mol_type = other DNA
ttggtgggtagagcagaagagtatataatagtgaaaaaaacacttagcttaggagtttgacacagtgtgatgttggtcagactagctaacctctctgagcctcactcagttccttcatct

SEQ ID NO: 8838 - DNA, 120 bp, synthetic construct
  source 1..120: mol_type = other DNA
cacaactggtcttccctgtgtgtttggtaaacaccaaaggaggtaaactctccaatcctggcctgtgctgatggtgaggcgggagaaggcttccctgggtcccaggtccccaacctggca

SEQ ID NO: 8839 - DNA, 120 bp, synthetic construct
  source 1..120: mol_type = other DNA
ttttttttttttttaagacagagtcttactctgttgcccaggctggagtgtagtggcatgatcttggctcactgcaacctccgccttccgggttcaagcgatttccggctaatttttgta

SEQ ID NO: 8840 - DNA, 120 bp, synthetic construct
  source 1..120: mol_type = other DNA
taaagtgaggacagtaaggaccatctcatggtattaagctaaaacattcacggaaataaatatgtaatgctcagagtaagatgccacctagtgaacagtgggcctgagtatttggtggtg

SEQ ID NO: 8841 - DNA, 120 bp, synthetic construct
  source 1..120: mol_type = other DNA
ttttattgcatctttgttccaaatccactccatctttgtcctgccttgtggttctggagctggaccctataaacatttcttctttgccattgggcacaacgttagactttgacagtaaat

SEQ ID NO: 8842 - DNA, 120 bp, synthetic construct
  source 1..120: mol_type = other DNA
tgtattgtttggccccttctcagaaatcaccttttttgccatcttcctttgtctttgcctttttgtgtcgttctgtcatggagaaggataccataggatagaacacaggcctaggatccc

SEQ ID NO: 8843 - DNA, 120 bp, synthetic construct
  source 1..120: mol_type = other DNA
tacctttggggtgattctagatcttgtaaaaaactgcttggcatctctttggagataccttgtgcatctgtggttaagtcataaccctagttaaggctcattggtttcaggtgggaggtt

SEQ ID NO: 8844 - DNA, 120 bp, synthetic construct
  source 1..120: mol_type = other DNA
tcctcccagctcagcctccccagcagctgagaccactacgcccagctaatttttgtatgtttttgtagagatggggtcttgccatgttgcccaggctggtcttgagctcttgggctcaag

SEQ ID NO: 8845 - DNA, 120 bp, synthetic construct
  source 1..120: mol_type = other DNA
tatgcatttggtctaaattagtcaaaggttttgcaaggctacatcaaggatgcagttatattattgggcctaagccatagggtgaaagatatggcccaggtagagagtgagagtgaaaag

SEQ ID NO: 8846 - DNA, 120 bp, synthetic construct
  source 1..120: mol_type = other DNA
tcttgactgcattcatatgtgtttgaggggtaaggtatgggcatgggaaataggaaagaggttgaagatgaagtatggacttctgggagacaggagatgatggaatctagagcaggatac

SEQ ID NO: 8847 - DNA, 120 bp, synthetic construct
  source 1..120: mol_type = other DNA
catgcagactttttaatcttctgacaactgagagggcagagttaatttgatctagtaagcggatgtttgaattgtgggtgcaactgaattgactgatcatggtttaggctagaaagtttc

SEQ ID NO: 8848 - DNA, 120 bp, synthetic construct
  source 1..120: mol_type = other DNA
tctattcctggtttgtttatttatttattttatttatttatttgagatggagttttgctcttgttgcctaggctggagtgcaatggcatgatctcggctcactgcaacgtctgcctgctg

SEQ ID NO: 8849 - DNA, 120 bp, synthetic construct
  source 1..120: mol_type = other DNA
ccagttttccagaaaagcattacagtctgttgctgttccctgttccccttgtctgcctgattatttattttcagagtcattttagcagtgtttggggagggagttataccttttattcct

SEQ ID NO: 8850 - DNA, 120 bp, synthetic construct
  source 1..120: mol_type = other DNA
tgtgtcggacccaaggccttggtggcatgggctcatgagggaatctcctgatccaccagtcgcaaagatccatgggagaagcatggtttcctgaggtcgcaccatcactcacttcttccc

SEQ ID NO: 8851 - DNA, 120 bp, synthetic construct
  source 1..120: mol_type = other DNA
tattagaagttgctttagctttttgaattacacatttatgtctttcattaagtttgagaagtcttcaatcattattttgttaaaaagttttttcagaccagcctgggcaacatgacaaaa

SEQ ID NO: 8852 - DNA, 120 bp, synthetic construct
  source 1..120: mol_type = other DNA
cttacataggtatacatgtgccctggtggtttgttgcacccatcaacctgtcacctatattaggtatttctcctaatgttatccctcccctaactccccactctctgacaggccccggtg

SEQ ID NO: 8853 - DNA, 120 bp, synthetic construct
  source 1..120: mol_type = other DNA
ttgttgccattgcttttagtgttttggacatgaagtctttgcccatgcctctgtcctgaatggtattgcccagattttcttctaggagttttatggtcctaagtcttatgttgaagtttt

SEQ ID NO: 8854 - DNA, 120 bp, synthetic construct
  source 1..120: mol_type = other DNA
ccttttccgtatctattgagataatcatgtggtttttgttattggttctgtttatgtgatggattacatttattgatttgcgtatgttgaaccagcctcgcatcccagggatgaagccaa

SEQ ID NO: 8855 - DNA, 120 bp, synthetic construct
  source 1..120: mol_type = other DNA
cattgtgtcttcattttcattggtttcaaagaacatttttagttctgccttcatttcattatttacccagtagtcattcaggaacaggttgttcagtttccatttatttgtgcagttttg

SEQ ID NO: 8856 - DNA, 120 bp, synthetic construct
  source 1..120: mol_type = other DNA
tctggagctctcgtaaggcaggtctggtggtgacaaaatccctcagcatttgcttgtctgtaaaggattttatttctccttcccttatgaagcttagtgtggctggatatgaaattctgg

SEQ ID NO: 8857 - DNA, 120 bp, synthetic construct
  source 1..120: mol_type = other DNA
tttttgtgctttgtttttcagctccattaggtcatttatgttcttctctacattggttattctagttaattcgattaacctttttttaaggtttttagcttctttgcattggcttagaac

SEQ ID NO: 8858 - DNA, 120 bp, synthetic construct
  source 1..120: mol_type = other DNA
tctcagattgctgctgtgctggcagcaagaatttcaagccagtggatcttagtttcctgggctccatgggcgtgggaccagccaagccagaccacttggctccctggcttcagcccctct

SEQ ID NO: 8859 - DNA, 120 bp, synthetic construct
  source 1..120: mol_type = other DNA
tgagttttcattttggttattttattttccagctataaaatttccatttgcttctttctttctttttttttttagaaatgttcatctttttattttaagttccggggtacatatacagga

SEQ ID NO: 8860 - DNA, 120 bp, synthetic construct
  source 1..120: mol_type = other DNA
gttttataatcctttgggtatatacccagtaatgggatggctgggtcaaatggtatttctagttctagatccctgaggaatcgccacactgacttccacaatggttgagctagtttacag

SEQ ID NO: 8861 - DNA, 120 bp, synthetic construct
  source 1..120: mol_type = other DNA
ttccattaaaaataatttcgaagttattcataattgcttgttggaacattttttatgatagctgctgcaaaatacttgtgagataattgcaatacctgtgtcatcttggtgttgacactg

SEQ ID NO: 8862 - DNA, 120 bp, synthetic construct
  source 1..120: mol_type = other DNA
gccaccacgcccagcctctgattagtttcttacatgtactgctcacaagaatttcatacacagattcagaatattcctttctcttttttctgtaatcttaccagccccacatactttagt

SEQ ID NO: 8863 - DNA, 120 bp, synthetic construct
  source 1..120: mol_type = other DNA
ttttgaaagaagaaatttaattttgatgctcttctttaaaaccaagggctccacattgtctgtaagataaataattaaagctttatttactatggcattcaagggacttctcaattgggc

SEQ ID NO: 8864 - DNA, 120 bp, synthetic construct
  source 1..120: mol_type = other DNA
gtggtttcatcagaattgccactggaccacagggtacttcatatgataaagaagatgtttctttccacagtcattcagtccaccattgaatagatctgaaaggtgtaaagttcactgata

SEQ ID NO: 8865 - DNA, 120 bp, synthetic construct
  source 1..120: mol_type = other DNA
gacttaatagacttaaatagatagttattatttggaatggactacatccaaacaattatgaggaacaattgtgaggaactcagttccagaaacttttgtatccagtaactgataaataga

SEQ ID NO: 8866 - DNA, 120 bp, synthetic construct
  source 1..120: mol_type = other DNA
atttatttctaaacacattgcagaacatggaatttagggaggacaaattttgatgaatcaaataggtatagtgatatgggtagaagattggtttactttatcataattccttaaatacat

SEQ ID NO: 8867 - DNA, 120 bp, synthetic construct
  source 1..120: mol_type = other DNA
ccctggaacaaatagacttaacagatatatacagaacattttacccaacaactgcagaatatacgttcaattcttcagcacatggaactttctccaggatagaccacatgatagagcaca

SEQ ID NO: 8868 - DNA, 120 bp, synthetic construct
  source 1..120: mol_type = other DNA
caaagaagaattggtaccaatcctattgacactattccacaagatagagaaagaaggaatcctccctaaatcattttatgaagccagtatcatcctaataccaaagccaggaaagaacaa

SEQ ID NO: 8869 - DNA, 120 bp, synthetic construct
  source 1..120: mol_type = other DNA
aataattcagcaaatttcctggatacaaaattaatgtacacaaatcagtagctctcctgtacaccaacagtgaccaagctgagaatcaaatcaagaactcaaccactttttacaatagct

SEQ ID NO: 8870 - DNA, 120 bp, synthetic construct
  source 1..120: mol_type = other DNA
aaatcttcacaatctatacatctgacaaaggactaatatccagaatctacaacaaactcaagcaaattagcaagaaagaaagaaacaatctcatcaaaaattgagctaaggacatgaaca

SEQ ID NO: 8871 - DNA, 120 bp, synthetic construct
  source 1..120: mol_type = other DNA
aagaactagaagtagaactaccattcaatcgagcaatgccactagtgggtatctacccagagcaaaataagtcattatacaaaaaagatacttgcacatgcatgtttatagcagcacaag

SEQ ID NO: 8872 - DNA, 120 bp, synthetic construct
  source 1..120: mol_type = other DNA
ttgaactcttgggctcaaggaatccactcgcctctgcctcccaaagtgccaggattataggcatgagccactgcatctggcctcttggcctccttttggaatgatttttataaattattc

SEQ ID NO: 8873 - DNA, 120 bp, synthetic construct
  source 1..120: mol_type = other DNA
aactcatagataatgtgccaagttggcaatgaatggactgttggcaactctatacccacttatacccactttcaatcatatgccaatcagtggtgggttaatgcaaattgaggagtagtt

SEQ ID NO: 8874 - DNA, 120 bp, synthetic construct
  source 1..120: mol_type = other DNA
agcaaatcgtaattttagaaacagtaaatattagtaattggctaaaactcaataggctaatcaggacattagacactgaaaagaaaatcagtgaattggaaggtaaacttgaggaagttg

SEQ ID NO: 8875 - DNA, 120 bp, synthetic construct
  source 1..120: mol_type = other DNA
tcaaaccacaaagcaaggattaagatacaaagagaaatagtgagcaatattggtaaatatatgaatatatctgaaaaacacagactataaaaataattttatcatgactaattttggggt

SEQ ID NO: 8876 - DNA, 120 bp, synthetic construct
  source 1..120: mol_type = other DNA
ccattcactcccctggaaagggggctgaagccagggagccaagtggtctcgctcagtgggtcccactcccccagcgcccagcaagctaataaccactggcttgaaattctcactgccagc

SEQ ID NO: 8877 - DNA, 120 bp, synthetic construct
  source 1..120: mol_type = other DNA
tacttgggaggctgaggtgggagaatcactcgaacctggaaggtggaggttgcagtgagccgagatcacgccgctgcactccaggttgggcaacagagcgagactttgtctcaaaaaaaa

SEQ ID NO: 8878 - DNA, 120 bp, synthetic construct
  source 1..120: mol_type = other DNA
ttacctataaagggaagcccactagactaacattggctctctctgcagaaaccctataagccagaaaagagtgggggccaatactcagtattcttaaagaaaataattttcaactcagaa

SEQ ID NO: 8879 - DNA, 120 bp, synthetic construct
  source 1..120: mol_type = other DNA
tccctgggatgcaaggctggttcaacatacgcaaatcaataaacataatccatcacatgaacagaaccaatgacaaaacccacatgattatctcaatagatacagaaaaggccttcgatt

SEQ ID NO: 8880 - DNA, 120 bp, synthetic construct
  source 1..120: mol_type = other DNA
taccaaaactgatatatagaccaatagaacagaagagaggcttcagaaataacaccacatgtctacaaccatctgatctttgacaaacctgacacacacaagcaatggggaaaggattcc

SEQ ID NO: 8881 - DNA, 120 bp, synthetic construct
  source 1..120: mol_type = other DNA
cccatcaatgatagactggataaagaaaatgtggcacatatatactatgcagtcataaaaaagaatgagttcatgttctttgcaggaacatggatgaagctataaaccatcattctcagc

SEQ ID NO: 8882 - DNA, 120 bp, synthetic construct
  source 1..120: mol_type = other DNA
aacatattccaaaagagccaagaaaacaaagaacaaagagcagaatgagacatgcttaatagatactcaaactttctatataccctgtataatcaaagcagtatgatatgacgtttttat

SEQ ID NO: 8883 - DNA, 120 bp, synthetic construct
  source 1..120: mol_type = other DNA
gtagtattccatggtatatatgtaccacatttctttatccagtccactactgatgggcacctaagttgattccgtgtctttgctattgtgaatagcactgcgatgaacatatgaacgcac

SEQ ID NO: 8884 - DNA, 120 bp, synthetic construct
  source 1..120: mol_type = other DNA
ccagcctgggcaacataagacctcatctctagcaaacctaaaaaataaaaaattagttgggcatggtggcgtgcatttgtagtcccaactactcaggaggccaaatggaaggattgcttg

SEQ ID NO: 8885 - DNA, 120 bp, synthetic construct
  source 1..120: mol_type = other DNA
tatagagatgtgtattgcagtatcatttggcaatggcagaatcatttagccaaaggcaaaaggttggaaacaagctaaatgtctatctttaaggaaatggttgaataagcagtaattcat

SEQ ID NO: 8886 - DNA, 120 bp, synthetic construct
  source 1..120: mol_type = other DNA
agccccacacccagccaggaaattgcatttttaatgcactactaactcagggagtctttaattgggataggagccgcattaactgattttacataaattgtttgtttcctaatattttgt

SEQ ID NO: 8887 - DNA, 120 bp, synthetic construct
  source 1..120: mol_type = other DNA
actagttagctgtcacatggaccagaggggctataggaaaaatgacatgagaatgatgaaaatctaatacttttaactatgtgaaaatctttctggtcaaaaatgttccctgataacagc

SEQ ID NO: 8888 - DNA, 120 bp, synthetic construct
  source 1..120: mol_type = other DNA
gggaattctgcaacttcctgcacacttgagtctttctctcctgaaggcatttagtttatccacatcccatgattgaactaaatgtatattcagggtgtgggctaaccagcacagtattga

SEQ ID NO: 8889 - DNA, 120 bp, synthetic construct
  source 1..120: mol_type = other DNA
attgtagaatgcttccagctgcctgaagagtaaaatataaattcctggcttgtttttcaaatccttttatattctccttttcaaaattataccccaggatgcctcccatgaatcttccgt

SEQ ID NO: 8890 - DNA, 120 bp, synthetic construct
  source 1..120: mol_type = other DNA
tttcttgggcttcctgtccttttagtacacctgactcactcttctttacttgggattccagtgtttctggtacactcacctcagtgttctttacttgggattctggtcctttcagtacac

SEQ ID NO: 8891 - DNA, 120 bp, synthetic construct
  source 1..120: mol_type = other DNA
ctaaaatgatggttctctgtacataaaattataaaagtatcgataaaattctggactattttcaataatttggaagattaatgagagaaaaggtaaaatgtactgtaaatgaactgacat

SEQ ID NO: 8892 - DNA, 120 bp, synthetic construct
  source 1..120: mol_type = other DNA
aaagaagacctaggtttattattcctgctagctgggtttaatgggtttattaaggtaaatcagttaatcctcaaagattcactgtttttatatttagtttgatctgctcactttgtagag

SEQ ID NO: 8893 - DNA, 120 bp, synthetic construct
  source 1..120: mol_type = other DNA
taacattaggaaaattacagtaatgttttctgaacctttttgtatatgtccccacctagagttcttcattaaaatatggttactgacattttattctagacaatcaattttcagtttcct

SEQ ID NO: 8894 - DNA, 120 bp, synthetic construct
  source 1..120: mol_type = other DNA
aattctatctaaatgatacttaacatagaaaatagaatgtgggctttattaggaaactaatcttaggttcttaatccagtggttgtcagggagagcacaattggatctagactgtaaaag

SEQ ID NO: 8895 - DNA, 120 bp, synthetic construct
  source 1..120: mol_type = other DNA
ttcaacttcatctccctgccttcctttccctccaaacccactctctttctagtgtgaactgagaaagaagaatgaggcttaaacacgattaaatataaggacatattttgtgtttgtgtc

SEQ ID NO: 8896 - DNA, 120 bp, synthetic construct
  source 1..120: mol_type = other DNA
gagattctttttcagagcctagaagatggccagagattgtggcaccctttcatatgagcttcatcttctctacagcaatctcttaaattgtagttatttaaaaacttggggcctggcaca

SEQ ID NO: 8897 - DNA, 120 bp, synthetic construct
  source 1..120: mol_type = other DNA
aacatttgggaaaaagaacttaaaggtcctaggcacagaaataggtaaggcaaggaaatgatccaaacttactgatttttccagaactgtccactgaaagagataaaggcaaacacatca

SEQ ID NO: 8898 - DNA, 120 bp, synthetic construct
  source 1..120: mol_type = other DNA
aaattagctgggtagggtggcaagcacctgtagtcccagctgctcagaaagctgaggtgggaggattgcttaggaagtcaaggctgcagtgggccatgatcacaccagtgcactctagcc

SEQ ID NO: 8899 - DNA, 120 bp, synthetic construct
  source 1..120: mol_type = other DNA
cattaaaaacatttgtagaaaaaatttgctcaccccagccctacaagaaactaatgtaataaaaatatattaggaacttactagtgtgaacttgaggtattcctgaaaatcaaaacaaga

SEQ ID NO: 8900 - DNA, 120 bp, synthetic construct
  source 1..120: mol_type = other DNA
atgatataatgtccctcttttgtccctggtaaatttctttgcatttaggtccactttacgtgatattaatgtagccacatctgcctttttttttgaaaaaattaatgtttcatggcatat

SEQ ID NO: 8901 - DNA, 120 bp, synthetic construct
  source 1..120: mol_type = other DNA
ccacttggaacaccagaaaacagacctttgggaaacattaaatcttctaggaatatgctatctcttattaagtcaattttaactccactttaataacttaaatatccaggccattttgaa

SEQ ID NO: 8902 - DNA, 120 bp, synthetic construct
  source 1..120: mol_type = other DNA
catcttagtcacagattagaagaagttaatgacttatgtctttagatgaatgcacacttacacgtagacatatagcttagaaggtatattggctctggaaaactttgtaattttcagttg

SEQ ID NO: 8903 - DNA, 120 bp, synthetic construct
  source 1..120: mol_type = other DNA
tctgtgttcctcagtcatctcttgattctaactcctgcgcataatttccccatatcccccctcccatagaaaccctccagccagcctgaaagacattagaagggtggtactttagaatgc

SEQ ID NO: 8904 - DNA, 120 bp, synthetic construct
  source 1..120: mol_type = other DNA
ttctctctaaatgatattttggttgtatcctaagtgttttgacaagtaatgattttatactcacttatttctatatattctgtaatttctctcacaattttgtttgtaacctgtggatta

SEQ ID NO: 8905 - DNA, 120 bp, synthetic construct
  source 1..120: mol_type = other DNA
cttatttttttataggaaaatagaaaaattaaaaaaatttaattcttttaattacatctgagagtttctagcttttaatctgtgagtttaatctactattgtataatattgtgctaagca

SEQ ID NO: 8906 - DNA, 120 bp, synthetic construct
  source 1..120: mol_type = other DNA
tacaggcatgcaccaccacactcacctgatgtttgtattttttgtagagacaggatttcaccatggtgcccagcctggtctccaactcctgagctcaagcaatccacctgccctggcctc

SEQ ID NO: 8907 - DNA, 120 bp, synthetic construct
  source 1..120: mol_type = other DNA
attattgctaatgagatgtctagtgttaacatgattttttgcaggtgatctgcttctctggttgtctttatgatttgctttttaatgtctgtcagcttactacgatgagttttggcacat

SEQ ID NO: 8908 - DNA, 120 bp, synthetic construct
  source 1..120: mol_type = other DNA
agaccccccctttactggttctccttctttctccctgctcactacttctctatatgcatagttagatttttctcattctaaacttctaaaactgattaatccttaccccttcatttttac

SEQ ID NO: 8909 - DNA, 120 bp, synthetic construct
  source 1..120: mol_type = other DNA
gtattgtacaagacatttgggtgtctgctctagatgacatcaaaggacagtcagtctcaggttctcagagaaaagaacctacaactaacagaggaaggagattgcatgccccaaatccat

SEQ ID NO: 8910 - DNA, 120 bp, synthetic construct
  source 1..120: mol_type = other DNA
gttttgcacctccatagcaggcctgtgcatgttgtacttgttccttttgcctgaagcacactcccccttctataccatctttctttagtctgttactcttcttatttttctacatgaatt

SEQ ID NO: 8911 - DNA, 120 bp, synthetic construct
  source 1..120: mol_type = other DNA
tttcctcatcccctcaccattcctcccaagagcttaactttagctttcctttctttatatgtgttcctatattccatttctgctccttggaaatcactcttaccctccttctttatgctt

SEQ ID NO: 8912 - DNA, 120 bp, synthetic construct
  source 1..120: mol_type = other DNA
tcgctcatttactgacctgcctgggctcttttggcatctgcgtttttaaccttgacaggaactttgggttttaatattaatgtgatttaatttcaggatgaggaatctcagctgatattg

SEQ ID NO: 8913 - DNA, 120 bp, synthetic construct
  source 1..120: mol_type = other DNA
ggtttccttaaaggccctcttcatttactggacccaacagctttgggtatagtctcgggtagagactgccatatctttctgtttcctttgaatagcattataatgtttgagagaacactg

SEQ ID NO: 8914 - DNA, 120 bp, synthetic construct
  source 1..120: mol_type = other DNA
aaatacaaaaaaatttctcctccctattctgagtcagtgtgcctgagactggccactaggagaggagagggttttaagaggggttggcctgagtgtttttaataatttaacatgattaga

SEQ ID NO: 8915 - DNA, 120 bp, synthetic construct
  source 1..120: mol_type = other DNA
acagtgtggcaattcctcaaagaccccaaaacggagctaccattcgacccagcaatcccatttctggctatatgcccaaagtaataaaaattgttctatcataaagaaacacacgtgtgt

SEQ ID NO: 8916 - DNA, 120 bp, synthetic construct
  source 1..120: mol_type = other DNA
ggttctaatgcatcattaagggacagagaggagatattttccagaaaacatgcttgaagcctgctaaggtcagattatttaattaattagtcctaaatatcccaggcatctagaacctaa

SEQ ID NO: 8917 - DNA, 120 bp, synthetic construct
  source 1..120: mol_type = other DNA
taatgcctggcctacaataggccaatatatatttgttgaatacatatatttttaaaatgcattaatatctttgaagactttttcttttttttcctttagtgtttgacttgttcagtgctg

SEQ ID NO: 8918 - DNA, 120 bp, synthetic construct
  source 1..120: mol_type = other DNA
gtgcaaggttgttatataggtaaacttgtgtcatgggggtttgttgtacagattatttttctacccagatattaaatctagttatttttcctgatcctctcccgctcccaccctccaccc

SEQ ID NO: 8919 - DNA, 120 bp, synthetic construct
  source 1..120: mol_type = other DNA
ttgctaaggcttcagaaagatgtgtggatgaggactttggagagacactggctaattctgtgttaatagctccaattctcctctctcaaataccaatgcctttgtcctaacattattgaa

SEQ ID NO: 8920 - DNA, 120 bp, synthetic construct
  source 1..120: mol_type = other DNA
atccatttaatttttctcaaatagaaaacacatagtattatctaatatattttgctggagtctgtgaggggaggacttgggtgggcagtgaaggaggtattccaaaccaccctatagatt

SEQ ID NO: 8921 - DNA, 120 bp, synthetic construct
  source 1..120: mol_type = other DNA
gtagaaaaagaaattgaacttaccgcggggtgctgaaggtggaccagctgaaaaacagagaggtatcttagcaactgttttttctcccatgatattttcctttctatgtagagagtttct

SEQ ID NO: 8922 - DNA, 120 bp, synthetic construct
  source 1..120: mol_type = other DNA
tagagaccgagtcctaaaggagagaattcaatgaacacatagacttactgattgtgtgaggatgcgatctgactgaaaaacaagcaaagatactttttgttacccctttcttgtttcttt

SEQ ID NO: 8923 - DNA, 120 bp, synthetic construct
  source 1..120: mol_type = other DNA
agaaatcacctaagaaattattttgagtagtatggaaaaattgaagtgattgaaaacatgactgaccgaggcagttgcaagaaaaggggatttgcctttgtaacctttgatgaccatgac

SEQ ID NO: 8924 - DNA, 120 bp, synthetic construct
  source 1..120: mol_type = other DNA
aataagggaccaaggaaattggaacattatcatatcacaatgtggatgcatacattttggcttaagatatgttagacactgctggagataattgagtttcactcatgaagggaaatggtc

SEQ ID NO: 8925 - DNA, 120 bp, synthetic construct
  source 1..120: mol_type = other DNA
agacctgtttctgctggtctgaggcaggagattggctataaagtggtaaagtgaggctttgttcttccttctcatttcatttagggacagtagatgcttgaaacacttctagaggttcat

SEQ ID NO: 8926 - DNA, 120 bp, synthetic construct
  source 1..120: mol_type = other DNA
attacaggcatgagccaccttgcctggccaaatttttgtatttttagtagagacggggtttcaccatgtttgtcaggctggtctcgaactgctgacctcgtgatccacctgcctcgggct

SEQ ID NO: 8927 - DNA, 120 bp, synthetic construct
  source 1..120: mol_type = other DNA
ccaaccatatctttctctcccttattcatgactttatcctcagtgctcagcttagtatcagatacatggtaggagctcagctagatgaaggaatgtttgtttgaatatatgtgacttgcc

SEQ ID NO: 8928 - DNA, 120 bp, synthetic construct
  source 1..120: mol_type = other DNA
tagggtgatcttggctcactgcaacctccaccttctgggttcaagggattctcgtgcctcagcctcctgagtagcagggattacaggtgcccgccaccatgcctggctattttttgtatt

SEQ ID NO: 8929 - DNA, 120 bp, synthetic construct
  source 1..120: mol_type = other DNA
gggccagaaccccctcatcatgggaacatcttatcaatatcctgccggccagcaagccatactacccagacccctcccgcctatacctataagtacccccagcctgtaagcagcagtggg

SEQ ID NO: 8930 - DNA, 120 bp, synthetic construct
  source 1..120: mol_type = other DNA
cagtctcgacctcctgggctcaagtgatcctcccacctcagcctcttgagtagctaggactacagctgcatgccactattcctggctaattaaaaaaatttttgtagagatggggtcttg

SEQ ID NO: 8931 - DNA, 120 bp, synthetic construct
  source 1..120: mol_type = other DNA
ctgagtagactgttcccagatgagagctatggtaatcttctaagtctgcgtggttagttgaatctaaaaagaccatatcttcacccagtgggcattgcagttaataatccttcacttcag

SEQ ID NO: 8932 - DNA, 120 bp, synthetic construct
  source 1..120: mol_type = other DNA
agtaatgtacgcgagggttaaaaaaacagtagtaagacattatagggatcactcaaagaatgtgactaggttgctaaaagttgctgaaaatagagcctaactcttctggagagaactttt

SEQ ID NO: 8933 - DNA, 120 bp, synthetic construct
  source 1..120: mol_type = other DNA
taatttgtatactttccctagtaggaatctgcatcactattgtcaagttcagctgcagttgagtagtagaaatggtgactttcttgctatggcaaactagtacatataagggcctcctca

SEQ ID NO: 8934 - DNA, 120 bp, synthetic construct
  source 1..120: mol_type = other DNA
tttaaaaatgcagggcagatcaggccccaagaccttgtaggtcagatatcaaagggaccagagtggaaaaacaaacttgatacttacgaataggggctgtgaattgcactgaaatacaaa

SEQ ID NO: 8935 - DNA, 120 bp, synthetic construct
  source 1..120: mol_type = other DNA
tgcctgtcttccagctggctaatttgaacttgcttagctagaatctatagcctcatctgaaggagacagtgggaattgctgtctctgtagtgattttggcccttattcaacagagtaact

SEQ ID NO: 8936 - DNA, 120 bp, synthetic construct
  source 1..120: mol_type = other DNA
gctacagtttcatttaaaattctatctggatacttatttcagatttattctttgttcataacaggggatatacatcccacacaaacatcagtgacagtctgggatcctcggtcagtgagc

SEQ ID NO: 8937 - DNA, 120 bp, synthetic construct
  source 1..120: mol_type = other DNA
tcctcacactggtaaaagagagaacagtaaaattgcaagtttttctcctttcctccatctttatgtgctttctcaccaccttccccattcctctggtagcaggcacattatagaatatca

SEQ ID NO: 8938 - DNA, 120 bp, synthetic construct
  source 1..120: mol_type = other DNA
ggaagagatgtctgtttttctatgtggtattttaggccgtcaatcactgaactgtcagtttcttgagaaggtgaagccactcctaccaccaaataaagataattttaaaaggacagtttt

SEQ ID NO: 8939 - DNA, 120 bp, synthetic construct
  source 1..120: mol_type = other DNA
tgtggggatcgatcacaaactcagttgcattaaggggcccagcaggtctcatgattgtgaatctgctagttataagggatagagatggtgaaaagtccatgccctacccagaggcattca

SEQ ID NO: 8940 - DNA, 120 bp, synthetic construct
  source 1..120: mol_type = other DNA
cgagtagctggaattacaggagcataccaccacgcccagctaattttgtatttttggtagagacggggtttcagcaggctggtctcgaactcctgacctcaggtgatccacctgcctcag

SEQ ID NO: 8941 - DNA, 120 bp, synthetic construct
  source 1..120: mol_type = other DNA
cagggagaagtcctctgcctagcataggagcccaacaacaccagagtttgaaacaagaagataaacttactcatggatccttgaggtaaagctaaagaacaataacaattattcaagtca

SEQ ID NO: 8942 - DNA, 120 bp, synthetic construct
  source 1..120: mol_type = other DNA
aacttttatgattcaatgaggctaaattcacaaactaaagccctgtgttcttgggccttttagccttagggtaagttttggtaggagaagcaaaaaggctgactttctagaaatagggcc

SEQ ID NO: 8943 - DNA, 120 bp, synthetic construct
  source 1..120: mol_type = other DNA
aatcattttagaaaggggacccttgattaggtctcattaagtacaatgggccatcaactactagaatgcttgggtttgaattctggttcctctacttactagctgtgttactctgcctgt

SEQ ID NO: 8944 - DNA, 120 bp, synthetic construct
  source 1..120: mol_type = other DNA
gctgtctgaaattcatatcagcaaattttcctgtatctttaacttctccaaacgttttcttcaccgtcttgctttaatattcctgtcttttaaaatactgtatctcaagcctgggtgcgg

SEQ ID NO: 8945 - DNA, 120 bp, synthetic construct
  source 1..120: mol_type = other DNA
aaaaaatccatacccatatacatgcctgaatgtaggtaaatgtcatttttgctccccattgctgtttccgaacagtcttctccagtagaaactcctgttgtctttgaagcacatatgaga

SEQ ID NO: 8946 - DNA, 120 bp, synthetic construct
  source 1..120: mol_type = other DNA
agctttctaagggcacctgttcacagttgtatatacaacaaaacagccttattcatgggataaggttatggcacagtattggattagcacactaagtctgatattttatattaatttaca

SEQ ID NO: 8947 - DNA, 120 bp, synthetic construct
  source 1..120: mol_type = other DNA
tcagggggatagggaattagccatctcttccattgctgccagcctgacttggggatgcctcagggaaggctgccctttcgtgctagccatgtaaagctttaaaattctgaggacacagct

SEQ ID NO: 8948 - DNA, 120 bp, synthetic construct
  source 1..120: mol_type = other DNA
gccctatggagatgaagaatagcaagagaccaaatcaggaagttcttgaataatattagaagctaaagagtcaaagtagtgaaagtatttagaacctcggggcttactgaaagggtgctt

SEQ ID NO: 8949 - DNA, 120 bp, synthetic construct
  source 1..120: mol_type = other DNA
ttagaagtgatatgaaagtcatccaggcttgtttgtaaagtcatccactcatgatcttcaagcttttttctttctgttcacttaaggtggactaacatgatgaacttaggagccattatt

SEQ ID NO: 8950 - DNA, 120 bp, synthetic construct
  source 1..120: mol_type = other DNA
aagagtagtttggagggaagatggtcaaataaaagttattatctagtcttggaagaagataccgattatctttaatttttaaagaaaagttaaatagtacacatgttacaaatatcagga

SEQ ID NO: 8951 - DNA, 120 bp, synthetic construct
  source 1..120: mol_type = other DNA
aatctgaaaattattagaactctaagagcacagcagggtggctagatacaaaatctactctcaaatatacaacatataacttatattccaacaataattatttgtaaaatccatgtagag

SEQ ID NO: 8952 - DNA, 120 bp, synthetic construct
  source 1..120: mol_type = other DNA
tgtggtgttgggggagagtgagtagaggccttctaaaagtcaagagacagcataaaaatttaaagctaagagacagaattggatgagataattgcagatatttaacataacatataaaag

SEQ ID NO: 8953 - DNA, 120 bp, synthetic construct
  source 1..120: mol_type = other DNA
agagaaaaaatacagaaaaaatagggcttgcaaaccagatgacagtagaattgaaagaaaaccacaaagcacttacctagagagttggttgatggtgctaaaatacacacacagaaaaca

SEQ ID NO: 8954 - DNA, 120 bp, synthetic construct
  source 1..120: mol_type = other DNA
gcgattgaatgtgcatcctatgatctaaaacttgtttcttagtgatgtcatggaaacagactttctaaaagatctggagacaaagcaaattacatggaaaactagtcatgttatcactgt

SEQ ID NO: 8955 - DNA, 120 bp, synthetic construct
  source 1..120: mol_type = other DNA
aatatcttcctgccagaagatttctatagtctcaagttgaccagtacatttatattcctatgtctagaaataatggagggaagactagcagggcgtgggaacctagaaacttaggatgac

SEQ ID NO: 8956 - DNA, 120 bp, synthetic construct
  source 1..120: mol_type = other DNA
gggattagggcttgggttttagacatgctaagagtgagatgcctttcatatatcttcaggacacgtgtgctatgattatataggttggctcactgcacaaagggttaagggaactgaaat

SEQ ID NO: 8957 - DNA, 120 bp, synthetic construct
  source 1..120: mol_type = other DNA
gtttgccgagaatgatggtttccagcttcatccatgttcctacaaaggacacgaactcatccttttttattgctgcatagtattccatggtgtatatgtgccacattttcttaatccggt

SEQ ID NO: 8958 - DNA, 120 bp, synthetic construct
  source 1..120: mol_type = other DNA
tttctttagctttattgaggtataattataaaaattatatatatttaaggtattacagtgtgcgattctaatatatgtatacattgtgaaatgattgccacaatcaagctaattaacata

SEQ ID NO: 8959 - DNA, 120 bp, synthetic construct
  source 1..120: mol_type = other DNA
ttttattttattttattttgtttttttctctctctctttttttttattatactttaagttctagggtacatgtgcacaatgtgcaggtttgttacatatatatacatgtgccatgttggt

SEQ ID NO: 8960 - DNA, 120 bp, synthetic construct
  source 1..120: mol_type = other DNA
tattttggatattactgtggttttaatgtcctctccgaaactcatgttgaaacttaatcctcaatgtgacagcattgagaagtgaggccttaaagaggtgattatatcatgagggttcta

SEQ ID NO: 8961 - DNA, 120 bp, synthetic construct
  source 1..120: mol_type = other DNA
ctttccctattgggtattcttggtaactttattttctcccatgttaattttctgtgtggatgctctattcattgtcaataatgggttactgaagtccgctacggttattatattgctgtt

SEQ ID NO: 8962 - DNA, 120 bp, synthetic construct
  source 1..120: mol_type = other DNA
tgttttcattttactaattattggcctttcatttcagcttgaagaacattctctagcatttcttgtaaggcagatctattggtgataaactccctcagcttttgtttgtctgataaagac

SEQ ID NO: 8963 - DNA, 120 bp, synthetic construct
  source 1..120: mol_type = other DNA
tttatgaccttgaagtcttgtcttgtgttttcacatttgaagaaacagtcaccctgttcaatatttgtttgtgcctacttcacaggtgggattttttcccttttttgagagaaaatctca

SEQ ID NO: 8964 - DNA, 120 bp, synthetic construct
  source 1..120: mol_type = other DNA
catctgttctaggattttataacctgacagcgtgctggaacttctctgctggactcctggactcccacaatggtattgtctcatctgtggatagttgtctaaattgatgcttctgtgtgg

SEQ ID NO: 8965 - DNA, 120 bp, synthetic construct
  source 1..120: mol_type = other DNA
ttctttaggttccatttcagaaaataaagagggaatgccatggcactgtgctcttcactcttgttgttcatgatagatgaatcatagaggtaagaaggagaaggatggaccaagagtcca

SEQ ID NO: 8966 - DNA, 120 bp, synthetic construct
  source 1..120: mol_type = other DNA
ccttcattaactgtctagtagttcctaatctatttacctctaccatcctcatagtccagaagtctagcacctagaaaaaaagggagagcacatgattttgcttcttgattattaaatgag

SEQ ID NO: 8967 - DNA, 120 bp, synthetic construct
  source 1..120: mol_type = other DNA
ttacttaggagaagtgttcttcctctgatcaaactcttctcactctaagctatgcttcttgcttaccaaggtggtcctcctgatataatgcattgttgttctcacccattttccacatct

SEQ ID NO: 8968 - DNA, 120 bp, synthetic construct
  source 1..120: mol_type = other DNA
gatgagtgagatgaactcagactgaatcttggcatccctccctccgtggttttcacaggaaatcttcattttgactcattattactcaccactttgcttacatcgtgcccatcttgttaa

SEQ ID NO: 8969 - DNA, 120 bp, synthetic construct
  source 1..120: mol_type = other DNA
gtgtcattgatctgcattcaattgatgtaagatagagtcttgcagtcataggagagaaaaatcttagacaatatcatatggttataaagggcagtggctatgaaggatcgggggagaaaa

SEQ ID NO: 8970 - DNA, 120 bp, synthetic construct
  source 1..120: mol_type = other DNA
ccatacccaagactgtcattttccatgtattgtcttcatcaggtctcgcatcatctggatttctttgtcagagagagatcaaggtaaaacgaaaaactcaagttcactgtttctgagcaa

SEQ ID NO: 8971 - DNA, 120 bp, synthetic construct
  source 1..120: mol_type = other DNA
ataccatatgttctcacttataagtgggagctaaacaacaagaacacatggacactaagaggggaacaacagacactggggcctacttaagggtggaggctaggaggagggagacagcat

SEQ ID NO: 8972 - DNA, 120 bp, synthetic construct
  source 1..120: mol_type = other DNA
aaacatcatgtgtaagagatctcccataagtccattaccagacttctcaacggaaaccttgcaagtcagtatttttaacctgcagaattgctatttatttctataatttctccttctgat

SEQ ID NO: 8973 - DNA, 120 bp, synthetic construct
  source 1..120: mol_type = other DNA
caaacattatccaactggaagagaagcagtaaaagtgaatgaccctaagtgggatcccaatgacaggtggaagactggaagaggagacgctttcagatgtgcataatggaaggcttttgt

SEQ ID NO: 8974 - DNA, 120 bp, synthetic construct
  source 1..120: mol_type = other DNA
tagacctctgggaagaatctgactgccgttttccccaaaacgatgcccctatcagcaggaagcagctaagacccgtcatcatccatattcgaacagcagttagatgtacctcttcagaca

SEQ ID NO: 8975 - DNA, 120 bp, synthetic construct
  source 1..120: mol_type = other DNA
tcagtatcttagaaggtggtaactgctgtgaaaagtgaaaaagcaagtcagtgaaagagaactactggcagctgcagtgggatttcgatttaaatagattatcctggatatacctctgtg

SEQ ID NO: 8976 - DNA, 120 bp, synthetic construct
  source 1..120: mol_type = other DNA
gactgccaaagattgccaatacctaggcattaaggagaacataaatataagtatggaatttcatgcagaccagggttaaagggtctaaggatacacctgagacaatgtctgaaaactaag

SEQ ID NO: 8977 - DNA, 120 bp, synthetic construct
  source 1..120: mol_type = other DNA
aaataaagaggcatgtatagtttttagagtaaaaataaatacatattttattttattttatttgcttgctgcaaaacttttgtgacatattggctccttaagcaatatttggaaacaggg

SEQ ID NO: 8978 - DNA, 120 bp, synthetic construct
  source 1..120: mol_type = other DNA
atataatatacattatgttgtacataatatatatgctgtgtatgaaatatatataaatagttttgaggtacatatatctgtcaaaacttgatattatgcctcataaatatatatattatt

SEQ ID NO: 8979 - DNA, 120 bp, synthetic construct
  source 1..120: mol_type = other DNA
attctaattaaaacagtaagataaatctagtaaaaaatacatataattaagtgtagtttaatcttaaaaatataaattttgtaatacattaatacaattatgaaattatatacctaatat

SEQ ID NO: 8980 - DNA, 120 bp, synthetic construct
  source 1..120: mol_type = other DNA
tattactttacactcactgacctggatataatttaaaaggctgaaaatatcaattattggttatgtggagtcactgaaactctcatacattgcttatttgaatgtaaaatagtgcagcca

SEQ ID NO: 8981 - DNA, 120 bp, synthetic construct
  source 1..120: mol_type = other DNA
gtctttcctaatcttttgaattagcaaaatatcctttatccaaagggaagaaaagaaatcctgtgtcaggaggacataattgctatctctccagaaaagaatgccaatccatgtatctct

SEQ ID NO: 8982 - DNA, 120 bp, synthetic construct
  source 1..120: mol_type = other DNA
ttctctctggattatgattactcacttactacagtggttcccaaaatgcaagcctaagctgaatcctagtagttcttctttgaatgcagcagctttgcccttgatacatgactttctctc

SEQ ID NO: 8983 - DNA, 120 bp, synthetic construct
  source 1..120: mol_type = other DNA
tgttactagaattgtgatctgaagcctggagcagaacttacctatgctactcatctcaatccttttaggcagtggcactaggagccttactctgttcaaatttggtgccttcctaccgtt

SEQ ID NO: 8984 - DNA, 120 bp, synthetic construct
  source 1..120: mol_type = other DNA
gggtggctggccgggcggggggctgacccccccacctccctcctggacggggcggctggccgggcggggggctgaccccccacctccctcccggacggggcgtctcgcctggcggggggc

SEQ ID NO: 8985 - DNA, 120 bp, synthetic construct
  source 1..120: mol_type = other DNA
agaggtctaatttacaaatacaaattcttatgagaaaaattttaattactgaggatgtttggtttgaaaagaagattagttactaccagtattagtactattgctactatcacctctgct

SEQ ID NO: 8986 - DNA, 120 bp, synthetic construct
  source 1..120: mol_type = other DNA
cagaagttggaccaggaacgagatgagctctgggtgtttgttcagcacaatgaagagagagtggtggtttgtagaaagtccagagaagaatttctgcatggtgacatgtgaagaaggaag

SEQ ID NO: 8987 - DNA, 120 bp, synthetic construct
  source 1..120: mol_type = other DNA
aagggacggagaaggctcatgaataattgtaaataattggaggaggagcccaagccttctggaaggaaagagcccttttctttaataagttctcactggtcagcaagtccagaattgtgt

SEQ ID NO: 8988 - DNA, 120 bp, synthetic construct
  source 1..120: mol_type = other DNA
gatccacccgccttgtcctcagaaagtgttgggattacaggcgtgagccaccgcacctggccgagcttcttctgttaaatgaaccctttcttcctgatgatggaagagatccccttagtt

SEQ ID NO: 8989 - DNA, 120 bp, synthetic construct
  source 1..120: mol_type = other DNA
ggtataataagacattccaaaaacagagtgactccactgcaaaaaagaaagacctgagggcaggaattatgtcttattaaggattgtatctctaggccttagcatagtacattcaacagg

SEQ ID NO: 8990 - DNA, 120 bp, synthetic construct
  source 1..120: mol_type = other DNA
taaagatagatcaatgtaaatgtaaaaatcatttgttaaactccagagattatataaacaaaaggtgaacctaatgtaaaactgtggactttagttgaaaataatgtgtcactattcttt

SEQ ID NO: 8991 - DNA, 120 bp, synthetic construct
  source 1..120: mol_type = other DNA
tttactgtgttacatgtactgcttatatttgtttattttataattattaattttaaattgtgcactttattttgctctaacaataaaattgacatgttcgtatagatgatacataatttt

SEQ ID NO: 8992 - DNA, 120 bp, synthetic construct
  source 1..120: mol_type = other DNA
gatcaggactcagaatatcattctggtttccagaatcccagattgttattttcctgatacgttggagatgttcttgtgggtacagaaaaaatgtccagagaacctacattagggaaccaa

SEQ ID NO: 8993 - DNA, 120 bp, synthetic construct
  source 1..120: mol_type = other DNA
gaaacactgacctcatgcatcactgagcctggattgcatgataagccctgggctttcctgtttctcatgtttccttagttactggatattcactgactgcctcccataggtgacttgtga

SEQ ID NO: 8994 - DNA, 120 bp, synthetic construct
  source 1..120: mol_type = other DNA
tgagttggtcttcatatttattttccaaacctgaaggaacataaggaatcaccaacctgagagagaaaaagttgcgattttctcctcgcccaaaaaggggatgctgatggaacaagtgac

SEQ ID NO: 8995 - DNA, 120 bp, synthetic construct
  source 1..120: mol_type = other DNA
cggacagtgggaaatgatgctgcagggagtgatttcatcttttctcccctgtccctgccaaaactgtcaatatttataattttggtttacacagtggatccagtttagtcttcagatgat

SEQ ID NO: 8996 - DNA, 120 bp, synthetic construct
  source 1..120: mol_type = other DNA
tgggggtttcatggactcagaatagaggttgctcttctttaaggaggaatcattccatgatgtgtgtcagtctgagtaaaacagtaattgaatccctacctgcttctacctgtatttttt

SEQ ID NO: 8997 - DNA, 120 bp, synthetic construct
  source 1..120: mol_type = other DNA
aatgcctcagtttcttaaactgtaaatttgctatacaactaccaaaatcataatgtttcagagttgaacaaaatagtttgcattaagtgcctggaagaccctgcagcgtgagcagaggtg

SEQ ID NO: 8998 - DNA, 120 bp, synthetic construct
  source 1..120: mol_type = other DNA
tacggtaaattacttaataaaacagactgtttcctcatctcctttatccatatgaggattttattccctgtccgtgtgtgacctgtgcacatattagatcttaaactggcttgccctgcc

SEQ ID NO: 8999 - DNA, 120 bp, synthetic construct
  source 1..120: mol_type = other DNA
gatgaatgagctgacaaagtcacacataagtaattaaggacttgcactgttaagttagatagatgtagattagaaggtaaacatcaccatttcttcctgatttttggcaaaccatgtatg

SEQ ID NO: 9000 - DNA, 120 bp, synthetic construct
  source 1..120: mol_type = other DNA
aaaggagggagctagtaaggaggtaaaggggaaactcaaaggggctcagccatcggctggttatgttttaaaccacttatctcaggtgcagcaaaataataccctcagtccaactccgag

SEQ ID NO: 9001 - DNA, 120 bp, synthetic construct
  source 1..120: mol_type = other DNA
ctccatgagcccccaaagtgtcaggtaacacagctgcaacctccttgaatgaggccattactttgctggtctcctctggtatttaatgaacataggacctggtaaaatcgtgcctcagtt

SEQ ID NO: 9002 - DNA, 120 bp, synthetic construct
  source 1..120: mol_type = other DNA
gtactgttgtattggggggttggttgtttttgctgctatttataaataaggccataattaatattctattatgcaaatagttgtctacatctctgattatcttcatatgatagatttcta

SEQ ID NO: 9003 - DNA, 120 bp, synthetic construct
  source 1..120: mol_type = other DNA
aaaggggaatcggagaagggggacatcatgacattttgcaacgcctctagcactgcaaacagagatgagctgtaatttattcattaattcctctgtgccatgaactctgcctttttcatc

SEQ ID NO: 9004 - DNA, 120 bp, synthetic construct
  source 1..120: mol_type = other DNA
tgaagaaccttcccattcacagagggtgtgtccaaaagcatctgtgagtccccaattcattgaacactagtatataacaatctccaaagcacgacattcttagccttttcagtcttgttg

SEQ ID NO: 9005 - DNA, 120 bp, synthetic construct
  source 1..120: mol_type = other DNA
ttacagagtcaattttgtgtactgaaaacaaatgcagttcaaaaatgtgggtgaggttgctgtctgtcacctaccagctatgtgattcggtggcaaatctattactcttggtaagatttt

SEQ ID NO: 9006 - DNA, 120 bp, synthetic construct
  source 1..120: mol_type = other DNA
gtgttttttcccacttcgccatgctgcattttccttagggctctgacatctccttctgacactgattttttttttttgacactgaatttttaaataattatttttcaaggtgcaacattt

SEQ ID NO: 9007 - DNA, 120 bp, synthetic construct
  source 1..120: mol_type = other DNA
cagttctccagaaagatgcttcaaagacaaaacaagattgagcacacggcctcccatctctcttgcctgagtcactctactccttaaaagataagcaataatagtccttgccttttccta

SEQ ID NO: 9008 - DNA, 120 bp, synthetic construct
  source 1..120: mol_type = other DNA
taagtggccttttagaatagacttaaaaacacgaatgaattaaaaaaacaaaaagcccaactggcagaaactggcaaacccagcaaccccactgtcccagctgaacaaaaatacttcaca

SEQ ID NO: 9009 - DNA, 120 bp, synthetic construct
  source 1..120: mol_type = other DNA
gagagaatatatcagggaggataaccaccttggaccagggttcttaatgggcaaagaggctgttttgcccttagaggacatttggcaatgtctgggaacattttcagttgtcacgactgg

SEQ ID NO: 9010 - DNA, 120 bp, synthetic construct
  source 1..120: mol_type = other DNA
catagtaactgactggtaagaataaattaacttagttcacgaagttgaaagcttatgtatcttagttcacgaagttgaaagcttatgtatctatgtagacattaaaaacagctatagttt

SEQ ID NO: 9011 - DNA, 120 bp, synthetic construct
  source 1..120: mol_type = other DNA
tttgtgtgtgtgtgtgtgaccttggacatctttctttacttttttgagcctgtattttctctgctgtgtggtggagacaatcatcctaatgttttccaagctgtgtcatgaccatgtgac

SEQ ID NO: 9012 - DNA, 120 bp, synthetic construct
  source 1..120: mol_type = other DNA
cacacatcagcgggtgctatccacccttccctccaccttgccacacatcaaagattcccaactagtgccaagtctccaccagagcatggcactcatcgggctggagttggaagcaaaact

SEQ ID NO: 9013 - DNA, 120 bp, synthetic construct
  source 1..120: mol_type = other DNA
aaagttctccaaggcaagaagtggcagactctggaaggctccaacagtgggatgaaagtttgctgcctaaaatgctgggatggaatgttccagcaagaggagagtggcatcaaggacata

SEQ ID NO: 9014 - DNA, 120 bp, synthetic construct
  source 1..120: mol_type = other DNA
cattcataactccctcagccactagacgacaaaagaagccctgagtttaggctgactgagattttcattctagctttgctatacatttgggcaagctttactttgggtaagtctgttctt

SEQ ID NO: 9015 - DNA, 120 bp, synthetic construct
  source 1..120: mol_type = other DNA
gctgacctacagtctaagttgagctctttacatacatggctgtcatatactttacaaaaagtgtctgacaaaccagttcctctaaaacttttaattttaaaaaatttaggttgggtgtgg

SEQ ID NO: 9016 - DNA, 120 bp, synthetic construct
  source 1..120: mol_type = other DNA
gcctccaagattttactactgcaccgcgatttcagagtggcgggaaggactgagagtcccatttagaaacttcccaaatcttaactgccaatatctttctttctaaaattgtgtttttgt

SEQ ID NO: 9017 - DNA, 120 bp, synthetic construct
  source 1..120: mol_type = other DNA
aattaatgggttagcaggatgaaaggaaaactataccccaaaggatagcctagccattgaaattgatatgaactggaatatgaaaataattggggacaatttagtttcatgaccatatat

SEQ ID NO: 9018 - DNA, 120 bp, synthetic construct
  source 1..120: mol_type = other DNA
ggcaggctgagatctggctgttattctcgtgtgatgagaatctcaagacagtgaggtttagtaacaagtcaagaaaatacatcaatgatgcagtagtggttaactacataaaatgcttct

SEQ ID NO: 9019 - DNA, 120 bp, synthetic construct
  source 1..120: mol_type = other DNA
ttactactacaatgctactctagaacatacatcaagaactattgcaagttcattacaacttcattcctaatagcaaaacatcaaaacaacttaagtatccattaacaactgaataacttt

SEQ ID NO: 9020 - DNA, 120 bp, synthetic construct
  source 1..120: mol_type = other DNA
ctggagggagaattgaatagctccaatagtgtactttccttggtaattttcactcttccttggactatcacataggttgaaactctgatatatgtcaaggttgtaaaccaaaaagtgtct

SEQ ID NO: 9021 - DNA, 120 bp, synthetic construct
  source 1..120: mol_type = other DNA
tagctgcttcagcttccatgtggtgtttgatacctgtgttccttttcatttggctcaacttccattaagcacaaaaaccccacaaaatgttcaaagggctagagggacaaatttggattt

SEQ ID NO: 9022 - DNA, 120 bp, synthetic construct
  source 1..120: mol_type = other DNA
ccttcagcctgggtctgtcgagcacaaggtgggtctccccgttttcacatgtgcctgctcctgaagccacctgagaaggaggccagggagctgggccagcaagtactgaagttcagggct

SEQ ID NO: 9023 - DNA, 120 bp, synthetic construct
  source 1..120: mol_type = other DNA
tgctggtttaaagtctgttctatcagaggtgtttatagtattctctgatggtagtttgtatttctgtgggatcagtggtgatatcccctttatcatttttattgcatctatttgattctt

SEQ ID NO: 9024 - DNA, 120 bp, synthetic construct
  source 1..120: mol_type = other DNA
aagtatatcctgccagtacactacaggtgtaataaaacatcatggatgacccatctcctcttccatgattacatcctaaattgctatgccagagaaatagagaggcattgtctgaaaaat

SEQ ID NO: 9025 - DNA, 120 bp, synthetic construct
  source 1..120: mol_type = other DNA
ggcctctccatgtgtgctatggcccctgaagacattttggtaggacaagatgtggaagtgggaaacagtgatattgatgatcctgactctgagtaggcctaggctaatgtgtgtgtttct

SEQ ID NO: 9026 - DNA, 120 bp, synthetic construct
  source 1..120: mol_type = other DNA
agtgcttgaagtcatcaactctcaaatcttgtcattgcagcaccacgtcaaatgacaaaacacttgctattttcttagtccactggaggagcctattgtcagaggccaaacctggattat

SEQ ID NO: 9027 - DNA, 120 bp, synthetic construct
  source 1..120: mol_type = other DNA
tacagcagcctgcctggggaaccaattcccttatcttcaataaacaatacagcaaggtagtctgcttaagtccgacttgcaggaagtcagattgctgtctctagtaacaatccaggaggc

SEQ ID NO: 9028 - DNA, 120 bp, synthetic construct
  source 1..120: mol_type = other DNA
ctttggaagcacaattttgctttttctgtccttacaaaacttttgcaatgcacttcactgtattacatctctctgggcttaaaataccttgagtgtgttttttcccccttgtaaatctgg

SEQ ID NO: 9029 - DNA, 120 bp, synthetic construct
  source 1..120: mol_type = other DNA
gaaagatacttcttttaaagaatttgctcacatgattgtggaagcttactgagtccaaattctgatggaagaggccagcagtggaggagactgggacagagttgcagtttgagcccaaag

SEQ ID NO: 9030 - DNA, 120 bp, synthetic construct
  source 1..120: mol_type = other DNA
atgaaaatggtaaggagcacctcctgccaccacacagctcaaacacaaagaagaacaaatacgttgaactcactgagtacttttgtaccccattgtttactattgtacagttgtatgaat

SEQ ID NO: 9031 - DNA, 120 bp, synthetic construct
  source 1..120: mol_type = other DNA
cctgatttttctgtatttgactggagtagtgcggttactgtcagttatctgcctggtaggctgctctttcttgttcccttggatagagaaacatgctttccttaggatatttttgtctgt

SEQ ID NO: 9032 - DNA, 120 bp, synthetic construct
  source 1..120: mol_type = other DNA
cttagaatcctcatgtcatctacgagctagtacctcttataacaaacccatgggcacagcttccagagtccctgtaaagggcatgctcagttacaagggtcactgcatttggaaataccc

SEQ ID NO: 9033 - DNA, 120 bp, synthetic construct
  source 1..120: mol_type = other DNA
cacagttgccactttctaagtaagcccttgaccaaaagactagatttctttaaacccagttttctcaggtaaaatggaaatacaactattatctaataaatataagtaagctttagtgtc

SEQ ID NO: 9034 - DNA, 120 bp, synthetic construct
  source 1..120: mol_type = other DNA
actgctacatagacattcttatgatcttcagaaatgagcacagatcatgcttaatgaaaaaagatttccaaacaatgctgcatatgtccagagaaaaggtggcagaaatgactgtcgttt

SEQ ID NO: 9035 - DNA, 120 bp, synthetic construct
  source 1..120: mol_type = other DNA
tgtatacctatgtaacaaacctgcatgttctgcacatgtatcccagaacttaaagtagaataaaataaataagtaaataaggaatgatgggacaaacaagtttctgttattgtctctcta

SEQ ID NO: 9036 - DNA, 120 bp, synthetic construct
  source 1..120: mol_type = other DNA
tacccaagcgcaggggaatagcatctctaatgaaattctctaaagaggcaagagcaggcacaatgagtttttgtttgattaaagattccatttagtgcttatccaacctagcaattacat

SEQ ID NO: 9037 - DNA, 120 bp, synthetic construct
  source 1..120: mol_type = other DNA
gtcaagtaaagaggggtaatttcacaccccaggaggtctgtataaagataactctggtctttaaagcatcaggtttcaggtagaggtgaagagagaatgaatcaaactcaaactgccatc

SEQ ID NO: 9038 - DNA, 120 bp, synthetic construct
  source 1..120: mol_type = other DNA
aggcttcctgtgggttcctgatcttttaaaattaggggtctgcagtgacttgtgctcctccagaccccctaacagttttaagggctaattccctgtaatatattcagttctgcttagact

SEQ ID NO: 9039 - DNA, 120 bp, synthetic construct
  source 1..120: mol_type = other DNA
aaccccgtctctactgaaaatacaaaaaaaaaaaaaaaaaaaaaaaaaaaaaaattggccgggcatggtggcgggcgcctgtagtcctagctactcgggaggctgaggcaggagaatggc

SEQ ID NO: 9040 - DNA, 120 bp, synthetic construct
  source 1..120: mol_type = other DNA
attgacctgaatcctcaaatgaggtgtgtccattagtcaactccaatctcttgtcatatataagatggtagagatgagaagaaggtagctcctttacagcccactatttccactaactac

SEQ ID NO: 9041 - DNA, 120 bp, synthetic construct
  source 1..120: mol_type = other DNA
atgaaatctgggacgatagactacgaagcattggagaaaagacctatggacatttggaagataatgtgtggagtgaaagaatagtgtgacaggtattatgtggtctcgacagaaagtata

SEQ ID NO: 9042 - DNA, 120 bp, synthetic construct
  source 1..120: mol_type = other DNA
ggtttgtgaagaggcagctagtatatttgtgtgtgtttgcatagatgcaaacggtaaataaattcctaggtttatcaatacacagtcaaacattaaaatctctcatcttggctgggcacg

SEQ ID NO: 9043 - DNA, 120 bp, synthetic construct
  source 1..120: mol_type = other DNA
ctggaattctggcctaagtgtatttaatgcccgggtaaagaaagtgagagaacatttctctttaggggctgctgctggatttctaaaaagaaaataatttctcagctagtaacatggagc

SEQ ID NO: 9044 - DNA, 120 bp, synthetic construct
  source 1..120: mol_type = other DNA
tcttatacctcaatattggctcaatttcttggggagggggtgctgtcagagattgttatctgaggatgtgacatagatttctcagggcacaatttcaactactttttcagctttagggtt

SEQ ID NO: 9045 - DNA, 120 bp, synthetic construct
  source 1..120: mol_type = other DNA
taggtgtggtcagaggaagacgtatatggagatatctgagggaggaaaacagggtggggaaaggaaatgtaatgcatttaagagacaaggtaggaacagatgtggctcttgatttctctt

SEQ ID NO: 9046 - DNA, 120 bp, synthetic construct
  source 1..120: mol_type = other DNA
tgccttttcctgtatctattttcctctatttcctatcattttattatcaccatgcaatgcctctggaataaaacatacaggagtctgtctctgctatggaatgccccatggggcatctct

SEQ ID NO: 9047 - DNA, 120 bp, synthetic construct
  source 1..120: mol_type = other DNA
gtaaactattcatgatagtgtggtagactgcaaataaatgctgttgaaatgagttaggcttgggtttcatcttggctgtatcatttactagctatgttttcactggtatcttacttaact

SEQ ID NO: 9048 - DNA, 120 bp, synthetic construct
  source 1..120: mol_type = other DNA
gaaaaccattttaatagacttttatttttagagctgttttaagctaacagaaaaattgcagaaattgtatacagagctcccccacccccagtttctacaatgcttaacatcctgtattaa

SEQ ID NO: 9049 - DNA, 120 bp, synthetic construct
  source 1..120: mol_type = other DNA
agcacagagctattccatatcacagagatcttcatcatgcttccctttatagccaaattccccccacacaatcaccttaacaacttaaaaccactaatttctttgctattaatctctaga

SEQ ID NO: 9050 - DNA, 120 bp, synthetic construct
  source 1..120: mol_type = other DNA
ttgggaggctgaggtgggaggattgcttgagcccaggaattcgaggctgcagtgagccactgcacttcagcctatctgacagagcaagatcctgtctccaaaaggaaggaagggagggaa

SEQ ID NO: 9051 - DNA, 120 bp, synthetic construct
  source 1..120: mol_type = other DNA
agccaccgcgcccagacaatattgattcttccttttccatgaacatgatatttttttccatttatttgtgtcatctctgagttctttgagcagtggtttgtagttttccttgtagagatc

SEQ ID NO: 9052 - DNA, 120 bp, synthetic construct
  source 1..120: mol_type = other DNA
ttggactaattataacaggaatggtaccagctcttctttgtacatcaggcagaattcagctgtgaattattctagtcctaggggttttttttgtttggtagtctacttattactgattta

SEQ ID NO: 9053 - DNA, 120 bp, synthetic construct
  source 1..120: mol_type = other DNA
ctatcaggtccatttgattcagtgctgagttcaagtcctgaatatctttgttaattttttgtctcgatgatctgtctaatattatcagtgagttgttaacatctccaagtattattgtgt

SEQ ID NO: 9054 - DNA, 120 bp, synthetic construct
  source 1..120: mol_type = other DNA
taagggaagcagagcataaatgtttggaaaatttgcagcctgacaatgcaatagaaaagaaaatccaattttctgaggataaattcaagctggctgcagaaatttcatgggtaacgagga

SEQ ID NO: 9055 - DNA, 120 bp, synthetic construct
  source 1..120: mol_type = other DNA
tgcatcatgcactggaaaagctgcagacactcaatgccagcccatgaaagcagcttggagggaggctatatcctgcaaagccacaggggcggagctgctcaagaccaggggaacccacct

SEQ ID NO: 9056 - DNA, 120 bp, synthetic construct
  source 1..120: mol_type = other DNA
agtaataaaaagcctaccaaccaaaaaaagcctgggaccagatggattcacagctgaattctaccagatggataaagaagacctggtcctattcctattaaaattattccaaaaaaattg

SEQ ID NO: 9057 - DNA, 120 bp, synthetic construct
  source 1..120: mol_type = other DNA
cgcgatctcagctcactgcaatctccgcttcccaggttgaagcaattctcctgcctcagcctcccaagtagctgggactacaggcacatgccaccacgcctggccttttttttttttttt

SEQ ID NO: 9058 - DNA, 120 bp, synthetic construct
  source 1..120: mol_type = other DNA
agaatagagagtccagaaataatgctgtacaactccaaccatctgatctttgacaaagatgacaaaaacaagcaatgaggaaaggactcctcattcaataaacagtgctgtactaactgg

SEQ ID NO: 9059 - DNA, 120 bp, synthetic construct
  source 1..120: mol_type = other DNA
acatgaacagacacttttcaaaagaagacatacatgcagccaacaaacataggaaaaaattcgcaacagcactaattattagagatatgcaagtcaaaatcacaataagataccatctca

SEQ ID NO: 9060 - DNA, 120 bp, synthetic construct
  source 1..120: mol_type = other DNA
attgcaaagagtgaaaggacaaagcttccacagtgtggaaggggacctgagtgggttgcagctgctggctgggttggccagcttttattcccttatttggccctgtccacatcctgctga

SEQ ID NO: 9061 - DNA, 120 bp, synthetic construct
  source 1..120: mol_type = other DNA
gcaccaccattcccacccccatctcatctcatctctgcccagaaggctggaaggacaagctgaagctccctcctgtgttccctcccacagcagacacacagacaaatccccactctacac

SEQ ID NO: 9062 - DNA, 120 bp, synthetic construct
  source 1..120: mol_type = other DNA
gggaaaaatagacctcatccctccgctggaggagcttaaagagaagtgaaattgatggcaaaaaaccaaacacgcaacaccttatacaggaacgaaaaatgttaagagaagtgtggagtt

SEQ ID NO: 9063 - DNA, 120 bp, synthetic construct
  source 1..120: mol_type = other DNA
aaataataattttttttttaagttctgggtacatgtgcaggatgtacaggtttgttacacaggtaaacatgtgccatggtggtttgctgcagctatcaacccattacctaggtattaagc

SEQ ID NO: 9064 - DNA, 120 bp, synthetic construct
  source 1..120: mol_type = other DNA
agacattgccaaatgttccctagggagttgggagagggaagggagggacagaggggtggtgaactatccctgggtgagacccactagtgtaaccatctgaaaaatctatggttaaaaagc

SEQ ID NO: 9065 - DNA, 120 bp, synthetic construct
  source 1..120: mol_type = other DNA
ctaaattctctgagcaccttcttcacagataagaatgttgaaaaataaaaatatgtgaagttgccgtcactgtagcttgcatagttagcactgcagtctatgctcatgtgccaagcttag

SEQ ID NO: 9066 - DNA, 120 bp, synthetic construct
  source 1..120: mol_type = other DNA
ctggtaattagtcactgcaaaatattacaatactccacgctaatacagaccagatttgctttgtttattactccattctcatcacccaaggtaataactagtatattctaagtcactaat

SEQ ID NO: 9067 - DNA, 120 bp, synthetic construct
  source 1..120: mol_type = other DNA
agtctgttcactttatctggatctgtctttgtcactactacactacatgaagccaaaaatttgtcttccctggagaattctgctgttctccacttgtgaaccccaacaatccaatctcca

SEQ ID NO: 9068 - DNA, 120 bp, synthetic construct
  source 1..120: mol_type = other DNA
ctcctcggctgataggattaagagattaaagtaaaggcaggcataggaaatcacaagggtattgattggggaagtgataagtgtccatgaaatctttacaatttatgtttagagattgca

SEQ ID NO: 9069 - DNA, 120 bp, synthetic construct
  source 1..120: mol_type = other DNA
ttcattctaatgacatgctatatcccttctcctccctgtgagaaattaaggcaaacttcttttctctcctctttctagttggaagaaggattcacagataaggaaacagtgattgtaaga

SEQ ID NO: 9070 - DNA, 120 bp, synthetic construct
  source 1..120: mol_type = other DNA
gtctgttcatatccttcacccacatgttgcttcggttgtttgtttttttcttgtaaatttgtttgagttttttgtagtttctggatattagccctttgtcagatgagtagattggaaaca

SEQ ID NO: 9071 - DNA, 120 bp, synthetic construct
  source 1..120: mol_type = other DNA
tgtcagagatcagatagttgtagatatgtggcattatttctgagggctctgttctgttcccttgatctatatctctgttttggtaccagtaccatgctgttttggttactgtagccttgt

SEQ ID NO: 9072 - DNA, 120 bp, synthetic construct
  source 1..120: mol_type = other DNA
gataatcatgtggtttttgtcgttggttctgtttatgtgctggattacctttattgattagcatttgttgaaccagccttgcatcccagggatgaagcccacttgatcatggtggataag

SEQ ID NO: 9073 - DNA, 120 bp, synthetic construct
  source 1..120: mol_type = other DNA
aattagtttctaaaactgaacatgaattgactctccttgtaaccatccagtagtgtctcacatctatttaaataaaattcaggctgggtacggagactaatgactgtaatcccagcagtt

SEQ ID NO: 9074 - DNA, 120 bp, synthetic construct
  source 1..120: mol_type = other DNA
ggggctcaaactccagcactctttcattttgatgtcacactagaccccttctcctcccggtgtgaaatacaggcaaagttcttctttctcctccttctagttgtaagaattcacagataa

SEQ ID NO: 9075 - DNA, 120 bp, synthetic construct
  source 1..120: mol_type = other DNA
gtcagagaacctacatacactacagggatataggctttataaacattggagttagaaagaaaaagaaaggagataatggggaggccattggtacatcctcacatttgaggaagaggggcc

SEQ ID NO: 9076 - DNA, 120 bp, synthetic construct
  source 1..120: mol_type = other DNA
ttcatttcccacttaacaagacaactgtttgcagaagtgagtgtgtgagtgtgtttaggagtaaaggagatggaaggaacatggttgtaaatccggagacatttaaactggtccttattg

SEQ ID NO: 9077 - DNA, 120 bp, synthetic construct
  source 1..120: mol_type = other DNA
aataatgaatattttatgtgaagagtgttcaatccctcattcttggttcccattatgatttcctcatttgattgaggctatagcactttatattatgtttctcttgttttatcataaggg

SEQ ID NO: 9078 - DNA, 120 bp, synthetic construct
  source 1..120: mol_type = other DNA
aacatatttcgaggctcctttaatgcctgtcctacaaaatgctgacataacgtaggactgttaagcatgccttgggataaaactctccattgatagcaagaaacaggttctttttgatta

SEQ ID NO: 9079 - DNA, 120 bp, synthetic construct
  source 1..120: mol_type = other DNA
tcctatgggctatgggatgggatagatagatttcccttgtagttgtgctctcaaaccctttatttcctcgtttctcctttcgtggagaaggatttaatttgcagggaataagcaacgacc

SEQ ID NO: 9080 - DNA, 120 bp, synthetic construct
  source 1..120: mol_type = other DNA
ttttagatttgtcaactgctaaattagccattgcctgcactaatattgtagagcaatgaagctcatttcccacatcttgacaagctctgagaaaatttcccaagttttttgtacacctca

SEQ ID NO: 9081 - DNA, 120 bp, synthetic construct
  source 1..120: mol_type = other DNA
gaataagaaggagataatggcagaaggacagtatggactaaactccaagtggagaaaatggaaggatcaactttgagacctttttactgagcccgttttaatccttctgctctgtcccaa

SEQ ID NO: 9082 - DNA, 120 bp, synthetic construct
  source 1..120: mol_type = other DNA
tgctgtttgatcatattgcctcagtggaaattctgagttggtcatgattctccagcctctggctctctacactgaatggattcaacaagaaagtggttgaatttatgcaactgtctagtt

SEQ ID NO: 9083 - DNA, 120 bp, synthetic construct
  source 1..120: mol_type = other DNA
agtgctatgtttccagaaaatgaacttgtggagaaccaagatttactgatttccttgcctttataatcagtcatcaaatcatatcatttatcttccatagcatcttctttcttaatttct

SEQ ID NO: 9084 - DNA, 120 bp, synthetic construct
  source 1..120: mol_type = other DNA
tgtaaaattaaataatgacttcttagcactgatcacataacaaacactcaaaaatattttcattttaattttttatgatccctttaactgcagctcacattatttttcttattccttgat

SEQ ID NO: 9085 - DNA, 120 bp, synthetic construct
  source 1..120: mol_type = other DNA
cttttttctacacacaagctattaccctatgtatcctcttccactccctggaatttaacagagtacacgtattgatgccatcaacataaacacctccagccctgaactcaccatgagtct

SEQ ID NO: 9086 - DNA, 120 bp, synthetic construct
  source 1..120: mol_type = other DNA
ctcacatcagctcagtaaaataaacaccgttttcatgcttacaggtggagagactaaaacgatggaaataaaacaaattttgccaagatacactagtaaacagtacactatagattgagc

SEQ ID NO: 9087 - DNA, 120 bp, synthetic construct
  source 1..120: mol_type = other DNA
tcccggccctccccgcaggcaacaggatccaggcctctctacactccactccctcaaggctgagaaggccctcctgtccatgcagccttgggggtgtctgttcccactttctggcctctc

SEQ ID NO: 9088 - DNA, 120 bp, synthetic construct
  source 1..120: mol_type = other DNA
ttagccaggcgtggtggtgtgtgtctgtaattccatctactcaggaggctgaggtgtgaggatcacatgagcctgggacgcaaaggctgcagttagccgtggtcgcgccactgccctcca

SEQ ID NO: 9089 - DNA, 120 bp, synthetic construct
  source 1..120: mol_type = other DNA
agaaatgtaaggttgtttgagcatttgagaatcaatcagtgtgattcactacattaactgaaggaaggagaatacacatgcaaccacctggatagagtcatgaaatacgatttgacagaa

SEQ ID NO: 9090 - DNA, 120 bp, synthetic construct
  source 1..120: mol_type = other DNA
agattttatgtgatcgcttcatcctgaattgtctgaatcaaatgtatcatataaggtctgttatcgttagagaagtcagatggtcagaaatgagcaggcaagggagtccctgggaaaaga

SEQ ID NO: 9091 - DNA, 120 bp, synthetic construct
  source 1..120: mol_type = other DNA
agtagactaaatctgaaaccctagggtttggcctctgagaatgggtgaaacagatggagaggaggagacacggggtagactggggagtagaatgagaggaagacccacaaatattacaag

SEQ ID NO: 9092 - DNA, 120 bp, synthetic construct
  source 1..120: mol_type = other DNA
tgtaaggagaacattttttaaagcagttttaagtgtacagaaaaattgcagagaaagttcagggagttgccacaccccttcttccctaaaacagccctctgttcagtttctcctattact

SEQ ID NO: 9093 - DNA, 120 bp, synthetic construct
  source 1..120: mol_type = other DNA
gtatgcatataggggctgggcgtggtggctcacacctgcaatcctagcactttgggaggtcgaggcaggcggatcatgaggtcaggagttcgagaccagcctggcgaatatggtgaaacc

SEQ ID NO: 9094 - DNA, 120 bp, synthetic construct
  source 1..120: mol_type = other DNA
atttctgcagcctactaataaaaatctaagaaaagcaagataaaacaagcacaaaccaaggtggcataaccttgcaagacttatgaataaattacaagtttctttatctatagtttagag

SEQ ID NO: 9095 - DNA, 120 bp, synthetic construct
  source 1..120: mol_type = other DNA
tctcagtgatggctttgtgtgaggccagggtaggagctagacaaatccagggtatttcagtaacaaaagcatcatacaaagtagtttccctaactatgcctgaggctcaacctactcacc

SEQ ID NO: 9096 - DNA, 120 bp, synthetic construct
  source 1..120: mol_type = other DNA
caggcgtgagccatggcgcccggccgacaaaaagatgctttttaaaaactttttacttggaaatcattatagagtcacaggaaattgcaaagacagtacagagaacatatgcttaccctt

SEQ ID NO: 9097 - DNA, 120 bp, synthetic construct
  source 1..120: mol_type = other DNA
ggtctcgctgacttcaagaatgaagctgtggaccttcgtggtgagtgtaacggttcttttttttttttttcatacagagtctccctctgtcacccaggctggagtgcagtggtgccatct

SEQ ID NO: 9098 - DNA, 120 bp, synthetic construct
  source 1..120: mol_type = other DNA
cacctgtcaccagcattcgctgcaggactctgcagcacccagccctggcactccagcagcccagagggagctcatccctcaatcatgcccagcagacgccggctggccgctctgagtgca

SEQ ID NO: 9099 - DNA, 120 bp, synthetic construct
  source 1..120: mol_type = other DNA
ttcccaccctcagggtatagccctcaacttcatttttggggcataacatctttataggacaggggtaaagtcccaatactaacaggagaatgcttaggactctaacagttttttgagaat

SEQ ID NO: 9100 - DNA, 120 bp, synthetic construct
  source 1..120: mol_type = other DNA
acctgggtatatgtccccttctccctctctgatttaaagcagatcaaggcagacctgaggaagctttcagatgatcctgataggtatatagatgtcctacagggtctagggcaaaccttt

SEQ ID NO: 9101 - DNA, 120 bp, synthetic construct
  source 1..120: mol_type = other DNA
caggactgagggtgcccggggcaagcaccagctcctgtcattatcctcactgagccctgggtacatttaaccatcgagggccaggaaattgacttcctcctggacactggtgtggccttc

SEQ ID NO: 9102 - DNA, 120 bp, synthetic construct
  source 1..120: mol_type = other DNA
aacaggggatctaaatcttaactaattaatatacaaaggtccaaccagatctagggggaactcccctcaggacaggaccatagatggttcctcccaggcaattaagtataaagacacaat

SEQ ID NO: 9103 - DNA, 120 bp, synthetic construct
  source 1..120: mol_type = other DNA
gatggtcttacaaatggaacctcaaatgtgctcaactaacaacttctactgaggacccctggaccaacccactggccctttcactggcctaaagagttcctctctggaggacactacaac

SEQ ID NO: 9104 - DNA, 120 bp, synthetic construct
  source 1..120: mol_type = other DNA
tgtccttgagatccatccaagatgttgcgtgtatcaacaatttgctcttttttattgctaaggaatactctatcagacggaggcactgcagtttaactatttccctgttgagggacattt

SEQ ID NO: 9105 - DNA, 120 bp, synthetic construct
  source 1..120: mol_type = other DNA
gatgagagaatttgttaagtttctttcttgcttctttttccttttgcttcttttttgcttttgtttcgttttgatttgtctatggatttccactttctcctggatcattgtttgaaaaga

SEQ ID NO: 9106 - DNA, 120 bp, synthetic construct
  source 1..120: mol_type = other DNA
cattcagtcttccaccattaagtgtaatttagccacaacatttttgtagaagttatttataaaattcaggaggtagtctttgatttctactattttgaggggttttttgttgttgctgtt

SEQ ID NO: 9107 - DNA, 120 bp, synthetic construct
  source 1..120: mol_type = other DNA
tttggtgtattcttttggtggactattgatgtcgaaggacctctagtgatataacatgtttcaatcccaatattggtgttttttctcctttttcccttctattttgtcctagaaatttgt

SEQ ID NO: 9108 - DNA, 120 bp, synthetic construct
  source 1..120: mol_type = other DNA
tgtggtggtctgtaaatgtctattagatcttattggtggatagttttgttgggtttcattatcttgctgagtttctatatagttgttttattaatttttcagagatgtgaagtctcaaag

SEQ ID NO: 9109 - DNA, 120 bp, synthetic construct
  source 1..120: mol_type = other DNA
tatcatttctattccagttcaaggacttcctttagcctttgttttaggataagtctgctagcatcaaattctcttgattttccttcctctaagaatgtcatggctgggcgctgtggctca

SEQ ID NO: 9110 - DNA, 120 bp, synthetic construct
  source 1..120: mol_type = other DNA
gagttactcaaaatgtacagtatgctgaagctgacaaataacataacatatgatgagttccacatctcatacagaaagtaagcccattctataaagctttcccaagacaagatcgcaggt

SEQ ID NO: 9111 - DNA, 120 bp, synthetic construct
  source 1..120: mol_type = other DNA
tcaacattcataagtcaataaaagtaatccatcacataaacagaaccaatgacaaaaaccacatgattatctcaatagatgcagaaaaggcctttgataaaattcaacagtgcttcatgc

SEQ ID NO: 9112 - DNA, 120 bp, synthetic construct
  source 1..120: mol_type = other DNA
agtatagaccaatggaaaggaacagagagctcagaaataataccacacatctacaaccatctgatctgtgataaacctgacaaaaacaagaaacagggaaaggattccctattcagtaaa

SEQ ID NO: 9113 - DNA, 120 bp, synthetic construct
  source 1..120: mol_type = other DNA
tggggagctaggggagggatagcattaggagaaatacctaatgtaaatgacgagttgatgggtgcagcaaaccaacatggcacatgtatacctatgtatcaaaccagcacgttgtgcaaa

SEQ ID NO: 9114 - DNA, 120 bp, synthetic construct
  source 1..120: mol_type = other DNA
ttcttttgattcttaagttaaaagtttatatatttgattttgacatattatccttttataaaataagtatttaaaactaaatatttttctttaaggactcctgtggttgcatatcaaaaa

SEQ ID NO: 9115 - DNA, 120 bp, synthetic construct
  source 1..120: mol_type = other DNA
gcattatggtttatgattttttccaatccatgttgatagtcctacataatttacttaaagccccgaacattattcctttctatggctatcccacaatttacctttcttctatgtaaatgt

SEQ ID NO: 9116 - DNA, 120 bp, synthetic construct
  source 1..120: mol_type = other DNA
accgctattgctgtagattacgcctatgacccactgccaccctttcactgtttctccctgaacatctgcttcttagatctaagtgactgtactcagtaaatagtgtggagaccagaactc

SEQ ID NO: 9117 - DNA, 120 bp, synthetic construct
  source 1..120: mol_type = other DNA
ctttcttttcttttcatttattttcttttttcatttgtgtaaatttataaggtacaagtgtatttttgttaatatgcgtagattgcatagtggtgaagtcagtgtttctacagtatccat

SEQ ID NO: 9118 - DNA, 120 bp, synthetic construct
  source 1..120: mol_type = other DNA
aatgtatagtatgttttaccatcttacagagctagtcattccttactctactttttttcaaaaatttccctggaaaatgaatttacctcataaaataacatgtcagcatacttgaattct

SEQ ID NO: 9119 - DNA, 120 bp, synthetic construct
  source 1..120: mol_type = other DNA
gagttgagcaatcctggagacaaccagcattggatctaacggctatgtgagatcatgggttaaaaaaaaataaagcctgctagatgggatttcctgctattagcagcagaaggcattttc

SEQ ID NO: 9120 - DNA, 120 bp, synthetic construct
  source 1..120: mol_type = other DNA
tatggatacgcagtatttagaataggttaaggaagagttctgattgacttgctagctggtttctcatctcatgttggccaagttgtttcagttgttataatctgttctcaatttttatgc

SEQ ID NO: 9121 - DNA, 120 bp, synthetic construct
  source 1..120: mol_type = other DNA
ataaattgcctgatcaggaatttggatccaaagtctttcctgctatttctgtctcatgccttatcacctctgccatcattctaggaaaactgaatctgtttctaaaagaggattaaaagg

SEQ ID NO: 9122 - DNA, 120 bp, synthetic construct
  source 1..120: mol_type = other DNA
cggcttcaacatctgataaacagaaagcctgagactcaatgaggttaaatagtttgtctagagtgacagagctaataaaaggcagagctgatattggactcccctcatgtcaggaaggcc

SEQ ID NO: 9123 - DNA, 120 bp, synthetic construct
  source 1..120: mol_type = other DNA
caaatccaaggtctgccttttactggttgatgctggaagagtttttcgattcttctgtgtctcaactttctcacccataatagaggataattatagtaatttacctcttggggttatatg

SEQ ID NO: 9124 - DNA, 120 bp, synthetic construct
  source 1..120: mol_type = other DNA
aaatgtggaatcaaatatcaataaagtgttaataatcttacagtacaaagaacccacaaaatcactgagaaaaatactaagccctggagataacagaaaatagatcattgtccattacct

SEQ ID NO: 9125 - DNA, 120 bp, synthetic construct
  source 1..120: mol_type = other DNA
ctctcacacacacacacacacacacacacacacacacacacacacactcagattcccagctcacaaggacccaggccccgccccccaccatgctcacctcgccgctgcactgtgaagctc

SEQ ID NO: 9126 - DNA, 120 bp, synthetic construct
  source 1..120: mol_type = other DNA
acaggaatgagaaatgtctgaagtgtggagttccagaacacagagtaataggatgatctcaattacattagggtgccagaggaggaccttctgaagggtgacagttcagatgtgacttgg

SEQ ID NO: 9127 - DNA, 120 bp, synthetic construct
  source 1..120: mol_type = other DNA
gcattgactaaatggattcaacaagaaagtggttgaatttatgcaactgtctacttttgcataatgaagcaagcaaaaataaaccataaagaactgaattgggtgctgagtgtataaaag

SEQ ID NO: 9128 - DNA, 120 bp, synthetic construct
  source 1..120: mol_type = other DNA
catgagcaggtccccagactttgtgtagagaccttcacaaagctccgtttgccctttagaaatgatggcagagaggtgtgcaccctggatcaaacaatgtctatctttctattcctaaat

SEQ ID NO: 9129 - DNA, 120 bp, synthetic construct
  source 1..120: mol_type = other DNA
ttagtttcataaagaattgtcattctgaaaacagagggcagaaacactggtttatgtctaataatgcagtatacctaaacctcacacaaaaggcacctgctgacatagaagaaatggact

SEQ ID NO: 9130 - DNA, 120 bp, synthetic construct
  source 1..120: mol_type = other DNA
ctccagacaatctccctatgtaacctcttccactccctggaatttaacacagtacacctattgatgccaccaacataaatacctccagccctggcctcaccatgagtctctttttttttt

SEQ ID NO: 9131 - DNA, 120 bp, synthetic construct
  source 1..120: mol_type = other DNA
aaagaatataaattgactttccttgtaaccatccagtagcttcccatatctatttaaataaaattcaggccatgcgcagtggctcacgcctgtaatcccagcactttgggagtctcaggc

SEQ ID NO: 9132 - DNA, 120 bp, synthetic construct
  source 1..120: mol_type = other DNA
agaaggggctcgagctccagcactctttcaatttgatgtcacactagaatccttctcctcccggtgagaaatacaggcaaatttcttctttctcctccttctaattggaagaagaattca

SEQ ID NO: 9133 - DNA, 120 bp, synthetic construct
  source 1..120: mol_type = other DNA
aggatttttccccataagaaaaagcactaagcataacttctgtcagagaccttgcatacattacagggtaaacattggagttcagaaagaaaagaaaggaggtaatggggaggccactgg

SEQ ID NO: 9134 - DNA, 120 bp, synthetic construct
  source 1..120: mol_type = other DNA
gaatttccttatttaaaggattgttttaaattagtacttgaaagatttgatccagttgcacgtaaaacactttaactgggtccctatcgtgagccagctctgtgctggtcagtgatgtgt

SEQ ID NO: 9135 - DNA, 120 bp, synthetic construct
  source 1..120: mol_type = other DNA
aggtcaactgtgcagtccaagtattcgtgggtctgagagatcgatcgaagactgtgaaagtcagctgttcacagagcaactatcttttctttttttttgaggcggagtcttgctctgtta

SEQ ID NO: 9136 - DNA, 120 bp, synthetic construct
  source 1..120: mol_type = other DNA
aagaagtgaggagcgtctctgccctgctgcccatcgtctgagatgtggggagcacctctgccccgccgccccgtctgagatgtgaagagcgcctctgcccggccgtgaccccgtctggga

SEQ ID NO: 9137 - DNA, 120 bp, synthetic construct
  source 1..120: mol_type = other DNA
gtgttcaatccctcattcttggttcccattatgattttctcatttgattgaggctatagcactttactattatgtttctcttgttttatcataagggaagatataagacgactttgataa

SEQ ID NO: 9138 - DNA, 120 bp, synthetic construct
  source 1..120: mol_type = other DNA
aagtagtaaatttgatcatctcaaaatagaagaaaaaaagtgcctcacttactttgggaaaacatacttctattaatatagaaagttcaaaatttcatgggtaaaagtcactattgtccc

SEQ ID NO: 9139 - DNA, 120 bp, synthetic construct
  source 1..120: mol_type = other DNA
gaggttctgcctgaggctgcccagggttgtgtccccagggtggccacgaagcctgattttcccgacggccaggcttgggcgtgatctgctccccacggtgcctcccccatcccatccagg

SEQ ID NO: 9140 - DNA, 120 bp, synthetic construct
  source 1..120: mol_type = other DNA
tgctgagaactgaggaaaggacaggacaatcagctgcagagaggagctaccctctctgttgataactgaacaggtgttggggcaacctggctatggagaggagctgcccactgcagctct

SEQ ID NO: 9141 - DNA, 120 bp, synthetic construct
  source 1..120: mol_type = other DNA
tagcacctgattaaagattaaagccttcttctttggcaatactcattgtcatctcagtgattggctttctgtgtggtgagcagcaagatccagaccaaagcccttgtgtgcaagatctag

SEQ ID NO: 9142 - DNA, 120 bp, synthetic construct
  source 1..120: mol_type = other DNA
gcccagtgataaaaatcctagaaaagcaaaataagcacaaaccaagatggcataaccttgtaagacttaacgaataaataacaagtttctttacctatggtttaaagaaagcagactctt

SEQ ID NO: 9143 - DNA, 120 bp, synthetic construct
  source 1..120: mol_type = other DNA
cctgacctcatgatctgcccacctcggcctcccaaagtgctgggattacaggcgtgagccactgcgcctggccagcctttgaaactcttataccaacctctggagttgggcaacatgctt

SEQ ID NO: 9144 - DNA, 120 bp, synthetic construct
  source 1..120: mol_type = other DNA
cattctcaccatcagtgtatgagaaattcaatttttctgcattctcaccagcatttaccattgtcagattttttagagattttagctttattagaagttgtgtagtgctattagaccaag

SEQ ID NO: 9145 - DNA, 120 bp, synthetic construct
  source 1..120: mol_type = other DNA
catgtagacatgatgtaattgggataaatgttttcataaggtctgagaatttaagtttctttcttgcttctttttccttttgcttcttttttgtttttgtttagttttgtttttgtctat

SEQ ID NO: 9146 - DNA, 120 bp, synthetic construct
  source 1..120: mol_type = other DNA
taagatggatgacattgattgatttcaaacattaaaccagacttgtgtccctaaaataaacgctatttggcatagtttacatatatttttagtttggctgattttttacttgctaacatt

SEQ ID NO: 9147 - DNA, 120 bp, synthetic construct
  source 1..120: mol_type = other DNA
ttttttccttcttcttgctttaggttatttttgacaacttttctagatttttgaggtgggaactgagattattgctttctgaagttttctctttttcagtgtatacattttgtactatgc

SEQ ID NO: 9148 - DNA, 120 bp, synthetic construct
  source 1..120: mol_type = other DNA
gcgccaccacgcccagctaatttttttctatttttagtagaggtgggggtttcaccatgttggtctggctggtctcgaacaactgacctcgtgatccacccgcttcagcctcccaaagtg

SEQ ID NO: 9149 - DNA, 120 bp, synthetic construct
  source 1..120: mol_type = other DNA
ctttccctgttttttgatgtgtcccttaagcaatatttagaattccattttttaatcaatcattttttggtgtatctcattgtagagtttttgtgatttatctatctattaatgcaactt

SEQ ID NO: 9150 - DNA, 120 bp, synthetic construct
  source 1..120: mol_type = other DNA
aaaagttagccaggcttggtggtgtgtgtctgtaattccagctactcaggaggcagaggtgtgaggatcacacgagcctgagaggcagaggctgcagtgagccatggttgcgccactgcc

SEQ ID NO: 9151 - DNA, 120 bp, synthetic construct
  source 1..120: mol_type = other DNA
aggttgtttgagcatttgagaatccattagtgtgattcattacattaactgaaggaaggagaatacacatggcaaccacctggatagagtcttgaaatatgatttgacagaactcagcac

SEQ ID NO: 9152 - DNA, 120 bp, synthetic construct
  source 1..120: mol_type = other DNA
gtgagtgttacaactcataaaagcagcgtggacccagagtcagcagtagcaacatttattgcaaaaagtgaaagaacaaagcttccacagtatggaaacggaccagagcaggttgccaag

SEQ ID NO: 9153 - DNA, 120 bp, synthetic construct
  source 1..120: mol_type = other DNA
ccaaagtgggagcccaggaaggggaggtgcggagagcaagcgagggctctgaggactgccagcacgctgtcacctctcaccatcttagctgtaatccatgggttctcactcagttcacag

SEQ ID NO: 9154 - DNA, 120 bp, synthetic construct
  source 1..120: mol_type = other DNA
ttcactatcttggccaggctggtcttcaactcctgacctcgtgatccacccgctttggcctcccaaagttctgggattacaggtgtgagccaccacacctagcgacgatgtcttattttt

SEQ ID NO: 9155 - DNA, 120 bp, synthetic construct
  source 1..120: mol_type = other DNA
gaaattgctgggtcatatggcaaacgtacgttaaactttgtaggaaattgccaatttccaggtatttgtaaaattatacactcccagcagcactacgtaagagttaagtctgtttgtctt

SEQ ID NO: 9156 - DNA, 120 bp, synthetic construct
  source 1..120: mol_type = other DNA
tgaattgaggatgcctgtcaggaatctctaggccttcatgtgaaatttaactacaaatactaacaacctaataataccacaatgtttcatttccctaccctgaaatcaatctctcctact

SEQ ID NO: 9157 - DNA, 120 bp, synthetic construct
  source 1..120: mol_type = other DNA
actttgaagtaaacttttgaattgattatgtactttcagatttgacatatttgatgctgactctcagatagaatacaatggagaaccctccatcttctaaatttgcctttctctgaaatc

SEQ ID NO: 9158 - DNA, 120 bp, synthetic construct
  source 1..120: mol_type = other DNA
aaattgttttcagacctggctttactaaaagcttcttttccctgctttcaacgactcagatgagagcactgcaggaagaagaaaaacaagttcctagatctccctgagccaatgatccag

SEQ ID NO: 9159 - DNA, 120 bp, synthetic construct
  source 1..120: mol_type = other DNA
tgagagaggaagccaggtttagtgatttttattccaaatttaacctctttaattgagactctaagattcagagctttcaaaatggggaagaaggctacctcctgtaagaactaaaataac

SEQ ID NO: 9160 - DNA, 120 bp, synthetic construct
  source 1..120: mol_type = other DNA
caggggctgggtctttgcaggatacacagtcaccttaggatggactaggagaaaaaaaggtagagagaatgaatcaggaagttagagtctcgttgttcagctgtttgtatgcttctctgt

SEQ ID NO: 9161 - DNA, 120 bp, synthetic construct
  source 1..120: mol_type = other DNA
tagagtctcgctctattgcccaggctgaaatgcagtggcgccatcttggctcactgcaacttctgcctcccaggttcaagtgattctcctgactcagcctcctgagttggtgggactaca

SEQ ID NO: 9162 - DNA, 120 bp, synthetic construct
  source 1..120: mol_type = other DNA
atatggaaaaaaattttcaaaatcaacatacaaaccacaaactggagaaaatgctgaataaaatatcaagaaagtgttaataatcttacagtacaaagaacccacaaagtagctgagaaa

SEQ ID NO: 9163 - DNA, 120 bp, synthetic construct
  source 1..120: mol_type = other DNA
cacagatgtctctctctctctctctctctctcacacacacacacacacacacacacactcaaattcccagctcacagggactcaggcccagccccccgccgcgctcacctcgcggctgca

SEQ ID NO: 9164 - DNA, 120 bp, synthetic construct
  source 1..120: mol_type = other DNA
aacacacaagagcttagacagaaatgagaaatgtcagaagtgtggagttctagaacagagaataataggatgatctcaattacattagggtgccagagaaggacccgttgaagaatgaca

SEQ ID NO: 9165 - DNA, 120 bp, synthetic construct
  source 1..120: mol_type = other DNA
atatgaagatactgaacttgcattgactaaattgccacagtccctgttggactgaacaaaggaggatgaatgggtgaataaagacaaaagacagaagagtatatttggaagaaggggtca

SEQ ID NO: 9166 - DNA, 120 bp, synthetic construct
  source 1..120: mol_type = other DNA
catcacaacagaagttattagtgtgaccaaggaaactatagcaaaaattatcatgcgtaaggctctatggccatgatgagtaagctgagttagaaaaagtttcacataatgcaaagcagg

SEQ ID NO: 9167 - DNA, 120 bp, synthetic construct
  source 1..120: mol_type = other DNA
taggggtcctggagcccacgctccctgattatgatcaatctcaggaggagtgtcactccagagtataggccatactgctggggggattgggaatatatgcccaatatatttttgcctctg

SEQ ID NO: 9168 - DNA, 120 bp, synthetic construct; identical to SEQ ID NO: 3391
  source 1..120: mol_type = other DNA

SEQ ID NO: 9169 - DNA, 120 bp, synthetic construct
  source 1..120: mol_type = other DNA
taagttgataagtggcaatacctagcatcgggtgcagccaattaatatcccctaacaactgttgaaaatcttttaaagtctgtaacctgtctttatggagaactacttttcgagaccgta

SEQ ID NO: 9170 - DNA, 120 bp, synthetic construct
  source 1..120: mol_type = other DNA
gaccaagacaaggtaaaatgtcagcactctgttgaacacttgtagctgctcttattcccactagggatgtggaggttagtctgagagaccatactgggggccagtccttactggatatta

SEQ ID NO: 9171 - DNA, 120 bp, synthetic construct
  source 1..120: mol_type = other DNA
ttgtcaactgctaaattagccactgcctgcactaatattgtagagcaatgaagctcagttcccacatcttgacaagctctgagaaaatttcccaagttttttgtacacctcacaggtgcc

SEQ ID NO: 9172 - DNA, 120 bp, synthetic construct
  source 1..120: mol_type = other DNA
tcagaacatcactcctgctgtccagcaagctaagaaggagataatggcagaaggacagtatggactaaactccaagtggagaaaacggaaggaccaactttgagacctttttgatgagcc

SEQ ID NO: 9173 - DNA, 120 bp, synthetic construct
  source 1..120: mol_type = other DNA
tattgccgcagtggaaatgctgagttggtcatgattctccggactctggctctctacactaaatggattcaacaagaaagtggttgaatttatgcaactgtctagttatttataatgaaa

SEQ ID NO: 9174 - DNA, 120 bp, synthetic construct
  source 1..120: mol_type = other DNA
cttgcctttataatcagtcatcaaatcatatcatttatctgttatagcatcttctttcttactttctgtgccactggtccaccaattatctgtagtaatgaatcacaaccacagccattt

SEQ ID NO: 9175 - DNA, 120 bp, synthetic construct
  source 1..120: mol_type = other DNA
ctaaccataagcctttttgtaatctatcaaatgcatttaataacagcatcatcttcacaggattatttttaagtgtaaaattaaataatgacttcttagcactgaccacataataaacac

SEQ ID NO: 9176 - DNA, 120 bp, synthetic construct
  source 1..120: mol_type = other DNA
ccaaccccagcaaacccagcacttgcttctctctcacattctcacttcacccacttagtgatactcattggcttctcccttcttcttgaaaaaaaatctattttccttgacttacaagca

SEQ ID NO: 9177 - DNA, 120 bp, synthetic construct
  source 1..120: mol_type = other DNA
ccccattgtgtctctctggaacattcgacccttagatcttcacatggctgtttacttattttgttgtctcagctgaatgtcactttctcaggtacagctgcctaagcatatgaaccaaag

SEQ ID NO: 9178 - DNA, 120 bp, synthetic construct
  source 1..120: mol_type = other DNA
tatacattctaggttaacgttcctttcagccattaaaacatcttgtgccacttctgtctggtctgcatgatttctaatgagcaatccactgtcatttaatttattttctcctgtgcatga

SEQ ID NO: 9179 - DNA, 120 bp, synthetic construct
  source 1..120: mol_type = other DNA
atccattagtgtgattcacgacattaactgaaggaaggagaatacacatgcaaccacctggatagagtcgtgaaatacgatttgacagaattgagcacttggccttaattttgaaaaaac

SEQ ID NO: 9180 - DNA, 120 bp, synthetic construct
  source 1..120: mol_type = other DNA
cttctttttattattaagttaaaattttacccctttgatttttacatatttatccttttataatacaggcatttaaaactaaatatttttctctaaggactgccttggttgcatctcgaa

SEQ ID NO: 9181 - DNA, 120 bp, synthetic construct
  source 1..120: mol_type = other DNA
attttccacctcctaactggcattatggtttatgatttttttccaatccatgttgatagtcctacataatttacttaaagccctgaatattattcctttctgtggttataccacagttta

SEQ ID NO: 9182 - DNA, 120 bp, synthetic construct
  source 1..120: mol_type = other DNA
cttatgtgatcaaaatttttcctgagcatcatatacttcttttaattttgttattttcttcatgcaaagaaatcagtaattttcttcaaatattttttcatttgtgtcttctggattttg

SEQ ID NO: 9183 - DNA, 120 bp, synthetic construct
  source 1..120: mol_type = other DNA
gattccaaggagtgaaattgctaggtcatagggcaaacatatgttaaactttttaagaaattgccaaattaccaggtatttgtagactcatacactcccaccagcaacacataaggaatt

SEQ ID NO: 9184 - DNA, 120 bp, synthetic construct
  source 1..120: mol_type = other DNA
ctggaaacagtttagttgctccttataaaggcacacaggagaaaggagtatccttttcctgcctttgggagttgttgtgaaagaataacaaacctaaagctgctgcaggggtcaccctac

SEQ ID NO: 9185 - DNA, 120 bp, synthetic construct
  source 1..120: mol_type = other DNA
cctttttaaatgttaggattacttttttaattgacaagtaaaaattgtatagtatatttatgttgtacagcatgaagttttgatatatggctatagtgtggaatgtctaaatccagctat

SEQ ID NO: 9186 - DNA, 120 bp, synthetic construct
  source 1..120: mol_type = other DNA
tttattgtgaagatcaaaagaacaaaacttccacagcagggaagaggacctgagtgggttgccactgctggttggggtggccagcttttattcctgtatttgtccctgcccatgtcctgc

SEQ ID NO: 9187 - DNA, 120 bp, synthetic construct
  source 1..120: mol_type = other DNA
agaaacagaccatgtgacccatgaagcctgaagtgtctgtcacaggatccagtgtaattccattagccttagtggctcttccttaatttgctccaggatctcaaaccaaaggacccctac

SEQ ID NO: 9188 - DNA, 120 bp, synthetic construct
  source 1..120: mol_type = other DNA
gggagagtgggtgaccctgacctgcaaaatcatggggaggttcaaaagagggacagtctctcccgcctggcaggcgagactgcttctccaggaggtacaggtgtttctagaaacacctac

SEQ ID NO: 9189 - DNA, 120 bp, synthetic construct
  source 1..120: mol_type = other DNA
agggcactcatcacacttgagtgctccacttggcacctatttatcatccttgtacaccttgacagaaaaatatgatttaaagcaatatgcatagataaagggacagagttgggtacatga

SEQ ID NO: 9190 - DNA, 120 bp, synthetic construct
  source 1..120: mol_type = other DNA
cttctggtgaatgtcataataaaggtcaacaaacgggaaagtgaggtgagttgtgtcacaaatattatatataaaagaataatatgtaactactagaaaactaccagcattataataaaa

SEQ ID NO: 9191 - DNA, 120 bp, synthetic construct
  source 1..120: mol_type = other DNA
tccagtactcagcgtcaggccgccccagctccgtcaccgcccggaactcccccacgtcgctgtcgaagcgcacggactcctcctggttatagaagtatctgtccaggaaccgcacccgct

SEQ ID NO: 9192 - DNA, 120 bp, synthetic construct
  source 1..120: mol_type = other DNA
cagacacaatatagtcactactcactaatgatggtcaaactctcaaactctataatcagaaaacctgaataaaaacacgatctcttctacttgggtcaatttttaccaaccataagcctt

SEQ ID NO: 9193 - DNA, 120 bp, synthetic construct
  source 1..120: mol_type = other DNA
tttcctttaggttcagctggctccctgaacccagagaacaatccttccctgaagctctctactcaaaacagtcaaccttaacctcgtcctcacttttactcactcttcaaatggtccaat

SEQ ID NO: 9194 - DNA, 120 bp, synthetic construct
  source 1..120: mol_type = other DNA
taaataaataataaaatttaatttttttttactgtggacatcagagcctataatgatgaggctcctgaattcctctctgtgtcctaccctcatcttctgcctctccatttccttgctttc

SEQ ID NO: 9195 - DNA, 120 bp, synthetic construct
  source 1..120: mol_type = other DNA
tacctcaaaaagagaaaaaaagtctctttcaatgaatctcatagtgctaaggttctgtgcaagctttagagatttctggaaatgatgacaacatagctggggaaaaatagaaactggagg

SEQ ID NO: 9196 - DNA, 120 bp, synthetic construct
  source 1..120: mol_type = other DNA
ttatggaggaaataatttgggatccaatgataaagatgggcaatctctgaagaaaacgtcacaatttcttaagggacatggcctgggcacaatgttaacaaaactccctattttccccac

SEQ ID NO: 9197 - DNA, 120 bp, synthetic construct
  source 1..120: mol_type = other DNA
taaaggaaattgaaagttagttaataatttaatctgagtaaaaagagttttttcaagtgtgtctcctgatgctgcccccaagtttagtgtcatctccagaacacacacaggcaaggggct

SEQ ID NO: 9198 - DNA, 120 bp, synthetic construct
  source 1..120: mol_type = other DNA
gcattaattcacaccctaccacagttctgacaggcactccttccttatgtgccttagtgtttctaggaatgagatactcaccatgctgcaataaaaatgactaaaatttcttgagcaatt

SEQ ID NO: 9199 - DNA, 120 bp, synthetic construct
  source 1..120: mol_type = other DNA
gtggaaagttgaagatttcttggagaggttggttagaagtcactattgtccctggatttgagaataaactgtgttcccacactacagtgataattcagtactattgacaattgtgcaatt

SEQ ID NO: 9200 - DNA, 120 bp, synthetic construct
  source 1..120: mol_type = other DNA
atacgagagattatttcctgaggaaatggcaataaaattggtttctggaagaaagtggttttcagtacggaacttccacggtctctggtcttgatgtatgaaaccataggtttggtttta

SEQ ID NO: 9201 - DNA, 120 bp, synthetic construct
  source 1..120: mol_type = other DNA
caccgcccttaatccatttaaccctgagtggacacagcacatgtttcagagagcacagggttgggggtaaggatcccaaggcagaggaatttttcttagcgcagaacaaaatgaaaagtc

SEQ ID NO: 9202 - DNA, 120 bp, synthetic construct
  source 1..120: mol_type = other DNA
acccctcacctcccggacggggcggctggccgggcaggggggctgaccccccctacctccctcccggacggggaggctggccgggcggggggctgacccccccacctccctcccggacgg

SEQ ID NO: 9203 - DNA, 120 bp, synthetic construct
  source 1..120: mol_type = other DNA
ggccgggcaggggggctgaccccccctacctccctcccagacggggcggctggccgggcggggggctgacccccccacctccctcccggacggggcggctggccgggcggggggctggcc

SEQ ID NO: 9204 - DNA, 120 bp, synthetic construct
  source 1..120: mol_type = other DNA
tcattttggtgctccactagcccactccccagtgactgcagtgtggacagtgaagaaattgatgaacctgttgaactgtaccaacttctcaatctgtcctataaagtgtgtgcctggttt

SEQ ID NO: 9205 - DNA, 120 bp, synthetic construct
  source 1..120: mol_type = other DNA
tgctgatactaattgcaatatcattaatactgaccatggttttttcacttgtagacttacagccatgacctagatagtgccatggtgcaaagactggctccacccaaagttcctcgatgg

SEQ ID NO: 9206 - DNA, 120 bp, synthetic construct
  source 1..120: mol_type = other DNA
acatctcatctgtcctggagaaagttcaatgtgtgcttgagaagaatgtgtattatatctaaaacatgctaaaaaaattcaccaaagtgctattagaataaatgaatacagtaaagttgc

SEQ ID NO: 9207 - DNA, 120 bp, synthetic construct
  source 1..120: mol_type = other DNA
aacctatacaacgttggtctggacaatgatttttattttatttgaccccaaaagcttaggcaacaaaatttaaaaatagacaagtgggattacatcacattaaaaagcttctgcacaaca

SEQ ID NO: 9208 - DNA, 120 bp, synthetic construct
  source 1..120: mol_type = other DNA
agcaatcccacttctaggtgtatggactaaggacttaaaatcagtatgttgaagagatatctgcactgtcatgttcattgcagtgttacttattatagccaagatattaagtgtccatca

SEQ ID NO: 9209 - DNA, 120 bp, synthetic construct
  source 1..120: mol_type = other DNA
ctagagatatagttgaggtgagatatgtactgaaagcaaaaatggaggctgggaactaaaaccttggtatttcctgtgcatgtgtctattcaccaatcatgccaatcaatcgatgcttct

SEQ ID NO: 9210 - DNA, 120 bp, synthetic construct
  source 1..120: mol_type = other DNA
tctcataggagaagctgttgtgggagccacacagggtggtaacagtcagcggtaatttggtgaaaagaattttgtagaagggattgtccctccttcacgtatttccatatataaatcctc

SEQ ID NO: 9211 - DNA, 120 bp, synthetic construct
  source 1..120: mol_type = other DNA
gaaatagagatagaggggagtctgctaacctagaattgaaaggctcccttaaataatactgggagatcagagtggatgtgcagagctgaagtacactaagaaaggcattgaaaatttggc

SEQ ID NO: 9212 - DNA, 120 bp, synthetic construct
  source 1..120: mol_type = other DNA
attttacaccaggcactgaattttctaccttcactttgtttcatttaattctcatcataaccctgcagtggatgtatgtatcaaactgtgttttcagttaactgctacattcccaacaca

SEQ ID NO: 9213 - DNA, 120 bp, synthetic construct
  source 1..120: mol_type = other DNA
cccagaaagtatcagcctgtcaataaatgctgctgaatcagttgtatatccttactgaaaaaaaaaagaaagaaatttgacacctatctcactttatacacaaaattaattccagtagaa

SEQ ID NO: 9214 - DNA, 120 bp, synthetic construct
  source 1..120: mol_type = other DNA
aaaatacaaatggggtttgggggtggtggctcacacctgtaatcctagcactttagaaggccaaggcaggtggattgcctgagctcaggagttcaagaccaccctgggcaacatggtgaa

SEQ ID NO: 9215 - DNA, 120 bp, synthetic construct
  source 1..120: mol_type = other DNA
ttttttagacctcttttcgtctttcagagatagcatccaaagactgagttctcaaacccccagggtgattatctatcctggttcccaggctctgtgctttaagatgaagcaggtcagttt

SEQ ID NO: 9216 - DNA, 120 bp, synthetic construct
  source 1..120: mol_type = other DNA
cactgcaacaagtgctgcaatcgattcgtttataaaatacaataagagcacaaatttgttggttttcaaacatgagccaaattgttaaaacagtttacacactggccgggcacggtggct

SEQ ID NO: 9217 - DNA, 120 bp, synthetic construct
  source 1..120: mol_type = other DNA
cttgcactaggcatttcaagaaagaaaagcattcctggaaatccccaatcggtcacaggcatgtttctccaaccaataggaatagagaatgaggcagcatcacttgtctccagcagatac

SEQ ID NO: 9218 - DNA, 120 bp, synthetic construct
  source 1..120: mol_type = other DNA
ctttatcagagctccttggggttcagttagtgaatatagttacatagtagaatgggaataaaaacactgtattcatggtcatgaggtcagaattctggcacccaacccacaccttggtca

SEQ ID NO: 9219 - DNA, 120 bp, synthetic construct
  source 1..120: mol_type = other DNA
ggtgatccacagccctggcctcccaattctgggattacaggcgtgagccaccacgcctggcccatctggcacctttttaagtttgataagaaacatttacaatctagtctgtctgaagcc

SEQ ID NO: 9220 - DNA, 120 bp, synthetic construct
  source 1..120: mol_type = other DNA
atcactagtggcactttgtgtggatcccatggtgttattcaaggtttacaacataacgctaaacatgaaaaatatacgagaaacataagagatcactttttactgcaatacacaatttat

SEQ ID NO: 9221 - DNA, 120 bp, synthetic construct
  source 1..120: mol_type = other DNA
agaaatattgtagcttagtttttcatcattatatactcatgaactttccaactcacttcctgaaaaactggccacatagctacaattatttgtcacccccttggtaactccatgggaata

SEQ ID NO: 9222 - DNA, 120 bp, synthetic construct
  source 1..120: mol_type = other DNA
ctgttcaagaaaatctctgaaaattggcaagaaaagcaagagtctgtggtgtttgaaccaagactataccctccctctctcctgcatgccagctcagtgaggtcagtgaggcatagactc

SEQ ID NO: 9223 - DNA, 120 bp, synthetic construct
  source 1..120: mol_type = other DNA
gccccagggcattattgaaaagagtggtaattaatggacttcagtggctgggttggtgagggaaagaatgaaaaagagtcctacaggaccactgtcattccagggtaaccctggatatac

SEQ ID NO: 9224 - DNA, 120 bp, synthetic construct
  source 1..120: mol_type = other DNA
tgacacataacattatccattacattcatagacctaaaggaaaggatggctaaagaagtgaaggaaggtgtgatggcaatgtttcatcagagagaataacaataagaggaggtgcagctg

SEQ ID NO: 9225 - DNA, 120 bp, synthetic construct
  source 1..120: mol_type = other DNA
gtaatttataaacaacagaaatgtattcctctcagttctggaggctaggaaatccaagatcgaagaacaaacagattcagtgtttggcaagggcttactgtctgtttcccagacagtgcc

SEQ ID NO: 9226 - DNA, 120 bp, synthetic construct
  source 1..120: mol_type = other DNA
ctaagaaaccacctactacttaacattataaataggtgcttcttttgtgttccattagaccataagccccttaaatttaagcctgttttccacaagtctgcatctcccaccatgcctaga

SEQ ID NO: 9227 - DNA, 120 bp, synthetic construct
  source 1..120: mol_type = other DNA
taaagttaggtatgctgtctataaatctaacaagttatagaggtctgttacatcagggttttacactgaactaaatgaaattgatcaagattctttttgatcaaaaacagatgattgttg

SEQ ID NO: 9228 - DNA, 120 bp, synthetic construct
  source 1..120: mol_type = other DNA
attggattcatacaacatagtatccacaaaaatcaattcaattcaggctaatcaaatgtgaacaggaaccacagtgaactatcaccttatcccagttggaatgcctactatcaaaaaggc

SEQ ID NO: 9229 - DNA, 120 bp, synthetic construct
  source 1..120: mol_type = other DNA
ccttggttatggatccacagaggcttcatgtgaagaaggcattcagatcaaatgctcaaagtggagtaagatatcattgtctttcacagaatcacttaatagactgcagcagatctccct

SEQ ID NO: 9230 - DNA, 120 bp, synthetic construct
  source 1..120: mol_type = other DNA
tgagaaagctacaacaaactacaagacagaaaaaccacgagagctaaaaatgagcattttgtggtaccaatcttgctgtaaaagtcttaatattttgtgtatctttctcagcactagact

SEQ ID NO: 9231 - DNA, 120 bp, synthetic construct
  source 1..120: mol_type = other DNA
cacattgagaacctcagagtaactaataataagtgtgatgcttgtaggaaaagaagagctgtttggtcacaggatgtggttattagaatagggttgtggttgaaggggaaggatgatgac

SEQ ID NO: 9232 - DNA, 120 bp, synthetic construct
  source 1..120: mol_type = other DNA
tttaaaaaagaatgtcttatgaatattatggctatattgttaattttcaaagtgtttttgttgttttacctatggagaaaagattaatagcaatttggtttgttttacaaagggactacc

SEQ ID NO: 9233 - DNA, 120 bp, synthetic construct
  source 1..120: mol_type = other DNA
gaaggatcttaatgacactcagaagactagaattagatgatagaagaacgactacatttttctcctcccaacagtcttaatagggcctccaggtctaaggtgagtggccttgaaaaatct

SEQ ID NO: 9234 - DNA, 120 bp, synthetic construct
  source 1..120: mol_type = other DNA
aaagtgcattcactatttaaatcacctgtagatgaattatgctggacttgaccaagagtgtttgtctatgcataaatcaaatgcagtcgactttccctatccaaggttccacatctgtgg

SEQ ID NO: 9235 - DNA, 120 bp, synthetic construct
  source 1..120: mol_type = other DNA
cttgaattctggctccatttcttactattggtatagctttagtcaggtatccaacccttccatgctacaatttcctaattggtaaaatgggggagggagatataataatatacctactta

SEQ ID NO: 9236 - DNA, 120 bp, synthetic construct
  source 1..120: mol_type = other DNA
taatctgactgttgaacccttcacttctctggttagttaattttccagacagagggcgctgaaaggacacccatgtatcatgtgttatttacaattcctcaccccaatccccaatctcca

SEQ ID NO: 9237 - DNA, 120 bp, synthetic construct
  source 1..120: mol_type = other DNA
tgaattatttttactagatatttctattaattctatgaaatatttatttttataatcattttttgctttcttttggattagttgttgccctagaattttacatatatgaataatctatct

SEQ ID NO: 9238 - DNA, 120 bp, synthetic construct
  source 1..120: mol_type = other DNA
cctcctgggttcacaccattctcctgcctcagtctcccgagtagccatcatgcctggctaatgttttgtatttttagtagagacagggtttcaccgtgttagccaggatggtcttgatct

SEQ ID NO: 9239 - DNA, 120 bp, synthetic construct
  source 1..120: mol_type = other DNA
tatgtgtctgttcttgtaccagtaccatgctgttctggttactgtagccctgtagtgtagtttgaagttgggtagtgtgatgcctccagctttgttctttttggttaggattgccttgac

SEQ ID NO: 9240 - DNA, 120 bp, synthetic construct
  source 1..120: mol_type = other DNA
taacaattgtttttataagtttcctctgcttcattaattttatgattgtgagaggccatgtgactggatatcagcatacaggactttgtatcagaatatgagcttggcagtcataagaga

SEQ ID NO: 9241 - DNA, 120 bp, synthetic construct
  source 1..120: mol_type = other DNA
cagcaatgtcttagtgcttctgtggctcacaggctcccacatgcctggagtgctacagggagaaggttaaatgaatgaggaaaaattgataggctttcccagcccaaagcatgatgttat

SEQ ID NO: 9242 - DNA, 120 bp, synthetic construct
  source 1..120: mol_type = other DNA
tggttaacacagtgaaaccccatctctactaaaaatacaaaaaattagccgggcgtggtggcaggtgcctgtagtcccagctacttgcagtgagccgagattacgccactgcactccagc

SEQ ID NO: 9243 - DNA, 120 bp, synthetic construct
  source 1..120: mol_type = other DNA
gaccagcaggagcatacaagcaatgaacaagtcagctttattgtttattgcaatgatggataaaactcaccatgagaatcatgcagcccctcagtaagagattgttggaaccaaagaagt

SEQ ID NO: 9244 - DNA, 120 bp, synthetic construct
  source 1..120: mol_type = other DNA
ttttgttttactttttttttttacagtctctgccagtaggaggtaaaacatagtgctgagaatctcagaaggccatttatcaaggacagagtgattctaaatagaagctccattaactta

SEQ ID NO: 9245 - DNA, 120 bp, synthetic construct
  source 1..120: mol_type = other DNA
cttgccattgtacctcagcctgggtgacagagtgagactacgtctcaaaaaaaaagaaaaagaaaagaaaaaggaaaaaaaagaaaaacacccatccctcttgcgactggcagacatgca

SEQ ID NO: 9246 - DNA, 120 bp, synthetic construct
  source 1..120: mol_type = other DNA
ttttaccacatggtcctcacttactctcagctgcctcatatgtgtcacctcacaagtaatcaaataaaatgggcatgtggctaagctttgtaaatagtgaaaacatgaatgtcaattttt

SEQ ID NO: 9247 - DNA, 120 bp, synthetic construct
  source 1..120: mol_type = other DNA
gaaggtactttaaactttcacaactttattaaccgtggctgctcccattatgattttgttcggcagtggaagtttcacctgcttctccagagcgcttggcgtctttgttccaaatttcct

SEQ ID NO: 9248 - DNA, 120 bp, synthetic construct
  source 1..120: mol_type = other DNA
aacttggacagccagatgttgagacggaggggttggaggtcataatgtggtcaaaaacatgttgatgagaggactcagctacaaagttgttaacttaagcagaaacctcaaggatggatt

SEQ ID NO: 9249 - DNA, 120 bp, synthetic construct
  source 1..120: mol_type = other DNA
ttgttcaattacattatttaatcataagtccatgacatgccaggcactcaggaaatagtaaaaattggacatgcgatattctgcccttgtgtagcgcacactagagtgggaaagaaagtg

SEQ ID NO: 9250 - DNA, 120 bp, synthetic construct
  source 1..120: mol_type = other DNA
caacatctttcctcctgtggtcaacatcacatggctgagcaatgggcagtcagtcacagaaggtgtttctgagaccagcttcctctccaagagtgatcattccttcttcaagatcagtta

SEQ ID NO: 9251 - DNA, 120 bp, synthetic construct
  source 1..120: mol_type = other DNA
aggagcagaagaatggacttgctaaatgacctagcactattctctggcccgatttatcatatcccttttctcctccaaatatttctcctctcaccttttctctgggacttaagctgctat

SEQ ID NO: 9252 - DNA, 120 bp, synthetic construct
  source 1..120: mol_type = other DNA
tatggctacaggatgtttcttggaaacatgccaatatcttcagaaatccccagccctttcccctaacccctcctgactaaggaaagcatgagcttatgagagaaaccctaggaagaacaa

SEQ ID NO: 9253 - DNA, 120 bp, synthetic construct
  source 1..120: mol_type = other DNA
aaggagaaaataatttaaaacacagactgggaatcagtaagcacaggaaatctgaaccagtgatgatcatgaaaatgtccatcacagagcacagatgattttcagggcaataaaactatt

SEQ ID NO: 9254 - DNA, 120 bp, synthetic construct
  source 1..120: mol_type = other DNA
gtctgtaatataaggggtatactgaatggcataatgaccagagtcatgcagaaatctacaaatgctgcccaactcagactccttcctcaagcagcactgtggaaagcaaatttaatgata

SEQ ID NO: 9255 - DNA, 120 bp, synthetic construct
  source 1..120: mol_type = other DNA
tttcttcagcaacaattcaagagagagagagaagagaagctatacattttaaaaggctgaagaaatatatgaaccaaatttgtatgaggcaatcagaaaaactgacaccgactgtattaa

SEQ ID NO: 9256 - DNA, 120 bp, synthetic construct
  source 1..120: mol_type = other DNA
ttggctatactaagcccccagacttgtttatatgttcattaattcatcaaaaatgcaaaaatggtcatggagtaccattatagcaataagtacaatactttgttatgagtatcattaaaa

SEQ ID NO: 9257 - DNA, 120 bp, synthetic construct
  source 1..120: mol_type = other DNA
aggatgccctctctcaccactcttattcaacatattattggaagttctggccagggcaatcaggcaaaagaaagaaataaagggtattcaattaggaaaagaggaagtcaaattgtcact

SEQ ID NO: 9258 - DNA, 120 bp, synthetic construct
  source 1..120: mol_type = other DNA
aatctacccatctgacaaagggctaatatccagaacctacaaagaacttaaacaaatttacaagaaaaaacaaacatcatcaaaaaaccctcatcaaaaggtggacaaaggatgtgaaca

SEQ ID NO: 9259 - DNA, 120 bp, synthetic construct
  source 1..120: mol_type = other DNA
taaagaattcttttttttttttttgagacagagtctcgctttgttgcccaggctgtagtgcagtggtgcgatcttggctcactgcaagctccctgggttcatgccattctcctgcctcag

SEQ ID NO: 9260 - DNA, 120 bp, synthetic construct
  source 1..120: mol_type = other DNA
ctcaagggttaaagaaacatcataaaatattccagtaagggaaaccaaaatgaaactgacaacagacagaaagtcggactcctagatgcttctattaagataataagaaaggccttgaag

SEQ ID NO: 9261 - DNA, 120 bp, synthetic construct
  source 1..120: mol_type = other DNA
agttctgaagctgtaagagcctttcagagttggcccaaattagggaaagggtttaggacatttatacccccacactgaccagtcattataggtggattcttcctgggaagtggagtaaaa

SEQ ID NO: 9262 - DNA, 120 bp, synthetic construct
  source 1..120: mol_type = other DNA
aagaacctgggggacattatgttaagggaaataagccaggcacagaaagacaaataccacatgacctcacttacatgtggaatctaaaaaagtcaaaatcacagcaggtggggaaatggg

SEQ ID NO: 9263 - DNA, 120 bp, synthetic construct
  source 1..120: mol_type = other DNA
ggagttcaagatcagcctggccaacatggtgaaaccctgtctcgggaaacccctgtctctactaaaaatacaaaaattatctgggcatggtagtgcatgcctgtagtcccagctatttgg

SEQ ID NO: 9264 - DNA, 120 bp, synthetic construct
  source 1..120: mol_type = other DNA
aatcaagtaggttcttttttatttttcctaagagtcggtcggcttgagaaataaagagacagagtacaaaagagagaaattttaaagctgggcatctgggggagacatcacacattggta

SEQ ID NO: 9265 - DNA, 120 bp, synthetic construct
  source 1..120: mol_type = other DNA
tggcataagaaattataaaagtattaatttggagaactaataaatgtccatgaaatcttcacaatccacgttcttctgccatggcttcagccggtccctccgtttggggtccctgacttc

SEQ ID NO: 9266 - DNA, 120 bp, synthetic construct
  source 1..120: mol_type = other DNA
actaatcctcctcagcacagaccctttacgggtgtcaggctgggggacagtcaggtctttcccttcccacgaggccatatttcagactatcacatggggagaaaccttggacaatatccg

SEQ ID NO: 9267 - DNA, 120 bp, synthetic construct
  source 1..120: mol_type = other DNA
ctccctcataaccgggaaaagagtgtcatcaggaatcaacaggttacaacgtcaatgacaaagggagctcagacaaggagtggaatgactgtgaacaggtacccccagtgagggacccta

SEQ ID NO: 9268 - DNA, 120 bp, synthetic construct
  source 1..120: mol_type = other DNA
ttgatcgatgtgactttccagaatgtttgaaacaccagtgaccaaggatcactatatatgtctccaaacaattctaccatgcttatttacacagcactcaccaaaccagaagagaggctg

SEQ ID NO: 9269 - DNA, 120 bp, synthetic construct
  source 1..120: mol_type = other DNA
gctcatgaggacacagaacttcagcttgatgcagatgtgtgggaggtggggaacagctgttattcttctggggaatatgaagggttcagtctttttaggaaattggatgatatctcttcc

SEQ ID NO: 9270 - DNA, 120 bp, synthetic construct
  source 1..120: mol_type = other DNA
tgataaggcccagcccaaggaagatcagccccagcacgaagcctccaacgccactcagcatcttgctctgggcagattcagactgagcccctaaagagcagaactgagtgtctgtgtttg

SEQ ID NO: 9271 - DNA, 120 bp, synthetic construct
  source 1..120: mol_type = other DNA
ctccttggaccagagtggaaagatacctggagtcgaagtcttggattaaggttcattcaacaaatataaatttgacaatcactgagaattcaaagataaataacatactatggtccctgc

SEQ ID NO: 9272 - DNA, 120 bp, synthetic construct
  source 1..120: mol_type = other DNA
cttgctggcattaggatgtgagtcaaaagaaggcaagggagtgtaaagcaaactaaaagttttgtgaacctgcatagataacaccggggtcagactagggattgattaatcatgaatttt

SEQ ID NO: 9273 - DNA, 120 bp, synthetic construct
  source 1..120: mol_type = other DNA
atgtgtcaggtaccaggcatgcaataattaaacagtctctcgcctcaaagatctccgccattagtggtagccatttaagaaaacagaattacgatgaataatgatttgaagccaaaaagt

SEQ ID NO: 9274 - DNA, 120 bp, synthetic construct
  source 1..120: mol_type = other DNA
cctgacccggcctggagctgtggaaccgcccgcgcgacctccagttcccgcccgcccgtgcctggcgctccagacctgggatcctcccggcggctctgcccagctctgcccgccttcttt

SEQ ID NO: 9275 - DNA, 120 bp, synthetic construct
  source 1..120: mol_type = other DNA
accattgctgcctcacattttccaatgcaggatctcataatcctaagtccaggcagtcttggggcacgcctaaatgacaaatcctgctgtgtctttggagaaattcatatcttcaaaaat

SEQ ID NO: 9276 - DNA, 120 bp, synthetic construct
  source 1..120: mol_type = other DNA
ttgctgtcacagaaatttttactgctgttgtcttagacacgctgaagagccttaagtcctggggagaagagcaaagttcttagaaggaaataatggtaagttgcagttccaccactaatg

SEQ ID NO: 9277 - DNA, 120 bp, synthetic construct
  source 1..120: mol_type = other DNA
atctaaaatcagaatataagtttatcagataaaaagaagcagggaagaggcaacagcaagacgtttgcaatagtggcacatgaaagcgttgagccactccaatattctgtattattcagt

SEQ ID NO: 9278 - DNA, 120 bp, synthetic construct
  source 1..120: mol_type = other DNA
cataggagccattctgtcaccagaaggaccatccaggaccctaccctgcatttacttcaggaatcaagaatcactgtatattctgaaaggttctgtggcttccttaatgccaatggtaat

SEQ ID NO: 9279 - DNA, 120 bp, synthetic construct
  source 1..120: mol_type = other DNA
gtgtccaagaactcagctcaaggccatggttcatgcaaaacagcaacatcagcagtaatattttggggagagtactcttatatcatcaaataggaaaacttaagatattccatttaaacc

SEQ ID NO: 9280 - DNA, 120 bp, synthetic construct
  source 1..120: mol_type = other DNA
cagtcctcaagattaactttcccttggcataatgagtttggggtcccaagattctatttttctttcacactgttatttgtgacaacatgcatgaacctagaggacattaagctaagtgaa

SEQ ID NO: 9281 - DNA, 120 bp, synthetic construct
  source 1..120: mol_type = other DNA
tttcacctcccacaatgattctgaggcctccccagtcatgtggaactgtaagtccaattaaacctcttattcttcccagtctccagtatgtctttatcagcagtgtgaaaacgaactcat

SEQ ID NO: 9282 - DNA, 120 bp, synthetic construct
  source 1..120: mol_type = other DNA
gtcaagaattgaggtttggaaacctccacctagatttcaggagatgtagggaaacgcccaaatgcccgggcaaaagtttgcttcaggaacagggacctcatggagaacctctgatagggc

SEQ ID NO: 9283 - DNA, 120 bp, synthetic construct
  source 1..120: mol_type = other DNA
ttggactatggacttttgggttaatgctgaaatgagttaagactttggggaactgttgggaaggcatgattggttttgaaatgtgaggaaatgagatttggagtggcccaggggaagaac

SEQ ID NO: 9284 - DNA, 120 bp, synthetic construct
  source 1..120: mol_type = other DNA
agatcccatttgtcagcatttgcttttgttgcaattgcttttgatgttcttgtcatgaagtctttgcccatgtctatgtcctgagtggtgttgcctagattttcttctagggtctttata

SEQ ID NO: 9285 - DNA, 120 bp, synthetic construct
  source 1..120: mol_type = other DNA
aatatgctttatttctttttcttgcctgattgtcctggccagaaattccaataccatgttgaataggagtggtgagagtgggcattgttgttttgtgcatgtgtttaaggggaatgcttt

SEQ ID NO: 9286 - DNA, 120 bp, synthetic construct
  source 1..120: mol_type = other DNA
gaccagatcctggattcgttgattttttgaagagttttttggtgtctctgtcttcttcagttccagtctgattttggttatttcttgtcttctgctagctttggggtttgtttgttcttg

SEQ ID NO: 9287 - DNA, 120 bp, synthetic construct
  source 1..120: mol_type = other DNA
ctctaagaatttgtttcatgaatctgggtgctcttgtgttggcggatgtatatctaggttagttagctcttcttgttgaattgaaccctttaccattatataatgctcttctttgtcttt

SEQ ID NO: 9288 - DNA, 120 bp, synthetic construct
  source 1..120: mol_type = other DNA
ggcaccccaatcagtcatagcttcagtctcttttacataatctcatagttcttggaggttttgttcattccttttcattctttttttctgtaatattgtctgcctgtcttattttggtaa

SEQ ID NO: 9289 - DNA, 120 bp, synthetic construct
  source 1..120: mol_type = other DNA
cctctggattgccaggctcttcagagccaacaggcaggaaagaggaagttttctgaactgtggagattgtggccacccctccctctaggggatggacagccacagtttccacagtttatg

SEQ ID NO: 9290 - DNA, 120 bp, synthetic construct
  source 1..120: mol_type = other DNA
tatgaggcaccatgcctgaccatattttggatattgatctcttatgagatatactatttgtcaacatcttctttcattctgttgattaccatgtttactctattggcactgtcctgtcgt

SEQ ID NO: 9291 - DNA, 120 bp, synthetic construct
  source 1..120: mol_type = other DNA
tcttttcttgtctatgtctttggtgttatgtccaggaaatcatagcctaatcaaatgtcatgaagattttcctttatgtttttttctaatggtttggtagttttaagttttacatttagg

SEQ ID NO: 9292 - DNA, 120 bp, synthetic construct
  source 1..120: mol_type = other DNA
acttttactatttgtttctctttgtgtttcactctgaataatttttattgatctatttcaaattcattgatgcttcccagggctgtgtcaagtttgctgatgagtttgacaaatgtattt

SEQ ID NO: 9293 - DNA, 120 bp, synthetic construct
  source 1..120: mol_type = other DNA
catgagaacagctataaactagttttgctctgctggagctttagggaatttgggtgtggagtttacaatgtatcttcatgggatgcttctttattctggaagatggtctaatgcctaagt

SEQ ID NO: 9294 - DNA, 120 bp, synthetic construct
  source 1..120: mol_type = other DNA
aagaagataatccttgttgactgtagtcctggttgttgagaccatgcatattacttttcccttcattagaggaggactacagttgatagccattattacgagagatgcctcaggaacaaa

SEQ ID NO: 9295 - DNA, 120 bp, synthetic construct
  source 1..120: mol_type = other DNA
tgattctcacatattgtcccataagtctatatcaatcaaatcaatttttattatcctgaaagcacctatggaaatactaccttttttgaagttaaatacgagcactctgctccatgctgt

SEQ ID NO: 9296 - DNA, 120 bp, synthetic construct
  source 1..120: mol_type = other DNA
aagcagatccaaatttatgttatgattaacgagatcgaaattgtatttatagtagtctccccttattcatgggggatacactgcaagatcccacagtagatgcctgaagccacggattgt

SEQ ID NO: 9297 - DNA, 120 bp, synthetic construct
  source 1..120: mol_type = other DNA
catacacacatacagagatgatattgagttagattaaaagtttaaatgtaaatcaagaaggaactcaaaatacagaaaaagatacatgttaatatttattttattaaaaagtgttggaat

SEQ ID NO: 9298 - DNA, 120 bp, synthetic construct
  source 1..120: mol_type = other DNA
attaaaattaatgtaataggtgctggtgaatctaccagttcacatagatgagaacatagacaataactttataatatattcaagtctattaggtcaagcttactaattgtgttgtttaga

SEQ ID NO: 9299 - DNA, 120 bp, synthetic construct
  source 1..120: mol_type = other DNA
actttaatctttcccatgattttactgacttttttatcctgttgtcacatgtctagaacccattctaacgtgtatcaggcctgggtatgctgcctggaaggtggatgtattttgcctcct

SEQ ID NO: 9300 - DNA, 120 bp, synthetic construct
  source 1..120: mol_type = other DNA
gcataaagacataaatgatttaagaaacatgacatgttcagagatgggagtgtaattttgggcttgtattttcaaacaaaattcatatgacaatgagaattcaaacagtttagattatta

SEQ ID NO: 9301 - DNA, 120 bp, synthetic construct
  source 1..120: mol_type = other DNA
atatacagtccttcaaaacaatgttttagaaagatatttaatgacaaaatagagttgtttaccatatgttaaatttaaaaggagttacaaattagcacattcactgtgatctaaaacctc

SEQ ID NO: 9302 - DNA, 120 bp, synthetic construct
  source 1..120: mol_type = other DNA
tttttgaaaagttaaacaaaattgacaaacctttagcaagacaaactaagaaaaaaagagagaagatccagataaataaaatcataaatggaaaaggagacattacaactgatactgcag

SEQ ID NO: 9303 - DNA, 120 bp, synthetic construct
  source 1..120: mol_type = other DNA
gaaagatataaatggcatccaaatttaaaaggaagaagtcaaattatccttgtttgcagaggatatgctcctatatttataaaaacttaaagactccacaagaatactattagaactgat

SEQ ID NO: 9304 - DNA, 120 bp, synthetic construct
  source 1..120: mol_type = other DNA
ctactacaagaaaacattagggaaaatctccaggacattggtctaggcaaaaatttcctgagtgatactctacaaacacaagcaaccaaagcaccaatggagaaatgggattacatcaag

SEQ ID NO: 9305 - DNA, 120 bp, synthetic construct
  source 1..120: mol_type = other DNA
actatttgatagcacaacagggtgactatagtaaatagtaactatacatttaaaataacttcaagagtgtaactggattgtttgcaactcaatggataaatgcttgagggtatggatgcc

SEQ ID NO: 9306 - DNA, 120 bp, synthetic construct
  source 1..120: mol_type = other DNA
caaaggatctgctggtctgcacatcagactcaatattctctactacaaggagacaggatataagcccagtccatctgcttcgttctttgacagtacatttcattcaaaataagtacaagt

SEQ ID NO: 9307 - DNA, 120 bp, synthetic construct
  source 1..120: mol_type = other DNA
gtatctaaatatatttcatgactatgttgtccaacttttgtaatacatatcaacaaatatctacctgttatatccatttttaagaaatacataaaatgtaataacttgtacttttctcac

SEQ ID NO: 9308 - DNA, 120 bp, synthetic construct
  source 1..120: mol_type = other DNA
cactattatatctgccactgctatattatttagagttctctttacttctttctagccaatctcttattactcagatctcttgttaagattcgtatttctttatattgatctttctcattt

SEQ ID NO: 9309 - DNA, 120 bp, synthetic construct
  source 1..120: mol_type = other DNA
atgcagggattacctacagaggaactaaacatagtaagataataaaatcacaagaaagatgtcagagacctaatttttggtggtttaaattatctggtttcataacaggaagtcaatgga

SEQ ID NO: 9310 - DNA, 120 bp, synthetic construct
  source 1..120: mol_type = other DNA
acaaggttagttttaaaataacgccatcgttagcattcccattccctactatctatctactcctcacagcttctgctcagattgtcttctctccattgtctcttccatctccctgtacaa

SEQ ID NO: 9311 - DNA, 120 bp, synthetic construct
  source 1..120: mol_type = other DNA
gtgctcttgctgtttgttgtttgtgttagtgacttgcttgggctagttcttccaagtctgtttccccctagtatgcagcctatggtgtctctgctaagtttgtttaataatttttgtttt

SEQ ID NO: 9312 - DNA, 120 bp, synthetic construct
  source 1..120: mol_type = other DNA
ttgtccaatgttctcactgctttttagattcgttgaaatgttttgatgtcaatatatgtggtatatttttatgtattttctacgtgaatttgaaaataagctgtatatagcatttggtac

SEQ ID NO: 9313 - DNA, 120 bp, synthetic construct
  source 1..120: mol_type = other DNA
tctcaggggaaactcacagtaaacgttgaactcacctagttactttccttttctcaatatttatctcctgatgtattctgcatgcttcaaaagatctccaatgattgcaaatttttaagt

SEQ ID NO: 9314 - DNA, 120 bp, synthetic construct
  source 1..120: mol_type = other DNA
aggaataaaaataaaacttgagtcataatgatggaaaaaccataagaagaacataacttttctaaatatgtatgcatctaataatatgacttaaaaataaatgatacaaaaattgacaga

SEQ ID NO: 9315 - DNA, 120 bp, synthetic construct
  source 1..120: mol_type = other DNA
accatcatcctcagcaaactaacacaggaacagaaaatcaaacaccgcatgttctcactcataagtgggagttgaacaatgagagtacatatccaagtctcacatgtctcaacaatgaga

SEQ ID NO: 9316 - DNA, 120 bp, synthetic construct
  source 1..120: mol_type = other DNA
actggagtgatagaatgcccagaaaaaaaccagtgaagaagaatacttctgaggtaataaataggagcatcccgtatcggaggtcttttaggacaattgttgtgtggtggccttggaata

SEQ ID NO: 9317 - DNA, 120 bp, synthetic construct
  source 1..120: mol_type = other DNA
tccgatcacattaaacgtgtaaaaaacaactcttgctatatctctactatagtggatgtctccctggcctcctccttgtccatctggagtaaggaactgcaggaaagaaacaacatccaa

SEQ ID NO: 9318 - DNA, 120 bp, synthetic construct
  source 1..120: mol_type = other DNA
gattgacagagcaggagcatcgccattttggacatgcaccaccattttaaagttccccttgatcaaaagccacctaaatccaacccaaagggcatcagcctaatggctaatggcagcatg

SEQ ID NO: 9319 - DNA, 120 bp, synthetic construct
  source 1..120: mol_type = other DNA
aatgagaaaggagagatagagaccgtgaactaggtaaatggatgtgcatcatttggtggtagtaaaaacacaatctaaatttactccgtgctcaagctcataaattatgattattgacaa

SEQ ID NO: 9320 - DNA, 120 bp, synthetic construct
  source 1..120: mol_type = other DNA
ttttaagactgaataatattccattgtatgtttataccacattttgcttttccaggcatccattgatggagatttgtttgtttgtttgtttcaccttttggctaccattaacgtttgtgc

SEQ ID NO: 9321 - DNA, 120 bp, synthetic construct
  source 1..120: mol_type = other DNA
tctgctccatagcaacttcattaaaggacctagtctaagttcaagattaaaaggttatatgaggcatatgtgtatgagcaggatagagaaaaatagcaaaaatatcttcttttgaaccat

SEQ ID NO: 9322 - DNA, 120 bp, synthetic construct
  source 1..120: mol_type = other DNA
aacacaaacacacttagagttatacaaatgtattttctttctctatatctttattgtttaaacttttttctaaaccttttactttttatacttttttttttctaaacagttaaggttcaa

SEQ ID NO: 9323 - DNA, 120 bp, synthetic construct
  source 1..120: mol_type = other DNA
tggcactaggactgtgatatttgtatcatagttcagctcctaatggctttgatatgctggtgtgaaactgtccccctcgtgcggcttggggagcccaagaccctgagagttatgatggtt

SEQ ID NO: 9324 - DNA, 120 bp, synthetic construct
  source 1..120: mol_type = other DNA
tggttttatttcactagtctatgattgaggttgataagtttcttgtatctgtgttttgacatcgttaatcagttttggaaaattttctgccattatctttttgttttctctgctgcactc

SEQ ID NO: 9325 - DNA, 120 bp, synthetic construct
  source 1..120: mol_type = other DNA
tagaggggatgtgcaaggcagcatttgttcagtggaatttcagaattgccagggatcagtgactgttcagtcccccattctttccgtttttgaatgggcatgtttactatcattatcctg

SEQ ID NO: 9326 - DNA, 120 bp, synthetic construct
  source 1..120: mol_type = other DNA
ggcagttacccaggggaccttcccccaacctttctctgtgcccaaactctcttatctgtgttttactgtctgctctttctggctatttgtagttagaagagaagtgatttccttgaaatg

SEQ ID NO: 9327 - DNA, 120 bp, synthetic construct
  source 1..120: mol_type = other DNA
ctgttcctgcaccactaaaatatacgtcccatgaggacaggaataattttttctgccttatttctgttgtatctttagtacctccaacactttctggcacaaagcagttttctcaaatat

SEQ ID NO: 9328 - DNA, 120 bp, synthetic construct
  source 1..120: mol_type = other DNA
tagccagggaccataccctcctctacccagcacttctgctccctgcttccctatcatttaaagggaccacactcttgccttcctagcactcacgtaccattttcaagcagagaaaagaac

SEQ ID NO: 9329 - DNA, 120 bp, synthetic construct
  source 1..120: mol_type = other DNA
caccagcatctgcatctgatgaggacctcagggtgcttccacttgtggcggaagaaggggagccagcatgtgcagataccacacggcgagagatgaaggaagagaaagaggaggaaggtt

SEQ ID NO: 9330 - DNA, 120 bp, synthetic construct
  source 1..120: mol_type = other DNA
ttgacttgttttggtttggtttccgtttgatactgaggatgaagggaaattagagcagaattgcttatttacattatttcaaacttccaaccatgaaaggaaaaggtttgggatcttgtt

SEQ ID NO: 9331 - DNA, 120 bp, synthetic construct
  source 1..120: mol_type = other DNA
actgaaagggacattgtggtaatgctggcttctctagactgaaccaaagcctatgtcttgaaagattaaaaagagataatgagcttattactcattaaagaaagcaagccataaaaatag

SEQ ID NO: 9332 - DNA, 120 bp, synthetic construct
  source 1..120: mol_type = other DNA
gtaataaataaataaattgagacttgaactcctactctagttggcactatatgtaggaatatggattctgggtgtctgttttcagtgatcattattaccttgatcagagagagtcctcag

SEQ ID NO: 9333 - DNA, 120 bp, synthetic construct
  source 1..120: mol_type = other DNA
caagaaaattttgcaaaggaaaatcacgaacgaggaagagggcaccctagacatcaaagtatattataaaataataatgtgtgatattggcacaggagtaccaaaacattcccaagaaag

SEQ ID NO: 9334 - DNA, 120 bp, synthetic construct
  source 1..120: mol_type = other DNA
tagaaagtttgttatgggtgttgtttaggcatttaagataacctaaaactctaaacaacagacacattcaccaagtgaagccttggttctatgtcaacatattgccaaacaaatatacat

SEQ ID NO: 9335 - DNA, 120 bp, synthetic construct
  source 1..120: mol_type = other DNA
tatagcagctggtgttacccaaactaataaaatgaaacagttaaaaggtagacagtgaactcagtattatgggcaaagagcagatcacagaagatttcattagccaggcagaagatttga

SEQ ID NO: 9336 - DNA, 120 bp, synthetic construct
  source 1..120: mol_type = other DNA
taagagattacatccccatgaaagagcagtgggcaacagatttcacctagcctttcgaatacctcatcacattgggcagaagtgatagttgattgtggtttcattgtggttatgttatta

SEQ ID NO: 9337 - DNA, 120 bp, synthetic construct
  source 1..120: mol_type = other DNA
agagagaaaaagaaacagcaattcagagaaatggatataagggaaaatgcaaatcgaagaaagacagaaaactatcaaatatattaatggggaggaggtctttcagacagagatagaaaa

SEQ ID NO: 9338 - DNA, 120 bp, synthetic construct
  source 1..120: mol_type = other DNA
cagaaacagaagaaggtagtaaaagcttatgaaagtatttatggtccaaacagggacagcagacagcagagagcagagctctcattatcatggtagtaagcaaacatttaggaaatttct

SEQ ID NO: 9339 - DNA, 120 bp, synthetic construct
  source 1..120: mol_type = other DNA
tctaagtaaagtcacttgtctctcactttaaatcaaaagctagacatcattaagcgtagtgaagaagacatgtcaaaagccaagatgggctaaaatctaggtctcttgctttcaacaatt

SEQ ID NO: 9340 - DNA, 120 bp, synthetic construct
  source 1..120: mol_type = other DNA
caaggtacctagtcatccaagagctctgatggagatgtacaaggagatgaatgttgttttcatgtctgctaatgcaacatccattctgcaactcatggatcaaggggtaattttaacttt

SEQ ID NO: 9341 - DNA, 120 bp, synthetic construct
  source 1..120: mol_type = other DNA
ctgggaaaccaaaagatacgtttaactttcttgcagtgctctctggaaccaaaatcgcaatatatctgaagtgcactttactctgttaaagtgaacacaaaacatcagcttgaaggggcc

SEQ ID NO: 9342 - DNA, 120 bp, synthetic construct
  source 1..120: mol_type = other DNA
tctataaccccacagaccatctccaagacatcagccctaaggtcaaaacctagaactataacacctcagaaggcgcaccgacaaggctgacctatagtctgggagtcaggtgatgcaaag

SEQ ID NO: 9343 - DNA, 120 bp, synthetic construct
  source 1..120: mol_type = other DNA
cttatgtctggtaaaaataataattaaaaaaggtctgacaatgtgtaactatgtgtgattttttataaaacaaagatcttcatgtttaaataaatctttagctccattattcacaggttg

SEQ ID NO: 9344 - DNA, 120 bp, synthetic construct
  source 1..120: mol_type = other DNA
acctcagaaggcacactgacaagtctgacctgcagcctgggagtcaggtgatgcaaaggggtcaccataaaaacctgggagaaaaggaggtcagttctcagtaagtccttttgacttaag

SEQ ID NO: 9345 - DNA, 120 bp, synthetic construct
  source 1..120: mol_type = other DNA
ttggttctttgtttgtctgttattggtgtataagaatgcttgtgctttttgcacattgattttgtattctgagactgctgaaattgcttgtcagcttaaggagattttgggctgagatga

SEQ ID NO: 9346 - DNA, 120 bp, synthetic construct
  source 1..120: mol_type = other DNA
tattctaagtagtaagactacgtgatgaaccaataaaaaataataactacaacaacttttcaagacatagtacaataagatataaatagaaacaacaaaaagttaaaaagtggggagatg

SEQ ID NO: 9347 - DNA, 120 bp, synthetic construct
  source 1..120: mol_type = other DNA
gaactgaaattcttaattcatctgaatcaggttgtagaactgactactgggaaacagataatattcctcacgcctaatagcaattgattcttttcctaggaactctccaatcctaatgta

SEQ ID NO: 9348 - DNA, 120 bp, synthetic construct
  source 1..120: mol_type = other DNA
tgatacaagttgagtaaaaattattcttgctatagtatttctctaaaagtatcccattgactaaagaagattggcaaggacaatcttgcacctgagagatggtggagcttgaaaggctta

SEQ ID NO: 9349 - DNA, 120 bp, synthetic construct
  source 1..120: mol_type = other DNA
agcagctcccacttgggaatagttgctaggtgccagaaactggcctgtatttaactgcataatttgtacttatctatcgtttcatcatattaattatcttctaatagttttcatcccaca

SEQ ID NO: 9350 - DNA, 120 bp, synthetic construct
  source 1..120: mol_type = other DNA
agtctaatttactgattattctatcttgcattaaaattatgacctgaaaacagaagcaaatagaacaaggttcgctgtattctggctggatgaagcaggaggaggagagggacacaaaac

SEQ ID NO: 9351 - DNA, 120 bp, synthetic construct
  source 1..120: mol_type = other DNA
gttggctttattgttcattgcaatgatggagaaaagtcaccatggggaatcatgcagcagttcagtaagagattgttggaaccaaagaagtagaactaggagaacacatatattaagaga

SEQ ID NO: 9352 - DNA, 120 bp, synthetic construct
  source 1..120: mol_type = other DNA
acactttttattttacctttttttagtctctgccattgggaggcaagacaacatgctgagaatctcagaaggccattcaacaaggacagagtgattctaaatgaaacctccattactaac

SEQ ID NO: 9353 - DNA, 120 bp, synthetic construct
  source 1..120: mol_type = other DNA
gtagaaaaggcaaaggtattgcttggctaccaccagcagagatccctaggaaggtggggtcaagtcaaaatttggggaataccatatacactatggaagcaaaaagaaaaatagctaacc

SEQ ID NO: 9354 - DNA, 120 bp, synthetic construct
  source 1..120: mol_type = other DNA
ggggtagatagttccatgaagtatgtacactctatagatataaagaaagaggttcttttctttctctcagacttacatttccacatgggaattggcacaggtggggagtaggtgaaagag

SEQ ID NO: 9355 - DNA, 120 bp, synthetic construct; identical to SEQ ID NO: 3591
  source 1..120: mol_type = other DNA

SEQ ID NO: 9356 - DNA, 120 bp, synthetic construct
  source 1..120: mol_type = other DNA
tcctccagcaacacttagcacccaggacaagtaccagatgaaaagaaggattgcatgtattccacatatattcatgtttgaacaaggagtcaaagtttattgtaaggataaggagtcttt

SEQ ID NO: 9357 - DNA, 120 bp, synthetic construct
  source 1..120: mol_type = other DNA
ataaatgtataatgttgctattcttgtaatagtctttcttgtaccctataattgttagaagaaattattttaagttaatacgttcctacatgcttttctttggtttaaaaaaaaaaaaaa

SEQ ID NO: 9358 - DNA, 120 bp, synthetic construct
  source 1..120: mol_type = other DNA
ctttcataccaagttttactcccttcttctcaagagatttccagatcttctcatggtaattgctgaaattttatcatctcccatctctaaaatcacatattcccatgtaatacaagggtc

SEQ ID NO: 9359 - DNA, 120 bp, synthetic construct
  source 1..120: mol_type = other DNA
aaggaaggtaagattgagatttgttggagctgaaacctcagtatgagagggaggaaagtgggagggggttgtggacatgaatgtggttgaaagttgtaggcgaattgggaagtggcatga

SEQ ID NO: 9360 - DNA, 120 bp, synthetic construct
  source 1..120: mol_type = other DNA
aaattttgttaccaaaagtcaaactgcattctcaaaactttaaatttgtgaagaatgacaacagtagaagctttcctctccccttctcaccttgaggagataaaaattctctaggcagga

SEQ ID NO: 9361 - DNA, 120 bp, synthetic construct
  source 1..120: mol_type = other DNA
ttttaaactttactgggtaaagtatctgattgacatttctgaaccttatttttctcatccacaatgtgggagtgataatattttccttgcagagttattgacagaatttgaataatcttg

SEQ ID NO: 9362 - DNA, 120 bp, synthetic construct
  source 1..120: mol_type = other DNA
agaaaaggtcaacaataatgatcccaaatatataaaattaaaactgtagtataaaaatggtcacatgaaaatgcatgaatgtgctaagaacttttctgcaataggatttaaaataaattt

SEQ ID NO: 9363 - DNA, 120 bp, synthetic construct
  source 1..120: mol_type = other DNA
acttcacacacagtctggcccatagtaagcagtttatagaagttaacaaatttgtgttattgttattttctggagtccaagacaaaatcccatgatgaatgacaccacaaggatgtaagc

SEQ ID NO: 9364 - DNA, 120 bp, synthetic construct
  source 1..120: mol_type = other DNA
aatgtgaaaacaattacattcattatcttcatagaacttacactccagtgggaggaaaatacatatattacataattccacaaacatagttacaaggtctgaaacatttataaagaaaaa

SEQ ID NO: 9365 - DNA, 120 bp, synthetic construct
  source 1..120: mol_type = other DNA
gcagagttttactagaaattgactaaggatatgaccaattgagattgttaatcaggatataggaaggtaaggaatccaggaaactgggtctaacccaggatctcactgaaaacggatcct

SEQ ID NO: 9366 - DNA, 120 bp, synthetic construct
  source 1..120: mol_type = other DNA
gaaatctgtatcaaagagatatctgcactcccgtgtttattgcagcactattcacaatggccaagagatggaatcaacctaactatccatcagcagatgaatggataaaaaaaatgtggt

SEQ ID NO: 9367 - DNA, 120 bp, synthetic construct
  source 1..120: mol_type = other DNA
ttgttcaaataaagttttctgttctttattttcaaaaacttttttgtttaaaaatatcatctcaatcatctcaatttctattaactcaattgattcaccctattaacttatgaactctcc

SEQ ID NO: 9368 - DNA, 120 bp, synthetic construct
  source 1..120: mol_type = other DNA
ttcccctacaccactctactgtgaggaggctctggaggctgaggtgctccacatggctggtgtagacatctgcacactggaagtcatttccagcatcagaaggatctggaaaacccagtc

SEQ ID NO: 9369 - DNA, 120 bp, synthetic construct
  source 1..120: mol_type = other DNA
cgaatacagataactcagaatcaggtttaattatgggaaaaagcactaaagtcaggtaaatgattttgtttgtcatgcttctcttgacaggtctgtggggggagaatggaaacagagatg

SEQ ID NO: 9370 - DNA, 120 bp, synthetic construct
  source 1..120: mol_type = other DNA
ctagctctatcgcccagactggagtgcagtggcgccatcttggctcactgcaacctctgcctcctgggttcaagtgattctcttgcctcaacctcccaagtagccgggattacagatgca

SEQ ID NO: 9371 - DNA, 120 bp, synthetic construct
  source 1..120: mol_type = other DNA
ccagtaggtctttggacacaataggtgggtgagggagaggaagaagcacacccctgcccctcaggacttcatccataaccttaaaccctaaggccccagtcaccagccctaagtcagtct

SEQ ID NO: 9372 - DNA, 120 bp, synthetic construct
  source 1..120: mol_type = other DNA
cctaatgagggaggtggacacaacaccggctgtctcctcctggtcattccgaaaccaccggactttgatctgggctggatagaaatctgtcaccgagcagaccagcaggttgtggtggtt

SEQ ID NO: 9373 - DNA, 120 bp, synthetic construct
  source 1..120: mol_type = other DNA
tggtttctgcttggacttgaacttttctttaggccctccttcctggagtctgactgaaataacagtcagctatgtggggacttacaagatttgttcatcttaaaaagactgaaagtaaaa

SEQ ID NO: 9374 - DNA, 120 bp, synthetic construct
  source 1..120: mol_type = other DNA
ataagagtttacagcattaagcaaaataatagaaaataattgataaagtccatctttaaggctctatttatcctctgctttcccttgagcctaagtggatgggcagctgagtacatttat

SEQ ID NO: 9375 - DNA, 120 bp, synthetic construct
  source 1..120: mol_type = other DNA
aacgtcgctgtcgaagcgcccgtactcctcgcggttatagatgtatctggccacaccgcgcacgcgctctgtcccgttggtgaagtagcacatgcccttaaactggaccaagaaatcctc

SEQ ID NO: 9376 - DNA, 120 bp, synthetic construct
  source 1..120: mol_type = other DNA
cctgtgtctgaatggagtggtttctcaatatgtattatttcccttctttacttcctccttcctatcatactaaattcagtccaccatcaactcaggtccctgaatcccactcaagtcacc

SEQ ID NO: 9377 - DNA, 120 bp, synthetic construct
  source 1..120: mol_type = other DNA
atgcctggcactgtttcttcttcaaattgcactagatgaacatttgaggtgaagatttctgaatagctgaagattgaatggcttaggggttttaagaagcaaaagacaaatgtgattcaa

SEQ ID NO: 9378 - DNA, 120 bp, synthetic construct
  source 1..120: mol_type = other DNA
agggatagtactaatggttataaagcaattaaaacaatgcctgacaaacattactggtaatcctaaccaagacaataaatatctccacctctcttcttgtctcccttcctcccactcttc

SEQ ID NO: 9379 - DNA, 120 bp, synthetic construct
  source 1..120: mol_type = other DNA
ctatgttgcccaggttggtttcaatgtcctggcctcaagcaatcctcccacctcggcctcccaaagcactgggattataggtgtgagccaccacacctggccacacagacttttcaacta

SEQ ID NO: 9380 - DNA, 120 bp, synthetic construct
  source 1..120: mol_type = other DNA
ccaggactctgtcctgcaattacttccagaatcaagaaacactgtagagtcagaaaggttctgtggcctccttaatgccagtggtaacataattagaaatacggccccagaatatcattt

SEQ ID NO: 9381 - DNA, 120 bp, synthetic construct
  source 1..120: mol_type = other DNA
cttctacaagttcttaccagtagagagaagaactaatattcaggtatgtaaaaaatatttcagtcctatttaagctcatgtccaagtactcaagaattcaagtgtccagctcagctcaag

SEQ ID NO: 9382 - DNA, 120 bp, synthetic construct
  source 1..120: mol_type = other DNA
ttctattctcacagaccgacaattccactcaagttaatttctgcaaaagcatcctaactggtcttcctgcctctactttataatgtcaacattgctcataaatccaagttaatctctctg

SEQ ID NO: 9383 - DNA, 120 bp, synthetic construct
  source 1..120: mol_type = other DNA
taagatacctaataaaaattacccaatgtgaaatacaaagagaaaagaagagcaggggaaaaacaaaacagagcatccaagagctgcagtgctgtattgaatggttacatcacctttgtt

SEQ ID NO: 9384 - DNA, 120 bp, synthetic construct
  source 1..120: mol_type = other DNA
cttcattcatattacatgttccaaaaaacaaccacaggaaaacttctccaacagtaactttgcatgaactcatgtgttctgtcaatcgagaaaaatggcaagtctcaatcattttaggag

SEQ ID NO: 9385 - DNA, 120 bp, synthetic construct
  source 1..120: mol_type = other DNA
aatttcctttcatagttctaaaactatgaccaagtgttcatttcttcctgataggcacttagcacactgaccatgtgccttaaattgtccatatgatgcgaagagctataaatccatgga

SEQ ID NO: 9386 - DNA, 120 bp, synthetic construct
  source 1..120: mol_type = other DNA
ctgtttctcatatattgcccccaagtctatatcaatcaaattaatttttattatcctgaaaacacctatagaaagactaacatgttgaaagttatatttaaatatgggcactctgcttca

SEQ ID NO: 9387 - DNA, 120 bp, synthetic construct
  source 1..120: mol_type = other DNA
ggacaactgtggaatgatattggctgcacataaacagaacctaatttatgccacaattaatgaaattgaaaattttgtttacaatagccccctcttatccatgggagatatgttgcaagg

SEQ ID NO: 9388 - DNA, 120 bp, synthetic construct
  source 1..120: mol_type = other DNA
caattagtgagttagtgggatagtaaaaagagcccatacatacacacatacagagattatactgaggcagattaaaagtttaaatgagaaggaactcagaactgaggaggaaccacccag

SEQ ID NO: 9389 - DNA, 120 bp, synthetic construct
  source 1..120: mol_type = other DNA
ctcagttccttgccacatggccctctacatcttcaaagtcagtaatacagagtctttctcatgtttaatctccctcttcaagaaaagttcagtccctttcaagggctcacctaattagtt

SEQ ID NO: 9390 - DNA, 120 bp, synthetic construct
  source 1..120: mol_type = other DNA
attccattacagcctcagatcaaggccaatatcctgtctaaatcttgttagctcaaagtccaaattcgcagtgccttcataccaaattacaggacttgaagatgtgagaattaggaactt

SEQ ID NO: 9391 - DNA, 120 bp, synthetic construct
  source 1..120: mol_type = other DNA
gagcctccttgctagtggggaccctctgcagagtcccattgtggtgcaaggcatcacatagcaagcaggctgagagggctacctcaagtatctctttctcctcttatcaaacccttagtg

SEQ ID NO: 9392 - DNA, 120 bp, synthetic construct
  source 1..120: mol_type = other DNA
tggtagctctacagttttggagtcttggtggcagtcccactgtcacagcaccactagatatttccctggggaggactccctgtagcagttccaaccccacagttcctctcagcattgccc

SEQ ID NO: 9393 - DNA, 120 bp, synthetic construct
  source 1..120: mol_type = other DNA
ccactagtcttgcattctgaagacctgcagaaatagcaccacatgcatgtggacattgccaaggcttactgcttgtgccttctgcagctacaatatgagtcacatctggggccacttgag

SEQ ID NO: 9394 - DNA, 120 bp, synthetic construct
  source 1..120: mol_type = other DNA
gcccaactttttagtaccaattttctgccttagtctgtttcttgttgcttgtaacagaatgccaaaaattgggtaatttatgaagaaacaaaatgtatctcttatgattctggaggatga

SEQ ID NO: 9395 - DNA, 120 bp, synthetic construct
  source 1..120: mol_type = other DNA
tttaccactttgagtgaaggatacagtccgtatctctagtaccattagcatattttaccctctctactttttaaatgcaattgtattaagtatttcttccacatgcattcccatccacag

SEQ ID NO: 9396 - DNA, 120 bp, synthetic construct
  source 1..120: mol_type = other DNA
gtctttgaagaatctccacactgtcttccccaatgatgaacaaaacctctgagaaatatggggttatgtaaagagaccaaatctatgactgattggtgtccctgaaagagatggagagaa

SEQ ID NO: 9397 - DNA, 120 bp, synthetic construct
  source 1..120: mol_type = other DNA
catgatatatcctttctgtcttttacactcaatctctgaaatgacttttatgctttagacatatgtcttgtaaacagtataatctgaatttgtatttttgcattcaatttgtcaatctct

SEQ ID NO: 9398 - DNA, 120 bp, synthetic construct
  source 1..120: mol_type = other DNA
gcctgcatggaagttcactactgataagcactttgtttctttattcccttactcagctttcctcttttgtagcttcatagcaagaatcacaacctaacactgcattttatgtctgtttat

SEQ ID NO: 9399 - DNA, 120 bp, synthetic construct
  source 1..120: mol_type = other DNA
cttttcccatcccactttgcttttctaagcagtatttatgtatttcaactttttttacagtttaaatacaatatacttaggtgtaggttttctttgttttttttttaaatacagggatta

SEQ ID NO: 9400 - DNA, 120 bp, synthetic construct
  source 1..120: mol_type = other DNA
atccaagatttttgcagtgcagtggaggtctctgagggtgttgcaatgagaattttaaacacaaagctagttttaaaataacaccataattagcagtccctttccccagcatctatctac

SEQ ID NO: 9401 - DNA, 120 bp, synthetic construct
  source 1..120: mol_type = other DNA
tgcataaccatttagaggatgctatcctgaaaaagataatcagttttacagagaagtcttggtagctctgaggctattaataaccccagttactacagtaacaaccgggaggtgaaacag

SEQ ID NO: 9402 - DNA, 120 bp, synthetic construct
  source 1..120: mol_type = other DNA
aaagatttcatgatgaagaggccaaaaacaattgcaacaaaagcaaaaattgacaaatgggatctaattaaagtaaagagcttctacacagcaaaagaaactaccaacacagtaaaaaga

SEQ ID NO: 9403 - DNA, 120 bp, synthetic construct
  source 1..120: mol_type = other DNA
gatgggatgatctgtgcagcaaaccaccatggcacacatttacctatgtaacaaacctgcacatcctgcacatgtacccctgaacttaaaataaatgttggaaaaaatatatttaaatta

SEQ ID NO: 9404 - DNA, 120 bp, synthetic construct
  source 1..120: mol_type = other DNA
cagataatttgggggttcattatagacatggaaaaagtattttgtataaggagaatcttcccatgtctgcctttggttttgctctctccccattacccttagttttatgattttctcctt

SEQ ID NO: 9405 - DNA, 120 bp, synthetic construct
  source 1..120: mol_type = other DNA
atagtgagagccctatctctacaaaaactttaaaaagaaattagccgggccggtggaatgtgcctgtcgtcccagctactaaggaggctgaggcgggaggaccatctgaacccaagaggt

SEQ ID NO: 9406 - DNA, 120 bp, synthetic construct
  source 1..120: mol_type = other DNA
tctgggtattggaagatccttggggacaaatgccaagaagacaccaacttcttttatcagcatctctcagaatccatgccctgtgggtagttatatgtgaatatcagaatcgccctccac

SEQ ID NO: 9407 - DNA, 120 bp, synthetic construct
  source 1..120: mol_type = other DNA
gatacagacgaacagattgataaagaaaaacaaaacacataggacaaagtatgggggaaagagtgcggagcttccacaccttcttcaagagcctatcctccaggcatctttccgtgttct

SEQ ID NO: 9408 - DNA, 120 bp, synthetic construct
  source 1..120: mol_type = other DNA
aataagaatacgagtaggtactctcattggtacttcttccttatctgtaggtacctgagatgactgtgtcctctaaagcttctgtgatgctagatgcacccaacatcattttctataatt

SEQ ID NO: 9409 - DNA, 120 bp, synthetic construct
  source 1..120: mol_type = other DNA
tttcagtcccttcatcctcattgtaataacaagactgctggtgatgtggccatgcagagctcttgtccctcatgttctttccacctcgatctttcacttttctctatttctgcttctcct

SEQ ID NO: 9410 - DNA, 120 bp, synthetic construct
  source 1..120: mol_type = other DNA
acaccttcttgcaagcttcgtatccgggaatgccagtgggtgttcacaaataaaaaatgggagagtcctgagaaggcattccgcatgcttttcaaggaaaagaataaatagaagttaaag

SEQ ID NO: 9411 - DNA, 120 bp, synthetic construct
  source 1..120: mol_type = other DNA
gcatagagatgcatatgcacacaacgattacatcgtagggctgtttaaattactcattctggctgggggtctgtgctctaaaccactattggtacgctatttctgtgtggctggtctgga

SEQ ID NO: 9412 - DNA, 120 bp, synthetic construct
  source 1..120: mol_type = other DNA
ggagaaggtgcataaacttaacaactttgttattgccctgaggatgtgatgtggcaaaggggacaaggattggatagattgtcttactgatggaagttggtaacaaacaaggcaaatcaa

SEQ ID NO: 9413 - DNA, 120 bp, synthetic construct
  source 1..120: mol_type = other DNA
ccagtcatcaagaaaggacagtttaagagaacattccatattagacattttgtatttgtagggcctgtgggtcatccagatgaaactttactctgtgtggtagatggaataatgccccca

SEQ ID NO: 9414 - DNA, 120 bp, synthetic construct
  source 1..120: mol_type = other DNA
aagcaatatagctcaaacctcaggcttggggaccatatggatttgagttcttatcatagctccatcgcttcctacccatatgaacttgcgtgtcttaattaacctccctaagcctccact

SEQ ID NO: 9415 - DNA, 120 bp, synthetic construct
  source 1..120: mol_type = other DNA
ggatggtctcgatctcctgacctcgtgatctgctcacctcagcctcccaaagtgctgggattataggcgtgagccacattttttattttctaaaatgaaaatgttgatatttaattttta

SEQ ID NO: 9416 - DNA, 120 bp, synthetic construct
  source 1..120: mol_type = other DNA
ctttatgttggaaacctgaaagggactaaatatatgacatagagtccatatttaaaaacttcatgtaggcattaaatagaaaggatacagctcatttgacaaccagtagaacaggcagct

SEQ ID NO: 9417 - DNA, 120 bp, synthetic construct
  source 1..120: mol_type = other DNA
ccacttccctcccatttccacttcttcattaacacagcaattattaatttccatctctatagttttggcattccaggagtgttatgtaagtggaatcatttagtagacaacattttgcaa

SEQ ID NO: 9418 - DNA, 120 bp, synthetic construct
  source 1..120: mol_type = other DNA
tgcacattgattttgtatcctgagaccttgctgaagttgtttatcaacttaagaagtttttgggctgagacgatagggttttctagatatatgatcatgtcatctgcaaacaggaatact

SEQ ID NO: 9419 - DNA, 120 bp, synthetic construct
  source 1..120: mol_type = other DNA
tatgtcatagaagtattcataatattctctgatggttgtctgtatttctgtggggtcagtggtaatacctcctttgtcattcctaattgtgtttatttgaatccttctctcttttcttct

SEQ ID NO: 9420 - DNA, 120 bp, synthetic construct
  source 1..120: mol_type = other DNA
tggggcactagcccatttacatttaagattagtattgatatgtgtggatttcatcctgtcatcatgatgttagctggttattttgcagacttgtttatgtggttgctttatagtgtcact

SEQ ID NO: 9421 - DNA, 120 bp, synthetic construct
  source 1..120: mol_type = other DNA
atgtacttctgtagctcaatgatcttcatttctatccttattctgaattacatatctgtcatttcagccatctcagcccagttcagaatccttgctcgagaggtgatgtggtcgtttgga

SEQ ID NO: 9422 - DNA, 120 bp, synthetic construct
  source 1..120: mol_type = other DNA
acactcctatatgctggtgaggcaaggaaaacaaaacccacccagcagacatgtaccagcaaaatgatgtggggagttgctgtgggcccagaggaagctgcagtgtggggagggagcatg

SEQ ID NO: 9423 - DNA, 120 bp, synthetic construct
  source 1..120: mol_type = other DNA
aatgtagtaactttttaagatactcaagagcggaaaatggaaccaagatttttatagccacaaaactgactttcgactatgaagtgcaagaacttcctggtgtggactgtatatgccgtc

SEQ ID NO: 9424 - DNA, 120 bp, synthetic construct
  source 1..120: mol_type = other DNA
tcttccttgataagacaccaaaactcaagaaatggcagattcttaaaggttagttgcagtgtggaatctgaaaccttatatattaacttttcatattctgttgtgttaaaattcactagt

SEQ ID NO: 9425 - DNA, 120 bp, synthetic construct
  source 1..120: mol_type = other DNA
tgacagggatatcaacataaggaatgatggtgagcattaaacatatctctactcacagaactaagactaacaagggagcaagtagtctatgcaatggtacaggatcaactaatatagaca

SEQ ID NO: 9426 - DNA, 120 bp, synthetic construct
  source 1..120: mol_type = other DNA
ttgaacactcccaggcactgataaacgtatctaggttgtttctctaaacactgaaactttgtcccagccctgagccaggttccttaaaccttcatataagctccataccctgaccccctc

SEQ ID NO: 9427 - DNA, 120 bp, synthetic construct
  source 1..120: mol_type = other DNA
ataaattaacagacctaagcaattagtatcaatggttgctaacatcacaaaaagaaacagctggaaattatgtctctcatggtgaaaggccacaacaccacgtatagattttccaaagga

SEQ ID NO: 9428 - DNA, 120 bp, synthetic construct
  source 1..120: mol_type = other DNA
tgacctcatgaatgtcctttacctcacccagggcccagactactcatcactacttcaggctccagagagagaagcttcagtgaggaccttagcatgactgagggagcagaacagctcttg

SEQ ID NO: 9429 - DNA, 120 bp, synthetic construct
  source 1..120: mol_type = other DNA
ggaaagaataattcatgttgtgaccaagataaacgcagaagtgacacaggctctgtattgagtcagtatagtcctgagtcaggcccagagagtactagaaactaattctcactccactcc

SEQ ID NO: 9430 - DNA, 120 bp, synthetic construct
  source 1..120: mol_type = other DNA
gatccagccggctgttccactgctcagcatctggctgccccagcttggtcaatgccacaaacatccccacatcactgtcgaaacgtacatactcctccaagttaaagatgaatctgacca

SEQ ID NO: 9431 - DNA, 120 bp, synthetic construct
  source 1..120: mol_type = other DNA
atctgtgctgatttttttttcagttgtattgtttaatggacattataaactcagggcggtttctattctctgagaataatgatctctcctggccaggtttgttcctcttttgtatttaat

SEQ ID NO: 9432 - DNA, 120 bp, synthetic construct
  source 1..120: mol_type = other DNA
ccaggggacccacccagaacccattctggagaaaggaaaaaaatgagatagtaaaatcgtcagcctcttcagaatgagctcataaaattcagtcagaaagtacccattaagagtataaat

SEQ ID NO: 9433 - DNA, 120 bp, synthetic construct
  source 1..120: mol_type = other DNA
aataattgtacatatttatggggtacagcatgatgttccaacacacctatacattgtgtattgatcaaatcagggtaattagtatgtgatatatatacatgatggaatactattccgcca

SEQ ID NO: 9434 - DNA, 120 bp, synthetic construct
  source 1..120: mol_type = other DNA
atagaagggctggaggcaatagcttggcacttttgcccttctgccttcctccttgtgaggactgttacactggaatgatttgactcaagtgtttagttaagtattctttcagtaaaacct

SEQ ID NO: 9435 - DNA, 120 bp, synthetic construct
  source 1..120: mol_type = other DNA
agaaaagcagtctaattagctgagtcaccatgaagagcagctgccccagggaatcactcacacctacaacacactctgtatgaatgagaaacaactgttctttaaagaaggtactggctt

SEQ ID NO: 9436 - DNA, 120 bp, synthetic construct
  source 1..120: mol_type = other DNA
agagaaagagagagaatcatcacacaaaaccctttgcagtagatactatcatgatctcccttttacagatgaggtaaggatggaatgaaccaaagttcacataactagtaagtccctagg

SEQ ID NO: 9437 - DNA, 120 bp, synthetic construct
  source 1..120: mol_type = other DNA
aaaatactggtttaattctttctcagtggtgattgacgtctcaaaccagcaagaggtgtaacatgaggggaaggggctggggaagagggaaaggatgtaagaaacaaaagaaatagttag

SEQ ID NO: 9438 - DNA, 120 bp, synthetic construct
  source 1..120: mol_type = other DNA
caatccgactgcttaggcctcccaaagtgctgggattataggtgtgagccactgcacccggcctctattttcaattttaaaagtttgatatagatgtagcatatctatttttttattgat

SEQ ID NO: 9439 - DNA, 120 bp, synthetic construct
  source 1..120: mol_type = other DNA
taaaaatattttcatttatttagttcagttaagaagcccatttataattattcatacagcaaatagattcagtctaattcagagatattaacttctgttaagtataatgtttacatgagt

SEQ ID NO: 9440 - DNA, 120 bp, synthetic construct
  source 1..120: mol_type = other DNA
actgtgctatttacattcgtttctgttacaatatatggtgctctgtatttgctatgtcttactttgcttcttttgttttccttgcatcacttatattaaatcaattacatttttatttaa

SEQ ID NO: 9441 - DNA, 120 bp, synthetic construct
  source 1..120: mol_type = other DNA
ttgcgaaaatactgagcaagaataaagatatacatatttgcttaatacacagtaaacttctctggaaagataaacacaaagctggaagaacggattgcctatgcaagaggaattagcaaa

SEQ ID NO: 9442 - DNA, 120 bp, synthetic construct
  source 1..120: mol_type = other DNA
gcatgcctgggtgggaaagatactgcaggtaagcgacaagaaggggaaattacagggtaaggagatcaatcaaatggtgatggggggtaggagtgaacaaaaagaactctggagcaaacc

SEQ ID NO: 9443 - DNA, 120 bp, synthetic construct
  source 1..120: mol_type = other DNA
attcatttattcaattgactatttattctccactatgaattaggccctcggccaggtagcagatataaagcttaataagatatatggctttccgcccaggtgctcatggtctagtggaag

SEQ ID NO: 9444 - DNA, 120 bp, synthetic construct
  source 1..120: mol_type = other DNA
ggatataggaaggcaatctcatgaatatttatgtcatttttggttaatttctatctcaaacaacagataaacgactgatgggacaggcagcaaaatagcaactatggttatctccaggaa

SEQ ID NO: 9445 - DNA, 120 bp, synthetic construct
  source 1..120: mol_type = other DNA
caccaccggattccattccccaaccccaagaaggcacagactgtttccactagtaggtccttcgtcctccctctgcccaattctgcacagtctgatcctcccagcatgcccctcccaggc

SEQ ID NO: 9446 - DNA, 120 bp, synthetic construct
  source 1..120: mol_type = other DNA
catcctctctctgtacatgctcccctctcctgtcccctgtcttctccctcctcacccacctggctgtgcaggtagcagtgttcatactgtgagatgggcttttcatccagcagcacctgt

SEQ ID NO: 9447 - DNA, 120 bp, synthetic construct
  source 1..120: mol_type = other DNA
cccagcgcagttctctacacaaaaaagatgtttatcaagtgtctaggaaaatgtttaaataaagccctggatgaagtagctgtttttgagaactggtaaatgtaggaagagatctaaatg

SEQ ID NO: 9448 - DNA, 120 bp, synthetic construct
  source 1..120: mol_type = other DNA
caaaattacttgcgggttttggttttgtattgtattgttaaaaagaacaaataaagcccaaggcccaggagtccacaaagaaaaagagagggaaaaaaggagagcaggcttggcttctcg

SEQ ID NO: 9449 - DNA, 120 bp, synthetic construct
  source 1..120: mol_type = other DNA
gaggcctaaacataagagctaacactataaaactcctaggaaaatgtagaagaaaagcctcatgccactagatttggcagtgatttcttggatataacaccaaacgcacaggcaacaaaa

SEQ ID NO: 9450 - DNA, 120 bp, synthetic construct
  source 1..120: mol_type = other DNA
ccacttctaagtatatacccaaaagaaccaaaagcagggtttcaaacaggtgtacactcatgtccacagcagcataattcacaacagccaaaaggtggaaacaacgcaaatgtccattga

SEQ ID NO: 9451 - DNA, 120 bp, synthetic construct
  source 1..120: mol_type = other DNA
gagaagagaacatctctctctaggggatcctctagccacaaatgtggaagcctcctcacctgtcagttttattctccctttggggttcccttacatgcacgctcacctgatggcgggtgt

SEQ ID NO: 9452 - DNA, 120 bp, synthetic construct
  source 1..120: mol_type = other DNA
catgtacaaatttacaagtatttatggagtgcactctgtactagacacaatagaaaactacaatagaagggaaaagatattgtgaaaacaagtatcccagtgcttgcttctgtcccagcg

SEQ ID NO: 9453 - DNA, 120 bp, synthetic construct
  source 1..120: mol_type = other DNA
catcccagtcccagccttatcaaacagtttgtttgtttgagtatgtctagaaagagaaaggaaagcaagtgaagggaaaagagtaatgattctggaaagaaaggtgataagcctcagagt

SEQ ID NO: 9454 - DNA, 120 bp, synthetic construct
  source 1..120: mol_type = other DNA
tgctccttctcctgggctccaggagggctcagaacagcccacagtgaccagctgagccccgcagccccgtaccccaccagcagccagctccaaggggctgaagcgactctggctggggga

SEQ ID NO: 9455 - DNA, 120 bp, synthetic construct
  source 1..120: mol_type = other DNA
ccaaggccttcattctgggctgggccgccgggagggggcgcgcgagacccgcagacagcggaactggagcccgaactctggttcgcactgtacaggcctgcaatgagtctcactcgcctt

SEQ ID NO: 9456 - DNA, 120 bp, synthetic construct
  source 1..120: mol_type = other DNA
tgttacctgtgtgactaccaaggagtcacttaaagtttaaaatagtggtggtggggaggagggattttaagtaggggctcgctaaagttttacaactctattcattctggcattttaaga

SEQ ID NO: 9457 - DNA, 120 bp, synthetic construct
  source 1..120: mol_type = other DNA
ctctctttggctcaggctaggcctcttcttctccttggacttaacgtggcttaggtccctgagtcggccaagacctcccagaggagacctgcccagctgccaccaccaccattattgatt

SEQ ID NO: 9458 - DNA, 120 bp, synthetic construct
  source 1..120: mol_type = other DNA
agaggaagatgttggtaacatgggggttcaaatatgagacataaaaagtgaacaaaagaattaatattaccacaagaacattggaattaggaaaccactttggtaaagtcatcgaacttt

SEQ ID NO: 9459 - DNA, 120 bp, synthetic construct
  source 1..120: mol_type = other DNA
catggtgccaagcaggtaagggttaatctcaatcaccttgttcacccgtaaggcacctggaagaagatggagctttgggagagaagggatgaccccatagatcccccagtgtgtcctaaa

SEQ ID NO: 9460 - DNA, 120 bp, synthetic construct
  source 1..120: mol_type = other DNA
cccgcctccctgcatccctaggggcttccctactgccccgacctgcattccccggggtaaagcgagctctggagatcgcatagagaaactgtagtgtcctgggtccgagcgacgcccgct

SEQ ID NO: 9461 - DNA, 120 bp, synthetic construct
  source 1..120: mol_type = other DNA
aatgggagatatttactaggcaatcccgcctactgttctgaggtttcccctccaggtgcagcttcagagccaggcgagccaggaaggaccagcgggcgaggtggtgagttgtgaggcgcg

SEQ ID NO: 9462 - DNA, 120 bp, synthetic construct
  source 1..120: mol_type = other DNA
gtgggttcccccctcccggatagcgcctccttccagaaagaggatgtggtcagcctgctccaccaggctgaggtgctgggtgatgagaagcactgagcgggagtaccgctcagggctttc

SEQ ID NO: 9463 - DNA, 120 bp, synthetic construct
  source 1..120: mol_type = other DNA
tcaggaattcaaggccagcctgggcaacatggtgaaacccatctctactaaaaatataaaagtcaaccaggcatagtggtgtacacctgtagtcccagctactcgggaggctgaggggag

SEQ ID NO: 9464 - DNA, 120 bp, synthetic construct
  source 1..120: mol_type = other DNA
gagggagtccagagatgaaactatgggccccagactttactgcagcagctgtgatttcctccatagttggcttctgggtcaggccataggcaatattttcttgaagacttcttccaaata

SEQ ID NO: 9465 - DNA, 120 bp, synthetic construct
  source 1..120: mol_type = other DNA
attgcagttggggccagtggaatacagggagtggtaggttgtacctgtagcactaagacatctgggcggtttgggtaggcaaaggagacatcttggaactggacaaggccctccaagtgt

SEQ ID NO: 9466 - DNA, 120 bp, synthetic construct
  source 1..120: mol_type = other DNA
aggaaacagtctcagagaaggtaaatttgttgtcatgatcacaagacaagtaaattgcatcatcaagccaggatcttcggatcactggcgtagctctctttccagtgcatcacagatgtc

SEQ ID NO: 9467 - DNA, 120 bp, synthetic construct
  source 1..120: mol_type = other DNA
ggaggttaatgttgagcaacctgggaacatggaccacagggacagggtgttccatgaagatggagaatcagtaagggtgccaggaaagctggactgaaagcaatgtgagaggaactgagt

SEQ ID NO: 9468 - DNA, 120 bp, synthetic construct
  source 1..120: mol_type = other DNA
cagatgaggcagttggtctctatgagctcaaaatttccaggtttgaaattctatggtttctatctaaggatacataggaatagatttataagaaaatgctagatgaaaactctaggtttt

SEQ ID NO: 9469 - DNA, 120 bp, synthetic construct
  source 1..120: mol_type = other DNA
cctaaataggctgccctggaactcactaccctgtggttgctctaccagaactttcaggattttattaggaaggctggagatcatgaagtagaaaagcctcctgttagagatgaggatgcc

SEQ ID NO: 9470 - DNA, 120 bp, synthetic construct
  source 1..120: mol_type = other DNA
cagccatgcgagagaagctccggggaggcagcggcacccgcggggagcgggacacctagagctagccattggcactcggacgccgtcccggtcccggccgggcctgggactctccgcgcc

SEQ ID NO: 9471 - DNA, 120 bp, synthetic construct
  source 1..120: mol_type = other DNA
tgactcttagctggaagcgtcaacgggaagctactctaaagcgctttcgctttcactctggtcccggacagtgggggctggttaaatcaagaaagggggttggggatggtgcaaagagat

SEQ ID NO: 9472 - DNA, 120 bp, synthetic construct
  source 1..120: mol_type = other DNA
tgctgagatatgtatttacctcttgatcggaaattccataactgaaacttttattttcaaccatctgtatgtgttccttgctgcttctctcctgccttgcccctggccatgctaaccact

SEQ ID NO: 9473 - DNA, 120 bp, synthetic construct
  source 1..120: mol_type = other DNA
atagggtctgagagggggacaggagatagatttttgagggtcttctttccatctgtgcttagggatcaaaaagatgattctgtcaagcagatacctggtttctcatttaccatatattga

SEQ ID NO: 9474 - DNA, 120 bp, synthetic construct
  source 1..120: mol_type = other DNA
gagttctgactccccacccactagagctcccccaacctgcatgaatccctgtacagtgtgctgttccaggagctggacactgggaaatggaaaagtcttgtttcggctcttgctggcact

SEQ ID NO: 9475 - DNA, 120 bp, synthetic construct
  source 1..120: mol_type = other DNA
atggaaccctgggaggaatgctgactcgacagccttttgccattggtggctccggcagcacctttatctatggttatgtggatgcagcatataagccaggcatgtctcccgaggagtgca

SEQ ID NO: 9476 - DNA, 120 bp, synthetic construct
  source 1..120: mol_type = other DNA
aaaaactgatttaccagcacaccactaaatatgccttcctggaagatgagttttgaggtgaaagtggtagtaggcatatggatggagggggagtaaaaagatttttgaagctaagccatc

SEQ ID NO: 9477 - DNA, 120 bp, synthetic construct
  source 1..120: mol_type = other DNA
ccagcctgggcaacatagtgagaaccccatctctacaaaaaaatttaaaaattagtcgggtgcggtggtgcatgcctgtagtcccagctgcctgggaggctgagtgggaggatcgcttag

SEQ ID NO: 9478 - DNA, 120 bp, synthetic construct
  source 1..120: mol_type = other DNA
attgtgaagagggtcaaaactgggagaggggcccctcctggggagtgggttttcaatgttttccccttttttcctcccagctctgccctgacgtcaggcctcaggtgcagagctgcactg

SEQ ID NO: 9479 - DNA, 120 bp, synthetic construct
  source 1..120: mol_type = other DNA
gaagacagttgttaactattggtaacttgatattgaccactatggaagtatttatactatagaaatcagcaatgctacaagtcagaagcattgtttttcttcagagagccggtttaacag

SEQ ID NO: 9480 - DNA, 120 bp, synthetic construct
  source 1..120: mol_type = other DNA
acataaaatatacatataaaataatattataatttcaaatacatttattagaacaagaaaagttaaaataaaggacctagaaattctactcaaaaatttggaaaaagagaagttgagcaa

SEQ ID NO: 9481 - DNA, 120 bp, synthetic construct
  source 1..120: mol_type = other DNA
gatcctgtgagatcctgtctctacaaaaaattaaaaaattagccaggtgtgatggtgagcacctgtagtctcagctactagggaggctgaggcaggaagatcatttgagcccaggagttt

SEQ ID NO: 9482 - DNA, 120 bp, synthetic construct
  source 1..120: mol_type = other DNA
tccatgacaaatgttagataattttccattttttccattcaataaaataaacaggaaatataattaaagagttcaattgaggattgggatttagaaaggaaggcaggaattaagaataat

SEQ ID NO: 9483 - DNA, 120 bp, synthetic construct
  source 1..120: mol_type = other DNA
ataaaattaactatcacttggctcaaggtgaaacttccagatcaatgtggcaggagtgttgaggaaggaagtgaactcggttctaaccaagtaggacagccgaatcatcactgaagtgtg

SEQ ID NO: 9484 - DNA, 120 bp, synthetic construct
  source 1..120: mol_type = other DNA
gcttaaaacaaaaataatcattttattatctctcatgaatctgtgaattactggactttaagagccactgatgtagtccatgaaccaaaacacatattcacggcagccactccacccagc

SEQ ID NO: 9485 - DNA, 120 bp, synthetic construct
  source 1..120: mol_type = other DNA
ctctaatcgcacagggctggccgggttcgtcttaggcaaattacaatccctgaaacactctggttttgatcaggcagaattatgagcaaaggttcaagtgtgatataaaataatcaagca

SEQ ID NO: 9486 - DNA, 120 bp, synthetic construct
  source 1..120: mol_type = other DNA
aaaataatttaaaaacttgatgctatcagcacaaagcactaaaagttatcaaggtattaagtgagagcattctgataagaaaccaccgctagctgggcagattatgctaaagggaaagaa

SEQ ID NO: 9487 - DNA, 120 bp, synthetic construct
  source 1..120: mol_type = other DNA
ataataataataaaattagtcaggcatagttcgatgtgtcatagtcctagatactctgaaggctgaggcaggaggatcacttgagcccaggagttcgaggttacagtgagctatgatcgc

SEQ ID NO: 9488 - DNA, 120 bp, synthetic construct
  source 1..120: mol_type = other DNA
aacggaaagaaaagcctgatgaagattttaaagccaccattattaaaatgctttgatgagcaattaacacttaaaagaatgaaaaaaataggatgtccagttcagtggtttaaaaaaaga

SEQ ID NO: 9489 - DNA, 120 bp, synthetic construct
  source 1..120: mol_type = other DNA
gggagggtaaacaaagagagaagaaatttctacacatcactcagactggtaattaatgacaataaataagttacataaatataatgtaatacctagaacaaccactaaaagagctatcca

SEQ ID NO: 9490 - DNA, 120 bp, synthetic construct
  source 1..120: mol_type = other DNA
caacaatgatagttgaagacttcaatagttttctctcaacaattgattaaacaaatagacaaaaattgagaaaaaacatagaagaataaacaacatcaaaccataagatctaatcaacat

SEQ ID NO: 9491 - DNA, 120 bp, synthetic construct
  source 1..120: mol_type = other DNA
catatctaagacaataaaagaccaacaaattttttaaataaaatcataaagaaagtgttctcctaccacaatggaaccaaaccagaaatcaacaacaggaaaatatctaaacatttggag

SEQ ID NO: 9492 - DNA, 120 bp, synthetic construct
  source 1..120: mol_type = other DNA
gcgtgagatggcatttcattgtggttttgatttgcatttgagaagtaaatttaaagcactaactgcatacattggaaaagaggaaaagtctcaaaccaataatctaaactctcacctcaa

SEQ ID NO: 9493 - DNA, 120 bp, synthetic construct
  source 1..120: mol_type = other DNA
tataggagtagaggagatctttctttacttgataaagatcgtctacaaaaatcctatggtgaacatacttgattctgaaagactgaatagtttctacctaaaatcaggaacaaggcaaga

SEQ ID NO: 9494 - DNA, 120 bp, synthetic construct
  source 1..120: mol_type = other DNA
atagtaaatatgtcaattctccccaaaccaatatacaagtttaacacaattccaatcaaaatctttgcaagatttgttaattataggtaggattactctaaaatttacatggaaaggcaa

SEQ ID NO: 9495 - DNA, 120 bp, synthetic construct
  source 1..120: mol_type = other DNA
cctatagttcagcagtactttgattatgtaccatttaagaaatcaaaataataagcacattcttctaacagcaaagaattgtcccactttttattttgacatattgatatttccataaac

SEQ ID NO: 9496 - DNA, 120 bp, synthetic construct
  source 1..120: mol_type = other DNA
ttggtgcaagtttaacctgtgagaaaaaagctagttttgatgagaaaaagttcagtcttttccttgtaaatacaaagaaatgcaacaggaattttaaaggtagtaggccagaaaatgtaa

SEQ ID NO: 9497 - DNA, 120 bp, synthetic construct
  source 1..120: mol_type = other DNA
tcatcatcgtgtaggtcttttgaaattaattgtctagctagtttgatattgagtccttcattgtagtgaagcgtccttctcatttcaaattgtcgctttttttctcgttcttcaggtgag

SEQ ID NO: 9498 - DNA, 120 bp, synthetic construct
  source 1..120: mol_type = other DNA
atttttgaaagaggtgcaaaaggaagtcagtggaagaaaaatagcctttttcacaaatagtgaattgaacaatggtgaaatggaacaattgggcatccataggcaagataataaaataaa

SEQ ID NO: 9499 - DNA, 120 bp, synthetic construct
  source 1..120: mol_type = other DNA
aatgggctgggtgcggtggctcacacctgtaatcccagcactttgtgaggccaaggtgggcagatgacctgaggtcgggagtttgagaccagcctggccaacatgaagaaaccctgtctc

SEQ ID NO: 9500 - DNA, 120 bp, synthetic construct
  source 1..120: mol_type = other DNA
gtaggcttgacatcaaaagcataatccaggctgggcgtggtggctcacgcctgtaatcccagcactttgggaggccgaggcaggcagatcattgaggtcaggagttcgagaccagctggc

SEQ ID NO: 9501 - DNA, 120 bp, synthetic construct
  source 1..120: mol_type = other DNA
tcaccttggcctttgagagagaacaggaaagaagatggagaagaaggattttccctttgccccattttcctctttttgggctgaactgtgtccccctataagttcataatgttgaataaa

SEQ ID NO: 9502 - DNA, 120 bp, synthetic construct
  source 1..120: mol_type = other DNA
tccccaggggattaagttccagtcattcacccttcgttggctgttttcccttcccaatcttttactcagctgctactgaagtttcatgcacctccaaaataaattactttcattcatgtc

SEQ ID NO: 9503 - DNA, 120 bp, synthetic construct
  source 1..120: mol_type = other DNA
aatggttaaaggcatgtgaccatcacacctggcctaccatggttttcaaatgtaaaattttaaatgaaaaatcttaatcttttggtcattgctgttttgctgtggtctgtctcccatggc

SEQ ID NO: 9504 - DNA, 120 bp, synthetic construct
  source 1..120: mol_type = other DNA
cttttcagattatgttctcatacagccttttacagccctttacagcttttctgtaaactgggctgagatgtaccactaaatgaaattgaatgataggagtccattgtggttggaatagat

SEQ ID NO: 9505 - DNA, 120 bp, synthetic construct
  source 1..120: mol_type = other DNA
ccacagcatttttctcactgttcattttcaaatttagtgtccaacctattactgtgtgcttttcttaatccctagaccaagcactctctggcttgctcattttcccacttgggcaccctg

SEQ ID NO: 9506 - DNA, 120 bp, synthetic construct
  source 1..120: mol_type = other DNA
tctttgctgtactatatagagaaatgaattctgaactgaattccctccatattcctagcaaaaacataactcctttgaattgcaattttgatttccttttcaacccaaaaattagtgaga

SEQ ID NO: 9507 - DNA, 120 bp, synthetic construct
  source 1..120: mol_type = other DNA
tccattggtttaatcactcggtgtcattttgttttaggtgctttttgtttgtttttgtttttattttgagacagggtctcagtctgccgctcaggctggagtgcaggggtgcgactacgg

SEQ ID NO: 9508 - DNA, 120 bp, synthetic construct
  source 1..120: mol_type = other DNA
ttaagaattatgcaagtttattattttatctgtattccactgatcttgatgttgcatagaattccacattatgattatgccaaaatttgtgtatcagtttacctgcaaatggacactggg

SEQ ID NO: 9509 - DNA, 120 bp, synthetic construct
  source 1..120: mol_type = other DNA
ttctcatgtagtcaggaaattccccaacttcctctttattttcaatggtattttggctcttcttgaacttgtgttccttcgtttcattttaatatcattgtgtccaattctataaaacat

SEQ ID NO: 9510 - DNA, 120 bp, synthetic construct
  source 1..120: mol_type = other DNA
ctcgctgtctcaagggtggcaaaggcagaagaaaatcatatataagtagacctgcacagttcaagcccatgttgttcaaaggtcaactgtactgtaagtttgttatataaaccagttaat

SEQ ID NO: 9511 - DNA, 120 bp, synthetic construct
  source 1..120: mol_type = other DNA
ggagggtaattccttgctgggccttaaaaggagtccacaagataggaaaaaaacgaaaaagccaaataagatgaacctctattcaggccccaatgagaggctgcttgactctgatctttc

SEQ ID NO: 9512 - DNA, 120 bp, synthetic construct
  source 1..120: mol_type = other DNA
gcagccagtgctgtggattcccacatccacgggacctgcggtttcgggttattccattcagggatacatgacgtccctcatttctacctaccagtgggctggtcaagattctcatttatc

SEQ ID NO: 9513 - DNA, 120 bp, synthetic construct
  source 1..120: mol_type = other DNA
tccgccgatcccaaggaggcaatctgtcaggcgccgcccgggcggcagtatgcctgagggggtcctccgtgttcgcgcctcccgccgcctgcactgaaaggtctgtacctgagcctggat

SEQ ID NO: 9514 - DNA, 120 bp, synthetic construct
  source 1..120: mol_type = other DNA
gtactatgtcgtttctcagcttggttgtatgtgcctccattgagtggaccgtatctccagaatttctcctaaccctcccagtgtactcccctgcaatcctttctttttttctccaaatcc

SEQ ID NO: 9515 - DNA, 120 bp, synthetic construct
  source 1..120: mol_type = other DNA
gcctcttcagtttgccttatgggcttcccactctaaatagatgaggtacacaacattctggcagtatcacactagggccagagttggtagctcacagatgtacgatagaggatggaagga

SEQ ID NO: 9516 - DNA, 120 bp, synthetic construct
  source 1..120: mol_type = other DNA
gactagtggtttattcgagggcccacaacttccacttctaccctggcgtcacacagatcattttctcttctcaagtcattgtattttcactggtagtaaaagaggataatatcttcatct

SEQ ID NO: 9517 - DNA, 120 bp, synthetic construct
  source 1..120: mol_type = other DNA
ttacattgaatttttaatttcttgttgtaagtgtaaaagttatatgggctgggtgcagtggcccacacctgtactcccagcactttgtgaggctgaagcaggaggattacttgagcccag

SEQ ID NO: 9518 - DNA, 120 bp, synthetic construct
  source 1..120: mol_type = other DNA
taaaatttcttcttagtcgtatgcaaaactcacataatgggctattattaaataatatttttaataatctgtcagctgacaactcaagtataaggttcttcttcaattttgttgaaagca

SEQ ID NO: 9519 - DNA, 120 bp, synthetic construct
  source 1..120: mol_type = other DNA
gaagttcaagaaaacatacattaaaataccttcaatatgtgtttgttttactccaagatgtgatgttgatctgtgagaaattaattttgagcgttttgcctccactgccttgaaataatg

SEQ ID NO: 9520 - DNA, 120 bp, synthetic construct
  source 1..120: mol_type = other DNA
ggcattgtaggatgctcatgagctacctcagtctctaccacccactagatgccagtagcattgacccctgatctctctacccaagttgtgacaactaaaaccatctctggataatggagg

SEQ ID NO: 9521 - DNA, 120 bp, synthetic construct
  source 1..120: mol_type = other DNA
cttcttaagcatttgctgttaacagttattttcacatgtgcttgtacttattttacacttgtcagaacatagtatttacctttgaaccaaggttttataataagcaagcactttttttat

SEQ ID NO: 9522 - DNA, 120 bp, synthetic construct
  source 1..120: mol_type = other DNA
gggtgggattggtgatgttataaaagggtaagttcagccccttcttgctctctctgtcacccttccaccttcctctgtgtgatgatgcaacaaaaaagcccttcccagatgccagcatct

SEQ ID NO: 9523 - DNA, 120 bp, synthetic construct
  source 1..120: mol_type = other DNA
taaactgaggctaattggagatcataaaattttacagcttgctagaggtggaccacaattttgattggaaactttccaccaaccaattctaaaaggtgttaatggtgactattttctaaa

SEQ ID NO: 9524 - DNA, 120 bp, synthetic construct
  source 1..120: mol_type = other DNA
gtgggcagtggcctcttatgctacgtaagagatttgacatcataaagtaagttgccagagttctgaatgagggcattagaaatagtaatgaacaggaaagcatacacttaagagctgtct

SEQ ID NO: 9525 - DNA, 120 bp, synthetic construct
  source 1..120: mol_type = other DNA
aaaagatggtgtttccatgaaagaaaagaaaaagtggctaattcagcttgcaactcaaacaagtgtttttccaaaagacaactatatttcagcatgcagtagaagtgttttatgggtaca

SEQ ID NO: 9526 - DNA, 120 bp, synthetic construct
  source 1..120: mol_type = other DNA
atccttttcagcatctctagacataggcaatctagacaccagaaaatgtgttttctcttctccctttttaaagccaaccatccaccctattcagataaaattttttaattaaaaacattt

SEQ ID NO: 9527 - DNA, 120 bp, synthetic construct
  source 1..120: mol_type = other DNA
agacaagcaattctatgtttatatgccctagagacctgaagacattctcaaatacaaaaacaaagaagtatgcataaggatgttcattgcaggtttgcttataattggtggaaagtcagg

SEQ ID NO: 9528 - DNA, 120 bp, synthetic construct
  source 1..120: mol_type = other DNA
taaccccttctgaaaaagattaatcacacgtaatttgttacatattaaaataactgctcctaaatagtgatgtggccttgggcaagctctttcaagtttctgtgagctccagcttttcct

SEQ ID NO: 9529 - DNA, 120 bp, synthetic construct
  source 1..120: mol_type = other DNA
tctttactctaaaatggtttttttaatctgtaacacagaacttagtgcttggttatatataggtaggcattgttttctaaaaacactggtttacaaaatggaatgtgcacactacaggga

SEQ ID NO: 9530 - DNA, 120 bp, synthetic construct
  source 1..120: mol_type = other DNA
aaataaactgcaatagtaaatttagaagtaatactgaaagagcaactgggaagtcttagatgaagttgtcaccagcttcttcaaagcaatgaaatatccagttgtcccatttaattctca

SEQ ID NO: 9531 - DNA, 120 bp, synthetic construct
  source 1..120: mol_type = other DNA
cttctaaatagtggcatacatggatatcaagtactgtagtgggttcaaaattggagaaatggattttgaagtcatctttttgcaggtacaagagaagccatattgagtcagtcagagaag

SEQ ID NO: 9532 - DNA, 120 bp, synthetic construct
  source 1..120: mol_type = other DNA
aaatacagctgacatttcacatttatccaaacagtacatttcaaagaaacagtaagtataaggtaaactggagttcatcttcccatgggaaaaaagagcttaaaactgttgttaaccctt

SEQ ID NO: 9533 - DNA, 120 bp, synthetic construct
  source 1..120: mol_type = other DNA
gaaatggcaaataggtaggttcaggcttccagctccctcacccaaaattaatttttgtaaaggtagagaagcaaaaggaagcaaggatctggggagctggcaacaccagaaataagtata

SEQ ID NO: 9534 - DNA, 120 bp, synthetic construct
  source 1..120: mol_type = other DNA
aatcccagaagacagtaggaaagaataaagacatcaaaaatataaaagaaagttcagcaaaatgtatgctagaaatagaagtatcaacatctgaatcataagagaactcacagtgagagg

SEQ ID NO: 9535 - DNA, 120 bp, synthetic construct
  source 1..120: mol_type = other DNA
tgtgtgtaatatctacttggtaggagaattggcattagagggagggaagtagaaaatcaaaagaacataagagtatgctaaagaacttaggaggcaagatataaatattaaggtagttaa

SEQ ID NO: 9536 - DNA, 120 bp, synthetic construct
  source 1..120: mol_type = other DNA
cactgtcttccacaatggttgaactaatttacactcccaccaacggtgtaaaaacgttcatttttctccataacctagccagcatctgttattttttgactttgtaatagtagccattct

SEQ ID NO: 9537 - DNA, 120 bp, synthetic construct
  source 1..120: mol_type = other DNA
gcaaaaactccgtctcaaaaaaataataataataataatagtttttctagctctgtgaagtatctcaatggtagtttaataagaagagtattgaatctataaattgttttgggcagtatg

SEQ ID NO: 9538 - DNA, 120 bp, synthetic construct
  source 1..120: mol_type = other DNA
tatttatttatttatttttgagacagagtttcactcttgttgcccaggctggagtgcaatggtgcgatcccggtacactgcagcctctgcctcctggattcaaccgattctccctactca

SEQ ID NO: 9539 - DNA, 120 bp, synthetic construct
  source 1..120: mol_type = other DNA
ctctctcacattaaaaatgaccaaagagacatgaaaacttactgaaatgcttgattctggattgcaggacaagagactgggagtggctggagttataaggttctttattgggaaaactgg

SEQ ID NO: 9540 - DNA, 120 bp, synthetic construct
  source 1..120: mol_type = other DNA
tttattacaaaaacaaacaaggaaatacaagaaaggcaagttttacgtccatgctttataaaagtaaatacaacaacccaagtaaaatattaactaaataacaccaacagtaaatgagta

SEQ ID NO: 9541 - DNA, 120 bp, synthetic construct
  source 1..120: mol_type = other DNA
taagatgtcaatggagatgggggcggggggagaacacctgcccagaaataatgaaaatggctaaaagaagttatctaaacagaatggaaatgataaaataggaaccttggaacatcaagg

SEQ ID NO: 9542 - DNA, 120 bp, synthetic construct
  source 1..120: mol_type = other DNA
catatatcaataattacattattcctaatacaaagaaatgataaattcttgaggtggtagatgccccaattactctgatttggtcattgcacattgtatgcctgtaactaacatcacatg

SEQ ID NO: 9543 - DNA, 120 bp, synthetic construct
  source 1..120: mol_type = other DNA
agacatcaacacaactctcacaactattaataaaactagaaagaaggcagggagtggtggctcaggcctgtaatcccagcactttgggaggccgaggggggtggatcacgaggtcaggag

SEQ ID NO: 9544 - DNA, 120 bp, synthetic construct
  source 1..120: mol_type = other DNA
tccatgtctttgctaacgtgaatagcagtgtgatgaacatgcatgtgcatgtgtctttatgacagaacaatttatattcttttaggtatatacccaacaatggaattgctgggttgtatg

SEQ ID NO: 9545 - DNA, 120 bp, synthetic construct
  source 1..120: mol_type = other DNA
aactgagtaagactccatctcaaaaaaaaatggcttgtatccaaaagacaggcaataacaagtactggtgagtatgtggagaaggctttgtacactgttggcaggaatataaattagtac

SEQ ID NO: 9546 - DNA, 120 bp, synthetic construct
  source 1..120: mol_type = other DNA
ctacttgggaggctgaggcaggaaaggatcacttgagcccagtagttcgaggccagcctgggcaacataaggagaccttgtctctttaaaaaaaaaaaaaagtacacaaattaataattc

SEQ ID NO: 9547 - DNA, 120 bp, synthetic construct
  source 1..120: mol_type = other DNA
gagtttgagaccagcctagccaacatggtgaaactctgtctctactaaaaatactaaaaattagctgggcgttgtggcacacgcctgtaatcccaggaggtagaggttggggtgagccga

SEQ ID NO: 9548 - DNA, 120 bp, synthetic construct
  source 1..120: mol_type = other DNA
gatggctaaactaactgtgctatacccataccatataatacaactaggcaataataaattattgatatatgcaacaaccttgtatgatctccagagaaatacattgagagaaaaaaaagt

SEQ ID NO: 9549 - DNA, 120 bp, synthetic construct
  source 1..120: mol_type = other DNA
acagacatttttccaaagatgatatacaagtggcaaacacacatatgaaaagatgctcagcattacttattattagagaagtgcaaattaaaaccataacatcatctaattctcattagc

SEQ ID NO: 9550 - DNA, 120 bp, synthetic construct
  source 1..120: mol_type = other DNA
cttctacatcagaaattactgattcaaaagtagaattgcaataagataccaatcacaatagcagcaaaagctacaacatgcctaagaattaactgagcatactcaggactactatgaaaa

SEQ ID NO: 9551 - DNA, 120 bp, synthetic construct
  source 1..120: mol_type = other DNA
agcacggccaggggcctcttagaagcctcatatgaaatggaagaggaagggtctggagaaacaaggagccccccatctgggagtagtctctataggtttggggcctctccactctctgaa

SEQ ID NO: 9552 - DNA, 120 bp, synthetic construct
  source 1..120: mol_type = other DNA
ttctctcacatgtgctcaagtgcacacacacacacacacacacgcactccttttttggcaatccattatgtttacattccattctcctcatgcagcatccattctcttctcctcatcctc

SEQ ID NO: 9553 - DNA, 120 bp, synthetic construct
  source 1..120: mol_type = other DNA
ttccttccactgacttcttctgttaaccccttccagaagagatgctctaattccaaggatgcttctgaagaaattatggaggtgttccaaatcaactcatttcttggtttctttttctta

SEQ ID NO: 9554 - DNA, 120 bp, synthetic construct
  source 1..120: mol_type = other DNA
accacagttgaatttctccttatgaattataaatcagaaaacggccccaaattctgtcatgtctaagtgggaaaatggaagaaggcattgatttctcccctactcaagcagaagagaatt

SEQ ID NO: 9555 - DNA, 120 bp, synthetic construct
  source 1..120: mol_type = other DNA
tctttgtggatgaaaatatctagcagtattcatagcaaatgcagtaggaaggagagagttaatcacaaacagaaagtaagcagagagtgggaccaagagtggggatgggagttcagcgag

SEQ ID NO: 9556 - DNA, 120 bp, synthetic construct
  source 1..120: mol_type = other DNA
gtgaggagacgttccccaggaaagttcaagtgagcatgtgatttccactctcttctctgttctccattcccttcccaactgcccagcaagaaacaacacttcccacaaggggaaacctgg

SEQ ID NO: 9557 - DNA, 120 bp, synthetic construct
  source 1..120: mol_type = other DNA
gctctaccacacaggtgtaagtgtccccgtaagagggggttaaggctaaatgggagagggtctggtatgtccagtctccattgggctgggcagtcttgtgcgcactgctgtgaggcatga

SEQ ID NO: 9558 - DNA, 120 bp, synthetic construct
  source 1..120: mol_type = other DNA
ttcaagtttactttcacaaacttcaagccattgtcaatgcaagagtttaagggtgagaaaaagcatgtgtcagaatcccctgggattccaaatattcccatgcctgggcccacatcagat

SEQ ID NO: 9559 - DNA, 120 bp, synthetic construct
  source 1..120: mol_type = other DNA
cctgcaggaggggctggtcaccagaaagaccaagtcatgattagaagtctggaacttttagtcccatcccccatactccctgaaggggaaggggctggagattgagttaataatcagtca

SEQ ID NO: 9560 - DNA, 120 bp, synthetic construct
  source 1..120: mol_type = other DNA
ctggcacagatttcctgctcagggaacatctactgaccaagctcatacactgaagtttctgaaagtctgatttgagggagtcagtagaagtagtagataagtttttagatccagtctcct

SEQ ID NO: 9561 - DNA, 120 bp, synthetic construct
  source 1..120: mol_type = other DNA
agtgcctcagcctagcatcatcagttactaggtaaacgtcatcctgccttagtcttagacaacaggtctccttgtctctcttaattctttttctgcagaacaaccagtagatttccgtag

SEQ ID NO: 9562 - DNA, 120 bp, synthetic construct
  source 1..120: mol_type = other DNA
atttggcgtaaaaatttatttcatcacccaggtaataagtatagtatctgataggtagtgttttgatcctctccctcctcccatcctccaccctcaagtagggcccagtgtctattattc

SEQ ID NO: 9563 - DNA, 120 bp, synthetic construct; identical to SEQ ID NO: 3813
  source 1..120: mol_type = other DNA

SEQ ID NO: 9564 - DNA, 120 bp, synthetic construct
  source 1..120: mol_type = other DNA
acaatccataacccaattcacccaagtcttatctttcctgtcctcagagttccttctgctctgagaaccaccgtcccttccactttctcttttgacaagtttcaaaactgaattttcccc

SEQ ID NO: 9565 - DNA, 120 bp, synthetic construct
  source 1..120: mol_type = other DNA
aaggcagttggcattgtaggtctggtgtatagctccacaagcttgacaatgctgtgaggtgccatcagggaggaggtgtcctacgagagcctgggttagctaaaacaaagacaagctaca

SEQ ID NO: 9566 - DNA, 120 bp, synthetic construct
  source 1..120: mol_type = other DNA
acctgagaggtgtagagatataccatattcatggataggccatgctaacataatgacaacctctccccacatctctaacctaaatgctaccccaattaaagtaacagtaggatttcagga

SEQ ID NO: 9567 - DNA, 120 bp, synthetic construct
  source 1..120: mol_type = other DNA
gcataataaagcacttttaagtcttgcctgacaggaaatatctagataagttggaaaacagagagacagagaaattaggaagaactagaaagcaccacatctagaattactaacatgaga

SEQ ID NO: 9568 - DNA, 120 bp, synthetic construct
  source 1..120: mol_type = other DNA
catgtgaattctttgcccttccaggctgttttcacttcatgttaggggcttcatgatactgttttcccagaactgacataactgattggtatagcacttgggagcttattcttcccatcc

SEQ ID NO: 9569 - DNA, 120 bp, synthetic construct
  source 1..120: mol_type = other DNA
tgcaccacaccctgcagaagttgatctctccttgttcccaaatcatctccaagcacccttcctacagcaccccatgattccttttttcactcaaagcaattcttgtgacccataactgtg

SEQ ID NO: 9570 - DNA, 120 bp, synthetic construct
  source 1..120: mol_type = other DNA
ccctggtggggggattgaagtgtagggggaaaaagagactagtttagatggtatctctgtgtttggaggggccatggcatatggaggggagggcagagaagaacacagtgggtcaggctt

SEQ ID NO: 9571 - DNA, 120 bp, synthetic construct
  source 1..120: mol_type = other DNA
cctccaacttaaaaaacagcaaggtggggctaggcgcagtggctcatgcctgtaatcccagcactttgggaggccaaggtgggtggatcatgaggtcaggagtttgagaccagcctggcc

SEQ ID NO: 9572 - DNA, 120 bp, synthetic construct
  source 1..120: mol_type = other DNA
aatcccagctacttgggaggctgaggcaggagagtctcttgaaccccagaggcaggggttgcagggagccgagatcacgtcactgcactctaccctgggtgacagagcgagatgccgtgt

SEQ ID NO: 9573 - DNA, 120 bp, synthetic construct
  source 1..120: mol_type = other DNA
acatgcaaagcatcactgatatcgtttaccaaccacacatagcagctgtctttccccactcccctgttgtttccactgcctcataagacttcccaccactcacaaagcacagcgcttttc

SEQ ID NO: 9574 - DNA, 120 bp, synthetic construct
  source 1..120: mol_type = other DNA
taattttatgaggatgcggaataggaggaacataatcaggcaggctcctaagacttgaaggaaaaacaatttggccagcagaacatgaaggaagagaaaaacacgccagggcaaagggta

SEQ ID NO: 9575 - DNA, 120 bp, synthetic construct
  source 1..120: mol_type = other DNA
agtgaaacaaggacaaaagcatgcatgggctcaaaccccaaacctcataccagttatccaggatccagtcaggagcatttaactactttatgtgcttcagactgaaagaatttaatatag

SEQ ID NO: 9576 - DNA, 120 bp, synthetic construct
  source 1..120: mol_type = other DNA
agtttgttagacaaaagaaagagaaagacagaaggggtgggggaagaggcagtgagaaagctctaatgtggcaatcaagtaatctgagaaattaatatatgtgaatattgtccaacagtg

SEQ ID NO: 9577 - DNA, 120 bp, synthetic construct
  source 1..120: mol_type = other DNA
ttcatgtgtcacgaaatattcttcatttgctttttttttccctaaccatttaaaaatgtgaagaccattcttagcttttaggccatttaaaaacaggtggtaggcaagattgtgctcaca

SEQ ID NO: 9578 - DNA, 120 bp, synthetic construct
  source 1..120: mol_type = other DNA
actaaaaatacaaaaaaaaaaaaaattagccaggcgtgatggcgggtgcctgtaatccaagctactcaggaggctgaggcaggagaatcacttgaattcgggaggtggaggttgcagtga

SEQ ID NO: 9579 - DNA, 120 bp, synthetic construct
  source 1..120: mol_type = other DNA
aatgaggatttattggaaagatactgatctaactcatgaaatgaaagtaatagttgaataagctagcctcaggtagaatagccacagggaccttagaagcaggggttgagttgccattaa

SEQ ID NO: 9580 - DNA, 120 bp, synthetic construct
  source 1..120: mol_type = other DNA
ctccatctcaagattacaagagtacactcatcactttcccttcccaatatattccaactcctctcttatatttaagacttcagtgaataacaagatgtccacccgagctacaaatgtggg

SEQ ID NO: 9581 - DNA, 120 bp, synthetic construct
  source 1..120: mol_type = other DNA
gggtttcactgtgttagccaggataatcttgatctcctgacctcgtgatccacctggctcggcctccctaagtgctttgattacaggcatgagcaaccacacccagtctctatgagccat

SEQ ID NO: 9582 - DNA, 120 bp, synthetic construct
  source 1..120: mol_type = other DNA
gaaacagaaaaaacaaacctaaaattaatatggaaccacagaaaacacaaatagtcaaggtaattctgaacaaaaagaacaaagctgtagacatcataccacccaacttcaaaatatact

SEQ ID NO: 9583 - DNA, 120 bp, synthetic construct
  source 1..120: mol_type = other DNA
ctcaaacaactaaaaatagatctactagatgattcagcaatcccactgctgggtatatatccaaaagaaaggaaatcagtgtatcaaagagatgtgtacatgcccatgtttatttcagca

SEQ ID NO: 9584 - DNA, 120 bp, synthetic construct
  source 1..120: mol_type = other DNA
gtattagtaaagaaacactgtattgtattaatacagaaacacatactactagatcatcacacgtttctttgaatatagtagtgtcccccacacagcaccaaatgtgattatacagtttat

SEQ ID NO: 9585 - DNA, 120 bp, synthetic construct
  source 1..120: mol_type = other DNA
gttttaagaagtgggacctttaagagttaattaggtcatgagggctctgctctcatgaatggattaatgctactaatgtaggtatgggttcccatttaaaaggggacattctgaggccgg

SEQ ID NO: 9586 - DNA, 120 bp, synthetic construct
  source 1..120: mol_type = other DNA
aacagcactggaaaccttctataatgtgttctctaatataaatttacctcccattttctcttctcctgctctacttcttgtagcttatgttctggccagactggactagactactctctg

SEQ ID NO: 9587 - DNA, 120 bp, synthetic construct
  source 1..120: mol_type = other DNA
ctgtaatcccagcactttgggaggctgaggcgggcggatcacgaggtcaggaattcgagactaatttggccaacatggtgaaaccccgtgtctactaaaaatacagacactagccgggtg

SEQ ID NO: 9588 - DNA, 120 bp, synthetic construct
  source 1..120: mol_type = other DNA
caaataggaaaagaaacaagtgagagtggtatagaagtcaagggtagagagaatgtcaggaaggaaacatgatcaaatgtcgaatgcctcagaggtcaaataaagtgagaactgtaaagt

SEQ ID NO: 9589 - DNA, 120 bp, synthetic construct
  source 1..120: mol_type = other DNA
attttaaggctgcctaagactaaagccaaatacgaagtccacatctgcggtccgcaccttatctctccgcgcggcaggcgcgacgagggcgagaaactccctctccagtggtcgcaccac

SEQ ID NO: 9590 - DNA, 120 bp, synthetic construct
  source 1..120: mol_type = other DNA
aggatccaggtgagaaggggcccttgtggggcggagatgtcagtcaagtgcttaaccaatggtggggagtccgggagggggattcttggggttcaggaaagaatcctgagagtgggaaga

SEQ ID NO: 9591 - DNA, 120 bp, synthetic construct
  source 1..120: mol_type = other DNA
agggaggatagaggatcgggaggcagtgattttccggaatgcagggaataaacgagagcaatgtctggctgcccttttcctaaggcctagtattttctcagcctcctaagtttttattcc

SEQ ID NO: 9592 - DNA, 120 bp, synthetic construct
  source 1..120: mol_type = other DNA
gctccgtggggaggactccggaccctggtgggggggcgggggggttctttcgcccccgtggcggagggcccctgagaggcggatacgggtgtgcctttgggggtgatgtggcgtgtgggg

SEQ ID NO: 9593 - DNA, 120 bp, synthetic construct
  source 1..120: mol_type = other DNA
ttgccacttccctgtgggtctctgcggcactcttctgcctggtgactgacaccttggaaatgaagtttatgacgtcatcgttgcggctggccaatagaaaaagctcccgcggagaggtgt

SEQ ID NO: 9594 - DNA, 120 bp, synthetic construct
  source 1..120: mol_type = other DNA
ttgcggtcaagatgctgcaaaacgtgactccccacaataagtacgtttccgcgagccgcgtgtgggaaggggatgttgcagggcggcggcacaggggtgtggggcgccgtgttgggagta

SEQ ID NO: 9595 - DNA, 120 bp, synthetic construct
  source 1..120: mol_type = other DNA
tctaggtggattattctgtgtcttatcagcattttatggaattttttatagccataatttgttcttttcctccttaccggcgctcaaccaccatggcaaccaccaaacccctagtgagga

SEQ ID NO: 9596 - DNA, 120 bp, synthetic construct
  source 1..120: mol_type = other DNA
gttagctaccagatttctgggtatcttggtcctttgtgattgatccgaccgcttgctgtaactatcttggcatctttccttgtgccctccatgtgtccttccttaacttttgtgccctgg

SEQ ID NO: 9597 - DNA, 120 bp, synthetic construct
  source 1..120: mol_type = other DNA
cagctctcaagttttttcttctttcgaattttgggagacagttaggagaaagtggaaattagtagtggcctggagtaggaaattttctttaagatttgatgacaagatgactggtggggg

SEQ ID NO: 9598 - DNA, 120 bp, synthetic construct
  source 1..120: mol_type = other DNA
tgcctgactctcagcaacaacaccagagctctaagaaaggaaagctttcagaacagttaaaacattgcaatggcattttgaaggagttactctctaagaagcatgctgcctatgcttggc

SEQ ID NO: 9599 - DNA, 120 bp, synthetic construct
  source 1..120: mol_type = other DNA
tatcacttggtggctgggtatgtagggcactgtttatcagcatagttttgagtttgtgcctctttgtaggatgtatttgagttccgttatgccaagatgccagatgaaccactagaacca

SEQ ID NO: 9600 - DNA, 120 bp, synthetic construct
  source 1..120: mol_type = other DNA
acctcagatcattgggccattggattcccataaggagcatgcagcctggatatgtaccatgcgcacttcacagtagggttcatgcttctatgagaatctaatgcttctgctgatgtgaca

SEQ ID NO: 9601 - DNA, 120 bp, synthetic construct
  source 1..120: mol_type = other DNA
tcacatttttagtaatattttttcattaaggtatgtacgtacattgtctttttaaagacatgttattgcctacttacagtcgagcaaaatgctctgtttcactatacagtgtcccagtag

SEQ ID NO: 9602 - DNA, 120 bp, synthetic construct
  source 1..120: mol_type = other DNA
tacagattgactccatcctgccttcttgactgtcttttattgacaaatgaagattcagacttgaacgtctttaactttcgaatttgttctgcagcgaatgagaaaacagagtcatcctct

SEQ ID NO: 9603 - DNA, 120 bp, synthetic construct
  source 1..120: mol_type = other DNA
aaaggcaatagctaacctataattggattgtcttaatttttaaaccagtaggcttttgctgtgtttttaataaagtaaatatgacttttgtaaattgagtccttagaagtaatctttagg

SEQ ID NO: 9604 - DNA, 120 bp, synthetic construct
  source 1..120: mol_type = other DNA
acaccacaaactaagtgtagggcaacaccacaaactaaatgtaggaagcaataaattttactagtgatgctcagccctctttaggaattccggctaaactggggcttgagcaacaatttt

SEQ ID NO: 9605 - DNA, 120 bp, synthetic construct
  source 1..120: mol_type = other DNA
ctgccatttactgccttttattgcgtccataggaagccttttgttgggttgtgggggaaggtgagagtcggtcttatttactcagtcacacatttattgagttcccttgattgccttttc

SEQ ID NO: 9606 - DNA, 120 bp, synthetic construct
  source 1..120: mol_type = other DNA
tttggtcctcactataatcctgtgaggtacatcttgtctgcatttaacagataaagaaatgaggcacagagagattagtcaatttgcccaacatcaccacattgtcagtgagcactggag

SEQ ID NO: 9607 - DNA, 120 bp, synthetic construct
  source 1..120: mol_type = other DNA
acaccacttgttcctagctctcatacttttcagacagccatttcttagtctgcttctttaaagtctctgcctctgcctcccataatatattgtccgttatgacacctttctttgtcctct

SEQ ID NO: 9608 - DNA, 120 bp, synthetic construct
  source 1..120: mol_type = other DNA
agtgttcagtggcccagaggttgggggacccctgctataaggaacaagcacttatatagagtttactatgtaccagacacttatgagcacttttgcaatttagtcttcataataatccta

SEQ ID NO: 9609 - DNA, 120 bp, synthetic construct
  source 1..120: mol_type = other DNA
ctcacccagagttcctgcaaaaaaaaaaaaaaaaagagacattttgcagtttcatctaccgattttctcctctctctcaaaaataatgtttttaaagacagagtcttgctctgtagccca

SEQ ID NO: 9610 - DNA, 120 bp, synthetic construct
  source 1..120: mol_type = other DNA
taaccaatcatttggccagggagtaaggcaagagacaaaaattgagggaaggagagaatgatgagcaactgagggagcagcttggggttgaaaagctacctcagaaagcagttctgtgat

SEQ ID NO: 9611 - DNA, 120 bp, synthetic construct
  source 1..120: mol_type = other DNA
ttacaggcatgacccaccaggccgagcctagaattttatttttattatttttatttcgatagctttaggagtacaggtggcttttatttacatggatgaattgtatagtggtgaagtctg

SEQ ID NO: 9612 - DNA, 120 bp, synthetic construct
  source 1..120: mol_type = other DNA
ctacttttagttctttgagaaatctccatagtgttttccacagaggttgtactaatttacattcccaccagcaatgtataagctatcccttttcactgcatccttgccaacatctattgc

SEQ ID NO: 9613 - DNA, 120 bp, synthetic construct
  source 1..120: mol_type = other DNA
atccacccacctcagcctcccaaaatgctgggattacaggcgtgagccaccacgctcggccctagtttcgttcttgtacctgtgtcaatccaattttcccagcactatctattgaatagg

SEQ ID NO: 9614 - DNA, 120 bp, synthetic construct
  source 1..120: mol_type = other DNA
gttcccctggacagtttttgtttttttgtgtgtgtgagacggagtctcactctgtcacccagactggagtgcagtggtgcgacctcagctccctgcaacccctgcctccgaggttcaagc

SEQ ID NO: 9615 - DNA, 120 bp, synthetic construct
  source 1..120: mol_type = other DNA
cttagagggttgtatgcttccaggagttcattcatttcctctaggtttgttcaggatttctatttcttcctgattcaagcttagaggaatgcttccaggaattcattcatttcctctaga

SEQ ID NO: 9616 - DNA, 120 bp, synthetic construct
  source 1..120: mol_type = other DNA
ttatataacattttaatgtcttataaaaacaaaattatatgacatttttctaggtgaacttattcttggtgttcctgggatgtctatagacaatgttacagtaacttttgactacagatc

SEQ ID NO: 9617 - DNA, 120 bp, synthetic construct
  source 1..120: mol_type = other DNA
tatattagtaaatcattagttaaaactgacatttctagttcaaaatatttttctagttcaaatttaatattattgttttaattcaactacgtttacttgcttttcatacattaaaaatct

SEQ ID NO: 9618 - DNA, 120 bp, synthetic construct
  source 1..120: mol_type = other DNA
actattccacccattttttaaacagcatctttttagagagacaaggccagtagaatctctcacattttgaatttgtgtgattggttctttgtggtttcatttgacttattcctctatcca

SEQ ID NO: 9619 - DNA, 120 bp, synthetic construct
  source 1..120: mol_type = other DNA
ggtcacttctccaagaagctctatttcctttgagtgggaaatgatatttacacactacaatctgtgcattgaggatgctcattgctacagggctactattaggctctttcatttgctaga

SEQ ID NO: 9620 - DNA, 120 bp, synthetic construct
  source 1..120: mol_type = other DNA
acaacaacaaaaaatagagagagaagagagagagtaagtgtattccaccaagaacatacagtagtatcttttaatatcacttgggatacttattttttctgtgtggttcagttctatttg

SEQ ID NO: 9621 - DNA, 120 bp, synthetic construct
  source 1..120: mol_type = other DNA
attttttcaactattgtactcttactaggcatgtttccaataattttcaattgttacaaataatgacatatcatttttaaaaggcagattactatataataaagatacatacttcacttt

SEQ ID NO: 9622 - DNA, 120 bp, synthetic construct
  source 1..120: mol_type = other DNA
gtccaccttgggagaccttaggcttactcagatttggaggctccaggtggggtggatgcaaaccacaagatggagccaaattacaagtcataggtagcaacctcctaaaccacaaggagg

SEQ ID NO: 9623 - DNA, 120 bp, synthetic construct
  source 1..120: mol_type = other DNA
aagaaatgaaataattcatgtatggcagaatgatgcttttctttttcctttgtttgtatttaggtttgtcacacaagacaatagcacatgtcaccgccaaggcctttcctcttctggctt

SEQ ID NO: 9624 - DNA, 120 bp, synthetic construct
  source 1..120: mol_type = other DNA
acagtgtttcaatgcccattatgttctgggtgttggaactataagacacagccttctcttgctttagaggagcagttagtggcaaaggcaaattcatacacagtcaactgacacagggcg

SEQ ID NO: 9625 - DNA, 120 bp, synthetic construct
  source 1..120: mol_type = other DNA
agtgtgagagtagaataaatatattttccgacatacgaagcataaaaagttttcctcatatgcactgtttctcaggaagtggaaagaagaggtgcctcattaaaataaggcagaccacaa

SEQ ID NO: 9626 - DNA, 120 bp, synthetic construct
  source 1..120: mol_type = other DNA
tggaagggagactgggtcaaggacagacagaggatttgatgttcttgttatataggagagatgacatgcttatgatttgtagggtgaccctgcaaaaagggagagtttggatacaaagga

SEQ ID NO: 9627 - DNA, 120 bp, synthetic construct
  source 1..120: mol_type = other DNA
attgagtccccataatctcttggtttctttcttttccaggaccaactgctcacagttcaaaccctcattttgcctctatttacttgtaccttgattggctgatgccctaacagacccagg

SEQ ID NO: 9628 - DNA, 120 bp, synthetic construct
  source 1..120: mol_type = other DNA
gtacttttaaaaggatcccaagcagttcttatgtgcattctggtttgaaaaccgtaatctgtattgctcattttggtcctgacataaactatgtggtatggtgatttatctctttgtatg

SEQ ID NO: 9629 - DNA, 120 bp, synthetic construct
  source 1..120: mol_type = other DNA
tcccacaagtcatttctctcagaaggatcattacctaaaatagcagaaaacatacgatcgaggttgctcaatttcaatatgctgggatcctatctctgagtgcccacctcccccaaaacc

SEQ ID NO: 9630 - DNA, 120 bp, synthetic construct
  source 1..120: mol_type = other DNA
ggacgccaggagctcctatatttgactggtccctgggcgggagtccgggtgagaggtgtcattcctcaaggagaggggtgccaaaggggtctgggaagacctggagcctcctgggaaaga

SEQ ID NO: 9631 - DNA, 120 bp, synthetic construct
  source 1..120: mol_type = other DNA
aaggttagtgacccagagaccaaggggatagggagaggcaactcaaggcattacaaagagcactggacgaggagtcagaagtcaaggttcatgtcccaattcctccatctcagagcatta

SEQ ID NO: 9632 - DNA, 120 bp, synthetic construct
  source 1..120: mol_type = other DNA
cttcagccaatcacagaaattctctgagtgaatgtatctgttgctgggtaaagagggaaagagccggggtgagaaggtggaaggattcactgggcccccaggagaggccagaggaagttt

SEQ ID NO: 9633 - DNA, 120 bp, synthetic construct
  source 1..120: mol_type = other DNA
gtctgtggactggtaaaacctgctccaatgctctttcctcaatgaataagggatgcctattttaagtggggcagacacagcttctgacttcaaattaatcaaatgacagctagtaattga

SEQ ID NO: 9634 - DNA, 120 bp, synthetic construct
  source 1..120: mol_type = other DNA
gtgaactgagccttttcccaatttgtcctgagaatctttctgtcctactctgtcttgtctgatagtaataagttctacagctgtctttgggtatttgttcactgtatctttttctactct

SEQ ID NO: 9635 - DNA, 120 bp, synthetic construct
  source 1..120: mol_type = other DNA
tcacacccggccaagttttcttttttaatcttcattgcctttttttttttttaagtgttaccgataccttctccatcttccctctgactggataagaactttagcatgctttcaaattta

SEQ ID NO: 9636 - DNA, 120 bp, synthetic construct
  source 1..120: mol_type = other DNA
acttttaaagtgcacttttaatgctcattttaagcggctggtctatattttctaccacttctttcaaggacatagatggtcctgtttgctgtttttcttttgaggtgtcggcactcccta

SEQ ID NO: 9637 - DNA, 120 bp, synthetic construct
  source 1..120: mol_type = other DNA
tcctcaaggactgtgctgtcctgtgcagtagccacaagccacctgtagctattaagccaaaaaaaactctaagtataaaatgccctgggatttgaagacttaattaaatgtatatacata

SEQ ID NO: 9638 - DNA, 120 bp, synthetic construct
  source 1..120: mol_type = other DNA
tttggctgggaactgctcacttcccttagaactttcccctcccgtctcctgacttctctaaatgccagagttccaacctctgtctcctgggaaattctaagctaaaatcactcttccttt

SEQ ID NO: 9639 - DNA, 120 bp, synthetic construct
  source 1..120: mol_type = other DNA
ttataagtaatattcgatttgtcagatgttggtgatacagggagaagatgacaatggtgacagagtgtttttcatcttcccaagtgtcctcacaaaaacagagagtgcaattgggatagc

SEQ ID NO: 9640 - DNA, 120 bp, synthetic construct
  source 1..120: mol_type = other DNA
ggaaacaggctggtgtcaaattgtgaaagccgcagatgtcctgctaagtaatagggttgtgccttatctatgattaatggcaagcaggcacagtttttgccttggagcccggtgaaagca

SEQ ID NO: 9641 - DNA, 120 bp, synthetic construct
  source 1..120: mol_type = other DNA
taaatgcagagtgcctctagggatctgtccccagctaacaatgtctccttgatcaaacattcatttgtatagcttcaattcttagtcatctaattatacctaacatagcaaagaacaatc

SEQ ID NO: 9642 - DNA, 120 bp, synthetic construct
  source 1..120: mol_type = other DNA
gttcttaatcttttttgtttatatagctctcattccaaaagacaatctccctgactgggctagaaagtcatatgtttgtaaataatcagagagaggccaaggaaaaggacagagctggcc

SEQ ID NO: 9643 - DNA, 120 bp, synthetic construct
  source 1..120: mol_type = other DNA
gcaggcagtggagagacagtgatggtttttgaggaggaagtgagatgatcatggttgtgttctaggattattaacctggcactagtgtagcaaataaattcgatctgagggtggcaggaa

SEQ ID NO: 9644 - DNA, 120 bp, synthetic construct
  source 1..120: mol_type = other DNA
ggtgccaggttgagaaaccatggcttagggtcatgctcctgccctaaagtgccattgctattgtttgcaagtttaattattccaggagctatacctctgttaaggactgaattttatccc

SEQ ID NO: 9645 - DNA, 120 bp, synthetic construct
  source 1..120: mol_type = other DNA
aagaaatcatgttcaggacagaacaccagtggtgtgtctatgtaaccatcggatgaggaaattagtatggatcaaccatctcagtggaatctgggtgctattcatcaaggcaatgaaaga

SEQ ID NO: 9646 - DNA, 120 bp, synthetic construct
  source 1..120: mol_type = other DNA
taatattcacattgttgtgtgacaactctagaacttttttatatgcaaaatgaaactttatcctcagggaacaactccctatttcccgctcttcccagctcctggaaacccccactctgt

SEQ ID NO: 9647 - DNA, 120 bp, synthetic construct
  source 1..120: mol_type = other DNA
ttattaattatattcaccacattgtacactaggcctcttgaacgtattcctcctatttggctgaaattttgtaacctgggacaaacatctttccaaccagcagcattttcagctcctaat

SEQ ID NO: 9648 - DNA, 120 bp, synthetic construct
  source 1..120: mol_type = other DNA
tttgggattatatcaaaaaattattgcccaaactaatgtcatggagcttttcttctatgttttcttctagtagttttacagtttcaggtcttatgtgtaagcctttattctgagttgatt

SEQ ID NO: 9649 - DNA, 120 bp, synthetic construct
  source 1..120: mol_type = other DNA
tttggatgatttttatttcttactcttgcctaattgctggctagaacttcagtactatgttgaatagaaatggttagagtggacctccttgtcttgttcctggtcttagaggaaaaaaat

SEQ ID NO: 9650 - DNA, 120 bp, synthetic construct
  source 1..120: mol_type = other DNA
gggtttacttctggaatagacagttgacattggggtactcagaaaacagcaagaatctaagagtgtttgagggtctattcttagaaaaaaacctttttcatacctcataatctctgcttt

SEQ ID NO: 9651 - DNA, 120 bp, synthetic construct
  source 1..120: mol_type = other DNA
tgagctgtgatgttggctctccacctctatcagccatcagattttcatattatcttgcctctctcttcctctttccttacaccaaacattgattcatcaaggagtcttaccactttacta

SEQ ID NO: 9652 - DNA, 120 bp, synthetic construct
  source 1..120: mol_type = other DNA
ctcccctctccctcttcatctcttcctccccttccctcccctcccctctcctttctgtctctctcagctccaaaaaagaatgatacagagatgcataacactcctctctctcccatctga

SEQ ID NO: 9653 - DNA, 120 bp, synthetic construct
  source 1..120: mol_type = other DNA
gtcaggtgcctgcacttggctatctcaacatcaacatcaccccaacacctgttttttcatgcattcaagggagattttttttctccccaagtttctttcaccttccctttggggttcctg

SEQ ID NO: 9654 - DNA, 120 bp, synthetic construct
  source 1..120: mol_type = other DNA
caaccataagttactattttcattgcttgattttcatatattaaacttaccctatgttcatagaataaactcaacttggtcattattttacctagtgttatatttaattgactaatagat

SEQ ID NO: 9655 - DNA, 120 bp, synthetic construct
  source 1..120: mol_type = other DNA
ctttcctttccttttcttttctttcaagacagggtctcactctgttgccctggctggagtgcagtggtgctgtcatatctcactgcagccttggactcctgggctcaagtgatcctccca

SEQ ID NO: 9656 - DNA, 120 bp, synthetic construct
  source 1..120: mol_type = other DNA
ctatctttttctatttcctagttcatttattcccattctaacattcctttcactagttctggtttgtcttactcatttctaatttcttttcttttcttttctttttttgtttgtttattt

SEQ ID NO: 9657 - DNA, 120 bp, synthetic construct
  source 1..120: mol_type = other DNA
atacaaacactttatttctatacagctctgttccctacccccgtgctgttattgtcatacaaattataccattcttacatgtgtgcctatcaacacagatttataaatattgtttgctga

SEQ ID NO: 9658 - DNA, 120 bp, synthetic construct
  source 1..120: mol_type = other DNA
ttcattttaggactacagttatacatattttggtctgcttgatggtgttctacaggtctctgaggatctgttcatttttcttttcccatttttcttcttcttcctcaaactggataatca

SEQ ID NO: 9659 - DNA, 120 bp, synthetic construct
  source 1..120: mol_type = other DNA
caaactcactttataacaacccactctcaagggaacttcataactaacccagtctttcaagaaagacaccaatccaacttaatgacctaagcacctcttaaaggcaccatctcccaacac

SEQ ID NO: 9660 - DNA, 120 bp, synthetic construct
  source 1..120: mol_type = other DNA
gagagtttttggaggttcttactttgttatttttgccaatattgacccatctataggagtttttaaaaatttatatcatcattttttagttctagaatttctattaattcttttctatac

SEQ ID NO: 9661 - DNA, 120 bp, synthetic construct
  source 1..120: mol_type = other DNA
attggaaggaacattaatattgtacaagctattccatcatagccaaaaagaggaaggcaatctacggtattgttttttattgacaactggggatagaattggaaactcaggtctttctac

SEQ ID NO: 9662 - DNA, 120 bp, synthetic construct
  source 1..120: mol_type = other DNA
tgcatggagtgaatgtaaagccataaatacattttctaccttgtgtatccccaacttaactttcccttatttgaatctctgaaatatctatggtcactctattgccgcctaacaaggggc

SEQ ID NO: 9663 - DNA, 120 bp, synthetic construct
  source 1..120: mol_type = other DNA
tgagaacatgtgatatttgtttttttgtgcctggcttatttcacttaacattatgacgtccacttccatccatgttactgcaaatgacatgatttcatctttttaaatggctgaatactt

SEQ ID NO: 9664 - DNA, 120 bp, synthetic construct
  source 1..120: mol_type = other DNA
cctcagtccttcagctgggactacaggctcatgtcaccataccaggctatttggttctttttaattttagtaagagactgaagtctagctatgcttcctgggctgatcttgaactcctgg

SEQ ID NO: 9665 - DNA, 120 bp, synthetic construct
  source 1..120: mol_type = other DNA
ctcatagcttagttcccacttatgagtgagaacatacaatgcctggttttcccttcctgagttactgcacttagaataatagtctccaatctcaaacaggtcactgcaaatgccattaaa

SEQ ID NO: 9666 - DNA, 120 bp, synthetic construct
  source 1..120: mol_type = other DNA
cttgagttgatttttgtgtagagtgagagacatggatccagttttattctcctacatgtggcttgccaattatcccagctcaatttgttaaatagggtgtttttttaccactttatgttt

SEQ ID NO: 9667 - DNA, 120 bp, synthetic construct
  source 1..120: mol_type = other DNA
ttttcggatctaggagctttttggatgagtctttagggtttttgaagtatatgatcatatcattagtgaacagtgatggtttgactttctctttacctatttgtatgtcctttatttctt

SEQ ID NO: 9668 - DNA, 120 bp, synthetic construct
  source 1..120: mol_type = other DNA
ccagtgatggtgaccattttttcatgtgttttttggctgcataaatgtcttcttttgagaaggggtgaaagtcagcattcttgtctccttccagttctcaaggggaatgctttcaacttc

SEQ ID NO: 9669 - DNA, 120 bp, synthetic construct
  source 1..120: mol_type = other DNA
ccagcttttcatttcatttatcttttgtattcttggtttcaatttcatttatttctgctctgaaatttatttcaatttcatttatttctttgctatttattttattctgatgggtttggg

SEQ ID NO: 9670 - DNA, 120 bp, synthetic construct
  source 1..120: mol_type = other DNA
acctcaccttgtagctcccataattcccacgtgttgtgggaggcaccctgtgggagattactgaattatgggggtgggtctttccagtgctgttcttgtgacagtgaatgggtctcagtt

SEQ ID NO: 9671 - DNA, 120 bp, synthetic construct
  source 1..120: mol_type = other DNA
atcttctcccatgatctacaccttcaggttccccagtgaggtatgcattcaagggtggaagatccccctttcccacctccacagtttgggcactcacagtatttgggatgtctcccaggt

SEQ ID NO: 9672 - DNA, 120 bp, synthetic construct
  source 1..120: mol_type = other DNA
tgcagccccccttggatagatagaatagtactatgttgagtaggaggggtgaacatgtgtatacttgtcttttcccagttcctaaagaaaaagctttcaacttttcaccattctgtatga

SEQ ID NO: 9673 - DNA, 120 bp, synthetic construct
  source 1..120: mol_type = other DNA
gatggtgggagaaattgtaaaattataggatatagacacaaaccttcttggaaggccggaaggtatttgcaaaagtctcaagatagggttatggctgaaagcagcgtaatccttaccttg

SEQ ID NO: 9674 - DNA, 120 bp, synthetic construct
  source 1..120: mol_type = other DNA
tgatatcaccaggccaaaataacaaagaggaaatggaggttttgcctgagccccctcctccaatagataggaaaaaagacaggagacatgctccagctgtgggaccttgtcttaagcaag

SEQ ID NO: 9675 - DNA, 120 bp, synthetic construct
  source 1..120: mol_type = other DNA
gacgaaggtaactcagggaaagaacccccttctatatgccccggatgtaaaacggtgaaacattgggcaaatcaatgcaggtcaaaatttgataaaaacagaaaccccataagtaaccag

SEQ ID NO: 9676 - DNA, 120 bp, synthetic construct
  source 1..120: mol_type = other DNA
cactgttattattcctcccctacccccgtcgtagctctctcaagatccaatttgagtagaacagtggcctctgaagggagagaaattacaaaaagcctgtgaattagttgaagagcaatt

SEQ ID NO: 9677 - DNA, 120 bp, synthetic construct
  source 1..120: mol_type = other DNA
ttgtttattttccccaccaaacactccccttcaggattaataggacagatgaccccaagactgcactttctagaatggatttttttttgctcacataccaggactaaaacactctttccc

SEQ ID NO: 9678 - DNA, 120 bp, synthetic construct
  source 1..120: mol_type = other DNA
gttatggcaaacagaagttacatccctgaatttggaaaactaagatatgtacatgtatccattgatactaacactcatctaattagtgcacacgctcttccttggagagtccactcaata

SEQ ID NO: 9679 - DNA, 120 bp, synthetic construct
  source 1..120: mol_type = other DNA
ttcctgctacactctattgggctcatatcttagatccgcctttctttcaccctgtcacctaggcagacactcccttcccaacttttaataacataactgcttggctaggagggatagatt

SEQ ID NO: 9680 - DNA, 120 bp, synthetic construct
  source 1..120: mol_type = other DNA
ttcctacccagtcaatttgacatgcgattggcaaagttcctctgcccttgccacctaagaatgtgccctgtcctaggccagacccaaaagatacataggcacacttacagcctttatagt

SEQ ID NO: 9681 - DNA, 120 bp, synthetic construct
  source 1..120: mol_type = other DNA
ttttgtgttagaacctgtgaagtagaagtaactcagaagtgctcctcagagagtagacagctctttctctaaccgtttccagctcagtagaatttagaaaggcttctaggaggccaacca

SEQ ID NO: 9682 - DNA, 120 bp, synthetic construct
  source 1..120: mol_type = other DNA
gagaggaaatagagacaaatagtttttatgggtgtaatacacagcctccactgtcccacaataagagcaattgagcttaaataccaaaaagggcttttctatgtgagctgaaaacagaaa

SEQ ID NO: 9683 - DNA, 120 bp, synthetic construct
  source 1..120: mol_type = other DNA
tgttagaaacatctcttctctacaaaccatgctttgtgttcagcatgctcatctggcatccagtttaagaaggatatcttctggccatgatttgatttttgtatgaaaaaaatctttgtt

SEQ ID NO: 9684 - DNA, 120 bp, synthetic construct
  source 1..120: mol_type = other DNA
tgggcggaggggttcctcacttctcagacggggcggttgccaggcagagggtctcctcacttctcagacggggcggccgggcagagacgctcctcacatcccggacggggcggcagggca

SEQ ID NO: 9685 - DNA, 120 bp, synthetic construct
  source 1..120: mol_type = other DNA
tttttgtttgtgtaaactctaatttctatcaaggtgtcatggacttttaaaattagtatttcattacaaatgtctcagcattggtcaatttttgccaggaccattattgatcaagcaaat

SEQ ID NO: 9686 - DNA, 120 bp, synthetic construct
  source 1..120: mol_type = other DNA
gggagccctcagaacccagaaagattcagaaagctctgtccagcaacatgtgaaggcagtgtttatagataaaaacaggaagtgatactcaaaaccagccaatttattacagctcagtgt

SEQ ID NO: 9687 - DNA, 120 bp, synthetic construct
  source 1..120: mol_type = other DNA
attgggtggaatattctacagatcttgattagatcacgttggttcattgataatgttatttaaatctatcatgtcctcatgaagttttttcctaaatattttattgtttactgagtgcta

SEQ ID NO: 9688 - DNA, 120 bp, synthetic construct
  source 1..120: mol_type = other DNA
ctaccatcttacagtttgttttctttttgtcttaccagactttcccttttttatttctttattttgaattaattatgcttagtgttctattttatcttctccattggcctcttggctata

SEQ ID NO: 9689 - DNA, 120 bp, synthetic construct
  source 1..120: mol_type = other DNA
gaggttgaaaccacaccttcaagaaatagtattcacatgtgacctggtcctagacttccagtaagaatgactcagagtctccccgctctgaaatactgaagtatttattggtcttagggt

SEQ ID NO: 9690 - DNA, 120 bp, synthetic construct
  source 1..120: mol_type = other DNA
agatatttcattaaaatatgatttattactgagttcttttggtatcccccaaattttgcacctaagccaggtgcatcccctacatcaccctagtcccagccctcttttccattcttcctc

SEQ ID NO: 9691 - DNA, 120 bp, synthetic construct
  source 1..120: mol_type = other DNA
aaaagttagaaaactggataatgtccagtgttgaagtccatttaggagttgcaggacaattagagtactgacaaaggaagttcagatgagtacagccattctgatgagaagatgagcagt

SEQ ID NO: 9692 - DNA, 120 bp, synthetic construct
  source 1..120: mol_type = other DNA
ttagatatgggagtaaggactggagataaaagggaccaaataaatcaagggagagagagagagctcggaggcaccaatgatgatcatataatgaactgagaagttcttaaccttttgtac

SEQ ID NO: 9693 - DNA, 120 bp, synthetic construct
  source 1..120: mol_type = other DNA
tccgttgtctcaggcatctggattggctcttgggcctctgggggaagaatgaagagatagggtcaggaggtgcagtgagggtggtgatggcctgggatggttgtgggaattgaaggttat

SEQ ID NO: 9694 - DNA, 120 bp, synthetic construct
  source 1..120: mol_type = other DNA
cctcaaaggaaaaggcttggccaaactcctccagatgccagacggtctccttcttgtccagatccacatagaacatctcatcttcatcaaattcaaacataaactcccctgttggtctat

SEQ ID NO: 9695 - DNA, 120 bp, synthetic construct
  source 1..120: mol_type = other DNA
gtttcctttttaaaaatatttcaacatttattttatgttcaggagtacatgtgcaggtttgttgtataggtaaactcatgacttgggggtttagtgtacagattatttcatcacacaggt

SEQ ID NO: 9696 - DNA, 120 bp, synthetic construct
  source 1..120: mol_type = other DNA
cagaaggaaacacaagtgacaggacaacagcaggttcagaaggataagtgcagatacgtaggtatacacaagatgcgaccaaacagcacatcagggaaggcttcctggggaacagatggc

SEQ ID NO: 9697 - DNA, 120 bp, synthetic construct
  source 1..120: mol_type = other DNA
atcttaaataaaactgtctgaagccagtgtgcatcttgtacgttatggattctaaccttccccatcactagattttggaatgacagcatcatgcacaggcttgatgtcattctccctgat

SEQ ID NO: 9698 - DNA, 120 bp, synthetic construct
  source 1..120: mol_type = other DNA
agatcacagctctgatatggaacattctgtcttcagggcgcatgttgtggggtctataattgatgactgtgagcacaggaacagtgatgaggaactgaggccgagtggaggcagatgaga

SEQ ID NO: 9699 - DNA, 120 bp, synthetic construct
  source 1..120: mol_type = other DNA
taatgtaatgatgaagtacatatattacgttaatattttatcttatttgtggtagccttaccttgcataaataataattactaacagattaggacatgagagattctgttattagtgctt

SEQ ID NO: 9700 - DNA, 120 bp, synthetic construct
  source 1..120: mol_type = other DNA
gactcacagacctctgggagaaagtaaatatgaatgggtgctaatcttaaacacacccttggacaaaggcaagacagacagactcagacctcatttgagttctgagatgggtactctaat

SEQ ID NO: 9701 - DNA, 120 bp, synthetic construct
  source 1..120: mol_type = other DNA
cccagtggtcagtgtctttggggaaaatgggaccaagaggtcctggataaccttggacagacaaggtttgcagagagagaagttggcaagtgcaggctcctgggcgtgttcatgtctgca

SEQ ID NO: 9702 - DNA, 120 bp, synthetic construct
  source 1..120: mol_type = other DNA
tggcgatcattaaaaagtcaggaaacaacaggtgctggagaggatgtggagaaataggaacacttttactctgttggtgggactgtaaactagttcaaccattgtactctcaggacattt

SEQ ID NO: 9703 - DNA, 120 bp, synthetic construct
  source 1..120: mol_type = other DNA
aacccatagggagctagaggtttttaatatatcctattctgaataagagacgaattcattcagatcagtggtttcaaaccgtgctctgggcaactcaattgctaagggttccacaaacag

SEQ ID NO: 9704 - DNA, 120 bp, synthetic construct
  source 1..120: mol_type = other DNA
atcatggcctccctcagactcctcatgaaggataagatcctcaaaaagaggaccaacaagttcatgaggcaccaatcagactgaaatgtcaaaattaagcataactggcggaaacccaga

SEQ ID NO: 9705 - DNA, 120 bp, synthetic construct
  source 1..120: mol_type = other DNA
gaactcggtactaggaaaactcctattttaaaatccagccctgggtgggaagatttgggaagaatcgttaatattgagagagagagggagaaagaggattagatgagagtggcgcctccg

SEQ ID NO: 9706 - DNA, 120 bp, synthetic construct
  source 1..120: mol_type = other DNA
agagaccaaaaaaacccaagtgcagtgtgaggagaggcccgcagagaagagtcttggaagctgaggggaggtgacctcagcagcacagtggacagcggtgccagtgacttgggaaggtca

SEQ ID NO: 9707 - DNA, 120 bp, synthetic construct
  source 1..120: mol_type = other DNA
ggaggtctggggatctctgcttgtaatcagctccctagaggttcccatgtagccagataagtattgtcagaacactgaagatttttgaaaaatgaaaaagagaaggttggagatgtgtct

SEQ ID NO: 9708 - DNA, 120 bp, synthetic construct
  source 1..120: mol_type = other DNA
ctagaagactaatttgagacattcctcttgatgagctgttctctagggtagtcctctgaaagagctgttctctagtggatctccctgaatgaactgttctctaggagcacttgacccttt

SEQ ID NO: 9709 - DNA, 120 bp, synthetic construct
  source 1..120: mol_type = other DNA
aatgctacccttacccactagcctaatcacattattcctattttcaacatctaggaatcaattacatagtgaacatgcctaagaaataataatctgggcagatgcagtggctcaggcccg

SEQ ID NO: 9710 - DNA, 120 bp, synthetic construct
  source 1..120: mol_type = other DNA
cacacttaggaactgacctcacacataggaacagttctcttccttcagcattttagcctcttctcaggcattttgagaggcaacttccagaatcagcatttgccaccttgttgaggtcac

SEQ ID NO: 9711 - DNA, 120 bp, synthetic construct
  source 1..120: mol_type = other DNA
ttgctgaaggaagcagagatcaactctgttatttatcagcctgagacgcatcctctcaccataatttttctctcctggacttacaggaaggaggctggcaacctgggataacttgtcttt

SEQ ID NO: 9712 - DNA, 120 bp, synthetic construct
  source 1..120: mol_type = other DNA
ctaagtctgcattcatccaccagcctaggcctcctgtcttaattttcatacagacagaaatgactccccactggggaaagagcaaagcaatacatgtagcactctttttcaaacactggt

SEQ ID NO: 9713 - DNA, 120 bp, synthetic construct
  source 1..120: mol_type = other DNA
agagtcactgagcagttaacattacaaattacaaaccatatccagtcagagtcattctctttcctgcttgtctcctgtactcatgttacaggttagggcagtaccccgagtggagtgaac

SEQ ID NO: 9714 - DNA, 120 bp, synthetic construct
  source 1..120: mol_type = other DNA
tgttgcattgtaaactgtccctgaaattactgtgcacttggcttatgggatgaaacatcctcctagttcttttgtctctcagcttctctgaagtctcattgagcaccttctcttcaattt

SEQ ID NO: 9715 - DNA, 120 bp, synthetic construct
  source 1..120: mol_type = other DNA
tatagaaagatgaaataagttcattcaaaatgctgcatagaatgtcagactgttaaacaattttgttagagtaaaatgactgtaaacaaatgagctaattatgtgaattaagaggatgga

SEQ ID NO: 9716 - DNA, 120 bp, synthetic construct
  source 1..120: mol_type = other DNA
caaagaaatgaggtggattgcctttgagattgtgcaaaagataggatgtccttcgttgctggaaatgtttaacatagcattggaagttctgaacatcactctgcgggcagaagaaaatta

SEQ ID NO: 9717 - DNA, 120 bp, synthetic construct
  source 1..120: mol_type = other DNA
gtcacaggtgtcctcggccatgggaacgagggtcagatagtggaacctgtgtaatctgagtttcttgctgggcaggaagatggtctctgcaataccctcaatgactggctccccattgcg

SEQ ID NO: 9718 - DNA, 120 bp, synthetic construct
  source 1..120: mol_type = other DNA
aatacgtaggatgctacacagaatgcaggaagcaaacaggtaacaggaaggttattgggaacatgaaggaataacacagaaaatgagaaatgcaaatgaaagaaaagaaaaggagtgaga

SEQ ID NO: 9719 - DNA, 120 bp, synthetic construct
  source 1..120: mol_type = other DNA
ccccactgagtttagggtctagaggattactcacctacagaaatgaatcccaaaggaaaaagaaaaatacatggtgtatagactgggctacacagatgtaattggttcagcttaggttac

SEQ ID NO: 9720 - DNA, 120 bp, synthetic construct
  source 1..120: mol_type = other DNA
ccagaagtagggatatgaagaagtcgagaataaccacgcaacgtggagaattgtggcatccgtgcctgcaaaggtgataattaagtgattgagagaaggtaaaattttctgtttgagaca

SEQ ID NO: 9721 - DNA, 120 bp, synthetic construct
  source 1..120: mol_type = other DNA
acagtgcccaggggtggtacaggccctgcagagaccacagactgttcacctgacaagaaatatcttgaggaactcacttcacagatccctcaagaaaggaaccactgcaggagaataccc

SEQ ID NO: 9722 - DNA, 120 bp, synthetic construct
  source 1..120: mol_type = other DNA
agcctggagtgaggtctgagtccatcctgaaggctgcagggagataaattcaatgctgttagtgtggcacagcaggagcaaaacctgcctcgccaactgcatgggagctgggtgaagcct

SEQ ID NO: 9723 - DNA, 120 bp, synthetic construct
  source 1..120: mol_type = other DNA
aggatccaacaagtagaagaaagaacttcatagctcaaacaacaagcctttcgaattaacccagtcagacaaagacaaagaaaaaagaactttaataaataaacaaagcctccaagaaat

SEQ ID NO: 9724 - DNA, 120 bp, synthetic construct
  source 1..120: mol_type = other DNA
attttaaagcaacaacagttaaaaaagacaaagagggacattatacaatgataaaaggataactccaacaggaaaatatcacaatcctaaacatatatgcacctaacatgggagcttcca

SEQ ID NO: 9725 - DNA, 120 bp, synthetic construct
  source 1..120: mol_type = other DNA
attcaaggctaatatgaacacattcacaggcacaaactagaaaacctagagaagacagattcctggaaatatacaaccctcctagaataaatcaggaagaaatagaaactgtgaacagac

SEQ ID NO: 9726 - DNA, 120 bp, synthetic construct
  source 1..120: mol_type = other DNA
cactgccatatactaacagtgaccaagctgagaattaaatcaagaactcaaccccttttatagtagctgcaaaaaaataaaatacttaggaatatacctaaccaaggaggtttactgggg

SEQ ID NO: 9727 - DNA, 120 bp, synthetic construct
  source 1..120: mol_type = other DNA
aagttataagagtattgattggggaagtgataaatgtccatgaaatcttcacaatttatgttcttccactgtggcttcagccggtccctccattcagggtccctgacttcccgcaataga

SEQ ID NO: 9728 - DNA, 120 bp, synthetic construct
  source 1..120: mol_type = other DNA
taaacaaatactcccatcaaaaagtgggctaagcagaggaacagacaattctcaaaagaaaatatacaaatggttgacaaacatatgaaaaaatgctctacatcactaattatcagggaa

SEQ ID NO: 9729 - DNA, 120 bp, synthetic construct
  source 1..120: mol_type = other DNA
aaatgattttttaaaaaacttttattggaaggaccctccggagttctgaggaggaggcctgagcatatgtggggaaggcacagatgaacacataggagggatctctaagaaaacaatggc

SEQ ID NO: 9730 - DNA, 120 bp, synthetic construct
  source 1..120: mol_type = other DNA
cagatgcctgttcccaaatccaggccatagccaagataagggtggggagaaggtgaaacattcaccaccaccccaactccccaaaacaaagatcttcagaatgcccctctccaccttcat

SEQ ID NO: 9731 - DNA, 120 bp, synthetic construct
  source 1..120: mol_type = other DNA
agaggacagatgaacaaaagcatagtcgaatagatgtgtgtaaagaaggggagagtcattaagcagggggaggatggacaggtgagtggatataagccttcatgcatgagtagatgggta

SEQ ID NO: 9732 - DNA, 120 bp, synthetic construct
  source 1..120: mol_type = other DNA
taacttgcccaaggtacaggctaacacaacttgcagagaaggatgcactctaagcccaaactctgggctagaagtgactgaactttgggcagtgcgtaggtgtgttgtggccaaaagaag

SEQ ID NO: 9733 - DNA, 120 bp, synthetic construct
  source 1..120: mol_type = other DNA
gcacatgaattgagaaagaaagctgagatatagcttgtaaaacagctggaattcagatctctcctaagtcctcttcctttcacatattttgtcacctgcctcgagacacacacagttact

SEQ ID NO: 9734 - DNA, 120 bp, synthetic construct
  source 1..120: mol_type = other DNA
taaaaaaatagtatcaaaagcctactatatgtcgaacattgttagatgctaaatattcaaataaaagtaagacataggtcttgtcctcctgatgtttacagttcacagaagagaacacaa

SEQ ID NO: 9735 - DNA, 120 bp, synthetic construct
  source 1..120: mol_type = other DNA
gctaaagaacttatggctcacctcacatacttattttttgtggtgagaacacttaaaatccacccttttagcaattttcaacaatacattgttagcaactatagtccatgttatacaata

SEQ ID NO: 9736 - DNA, 120 bp, synthetic construct
  source 1..120: mol_type = other DNA
ctctcaggtccccaaagtccattgtatcattcttatgccttttcatcctcttagcttagctcccacatatcagtgagaatatatgtttagttttccattcctgagttagttcacttagaa

SEQ ID NO: 9737 - DNA, 120 bp, synthetic construct
  source 1..120: mol_type = other DNA
catgctgtcttggtgactatggcagggaacgtgagctttttccccgcaatcctatactggccccttctactgcataattattttcttctcttgaattttacatgctagtcttctatttac

SEQ ID NO: 9738 - DNA, 120 bp, synthetic construct
  source 1..120: mol_type = other DNA
agactgcttgggttcatggtctctaatatttcagacaggagctccctttaatgagttcttgttttcctgactgcagctctcttcattctgccaaccttttccaactccatgatgatcctg

SEQ ID NO: 9739 - DNA, 120 bp, synthetic construct
  source 1..120: mol_type = other DNA
ttgtggctggtgtaatattatggcttctatgacccattgtttttctctcaggatgttcttacttttctggtccaaatttacaccaacaccctgagaggaaggactgcagagtaggtgtct

SEQ ID NO: 9740 - DNA, 120 bp, synthetic construct
  source 1..120: mol_type = other DNA
aggagatgacacggcaggtgaaaaaaccagactcctggaggcaacacccttttgtctctgacaagctttaaaatgggctttttacagctgagtttcttacctcaccccacccactacccc

SEQ ID NO: 9741 - DNA, 120 bp, synthetic construct
  source 1..120: mol_type = other DNA
ttcttactcttgactaaaacatgttctcttattggtgaatgaggaagaggaacaaagactaacaaattaaaatgagaggatacacactcagagtggggcacttgaatagggaggggcaga

SEQ ID NO: 9742 - DNA, 120 bp, synthetic construct
  source 1..120: mol_type = other DNA
gaatgcatggaaatgcatttctgcatttccagcatgcagagatgtccagcatgcagaacagcaagagcaacttgaggtattctcaagaaactggcagagaagagagagaacctagctgta

SEQ ID NO: 9743 - DNA, 120 bp, synthetic construct
  source 1..120: mol_type = other DNA
ggcagccgtgggggccgggcccagggagtaggggcagccgggccggcctaagggaccttagtgccaggagggaaggggactttgagctggggattgatgggaggagcccaaccggagctt

SEQ ID NO: 9744 - DNA, 120 bp, synthetic construct
  source 1..120: mol_type = other DNA
tggggctgctttttattaaaggaaaattccactgagaatttttaccctttctagctgcctaaaaataatttcttaataactcctgtattatttcctccctcaggagacgtaaccataact

SEQ ID NO: 9745 - DNA, 120 bp, synthetic construct
  source 1..120: mol_type = other DNA
tctgtcataaagatgataattaggcaaaatattacaggaattagaattttacaaccagaattccacattgtgggtgccacagtatacagttctattgcaaataacagcatgatgataaca

SEQ ID NO: 9746 - DNA, 120 bp, synthetic construct
  source 1..120: mol_type = other DNA
ctgccgcctgcttagctccctgctcagctaacctatttcctttggctacttcatctgttcctctttgatgttccctataatacattactgctatttttcgtgaaaggaaaactgaggata

SEQ ID NO: 9747 - DNA, 120 bp, synthetic construct
  source 1..120: mol_type = other DNA
cctcaggaggttccccaaggtgctatctggtcctatagcgtgcttctacagtttccttctaatatcaagagctgcctgtgtaataaacttgtctttacaatgagccatcccttgactgaa

SEQ ID NO: 9748 - DNA, 120 bp, synthetic construct
  source 1..120: mol_type = other DNA
aggactctgtgtcataaataagtttaaggaaaggtgctgtgcctggatgtgcacataggccagatttatgtttgactttacacaaacatctcagtgcagtaaacagcagtattaccacca

SEQ ID NO: 9749 - DNA, 120 bp, synthetic construct
  source 1..120: mol_type = other DNA
agtcctgaggttaaaggagttccagtgtttcagagtgcactccagaggggtgcaagctgaagctggtctgtcacccatctagaaaaagaagtgagaataaaagtatcctttcgtccccat

SEQ ID NO: 9750 - DNA, 120 bp, synthetic construct
  source 1..120: mol_type = other DNA
taaaacttcccgcaaattgcacacacagagagagaggacaggagacatagtgaccacggatacaaaggaaaggaaaattttgcaacgggttagctggagatccattaccaacacctggac

SEQ ID NO: 9751 - DNA, 120 bp, synthetic construct
  source 1..120: mol_type = other DNA
ctgcctaaaaataatctcttaataactcgtgtattaatttggccaagagagaaatcccgtgaaggagaccaaaaagcaccagtgagcctctcactaaacaaggacctttgtcctagagaa

SEQ ID NO: 9752 - DNA, 120 bp, synthetic construct
  source 1..120: mol_type = other DNA
acaaggctggaaatctgttttcagaagactgtgaagtcagttggagagagcaggaaccagaggcagggagatgagataagaaactgctattattgtccagggaaatcataataagggcat

SEQ ID NO: 9753 - DNA, 120 bp, synthetic construct
  source 1..120: mol_type = other DNA
gctcaggatattatgtaaataggacgattttgagtgtttgtaggcgaggccaaaaaatccataggttacttgcagaataagtcacgtcaagctcactttattttcttgatatatttatga

SEQ ID NO: 9754 - DNA, 120 bp, synthetic construct
  source 1..120: mol_type = other DNA
tcctgaatggacaggaggaaacagctggggtcgtgtccaccaacctgatccgtaatggagactggaccttccagatcctggagatgctggaaatgaccccccagcagggaaacatctaca

SEQ ID NO: 9755 - DNA, 120 bp, synthetic construct
  source 1..120: mol_type = other DNA
ctgaaatcacatagtcaggaaacaaagacagcttctaaggagagaggaatcccagcctggcatcttaatgcagccagatgcatgaggtcccagttactcaggctcctgcagagcgtccat

SEQ ID NO: 9756 - DNA, 120 bp, synthetic construct
  source 1..120: mol_type = other DNA
tttactatatttcagtgagctgccccatcctcatgtttggtgtcttcatccatttaggtctgaaaccactattcttagctattcagtggtgaacagactgcaaatctgtgttatagggcc

SEQ ID NO: 9757 - DNA, 120 bp, synthetic construct
  source 1..120: mol_type = other DNA
tatttattgaactctgggatttctcaggaaaaatgcagtgcagagaaaggtccctgatgagaccacagcatacagaccatccagtgtgggcaccaccttgtcactacactttaaattctt

SEQ ID NO: 9758 - DNA, 120 bp, synthetic construct
  source 1..120: mol_type = other DNA
aggaattcaagatcagcctggccaacatggtgaaacccctttgtctctactaaacctctttgtctctactaaagatacaaaaattagccaggcatgctgtctgtagtcccagctacttgg

SEQ ID NO: 9759 - DNA, 120 bp, synthetic construct
  source 1..120: mol_type = other DNA
tctggtctgttggggcttagtgcatttagcctttcattaaagtccaaaacaatggcctcccatgattttgtttaaaaatgtcccctttttggtcaggttctcacttaggtgagaatgtga

SEQ ID NO: 9760 - DNA, 120 bp, synthetic construct
  source 1..120: mol_type = other DNA
cctaccccataagtgcacacaacagacccccttttcacttctactgttcatagaggcatcagcaagggaaaaaatactcagagataagagcctccatatagcagagaagtcttgatctgt

SEQ ID NO: 9761 - DNA, 120 bp, synthetic construct
  source 1..120: mol_type = other DNA
gttctacttgggatggcagttttataaaccagtcagtcttttaagctccaggaagcaggagaatggcgtgaacctgggaggcggagcttgcagtgagccaagatcgtgccactgcactcc

SEQ ID NO: 9762 - DNA, 120 bp, synthetic construct
  source 1..120: mol_type = other DNA
ctctttctaaaaaaaaaaaaaaattatttgattgtttttagagacggagtcttgctctcttgcccaggctggagttcagtggttcaatctcagctcactgcaacctccgcctcccaggtt

SEQ ID NO: 9763 - DNA, 120 bp, synthetic construct
  source 1..120: mol_type = other DNA
tgaccagtttgccaggctggcttgaacagcagacttctgggagtcctaggcccacattttatcctatttaaccccttttatgaccaaatgacacagaaagaccaattcatagcacaaagt

SEQ ID NO: 9764 - DNA, 120 bp, synthetic construct
  source 1..120: mol_type = other DNA
caagatataatagaaagctggaaaaaggaggccgggcgtggtggctcacgcctgtaatcccagcactttgggaggccgaggtgggcagatcacgaggtcaggagatcgagaccattctgg

SEQ ID NO: 9765 - DNA, 120 bp, synthetic construct
  source 1..120: mol_type = other DNA
ttttttgtaaagtctttaaatgcaaatattgaaattttttagaagcttctgcatatcaataggcatccctacatgagactgtacatgagactaatttgggagccctcattttcaaatgca

SEQ ID NO: 9766 - DNA, 120 bp, synthetic construct
  source 1..120: mol_type = other DNA
gagagaaagagacacaatgggcctggagggtacctcgctaggtcactcagcacttctgggggtcattagaagctctacttccaaccccacttctgacaccacctgataaaagaaaaactt

SEQ ID NO: 9767 - DNA, 120 bp, synthetic construct
  source 1..120: mol_type = other DNA
ctatgggatagtatcttagctttacctgatgtataagacgcagcaaaaggttgacaacaaaaaagtctattactattacagtaaaagaataaagatgagagagcatggagtccagcctgg

SEQ ID NO: 9768 - DNA, 120 bp, synthetic construct
  source 1..120: mol_type = other DNA
gctgatggcaggtgtttgcattttatcccacaggacataggaagttgtgaagcatcttaagcaggacagtaacatgatgagatttgtgtttggagggggcagcagtagggaggatgggtt

SEQ ID NO: 9769 - DNA, 120 bp, synthetic construct
  source 1..120: mol_type = other DNA
aatcttagtgctgtgagaggctgaacaggaggatcacttgaggccaggagtttgagaccagcctaggaaatacagtgagactccatctctaaggggaaaaatatatatatatatatatat

SEQ ID NO: 9770 - DNA, 120 bp, synthetic construct
  source 1..120: mol_type = other DNA
caatggccactgtgcgccagaccccaaggagaaaatgaggcggcgcagggacggaggagctccgaatccagcactcctttccctacccctgtccagggagaaaggctggagatgaaacag

SEQ ID NO: 9771 - DNA, 120 bp, synthetic construct
  source 1..120: mol_type = other DNA
taagaacaatttctttttctcctttattttctgtgtgtgtgtgtgtgtgtgtgtgtgtgtgtgtgtgtgagagagagagagagagagagaaagacagacagggtctcattctgttaacca

SEQ ID NO: 9772 - DNA, 120 bp, synthetic construct
  source 1..120: mol_type = other DNA
ttccataactctatgttcaccagatcacctcttgcaggttgtacagtgaaaacacatccttagtttcaaaagatgtgtgtataccagatttttcagacataggcttggttttagaataca

SEQ ID NO: 9773 - DNA, 120 bp, synthetic construct
  source 1..120: mol_type = other DNA
cctaagagaaaccaggctcaggcttccaaggatcctgtccccctggagccacacaggacacacttaattcctcccacaaggagctgggatgccatgtgtaaaatattgtctaccaggaag

SEQ ID NO: 9774 - DNA, 120 bp, synthetic construct
  source 1..120: mol_type = other DNA
ggcagatagcttgaccagcatgggcaacatggcaaaatcctgtctctacaaaaaaataaaaaaaaacaaaaaataaatgtagtcccaggtactgaggaagctgaggcaggaggaacactt

SEQ ID NO: 9775 - DNA, 120 bp, synthetic construct
  source 1..120: mol_type = other DNA
tatccccacctagtggccaacactgaaatctgggcttagaacaggaaacaagggaatttgtcaacaatttgggaatactccagcattctttacaaaaaaaagttagagaaaaagttaagc

SEQ ID NO: 9776 - DNA, 120 bp, synthetic construct
  source 1..120: mol_type = other DNA
ctgaagttctcatttaatttcaaattaaggcagaaccgcctataagagaaagtgctaaagaattggaaaaatgaaaaagaatttgagaacccagtgggaatggagctaacgtgtatggtc

SEQ ID NO: 9777 - DNA, 120 bp, synthetic construct
  source 1..120: mol_type = other DNA
aggactctttaacaactcattttggccagtcaaaagggaggtggagcttggaagtgaattgtgaattacaccgatattaagaaaagcagctaattctgaagtagtattaagtggcagtga

SEQ ID NO: 9778 - DNA, 120 bp, synthetic construct
  source 1..120: mol_type = other DNA
ccactgtgcctggcctgaacctggttttttttaaagcaactgcatcaaaaacctctgtcttccattattaattttatgagttaaaagaaacagactataaaagagcacaaattttggtaa

SEQ ID NO: 9779 - DNA, 120 bp, synthetic construct
  source 1..120: mol_type = other DNA
ccacaaaaccagcagctttttattaaggacttcaaaaggggagggggtgtacaaacagggagtaggtcacaaagatcacatgcttcaaagggcaataaagatcacaaggcaaaaggcaaa

SEQ ID NO: 9780 - DNA, 120 bp, synthetic construct
  source 1..120: mol_type = other DNA
gacatatatgcagaggtaactaatggtggcctcacgaggaaagggggcagctactccatgagcacaagctctagatacttagccttcaaatacttcaaaaaacaaaacaatccctcgggg

SEQ ID NO: 9781 - DNA, 120 bp, synthetic construct
  source 1..120: mol_type = other DNA
aacatcatgcccctccgtggagctcattagtaaggagcaagtgagattctttttatttatctaatcagtgaattccaaaaactgacaaacaggataaagaaggaataccagccactgtta

SEQ ID NO: 9782 - DNA, 120 bp, synthetic construct
  source 1..120: mol_type = other DNA
aggctggtctcgaactcctaacctcaggtgatccgcccgcctcagcctctcaaagtgctggtattacaggtgtgaggcaccacacccggccatctttgcttatttccttttttttctttt

SEQ ID NO: 9783 - DNA, 120 bp, synthetic construct
  source 1..120: mol_type = other DNA
agcctggacaagatggcaaaaccctgtctctacaaaaaatacaaaaattagccgggcatggtggctggcgcctgtagtcccagctacttgggaggctgaggctggagcatcgcttgagcc

SEQ ID NO: 9784 - DNA, 120 bp, synthetic construct
  source 1..120: mol_type = other DNA
tgtatcacgctggtcaaatgcatacaaaggagtctgtttagacagaagcgaagaagggaaagcaagcggacacctcctgggggcctcaggatcccacattatctggaaacagtgccccca

SEQ ID NO: 9785 - DNA, 120 bp, synthetic construct
  source 1..120: mol_type = other DNA
atacaaataaccacaactgggaagggatggaattataagaaatctctcccagcattagtaataccagtatgccttatttcatgaggagagcaggccgattacctgacccaacaatatagc

SEQ ID NO: 9786 - DNA, 120 bp, synthetic construct
  source 1..120: mol_type = other DNA
agaggccagagcgaagtacacaaaatggattgacctgctcctgccaactgagggaaagccagacagggtgatatgctggctctcgctgaagctgagagctgtgttcattctaccatcctg

SEQ ID NO: 9787 - DNA, 120 bp, synthetic construct
  source 1..120: mol_type = other DNA
tcgggaggctgaggtgggaggatggctggaacccacggaggtcgaggctgcagtgaaccttgatcttgccactccactccagcctgagtgacagagaccctgtctcaaagaaagagagaa

SEQ ID NO: 9788 - DNA, 120 bp, synthetic construct
  source 1..120: mol_type = other DNA
ccacaggcccagaggcctgggcacttgccctgttcacacccagccccaccccaaaaccccgcctctacagccctgcccttaaacccctcccacccttccttagagcctggctctagcttt

SEQ ID NO: 9789 - DNA, 120 bp, synthetic construct
  source 1..120: mol_type = other DNA
cggggaggaggggcgggggcgcagcctacccgggctcgggctcggggtgaagggcagccctgccaggcccgccccgaggccgcggatgcgaaaccgggacacaaaggcacgcactcttga

SEQ ID NO: 9790 - DNA, 120 bp, synthetic construct
  source 1..120: mol_type = other DNA
atatgccacacattaaccctttaattgcaggatcagggaaagtgaggggtgcccaggggagggacaggggtggcaatgaacatactcagtggctcagggccatggcaatttaccagccaa

SEQ ID NO: 9791 - DNA, 120 bp, synthetic construct
  source 1..120: mol_type = other DNA
gggctcccaggtctgagaaggaggcatccagcactggcagctgctccagcacaggcgttcgcacctccagcaccgtccggccttgctgtgtcttcagggggagacaaggaagaaagtgtg

SEQ ID NO: 9792 - DNA, 120 bp, synthetic construct
  source 1..120: mol_type = other DNA
ggaccggtgaaaaggaaaagaagaaagagctaagaagtggagaaggggtggcaggctccggggggggcaacagccaggggactgtcaccaaaacccagaaaccactaagccctgaggggg

SEQ ID NO: 9793 - DNA, 120 bp, synthetic construct
  source 1..120: mol_type = other DNA
tgggtccctgttggccgcctcatctgctcgatctcctcccgcagggagtcgagtgagccaaagatctcctccagccccccaggactgccgggggctcccccggtcggtatggcctcatct

SEQ ID NO: 9794 - DNA, 120 bp, synthetic construct
  source 1..120: mol_type = other DNA
taggaagggtagtggctggttcaactgggtcctcctcccacaccctcctgagcacctgctcgcttacccacagctgagtcccaactccaactccacccctctccaccccactctcaaccc

SEQ ID NO: 9795 - DNA, 120 bp, synthetic construct
  source 1..120: mol_type = other DNA
atctccctgaaacacacacaaggaatgtgtcctgaatggcagaggagtggggtgtgggcagggggcagagggtccaaggtgggaggcaggaggcagggaggaagggccaaactctaggag

SEQ ID NO: 9796 - DNA, 120 bp, synthetic construct
  source 1..120: mol_type = other DNA
gccattgcccagcctccacccacacagcccagggactgcctcccaaggtctcaggggtccacctcacttactcgctttccaagtggccctgggggtccattctccccggtgggaccaggg

SEQ ID NO: 9797 - DNA, 120 bp, synthetic construct
  source 1..120: mol_type = other DNA
cctgtggggcctttaggccctggtggccctggctctcctggctgccccgactctcctttctctccacgttccccgcgtggaccctgcagaacaagcggaggacacagatggcccagggaa

SEQ ID NO: 9798 - DNA, 120 bp, synthetic construct
  source 1..120: mol_type = other DNA
gccaggtggtccctgggggaaacagatacaccacagatgaggaagggaagtgagatggctgagcatgaatggtggagagaggaggaggagcagccaggccagggagttggcagtggggtg

SEQ ID NO: 9799 - DNA, 120 bp, synthetic construct
  source 1..120: mol_type = other DNA
ggaggagaaggcagacaagatattagagaaaggtgatgggtagagtgggaaggatgacatgacaggggccaggggtcatgcccaggtcagccatctcatctggaaagaagattggtcggg

SEQ ID NO: 9800 - DNA, 120 bp, synthetic construct
  source 1..120: mol_type = other DNA
cagcagtgcctgggaggcctctctctcctgggaatcccctcagaccagcaggaccatccttccctggggccccagggggaccagggtcaccctaaaaggaaaggagaggtgatgagccac

SEQ ID NO: 9801 - DNA, 120 bp, synthetic construct; identical to SEQ ID NO: 4068
  source 1..120: mol_type = other DNA

SEQ ID NO: 9802 - DNA, 120 bp, synthetic construct
  source 1..120: mol_type = other DNA
ggctcccttctctccactggcaccaggaaagccaggaaatcctagggacccctggtgagaacggagaaggggggaaattgagaagttatgaaaggtagggttcaggaaggggcaaagggg

SEQ ID NO: 9803 - DNA, 120 bp, synthetic construct
  source 1..120: mol_type = other DNA
tgtgcctctgtaaaacctcagcaaaacagtacgtcacatgcctacctcataggatagataggacgcatcagcacagcacctggcacagggcaagtgctggggagagtcagctctggagac

SEQ ID NO: 9804 - DNA, 120 bp, synthetic construct
  source 1..120: mol_type = other DNA
agagggcaccacagatgacagagggctggggttctaatgggaattctgagaacataggtggaagcaggggctcgggagctggacggcagtgcggggcaggctggagggaaggcagtgaag

SEQ ID NO: 9805 - DNA, 120 bp, synthetic construct
  source 1..120: mol_type = other DNA
gcaggaagacaaagaggctcagggtcactagaggggtcatgtctggacacagacaaaatcccagcagacatttagggttctccctacatccccactctaaaccccctgtcctccaaatca

SEQ ID NO: 9806 - DNA, 120 bp, synthetic construct
  source 1..120: mol_type = other DNA
ggggagctcacagggaatgggaagcatgccgagagaggagagggagcaggaaggcagctagaaaggtggagagttggagaggtcaaggggtcacctcagggtcagaagtcagggagtcac

SEQ ID NO: 9807 - DNA, 120 bp, synthetic construct
  source 1..120: mol_type = other DNA
ccggccctgggagaacaagggaagtgtcagaacaagcagggccgcagtcccctaccctgcaggccctgtctccccacaacacccatccacccctggggcactcacccttcgcccagcctt

SEQ ID NO: 9808 - DNA, 120 bp, synthetic construct
  source 1..120: mol_type = other DNA
ggcttccagataatcacttagaggattccagaaactcaactcctgccctcctccactgtccagcctctgcctccagaaagactctcttttggttctagagctcctgaaatataggctgtt

SEQ ID NO: 9809 - DNA, 120 bp, synthetic construct
  source 1..120: mol_type = other DNA
gagggatgctcccgagttctgaggaggaggcctgggcatatgtggggaaggctcagatgagcacatagaaggggtttctaagaaaagaatggccaccaggtcactgctagacttaccgca

SEQ ID NO: 9810 - DNA, 120 bp, synthetic construct
  source 1..120: mol_type = other DNA
ccaccttcccaaaccctcttctagaggaccctatcccatctcccaaactccctccctagaaccttaagaaaccttccacacatttaccccaatacatcataaaagaatctctctaagatt

SEQ ID NO: 9811 - DNA, 120 bp, synthetic construct
  source 1..120: mol_type = other DNA
ctcaagtacattccaagcccaccagttccctcccttgcacacctccactcagatacctgttcccaactctagggccagaaacaaaataagaacatggagaatgggagacattcaccacca

SEQ ID NO: 9812 - DNA, 120 bp, synthetic construct
  source 1..120: mol_type = other DNA
accaagaagaaatgatagagaaacactgaaaatggacacaaggtagtagtttattgaccaaaagctttatgaaatccagcttcagttagacaggaagtgatcaagaaagacaggaagtgg

SEQ ID NO: 9813 - DNA, 120 bp, synthetic construct
  source 1..120: mol_type = other DNA
ggctcccgggaacagaaataggacatagaaagtaagaccattagacaccaacatggagacgaagtcactcaggaatcaaagaatcatggaaggaggcctggatactgaagggaacgggct

SEQ ID NO: 9814 - DNA, 120 bp, synthetic construct
  source 1..120: mol_type = other DNA
ttgctgggggtgctgggagaaagggaagaaatgaaggggtcccttgagtttacctgataatcaggggttgtccccgtagtcatcacatcataataggggggctcgtagtcatagtagaga

SEQ ID NO: 9815 - DNA, 120 bp, synthetic construct
  source 1..120: mol_type = other DNA
gttctcccagctccctcacctggctctggggttcctgattttgtggcctgtgaagtcttgatggttgctgctgtggagatctctgggctctgtgaggctgttggttttggggtctttccc

SEQ ID NO: 9816 - DNA, 120 bp, synthetic construct
  source 1..120: mol_type = other DNA
tgaatgggagcattgataaatagtgaatgaataaatgtacgtatgggagggtggactggtgggcagatgaacaggggttacagagtagatggaagcaaatgggtgaataggtagatgggt

SEQ ID NO: 9817 - DNA, 120 bp, synthetic construct
  source 1..120: mol_type = other DNA
gaaatggtggaagaggttcaagtgaactcttggctgactgaagtaggggagtcaacatggttggagagcagtgataagagttgaagccaatggtgataagagcagtaataacaatggcta

SEQ ID NO: 9818 - DNA, 120 bp, synthetic construct
  source 1..120: mol_type = other DNA
agcacatccacagggggtgcacctgggagagtccatgattatcaggagaagggacatgccctcaggagggcataaataggggacatttgggatctagaactcagctttccagggctcaaa

SEQ ID NO: 9819 - DNA, 120 bp, synthetic construct
  source 1..120: mol_type = other DNA
tctaactagaactcagcttcctagggctcaaactccctggaaaacaaaagatcaccttgccctcacttgctcccctatacacatactcttcacaccatcagctccagattggaaaaatcc

SEQ ID NO: 9820 - DNA, 120 bp, synthetic construct
  source 1..120: mol_type = other DNA
aaaagaaggaaaagatcagggttgtgggcaccagggtcccaggggagcctggctggccagagggaggaggggctaggcaggaatgcaaagagttggctctggcctcagacacctgatcct

SEQ ID NO: 9821 - DNA, 120 bp, synthetic construct
  source 1..120: mol_type = other DNA
gctgcgggcagcgacagctgtcagcggcccagctccatgcagcaaggcgccgtcggggctcccggcactgctccctcctcggtggctgccgcttctgtgtgtccccggccaccctggcgc

SEQ ID NO: 9822 - DNA, 120 bp, synthetic construct
  source 1..120: mol_type = other DNA
cgcggagagggcacgagcgaacaaggcgcctttgagaatccaccgcccccccttcctcctccggccggccccgcccccagcctggcacaccctctccccccctccccgacaaagcttgcc

SEQ ID NO: 9823 - DNA, 120 bp, synthetic construct
  source 1..120: mol_type = other DNA
tactctcatgtccatcagcttgggaggcctgccccccagtatccacctctgggggagttccccatttccactcttcagatgggaagcaaaatgaggcaagatgagaaggaagcaaggtcc

SEQ ID NO: 9824 - DNA, 120 bp, synthetic construct
  source 1..120: mol_type = other DNA
aggcctggcaagggaagcagggcccactgggtttgtgggatggatccgtggatgtgggtttttcctcggccagttgggagatttccaggttgagggtcttactgagggggatagctgggt

SEQ ID NO: 9825 - DNA, 120 bp, synthetic construct
  source 1..120: mol_type = other DNA
cccccttgtaagaggcttttgacaccccctccttacatatagtcttcctgtgagccccatccaaaccaatccctgtaagtgagtcttctcttctggcattagtgcaaacaattatttatt

SEQ ID NO: 9826 - DNA, 120 bp, synthetic construct
  source 1..120: mol_type = other DNA
aagatgaagaactcggggttcaaagagattagtttgcttaaattcatataatacatggcaggtcatacaactgactctaagtgtgtctgagtgcaaatcttgtgctcttctgactcaaca

SEQ ID NO: 9827 - DNA, 120 bp, synthetic construct
  source 1..120: mol_type = other DNA
gaaggttgcatggagacaccttcaccatttagtctgtttccaatctccccctagcaaaacttaaagtcctccctgtttgccaaatacagagatagggaaccaggagctgagtgatgatcc

SEQ ID NO: 9828 - DNA, 120 bp, synthetic construct
  source 1..120: mol_type = other DNA
aaaaaaacacacacacacacacaaaaacaaagaatattagagttcttttaggggaggaagcatgcactgaaagatcagtcacctcaggaaaggcaaggggtctcataaagaccacaggcc

SEQ ID NO: 9829 - DNA, 120 bp, synthetic construct
  source 1..120: mol_type = other DNA
aagccaggtagccagagcgtgcaagggaaagagacaggcaggagagacccctcctaagacgcaggatctgcctgtaaacgcccaaagtcctgaggtttaagaggaatcgtgcccttccca

SEQ ID NO: 9830 - DNA, 120 bp, synthetic construct
  source 1..120: mol_type = other DNA
tccacactcgcgcatgcgtgtcagtgcaggatggattcgtcgctaccggagtgccgccatattggtaaaggcattagggcgaaggtggaacggaacttcctgttctcgcgggatctaaag

SEQ ID NO: 9831 - DNA, 120 bp, synthetic construct
  source 1..120: mol_type = other DNA
tgactctccctcaccaggcactgggggccacagtgctgatctcagcagctccattttttgtcctcttccttatccccgtggagtcgaactctccccggcatcgctctctacttcagatct

SEQ ID NO: 9832 - DNA, 120 bp, synthetic construct
  source 1..120: mol_type = other DNA
aaaagaggcttaggtaagggccagagttggtgataaatttgggcaagggacatcatcacaaatcacatggaatatgtgctgtgggtaatggcaggtatctgagaaacactaaaggactgg

SEQ ID NO: 9833 - DNA, 120 bp, synthetic construct
  source 1..120: mol_type = other DNA
tcctggctgggtcctgccatttactgcaggtggctttatctacgtagcaacagtgtctgtgttgcccgagctgctgagggaggcatcaccattgcaatcacttctggaggtgctggggct

SEQ ID NO: 9834 - DNA, 120 bp, synthetic construct
  source 1..120: mol_type = other DNA
aaggctggcgggcctttgattggccccggctttgcccttgccacgcccctctgcgctgggattggcttagtgctgggattcccacccacccacagcccgccatggcgtctcagctccaga

SEQ ID NO: 9835 - DNA, 120 bp, synthetic construct
  source 1..120: mol_type = other DNA
atcgtaggaaaggtcaggttgagttggacgaggtcagccagccaagtggtatagagaggagaacccctccttgagactcctgactcattccacatctctgactcacctataggtggggaa

SEQ ID NO: 9836 - DNA, 120 bp, synthetic construct
  source 1..120: mol_type = other DNA
agaacccagactatatgagaaagcaagtaaggggagtctggagccactgggaagggcagaggttcccaaggccagggacagaagtgggtaccccctagcccatttgtgtctccacccatg

SEQ ID NO: 9837 - DNA, 120 bp, synthetic construct
  source 1..120: mol_type = other DNA
cgagggcacccactgctgccttgtcccagggacaggccaccccctggcagccgcagcccaagtccgggagcctcagctcgggcggggacaagatgcccatcagggtctctaactgccccc

SEQ ID NO: 9838 - DNA, 120 bp, synthetic construct
  source 1..120: mol_type = other DNA
gtccacgtcccgtcccacccgcgccgcgaatggtgggtgacgtctccgccggcggggggagcgggtgtagcggaggagcaggcggaagtgacgtagggccccagcgcccgggccatggcg

SEQ ID NO: 9839 - DNA, 120 bp, synthetic construct
  source 1..120: mol_type = other DNA
ttttgttgaatagtttttcccaaccacagatttgtgccatcttcactcctaggccacttagccacctcagatcctcctattccaaagctcctactcttagttaatggacactaaagtctg

SEQ ID NO: 9840 - DNA, 120 bp, synthetic construct
  source 1..120: mol_type = other DNA
ctcagcatcctaggagctgaccacagactgatcattagggctggaaatcatgggtgtaaattgcagtttcttagtaaacaactggccctgctcttcttaagaaaaatatagggctgggca

SEQ ID NO: 9841 - DNA, 120 bp, synthetic construct
  source 1..120: mol_type = other DNA
gtgaggcggccgataccagggtcagatcagaccacaacgatgagtgggggggaaggagagcccggggagggagaaggggatggagaagatgtgagctcagactccgcccctgactctgcc

SEQ ID NO: 9842 - DNA, 120 bp, synthetic construct
  source 1..120: mol_type = other DNA
catcagcactcttcccctatacatcctctatctctttctatgtcccctctcctttcccatcatccatgtccttttttgccttatcgcttttattattccttttttctttcctcctccctt

SEQ ID NO: 9843 - DNA, 120 bp, synthetic construct
  source 1..120: mol_type = other DNA
ggaaagcaggaaaatggctcaaaagagaaagggatgtgtgtagatgtgggaatgaccgtgatgtttggaagtcactgcgagcagccggtttctatagctggaaagagggagggaggtgga

SEQ ID NO: 9844 - DNA, 120 bp, synthetic construct
  source 1..120: mol_type = other DNA
gggcgttgttcctggagtttcagggtagagaagcaggtggggaggagttgggtgagatacagaggtggaagccaaaagtctggagttaacctgacttctcttctggctccaggggctgcc

SEQ ID NO: 9845 - DNA, 120 bp, synthetic construct
  source 1..120: mol_type = other DNA
gacactgaagaagatgccccacaaaatgttacggccttgccttatactataaagaatggcaaagggcccgtgtaggggtgctctgtgactcccaagcaggaggatcactgcaggccagta

SEQ ID NO: 9846 - DNA, 120 bp, synthetic construct
  source 1..120: mol_type = other DNA
gccacagctcacacctggcccagcactgcggcacacacctgcctgaacccaatcactgccaccagtgtggcaagggcctctccccaaggctccagcccgttgcagcctgccactctacac

SEQ ID NO: 9847 - DNA, 120 bp, synthetic construct
  source 1..120: mol_type = other DNA
ctgaccaaacctggcaaaaccctggctatacaaaaaacacaaaaattagcaaggcgtggtggcccatgcctgtaatcccagctactcaggaggttaaggcatgagaatcacttgaacctg

SEQ ID NO: 9848 - DNA, 120 bp, synthetic construct
  source 1..120: mol_type = other DNA
ctgaagaggctgggaatggccttctctacagtatgacacacacctaagagggatcctttaaaaatgcaaatctgattgtttcagtcagcctccttaaacctattcagtggttttccattg

SEQ ID NO: 9849 - DNA, 120 bp, synthetic construct
  source 1..120: mol_type = other DNA
gccagcatggaataatgtcgcaagacccaggatccagaactggaggccaggtgcagtggctcactgctaaaatcccagaattttgggaggccaaggcaagaggattgcttgagctcagaa

SEQ ID NO: 9850 - DNA, 120 bp, synthetic construct
  source 1..120: mol_type = other DNA
ctcccgggttcaagaaattctcctgcctcagcctcctgagtagctaggattacaggcatttgccaccacacctggctaatttttttgtatttttagtagagacagggtttcactatgtcg

SEQ ID NO: 9851 - DNA, 120 bp, synthetic construct
  source 1..120: mol_type = other DNA
gaagagatcccctactcacaaagacggaagtttgatataaagctgataatttttctcaaatctaaaaattcagtacaattctaagcaaaactccaatcagatattttatggaacttgaca

SEQ ID NO: 9852 - DNA, 120 bp, synthetic construct
  source 1..120: mol_type = other DNA
atacaaaaatagtagccgagcatggtgatgcatgcctgtggtcccagctactcaggaggctgaggtgggaggatcgcttgagcccagagggtggaggttacagtgaactgagattgtgcc

SEQ ID NO: 9853 - DNA, 120 bp, synthetic construct
  source 1..120: mol_type = other DNA
ggtcaatgttgaccaggttggcctcgaactcatagcctcgcctccctgtgcaccaggacagctggcttgagccactgatgctccctaggcatccaaattggaaagaaagaagttaaattg

SEQ ID NO: 9854 - DNA, 120 bp, synthetic construct
  source 1..120: mol_type = other DNA
ccaggagttcgaaaccagcctggccaacatggtgaaacctaccaaaaacacaaaaattagccaggggtggtggcacacacctatagtcccagctactcaggaggctaaggcacaagaatt

SEQ ID NO: 9855 - DNA, 120 bp, synthetic construct
  source 1..120: mol_type = other DNA
tgcccagatttatcttgaactcctaggctcaagtgatcctcctgccttggcctcccaaagtgctggaattacaaacataagccactgcatccagccaaaaatctgattttacaatgggca

SEQ ID NO: 9856 - DNA, 120 bp, synthetic construct
  source 1..120: mol_type = other DNA
gggctagggggcggggggcgggtgtgggcagggattggagagctttagtcaaaggatacaaaatttcagttaggtagaataaattcaggagatctattgtataacatgatgactagagtt

SEQ ID NO: 9857 - DNA, 120 bp, synthetic construct
  source 1..120: mol_type = other DNA
ggattatatccaggattcataaagaagttgcagatccatatgaaaaggacaacgcaagagaatatgagcaaaagctgtgaataggtgagtcacaaaagagaaacctaatggtcaataaac

SEQ ID NO: 9858 - DNA, 120 bp, synthetic construct
  source 1..120: mol_type = other DNA
tacaatgatggtggctgtgcaggtggagagatgtgatttcctgacctattctctcctccaccctgtgttgagtctcacgcctcctattggacggtataaattggtataaatctttttttt

SEQ ID NO: 9859 - DNA, 120 bp, synthetic construct
  source 1..120: mol_type = other DNA
cacctggctaattttgtatcatatacatatatatataaacatacacatacacatatgtatatatacatgtatacatatgggttcaagcattcttctgctaattttttgtatttttagtag

SEQ ID NO: 9860 - DNA, 120 bp, synthetic construct
  source 1..120: mol_type = other DNA
tgtaatcctagcactttgggaggctcaggcgggctaatcatttgaggtcggtagttcaagacaagcctggtcaacatggagaaaccccatctctactaaaaacacaaaaattagccagtc

SEQ ID NO: 9861 - DNA, 120 bp, synthetic construct
  source 1..120: mol_type = other DNA
acagtataacatatatttatacagcatttacattgcgataggcaccatagataacctagggatgatttaaagtatgtggaagaatgtgcataggttatatgcaaatactatgccatgtta

SEQ ID NO: 9862 - DNA, 120 bp, synthetic construct
  source 1..120: mol_type = other DNA
taagttgtttgtgataggtgaatccccctaaagtatgtgggccagggcagggcccctgtggttcagatctgaggatgatactgcttctgtgggaagatcatgacttctgtttcaaatatg

SEQ ID NO: 9863 - DNA, 120 bp, synthetic construct
  source 1..120: mol_type = other DNA
atacatatatacaaatatttatatattatatatatacaaacatatatatatacacacacatatatatatggttctttttttttttttccaagacagggtctcacttcatcgcacagggtg

SEQ ID NO: 9864 - DNA, 120 bp, synthetic construct
  source 1..120: mol_type = other DNA
agcagaatatactcaaatattccccagttagcctcaaaatgtcttttatatatatatttatatatatatatatctttctttttaatttctttccttcctttcttctgtttttccttcctt

SEQ ID NO: 9865 - DNA, 120 bp, synthetic construct
  source 1..120: mol_type = other DNA
gttttgccacttgggtacaaaggatgaaaatacagaggggaaggggagttggcgacattgtccagagaggtgttgaaatgaagggttgtggagttgagctgaatagggaggggctcataa

SEQ ID NO: 9866 - DNA, 120 bp, synthetic construct
  source 1..120: mol_type = other DNA
atttcacccagttagtttcttggaagctgtaaaaagtggcgtttaagaatgtagccttggccaggcacgatggcttatgcctgtatcccagcactttggaaggccaaggcaggcggatcg

SEQ ID NO: 9867 - DNA, 120 bp, synthetic construct
  source 1..120: mol_type = other DNA
ctcatgtagtcccagtgttggaggtggagcctggtgagaggtggttggattatgggagtggattctcacgaatggtttagcaccatcctcctggtgctgttctcatgatagagagttctg

SEQ ID NO: 9868 - DNA, 120 bp, synthetic construct
  source 1..120: mol_type = other DNA
gagaagggactaatgcaaatgtttacaacagtgcgcaaatatttataacagtgcttgggctgtcacctcagacacacttggtggagccttgcaggcccagcagagcagcctctttgatta

SEQ ID NO: 9869 - DNA, 120 bp, synthetic construct
  source 1..120: mol_type = other DNA
gctgttggtctggggatctgcaagggagctgggccatccagaaggtaccataagcaagttgtcataatcaaacatatgtttcatcctatggatatttttggttgttttgtttgttttctg

SEQ ID NO: 9870 - DNA, 120 bp, synthetic construct
  source 1..120: mol_type = other DNA
tattaggttcaggggacctcaggaaaaaggaggaaaatctaaggggatgggaggctttcctcagtgcctgtgaggccaacagacactttcaatctccaatgtgtgtatgcttcagaaagg

SEQ ID NO: 9871 - DNA, 120 bp, synthetic construct
  source 1..120: mol_type = other DNA
tgagacctgcctacagatgccaagattgcagggctcatcctggactattaatgagaccatccagaggccaaggagcttacagggctcacctttggggatactggcccagcagtgctgcag

SEQ ID NO: 9872 - DNA, 120 bp, synthetic construct
  source 1..120: mol_type = other DNA
agcatggttttgtacaagagaagtgttttctaaatatttggcaaataaatgaataattgaatttgagtaataatgaagaaaatataagcaggaattttacaagaagacctttagtttaaa

SEQ ID NO: 9873 - DNA, 120 bp, synthetic construct
  source 1..120: mol_type = other DNA
acagtggctcatgcctgcaatcccagctactaaggaggctgaggtaggaggatcgctggagcctaggaagttgaggctacagtgagccgtgatcgtgccactcactgcactccagcctcg

SEQ ID NO: 9874 - DNA, 120 bp, synthetic construct
  source 1..120: mol_type = other DNA
taattgtcctttcagctcagctatatcatcagtcccaaggcagacgttcagaagattcttttctagttcatagggaaaatgacacttaatcctatgagagccccaaaggcagaggacatg

SEQ ID NO: 9875 - DNA, 120 bp, synthetic construct
  source 1..120: mol_type = other DNA
gcctcggcctcccaaagtgctgggattacaggcatgagccaccacgcctggctagtgcctgtatgtgtgtatgtgtgtgtgtatgtatgtatatatatatatatatatatatatatatat

SEQ ID NO: 9876 - DNA, 120 bp, synthetic construct
  source 1..120: mol_type = other DNA
tacaggcgtgagccaccgcgcagggcctcttttcatatatttttaactaaattaataaaacagctggggcagtggctcatgcctgtaattccaacactttgggaggccgaggtaggagat

SEQ ID NO: 9877 - DNA, 120 bp, synthetic construct
  source 1..120: mol_type = other DNA
tacggtgttatttctactaagttgtacttgattcttctccagtggctctgtctggagtttatttaatgttactagtttgccaatgaatagactaagacaataagcaattttgcttttatt

SEQ ID NO: 9878 - DNA, 120 bp, synthetic construct
  source 1..120: mol_type = other DNA
gctagtacgtaacatgaatagctgtgtccattatgtccagggtgaagtcagccaatttcgattctcctctccttaaagttttgtcttgctttctctttctttccttgaatcttcacacta

SEQ ID NO: 9879 - DNA, 120 bp, synthetic construct
  source 1..120: mol_type = other DNA
cgagactttgctgttgaacacgaagtaaacgtttcccagaaagcccagtttaagaaacaattcagggcgaggtgagggcacaaaggtagagaaataaggggaaatgatatttctttaaag

SEQ ID NO: 9880 - DNA, 120 bp, synthetic construct
  source 1..120: mol_type = other DNA
tagttggctaaagtcgcctgtctcgacagtctcccctgcggggtatctggggaccctttctttgggaatccacgctctttgtcagagtagccaatgcctctcctgtccaaaatctcatac

SEQ ID NO: 9881 - DNA, 120 bp, synthetic construct
  source 1..120: mol_type = other DNA
ttaactgcgcctctcttcttaggccttaaaggggtccccgtgtctctccagtctagagcctaagttcaaacgaggcgtataggcgaggacagcaggaaggctccaagtcaaacaaacgga

SEQ ID NO: 9882 - DNA, 120 bp, synthetic construct
  source 1..120: mol_type = other DNA
gcctgggaagcaaggggaaaactggaaggggtaccccaggtgaagaagggtatggaatggggtgcagaagtccatggagatgaccggcagatctcagggcggtttctggcacatcagaag

SEQ ID NO: 9883 - DNA, 120 bp, synthetic construct
  source 1..120: mol_type = other DNA
aggaaacagtgtcagagagggatctggctgatcttcaactccactaagttctccccaaggtatagccatccttatcatcaaaccctcttttctggtattctctcaatccagtctttcata

SEQ ID NO: 9884 - DNA, 120 bp, synthetic construct
  source 1..120: mol_type = other DNA
aaggatgtaaaaatgaccaattagtaagaactatgaggaatgaacagacttgaaaaaaggaaatttttttagatatgaaaagccagttttagaaagtcaacagattaacaagaattatac

SEQ ID NO: 9885 - DNA, 120 bp, synthetic construct
  source 1..120: mol_type = other DNA
ttaagtgtgataatgtattgtagtttttaaaaccatctgttaccaggtgtggtggcacacacctgtagtcccagttacttaggaggctgaggtgggaggatcacttgagcccaggagttc

SEQ ID NO: 9886 - DNA, 120 bp, synthetic construct
  source 1..120: mol_type = other DNA
ggagtagacttgccaaagaaaagttgaactaacagtgatgacccctgctaggcaggagccataaattatataatgtgttgtaagcatgatatatacacctgattttgaagacttcatctt

SEQ ID NO: 9887 - DNA, 120 bp, synthetic construct
  source 1..120: mol_type = other DNA
taaagaaatggggtcttagccgggcatggtggctaacacctgtaatcccagcactttgggaggccaaggcgggcagatgacgaggtcagatcaagaccatcctggctaacatggtgaaac

SEQ ID NO: 9888 - DNA, 120 bp, synthetic construct
  source 1..120: mol_type = other DNA
gagcaaaacctgtctcaaaaaaaaaaaaaaaaaaaaaaaaaaaaaaaaaaaaaaaaggatagggagcccatgatcatgatcatggataggaagtttcaatatcataaagtatcaattctt

SEQ ID NO: 9889 - DNA, 120 bp, synthetic construct
  source 1..120: mol_type = other DNA
ctcagcctcccaaagtactgggattacaggcgtgagccaccacacccagcccaggaatttcttaaacaggacaaaaatagtcaggcgtggtagatggtggctgtaagcccagcactttgg

SEQ ID NO: 9890 - DNA, 120 bp, synthetic construct
  source 1..120: mol_type = other DNA
agagtcacgctctgtaactgaggctggagtgcagtggcataatcttggctcactgcaacctccgcctcccaggttcagcgcccctgaggagctgggactacaggcatgcgccactatgcc

SEQ ID NO: 9891 - DNA, 120 bp, synthetic construct
  source 1..120: mol_type = other DNA
aatccaaaatgctccaaaatccggaagtttttgagtatcaacatgatgctcaaaggtaatgctctttggagcatttcagatttcagattttcagactacagatgctaaccagtaaaaata

SEQ ID NO: 9892 - DNA, 120 bp, synthetic construct
  source 1..120: mol_type = other DNA
acaatccaagtagcagcagcttggcaaaagtcaccatcaaactatgaaatcctactgaaaccatccctgtgcttctcgtgcacaggtactcgttgatctaaatgttgcatttattgtgtt

SEQ ID NO: 9893 - DNA, 120 bp, synthetic construct
  source 1..120: mol_type = other DNA
cagagcaagactccgtctgaaaaaaaaaaaaagagagatagtctcttcaataatggtgctgggaaaactggctatccattacacagaagaatgaaactatacccctatctctcgccacat

SEQ ID NO: 9894 - DNA, 120 bp, synthetic construct
  source 1..120: mol_type = other DNA
tacactgttggtgggaatgtagattagtacaaacactttggagaacagtttgaaggttgctcaaaaaactaaaagtagagctaccatatgattcagcaatcccactgctgggtatatacc

SEQ ID NO: 9895 - DNA, 120 bp, synthetic construct
  source 1..120: mol_type = other DNA
ccattatgccactccctacacacacacacacacacacacacacacacagagagagagagagagagagctgaaaacagcacagaaggctgtctcttcccttttccccacacccctacctgt

SEQ ID NO: 9896 - DNA, 120 bp, synthetic construct
  source 1..120: mol_type = other DNA
gagccctgcctttcaagaaccctttgttacccttgccctccctcacatagtggggccgagtatccaacccccctaggcgctgggggtcagtgcttcggacgctctgaacattcatctcca

SEQ ID NO: 9897 - DNA, 120 bp, synthetic construct
  source 1..120: mol_type = other DNA
ctggtctcgaactcctgacctcaggcgatccgcccacctcagcctcctaaagtgctgggattacaggtgtgagccactgcacccggtgttttcggctttagagacaggttgttttgtcac

SEQ ID NO: 9898 - DNA, 120 bp, synthetic construct
  source 1..120: mol_type = other DNA
tccacctcagcatctttagtagctgtgaccacaggcacacatcaacacacacccggctaatttttcattttttgtagagatgaggttgttgcccaggctggtctcaaactcctgagctca

SEQ ID NO: 9899 - DNA, 120 bp, synthetic construct
  source 1..120: mol_type = other DNA
ctgtgtgaggcaccaggatgggggcctcaagttcagtgggggagatgacagagccgcgggttcctagggtgaaaatggtgttcctgctgcggagcgatggctttgagaagaatcgtaaga

SEQ ID NO: 9900 - DNA, 120 bp, synthetic construct
  source 1..120: mol_type = other DNA
ctgggggatctgatagttggtcatgggtttcctgaaggaataaatcttctggaggataaactctcggatcttcgtcactgcctagatgtggggaaccaaacacagggcatgaagctgcaa

SEQ ID NO: 9901 - DNA, 120 bp, synthetic construct
  source 1..120: mol_type = other DNA
caagctccccaagtttcccccgaactgcctggcgatttcgaagtcgaatgttcatggctcctgactgttcctgcagtgtccggatctcagagctgatggagctgaggtcactctgaaaag

SEQ ID NO: 9902 - DNA, 120 bp, synthetic construct
  source 1..120: mol_type = other DNA
ctaccttattccttccagcccccatgcctctcagattacaggtactgcacccaccccatgccatcgcttaccatccacttcatccaggatgaattcatcagaagtgatatccaactcccc

SEQ ID NO: 9903 - DNA, 120 bp, synthetic construct
  source 1..120: mol_type = other DNA
tctggggaaccccaggctttctagaaatgtcaaaacacatagtgtttacctgcatgccaggtgcaatcttacacatattcatctaatcctaacgacgatgtatacaataggttctatctt

SEQ ID NO: 9904 - DNA, 120 bp, synthetic construct
  source 1..120: mol_type = other DNA
cacttctcctagatcgcaccgcctcttcctcctggaagctatataatgatatcgcgtcacttccgctctctcttccacaggaggcctacacgccgccgcttgtgctgcagccatggtaag

SEQ ID NO: 9905 - DNA, 120 bp, synthetic construct
  source 1..120: mol_type = other DNA
gcatttaccacagaaaataagtgattaaagccaagatagtggtctaaggtcaagccaaaacatttcacctggggaagtggggaggaggtatggttgctcacccgaattcgctaagatttt

SEQ ID NO: 9906 - DNA, 120 bp, synthetic construct
  source 1..120: mol_type = other DNA
tggctcactcggaggctgaagtgggcggatcccctgaggtcaggagttcgagaccagcctggtcaacatggtgaaacctcgtcatttaattaataaatttgaaagaccctgctctcttct

SEQ ID NO: 9907 - DNA, 120 bp, synthetic construct
  source 1..120: mol_type = other DNA
gctgtcatctcatggtcctcttcgtgtctctctcatgatttgtcattggatctagagcccaccctaatcaaatataacgtcattttacctaattatttccgtaacgaccttatttccaaa

SEQ ID NO: 9908 - DNA, 120 bp, synthetic construct
  source 1..120: mol_type = other DNA
atctggaaaggtgggtgaggaaagggtgacctaggggattgcaaaatagattattgcagatcctacctttgtgagctttttgaatgaggctataaaggaatttaaaaatcagattcaaca

SEQ ID NO: 9909 - DNA, 120 bp, synthetic construct
  source 1..120: mol_type = other DNA
ccagtttagagaccaacaccctggggttggtgtgcagcatcattgtggagtgggttagctgagcctagccagttgcagttaaggtgagtttgcaggtcttggtcactctgggtttttttg

SEQ ID NO: 9910 - DNA, 120 bp, synthetic construct
  source 1..120: mol_type = other DNA
ttcgggcttcgtggggcgggctgcgcgaggcccgggggctcagggtacagacgctattcttgctgggagagccgaacgcacagcaccccgtgtggggttcccaggggagtgacctggcct

SEQ ID NO: 9911 - DNA, 120 bp, synthetic construct
  source 1..120: mol_type = other DNA
ccttataccagatcctcagtctcactaaagacagcgatatgggagacacccaggggcctggcccgccagcccaaaagatggtcatcgggaagagaaaaagaaaaaaatgctgcagttgtt

SEQ ID NO: 9912 - DNA, 120 bp, synthetic construct
  source 1..120: mol_type = other DNA
ttggctttggctggaagggagccttagcctgcgggtcatagccctgagggaggggacaggagtgatatctgttacagcctcggagtcagggaactggcagcacccacctgctggccgcac

SEQ ID NO: 9913 - DNA, 120 bp, synthetic construct
  source 1..120: mol_type = other DNA
gggagggagggagaagcatggagccataaggaagaacctcagtccaacagctccagcccaactaagcccccagttcctggatgtctctggcccaaacttccacccagagttcattcactt

SEQ ID NO: 9914 - DNA, 120 bp, synthetic construct
  source 1..120: mol_type = other DNA
aatgcattaacaccagagtgttgagactgagagggaagcagaggtttgttaggattggtgggaaacatggtcaggaaaatcaggagcagacaatttgtgaggtttctttaaagtcagact

SEQ ID NO: 9915 - DNA, 120 bp, synthetic construct
  source 1..120: mol_type = other DNA
cacacacccatctatgggacccctgggtaaagaccagcccagtgccaaatgggagtctactgtactactagtaagcagcagttcggctttgagaagtcaacgcaatccaatcataataca

SEQ ID NO: 9916 - DNA, 120 bp, synthetic construct
  source 1..120: mol_type = other DNA
gctacatggtgaaaccccatctctacaaaaaatagaaaaattatccaggtgtggtggtgtgtacctgagtcaaattctgggtgacaggaaaattctgggagatgagagcaggtcaagaga

SEQ ID NO: 9917 - DNA, 120 bp, synthetic construct
  source 1..120: mol_type = other DNA
cacagcaggtgcccagtgaatacctgatgacaaaaggaatcagaggaaaatacaaatcagacagaaaagctgtggaaaatgcagatactccctcaggaacagcagaaatccaaagcagac

SEQ ID NO: 9918 - DNA, 120 bp, synthetic construct
  source 1..120: mol_type = other DNA
aacctcctgggctgaggtgggaggatcacctcagcctcctgagtagctgggactacaggcatgcaccaccacacccggctaatttttctatcttctgtagagacagagttttgccatgtc

SEQ ID NO: 9919 - DNA, 120 bp, synthetic construct
  source 1..120: mol_type = other DNA
accagcctgaacaacatgctgaaaccctgtctctactaaaaatacaaaaattagccaggtgttgtagcaggcgcctgtagtcccagatactcgagaggccaaggcaggagaatcacttga

SEQ ID NO: 9920 - DNA, 120 bp, synthetic construct
  source 1..120: mol_type = other DNA
ttagaaaccctgtttctgactgagagagaaagacagagagaatgacccagtcctgattgccctctgtattccctctgctggggtcctaaaggagaggtggtcatcccaagggcttccaac

SEQ ID NO: 9921 - DNA, 120 bp, synthetic construct
  source 1..120: mol_type = other DNA
ccacagcctccacaatgtcagcctggcatatctttgctgtgtcttccccatcctccccttccagaaacctgaaagcaagggttaggatggcagtaaagcttcccaatatgaagcaagtat

SEQ ID NO: 9922 - DNA, 120 bp, synthetic construct
  source 1..120: mol_type = other DNA
cgccccccgaccccacagctaaaaacttcgtttcccacccagggaggcctctacctttctcttggtctgaagtttgtctttcttgggcgggacatccttgcccggcttgggggctgtctc

SEQ ID NO: 9923 - DNA, 120 bp, synthetic construct
  source 1..120: mol_type = other DNA
aacagggtcggtatggtctcgcccaatgcacttacaacccaaagccattaccgagataaggtttgttgccccatctgggccctcgcgtgcagagacttccccgcctcagtctcagtactc

SEQ ID NO: 9924 - DNA, 120 bp, synthetic construct
  source 1..120: mol_type = other DNA
agctctaggatctatactgtagctaataaaatgtaaaaacacctggctctgtttcctgaccaggcacttctgtcatatccccacagccccttccaccttaacacacaccacctgtattac

SEQ ID NO: 9925 - DNA, 120 bp, synthetic construct
  source 1..120: mol_type = other DNA
tgttaggatatggccaagaatcagaaactgatgcgtttttccagcactacctgtgtgctgcactcatggaaggtgggaagctatacacaggtatccaacttggttataagacaccagttc

SEQ ID NO: 9926 - DNA, 120 bp, synthetic construct
  source 1..120: mol_type = other DNA
gctgcttccctgtggggaaactgctgttgattctgaaattttaacacggcgaccaaaagtttaaggtgtagcaactaatgcaaaatagccatcaaaataaaacaaatttcagcttctatt

SEQ ID NO: 9927 - DNA, 120 bp, synthetic construct
  source 1..120: mol_type = other DNA
tcagtggccggagcccctgtagccacctctggatatcatggtcaggttggaggttatagccacgacattcattctggagccgtcgcaactcagaaaggactgcaaactcctgggaaggag

SEQ ID NO: 9928 - DNA, 120 bp, synthetic construct
  source 1..120: mol_type = other DNA
gagaacagatttcattctcctcacccctctgtgcctcccttacccatccttcaggctgctcccccaaaacatactcctcaccccttcataatcaccacccccacgcccaccaccccgcta

SEQ ID NO: 9929 - DNA, 120 bp, synthetic construct
  source 1..120: mol_type = other DNA
ccttccaatatcagggatctgaggatctcaggtggccaaggaaccagaggggcacagggtttgaagggtaacgaccaaagggaaaaggggagaatcaaaatggtaggtggaggaggctag

SEQ ID NO: 9930 - DNA, 120 bp, synthetic construct
  source 1..120: mol_type = other DNA
catagggacctggagaacacagagagatgatcgctaaccctttctcccactctgcacctagatttctgaggacaatcccagacccaggagatgttccagactcatttttctgatattcag

SEQ ID NO: 9931 - DNA, 120 bp, synthetic construct
  source 1..120: mol_type = other DNA
agtcacgtggccccagcccctcccccgaccgatcccgaaaaaccagccctgccagtcaacctgccctcacctaggatctggacctaggagtttagggcctcggggccccaaatccaaatt

SEQ ID NO: 9932 - DNA, 120 bp, synthetic construct
  source 1..120: mol_type = other DNA
aggcaggcgcgggggaaccgggcagggaagggacgtgggtgggtgtcaagaagaccggaagggagttctgcaggaaggttgggggagggggcaacagaagggtggaataggggggccctt

SEQ ID NO: 9933 - DNA, 120 bp, synthetic construct
  source 1..120: mol_type = other DNA
ctctgagcggttcagggtcactggaagggaccagaggtgattggaatattcattgagcttggaaaggggttggaatgagagaaccgtttggaagcactggaatacagctttattcctaca

SEQ ID NO: 9934 - DNA, 120 bp, synthetic construct
  source 1..120: mol_type = other DNA
ggccgaggcgggcggatcaccaggttaggagatcgagaccatcctggctaacacggtgaaaccccgtctctactaaaaaatacaaaatattagccaggcatggtggaggacgcctgtagt

SEQ ID NO: 9935 - DNA, 120 bp, synthetic construct
  source 1..120: mol_type = other DNA
ataaactatcatgggcacagatgatgggagaaggatgaggctaatattttctgccctccagacactgctgagtgctgtatctcctgcatcttcttaaggagatacactgtcttccttaat

SEQ ID NO: 9936 - DNA, 120 bp, synthetic construct
  source 1..120: mol_type = other DNA
ttttttagtgccaacatgatgccacaagtggaaaatcccacagctgccctcatgtgatgggtcacatatattattaaaaatattgtggtcgggtgcagcggttcacacctgtaatcccaa

SEQ ID NO: 9937 - DNA, 120 bp, synthetic construct
  source 1..120: mol_type = other DNA
aagggatgggatgctggagtggtagaggtggagggcagagggatgggtgtcaggctcttgggagtaggtggggaaagtccaccaacctcaggtcatggtcagggtagggctgacacttac

SEQ ID NO: 9938 - DNA, 120 bp, synthetic construct
  source 1..120: mol_type = other DNA
gacctctgtcccccaactcactgtacacagcaagctccagggtgacctgtccttgcaggtatggcaggtgtatggtggccagataggtgccctcctgaaagggttgaactgtaggcagcc

SEQ ID NO: 9939 - DNA, 120 bp, synthetic construct
  source 1..120: mol_type = other DNA
gcctggctgaccgggttcaaatcccctctgcagcttatttatatggccttgggccacttcctttttccatggctcagcttcctaatctctaaaattaaaagttgatgataataatagtac

SEQ ID NO: 9940 - DNA, 120 bp, synthetic construct
  source 1..120: mol_type = other DNA
cgggagtttgaaaccagcctgaccaacatggtgaaaccccgtctctactaaaaatacaaaattagcctggtgtggtggcacatgcctgtaatcccagctactcgggagaccgaggcagta

SEQ ID NO: 9941 - DNA, 120 bp, synthetic construct
  source 1..120: mol_type = other DNA
tgtccttgggcaaattatttaactggtttgtgtcctatatttatccatatgcaatacagggataatattaaaacctacaacctatggttgttgagaggaataagtgagattatgcatata

SEQ ID NO: 9942 - DNA, 120 bp, synthetic construct
  source 1..120: mol_type = other DNA
tgttcgtatattttatgcatggcccaagacaattcttctcccagtgtggctcagggaagccaaaagattggagacccctgatctaaatactccatgtacatgaaggtcactttcactgct

SEQ ID NO: 9943 - DNA, 120 bp, synthetic construct
  source 1..120: mol_type = other DNA
cccacctcggcctcccaaagtgctgggattacaggcatgagccactgcgcccagcatttttttaatttttagtagagacaaggtctggttatgttgcccaggctggtcttgaactcctga

SEQ ID NO: 9944 - DNA, 120 bp, synthetic construct
  source 1..120: mol_type = other DNA
tcttggaccctggagagatttcatttctaattttacatcagtacaacagctttcattttcttaaatccctgatcaagcagaaatgcttgaaaagaaagagcacagcaggccgggcgtggt

SEQ ID NO: 9945 - DNA, 120 bp, synthetic construct
  source 1..120: mol_type = other DNA
tcggccaagctaagcatgggattgaatcaggtttcagtatattttagaaacctccaacagtgtggactgagaactgctgagtcctaactcattcttggtgctaaaaagtatttattgaat

SEQ ID NO: 9946 - DNA, 120 bp, synthetic construct
  source 1..120: mol_type = other DNA
tgcagagcaagacacagatctgggaagagcagagaaaaaacgctcctgcttctgaacccctcccacctcgcatcacctgacaagtctctcaaggtctggtgtcgggaaaccccacctctt

SEQ ID NO: 9947 - DNA, 120 bp, synthetic construct
  source 1..120: mol_type = other DNA
cggccggggcggcggttcccccggtccctggcgcaacagcagtgcaccgggtctcttggccaggccctttccgctcgcatcctccacgaaccaacactcgatcaccgcgggtcctgctga

SEQ ID NO: 9948 - DNA, 120 bp, synthetic construct
  source 1..120: mol_type = other DNA
gaaataccttgggggggaggggttgagtagtagaatgggcgggcgatggtgaaactgtggttccccttccagaatatatacaagtccacagagataaaggaagacagtaagtgtggtggg

SEQ ID NO: 9949 - DNA, 120 bp, synthetic construct
  source 1..120: mol_type = other DNA
gtcattggaggactcacagaagttgacctgctcctcccccttgtctgggggctcactcagggtacggacatcacttatgctgagggtagcctcaggccctccccccactggaaccctgga

SEQ ID NO: 9950 - DNA, 120 bp, synthetic construct
  source 1..120: mol_type = other DNA
cactctgatagatacatcgcagagctggccctgcagacgctgctgattgagggactccaagagggcactggtcacctcagggaaggacacatgtaccactgcagctgctggcaggggtag

SEQ ID NO: 9951 - DNA, 120 bp, synthetic construct
  source 1..120: mol_type = other DNA
ctcggcggccagagcagcaacctgggcccctcccgccgccatcttgcgccgactccctccgccctccgcctccgctccgcctcccgcccctccgcctttaaaggcacagccgggcacccc

SEQ ID NO: 9952 - DNA, 120 bp, synthetic construct
  source 1..120: mol_type = other DNA
aagcttttttttttttttaaagaaacaccaccaaaaggggattagcttagtccatcccttcctcagtcatctgcttcccaccttcctccaaatgttatcccagaacattctggaggcagg

SEQ ID NO: 9953 - DNA, 120 bp, synthetic construct
  source 1..120: mol_type = other DNA
atctctagctcaaagagctgagacacagggctttcttcctccagggtcagctcctcaggctgttctccattgctttcagcatctatgctggagggggccaggggttcttctgacagtaac

SEQ ID NO: 9954 - DNA, 120 bp, synthetic construct
  source 1..120: mol_type = other DNA
gatctgatagtgcagggtcaacgcctacgtgggaagacataaagtcagagcactcagcccttgaagggactagaagagtaaaaaccctagaaaggactagagagatgccccatccgcctc

SEQ ID NO: 9955 - DNA, 120 bp, synthetic construct
  source 1..120: mol_type = other DNA
cagggtggtctgctgtctgcatcttacaaagttcaaggaactagaaggttcaggggaagaaggaaggggaagagagacaagggagggggttgagagaaaggggaggtggggttagtggga

SEQ ID NO: 9956 - DNA, 120 bp, synthetic construct
  source 1..120: mol_type = other DNA
ctcccaacagtccgttctcttttctcctccttgaattatctccatatttcaccctccgatgagtctcctcaaactggggctttaggttgaagatattttacccaagtcccctccctttca

SEQ ID NO: 9957 - DNA, 120 bp, synthetic construct
  source 1..120: mol_type = other DNA
gctgtgcagagtttcagggaagggcagaagtctcttaaaagggaagtaaaaccttttctttcagttgggctattggcaagctatctggccctgctttcctgtcccccaggttcccatttc

SEQ ID NO: 9958 - DNA, 120 bp, synthetic construct
  source 1..120: mol_type = other DNA
atagttctcttttttcccctcccccctcaaaagtatagttctcaaccatgaaatctcctgggggtaatcttacctgtttaaaataaagggaaatgtaccctgtttctttcaccaaggcac

SEQ ID NO: 9959 - DNA, 120 bp, synthetic construct
  source 1..120: mol_type = other DNA
aaaaaaaaaaaaaaggttttttatagcgacagggtcttactgtgttgcccagatggatcttgagctccttgcctcaagcaatcttcccacctcagcgtctcaaagtgctgggattatggg

SEQ ID NO: 9960 - DNA, 120 bp, synthetic construct
  source 1..120: mol_type = other DNA
gcagctgggattacaggcacacaacaccatgcccagctaattttttgtattttttgtattttttttttttagtggatatgggtttttggcatgttggccaggctggtctcaaactcctga

SEQ ID NO: 9961 - DNA, 120 bp, synthetic construct
  source 1..120: mol_type = other DNA
ggaagttgaggtgggtggattgcttgatctcaggattacagaccagcctaggcaacatagtgagacctcatctcaataaatcaataaataggctgggcgcagtggctcatgcctgtaatc

SEQ ID NO: 9962 - DNA, 120 bp, synthetic construct
  source 1..120: mol_type = other DNA
ccaaatttctgggattacaggcatgagccactgtgcccggccacaattttaatttatgatgaaaatttttagatacctacttaaagatatatgaaggagtatatacttcttcaaaattat

SEQ ID NO: 9963 - DNA, 120 bp, synthetic construct
  source 1..120: mol_type = other DNA
ctgccagtcctgaccttaattcccacacctaagagaaaagagaaaggaccctatgagccttcagatcaattatttaaacatccagtgtgatgtgaaaggtctggactaaatgatccatga

SEQ ID NO: 9964 - DNA, 120 bp, synthetic construct
  source 1..120: mol_type = other DNA
cacccagccagggtaattttaaagaagagtgaagttttgccatcgatggtccaggtctcagaggctaccagtggaggatgtggttgaggaggttgtaggagcaaggactgaagacctttt

SEQ ID NO: 9965 - DNA, 120 bp, synthetic construct
  source 1..120: mol_type = other DNA
ctgcagccttgatctccccagctcaagcaatcctcccatcttagcctcctgagtagttgggaccacaggtgtgtgtcaccacgcctggctcatttttgaattttgtagagacagggtctt

SEQ ID NO: 9966 - DNA, 120 bp, synthetic construct
  source 1..120: mol_type = other DNA
tgtcttttgctgcagctgcaaaggagtctcgaaaaagtgaaaaaaccctggactagaatttaaactgatcacttagttgtgtgaagctgtggacaagtcacatgacctttctttagtgtt

SEQ ID NO: 9967 - DNA, 120 bp, synthetic construct
  source 1..120: mol_type = other DNA
cccactgacagtacgagactcctctcaaaaaaaaaaaaaaaaaaaaaaaggtgaagaattcatttgttcgcatgttctcacttacaagtgatgatgagaatacacggacacacggtggga

SEQ ID NO: 9968 - DNA, 120 bp, synthetic construct
  source 1..120: mol_type = other DNA
aaaaaaaaaaaaaaatacaaaatgttagccgggcgtggtcgtgggtgcctgtaatcccagctactcaatcgggaggctgaggcaggaaaattgcttgaacctgggaggcagaggttgcac

SEQ ID NO: 9969 - DNA, 120 bp, synthetic construct
  source 1..120: mol_type = other DNA
ccatacttggcctatctgtcctttctagtccaggatcacatactgcatttgactgtcacatatctatctgtagtctccttcaatctgggaagttctcagtctttccttgtctctcatgaa

SEQ ID NO: 9970 - DNA, 120 bp, synthetic construct
  source 1..120: mol_type = other DNA
acccaggctagagtgcaatgtgctatctcgcctcattgcaacctccacctcccaggttcaatcgattctcctgcctcagcctcccaagtagctgggattacaggtgcccgccacaacacc

SEQ ID NO: 9971 - DNA, 120 bp, synthetic construct
  source 1..120: mol_type = other DNA
taaaaacattttggaaaattatgtgccattttgtatatatttttatttggcatctaatttttttccttgttgatttaaataactgcaaagagtataacaaatcggcttggtgcaatggct

SEQ ID NO: 9972 - DNA, 120 bp, synthetic construct
  source 1..120: mol_type = other DNA
agcttgcagtgagccaagatcgcgccactgcactccagcctgggcaacagagccaggctccatctcaaaaaaacaaacaaaacaaaaacaacaaaaaaaaacaaaaaactgtctggctgg

SEQ ID NO: 9973 - DNA, 120 bp, synthetic construct
  source 1..120: mol_type = other DNA
gacttcagacatgagcaaaaacccaaaattaaaagtaaaaacgacacagcattgtgctcttcgccttccctcatcgtctggcgcagggcagcccacttctggtgtttggcgctggaatta

SEQ ID NO: 9974 - DNA, 120 bp, synthetic construct
  source 1..120: mol_type = other DNA
gaggcagaagttgcagtgaaccaagatcacaccgttgcaccccagcctgggcaacaagagcaaaattcagtcaaaaaaaaaaaaaagaaagaaagaaaagaaaagaaggccaggcacggt

SEQ ID NO: 9975 - DNA, 120 bp, synthetic construct
  source 1..120: mol_type = other DNA
gtagctcatgcctgtaatctcaacacttaagaggctgaggtaggaggattgcttgagcccagacatttgagaccaacctgggtaacatagggagacttgtctctacaaataatttaaaaa

SEQ ID NO: 9976 - DNA, 120 bp, synthetic construct
  source 1..120: mol_type = other DNA
gagccgagattgtgccactgcactccagcctggacaacagggagagactctgtcaaaaaaaaaaaaaaaaaaagaaatctcaaaaaagaaagaaaaatggccaggcacagtggctcatgc

SEQ ID NO: 9977 - DNA, 120 bp, synthetic construct
  source 1..120: mol_type = other DNA
aatttttatatttttttttagtaaagatggggtttggccatgttggccaagctggtctcaaactcctgacttcaggtgatctgcccacctcggcctcccaaagtgctgggatacttttgg

SEQ ID NO: 9978 - DNA, 120 bp, synthetic construct
  source 1..120: mol_type = other DNA
aatacaaaaattagctgtgcgtggtggtgcgcacctgtaatcccagctactcaggaggctgactgaggcaggaagactgcttgaacctgggaggcagaggcggaggttgtagtgagctga

SEQ ID NO: 9979 - DNA, 120 bp, synthetic construct
  source 1..120: mol_type = other DNA
aaaaataaaataatataattcaaagtttgggctacagagtataagtgagagatattcagctactgggagtttataaaagacacacaaacatcgcacaagagcaaaagtcaatttgaacat

SEQ ID NO: 9980 - DNA, 120 bp, synthetic construct
  source 1..120: mol_type = other DNA
ttaagaaaatcccggtaagggacagtcctgactaccatcaggtggacaggacccacgcgaaaaataccaggggttcggttatcatgggtcaggaaatgaacaaagaataatttttttttt

SEQ ID NO: 9981 - DNA, 120 bp, synthetic construct
  source 1..120: mol_type = other DNA
tgcccagctcccttattaggtcgagacattttaactaaattatctgcttccctgactaatcctaggctacagccacatttcgttgctgcccttttccccagttcaaagcctccttcacgt

SEQ ID NO: 9982 - DNA, 120 bp, synthetic construct
  source 1..120: mol_type = other DNA
cacacctgacccccatgactgtatctctctgatccacctgacattcaccccatttccccgtatttccttctttcctgttcctcaccctgatcacacttggtttattgatggtagttctac

SEQ ID NO: 9983 - DNA, 120 bp, synthetic construct
  source 1..120: mol_type = other DNA
ccaagtcaggaaactaaaatacctcttggtctgggtagacactttcactggatgggtagaggcctttccaacagggtctgagaaggccactgcggtcatttcttcccttctgtcagacat

SEQ ID NO: 9984 - DNA, 120 bp, synthetic construct
  source 1..120: mol_type = other DNA
tcacctttaccttcctaaagaacttctttactttctagacaggtccagcaagacttccccagacatttcacttcagcaagctgccgccctcctccacacttacttaaaaaacctttctcc

SEQ ID NO: 9985 - DNA, 120 bp, synthetic construct
  source 1..120: mol_type = other DNA
catagcctctctaatgacttctctgctagcatcacacacatatcacaaactttatcagtccttcaggcccaagttgactctttagctgcagttgtcctccaaaaccaccgaggccttgac

SEQ ID NO: 9986 - DNA, 120 bp, synthetic construct
  source 1..120: mol_type = other DNA
cacccattatctctccataccacctccaaaaattttcgcagccccaacacttcaccactattttgtttattaatataaggagataggaatgtcaggcctctgagcccaagttaagccatc

SEQ ID NO: 9987 - DNA, 120 bp, synthetic construct
  source 1..120: mol_type = other DNA
caaggaatgctaagtttcctccctattgggagagacacgaagtgaacttagtgttgggagacagaagctggatggccctcgggggctgacgcgcagggtgccggacttcaggatatagca

SEQ ID NO: 9988 - DNA, 120 bp, synthetic construct
  source 1..120: mol_type = other DNA
ttctttccaccctctgatgacaacatgatcttcaggctggtgctggtttaccagaaattttaggggtggtacctgtgctaaaatatttttagttttgagggagaggaaagtggaagataa

SEQ ID NO: 9989 - DNA, 120 bp, synthetic construct
  source 1..120: mol_type = other DNA
agacatatttatccaatttttaatgtctgatcataaggtaagtttttgttttttgtttttttttttttttttgagatggagtcttgctctgtcgcccaggctgaaatgcagtggcacgat

SEQ ID NO: 9990 - DNA, 120 bp, synthetic construct
  source 1..120: mol_type = other DNA
caatggtgcgatcttggctcactgcaacctccgcctcccacgttcaagtgattctcctgcctcagcctcctgagtgagtagctgggattacaggtgcccaccacaacgcccagctaattt

SEQ ID NO: 9991 - DNA, 120 bp, synthetic construct
  source 1..120: mol_type = other DNA
caaatataaaattttccttttaattctcagcaaggctaggtacttctatatagaagggtgcacccttacagatggaacaatggtgagcgcacacttggacaagggaggggaaggggttct

SEQ ID NO: 9992 - DNA, 120 bp, synthetic construct
  source 1..120: mol_type = other DNA
ttaaatgctagctaggctgaggtggacaagctctgccagctgctgtcatcttcagaagatagacgcagcagtaaggaatatttgttttgcttttttataaaatgtttaaaagcactgtgg

SEQ ID NO: 9993 - DNA, 120 bp, synthetic construct
  source 1..120: mol_type = other DNA
ctcccagacggggtggccgggcagaggcgcccacttcccagacggggcggccgaatcccggctctttcatgttttagctgttgggctttggggaagttattctacctctttcagcctgtg

SEQ ID NO: 9994 - DNA, 120 bp, synthetic construct
  source 1..120: mol_type = other DNA
tggctttagagtttcaaagacttatggcattaaaaaaaaaaaaaagaaaaaatggaccgggcgcagtggctcacgcctgtaatcccagcactttgggaggctgacgcgggtggatcactt

SEQ ID NO: 9995 - DNA, 120 bp, synthetic construct
  source 1..120: mol_type = other DNA
acccttgtcttttgaagtggcaattagagctaggaagccaaagataagatatgaaaagaataaaagagaagcctaccacttctcatcttggagtttcaacaagacgaaggcagggaggtg

SEQ ID NO: 9996 - DNA, 120 bp, synthetic construct
  source 1..120: mol_type = other DNA
gcttgcatcgtgtcctctgacattctgttggcacaagcaagtcacacagcaaaggggatggatgtacacttaaataataaggaggaagcaaaggattgggaataacagtccaaaccacca

SEQ ID NO: 9997 - DNA, 120 bp, synthetic construct
  source 1..120: mol_type = other DNA
ttgtgttatcctaccttccaagcttgcgtgaggctgaagtgtcttatgtacttgtagtttattcaaaggataaagtggtaaaatgccctcatagtgaaaaagtgaaaggtctgtgcatgg

SEQ ID NO: 9998 - DNA, 120 bp, synthetic construct
  source 1..120: mol_type = other DNA
gggcgacagagtgagactccgtctcaaaaaaaaaaacaaaacaaaaacaaaaacaaaacaaaacaaaaaaactggaaaatctagtcctgcccaagctcctctctctgtctttgaggggag

SEQ ID NO: 9999 - DNA, 120 bp, synthetic construct
  source 1..120: mol_type = other DNA
gagattgtgccactgcactccagcctgggcaacagagcaagactccgtctcaaaaacataaaaaaaaacaaagaaaagaaaactaaaaacaaacaagcaaagaaaaaaaaatgcctttca

SEQ ID NO: 10000 - DNA, 120 bp, synthetic construct
  source 1..120: mol_type = other DNA
tttttttttttgaggaagcaatttctttaattttatcagaatccaggacacaagaagaaaaacacccaaaaaccacatggagacagaagacaagacacaactcctcccccactgcctccc

SEQ ID NO: 10001 - DNA, 120 bp, synthetic construct
  source 1..120: mol_type = other DNA
gggccccaaaccgtacgggcaccatggggtccagctccccatggcactggaggatggccaggtccttggcactgccattagctgcctgggggaaggcccggtgcagaggcggccagcagc

SEQ ID NO: 10002 - DNA, 120 bp, synthetic construct
  source 1..120: mol_type = other DNA
tagctggcattcctttttatggctgaataatactccattgcctgtacagatcacaatttatttatccattcatcagttagtgggcatttgggctgttttcaccttttggctattataaat

SEQ ID NO: 10003 - DNA, 120 bp, synthetic construct
  source 1..120: mol_type = other DNA
tgaactgttagaaactatgttagtgttcatgaaagtctttatcaagtcggacgcagtagctcatgcctataatcccagcactttgggaggccgaggtgggcgggtcacttgaggtcagga

SEQ ID NO: 10004 - DNA, 120 bp, synthetic construct
  source 1..120: mol_type = other DNA
gctgagatcataccactgcactccagcctgggcaacagtgagactccgtcttaaaataaataaataaataaataaatacatacatacatacataaaataaaataacgatgaggtgaaaaa

SEQ ID NO: 10005 - DNA, 120 bp, synthetic construct
  source 1..120: mol_type = other DNA
ttagacaatgctgatatagaaaatttccatcattgcagaaagttctattggacagcactgttctacaacataaaatgagctaactgggtctaaatatttcaaaaagaaaaaaaaacaaaa

SEQ ID NO: 10006 - DNA, 120 bp, synthetic construct
  source 1..120: mol_type = other DNA
agatttagtcattccaagtttatatatgcttcaaaatagcatgtaatacctatggaaactaagaattaggctgggcacagaggctcacacctgaaatcccagtgctttggtaggccaagg

SEQ ID NO: 10007 - DNA, 120 bp, synthetic construct
  source 1..120: mol_type = other DNA
agaccaaaaaaaaaaaatttttttgagacagagtactctgtcacccaggctggactgcagtggtgtgatcttggctcactgcaacctctgcctccccagttcaagggattctcctgcctc

SEQ ID NO: 10008 - DNA, 120 bp, synthetic construct
  source 1..120: mol_type = other DNA
gggttgtaggaaccctgatttatagcaggtttgtcagaagcacagatcacagccttggtcttggaattggcatctaaagtgggaggcagtcttttgggactcagccctccccctgtggaa

SEQ ID NO: 10009 - DNA, 120 bp, synthetic construct
  source 1..120: mol_type = other DNA
catagtgagacaccccccaactccacccccataaaaaaaaaaagaaaaaaagatgtaatcccagcactttgggaggctgaggcaggcggatcacttgaggtcaagagttggagaccagcc

SEQ ID NO: 10010 - DNA, 120 bp, synthetic construct
  source 1..120: mol_type = other DNA
taacctgttttgccaggatggtaaataagctcctgaaccctgttgtggattggttaatcactctgtggttctctctgtgtacacattaatccatttatatgcctcttctccaatgcacct

SEQ ID NO: 10011 - DNA, 120 bp, synthetic construct
  source 1..120: mol_type = other DNA
tgcaccatcacacccggctaatttttgtattttttgtagagatggggtttcaccgtgttaactaggctggtctcataaccgcccaatgtgtttaccttgcccgctgcctagacagagccg

SEQ ID NO: 10012 - DNA, 120 bp, synthetic construct
  source 1..120: mol_type = other DNA
gtccccaggcaagaaggaggtctgttattgtctttgttttaaagggctattaaaacaaagggaaagggctattattgtctttgttttaaattataaaccaagtttctcccaaagttagtt

SEQ ID NO: 10013 - DNA, 120 bp, synthetic construct
  source 1..120: mol_type = other DNA
gatcatatagggtaacttcctgatgtttccatggcatttgtaaactgtcaggttgctggtgggagtgtagcagtgaggacaaccagaggtcattctcatcgccatctttgtttcggtggg

SEQ ID NO: 10014 - DNA, 120 bp, synthetic construct
  source 1..120: mol_type = other DNA
ctgttctcaagattctggcatccaagaaaaaaaaaataatacttctcctagggctaataaatttgtaaagacttgctattacatgacttgtttcaaatgtttgcagcatattgtttatat

SEQ ID NO: 10015 - DNA, 120 bp, synthetic construct
  source 1..120: mol_type = other DNA
actgagctgacatcgcaccattgcactccagcctgggtgacagagcgcgactctgtctcaaaaaaaaaaaaaagaaagtgatcacattttgggaatgcattgactataccctaaaaagct

SEQ ID NO: 10016 - DNA, 120 bp, synthetic construct
  source 1..120: mol_type = other DNA
aaatttgtttatgtatttgcttataccctgcacaccctaagtgcagtgtagcctcaacatgtccaagcagagcccttgaccttctccacaaaactcctcctcttttggtgcctgtctccc

SEQ ID NO: 10017 - DNA, 120 bp, synthetic construct
  source 1..120: mol_type = other DNA
taaactctctaacaatagggagttaggagctatcagacccctcttaactatgatttacaacccagatcactacaactccgagtagacgaaggacaggccttccaaacattctgtttttat

SEQ ID NO: 10018 - DNA, 120 bp, synthetic construct
  source 1..120: mol_type = other DNA
actcctttgactacctgccactctaaggtaacagagataccaccacagttggaacacaaagaatgggggcgggggagccatcactaggacccacacatacagctcaagcttaagggtcaa

SEQ ID NO: 10019 - DNA, 120 bp, synthetic construct
  source 1..120: mol_type = other DNA
tgaagcttgtggttcttctattctcaacaaatggcatggtttgacggggaagggcatactccttcctttagggctctccctgaaatgtggatatattacttccatttgtgctctattggc

SEQ ID NO: 10020 - DNA, 120 bp, synthetic construct
  source 1..120: mol_type = other DNA
gtaatcccagcaagcagcatggtgcggcaccttcacagggcctctggctccagatcgttggcacacagtaagtgtttctttttttaaaattattattattatttttatcgagaaggagtc

SEQ ID NO: 10021 - DNA, 120 bp, synthetic construct
  source 1..120: mol_type = other DNA
tttcccaggctagtcttgaactcctgggctcaagcaatccacccactttggcctcccaaagtcctgggactacgggcatgagctactgtgcctggtctagactccccctttttttttttt

SEQ ID NO: 10022 - DNA, 120 bp, synthetic construct
  source 1..120: mol_type = other DNA
gttggaaataacacttgtgtagcagtttgagatgaaatataggcaatgcctggcttctgaaagtgccttcaggcctgatgttacacaagcattctcagcccaacttgcctcccctcctat

SEQ ID NO: 10023 - DNA, 120 bp, synthetic construct
  source 1..120: mol_type = other DNA
aaaattctggatttggaatctatcttggcaagataatacatagatatgattataagaaaatcagtgaggtcataaacagtggcttaccaacataggttggtatacaaatataacttcaca

SEQ ID NO: 10024 - DNA, 120 bp, synthetic construct
  source 1..120: mol_type = other DNA
atcgcttgaacccgtgaggcagaggttgcagtgagccgagaacacgccactgcactccagcctgggggacagtgcaagactccgtctccttggccaggcacagtggctcatgcctgtcat

SEQ ID NO: 10025 - DNA, 120 bp, synthetic construct
  source 1..120: mol_type = other DNA
gttggccaggctggtctggaactcctgacctcaagtggtccttctgccttggccttccaaagtgctgggattataggcatgatccaccatgcctggcaatttttttttaagagcacaaat

SEQ ID NO: 10026 - DNA, 120 bp, synthetic construct
  source 1..120: mol_type = other DNA
ggccaccaaatagtgtaatttttacagttacactttgtaactagtgttgctgaagacggaaatgcaattgattttgaaaattgattttttcctcttactgattttttatccatcaacctt

SEQ ID NO: 10027 - DNA, 120 bp, synthetic construct
  source 1..120: mol_type = other DNA
cttattgtgtaatctttctgaacctgtctccatccatctctacaaagaatgtggcacaatgtaggaactcagtgaattttcgtgattaaaagacgagataatacaggtgcacaatctgca

SEQ ID NO: 10028 - DNA, 120 bp, synthetic construct
  source 1..120: mol_type = other DNA
tgggtggtggccgttggaattcaaaagtggcgggtgtggcgcggggctggtagcggccggagccgtgcgagttctctaccctgcttcgcgagcgggcgagagaacgcgagtcccaggatc

SEQ ID NO: 10029 - DNA, 120 bp, synthetic construct
  source 1..120: mol_type = other DNA
tgcctgaatcctttgtttactagtatttcacgttcaggtttccctgaagttaggattcagccttaagagagattctttctctcgtgacaaccagagagcagagtagtattatgtgacagt

SEQ ID NO: 10030 - DNA, 120 bp, synthetic construct
  source 1..120: mol_type = other DNA
gtagctgggactacaggcagctgccaccatgcctggctgattttttgtatttttaatagagacagggttttgccatgttgcccaggctggtctggaactaactcctgggctcaagcaatt

SEQ ID NO: 10031 - DNA, 120 bp, synthetic construct
  source 1..120: mol_type = other DNA
ctggagtgcagtggtgtgatctcagctcactgcaacttctacctcccagcttcaagcaatcctcccacctcaatctcccgagtagctgggattacaggcacgtgccagcacacctggcta

SEQ ID NO: 10032 - DNA, 120 bp, synthetic construct
  source 1..120: mol_type = other DNA
ttgtggtgaggtggatgtaggcagggttgcatgaatatctgttcttatagaaggttaagtgcttatgcttctcactgtggaaagttggagggcatcattctagctttatattaatagatg

SEQ ID NO: 10033 - DNA, 120 bp, synthetic construct
  source 1..120: mol_type = other DNA
ttctttttctttttctttcttttcttttctttttttttttttttttttgagacaggatctcaatatgtcgcccaggctggagtgctggagtgcagtggcatgatcacggctcactgcagc

SEQ ID NO: 10034 - DNA, 120 bp, synthetic construct
  source 1..120: mol_type = other DNA
ttcaaacatggctcagtaaatattgcctgattctcccaagcagtcttcaacactcacatatcttccactctctcccttgtttatgattctcagctccagccaaaagggccagttggtttc

SEQ ID NO: 10035 - DNA, 120 bp, synthetic construct
  source 1..120: mol_type = other DNA
actcctgacctcaggtgatccacccgcctctgccttccaaagtgctgggattataggtgtgaggcaccgcacccagcctattttgaataggtaataacatttcatttggttcaaaattcc

SEQ ID NO: 10036 - DNA, 120 bp, synthetic construct
  source 1..120: mol_type = other DNA
ccatttgtgtatataaacatacctaaacatagaaaaggtacagttaaaatataatataaatgataaaaaatggcacacctgtacagggtactaaccattaaatggagcatgtttgaatgg

SEQ ID NO: 10037 - DNA, 120 bp, synthetic construct
  source 1..120: mol_type = other DNA
ctggtgtcggatgaacccagattcaggatgaccgaagaaagttgcaccttggcctcctccgagccgaaagccgagagcttctctctcttttttttttgagatggagtctcgctctgtcgc

SEQ ID NO: 10038 - DNA, 120 bp, synthetic construct
  source 1..120: mol_type = other DNA
caaactttttgttaaaaacgaagaaatatacacattagcctaggcctacatagggtcaggatcatcaacatcactggctttcacctccacatcttgtctcactggaagatcttcaggggc

SEQ ID NO: 10039 - DNA, 120 bp, synthetic construct
  source 1..120: mol_type = other DNA
gaggcaggcagatcacctgaggtcaggagtttgagaccagcctggccaacatgctgaaaacctgtctctactaaaaatacaaaaaaaaaaaaattagccaggcgtggtggcgcttgcctg

SEQ ID NO: 10040 - DNA, 120 bp, synthetic construct
  source 1..120: mol_type = other DNA
gtcctgtaattcctaagtcacctcctcaattctgtagggttgaagaaccagaagccagttcctgctgttcctgtccagaagtctggcagtaagtgacaaacataaccactgggtgagagg

SEQ ID NO: 10041 - DNA, 120 bp, synthetic construct
  source 1..120: mol_type = other DNA
gttcccatcctgatcacaaattcctgtggtactctctttccctcctcccatgtccacttgactccttcctggtgagcaccaactagattaagttatttgcagtctcttaaatgactcaac

SEQ ID NO: 10042 - DNA, 120 bp, synthetic construct
  source 1..120: mol_type = other DNA
gggggagacccccagttggaggggctgatccctcgggccctgcggcacctcttctctgtggctcaggagctgagtggtcagggctggacctacagctttgtagcaagctacgtagagatc

SEQ ID NO: 10043 - DNA, 120 bp, synthetic construct
  source 1..120: mol_type = other DNA
gctacagatttctggggagcactccagccgaggcctgcagtgtggggcccccctcagtcttgtggacctggccgggagtgagcgacttgaccccggcttagccctcggccccggggagcg

SEQ ID NO: 10044 - DNA, 120 bp, synthetic construct
  source 1..120: mol_type = other DNA
aaaataggaaaattagctgggtgtaatggctcacacctgtagttccagctactcaggaggctgaggtgggaggatcacctgaacctgggaggtggaggctgcagtgagccgtgatcctac

SEQ ID NO: 10045 - DNA, 120 bp, synthetic construct
  source 1..120: mol_type = other DNA
ggatccaggcaagggccacccacttggttgaaatgtctcaagttccacaaccctatcccacactgccactattatgtcgtttgttgaaggtcatttgtcctatagaatatactattctgg

SEQ ID NO: 10046 - DNA, 120 bp, synthetic construct
  source 1..120: mol_type = other DNA
caacaacaacaaaaaaaagagcctccttcagattggtgccagtgtcctttagacagaactctagtagtcttttcagattcaacttgtacatttccttccccagacttcaactgatccatt

SEQ ID NO: 10047 - DNA, 120 bp, synthetic construct
  source 1..120: mol_type = other DNA
aggtgtgccctctagctatccacgccccctccttggtcactagttataggtaactttcacccttccgccggccaccccagccccagggaagaacgttcctttggtgggtgtcggcaaatg

SEQ ID NO: 10048 - DNA, 120 bp, synthetic construct
  source 1..120: mol_type = other DNA
tgcgtcatacgccccagagccgccgggacggaggggctgggcctggggaccccccggcctccgcctgcacgcccccccacgcccggacgtgccctctccgcgcgggggactcgcctaggt

SEQ ID NO: 10049 - DNA, 120 bp, synthetic construct
  source 1..120: mol_type = other DNA
ttggccaacatggccaacacctcatctctactaaaaatacaaaaattagccaggcatggtggcatgcgcctgtaatcccacctacttgggagactgaggcaggagaattgcctgaacccg

SEQ ID NO: 10050 - DNA, 120 bp, synthetic construct
  source 1..120: mol_type = other DNA
tctggccaggctgcttagccttatcttagtcctcatccgctttcagcccagggagaagcagccatggaaaggggtggtataacctttgcaggcagaagatggtttaaatgcatccttttc

SEQ ID NO: 10051 - DNA, 120 bp, synthetic construct
  source 1..120: mol_type = other DNA
tgcttgtgagtcttccaggggatggcacagttttcctgtgtaagtgtgtttgctccctcttgcccatgtccaggttctatgaatttgaatgctgtgtgtgtcgcgggggccctgagaaag

SEQ ID NO: 10052 - DNA, 120 bp, synthetic construct
  source 1..120: mol_type = other DNA
gtatagagatggggaggtcttgggggtgtccgggagggggctggggggataaggaggcctcttacagcttcccttcagggcagggccctgggggaggggtctcacgtcccctggggaagc

SEQ ID NO: 10053 - DNA, 120 bp, synthetic construct
  source 1..120: mol_type = other DNA
ctccatttctgcccatttcttacaattgccttctctccctaggtcacccctggaacttcacattggtttccccacagacatccctaaaagtgccccccactcgatgactgcctcatcttc

SEQ ID NO: 10054 - DNA, 120 bp, synthetic construct
  source 1..120: mol_type = other DNA
tgacctggcgcacccactgcaggtacggaaagttcccctgttccacaggcaatgcaattacctcggccacttcgtaagggtgcacagaactacaaaataggtgggtgggggaaggggatc

SEQ ID NO: 10055 - DNA, 120 bp, synthetic construct
  source 1..120: mol_type = other DNA
cacaggcagcagcgccggcatccaaacaaaagacaggagcagagaggcctgagagcaggaggcgaattcgatctctcctcacaaacagcccaggaaattacacccggggaagccttcgct

SEQ ID NO: 10056 - DNA, 120 bp, synthetic construct
  source 1..120: mol_type = other DNA
agtgggagggtctgagaaggacccttcaccccaaactcaggggttaagagagcgccccctgcccttttagttgggcagagatatgcctgggtttgggaatgaacaacggtgatctagaag

SEQ ID NO: 10057 - DNA, 120 bp, synthetic construct
  source 1..120: mol_type = other DNA
tatcagtctctgagatctgagtctggggtctctttctaggtctgagttctctaagctctaattctacatctggctctttctgaatctgggcctcatctttttctgagtctaggtctcagg

SEQ ID NO: 10058 - DNA, 120 bp, synthetic construct
  source 1..120: mol_type = other DNA
ggaggccagagggataggggtagataagggatggaggggccaggaaatgggccttgaaagggggctgaagggaaaatgatgaaggggaaagaaagcgccagaaaggggtgggaaggtaga

SEQ ID NO: 10059 - DNA, 120 bp, synthetic construct
  source 1..120: mol_type = other DNA
tccttttctatctactcctattatttgtctcccagaccattccttgtcaccacaagtctgtgcctacccactttcccttaatacctcaactcttattatcatttctcttttcttgtctcc

SEQ ID NO: 10060 - DNA, 120 bp, synthetic construct
  source 1..120: mol_type = other DNA
cctggtctcatctcagccataggcgacacttggtctactgttctctcttctcaaagttttgttcccatctccagctcttgtctttggaggcccctctgtgtcaccaggcctggatattcc

SEQ ID NO: 10061 - DNA, 120 bp, synthetic construct
  source 1..120: mol_type = other DNA
tttcccctttgtataaatgcttgtcttgtgttcctttagagttgccaggtgtctcactttcaactgtgatctcctgaaggccggtagggtccccttctcactttgtggactctcttcttg

SEQ ID NO: 10062 - DNA, 120 bp, synthetic construct
  source 1..120: mol_type = other DNA
gagtatgtggagttatctaaaggagtacaagtggagtaggggcagggactagccagagtaaaggagatgaaacggacagaggcctcttatgggaggtggtggccaggtatggagatctga

SEQ ID NO: 10063 - DNA, 120 bp, synthetic construct
  source 1..120: mol_type = other DNA
gaggtggacagggggagctgggtgtgaagcttagggaaaggtgatggctgaggggaagaagggaactgagagatgctgggtcgggtgatggaaggagatgaaaggtgggggaaggtgacc

SEQ ID NO: 10064 - DNA, 120 bp, synthetic construct
  source 1..120: mol_type = other DNA
ttcgctccctttctcctctccagcagtgaagtttgactattttcctggtgcttgtaaaaatagtctccttagatctttagcttccagtccgtgtgttcctgcccctgcccctcccagccc

SEQ ID NO: 10065 - DNA, 120 bp, synthetic construct
  source 1..120: mol_type = other DNA
aaccccataccatcggggtgtgtgggtagcacatctctgtgaggcaaagtcaggtggtggtggagtgtatacagagaatgtgtgtgatgtctgtcacatctgtgtgtatatgtatatgtg

SEQ ID NO: 10066 - DNA, 120 bp, synthetic construct
  source 1..120: mol_type = other DNA
ccgtcccggccgtcccgggccccgccgccgcccccaccgcgccgggcggcgcgagccgggccgtaccgccccctctccctccgcaccccgcccttcccccgcgcaggggcggggcccctc

SEQ ID NO: 10067 - DNA, 120 bp, synthetic construct
  source 1..120: mol_type = other DNA
tggaattctactgtgtatgaaacacctttgggctgggcaggtgtaagccctgcttggtcagtaagtggggacagaaaagcttaaaaagggaagaaatggggtaaagaggaaaagtgggga

SEQ ID NO: 10068 - DNA, 120 bp, synthetic construct
  source 1..120: mol_type = other DNA
ctgcatgcagcattaataacaggatgttctgtgtttctgtcactctgccccccctttcctctgtgtttctgctattcttttcctgcggcaacaaaagtgtttaataagcatatgtgtatg

SEQ ID NO: 10069 - DNA, 120 bp, synthetic construct
  source 1..120: mol_type = other DNA
gtctcagaatgtggatccgtgctatgcccgtgctcacagttgtctgtatgtctcaaaagcacatagatccccagttatttttctgtattgtggttctcatatacacgtacctccatagct

SEQ ID NO: 10070 - DNA, 120 bp, synthetic construct
  source 1..120: mol_type = other DNA
ggggttccaggaggtggggggcaggtggaagatgtgcccaccagggggaagaggaaagcctgcctatgggcaatgacctttaacccatctttccccccagctagccccttctggggtggg

SEQ ID NO: 10071 - DNA, 120 bp, synthetic construct
  source 1..120: mol_type = other DNA
cctgccccaacccaccccatccccatttcccccccagcaaggcttcctgagccgacggctaaaaagctccatcaaacgaacgaagtcacaacccaaacttgaccggaccagcagctttcg

SEQ ID NO: 10072 - DNA, 120 bp, synthetic construct
  source 1..120: mol_type = other DNA
agtgagtcacacctttccctgcccccctcccatgttgccagagctggatttggggccggcagggggtgagggcatggtattcctggccgcgggggcgggggggggggtccgggggccggg

SEQ ID NO: 10073 - DNA, 120 bp, synthetic construct
  source 1..120: mol_type = other DNA
agaaatagggtctcactgtgttgcccagactggtcttgaactcctgggctcaagtgaccctcccacctcggcctttgaaatgttgggattacaggtgtgagccaccaggcccaggtggag

SEQ ID NO: 10074 - DNA, 120 bp, synthetic construct
  source 1..120: mol_type = other DNA
ttccctcaactccacactcctttctaggtaacaacttcatcaggaacaaaatgctttgcctgtcggtctgcggccgaaagagacaaatggattgagaatctgcagcgggcagtaaagccc

SEQ ID NO: 10075 - DNA, 120 bp, synthetic construct
  source 1..120: mol_type = other DNA
cacatctggccaagctttacccattctatatgcaattcttttttcacaatttctgatagtctctgcaggactttccagttcccttcaaattctacattaatatttttggcttgttattcc

SEQ ID NO: 10076 - DNA, 120 bp, synthetic construct
  source 1..120: mol_type = other DNA
ttttggtgggatactattcaacccagtacaccgtctcaccttatgattgctgtctgtatcccactttcttactgtctctcctcttttggtgtctctctgtcccttccccctttaacatca

SEQ ID NO: 10077 - DNA, 120 bp, synthetic construct
  source 1..120: mol_type = other DNA
gagaacacgcttgccactaaagccatagaagagtatatgagactgattggtcagaaatacctcaaggatgccattggtatggcccacactcaggccctcttcttcccaaacctgccagat

SEQ ID NO: 10078 - DNA, 120 bp, synthetic construct
  source 1..120: mol_type = other DNA
atgtctgggcaggaagattagctttagaaactggaaggcctcaaggagtctgaggtcattggtaggccttgggatgccattaaaggtgtcagaaatattgtgatttagaagattaatcca

SEQ ID NO: 10079 - DNA, 120 bp, synthetic construct
  source 1..120: mol_type = other DNA
tgtttttcttctcctcctctccttgtctctctcccacacccctccatctctctcccacgtgtctctcccctcaccttctctccccctccatttctctctccctaatctgtctgttccctc

SEQ ID NO: 10080 - DNA, 120 bp, synthetic construct
  source 1..120: mol_type = other DNA
cagcaaggtcagcagatcccctctttgccctatccccagatggctccagaggttcctggagcctgagaaactaccctttgaagattttttttctccccttgtttctcgaggtgtcaccac

SEQ ID NO: 10081 - DNA, 120 bp, synthetic construct
  source 1..120: mol_type = other DNA
ttttcctctgcccgtgtcttcctccatgacaccatacccatcccaccattcccgcctctcctttcatttgtccacatctctctccttctctgtctgtgctcgcccctctttccatctctc

SEQ ID NO: 10082 - DNA, 120 bp, synthetic construct
  source 1..120: mol_type = other DNA
cacagacggtgtccctgcccagcaactgcgaatccccctctccttccagaaccctctcttccacatggctgctgatgggccaggtcccccaggcggccatggagggggcggtggccatgg

SEQ ID NO: 10083 - DNA, 120 bp, synthetic construct
  source 1..120: mol_type = other DNA
agatcctgaatcagaacaacaggagaaattctctggcattcaactcacatctctggcattcagaggtgataaaggctacagcagggcaataggactgggactgtcgtctcctttggctgt

SEQ ID NO: 10084 - DNA, 120 bp, synthetic construct
  source 1..120: mol_type = other DNA
cagataacttagcagaaagttacttgaggaagctgttgttcctagggcctgaggaagagggcggctgcaggattaggtcatatataaagaacatatgatcctaacacggggaagtggtct

SEQ ID NO: 10085 - DNA, 120 bp, synthetic construct
  source 1..120: mol_type = other DNA
accctatttttaatttctgagcacagttactcaaggtgtgtttgtgagtgtaggtttctgtgtgggtcttcatgaggggccatacatagacctcagggtgtgggagtctgtgaccttgct

SEQ ID NO: 10086 - DNA, 120 bp, synthetic construct
  source 1..120: mol_type = other DNA
ggaaaggtgttctgttagaaagggtcttttagcctgtgtatgttttcagctgctccagcaagtcctgggctccaaagagggtatcctcagcaaagaggtcaattatcttcagagtggtgg

SEQ ID NO: 10087 - DNA, 120 bp, synthetic construct
  source 1..120: mol_type = other DNA
tggcagcgtcagcccaactcctgtgccttcccatccagtcttcccactcctctctgcatctcaggaccttctctaccagaaccttggtctttctgcccctagaccccacctagttccaag

SEQ ID NO: 10088 - DNA, 120 bp, synthetic construct
  source 1..120: mol_type = other DNA
attcacaggtcacacccacttccctgcaaaacccaccccctcccagcctcctcctgactctaagccctcctcttcctctacctctccagtgtatgtctgtcaccccccatttcaccagag

SEQ ID NO: 10089 - DNA, 120 bp, synthetic construct
  source 1..120: mol_type = other DNA
ttccctgctctcccgccatactcaggataccctaccataagtgatttcctctcactgacttgcagaaaatgtgtgagatacccagcaagctaagaaggcagttttgctgggtatctcata

SEQ ID NO: 10090 - DNA, 120 bp, synthetic construct
  source 1..120: mol_type = other DNA
gaagatggccactgtgaataagtgacaaacggaatgacagtgtctatttaatgaaatgcatgtcttcaaaatatatacagaactcgatgaacaaggctttttccactcctcagggagcat

SEQ ID NO: 10091 - DNA, 120 bp, synthetic construct
  source 1..120: mol_type = other DNA
accaccaggattggacatcaccgaggaacagcgggattgcctccccgaatgcctccctgggaggcacactgattgcccacccccaccactgcaccatttccaggagggagagtggggacc

SEQ ID NO: 10092 - DNA, 120 bp, synthetic construct
  source 1..120: mol_type = other DNA
tgggcttccctctcatcctccccctcccaatctccttccacctccctccctcccgccagctccacgatttttcggtgtttctctgtacatagttttctggcgggataggggaggtaggat

SEQ ID NO: 10093 - DNA, 120 bp, synthetic construct
  source 1..120: mol_type = other DNA
ataaggtttctttaattgctggttaaaatgctcccgtgcagaaaacaggaaagaacctgcctggttccttagcaaatctgagttccagtcccaggtccactactattagctgagtgacgc

SEQ ID NO: 10094 - DNA, 120 bp, synthetic construct
  source 1..120: mol_type = other DNA
tttgagaagatgtggctccctttatccagggcttctgtgacctccatctttttcctctgcagccttcatcccgcgtggagtctacccccaagcccttctcctcttcccaattcttgtcac

SEQ ID NO: 10095 - DNA, 120 bp, synthetic construct
  source 1..120: mol_type = other DNA
tgcactgccccccaaaatcttctacattaagcaggaacccttcgagcctaaggaggagatatcaggaagcggaactcagcctggaggagcaaaggaggaaaccaaagtgttttctggagg

SEQ ID NO: 10096 - DNA, 120 bp, synthetic construct
  source 1..120: mol_type = other DNA
ctaagctctaagcttttttctctcattgctggaatgatttaagcagaagtccttttgtgtacttttaaaattgtatctttccaggagcccctcagattgtaccttgctttctcaccaata

SEQ ID NO: 10097 - DNA, 120 bp, synthetic construct
  source 1..120: mol_type = other DNA
actgcacctggcctgccttacgttttaaaatctgaactagtactttttttggtagagtggtgtggaacacctaactggttctgttttcctttttaaaagaggttggttcacttatctttt

SEQ ID NO: 10098 - DNA, 120 bp, synthetic construct
  source 1..120: mol_type = other DNA
ccttccccaaagtttgtttctgaaagttatgaggtatggcactcagaagggtctgaaaaatgtgactgtggctaagaaggtaaattctagctgggatttgacagtgtctcaaaagagcca

SEQ ID NO: 10099 - DNA, 120 bp, synthetic construct
  source 1..120: mol_type = other DNA
aagattttggtttaaacaaataaacttgttacctctctgcctctgtccttcagaagatgcagtggaggagatgtccaatctagtgtcaaaggatagccccattcccagagcctttgctct

SEQ ID NO: 10100 - DNA, 120 bp, synthetic construct
  source 1..120: mol_type = other DNA
catacaccacatattctcactcataggtgggaattgaacaatgagaacacatggacacaggaaggggaaaatcacactctggggactgttgtggggtggggggacgggggagggatagca

SEQ ID NO: 10101 - DNA, 120 bp, synthetic construct
  source 1..120: mol_type = other DNA
agttttactgggccccaaacccacttggattttttccttctttcctttctttttcaacaagtgcctgctgtataccagacactgaagaaaaaagcagaaggcatcataggggcttggact

SEQ ID NO: 10102 - DNA, 120 bp, synthetic construct
  source 1..120: mol_type = other DNA
ggatagccctgctctgtctatggagcagccattaaagtaaaaaataaaagttgagaaaaaaacatacttgccaactacctactgttactcatgtgtgggcactgctctaggcacaatgat

SEQ ID NO: 10103 - DNA, 120 bp, synthetic construct
  source 1..120: mol_type = other DNA
caaaaaagatctgtaaagttttggcttgaggaattgaattagaggtcatttaatgagtggaagacaggaataaaagaacttgggaatggatcaagagttttgtataggctaggcacagtg

SEQ ID NO: 10104 - DNA, 120 bp, synthetic construct
  source 1..120: mol_type = other DNA
ttttacatattttgtctttgaaaatgtctttacaaaggcaggtattgccaaatactgatatcaatccaagaccatctggttttgattgggtatattcattacttggaaggctttatataa

SEQ ID NO: 10105 - DNA, 120 bp, synthetic construct
  source 1..120: mol_type = other DNA
caatgtgatagaaaagaaaaacccattttctcaagagaaattcaagcctgctgcagaaatttgcataagtagcaaggagcctaatgttaatcccaagactgtggggaaactatctccagg

SEQ ID NO: 10106 - DNA, 120 bp, synthetic construct
  source 1..120: mol_type = other DNA
catgggggctggtctttcctgtcctattcttgtgatagtgaataagtctcacaagatctgatgggtttatcaggggtttccgcttttgcatcttcctcattttctcttgccaccgccatg

SEQ ID NO: 10107 - DNA, 120 bp, synthetic construct
  source 1..120: mol_type = other DNA
acaataagcacctttttaccttgtaattttagattaaattcatcaaggccaggggcagcagctcactcctgtaatcctaggattttgggaggccaaggcaggcagattgtctgagctcag

SEQ ID NO: 10108 - DNA, 120 bp, synthetic construct
  source 1..120: mol_type = other DNA
acacctctttgccaccactatgtcaatgaactgctgtatggtaggacaagtcaggatattcaacttctatttgtaacaaaaactgttttagttcagtcagctacaacaaattaacacaga

SEQ ID NO: 10109 - DNA, 120 bp, synthetic construct
  source 1..120: mol_type = other DNA
ctggacacatttctttggcttctgcatcacatgatttaattaactcattattgataaatggctttccttgcttggctacaaatgaactatgtggaaacttactctctgattgtagcttta

SEQ ID NO: 10110 - DNA, 120 bp, synthetic construct
  source 1..120: mol_type = other DNA
gtaattccagcactttgggagaccgaggtaggaagatagcttgagcccagtagttcgagaccaggctgggcaacatggcagaaacccatctctataaaaaatacaaaaattagccatgca

SEQ ID NO: 10111 - DNA, 120 bp, synthetic construct
  source 1..120: mol_type = other DNA
acttggatcatagtgttaaaaaaaaatggtctcgatctctttttaacatgacatttatgagacaactgtagactcaaccactgactgaacatttgatgatattagggagttcttattttt

SEQ ID NO: 10112 - DNA, 120 bp, synthetic construct
  source 1..120: mol_type = other DNA
ccgaggcaggagaatgacgtgaacccgggaggcggagcttgcagtgagctgagatcccgccactgcactccagcctgggtgacagaagaagactccgtctcaaaaaaaaaaggcctatac

SEQ ID NO: 10113 - DNA, 120 bp, synthetic construct
  source 1..120: mol_type = other DNA
gtgcgcccctgtggccccagctactcaggaggtgagaggatcacttgagtccaggaggtgaaagctgcagtgagccatgattgtgccactgcactccaccctgggcaacagagcaagacc

SEQ ID NO: 10114 - DNA, 120 bp, synthetic construct
  source 1..120: mol_type = other DNA
actcctgacctcaggtgatccacctgcctcagcctcccaaaatgctgggatttcaggcatgagccactgcagccggccaggaaccagtatttttagtacaagagaaatgatacaattata

SEQ ID NO: 10115 - DNA, 120 bp, synthetic construct
  source 1..120: mol_type = other DNA
cctaatgtccatgctgtgctctctaataccattccacattaaaacaagatgtggctcattgggaaactgttgatttcaggtctagtgcaggcacttttcaaggtgagcctgggactcctt

SEQ ID NO: 10116 - DNA, 120 bp, synthetic construct
  source 1..120: mol_type = other DNA
agccgagatcgccccattgcattccagcctgggtgacagagccagaacctgtctcaacaagaaaaaaaaaaagcatttattttgctctttcagtaaaaatttattttaggataaccaaat

SEQ ID NO: 10117 - DNA, 120 bp, synthetic construct
  source 1..120: mol_type = other DNA
aaaaaatgataatgtattcccagcacatctaaaaaccccaaccattttctatatatacgtatatatataagatttttctgcttaatataaagcctttaaaacaccaatagcataattgtt

SEQ ID NO: 10118 - DNA, 120 bp, synthetic construct
  source 1..120: mol_type = other DNA
atgccccagactgtgggtcttaaacagcagagatttattttcccacagtcctggaggccggacgttcagtattgaggtcccagcaggtttggcttcttctgaggtctctctccttggctt

SEQ ID NO: 10119 - DNA, 120 bp, synthetic construct
  source 1..120: mol_type = other DNA
ctttagtgttttcagttcacctgctttcctcacagtgttcacttcagttgtttcattttgtaatgtggcgaactgacacagaaaatgcataacattagtctgtctatcttttcacccata

SEQ ID NO: 10120 - DNA, 120 bp, synthetic construct
  source 1..120: mol_type = other DNA
ctgagatctatttatttaacaaataataaattcttagccgggtgtggtggctcacacctgtaatcccagcactttgggaggccaaggagggtggatcacctgaggtcaggagtttgagac

SEQ ID NO: 10121 - DNA, 80 bp, synthetic construct
  source 1..80: mol_type = other DNA
atgatgaatcaaggcaaaaacaaggccactgcataattgtaactgaacatagacaaagcacgaacattgtccaaatcgca

SEQ ID NO: 10122 - DNA, 80 bp, synthetic construct
  source 1..80: mol_type = other DNA
cgacatcctaacactccgttcaagtcatgccgtcctctctcagatactcttaacagattttgcaggatttctcataagta

SEQ ID NO: 10123 - DNA, 80 bp, synthetic construct
  source 1..80: mol_type = other DNA
ctgaggagtgcgggcgcagggcgcgggactggcaggcagctcggcctgcggccgtggtgcggcatccactggctgaagcc

SEQ ID NO: 10124 - DNA, 80 bp, synthetic construct
  source 1..80: mol_type = other DNA
ttttggctcccccatctgatgagagctacttccacttaataaaaccttgcacttattctccatgcccacgtgtgatccga

SEQ ID NO: 10125 - DNA, 80 bp, synthetic construct
  source 1..80: mol_type = other DNA
ccttacgtctgagctaaataatttccagcatttgtctttcttgctactataataaaaagtcacacggaaatcaccatgtg

SEQ ID NO: 10126 - DNA, 80 bp, synthetic construct
  source 1..80: mol_type = other DNA
ctgagctgagctttgtctctacctcacctcatgaccttccctaaaattaatattagtggacaaccatattggccttatgc

SEQ ID NO: 10127 - DNA, 80 bp, synthetic construct
  source 1..80: mol_type = other DNA
cattctctgcctcttgaaactaaagtctgggtggggttgagttcttatgaactctcttgaaagacaagcttttagttatc

SEQ ID NO: 10128 - DNA, 80 bp, synthetic construct
  source 1..80: mol_type = other DNA
gcccttcacccatccttctttggagccttagttccctgttatctccttccaggaattttgctttcatcccttagctatct

SEQ ID NO: 10129 - DNA, 80 bp, synthetic construct
  source 1..80: mol_type = other DNA
gatctacacatttgatcagcataccttttgtgtcttccaccaaatacattaaagtttataggatagaaagaagccaagtg

SEQ ID NO: 10130 - DNA, 80 bp, synthetic construct
  source 1..80: mol_type = other DNA
cttactggagaagaaagaagcaaaggatgtgttaaagagagtagctttttatcattgtcaaggcgtaacactctatcatt

SEQ ID NO: 10131 - DNA, 80 bp, synthetic construct
  source 1..80: mol_type = other DNA
ctacatctgaaaaagcttgttaccacagcccccacccttgcacacatacccatactcactgaattattccgaactaaatt

SEQ ID NO: 10132 - DNA, 80 bp, synthetic construct
  source 1..80: mol_type = other DNA
gatccattaaagcaggagtaataggaacaccatctaggggagtgcacattatttctctcaccacctccccaccccagcct

SEQ ID NO: 10133 - DNA, 80 bp, synthetic construct
  source 1..80: mol_type = other DNA
actgccactcactaactacgtgaccttgggcagaaaacttattctcataagaatacgacctcaaggaaaaattggagtct

SEQ ID NO: 10134 - DNA, 80 bp, synthetic construct
  source 1..80: mol_type = other DNA
gcatcgctggctctttttagggggaaagatatcagataggtgtttagagtttccagtggcaatagggtaaaggaaaaact

SEQ ID NO: 10135 - DNA, 80 bp, synthetic construct
  source 1..80: mol_type = other DNA
ggaaaattaaacccagtgagacttcaagaattaaacctcacttagacttcagttacaaggaggtggaggcaggattttgt

SEQ ID NO: 10136 - DNA, 80 bp, synthetic construct
  source 1..80: mol_type = other DNA
cggggctccaggcctgcattcatcaattcatatagtctaaaattttagccaagactactgagaggtcattggaaactgtt

SEQ ID NO: 10137 - DNA, 80 bp, synthetic construct
  source 1..80: mol_type = other DNA
actatttcccctcctcgagccagtttcctcctaactctttttgagagatcctagatggccggcccattctttgatttatt

SEQ ID NO: 10138 - DNA, 80 bp, synthetic construct
  source 1..80: mol_type = other DNA
agacacagctcagcaacaaccccttgaagaggaggaaaaaacgaatgtggaagttttaaggatggataaaatcagagagt

SEQ ID NO: 10139 - DNA, 80 bp, synthetic construct
  source 1..80: mol_type = other DNA
taaaaacctgcatagaaaaatatctttttcctcaagagtaagaagtgagtagctacaacctagtatgctggtgataaaat

SEQ ID NO: 10140 - DNA, 80 bp, synthetic construct
  source 1..80: mol_type = other DNA
gaaagataagcaactaagatatcctaaaaatagttcagcaatttaaaaccctcccttctcagagagtccagacaggaggc

SEQ ID NO: 10141 - DNA, 80 bp, synthetic construct
  source 1..80: mol_type = other DNA
tcgtcaacgtggccacctactgtggtctgacagcgcaatatcctggtaagagaattcatagttacttctctttgggacta

SEQ ID NO: 10142 - DNA, 80 bp, synthetic construct
  source 1..80: mol_type = other DNA
ggtttccaccttcttcccctcccttcagtagaccaatattatcttgtttacagaatacatagatattcttgtttctgctc

SEQ ID NO: 10143 - DNA, 80 bp, synthetic construct
  source 1..80: mol_type = other DNA
aacttttgaataataaagaagactaagccccatttcagaggaacagaaaactctctgaaatgggacctgggcatccctat

SEQ ID NO: 10144 - DNA, 80 bp, synthetic construct
  source 1..80: mol_type = other DNA
ggattggtctttgtggagaaaaatctccagatcagcattccacattgcacatgctgatctggagattaatctgtgagtat

SEQ ID NO: 10145 - DNA, 80 bp, synthetic construct
  source 1..80: mol_type = other DNA
cgtctaacttataggacttccctttattcacaaattatgacccacacgcagtttattcttccaatggtctttttaaatta

SEQ ID NO: 10146 - DNA, 80 bp, synthetic construct
  source 1..80: mol_type = other DNA
tcccactctccacaaactagatttatatttggaaggctactgctcttttgcctctcaagagtatgtgggtgaagactgaa

SEQ ID NO: 10147 - DNA, 80 bp, synthetic construct
  source 1..80: mol_type = other DNA
gggccatactagctctagacatgcacaaggggtaggccggtggcattttgtgcttgcactgcaccccagtttttccctct

SEQ ID NO: 10148 - DNA, 80 bp, synthetic construct
  source 1..80: mol_type = other DNA
tctcaacatggagacatctggtttgatgtattagaatatccaaatctccaaattttccaggacccccaaaacttttagaa

SEQ ID NO: 10149 - DNA, 80 bp, synthetic construct
  source 1..80: mol_type = other DNA
ggcatttcatgtaaagcagcaaatagtgtagccgaacgcagagtggagagacaggaagtagaatggcgaaaatgaaaagc

SEQ ID NO: 10150 - DNA, 80 bp, synthetic construct
  source 1..80: mol_type = other DNA
agagctggtctcttgagcccggaggtcaagaccaggcatgggcaacatgatgaaaccttgtctctacaaaaaaatgcaat

SEQ ID NO: 10151 - DNA, 80 bp, synthetic construct
  source 1..80: mol_type = other DNA
acaagcatgcgccaccatgcatggctaatgtttgtatttttatagtagtagagtcagggtttcgccatattgcccaggct

SEQ ID NO: 10152 - DNA, 80 bp, synthetic construct
  source 1..80: mol_type = other DNA
ttcttttggtaggtgtgctgatttgccttgtcacccgtgacaaggagaaaagggtttgatatccatattgagagacattt

SEQ ID NO: 10153 - DNA, 80 bp, synthetic construct
  source 1..80: mol_type = other DNA
gcacagctgtgaataattttttataaccaataaaccctgaatttagaattatgatgaaattaagtaggaaggatgaggga

SEQ ID NO: 10154 - DNA, 80 bp, synthetic construct
  source 1..80: mol_type = other DNA
gctattccttcttgaatcgtacttaatagtcatgtcgtcctaataatttctccatttcataaaagtattcaaatgtattt

SEQ ID NO: 10155 - DNA, 80 bp, synthetic construct
  source 1..80: mol_type = other DNA
gaaattaattggatgctataattttgtggtgtgggaggttgtgcagtcttgttttagagtgaaaaagggagaatcaacca

SEQ ID NO: 10156 - DNA, 80 bp, synthetic construct
  source 1..80: mol_type = other DNA
acctcccactagtgatgtgccggtgggaaacacacaggaaggaaaggcgcgcgcgaggcctgcccccggaacgaacgacg

SEQ ID NO: 10157 - DNA, 80 bp, synthetic construct
  source 1..80: mol_type = other DNA
tcttcaaaacaatccagggagaataatttcaattggatacaaacttttccaaacgtagtgacagagggaagacttttcac

SEQ ID NO: 10158 - DNA, 80 bp, synthetic construct
  source 1..80: mol_type = other DNA
attattatagtggttatatcagcatgagaatgagagagatatactatagagtggggtaaatggagtttctaaaataatgg

SEQ ID NO: 10159 - DNA, 80 bp, synthetic construct
  source 1..80: mol_type = other DNA
tccaatccatggacatgaaatatcttttcatgtatttgtgtcttcaccaattaatttcatcaatgtcaatagttggttaa

SEQ ID NO: 10160 - DNA, 80 bp, synthetic construct
  source 1..80: mol_type = other DNA
atcccactactgggtatctacccagaggaaagtaagtcattatatgaataagacacttgcatacacatgtttatagccac

SEQ ID NO: 10161 - DNA, 80 bp, synthetic construct
  source 1..80: mol_type = other DNA
tgcactccagggataaattccacttgatcatggcgcatgatccttttaatgtactgttggattcagtttgctactatttt

SEQ ID NO: 10162 - DNA, 80 bp, synthetic construct
  source 1..80: mol_type = other DNA
agataaagagataaacagggtgtgatctgaaagggtccagagcacaagagctttccttcccatgaagttgggatgtgcta

SEQ ID NO: 10163 - DNA, 80 bp, synthetic construct
  source 1..80: mol_type = other DNA
ttatttagatgatactttggagttttgtgttggtgctggaaggagttaagatcttagagctattgggatggagtgaatgt

SEQ ID NO: 10164 - DNA, 80 bp, synthetic construct
  source 1..80: mol_type = other DNA
gtgaaatcatgtttgactaattcttcacgatctgtgtggcattgcattggtgtctgtgtatttgaaggaagaaaaacttc

SEQ ID NO: 10165 - DNA, 80 bp, synthetic construct
  source 1..80: mol_type = other DNA
tcccgctctagcaataaatatattgattataagcaaacaaagttataaagatgaatctgggtttatgagaaaagagatga

SEQ ID NO: 10166 - DNA, 80 bp, synthetic construct
  source 1..80: mol_type = other DNA
atatgaccactgaccttctgaaaaggcaaaactacagagatagttaaatgattcttgattgccaggagtttgtggggagg

SEQ ID NO: 10167 - DNA, 80 bp, synthetic construct
  source 1..80: mol_type = other DNA
ttttctgtacattatgtccaatgcaataccatgaacttttgcgcagaacgaacctgttacttcattttccctaactgcca

SEQ ID NO: 10168 - DNA, 80 bp, synthetic construct
  source 1..80: mol_type = other DNA
gagtgaaatgaaagaaagtagctcatgaaagagagttgtcttgctgatatgccacccccttttcagatgaaacacacagg

SEQ ID NO: 10169 - DNA, 80 bp, synthetic construct
  source 1..80: mol_type = other DNA
acctgcctcggcctcacaaagtgctgggattacacatgctgggctaatttttaaattttttgttgatacagagtctcact

SEQ ID NO: 10170 - DNA, 80 bp, synthetic construct
  source 1..80: mol_type = other DNA
gcccagatcctacaggatgttaggattttctttacaaagactcttcttgactcagatctttttataatactctagaatca

SEQ ID NO: 10171 - DNA, 80 bp, synthetic construct
  source 1..80: mol_type = other DNA
tactattaaaccatagttggcccaagaagtacagcagctgggcaaagccatgcaaacacagtgagctcagagatgctcaa

SEQ ID NO: 10172 - DNA, 80 bp, synthetic construct
  source 1..80: mol_type = other DNA
cttgtttgcttcttccatcacgtgaggacacataggaagtgtcatctgtgaggaacaggctctcaccacacaccaaatct

SEQ ID NO: 10173 - DNA, 80 bp, synthetic construct
  source 1..80: mol_type = other DNA
ccccttcctctctgagccatactcttatacactgcattgaaaataccttcttatcagcttccttcaaaaggctgagagtt

SEQ ID NO: 10174 - DNA, 80 bp, synthetic construct
  source 1..80: mol_type = other DNA
catgcatgtctctcatttcgtggctaccattaaattattacttcccagctgtcttctgacttcttaccattttcttctct

SEQ ID NO: 10175 - DNA, 80 bp, synthetic construct
  source 1..80: mol_type = other DNA
caaagaaaattttcttctcctttaaaaaatgaaagatcagtatttatgtcaagggtttagacagtatacttttcctaacc

SEQ ID NO: 10176 - DNA, 80 bp, synthetic construct
  source 1..80: mol_type = other DNA
atccatcacttaatgattttgcaaactactatctcagtcttgatttgcactgttgtcatttttgggaaataacttttcag

SEQ ID NO: 10177 - DNA, 80 bp, synthetic construct
  source 1..80: mol_type = other DNA
ttcttatcctttatcttgacaattacttctccctgttctctccttaggagcagatattggaacactttggtttctccttg

SEQ ID NO: 10178 - DNA, 80 bp, synthetic construct
  source 1..80: mol_type = other DNA
gctcctcacaatgcatgtaaataagagtggatttgaaagattgtagggcatgcacatcttcaactttaccagataatgtc

SEQ ID NO: 10179 - DNA, 80 bp, synthetic construct
  source 1..80: mol_type = other DNA
ttctaaatggaccatcaattttttctcttcctcactgaggagcaaacttctgttatataccaagtttccttatacccaca

SEQ ID NO: 10180 - DNA, 80 bp, synthetic construct
  source 1..80: mol_type = other DNA
tctactggtattttcaatacaattgctaactggcacctttataatatggagcctttcagatatgtctgtagcaggacaag

SEQ ID NO: 10181 - DNA, 80 bp, synthetic construct
  source 1..80: mol_type = other DNA
gcatttaaatcctaaaataaagcacatcattatttcagcataaactcttaaaagtcatgcaatccagccgggcatggtgg

SEQ ID NO: 10182 - DNA, 80 bp, synthetic construct
  source 1..80: mol_type = other DNA
tcaccagcagagctgaaggagaagtggtctttcatccaggtggctggggtaatatagaggaatctgggtataaggttgca

SEQ ID NO: 10183 - DNA, 80 bp, synthetic construct
  source 1..80: mol_type = other DNA
ttatagacatgtgaacttgctgcaaaacaagcagaaaataggaagagaaaatcaggttatctacagaatcactagtcatc

SEQ ID NO: 10184 - DNA, 80 bp, synthetic construct
  source 1..80: mol_type = other DNA
accctgtctaggaaaagatattttcttcatggattctgtcatgttttgatgctaaagaacctgttttatcggactaattt

SEQ ID NO: 10185 - DNA, 80 bp, synthetic construct
  source 1..80: mol_type = other DNA
aataaatacgacaaatatgaggaaaaatagaattataaaaactgtacacattcttaattgaaaatatacatataggcaat

SEQ ID NO: 10186 - DNA, 80 bp, synthetic construct
  source 1..80: mol_type = other DNA
ttgcagaaacactaagagttcatttcgtatttcaaacattcttgacagaacttttccccgtgataaccaccgtatctcag

SEQ ID NO: 10187 - DNA, 80 bp, synthetic construct
  source 1..80: mol_type = other DNA
taagttttgatggtttcattgcttcattagccagtacatctccacaaataatacactgtggttttagtacttcaccatca

SEQ ID NO: 10188 - DNA, 80 bp, synthetic construct
  source 1..80: mol_type = other DNA
ttacccagtctcctactttgtctggtgaaaatggtgtccctgatggctttagcattttggaaggtttaacaggcaaactt

SEQ ID NO: 10189 - DNA, 80 bp, synthetic construct
  source 1..80: mol_type = other DNA
atgcaaaataaatctgtactccccatcaggattcaactgcatgtctataagatctacttggcatcttgaactaacttcct

SEQ ID NO: 10190 - DNA, 80 bp, synthetic construct
  source 1..80: mol_type = other DNA
gtggaatgaagagcgtaaatgaaactccagccaataacaaaaagtttcaaacaataaagagcagaaagccaggacatgaa

SEQ ID NO: 10191 - DNA, 80 bp, synthetic construct
  source 1..80: mol_type = other DNA
gttagtcatgagatgttccctatattaactaaagatagcatcttaacatatatccctaagttgtttttcagaaacccata

SEQ ID NO: 10192 - DNA, 80 bp, synthetic construct
  source 1..80: mol_type = other DNA
atgtgactgaaaaagaccatcctatggatagcatttctttccatactgatccattttgtgccatgctatagaactagaag

SEQ ID NO: 10193 - DNA, 80 bp, synthetic construct
  source 1..80: mol_type = other DNA
ccatatgtgccctgtgagacctgtggacaagtaggtgcatttggtaaacaatacaaataattgtagtttgtcatagctaa

SEQ ID NO: 10194 - DNA, 80 bp, synthetic construct
  source 1..80: mol_type = other DNA
gccagttccctttggtatgtttttcccttctctgagcttaataaggtatcttatgtaaattgctttgtataatataatag

SEQ ID NO: 10195 - DNA, 80 bp, synthetic construct
  source 1..80: mol_type = other DNA
tttggcctcatgcttaccatcacttaatggtcagaagatggccagatatcatattagtgttcaagactggaagtgagaaa

SEQ ID NO: 10196 - DNA, 80 bp, synthetic construct
  source 1..80: mol_type = other DNA
ctttctgcaaaactgcagaaaagtgacaggatttatggggaaaatacggttaaagggtggactattttaacacctacaca

SEQ ID NO: 10197 - DNA, 80 bp, synthetic construct
  source 1..80: mol_type = other DNA
tattcttccacccttggatatagtgatactacaagaaacatgatgtgggttcccgtttatcatcttgtttttatttattt

SEQ ID NO: 10198 - DNA, 80 bp, synthetic construct
  source 1..80: mol_type = other DNA
agatcagaaaatatctgccctgtcatctagtctctcttgctagacctgtagtaggcaccaaggctagtctttacaattca

SEQ ID NO: 10199 - DNA, 80 bp, synthetic construct
  source 1..80: mol_type = other DNA
actcccacctggtggccccaaacatcaacttgctgggaaaactcatacatgagcttacacaatttcagcattatactgac

SEQ ID NO: 10200 - DNA, 80 bp, synthetic construct
  source 1..80: mol_type = other DNA
tgacgagagagttccctggtataagacaaattcctacgtagggctgattcctgatcccaagtgtggtcttcttctttaac

SEQ ID NO: 10201 - DNA, 80 bp, synthetic construct
  source 1..80: mol_type = other DNA
ggagaattaactccggaattacctagttatctggcatcacggtgaaaagagttccacagtgtgagtagtgctggagtaga

SEQ ID NO: 10202 - DNA, 80 bp, synthetic construct
  source 1..80: mol_type = other DNA
agttaacatggagtaagcatgacttctaagtcctttactgacgagccttactgttttgtttgttttgttttgtagatttg

SEQ ID NO: 10203 - DNA, 80 bp, synthetic construct
  source 1..80: mol_type = other DNA
cggtgggacctttcaaaggtgaacgttttacagttcctggcttggcctctgaatgtgggaaaaattcgttcctccgcttc

SEQ ID NO: 10204 - DNA, 80 bp, synthetic construct
  source 1..80: mol_type = other DNA
tgaactgtgtgtgtagacgaggattgaattggagatagagttgatgaaacccggaaggtctggaaaattccttatagaca

SEQ ID NO: 10205 - DNA, 80 bp, synthetic construct
  source 1..80: mol_type = other DNA
ctgatgccttacatgttctgtgggtctaccaattcctttaggaagctgaggaaattcccgtgggtatttataaaaactcc

SEQ ID NO: 10206 - DNA, 80 bp, synthetic construct
  source 1..80: mol_type = other DNA
tctatataatgatgaactatctgaaaaggaaattaagaaaacaatcccatttacaatagcaacaaaaacaaaataaaata

SEQ ID NO: 10207 - DNA, 80 bp, synthetic construct
  source 1..80: mol_type = other DNA
aggcaaaggacctgaacagacatttctcaaaagaagatatacaaatggcaatacatataaaaaaaagatgctcagcatca

SEQ ID NO: 10208 - DNA, 80 bp, synthetic construct
  source 1..80: mol_type = other DNA
cagcttttgtacattgttggtgaaaatgtaaagtagtacaaccattatggaaaatagtatatagatatttcaaaaactaa

SEQ ID NO: 10209 - DNA, 80 bp, synthetic construct
  source 1..80: mol_type = other DNA
ttatgaaatgtgtacctgggaacatcgaagatagaaactggccagaagcggtaatcccacgcctgcaatcccagcatttt

SEQ ID NO: 10210 - DNA, 80 bp, synthetic construct
  source 1..80: mol_type = other DNA
gtccagaggagggtgagaggaacaagaattttagtcattactggttaagagtgtaaactaataaaatccttttggagggc

SEQ ID NO: 10211 - DNA, 80 bp, synthetic construct
  source 1..80: mol_type = other DNA
aatggagaacacatatatttcttgcccttaagaaggttaccatctggagggaaaagtaaacactacccaaatgtttcaac

SEQ ID NO: 10212 - DNA, 80 bp, synthetic construct
  source 1..80: mol_type = other DNA
ttggaaaaaaggtagaaagactccccgatgtgagcattttcgttctagagtagtttggaatgttactgcgtaagatgatt

SEQ ID NO: 10213 - DNA, 80 bp, synthetic construct
  source 1..80: mol_type = other DNA
caaggttgcaagacacaaggttactacataaaagtcaattccttttctacatactagcaatactcatttggaatttgaaa

SEQ ID NO: 10214 - DNA, 80 bp, synthetic construct
  source 1..80: mol_type = other DNA
atcaatgggaagaagtgagaattacaaaatagacccatagtaaacttacctttgacaagagagcaaaggcagttcagtgg

SEQ ID NO: 10215 - DNA, 80 bp, synthetic construct
  source 1..80: mol_type = other DNA
ctcacccataaaaaattttttgcataactggaaaaattgaacacggactaggtattagataatattaagaattttagtta

SEQ ID NO: 10216 - DNA, 80 bp, synthetic construct
  source 1..80: mol_type = other DNA
ctcccaagttgctgggactacaggcatgcaccaccacacctggctaatgtttgtgtgtgtatttttagtagagatggggt

SEQ ID NO: 10217 - DNA, 80 bp, synthetic construct
  source 1..80: mol_type = other DNA
aatcttcctaataatttttgatgataatgacctctctttcttctctgccccaatacctcattctttaaataaagcttatg

SEQ ID NO: 10218 - DNA, 80 bp, synthetic construct
  source 1..80: mol_type = other DNA
tatacattctctctggctgatttgagacatcctcttatgtttgttataacacagtttcagtatgaggtgtgtagttatag

SEQ ID NO: 10219 - DNA, 80 bp, synthetic construct
  source 1..80: mol_type = other DNA
tattacatatttatttcttgaatctaaatttttacataattttactcactcttttgcatacttcatttgtaatcatatcc

SEQ ID NO: 10220 - DNA, 80 bp, synthetic construct
  source 1..80: mol_type = other DNA
acgtatatcctgagcctagtcatgcgaaagtatcagtcagtgaaagacattctatttttaaaaatgaaatgaggccggga

SEQ ID NO: 10221 - DNA, 80 bp, synthetic construct
  source 1..80: mol_type = other DNA
ctcccctcaccattcgagaaaccaataatttttcattgctccatggtttcctacagattggtcgccaagcaacagatgcc

SEQ ID NO: 10222 - DNA, 80 bp, synthetic construct
  source 1..80: mol_type = other DNA
caattttctgcttgtctgtacagcctttgcagtgttaagtatctgtatcgatagcattgccacaccaggaaggtcttgaa

SEQ ID NO: 10223 - DNA, 80 bp, synthetic construct
  source 1..80: mol_type = other DNA
ttattgtattctataaatagtgtggagaccagaggtctgagccttttgcagcctccattttgcaactgaccccctggctc

SEQ ID NO: 10224 - DNA, 80 bp, synthetic construct
  source 1..80: mol_type = other DNA
tggatagaatgggataaagctatctatgtatcttggtaggattatatatctggaagccacccctcaaatgaaaaacttac

SEQ ID NO: 10225 - DNA, 80 bp, synthetic construct
  source 1..80: mol_type = other DNA
aggctgaggtacaagaatggcttaaagccagtaaggcttttttccccccaggtttttaaaataaccttaatttttttaaa

SEQ ID NO: 10226 - DNA, 80 bp, synthetic construct
  source 1..80: mol_type = other DNA
agagatgcacatacaccaatggctatcgtcaaaatggaaatatggacacatctgcattcatctctccctttatacttcct

SEQ ID NO: 10227 - DNA, 80 bp, synthetic construct
  source 1..80: mol_type = other DNA
tctgcctcccagcttcaagcgattctcctgagtagcatcctgagtagctgggactacaggcgtgtgccaccatgtgcccg

SEQ ID NO: 10228 - DNA, 80 bp, synthetic construct
  source 1..80: mol_type = other DNA
cactggcaatctctttaatatctagagactagatgttacaaaattgactagatattataaaatttaatatatagagactg

SEQ ID NO: 10229 - DNA, 80 bp, synthetic construct
  source 1..80: mol_type = other DNA
tcccacttccactaaaccattaaacaagtatagacactactataccactcacaggggcggtttaacaattccactttctt

SEQ ID NO: 10230 - DNA, 80 bp, synthetic construct
  source 1..80: mol_type = other DNA
caatagttaaaatctgaaagaatcttccaaataaaaatattccagcctagaacccttcccatctcagtcaacccagtggc

SEQ ID NO: 10231 - DNA, 80 bp, synthetic construct
  source 1..80: mol_type = other DNA
tgcacacggaagacaacgattataatatgtaaacgtcttctaaatatgaccagtctggcataggaccttcttctcgtcct

SEQ ID NO: 10232 - DNA, 80 bp, synthetic construct
  source 1..80: mol_type = other DNA
gttaatgagccaccctgtcgtctggccggaggcaagagactgtaaatcgattgattgttcaacattccttcccaaagtgg

SEQ ID NO: 10233 - DNA, 80 bp, synthetic construct
  source 1..80: mol_type = other DNA
cgctccgcctatttgttccttttaaaaaatctaattttccctttcttgtctcagatttctcccataatttgaatgtattt

SEQ ID NO: 10234 - DNA, 80 bp, synthetic construct
  source 1..80: mol_type = other DNA
ggtgaaacctggcctgccacatagtggatgcagagtagttcacgtgtaggtctaccactatgatattttgaaataagaaa

SEQ ID NO: 10235 - DNA, 80 bp, synthetic construct
  source 1..80: mol_type = other DNA
gaattttcttacaattttccacatatacacaggagcatagtggcttggtgtcacaggttagattatctgtgaagtagacc

SEQ ID NO: 10236 - DNA, 80 bp, synthetic construct
  source 1..80: mol_type = other DNA
ccccttcactcatttgatatgaacagcctcaaaaaggatgtgatcttgggcaggcagctctgcagctgaaacaatccctg

SEQ ID NO: 10237 - DNA, 80 bp, synthetic construct
  source 1..80: mol_type = other DNA
ggaaaatgcaaatcaaaactacaaagacatgtcacttcatacttgtagagatggctattataaaaaacaacaaagataac

SEQ ID NO: 10238 - DNA, 80 bp, synthetic construct
  source 1..80: mol_type = other DNA
ggccgggtactcctctgagacaaaacttccagaggaacgatcagacagcagcattcgcggttcatgaaaatccgctgttc

SEQ ID NO: 10239 - DNA, 80 bp, synthetic construct
  source 1..80: mol_type = other DNA
atgtgaaaagaccaaatctacgtctgattggtgcacctgaaagtgactgggagaatggaaccaagttggaaaacactctt

SEQ ID NO: 10240 - DNA, 80 bp, synthetic construct
  source 1..80: mol_type = other DNA
atatacattttttccagcaccacaccacacctattccaaaattgactgcatagttggaagtaaagctctcgtcagcaatt

SEQ ID NO: 10241 - DNA, 80 bp, synthetic construct
  source 1..80: mol_type = other DNA
tgaggccagcatcatcctgataccaaagcctggcagagacacaaccaaaaaagagaattttagaccaatatccttgatga

SEQ ID NO: 10242 - DNA, 80 bp, synthetic construct
  source 1..80: mol_type = other DNA
aactacaactatctgatctttgacaaacctgagaaaaacaagcaatggggaaaggattccctatttaataaatggtgctg

SEQ ID NO: 10243 - DNA, 80 bp, synthetic construct
  source 1..80: mol_type = other DNA
ctatgcagccataaaaaatgatgagttcatgtcctttgtagggacatggatgaaattggaaatcatcattctcagtaaac

SEQ ID NO: 10244 - DNA, 80 bp, synthetic construct
  source 1..80: mol_type = other DNA
atggatcatgggtatttccttgtgcccgaattcatcatattgtacacattgtgtgcagttctttgtatatcagttatacc

SEQ ID NO: 10245 - DNA, 80 bp, synthetic construct
  source 1..80: mol_type = other DNA
tgaatccaaccttcccctccttctgttctattcagaccctcaatggattggattatgtccacccacattgaggaaagcca

SEQ ID NO: 10246 - DNA, 80 bp, synthetic construct
  source 1..80: mol_type = other DNA
tgtgtggatcacttgagatcaggagttcaagatcagcctggccaacaaggtgaagccccatctctactaaaaatacaaaa

SEQ ID NO: 10247 - DNA, 80 bp, synthetic construct
  source 1..80: mol_type = other DNA
aaccattaaagtcctgttctaatctatcatgagaatccattctacttcagcttatgtgtgttccatggtacatatatttt

SEQ ID NO: 10248 - DNA, 80 bp, synthetic construct
  source 1..80: mol_type = other DNA
catcaagtgatattagacaggacataaggagatgttgggagctttgcaaaagaatcaattaaattcaccacacaaggctg

SEQ ID NO: 10249 - DNA, 80 bp, synthetic construct
  source 1..80: mol_type = other DNA
ttgagaagaaaaagttaccctttagttcattcaaatgaccttaaattcaattgaaccagaccaggtctcattcaacaagc

SEQ ID NO: 10250 - DNA, 80 bp, synthetic construct
  source 1..80: mol_type = other DNA
aagtgtgccgtgttaaatacatctgacctttaaagccaccgacctatttccaagtatttgaagacgtcaggaagttctac

SEQ ID NO: 10251 - DNA, 80 bp, synthetic construct
  source 1..80: mol_type = other DNA
tgaatttacgcttagcagagacctacagaaaaatgagatccagctcgccgctggagggaacagctctggcctcccagtga

SEQ ID NO: 10252 - DNA, 80 bp, synthetic construct
  source 1..80: mol_type = other DNA
taactggaggataaaacctttggctctttgcttatttctcttgctgcgcttctctgcatcccagactaactcctttccac

SEQ ID NO: 10253 - DNA, 80 bp, synthetic construct
  source 1..80: mol_type = other DNA
gtatttccatcaacaatgaattagagttcctattttttgacatcctcaacagtatttggtgttgtaagggttccggagtt

SEQ ID NO: 10254 - DNA, 80 bp, synthetic construct
  source 1..80: mol_type = other DNA
ggttaggctctgattagtttctcctgagggcagaatttattaagacaaacaggtgctattcaaaatagtcccttttcctc

SEQ ID NO: 10255 - DNA, 80 bp, synthetic construct
  source 1..80: mol_type = other DNA
atattcagaaatgtggttaagagaataaatctgacagcccctgaaaatttcagcataacactgggtccggaattggcggg

SEQ ID NO: 10256 - DNA, 80 bp, synthetic construct
  source 1..80: mol_type = other DNA
ggtggtcgataggactggctgctgtggagcagggggcggctctagtctgggaggctggggccgcacaggagcccacgggg

SEQ ID NO: 10257 - DNA, 80 bp, synthetic construct
  source 1..80: mol_type = other DNA
tagcaagctttctgtaacactgattgggttaggcaaagatcgtgtcagtcattttgcaaatgtgttaatcttcaaaaata

SEQ ID NO: 10258 - DNA, 80 bp, synthetic construct
  source 1..80: mol_type = other DNA
tctcaagacttctatcaaggacaccttgcattgcataattaaaataaaaataggattcttttacgatgttatccttgctc

SEQ ID NO: 10259 - DNA, 80 bp, synthetic construct
  source 1..80: mol_type = other DNA
ttccacagtccctgactcataggtctggagtagtcctagagaatttgtatttttagtaagatcctaggtgatgctgatgc

SEQ ID NO: 10260 - DNA, 80 bp, synthetic construct
  source 1..80: mol_type = other DNA
aagaaaggaggttaggcagaaaaaaggatttgtttgtttccacctctgccctttgttttttcaacatctctttcatcttt

SEQ ID NO: 10261 - DNA, 80 bp, synthetic construct
  source 1..80: mol_type = other DNA
atgacaattcaacatatgctcaaagattttcttttgctaaaaaggacattttagggacaattagcacagtctgaataagg

SEQ ID NO: 10262 - DNA, 80 bp, synthetic construct
  source 1..80: mol_type = other DNA
aggctagtcaagttgcttaccaaaggtccacatttggtagtgaaggatccaggacatgcatacagactttgtcactgaca

SEQ ID NO: 10263 - DNA, 80 bp, synthetic construct
  source 1..80: mol_type = other DNA
ttggttgctcttaatataaaattaaaactccttggcatggcctctaaaattctgacacagtttcgtcctatccttctgca

SEQ ID NO: 10264 - DNA, 80 bp, synthetic construct
  source 1..80: mol_type = other DNA
taactttgacttaagtaactgagaaatattggatttaaatattagcttgattatcagctgtaagatttgggcaagtttat

SEQ ID NO: 10265 - DNA, 80 bp, synthetic construct
  source 1..80: mol_type = other DNA
ttctggccaattagaagatagcacacggatgcgctgaaaaacaaaaactgttaacgcgttcagactctccaaacagctgc

SEQ ID NO: 10266 - DNA, 80 bp, synthetic construct
  source 1..80: mol_type = other DNA
aaacagtatcacaataaaagaagtacaatgtgatagttgagtgcctagcaggtcccagtaatcaagttcaaagcataata

SEQ ID NO: 10267 - DNA, 80 bp, synthetic construct
  source 1..80: mol_type = other DNA
agaatagggtgatttactatactactagttagtagctgttagtcccctgaaaattcatgtttaaatcctaccctcagtac

SEQ ID NO: 10268 - DNA, 80 bp, synthetic construct
  source 1..80: mol_type = other DNA
agatagaagaaaataaaaggcacaaggaaaagtatgtgtcagcttagctatcccagtccatagtttctgagaacaaccag

SEQ ID NO: 10269 - DNA, 80 bp, synthetic construct
  source 1..80: mol_type = other DNA
cttgatgaacaaccagatataactgaaggaaagatgaagtacttgacatttaaaggtagaaacacagttacatgccacat

SEQ ID NO: 10270 - DNA, 80 bp, synthetic construct
  source 1..80: mol_type = other DNA
gcatttataaaatctacagtagtgtacagtaatgtcctaggtcttcacattgactcaccactcactcactgactcaccaa

SEQ ID NO: 10271 - DNA, 80 bp, synthetic construct
  source 1..80: mol_type = other DNA
catcacaaaaaaaaaaaaaagaagatttttatcttatgaatatctattattggagatatctctgagaaaaatttacccac

SEQ ID NO: 10272 - DNA, 80 bp, synthetic construct
  source 1..80: mol_type = other DNA
taactctgggttcctgataggaaaattaaaaaaattttaaacaatatttcaaaagatcgctattttaattggtaaaacca

SEQ ID NO: 10273 - DNA, 80 bp, synthetic construct
  source 1..80: mol_type = other DNA
aatgtgtaacttctccaggtctcttatatgaaataaatttagggaactgatgggggaaagagtggcactgagggccactg

SEQ ID NO: 10274 - DNA, 80 bp, synthetic construct
  source 1..80: mol_type = other DNA
tcgaggcgaagtctctctcttgtcccctaggctggagtgcaatggcgcgatctcggctcactgcaacctccgcctcgcag

SEQ ID NO: 10275 - DNA, 80 bp, synthetic construct
  source 1..80: mol_type = other DNA
aaggaatttctgttataaaaataaactcgttccactccgttagcaactgggacggttaaaggctaaagatgttggattgc

SEQ ID NO: 10276 - DNA, 80 bp, synthetic construct
  source 1..80: mol_type = other DNA
ttcacataattaatcatgcactactctagaccccagtacacacctggaaggtaaggaacatatctaacaaaagactcaga

SEQ ID NO: 10277 - DNA, 80 bp, synthetic construct
  source 1..80: mol_type = other DNA
aaaagggaaaacaagaggactgaattctacctccaggctgcctccagactcaagaccacaacatttgttaactatcggca

SEQ ID NO: 10278 - DNA, 80 bp, synthetic construct
  source 1..80: mol_type = other DNA
taaaagtgatagttaatgtaaactagctacagatacaatttttctttcaaatttgtaagactccttaactggtatacata

SEQ ID NO: 10279 - DNA, 80 bp, synthetic construct
  source 1..80: mol_type = other DNA
atcttgccattgcactccagcctgggcaacagagtgagactcggtctcaaaaaaaaattaaaaaattgttcagaaataaa

SEQ ID NO: 10280 - DNA, 80 bp, synthetic construct
  source 1..80: mol_type = other DNA
gtttctatcaatgaccattaatccttcaactcattaagcctgctcattaacgttatctttcagtaaagtgggctgtactt

SEQ ID NO: 10281 - DNA, 80 bp, synthetic construct
  source 1..80: mol_type = other DNA
cggtaagatatatttttcaaagataattctggcaaccatgtggagcatgaattttaggaagaatggaaatgccaggggac

SEQ ID NO: 10282 - DNA, 80 bp, synthetic construct
  source 1..80: mol_type = other DNA
ttgaatccctcatttgcttaaatgaacctgattgagaataaacactgggaagattgaattttcccagcgtatacattgtt

SEQ ID NO: 10283 - DNA, 80 bp, synthetic construct
  source 1..80: mol_type = other DNA
tgcctgtggaataatacagtggcgacatgctgtaggctatatggacttaacatttaatgagggtggtagagactaaagat

SEQ ID NO: 10284 - DNA, 80 bp, synthetic construct
  source 1..80: mol_type = other DNA
gaattcaagaccagtgtggccaaatgctgaaaccctgtttctactaaaaatacaaaaattagttgggcatggtggcacgc

SEQ ID NO: 10285 - DNA, 80 bp, synthetic construct
  source 1..80: mol_type = other DNA
tccttatttagagtggcactaatcttcaccgtggtgtgatattctctaggagcaccaaacagtctgtgtggagtgaataa

SEQ ID NO: 10286 - DNA, 80 bp, synthetic construct
  source 1..80: mol_type = other DNA
acatttgttgagcatgtatattgttctaagatattgtcacaagtcctcctatgagttttaactaaatttattctttttct

SEQ ID NO: 10287 - DNA, 80 bp, synthetic construct
  source 1..80: mol_type = other DNA
gtggaaataaagattcctgggaaaagagagatcaaatgaatgagaagctggggtgctggatgatctgtccacatggcccc

SEQ ID NO: 10288 - DNA, 80 bp, synthetic construct
  source 1..80: mol_type = other DNA
gacagggtttcgccatgttgttgcccaggcaagtctgaaactcctgggctcaagtgatctgcctgcctcggcctttcaaa

SEQ ID NO: 10289 - DNA, 80 bp, synthetic construct
  source 1..80: mol_type = other DNA
ttctggactcttccagtaatatctgaactagtcttattttcatcttatttcaccaccattcccaatccattttccacatt

SEQ ID NO: 10290 - DNA, 80 bp, synthetic construct
  source 1..80: mol_type = other DNA
ttttccatcctattccactttccccaccccgcaaaaaaaaaactatgatacggagacattttatttttactgatagtttt

SEQ ID NO: 10291 - DNA, 80 bp, synthetic construct
  source 1..80: mol_type = other DNA
actgtccaaatagatgaaaacgtgaaaatcctgcctgacctttctccccacatgcaatggctcgggccacacataccatc

SEQ ID NO: 10292 - DNA, 80 bp, synthetic construct
  source 1..80: mol_type = other DNA
ccagcagtcacactgtttggtacctatccagaggagttgaaagcatatctatgcaaaaaccctgcacatgcatgtttata

SEQ ID NO: 10293 - DNA, 80 bp, synthetic construct
  source 1..80: mol_type = other DNA
aaaaaaaaaaaaaaacaacgattaggattggccagtccacaaagctgcatctcctcataaaaaatgtgagagatccagta

SEQ ID NO: 10294 - DNA, 80 bp, synthetic construct
  source 1..80: mol_type = other DNA
agaatgagttggaaattattgtctctgcttctattttcactaaataatgaaagagttggtaaagtttcttcctaaaatat

SEQ ID NO: 10295 - DNA, 80 bp, synthetic construct
  source 1..80: mol_type = other DNA
atttttttctatattgattctgctttttttcctttattattgctgtttgtcctgactttgggtggacaaattattctttt

SEQ ID NO: 10296 - DNA, 80 bp, synthetic construct
  source 1..80: mol_type = other DNA
ttgatttgcatttctctgatgattaatgatgttgagcattttttcattttttaagagcactccaacatctgaagaacatt

SEQ ID NO: 10297 - DNA, 80 bp, synthetic construct
  source 1..80: mol_type = other DNA
agattgttaaagcaagtaacaaatttgtccttacactctccactgtgtaaaagaagtgagagcaactctggcacaggaca

SEQ ID NO: 10298 - DNA, 80 bp, synthetic construct
  source 1..80: mol_type = other DNA
tggtgtgtacaatgatatttcaacacactcaaattatattctaacatgctttctatgtgactccttccaaaacagcaccc

SEQ ID NO: 10299 - DNA, 80 bp, synthetic construct
  source 1..80: mol_type = other DNA
caaatcacaattaaccctttcaattctcactctacctactgttcctctcctctgtggctacataattaataagaatccca

SEQ ID NO: 10300 - DNA, 80 bp, synthetic construct
  source 1..80: mol_type = other DNA
atcaataaatactgagggaactcagagaccagtgcctgccctcctctctgagatggtagagataatgatcaataaatact

SEQ ID NO: 10301 - DNA, 80 bp, synthetic construct
  source 1..80: mol_type = other DNA
ttgcaacctcaaatgcaggttagacaagtacaaaccccagaagaatatcaaatagaaaaagataaagtctctgccatggc

SEQ ID NO: 10302 - DNA, 80 bp, synthetic construct
  source 1..80: mol_type = other DNA
atcctgagtgtcaatcagccattaagccattaaaaggaaaggtcccagcaggatcagatgtaatctcatagtatgtaaaa

SEQ ID NO: 10303 - DNA, 80 bp, synthetic construct
  source 1..80: mol_type = other DNA
agggccgaataatcaagaaagtactgttcagccaatgattacttcatttcctgttaatccgtggggtcatttattacaac

SEQ ID NO: 10304 - DNA, 80 bp, synthetic construct
  source 1..80: mol_type = other DNA
agacctctactccttttcattatttaggtatgcagatagaaaatagaaaaattaagccacaaaaaatagaaataagaaaa

SEQ ID NO: 10305 - DNA, 80 bp, synthetic construct
  source 1..80: mol_type = other DNA
gcacagcacttttccttaaacttatttatgacacagagatctttgttcacattttttcctgctgaccctctccccaccat

SEQ ID NO: 10306 - DNA, 80 bp, synthetic construct
  source 1..80: mol_type = other DNA
atttattacaacaaactgtaagaaaaagaaatttcccattttatattactcatattcgagcacacactaatttaccaggg

SEQ ID NO: 10307 - DNA, 80 bp, synthetic construct
  source 1..80: mol_type = other DNA
gatgcaaagaaaagcgcctccacggagatggaaacacagcaatcgagcaccatcgactcacaagatgaacagaatggtga

SEQ ID NO: 10308 - DNA, 80 bp, synthetic construct
  source 1..80: mol_type = other DNA
aataataagtcctgtttctggtcctgaacatccagaattatggaggcttaatgtggcctcattaccatattagaatttgg

SEQ ID NO: 10309 - DNA, 80 bp, synthetic construct
  source 1..80: mol_type = other DNA
gtgcctgttctgtctgttgttagtctgcaggtgtacccaacagctccaaagagacagcgaccatcgagaacaggccatga

SEQ ID NO: 10310 - DNA, 80 bp, synthetic construct
  source 1..80: mol_type = other DNA
tctcctgggcccacttttctttctctatactttgtttctgtctcttatttcttttttcagtctctcatcccacctgacaa

SEQ ID NO: 10311 - DNA, 80 bp, synthetic construct
  source 1..80: mol_type = other DNA
atttcccaaatctgccggatttcgaatttagggagctttctaaatgatgtaacttaactgcccggccccgcctggaccgt

SEQ ID NO: 10312 - DNA, 80 bp, synthetic construct
  source 1..80: mol_type = other DNA
tacattcctccagtgtaggactatgcttagaaacagaggagttcttcgtcttatcatttttactggccccttgtttatac

SEQ ID NO: 10313 - DNA, 80 bp, synthetic construct
  source 1..80: mol_type = other DNA
tcttccaatcactcacccaaacagacatgagatctgcttctcccaaatcaatggaggtccataatgagaggatggattgg

SEQ ID NO: 10314 - DNA, 80 bp, synthetic construct
  source 1..80: mol_type = other DNA
aaggatgtacatattcacgtcaaagccttgggctgcttctttatccaagagctgttgtgtaacactgacgaaagttatat

SEQ ID NO: 10315 - DNA, 80 bp, synthetic construct
  source 1..80: mol_type = other DNA
taaatcctctaaaactgatgattgtcccaatttctggatatccagtggttggtaggacagtttactgtattcaacctcac

SEQ ID NO: 10316 - DNA, 80 bp, synthetic construct
  source 1..80: mol_type = other DNA
caattaatggatgcttcagctctagttaaggaggccccatagaaggaaagggaaagagtaaaagaagggaaaagctgcaa

SEQ ID NO: 10317 - DNA, 80 bp, synthetic construct
  source 1..80: mol_type = other DNA
gacatttgtcccacaggaagatctgacttgtttagtctaaaattgttatggctttgacaatgccttgctgcccttttctg

SEQ ID NO: 10318 - DNA, 80 bp, synthetic construct
  source 1..80: mol_type = other DNA
cctcctgtttgctcaactggattctaaaagtcgagagtttgagggagcaaaaccaaggttgcagtaaaataagaattcca

SEQ ID NO: 10319 - DNA, 80 bp, synthetic construct
  source 1..80: mol_type = other DNA
gtggcatattttctgcctgtgagcttctttttcctcatttcacagtctttctttctcttcagtactattgctaaatggta

SEQ ID NO: 10320 - DNA, 80 bp, synthetic construct
  source 1..80: mol_type = other DNA
tcaatcttacctgccaagtaagtcctctcccagatcctgtcactggtctaaagcttctttttatttttaattttgagcca

SEQ ID NO: 10321 - DNA, 80 bp, synthetic construct
  source 1..80: mol_type = other DNA
ctgcagctggtaggaccagagaatagtaagttatcaaatagtcttgtgggttttgatgtatttactttctgatcttctcc

SEQ ID NO: 10322 - DNA, 80 bp, synthetic construct
  source 1..80: mol_type = other DNA
aatgccatgtgaccagaaaggcagagattggagtgatgctgctacaagtcagagaatacaaaatattgatggccaccacc

SEQ ID NO: 10323 - DNA, 80 bp, synthetic construct
  source 1..80: mol_type = other DNA
agtgagccccaatcatgaagcagttgtgtaggcaacagaaactgtgacagaaactccatatttctagccaaattatcaag

SEQ ID NO: 10324 - DNA, 80 bp, synthetic construct
  source 1..80: mol_type = other DNA
aggcatggtggctcacaactgtaatcccagcactttacaggggctcaggggaaggattgcttgtgatcaagaatttgaga

SEQ ID NO: 10325 - DNA, 80 bp, synthetic construct
  source 1..80: mol_type = other DNA
aaggaaggaaggaaggaaggaaggaaggaagctattttagccaggcacggtagtgcacatctgtagtcccagctacagaa

SEQ ID NO: 10326 - DNA, 80 bp, synthetic construct
  source 1..80: mol_type = other DNA
aaaaacaccagagagaacaaatggaaatcaaataagaaagtggcagacataaatccacacatttgataagggcctagtat

SEQ ID NO: 10327 - DNA, 80 bp, synthetic construct
  source 1..80: mol_type = other DNA
aaaagagcaacgaattgctctcaacccgcgacaatctagaacaaaacaaaccaaatcttcgtgcaggacctacgttttca

SEQ ID NO: 10328 - DNA, 80 bp, synthetic construct
  source 1..80: mol_type = other DNA
tagtactggtcttagtattccctagtagtaccgtttatgtttttctgggagcactgcagacagaaaagtaggaagttgac

SEQ ID NO: 10329 - DNA, 80 bp, synthetic construct
  source 1..80: mol_type = other DNA
agccctaaagtgctacctttaagtgaaaaggggaaagttttctacttaataaggaaacagaaacaaattcatatcagagg

SEQ ID NO: 10330 - DNA, 80 bp, synthetic construct
  source 1..80: mol_type = other DNA
ttaacatagtcatagtaataaccttctaaagagaagttggaagccagcatttacaggtggaaagaaagctgatgcagctt

SEQ ID NO: 10331 - DNA, 80 bp, synthetic construct
  source 1..80: mol_type = other DNA
taaatatatatatattattcacatggacaggggccccacaaaaaacaaatatgtttgtctgggttactcaacatcctagg

SEQ ID NO: 10332 - DNA, 80 bp, synthetic construct
  source 1..80: mol_type = other DNA
tagtgcaaattttagacttttacatttacaactaactttggatttacagaaaggttacaaaacaaatacagagtttttat

SEQ ID NO: 10333 - DNA, 80 bp, synthetic construct
  source 1..80: mol_type = other DNA
aatgaattagataacctaccatgccaaaatattttatcctatccagttctctgtatttcttcactcatctcattttttct

SEQ ID NO: 10334 - DNA, 80 bp, synthetic construct
  source 1..80: mol_type = other DNA
tactacaaatcctgaaaacaggatttgtggagggcaagatctgccctttcctcaccaacctcttggcaaatcttcagcaa

SEQ ID NO: 10335 - DNA, 80 bp, synthetic construct
  source 1..80: mol_type = other DNA
aggaaatctgtctggctttgaaacctgtcctgctacatgttggctgtgagctatgtggccaattatttcacctctgaaaa

SEQ ID NO: 10336 - DNA, 80 bp, synthetic construct
  source 1..80: mol_type = other DNA
gacttttgtgtaaatgaactcacaataaacttattggggtcccactctagccaaaatacatggagttttagatatttaat

SEQ ID NO: 10337 - DNA, 80 bp, synthetic construct
  source 1..80: mol_type = other DNA
gtctttaaccctgaataatttgttagaaaattaaactttcaatttgatggtccagtgtttgagctccttttcagatcctg

SEQ ID NO: 10338 - DNA, 80 bp, synthetic construct
  source 1..80: mol_type = other DNA
ggattttcctggggttttcaaaaccatcttgatttaccagaagataatctgtgctactatcctatcctaaaaaaatgtgc

SEQ ID NO: 10339 - DNA, 80 bp, synthetic construct
  source 1..80: mol_type = other DNA
taccgagtagctgggaccacaggcgcgtgccaccacggccagctgaatttttgtatttttagtagagacagggtttcact

SEQ ID NO: 10340 - DNA, 80 bp, synthetic construct
  source 1..80: mol_type = other DNA
tttgaaggaaagataaaggctattgtatctgttgaataaaatatctaggaggccattgatttggactggcctcctccact

SEQ ID NO: 10341 - DNA, 80 bp, synthetic construct
  source 1..80: mol_type = other DNA
aaattacacaagctctagaacacatgctccatccaaagtaagtgggaattgtcttttccatgcaaaaagtgccacaccaa

SEQ ID NO: 10342 - DNA, 80 bp, synthetic construct
  source 1..80: mol_type = other DNA
aaggtggaatcttcatgaatgggattagtgctcttataaaatatgcctgagagagacctttttctgtaaatggccaagta

SEQ ID NO: 10343 - DNA, 80 bp, synthetic construct
  source 1..80: mol_type = other DNA
agtgatgcctggtccaccagagcaaattaagtctactgttcaataacacctgataccatcaaattttttccacaaattat

SEQ ID NO: 10344 - DNA, 80 bp, synthetic construct
  source 1..80: mol_type = other DNA
atttactcatagttccttctttgatcttgcttgaatttttccctcggcttgtgttcccatgaggcaacaaggctccaaga

SEQ ID NO: 10345 - DNA, 80 bp, synthetic construct
  source 1..80: mol_type = other DNA
acagggtcccttattcaaaaagcaggggcaactgccatcaaaagtgctaaaatacaaagcttttccctttcagtcgctct

SEQ ID NO: 10346 - DNA, 80 bp, synthetic construct
  source 1..80: mol_type = other DNA
gggtcaggtttctgtctcctagcgatgattttgaatgagctattaatcctttgttttatcctctttcatctagtctttgt

SEQ ID NO: 10347 - DNA, 80 bp, synthetic construct
  source 1..80: mol_type = other DNA
caggaatggtgagaagggaaaaaatttattaggtttctttgttttgttttgttttgttttgttttgttttgttttgtttt

SEQ ID NO: 10348 - DNA, 80 bp, synthetic construct
  source 1..80: mol_type = other DNA
tttctcctactcctataaaaagaggacagtgtcaaatgtgttgcttttaatactatgctatttattctggcactcatctg

SEQ ID NO: 10349 - DNA, 80 bp, synthetic construct
  source 1..80: mol_type = other DNA
gtaaacctcttctctactattagccgggcgtggtggccggcgcctgtaatcccagctactcgggaggctgaggcgggaga

SEQ ID NO: 10350 - DNA, 80 bp, synthetic construct
  source 1..80: mol_type = other DNA
aattatttctgggcaaagaaaaaatgatagaccttctttctctttgaccctcatttcattgactcctgattggcccgcag

SEQ ID NO: 10351 - DNA, 80 bp, synthetic construct
  source 1..80: mol_type = other DNA
ggttgaccaccagcctttaatggaggcatcttatgttaacctacctaccattgctctgtgtaacacagattctcctctgt

SEQ ID NO: 10352 - DNA, 80 bp, synthetic construct
  source 1..80: mol_type = other DNA
tttcctcctgttgttaaattttggggtgtccaactatgtccacataaattttaggaggtaatcctaaaccattgtgtctt

SEQ ID NO: 10353 - DNA, 80 bp, synthetic construct
  source 1..80: mol_type = other DNA
tttgtagtagagacagggtttccgccatgatctcgagctcctgaactcagctgatccgcctacctcggcctcccaatgtg

SEQ ID NO: 10354 - DNA, 80 bp, synthetic construct
  source 1..80: mol_type = other DNA
tgcctgttgcttcactctcaggggatcttgaataagcagcttctctatttcagtaaataactataaagctgtgctgaagc

SEQ ID NO: 10355 - DNA, 80 bp, synthetic construct
  source 1..80: mol_type = other DNA
atagcaaactaaaaagcttcttcacaggaaagaaaacaatcaacaaaggaaaaaggcaagctatggaatgggagaaaata

SEQ ID NO: 10356 - DNA, 80 bp, synthetic construct
  source 1..80: mol_type = other DNA
ttgcacaacctagtgccttcagttaacaataccataatgtacacttaaaattttgttaaaaagataactcggccgggagc

SEQ ID NO: 10357 - DNA, 80 bp, synthetic construct
  source 1..80: mol_type = other DNA
tttgagcaaggaggaaagcacaaaggaagctggtctcaacctgagaaaaccaattcaccctttgtaaaaccctccctaca

SEQ ID NO: 10358 - DNA, 80 bp, synthetic construct
  source 1..80: mol_type = other DNA
gctagctcagctggaaatgcatcaggccactagtccggaaatttaggaatcacgatcctgttctgatgtagatacttttc

SEQ ID NO: 10359 - DNA, 80 bp, synthetic construct
  source 1..80: mol_type = other DNA
caccagaggccaaggcaggaggattgcctgggcctaggagtttgaggtagcagtgagccatgcttgcagtgccactgcac

SEQ ID NO: 10360 - DNA, 80 bp, synthetic construct
  source 1..80: mol_type = other DNA
tttgaaccacccaaaaggctgatttatgtgaatttaatttcacttgacaattaattaaactcctctgcatatcctgcctt

SEQ ID NO: 10361 - DNA, 80 bp, synthetic construct
  source 1..80: mol_type = other DNA
ataccctgcacccaatacccctactattatgatagtccttactattaagatggtacttttctgccgcgcgcgatgactca

SEQ ID NO: 10362 - DNA, 80 bp, synthetic construct
  source 1..80: mol_type = other DNA
ttttaactggcttgcagaaagctcaaggagatgtgcagaaagtaaagatatttcctgacaatagtaagaacacgaccacg

SEQ ID NO: 10363 - DNA, 80 bp, synthetic construct
  source 1..80: mol_type = other DNA
ctggggcgattttttgttaccctttccccagctatgtcccctatgttgatagggtaggaaagattaaaaaaaaaaacaac

SEQ ID NO: 10364 - DNA, 80 bp, synthetic construct
  source 1..80: mol_type = other DNA
aggaagatgctaaaaaggattggcactgagatttgaaagaataatgctaagaaactattaaattgtatgaaatgtttgtt

SEQ ID NO: 10365 - DNA, 80 bp, synthetic construct
  source 1..80: mol_type = other DNA
acgtggagaaaggagaaccctagtacactcttggtgggaatttaaattagtacaaccgctttggagaatagtatggaggt

SEQ ID NO: 10366 - DNA, 80 bp, synthetic construct
  source 1..80: mol_type = other DNA
tcacatattctctctcatttgtggaagccaaaaataaaacaattgaactcatggagacagagagtagaatgatggttacc

SEQ ID NO: 10367 - DNA, 80 bp, synthetic construct
  source 1..80: mol_type = other DNA
tgtgtagaagacgctccatctcaggttacgaaaatctacagaaaggaaatgtttaaaaagagaaaaggaaaatattccta

SEQ ID NO: 10368 - DNA, 80 bp, synthetic construct
  source 1..80: mol_type = other DNA
ttgccttagtgaagttgttttccaaacaccagaatacagaaatctaaactattttagagactgttgacctggagatttgc

SEQ ID NO: 10369 - DNA, 80 bp, synthetic construct
  source 1..80: mol_type = other DNA
taagacaattatattacaagtaggagaggcaaagtgacaaaaaggtaaagatgacacacatcactttaactgataaaata

SEQ ID NO: 10370 - DNA, 80 bp, synthetic construct
  source 1..80: mol_type = other DNA
ttaaaaatccaccaagaaggcataacaatcctaaatatgtataaaccaaacagagttgaaaatatgtaaagaaaaaaaga

SEQ ID NO: 10371 - DNA, 80 bp, synthetic construct
  source 1..80: mol_type = other DNA
acaagagcgaaactccgtcgcagactttttctcccccttgtaaggtcggagcgttcccactcaggaaacaacatttctct

SEQ ID NO: 10372 - DNA, 80 bp, synthetic construct
  source 1..80: mol_type = other DNA
taatcatacagtgcttaatttgtggccttgcagctgcgtcaaaagaaaaacaagaactgactaaatacagacatttgtaa

SEQ ID NO: 10373 - DNA, 80 bp, synthetic construct
  source 1..80: mol_type = other DNA
aaaaaactttccatttatttatgaagttaatagtatcctgatgctaaaaccaggtaaatacagtacaaaataatgagtat

SEQ ID NO: 10374 - DNA, 80 bp, synthetic construct
  source 1..80: mol_type = other DNA
tctcccacaaagtcaaaggaattagaataattatttaaaatctaggagggaaaaacagtctacctgatttcaagactatt

SEQ ID NO: 10375 - DNA, 80 bp, synthetic construct
  source 1..80: mol_type = other DNA
gacggtgtcaaagagataataaatgcatccccacccctgatgtaaggcaaatacaaacctcactggctttcctaggtggt

SEQ ID NO: 10376 - DNA, 80 bp, synthetic construct
  source 1..80: mol_type = other DNA
gcctaccctgacagagtgttagactggtggactgatgacaaacatcgtactctgttgcctctcaaagacacttttgattc

SEQ ID NO: 10377 - DNA, 80 bp, synthetic construct
  source 1..80: mol_type = other DNA
tgcgcagttcgacagggagagaaatcagtggacagatgctttgactctggatttggctcagaaaacaaaaacaacgacca

SEQ ID NO: 10378 - DNA, 80 bp, synthetic construct
  source 1..80: mol_type = other DNA
aagaaaacctgagagcgatgcactcagcatttcatcttaagggtctttagctggtgtgttgtcctgcgcctgtactcaca

SEQ ID NO: 10379 - DNA, 80 bp, synthetic construct
  source 1..80: mol_type = other DNA
aaaaaaaaattttttttaaagtttgctcctctatgttcttgaaccctggtatttattattatttatcatgattagggctg

SEQ ID NO: 10380 - DNA, 80 bp, synthetic construct
  source 1..80: mol_type = other DNA
atatatatgtaaatatatatatacatacacacaccagatttcaaagatgtgtaatactattttttaaatataaaatatct

SEQ ID NO: 10381 - DNA, 80 bp, synthetic construct
  source 1..80: mol_type = other DNA
ccaacagagaatttcaagagaggagttgaagtgaaaaagggaaaatggggcacatgcacctgagtcttgactttgctgcc

SEQ ID NO: 10382 - DNA, 80 bp, synthetic construct
  source 1..80: mol_type = other DNA
ccacagcatatagcacgttggaatttcttaggttttaaaactaataacttcctaagtttaagactttaaataaggacggg

SEQ ID NO: 10383 - DNA, 80 bp, synthetic construct
  source 1..80: mol_type = other DNA
caggaaaagaaagaaaagaaggatctcttatgtcctccagtacattctatctcttccttagagtttttaaaattgtggtc

SEQ ID NO: 10384 - DNA, 80 bp, synthetic construct
  source 1..80: mol_type = other DNA
atatgaatcacaacacagtgtttaaaatgtgcgtaaacgggtctaggagtgcgctgcactattgtgaaaagttcattctg

SEQ ID NO: 10385 - DNA, 80 bp, synthetic construct
  source 1..80: mol_type = other DNA
gagaaagaaaattcccgtttgtttgctccacatacttctcttagaagcctatggaaagccaactttccccctgaagaaac

SEQ ID NO: 10386 - DNA, 80 bp, synthetic construct
  source 1..80: mol_type = other DNA
tagttagccatggattccagttaaacatgctttgataccaggggatgttattttctctttcttgttggcatctatctaga

SEQ ID NO: 10387 - DNA, 80 bp, synthetic construct
  source 1..80: mol_type = other DNA
ggtgggctccatgagaccaggattttcttctggatggcgaacatagtcttaacatcaaatcctgggatataaagccttaa

SEQ ID NO: 10388 - DNA, 80 bp, synthetic construct
  source 1..80: mol_type = other DNA
atgggctcctcggaaaagtggctggatgatatcttgtacctgttggagagactttagctactgtaataaattagcttgtg

SEQ ID NO: 10389 - DNA, 80 bp, synthetic construct
  source 1..80: mol_type = other DNA
ctgtggaaaggagactgtgggtaataagtttagaggcatgactggaagtctggctgcatcccgggccgctgagtcagctt

SEQ ID NO: 10390 - DNA, 80 bp, synthetic construct
  source 1..80: mol_type = other DNA
ggagcaggggcttcagttaatgcctttttcagattttgaaaagcctgttcttctgtgtccatctaaactagccggctatt

SEQ ID NO: 10391 - DNA, 80 bp, synthetic construct
  source 1..80: mol_type = other DNA
ggtttgactggcccaaactctgggaaagagtgtctgtaagtccaacaggagaggattagtattattttccagtggttgtg

SEQ ID NO: 10392 - DNA, 80 bp, synthetic construct
  source 1..80: mol_type = other DNA
gtcaaaagaggtgtaagtccgataggcctcctggaggcgttctaaaaacgctcccggtgactcatcaggccctgtgcgac

SEQ ID NO: 10393 - DNA, 80 bp, synthetic construct
  source 1..80: mol_type = other DNA
cagagtgtccggagtttgcctttttaaaggcggaccccataatcctctgagaagcctagagaaaaattctgcagcataca

SEQ ID NO: 10394 - DNA, 80 bp, synthetic construct
  source 1..80: mol_type = other DNA
gtcacttggacatggggtatgacaatctaaatgccagcaatcttcatggtgccagaaatcccaaacaggcgaatgttcct

SEQ ID NO: 10395 - DNA, 80 bp, synthetic construct
  source 1..80: mol_type = other DNA
tagtcgatccgctgtcctccggaagacggtcgcctttcggggacctggaaaattttttttcaggtggctcctcgcctata

SEQ ID NO: 10396 - DNA, 80 bp, synthetic construct
  source 1..80: mol_type = other DNA
tgcttgtcgcccccctctttcctcccccttcccatcccccatccttggtggccttcacccaaacaaaaacagtttagtct

SEQ ID NO: 10397 - DNA, 80 bp, synthetic construct
  source 1..80: mol_type = other DNA
gatatgggatgttcagtagctaagaaggaagttattccttgaaagtaagtacagtgaggtagaaaaggatccattgggat

SEQ ID NO: 10398 - DNA, 80 bp, synthetic construct
  source 1..80: mol_type = other DNA
agaaatgcagaggccaacacaattcccttgaataggtggggaatatcatggagaacttcctaaggtggctcataggaaaa

SEQ ID NO: 10399 - DNA, 80 bp, synthetic construct
  source 1..80: mol_type = other DNA
actaaaaggaaccagagatactaatagaaagtagctattagtgtcaactacacagactccaggactgtgccagggaaact

SEQ ID NO: 10400 - DNA, 80 bp, synthetic construct
  source 1..80: mol_type = other DNA
cagattaagaaacgttgcacaaaaccactggaaaaactcttcaaaaacatgtcggtgttgtgaaagacaagaagattaag

SEQ ID NO: 10401 - DNA, 80 bp, synthetic construct
  source 1..80: mol_type = other DNA
tagcccaggaaaccctttaaatagggccatcagtaggccagaaattttgattagtgccttgaaaataaaagcatagccgg

SEQ ID NO: 10402 - DNA, 80 bp, synthetic construct
  source 1..80: mol_type = other DNA
ttagaaaacataatccaactatacactatctaaaagaaactcatttcaaatataattatataagcaggctgaaattaagg

SEQ ID NO: 10403 - DNA, 80 bp, synthetic construct
  source 1..80: mol_type = other DNA
tctctctctctcttttttgtgaatttgttcttattggggaagacggcacagggtgggaaatgtcgccttgggctatggta

SEQ ID NO: 10404 - DNA, 80 bp, synthetic construct
  source 1..80: mol_type = other DNA
acgcattcatttcaaattcatacgtaacgtagatcaagatagaacatacctcataccttgggcctcaacaaatttaaaag

SEQ ID NO: 10405 - DNA, 80 bp, synthetic construct
  source 1..80: mol_type = other DNA
tgtgatataaaaactttaaaaaaaaaacagactcttcaggttcaagaaagtttcactgtataattcgtcgcccccgccct

SEQ ID NO: 10406 - DNA, 80 bp, synthetic construct
  source 1..80: mol_type = other DNA
ttcctcggtgtccacgataggtgagagggctcattccctgtaggagaagtgagctgaaaacactttccccgcaagatctc

SEQ ID NO: 10407 - DNA, 80 bp, synthetic construct
  source 1..80: mol_type = other DNA
ttacattttatgcattagattgctttttttgtttgtttttgttttttgtttttgatggagtctcgttgtgtcaccaagct

SEQ ID NO: 10408 - DNA, 80 bp, synthetic construct
  source 1..80: mol_type = other DNA
ctggaatttgacattccactagtagcaccctaatccctcatgccttgctctcctgtgcagcatcctttgtggcaaacatg

SEQ ID NO: 10409 - DNA, 80 bp, synthetic construct
  source 1..80: mol_type = other DNA
actggaggagaaatcagtggacagatgctttcgctctgttctttggcccagaaaacaaaactaaagtaaaaaaaaacaaa

SEQ ID NO: 10410 - DNA, 80 bp, synthetic construct
  source 1..80: mol_type = other DNA
gctgtgagtagaagatactaggtactaacgggggatacaaattatttagaatacagtatacgacttgaaatggaaggcgc

SEQ ID NO: 10411 - DNA, 80 bp, synthetic construct
  source 1..80: mol_type = other DNA
aatatcacctgtcattcactcaccccttcacccccaaaatatagattcttccccaatttatgtctgaaaacaggacccaa

SEQ ID NO: 10412 - DNA, 80 bp, synthetic construct
  source 1..80: mol_type = other DNA
ccatcctccttaagaaaagatgatgagccacagtctaggagaagatattccaatacttatattttactaaggatctttat

SEQ ID NO: 10413 - DNA, 80 bp, synthetic construct
  source 1..80: mol_type = other DNA
aaatgaattaataaatcatgatgtacagtattcagacaatagaatactcgagagcaacagaaaataactactgttactag

SEQ ID NO: 10414 - DNA, 80 bp, synthetic construct
  source 1..80: mol_type = other DNA
ccgggaggcagaggttgcagtgagccaagactgagccactgcactccaacctgggcaacaagagtgaaactctgtcagga

SEQ ID NO: 10415 - DNA, 80 bp, synthetic construct
  source 1..80: mol_type = other DNA
gaagccgattgaaagttaacttcaccctgaagaaactcctcctggcgtttgcaacgatctcctgtatgtctcacgtccag

SEQ ID NO: 10416 - DNA, 80 bp, synthetic construct
  source 1..80: mol_type = other DNA
ggagttagaaaaagaaacagaaaaagacttgagccttttagcttctgatctgaaatcagacttgggccacacaggtctat

SEQ ID NO: 10417 - DNA, 80 bp, synthetic construct
  source 1..80: mol_type = other DNA
agagaaaagaaaggaaagtagcttagtggtaaaaataaaggcactgttcctgatttgtggtcaacccaagatcaactcac

SEQ ID NO: 10418 - DNA, 80 bp, synthetic construct
  source 1..80: mol_type = other DNA
caaaaaaaaaaaaaagtaaaatttccctgcagatctgtctgctaactgggcctggaagaaatacctcagaaacaataagc

SEQ ID NO: 10419 - DNA, 80 bp, synthetic construct
  source 1..80: mol_type = other DNA
tgataattgtgctgtgttaaggaactgatcttgttttaagaaatacacattgatgaatttagggattaaaaagatataat

SEQ ID NO: 10420 - DNA, 80 bp, synthetic construct
  source 1..80: mol_type = other DNA
aggagagctgcaacatatgtaaagataaaaaaacagaactttaaaaaaaaatagacaaatccacaattactttggagact

SEQ ID NO: 10421 - DNA, 80 bp, synthetic construct
  source 1..80: mol_type = other DNA
atcagtcctctaagctcttacttgtagaaatcaggtgggaaaaagagcaaaataacccaaagcaaatagaagaaaggaaa

SEQ ID NO: 10422 - DNA, 80 bp, synthetic construct
  source 1..80: mol_type = other DNA
tggctgacatgccgctgtttgcctggagagaaccaatagatgccaggaaattaaaaaagaaaaagtatgaaacacaaaga

SEQ ID NO: 10423 - DNA, 80 bp, synthetic construct
  source 1..80: mol_type = other DNA
aaaaaaaagatgcccactggcatttttctctcttcttggtctttgcgtctctttaatcatagtacaaaatggaaggccgg

SEQ ID NO: 10424 - DNA, 80 bp, synthetic construct
  source 1..80: mol_type = other DNA
cttgaaacgaaaaacgaaagattagaaaagtgtcagataataaccacaagaagtttcctttgtggcctgaagacgttgag

SEQ ID NO: 10425 - DNA, 80 bp, synthetic construct
  source 1..80: mol_type = other DNA
ttacacagagaactcaggcaattaactccgtctccagcctggggtttgtaagcattagtagtagtagacacattacatgg

SEQ ID NO: 10426 - DNA, 80 bp, synthetic construct
  source 1..80: mol_type = other DNA
tacctgtttaaatctgcactttccaatatggttaccattagccacattggctattgaatgcttgaaattgcccagtccaa

SEQ ID NO: 10427 - DNA, 80 bp, synthetic construct
  source 1..80: mol_type = other DNA
tccggaagataaagtagaagacttgtattatcttttaattggacagcattgtctagagatgatgttatctctttaaatgc

SEQ ID NO: 10428 - DNA, 80 bp, synthetic construct
  source 1..80: mol_type = other DNA
aaaccaaaaaacaaacaaacaaacaaaaagccaggcttgttgttgcatttctgtagtctcagctactcaggaggttgaca

SEQ ID NO: 10429 - DNA, 80 bp, synthetic construct
  source 1..80: mol_type = other DNA
caatatcacccgtcattcactcacctcccctccacccaagaaatataagttctgctgcaatttatgtgtgaaataggatc

SEQ ID NO: 10430 - DNA, 80 bp, synthetic construct
  source 1..80: mol_type = other DNA
cgcgcccctgtagtcccagctacagaatctcttgaacccaggaggcagaggttgcagtgagccgagatcacaccactaca

SEQ ID NO: 10431 - DNA, 80 bp, synthetic construct
  source 1..80: mol_type = other DNA
tggaacgtgatgcggaaattaaaacagcagctacatataaatctcaacacagtgcttaaaatgtgtgtaaatggttctag

SEQ ID NO: 10432 - DNA, 80 bp, synthetic construct
  source 1..80: mol_type = other DNA
gctcctgcagatggatagaggtcacttttctgccttctgggtgtttagtaacttatttttttttttgctttgttggcatg

SEQ ID NO: 10433 - DNA, 80 bp, synthetic construct
  source 1..80: mol_type = other DNA
agacagaaaaatttaaagttggggaatatcatggaccgcttctcactagtgcccggggaagaaaacaaaacctggaggta

SEQ ID NO: 10434 - DNA, 80 bp, synthetic construct
  source 1..80: mol_type = other DNA
gtgtggatcgcttcaggtcagaaatcgagaacagcctggccaacatggcaaaacgccgtttctcctaaaaatacaaaaat

SEQ ID NO: 10435 - DNA, 80 bp, synthetic construct
  source 1..80: mol_type = other DNA
aaattctcccttctcaaatttcttttccctcttccttcaagggctgtactcttctatcaagagtaacgtagatggatact

SEQ ID NO: 10436 - DNA, 80 bp, synthetic construct
  source 1..80: mol_type = other DNA
ttcaacctacctagcagagtgaagctctatgagtctaatatcttggctttcttccacatcagcaagcctctgaaattcgg

SEQ ID NO: 10437 - DNA, 80 bp, synthetic construct
  source 1..80: mol_type = other DNA
attcaaacacaggaggctgagccccatccatactcagcagttctgattcaatagacctaaggttgggcctgaaatttatt

SEQ ID NO: 10438 - DNA, 80 bp, synthetic construct
  source 1..80: mol_type = other DNA
ttcgctctgttctttggcccagaaaacaaaaataacttaaaaaaaaatagatgccttcagggcgcttttctcccttctcc

SEQ ID NO: 10439 - DNA, 80 bp, synthetic construct
  source 1..80: mol_type = other DNA
tgcacttagcattttttcataagggtccttagctggcgtggtgtcttacgcctgtactcccagctactctagaggctgag

SEQ ID NO: 10440 - DNA, 80 bp, synthetic construct
  source 1..80: mol_type = other DNA
tatagacaaaattgatgtgtattcatgtgtgtttgcctgcctgactgtgtctgtgtgtgtgcatgtaaatgatgggaagg

SEQ ID NO: 10441 - DNA, 80 bp, synthetic construct
  source 1..80: mol_type = other DNA
tgggattaatctcaccccaaccccagcatcatgcactatacccatgtaacaaacctggacatgtaccccctgaatctaaa

SEQ ID NO: 10442 - DNA, 80 bp, synthetic construct
  source 1..80: mol_type = other DNA
ttattattattattattattgttattattattattttgtatttttagtagtgacagggtatcaccatgttggccaggcag

SEQ ID NO: 10443 - DNA, 80 bp, synthetic construct
  source 1..80: mol_type = other DNA
cttatttttgttctttcctggataccaatgaggaaataacttaagatttggaaattctaggcaaggtttccaggctaaag

SEQ ID NO: 10444 - DNA, 80 bp, synthetic construct
  source 1..80: mol_type = other DNA
ccctgcccaacacacataaataacatcaaatcagaaatgaattgtaattgccacagtctatagcatattggaatttctta

SEQ ID NO: 10445 - DNA, 80 bp, synthetic construct
  source 1..80: mol_type = other DNA
gtcaaatcagcaagatagatgctcccatgcttggtcaccttggaaacaccgctcagaaaactaaaggaaactatctaaaa

SEQ ID NO: 10446 - DNA, 80 bp, synthetic construct
  source 1..80: mol_type = other DNA
agattctcttacaggcttttttctttttttctctccctcttgtaaggcccgaacctccccagacaggaaacaacattcct

SEQ ID NO: 10447 - DNA, 80 bp, synthetic construct
  source 1..80: mol_type = other DNA
taatataggtgaatccctcacaagttgagtgggttgacctcaaaattgactttagcgatggcttgtgaccacctggtagg

SEQ ID NO: 10448 - DNA, 80 bp, synthetic construct
  source 1..80: mol_type = other DNA
ttctatggtttctgattatttcatttacaactagaaataggctggagggccaggagtagtacttgcttccatagtgcgtg

SEQ ID NO: 10449 - DNA, 80 bp, synthetic construct
  source 1..80: mol_type = other DNA
ctccacagatctctctgctaattgggcctagaagaaatgatacctcagatgcaatgagcaaagataattctatatattga

SEQ ID NO: 10450 - DNA, 80 bp, synthetic construct
  source 1..80: mol_type = other DNA
tatagactgtatattagagaatactattttatcaatgttaagttctctaaatttgataattgtgctgtggtaagaaattg

SEQ ID NO: 10451 - DNA, 80 bp, synthetic construct
  source 1..80: mol_type = other DNA
tgccttgagtggttttgaggctcatgaagtctaaataacgtaatattgaaattaacatcttggcaaaattcaacagccct

SEQ ID NO: 10452 - DNA, 80 bp, synthetic construct
  source 1..80: mol_type = other DNA
gcgatccccatcaagctaccaatgactttcttcacagaattggagaaaaactattttaaagttcatatggaaccaaaaaa

SEQ ID NO: 10453 - DNA, 80 bp, synthetic construct
  source 1..80: mol_type = other DNA
caaccccatcaaaccccaacaaaaagtgggcaaaggatatgaacagacacttctcaaaagaagacatttatgcagccaat

SEQ ID NO: 10454 - DNA, 80 bp, synthetic construct
  source 1..80: mol_type = other DNA
aaaaaaaaaaaacagaaattaacgtcttggggtcacgtgtttacttctcatgtgacaggcaacgaaaagagagtaggaca

SEQ ID NO: 10455 - DNA, 80 bp, synthetic construct
  source 1..80: mol_type = other DNA
taagagcaaaactttgatgagaaaaccccaggtgagaatgaaaaccacatgcaacctgttattcattgccaaggggttct

SEQ ID NO: 10456 - DNA, 80 bp, synthetic construct
  source 1..80: mol_type = other DNA
caagctctggtgtgtgtgtgtttgtgcgcgcgcgcgcgcgtgaaagtgctgggaggatgtgagaaaaattatctaggctg

SEQ ID NO: 10457 - DNA, 80 bp, synthetic construct
  source 1..80: mol_type = other DNA
tttgttgacagggagagggaggtttgattacactgttgtaagtctcccaccttgattgaatattaaaaaagaattcctga

SEQ ID NO: 10458 - DNA, 80 bp, synthetic construct
  source 1..80: mol_type = other DNA
agtgagtataagtggcaaagagacattgtggaactgtactttgaaaatgagagaagagagagaaaaaatgtcaacagaac

SEQ ID NO: 10459 - DNA, 80 bp, synthetic construct
  source 1..80: mol_type = other DNA
atgattcagcaatagaaatatatattttttgcaattatgttttctgttagaatagaaaattgggggaaaaaacacagccg

SEQ ID NO: 10460 - DNA, 80 bp, synthetic construct
  source 1..80: mol_type = other DNA
tttatcttttatttcctactttttaaataacaatactccaaaggttaatgagctcgtcaatttggcgacgccattgaagt

SEQ ID NO: 10461 - DNA, 80 bp, synthetic construct
  source 1..80: mol_type = other DNA
gcgccccctttcgggcagaatccgctcccggtccggtcccgattggcagaaaacgatacgagggcggtatacactcaaca

SEQ ID NO: 10462 - DNA, 80 bp, synthetic construct
  source 1..80: mol_type = other DNA
atatttgaaagtcaacaaaatagacaaacctctagccaacaaagagaaaattagtgcaaatacacaaaattagaactgga

SEQ ID NO: 10463 - DNA, 80 bp, synthetic construct
  source 1..80: mol_type = other DNA
tacaggtgcctgccaccacagccagcctctaatgttgatagtagagtagggtgactatagttagcaacaatgtattgtat

SEQ ID NO: 10464 - DNA, 80 bp, synthetic construct
  source 1..80: mol_type = other DNA
aggctggggccaagatcatgccactgcactctagcctgggagacagagcgagactccatctcaaaaaaaaaaaaacaaaa

SEQ ID NO: 10465 - DNA, 80 bp, synthetic construct
  source 1..80: mol_type = other DNA
aaagtagatagcttccaatcctttcccaaaataactgatttaatttgtaacatagaatagagaagtggaaagctaagggc

SEQ ID NO: 10466 - DNA, 80 bp, synthetic construct
  source 1..80: mol_type = other DNA
actactgttcaacatagcactagaagtcctactcagagcaattagacaagaaaaaaagccccagtgcgctggctacagcc

SEQ ID NO: 10467 - DNA, 80 bp, synthetic construct
  source 1..80: mol_type = other DNA
tttgaaccatactagaaagcaacgctaatgaagatggttgtaggggccaggcgcagtggctcatgcctgtaatcccagca

SEQ ID NO: 10468 - DNA, 80 bp, synthetic construct
  source 1..80: mol_type = other DNA
caacattactaatcattagagaaatacaaatcaaaatcataatgaaatataatctcacatctgttaggatggccctatga

SEQ ID NO: 10469 - DNA, 80 bp, synthetic construct
  source 1..80: mol_type = other DNA
tagtcttctatgttgatgattattgtggtgtaagactagaggaaaatggttggtgagagttttcccaacacagggtttct

SEQ ID NO: 10470 - DNA, 80 bp, synthetic construct
  source 1..80: mol_type = other DNA
ctgcactccagcctgggtgacagggtgagactaggtctcaaaaaaaaaaaaaagtacacaacagcacaacatatcaaaat

SEQ ID NO: 10471 - DNA, 80 bp, synthetic construct
  source 1..80: mol_type = other DNA
cagagtgtacctggaaaatcgggacactcctgccctaatactgcacttttccaatggtcttagcaaatggcacaccagga

SEQ ID NO: 10472 - DNA, 80 bp, synthetic construct
  source 1..80: mol_type = other DNA
agaatttagagaaaaaagggtaaaaagaagccgggcgcggtggctcacgcctgtaatcccagcattttgggaggccgagg

SEQ ID NO: 10473 - DNA, 80 bp, synthetic construct
  source 1..80: mol_type = other DNA
aaatgtaaagcaaaaaaaaaagcagcagttgcaatcctagtctctgataaaacagactttaaaccaacaaagatcaacaa

SEQ ID NO: 10474 - DNA, 80 bp, synthetic construct
  source 1..80: mol_type = other DNA
aatagagactaatcaaacagatgcaatgaaaaatgataaaggggatatcaccaccgatcccacagaaatgcaaactacca

SEQ ID NO: 10475 - DNA, 80 bp, synthetic construct
  source 1..80: mol_type = other DNA
gattgtatatttagaaaaccccatcgtctcagtccaaaatctccttaagctgataagcaacttcagcaaagtctcaggat

SEQ ID NO: 10476 - DNA, 80 bp, synthetic construct
  source 1..80: mol_type = other DNA
agctgaaactggatccctcccttaaaccttatacaaaaattaattcaagatggatgaaagacttaaatgttagacctaaa

SEQ ID NO: 10477 - DNA, 80 bp, synthetic construct
  source 1..80: mol_type = other DNA
cctcatgttctcactcatggggggaattgaacaataagaacacttggacacaggaaggggaatgtcacacaccagggcct

SEQ ID NO: 10478 - DNA, 80 bp, synthetic construct
  source 1..80: mol_type = other DNA
ggtggcatttctccatgtcttatatatctcagttattatttattcaaatattgcctctgctctattgtctttcatccatt

SEQ ID NO: 10479 - DNA, 80 bp, synthetic construct
  source 1..80: mol_type = other DNA
tgtgaagtctaggttaaagttttattccttcagagaggattttcttttgcttcttcagaaacctagatgtgctgaaatac

SEQ ID NO: 10480 - DNA, 80 bp, synthetic construct
  source 1..80: mol_type = other DNA
gccactgcgctcggccctccctttttttttttttttttttttggtctataaatcttcttccaccatgtgactgcgctgag

SEQ ID NO: 10481 - DNA, 80 bp, synthetic construct
  source 1..80: mol_type = other DNA
actatcaccgtaacttgatgtaaacttgaacttagtatacagtaaggctgagcttataaaatgttcattcaggcttacgt

SEQ ID NO: 10482 - DNA, 80 bp, synthetic construct
  source 1..80: mol_type = other DNA
ccatacagaaaggtagtcgccatctcaaaactctcatatatagcaaaggactttggtcttcccaagatagccatttggtt

SEQ ID NO: 10483 - DNA, 80 bp, synthetic construct
  source 1..80: mol_type = other DNA
ccgcttcctgcctggggactagactgctttcgcaggactaacaaattagccacaagattataaattatggtttaggagtc

SEQ ID NO: 10484 - DNA, 80 bp, synthetic construct
  source 1..80: mol_type = other DNA
gtccaccgattccctgcaggccaatgtgcagcgtctgaatgagtattgctccaaactcatcctcttccccagaaagccct

SEQ ID NO: 10485 - DNA, 80 bp, synthetic construct
  source 1..80: mol_type = other DNA
tggatccaaagcttacattatgctttaataaaagttaccctaataaagtcagaaacaataacaatgagtcaaagaaatgc

SEQ ID NO: 10486 - DNA, 80 bp, synthetic construct
  source 1..80: mol_type = other DNA
gaattgagagagaatgaaagtgccacaaaaacaaaagaaaaaaaattgaggcgagtcgtggacatgatagacatgatttt

SEQ ID NO: 10487 - DNA, 80 bp, synthetic construct
  source 1..80: mol_type = other DNA
aatccagaaatgagcttctggaacaaatcctaaatccttttttgtctgtcttcttctgattcgctctcatccttaaggga

SEQ ID NO: 10488 - DNA, 80 bp, synthetic construct
  source 1..80: mol_type = other DNA
aatcgttagatgcggtgtagccagagttcattccctctgacgttcggatgtgttatagagtttcttccttctggtggttt

SEQ ID NO: 10489 - DNA, 80 bp, synthetic construct
  source 1..80: mol_type = other DNA
ccgtggagcagggggcggcgctcgtcggggaggctcgggccgcgcaggagcccatggcggggaggggcgtctcaggcatg

SEQ ID NO: 10490 - DNA, 80 bp, synthetic construct
  source 1..80: mol_type = other DNA
catttttgaaggctcttgtgtcaataaaatttgtttgatttgtatgcttttcctttttttttttttttttttttgttgtt

SEQ ID NO: 10491 - DNA, 80 bp, synthetic construct
  source 1..80: mol_type = other DNA
aaactgtttctaagttaattttctggctttttgcctactgtgtttgagcaatgagactgtttttcttggtaggttctcag

SEQ ID NO: 10492 - DNA, 80 bp, synthetic construct
  source 1..80: mol_type = other DNA
tatcattgtgttttctcccactggcactattagggatgccactgtgggcttcaggcctggattacaaaaccacccatgtc

SEQ ID NO: 10493 - DNA, 80 bp, synthetic construct
  source 1..80: mol_type = other DNA
ctatattttcttctgatgcccagtgttggatatctttgctatgcccatcaatgtaccagggcctagcagatattggcggg

SEQ ID NO: 10494 - DNA, 80 bp, synthetic construct
  source 1..80: mol_type = other DNA
ctgcttgctctagcagttgagcaatattggatacagctgcatgtacagggcgtaccactttgttcagctagcggtaatcc

SEQ ID NO: 10495 - DNA, 80 bp, synthetic construct
  source 1..80: mol_type = other DNA
agggtgctgattggtgtgtttacaatccctgagctagataaaaagactctccacgtccccaccagactcaggagcccagc

SEQ ID NO: 10496 - DNA, 80 bp, synthetic construct
  source 1..80: mol_type = other DNA
tatctagcagaggcaaatgtaaaactaattggtaaactgagacaaaaacgtatgctgacaattcaaggacatttctattt

SEQ ID NO: 10497 - DNA, 80 bp, synthetic construct
  source 1..80: mol_type = other DNA
atatggctactttagataatgggagtgctaaaagcaaggagccagcaagtctagcagacatacaagtcctgttgtctccc

SEQ ID NO: 10498 - DNA, 80 bp, synthetic construct
  source 1..80: mol_type = other DNA
taaattgggaagcagccaacagaccaaagaatgacttggacacgtacagcttgacaagtaagatgaatttattaggactt

SEQ ID NO: 10499 - DNA, 80 bp, synthetic construct
  source 1..80: mol_type = other DNA
aagcataggtccatcagaatcatctggatgacttgttgaaacatattggaacatcctttgggaatttctgatttagtgga

SEQ ID NO: 10500 - DNA, 80 bp, synthetic construct
  source 1..80: mol_type = other DNA
tcattgaccttattctctgtcctactctaaggagggcataatgtgtgtctcctgcaatcggtcataggaataatgcttaa

SEQ ID NO: 10501 - DNA, 80 bp, synthetic construct
  source 1..80: mol_type = other DNA
gagaggaaaaaacatctccatgaactctcagtacttatttttattttagaattagaaccctgtgagaaagctgacaattg

SEQ ID NO: 10502 - DNA, 80 bp, synthetic construct
  source 1..80: mol_type = other DNA
gaggctgaggtgggaggatccctttagcccaggaggtcgaggctgcagtgagccgttatagcgtcactgcactccagcct

SEQ ID NO: 10503 - DNA, 80 bp, synthetic construct
  source 1..80: mol_type = other DNA
cttcaagtcaggaatggaagtcactaagctccatgtaaataaacagtatatgtgaactgaataacctactttgttccggc

SEQ ID NO: 10504 - DNA, 80 bp, synthetic construct
  source 1..80: mol_type = other DNA
tgtgaaaaaaagaagtacgaggataaaataaaaaaataagggatggggacttctttaggaagcatccaccctcctggagg

SEQ ID NO: 10505 - DNA, 80 bp, synthetic construct
  source 1..80: mol_type = other DNA
aagttatttctggagcacaagtctcaatgtttagaacaaatttttattgtttaatggcacgatgcagtgtggtaaaatat

SEQ ID NO: 10506 - DNA, 80 bp, synthetic construct
  source 1..80: mol_type = other DNA
tgctcatctgttgatggctggattctccttttagctattatgaatgatgctgcaaagaacattggattacaaggatctgt

SEQ ID NO: 10507 - DNA, 80 bp, synthetic construct
  source 1..80: mol_type = other DNA
aaaatttattacaaagaacataaagaacaaggtttccacaacagagagatcgactccgagtaggttatcgtggctgctcc

SEQ ID NO: 10508 - DNA, 80 bp, synthetic construct
  source 1..80: mol_type = other DNA
gagaatctttatgtcttgtagctaagggtttgtgaatgcacctaatcagcactctgtatctagctcaaggtttgtaaaca

SEQ ID NO: 10509 - DNA, 80 bp, synthetic construct
  source 1..80: mol_type = other DNA
actacaacatatatgtatactataatgtttataatgcctgaaccccacccataaaaatgaacatgccataacctggtcat

SEQ ID NO: 10510 - DNA, 80 bp, synthetic construct
  source 1..80: mol_type = other DNA
aaagacggggaacaacactggactgtagctcgtagacaaaggaaaccttgagaagtttaacactgtatcatagttttaga

SEQ ID NO: 10511 - DNA, 80 bp, synthetic construct
  source 1..80: mol_type = other DNA
ttaatacctttcaactgatacccagtattttataagctttattggatatagtgagcatcttttcctgaaagagagagcag

SEQ ID NO: 10512 - DNA, 80 bp, synthetic construct
  source 1..80: mol_type = other DNA
tactaagatctgagctccaaatgaaagtcttgccacactgatcacattcatagtgtctgtgaaaatacagcttctataat

SEQ ID NO: 10513 - DNA, 80 bp, synthetic construct
  source 1..80: mol_type = other DNA
cagtaagttctatttccctttccttcaacagatttgcaaatttagctgtaaatgaaggatttgaacacaaacaaattcac

SEQ ID NO: 10514 - DNA, 80 bp, synthetic construct
  source 1..80: mol_type = other DNA
aaaaagaaggtgtgtgtaatattagctttcagttttatgcaagtcactatagtgacagtgtgaaagatggtcttcaagga

SEQ ID NO: 10515 - DNA, 80 bp, synthetic construct
  source 1..80: mol_type = other DNA
tgactgctaaggagtatttttttttaccttgaggtgataaaaatgttctaacactgatggtgataatgtttgcacaactc

SEQ ID NO: 10516 - DNA, 80 bp, synthetic construct
  source 1..80: mol_type = other DNA
gaaacgcaatttaattcagttcaactgcagttgagcatttgtgggggtgggggcggggttgggatgaggggttggagaca

SEQ ID NO: 10517 - DNA, 80 bp, synthetic construct
  source 1..80: mol_type = other DNA
cttttaatccgaaagccagcaaactgagaagatggaacactagtgttctaaagtaccaccttaaaatttaaattttacca

SEQ ID NO: 10518 - DNA, 80 bp, synthetic construct
  source 1..80: mol_type = other DNA
gaacgtacagctttcatatttcattcaatggttaaaatggtactcaattttgactgacaaaacggtaatgatcagatgcc

SEQ ID NO: 10519 - DNA, 80 bp, synthetic construct
  source 1..80: mol_type = other DNA
aggagaggaaaaagaaaagtatgtgtcagaagtgggattcgaacccacgcctccattggagaccagaatccccaccgcgg

SEQ ID NO: 10520 - DNA, 80 bp, synthetic construct
  source 1..80: mol_type = other DNA
agcaatctgagctccaggccgggaagccccaaggtcacaaattttaatggagccctgaaactaaacagaaatcatccctc

SEQ ID NO: 10521 - DNA, 80 bp, synthetic construct
  source 1..80: mol_type = other DNA
taattttttattttcatcagcaatgctgtaaaaactatccttacataaatattttcaaacatccacgattatttccttaa

SEQ ID NO: 10522 - DNA, 80 bp, synthetic construct
  source 1..80: mol_type = other DNA
atctcttattaacaagaatcccattatgtcccttaaacatttagttacttccatcttacagaaactagaagctatacaat

SEQ ID NO: 10523 - DNA, 80 bp, synthetic construct
  source 1..80: mol_type = other DNA
tctacatttttatgaaaacatctgtaagaggaattttaaaaggcctgacaaattatttaaagagggaagcagagggacta

SEQ ID NO: 10524 - DNA, 80 bp, synthetic construct
  source 1..80: mol_type = other DNA
ctctaacgctggtttggttgggatttattattactctcacagacttcatataggaggaatttctggtttcaacaaagtgc

SEQ ID NO: 10525 - DNA, 80 bp, synthetic construct
  source 1..80: mol_type = other DNA
atgtctttagtgactcaattcctgactcggtgaactcaaaagttgcttacctttctgcagatgagtaaacttagaatcac

SEQ ID NO: 10526 - DNA, 80 bp, synthetic construct
  source 1..80: mol_type = other DNA
actccacctcaaaaaaaaaagaactgtaggctatgaatgtccaacactactttcttagcaccactagaaagtagtgacat

SEQ ID NO: 10527 - DNA, 80 bp, synthetic construct
  source 1..80: mol_type = other DNA
ttccagtctaggttgttagaaaggagccctagcccagaaatgacagcaaatagccataatcattatgtggggctgaacca

SEQ ID NO: 10528 - DNA, 80 bp, synthetic construct
  source 1..80: mol_type = other DNA
cttgccgcagattatcagagaggatcaggctggggtaggccgtgtctgggtccagagtcacgtccactgtagagacacaa

SEQ ID NO: 10529 - DNA, 80 bp, synthetic construct
  source 1..80: mol_type = other DNA
gagccactacacccagcccaaatcactcttttatccattctataagatctttactctgcacatcgaagctctattcatct

SEQ ID NO: 10530 - DNA, 80 bp, synthetic construct
  source 1..80: mol_type = other DNA
gaatacttctgcaatgttaaatttacccaggctctatagtagggtgaaagcggttgtgagggggaagggaagtttcaaac

SEQ ID NO: 10531 - DNA, 80 bp, synthetic construct
  source 1..80: mol_type = other DNA
aaccacttctggtattatccactgtattgagtggagtttctccccatttgtcttgcttgtagaggacatgtatctgctag

SEQ ID NO: 10532 - DNA, 80 bp, synthetic construct
  source 1..80: mol_type = other DNA
cccttatcccacgtttcccactttcagtgcagatgttcttttttccaagcaactttacatcaaaagcccagtaggtagat

SEQ ID NO: 10533 - DNA, 80 bp, synthetic construct
  source 1..80: mol_type = other DNA
ccatgacagtccttgatatttatggtgggcaattaacccgaattctcaggttcccaaatatggaaagaatgacatgttca

SEQ ID NO: 10534 - DNA, 80 bp, synthetic construct
  source 1..80: mol_type = other DNA
ttcctatcttatatagccaaattcaatccttaatgtcacaaactgctagggtctgaggcagctaactctgtatgttaggt

SEQ ID NO: 10535 - DNA, 80 bp, synthetic construct
  source 1..80: mol_type = other DNA
ccatcctcaggctcagggctcctttcaggatttacaaatgtgaaggagacagtcttctcatatttgatttaacactaggg

SEQ ID NO: 10536 - DNA, 80 bp, synthetic construct
  source 1..80: mol_type = other DNA
gaaaaccactccgtatcagttcataggtatcattcttttcctttttttaacttggatagtattccatagtgtatatgtgc

SEQ ID NO: 10537 - DNA, 80 bp, synthetic construct
  source 1..80: mol_type = other DNA
agaaattctcctccaaaagggtcatgattttgcattcctaccagcccactggcatatgagtgtctctccgacacttcgtc

SEQ ID NO: 10538 - DNA, 80 bp, synthetic construct
  source 1..80: mol_type = other DNA
cataaaaataagcacataataatatgtgcttattttatatgtgcatattattatgtgcttatttttctatctgaagttga

SEQ ID NO: 10539 - DNA, 80 bp, synthetic construct
  source 1..80: mol_type = other DNA
ctaaaaaaaatttaaaaaaaggttttaaagccttaattatggtgcttgcttcagcagcagatatcctcaaatgggaacca

SEQ ID NO: 10540 - DNA, 80 bp, synthetic construct
  source 1..80: mol_type = other DNA
ttgcttaatagtgtgaggtttccttttgggtggtaaaagtgttttagatccagacagtggttgataatttacaacactgt

SEQ ID NO: 10541 - DNA, 80 bp, synthetic construct
  source 1..80: mol_type = other DNA
cactgaccaaatactcctactagttctcgcaaaccaactgtctttcccatactctgaaacaatcatttcttcccatacaa

SEQ ID NO: 10542 - DNA, 80 bp, synthetic construct
  source 1..80: mol_type = other DNA
tgacgctgtggctcacacttgtaatcccaacactttgggaggccgaggagggcagatcacgaggtcaggagtttgagacc

SEQ ID NO: 10543 - DNA, 80 bp, synthetic construct
  source 1..80: mol_type = other DNA
gactgctcaggtaacctaaccactcctgctcaagtgctcattgttttgtggctatagtaatacattaaaactacaggata

SEQ ID NO: 10544 - DNA, 80 bp, synthetic construct
  source 1..80: mol_type = other DNA
gtgacagcctgcaatgaaagaaactggtaccatcttcacagaagcaatttcacacaatgttcatgtgatgaacaagaatt

SEQ ID NO: 10545 - DNA, 80 bp, synthetic construct
  source 1..80: mol_type = other DNA
agaattaaggcattgttaagaaaggagaataagccaaagagaagcaacagtggggattacacaaatccactattagcaat

SEQ ID NO: 10546 - DNA, 80 bp, synthetic construct
  source 1..80: mol_type = other DNA
accatcttcccaacctactcaagagttctcaccagagtgagtgaaataatatagctgaaaggtccataaatgttaagtga

SEQ ID NO: 10547 - DNA, 80 bp, synthetic construct
  source 1..80: mol_type = other DNA
gcttcaggggctcgcggtgcttctcgcacacgcccatctcgccgccgggccccgacggccgctcggtgcgcagctgcttt

SEQ ID NO: 10548 - DNA, 80 bp, synthetic construct
  source 1..80: mol_type = other DNA
aaaagaaagctggctttggccgcgcgcagtggctcgcgcctgtaatcccagcatttgggaggccaaggcaggtggatcac

SEQ ID NO: 10549 - DNA, 80 bp, synthetic construct
  source 1..80: mol_type = other DNA
ttgtcttgctatctgagcaaggcgggcttctgcttccagaccatcactttatttttattttttcaaagtgaaagtaagat

SEQ ID NO: 10550 - DNA, 80 bp, synthetic construct
  source 1..80: mol_type = other DNA
aggtgggagtgggggaaagggaatatttacattagcaatctctaacagtccccttccttttttttaatttaaaaaagtta

SEQ ID NO: 10551 - DNA, 80 bp, synthetic construct
  source 1..80: mol_type = other DNA
cgtctcaaaaaaagagtattaataaaatatactttttttttttttgagacagagtctcgctctgtcgcccaggctggagt

SEQ ID NO: 10552 - DNA, 80 bp, synthetic construct
  source 1..80: mol_type = other DNA
acagaagaatgcgggttaagcttcctgctaccttagcgttatcaatcagtccaagttccattgtataaaatccctagcaa

SEQ ID NO: 10553 - DNA, 80 bp, synthetic construct
  source 1..80: mol_type = other DNA
tctcatctcacttcttatactgaactatattattgatcaatgaaatttttttaagaaaattaatccataaaaattccagg

SEQ ID NO: 10554 - DNA, 80 bp, synthetic construct
  source 1..80: mol_type = other DNA
attacagcattgtttggatttgtaaaatactgggaccaacgtcaatatgctccaacaggggataagttaatgaaaatatt

SEQ ID NO: 10555 - DNA, 80 bp, synthetic construct
  source 1..80: mol_type = other DNA
acaacattctcgaaatgataaaattatagagatagagagcagatgagtagttgctaggcattagggagagagaagggaag

SEQ ID NO: 10556 - DNA, 80 bp, synthetic construct
  source 1..80: mol_type = other DNA
aaatataatttatttttgaattggttatgtgcttcccaacatttagctatattctatttcctggggataaaatctttgaa

SEQ ID NO: 10557 - DNA, 80 bp, synthetic construct
  source 1..80: mol_type = other DNA
cctgagacaccatagatatgtctttattagtctcctcaggctggcatacaaaatactagatggcttaaaaaacgggaatt

SEQ ID NO: 10558 - DNA, 80 bp, synthetic construct
  source 1..80: mol_type = other DNA
aggtgttacagaaaaatcatcccagtgagccctacctgttggggcagtttgttatgcagtatgaaataatcagaataagg

SEQ ID NO: 10559 - DNA, 80 bp, synthetic construct
  source 1..80: mol_type = other DNA
gaaacttcgaatcatggcggaaaacaaagggggagcaggcatatcgcctagcgagaatggagcaaggaggccccaccgga

SEQ ID NO: 10560 - DNA, 80 bp, synthetic construct
  source 1..80: mol_type = other DNA
gctaattttttttttttttttttgtagagatggtggggcagggggagtcttactatgttgcccaggctggtctcgaactc

SEQ ID NO: 10561 - DNA, 80 bp, synthetic construct
  source 1..80: mol_type = other DNA
cgtaccttacattcattaacatatcctctttctagaagctttactttccctgtcatacttaggtgtatggtccattatga

SEQ ID NO: 10562 - DNA, 80 bp, synthetic construct
  source 1..80: mol_type = other DNA
ggtttctgtgggattatcattgacctgtttttactttgtcttagtgatagctttgtaggaaagattaatttttccttagc

SEQ ID NO: 10563 - DNA, 80 bp, synthetic construct
  source 1..80: mol_type = other DNA
tacctttcttctgtgttaggtccccagtcaccggatttcatatttcctttttcttagtttaattccctagttagtggaca

SEQ ID NO: 10564 - DNA, 80 bp, synthetic construct
  source 1..80: mol_type = other DNA
tcataatattattaataattttaagaactcccctcctttttgtttcatgagtgcagtatcttctcttactttcccgagga

SEQ ID NO: 10565 - DNA, 80 bp, synthetic construct
  source 1..80: mol_type = other DNA
cattaaatcgcgaacgtagtaatgacttaacgctggttacgcattcattacaatcgaagattatattaatttgcgatggt

SEQ ID NO: 10566 - DNA, 80 bp, synthetic construct
  source 1..80: mol_type = other DNA
tacagatgcctctagaacaacctccgagtatcttggcactgcccctcagttgtaaccatgggcttaaatttttaaaatct

SEQ ID NO: 10567 - DNA, 80 bp, synthetic construct
  source 1..80: mol_type = other DNA
tggtctaaactaccccagatccaggtaaataacggatcaagtccttcttccctaaaacaggtgttattctttctattcta

SEQ ID NO: 10568 - DNA, 80 bp, synthetic construct
  source 1..80: mol_type = other DNA
aggaggggaatcctgccccatttatcatcaacacagtaaaaaggggtcgaagagaccgagagcgccagaggacgccatgg

SEQ ID NO: 10569 - DNA, 80 bp, synthetic construct
  source 1..80: mol_type = other DNA
ccaaaattctcatctcccctcccgccctgcataccaattggagatagagctggtagcattttcaaatgtttttcagatat

SEQ ID NO: 10570 - DNA, 80 bp, synthetic construct
  source 1..80: mol_type = other DNA
ttccagccctacaaggtggtagctacttcccagtagttatcacctctgagttaccatggtgtgcccagttgaaataccta

SEQ ID NO: 10571 - DNA, 80 bp, synthetic construct
  source 1..80: mol_type = other DNA
gaaaagacaacagtgatttaagttgtggaggtcagccagaccttgagaatattctgattcatgagtctgagatagaatct

SEQ ID NO: 10572 - DNA, 80 bp, synthetic construct
  source 1..80: mol_type = other DNA
ttgctttatttctgcctttccctgtaaagagcttttcttggtaaataagcagctgagacatcttgacacctcctgccctc

SEQ ID NO: 10573 - DNA, 80 bp, synthetic construct
  source 1..80: mol_type = other DNA
tcaacattttgtaacctgaacgttttctcaagagcatgtgttacagtgactgtttaaacagtgtaatttgtcgtttaacg

SEQ ID NO: 10574 - DNA, 80 bp, synthetic construct
  source 1..80: mol_type = other DNA
cccacggaggcgggggaaggctcaggcatggcaggctgcagtcccgaagcctgccccgcgggaaggcaactaaggcccgg

SEQ ID NO: 10575 - DNA, 80 bp, synthetic construct
  source 1..80: mol_type = other DNA
ttacacaaagatgggagttaattttttccatgagttggggacaaaaataactgtgagccatattcaaagtgggcaaaagc

SEQ ID NO: 10576 - DNA, 80 bp, synthetic construct
  source 1..80: mol_type = other DNA
caagaaagttataatatgttcatattctggcttggcatatttctggcatttagttaccgtgagtcagccctgcaagtctt

SEQ ID NO: 10577 - DNA, 80 bp, synthetic construct
  source 1..80: mol_type = other DNA
tgttaagatgttccctataaaacgcttccttaagtcggcaacagaatgaactgttaagagagctgtcctgaaatacagac

SEQ ID NO: 10578 - DNA, 80 bp, synthetic construct
  source 1..80: mol_type = other DNA
ctactgcgctaaggaggcagacaactagtgctcctcagcaggtgttttcaacactgatttttaccttatttaaacatttt

SEQ ID NO: 10579 - DNA, 80 bp, synthetic construct
  source 1..80: mol_type = other DNA
gggctttcggtttttggcgataggttggagagaatatatacacacaaaaagtgacaaccccatccttgttcccacccctg

SEQ ID NO: 10580 - DNA, 80 bp, synthetic construct
  source 1..80: mol_type = other DNA
gtgtttttgtctcccaaaagtgacaccagcgctctgtagagaatagcattgggcttgcttacaaggagaccttaaaaaaa

SEQ ID NO: 10581 - DNA, 80 bp, synthetic construct
  source 1..80: mol_type = other DNA
ttgtgatttgtttactggtgatattgaggctttcatggcttaatgagatttatggtcactttttagtttcctcaaaatgt

SEQ ID NO: 10582 - DNA, 80 bp, synthetic construct
  source 1..80: mol_type = other DNA
tagtgtgattttatcacactagaatgataccaggaatctaagtaatatgggcttgataagagcagagctgcaattcaaag

SEQ ID NO: 10583 - DNA, 80 bp, synthetic construct
  source 1..80: mol_type = other DNA
cacggggcagggctcgggacctgcagcccaccatgcctgagcctcccatccactccatgggctcctgtgcggcccgagcc

SEQ ID NO: 10584 - DNA, 80 bp, synthetic construct
  source 1..80: mol_type = other DNA
ttttgcaataaatcttgcaactggtcactctttgggtccatgctgcttttgtgagctgtaagactcaccgtgaagatctg

SEQ ID NO: 10585 - DNA, 80 bp, synthetic construct
  source 1..80: mol_type = other DNA
aacttgaggctggtatacttgaggtctttcattaacattcaaggatttaatatttgtgaaagaagaccctcaggggtcta

SEQ ID NO: 10586 - DNA, 80 bp, synthetic construct
  source 1..80: mol_type = other DNA
ggccactcctgctggcatcacagggatcctttgggagggcagccagaggcacagggaaaatggcacaggaagaaggaaac

SEQ ID NO: 10587 - DNA, 80 bp, synthetic construct
  source 1..80: mol_type = other DNA
cccaacacaaagaaatccaaaaaatgatacaagaagtgaagggagagaccaggtgcagtggttcatacctgtaatccctg

SEQ ID NO: 10588 - DNA, 80 bp, synthetic construct
  source 1..80: mol_type = other DNA
atcctgcaaaactaagcatcttatatgaaagaaagatagtctttttcagacaaaccaatgctgagagaatttgccactac

SEQ ID NO: 10589 - DNA, 80 bp, synthetic construct
  source 1..80: mol_type = other DNA
catcaagacagaaagtcagcaaagaaacaatggatttaaactataccttggaacaaatggacttaacagatatatacaaa

SEQ ID NO: 10590 - DNA, 80 bp, synthetic construct
  source 1..80: mol_type = other DNA
taatcccagaattttgagaggctgaggtgagtggatcacctgacatcaggagttcgagaccagcctggctaacatgggga

SEQ ID NO: 10591 - DNA, 80 bp, synthetic construct
  source 1..80: mol_type = other DNA
acagggttaaaaacaaaaattacacaatcatctcaatagatgcagaaaaagcattcaacaatatcaagcatccttttatg

SEQ ID NO: 10592 - DNA, 80 bp, synthetic construct
  source 1..80: mol_type = other DNA
ggagaatcaaatcaagaactcaaccccgtttacaatagctgcaaaaacaattaaaatacttagaaatatacctaaccaag

SEQ ID NO: 10593 - DNA, 80 bp, synthetic construct
  source 1..80: mol_type = other DNA
aaccactgtggaaaacagtgggggagatttcttaaagaactaaagtagagctaccctttgatccagtaatcccactactg

SEQ ID NO: 10594 - DNA, 80 bp, synthetic construct
  source 1..80: mol_type = other DNA
tgggatttgacaaggaagtttcagtggaatggaggggaggaaaccttggtttagagtgtgacaaagaaaggagcgcagtt

SEQ ID NO: 10595 - DNA, 80 bp, synthetic construct
  source 1..80: mol_type = other DNA
agacaccactttgccatccactcactatcgggcgggtggtggtctttcggatggtttgcatggagttgctgctgtccagg

SEQ ID NO: 10596 - DNA, 80 bp, synthetic construct
  source 1..80: mol_type = other DNA
cggattttgctctccagcttccggttcttggtctccatgcttctcactctgtccaggtaggaggccaggcggtccttcag

SEQ ID NO: 10597 - DNA, 80 bp, synthetic construct
  source 1..80: mol_type = other DNA
acagaatgggatatttagaaatgaaaaagtcaaggacctgggggagactaatggctgagggaatgcatgtccccctgcac

SEQ ID NO: 10598 - DNA, 80 bp, synthetic construct
  source 1..80: mol_type = other DNA
tgtaggcttcttttcactgggctccaaattcagtcttgctgactctggtaacttcaaaacattttagcatgcaatagcat

SEQ ID NO: 10599 - DNA, 80 bp, synthetic construct
  source 1..80: mol_type = other DNA
ccgcccacctcggcctcccaaagtgctgggattacaggcttgagccaccgcactcagcctgagggagtgtaattttgtct

SEQ ID NO: 10600 - DNA, 80 bp, synthetic construct
  source 1..80: mol_type = other DNA
attacaggcatgcgccaccatgtatttttagtagagatggggtttcaccatgttggccaggctggtctcgaacttccgac

SEQ ID NO: 10601 - DNA, 80 bp, synthetic construct
  source 1..80: mol_type = other DNA
tcttgaaatgccagccgttttactatttcttacaattctgtgaatagactgggcttacctgggtgattctgctccacatg

SEQ ID NO: 10602 - DNA, 80 bp, synthetic construct
  source 1..80: mol_type = other DNA
attaggtgcctgtattggtgatcttgtacacagtaccctgcccttacacctatggaagaacttaggagtaaatcttcact

SEQ ID NO: 10603 - DNA, 80 bp, synthetic construct
  source 1..80: mol_type = other DNA
tgtagaaccatcaggtccaaaagcatcaacaaccttgtcacttgcagcgtgggctgctgatcagcaacactgacctaacc

SEQ ID NO: 10604 - DNA, 80 bp, synthetic construct
  source 1..80: mol_type = other DNA
catcttggaaatttctccatgttgcactcttcctttccccaaacaacaagacagtagtctgttttgcattttgcaaatgc

SEQ ID NO: 10605 - DNA, 80 bp, synthetic construct
  source 1..80: mol_type = other DNA
agctgaaaatgactcaaatgtctttcagcaggtgaatgttcaaactggtaaattcataccacagaatgctagtgagcgag

SEQ ID NO: 10606 - DNA, 80 bp, synthetic construct
  source 1..80: mol_type = other DNA
cacctggtcctatctgggtttttcatgccttatgtagatcagacaccatctccccactagctcatctgtaaaaccccctg

SEQ ID NO: 10607 - DNA, 80 bp, synthetic construct
  source 1..80: mol_type = other DNA
gtgctatgatcaaggcattgtgacccctgtgacccacacgtacacatccagaaggtctcctggagccagaaagtctggga

SEQ ID NO: 10608 - DNA, 80 bp, synthetic construct
  source 1..80: mol_type = other DNA
caggtactccgaaggaaccaaagacaaattaaaaaattatttcgttcttcaaatggctcaccactttatgcaaagaaaag

SEQ ID NO: 10609 - DNA, 80 bp, synthetic construct
  source 1..80: mol_type = other DNA
cacagtaatttaatattctgggccaaagcagtttcaggactgcttcatctctccagcgcttcaaccttttttcccctatg

SEQ ID NO: 10610 - DNA, 80 bp, synthetic construct
  source 1..80: mol_type = other DNA
ccttgagatgggacactcttttgtcatcttgtcagttctgtccttgaattaataaactttgacacatacataagatcaat

SEQ ID NO: 10611 - DNA, 80 bp, synthetic construct
  source 1..80: mol_type = other DNA
tattaatattatcatcatcatcattcttctcaccgtacttggggaatgaaggagacagatactgtgagtaagttttcctt

SEQ ID NO: 10612 - DNA, 80 bp, synthetic construct
  source 1..80: mol_type = other DNA
gcctatcaaacaaagcaaaccggttggactgaagctgtgggatcgggactgaaatagaaccagcgagaaaggcagtcctc

SEQ ID NO: 10613 - DNA, 80 bp, synthetic construct
  source 1..80: mol_type = other DNA
agttggcctttcctcctagctgtgaaggtgaggaccgccggtgtcagcgttcgtcctgaatactcagtgcccaggcacag

SEQ ID NO: 10614 - DNA, 80 bp, synthetic construct
  source 1..80: mol_type = other DNA
taagagtattgcaacttttagtattgacgaggtacttttactgaatcagtataagtcaacaagcaaccaccagaagctgg

SEQ ID NO: 10615 - DNA, 80 bp, synthetic construct
  source 1..80: mol_type = other DNA
cagcaactatacttttaaatgattcgaatcttgaggtttcaaactgaaccgtcttgtgccttttgcccggcgggcatttc

SEQ ID NO: 10616 - DNA, 80 bp, synthetic construct
  source 1..80: mol_type = other DNA
gctgttcttcctccagcctctctgtagtgtgctcacttcacacttggaaccatagttatatggtatagagaagagacaac

SEQ ID NO: 10617 - DNA, 80 bp, synthetic construct
  source 1..80: mol_type = other DNA
tttttaaaaaatttccttgtgttgtttgtttttcctcatcgttccctaatggtttggtattaaggttatacaggcctcat

SEQ ID NO: 10618 - DNA, 80 bp, synthetic construct
  source 1..80: mol_type = other DNA
tgcctggcttggttttttttaatgttaagaaaaaatggcattagagaaaaatttgaacagcgaatgaatctttgatgatg

SEQ ID NO: 10619 - DNA, 80 bp, synthetic construct
  source 1..80: mol_type = other DNA
caatacattttttttaatagaggaggactataaaacctatgggaagctctgatggcacgactatgacttgctgatgttca

SEQ ID NO: 10620 - DNA, 80 bp, synthetic construct
  source 1..80: mol_type = other DNA
tgccattcttcctgattatgaatggttttactgtagcattagtgtagttctgagggggagcaataccaaatacacgtagt

SEQ ID NO: 10621 - DNA, 80 bp, synthetic construct
  source 1..80: mol_type = other DNA
ctgttctctccctgcctcccttttcactttgaatcttagcaatcctgatacaatatggagaagtaccattctagctttat

SEQ ID NO: 10622 - DNA, 80 bp, synthetic construct
  source 1..80: mol_type = other DNA
tgtatgctctcgttcatgagccctgcgcttacagttatgacgaaaggctttcccacactcctcacacctgtaacgtttct

SEQ ID NO: 10623 - DNA, 80 bp, synthetic construct
  source 1..80: mol_type = other DNA
tcccttatagatgtttcccattgattctctaatttgacatcctgaacacaaacttctctaaccttaggatcccgggaatc

SEQ ID NO: 10624 - DNA, 80 bp, synthetic construct
  source 1..80: mol_type = other DNA
gctgcccttaggtcccatgacacatcctgaataataaataaattcatgtttttctgcttaagctagcttgggttaatttc

SEQ ID NO: 10625 - DNA, 80 bp, synthetic construct
  source 1..80: mol_type = other DNA
ctcactgcaacctctgtctcctgggttcaaatgattctccggcctcagacctcccaagcagctgggattacacccagcat

SEQ ID NO: 10626 - DNA, 80 bp, synthetic construct
  source 1..80: mol_type = other DNA
aacaccccataaaaaaatgagaggcttgaggaagcaagaacccagggaaaacagaaggtaaatgtctccttttaactcat

SEQ ID NO: 10627 - DNA, 80 bp, synthetic construct
  source 1..80: mol_type = other DNA
tcctcaaatgtagaagcttctgcagctctaacctagggctttaggctactgccttacagtatccttcctcttcattattt

SEQ ID NO: 10628 - DNA, 80 bp, synthetic construct
  source 1..80: mol_type = other DNA
agtagttcatattactaattaatagggcctgactttattccttgcaggccagctcaatctttctgtagcttcaatgttta

SEQ ID NO: 10629 - DNA, 80 bp, synthetic construct
  source 1..80: mol_type = other DNA
ttccctactggtttttaccatatcttcttcacaactgggaaagtctgtcactcatagtgattcataagctttatttttta

SEQ ID NO: 10630 - DNA, 80 bp, synthetic construct
  source 1..80: mol_type = other DNA
ctcacatacgccaccaaagagcacaaggcttcaatgggaaaacttttgcttcttcttttgtcactgctttattttatatt

SEQ ID NO: 10631 - DNA, 80 bp, synthetic construct
  source 1..80: mol_type = other DNA
tgtatcacagaccctcctcttcttacctcctgcatctttttactcaggtttctttaacagtcttccactgctgtcctggt

SEQ ID NO: 10632 - DNA, 80 bp, synthetic construct
  source 1..80: mol_type = other DNA
ttagggcctttccattggctgctcccttcaccttaagcgatctccatggctaataatcttgcctccttcaagtgttttct

SEQ ID NO: 10633 - DNA, 80 bp, synthetic construct
  source 1..80: mol_type = other DNA
tgcaaaggggttgcagaaatattacccttttgctccttttttcccatgtagaggaacctctagataggaatggacagaag

SEQ ID NO: 10634 - DNA, 80 bp, synthetic construct
  source 1..80: mol_type = other DNA
tttcacatttattagttagaactcctctataaagaaaaactttccttcatcaatttagcaatttagggctatttggttat

SEQ ID NO: 10635 - DNA, 80 bp, synthetic construct
  source 1..80: mol_type = other DNA
gatttctggtcttcagaagctggggaatggctttgagggaggaaactgcaacagatgtttggttctaagttttataacta

SEQ ID NO: 10636 - DNA, 80 bp, synthetic construct
  source 1..80: mol_type = other DNA
tccagcccagtcgggtcttctatttattcaaagacaaaggaggtaagaaaatacttggcacagtagcaataaagtggtat

SEQ ID NO: 10637 - DNA, 80 bp, synthetic construct
  source 1..80: mol_type = other DNA
tgtaaatgtttgtcctatcattctcaacttgaaggtcacgacacttgatggagatatgaaagcctgataatgttaagtaa

SEQ ID NO: 10638 - DNA, 80 bp, synthetic construct
  source 1..80: mol_type = other DNA
catcttaaccaaagaaaaaaaagttcagtggttgtcaggggttggaagtggagaaggatgaccaggccgagcacaaaggg

SEQ ID NO: 10639 - DNA, 80 bp, synthetic construct
  source 1..80: mol_type = other DNA
agaaaagcgaagcacgcgttaccatggagactgcggaatggaaaagcgttcggtttcttgtttcctagccgcgaatgggg

SEQ ID NO: 10640 - DNA, 80 bp, synthetic construct
  source 1..80: mol_type = other DNA
taccttattctatattacacagaaatggcagcctgtttttccccagctttgccaacataataattagcaaaactttttaa

SEQ ID NO: 10641 - DNA, 80 bp, synthetic construct
  source 1..80: mol_type = other DNA
cccagtaaatcttattcccattccttcgttcatactatgtgatgttgtagaatttattgcaaggcccattgtaccacatc

SEQ ID NO: 10642 - DNA, 80 bp, synthetic construct
  source 1..80: mol_type = other DNA
acccaactgattgcaaataggattttggaataacagtttctgaggtgtcacaaagaactgtcagcccttgtgtctgttct

SEQ ID NO: 10643 - DNA, 80 bp, synthetic construct
  source 1..80: mol_type = other DNA
ccagcagctacggagggggcgctgggtcccctaccgctgccggcccacccgcgccgcgctcgcgtgcttcagccgcctcc

SEQ ID NO: 10644 - DNA, 80 bp, synthetic construct
  source 1..80: mol_type = other DNA
gccacgaacccacctggaaaaacaaacagttccagatatgccgccttaagagctgtaacactcattgtagaggtctgcgg

SEQ ID NO: 10645 - DNA, 80 bp, synthetic construct
  source 1..80: mol_type = other DNA
aagaagtgggtgcagggtgagaggtctgtctacctccttagaaggaccactgtggcttgtgcagagatccgaagtttgtt

SEQ ID NO: 10646 - DNA, 80 bp, synthetic construct
  source 1..80: mol_type = other DNA
ctggttgtctttcttctacctaattgtatacttataccgtttaaccaacctctctttatcccacgtcttccctcctcttt

SEQ ID NO: 10647 - DNA, 80 bp, synthetic construct
  source 1..80: mol_type = other DNA
gctgtattctgtaggcttcggtatgttgtatatctattttcactagtttcatgaaatttttaaaattttcttagcttatt

SEQ ID NO: 10648 - DNA, 80 bp, synthetic construct
  source 1..80: mol_type = other DNA
gttaagttattttctctggtagaatgctttaattcactgccttctatttttagtgtattaattacagatttttgcattgg

SEQ ID NO: 10649 - DNA, 80 bp, synthetic construct
  source 1..80: mol_type = other DNA
gcctgtatagtttccattgaggagtctgttgccagaataattggagctctttgtatgttatttacttcttttctcttgct

SEQ ID NO: 10650 - DNA, 80 bp, synthetic construct
  source 1..80: mol_type = other DNA
gctattttgaattcttggtgagagagctcacataccactgtcttgcctagggtaagtcattggttccttgctttgtctgt

SEQ ID NO: 10651 - DNA, 80 bp, synthetic construct
  source 1..80: mol_type = other DNA
gccattttggaaccaaactctcacacattccatggaacatttctagccagcaaggtacaatgactagcaaggaaacaaac

SEQ ID NO: 10652 - DNA, 80 bp, synthetic construct
  source 1..80: mol_type = other DNA
tgcctttgcatttctgaccattttagattcagaattatggataagggattttcagcctatactgatcatgtctagaagtt

SEQ ID NO: 10653 - DNA, 80 bp, synthetic construct
  source 1..80: mol_type = other DNA
tcaagatttctgttagttattggtttcctattctttggggcacaatttcagtttcaacttttcagcaagttgtttctttt

SEQ ID NO: 10654 - DNA, 80 bp, synthetic construct
  source 1..80: mol_type = other DNA
aacattgacatattcattctacagacatttattggctatgtaattcatgtcagaaactgattcgacacagcaaaatcacg

SEQ ID NO: 10655 - DNA, 80 bp, synthetic construct
  source 1..80: mol_type = other DNA
aaagcaaagtaaaaacataagcttgctaaattttcttttgtcatttaagagcaccaagctttgagcgtgaatgtgctttg

SEQ ID NO: 10656 - DNA, 80 bp, synthetic construct
  source 1..80: mol_type = other DNA
gtatttcctaccagagtcacaatatagatgatgaagacaaccactgagatgatgtgctctaattggggtcgatcagaaaa

SEQ ID NO: 10657 - DNA, 80 bp, synthetic construct
  source 1..80: mol_type = other DNA
acaccatctaaacagccttactgatttgttgcagttaaatattgaggtaattccagaactatttggccaccacgtacaac

SEQ ID NO: 10658 - DNA, 80 bp, synthetic construct
  source 1..80: mol_type = other DNA
gcttcggcctgagccctggtgtcgagctaatggctgaattagtttaaacattttttctgctgataatttctgaccacgaa

SEQ ID NO: 10659 - DNA, 80 bp, synthetic construct
  source 1..80: mol_type = other DNA
cccagccctggctgattttctttattctgaaaataacacagagtaagtcaatttaacatggcctcataaaaaccccagta

SEQ ID NO: 10660 - DNA, 80 bp, synthetic construct
  source 1..80: mol_type = other DNA
ggcatgctacattttaatcgaaactcagtttttcatttttcatagtatggacttcagagcccaataatcgcgcataactt

SEQ ID NO: 10661 - DNA, 80 bp, synthetic construct
  source 1..80: mol_type = other DNA
tactcttgttattcatatttacagctagatttttgcctaattaaacaaggagaacactgtgttggtcaatgtatattcca

SEQ ID NO: 10662 - DNA, 80 bp, synthetic construct
  source 1..80: mol_type = other DNA
ctggagcttatccctcaatttatggtctggaaacttaccaccatccccagcttctggtaattaccattccactctctgct

SEQ ID NO: 10663 - DNA, 80 bp, synthetic construct
  source 1..80: mol_type = other DNA
tcttgacctcaagtgatccacccatcttggcctcccaaaattctgagattagagatgtgaaccaacacagccagctccat

SEQ ID NO: 10664 - DNA, 80 bp, synthetic construct
  source 1..80: mol_type = other DNA
agttattttaattaatttattttttaattatgattgtttacttaatttcttctcagatgattgttagtgcatagaaacac

SEQ ID NO: 10665 - DNA, 80 bp, synthetic construct
  source 1..80: mol_type = other DNA
tgcaccccagcagcctctgcgtgtttcttcccgcccggcacacccgcggccatccaaaggtgctgtgtgccggcggccac

SEQ ID NO: 10666 - DNA, 80 bp, synthetic construct
  source 1..80: mol_type = other DNA
gttcaacatatgttaagttcatctttattgatatcattttatttaattgctcattgcttattgttgttaggagagctata

SEQ ID NO: 10667 - DNA, 80 bp, synthetic construct
  source 1..80: mol_type = other DNA
gttgatttgtttaaatttcttatagattctggatattagacctttgttggatgcttaatttgcaaatattttctcctatt

SEQ ID NO: 10668 - DNA, 80 bp, synthetic construct
  source 1..80: mol_type = other DNA
attattatgtgagttggctaggcatcaaatgttgaccaagaggtagataactgaaggtcctgtggtagctgccttggagg

SEQ ID NO: 10669 - DNA, 80 bp, synthetic construct
  source 1..80: mol_type = other DNA
atttcaaaattttattcattgaaacataaacttggtcagttctattcaagacatcaatataaagagaaatcactgaattg

SEQ ID NO: 10670 - DNA, 80 bp, synthetic construct
  source 1..80: mol_type = other DNA
gagtgtcagaatttcttcagaaagtagaaagaattttaaaatttaacttatgcaggttgggcacggtggctcacgcctgt

SEQ ID NO: 10671 - DNA, 80 bp, synthetic construct
  source 1..80: mol_type = other DNA
agaaatattgaaagaattagctatttacttgcactgaggggagtcattatgtgcattttctactatggttttcttagtcc

SEQ ID NO: 10672 - DNA, 80 bp, synthetic construct
  source 1..80: mol_type = other DNA
atgggcttcaacgggggggcacactctgggatgcagagacttttgtagggttataaagttagttttaaggaaataacttc

SEQ ID NO: 10673 - DNA, 80 bp, synthetic construct
  source 1..80: mol_type = other DNA
gtatatgtatattttttctcaagctccaatagaatgaacattatgggtatattatttaatatacacaccataatgtatat

SEQ ID NO: 10674 - DNA, 80 bp, synthetic construct
  source 1..80: mol_type = other DNA
actaatactccagatcatgataatcatctttagacatagatgtgggttcatgactacaaaataatgcaagggcttacata

SEQ ID NO: 10675 - DNA, 80 bp, synthetic construct
  source 1..80: mol_type = other DNA
tgaacatattcttttatttgatcagtaaattcacctataaaatttaagtactgggctaatggtaggatgaggaaaagatg

SEQ ID NO: 10676 - DNA, 80 bp, synthetic construct
  source 1..80: mol_type = other DNA
ataaagaaggtgggaggaaactgttggaggtgatggatgtatatatgggatagattgtgttgatggtttcacaggtatat

SEQ ID NO: 10677 - DNA, 80 bp, synthetic construct
  source 1..80: mol_type = other DNA
gaataaaaatcctccttctgcctattaaaaagtgacatagaaaaatcttcaaataaattttcatgcacagtatgagattt

SEQ ID NO: 10678 - DNA, 80 bp, synthetic construct
  source 1..80: mol_type = other DNA
ttgctctgagcagatatcatttaaatgaggtacctctagtggttatctctgatacccatggtcagaacagttgtatttga

SEQ ID NO: 10679 - DNA, 80 bp, synthetic construct
  source 1..80: mol_type = other DNA
tctactaatggtacatttttgtctatcaagattctaaacatctgaatacttgaaactgttcactttgactggagatctca

SEQ ID NO: 10680 - DNA, 80 bp, synthetic construct
  source 1..80: mol_type = other DNA
gatctcttgattgcactgaatctgctctcattccagtcttcctcattgtagtaaatgatataaacatgtacctatttctg

SEQ ID NO: 10681 - DNA, 80 bp, synthetic construct
  source 1..80: mol_type = other DNA
tcaacgagatcttccttgactacttaatctaaattaaaatccctcctccccagctaatctctatcacatttccatgtgtt

SEQ ID NO: 10682 - DNA, 80 bp, synthetic construct
  source 1..80: mol_type = other DNA
atttcagtctttccagtcactgggattaatggtgtgtgccacaaaacttggctctgtttgatttttttttttttggtgga

SEQ ID NO: 10683 - DNA, 80 bp, synthetic construct
  source 1..80: mol_type = other DNA
gtctaaattttaccgcctaaagcaatctacagattcaacactattcctattaaattaccaacgtcattttacacagaact

SEQ ID NO: 10684 - DNA, 80 bp, synthetic construct
  source 1..80: mol_type = other DNA
agaaaatggaacacttttatactgctggtgggaatgtagattagttcagccactatggaaagtagtttgggaatttctca

SEQ ID NO: 10685 - DNA, 80 bp, synthetic construct
  source 1..80: mol_type = other DNA
accatgctgcatattaaatccccagaacttgttcgccttataactgaaagcttgtaccttctgaccaacatctccctatt

SEQ ID NO: 10686 - DNA, 80 bp, synthetic construct
  source 1..80: mol_type = other DNA
ccattggtttgtgtgtctgcttttatgccagtatcatacagttttgattcttatggttctgtaatatggtttcaagtcag

SEQ ID NO: 10687 - DNA, 80 bp, synthetic construct
  source 1..80: mol_type = other DNA
acatgttataattaatggcaagctttctttcttttttaaaattactgaatagtattctatagtgtatataaaccacatct

SEQ ID NO: 10688 - DNA, 80 bp, synthetic construct
  source 1..80: mol_type = other DNA
acatccagttttccaaacaccattcattaaagagactgttcttttctcattatgtgtttttggcacttttgttgaaaatc

SEQ ID NO: 10689 - DNA, 80 bp, synthetic construct
  source 1..80: mol_type = other DNA
attttctttatccagtttatcattgttgggcatttgggttggttccaagtctttgctattgtgaacagtgctgcaataga

SEQ ID NO: 10690 - DNA, 80 bp, synthetic construct
  source 1..80: mol_type = other DNA
gttaatggtagcttgattgggatagcattgaatctataaattcctttgggcagtatggccattttcacgatattgattct

SEQ ID NO: 10691 - DNA, 80 bp, synthetic construct
  source 1..80: mol_type = other DNA
aagatgatgctgacttcataaaatgagttagggaggagtccctctttttctatagtttggaatagtttcagaaggaatga

SEQ ID NO: 10692 - DNA, 80 bp, synthetic construct
  source 1..80: mol_type = other DNA
taccgttatgtaattcccttctttgtcttttttgatttaaagtctgttttatcagagactaggattgctactgctgcttt

SEQ ID NO: 10693 - DNA, 80 bp, synthetic construct
  source 1..80: mol_type = other DNA
cccctgaatagctggaactatggaactatgagcatgcaccaccacacttggctaatttttaaatttctgtaggataggtg

SEQ ID NO: 10694 - DNA, 80 bp, synthetic construct
  source 1..80: mol_type = other DNA
gatactttcagaaaagaatcaaaaggaagaaagtcttaatgttcacattgagttaaggtgatggctagctttggaactgg

SEQ ID NO: 10695 - DNA, 80 bp, synthetic construct
  source 1..80: mol_type = other DNA
agaacattttaaaggcaactaaaaagatcagccatgctcattaagtaacagatacctacagaaaatgtctgtctttgtct

SEQ ID NO: 10696 - DNA, 80 bp, synthetic construct
  source 1..80: mol_type = other DNA
cgctaccacgcccggctaattttttgtatttttagtagagacggggtctcgatctcctgacctcgtgatccgcccgcctc

SEQ ID NO: 10697 - DNA, 80 bp, synthetic construct
  source 1..80: mol_type = other DNA
ggaatcctttccccattgcttatttttgtcagatttgtcaaagattagatagctgtagatatgtggcgttatttctgagg

SEQ ID NO: 10698 - DNA, 80 bp, synthetic construct
  source 1..80: mol_type = other DNA
aatccatatgaaagaccagagatcagctaattttccccacaagagccagatggaaaatagttcaggttttgcaggccagg

SEQ ID NO: 10699 - DNA, 80 bp, synthetic construct
  source 1..80: mol_type = other DNA
atgcaacaaaatccaagataaataggtggggtttaatgaaactaaagagctttggcacagcaaaagaacagtcagcagag

SEQ ID NO: 10700 - DNA, 80 bp, synthetic construct
  source 1..80: mol_type = other DNA
tgctcaggtggtgggtgcaccaaaatctcacaaatcaccactaaagaacttatgtaaccaaataccacctgttacctaaa

SEQ ID NO: 10701 - DNA, 80 bp, synthetic construct
  source 1..80: mol_type = other DNA
tcccattgaagggtgagtggctctcaatattaagagacaacatagaaatttctgaagattttaacttctccatctgataa

SEQ ID NO: 10702 - DNA, 80 bp, synthetic construct
  source 1..80: mol_type = other DNA
gaatcctcagcacagtagctacaatgaatccacagtaagcaaagataattgattagagaacgagggactaaaatatcctc

SEQ ID NO: 10703 - DNA, 80 bp, synthetic construct
  source 1..80: mol_type = other DNA
ataaaacttttgtcataaaaggaagcacacagctgaaaggaaatggttccttgcaacacgttcagtacttacaagacaag

SEQ ID NO: 10704 - DNA, 80 bp, synthetic construct
  source 1..80: mol_type = other DNA
caaaaaagaacattaatctttttcttccatcagaattcagtgttaattggggataaagattgaatgttctttctgtattc

SEQ ID NO: 10705 - DNA, 80 bp, synthetic construct
  source 1..80: mol_type = other DNA
accaatttcacatgtgacactaagaaaatggaatgctataaaatcaatcctcatcaccgtggtagggatgctgttgcttt

SEQ ID NO: 10706 - DNA, 80 bp, synthetic construct
  source 1..80: mol_type = other DNA
tagaatcactttcttttgaaatcaaccagagtggtgagatgtgtttttcttttcaggtgccccataatggcacacagctt

SEQ ID NO: 10707 - DNA, 80 bp, synthetic construct
  source 1..80: mol_type = other DNA
gaaagacattattcatgcttattatggcctgaagggctcctccagcaaaggtgggtggcccaggccctccctcagagcac

SEQ ID NO: 10708 - DNA, 80 bp, synthetic construct
  source 1..80: mol_type = other DNA
tacagacaaaagaagtcttcaataatttcttccacaataacccaacacagtatagactttttaccttccattgactacat

SEQ ID NO: 10709 - DNA, 80 bp, synthetic construct
  source 1..80: mol_type = other DNA
atgaatacatgaagggggaaaagggaaaactcttaatggcacatcagttaataaatatagagggcatactaggattggag

SEQ ID NO: 10710 - DNA, 80 bp, synthetic construct
  source 1..80: mol_type = other DNA
gaattgtgtctgtcttattcactaacaaatactcggcaaatagcaaaatctgtatgtatagtaagcgattgaaaaacatt

SEQ ID NO: 10711 - DNA, 80 bp, synthetic construct
  source 1..80: mol_type = other DNA
tgtttattgaatgttgctagggacttgtccatgtcattgtgcattagggatccaaactgatgaagtagacactatccaaa

SEQ ID NO: 10712 - DNA, 80 bp, synthetic construct
  source 1..80: mol_type = other DNA
cttttactttaggttcaggggtacatgtgcaggtttgttacgtaggtaaatcgtatttcatagggtttgttgtatagact

SEQ ID NO: 10713 - DNA, 80 bp, synthetic construct
  source 1..80: mol_type = other DNA
ggcccctctcagtttcaagctttactatcatatccctcatcatctgccatgtgatccttttgccagtgcctcatatttta

SEQ ID NO: 10714 - DNA, 80 bp, synthetic construct
  source 1..80: mol_type = other DNA
attttctgatataatgcacacgaaaaaacgcaaactccgctggtagtgagttgggagaagtgcataaaggtagattgggt

SEQ ID NO: 10715 - DNA, 80 bp, synthetic construct
  source 1..80: mol_type = other DNA
agaaaagatgccacatacctgaggtagaacttgggacaaataaggaatttaacaaaagggaagaaaggataaatgctatc

SEQ ID NO: 10716 - DNA, 80 bp, synthetic construct
  source 1..80: mol_type = other DNA
cagccaacagaggaaggattttctaattgttgacagaatttagtgaaatcaccagagcctggaaaataggaaaatgagtt

SEQ ID NO: 10717 - DNA, 80 bp, synthetic construct
  source 1..80: mol_type = other DNA
tatgaagtttgggatccagaatgcacaccatcatgatggacacattgccaaatatggtgattgtgtatgatattaacagg

SEQ ID NO: 10718 - DNA, 80 bp, synthetic construct
  source 1..80: mol_type = other DNA
tgcattttattgcttctgtgattcagtaagaataaataatttgcacactcattattggtgaggtcaagactaacacctag

SEQ ID NO: 10719 - DNA, 80 bp, synthetic construct
  source 1..80: mol_type = other DNA
gaaaaaaatgagcaatggacataaataagcagtttggggaagaaaacaacataaaatgacagtgaaagtataaaagatta

SEQ ID NO: 10720 - DNA, 80 bp, synthetic construct
  source 1..80: mol_type = other DNA
cccactgaccgtttttatgtacggagatataatgagcaaaccattcaaaagggtgaaaggatacgaaggatttttggaat

SEQ ID NO: 10721 - DNA, 80 bp, synthetic construct
  source 1..80: mol_type = other DNA
gaaatttaaggttagcattaattcactgggtcagaacacacagaaattacatgaaattgcaatagggggaatagtttttg

SEQ ID NO: 10722 - DNA, 80 bp, synthetic construct
  source 1..80: mol_type = other DNA
tccctgtgccgccacccttcaacaggccccagtgtgtgatgttccccttcctgtgtccacgtgttcttattttcaactcc

SEQ ID NO: 10723 - DNA, 80 bp, synthetic construct
  source 1..80: mol_type = other DNA
atgctgtataattgtattaatagcacatccaggggtgcagcattgctacatgtcttctctatccaggcacactgatcgat

SEQ ID NO: 10724 - DNA, 80 bp, synthetic construct
  source 1..80: mol_type = other DNA
atgaggtgaaatagccttaagtctgatatatgatgcacccacatataaatggaaatggcatgcacaaagacactttacta

SEQ ID NO: 10725 - DNA, 80 bp, synthetic construct
  source 1..80: mol_type = other DNA
gtctccacagttttaagaagatcgaaatcatatcaagtatcttttctgaccacaaagttatgaaagtagaagtgaataat

SEQ ID NO: 10726 - DNA, 80 bp, synthetic construct
  source 1..80: mol_type = other DNA
caaagctggaggcatcacactacctgtttcaaaatatattacacagttatagtattcaaaacagaaaggtagtggcataa

SEQ ID NO: 10727 - DNA, 80 bp, synthetic construct
  source 1..80: mol_type = other DNA
gtagattttcctctaatttggtcttaacgtctctctttgaagaggagccagaaactctagccctgctctgatgggctcca

SEQ ID NO: 10728 - DNA, 80 bp, synthetic construct
  source 1..80: mol_type = other DNA
ggaacttaaatgcccatcaatggataaacagataaatatataaaagggatataatgtgatatatatgagccacattatct

SEQ ID NO: 10729 - DNA, 80 bp, synthetic construct
  source 1..80: mol_type = other DNA
cagatcttttggacaaactcaggctctcttttctgtagcaatgacaatcacagttatttccagactctgttctccatagt

SEQ ID NO: 10730 - DNA, 80 bp, synthetic construct
  source 1..80: mol_type = other DNA
ccatgatttctcaaaaggtaatgatcatttcattatcaacaatatggaaaagtgtacagatatctttgtacctgtctgga

SEQ ID NO: 10731 - DNA, 80 bp, synthetic construct
  source 1..80: mol_type = other DNA
gttcctatctataagtaagattattatggctgcagttattcctttctctgtaactgcaaaattggaaatagtctgaaaat

SEQ ID NO: 10732 - DNA, 80 bp, synthetic construct
  source 1..80: mol_type = other DNA
tgtgaagttccagcacttctgcgattatcatgtgttgatacccaggcaaatgagctgaccctcatggtcatgagctccat

SEQ ID NO: 10733 - DNA, 80 bp, synthetic construct
  source 1..80: mol_type = other DNA
gtaggtctgcattcttgtcacattgaacagtaaactaatatctctttaaaatggctgattcgttcatctgtccatttatt

SEQ ID NO: 10734 - DNA, 80 bp, synthetic construct
  source 1..80: mol_type = other DNA
cagaaagtttgtaccatttggctgtctctccacttcccaccctccagcccatggcaaccaccattctattctctgcttct

SEQ ID NO: 10735 - DNA, 80 bp, synthetic construct
  source 1..80: mol_type = other DNA
ttagacatcaaatattggatttaataagctatcggaaaaagtgtataattataatcctttatactgtaacagtactacac

SEQ ID NO: 10736 - DNA, 80 bp, synthetic construct
  source 1..80: mol_type = other DNA
acctctcaagttaggttacctgtggctataatttgcattgaggggtgttgacattgaccatcctcttgtgtgcttttcat

SEQ ID NO: 10737 - DNA, 80 bp, synthetic construct
  source 1..80: mol_type = other DNA
ctccatgttgtatatgtgaattttctaggccttaactccaactgagcttcccatctacaatgctttaatagtttgtgatc

SEQ ID NO: 10738 - DNA, 80 bp, synthetic construct
  source 1..80: mol_type = other DNA
tgattttcataccaagactttgtctggtacacatggaatatatcacctagacacaatgtaacaattgaaaaatcttcatt

SEQ ID NO: 10739 - DNA, 80 bp, synthetic construct
  source 1..80: mol_type = other DNA
agtagatgagggaagtgtaggcatttatgttggtgatttcaaggtgatcaaaatcagagatcagatcagtctgtgcatga

SEQ ID NO: 10740 - DNA, 80 bp, synthetic construct
  source 1..80: mol_type = other DNA
atatttctcatgatgtattatctcctattctagagaaatttttaaaaatctcttggaaaattttcatcttccctcaaggg

SEQ ID NO: 10741 - DNA, 80 bp, synthetic construct
  source 1..80: mol_type = other DNA
actacactcaggttctcctccattttcctgcccctcccacttttccttccttctctgttctctcactgaatttttatctt

SEQ ID NO: 10742 - DNA, 80 bp, synthetic construct
  source 1..80: mol_type = other DNA
agctagtttttgaaaaaatccaggattgtacactgagaaatcacatctcactagtctcttttcatctggaccagttcctc

SEQ ID NO: 10743 - DNA, 80 bp, synthetic construct
  source 1..80: mol_type = other DNA
ctttactttgttctcgcactgggaaccacagagtgtgtcctactggtggtgatgtcctatgaccgttatgcagctgtgtg

SEQ ID NO: 10744 - DNA, 80 bp, synthetic construct
  source 1..80: mol_type = other DNA
ctgtaaatcctatgaaaagatgatactctcaatttaaaaatctctacaatatgtcttttaatttcttgctttttgggcag

SEQ ID NO: 10745 - DNA, 80 bp, synthetic construct
  source 1..80: mol_type = other DNA
tagtgtgacttgcaattgcattgattctgctgactttatcttccttctgcatctctgactcttcctttatttctaactag

SEQ ID NO: 10746 - DNA, 80 bp, synthetic construct
  source 1..80: mol_type = other DNA
tagattgattcaataccttggctattatgaatttgctgtcataaagatgggtgtatagatagcttttcaacatagtgatt

SEQ ID NO: 10747 - DNA, 80 bp, synthetic construct
  source 1..80: mol_type = other DNA
ttttatatatttaatttaacttaattttttgagatggagtcttgctctgtttcccaagctggagtgcagtggtgggatct

SEQ ID NO: 10748 - DNA, 80 bp, synthetic construct
  source 1..80: mol_type = other DNA
gctgtgtaatttgtaatctgagaaatagatcagttaccaaaaattccaccaaagattaacactggtattactgtttttat

SEQ ID NO: 10749 - DNA, 80 bp, synthetic construct
  source 1..80: mol_type = other DNA
atatgcatttaaattttttttctaaactattacgctgtaatgcacatgttcccctaggttgtcacaagaatatttcctaa

SEQ ID NO: 10750 - DNA, 80 bp, synthetic construct
  source 1..80: mol_type = other DNA
catcttatagggactcagggttattcagaagttacacggcagattagcatttaaaataaagtcactcttgctcctgcact

SEQ ID NO: 10751 - DNA, 80 bp, synthetic construct
  source 1..80: mol_type = other DNA
catggcaaaaggatttttatagatgtgattaaattcagaaccttgagttgggattattatcctgaattagccaggtgggc

SEQ ID NO: 10752 - DNA, 80 bp, synthetic construct
  source 1..80: mol_type = other DNA
acttttctttgggaggaatagataactttgtttatcttaggtcaaatgacaaaaactttgaataaagtactggggtttcc

SEQ ID NO: 10753 - DNA, 80 bp, synthetic construct
  source 1..80: mol_type = other DNA
taaagaaaaccccataatcttggtccaaaagctccttgatctgataaacaactttagataagtttcaggatataaaataa

SEQ ID NO: 10754 - DNA, 80 bp, synthetic construct
  source 1..80: mol_type = other DNA
agtggaaacagacagtctacaaaatgagagaaaatatctgcatacaatgcatttgacaaaggtctaatatctggcatcta

SEQ ID NO: 10755 - DNA, 80 bp, synthetic construct
  source 1..80: mol_type = other DNA
cctaaaccccaaattaccttcaaccttcatgagtttttacatttgaaagttaaatcgataacttaatgacaataattcaa

SEQ ID NO: 10756 - DNA, 80 bp, synthetic construct
  source 1..80: mol_type = other DNA
agctaaattatttttcatggagtcctgccctgagaacaaggcatcaaatcctctaagtgtataggaaatttgagttcaaa

SEQ ID NO: 10757 - DNA, 80 bp, synthetic construct
  source 1..80: mol_type = other DNA
tcagaatggggccaggtgcagtggctcatgtttgtaatcccagcactttgggaggccgagacaggtggatcacaaggtca

SEQ ID NO: 10758 - DNA, 80 bp, synthetic construct
  source 1..80: mol_type = other DNA
actgaacatattcagcatgaattaagcatttttctagcacgaaaatgtagcttgaaagtaagtaaggttcagaacattta

SEQ ID NO: 10759 - DNA, 80 bp, synthetic construct
  source 1..80: mol_type = other DNA
ataagacatctggaaaaagaaaacctgttgggatggaaacacaccagtgttatccagggcttagtgtaggggagattagt

SEQ ID NO: 10760 - DNA, 80 bp, synthetic construct
  source 1..80: mol_type = other DNA
aaatatataagataagcctggaggagaaggaccagtaataccagaaatcaaggaggggccttgaagagaaaaggatagca

SEQ ID NO: 10761 - DNA, 80 bp, synthetic construct
  source 1..80: mol_type = other DNA
tctgggtgcagttgcaggtgcgcaagctgtggctgtggatctgggcatctccacacttttggggacccgggaaagaaccc

SEQ ID NO: 10762 - DNA, 80 bp, synthetic construct
  source 1..80: mol_type = other DNA
accacattgcaggcgacaaaaaggagtgaagagctgctgcccttcggggagcccagacctaagagctccctgagtcaggg

SEQ ID NO: 10763 - DNA, 80 bp, synthetic construct
  source 1..80: mol_type = other DNA
taaattggacagatcttaggaaagaaaatgctgagcgtgaagaggcaaagctaaagctgaggctgtagagacagaaagct

SEQ ID NO: 10764 - DNA, 80 bp, synthetic construct
  source 1..80: mol_type = other DNA
caaggagatgaatatgctaattaccctaatttggtctctatacattgtatatctatatcaaaacatcatatctcataagc

SEQ ID NO: 10765 - DNA, 80 bp, synthetic construct
  source 1..80: mol_type = other DNA
gtgaattcagattcagtcattagttggtactctttctagcaaaatagcttctatggattcaagaaagaaatgattagagg

SEQ ID NO: 10766 - DNA, 80 bp, synthetic construct
  source 1..80: mol_type = other DNA
ggccactgctcccggccaactgatgtctatttcttcttgtagataattagtaacatcttccgcggaatttgacttcagtt

SEQ ID NO: 10767 - DNA, 80 bp, synthetic construct
  source 1..80: mol_type = other DNA
ttgccttttgaaaatatttttaattcttctttgagtactttaattagtcttcttttttcattccaaaggcacattctttt

SEQ ID NO: 10768 - DNA, 80 bp, synthetic construct
  source 1..80: mol_type = other DNA
gtgtctagatttcactcatgcctctgaaatgaatgttttttacaggacttgaaggtagtatatacattagccaaggacgg

SEQ ID NO: 10769 - DNA, 80 bp, synthetic construct
  source 1..80: mol_type = other DNA
acggaaatgcttccaggttgtgtttcattattaatatcacttccttgttatctcactgattcgaagactcattattatag

SEQ ID NO: 10770 - DNA, 80 bp, synthetic construct
  source 1..80: mol_type = other DNA
caataagatgggaggagcatgtcccaaaggcctttttccttcccttggaagatttgatcttaaatacagcacttccaata

SEQ ID NO: 10771 - DNA, 80 bp, synthetic construct
  source 1..80: mol_type = other DNA
aatggaatttcttcttctgtgtaagaaggttgacaataactaccattcttgagtgaggtgaggattaaatacaaagtaaa

SEQ ID NO: 10772 - DNA, 80 bp, synthetic construct
  source 1..80: mol_type = other DNA
caggatgagaaatattcggttgaaaagttaagatagcatctcagtgacaacattctgagtaactctgccagtcaattagt

SEQ ID NO: 10773 - DNA, 80 bp, synthetic construct
  source 1..80: mol_type = other DNA
aaatggtatacctatattgggcacttaccataaatggatcttgcaggacttgaagttgctctgggtgagtcagtgagtga

SEQ ID NO: 10774 - DNA, 80 bp, synthetic construct
  source 1..80: mol_type = other DNA
ctttatttaacattgttatgttcaccttttatattttttctaccagggaccatccttgaattttttaaaaagcaatttta

SEQ ID NO: 10775 - DNA, 80 bp, synthetic construct
  source 1..80: mol_type = other DNA
ctttactcaattgctaaaggctgtaaatagctcaaagtaaaagttttcttaactctggaaaacaaaacaaagggttagca

SEQ ID NO: 10776 - DNA, 80 bp, synthetic construct
  source 1..80: mol_type = other DNA
actcagagttatgaatggctctcatcataccaatgctttttgacgagctcctctctaccccaaatacgagagactctaat

SEQ ID NO: 10777 - DNA, 80 bp, synthetic construct
  source 1..80: mol_type = other DNA
aatccacctgattgaaagaaggcttcatatttgttttgggcatttaatatttctcagatatagtgtataaatctccctct

SEQ ID NO: 10778 - DNA, 80 bp, synthetic construct
  source 1..80: mol_type = other DNA
ccttacctcattaacttctagactacctcacataaaatttaatcatttctagttgtaagaataaaggggcacaaaaatga

SEQ ID NO: 10779 - DNA, 80 bp, synthetic construct
  source 1..80: mol_type = other DNA
gtgttggttgctaagcctcccaactgttgctagattcagagtagtccatatataatacatatacagaaatcccttgttga

SEQ ID NO: 10780 - DNA, 80 bp, synthetic construct
  source 1..80: mol_type = other DNA
ctattgctccaaacagttctgttagtctttgttttatgtagtttggagatctgctgcaaggtgcatatgtacttataatt

SEQ ID NO: 10781 - DNA, 80 bp, synthetic construct
  source 1..80: mol_type = other DNA
gtgttgtatgaaactgtccagttgtcctctagagtggttgtacacttttggatttctgtaatcagtgaatgagagttcct

SEQ ID NO: 10782 - DNA, 80 bp, synthetic construct
  source 1..80: mol_type = other DNA
cactcccaccaacagtgtatacatgtttgtttttctccataaccttcccagcatctgttcttctctgactttttaataat

SEQ ID NO: 10783 - DNA, 80 bp, synthetic construct
  source 1..80: mol_type = other DNA
tattttggtatttcaggagatttgattttttttgttctgatgcttatatttacacattagtccctcttttaggcatcatt

SEQ ID NO: 10784 - DNA, 80 bp, synthetic construct
  source 1..80: mol_type = other DNA
agtgtggtaaccaatgggttggttttgatcctcacctcccccatcataggccccagtttctattgttcttttctttgtgt

SEQ ID NO: 10785 - DNA, 80 bp, synthetic construct
  source 1..80: mol_type = other DNA
tatttgtcaatttttggttttgttgtgattgcttttggagtcctcgtcttgaagtcttcgtgaaagtcgatgtccagaat

SEQ ID NO: 10786 - DNA, 80 bp, synthetic construct
  source 1..80: mol_type = other DNA
ctttagcagttctcgtaggacaggtttggtagtgatagaatgagcattattgaaatagttaataacctcttctttcctcc

SEQ ID NO: 10787 - DNA, 80 bp, synthetic construct
  source 1..80: mol_type = other DNA
atactctagattgcagtcatttttagggctggcctatattcagtctatggttattcataggttgcagccattcacccatt

SEQ ID NO: 10788 - DNA, 80 bp, synthetic construct
  source 1..80: mol_type = other DNA
ctgtacattgcttgttcactctgatggtagtttcttttgctgtgcagaagctctttagtttaattagatcccatgcatct

SEQ ID NO: 10789 - DNA, 80 bp, synthetic construct
  source 1..80: mol_type = other DNA
tattttgttagagtcttcttttttttcttagttggtctgctaaagttttgtcaattgtttttatcttttcaaaaactgaa

SEQ ID NO: 10790 - DNA, 80 bp, synthetic construct
  source 1..80: mol_type = other DNA
cttgcatgaaataattttttcaatcaatgtgtgttcttcaagttaaagtgaacctcttacaggcagcctacgtctgcata

SEQ ID NO: 10791 - DNA, 80 bp, synthetic construct
  source 1..80: mol_type = other DNA
tgtaatggaatgtttttcaacagtaatgttatgttaaacacactttaaatggtcactctaagcaaacataaccttactag

SEQ ID NO: 10792 - DNA, 80 bp, synthetic construct
  source 1..80: mol_type = other DNA
tcaggacctcccgcagcctctgccctgcaggctccaggtgccctcgctgtggctcccctcgcgggcccaggcctgaagaa

SEQ ID NO: 10793 - DNA, 80 bp, synthetic construct
  source 1..80: mol_type = other DNA
tgttccttttcattcttttttctctaatcttgtcttcacaccttatttcagtaagttggtcttcagtctctaatatcctt

SEQ ID NO: 10794 - DNA, 80 bp, synthetic construct
  source 1..80: mol_type = other DNA
ttgtctgtaagcctctgactggggctgttacctttctttcagagatgccctgcccagtgagggggaatctagagaagcag

SEQ ID NO: 10795 - DNA, 80 bp, synthetic construct
  source 1..80: mol_type = other DNA
tacacagcacagtaaaagaaaatgcagacataagggacaatggtaaagtgtgcctcaccataaacacactggtatttgaa

SEQ ID NO: 10796 - DNA, 80 bp, synthetic construct
  source 1..80: mol_type = other DNA
agagaggacgctgttcacagaggtggttcaacaatgccagttccaaaaagtatttctcattacttttaaaagatatttac

SEQ ID NO: 10797 - DNA, 80 bp, synthetic construct
  source 1..80: mol_type = other DNA
aatttgaaggagtcttccaaatgtgaacattctggcctaaaaatctttccatctccatcaacccagtgggcaagaatgct

SEQ ID NO: 10798 - DNA, 80 bp, synthetic construct
  source 1..80: mol_type = other DNA
gagagccgctttctcactttacacacgcagggccttctataaacggtggtaattaaatcttcccaaagggtagtgggcat

SEQ ID NO: 10799 - DNA, 80 bp, synthetic construct
  source 1..80: mol_type = other DNA
ttatccaggatcaaatattaggtaacaaaataagactcaacaattttaagaagattgaaatcatatcaagtatcttttct

SEQ ID NO: 10800 - DNA, 80 bp, synthetic construct
  source 1..80: mol_type = other DNA
aagtagctaaagcacttttgagcaaaaagaccagagctggaggcatcacactacctgattaaagatatattacaaagtta

SEQ ID NO: 10801 - DNA, 80 bp, synthetic construct
  source 1..80: mol_type = other DNA
gattgaaatttgtattttaaaaatatgttggagaccagcctgaccaatatggtgaaaccccatctctactaaaaatacaa

SEQ ID NO: 10802 - DNA, 80 bp, synthetic construct
  source 1..80: mol_type = other DNA
agaggccaaatatctggattgaccacctgaagaaactgggagaggagaactcaaaattgtgataagggtgactaagtcct

SEQ ID NO: 10803 - DNA, 80 bp, synthetic construct
  source 1..80: mol_type = other DNA
ctgaaaaaaaaaatcggacggctcagtaaaacctcttcctttcattgtaaatgttactcacagcatcttttcccatgttt

SEQ ID NO: 10804 - DNA, 80 bp, synthetic construct
  source 1..80: mol_type = other DNA
tctacaactcataaaagctacatttgatagggtcttcatttccctcttttccaccaagaagaaaattgaagctgagactt

SEQ ID NO: 10805 - DNA, 80 bp, synthetic construct
  source 1..80: mol_type = other DNA
ttttgccaaatttatcagagagtataagaggaagagttggctgtggcaggaggggagcagaagggggatggcaaaactat

SEQ ID NO: 10806 - DNA, 80 bp, synthetic construct
  source 1..80: mol_type = other DNA
agtaagactgctgttattcctttctctgtaattgcaaaattggaaatagcctgaaaatataaaaataatttgacttttta

SEQ ID NO: 10807 - DNA, 80 bp, synthetic construct
  source 1..80: mol_type = other DNA
tcatgtgttgacacccatgcaaatgagctgaccctcatggtcatgagctccatttttgttctcatacctctcattctcat

SEQ ID NO: 10808 - DNA, 80 bp, synthetic construct
  source 1..80: mol_type = other DNA
agtatttggttgaaagacactttttaaagacactaaattatctaatttatcctgtaggtctacatacttgtcacattgaa

SEQ ID NO: 10809 - DNA, 80 bp, synthetic construct
  source 1..80: mol_type = other DNA
ggtaaaatttcaaacttagagaagaattgcaaaaaagtagtacaaagactgacatttaccctataaccagattaagcatt

SEQ ID NO: 10810 - DNA, 80 bp, synthetic construct
  source 1..80: mol_type = other DNA
cctcttattttggtttgttacaatttgtgatgttaaaagtctaaaaatgtgtgcgtggttaatactatctattgttcatt

SEQ ID NO: 10811 - DNA, 80 bp, synthetic construct
  source 1..80: mol_type = other DNA
gggctgtttgttcttttcttgtaaatttgtttgagttcattgtagattctggatattagccctttgtcagatgagtagct

SEQ ID NO: 10812 - DNA, 80 bp, synthetic construct
  source 1..80: mol_type = other DNA
atcgcaccgaatctataaattaccttgggcagtatggccattttcgcgatattgattcttcctatccatgagcatggaat

SEQ ID NO: 10813 - DNA, 80 bp, synthetic construct
  source 1..80: mol_type = other DNA
tgcatctattgagataatcatgtggtttttgtcttttgttctgctggattacgtttattgatttgcgtacgttgaaccag

SEQ ID NO: 10814 - DNA, 80 bp, synthetic construct
  source 1..80: mol_type = other DNA
tgtggtactgagaagaatgtatattctgttgatttggggtggagagttctgtagatgtctattagcactgcttggtgcag

SEQ ID NO: 10815 - DNA, 80 bp, synthetic construct
  source 1..80: mol_type = other DNA
actgatgggtcttgaccctttatccaatttgccagtctgtgtcttttaattggagcatttagcccattcaagacatttac

SEQ ID NO: 10816 - DNA, 80 bp, synthetic construct
  source 1..80: mol_type = other DNA
agcccttcaaactggattttattttttttacgtatcctgatgttttttggagcatttgtttactgctttttgagtttacc

SEQ ID NO: 10817 - DNA, 80 bp, synthetic construct
  source 1..80: mol_type = other DNA
caagatcaaggcaagttcattgctctcttttatactgttgttacacctagtcttaaccctctaatctacaccctcagaaa

SEQ ID NO: 10818 - DNA, 80 bp, synthetic construct
  source 1..80: mol_type = other DNA
caaatagagaggctctgaaaatgacttgaagtcaatgggtgtataaaagaattatgtttaaatatactggaaaattttta

SEQ ID NO: 10819 - DNA, 80 bp, synthetic construct
  source 1..80: mol_type = other DNA
ttaggatctgttatcttagcaattttcaagtatgcagtacagttttattaactatagtcaccatactatagaatagatct

SEQ ID NO: 10820 - DNA, 80 bp, synthetic construct
  source 1..80: mol_type = other DNA
cctatcaacctgtcatctaggttttaagccccatatgcattagatatttgtcctaatgctctccctctccttccccctga

SEQ ID NO: 10821 - DNA, 80 bp, synthetic construct
  source 1..80: mol_type = other DNA
ttgagaagtttctatttatatcctttgctcactttttgatggggttgtttgttttattttcataaatttgtttaagttcc

SEQ ID NO: 10822 - DNA, 80 bp, synthetic construct
  source 1..80: mol_type = other DNA
catggatcttgggactacagagtctgacctagggggccaactggcactggaaagtcctattttgccgttttattgatatc

SEQ ID NO: 10823 - DNA, 80 bp, synthetic construct
  source 1..80: mol_type = other DNA
ctgaagggaggagataggtgcttgcataagctctggcaacttgtatatgaaaaaatcagggtaaggacaatacattttta

SEQ ID NO: 10824 - DNA, 80 bp, synthetic construct
  source 1..80: mol_type = other DNA
ggataagttattatatattaccttacgtggcaaaattaattttattttttatattttaagtcctggaagacatgtgcgga

SEQ ID NO: 10825 - DNA, 80 bp, synthetic construct
  source 1..80: mol_type = other DNA
tttctcccattctgtaggctgcttgtccagaaggtttcttttgctgtgcagaagctctttagtttaattagatcccattt

SEQ ID NO: 10826 - DNA, 80 bp, synthetic construct
  source 1..80: mol_type = other DNA
ttccctttgtgggtaacgcgacctttctctctggctgcccttaacattttttttctttcatttcaaccttggtgaatatt

SEQ ID NO: 10827 - DNA, 80 bp, synthetic construct
  source 1..80: mol_type = other DNA
acatgttctgtcctagagcctgcggaagatgtgcagccctgtagatccaatttagtctttctttctccagatatataaga

SEQ ID NO: 10828 - DNA, 80 bp, synthetic construct
  source 1..80: mol_type = other DNA
ctgacctccagcctccctcttatatggacacaggtgattatattagcctacctgcctaatccaggataatatccccatct

SEQ ID NO: 10829 - DNA, 80 bp, synthetic construct
  source 1..80: mol_type = other DNA
ggatactaagattcagtatcattaaaatggccacactggtccaaagcaatttatagattcagtgcaattcctatcaaact

SEQ ID NO: 10830 - DNA, 80 bp, synthetic construct
  source 1..80: mol_type = other DNA
tcaaattattaataacagatacatcaaggttatggagaaaagggaatgcttatacactgctggtgggaatgtaaattacc

SEQ ID NO: 10831 - DNA, 80 bp, synthetic construct
  source 1..80: mol_type = other DNA
aaatgacattaattctctcatactttagggttgcttgttagtgcctagaaggaatacagtctctgtggccagtctccttg

SEQ ID NO: 10832 - DNA, 80 bp, synthetic construct
  source 1..80: mol_type = other DNA
tcatccaaataaaatacattgtcctcagtaggtagtctttcatccctcaaccctttcccagcctcccaccttttggagtc

SEQ ID NO: 10833 - DNA, 80 bp, synthetic construct
  source 1..80: mol_type = other DNA
ccactgggcaaaaggatatttatatccttggattaagtgttaagtgataagaaatcaaatcaaataactgagtaaacagt

SEQ ID NO: 10834 - DNA, 80 bp, synthetic construct
  source 1..80: mol_type = other DNA
aagcatttgtctagtaagaaaatgtaatttgaaagtaaggttcagaacatttaaccaaatgttcaagtaatttctaaact

SEQ ID NO: 10835 - DNA, 80 bp, synthetic construct
  source 1..80: mol_type = other DNA
aaaaaacccactgggatggaaacacatcagtggtatccagggcttagtgtaagggagattagtttattacaaagaagaca

SEQ ID NO: 10836 - DNA, 80 bp, synthetic construct
  source 1..80: mol_type = other DNA
aggatgaagacctgtccaagggacccagcagctaacttgaaagagctctcaatgggtaaagctggagcaatttcaacaac

SEQ ID NO: 10837 - DNA, 80 bp, synthetic construct
  source 1..80: mol_type = other DNA
gatctctccctgctcctggtgcgtgctctgatctcggagcgtggttgaggccaggcccaggtgctattgcaacctggcct

SEQ ID NO: 10838 - DNA, 80 bp, synthetic construct
  source 1..80: mol_type = other DNA
ggtggttctgtggttcctggtgcggaagctgcttgcagtacacctggtccagccgcagacttgcagggagatggcacccc

SEQ ID NO: 10839 - DNA, 80 bp, synthetic construct
  source 1..80: mol_type = other DNA
tgtctgaagtactgtctctgcctgttccccagggagatacccctgccagctaacacatttatgggggatatggggtctct

SEQ ID NO: 10840 - DNA, 80 bp, synthetic construct
  source 1..80: mol_type = other DNA
ttcaccagctgaaaacctctgtggctagtggcacttatgctggggttttgctcaggcccactggcccactcagcctggca

SEQ ID NO: 10841 - DNA, 80 bp, synthetic construct
  source 1..80: mol_type = other DNA
gtggctagccagttttcccaacaccatttattaaatagggaatcttttccacattgcttgtttttttcaggttcatggaa

SEQ ID NO: 10842 - DNA, 80 bp, synthetic construct
  source 1..80: mol_type = other DNA
ttggacattctgattacttaacatgatgcaacccagaggtaatgatgtaggttagatgatcttgaaagacccttcccaat

SEQ ID NO: 10843 - DNA, 80 bp, synthetic construct
  source 1..80: mol_type = other DNA
cccttagtgataactctccattcccctcccccatcccctagtaactttcaacctaccttatgtctgtatgaatttgcatg

SEQ ID NO: 10844 - DNA, 80 bp, synthetic construct
  source 1..80: mol_type = other DNA
gtgagccatggcacctggccacatgctcgtattttaatgtatttgtttccccttacttttcttttgtgtatcattttttt

SEQ ID NO: 10845 - DNA, 80 bp, synthetic construct
  source 1..80: mol_type = other DNA
aaaaatttttagaagtgttagtatataacaaatacatatttcgaattgcttttaaaaggaatagaattgtttggacttga

SEQ ID NO: 10846 - DNA, 80 bp, synthetic construct
  source 1..80: mol_type = other DNA
ctatcgagtactgttctaattcatccactaggtgctgtatttgaatggccttcagggtaagaatgggctctatagcaagt

SEQ ID NO: 10847 - DNA, 80 bp, synthetic construct
  source 1..80: mol_type = other DNA
tcaagagcttctgacatttgccctcattatcctacctgcaatgctagagcaatgagcttatgaatgaagtcaccatgata

SEQ ID NO: 10848 - DNA, 80 bp, synthetic construct
  source 1..80: mol_type = other DNA
ggagaggtgccagataagggtgagagcaacacagaatgaatagtaagaaggagatggtgaccatagtttgtaggacttaa

SEQ ID NO: 10849 - DNA, 80 bp, synthetic construct
  source 1..80: mol_type = other DNA
gagtgaaacatttaagaaagaaagttaatttagggatgcattagccaggttgtgtgtaatgagagctcagttctctaaag

SEQ ID NO: 10850 - DNA, 80 bp, synthetic construct
  source 1..80: mol_type = other DNA
gaaaatcgaagggtggggtaagaggcaggttgattctgaacatggaaaaatctacaagactgagattctttaaaacatca

SEQ ID NO: 10851 - DNA, 80 bp, synthetic construct
  source 1..80: mol_type = other DNA
agttactttgtgccaagaacactttttagtatttcccacatttgcacatttaatctctccaacaagcatatgtaggtttt

SEQ ID NO: 10852 - DNA, 80 bp, synthetic construct
  source 1..80: mol_type = other DNA
tatggtcatagttcttgtgtccttgaaggatccaaaactccacatccctatgtatttctttctttccaacctttccttgg

SEQ ID NO: 10853 - DNA, 80 bp, synthetic construct
  source 1..80: mol_type = other DNA
agagctgcattctgttcaggttgagatttcagtttccttcatcaatcaattgggcccttaaattcttcatattgtggatt

SEQ ID NO: 10854 - DNA, 80 bp, synthetic construct
  source 1..80: mol_type = other DNA
attgcagctaacaacactggtctagcaagtgcttccccctcagttcactcctgttcagagacagtgacaatgtgatagaa

SEQ ID NO: 10855 - DNA, 80 bp, synthetic construct
  source 1..80: mol_type = other DNA
tgaattgtagttcccataatccccatgtgtcttggtagggacctagtgagaggttgaatcataggagtggttactcccca

SEQ ID NO: 10856 - DNA, 80 bp, synthetic construct
  source 1..80: mol_type = other DNA
ttaacccaccacgtaggtattaagccccacatgcattagctatttatcctgatgctcttcccacctatccccgacaggtc

SEQ ID NO: 10857 - DNA, 80 bp, synthetic construct
  source 1..80: mol_type = other DNA
atagcaggattctacttaggggtagacagagcagtgaactttctgtggatcagagacctgggttttgattctatgcttgt

SEQ ID NO: 10858 - DNA, 80 bp, synthetic construct
  source 1..80: mol_type = other DNA
atatctaaccaaagtgaacaagttctgtgtccccaaaaactcaggatccacctctatgacaaggaggagctcagataatc

SEQ ID NO: 10859 - DNA, 80 bp, synthetic construct
  source 1..80: mol_type = other DNA
taataaaaaaaagaaaaataaattttggaaagatacagtgagtaccccaccaaatgaaagaaccagtaggaccatcaggt

SEQ ID NO: 10860 - DNA, 80 bp, synthetic construct
  source 1..80: mol_type = other DNA
tactccacttcctctatcctgtaaaaactctgatctgacttcagtaaggagatctcaatgctcatcacctgaataaagtc

SEQ ID NO: 10861 - DNA, 80 bp, synthetic construct
  source 1..80: mol_type = other DNA
gttcataatgacttgtgtctgacattaaaacaaggattcagtcactagaagatatgtcaaagtccatcagtaccaaatgg

SEQ ID NO: 10862 - DNA, 80 bp, synthetic construct
  source 1..80: mol_type = other DNA
gaacctacttttaacatccaggaaaaatagccatatcattgttgtcctaaagtaattaaaaattctctctattctagttt

SEQ ID NO: 10863 - DNA, 80 bp, synthetic construct
  source 1..80: mol_type = other DNA
ctttgtttctgagttcaccctcactctcctgctgtgtaattttgcatactctataggtcattaccatagaatacaagcat

SEQ ID NO: 10864 - DNA, 80 bp, synthetic construct
  source 1..80: mol_type = other DNA
cctggctggtggcttttcagtgtagagttccatggttctaaattcttgacttcaggaactctccaaattatataaaatgg

SEQ ID NO: 10865 - DNA, 80 bp, synthetic construct
  source 1..80: mol_type = other DNA
tatgtcaaaatggccttttctcttattataaaaatgaaaatttaaaaccatacataatgaaacaaaaggacactaaaaac

SEQ ID NO: 10866 - DNA, 80 bp, synthetic construct
  source 1..80: mol_type = other DNA
caaaattgtgtttgagggcttatatgtctttttttaatgaataaataaaaggtggaaacggaaggaagggaaggaaaaaa

SEQ ID NO: 10867 - DNA, 80 bp, synthetic construct
  source 1..80: mol_type = other DNA
ggtatagtggagaggtttgcaaactgcagcatagcgatcaaaagccattacagccaggaggacacactcagtggagccca

SEQ ID NO: 10868 - DNA, 80 bp, synthetic construct
  source 1..80: mol_type = other DNA
tccaccagcatactgatgacgtaaactcatgcagtttattcagcaaagatattcttatgcaagcattatgcagcacacct

SEQ ID NO: 10869 - DNA, 80 bp, synthetic construct
  source 1..80: mol_type = other DNA
ttaatgcagcctgctcattgtcaatttacccatcccaatcaaaggagacttctcctgtatttttaacacacactcacaca

SEQ ID NO: 10870 - DNA, 80 bp, synthetic construct
  source 1..80: mol_type = other DNA
aacagggccttttccctcatatctaataggcacttgactgttgctggagataaatatataaatgttttgaacggcgccct

SEQ ID NO: 10871 - DNA, 80 bp, synthetic construct
  source 1..80: mol_type = other DNA
tcaagaaaacaatgtaagaaacattctagaatgactctcaatttcatttccttatgctacttatacctgccccttgtaac

SEQ ID NO: 10872 - DNA, 80 bp, synthetic construct
  source 1..80: mol_type = other DNA
ttcattttttcattgtgttagcaaaataacacaataaagaaacaacattttataatcatatcatcagataaaaaatcaag

SEQ ID NO: 10873 - DNA, 80 bp, synthetic construct
  source 1..80: mol_type = other DNA
atgaagtctcataagtggtcacccttacaagcaatagatgggaaatattttgtattcagacctttaaaagatactggact

SEQ ID NO: 10874 - DNA, 80 bp, synthetic construct
  source 1..80: mol_type = other DNA
tcctgtttgcttgtctatgtctgcagctagattctatacaggctgctctttgttagaaaaaatgatttgggggctgcttt

SEQ ID NO: 10875 - DNA, 80 bp, synthetic construct
  source 1..80: mol_type = other DNA
cccagtctcgggtgatcctcccatctcagcttccctggtagctgggaccacaggcatgcaccaccacacccggctaattt

SEQ ID NO: 10876 - DNA, 80 bp, synthetic construct
  source 1..80: mol_type = other DNA
gctgttggtgtatagtaatgctagtgatttttgtatatggatttgtattctgaaactttgctgaagttgtgtatcagctg

SEQ ID NO: 10877 - DNA, 80 bp, synthetic construct
  source 1..80: mol_type = other DNA
tgtcttctacaatggttgaactaattttcactcccaagaacagtataaaagcattcctatttctccatatcctctccagt

SEQ ID NO: 10878 - DNA, 80 bp, synthetic construct
  source 1..80: mol_type = other DNA
tcatgatttggctttctgtttgtctattattggtgtatagaaatgcctgtgatttttgcacattgattatgtatcctaag

SEQ ID NO: 10879 - DNA, 80 bp, synthetic construct
  source 1..80: mol_type = other DNA
tgatgctggcctcataaaatgagttagggaagagtccctctttttctattgtttagaatagtttcagaaggaatgatagc

SEQ ID NO: 10880 - DNA, 80 bp, synthetic construct
  source 1..80: mol_type = other DNA
aataatgtatgttctgttgatttggggtggagagttctatagatgtctattaggtccacttggtccagagctgagttcaa

SEQ ID NO: 10881 - DNA, 80 bp, synthetic construct
  source 1..80: mol_type = other DNA
agttggccagtctgtgtctcttaattggggcatttagctcatttacatttaaggttagtattgttatgtgtgaattttat

SEQ ID NO: 10882 - DNA, 80 bp, synthetic construct
  source 1..80: mol_type = other DNA
gcttttgatgttggtgaccttcagatgggatcctgagtagacatttttctcttgatgttgatactattcctttctgtttg

SEQ ID NO: 10883 - DNA, 80 bp, synthetic construct
  source 1..80: mol_type = other DNA
accctacttttgagataagaataaatggaaaacatgaatcctacaaactggttatgacaatcaatggtagcagtacattt

SEQ ID NO: 10884 - DNA, 80 bp, synthetic construct
  source 1..80: mol_type = other DNA
gcaggattaggggtggcatgggaacctagagtgggagagattaaattgaagaaacattttgtggtaaggggtgatatcgt

SEQ ID NO: 10885 - DNA, 80 bp, synthetic construct
  source 1..80: mol_type = other DNA
ggagagtactcgcaacttccaggaggaagaggagagatctggctggctgtccaatggacacagctttattctgtaatggt

SEQ ID NO: 10886 - DNA, 80 bp, synthetic construct
  source 1..80: mol_type = other DNA
acttccatgaagagaaggagatgaggagctgcaggaatcaagccacaggcttgtatcccacatggaagtggtcatgaagg

SEQ ID NO: 10887 - DNA, 80 bp, synthetic construct
  source 1..80: mol_type = other DNA
tgtgaggtcaagtttctttgatagaaaggcaacaggttgtgagcctggctcctgtgtgaggactccggcagcacagactt

SEQ ID NO: 10888 - DNA, 80 bp, synthetic construct
  source 1..80: mol_type = other DNA
tttgtaggctttaagaggccatgttgtaacaggtgagttataacaggctttaacccttttaaagcctgctgtgggatggg

SEQ ID NO: 10889 - DNA, 80 bp, synthetic construct
  source 1..80: mol_type = other DNA
agaggtcagataaagaaaaaaggagcattaatcttgactatgccttcagctccggccacctctctaaaatgaaattgttg

SEQ ID NO: 10890 - DNA, 80 bp, synthetic construct
  source 1..80: mol_type = other DNA
ccccgctatgatcagacaccgagggaagaccatcttcccatatccgtgaccgacgtcggagtttttgagttcacggataa

SEQ ID NO: 10891 - DNA, 80 bp, synthetic construct
  source 1..80: mol_type = other DNA
aaaaacttaatccaccacaatcaagtaggctttatttctgggatgcgaggttggttcatcacccacacatcaataaatgt

SEQ ID NO: 10892 - DNA, 80 bp, synthetic construct
  source 1..80: mol_type = other DNA
aattacctcctttggaaaggctaatcagaaactcaaaagaatgtaatcgtttgtgtatcacctagtgtaacctgggagct

SEQ ID NO: 10893 - DNA, 80 bp, synthetic construct
  source 1..80: mol_type = other DNA
caaaaattcacaagtatgacctaattaaactaaagagcttctgcacagcaaaagaaactatcaacaggatatgcagacaa

SEQ ID NO: 10894 - DNA, 80 bp, synthetic construct
  source 1..80: mol_type = other DNA
ctctagcttttagtgttcctattatgatgcaactgaatgtgaatatttttacattaatcctatttagagaaaggagcttt

SEQ ID NO: 10895 - DNA, 80 bp, synthetic construct
  source 1..80: mol_type = other DNA
gggtgctctattggttttgataatgccctggggacataaattgctccacagtgtgatctaattttgcaggggtagttctt

SEQ ID NO: 10896 - DNA, 80 bp, synthetic construct
  source 1..80: mol_type = other DNA
tagaaaattcaatgatggataaaccacgtggttcgataggacccaaacgaaaccattaatatacatagcagaaaaatact

SEQ ID NO: 10897 - DNA, 80 bp, synthetic construct
  source 1..80: mol_type = other DNA
agcattaatgtgattaaaggatgtgtgttttatcatatacagtgtctaccattgtctgaggtgctttgattctacaactt

SEQ ID NO: 10898 - DNA, 80 bp, synthetic construct
  source 1..80: mol_type = other DNA
ttatttaccagagggaagggcagggcccaagggatctcattatgaagtgaatggaattactggcattgatgatctcactt

SEQ ID NO: 10899 - DNA, 80 bp, synthetic construct
  source 1..80: mol_type = other DNA
ggggacacagacattcacaatacagtggtaggttacccaaatattgtgtttttaagtaccgtttgataaactgtgtatca

SEQ ID NO: 10900 - DNA, 80 bp, synthetic construct
  source 1..80: mol_type = other DNA
ttgttaatatttagggatgtttgcaactgtgtttatgaaagatactgataaacattttttatttttttgtaaatccttgt

SEQ ID NO: 10901 - DNA, 80 bp, synthetic construct
  source 1..80: mol_type = other DNA
caagctccgcctcccgggttcacgccattctcctgcctcagcctccagagtagctgggacttcaggtgcgaattttttgt

SEQ ID NO: 10902 - DNA, 80 bp, synthetic construct
  source 1..80: mol_type = other DNA
ttccaaccccgccataaacttctccacacacataaacattccaagcttgtaataagccccctcaccctaaaaccaatata

SEQ ID NO: 10903 - DNA, 80 bp, synthetic construct
  source 1..80: mol_type = other DNA
gttctaatgttttatctgtttatccaactaagtgtaaaatttatacccagggcaatttgccttacaaggtctatattctc

SEQ ID NO: 10904 - DNA, 80 bp, synthetic construct
  source 1..80: mol_type = other DNA
cacagccaaaccacatcaaacactgaaatagaaaaaaaaagacttgaaacaaacccacagatctgtggaaatttatttat

SEQ ID NO: 10905 - DNA, 80 bp, synthetic construct
  source 1..80: mol_type = other DNA
ggtgcaaccactctggaaaattttggcagtgtttcaaaaaacctgagtacaaatatacaatgaggatatatatacatatg

SEQ ID NO: 10906 - DNA, 80 bp, synthetic construct
  source 1..80: mol_type = other DNA
tattctagatttttcattttatttaagttttctactttctcaagggagaaagagggtataaggaataaaattaatcactc

SEQ ID NO: 10907 - DNA, 80 bp, synthetic construct
  source 1..80: mol_type = other DNA
agtgcatagcatgttatttttagtgttggcactttagtttataatttcattttaaatatgagttttgtacatataccaat

SEQ ID NO: 10908 - DNA, 80 bp, synthetic construct
  source 1..80: mol_type = other DNA
atgaaaagttgaaaggcacacccaccaaaggtaattcttttgtctttgccccagatactgaccaacatttgtgggactat

SEQ ID NO: 10909 - DNA, 80 bp, synthetic construct
  source 1..80: mol_type = other DNA
gtgcactgtttctatttttcttgcttgttagtgtgcctcatagtgtttaatttttattttatgccaggcattgtgtgtct

SEQ ID NO: 10910 - DNA, 80 bp, synthetic construct
  source 1..80: mol_type = other DNA
aggtggcagcccagataatctctaaaacacctttagggtctttcttcccttgtcttgaagagtaatatcacacattcaca

SEQ ID NO: 10911 - DNA, 80 bp, synthetic construct
  source 1..80: mol_type = other DNA
gaagctggaatgtccaaatttaaggtgccagaaaatttagtttttggtgaagtctctcttgctgacagacctttcactgt

SEQ ID NO: 10912 - DNA, 80 bp, synthetic construct
  source 1..80: mol_type = other DNA
tgtggattaagccaaatttatcaacatgagagcccttaaaagatattctaattttatgtgctggctcaaacagctgggag

SEQ ID NO: 10913 - DNA, 80 bp, synthetic construct
  source 1..80: mol_type = other DNA
gcgcctctcgtcctccaaaggaatgcggctcctcaccagcaacggaacaaagctggagggagaatgactttgacaagttt

SEQ ID NO: 10914 - DNA, 80 bp, synthetic construct
  source 1..80: mol_type = other DNA
tgccaaattgtaaagaccttcaaggctaggaagaaactgcatcaactaacaagcaaaataaccagctaacatcataatga

SEQ ID NO: 10915 - DNA, 80 bp, synthetic construct
  source 1..80: mol_type = other DNA
accactagcaagactaataaagaagaaaagagagaagaatcaaatagacgcaataaaaaatgataaaggggatatcacca

SEQ ID NO: 10916 - DNA, 80 bp, synthetic construct
  source 1..80: mol_type = other DNA
aactctcaataaattaggtattgatgggacatatcttaaaataataagagctatctatgacaaacccacagccaatatta

SEQ ID NO: 10917 - DNA, 80 bp, synthetic construct
  source 1..80: mol_type = other DNA
atttccaagtcaatcctaagccaaatgaacaaagctggaggcatcatgctacctgactgcaaactatactacaaggctac

SEQ ID NO: 10918 - DNA, 80 bp, synthetic construct
  source 1..80: mol_type = other DNA
ttgctgggtatatacccaaaggattataaatcatgctgctagaaagacacacacacacatatgtttattgcggcactatt

SEQ ID NO: 10919 - DNA, 80 bp, synthetic construct
  source 1..80: mol_type = other DNA
acatgtactctaaaacttaaagtataataataataaaattttaaaaaagtaatgttcaagtttatttgggtatgaaattc

SEQ ID NO: 10920 - DNA, 80 bp, synthetic construct
  source 1..80: mol_type = other DNA
tttttttcctgattttaaatcagttagcacacacacactccattgaaacgttctgcctttacgtaatgatatgaaattac

SEQ ID NO: 10921 - DNA, 80 bp, synthetic construct
  source 1..80: mol_type = other DNA
attattttaacgagtgcatgaagttgtcatatctttatcagaataataagtacatgtgaaggaaaaatttacctatttca

SEQ ID NO: 10922 - DNA, 80 bp, synthetic construct
  source 1..80: mol_type = other DNA
taggaaggcaggaagtcaaattgtctctgtttgcagatgacatgattgtatatttagaaaaccccatcgtctcagaccta

SEQ ID NO: 10923 - DNA, 80 bp, synthetic construct
  source 1..80: mol_type = other DNA
tatttaataaatggttttgggaaaactggctagccatatgcagaaaacggaaactggaccccttccttacaccttataaa

SEQ ID NO: 10924 - DNA, 80 bp, synthetic construct
  source 1..80: mol_type = other DNA
aagccatgagtctcattaactaacacaggaacagcaaaccaaacactccttattctcactcataaatgggagttgaacaa

SEQ ID NO: 10925 - DNA, 80 bp, synthetic construct
  source 1..80: mol_type = other DNA
ttattcaaatcttttcttctgaatttactagatctataaacttgagcaagtcctacaacctcttggtgcctgcgtttcct

SEQ ID NO: 10926 - DNA, 80 bp, synthetic construct
  source 1..80: mol_type = other DNA
atgtggtcagatacttctactctgctcacccttcgtttttttgtgcactccatttgccagagatctatagattcttctgt

SEQ ID NO: 10927 - DNA, 80 bp, synthetic construct
  source 1..80: mol_type = other DNA
agaaatatatatgtaaagataaaattgtttctcagtattgaatcaaaatatattcatataataatcttctaatcaactgg

SEQ ID NO: 10928 - DNA, 80 bp, synthetic construct
  source 1..80: mol_type = other DNA
acctcttgggctctgaattagtaaatgatgtatatgggtttggttgtgatgaaatatcagtgaaactgattgaggtcata

SEQ ID NO: 10929 - DNA, 80 bp, synthetic construct
  source 1..80: mol_type = other DNA
ttgagagacaatggtgaagaagaaattactccagctgacatcttacgtgacatgtatgcaattataattcaaagagaatg

SEQ ID NO: 10930 - DNA, 80 bp, synthetic construct
  source 1..80: mol_type = other DNA
agagcaggatagaggcaattttggtggaaaaaatagtatcagtaattagaaaatatgagaataaagaagggagagagagg

SEQ ID NO: 10931 - DNA, 80 bp, synthetic construct
  source 1..80: mol_type = other DNA
ttctggtggcctacatcttttccctatttggaaatatctccattatcctagtttcccatctggatccccagcttgacagt

SEQ ID NO: 10932 - DNA, 80 bp, synthetic construct
  source 1..80: mol_type = other DNA
tttacaatattggattccatcaagtcagtcttttttctccctattcctaatgactagctaatctagttaaagtaagggaa

SEQ ID NO: 10933 - DNA, 80 bp, synthetic construct
  source 1..80: mol_type = other DNA
tggaaaaggatcctagacattatgcatttttttgatcacagtatttttcccaacccatggttcatttatacatggagtct

SEQ ID NO: 10934 - DNA, 80 bp, synthetic construct
  source 1..80: mol_type = other DNA
ataatattagtaaattattaaataaaaatatttatttgttatatcttataaaacaacataaacagcaacatttaaatgag

SEQ ID NO: 10935 - DNA, 80 bp, synthetic construct
  source 1..80: mol_type = other DNA
gggtatttataggattacagatatacccagtaaaagaaaattttccaatgaaaatttactaagcatgaaaaaaagcagga

SEQ ID NO: 10936 - DNA, 80 bp, synthetic construct
  source 1..80: mol_type = other DNA
gcgggcaaagcgttggcctgcaggtgccccttggcaccatgaaaggcgtcaggaggcagacgggctcctaggtggaaggg

SEQ ID NO: 10937 - DNA, 80 bp, synthetic construct
  source 1..80: mol_type = other DNA
tcaggcctctctattttctaagacacaacaatattgaaatgagaccaattaataatcctacaatggcctttaagtattca

SEQ ID NO: 10938 - DNA, 80 bp, synthetic construct
  source 1..80: mol_type = other DNA
tagttactgtatcatcaggaacaggttttgaaaattattgtttatgctgagaaaacaactatctgaatataactaataac

SEQ ID NO: 10939 - DNA, 80 bp, synthetic construct
  source 1..80: mol_type = other DNA
catttgccaagtagaatatacaatatattaaatttttgatattaaaagttttaaaaaattttctttcaatgctaagaagg

SEQ ID NO: 10940 - DNA, 80 bp, synthetic construct
  source 1..80: mol_type = other DNA
tgacaaagggctaatatccagaatctacaatgaactcaaacaaatttacaagaaaaaaacaaccccatcaaaaagtgggc

SEQ ID NO: 10941 - DNA, 80 bp, synthetic construct
  source 1..80: mol_type = other DNA
aaaattattcatctgggggattgttaaaatgagggctggattatcagtttcagagtaattttagaaaagacaccatgttt

SEQ ID NO: 10942 - DNA, 80 bp, synthetic construct
  source 1..80: mol_type = other DNA
ctccaaagagtgacaattcttcttgggtcgacagttaaactcaggtgaattataaatggaaagagacaatgtagctgtgt

SEQ ID NO: 10943 - DNA, 80 bp, synthetic construct
  source 1..80: mol_type = other DNA
caaagttgtgccattctttgaaataggtcacagtgacagggagatgtctgggagaagagatgagtccttatgggaaagac

SEQ ID NO: 10944 - DNA, 80 bp, synthetic construct
  source 1..80: mol_type = other DNA
cacacacacataaaatgtgcactattatgaaagagagagagagagcaagtgcatactgtggcaaagatgccctttgcgat

SEQ ID NO: 10945 - DNA, 80 bp, synthetic construct
  source 1..80: mol_type = other DNA
ttcttacgatttttctcctccttccctctatggagaaaccttaatggggaggctaaatgatagaggtttttcttagatta

SEQ ID NO: 10946 - DNA, 80 bp, synthetic construct
  source 1..80: mol_type = other DNA
atctggtatagattttttttttgtttggttggttattttaagaaatgggctcccactatctaatatatttcaagtcctag

SEQ ID NO: 10947 - DNA, 80 bp, synthetic construct
  source 1..80: mol_type = other DNA
cagagagactatggtcaatttgacttcaatgagtggattccttcttatggggttttctgatgagcgtaagcttcagattt

SEQ ID NO: 10948 - DNA, 80 bp, synthetic construct
  source 1..80: mol_type = other DNA
catgtttaaactctgaagaaccatacaaatgaaaggcattgttattatgtttcagattggaagagaggtgaatcttattt

SEQ ID NO: 10949 - DNA, 80 bp, synthetic construct
  source 1..80: mol_type = other DNA
ggaggcacaaatcttgtgaatctgaatatctgattcaattttgtgtaatgctgcagatttcttcaagaaagactcataat

SEQ ID NO: 10950 - DNA, 80 bp, synthetic construct
  source 1..80: mol_type = other DNA
tgaaactccatctcaactaaaaatacaaacacttagctgggcatggtgccatgaacctgtaatcccggctactcaggagg

SEQ ID NO: 10951 - DNA, 80 bp, synthetic construct
  source 1..80: mol_type = other DNA
tccatttgtttgtgccctctctccttgagcagtggtttgtagttctccttgaagaggtccttcacatgccttgtaagttg

SEQ ID NO: 10952 - DNA, 80 bp, synthetic construct
  source 1..80: mol_type = other DNA
tctgtgaatctgtctggttctgggcttttcttggttggtaggctattaactactacctccatttcagaacatgttattgg

SEQ ID NO: 10953 - DNA, 80 bp, synthetic construct
  source 1..80: mol_type = other DNA
ttccagccacccacactgatttctaaagtagttgttccatattatattccctagataatcaagaattgttataaagggct

SEQ ID NO: 10954 - DNA, 80 bp, synthetic construct
  source 1..80: mol_type = other DNA
cgcgcccggcctaaaattataaaggtatttttctatgtgaccatttagaaaatgaatagttttagcttctatattaatta

SEQ ID NO: 10955 - DNA, 80 bp, synthetic construct
  source 1..80: mol_type = other DNA
attacacttcatgctccttaaattgtttcaaatgttgtagaaataacattaaaataagaatttcctctttaatagtgatt

SEQ ID NO: 10956 - DNA, 80 bp, synthetic construct
  source 1..80: mol_type = other DNA
gcttttaactttttggaacactttttgctcatatctctcgatctgctttcttatgcctgtgctagcgtataataaaacta

SEQ ID NO: 10957 - DNA, 80 bp, synthetic construct
  source 1..80: mol_type = other DNA
tggtttctcctagactcccggcacctcatgcactttttccctttgttcatttttaatatgataacttttcaatactaaca

SEQ ID NO: 10958 - DNA, 80 bp, synthetic construct
  source 1..80: mol_type = other DNA
acttaatagaagtggcagatatccctttcccttctgtagcctgatttttcattcattctgtggtttcctttgatgtgaag

SEQ ID NO: 10959 - DNA, 80 bp, synthetic construct
  source 1..80: mol_type = other DNA
taaattatctcatttttctaatgttttatctgcagattcttagggatttttttttttttcttgagacggagtctcgctct

SEQ ID NO: 10960 - DNA, 80 bp, synthetic construct
  source 1..80: mol_type = other DNA
gtactgatctaccccaggagcctttattaaattgacaaagtcccttcttatttcaggtctgctaaacttttcatcataaa

SEQ ID NO: 10961 - DNA, 80 bp, synthetic construct
  source 1..80: mol_type = other DNA
tatatgtgatgtgattcttgatacttgattctatgccatagttctagttagttatcatagctttgtaagttttgatatcc

SEQ ID NO: 10962 - DNA, 80 bp, synthetic construct
  source 1..80: mol_type = other DNA
ttatcatttactcttttaataaacatttttttaaccttttgaacaatgtgtatttcctaagaacagacattctcttgcat

SEQ ID NO: 10963 - DNA, 80 bp, synthetic construct
  source 1..80: mol_type = other DNA
atccctcaccctgctcccaccctttcccctgagtcctcaaaatccattctgtcattcttaggcctttgcatcctcatagc

SEQ ID NO: 10964 - DNA, 80 bp, synthetic construct
  source 1..80: mol_type = other DNA
gtcatgaaatcgttgcctaagccaatatctagaagggtttttctgatgtcatgagtttttatggtttcaggtcttagatt

SEQ ID NO: 10965 - DNA, 80 bp, synthetic construct
  source 1..80: mol_type = other DNA
tttatcaatatttaaatgcatacagttttagaaataaacttaaactgaataatcttatattctttaattttaaggaaaaa

SEQ ID NO: 10966 - DNA, 80 bp, synthetic construct
  source 1..80: mol_type = other DNA
atcttcaggcaactcaaatgtctgctaaaatttgagaaccaatgctaaggatgacaaaaccccataacttactaaactat

SEQ ID NO: 10967 - DNA, 80 bp, synthetic construct
  source 1..80: mol_type = other DNA
ttagaataactttattcctttcctaagggaaagacaaaaaagtttccatcccgtcagaacatacggggagagaaaacaca

SEQ ID NO: 10968 - DNA, 80 bp, synthetic construct
  source 1..80: mol_type = other DNA
tctgatcaggaggcatctgtaggattttgatctccaaggaattgtgggtgagtcacatacacctggtgtattacaggtgg

SEQ ID NO: 10969 - DNA, 80 bp, synthetic construct
  source 1..80: mol_type = other DNA
taaccaagggtaccatagaaacctgctctctacagcaagaggccaaagtgctttctagaatttagtgctgagtaaactga

SEQ ID NO: 10970 - DNA, 80 bp, synthetic construct
  source 1..80: mol_type = other DNA
gtgtctaaaagatgatattctgaataactcagagcatacagcacttcacacaaatgagtaataagctcctcaggcttaaa

SEQ ID NO: 10971 - DNA, 80 bp, synthetic construct
  source 1..80: mol_type = other DNA
cagttaaagaaaatgatcatctggtttagctgaagcctggagaaaagtgtggtgaggccgtgtactttttggtgctcagt

SEQ ID NO: 10972 - DNA, 80 bp, synthetic construct
  source 1..80: mol_type = other DNA
agctgaccattttgactggacagacccattataacagcgttctctgttctggttgtgctcatgctgtgttaattgcaaag

SEQ ID NO: 10973 - DNA, 80 bp, synthetic construct
  source 1..80: mol_type = other DNA
ccaccgcacccggccataacttatttttaatatctcttgactgcagctgctaccacaatttgcatcttcaaaatggttat

SEQ ID NO: 10974 - DNA, 80 bp, synthetic construct
  source 1..80: mol_type = other DNA
tttcccaatagactagaccaaacagaagaaagaatttcagagtttgaagattggtctttcaaacttacccagtcagacaa

SEQ ID NO: 10975 - DNA, 80 bp, synthetic construct
  source 1..80: mol_type = other DNA
tacacgtgatgacactgatagactcaaggtaaagggtaggagaaagatctatcacccaaacagaagacaaaaaagagcag

SEQ ID NO: 10976 - DNA, 80 bp, synthetic construct
  source 1..80: mol_type = other DNA
tggagacacaatattttaaaatctctggaatacagctaaagcagtgttaggaaagcttacatcactaaatacctacatca

SEQ ID NO: 10977 - DNA, 80 bp, synthetic construct
  source 1..80: mol_type = other DNA
cccttcatgaaaaaaatcctcaacatactaggcatggaagaaacatacctcaagataataagagcccactatgacaaacc

SEQ ID NO: 10978 - DNA, 80 bp, synthetic construct
  source 1..80: mol_type = other DNA
tggaccatgtcactaagctgttatgagttacataactggcatgtgaagttggttggtggagaggagagactgtgcttcta

SEQ ID NO: 10979 - DNA, 80 bp, synthetic construct
  source 1..80: mol_type = other DNA
aacatcagagtgtgtgagtgtggagttttctccagattttctgaaccgtatgtatagaaaatactggatgctgttttgga

SEQ ID NO: 10980 - DNA, 80 bp, synthetic construct
  source 1..80: mol_type = other DNA
tatgggcacccaatatgcagttaggaacatgcctggaaaataagcatatgagcaaaataagaagatgtagagaatttttg

SEQ ID NO: 10981 - DNA, 80 bp, synthetic construct
  source 1..80: mol_type = other DNA
tactcatgagagagagtgacttgcatgacataaaaaatttcataattatttttgtaagtaagagaaacatacagtttcac

SEQ ID NO: 10982 - DNA, 80 bp, synthetic construct
  source 1..80: mol_type = other DNA
cagctttattgggagtataatatacaaagaattgcacatacttaatatgtacaagttgatgagctttgacatatacaaat

SEQ ID NO: 10983 - DNA, 80 bp, synthetic construct
  source 1..80: mol_type = other DNA
aacaagataaaagtatacatcctctgcccaactagtaacatgagaatatccttgcataatgtacctctgccccatataat

SEQ ID NO: 10984 - DNA, 80 bp, synthetic construct
  source 1..80: mol_type = other DNA
ttataagtatatatacaagtatacataagtttataatatgcatctagcttttcaaaactacatgaaaagaatctatgaaa

SEQ ID NO: 10985 - DNA, 80 bp, synthetic construct
  source 1..80: mol_type = other DNA
tgtacttattgactttgcgaaaacatttataacatcttaacaatacaattatctgtaagctttctaatgagcccccaagt

SEQ ID NO: 10986 - DNA, 80 bp, synthetic construct
  source 1..80: mol_type = other DNA
atgagaatggtggttcttccatcaccttatagctatttccacatccatttacaattcaagctcttccaatactggaagtg

SEQ ID NO: 10987 - DNA, 80 bp, synthetic construct
  source 1..80: mol_type = other DNA
agaaaagacagttccttcaacaactaatgttggaacaattggatatttgcatgccagtagaatgaaattggaccctaatc

SEQ ID NO: 10988 - DNA, 80 bp, synthetic construct
  source 1..80: mol_type = other DNA
acgttattttaagtgaagtaagctaggaacagaaagacaaatgctacatgatctcacattatgcagaatttttaaaagtt

SEQ ID NO: 10989 - DNA, 80 bp, synthetic construct
  source 1..80: mol_type = other DNA
gggcgtgtgttacagggtgctcttaatttgctgtctacaggtggcttgtgttagcccaattagaccttctaccttgtccg

SEQ ID NO: 10990 - DNA, 80 bp, synthetic construct
  source 1..80: mol_type = other DNA
acagaagagcatgttgtcaaagtatgaggcttggatgtttcccactttggaaatatttgatgagaaatacgtgttgacca

SEQ ID NO: 10991 - DNA, 80 bp, synthetic construct
  source 1..80: mol_type = other DNA
gctaaatggtatttctggttctagatccttgaggaattgccacactgtcttccacaatggttgaactaatttacattccc

SEQ ID NO: 10992 - DNA, 80 bp, synthetic construct
  source 1..80: mol_type = other DNA
aaagtagccttttttttttaattctctgaagaatgtcaatggtagtttgatgggaatagcactgaatctataaattactt

SEQ ID NO: 10993 - DNA, 80 bp, synthetic construct
  source 1..80: mol_type = other DNA
ccgtctctgccaggttttagtatcaggatgatgctgggcttataaaattagttagggagaagtccctccttttgaattgt

SEQ ID NO: 10994 - DNA, 80 bp, synthetic construct
  source 1..80: mol_type = other DNA
ccattatgtgatcgattttagagtaaatgccacgtggcactgagaagaatgtatattctgttgtttcaggctggaagggc

SEQ ID NO: 10995 - DNA, 80 bp, synthetic construct
  source 1..80: mol_type = other DNA
ggtgagaagttgtaattttaaatagattagtcaagtaactctcactaccaccaccaccaccatttcaggcagtaccatgt

SEQ ID NO: 10996 - DNA, 80 bp, synthetic construct
  source 1..80: mol_type = other DNA
agactttttattccccatcaaaaaacccttgttttttctgtatgttttatctgattctgttttctaaatttttagcgaaa

SEQ ID NO: 10997 - DNA, 80 bp, synthetic construct
  source 1..80: mol_type = other DNA
ctgtacaacactgaaaccaacctatctttctttaatgagtaagttgagatgggccgtacatatgtaaagatggcgctgcc

SEQ ID NO: 10998 - DNA, 80 bp, synthetic construct
  source 1..80: mol_type = other DNA
ccatttatgtcaaaccagagaagcagcattcttttgcaaaccatagctcctacctaccatgcaacacagatataaataca

SEQ ID NO: 10999 - DNA, 80 bp, synthetic construct
  source 1..80: mol_type = other DNA
ataagtaatatttatcattcccattctctggatgagagcaccaagcctcagcaagataaacgtctggaagatgtcacgca

SEQ ID NO: 11000 - DNA, 80 bp, synthetic construct
  source 1..80: mol_type = other DNA
ctttcatcttttttaacatttccttccacttctgaggaggaattaacccttctactcattttattcaacaaatgtatttt

SEQ ID NO: 11001 - DNA, 80 bp, synthetic construct
  source 1..80: mol_type = other DNA
tattataacataaccattcaacaatcattgtattacccagttcacatgcccacacacactaaaaacgcacacgcacacaa

SEQ ID NO: 11002 - DNA, 80 bp, synthetic construct
  source 1..80: mol_type = other DNA
gggtggaactcaacacagcgtggcaaagtggctgtggccagactgcttctctagattcctcctcactggggagggcatct

SEQ ID NO: 11003 - DNA, 80 bp, synthetic construct
  source 1..80: mol_type = other DNA
aaaatattatccaggagaccttccccaacctagcaagacaggtcaacatccaaattcaggaaatacagagaacaccacta

SEQ ID NO: 11004 - DNA, 80 bp, synthetic construct
  source 1..80: mol_type = other DNA
tcccatacaataataatggaagactttaacactccactgtcaatattagacagatcaatgagacagaaaattatcaagaa

SEQ ID NO: 11005 - DNA, 80 bp, synthetic construct
  source 1..80: mol_type = other DNA
caagtactgaaattgaggcagtaattagtagcctaaaaaaacaaaaaatctccaggatctgatggattcatggctgaatt

SEQ ID NO: 11006 - DNA, 80 bp, synthetic construct
  source 1..80: mol_type = other DNA
atgtgatggacctctttaaggagaattacaaactgcttctcaaggaaataagagaggacacaaatgaagagaaaaaaatt

SEQ ID NO: 11007 - DNA, 80 bp, synthetic construct
  source 1..80: mol_type = other DNA
cacatctacaacctgacaaacctgacaaaacctttgttttgacaaacctgaaaaaacctgacaaacctgacaaaaacaag

SEQ ID NO: 11008 - DNA, 80 bp, synthetic construct
  source 1..80: mol_type = other DNA
taagataccatctcacgccagtttgaatggaaatcattaaaaagtctgcaaacagcagatgttggcgaggatgtggagaa

SEQ ID NO: 11009 - DNA, 80 bp, synthetic construct
  source 1..80: mol_type = other DNA
ctgcacattctgcatatgtatccctgaacttaaagtaaagtatattaaaaaaaaaaaaaaaaaaaggaaatccaggggga

SEQ ID NO: 11010 - DNA, 80 bp, synthetic construct
  source 1..80: mol_type = other DNA
catatttttaaagctcagcttaaatgcctcttttctcttcaagtgaaatgcttctgtcccttcctggaaaatctataggc

SEQ ID NO: 11011 - DNA, 80 bp, synthetic construct
  source 1..80: mol_type = other DNA
aaactgaaatcacatagcaaacgtgaaaatcagtgtggctaaagctcaatcaataatagctagcatgcaaggttattaga

SEQ ID NO: 11012 - DNA, 80 bp, synthetic construct
  source 1..80: mol_type = other DNA
tctagtgagaaacaacccacatgcttcccctattaacacaggaaatgcagttctctagattttgcttcttggccatgtaa

SEQ ID NO: 11013 - DNA, 80 bp, synthetic construct
  source 1..80: mol_type = other DNA
atgttcaaatttggagtatggatctcaccaccctggtaatgagcctagtacctggcttgataggcagttttttaacccat

SEQ ID NO: 11014 - DNA, 80 bp, synthetic construct
  source 1..80: mol_type = other DNA
cttttggtgacttagccaaaaatcttttgccaaggccgatgttgagaagagtatttcctaggttatcttccatgatttct

SEQ ID NO: 11015 - DNA, 80 bp, synthetic construct
  source 1..80: mol_type = other DNA
ataaaatatataaagcaatgattttaatacactgtacaagacagggttgggtatgtcccatgacccatcagcctgattgg

SEQ ID NO: 11016 - DNA, 80 bp, synthetic construct
  source 1..80: mol_type = other DNA
aaatagttaaggaaagtctttagacaacaacaacaaaaaaatgatacgagatgaaaatcagtgtctccatgaagggacca

SEQ ID NO: 11017 - DNA, 80 bp, synthetic construct
  source 1..80: mol_type = other DNA
aaatgatattctagataaaaactgttgtgagaaaaattatcatcagtactttcctgctgaaggaaacacaaaaggaaaaa

SEQ ID NO: 11018 - DNA, 80 bp, synthetic construct
  source 1..80: mol_type = other DNA
gaagaagtgattgagtttctgagagccacaaaaactcaggtgtgcagtcatgacagaatgcatcagagcgtaaaagaagc

SEQ ID NO: 11019 - DNA, 80 bp, synthetic construct
  source 1..80: mol_type = other DNA
tctaggttctggcaaaaattcagatgtagctcagtggggatttcatcacttcttctaagatacataaaagccacaagaga

SEQ ID NO: 11020 - DNA, 80 bp, synthetic construct
  source 1..80: mol_type = other DNA
caaagaatgtcccttgaccacactggaattaaaaaacaataagaaaaatgcatctagaaactcaccaattgcttcatatt

SEQ ID NO: 11021 - DNA, 80 bp, synthetic construct
  source 1..80: mol_type = other DNA
gaactgcagactaacctgtcttgtgactatagatgcaaaaatcttgaaaaaatgaataaaaacaagcaatatctacatcg

SEQ ID NO: 11022 - DNA, 80 bp, synthetic construct
  source 1..80: mol_type = other DNA
gcagtgccactgcacaataactagaacagttaaaataaaaaagtgatggaaaacaccaagtgtcaacaaggatgtagagc

SEQ ID NO: 11023 - DNA, 80 bp, synthetic construct
  source 1..80: mol_type = other DNA
tatacaggtttctcccatctcccttcccattaagtacaactacaaaccgtagaaacaatacaagaggtaaccaaaaaaga

SEQ ID NO: 11024 - DNA, 80 bp, synthetic construct
  source 1..80: mol_type = other DNA
atgaccaaggatgaaatcaatgagcatgaggacagatcaacaaaatgtagcctatctgaacaatgggagaaaacagactg

SEQ ID NO: 11025 - DNA, 80 bp, synthetic construct
  source 1..80: mol_type = other DNA
caggatacaagattaacacaaaaaattaaatatttttaataaactatgaatatgtgaaaaccaaaattaaaacacaattt

SEQ ID NO: 11026 - DNA, 80 bp, synthetic construct
  source 1..80: mol_type = other DNA
aatactgtttcaaatcacatatctgagagaactctcaaaacttaatagtattcttaaaagtccaaaaacatgggcaaaaa

SEQ ID NO: 11027 - DNA, 80 bp, synthetic construct
  source 1..80: mol_type = other DNA
tatcagcatcaatatcctgattgtgaaactgtgctgcaatttgttaccatggggaggaaccatgtaaagggaaaacagca

SEQ ID NO: 11028 - DNA, 80 bp, synthetic construct
  source 1..80: mol_type = other DNA
agtgtatatgacaagtacagtctgttttatagatggcaaagtggagactgtgacttactttggactagaaagtcgttact

SEQ ID NO: 11029 - DNA, 80 bp, synthetic construct
  source 1..80: mol_type = other DNA
caaacagaacgcatcctctttccaagcatgctctcacagtgtttcaacgtagtgaacagaataaaaaccatctagttgtt

SEQ ID NO: 11030 - DNA, 80 bp, synthetic construct
  source 1..80: mol_type = other DNA
ctattacgatacccttctataggtttctgtacttccatttgtctgataatcattattatccttcttcagctactttctcc

SEQ ID NO: 11031 - DNA, 80 bp, synthetic construct
  source 1..80: mol_type = other DNA
tccaagtttcatcctagtatctacccacagttttgtaactgtgttcatatactgtgcattcactctgtttctaatggttt

SEQ ID NO: 11032 - DNA, 80 bp, synthetic construct
  source 1..80: mol_type = other DNA
aaactgattgtgatagatactaaaaggttactcacctatttttttttacttctccctcacttccttttccctttatttcg

SEQ ID NO: 11033 - DNA, 80 bp, synthetic construct
  source 1..80: mol_type = other DNA
gattagtgtttatatagattcttggaagagacaactttatgtatggagcccattgaaataattaaaaacatctaactaaa

SEQ ID NO: 11034 - DNA, 80 bp, synthetic construct
  source 1..80: mol_type = other DNA
aatagtgcagtctctgtatgatttcttcatctgtaaacagtgtcagtggtgtctgtgatttctttggtggcttaggatat

SEQ ID NO: 11035 - DNA, 80 bp, synthetic construct
  source 1..80: mol_type = other DNA
gaagcagagtaagatgcagtgcgttgggatctgtgctgtcaaaatggtgccgtgctgcagttagttaggacttagggttc

SEQ ID NO: 11036 - DNA, 80 bp, synthetic construct
  source 1..80: mol_type = other DNA
gaatggttagtcggtctacatagagacaaccagaaccaagactagctgattatctcacaggatatgtaaatataacctct

SEQ ID NO: 11037 - DNA, 80 bp, synthetic construct
  source 1..80: mol_type = other DNA
aaaataatttagtattattagcaacagtgaagagtaagatgtagaaggtacaaaagtaatactatttctctttatgtctc

SEQ ID NO: 11038 - DNA, 80 bp, synthetic construct
  source 1..80: mol_type = other DNA
agagaagttggctaaacaacattctttaaacgttaggaaaatgttgttttattatttattattttttaaattttcttttt

SEQ ID NO: 11039 - DNA, 80 bp, synthetic construct
  source 1..80: mol_type = other DNA
gggttgatggaggagaacctgactgtcagtgtcacattgatgaaactagaagaaaagagaaaattcacttggatacaatg

SEQ ID NO: 11040 - DNA, 80 bp, synthetic construct
  source 1..80: mol_type = other DNA
ctgacttgggataggaaaggaaagttgtaacagaatacggatgtattcttctcaaccagagaagatgtaagttagcaaca

SEQ ID NO: 11041 - DNA, 80 bp, synthetic construct
  source 1..80: mol_type = other DNA
ccccttctttctgacacttctctcctatttctacattatcacttatctcttcttcaagacccgttcttgtagcatgctct

SEQ ID NO: 11042 - DNA, 80 bp, synthetic construct
  source 1..80: mol_type = other DNA
ggagatctttccctattagaacatagagcttctttatttttttaacatgcatggtatatgccactttgttcatgtattat

SEQ ID NO: 11043 - DNA, 80 bp, synthetic construct
  source 1..80: mol_type = other DNA
tggtccagagaggctaataagtaattaaattgaatgacattgcaaccactaattaagagataaaacaaccaattgttcag

SEQ ID NO: 11044 - DNA, 80 bp, synthetic construct
  source 1..80: mol_type = other DNA
ttatttaatcaaatcccaggattctgtgggtcagaaattggggagggcacagcaggaaagggttgactatgctcagtgat

SEQ ID NO: 11045 - DNA, 80 bp, synthetic construct
  source 1..80: mol_type = other DNA
acctcccaggttcaagtgattctctcaactgagcctcctaagtagttgggattacaggcatgtgccaccatgcccggcta

SEQ ID NO: 11046 - DNA, 80 bp, synthetic construct
  source 1..80: mol_type = other DNA
tggtgtagaataaactacatagagaagaatgaaattggaccctatctcatactatatacaaaatcaactcaaaatggatt

SEQ ID NO: 11047 - DNA, 80 bp, synthetic construct
  source 1..80: mol_type = other DNA
tgttgcatggccatgcttaagtcaacctcatagaaatacaaaatagaatggtgattgtaaaggaatgtgtagagggggag

SEQ ID NO: 11048 - DNA, 80 bp, synthetic construct
  source 1..80: mol_type = other DNA
ttcttcctagtaagcaccttagcaacatctgggttcaatagatatcctttctatcttctttgttactgtggatagtacat

SEQ ID NO: 11049 - DNA, 80 bp, synthetic construct
  source 1..80: mol_type = other DNA
gcctaatttcctgctcagttcacagacgcaagctaatatttaggtgcataacttattacctgaacatttagtcatgtcct

SEQ ID NO: 11050 - DNA, 80 bp, synthetic construct
  source 1..80: mol_type = other DNA
aggcatggttcacttggcatccatgtgtctagactagctaccacattgacttgagactcattttgatagtcccgtctgaa

SEQ ID NO: 11051 - DNA, 80 bp, synthetic construct
  source 1..80: mol_type = other DNA
gtgaaaatggccacactgcccaaagtaatttatagattcaatgctatccccatcaagctaccattgactttcttcacaga

SEQ ID NO: 11052 - DNA, 80 bp, synthetic construct
  source 1..80: mol_type = other DNA
catggagaaataggaacacttttacactgttggtgggagcgtaaattagttcaaccattgtggaaaacagtgtggcgatt

SEQ ID NO: 11053 - DNA, 80 bp, synthetic construct
  source 1..80: mol_type = other DNA
ttgaaagagcacaatacagtgatcactagaactaaggagcctcagtttgagtcctggtttcacaatatatcacaagaaga

SEQ ID NO: 11054 - DNA, 80 bp, synthetic construct
  source 1..80: mol_type = other DNA
gccttctttgctgtttcatagccttaaccattggtgccttcaggctctggggaatctgaggtgactagggactggagtgg

SEQ ID NO: 11055 - DNA, 80 bp, synthetic construct
  source 1..80: mol_type = other DNA
acccataacacagagcatccacatcatagaaaagtggctgaactgttctccatgcagatcctgatcctcacttctcctca

SEQ ID NO: 11056 - DNA, 80 bp, synthetic construct
  source 1..80: mol_type = other DNA
ccagaagagattgcaggtctatattcgatattcttaaagaaaaatttctttaaccaagaattttatatccagccaaacta

SEQ ID NO: 11057 - DNA, 80 bp, synthetic construct
  source 1..80: mol_type = other DNA
aactgaaatcataccaaacacattggtggacaacagctcaataaaaatagaaatcaagactaaaaaaatcactcaatcca

SEQ ID NO: 11058 - DNA, 80 bp, synthetic construct
  source 1..80: mol_type = other DNA
atacaaggttggttcaacatttgcaaattaataaatgtgattcatcacataaacagaactaaaaacaaaactcacatgat

SEQ ID NO: 11059 - DNA, 80 bp, synthetic construct
  source 1..80: mol_type = other DNA
ctacagagcaacagtagccaaaacaggtttcctgaaaaataccagggtattctttcaggaaagtcccaaaaatgggaaag

SEQ ID NO: 11060 - DNA, 80 bp, synthetic construct
  source 1..80: mol_type = other DNA
aaaagttagattgtttttcaaaacttcttcccagctatgaagccaaaaaacccatgggctctctagaagtgttcccttgt

SEQ ID NO: 11061 - DNA, 80 bp, synthetic construct
  source 1..80: mol_type = other DNA
aacatcctactggtggtttcttactaggccaagagatagctatgtggtatgcttaaaaattgccccctgtgagagctgct

SEQ ID NO: 11062 - DNA, 80 bp, synthetic construct
  source 1..80: mol_type = other DNA
tttgtggctatttgcaagccacttcgctacactgtcattatgaaccctcagctctgtacccagatggccatcacaatctg

SEQ ID NO: 11063 - DNA, 80 bp, synthetic construct
  source 1..80: mol_type = other DNA
atgctttgatattttgaggattttactttagggccatagttactcaactggaaaagaatatgctaactgacgtatgagtt

SEQ ID NO: 11064 - DNA, 80 bp, synthetic construct
  source 1..80: mol_type = other DNA
acggaatagctgagagctgagtaagtctctctctctatttctttttctcctcccttaattgctccttgtgactatcatat

SEQ ID NO: 11065 - DNA, 80 bp, synthetic construct
  source 1..80: mol_type = other DNA
cacaggatacaaaattaacttacaaaagccagttgcatttttacaacaatgatctatttgaataggaaatcaagaaaaca

SEQ ID NO: 11066 - DNA, 80 bp, synthetic construct
  source 1..80: mol_type = other DNA
actcaatagcaagaaaacaaatagcctagtttaaaaatgaggaaagaatctaaatagacattttttcaatgaaatagata

SEQ ID NO: 11067 - DNA, 80 bp, synthetic construct
  source 1..80: mol_type = other DNA
tcacagtaaacatcataaatatatacaacttcatgtgtcagtcataccttaataaagttaagaggaagaaaacgaccacc

SEQ ID NO: 11068 - DNA, 80 bp, synthetic construct
  source 1..80: mol_type = other DNA
ttgtaccatgatttattttcctttgggtagatatctagtattgggattgctgaatcaaagggtagttctaattttagccc

SEQ ID NO: 11069 - DNA, 80 bp, synthetic construct
  source 1..80: mol_type = other DNA
tggtccttctggagcatcagtgatggatctagaagtactctagggttgagtaatgatggcagtgatatttacgccaacaa

SEQ ID NO: 11070 - DNA, 80 bp, synthetic construct
  source 1..80: mol_type = other DNA
atggcttgtgtattagatgatataaaggaaatactgataattgtgctaagtatcataatggtattgtgggcatggttttt

SEQ ID NO: 11071 - DNA, 80 bp, synthetic construct
  source 1..80: mol_type = other DNA
gaagatcaggaaaaatgattaatgagtactaggcttaatacctgggtgatgaaataatctgtacagtaaacccccatgac

SEQ ID NO: 11072 - DNA, 80 bp, synthetic construct
  source 1..80: mol_type = other DNA
tatgccatgacagccagcagtaagcattcagctgtggctagagagccgaagataaagaactggagcaagcaaccagccac

SEQ ID NO: 11073 - DNA, 80 bp, synthetic construct
  source 1..80: mol_type = other DNA
tcattatctcaaccgcccctttcattccccatctcctaatcagtgataccttaccaactgttcctcggataattcttata

SEQ ID NO: 11074 - DNA, 80 bp, synthetic construct
  source 1..80: mol_type = other DNA
aaaaatgtaagttatctttaatacaaatagtctagaacatcagtttcctaagaggtgaaaaactggatgcctcagggacc

SEQ ID NO: 11075 - DNA, 80 bp, synthetic construct
  source 1..80: mol_type = other DNA
atatgaattgatcagagaagaatgctgttcttcatagactacaaaattccacaggttctgttattgccctccaactcccg

SEQ ID NO: 11076 - DNA, 80 bp, synthetic construct
  source 1..80: mol_type = other DNA
tattagaaaaaaatttattctcatattttgaaatgtctgctaaacaaacatgttatgtttgtaagcagaaaaccaaaaag

SEQ ID NO: 11077 - DNA, 80 bp, synthetic construct
  source 1..80: mol_type = other DNA
tctatcacatgggagggcaggaaattgccacaaagggagaggcccctgagaaccaattacagatttactggagagcagcc

SEQ ID NO: 11078 - DNA, 80 bp, synthetic construct
  source 1..80: mol_type = other DNA
tatatttatgatgtataacatgatgttttgacatatgtatacatcatggaatgacaaaatcaagctaatttacatgaacc

SEQ ID NO: 11079 - DNA, 80 bp, synthetic construct
  source 1..80: mol_type = other DNA
tcattttaaaattgagttatttgtttccttgttattgatttgtttaagttccttatatagcttgaattttagccacttac

SEQ ID NO: 11080 - DNA, 80 bp, synthetic construct
  source 1..80: mol_type = other DNA
ttgatatatgttgtactaggagaattctaagagggcctgtggccttgcttagaaaaagcaggtacaggggacagtggttg

SEQ ID NO: 11081 - DNA, 80 bp, synthetic construct
  source 1..80: mol_type = other DNA
ttgagacacactgtatgcatccccacctgatgctgagcaaggaaacgctctgtcctcttgtttcagctattatactgtaa

SEQ ID NO: 11082 - DNA, 80 bp, synthetic construct
  source 1..80: mol_type = other DNA
tctgtcagctgtatcttcagttctgaaaatgcaataagaaaagataaaatacggaattcagtcggccagtggcccgcaat

SEQ ID NO: 11083 - DNA, 80 bp, synthetic construct
  source 1..80: mol_type = other DNA
aatagcaatccaaattattctactccattctgttccctgtaacattaatggcatcatcttcagccataacagggctacac

SEQ ID NO: 11084 - DNA, 80 bp, synthetic construct
  source 1..80: mol_type = other DNA
tcaaaataacagattaattggttttgtgaagcattctccccattggaaagccaagaatgcttggagactcagatcctcag

SEQ ID NO: 11085 - DNA, 80 bp, synthetic construct
  source 1..80: mol_type = other DNA
atggagaaaaagatctgctatgagggaaaattctgtctccagccctgcaggaagaattggaaaatcagaaaagagtgaaa

SEQ ID NO: 11086 - DNA, 80 bp, synthetic construct
  source 1..80: mol_type = other DNA
ctgtcctgcagctggtatgtggagacacctcgcttaatgaactgcagattatcctggcaacagccctcctcatcctctgc

SEQ ID NO: 11087 - DNA, 80 bp, synthetic construct
  source 1..80: mol_type = other DNA
aaagtcaagtcttattttttccagctagttagctaagtgatcacaggtgaatgatataatctctctgagccttaattttt

SEQ ID NO: 11088 - DNA, 80 bp, synthetic construct
  source 1..80: mol_type = other DNA
gcaaactttctatgtgcctattgctctttggcactgtggagaatatcaagtacatacagggtggtgattctgtccagaga

SEQ ID NO: 11089 - DNA, 80 bp, synthetic construct
  source 1..80: mol_type = other DNA
atatttggagatttggccatgttgtggtgtgtacagcagccattccttttcatttctgagtgatactccattgtatagat

SEQ ID NO: 11090 - DNA, 80 bp, synthetic construct
  source 1..80: mol_type = other DNA
tgaagacatgggttgtgatctctactccgttactaaaactttacaggacctagagcaaactctttgcatcatctttttgg

SEQ ID NO: 11091 - DNA, 80 bp, synthetic construct
  source 1..80: mol_type = other DNA
gggagggagggtagaagtcagatggaagggaagggagaaggagagaaagaagaaacagaggcaggctgaagaactgagca

SEQ ID NO: 11092 - DNA, 80 bp, synthetic construct
  source 1..80: mol_type = other DNA
ttgcctatctccctcctcatcacccaatcccatttcctgcaagaagaggcaatattattaatctgtctcatctaccataa

SEQ ID NO: 11093 - DNA, 80 bp, synthetic construct
  source 1..80: mol_type = other DNA
aagggtaaaaatactgccctaggcaatcatgatgcctcttatttactgcctttcaaatagaaactttctaaagcagccat

SEQ ID NO: 11094 - DNA, 80 bp, synthetic construct
  source 1..80: mol_type = other DNA
gctgttgtctctccagttcctcttggataattctggtgtccatgaattattatgttgccacatttggatgccccataagg

SEQ ID NO: 11095 - DNA, 80 bp, synthetic construct
  source 1..80: mol_type = other DNA
agaagaaaacttcaaatacctccctataatcctatactaaatgatactctagctatcttgccccctcttaattaccagaa

SEQ ID NO: 11096 - DNA, 80 bp, synthetic construct
  source 1..80: mol_type = other DNA
ctctcaacagctatcccagacctgctgggtcatccctcacaacagaaactcagtgtttgggtagagtggagaggcttgta

SEQ ID NO: 11097 - DNA, 80 bp, synthetic construct
  source 1..80: mol_type = other DNA
tgaaactggaccctttcctttcaccatatgcaaaagtcaactcgaagtaaattaaagatttaaaagtaaaacctaaaact

SEQ ID NO: 11098 - DNA, 80 bp, synthetic construct
  source 1..80: mol_type = other DNA
aaacattgaatacacatgaccacaaagaaagtaacaatagacaccagggcctacttgagttggaagaatggcaggatggt

SEQ ID NO: 11099 - DNA, 80 bp, synthetic construct
  source 1..80: mol_type = other DNA
tattgtattaagtcagagtagactcttataagttcaggatccatatggtatccccaagaaaaaaacttgcactttaaata

SEQ ID NO: 11100 - DNA, 80 bp, synthetic construct
  source 1..80: mol_type = other DNA
gaacactaagctgtgcaagaacaagggaaacttctgggatccaagattttaaaatatgaatttttaagagctaggttgag

SEQ ID NO: 11101 - DNA, 80 bp, synthetic construct
  source 1..80: mol_type = other DNA
acaggaaacgatattctttgcaacaaatggtactggaggaaccagatataggtataaaaactgtaccattatgatttgtt

SEQ ID NO: 11102 - DNA, 80 bp, synthetic construct
  source 1..80: mol_type = other DNA
caggtggatcacctgaaatcaggagttcgagatcagcctggtcaatgtggtgaaacaccgtctctactaaatatacaata

SEQ ID NO: 11103 - DNA, 80 bp, synthetic construct
  source 1..80: mol_type = other DNA
acattgtagtcaagaagtcagctgattgtatttctaagatttggatgaagctgaaggattcacttacaagatgtcccagt

SEQ ID NO: 11104 - DNA, 80 bp, synthetic construct
  source 1..80: mol_type = other DNA
gcagtggtgacctttttatatgccaaagggaactcagttgctggcacacttcctttgaatcttcacattccttcttaacc

SEQ ID NO: 11105 - DNA, 80 bp, synthetic construct
  source 1..80: mol_type = other DNA
gaagcagatattccaggaaattatttagcacagtgttagtatataggacatcaacagatagtaactgtcaaaactataag

SEQ ID NO: 11106 - DNA, 80 bp, synthetic construct
  source 1..80: mol_type = other DNA
cacccacccagattcctcctttattgtgcagactctttcctaacccacacctcatcttaatttatttgccttcaattctg

SEQ ID NO: 11107 - DNA, 80 bp, synthetic construct
  source 1..80: mol_type = other DNA
taaatcttaaatagtgaatagaattaagaaagtaacaaattctaattccttcctttttttctttaaattcttctagatcc

SEQ ID NO: 11108 - DNA, 80 bp, synthetic construct
  source 1..80: mol_type = other DNA
ctctctttgtggttgtcttcacttcctacctcttgaccctggtgggcaacacactcatcatcctgctgtctgtactgtac

SEQ ID NO: 11109 - DNA, 80 bp, synthetic construct
  source 1..80: mol_type = other DNA
aaaagaaattgggtgagaggagataggtagctccataaggcacacaaattcaaatattatcattcctatcactgtccatt

SEQ ID NO: 11110 - DNA, 80 bp, synthetic construct
  source 1..80: mol_type = other DNA
ggaaactccaagattaaggcagatttcatgcctattgagggcctgctttctgattatagaaggtgacttcttgctgtgcc

SEQ ID NO: 11111 - DNA, 80 bp, synthetic construct
  source 1..80: mol_type = other DNA
tgatgccataatctaccatatttttttaaattaagtcatgccaggaggagatttctctgctcctcatcacatgtttccac

SEQ ID NO: 11112 - DNA, 80 bp, synthetic construct
  source 1..80: mol_type = other DNA
atgtccagaagtaaccctatgtaatctaaagaggggacgaactttcagttctgagaattgcccaccgtcttcccagaaaa

SEQ ID NO: 11113 - DNA, 80 bp, synthetic construct
  source 1..80: mol_type = other DNA
gacctgtatctacctgcacacagagcctctctacatacactgggagacattacttccaggaacctaaggaaatctttgtc

SEQ ID NO: 11114 - DNA, 80 bp, synthetic construct
  source 1..80: mol_type = other DNA
tctggaaataaacttgtcccacaaactgataaatgcctgtgatttttctagaaatatgccacaggcaaccctggcatctg

SEQ ID NO: 11115 - DNA, 80 bp, synthetic construct
  source 1..80: mol_type = other DNA
ccaagggctgccaggggcccattcatctgagctctttatagatcctacatatgagtccttcatcagatgtgagattgaaa

SEQ ID NO: 11116 - DNA, 80 bp, synthetic construct
  source 1..80: mol_type = other DNA
aatttcagtcaactaggaatagaaacgaagtttctcaaaatgataaaaggcagctaccaaaaaaaaaatcctatggttga

SEQ ID NO: 11117 - DNA, 80 bp, synthetic construct
  source 1..80: mol_type = other DNA
caagtgcctcctggtgaggccgaaactccacaagacactctggtcagtcctggggtacagtttcttccaggtggcagagg

SEQ ID NO: 11118 - DNA, 80 bp, synthetic construct
  source 1..80: mol_type = other DNA
aggagggatgggatcctctggagtaggtaccatttaaggggcacttttgaaagtcagttttttagacatccaagcccctt

SEQ ID NO: 11119 - DNA, 80 bp, synthetic construct
  source 1..80: mol_type = other DNA
gtttctgccattcacttatcaaaggacaacatcaaattatgtaaatcaaactctgtttcaaattctagtgtgatgtgaaa

SEQ ID NO: 11120 - DNA, 80 bp, synthetic construct
  source 1..80: mol_type = other DNA
cacctgaggacaactcagggggtggacaccatcctgaaatctaagagttacgctggctggggtgcaattgaacaaatgaa

SEQ ID NO: 11121 - DNA, 80 bp, synthetic construct
  source 1..80: mol_type = other DNA
atcccattactgggtatataccgaaaggattgtaaatcatgctgctataaagacacatgcacacgtatgtttattatgac

SEQ ID NO: 11122 - DNA, 80 bp, synthetic construct
  source 1..80: mol_type = other DNA
cctttagggactccctgtgcctcttcctgtagagttactcagccaagaagtagatgactaggtgaggcatgctgaccaca

SEQ ID NO: 11123 - DNA, 80 bp, synthetic construct
  source 1..80: mol_type = other DNA
ggtctggagaggagagtcagggttgccctctgtcctcagaggttcctgctgagcctcatgagattggcagggattctgca

SEQ ID NO: 11124 - DNA, 80 bp, synthetic construct
  source 1..80: mol_type = other DNA
caggtctttgtgtgaagaattgtgcagggagggcaaaggtaccactttgccttagaatttcctagtttgtattcctgaaa

SEQ ID NO: 11125 - DNA, 80 bp, synthetic construct
  source 1..80: mol_type = other DNA
ttatctgaggccaggagaggaaagcagatccagcttatatctaatctggtcataagacgaggcttggggcttagtaacat

SEQ ID NO: 11126 - DNA, 80 bp, synthetic construct
  source 1..80: mol_type = other DNA
cttggcaaccaccatctgctttctgtctctgcgcattcacccattctggacacgtcctattagtggaatcaaaccttccg

SEQ ID NO: 11127 - DNA, 80 bp, synthetic construct
  source 1..80: mol_type = other DNA
agaggaaagtcaggtcagcattttcccaatgaactcaggaattccagtagctcaaacgtgctccttggattttgtcatga

SEQ ID NO: 11128 - DNA, 80 bp, synthetic construct
  source 1..80: mol_type = other DNA
attgtggatcttgaatttttttattatatgtacccaaattattttttcattattattattttttaaattatactttaagt

SEQ ID NO: 11129 - DNA, 80 bp, synthetic construct
  source 1..80: mol_type = other DNA
tttgcccatgcctatgttctgaatgatattgcctagttctagggtttttatggttttaggtctcatgtttaaatctttaa

SEQ ID NO: 11130 - DNA, 80 bp, synthetic construct
  source 1..80: mol_type = other DNA
aagccacactcagataattttataaacataaatctaggccctggtttaacaacaatgggcatcaatgtatgaggcaagct

SEQ ID NO: 11131 - DNA, 80 bp, synthetic construct
  source 1..80: mol_type = other DNA
ttttccttatttggtttattccgtggccacacctgggtgtttgaggtgaaacacctttctaatgtttgttcatatttcac

SEQ ID NO: 11132 - DNA, 80 bp, synthetic construct
  source 1..80: mol_type = other DNA
ctttaatcataactcaatacataagccataaaagactgacaaattcaaatttataaaaacggtgtgcttgacaataacat

SEQ ID NO: 11133 - DNA, 80 bp, synthetic construct
  source 1..80: mol_type = other DNA
agatcaataagaccagccagagaatgtgatcatagaaatgctcttaaagttgacctttttaactagagataaaacatgga

SEQ ID NO: 11134 - DNA, 80 bp, synthetic construct
  source 1..80: mol_type = other DNA
taaagcattgatttgatgcagcagccttatgatgcagaacaggctgggttactatgtgtacaattccccagctcagatgt

SEQ ID NO: 11135 - DNA, 80 bp, synthetic construct
  source 1..80: mol_type = other DNA
gcaaagcagccagaagacagtgccattcaataagaccccacagagggagaccagcacagccttgggggcaatgatattca

SEQ ID NO: 11136 - DNA, 80 bp, synthetic construct
  source 1..80: mol_type = other DNA
gcagttggcaccaaagaagtcctttctatggctggcaggacttgacctggaaaataaggaaatctgcgtttctccagggg

SEQ ID NO: 11137 - DNA, 80 bp, synthetic construct
  source 1..80: mol_type = other DNA
ccaccttcgtcacagtcttgatgccaacacgacccatgttggtgggtctttggtcattaatattaattgatattaacatt

SEQ ID NO: 11138 - DNA, 80 bp, synthetic construct
  source 1..80: mol_type = other DNA
tagagagttaaagacttataagccattttcaagattggagaatattcttatctcagccatcagtggacagaaaggggcag

SEQ ID NO: 11139 - DNA, 80 bp, synthetic construct
  source 1..80: mol_type = other DNA
ccatgggaatgcccaaaaagatgttacagatttcactagggcttaatcttagtcctgcagcaccaagtacacactcttcc

SEQ ID NO: 11140 - DNA, 80 bp, synthetic construct
  source 1..80: mol_type = other DNA
cattatggtaagtgagattagccagtcatagaagaataaatcctgcatgcacttaaatagggtatctaaaatagtcaaat

SEQ ID NO: 11141 - DNA, 80 bp, synthetic construct
  source 1..80: mol_type = other DNA
ctccagcccaatcgatgcctccacctcagcctcctgagtggctgggaccacaggcgtgtgctgccacatctggctaggtt

SEQ ID NO: 11142 - DNA, 80 bp, synthetic construct
  source 1..80: mol_type = other DNA
gcaaggagtagacccagttccaagttggatatgttgagtcagtttctagtgagctgaacttcatggcattgctcttgata

SEQ ID NO: 11143 - DNA, 80 bp, synthetic construct
  source 1..80: mol_type = other DNA
ttttctcacccatcagctctgaagtacaagaggctcctggacttcaaggtgctctgcaagctcctcacctgtatctgcct

SEQ ID NO: 11144 - DNA, 80 bp, synthetic construct
  source 1..80: mol_type = other DNA
ggaaattcagcataagcaaggttcacattcaggtgtatgcttaaattctaggtattcatctcattcatgaactcaatcag

SEQ ID NO: 11145 - DNA, 80 bp, synthetic construct
  source 1..80: mol_type = other DNA
aaagacgtcaccatccacaggaagtgtttgtcattgtacccaatctggtctcagtagcaccatttacataccaatagtgt

SEQ ID NO: 11146 - DNA, 80 bp, synthetic construct
  source 1..80: mol_type = other DNA
atgaatgcaggcattcctttggagcatatatccaacgaaaaggagtgaaattactgggtcagcaacttcttttttttttt

SEQ ID NO: 11147 - DNA, 80 bp, synthetic construct
  source 1..80: mol_type = other DNA
cctatgtgtgtccttaaagatatattgaatccctcagatgcaacacatagttggatcttggttttctttttctattcatt

SEQ ID NO: 11148 - DNA, 80 bp, synthetic construct
  source 1..80: mol_type = other DNA
aaaaattaaagaactgctgcaggaagggccctataaattttgtcatcataactgcctgagccagagatgtggggtgttcc

SEQ ID NO: 11149 - DNA, 80 bp, synthetic construct
  source 1..80: mol_type = other DNA
agagcagaatttgaaaagcatccaatcctgaaattgggctggagggagcatgtcccaagcctgttagggactgcaggaaa

SEQ ID NO: 11150 - DNA, 80 bp, synthetic construct
  source 1..80: mol_type = other DNA
tctgccttccaatatctctcatacgatccatgatttttaaagaaatacaactccattgcatgaccaaagggaggaggggg

SEQ ID NO: 11151 - DNA, 80 bp, synthetic construct
  source 1..80: mol_type = other DNA
tggttgcagctgcatccctcccacctctgcctccgtttttgtgtgacattctctctgccagcatctgcctgtttctcttg

SEQ ID NO: 11152 - DNA, 80 bp, synthetic construct
  source 1..80: mol_type = other DNA
gtctatggggccagcaggaccagtggggtcagtagagcatatactgagcttgaagaggtggcatggagcacttagaagct

SEQ ID NO: 11153 - DNA, 80 bp, synthetic construct
  source 1..80: mol_type = other DNA
tcttccctttatttgggccccctttttcttctgtccttaactctgactctggtagagcccatggaactgacagttcaaag

SEQ ID NO: 11154 - DNA, 80 bp, synthetic construct
  source 1..80: mol_type = other DNA
aaaagggggtgttcagtgatgggtgcacatctgattgacaaacttttgcagaatcatttccaggcctttcttaggaggct

SEQ ID NO: 11155 - DNA, 80 bp, synthetic construct
  source 1..80: mol_type = other DNA
aaagtggagtggatgaaaagaacaggaaagagcaccaaccctgctgctgtccccatatgacagaggctgctgtgggggca

SEQ ID NO: 11156 - DNA, 80 bp, synthetic construct
  source 1..80: mol_type = other DNA
taggtagaatgttccagactagtgaagtctttgagattttctgcttcttgttcactgcttccttctgatgtggaccatgc

SEQ ID NO: 11157 - DNA, 80 bp, synthetic construct
  source 1..80: mol_type = other DNA
gtttgtgtagtgggttaggatgagctcctcagaaaccagcctgagctctctggctcaggagcttctcaggaagagctgag

SEQ ID NO: 11158 - DNA, 80 bp, synthetic construct
  source 1..80: mol_type = other DNA
caggaggctcagctcaaccttgggtgtcacctgccacctgtactgctgtccctggagtggcccaggatactaggatatga

SEQ ID NO: 11159 - DNA, 80 bp, synthetic construct
  source 1..80: mol_type = other DNA
ggctcttccattttatcacaattattccgcctgttcacgtgcagagagaacacttggggcagattttaagaccttagaga

SEQ ID NO: 11160 - DNA, 80 bp, synthetic construct
  source 1..80: mol_type = other DNA
gatagttcaaatcagattcaaggtaagctcctgtaagtatggaaaaagtgacaactccccacgaaagacagaggtgagaa

SEQ ID NO: 11161 - DNA, 80 bp, synthetic construct
  source 1..80: mol_type = other DNA
ctttcctcaactgtcaactctgagtgctaagaacctaaaagatatctctgctttactgcacagcaaggtctttgttgtga

SEQ ID NO: 11162 - DNA, 80 bp, synthetic construct
  source 1..80: mol_type = other DNA
ataatagcttccaccttccaccctgcagagcaattgtaaacttcataacacatgcgaagcgcttgactcaaaaaacagga

SEQ ID NO: 11163 - DNA, 80 bp, synthetic construct
  source 1..80: mol_type = other DNA
gaataatagcaataaaattcaatagaataaaacaaaatgaacgacatgaagcccaacacctcactggaacatgcaaaacc

SEQ ID NO: 11164 - DNA, 80 bp, synthetic construct
  source 1..80: mol_type = other DNA
tggacagtctttttttgttttttggtttttggttttgtttttaagacggagtcttgctctgtcatccaggctggagtgca

SEQ ID NO: 11165 - DNA, 80 bp, synthetic construct
  source 1..80: mol_type = other DNA
gagcaacaggactaacacatcgctgccaggaaagcaaaatggcacagctgcactggaaagcaatttgtttcttgtaaggt

SEQ ID NO: 11166 - DNA, 80 bp, synthetic construct
  source 1..80: mol_type = other DNA
acagaagctgacatccaagaggtgattccacccacctccctcctgagcttcctccttcctcaggtccagttaggcagggg

SEQ ID NO: 11167 - DNA, 80 bp, synthetic construct
  source 1..80: mol_type = other DNA
aatgtacccatttgaagatgagatgcctgaggtcagaggggaggcaactgacccagggacccagatgtgactctggactg

SEQ ID NO: 11168 - DNA, 80 bp, synthetic construct
  source 1..80: mol_type = other DNA
tgagcaggtagatgccgttcatcctgctgtggagtgtgtgcccatttcaggacatttagggacaacaagtcttgttgtct

SEQ ID NO: 11169 - DNA, 80 bp, synthetic construct
  source 1..80: mol_type = other DNA
tctgcagcaaaagcatgttgttaaggcaaaaaagcatgttgttaaggaatccccctgcagatgtggagtcaggcatggtc

SEQ ID NO: 11170 - DNA, 80 bp, synthetic construct
  source 1..80: mol_type = other DNA
cagaacccaagtggctactgaggaaacaagcggtagcaaacacaatcatgctgcatggtgaaaagttctctctatgaccc

SEQ ID NO: 11171 - DNA, 80 bp, synthetic construct
  source 1..80: mol_type = other DNA
aatgaaatctgtttctcaaatcttataaacaaatctattaaattttaatgatcttcaccatactatataatttccaaaaa

SEQ ID NO: 11172 - DNA, 80 bp, synthetic construct
  source 1..80: mol_type = other DNA
ttatctcaggacttatgaaggggagagaaaggtgaaaacagtgagattcaataaaagttgaaatctggggtaaaaaaatt

SEQ ID NO: 11173 - DNA, 80 bp, synthetic construct
  source 1..80: mol_type = other DNA
acatattcttagcaaaatgtttttctgtaatttttttaattgtgaatgacccagacatttaataaatgcctgttatgtaa

SEQ ID NO: 11174 - DNA, 80 bp, synthetic construct
  source 1..80: mol_type = other DNA
ctttctttataccagacttcacttttgttaattggactctgcaagcaacaagcgactaacctgcattttggttacattac

SEQ ID NO: 11175 - DNA, 80 bp, synthetic construct
  source 1..80: mol_type = other DNA
agaaagtaaagtccacttgaaagagggccgagtgggtgacttgagagatcaagttcatggtttgatctttgacttggggt

SEQ ID NO: 11176 - DNA, 80 bp, synthetic construct
  source 1..80: mol_type = other DNA
tccgttggttgccaacttgtaaacgaaaaagtatgtcagataggtctcaatcagtttagaattttcattttgccaaggtt

SEQ ID NO: 11177 - DNA, 80 bp, synthetic construct
  source 1..80: mol_type = other DNA
tatgccttttctggccacacatgagtttggatgaagcaggagtctcttccatagctccttttcatctgagatgtccatga

SEQ ID NO: 11178 - DNA, 80 bp, synthetic construct
  source 1..80: mol_type = other DNA
ggggacggccacactggctgggtaattgtgacttacagacaaggcaccttctgtcccctgctcattttgagcctccaggg

SEQ ID NO: 11179 - DNA, 80 bp, synthetic construct
  source 1..80: mol_type = other DNA
ccagccagggcttgatctggttttcaatggattcaaagtttggcctccttttccttacctggaggggacagaggcactgg

SEQ ID NO: 11180 - DNA, 80 bp, synthetic construct
  source 1..80: mol_type = other DNA
acaactatggtatacatggccttcacagccacagaattaagtccctgggtggccaatggtgcccagaaggagcatgcagg

SEQ ID NO: 11181 - DNA, 80 bp, synthetic construct
  source 1..80: mol_type = other DNA
ggggccttcactcctgagcacccctccaagggcctaaaatcagtgtcagagaccctaagagaatctagggagagggcata

SEQ ID NO: 11182 - DNA, 80 bp, synthetic construct
  source 1..80: mol_type = other DNA
ctcagaggcctgtggttttcacagtagagcttggagcagagatgctaggcccctatcacttccatatgtgtcctggacac

SEQ ID NO: 11183 - DNA, 80 bp, synthetic construct
  source 1..80: mol_type = other DNA
gaaaactaagcaaatgagagtccaggaggctggatccctcatctgccattcttggcagttgcattttgtggtcagaaaaa

SEQ ID NO: 11184 - DNA, 80 bp, synthetic construct
  source 1..80: mol_type = other DNA
cacgtgtatgtgtatgtgtgtgcgtgcctgtgcacacctgtttactcagttctgctctaagtccatgtccacgaccccag

SEQ ID NO: 11185 - DNA, 80 bp, synthetic construct
  source 1..80: mol_type = other DNA
gctgggcacccagagcctgagaccaactgtccctccctgtgccctggaggaggggcctggcctgtcagtgtagatgtggg

SEQ ID NO: 11186 - DNA, 80 bp, synthetic construct
  source 1..80: mol_type = other DNA
atcccaagaatgcaaggctgcttcaacgttaaaaatgggccagtataactcaccatattaacagatgaaaagacaacagc

SEQ ID NO: 11187 - DNA, 80 bp, synthetic construct
  source 1..80: mol_type = other DNA
tagtcatagttttttccaccacttgacttcctgccctattcagagtcttatgtttgccaggactcaagcacctccttatg

SEQ ID NO: 11188 - DNA, 80 bp, synthetic construct
  source 1..80: mol_type = other DNA
gaaatattataaagcctgcctgaaattggtcacatgccaggcccttctcccattactcacaaacctggctaaccacatgc

SEQ ID NO: 11189 - DNA, 80 bp, synthetic construct
  source 1..80: mol_type = other DNA
catggcatggttttggtggaggcaccaggcaattcctctgccctaaggttctgagatattctgagtcccacatggggcag

SEQ ID NO: 11190 - DNA, 80 bp, synthetic construct
  source 1..80: mol_type = other DNA
ctgactctttctttgcctcagcatccccatctaagtaagggctgctgctatgggatgaattgtattcttctaaattcata

SEQ ID NO: 11191 - DNA, 80 bp, synthetic construct
  source 1..80: mol_type = other DNA
ccaaggcaccaagcaggagcagttgggctctggtccccaacaaagaaaggagatttatagataaaagagtttcaagggga

SEQ ID NO: 11192 - DNA, 80 bp, synthetic construct
  source 1..80: mol_type = other DNA
atcagaagacccaaaaggattttcctagaagtcatagactacacctcagtaatacagtggctcaaatcctacctttaaca

SEQ ID NO: 11193 - DNA, 80 bp, synthetic construct
  source 1..80: mol_type = other DNA
ttgtaaatctgtgtcagaaacttacattggattcaccaagcctagggagatttggctgtgctttgttggagccaatattt

SEQ ID NO: 11194 - DNA, 80 bp, synthetic construct
  source 1..80: mol_type = other DNA
acatgggtgtaggaaatatgtgcttctcacactcccaaaggatcacaaatggggccctgtgtctcttaacttccttatgt

SEQ ID NO: 11195 - DNA, 80 bp, synthetic construct
  source 1..80: mol_type = other DNA
caattccattgtggttggaatacatatattgtattagttcaatttttttttaatttatagataatttgtgccctcccatc

SEQ ID NO: 11196 - DNA, 80 bp, synthetic construct
  source 1..80: mol_type = other DNA
gtttcagagacctgtgggacacaatccagtgtaccaaaacacataaacgagaattttcaggagaggatagaataaaagga

SEQ ID NO: 11197 - DNA, 80 bp, synthetic construct
  source 1..80: mol_type = other DNA
gaatagagcaataaaaaacacgatataaagaaaataagtagcaaaatgacaggtcaaaatcctatactatcagtaattac

SEQ ID NO: 11198 - DNA, 80 bp, synthetic construct
  source 1..80: mol_type = other DNA
gctggttttgattgtcacaattagagaggatgcactactatcacctagtgggtagagccccgagatggtgctaaacatcc

SEQ ID NO: 11199 - DNA, 80 bp, synthetic construct
  source 1..80: mol_type = other DNA
gatcaagatgctggctgattttgttcctggtgatggctctcctcctggcttgcagacaactccctacttgctgcctcctc

SEQ ID NO: 11200 - DNA, 80 bp, synthetic construct
  source 1..80: mol_type = other DNA
aagggcaggaacattgatgtatgcaaaggagtaatagtgattgacgagacagtctaagcttgatagagaactgaagatac

SEQ ID NO: 11201 - DNA, 80 bp, synthetic construct
  source 1..80: mol_type = other DNA
tgtaggttctttcttacccgttctttttattcctctatttacaagcacaatgacacccacccctcgtcttcttcctgaaa

SEQ ID NO: 11202 - DNA, 80 bp, synthetic construct
  source 1..80: mol_type = other DNA
cagttgtatcactgcctagcataagaaccccttaaaaacctgtttcttaatttgggaaacagatatgacgatagttagca

SEQ ID NO: 11203 - DNA, 80 bp, synthetic construct
  source 1..80: mol_type = other DNA
atgggttgtgttagaaagtaaactaaggcccaataaaatatttaagagtttatttgagcagtgatccagaagtggctagg

SEQ ID NO: 11204 - DNA, 80 bp, synthetic construct
  source 1..80: mol_type = other DNA
gcgctctggctgccgcgcagccactgcacggcccagctgtgcgcatcgctggctctgggttccgccgaatgcgtcctcct

SEQ ID NO: 11205 - DNA, 80 bp, synthetic construct
  source 1..80: mol_type = other DNA
tagcttcctccctatctgatggaagaccatggaagacctcttggtctctgcaatcagaagtctcaagttgacaagaaaat

SEQ ID NO: 11206 - DNA, 80 bp, synthetic construct
  source 1..80: mol_type = other DNA
taacaaagacagaaatacagaaatcagtagaacatggatcccaacctaaaacttactctcttgtcataaaggaaaggaga

SEQ ID NO: 11207 - DNA, 80 bp, synthetic construct
  source 1..80: mol_type = other DNA
tatctatctggtcctctagctcctattcagtagccagtgtccctctctttcttggaacttcttttttggaattaccaagt

SEQ ID NO: 11208 - DNA, 80 bp, synthetic construct
  source 1..80: mol_type = other DNA
atgcaattaaatgttaagtctccacttcagagtgaccatgggtggtatgtaacatgcaagcttattcaatatgcatgcat

SEQ ID NO: 11209 - DNA, 80 bp, synthetic construct
  source 1..80: mol_type = other DNA
acggctcgaggtgagctttcgcttgccatccaccactgccgtttgccaccgtcgcagacccgcggctgacttccatccct

SEQ ID NO: 11210 - DNA, 80 bp, synthetic construct
  source 1..80: mol_type = other DNA
agccagataaccagcttctcttcagacaatccctcttcccattctgcaaatgtcaatgccagcctcttctcctgaaggat

SEQ ID NO: 11211 - DNA, 80 bp, synthetic construct
  source 1..80: mol_type = other DNA
agaactgcacaacatattattaaatgttaccttatttactgtttcagcattttaatgaagtaagtacaggtgctccttca

SEQ ID NO: 11212 - DNA, 80 bp, synthetic construct
  source 1..80: mol_type = other DNA
ccttgcttcttacccagtgtcaatctgacttttttctgtctctctctatgtcacaataagttctttcagagacagatctc

SEQ ID NO: 11213 - DNA, 80 bp, synthetic construct
  source 1..80: mol_type = other DNA
cccttgtttagtatataatcaagaaataaccataaaaatagtcaaccagcagccctcagggctgctctgcctataaagta

SEQ ID NO: 11214 - DNA, 80 bp, synthetic construct
  source 1..80: mol_type = other DNA
ttggaccacacaatctaagctaattccgattggctattttaaagagagcaggggtatgagccagagcggcagggtgggta

SEQ ID NO: 11215 - DNA, 80 bp, synthetic construct
  source 1..80: mol_type = other DNA
tatcctctagctcagcaattctgcttctaggaacttatcctattagtactcttttggtttttttttaaggagtatcactc

SEQ ID NO: 11216 - DNA, 80 bp, synthetic construct
  source 1..80: mol_type = other DNA
tgagcctggtacatgggactgatgtcaatgtgcaaaaattgtccaacctgacaaagcaactggaataactaatgcagtca

SEQ ID NO: 11217 - DNA, 80 bp, synthetic construct
  source 1..80: mol_type = other DNA
tcatagcttagaaacatcaaaataattaagaaacaattagacatatcataaatgcataaaacatacgtagatactagcat

SEQ ID NO: 11218 - DNA, 80 bp, synthetic construct
  source 1..80: mol_type = other DNA
ttcatctcttaacagatgacacaaacttacataattgataaatacggtattgtactgtcagtgtattttctcttccttat

SEQ ID NO: 11219 - DNA, 80 bp, synthetic construct
  source 1..80: mol_type = other DNA
atgataagatgtttaacaccattaaccatcacagagcaaattgaaacgacttgagggagcacttcacagccgatagaatg

SEQ ID NO: 11220 - DNA, 80 bp, synthetic construct
  source 1..80: mol_type = other DNA
cttgagcccaagaattcgagaccagtctgggcaacacagcgagaccctgtctctacaaaaagtacaaaacttagccgcgt

SEQ ID NO: 11221 - DNA, 80 bp, synthetic construct
  source 1..80: mol_type = other DNA
ggtctcgaactcctgggctcaggtgatccattcctcttggcctcttaaagtgctgggattacagatgtgagccaccatgc

SEQ ID NO: 11222 - DNA, 80 bp, synthetic construct
  source 1..80: mol_type = other DNA
gaaatattatccaggtcatacagaggttgtgaagtgctttgaaaggtgtggcagcagcattagaagtcaacattactacc

SEQ ID NO: 11223 - DNA, 80 bp, synthetic construct
  source 1..80: mol_type = other DNA
gacaatataggaatgattttgtaaaagtaataattgaaatagtcattgcgtcttcaggagtaggtagtaggtatgattag

SEQ ID NO: 11224 - DNA, 80 bp, synthetic construct
  source 1..80: mol_type = other DNA
aatactaagacaataaggagaaagaggcatgatgtccacaagttattcccaagtgactcagagtaaaaatgaaaatacat

SEQ ID NO: 11225 - DNA, 80 bp, synthetic construct
  source 1..80: mol_type = other DNA
taatggtttcctcactcccactagacaatgtttgatcagaaggaacaggggatgagaaggagctgcttgatggtgatgag

SEQ ID NO: 11226 - DNA, 80 bp, synthetic construct
  source 1..80: mol_type = other DNA
tcttctacagctcagtcattgctgtctacctccagcccaaaaatccctatgcccaagagaggggcaagttctttggtctc

SEQ ID NO: 11227 - DNA, 80 bp, synthetic construct
  source 1..80: mol_type = other DNA
ttgaggtggactgacaggaagctgacactcagagaatttagtaatttcacccaagaacacacagcaatttgttagaccta

SEQ ID NO: 11228 - DNA, 80 bp, synthetic construct
  source 1..80: mol_type = other DNA
aacactttgactcattggtcatttgccaaagcaaatctcatggctacatataacttcaaggtgaggggaaataaaccaat

SEQ ID NO: 11229 - DNA, 80 bp, synthetic construct
  source 1..80: mol_type = other DNA
ctgtgccagcctcccctagacaagagcgccgtgtcgaggagaagaaatcggctcaagctctgggcccatgatgcctgctc

SEQ ID NO: 11230 - DNA, 80 bp, synthetic construct
  source 1..80: mol_type = other DNA
gcaataggggtgctaggagagtcttttgttctaatatttggtctttgaccaaatatgtcagttcctaacattgagctcta

SEQ ID NO: 11231 - DNA, 80 bp, synthetic construct
  source 1..80: mol_type = other DNA
taaaaacgaacatgttttggtgactagaagtgttgaatgttgagaatatagtaggagaaaatggtcagtttgggggtttt

SEQ ID NO: 11232 - DNA, 80 bp, synthetic construct
  source 1..80: mol_type = other DNA
atcctggagtcctgaatttccaagtaaaaagtctatcatgctgggcagaccatgtagaaaggccctgagatagcatgaag

SEQ ID NO: 11233 - DNA, 80 bp, synthetic construct
  source 1..80: mol_type = other DNA
tggaatatgtttcctctagatcctaaataggacaaccaagcattctctaccctggagaagaggaaggagaagaccaagat

SEQ ID NO: 11234 - DNA, 80 bp, synthetic construct
  source 1..80: mol_type = other DNA
tcctcctggttcagaagtgattttccattaggctatcttttaatttaaacatgaactctgctgtgcccatcactgtctgt

SEQ ID NO: 11235 - DNA, 80 bp, synthetic construct
  source 1..80: mol_type = other DNA
cagaaatcagcaaatgatgtaaatcaaggcttttttgcctggacttgcagcacatccatgtcccattggaccctattatg

SEQ ID NO: 11236 - DNA, 80 bp, synthetic construct
  source 1..80: mol_type = other DNA
atggaagagaagcataacgattcagttatatgaagattggctaaatgttctaagtactctccaaacccagagctttataa

SEQ ID NO: 11237 - DNA, 80 bp, synthetic construct
  source 1..80: mol_type = other DNA
ataactgtctcacaaaattcctaaaaatttactaatcaagagataatctgagccagctccagctcatcacacacatgtgt

SEQ ID NO: 11238 - DNA, 80 bp, synthetic construct
  source 1..80: mol_type = other DNA
atgaggtttcttttgggagtaatgaaatattctggaagtaaatggtgttggttgcacaacttgtgaatatactttaaacc

SEQ ID NO: 11239 - DNA, 80 bp, synthetic construct
  source 1..80: mol_type = other DNA
acatctctattttaaggaaaaagtccagtcacctcctctaggaagctttccctgatatacccaaccaaattggtcagtca

SEQ ID NO: 11240 - DNA, 80 bp, synthetic construct
  source 1..80: mol_type = other DNA
tccacaccgggcttcctccttctgggcttctctgaacacccagggctggaaaggactctcttcgtggttgtcctcacttc

SEQ ID NO: 11241 - DNA, 80 bp, synthetic construct
  source 1..80: mol_type = other DNA
ttctatgtgcttttatcagaaagtttgagttccctgcccctctgccttcttcacacccattacattgtgggaatggatga

SEQ ID NO: 11242 - DNA, 80 bp, synthetic construct
  source 1..80: mol_type = other DNA
gtaagttgaatatgcatttcatacacctaacctaccaaacatcatagcttagcctagcctaccttaaacatactcagaac

SEQ ID NO: 11243 - DNA, 80 bp, synthetic construct
  source 1..80: mol_type = other DNA
ccttgacctcgttattagagcatattctaatcttaatgtagagcccccattttatatttaataatcctaatcagtcaggc

SEQ ID NO: 11244 - DNA, 80 bp, synthetic construct
  source 1..80: mol_type = other DNA
taagtagcaacttgaaaagcaacaaggtaatagcagcctaagacaatagccaaggaagttaagcgttctgaataggtttg

SEQ ID NO: 11245 - DNA, 80 bp, synthetic construct
  source 1..80: mol_type = other DNA
atctcaaaaaaaaatgtggaacctctatgcactgatttccaatgttccttgtagcttctgcttttctgaaatttacccct

SEQ ID NO: 11246 - DNA, 80 bp, synthetic construct
  source 1..80: mol_type = other DNA
ttttcatgccatgtaactctgatacattctgccgctaatacccttgcctgcaagacatcagggaggccaggacttgagtg

SEQ ID NO: 11247 - DNA, 80 bp, synthetic construct
  source 1..80: mol_type = other DNA
ttgaagggtaccagtatatgccacctcaaactatctttagcatgtggattattttgagctaacaattgaaaatcatcaga

SEQ ID NO: 11248 - DNA, 80 bp, synthetic construct
  source 1..80: mol_type = other DNA
tttagggacaactgaccagcattaacattacaatagagatcataagactgacaaaagattctctgtagcaataaaatagt

SEQ ID NO: 11249 - DNA, 80 bp, synthetic construct
  source 1..80: mol_type = other DNA
aaacttacgcacacacttacagaccatacataagccactcaaagtcaagagaaagcttaacaaaagatgcagaattaaat

SEQ ID NO: 11250 - DNA, 80 bp, synthetic construct
  source 1..80: mol_type = other DNA
tcttatgccactctaatttacacagccacggctggagaacctaagacaggaagaggaaaaggattttctttcctacactc

SEQ ID NO: 11251 - DNA, 80 bp, synthetic construct
  source 1..80: mol_type = other DNA
atctcagaagtgatgctacgtgactttcaaggctttgtcagggaaaaaaaaaatacagcttaaacctggctgactctcta

SEQ ID NO: 11252 - DNA, 80 bp, synthetic construct
  source 1..80: mol_type = other DNA
accattcaccctgaaaagacactttcagaaatgaatacatgaagtctcattgtagataagcattgacagatgaacatttg

SEQ ID NO: 11253 - DNA, 80 bp, synthetic construct
  source 1..80: mol_type = other DNA
ttggctcttaacaggtcagtgaatgacagggcccatccaacccttgcagctgtcttacaaaaatctgagaatcactttaa

SEQ ID NO: 11254 - DNA, 80 bp, synthetic construct
  source 1..80: mol_type = other DNA
cctttggtcaggattctcatcaactatccactggaagcagctctccaaacctgcccccacttatttttccttaattcccc

SEQ ID NO: 11255 - DNA, 80 bp, synthetic construct
  source 1..80: mol_type = other DNA
tacaaaattacatgaagcagtaagagagaaaaaggtctgtttcccagaggtatgagagacccaaatcagcccagaactca

SEQ ID NO: 11256 - DNA, 80 bp, synthetic construct
  source 1..80: mol_type = other DNA
ccacatagctcccactccagagcccttccacctgccaggccaacactggattttgcctgagatagaatcttgctcagccc

SEQ ID NO: 11257 - DNA, 80 bp, synthetic construct
  source 1..80: mol_type = other DNA
caggatcatcctcaaatatagattgagaaaaatctcaaactgtcccaaaccagttttcactcttggttaacccctcccct

SEQ ID NO: 11258 - DNA, 80 bp, synthetic construct
  source 1..80: mol_type = other DNA
ggtaggtttgcaatttgtgaccatgaatcgaacaatgctaataaggccaagggggatctaaaagataatgtcaagtctgg

SEQ ID NO: 11259 - DNA, 80 bp, synthetic construct
  source 1..80: mol_type = other DNA
caccagcaggcccactgtggcatacagcttccagggttccagagtctggataaatatgtggggagaacaggcacgtcagg

SEQ ID NO: 11260 - DNA, 80 bp, synthetic construct
  source 1..80: mol_type = other DNA
gaggattcctgatgaactgcatgtgcatgtgcatggaaatgccatgtgcacagatgtatgatcaggacagcacagagcag

SEQ ID NO: 11261 - DNA, 80 bp, synthetic construct
  source 1..80: mol_type = other DNA
ctccaaataccacgcaatggcatgaccctaatttcagggccaggggctaaaggaagacaggattggagaagacagtggag

SEQ ID NO: 11262 - DNA, 80 bp, synthetic construct
  source 1..80: mol_type = other DNA
cacctattcttaagacaaacaaaaaaagaaggaaagctaatctgaaattttaatcctggcagggtaatattcccaaatat

SEQ ID NO: 11263 - DNA, 80 bp, synthetic construct
  source 1..80: mol_type = other DNA
ctgtcgagaggggctgaaggaaaatacaaacaagatccactcaccaatccatttatctgttttggaccaggaaagatcat

SEQ ID NO: 11264 - DNA, 80 bp, synthetic construct
  source 1..80: mol_type = other DNA
ccaagccactcaaggggaaattcctgaaattaatggaagccactgggaaagagagtagctgtttttaatttgcatgtctc

SEQ ID NO: 11265 - DNA, 80 bp, synthetic construct
  source 1..80: mol_type = other DNA
tggcctaagcaagtcagcaaatctctctggaaactaatcttttcattttaaaaggaataagaagatgacctttcagactg

SEQ ID NO: 11266 - DNA, 80 bp, synthetic construct
  source 1..80: mol_type = other DNA
cactgatgttctctgatccttctgactttcttcatagagttaacccaggatctaacagctcctacaattccaaaagattc

SEQ ID NO: 11267 - DNA, 80 bp, synthetic construct
  source 1..80: mol_type = other DNA
tctggcggaggatgtcgataatgtagaaggctatgcatgtgggaagcatatgggaagtttctgtaccttcatctcaattc

SEQ ID NO: 11268 - DNA, 80 bp, synthetic construct
  source 1..80: mol_type = other DNA
ctctgcctttaaaaaaaaaaaaaaaaaaaggcagccaggcacagggggctcacgcctgtaatcccaacattttcattttc

SEQ ID NO: 11269 - DNA, 80 bp, synthetic construct
  source 1..80: mol_type = other DNA
gggtggatgacttgagcccaggaggtcaaggctgcagcgattgtaccactgcactcctgcctgggcagcagagggatact

SEQ ID NO: 11270 - DNA, 80 bp, synthetic construct
  source 1..80: mol_type = other DNA
gctcaattttttcttactcccaaacagctcccagtaaatgagactgaagccttggaattacatcagaccctttcaaatca

SEQ ID NO: 11271 - DNA, 80 bp, synthetic construct
  source 1..80: mol_type = other DNA
ccatttccacatattgcccctaaagatgttttctctaaactagggtttctcattctctgcactattaacattttgagcaa

SEQ ID NO: 11272 - DNA, 80 bp, synthetic construct
  source 1..80: mol_type = other DNA
gccactagatccagccaaatccctgttttctgtcagcctcctctagctccctgctataagacagaagcaacgattggcaa

SEQ ID NO: 11273 - DNA, 80 bp, synthetic construct
  source 1..80: mol_type = other DNA
ccacataaaattctaaaaaaagaatcattaaaaaaagcaacaggatccaagctaattgcatatcaatcatgagtgaatat

SEQ ID NO: 11274 - DNA, 80 bp, synthetic construct
  source 1..80: mol_type = other DNA
gaattcatgggcttctcaggaaacacaaagcagtagaaaaatgagatctgaagaaagtatcatgtgtgtgcagacaaggg

SEQ ID NO: 11275 - DNA, 80 bp, synthetic construct
  source 1..80: mol_type = other DNA
gcaaagatggggtaaagaaacataaaggaaccaggaaaagacaaggcaaggactgggacagacagcatgatgtcaacctc

SEQ ID NO: 11276 - DNA, 80 bp, synthetic construct
  source 1..80: mol_type = other DNA
ctgatgggtgcgttcggaagaaagtggggaaacgctgccggtttgacagggctggtgagctggagccataggaaagctgt

SEQ ID NO: 11277 - DNA, 80 bp, synthetic construct
  source 1..80: mol_type = other DNA
ttctatgcttcaaacaccagtgggtggaagaagtcagtaggaatacggtaaactctttccacatccccagatagcttgct

SEQ ID NO: 11278 - DNA, 80 bp, synthetic construct
  source 1..80: mol_type = other DNA
cccacagcccctcagtgcccctccacttctctaaagacagggttaataggaacaatgaggacatacaagaacatataaga

SEQ ID NO: 11279 - DNA, 80 bp, synthetic construct
  source 1..80: mol_type = other DNA
cccctcacacacctatcccagacacacacctatttctaggtgtatagtgatgttctaaaaatgaatataaatccttggat

SEQ ID NO: 11280 - DNA, 80 bp, synthetic construct
  source 1..80: mol_type = other DNA
ccctccacccccaacccattccagggttagtttactccctcagaggatcagtgtctcctaataccttaaatccaccacca

SEQ ID NO: 11281 - DNA, 80 bp, synthetic construct
  source 1..80: mol_type = other DNA
gggcggcgcgcggcagcggggggtgggggggcgggcgggagctggggaggcaggaagggggcggggagggaagcgagcgc

SEQ ID NO: 11282 - DNA, 80 bp, synthetic construct
  source 1..80: mol_type = other DNA
gaaggggagggcattgcagtgcgcgcggtaagggtttctcatctcacctgagtgtggcgttcgattcactggcagcagga

SEQ ID NO: 11283 - DNA, 80 bp, synthetic construct
  source 1..80: mol_type = other DNA
ctgagttgttcttcatcttctgataatgctgcctccaattttaagtcttttaccctaatatgtttccacccccagagctc

SEQ ID NO: 11284 - DNA, 80 bp, synthetic construct
  source 1..80: mol_type = other DNA
ccttacctgtgcaagcatccacacattcccaaaagaaaaaaaaaattaccattttaggaacccaagatggggctataagc

SEQ ID NO: 11285 - DNA, 80 bp, synthetic construct
  source 1..80: mol_type = other DNA
cagatcccctggctaaaggacagagagtaaagggccagggttaaagctgatgagagaacccacaagtggggagggaaggg

SEQ ID NO: 11286 - DNA, 80 bp, synthetic construct
  source 1..80: mol_type = other DNA
acccacgctcccggcatcggccgcctcagcgctccccgattccatccccgcggttcctcctctcccccagccccgcttcc

SEQ ID NO: 11287 - DNA, 80 bp, synthetic construct
  source 1..80: mol_type = other DNA
agaagagatttctgggagactagagcagctccatggtccagcagcattgctactcgcctgctctgcagggaacgcgcaga

SEQ ID NO: 11288 - DNA, 80 bp, synthetic construct
  source 1..80: mol_type = other DNA
cctacctacatacacaactttaaacagaaagcaaaatgcttccctttctgtaacgtaaaggggaaatgaaagaaaagtaa

SEQ ID NO: 11289 - DNA, 80 bp, synthetic construct
  source 1..80: mol_type = other DNA
tttttgttttagagtaatttatccctacttaaagacagattgctctgcatgtaacagctaagtacaaaaaagttataaaa

SEQ ID NO: 11290 - DNA, 80 bp, synthetic construct
  source 1..80: mol_type = other DNA
ggaggcggcagcagtggacaaggggagagggtgcgcgcacgtcgtgctctccctccctccaccctcacttttcttttttt

SEQ ID NO: 11291 - DNA, 80 bp, synthetic construct
  source 1..80: mol_type = other DNA
tttgtagtttttgacggtttttcatagagatagtggagttcctactcagattactggaaaatgacaaatcttattcattt

SEQ ID NO: 11292 - DNA, 80 bp, synthetic construct
  source 1..80: mol_type = other DNA
atctaaagtagtggtgatcactgggtgaatggaagatgttcatgtcctcttgggttaggatgaaagacctgtcttctggg

SEQ ID NO: 11293 - DNA, 80 bp, synthetic construct
  source 1..80: mol_type = other DNA
tacattcttggcagttctggccttggtttattgtgccaataaaagtaagctcatgaagctatttctatcatgtctttaca

SEQ ID NO: 11294 - DNA, 80 bp, synthetic construct
  source 1..80: mol_type = other DNA
ttcattttgctgcaatagatttctgtctctcgtcatattctgttcaagtacctaaaatgattgctcacttattcgaagca

SEQ ID NO: 11295 - DNA, 80 bp, synthetic construct
  source 1..80: mol_type = other DNA
atgtatgaaaacctgaccatgtcacatccatgaccctattacagcaggtcagattaatcttaccctagtccagagaacca

SEQ ID NO: 11296 - DNA, 80 bp, synthetic construct
  source 1..80: mol_type = other DNA
taacatgaggagaccctgtctctaccaaaaattaaaaatattagccgagtgtggtggcatgagcctgtagtcccagctac

SEQ ID NO: 11297 - DNA, 80 bp, synthetic construct
  source 1..80: mol_type = other DNA
gcagggggccttggctgagccataggcagaatcactctccaaaaagacttaccagtgtttatctgaatattttcttttag

SEQ ID NO: 11298 - DNA, 80 bp, synthetic construct
  source 1..80: mol_type = other DNA
ggctaggtggggtatcttctttaactctactcctgcattagctgttctaaatcctagaactcatgccctgtttgaaattt

SEQ ID NO: 11299 - DNA, 80 bp, synthetic construct
  source 1..80: mol_type = other DNA
aactgtgcctgacccttctcttaattttaactcctgagtgattttcttctctggaccccaaggagtcatgatatctctaa

SEQ ID NO: 11300 - DNA, 80 bp, synthetic construct
  source 1..80: mol_type = other DNA
gccaccatgcctggcccagaaaatattattgttatttaatatgacctgccataactaccattaaaagtagtacaggtgtg

SEQ ID NO: 11301 - DNA, 80 bp, synthetic construct
  source 1..80: mol_type = other DNA
tttgcatatgtatacacatgatgctgactttagaagaaaagttacaagttaaaacacgtttgattaataaaagaaaaaga

SEQ ID NO: 11302 - DNA, 80 bp, synthetic construct
  source 1..80: mol_type = other DNA
ttgggaggcctaggcgggcaggcagatcacgaggtcaggagttggagacaagcctggccaacacagtgaaaccctgtctc

SEQ ID NO: 11303 - DNA, 80 bp, synthetic construct
  source 1..80: mol_type = other DNA
aaaaaaaaaaaagagagatttctttaagctctttgcctagggtcacaggtctttccacaggaccgtagactagagtcaga

SEQ ID NO: 11304 - DNA, 80 bp, synthetic construct
  source 1..80: mol_type = other DNA
tcattcccaccacggttggacagctctgaaggagggaaaattctttcttttgagctgaaatctgccttcagagtcttgca

SEQ ID NO: 11305 - DNA, 80 bp, synthetic construct
  source 1..80: mol_type = other DNA
agctgcctcacattgattcggatcagtgttctcatttctccgacctacctaggaagcatctggctaaattgatgtaaatt

SEQ ID NO: 11306 - DNA, 80 bp, synthetic construct
  source 1..80: mol_type = other DNA
atggccctaggcacttgtgaagatctgcacttccccctaggtactcctgtgcctggagtgtgacattaaattaaaaaaaa

SEQ ID NO: 11307 - DNA, 80 bp, synthetic construct
  source 1..80: mol_type = other DNA
gtatttaaaaaactgaaacagtctaaatgtcttgggatgctacttaaataactatattatattcatccaataaaatattg

SEQ ID NO: 11308 - DNA, 80 bp, synthetic construct
  source 1..80: mol_type = other DNA
agaagctttcatttagccaggcatgctggcacatacctgtagtttcagctactcaggaggttgaggcataaggttcactt

SEQ ID NO: 11309 - DNA, 80 bp, synthetic construct
  source 1..80: mol_type = other DNA
agaaccacagcacatagaatatctcagtaaggtggttagttttttttattgttgttttcagagatgctgtgatttctcca

SEQ ID NO: 11310 - DNA, 80 bp, synthetic construct
  source 1..80: mol_type = other DNA
ggcaagtgatgtgaaggctggagagcgtgtcctgtatgctggctctgtcccttctgcctgtgttgactgacatagttagt

SEQ ID NO: 11311 - DNA, 80 bp, synthetic construct
  source 1..80: mol_type = other DNA
ggcttagctccttcaaacatcctcaagttgctatattatctttctaaaacatagacctactgacatgcctcccttcctca

SEQ ID NO: 11312 - DNA, 80 bp, synthetic construct
  source 1..80: mol_type = other DNA
agaggcacagtgcatccactctccaggtctaggggagaaagcagccttatttcttagtagctcagaatctgacttgagaa

SEQ ID NO: 11313 - DNA, 80 bp, synthetic construct
  source 1..80: mol_type = other DNA
aagcagcccttctcatgacaggcttgcttgccaaggttccctctgaccttaaatctcttccttttggtgtcttggacagg

SEQ ID NO: 11314 - DNA, 80 bp, synthetic construct
  source 1..80: mol_type = other DNA
cgggtgacagagcaaagaccttcacccccactccctacccgtctctaaaaaaaacaaaaacaaaaacaaaaaaacccttg

SEQ ID NO: 11315 - DNA, 80 bp, synthetic construct
  source 1..80: mol_type = other DNA
ctttgaaagttacttgctatttaattgaggaactaaactgctttgagagcctgggggtcagatcctctgccttttcctcc

SEQ ID NO: 11316 - DNA, 80 bp, synthetic construct
  source 1..80: mol_type = other DNA
agccaggaagttgagacaaatttaggaatgagatgaagtaatggtattattgcaagtctcaggtgtaactacctctgctc

SEQ ID NO: 11317 - DNA, 80 bp, synthetic construct
  source 1..80: mol_type = other DNA
gcgaagaacactttttaaaaaataaataggccgggcgcggtggctcacacctgtaatcccagtactttgggagcccaagg

SEQ ID NO: 11318 - DNA, 80 bp, synthetic construct
  source 1..80: mol_type = other DNA
gttattagctgtgatgtatccctacctttgatgtcattatccttactcagctcccttaaagcagagatcaagatgaaaag

SEQ ID NO: 11319 - DNA, 80 bp, synthetic construct
  source 1..80: mol_type = other DNA
ttaattagtgtaatttcaaaatagtaatgaacataagtgatagtttgagatttctgtgacttttctaatgtgacgtgaaa

SEQ ID NO: 11320 - DNA, 80 bp, synthetic construct
  source 1..80: mol_type = other DNA
atcctgatgatattcacttctttatttgacctgatttattgggccccagacaccatgctgagtgttggggattcagctct

SEQ ID NO: 11321 - DNA, 80 bp, synthetic construct
  source 1..80: mol_type = other DNA
cgatcaacaacaaagtcctttctctcaccttgaattcatcccagatgcctgcttgtttacttcttccacacaaaaaaagg

SEQ ID NO: 11322 - DNA, 80 bp, synthetic construct
  source 1..80: mol_type = other DNA
ggacccctggctcctggttgagtcccttcctctcttctcttttctttctttaaataagaagtcatttgcatttaggattg

SEQ ID NO: 11323 - DNA, 80 bp, synthetic construct
  source 1..80: mol_type = other DNA
tcttgtcacccaggctggagtgcaatggcgcgatctaggctcactgaaacctctgcctcccgggttcaagcgattctcag

SEQ ID NO: 11324 - DNA, 80 bp, synthetic construct
  source 1..80: mol_type = other DNA
ggaggcagtacttttctcatccaagttcatggactttctgaattttgtccccagagtcctttggtgttctaggaccccag

SEQ ID NO: 11325 - DNA, 80 bp, synthetic construct
  source 1..80: mol_type = other DNA
atgatacaaactactgacatacgtttttcaagttattttctccttcttctaggaaatcccttctgagtgatgtcacatct

SEQ ID NO: 11326 - DNA, 80 bp, synthetic construct
  source 1..80: mol_type = other DNA
aaaaacgaaagctgggcaacatgcctgctttagaatgttttccttctacttacacatcttccacaggtctcagaatcttt

SEQ ID NO: 11327 - DNA, 80 bp, synthetic construct
  source 1..80: mol_type = other DNA
cctttatagcccctccagtgatccataaggccctctttctccccaaaggagaggtcacagatagggcaaaggtagctctt

SEQ ID NO: 11328 - DNA, 80 bp, synthetic construct
  source 1..80: mol_type = other DNA
gcaaggaagaccttgtcatcactagtcccctcatctctcagactgggatgttgttctcgaagctctttcttcttgccttc

SEQ ID NO: 11329 - DNA, 80 bp, synthetic construct
  source 1..80: mol_type = other DNA
agcatgaaacctatctcctttgcttctcttttctcttggaaagaacattttaatcagagcactatcatggacataagcaa

SEQ ID NO: 11330 - DNA, 80 bp, synthetic construct
  source 1..80: mol_type = other DNA
ttgtttgatgaatggaaaaatttgcatattttgagaacactgtcatcatgttacaagtgttatctttgccttcatgcagg

SEQ ID NO: 11331 - DNA, 80 bp, synthetic construct
  source 1..80: mol_type = other DNA
tggatgtcgttcagtctggaacaatctgagatttcatttgacctgcaggcaggagtatgtatgaaagagctcctggagtc

SEQ ID NO: 11332 - DNA, 80 bp, synthetic construct
  source 1..80: mol_type = other DNA
ggggtaaccaggctaggatctgtcacagatcacctcgagtgagtctctttattctttctgacttggtttcatcagaaatg

SEQ ID NO: 11333 - DNA, 80 bp, synthetic construct
  source 1..80: mol_type = other DNA
gagataccacattcatacaacttttattacaatatattgctgtaattgttctatcttattactagttattgttgtcaatc

SEQ ID NO: 11334 - DNA, 80 bp, synthetic construct
  source 1..80: mol_type = other DNA
aaccattcgcactccttttatgaggcatgcagatcttggattattcttccactttccagccaactgcacttcaaaacagc

SEQ ID NO: 11335 - DNA, 80 bp, synthetic construct
  source 1..80: mol_type = other DNA
tccagccacgtgagttttccgcctgtcagccaagcaaaatggccttcctgcagtcgcacggccctttggtctctgctcag

SEQ ID NO: 11336 - DNA, 80 bp, synthetic construct
  source 1..80: mol_type = other DNA
aactgatagctgctggtcccaagtagcgctaggattttcgctttcccagtcttaattgactctaaaagaagaagaaaaaa

SEQ ID NO: 11337 - DNA, 80 bp, synthetic construct
  source 1..80: mol_type = other DNA
ggcaatggagtgaggccctatttctaaacagaacaaaaaaaaagaatgcctgctgataaaccttgtgacaggacattcat

SEQ ID NO: 11338 - DNA, 80 bp, synthetic construct
  source 1..80: mol_type = other DNA
tccttcatgccttcctggccttttttttttttttttttttttttgagacagagtctcgcttcttcacctaggctagcgtg

SEQ ID NO: 11339 - DNA, 80 bp, synthetic construct
  source 1..80: mol_type = other DNA
cctgatgagaactttaaaaatgttaacttggtaatggatggaatcctcctcattcaaggttacccctgtgcaagtcaagc

SEQ ID NO: 11340 - DNA, 80 bp, synthetic construct
  source 1..80: mol_type = other DNA
ggattatgctgttgtaattgaagtcccaagacaattgaccataaaacaggttatctggttgggcctgatctaaccacatg

SEQ ID NO: 11341 - DNA, 80 bp, synthetic construct
  source 1..80: mol_type = other DNA
gtcaatgagggagtgaaggtaagccgcccgaaaagtagataatttttacttccactttctttttctttcctgagcactag

SEQ ID NO: 11342 - DNA, 80 bp, synthetic construct
  source 1..80: mol_type = other DNA
tttcccagtctataatatataatttttaatagcatcccaaaaagactaaaacacttgcccttgcatgaagaaccctgtct

SEQ ID NO: 11343 - DNA, 80 bp, synthetic construct
  source 1..80: mol_type = other DNA
ccccattgttaacatcttatatcactattatacatttttcacaaccagtgagacaatattaatatagtatcactaaactt

SEQ ID NO: 11344 - DNA, 80 bp, synthetic construct
  source 1..80: mol_type = other DNA
ctaatggaaaaaattatggtgcattctataacaatagaggactcacagaaaactttgcaggtagatatatcaatagagca

SEQ ID NO: 11345 - DNA, 80 bp, synthetic construct
  source 1..80: mol_type = other DNA
catttatcacacacacacaccctcacaccttttgctcaataggtaaacatctctttcacttctgtatcactttctttctt

SEQ ID NO: 11346 - DNA, 80 bp, synthetic construct
  source 1..80: mol_type = other DNA
agcctggtttaatactttttatttagtggcacaatgcccaggaatgaattaaagtcattaaatgaggactaggttgctat

SEQ ID NO: 11347 - DNA, 80 bp, synthetic construct
  source 1..80: mol_type = other DNA
actttttattgtttatatgaacaaaggcaattgtttaatgtttgggaatttatatgctactatatgctatttcttttctt

SEQ ID NO: 11348 - DNA, 80 bp, synthetic construct
  source 1..80: mol_type = other DNA
tccacctcccgggttctcgccattctccttcctgcctcagcttcgggagtagctgggactacaggcgcctgcaaccacgc

SEQ ID NO: 11349 - DNA, 80 bp, synthetic construct
  source 1..80: mol_type = other DNA
tcgtgatctgcccgcctcagcctcccaaaatgctgggattacaggcatgagccaccgcgcccagcccaggtggtttactt

SEQ ID NO: 11350 - DNA, 80 bp, synthetic construct
  source 1..80: mol_type = other DNA
atccccaagcctgccccacaatggtgagcacaggcagcagctttcaggcaggagtgatggcatgggaaacttctggtgaa

SEQ ID NO: 11351 - DNA, 80 bp, synthetic construct
  source 1..80: mol_type = other DNA
acgactctgctggaagtggtgcagtcactcagcccacaaacaaggagctcttggacacagatgagtacatggtctggcct

SEQ ID NO: 11352 - DNA, 80 bp, synthetic construct
  source 1..80: mol_type = other DNA
gctctcttgctctttctctctccatgtgacacacctgctcttcctttgccttctgccacaagtaaaagcttcctgagact

SEQ ID NO: 11353 - DNA, 80 bp, synthetic construct
  source 1..80: mol_type = other DNA
aattggtctgaatgatgaggccaggcaagtgtatacatcttttcactggtagaaaaatctgtagcaaagcctgtgccctt

SEQ ID NO: 11354 - DNA, 80 bp, synthetic construct
  source 1..80: mol_type = other DNA
gcgcctggccaatttgtttttttttttaaataaacatagacagcatctcggtatgttgcccagactggtcttgaaccctg

SEQ ID NO: 11355 - DNA, 80 bp, synthetic construct
  source 1..80: mol_type = other DNA
actggcgcatgccaccacacctggttaatgtttgtttgtttgtttgtttgtttgttgagacattgtctcgccatgttacc

SEQ ID NO: 11356 - DNA, 80 bp, synthetic construct
  source 1..80: mol_type = other DNA
cttcttcattggatgacctttgtacttgtattcaaaatcaagtgactctatttttgtccttccatttctggcctctccat

SEQ ID NO: 11357 - DNA, 80 bp, synthetic construct
  source 1..80: mol_type = other DNA
ggaaactccttcagtatttttcttgcagtagagttatgtttgcaacaaattatcctagttttattttatctggagacacc

SEQ ID NO: 11358 - DNA, 80 bp, synthetic construct
  source 1..80: mol_type = other DNA
cctggctagggagaaaggggagcggggtctctgtcctcggccctgtggccacacgggggcgccgctgcgctgctctcgga

SEQ ID NO: 11359 - DNA, 80 bp, synthetic construct
  source 1..80: mol_type = other DNA
aagaaaaaaaaaaaaagttagtgaaatcatgattgtgaaggaacaatggcaaatggagagaaagagcagagagacagaca

SEQ ID NO: 11360 - DNA, 80 bp, synthetic construct
  source 1..80: mol_type = other DNA
tgtcctactggaaaaggatggatttctagaaatgtcccaatggcttggaacactcaatttctctgtgtgcactgcaagca

SEQ ID NO: 11361 - DNA, 80 bp, synthetic construct
  source 1..80: mol_type = other DNA
tgccctaggggaaatttcctgaaggaaacaggaaaaggaacctctattcctcgctgcatatcttttatgtaggcctttcc

SEQ ID NO: 11362 - DNA, 80 bp, synthetic construct
  source 1..80: mol_type = other DNA
tgccccaaggaactccttcttcaccctctgagagaaagtgtcacaggaccacagacccttggtcttcatagatcccataa

SEQ ID NO: 11363 - DNA, 80 bp, synthetic construct
  source 1..80: mol_type = other DNA
gtaagcattatttccaaagtaaaattaagtcacatttgtggttgctagtgaatgcggcacaaatggaccctgaagattca

SEQ ID NO: 11364 - DNA, 80 bp, synthetic construct
  source 1..80: mol_type = other DNA
ggctactgctgtactgtccttctgaggtcagtgagatagggtgttcacagcctcacttgaaaggaaacaagagacttgtc

SEQ ID NO: 11365 - DNA, 80 bp, synthetic construct
  source 1..80: mol_type = other DNA
ctgcatggccgtgtgcctgacatggtcagaaatgagaaatgctgctgcccctttgcaaagcactacttagtttttctctt

SEQ ID NO: 11366 - DNA, 80 bp, synthetic construct
  source 1..80: mol_type = other DNA
tgtgactgcagggccaaaaggaaccagggctgagaggaacctggagacatgctggggtggggccaaacgagggcttggag

SEQ ID NO: 11367 - DNA, 80 bp, synthetic construct
  source 1..80: mol_type = other DNA
gggctcattgatattcctgaggaaagtgtggccttgaaaaggcagagaactaaatggtgacagtggcctgcaaaagccag

SEQ ID NO: 11368 - DNA, 80 bp, synthetic construct
  source 1..80: mol_type = other DNA
gaagcctgatggggcctaaagaatgaatgagattacttcagacttgaaaaagtaggagtcataattgcagctgccatgct

SEQ ID NO: 11369 - DNA, 80 bp, synthetic construct
  source 1..80: mol_type = other DNA
tgttgacacctccagaaaacatccaaacctgaagtggcactaaacaaccaagcagacaaattgaagttagccagccctca

SEQ ID NO: 11370 - DNA, 80 bp, synthetic construct
  source 1..80: mol_type = other DNA
ggacaaatgagagcctactgaagaacacattactattgcccccagagagatttggacagtatgtgcccagagaccagcaa

SEQ ID NO: 11371 - DNA, 80 bp, synthetic construct
  source 1..80: mol_type = other DNA
tttttataatattatccatacataatgtttcccgtttctctccacctattctcttcttgatttttcttttccttcccacc

SEQ ID NO: 11372 - DNA, 80 bp, synthetic construct
  source 1..80: mol_type = other DNA
gattcacattttttctaccttaaaagcaatctgatttggcaaatatttttaaagatgatatttgaatgagaaaattggca

SEQ ID NO: 11373 - DNA, 80 bp, synthetic construct
  source 1..80: mol_type = other DNA
cagtaaaaaaaaatacagcttcacaagagaggatgaatagttgcactttaattttcatttgctctaaatttattagtgtt

SEQ ID NO: 11374 - DNA, 80 bp, synthetic construct
  source 1..80: mol_type = other DNA
tctcccgtctccctctccctctcccgtctccctctccctctcccgtctccctctccctctcatgccgagccaaagctgga

SEQ ID NO: 11375 - DNA, 80 bp, synthetic construct
  source 1..80: mol_type = other DNA
gggaagtgaggagcccctctgcccggccagccgccccgtccgggagggaggcgggggggggggggtcggccagccgcccc

SEQ ID NO: 11376 - DNA, 80 bp, synthetic construct
  source 1..80: mol_type = other DNA
gcgcctctgcccggccgcccctactgggaagtgaggagcccctctgcctggccagccgccccgtccgggagggcggtggg

SEQ ID NO: 11377 - DNA, 80 bp, synthetic construct
  source 1..80: mol_type = other DNA
aaaaaaaaaaaaaaaaaaaaaaaaaaaagaaagacccaagccttgctaggctgattctatcatcccccccatgatagacg

SEQ ID NO: 11378 - DNA, 80 bp, synthetic construct
  source 1..80: mol_type = other DNA
ttgtggtaatttgttatgcagtcatacaaaagtcatacacagactcaacagacacatggaatgaatttataaattgataa

SEQ ID NO: 11379 - DNA, 80 bp, synthetic construct
  source 1..80: mol_type = other DNA
agagtcacagatacatagtctgggaaagcaaaacttaggagctctgagagttgtacaactgtaatgcatttagacacatt

SEQ ID NO: 11380 - DNA, 80 bp, synthetic construct
  source 1..80: mol_type = other DNA
tgccgaaggtttctccctggtttctcagcccccgggcgaagactcagggagacattgagacacaccctgcacaggagggg

SEQ ID NO: 11381 - DNA, 80 bp, synthetic construct
  source 1..80: mol_type = other DNA
cccagaccctccacccgggagagtcccaggcgcctttacccaggttcattttcagtttaggccaaaatccccgcgggttg

SEQ ID NO: 11382 - DNA, 80 bp, synthetic construct
  source 1..80: mol_type = other DNA
ttggtcacatgggtgctgctggggtttcccatgaggagtgcaaagtgcctgaattttctgactcttctcagatcctccaa

SEQ ID NO: 11383 - DNA, 80 bp, synthetic construct
  source 1..80: mol_type = other DNA
cttgatcctgccctggatctacagttacacttttctggaaacttctctgggatcaaagactaggggtttgctctaggacc

SEQ ID NO: 11384 - DNA, 80 bp, synthetic construct
  source 1..80: mol_type = other DNA
tatttgggctgcctccggagtcacagtgtcttgggccgccggaaggtgggtgacatgtggatcttgttttttttgtggct

SEQ ID NO: 11385 - DNA, 80 bp, synthetic construct
  source 1..80: mol_type = other DNA
gctttgtatctacttccggatcactttccctctacaggcccagctcctgagtgtctctacctctcaaacaagtattctca

SEQ ID NO: 11386 - DNA, 80 bp, synthetic construct
  source 1..80: mol_type = other DNA
gggttcctggaagggaccctctcccttcagcgacgcattgtgaggccatttctaggtaaaaaggtagaatttccttggat

SEQ ID NO: 11387 - DNA, 80 bp, synthetic construct
  source 1..80: mol_type = other DNA
gaaaaacaaacaatctcattcaaaaatgagtgaacaacatgaatagacaattctccaaagaagatatacaaatgggcaat

SEQ ID NO: 11388 - DNA, 80 bp, synthetic construct
  source 1..80: mol_type = other DNA
aggcagagtgagcctctcaaacgaaaattaggacatatcctatgaacacctcagcccttttctttcctaggcacaatgaa

SEQ ID NO: 11389 - DNA, 80 bp, synthetic construct
  source 1..80: mol_type = other DNA
tcacatgccaatcccttccagaaacaccctcgcaggcacacccagaaataatgttataccagctatctaggcatccctta

SEQ ID NO: 11390 - DNA, 80 bp, synthetic construct
  source 1..80: mol_type = other DNA
gactcctggctaattttttgtattttttagtacagatggggtttcaccatgttggccagtctggtctcgaattcctgacc

SEQ ID NO: 11391 - DNA, 80 bp, synthetic construct
  source 1..80: mol_type = other DNA
gcaaatttctcatttgaaatccatagggcagaaatgccgattatggcacctccagagagtagaaaaatattcttcctcca

SEQ ID NO: 11392 - DNA, 80 bp, synthetic construct
  source 1..80: mol_type = other DNA
ggggaaagacagatgggcagatgctcaagcaaactcaggagtttaccatataaaagattttggaatctattcttcagcct

SEQ ID NO: 11393 - DNA, 80 bp, synthetic construct
  source 1..80: mol_type = other DNA
gggctgcaatcttattgaggatccattgaacctgaaaagttccttctctgttattcatttcaatatgctctgtttgtcat

SEQ ID NO: 11394 - DNA, 80 bp, synthetic construct
  source 1..80: mol_type = other DNA
agaaatgtatacttgaatgaaggacaacatgcatggagaaaggtggacaaaccataagtgggccgtggattttcacaaag

SEQ ID NO: 11395 - DNA, 80 bp, synthetic construct
  source 1..80: mol_type = other DNA
taggtcagctgccaaacttctccctctctctgatggttaaagggtgtttacttttgattaaagggcaccatttttagatc

SEQ ID NO: 11396 - DNA, 80 bp, synthetic construct
  source 1..80: mol_type = other DNA
cataataagtaaacatttacaatttactcacaccattgaggtttcctccaggtgtgagcacagctgcagacacaccttgt

SEQ ID NO: 11397 - DNA, 80 bp, synthetic construct
  source 1..80: mol_type = other DNA
atagttaagataccaaattttacataatgtagtttttggcccaaggaaaagactaattagccctgttactaatttaggga

SEQ ID NO: 11398 - DNA, 80 bp, synthetic construct
  source 1..80: mol_type = other DNA
gaacacaaatgtgaaataatacacctgtaaacacatctctggatagatagcccacgattgaattctctaccccacctcct

SEQ ID NO: 11399 - DNA, 80 bp, synthetic construct
  source 1..80: mol_type = other DNA
ggctccccagaaggagccgtaaccaggacactcactcataaatctcatttataataataatacaatgaccgcatatgtaa

SEQ ID NO: 11400 - DNA, 80 bp, synthetic construct
  source 1..80: mol_type = other DNA
ccaccaggaagcccagcaggcctgtcaggcccaggatggaaacacgtggctgccatggggtctgcacctgacctgaccct

SEQ ID NO: 11401 - DNA, 80 bp, synthetic construct
  source 1..80: mol_type = other DNA
aggcccatggggagctgcaaagtggacagagatggctgtgtgcactcaggaccctccctgttacaaggggacctcaaagg

SEQ ID NO: 11402 - DNA, 80 bp, synthetic construct
  source 1..80: mol_type = other DNA
gtgagtgctgtgattccctctgtgtcccatgtagcaggtgaacctctgctcctctcctcggggaatcctggtggccatgc

SEQ ID NO: 11403 - DNA, 80 bp, synthetic construct
  source 1..80: mol_type = other DNA
tcctcacccctactcacagccaaatccagtgggaagagacaggtcctgctctctgcccccaactctcctggaaaaggcct

SEQ ID NO: 11404 - DNA, 80 bp, synthetic construct
  source 1..80: mol_type = other DNA
ggcatggcaatgccccaagtagggaggtggatggaccagttggtgtcccctggggtgggctggtggcaagggtcttaaag

SEQ ID NO: 11405 - DNA, 80 bp, synthetic construct
  source 1..80: mol_type = other DNA
tgttgggtctgggtagaggaggacagatgtgcagggcaaggactggaggatggggtgagcatggtgtgggggtgaccctg

SEQ ID NO: 11406 - DNA, 80 bp, synthetic construct
  source 1..80: mol_type = other DNA
ggagatgcggcccaggagctgagaacacgtcggctccgggagaggacagggcttcagggaccttagggccgcccccagca

SEQ ID NO: 11407 - DNA, 80 bp, synthetic construct
  source 1..80: mol_type = other DNA
tgactgtcattcgcttgttctttccaggacacacttacagaagagacgaggcctggttattcttccaacacactcccctc

SEQ ID NO: 11408 - DNA, 80 bp, synthetic construct
  source 1..80: mol_type = other DNA
tctgcctctgagcccattagaccgtgtcacatccttaaatcttcccaattaggctggtcagagtgtagtggtgtttacaa

SEQ ID NO: 11409 - DNA, 80 bp, synthetic construct
  source 1..80: mol_type = other DNA
ctctttctactgaaagaatcatctcgtccccaacacacacgtctcttactctttggaacatctagccagtggtcctcaaa

SEQ ID NO: 11410 - DNA, 80 bp, synthetic construct
  source 1..80: mol_type = other DNA
aggacgaccttcctccctgtgccagctctagcaaagggtctcattcagctcacctcaaaaaatacttttaatacttaaat

SEQ ID NO: 11411 - DNA, 80 bp, synthetic construct
  source 1..80: mol_type = other DNA
ctaaatttacatcccgagtgtggccccatcaaagactggagcgacgttcactgaaatgatacaagaccagcaggggcgca

SEQ ID NO: 11412 - DNA, 80 bp, synthetic construct
  source 1..80: mol_type = other DNA
actaccacaatgaagatgtagaacatttccatcggactccaaagagctgctatgcaatacaattttatagggtcaataaa

SEQ ID NO: 11413 - DNA, 80 bp, synthetic construct
  source 1..80: mol_type = other DNA
attttatattacagtattaacttggatttggcttggcccggtggtttgtacctgtaatttcagctctggaaggtgaggca

SEQ ID NO: 11414 - DNA, 80 bp, synthetic construct
  source 1..80: mol_type = other DNA
aagacgtgtcttttgcaaggtagactccttatctcgcactctgtctggttttctaagtccatcctaatgaaacacaaaaa

SEQ ID NO: 11415 - DNA, 80 bp, synthetic construct
  source 1..80: mol_type = other DNA
cttgggggaggttttatacttagttactgactttgcattcgttgacttcatctttgaacatcttacagttacgtaatttg

SEQ ID NO: 11416 - DNA, 80 bp, synthetic construct
  source 1..80: mol_type = other DNA
atcccgctgctcttgggggatttgctgagtcacttctccctgtttctgctggggctggggatggttaacccagtcaagcc

SEQ ID NO: 11417 - DNA, 80 bp, synthetic construct
  source 1..80: mol_type = other DNA
ggtcctgcctcaaatacagtctcctcctgcaggctctgctgggtctttttattatcattctccaggtggtgaccgggtcc

SEQ ID NO: 11418 - DNA, 80 bp, synthetic construct
  source 1..80: mol_type = other DNA
catcctgccctcgcctccactttatctggcatatttttatatgttgatctgatcctcctcataagggatgtatatgagca

SEQ ID NO: 11419 - DNA, 80 bp, synthetic construct
  source 1..80: mol_type = other DNA
tggatgatggctctgtgaggagatggaagctgagaataatgcacttgcttacagtgttcacattcttcatggaatttact

SEQ ID NO: 11420 - DNA, 80 bp, synthetic construct
  source 1..80: mol_type = other DNA
taggaatagagtcaatgttttcccttaatgggagctccttttctccatttatcttcttaaagcagggggaaggggatgag

SEQ ID NO: 11421 - DNA, 80 bp, synthetic construct
  source 1..80: mol_type = other DNA
acctgataagactacaatgaccaggatggccaatatccctgtcttcttgcaactcaagctttgcctggttaccccctact

SEQ ID NO: 11422 - DNA, 80 bp, synthetic construct
  source 1..80: mol_type = other DNA
cccacctccctctcagcctggccccagacagaatccagaccaactcctgtctgctgtgaaaaatgttcctgccagtttag

SEQ ID NO: 11423 - DNA, 80 bp, synthetic construct
  source 1..80: mol_type = other DNA
cactccacacctcctgaactagaaccaaagctctgtgcacacaccattcatgtgagtctgtagagatctcagcttcctgc

SEQ ID NO: 11424 - DNA, 80 bp, synthetic construct
  source 1..80: mol_type = other DNA
agagagcccaggtgacagccatgcctgctcctcctccctcatctcccacagcctcagcaccatcgtctgcctcgagtcca

SEQ ID NO: 11425 - DNA, 80 bp, synthetic construct
  source 1..80: mol_type = other DNA
ccaaaaaggaagtgggaagctcagttctatctgcaggaagtgaattcagacaagaacctgaataagcttggatgtggact

SEQ ID NO: 11426 - DNA, 80 bp, synthetic construct
  source 1..80: mol_type = other DNA
tcctcctggcctgggtgactcttacataccttctctctgtcctcacacatccaatcttccttccccattcttacttccgc

SEQ ID NO: 11427 - DNA, 80 bp, synthetic construct
  source 1..80: mol_type = other DNA
aacctgagaagatgctctggttaggggaagctatggcagatgtggtgatagaatgccctgcacaataatgatggagttgg

SEQ ID NO: 11428 - DNA, 80 bp, synthetic construct
  source 1..80: mol_type = other DNA
gctgggggggatgatagtaaaggtcccagagttgtgcttattcatatctctggggagaatgtgggcctgaagagactgag

SEQ ID NO: 11429 - DNA, 80 bp, synthetic construct
  source 1..80: mol_type = other DNA
tgaggaagcctagtgaggcctaaagaatgaatgagattactccagatatggccaagtaggagttataagtgcagcttttg

SEQ ID NO: 11430 - DNA, 80 bp, synthetic construct
  source 1..80: mol_type = other DNA
cagaaaacacccaagtctgaagcagcactgaacaaccaaacagacaaatggaagttagccagccttcactatgggtcaat

SEQ ID NO: 11431 - DNA, 80 bp, synthetic construct
  source 1..80: mol_type = other DNA
tctacttgggggccttctggtttgccttgtccctttgtaaatgtgagcagaatcatccagcaatccagcctgagaggatt

SEQ ID NO: 11432 - DNA, 80 bp, synthetic construct
  source 1..80: mol_type = other DNA
actcctctctccttctttctctcctttcctccatttttttcttttttattatgacatattctgacatataaaataaccct

SEQ ID NO: 11433 - DNA, 80 bp, synthetic construct
  source 1..80: mol_type = other DNA
ggtggctttgcgggttctgtgtcttatgccagtgctgggaacccaggtaactactagattataactccttaaacagtatt

SEQ ID NO: 11434 - DNA, 80 bp, synthetic construct
  source 1..80: mol_type = other DNA
ggcatacttcaactaaatgtgagacaccttagttgaaacaaagacttattttcaagtcattatttttacggcacagaagt

SEQ ID NO: 11435 - DNA, 80 bp, synthetic construct
  source 1..80: mol_type = other DNA
agaagaaaatctaggcaataccatttgcctgggcatgggcaaagattttatgatgaaatcgccaaaagcatctgccacaa

SEQ ID NO: 11436 - DNA, 80 bp, synthetic construct
  source 1..80: mol_type = other DNA
cgcattaggaaaaatagctcattcatgctaggcttaatacctaggtgctgggttgataagtgtagcaaaacaccatggca

SEQ ID NO: 11437 - DNA, 80 bp, synthetic construct
  source 1..80: mol_type = other DNA
cctgaccattggaaactgcggtagatgatgtttgttgttttgcgctgctaagttttatgtaatttgttatgcaatagtaa

SEQ ID NO: 11438 - DNA, 80 bp, synthetic construct
  source 1..80: mol_type = other DNA
accttgacagctagcagggaacaggaaactcagtcttaacgactgtcagaaactgaattctgccgcctctatatatgctt

SEQ ID NO: 11439 - DNA, 80 bp, synthetic construct
  source 1..80: mol_type = other DNA
acagtgggtgcaggacagtgggtgcagtgcaccaagtgtgagccaaagcagggcgaggccacgcctcacccaggaagcgc

SEQ ID NO: 11440 - DNA, 80 bp, synthetic construct
  source 1..80: mol_type = other DNA
gatgaatgcacaagcttcagtagctgattcgatcaactggaagaaaggttatcagtgatggaagatcaaatgaatgaaat

SEQ ID NO: 11441 - DNA, 80 bp, synthetic construct
  source 1..80: mol_type = other DNA
gtaatgggaaactttaacaccccactgtcaacatcggacagatcaatgagacagaaagttaacaaagatatccaggaatt

SEQ ID NO: 11442 - DNA, 80 bp, synthetic construct
  source 1..80: mol_type = other DNA
aaaatactggcaaaccgaatccagcagcacatcaaaaagcttatccaccatgatcaagtgggcttcatccctgggatgca

SEQ ID NO: 11443 - DNA, 80 bp, synthetic construct
  source 1..80: mol_type = other DNA
acctgctcaatgaaataaaagaggatataaacaaatggaagaacattccacgttcatggataggaagaatccatatcatg

SEQ ID NO: 11444 - DNA, 80 bp, synthetic construct
  source 1..80: mol_type = other DNA
tcagagtgaacaggcaacctacagaatgggagaaaatttttgcagtctacccatcaaacaaccccataaaaagtgggcaa

SEQ ID NO: 11445 - DNA, 80 bp, synthetic construct
  source 1..80: mol_type = other DNA
gaagcaaaccacagagaattgtaaggagtcatgtgacagagaggaccaggatgccatgaaaatggacttggctaaaaata

SEQ ID NO: 11446 - DNA, 80 bp, synthetic construct
  source 1..80: mol_type = other DNA
ctgtttcaaactgttttctcctaagcacccaaggctctgtgatgtctgaaacagttaatcattaattttaaaagataagc

SEQ ID NO: 11447 - DNA, 80 bp, synthetic construct
  source 1..80: mol_type = other DNA
ggttgtggagaaataggaaggcttttacactgttgctggaaatgtaaattggttgaaccattgtggaagacagtttggtg

SEQ ID NO: 11448 - DNA, 80 bp, synthetic construct
  source 1..80: mol_type = other DNA
atgctgctcttatgatgctgagggaattctcatgagatctgatggttttatgaggtatttttccccacttcgatctgcaa

SEQ ID NO: 11449 - DNA, 80 bp, synthetic construct
  source 1..80: mol_type = other DNA
ctcttatctcagcgtcctgagtaactgggactacaggcatgaagcaccacgcctggctaattttctaaatttttttgtag

SEQ ID NO: 11450 - DNA, 80 bp, synthetic construct
  source 1..80: mol_type = other DNA
atgggtgttgttttgccagtcgtggtagtgcacgaatgaattgatgaattgatatgcacactaattacataaaataaaat

SEQ ID NO: 11451 - DNA, 80 bp, synthetic construct
  source 1..80: mol_type = other DNA
atttatatgtcaagggaccaaagtcacatttttggccgattagattcctgatcattaggagttaccaagattctgctacc

SEQ ID NO: 11452 - DNA, 80 bp, synthetic construct
  source 1..80: mol_type = other DNA
tttccacaccaccatgtcccggcccggccgcgcggatccccgcttcctctccgtgggcgacgtggacgacacgcagtgcg

SEQ ID NO: 11453 - DNA, 80 bp, synthetic construct
  source 1..80: mol_type = other DNA
aaaccctctgaggaatgggtgccatctttcaggatgtggtgcatgtattgaatcaaagatgtctctatagtgctgtgttt

SEQ ID NO: 11454 - DNA, 80 bp, synthetic construct
  source 1..80: mol_type = other DNA
taactcttattccaacctgtaaaatccttctctttatccaacttctgccacccccacagaatctattttacttgtgtgtg

SEQ ID NO: 11455 - DNA, 80 bp, synthetic construct
  source 1..80: mol_type = other DNA
caatgaaaaggaatagtaaatacaagactcaagatagaagttccttttggggaatagaattggacaacagccgagggtgg

SEQ ID NO: 11456 - DNA, 80 bp, synthetic construct
  source 1..80: mol_type = other DNA
tcatttgaccctgggctaattggcaactctctacattgtctggcatacagtgttcaatctgatgtgcaaggcaattgtat

SEQ ID NO: 11457 - DNA, 80 bp, synthetic construct
  source 1..80: mol_type = other DNA
taatgttaattttgcttttaacatgtttataaattctttgatactcctcctttccagaagtgcagcttcattccctccct

SEQ ID NO: 11458 - DNA, 80 bp, synthetic construct
  source 1..80: mol_type = other DNA
gacggtcctaatcaggtaagctctgaaaaggactgggttcttcctgagaatagagactcacagtgtgagagggattcagc

SEQ ID NO: 11459 - DNA, 80 bp, synthetic construct
  source 1..80: mol_type = other DNA
aagaattctaaagcaatggaattctcagacttaaatacagtgttttatagatttttaatgcatttatccgcaaagcctgg

SEQ ID NO: 11460 - DNA, 80 bp, synthetic construct
  source 1..80: mol_type = other DNA
ggttgcaatatacggtaatacattgtgctttgtattgagatgtcctggactcgcacacacaaactcagagctatgaaata

SEQ ID NO: 11461 - DNA, 80 bp, synthetic construct
  source 1..80: mol_type = other DNA
accccccagcagccttgggcaccaggaattttcctctcaggccttgttctctgcctcatactcaatgtgtgtgggggtct

SEQ ID NO: 11462 - DNA, 80 bp, synthetic construct
  source 1..80: mol_type = other DNA
gttcagaggccctgtctatcaacgcttactcttttgtaaagcacttgtgaaaatgaaggacaaatttatcaccttgattg

SEQ ID NO: 11463 - DNA, 80 bp, synthetic construct
  source 1..80: mol_type = other DNA
gtaatgtctgcttccccttagccttccagcataatcgaaagttccctgaggccctctcataagatgagcagatgccagaa

SEQ ID NO: 11464 - DNA, 80 bp, synthetic construct
  source 1..80: mol_type = other DNA
acgacagcaggggctggagccaccttcttctccttggccttctttccttttggcatcttggatggtgggaggagaaagaa

SEQ ID NO: 11465 - DNA, 80 bp, synthetic construct
  source 1..80: mol_type = other DNA
ttcaaccttgtgaggacactgcattcatttcttttggtccacttatttcttttggaatggaaatgtataggaaatgtctc

SEQ ID NO: 11466 - DNA, 80 bp, synthetic construct
  source 1..80: mol_type = other DNA
aacagtaaagaagcattggcatattatccaagtctcattcggtcattcaaaattaggccagtttatcatcctcttgtatg

SEQ ID NO: 11467 - DNA, 80 bp, synthetic construct
  source 1..80: mol_type = other DNA
tttatattgcccaacaattatattggcagtttttagacaattagacaaccaatgtttcaactgactatttctttttcttt

SEQ ID NO: 11468 - DNA, 80 bp, synthetic construct
  source 1..80: mol_type = other DNA
aatctgaagagaactgtacactaagacagtaattttaaaaccttctcacaaagaaatgccaaagcccagatatcttcact

SEQ ID NO: 11469 - DNA, 80 bp, synthetic construct
  source 1..80: mol_type = other DNA
attcatggagagatgcggttggaaagctcaataatattgttaagatgacaattctccaccaagagatctataggttcagt

SEQ ID NO: 11470 - DNA, 80 bp, synthetic construct
  source 1..80: mol_type = other DNA
ctcaaaatgagtcacaagctttcatgtaaagcacagagttaaaatggcaaacattgagccaggtgtggtatcacaggcct

SEQ ID NO: 11471 - DNA, 80 bp, synthetic construct
  source 1..80: mol_type = other DNA
actgagtcacacaagtgccctttctcaaggctaccatcctgcttctctgtgcagtaagtgttttatgcatatttcccatt

SEQ ID NO: 11472 - DNA, 80 bp, synthetic construct
  source 1..80: mol_type = other DNA
gtagagaggcagcacaaattaagagattaagattttgtgactgagctattccaaagtaacttaaacataaaacacacatg

SEQ ID NO: 11473 - DNA, 80 bp, synthetic construct
  source 1..80: mol_type = other DNA
tatctatagtataaaatatgaagacagagtagaatggggtaatgcaggagagcatgacagagatgacaggacctcaaggt

SEQ ID NO: 11474 - DNA, 80 bp, synthetic construct
  source 1..80: mol_type = other DNA
acctgcataccagggcaggccctgcacgctgtgggttctgccctccaccagcagctcactgttcctcccctcccagctct

SEQ ID NO: 11475 - DNA, 80 bp, synthetic construct
  source 1..80: mol_type = other DNA
tttcctggacaccccagactctcactgtcccctgcactgcctctgtctttgcagaaactcaaaactttctgcttgctctt

SEQ ID NO: 11476 - DNA, 80 bp, synthetic construct
  source 1..80: mol_type = other DNA
acttaagggtgtaaaaaataacctacatgtgatggttcattttcaattctatgtgccttagtataggtttaagcaggcca

SEQ ID NO: 11477 - DNA, 80 bp, synthetic construct
  source 1..80: mol_type = other DNA
agcaaactgtccctgagggagcctgatgatgcctaaagaatgaatgagattactctaggtatggccaagtaggagttata

SEQ ID NO: 11478 - DNA, 80 bp, synthetic construct
  source 1..80: mol_type = other DNA
ttgctgacacccacagaaaacacccaagtctgaagtggcactgaactaccaaacagacaaatggcagttagccagccttc

SEQ ID NO: 11479 - DNA, 80 bp, synthetic construct
  source 1..80: mol_type = other DNA
tgggtccccttgccccattgtaagtgtgagcagaatcatccagcaatttagcctgagaggatttgatttccaagaaccca

SEQ ID NO: 11480 - DNA, 80 bp, synthetic construct
  source 1..80: mol_type = other DNA
tccccttccccttccttcttttcttctttcactccttcttctcttcctccttctttccctcccttcctccattttttcct

SEQ ID NO: 11481 - DNA, 80 bp, synthetic construct
  source 1..80: mol_type = other DNA
tattattatctagtatggttaaaggccatataacatatcatccaatcatcccactcctaatcatacactctgcgggcttt

SEQ ID NO: 11482 - DNA, 80 bp, synthetic construct
  source 1..80: mol_type = other DNA
tttgatccttggctcactggcatctctgtagattttcatgtatacaatcttcaatctgatgtgcaaggtaattccatctt

SEQ ID NO: 11483 - DNA, 80 bp, synthetic construct
  source 1..80: mol_type = other DNA
aactgttttcccctcaacacctaaggctctgtgatgtctcaaacttttagtcattaatttaaaaagtgaagcttatcata

SEQ ID NO: 11484 - DNA, 80 bp, synthetic construct
  source 1..80: mol_type = other DNA
ttgcagagaaataggaaggcttttacactgttggtggaaatgtaaattggttcaaccattgtggaagacagtgtggcaat

SEQ ID NO: 11485 - DNA, 80 bp, synthetic construct
  source 1..80: mol_type = other DNA
gatgattcccccaagctgtggaagtcagcggttgaacctatttttcctaatgctcccctcagcactgccctcccataata

SEQ ID NO: 11486 - DNA, 80 bp, synthetic construct
  source 1..80: mol_type = other DNA
aagagaggatgtattattacacattaatttgcatttgctctaaatttatcatcatcatattactatttttgagacagggt

SEQ ID NO: 11487 - DNA, 80 bp, synthetic construct
  source 1..80: mol_type = other DNA
gacctcagtcttacaactgccagaaactgcattctgccacctctgtataagcctgaaggaggattcaaaatgaaaacaca

SEQ ID NO: 11488 - DNA, 80 bp, synthetic construct
  source 1..80: mol_type = other DNA
gaggagcaggaggtgaggaaaaggagcagaggaaagaattccaaagcagcagaactcttaggtttaaacacattgtttta

SEQ ID NO: 11489 - DNA, 80 bp, synthetic construct
  source 1..80: mol_type = other DNA
ttctccctggtttctcagacagctcctgggccaagactcagggagacactgagacagaacgcttggcacaagagtagcgg

SEQ ID NO: 11490 - DNA, 80 bp, synthetic construct
  source 1..80: mol_type = other DNA
ccaaggcgcctttaccaaaatccccgcgggtgggtccgggcgagggcgaggctcggtgggcggggctgaccgagggggtg

SEQ ID NO: 11491 - DNA, 80 bp, synthetic construct
  source 1..80: mol_type = other DNA
gagagatgcaaagtgcttgaattttctgactcttcctttcagacccccccaagacacacgtgacccaccaccctgtcttt

SEQ ID NO: 11492 - DNA, 80 bp, synthetic construct
  source 1..80: mol_type = other DNA
tgccacctttctggcctctcacaggacattttcttcccacagattgaaaaggagggagctactctcaggctgcaagtaag

SEQ ID NO: 11493 - DNA, 80 bp, synthetic construct
  source 1..80: mol_type = other DNA
gtgatcacatagacttggatatcacctaggatggtccctacacgtagaagttcctgtgttatcagaagaaaaattttcag

SEQ ID NO: 11494 - DNA, 80 bp, synthetic construct
  source 1..80: mol_type = other DNA
atgtggcccaggacagctttagaatgtgacgatttttttgcttatctgtagtggcagatatcatgaaaattatccatgca

SEQ ID NO: 11495 - DNA, 80 bp, synthetic construct
  source 1..80: mol_type = other DNA
acagtattggactgagtgagcagaagggtggagctgctgtcaatggagatggggagactctggcaggagcatacagagga

SEQ ID NO: 11496 - DNA, 80 bp, synthetic construct
  source 1..80: mol_type = other DNA
atgtctcattttctcatttgctgtggtgtgaacaaggaaacaatatcataccatgtatttgacttgcagcaggtacacaa

SEQ ID NO: 11497 - DNA, 80 bp, synthetic construct
  source 1..80: mol_type = other DNA
gtacctgccagatgcccagcacccaccatgtgaggagtgaaaatgccccaggactaaaggacaagatgacgttccacccc

SEQ ID NO: 11498 - DNA, 80 bp, synthetic construct
  source 1..80: mol_type = other DNA
agctatcaccccactctgtggctctcttatgcaataagcataagagattgtgggccaacagaatttgtagcaagataaac

SEQ ID NO: 11499 - DNA, 80 bp, synthetic construct
  source 1..80: mol_type = other DNA
attctccagagaagatacacagtaaggacataaaaataaggaattccaataaggacatgaaaatatgctcagcttcacta

SEQ ID NO: 11500 - DNA, 80 bp, synthetic construct
  source 1..80: mol_type = other DNA
cttcttaggcacaaggaaaccccagtttcccaccatttcctatgcactccttatcacagggtcccctctggccactttgg

SEQ ID NO: 11501 - DNA, 80 bp, synthetic construct
  source 1..80: mol_type = other DNA
cagtccacccactcacatcccttccagaaaaactctcacagacactggtttaatacttacaatttgagtagtctataatt

SEQ ID NO: 11502 - DNA, 80 bp, synthetic construct
  source 1..80: mol_type = other DNA
tagaaaacaaaagaatggaagtcagcatcactgcagaagatagctccagggatgaccattcacactgcagtccaggaagt

SEQ ID NO: 11503 - DNA, 80 bp, synthetic construct
  source 1..80: mol_type = other DNA
aaccctggaagcttcacacttgtaatgttccatgtccagcggcattcagttgatggatgggccaagataagaatacagct

SEQ ID NO: 11504 - DNA, 80 bp, synthetic construct
  source 1..80: mol_type = other DNA
gtcagctttttttaacctgtgaatgtcgtgatttctccatcatttctgaaggagagttttgcagacatacaattcttggt

SEQ ID NO: 11505 - DNA, 80 bp, synthetic construct
  source 1..80: mol_type = other DNA
ctttgaaaatcatgttttctaaactatttttgtatagactgtattctttattgtgtgtcatcactgaagtctctattctg

SEQ ID NO: 11506 - DNA, 80 bp, synthetic construct
  source 1..80: mol_type = other DNA
acaaagctctgctcctgagttccagttgatttttctggacttgctaggttgcaataaacctttgatgatttttcagggtt

SEQ ID NO: 11507 - DNA, 80 bp, synthetic construct
  source 1..80: mol_type = other DNA
ctttctttctctcttttgttcttacatatttctctgttcttgtagatattttgaaattgggtattatggagacagtgcaa

SEQ ID NO: 11508 - DNA, 80 bp, synthetic construct
  source 1..80: mol_type = other DNA
atattttaagataacctctttctggaatgcctctttccatttactcacttctcttcttctaggaatttaattagagaaga

SEQ ID NO: 11509 - DNA, 80 bp, synthetic construct
  source 1..80: mol_type = other DNA
aaaataaaaatttactattgaactgggtcaattgatggggcttctaggtcagctgacaaacttctctctctttctgatgg

SEQ ID NO: 11510 - DNA, 80 bp, synthetic construct
  source 1..80: mol_type = other DNA
gatgacaccattcctcctgtaacatggtccaatctcacgcttgttctgctttacaagaaagttgacccacgctggtgtcc

SEQ ID NO: 11511 - DNA, 80 bp, synthetic construct
  source 1..80: mol_type = other DNA
aaacattaattccactgaaatgagggaggctgtaaaaaagaaaaacattgcatacccgtattcacagcaacattactcac

SEQ ID NO: 11512 - DNA, 80 bp, synthetic construct
  source 1..80: mol_type = other DNA
gtattaacttgaggaagaacaaatactacgaagcaagtgaaaagtagtcaagttgacatatgagaagatgagtcacggaa

SEQ ID NO: 11513 - DNA, 80 bp, synthetic construct
  source 1..80: mol_type = other DNA
ggactctccctagaaaggcagagaagactctcatttttctcagaaagtcctgcacaaatatttactctttccattatgtg

SEQ ID NO: 11514 - DNA, 80 bp, synthetic construct
  source 1..80: mol_type = other DNA
tttgtgctatgtcaacgcatctagacagagctctcattctcccttgaacctcaactctatccgttcccagacacttgaaa

SEQ ID NO: 11515 - DNA, 80 bp, synthetic construct
  source 1..80: mol_type = other DNA
ccaggaccaaaggacaagacctgggaaaaacccagtgccctcccctcctctcaagcctggccagctctgacagcaggagg

SEQ ID NO: 11516 - DNA, 80 bp, synthetic construct
  source 1..80: mol_type = other DNA
acaccacaggtgagagcaggagcgaccacagacctgcactgcccctgctgtgggtgcctcctggacagggccctcttgct

SEQ ID NO: 11517 - DNA, 80 bp, synthetic construct
  source 1..80: mol_type = other DNA
atttgtgtgaacattgatccatctcatagaccatgttaacggaaaaagcaagcaaatgcataacaaaatcagcaagaaac

SEQ ID NO: 11518 - DNA, 80 bp, synthetic construct
  source 1..80: mol_type = other DNA
tctgaacattctgctttaggtccagcactagagaaagaggactcatctttatttagcaccttccacaatctgtagagaaa

SEQ ID NO: 11519 - DNA, 80 bp, synthetic construct
  source 1..80: mol_type = other DNA
aagcttatagcctctcctccaagatctggaagaaggctaagactcccactttcatcacttttattctacacagcactaga

SEQ ID NO: 11520 - DNA, 80 bp, synthetic construct
  source 1..80: mol_type = other DNA
ttaaaaaatgaaacacataaatttcatgcacataaattgggagaatattgttaaaatgttcatactacccaaagcaattt

SEQ ID NO: 11521 - DNA, 80 bp, synthetic construct
  source 1..80: mol_type = other DNA
tactaataggaaataaaaaataatggatagtggtgagcatgtggagaaatgggaactgttgtacactcttgggaaagtaa

SEQ ID NO: 11522 - DNA, 80 bp, synthetic construct
  source 1..80: mol_type = other DNA
aaaacaaaacaaaacaaaaaagagtgaatttaaaatgttctcaacagaaagaaatgataaatgcttgaggtcatggatac

SEQ ID NO: 11523 - DNA, 80 bp, synthetic construct
  source 1..80: mol_type = other DNA
acctgagatttcaaaagatagagtgaggcaattgaaaatagatgatatagggtcatttccaagcctctgagtgtcccctg

SEQ ID NO: 11524 - DNA, 80 bp, synthetic construct
  source 1..80: mol_type = other DNA
agttgagattttattttatacttaggtgcctctgagtcattagagttttttgcctgactccactctggccccatttcaat

SEQ ID NO: 11525 - DNA, 80 bp, synthetic construct
  source 1..80: mol_type = other DNA
acttttcaaatatgtattttcctcccatttttctagttgtactcaatgggagaagtggtccaaatgacctaatcagcaat

SEQ ID NO: 11526 - DNA, 80 bp, synthetic construct
  source 1..80: mol_type = other DNA
gaattcatttaattgtcacgatacatctatggggtgtgcctgctaattttccgttttcaggtgatacaataggaaagaag

SEQ ID NO: 11527 - DNA, 80 bp, synthetic construct
  source 1..80: mol_type = other DNA
ggactgtggcaggtgaggcaaggagctgtctgagccgctcagcagcctccaggagtcagctctctccaggcctgtcttca

SEQ ID NO: 11528 - DNA, 80 bp, synthetic construct
  source 1..80: mol_type = other DNA
cttctctggtaggtctggggacatggtatcccttataaccttggttcctggcatatgacactggtaccaggctctgttgg

SEQ ID NO: 11529 - DNA, 80 bp, synthetic construct
  source 1..80: mol_type = other DNA
gctttaagttataaactccaaaatgaactaactcccaataatttacagtagggagctctaagccacaaataaaggtgtca

SEQ ID NO: 11530 - DNA, 80 bp, synthetic construct
  source 1..80: mol_type = other DNA
atgtaatgaagattaaggaccttaaaatagggagattctgctggaatctctgtgtgggcccaatcaaatcacaagagcta

SEQ ID NO: 11531 - DNA, 80 bp, synthetic construct
  source 1..80: mol_type = other DNA
tatggtaaataatttccatccctcccttccctctcccttgagttgtcacactcacctggcaaaactacacagctggtggg

SEQ ID NO: 11532 - DNA, 80 bp, synthetic construct
  source 1..80: mol_type = other DNA
tctctcacaagtatttcccctaataaatccttacatgtttactactgtattggggtccgcttctcaggggaccctaacta

SEQ ID NO: 11533 - DNA, 80 bp, synthetic construct
  source 1..80: mol_type = other DNA
atcaaacactccaggactttgataagtggaataaacccactgctgggatgtatccacatagtctagaaaaaaacatgccc

SEQ ID NO: 11534 - DNA, 80 bp, synthetic construct
  source 1..80: mol_type = other DNA
ctgagtgcataattgacactgatgcactgctaagtggagtcacccccacaatgggtccctagtctgtggagtaaggactt

SEQ ID NO: 11535 - DNA, 80 bp, synthetic construct
  source 1..80: mol_type = other DNA
gcacactgcctgatgagcctctttcagttctgacaacaccactttccacatctaggtatgttgctttggcccacactcta

SEQ ID NO: 11536 - DNA, 80 bp, synthetic construct
  source 1..80: mol_type = other DNA
ccattatctgcctgaaggacccacttggctgggaaagtttcagtgtttccatggctgtgggttccactaatcctatcacc

SEQ ID NO: 11537 - DNA, 80 bp, synthetic construct
  source 1..80: mol_type = other DNA
taactttaatcccatgatggaacttgctttttggagcatttggactataaaatcattttcatctgcccactagtgacctc

SEQ ID NO: 11538 - DNA, 80 bp, synthetic construct
  source 1..80: mol_type = other DNA
gggctgtaagtaagcattttctgaatctatctgtcaaaagcataatgtcttttatatgagaaacaagtaaacaacaggaa

SEQ ID NO: 11539 - DNA, 80 bp, synthetic construct
  source 1..80: mol_type = other DNA
tgatttgtaaggagataaaagcaagggctgctttgtcacggtgagctacttcttgcaggaatcgggatctgcatctgcag

SEQ ID NO: 11540 - DNA, 80 bp, synthetic construct
  source 1..80: mol_type = other DNA
atctggctcatgataaggtttcaggtatcttgatggtatccaaattggctgttgattttggcctggagaaatacaagcat

SEQ ID NO: 11541 - DNA, 80 bp, synthetic construct
  source 1..80: mol_type = other DNA
aactgctgtttgcaattgggtaaataaagtcatcagttgttcatctgtatgaaattgtgagaattttaaataactgtgtg

SEQ ID NO: 11542 - DNA, 80 bp, synthetic construct
  source 1..80: mol_type = other DNA
aggagctataattaaatcagcatgagaaatcgaattttgcaagtgatcataacattgaagtaatatttctcgagtggggg

SEQ ID NO: 11543 - DNA, 80 bp, synthetic construct
  source 1..80: mol_type = other DNA
aattggccacatggacggccagtgctgtagagaaatgattgaaatgtctgctcctgtatctaccaaacctttacatttct

SEQ ID NO: 11544 - DNA, 80 bp, synthetic construct
  source 1..80: mol_type = other DNA
tgcccagtgtcctccagaaaagaaagatgtggggggtcatcttcatcaaaataataaggagggggtgcagaagggtaggg

SEQ ID NO: 11545 - DNA, 80 bp, synthetic construct
  source 1..80: mol_type = other DNA
gtgctgggcaccctggtagatacttgattataattccttaaacagagttttccaaattaaaatatacctgttttttatag

SEQ ID NO: 11546 - DNA, 80 bp, synthetic construct
  source 1..80: mol_type = other DNA
aagtagacaaagaacttgaacagacacttctaaagaagacatacatgtggccaacaaaaatacgaaaaaaagctcaacat

SEQ ID NO: 11547 - DNA, 80 bp, synthetic construct
  source 1..80: mol_type = other DNA
atatattcaaaacatttgatactgttcccttccagaggtgcatcttaattccctctcctgagtgtggcttggacttaatg

SEQ ID NO: 11548 - DNA, 80 bp, synthetic construct
  source 1..80: mol_type = other DNA
gtcaagggacccactgatctcagcctcctgagtagctgggactaccgtcatgaactactatgcctggctaattttctaat

SEQ ID NO: 11549 - DNA, 80 bp, synthetic construct
  source 1..80: mol_type = other DNA
gagcgagactccatctcaaaaaaataaataaataaaattaaaaatgaaggggctgtgtaggaaagaatgctggtgaggac

SEQ ID NO: 11550 - DNA, 80 bp, synthetic construct
  source 1..80: mol_type = other DNA
tagcagtggatacttcctaaaaacagacagtgcatgagcactagtgaggggcattgcgactacattgaacagttgcaact

SEQ ID NO: 11551 - DNA, 80 bp, synthetic construct
  source 1..80: mol_type = other DNA
cggttctaaagtccccacgcacccaccgggactcagattctccccagacgccgaggatggtgctcatggcgccccgaacc

SEQ ID NO: 11552 - DNA, 80 bp, synthetic construct
  source 1..80: mol_type = other DNA
agcagctgagagcctacctggagggcgagttcgtggagtggctccgcagatacctggagaacgggaaggagacgctgcag

SEQ ID NO: 11553 - DNA, 80 bp, synthetic construct
  source 1..80: mol_type = other DNA
gatgggggtgtcatgtctcttagggaaagccggagcctctctggagagctttagcagggtcagggtccctcaccttcccc

SEQ ID NO: 11554 - DNA, 80 bp, synthetic construct
  source 1..80: mol_type = other DNA
gagcatgcgatgggctgccaaagtgtcatccattactgggacagatatgaatttgttcatgaatattttttctatagtgt

SEQ ID NO: 11555 - DNA, 80 bp, synthetic construct
  source 1..80: mol_type = other DNA
ctccaatccaaactcatggatttacaaagcagagtctaatttagattcatacgtggttggaaaattgtacccataagcct

SEQ ID NO: 11556 - DNA, 80 bp, synthetic construct
  source 1..80: mol_type = other DNA
tccacatgcataattggccttgatgcactggcaaagagggtcacccccacactacatccctagtctggagagtaagggct

SEQ ID NO: 11557 - DNA, 80 bp, synthetic construct
  source 1..80: mol_type = other DNA
caagtgagctgagatcccgcccctacactccagcctgagcaacaagagtgaaactccatctcaaaaagaaaaaaaaaaaa

SEQ ID NO: 11558 - DNA, 80 bp, synthetic construct
  source 1..80: mol_type = other DNA
gggcgtgttggtgcgtgtctgtaatccaagctactcagaaggctgatgcaggagaatcgtttgaacctggaaggcagaag

SEQ ID NO: 11559 - DNA, 80 bp, synthetic construct
  source 1..80: mol_type = other DNA
gacggggtggccaggcagaggtgccccccacctcctggacggggtggctggccgggcgggggctgccccccacctccctc

SEQ ID NO: 11560 - DNA, 80 bp, synthetic construct
  source 1..80: mol_type = other DNA
aggccaccctgaggtgctgggtcccgggcttctaccatgtggaaatcacagtgacccaactgtgggatggggaggaccaa

SEQ ID NO: 11561 - DNA, 80 bp, synthetic construct
  source 1..80: mol_type = other DNA
ccatgggggagcacagccaccccaaaattcctcctttagtcacatcacctgtgggctctgaccagactttgtttttgttc

SEQ ID NO: 11562 - DNA, 80 bp, synthetic construct
  source 1..80: mol_type = other DNA
ccataggcattcaattttctcccatgacagcagctatatgggttatgttcagcaaagccataaatgtggagctgcaaatg

SEQ ID NO: 11563 - DNA, 80 bp, synthetic construct
  source 1..80: mol_type = other DNA
gcagctagccaccgttcttaagatatccaggatccactcagccaagagtcttctcatcagtactctaaagacacttatca

SEQ ID NO: 11564 - DNA, 80 bp, synthetic construct
  source 1..80: mol_type = other DNA
tgaagtgtagtctttattccagcatcctctcctcttcagaagaattgtatgtatcgtcataacagcatcgtcctgatcca

SEQ ID NO: 11565 - DNA, 80 bp, synthetic construct
  source 1..80: mol_type = other DNA
aaggattacactccatgaccaatgggattcatcccaggaacatatggttggattaacatttgaaaatcagttcatggaat

SEQ ID NO: 11566 - DNA, 80 bp, synthetic construct
  source 1..80: mol_type = other DNA
tgaaaccccgtctctactaaaaatacaaaaaattagccgggcgtggtggcaggctcctcgggaggctgaggcagaaaaat

SEQ ID NO: 11567 - DNA, 80 bp, synthetic construct
  source 1..80: mol_type = other DNA
ctttatacaaaaaaaaaaaaaaaaacctcaaaatgaatcacaggctttaatgtaaaacacacagttaaaattacaaacat

SEQ ID NO: 11568 - DNA, 80 bp, synthetic construct
  source 1..80: mol_type = other DNA
ctggaaataatgcaattgtctttcagtgggtgaaggagatctgctggttgaactcataactgagtctacacaagtgccct

SEQ ID NO: 11569 - DNA, 80 bp, synthetic construct
  source 1..80: mol_type = other DNA
tgtgtatgtgtgtgtagagaggcagcaggaatgaagagattaagcttttgtgactgagccattctaaagtaacaaacata

SEQ ID NO: 11570 - DNA, 80 bp, synthetic construct
  source 1..80: mol_type = other DNA
agacctctccttctctcctgaacctcacactctatcccttcccagacacttgaaataaaacacagaccagaaatgtttat

SEQ ID NO: 11571 - DNA, 80 bp, synthetic construct
  source 1..80: mol_type = other DNA
gcctcactttttccttttcatgccttattctcaccatgccacattttcccctcagttgaacagacacagtaggggactag

SEQ ID NO: 11572 - DNA, 80 bp, synthetic construct
  source 1..80: mol_type = other DNA
tgtctgtccccactaataaatgattaactgttagatgagggggaattcctgttcaaggactctggactgtgctgctctgg

SEQ ID NO: 11573 - DNA, 80 bp, synthetic construct
  source 1..80: mol_type = other DNA
aagttgccataagagcctttagcaaccaccctcctgatcagccagcaatcatcaacattgaggcaagaccgtgccccagc

SEQ ID NO: 11574 - DNA, 80 bp, synthetic construct
  source 1..80: mol_type = other DNA
tcagtggaaaaaaaacccagaacttttgcaaaattttaggagagagggatttccctcttgtctcttagtgctacggttat

SEQ ID NO: 11575 - DNA, 80 bp, synthetic construct
  source 1..80: mol_type = other DNA
cccacataggggagtttcccccatggacttgtacccctgggttcagaggtgaggtggggtcctttctcctcactgtggtt

SEQ ID NO: 11576 - DNA, 80 bp, synthetic construct
  source 1..80: mol_type = other DNA
tcatgcccaaggaccccagcccttccatactctcaatttcacacttcccactctctggccatctttccactcatcccatg

SEQ ID NO: 11577 - DNA, 80 bp, synthetic construct
  source 1..80: mol_type = other DNA
aaggctgactgaagctctagggcttcctgccacgcttactgaacttctgttagcctgcacagggtctaggatgcttccag

SEQ ID NO: 11578 - DNA, 80 bp, synthetic construct
  source 1..80: mol_type = other DNA
ctggcacgtccccataggaggctgaggagcacttctgggattggaatttgagggtgtttgatcaaggaaccagaatttca

SEQ ID NO: 11579 - DNA, 80 bp, synthetic construct
  source 1..80: mol_type = other DNA
aacctatagccatttactcaggagattgtacactggcgaaaggaaagatgcagaactggtcagattattgacactgagtg

SEQ ID NO: 11580 - DNA, 80 bp, synthetic construct
  source 1..80: mol_type = other DNA
aaacacacgcactccagtatgtgaagataaaccttacagagcttcaagagtggccactgaagtgaagttttatgggttaa

SEQ ID NO: 11581 - DNA, 80 bp, synthetic construct
  source 1..80: mol_type = other DNA
attttaggcccatgatatgccctagtggggcactatttctttaggtgactagccattaactaagaagttgactacattta

SEQ ID NO: 11582 - DNA, 80 bp, synthetic construct
  source 1..80: mol_type = other DNA
acgaggtcctggtttgcaaaggagggtacccttaaaagcagacaaaagacagcccactgaactacacattaagtgtgtca

SEQ ID NO: 11583 - DNA, 80 bp, synthetic construct
  source 1..80: mol_type = other DNA
agagggtttccagttcccaacgcctattcttttctttattttagtttcttttctcctttgttccttctttttctctttcc

SEQ ID NO: 11584 - DNA, 80 bp, synthetic construct
  source 1..80: mol_type = other DNA
cagcagcccaggggagctttacaggtttgtgttttacaccagtgttgggcatctttttagttacatgattgtaatttgtt

SEQ ID NO: 11585 - DNA, 80 bp, synthetic construct
  source 1..80: mol_type = other DNA
gatatgtcaataagaaaattggcacttggggcatacttccactaaatttgagacatcttagacaaaacaaagacttattt

SEQ ID NO: 11586 - DNA, 80 bp, synthetic construct
  source 1..80: mol_type = other DNA
ctaaaaagaacttaagcaaatttacatgaaaaaaacaacttcattaagaagtggacaaagcacatgaacagacacttctc

SEQ ID NO: 11587 - DNA, 80 bp, synthetic construct
  source 1..80: mol_type = other DNA
aaataatagtttgaattttgcttttaacatatatgcaaatcctttaatactgctcccttccagaggtgcagctgaattcc

SEQ ID NO: 11588 - DNA, 80 bp, synthetic construct
  source 1..80: mol_type = other DNA
aataactaatacattttcacaagagaggatgtattattacatgttaatttgcatttgctctaaatttatcatcatcatta

SEQ ID NO: 11589 - DNA, 80 bp, synthetic construct
  source 1..80: mol_type = other DNA
aggattcaaaatgaaaacacagctttgggaagcccggaacagagattccatccacatcatgcccagatttctgactaagg

SEQ ID NO: 11590 - DNA, 80 bp, synthetic construct
  source 1..80: mol_type = other DNA
ttgttttatagatttttattacatccatctacagagcctcgctcagtgttctttgcagttggcctttaatacctaatgta

SEQ ID NO: 11591 - DNA, 80 bp, synthetic construct
  source 1..80: mol_type = other DNA
ctggtttctcagacagctcttgggccaagactcagggagacattgagacagagcgcttggcacaggaggagcggggtcag

SEQ ID NO: 11592 - DNA, 80 bp, synthetic construct
  source 1..80: mol_type = other DNA
acccgggagaggcccaggcgcctttaccaggtttcattttccgtttaggccaaaatccccgcgggttggtcggggcgggg

SEQ ID NO: 11593 - DNA, 80 bp, synthetic construct
  source 1..80: mol_type = other DNA
gcaaagtgcctgaattttctgacacttcctgttagacctctcccccagacacatatgatccaccattccgtctctgacta

SEQ ID NO: 11594 - DNA, 80 bp, synthetic construct
  source 1..80: mol_type = other DNA
ctgactcctttctggcctctcataggacattttcttcccacagatagagtgagctactctgaagctgcaagtaagtatga

SEQ ID NO: 11595 - DNA, 80 bp, synthetic construct
  source 1..80: mol_type = other DNA
aagagataaagagaaaacagctgggcccgggggaccactgccatcaagatgcggagaccggtagtggccccgaacagctg

SEQ ID NO: 11596 - DNA, 80 bp, synthetic construct
  source 1..80: mol_type = other DNA
aaattttcagatcgttcaagctcttgccgtcttcccagggctctttcctcattgtattttccatcttttctgcaatcttt

SEQ ID NO: 11597 - DNA, 80 bp, synthetic construct
  source 1..80: mol_type = other DNA
ccttttcagtgacctgaaaaagatagagggcacacttactgtgataacccagagtatcagtcaagggggcttgaccttca

SEQ ID NO: 11598 - DNA, 80 bp, synthetic construct
  source 1..80: mol_type = other DNA
cgtctccgcccggcagccacccactccgggagggagttggggggtcagccccccgcccagccagcctccccgtccgggag

SEQ ID NO: 11599 - DNA, 80 bp, synthetic construct
  source 1..80: mol_type = other DNA
ataaaaaaaaaaaaaagaattgaggagcaagcttcacattcagaatccagtggctgaggaagtatccatatccctaagag

SEQ ID NO: 11600 - DNA, 80 bp, synthetic construct
  source 1..80: mol_type = other DNA
taatattagccacacataggtttctagtttctcaacacctattcttttctttattttagtttcttttctcctttgttcca

SEQ ID NO: 11601 - DNA, 80 bp, synthetic construct
  source 1..80: mol_type = other DNA
tttcttgcctatgtgcacaggagacatgcacactaatatttatggcaaaaactggaatcagccacatatacatcaatagg

SEQ ID NO: 11602 - DNA, 80 bp, synthetic construct
  source 1..80: mol_type = other DNA
acaccagtgctgggccccctggtagttacttgattataattccttaaacagagttttccaaattaaaatatacctgtttt

SEQ ID NO: 11603 - DNA, 80 bp, synthetic construct
  source 1..80: mol_type = other DNA
acaaagaacttaagcaaatttacatgaaaaaaaacttcattaaaaagtggacaaagaacatgaacagacacttctaaaga

SEQ ID NO: 11604 - DNA, 80 bp, synthetic construct
  source 1..80: mol_type = other DNA
aacaatagttataattttgcttttaacatatattcaaatcctttgatactgttcctttctagaggtgcagcttaattccc

SEQ ID NO: 11605 - DNA, 80 bp, synthetic construct
  source 1..80: mol_type = other DNA
agatgagaaacatttgttgtttcgagctaagttttacgtaatttgttatgcaacagtaaataatatattttcacaagaga

SEQ ID NO: 11606 - DNA, 80 bp, synthetic construct
  source 1..80: mol_type = other DNA
aaaagaaaaattaaggggctgtgtaggaaagaacgctggtgagcaccgggaattgagcccctcccagttctctacattga

SEQ ID NO: 11607 - DNA, 80 bp, synthetic construct
  source 1..80: mol_type = other DNA
tataggaacacagtggctactttgtattgaggagatgtcgtggactcacacagaaactcagagctaaggaatgatggcaa

SEQ ID NO: 11608 - DNA, 80 bp, synthetic construct
  source 1..80: mol_type = other DNA
gacctgggcgggtgagtgcggggtcgggagggaaaccgcctctgcggggagaagcaaggggccctcctggcgggggcgca

SEQ ID NO: 11609 - DNA, 80 bp, synthetic construct
  source 1..80: mol_type = other DNA
cctgtagatctcccgggctggcctcccacaaggaggggagacaattgggaccaacactagaatatcaccctccctctggt

SEQ ID NO: 11610 - DNA, 80 bp, synthetic construct
  source 1..80: mol_type = other DNA
tcattgctggcctggttctccttggagctgtgatcactggagctgtggtcgctgccgtgatgtggaggaggaagagctca

SEQ ID NO: 11611 - DNA, 80 bp, synthetic construct
  source 1..80: mol_type = other DNA
ctgcccttccctttgtgacttgaagaaccctgactttgtttctgcaaaggcacctgcatgtgtctgtgttcgtgtaggca

SEQ ID NO: 11612 - DNA, 80 bp, synthetic construct
  source 1..80: mol_type = other DNA
ggttattgttcctgaagagaaatatatggttttgtgctgaagtgtgcaggagggttggtgtgggaggagggaggacatac

SEQ ID NO: 11613 - DNA, 80 bp, synthetic construct
  source 1..80: mol_type = other DNA
aaacctagatacattatgccccatggtggaatcaccagttccataaatcctgtcctggttatctccccattctctgagtg

SEQ ID NO: 11614 - DNA, 80 bp, synthetic construct
  source 1..80: mol_type = other DNA
ccacatctaagtttattgctttggctgacactctgggtgatataggaggaggccagctttgagtggggcctggactggaa

SEQ ID NO: 11615 - DNA, 80 bp, synthetic construct
  source 1..80: mol_type = other DNA
agtcaacaacactattggcattcctgatccactggctcagaatttcagtacactatctgcctgggggacacacctgttgg

SEQ ID NO: 11616 - DNA, 80 bp, synthetic construct
  source 1..80: mol_type = other DNA
ccagtgaccggtcacagcaagcacactaaggcaggccattactgggagacatgggactcctctgatggccaaatgtggct

SEQ ID NO: 11617 - DNA, 80 bp, synthetic construct
  source 1..80: mol_type = other DNA
cataagttctttcccattcttggtacaagcacttgggaaatcaaattagccttatcttgtatgattaatgtccatacact

SEQ ID NO: 11618 - DNA, 80 bp, synthetic construct
  source 1..80: mol_type = other DNA
ttcattgcaaggatccttagcaataactacatgagttaaaacaaagccacagccaattgtaaggagccatgtgacagaga

SEQ ID NO: 11619 - DNA, 80 bp, synthetic construct
  source 1..80: mol_type = other DNA
tagtcagatacaagaagtatttgatttacaaaatcctgaaacaataatgttaattgtggtgccagctacttgggaggctg

SEQ ID NO: 11620 - DNA, 80 bp, synthetic construct
  source 1..80: mol_type = other DNA
caagtgactaggaagtgaggcctcctggggccagacaataagaagatgaagcctcttccaacagccacgtgggatattct

SEQ ID NO: 11621 - DNA, 80 bp, synthetic construct
  source 1..80: mol_type = other DNA
accagaaaccgaattctgccaacgagctctatataagcttgggggagaatcccaatcttaagatgaggatacagctttgc

SEQ ID NO: 11622 - DNA, 80 bp, synthetic construct
  source 1..80: mol_type = other DNA
caataaaatatgcacatagcttagatgtgaataattcctaaatataggcaggtgcatgagatggtcattgtggctcatgc

SEQ ID NO: 11623 - DNA, 80 bp, synthetic construct
  source 1..80: mol_type = other DNA
tccgaaaccaggaactgcgctcttggactgcagcggacaaggcggctcagatgccctggcggaggaacaggcagagctgc

SEQ ID NO: 11624 - DNA, 80 bp, synthetic construct
  source 1..80: mol_type = other DNA
tcagcaaggtcagggtttgaggcctgatggtcagggcccctcacgttcccctcctttcttacagctgtcttcccagccca

SEQ ID NO: 11625 - DNA, 80 bp, synthetic construct
  source 1..80: mol_type = other DNA
cagggtgtggtgggctgttcagtgtcacaacttactatgactgatctgaatttgttcatgactattttttttctaagact

SEQ ID NO: 11626 - DNA, 80 bp, synthetic construct
  source 1..80: mol_type = other DNA
ttagggatctgtggaactttgaacatgagggtgatgattaagggtatctgatagaagaaatttctaagcagcatagcatt

SEQ ID NO: 11627 - DNA, 80 bp, synthetic construct
  source 1..80: mol_type = other DNA
aaatgctcaaacatttccagacatcagaatcccaagccacatgaaccttgtttatataaattagtcagtctctgacattt

SEQ ID NO: 11628 - DNA, 80 bp, synthetic construct
  source 1..80: mol_type = other DNA
gtatgtatagtcataacagcatcatcctgatccatcaggtaaaagagaggaagctatctagaggagtcactcttgcagcc

SEQ ID NO: 11629 - DNA, 80 bp, synthetic construct
  source 1..80: mol_type = other DNA
ttctctatgtgaatgataaaaccccatcttcacaagaggagatgggttatgctgtttgttggattagtgaattaagcccc

SEQ ID NO: 11630 - DNA, 80 bp, synthetic construct
  source 1..80: mol_type = other DNA
atatccagaatctacaaagaacttaatttacatgaaaaaaacaaacaactccatcaaaaagtgggcgacggatatgaaaa

SEQ ID NO: 11631 - DNA, 80 bp, synthetic construct
  source 1..80: mol_type = other DNA
aacaagtactgaggttaggaattttaaaaaggaaatgaggccactctcggaagatcccctcagtttagcagaacagctag

SEQ ID NO: 11632 - DNA, 80 bp, synthetic construct
  source 1..80: mol_type = other DNA
aaggtaaaactggggagacaaataatgtaaaaggaaaaaagagtacaagacaaagtgagagaatgctgagaggttggcag

SEQ ID NO: 11633 - DNA, 80 bp, synthetic construct
  source 1..80: mol_type = other DNA
cacggagaggaacggtgcctttgaagcacaaaaaaaaaaaaaaaacaggaagggagggcggagccagaaatgccttttct

SEQ ID NO: 11634 - DNA, 80 bp, synthetic construct
  source 1..80: mol_type = other DNA
aatggaaggtgagtgctccctgatgggagagaaataataaacaaacccataataaaaaatctaatgttggccgggtgcgg

SEQ ID NO: 11635 - DNA, 80 bp, synthetic construct
  source 1..80: mol_type = other DNA
agaaatcttgaaggtataaattaaaaataaatatctcagaaaggaatcccgtgggacggttagcttttaggttagtcacc

SEQ ID NO: 11636 - DNA, 80 bp, synthetic construct
  source 1..80: mol_type = other DNA
atatacacacacacatacacacaaggcttctggaacagtggatgaaagctttgtatatctatctatccatctatctatct

SEQ ID NO: 11637 - DNA, 80 bp, synthetic construct
  source 1..80: mol_type = other DNA
aagcaaaatatactaagccacaatcccctccttcctgctttccctttgacccagtgtccaggagcctactggtcagggcc

SEQ ID NO: 11638 - DNA, 80 bp, synthetic construct
  source 1..80: mol_type = other DNA
agtgctgtgattcctgctgtatcccatggagcagatgaccctctgctcctctccttggggaatcctgcaggccacctctg

SEQ ID NO: 11639 - DNA, 80 bp, synthetic construct
  source 1..80: mol_type = other DNA
agcatcttccttctagaaatttgtgatgttcatagcaaaggtctgagttctggaggactgggatactgtccattcctgag

SEQ ID NO: 11640 - DNA, 80 bp, synthetic construct
  source 1..80: mol_type = other DNA
ccaaggcagggtggctacaggccacctaagggtatagggaggaggccaaggagagaggctgccctgcagtggtgagggag

SEQ ID NO: 11641 - DNA, 80 bp, synthetic construct
  source 1..80: mol_type = other DNA
aagatatttgaacactcatgttcatagcagcataattcccaataaccaaattcatagagacagaaagtagaaccagtggt

SEQ ID NO: 11642 - DNA, 80 bp, synthetic construct
  source 1..80: mol_type = other DNA
actggaggggagggggcatctgcgctgccctgcgccctgcctaaggcccaactttcattagcaccagggctccccttaag

SEQ ID NO: 11643 - DNA, 80 bp, synthetic construct
  source 1..80: mol_type = other DNA
gctgcacatcgcacctgagccccgccgcgaccgcatcgcgctcgctgcgacccattcagaccccccagaaacgccaagcc

SEQ ID NO: 11644 - DNA, 80 bp, synthetic construct
  source 1..80: mol_type = other DNA
ctccttctgctctgagccatcaactacgttttctccctcagcactcgccttagattcctggacttaccagcacaaaggtg

SEQ ID NO: 11645 - DNA, 80 bp, synthetic construct
  source 1..80: mol_type = other DNA
ttcgaggaaaggaagggagagggagaaaaggggagagaaaaggtgaaggtgagaataatatctgaaagatgtagttttat

SEQ ID NO: 11646 - DNA, 80 bp, synthetic construct
  source 1..80: mol_type = other DNA
cactccagcctgggtgacagcaagagatcttgtctcagaaataaataaataaaatttaaaaataaaaataataaacttgg

SEQ ID NO: 11647 - DNA, 80 bp, synthetic construct
  source 1..80: mol_type = other DNA
caccaagtcaatcctaagccaaaagaacaaagctggaggcatcacgttacctgacttcaaactatactacaaggctacaa

SEQ ID NO: 11648 - DNA, 80 bp, synthetic construct
  source 1..80: mol_type = other DNA
atcatcactggccatcagagaaatgcaaatcaaaaccacaatgagataccatctcacaccagttagaatggcaatcatta

SEQ ID NO: 11649 - DNA, 80 bp, synthetic construct
  source 1..80: mol_type = other DNA
atgtaccctaaaacttaaagtataataataataataataataataataataataataataataataaagaccaaaaaaaa

SEQ ID NO: 11650 - DNA, 80 bp, synthetic construct
  source 1..80: mol_type = other DNA
gtgtgtgtgtgcccgtgtgtgtgaatctgtgtgtgagagtgtgtctaaatatgtgtgtgaatgtgtgtgcgactgtgtgt

SEQ ID NO: 11651 - DNA, 80 bp, synthetic construct
  source 1..80: mol_type = other DNA
caattgtgagccaacaaatctatggctagggaaacagtcaactccatttctgcaaatgtttcagatgttccttcttgctg

SEQ ID NO: 11652 - DNA, 80 bp, synthetic construct
  source 1..80: mol_type = other DNA
agggatccacatggctcactcctcatgccattcagttctctgctcaaatgtcccttagtcaagttctcaggaacctctta

SEQ ID NO: 11653 - DNA, 80 bp, synthetic construct
  source 1..80: mol_type = other DNA
ccacatgcacagaaaccaggggtggaaactcagggggcagctgcaaagcacagctccagggccccttttcactgacgtct

SEQ ID NO: 11654 - DNA, 80 bp, synthetic construct
  source 1..80: mol_type = other DNA
aaatgtaggtcttgagacttaaagggcacttggtctcctgagcaggccccctgcatgcgccacacccactaaggctccat

SEQ ID NO: 11655 - DNA, 80 bp, synthetic construct
  source 1..80: mol_type = other DNA
ttttattccaccttcttgtctcctaggtcattgcaggaaatcccttcatttggtaaacatttatcaaacacctaccatgt

SEQ ID NO: 11656 - DNA, 80 bp, synthetic construct
  source 1..80: mol_type = other DNA
cttcacaagtggcccccacacccccaatccttcccaccccttatgaaactgacctacgagtcttgctctgctgtcctggg

SEQ ID NO: 11657 - DNA, 80 bp, synthetic construct
  source 1..80: mol_type = other DNA
gccttttcccttcacattgtatcacaaagaccatcacatgaagaaataccaagagcttagctacatctttgtttgaaatt

SEQ ID NO: 11658 - DNA, 80 bp, synthetic construct
  source 1..80: mol_type = other DNA
ttgatttgctcagtacagtactgactgaaacatgtgcatatcagagctgtgaaaaatcaaggctatctacatatatttct

SEQ ID NO: 11659 - DNA, 80 bp, synthetic construct
  source 1..80: mol_type = other DNA
tcatttgtaacaataaaaaaccgtgaatacccccaaaatgtacaaaaaaattgtgactcagtgatacaatgcaatactac

SEQ ID NO: 11660 - DNA, 80 bp, synthetic construct
  source 1..80: mol_type = other DNA
tattaagctaaaaagcttctgcacagcaaaggaaacatccaacagaatgaagcaataacctgttgaatcgtgaaaatatt

SEQ ID NO: 11661 - DNA, 80 bp, synthetic construct
  source 1..80: mol_type = other DNA
tgacttgattattccacattctgtgtatgtatcaaatgatcacatgtgccccataaacatataaaatgttatgtattacc

SEQ ID NO: 11662 - DNA, 80 bp, synthetic construct
  source 1..80: mol_type = other DNA
cttttcagtttcacacagtgcaaaagttgtggacatagaatcacaaactgtgtttaatttatttgagacattgagtgagc

SEQ ID NO: 11663 - DNA, 80 bp, synthetic construct
  source 1..80: mol_type = other DNA
catgaaacccttagttcctccctattccttactgtgtcttcaatcccatcatgtaggtcatgggcacttaacgcataatg

SEQ ID NO: 11664 - DNA, 80 bp, synthetic construct
  source 1..80: mol_type = other DNA
ttggaacctgtattgcagggtctggctgtaaatgaggaattctacctccctttccctttttctagcccattagcttaagg

SEQ ID NO: 11665 - DNA, 80 bp, synthetic construct
  source 1..80: mol_type = other DNA
tttcttggcactgggtttcttctcacttattcttctgaattggcaaggcaggaattacatcactagtttgcagatgagga

SEQ ID NO: 11666 - DNA, 80 bp, synthetic construct
  source 1..80: mol_type = other DNA
atgagccattaaaagcagagaaactgccctggctggagtcagattctgcagaagaggaaacagaggagaagctggagaga

SEQ ID NO: 11667 - DNA, 80 bp, synthetic construct
  source 1..80: mol_type = other DNA
accctcagcctcctcttggcctgggtgactcctagacaccttctctctgtgctcacacatccaacccttcttccccattc

SEQ ID NO: 11668 - DNA, 80 bp, synthetic construct
  source 1..80: mol_type = other DNA
ctgtggtctcctcagtgctgagctgagaagatgccctggttaggggaagctatggcaggtgaggtgatagaatgccctac

SEQ ID NO: 11669 - DNA, 80 bp, synthetic construct
  source 1..80: mol_type = other DNA
gtataggggtgttgtcctctgcaggctgcaggtgatggtaataaagatggtcccagagttgcatttatccatatccctgg

SEQ ID NO: 11670 - DNA, 80 bp, synthetic construct
  source 1..80: mol_type = other DNA
taggagttataattgcagcttttatgttgtctggttatcactggtagagcaggttaataaagccccgggcacacagtgtg

SEQ ID NO: 11671 - DNA, 80 bp, synthetic construct
  source 1..80: mol_type = other DNA
cacattccacatctagacattttgctttggcccacagtctaggtgacataggaggatgccagcttcaagtggggcctaca

SEQ ID NO: 11672 - DNA, 80 bp, synthetic construct
  source 1..80: mol_type = other DNA
gtttccacggctgtgggttccactaatcctatcaccatctgcactacccaggagctgccagccacaaggaaggctggaca

SEQ ID NO: 11673 - DNA, 80 bp, synthetic construct
  source 1..80: mol_type = other DNA
ggaaacctctcctggatttctgatcattggaaactgtgggagatgaggaatatttgttgttctgagctgctaagttttac

SEQ ID NO: 11674 - DNA, 80 bp, synthetic construct
  source 1..80: mol_type = other DNA
gtgtaggaaacaacactggtgggcaccaggaattgagtacagccctccctgttctctacattgacagccagcaaggaaca

SEQ ID NO: 11675 - DNA, 80 bp, synthetic construct
  source 1..80: mol_type = other DNA
agcagtaggtgaggaaaaggagtagagggatagaattcaaaagcagcacaactcttaggtttgaacactttttttaatgg

SEQ ID NO: 11676 - DNA, 80 bp, synthetic construct
  source 1..80: mol_type = other DNA
gagtttctcttctccctctcccagcctgcgacgggtccttcttcctggacactcacgacgcggacccagttctcactccc

SEQ ID NO: 11677 - DNA, 80 bp, synthetic construct
  source 1..80: mol_type = other DNA
ccgcgggtatgagcagtatgcctacgacggcaaggattacatcgccctgaacgaggacctgcgctcctggaccgccgcgg

SEQ ID NO: 11678 - DNA, 80 bp, synthetic construct
  source 1..80: mol_type = other DNA
accaggcccacaggggatggaaccttccagaagtgggcggttgtggtagtgccttctggagaggaacagagatacacatg

SEQ ID NO: 11679 - DNA, 80 bp, synthetic construct
  source 1..80: mol_type = other DNA
caattcctcctctagccacatctcctgtgggatctgaccaggttctgtttttgttctaccccaggcagccaaagtgccca

SEQ ID NO: 11680 - DNA, 80 bp, synthetic construct
  source 1..80: mol_type = other DNA
catcgaagtccttccggtatgaagagacaaattttcagtcccctgtatcttttgccctccttccaggtctctttcctgga

SEQ ID NO: 11681 - DNA, 80 bp, synthetic construct
  source 1..80: mol_type = other DNA
aggatgtctgggaaagttcttttcaggcaggggaaccttcagtgcagatgcactagggcaggaaattgtctgtgttcctg

SEQ ID NO: 11682 - DNA, 80 bp, synthetic construct
  source 1..80: mol_type = other DNA
aaggcagcaaatgacaatggacagacttaaacccaatgaggtcaataattacattaaacataatggactcagacactcca

SEQ ID NO: 11683 - DNA, 80 bp, synthetic construct
  source 1..80: mol_type = other DNA
agaccactccacaagattctctgtcccaaattgttaatagtgctgctgttgagaaacccgccccagaggtaaatgctgta

SEQ ID NO: 11684 - DNA, 80 bp, synthetic construct
  source 1..80: mol_type = other DNA
agcagaaaattcctatatcatattgtgttcttcttcatcatgaaggtcccctgaagggaccttctcccttcagcagtgca

SEQ ID NO: 11685 - DNA, 80 bp, synthetic construct
  source 1..80: mol_type = other DNA
aagaattaatatccagaatatgtaaagaactacaattcaacaatagcaaaacaatctcattcaaaaataagtaaaagaca

SEQ ID NO: 11686 - DNA, 80 bp, synthetic construct
  source 1..80: mol_type = other DNA
agaatgggcagttatggtttaatgggtacagtttctgtttgggatgatgaaaatgttctggaaatggatattggcggtgg

SEQ ID NO: 11687 - DNA, 80 bp, synthetic construct
  source 1..80: mol_type = other DNA
gtccagcatagggaagcagttcctttagaattttagtcacaattaatggaagggtactgaaacctgctatttcccagttg

SEQ ID NO: 11688 - DNA, 80 bp, synthetic construct
  source 1..80: mol_type = other DNA
ttgagacgaaagtatgcactaacatgtgtatacactgccatgggattgttgcaagctttcccttgtaagagcaaaccaaa

SEQ ID NO: 11689 - DNA, 80 bp, synthetic construct
  source 1..80: mol_type = other DNA
gtgttgttgctgtggcccctgcttaacaagtagaaaacaaattgataaaatgtgtcactcacaccatcaaaatgtcaccc

SEQ ID NO: 11690 - DNA, 80 bp, synthetic construct
  source 1..80: mol_type = other DNA
tgccagcttaattgcacccaactgtacaatgagaacatggggatcagtgtgttctgctacttctctgcttagcattcctg

SEQ ID NO: 11691 - DNA, 80 bp, synthetic construct
  source 1..80: mol_type = other DNA
aacaacatataaagaaacaagttaataccatgagaatgtcattagccaaactcagaatgtggatcattctacaggacaag

SEQ ID NO: 11692 - DNA, 80 bp, synthetic construct
  source 1..80: mol_type = other DNA
ttatgttttttaaaaaccctattctgtgaaagatgcatgctgaactatttaactgtgaaattgtatgtaaaggatttgct

SEQ ID NO: 11693 - DNA, 80 bp, synthetic construct
  source 1..80: mol_type = other DNA
agcactttgggaggccaagagttcaagaccagcctgggcaatgtagtgagaccccatctctaccaaaaaacagaaaaatt

SEQ ID NO: 11694 - DNA, 80 bp, synthetic construct
  source 1..80: mol_type = other DNA
attttttgaagaacaaaaagtggccgcttctacaaaacagaaattttcagattaggagatgtgggacagggaaaaattcc

SEQ ID NO: 11695 - DNA, 80 bp, synthetic construct
  source 1..80: mol_type = other DNA
gtaacctgtggcctaagtcaagtcagaaaatgcttttgactctatatttctcaaaaatgtaagtcttaaaatttggctat

SEQ ID NO: 11696 - DNA, 80 bp, synthetic construct
  source 1..80: mol_type = other DNA
aagcaaataagggtatttagcctatgcatcacatcaaacgtttaccatttctttgtgatggaaacattcaaaatcatatc

SEQ ID NO: 11697 - DNA, 80 bp, synthetic construct
  source 1..80: mol_type = other DNA
catataaaacccaaaaaaagcctgcatagcaaaagcgagactaagcaaaaagaacaaatcttgaggcatcacattacctg

SEQ ID NO: 11698 - DNA, 80 bp, synthetic construct
  source 1..80: mol_type = other DNA
acaaggtggagatttttttagagaactaaaagttgaactaccatttgatccagcaatcccacaatcccacaatgggtatc

SEQ ID NO: 11699 - DNA, 80 bp, synthetic construct
  source 1..80: mol_type = other DNA
ttggtgattttgttaaaaataaattgagtggctgggcacggtggctcacgcctgtaatcccagcactttgggaggctgag

SEQ ID NO: 11700 - DNA, 80 bp, synthetic construct
  source 1..80: mol_type = other DNA
atcatgtttattgatttgtatggaaagtctacagtttttttatgttgattttatattctgtaaatttactaaatttgttt

SEQ ID NO: 11701 - DNA, 80 bp, synthetic construct
  source 1..80: mol_type = other DNA
taatttcttcttggttcattcttggtatattttatgtgtccaggttaaacttcagttgcctttataatctaatgagagct

SEQ ID NO: 11702 - DNA, 80 bp, synthetic construct
  source 1..80: mol_type = other DNA
gtgagttttatctcaacacctgtagaaatgtcatcatgttcaaagtaggcagaaaaaaaaagagagagagagagagaact

SEQ ID NO: 11703 - DNA, 80 bp, synthetic construct
  source 1..80: mol_type = other DNA
ttgatatatcctatggtggtgaaaatggattcaaccaagctgttgggctatctactgaagtcctctccaaagtgaaattt

SEQ ID NO: 11704 - DNA, 80 bp, synthetic construct
  source 1..80: mol_type = other DNA
attggagagaaattaaattgctacattttgcagtgacccatttacatggcattctcagcttagactgcataagaagaaat

SEQ ID NO: 11705 - DNA, 80 bp, synthetic construct
  source 1..80: mol_type = other DNA
ggaaatgctattcacaaggattattttccttcctggaattgactttttaatttccctggaattaataaatgttttatccc

SEQ ID NO: 11706 - DNA, 80 bp, synthetic construct
  source 1..80: mol_type = other DNA
gtttttgggatttcttcttttccacccaccttctaaaatttcattgtgatgtgtcttggtgtgggtctgttttcatctac

SEQ ID NO: 11707 - DNA, 80 bp, synthetic construct
  source 1..80: mol_type = other DNA
accacctgcttaacctctctgagtctccctttccctgtctatacaaagatatcacatatcgggcttctcatgggtttgca

SEQ ID NO: 11708 - DNA, 80 bp, synthetic construct
  source 1..80: mol_type = other DNA
aaaagcagctcttgacttctgacactgacagtaggtttcagtactgttagaagctgtcctactgctcaacactaggccat

SEQ ID NO: 11709 - DNA, 80 bp, synthetic construct
  source 1..80: mol_type = other DNA
gagttcaagaccagcctggccaacatggtgtattcaccaaaaaatacaaaaactagccaggtgtggtggcgtgtgcctgt

SEQ ID NO: 11710 - DNA, 80 bp, synthetic construct
  source 1..80: mol_type = other DNA
tttagaggaagtgattatgtcatgaggtcagaactcccatgaattgaacttgtacccttataaaagagattctagaaagc

SEQ ID NO: 11711 - DNA, 80 bp, synthetic construct
  source 1..80: mol_type = other DNA
gagaaaaatttgggaaaatgaagaggcaaaggggccagtcaagaactctccacagcttacccagaacaggatttctcaaa

SEQ ID NO: 11712 - DNA, 80 bp, synthetic construct
  source 1..80: mol_type = other DNA
cactggaagacataatgtggtgaaattttgtttctttttttaaaagtcatgtattatacaagaagcattcaatgtggaag

SEQ ID NO: 11713 - DNA, 80 bp, synthetic construct
  source 1..80: mol_type = other DNA
ataaaattatcttcagagtcctcactaattcctaagagcatgcagagatctgaaaccaaaacgtttgagaaacgatgacg

SEQ ID NO: 11714 - DNA, 80 bp, synthetic construct
  source 1..80: mol_type = other DNA
tggctgtatgaaatgctagttttacatctggaaactaaaaacaggcaaaaattgctggccttgaggggcacatgttttag

SEQ ID NO: 11715 - DNA, 80 bp, synthetic construct
  source 1..80: mol_type = other DNA
tgaatctcagatgtcagacattcaagtgaggttgttgtgttggcagatggatatgcaagttggaaatgtaggagaaatgt

SEQ ID NO: 11716 - DNA, 80 bp, synthetic construct
  source 1..80: mol_type = other DNA
cacaccacacttactaaaatgtgtgcacagtaccagcttatgtcaccaggctgagtcagaatccagcaagtggttatctg

SEQ ID NO: 11717 - DNA, 80 bp, synthetic construct
  source 1..80: mol_type = other DNA
caccaacctccaaaaacctccacttgttcagctacctggaagctccctgaacccagttctcctgggtttttatggaagct

SEQ ID NO: 11718 - DNA, 80 bp, synthetic construct
  source 1..80: mol_type = other DNA
caattatctcaatagatgcagaaaaaggttttgatcaaattcgatactctttcataatagaaacagtcaacaggtgggca

SEQ ID NO: 11719 - DNA, 80 bp, synthetic construct
  source 1..80: mol_type = other DNA
gcaaggataaaggatataacaccagtatacaaaaatcaattgtatttctaaacccttgcaatgacaaatccagaaatgaa

SEQ ID NO: 11720 - DNA, 80 bp, synthetic construct
  source 1..80: mol_type = other DNA
catacaaaatgatggagtggaccttatggtggttgaagtgtgtactccgaaaggtttgtctaagacctgaccaccagtac

SEQ ID NO: 11721 - DNA, 80 bp, synthetic construct
  source 1..80: mol_type = other DNA
tatatatatatttatgaactcaggttggacaatggattcttagatattatgccaaagcacaaacaaaagatattagataa

SEQ ID NO: 11722 - DNA, 80 bp, synthetic construct
  source 1..80: mol_type = other DNA
ataagtattgttaaggatatgcaggaatgagaaccctcagacactgctggcaggaatgtgtaattatgtagtcactttgg

SEQ ID NO: 11723 - DNA, 80 bp, synthetic construct
  source 1..80: mol_type = other DNA
tcacacacccacaaacacacacacacacacacacacacccttcccagcctctggatactatctttctgctgtttacctcg

SEQ ID NO: 11724 - DNA, 80 bp, synthetic construct
  source 1..80: mol_type = other DNA
gtttcatagtttcggatctatcatttaagcctttaatccatttttggttgattttttaatatggtaagagatatgagcct

SEQ ID NO: 11725 - DNA, 80 bp, synthetic construct
  source 1..80: mol_type = other DNA
ttgaaaaggtggataaaactgaatttggaattggaagatttgttttgggtccccactctgccatttccaaactcagtact

SEQ ID NO: 11726 - DNA, 80 bp, synthetic construct
  source 1..80: mol_type = other DNA
tgttccatttctcagtctgagcaacgggcacctggacatttattattgttcttctaaatatacattttcatttgtgtatt

SEQ ID NO: 11727 - DNA, 80 bp, synthetic construct
  source 1..80: mol_type = other DNA
taaatttaaatgaaattcaattaaacattccattccacagctgcaccagccacattttaaatgcctcaacagccacgtgt

SEQ ID NO: 11728 - DNA, 80 bp, synthetic construct
  source 1..80: mol_type = other DNA
acaattctttattcaccaccattgcccaaccccggtctttccaagtggggaaactaacatttatgaaacaactaatacat

SEQ ID NO: 11729 - DNA, 80 bp, synthetic construct
  source 1..80: mol_type = other DNA
ttattttattataataagactctgctttggcaagccagtagtcaagagaaacagcttgctccctacagagtatttcacac

SEQ ID NO: 11730 - DNA, 80 bp, synthetic construct
  source 1..80: mol_type = other DNA
tttgtgttctgagacgattgtaggttctagttttctagacgattctaggtttctagttttctcttcctgcagtttcttga

SEQ ID NO: 11731 - DNA, 80 bp, synthetic construct
  source 1..80: mol_type = other DNA
ctagcacaatacttaacattagagtctgtgatcccaagttctcaaaattaatgatttgctgattgctgatgatccttgac

SEQ ID NO: 11732 - DNA, 80 bp, synthetic construct
  source 1..80: mol_type = other DNA
ataatgaattaagagttcgataggcggcaggcacaactaaaagccaaactcgacctaagtcttatgaaatcctacttaat

SEQ ID NO: 11733 - DNA, 80 bp, synthetic construct
  source 1..80: mol_type = other DNA
tcgggttatatactcctaggtcctgggacagaatagttacgacctctgggacaggaactcttctctcttttgttaataaa

SEQ ID NO: 11734 - DNA, 80 bp, synthetic construct
  source 1..80: mol_type = other DNA
ctaaacaaatccagtgatttatttttttgtacgaaatggccgtttcccttggtcccatcccttatttctgtgcagttctg

SEQ ID NO: 11735 - DNA, 80 bp, synthetic construct
  source 1..80: mol_type = other DNA
tctgagtaatttcttcaggtccctcttccatgtcactaattctgtcttcagtttatttcaagtattattattttttacta

SEQ ID NO: 11736 - DNA, 80 bp, synthetic construct
  source 1..80: mol_type = other DNA
tgagcagaagttttaagtttttataaggttcagcttatccttttttttttcttttacagctagtgctttctgtgtcctaa

SEQ ID NO: 11737 - DNA, 80 bp, synthetic construct
  source 1..80: mol_type = other DNA
cttgagtctacatatatgtggattttcttctacttctgagacccataagatagcagcacatttaagccctccttttcctc

SEQ ID NO: 11738 - DNA, 80 bp, synthetic construct
  source 1..80: mol_type = other DNA
cctgtagtgcacacatctacaactttttaagctgctcttctaaaaaaacctacttgtcggccttcctggttcttgtttta

SEQ ID NO: 11739 - DNA, 80 bp, synthetic construct
  source 1..80: mol_type = other DNA
agaagcggaggcccaggaggagggggaataaagaaggtggaggatcctggctaccactctgaatccgataccgcttctct

SEQ ID NO: 11740 - DNA, 80 bp, synthetic construct
  source 1..80: mol_type = other DNA
tgctgggacctttcctaggttaggaattgtgtcttctcttatactggtggtataagaacaggaaataatacttattcctc

SEQ ID NO: 11741 - DNA, 80 bp, synthetic construct
  source 1..80: mol_type = other DNA
ccccagcctcctgacccttcccagccccctccagggccaatgcagcactaaatccctctctcctccagcattcctgtgtc

SEQ ID NO: 11742 - DNA, 80 bp, synthetic construct
  source 1..80: mol_type = other DNA
ttttcattttccggtccttttgccatacacagttacagagatcagtcaaatccataccaccactgagatctcatttattg

SEQ ID NO: 11743 - DNA, 80 bp, synthetic construct
  source 1..80: mol_type = other DNA
tgcgctcccccagggggccaggcgcctggaaggcgtaaagcaggtcgagtgagcggccgtcgtagaaggccacgcggccc

SEQ ID NO: 11744 - DNA, 80 bp, synthetic construct
  source 1..80: mol_type = other DNA
tggggaaggttcatctaaagagaaagtcgtactgatactggaacctcaagtaatgggaggggcacagggaggaatccaag

SEQ ID NO: 11745 - DNA, 80 bp, synthetic construct
  source 1..80: mol_type = other DNA
gcagacatcaaaaaggacctgatcactttttagggctaaaaggaagaaaatctaacacagactttcattcaattcccttc

SEQ ID NO: 11746 - DNA, 80 bp, synthetic construct
  source 1..80: mol_type = other DNA
cttacaataaagctgcttcccctcttgcaataaaagcccagtggcatttattgggccctttgctttgtgtctctggaccc

SEQ ID NO: 11747 - DNA, 80 bp, synthetic construct
  source 1..80: mol_type = other DNA
cccttctctgcctccccagtctcttctctccagcccctctcacaaggctcaggcatcggtccagcctcctcccctgtgga

SEQ ID NO: 11748 - DNA, 80 bp, synthetic construct
  source 1..80: mol_type = other DNA
gaggggagaatagcacacctggttcccagagcctaggaggcggtcactagagggcgctctggggcggggtagccctgtgt

SEQ ID NO: 11749 - DNA, 80 bp, synthetic construct
  source 1..80: mol_type = other DNA
tactcatgggggtttgtgcataagtaaacatccagatgtctacaactatgatcacccacactgttatataacatgtgtct

SEQ ID NO: 11750 - DNA, 80 bp, synthetic construct
  source 1..80: mol_type = other DNA
gagaaatgtctctgagactcctcaagaacctcaattgtcaccaatccaagtgccttgctatggccctcatgggcttgtca

SEQ ID NO: 11751 - DNA, 80 bp, synthetic construct
  source 1..80: mol_type = other DNA
accagatggtgaggattcctgctaacaaagcatcagctcaacctttacgtccaggttacaatgagttcatacctaatggt

SEQ ID NO: 11752 - DNA, 80 bp, synthetic construct
  source 1..80: mol_type = other DNA
aggaggaggtgacctgtaaaagaagtgaaggttgtgttgactggaagagaagtgaaaaggcctgaacaaagaatgtgaag

SEQ ID NO: 11753 - DNA, 80 bp, synthetic construct
  source 1..80: mol_type = other DNA
tttctgtccctcctggaaggctccttcctttctctccctttaaatccctgcttagggctaacagtttctctgaaatgttg

SEQ ID NO: 11754 - DNA, 80 bp, synthetic construct
  source 1..80: mol_type = other DNA
tttctctgatggccagtgatggtgagcattttttcatgtgttttttggctgcataaatgtcttcttttgagaagtgtctg

SEQ ID NO: 11755 - DNA, 80 bp, synthetic construct
  source 1..80: mol_type = other DNA
tgtcgtctgcaaacaggaacaatttgacttcctcttttcctaattgaataccctttatttccttctcctgactaattgcc

SEQ ID NO: 11756 - DNA, 80 bp, synthetic construct
  source 1..80: mol_type = other DNA
catttagtgctataaatttccctctacacactgctttgaatgcgtcccagagattctagtatgttgtatctttgttctcg

SEQ ID NO: 11757 - DNA, 80 bp, synthetic construct
  source 1..80: mol_type = other DNA
gtctcaatggtctttacattttggcatgattttgcagcagctggtactggttgttcctttccatgtttagtgcttccttc

SEQ ID NO: 11758 - DNA, 80 bp, synthetic construct
  source 1..80: mol_type = other DNA
attcctttggaggaggagaggagctctgctttttagagtttccagtttttctgctctgttttttccccatctttgtggtt

SEQ ID NO: 11759 - DNA, 80 bp, synthetic construct
  source 1..80: mol_type = other DNA
cctctgtcacccctttctttgactaggaaagggaactccctgaccccttgtgcttcctgagtgaggcaatgcctcgccct

SEQ ID NO: 11760 - DNA, 80 bp, synthetic construct
  source 1..80: mol_type = other DNA
ttaactggaggaggtgtgcactacttttaataggatgttagaaaaagctcctctgagaaggtgaagagagggagccagca

SEQ ID NO: 11761 - DNA, 80 bp, synthetic construct
  source 1..80: mol_type = other DNA
aaaaaaaaaaaaaaaaaaaaaaaagtcaggatgtcctaactggtttattggcttcaaggtcaatcaccataggtcagtag

SEQ ID NO: 11762 - DNA, 80 bp, synthetic construct
  source 1..80: mol_type = other DNA
aagagagaaaactatgccagtaatttaggtgagaaaggatgatggcttgagatagtgggatccagtggagctgaaaatga

SEQ ID NO: 11763 - DNA, 80 bp, synthetic construct
  source 1..80: mol_type = other DNA
gtaatttatacttattcgttcaaaagtacttattaaggacctactatgtgcagatacagtgttgaaagctagggactcag

SEQ ID NO: 11764 - DNA, 80 bp, synthetic construct
  source 1..80: mol_type = other DNA
cctaccaggggttggagttggtgggaaggggctgacttctggacgtgagttactgcattggttgtggagtgtgagagcaa

SEQ ID NO: 11765 - DNA, 80 bp, synthetic construct
  source 1..80: mol_type = other DNA
catccagcccctccctgcgcagaacatggcatctcgtgcccttttatctgccatttctggccacctttgcaagcgtcctt

SEQ ID NO: 11766 - DNA, 80 bp, synthetic construct
  source 1..80: mol_type = other DNA
aaggtacattctcctctataccacagagcacctcttctgtgtgtggcatattacatagaaaaatgagattagacatttag

SEQ ID NO: 11767 - DNA, 80 bp, synthetic construct
  source 1..80: mol_type = other DNA
aaaagtcagtgcagaacattatgtactataaattatgacccatagtaaagaaacacatacaggggaagggttttggtcag

SEQ ID NO: 11768 - DNA, 80 bp, synthetic construct
  source 1..80: mol_type = other DNA
tgtggtggtgggcacctgtaatcccagctacctaagagactgaggcaagagaagcccttgaacccgggaggctgaggttg

SEQ ID NO: 11769 - DNA, 80 bp, synthetic construct
  source 1..80: mol_type = other DNA
tgacctggaaatatatgcctggattggggaggtggacaccttggaaataaactccagacttcctctatttgaaaaatttt

SEQ ID NO: 11770 - DNA, 80 bp, synthetic construct
  source 1..80: mol_type = other DNA
agcatgtttaatgacagttatgttcctggggggtctttggctggaaaacacgggtaacagtgttctttgcttccttctta

SEQ ID NO: 11771 - DNA, 80 bp, synthetic construct
  source 1..80: mol_type = other DNA
ctttggcctgggtaatggaagatggattgggcagaataagtctggaggcagggaaatgagaaaggcagctgtcataatcc

SEQ ID NO: 11772 - DNA, 80 bp, synthetic construct
  source 1..80: mol_type = other DNA
actgatcaacatagcaaaaccctgtccctacaaaaaatacaaaaattagccaggcatggtgctgtgtgcctgtagtccca

SEQ ID NO: 11773 - DNA, 80 bp, synthetic construct
  source 1..80: mol_type = other DNA
gttgaaagacctgagtttgaacattcataccatatttggaatatgggaatgtaaccatacctaatttaagcagttgtgag

SEQ ID NO: 11774 - DNA, 80 bp, synthetic construct
  source 1..80: mol_type = other DNA
agggctgtgagaactgtaaatagggatttgggcagtcccggctgattctgaataaaagtccggaggggcgttactttcgg

SEQ ID NO: 11775 - DNA, 80 bp, synthetic construct
  source 1..80: mol_type = other DNA
ttcgtttccagtcttatcctgttaccaactgtgctgcaatgaacagccttgtgtatagccttttagtgtatttgagcctt

SEQ ID NO: 11776 - DNA, 80 bp, synthetic construct
  source 1..80: mol_type = other DNA
ctttgtggtccccagagaagtcttaggcccggcaccgcctcctcctcctcaaagttaatccctaaatttcacaatgtgtt

SEQ ID NO: 11777 - DNA, 80 bp, synthetic construct
  source 1..80: mol_type = other DNA
tccgtgtagcaccaccgctccccgtgttctctgagctggcttagcttgaaggaacctcacaaaaccaagcccggatcgct

SEQ ID NO: 11778 - DNA, 80 bp, synthetic construct
  source 1..80: mol_type = other DNA
gagcataacaaagatggcctttctaaacaccggtagctccttttgtggagaaatgctggtggaataggatccctaaatcc

SEQ ID NO: 11779 - DNA, 80 bp, synthetic construct
  source 1..80: mol_type = other DNA
gaactcactatcacacagcaaggcactaatttgaaatgcctgggagaagtagaagctgcatttgactctcatattcttat

SEQ ID NO: 11780 - DNA, 80 bp, synthetic construct
  source 1..80: mol_type = other DNA
gacagcctggggctaggtagtgggacaagcgtgggtagcttccctgagagccaccagcccagtcatggggactgctcagg

SEQ ID NO: 11781 - DNA, 80 bp, synthetic construct
  source 1..80: mol_type = other DNA
tagacaaagcagagcagttagtggacaaaagaaaagctcagacaacaaaattaagaataaaacaaaacatgctttcctgt

SEQ ID NO: 11782 - DNA, 80 bp, synthetic construct
  source 1..80: mol_type = other DNA
ttttgcttcactgagttttttctccagttccagaggaacaggggttgggttgagaaactgaaactcttcacttctaggaa

SEQ ID NO: 11783 - DNA, 80 bp, synthetic construct
  source 1..80: mol_type = other DNA
gtgtgtggatgaatcagtaggcaaaatacatttggggtggcccatcatacctgcacaagacgactttgatatcctagaag

SEQ ID NO: 11784 - DNA, 80 bp, synthetic construct
  source 1..80: mol_type = other DNA
agtactttttccattaaacacaactttattgatttggtaagactatattttactttaacaattgacaatttagcatctga

SEQ ID NO: 11785 - DNA, 80 bp, synthetic construct
  source 1..80: mol_type = other DNA
gtgctcagctttaagcgaaattattaatttatggtttaccacttgccttcaaggaactgtctaatacaattccagaaggc

SEQ ID NO: 11786 - DNA, 80 bp, synthetic construct
  source 1..80: mol_type = other DNA
gttgctgagaagggagaaatctggagcctaagtgacctaaatgaccagaacatagttatttatgactaactaggactatg

SEQ ID NO: 11787 - DNA, 80 bp, synthetic construct
  source 1..80: mol_type = other DNA
cagggctgtttcaagactgtaggaagctgtgccaagtctgtaggagccccggagtccactgtggatactgtttctaggaa

SEQ ID NO: 11788 - DNA, 80 bp, synthetic construct
  source 1..80: mol_type = other DNA
gaatatatcaaccagtgttacatacattcccttctgtacattcatgtcctaaccttccctccttgcctcttgtcttaagg

SEQ ID NO: 11789 - DNA, 80 bp, synthetic construct
  source 1..80: mol_type = other DNA
cccctggtttagagacactactaattgttccagctcatccagctaataaatgacagatctcagacttaattccaggtttc

SEQ ID NO: 11790 - DNA, 80 bp, synthetic construct
  source 1..80: mol_type = other DNA
aaaattagccatagaacaggaaatgatgcagagcctcatgcacatgagacagctgtcacacacaagaaagcagacacaga

SEQ ID NO: 11791 - DNA, 80 bp, synthetic construct
  source 1..80: mol_type = other DNA
tgcagagcaataaaaccaattaaccaataaatacttgaaaacagtaatcttgaaaatgcacgctcaactcattggctcat

SEQ ID NO: 11792 - DNA, 80 bp, synthetic construct
  source 1..80: mol_type = other DNA
tgccctccagcctgggcgacagggtgaggctccgtctcaaaaaaataaataaataaataaataaatcctatgtcagggtt

SEQ ID NO: 11793 - DNA, 80 bp, synthetic construct
  source 1..80: mol_type = other DNA
atgtggaaaaatgggactcttcatatgtggctggtttcagtgtgaatgggcactatctttttcaaaagcctcaaggcaaa

SEQ ID NO: 11794 - DNA, 80 bp, synthetic construct
  source 1..80: mol_type = other DNA
caaaggatcagtcatgagattaaaaaccccaacaaaatgtaaagctccctttcttccttagagaaacccattaaaacata

SEQ ID NO: 11795 - DNA, 80 bp, synthetic construct
  source 1..80: mol_type = other DNA
cagccctcaggagatcctgagaacatgtgcctgaggtggttagggcacagcctggtttcatacatacatttttgggagac

SEQ ID NO: 11796 - DNA, 80 bp, synthetic construct
  source 1..80: mol_type = other DNA
tttgggcaagagaaggaaaaaggtcagagtttagtcctcagaggtaaaataagcccatcagagcggacctttgtctaatc

SEQ ID NO: 11797 - DNA, 80 bp, synthetic construct
  source 1..80: mol_type = other DNA
agatcctgaattttagtagaacagctgatgacaactagtttaagacctccacaaaggaactgttttctcaacttgataat

SEQ ID NO: 11798 - DNA, 80 bp, synthetic construct
  source 1..80: mol_type = other DNA
tatctttcattccttaactgtcttttccagttggcctgataccctgtgacccagatttgccaaacagggttgtcagattt

SEQ ID NO: 11799 - DNA, 80 bp, synthetic construct
  source 1..80: mol_type = other DNA
ttttaacccgagtgtttttaaacattgctttttaaaaaataaaaaacttttaaaatattgaaccatttacgggggcttta

SEQ ID NO: 11800 - DNA, 80 bp, synthetic construct
  source 1..80: mol_type = other DNA
ggtagtggtaggtggaatgaatgaagaagggcaaggtggtcacagtcctacttaatctataccttttaatatattatttt

SEQ ID NO: 11801 - DNA, 80 bp, synthetic construct
  source 1..80: mol_type = other DNA
atgcatttgaggcctaggatgctattatcttcttcccagaatgattgtttttgacactagcagtttagagtcactttgaa

SEQ ID NO: 11802 - DNA, 80 bp, synthetic construct
  source 1..80: mol_type = other DNA
ctagcatttggagaccactctcaggggctttggggcgtacgactttcggggctctggtcctctgtttccctatccgtaga

SEQ ID NO: 11803 - DNA, 80 bp, synthetic construct
  source 1..80: mol_type = other DNA
caggtttgtggggcttgaaagcttacacagtgttgtgtcttttcaagaaaaaggatacagccgggcacggtggctcacgc

SEQ ID NO: 11804 - DNA, 80 bp, synthetic construct
  source 1..80: mol_type = other DNA
ttatgtggttaattcttcatcaagtgattgtcaaacaatctaggcatctattctatttaaaatgtatcccttcccttcaa

SEQ ID NO: 11805 - DNA, 80 bp, synthetic construct
  source 1..80: mol_type = other DNA
tttggagttggaagctcataaattcccctattatagggaagtggctgattgtgtaaccctatccttttgttgaaataggt

SEQ ID NO: 11806 - DNA, 80 bp, synthetic construct
  source 1..80: mol_type = other DNA
taggcatttccgttcttaaacattccttcactatttctgcccaagacatttctcactggtaaactttccttgttggttac

SEQ ID NO: 11807 - DNA, 80 bp, synthetic construct
  source 1..80: mol_type = other DNA
aaaaatcaaatggtaataaatgagacggtgatttaggaaagagagatccatgtagaacctgcaggcccctctgacacctt

SEQ ID NO: 11808 - DNA, 80 bp, synthetic construct
  source 1..80: mol_type = other DNA
atttatttttattttttaaaatcagtaatctatgtgtccaaagcataaaccaggcatgggcatagaccagaagccaagct

SEQ ID NO: 11809 - DNA, 80 bp, synthetic construct
  source 1..80: mol_type = other DNA
ttttaatatgctttagagacatttggtatttctttttctatgaaatgtctgctgagatacctctgcccaattttcttctt

SEQ ID NO: 11810 - DNA, 80 bp, synthetic construct
  source 1..80: mol_type = other DNA
ttggtgttaaatgatcatgtacatagtctttgaaatcaccaggatcatggtaatttcacagccagatgaagggcaagttc

SEQ ID NO: 11811 - DNA, 80 bp, synthetic construct
  source 1..80: mol_type = other DNA
gtgccaagactaattatatatatatctcacaagatcacacaacccacagcaaacagtggcaaagtgggattgagggagga

SEQ ID NO: 11812 - DNA, 80 bp, synthetic construct
  source 1..80: mol_type = other DNA
gaaaacagtccaaactcctgccaaactctctctactgatggcaaatcagaggagactcaaattgtaagtttatagtggtc

SEQ ID NO: 11813 - DNA, 80 bp, synthetic construct
  source 1..80: mol_type = other DNA
tggcacctcagagtagctcaacaatggacatctctctttgtttcttctgcttcatcctgttttggacccttgtcttgctt

SEQ ID NO: 11814 - DNA, 80 bp, synthetic construct
  source 1..80: mol_type = other DNA
cttgcatactgccttgattctttgtgctgttctattctgtctatgcttgcctataagccaaggtattttagagattttat

SEQ ID NO: 11815 - DNA, 80 bp, synthetic construct
  source 1..80: mol_type = other DNA
ttttattagttaggaagaaaataaacaagggtctgggatgaacagtaatgggtggcccatgtccatttggtcagtgaggg

SEQ ID NO: 11816 - DNA, 80 bp, synthetic construct
  source 1..80: mol_type = other DNA
tgaaggaaggaggaaggtcaaagatgacttcatgagtttctggtttgagaaactgaatagatgatgtgaaagataataac

SEQ ID NO: 11817 - DNA, 80 bp, synthetic construct
  source 1..80: mol_type = other DNA
caggatggatgtgaaaggtttgaaaagaaacaagatggtgtgatgcagtgtgggagagcgcttacaagagaaactatgta

SEQ ID NO: 11818 - DNA, 80 bp, synthetic construct
  source 1..80: mol_type = other DNA
acgttaattttcctttattctggtatccagttgttcccaaaatatttatataacagtgagtcctttccacatttacgtgt

SEQ ID NO: 11819 - DNA, 80 bp, synthetic construct
  source 1..80: mol_type = other DNA
gcttttcaattctaatgagtgtcttatttatattatatgcacccattaaatacctttatgcaaaaattggtgaaaaagta

SEQ ID NO: 11820 - DNA, 80 bp, synthetic construct
  source 1..80: mol_type = other DNA
ggctggagatctcaggtgactttggagagagaggctttaaaggagtgatgagaaacaaggcggctggctgaggaatgacg

SEQ ID NO: 11821 - DNA, 80 bp, synthetic construct
  source 1..80: mol_type = other DNA
aaggcaattccctccagactggctccatgtgttactgtaaaatagtaagaagtgctagaagactgtcatataacttttgt

SEQ ID NO: 11822 - DNA, 80 bp, synthetic construct
  source 1..80: mol_type = other DNA
gtagatattcagagagtgaggtggaaaggtgaggtgtccctgcctttatgagaatcaaagctgcttctgctatacctgtg

SEQ ID NO: 11823 - DNA, 80 bp, synthetic construct
  source 1..80: mol_type = other DNA
taatctatgaaagatttctttgtttctaggagtgctccacagaaattagaggttatttatccccagttggagaaaggagt

SEQ ID NO: 11824 - DNA, 80 bp, synthetic construct
  source 1..80: mol_type = other DNA
tccagccaacaccttgattatagtcttgtgagtacctaagctgaggacccagtgaagctgtgccaaaatttcccacccac

SEQ ID NO: 11825 - DNA, 80 bp, synthetic construct
  source 1..80: mol_type = other DNA
ggtacctgtggcctgggattgttgtcaaaattaaatacatgctgagtgtctgctaaagtgtctaaaacgtaaacattcaa

SEQ ID NO: 11826 - DNA, 80 bp, synthetic construct
  source 1..80: mol_type = other DNA
aggtttctgagtcaggaatgaagggagaagtggtgtttaatgaaagccagtctggatcgtttgcacaagaaggactggga

SEQ ID NO: 11827 - DNA, 80 bp, synthetic construct
  source 1..80: mol_type = other DNA
aagttctatgtgtgtgattgttatcagcatttttggaatctctagttcttcctacaggaacgagtggtgaccccaccaac

SEQ ID NO: 11828 - DNA, 80 bp, synthetic construct
  source 1..80: mol_type = other DNA
ccctggcttctgatctccacctcttttctacctgctgaggtaaggatgaacaacagaacttctcaattgaattctaagct

SEQ ID NO: 11829 - DNA, 80 bp, synthetic construct
  source 1..80: mol_type = other DNA
ctctttatgtttctctgtcttcccaagagctctttcagatatagagcaggttttttttttctctatattttcaagtcacc

SEQ ID NO: 11830 - DNA, 80 bp, synthetic construct
  source 1..80: mol_type = other DNA
atgccagtgtgggccagaacacaggtggcccggtcaaaacgttgggggttgtctggtgagttctgccatttgtaggagaa

SEQ ID NO: 11831 - DNA, 80 bp, synthetic construct
  source 1..80: mol_type = other DNA
aagcaggggttccttacgttctaaagaggtgattataaacccagatcaaagtcccctttatccagaaagcattcccagat

SEQ ID NO: 11832 - DNA, 80 bp, synthetic construct
  source 1..80: mol_type = other DNA
ataactgtgggtgggtcatttcaaaattggtgtcatcattcattctgtcatggttagtgaggaggtggttggcagagagc

SEQ ID NO: 11833 - DNA, 80 bp, synthetic construct
  source 1..80: mol_type = other DNA
atacctgagaaggcatttgggtatatagaggtttatatgtaaatttgtatccttaagtgagaatgttatatacctgtgtg

SEQ ID NO: 11834 - DNA, 80 bp, synthetic construct
  source 1..80: mol_type = other DNA
ggatacagagatgtgtgagtcagggagacatggcttaggcaagacaaagatgcaagagtcacaggacagcacaggtgggg

SEQ ID NO: 11835 - DNA, 80 bp, synthetic construct
  source 1..80: mol_type = other DNA
ctcttgactggatttcttgaatctcctctctctcttttcttagacatttaagacacttatggatttgttcctggggagaa

SEQ ID NO: 11836 - DNA, 80 bp, synthetic construct
  source 1..80: mol_type = other DNA
tcaaaaaaacataaaacataaacacaattttccatgcctgggtctattgcctgggtgatcatgtaagtaaggagaaagaa

SEQ ID NO: 11837 - DNA, 80 bp, synthetic construct
  source 1..80: mol_type = other DNA
attcttttgggggcaagtgggagactgggtcacagagtggagatgccattccagcctttctgccatatggccagctgtct

SEQ ID NO: 11838 - DNA, 80 bp, synthetic construct
  source 1..80: mol_type = other DNA
ctgtattggacaaactagttcctgggctgcactcgtggcaggaagagcagagattggatgggaaggggaggtaataaagt

SEQ ID NO: 11839 - DNA, 80 bp, synthetic construct
  source 1..80: mol_type = other DNA
agaaggagccaggagtaaagaactggcttacttggccgccactgggaaattctgggtaattcgagacgccctggaatttg

SEQ ID NO: 11840 - DNA, 80 bp, synthetic construct
  source 1..80: mol_type = other DNA
tggaaagaaagctccaatgccgagtgggatcttctgcagattatgggcagggtaaacttgttctcccaggatccagactg

SEQ ID NO: 11841 - DNA, 80 bp, synthetic construct
  source 1..80: mol_type = other DNA
tacgtgccatggtggtttgctgcacccatcaatccatcatctacattaggtatttctcctaatgctatccctcccctagt

SEQ ID NO: 11842 - DNA, 80 bp, synthetic construct
  source 1..80: mol_type = other DNA
tagattcttgaggagttgccacactgtcttccacaacggttgaactaatttacactcccaccaacattgtaaaagcattc

SEQ ID NO: 11843 - DNA, 80 bp, synthetic construct
  source 1..80: mol_type = other DNA
ttcaactggaaatttatctttcaaggcacattgtaaatgttttctgctttccaaaccttcccttaggcctacaggcagag

SEQ ID NO: 11844 - DNA, 80 bp, synthetic construct
  source 1..80: mol_type = other DNA
ggatccctcacgcctctcttttcatgctataaagttatggaggaatcacagtgtgaggatttctggtaccttgaccaagg

SEQ ID NO: 11845 - DNA, 80 bp, synthetic construct
  source 1..80: mol_type = other DNA
atgttaaggggtttagggtcagacagtcttggatttgaatgttggctcttccaattgtgtgacttgagtgagtctcttag

SEQ ID NO: 11846 - DNA, 80 bp, synthetic construct
  source 1..80: mol_type = other DNA
agcctgttctttcattcattcattttttacacacatctctggtttccttcagaattttctaatgctactgtaaaaggaca

SEQ ID NO: 11847 - DNA, 80 bp, synthetic construct
  source 1..80: mol_type = other DNA
ttcccttagtgatctcaatttattcaggggcactattcccagagcatctcctccactccctaaggacaggtgcaggactg

SEQ ID NO: 11848 - DNA, 80 bp, synthetic construct
  source 1..80: mol_type = other DNA
agaagcaaatccttaacagcaccacttgctgattaggtagaagggcggttcagagaagtggcccaatggcaggctgccca

SEQ ID NO: 11849 - DNA, 80 bp, synthetic construct
  source 1..80: mol_type = other DNA
ccaacctaggagccagcgggctttcggggaaaaaaaagaaaaagacatctaaaataaaatgtttaaactgtttcaaaata

SEQ ID NO: 11850 - DNA, 80 bp, synthetic construct
  source 1..80: mol_type = other DNA
tcaggagtttgagcctggccaacatggtgaaaccccatctccactaaatatacaaaaattagctgggtgtggtggcagac

SEQ ID NO: 11851 - DNA, 80 bp, synthetic construct
  source 1..80: mol_type = other DNA
catttccaccacactcagacttctaaaacagacacatcccaatggggctatgtttcatttgctacccattgaattcatgt

SEQ ID NO: 11852 - DNA, 80 bp, synthetic construct
  source 1..80: mol_type = other DNA
tacataggtaaatgtgtgccatagtagtcagctacacagatcatcctatcacccaggaattaagcccagcacccattagc

SEQ ID NO: 11853 - DNA, 80 bp, synthetic construct
  source 1..80: mol_type = other DNA
acaatatggtcattttaatgatgttgatattccttctaatccatgagcataaggtgtttttccatttgtgttgttttgaa

SEQ ID NO: 11854 - DNA, 80 bp, synthetic construct
  source 1..80: mol_type = other DNA
gaaaattccttcctctttgacttgtttgaacagtttcaggaggatcggtattagttctttgtatgtttagtagaattcag

SEQ ID NO: 11855 - DNA, 80 bp, synthetic construct
  source 1..80: mol_type = other DNA
gtgctgggattacaggtgtgagccaccatgcctggccttctatcttaatttgttcattgacccagtggtcattcaggacc

SEQ ID NO: 11856 - DNA, 80 bp, synthetic construct
  source 1..80: mol_type = other DNA
tctgtagaggcaccatttgagtcctttctcttcttcctttgtgtgattgctttactagcgagttttatacttttgtgtgt

SEQ ID NO: 11857 - DNA, 80 bp, synthetic construct
  source 1..80: mol_type = other DNA
tctatttttcttttaaaaaacaatctattgctttattaaatttctcattcatatcctacattattatcttttttctttct

SEQ ID NO: 11858 - DNA, 80 bp, synthetic construct
  source 1..80: mol_type = other DNA
gccaattattgggccttcaggtgacttgctcagatgctagcagtggcagcagtgggccagacatgtgggcaacttctcag

SEQ ID NO: 11859 - DNA, 80 bp, synthetic construct
  source 1..80: mol_type = other DNA
gcgccacatcagtccggcctcaggtcaagacttatgtgataggcattattctgggtacttgggatgcatcagtttttaaa

SEQ ID NO: 11860 - DNA, 80 bp, synthetic construct
  source 1..80: mol_type = other DNA
catcactagagcctaggtgacagagtaagaccatgtctctaaaataataaaaattcagccagttgtggtggctcacacct

SEQ ID NO: 11861 - DNA, 80 bp, synthetic construct
  source 1..80: mol_type = other DNA
gtaggctctttttgagggacttccagaaatgacagcatgtgtgcagagaacagaaagcaaagttacactgttacagaagg

SEQ ID NO: 11862 - DNA, 80 bp, synthetic construct
  source 1..80: mol_type = other DNA
cctgggaagcctcagtggattttgtttattttcagcattgccatgtatgcttaactctgagttggggtggggtaggtctg

SEQ ID NO: 11863 - DNA, 80 bp, synthetic construct
  source 1..80: mol_type = other DNA
ctcctcttcctcctcctcctcttctccctcttcctcctcatccccctcttcttcatcctcagaccagccctccctctcca

SEQ ID NO: 11864 - DNA, 80 bp, synthetic construct
  source 1..80: mol_type = other DNA
ttagaaaagagggcattcaggcattcggcaactcctgaagaccaacctgaagaatatctgcccttgtaacctgtccattt

SEQ ID NO: 11865 - DNA, 80 bp, synthetic construct
  source 1..80: mol_type = other DNA
gatgtggcctctgagttccacaagttcttgcaaagcatcatctgttgtaacacaagcattcagggtctctgtaaactgtt

SEQ ID NO: 11866 - DNA, 80 bp, synthetic construct
  source 1..80: mol_type = other DNA
acagcaatgactcaagtcccgaaaatttatgagcccatttcttgctcgggcagtatcaatttcctgatagggatccatgt

SEQ ID NO: 11867 - DNA, 80 bp, synthetic construct
  source 1..80: mol_type = other DNA
caaaacaaatgtggtcccttttttatggagctgacattccagtggggtcactgcataaaacaacaagaaaacaaacaaaa

SEQ ID NO: 11868 - DNA, 80 bp, synthetic construct
  source 1..80: mol_type = other DNA
aaagatggcctgaactaaggtggtggcagtagggagaaaaagagagaagcaatacattccaggtattttagagacagatt

SEQ ID NO: 11869 - DNA, 80 bp, synthetic construct
  source 1..80: mol_type = other DNA
ggcatatttcctgacatggaagttcctagaacagtagaaagggagagaatcatacaggagaaagaagagtcctctaaagg

SEQ ID NO: 11870 - DNA, 80 bp, synthetic construct
  source 1..80: mol_type = other DNA
aactcaaataagcacacagacaaaatctaccaataccatttttctgcgtatggttggttacccagttttcctagcaccat

SEQ ID NO: 11871 - DNA, 80 bp, synthetic construct
  source 1..80: mol_type = other DNA
ggtctttcacctccttggttaacttcattcccaggtattttattttacttttgtagctattgtaaatggggttgctttct

SEQ ID NO: 11872 - DNA, 80 bp, synthetic construct
  source 1..80: mol_type = other DNA
tcccagctatttgggaggctgaggcaggagaatcgcttgaacccaggagacagaggttgcagaggcaggagaattgcttc

SEQ ID NO: 11873 - DNA, 80 bp, synthetic construct
  source 1..80: mol_type = other DNA
tagagatcctgggtggctctgctgctgacagacagacccagccaccctaaacagtgcaagtgggggaataccatcagaga

SEQ ID NO: 11874 - DNA, 80 bp, synthetic construct
  source 1..80: mol_type = other DNA
tccctgccctccgtgagctcctgctccagcttcgccagctgttccagcaggtgttcctcccgctccctcaggaactgatg

SEQ ID NO: 11875 - DNA, 80 bp, synthetic construct
  source 1..80: mol_type = other DNA
actacagttgtcccttggtatcagtgggtgatgggttccaggatctccctccccaaggataccaaaatccaaggatgctc

SEQ ID NO: 11876 - DNA, 80 bp, synthetic construct
  source 1..80: mol_type = other DNA
caagcagtggcaacaggtggatgctctgggctggggcaggaagggagactcaggctgagtcctctgaggactgcaaggtg

SEQ ID NO: 11877 - DNA, 80 bp, synthetic construct
  source 1..80: mol_type = other DNA
tgggaaactcataatgatacacatataaatctacaatgtctactgtggacacagtgctccttcactcaactgtgcaaagc

SEQ ID NO: 11878 - DNA, 80 bp, synthetic construct
  source 1..80: mol_type = other DNA
gggctgttctatagtttgggtttaatttgcttcccctagaaggctggactctaaacacagccctccagaggagcacagct

SEQ ID NO: 11879 - DNA, 80 bp, synthetic construct
  source 1..80: mol_type = other DNA
atagtgctgataataaattccaactggaagcactaatggatctaggtatgtgtgactttaagagacataatgaggggaaa

SEQ ID NO: 11880 - DNA, 80 bp, synthetic construct
  source 1..80: mol_type = other DNA
aagtagaagagggataacagaattagaaaatcattttgcgactgccattataatagcacaaggatcatcaatagatgcta

SEQ ID NO: 11881 - DNA, 80 bp, synthetic construct
  source 1..80: mol_type = other DNA
atatatttatttatttttgagatggagtttttctcttgttgcccaggctggagtgcaatggcgcaatctggctcactaca

SEQ ID NO: 11882 - DNA, 80 bp, synthetic construct
  source 1..80: mol_type = other DNA
aggtcatctacatggaagggctttgtaagcggagtaatgctgacaaaagaaagggggcatatattctgctgatactgacc

SEQ ID NO: 11883 - DNA, 80 bp, synthetic construct
  source 1..80: mol_type = other DNA
gaaaaaataaaccagaagctagctgcaattctatagaaccaggaagatgcaacaaacaagccctgcaatgtcctggtacc

SEQ ID NO: 11884 - DNA, 80 bp, synthetic construct
  source 1..80: mol_type = other DNA
ttactttccccacggagccgagcatcagtggtgctctgaagcacagtgcaggccacaaaaactaccagggctctgaacgc

SEQ ID NO: 11885 - DNA, 80 bp, synthetic construct
  source 1..80: mol_type = other DNA
gacctgaggaatcctttagaagctgaaatcagatccaactgtgggatcatcaaaccctcaagggtttcctgatttacata

SEQ ID NO: 11886 - DNA, 80 bp, synthetic construct
  source 1..80: mol_type = other DNA
agcaacttacagaaaccaggagaagaaaaagctgtgtctgagaaaatggttgttgtggagtaaattgtaatagtgagaat

SEQ ID NO: 11887 - DNA, 80 bp, synthetic construct
  source 1..80: mol_type = other DNA
actggcaaaatatttttttgatgtggagcataaaataagggcacataaaagatttggtggtgctgtggtttgaacatgtc

SEQ ID NO: 11888 - DNA, 80 bp, synthetic construct
  source 1..80: mol_type = other DNA
tagccccaacttacccatccagccccaaatccctcctcgtcctacctaattctctggccattagatacactgaaccagga

SEQ ID NO: 11889 - DNA, 80 bp, synthetic construct
  source 1..80: mol_type = other DNA
aattctgcttcagcagcaggcttccagggctctctttagattagacattcttgcccacacacattacctagatatctctt

SEQ ID NO: 11890 - DNA, 80 bp, synthetic construct
  source 1..80: mol_type = other DNA
gtctgagaaactcccacagccaagaggagcataaggagacatgacaactaaatgtaatgtggtaacctccatgggatcat

SEQ ID NO: 11891 - DNA, 80 bp, synthetic construct
  source 1..80: mol_type = other DNA
tcctgagcccgcccgggggcctggccccgttttgaacccgggcccggcggctgcgttgggtcgccccaaacccggtgagc

SEQ ID NO: 11892 - DNA, 80 bp, synthetic construct
  source 1..80: mol_type = other DNA
gaggtttccaggaggctcgggcgcgcccccgtccacggccccggaagctgacgtcgccgaagcgtacgccgctgcccagc

SEQ ID NO: 11893 - DNA, 80 bp, synthetic construct
  source 1..80: mol_type = other DNA
ttcacagaccattctgggcagactccagccacaaatccaccaccccacttaaaattctctatcctctcagcacacttaga

SEQ ID NO: 11894 - DNA, 80 bp, synthetic construct
  source 1..80: mol_type = other DNA
tcctgcttcatttaaggttctgaagcagagttgaaattccttcctccagctctccatttctgtggtcataccagatggag

SEQ ID NO: 11895 - DNA, 80 bp, synthetic construct
  source 1..80: mol_type = other DNA
ttgaagtctcagcataaaccttgtgatgggtaaggaaaatatattagtttttttcccctaagtttagtataaacatattg

SEQ ID NO: 11896 - DNA, 80 bp, synthetic construct
  source 1..80: mol_type = other DNA
ctgggattacaggcttgatacaacgcgcccggccgacactgtagcattttctaataggcctacgtaaaaattatctaatt

SEQ ID NO: 11897 - DNA, 80 bp, synthetic construct
  source 1..80: mol_type = other DNA
cccactattagtgatggtagatttgatggaagattcaggtattgtcagcctgatccctccattccccagtttgtgagtta

SEQ ID NO: 11898 - DNA, 80 bp, synthetic construct
  source 1..80: mol_type = other DNA
aggcgtgagccactgcgcctggccagtaacataagtttttaaaaggtttttgcttcaggtactctcctattttcctgctc

SEQ ID NO: 11899 - DNA, 80 bp, synthetic construct
  source 1..80: mol_type = other DNA
agatggtgtctagctatgtcgcccaggcttgtctcaaactcctggcctcaagcaatcctactgcctcaacctcccatagt

SEQ ID NO: 11900 - DNA, 80 bp, synthetic construct
  source 1..80: mol_type = other DNA
accaaaaatacaaaaaccagtcaggcattgcagcgcatgcctgcaatcccaggcactcggcaggtcaaggcaggagaatc

SEQ ID NO: 11901 - DNA, 80 bp, synthetic construct
  source 1..80: mol_type = other DNA
aaggctttattcaggtgttgcaaccgaggagattggagatcagtcttaactctgtctcctcttttcaacagattaaaatt

SEQ ID NO: 11902 - DNA, 80 bp, synthetic construct
  source 1..80: mol_type = other DNA
aaactgactgtgcaccctgagctcagacttcccctacctctagaactatgagaaataagtggttgttatttaagccaccc

SEQ ID NO: 11903 - DNA, 80 bp, synthetic construct
  source 1..80: mol_type = other DNA
tgatatttcagcaaatgcctgaaagaggttagagagccagctttgagaatatctgagagaaatgtgttctaggcaacggg

SEQ ID NO: 11904 - DNA, 80 bp, synthetic construct
  source 1..80: mol_type = other DNA
tcaaatacccaaaaaaaattccctattttcacagcataccatacaactactttctacagagtttccaacattttgcagta

SEQ ID NO: 11905 - DNA, 80 bp, synthetic construct
  source 1..80: mol_type = other DNA
tagagacgggtttcacaatattggccaggcaggtctcgaactcctgaccttgtgatccacccacctcggcctcctgaagt

SEQ ID NO: 11906 - DNA, 80 bp, synthetic construct
  source 1..80: mol_type = other DNA
tttcccaggctgtatagggtatcaagaacttgtaaccacctggcagaatcctgcaggactgcttgtcttgcaaaagactt

SEQ ID NO: 11907 - DNA, 80 bp, synthetic construct
  source 1..80: mol_type = other DNA
ctggtaaaaattcccaaagctttgcttaattctattcaggttgttgaacaaaatttacattagcaacaaataccagggaa

SEQ ID NO: 11908 - DNA, 80 bp, synthetic construct
  source 1..80: mol_type = other DNA
gccatatagtagtttattgtatggatgtactacaatgtgtctattcattcaaatgttgatggaaatttagattgtttcca

SEQ ID NO: 11909 - DNA, 80 bp, synthetic construct
  source 1..80: mol_type = other DNA
tcaacagagcttagaacaaaagatttcagaatcagacctagaaaagaactttggttgtggtcactgatgcatgaaacaaa

SEQ ID NO: 11910 - DNA, 80 bp, synthetic construct
  source 1..80: mol_type = other DNA
gccatgtgactagggtcttgacaaaggaatataagttgtgataaatgaaacagtcacctcacagattaaagagaccttga

SEQ ID NO: 11911 - DNA, 80 bp, synthetic construct
  source 1..80: mol_type = other DNA
taccaactaaacctcagacaaggggagcttgagaaaaactggctttgccaaatatgaaaacattctaaagcctcaataac

SEQ ID NO: 11912 - DNA, 80 bp, synthetic construct
  source 1..80: mol_type = other DNA
ataggagtccagtttgggacaaaccttttggaggacaattaggcaatcaatacctttcaaaattgtttgtgaatacagcc

SEQ ID NO: 11913 - DNA, 80 bp, synthetic construct
  source 1..80: mol_type = other DNA
tttctactttaggtgtgattgacatgcatttgtagatgtgttagtgcagattgcacttcatggcacaaggtcctatttgg

SEQ ID NO: 11914 - DNA, 80 bp, synthetic construct
  source 1..80: mol_type = other DNA
tcagcctagctccccctttaaaaagtctttcatctatttagagtttaacaagtcttttttttttctctttaaaaactatg

SEQ ID NO: 11915 - DNA, 80 bp, synthetic construct
  source 1..80: mol_type = other DNA
ggtttgatttgtttttcaaaatgtaggtgatacctactgtcatgaaaccaattttgcaggttataaccagcatttttaaa

SEQ ID NO: 11916 - DNA, 80 bp, synthetic construct
  source 1..80: mol_type = other DNA
acacaacaaattagccggacaaggtggccggcgcctgtagtcccacctacctgggaggctgaggaaggagaatggcgtga

SEQ ID NO: 11917 - DNA, 80 bp, synthetic construct
  source 1..80: mol_type = other DNA
cttttagccagaaagttctatggtaccttcaggataaggtgcaggttttttgcattactttattgaggtatgattgacat

SEQ ID NO: 11918 - DNA, 80 bp, synthetic construct
  source 1..80: mol_type = other DNA
tatatcttttatggaagtaagtctatcacattgccttgatggtttcatctctgaggttcagatcaagtcttatcagctat

SEQ ID NO: 11919 - DNA, 80 bp, synthetic construct
  source 1..80: mol_type = other DNA
aatctggagttgctgccaggtgtggtggctcatgcctgtaatcccaacactttgggaagccaaggcaggaggatagcttg

SEQ ID NO: 11920 - DNA, 80 bp, synthetic construct
  source 1..80: mol_type = other DNA
gaagattctgaagggatacaaggatagcattcagaattctcaatctatgggagaagatgagattcaggccctggtggtaa

SEQ ID NO: 11921 - DNA, 80 bp, synthetic construct
  source 1..80: mol_type = other DNA
caggcacccatcaccacgcccagctaagtaagatttagattgtcagaaaggagctaaacattccacttggtagggggtgg

SEQ ID NO: 11922 - DNA, 80 bp, synthetic construct
  source 1..80: mol_type = other DNA
gacggctcctgagaactatttttatgacaatgtctgtgttctgtttttttccgggacccaagtgacataatatgcaggta

SEQ ID NO: 11923 - DNA, 80 bp, synthetic construct
  source 1..80: mol_type = other DNA
attagtgttcacatggcatttctttttctgtcctttaattctcaaactttctgtgttttttaaaaatgtctcttataagc

SEQ ID NO: 11924 - DNA, 80 bp, synthetic construct
  source 1..80: mol_type = other DNA
taggtctttttgtttcatagttttcaagtcttgtgataagaaaagtttgctatgtctactttttggactttttttgaggc

SEQ ID NO: 11925 - DNA, 80 bp, synthetic construct
  source 1..80: mol_type = other DNA
tagtaagatcaagatatcagaattctttcattttggatttagttaatacacctttgcctaccattatcttaattttaaat

SEQ ID NO: 11926 - DNA, 80 bp, synthetic construct
  source 1..80: mol_type = other DNA
gttttatcttaattttcatttaatctgatatatatccccaaataattcctttagaggttgtaacagcgaggaaggagcca

SEQ ID NO: 11927 - DNA, 80 bp, synthetic construct
  source 1..80: mol_type = other DNA
aatctaaaaagcagagcgcctctcctcctccaaaggaatgcagttcctcaccagcaacggaacaaacctggacagagaat

SEQ ID NO: 11928 - DNA, 80 bp, synthetic construct
  source 1..80: mol_type = other DNA
cgctgcaaaatcatgccaaaatgtaaagaccatcgagactaggaagaaactgcatcaactaacgagcaaaataaccagct

SEQ ID NO: 11929 - DNA, 80 bp, synthetic construct
  source 1..80: mol_type = other DNA
aaaaattaatgaatccaggagctggttttttgaaaggatcaacaaaattgatagaccgctagcaagactaataaagaaaa

SEQ ID NO: 11930 - DNA, 80 bp, synthetic construct
  source 1..80: mol_type = other DNA
caattgtttcaaagagaaaaaaacacctaggaatccaacttacaagggatgtgaaggacttcttcaaggagaactacaaa

SEQ ID NO: 11931 - DNA, 80 bp, synthetic construct
  source 1..80: mol_type = other DNA
aagcaatggcaacaaaagccaaaattgacaaatgggatctaattaaactgaagagcttctgcacagcaaaagaaactacc

SEQ ID NO: 11932 - DNA, 80 bp, synthetic construct
  source 1..80: mol_type = other DNA
tttggaggtggagccattaggaagtgatcatgcaatgaaggcaaaaccctcattaatgaaatgaatgcccttataaaagg

SEQ ID NO: 11933 - DNA, 80 bp, synthetic construct
  source 1..80: mol_type = other DNA
atatattgattgtagaaattgaatgtgtaatcaaaatccttctcatataggaaactccaggtccagaaggcttcattgat

SEQ ID NO: 11934 - DNA, 80 bp, synthetic construct
  source 1..80: mol_type = other DNA
tctgtcttgttctgagccctccaaactgttccaacctctgcctaatacccagttccaaagtcaattccacattttcgggt

SEQ ID NO: 11935 - DNA, 80 bp, synthetic construct
  source 1..80: mol_type = other DNA
cagatgcttacttcctaagattagcaacaaagcaaagatgtggctctcctcatttttgtttaaaacaccttacgagcatc

SEQ ID NO: 11936 - DNA, 80 bp, synthetic construct
  source 1..80: mol_type = other DNA
tatgattgcatgtccatgaaattctagaaatttcattattacagtaacagaaagcacagcagtggttgagtgaagagaag

SEQ ID NO: 11937 - DNA, 80 bp, synthetic construct
  source 1..80: mol_type = other DNA
agcagtggaggagcctagcagggggttcttgacatgcattcggtatttaatacattttgtgggactgccaaaaactaatg

SEQ ID NO: 11938 - DNA, 80 bp, synthetic construct
  source 1..80: mol_type = other DNA
tctcccaaccttcttcctggatacttgtgacataatcccacttctcactcccattgggtgccgggtttttagagaagcca

SEQ ID NO: 11939 - DNA, 80 bp, synthetic construct
  source 1..80: mol_type = other DNA
gatggcaaggattacatcgccctgaacgaggacctgcactcctggaccgccgcgaacacagcggctcagatctcccagca

SEQ ID NO: 11940 - DNA, 80 bp, synthetic construct
  source 1..80: mol_type = other DNA
cttccagaagtgggtggctgtagtggtgccttccggagaggagcagagatacatgtgccatgtgcagcatgaggggctgc

SEQ ID NO: 11941 - DNA, 80 bp, synthetic construct
  source 1..80: mol_type = other DNA
tgtgggctctgaccagttcctatttttgttctaccccaggcagcaattgtgctcagtactctgatgcatctcatgatact

SEQ ID NO: 11942 - DNA, 80 bp, synthetic construct
  source 1..80: mol_type = other DNA
cagtctatggtctggccctaatattttgtatcattatttttggtttctttgtttctgtagaggactatgcctgttcctgt

SEQ ID NO: 11943 - DNA, 80 bp, synthetic construct
  source 1..80: mol_type = other DNA
tgtcatgagggtatctggaagaagttttttctagggagtaggaaccttcagtgtcagtgtaccagggcaggatcatgtct

SEQ ID NO: 11944 - DNA, 80 bp, synthetic construct
  source 1..80: mol_type = other DNA
tgagatttcctacttatataatgttgctgttggcgctgatgctgctggtcttcagatcccacttttggtagcaagaacac

SEQ ID NO: 11945 - DNA, 80 bp, synthetic construct
  source 1..80: mol_type = other DNA
ggacacagccaaaccacattggacacagaaccaggtttgaagctacacagccaggaacataatccacagccaccctaatt

SEQ ID NO: 11946 - DNA, 80 bp, synthetic construct
  source 1..80: mol_type = other DNA
tgataaccatactgtttttagaagacccagtgacatggtataaatgctcatcttttgcttgactgttactagtctgggat

SEQ ID NO: 11947 - DNA, 80 bp, synthetic construct
  source 1..80: mol_type = other DNA
ggaaaaagctgctcagagcatgaactgtataaagtacaagtggagaaaagtcagtctgattgagaaccagtggaaacaat

SEQ ID NO: 11948 - DNA, 80 bp, synthetic construct
  source 1..80: mol_type = other DNA
attccaggacatccagaatatgcaaagatgaaggcacatagaaaagacagctgatgataaaaagcactgtaagtctgcag

SEQ ID NO: 11949 - DNA, 80 bp, synthetic construct
  source 1..80: mol_type = other DNA
ataaaacatcaaaatcaaacttccaaagatgaaaatgtcagacataaaatacactggatgtgaggtgagattaatggtaa

SEQ ID NO: 11950 - DNA, 80 bp, synthetic construct
  source 1..80: mol_type = other DNA
atggtactggcataaaaacagcacatagaataatggaatagaacagaaagctcagaaataaatccatgcatatacaatta

SEQ ID NO: 11951 - DNA, 80 bp, synthetic construct
  source 1..80: mol_type = other DNA
attaatggatgaataaagacattgtgatacacacacatacacacacacacgaatattattcagacatgaaaaggaaggaa

SEQ ID NO: 11952 - DNA, 80 bp, synthetic construct
  source 1..80: mol_type = other DNA
taaagctagggaaaaataaaatacttagaaataaatgtaataaaagaagtacgaaatttatactacaaaaaaaccgacaa

SEQ ID NO: 11953 - DNA, 80 bp, synthetic construct
  source 1..80: mol_type = other DNA
cagcattatttcctggaaataacctgaatgtctgtcaactgatgaatggattaaacatatgttttactctattttatgct

SEQ ID NO: 11954 - DNA, 80 bp, synthetic construct
  source 1..80: mol_type = other DNA
atgccatgcacaactttgtcaattaaatgttttttaaatatgaaatggccaatggttaaaaaaaattgtgctgatgtaac

SEQ ID NO: 11955 - DNA, 80 bp, synthetic construct
  source 1..80: mol_type = other DNA
ttgtagagagaaagtagattagtggttgcctaggactgaggaaatgttggagggaaaaatggggatgactgcctgagaat

SEQ ID NO: 11956 - DNA, 80 bp, synthetic construct
  source 1..80: mol_type = other DNA
gataaaggggaatgtccagatattttcaggtctattggatacagggtccaatttcacactgatacctggggaaccaaagc

SEQ ID NO: 11957 - DNA, 80 bp, synthetic construct
  source 1..80: mol_type = other DNA
atcaaatagtaggtcttattcttctaaatttttttttaccgattaaacatccccaccttcccttcagccccccactacca

SEQ ID NO: 11958 - DNA, 80 bp, synthetic construct
  source 1..80: mol_type = other DNA
ggggtgagattatatctcattgcagttttgatttgcatttctctgaggatcaataatcatcagcaccttttcatatgcct

SEQ ID NO: 11959 - DNA, 80 bp, synthetic construct
  source 1..80: mol_type = other DNA
ttgatgtgatactatttgtccagttttattttggttgcctgtgcttgtggggtattgctcaagaaatttttggccagact

SEQ ID NO: 11960 - DNA, 80 bp, synthetic construct
  source 1..80: mol_type = other DNA
cattttttttgtgtcctcttcaatttctttcatcaatgttttataattctcctcatagatatcttgcacatttttggtta

SEQ ID NO: 11961 - DNA, 80 bp, synthetic construct
  source 1..80: mol_type = other DNA
caaagtgctgggattagaggcttaagccactgcacccgaccctgatgaatgatctttttaatgtattgttgaatttagtt

SEQ ID NO: 11962 - DNA, 80 bp, synthetic construct
  source 1..80: mol_type = other DNA
ttcaaaaattcctcttgttattagtttctagttgtattccactgtggtcagagaagatgcttgatggtattcaacttttt

SEQ ID NO: 11963 - DNA, 80 bp, synthetic construct
  source 1..80: mol_type = other DNA
aggcaagtctctcccacctgtgagcttacaaaataaaaaaacagttagttacttccaacatacagtgggggtacaggaat

SEQ ID NO: 11964 - DNA, 80 bp, synthetic construct
  source 1..80: mol_type = other DNA
tttttttcttttctacaacatggccaggctgcaaattctccaaacttttacactctgcttcctttttaaatataagttcc

SEQ ID NO: 11965 - DNA, 80 bp, synthetic construct
  source 1..80: mol_type = other DNA
gtatagtgactttatttgtctcatagtttttgtatcaaaatcaatactccttctctttttcctggtttccattggcatgg

SEQ ID NO: 11966 - DNA, 80 bp, synthetic construct
  source 1..80: mol_type = other DNA
tgaaaaatatactgccagatgtattggagctccattgtatgttatctgtttcttttctcttgctgcttttaggatccttt

SEQ ID NO: 11967 - DNA, 80 bp, synthetic construct
  source 1..80: mol_type = other DNA
tggttttgattttgcatttctctaatgatcagtgataattgaggttttctttaacacgctagttggctgtatgtatgtct

SEQ ID NO: 11968 - DNA, 80 bp, synthetic construct
  source 1..80: mol_type = other DNA
ttagctgcattcctgggtattttattcttttttgtggcaattatgaatgggattgtgctcctgatttggctcttggcttg

SEQ ID NO: 11969 - DNA, 80 bp, synthetic construct
  source 1..80: mol_type = other DNA
ctctgccccacccttctgatctcacagcttctccttaggtgacattcacactttagacaaagttgtttggtcccctgatt

SEQ ID NO: 11970 - DNA, 80 bp, synthetic construct
  source 1..80: mol_type = other DNA
tggaaagtctcattttcttcatctactcaaatcatacacatccctcgggttccatgcaaagttccatctcattcatgaaa

SEQ ID NO: 11971 - DNA, 80 bp, synthetic construct
  source 1..80: mol_type = other DNA
actcacagatggcttattattgctagcaatgtaaatattggatgcaaatcatgctcaaaagctgtgtgaatagccaaaag

SEQ ID NO: 11972 - DNA, 80 bp, synthetic construct
  source 1..80: mol_type = other DNA
tgattgcctgtgggggaaaaagaaacttttttggatagaacagtctggatggactctaacacagtaaaaagtgaaggcag

SEQ ID NO: 11973 - DNA, 80 bp, synthetic construct
  source 1..80: mol_type = other DNA
tcatccttggtcacaataaaggagaataaagggaaaaaagtatgattattgtattagattgtggggttgcaggtgagttt

SEQ ID NO: 11974 - DNA, 80 bp, synthetic construct
  source 1..80: mol_type = other DNA
aaataggcatttggagtgtggaagtgggtgcccaccctagtcggggagcatctcaggatgtcctcctcaaggagatgaca

SEQ ID NO: 11975 - DNA, 80 bp, synthetic construct
  source 1..80: mol_type = other DNA
ccacaaggagccctttcaacagggagacatcaggcccaactggattctagccaccttggtctccagtctcctactctcaa

SEQ ID NO: 11976 - DNA, 80 bp, synthetic construct
  source 1..80: mol_type = other DNA
aaaggcaacaaaagccctggatagatagggtttttttaggtgagctataacatctgggcaaataaaaacactatgttatt

SEQ ID NO: 11977 - DNA, 80 bp, synthetic construct
  source 1..80: mol_type = other DNA
ccggtccgtgacaacaaaatctttgtaatctaaagtttgaagcatttcagaggtcagaagggtgtttgctgttacgactc

SEQ ID NO: 11978 - DNA, 80 bp, synthetic construct
  source 1..80: mol_type = other DNA
cccagtccccttctccctgattaaaaatatatttttttattttttttcactattcaacttccattttaggttcaaggggt

SEQ ID NO: 11979 - DNA, 80 bp, synthetic construct
  source 1..80: mol_type = other DNA
cttttttctgcaacctcatcagcatcagttagtttttgacttttttaataatagcctttctgactggtgtaagatggtat

SEQ ID NO: 11980 - DNA, 80 bp, synthetic construct
  source 1..80: mol_type = other DNA
tcccattggtgtaatctgatttctttgggcagtgtcttgtaaaattctcattgcagagattgtttacctctttggctagc

SEQ ID NO: 11981 - DNA, 80 bp, synthetic construct
  source 1..80: mol_type = other DNA
tgtgaatccatctggtccaggactttttctggttagtaggctttttattactgattcaattttggaacttgttattggtc

SEQ ID NO: 11982 - DNA, 80 bp, synthetic construct
  source 1..80: mol_type = other DNA
ttgacctcaagtgatttgcccacctcagccttccaaagtgttgggattacaggtgtgagccactacacctggccggtatt

SEQ ID NO: 11983 - DNA, 80 bp, synthetic construct
  source 1..80: mol_type = other DNA
atgtggtgtcttctccaatattgtccaactagaagatgtgggaatcccaactgatataagaactaagaaatatgactaca

SEQ ID NO: 11984 - DNA, 80 bp, synthetic construct
  source 1..80: mol_type = other DNA
acactttgacagcttccctctctgttcagtcttgagaaaaaaataacactaaataaggaaggtgaagctacagaaagtcc

SEQ ID NO: 11985 - DNA, 80 bp, synthetic construct
  source 1..80: mol_type = other DNA
gaaagtgagtaatggaaacaaaaggatagagatatacaggaagtcctctttcctcacctggagaagaaagaagacagcaa

SEQ ID NO: 11986 - DNA, 80 bp, synthetic construct
  source 1..80: mol_type = other DNA
tttcattttcagcccacagccctcccctgctcagatttcccaccatctaaggcagcaatcctcaaatgctagtgtgcaca

SEQ ID NO: 11987 - DNA, 80 bp, synthetic construct
  source 1..80: mol_type = other DNA
ccaaggacagaaaattgtacctaatgatacagcctagagcgcatgttgttccttttgtctacagtaccttctacctctgg

SEQ ID NO: 11988 - DNA, 80 bp, synthetic construct
  source 1..80: mol_type = other DNA
agatgacaaagttacatcatttgctattcaatattggaaaatacatctcaccccatattgagatcctagtctgggctagc

SEQ ID NO: 11989 - DNA, 80 bp, synthetic construct
  source 1..80: mol_type = other DNA
cagaatgagactcaagtaattacaaggattcatcagaagggaaaagctgacatgaccagaactagaacacagcccaggga

SEQ ID NO: 11990 - DNA, 80 bp, synthetic construct
  source 1..80: mol_type = other DNA
tattgctcaggctggagtacagcgatgcgatctcggctcactgcaatctctgcctcccaggttcaagcaattctcctgcc

SEQ ID NO: 11991 - DNA, 80 bp, synthetic construct
  source 1..80: mol_type = other DNA
agggaagagaaagtgatgttactaaccctccatgtaatgataatctccaaatagctcttcccagcagttccatacttaag

SEQ ID NO: 11992 - DNA, 80 bp, synthetic construct
  source 1..80: mol_type = other DNA
gcaaaaccccatacaaatacaaatacaaaacgttagctgggcatgttggtgcatgcctatagtcctagctacttgggagg

SEQ ID NO: 11993 - DNA, 80 bp, synthetic construct
  source 1..80: mol_type = other DNA
cgtcaggcactattagggaatgaaaaacaaaaccaatctccatgctaaagtagctctccagtgtagcacagttcagatat

SEQ ID NO: 11994 - DNA, 80 bp, synthetic construct
  source 1..80: mol_type = other DNA
acatctggctattgtagtgtcatggaaactctcctctctggtgaagagtatctagagacacccatgagttttattatcta

SEQ ID NO: 11995 - DNA, 80 bp, synthetic construct
  source 1..80: mol_type = other DNA
ggaagaggatcctccagccctgctcacactttcagaactgcagccccagctgatatcgactggaaccacattagactctg

SEQ ID NO: 11996 - DNA, 80 bp, synthetic construct
  source 1..80: mol_type = other DNA
tttctggctgatttggatgcttaatttgcaccaagggaaagcttaatatccctgaaagcagcactcaaccaacggcaaaa

SEQ ID NO: 11997 - DNA, 80 bp, synthetic construct
  source 1..80: mol_type = other DNA
aacttgtatcctaaagatgatatcacatgggcctactgaacactaatcttacgactttttaggaatttagagatgatcac

SEQ ID NO: 11998 - DNA, 80 bp, synthetic construct
  source 1..80: mol_type = other DNA
atgcaaattcttgaattttcacctgagggaggtgttggaggaataaattgttctacgggacaaaatcaggtgcaatatca

SEQ ID NO: 11999 - DNA, 80 bp, synthetic construct
  source 1..80: mol_type = other DNA
tcacagccacaccaagcttctagctactgctcagcacacacttaccacctggtttccctgtgcttctcatttgtaatttt

SEQ ID NO: 12000 - DNA, 80 bp, synthetic construct
  source 1..80: mol_type = other DNA
tcattcgacatgagatttgggaagggacacaaatccatatcacagactgtataaagaacccctccagtccaggcgtagtg

SEQ ID NO: 12001 - DNA, 80 bp, synthetic construct
  source 1..80: mol_type = other DNA
ggacaatatatactatctgatttgtaatcatggaaaatactcagtaaaaatggccaaaattcaaaagtctgaaaatacca

SEQ ID NO: 12002 - DNA, 80 bp, synthetic construct
  source 1..80: mol_type = other DNA
cattacagacgtgagccaccgcacctggctcgcttccattatatttctattggacagcactgctctggagaaaaattaag

SEQ ID NO: 12003 - DNA, 80 bp, synthetic construct
  source 1..80: mol_type = other DNA
tttcccacccacaattttaatgacttttctatcttaaccaagtgcttaacatgcactgtggctgcaacttttccattttg

SEQ ID NO: 12004 - DNA, 80 bp, synthetic construct
  source 1..80: mol_type = other DNA
tcaacttttacaagtaactaaaatttatatacatctctgaaatgccatgccgaaactctttttactatcctaagctcctg

SEQ ID NO: 12005 - DNA, 80 bp, synthetic construct
  source 1..80: mol_type = other DNA
tttgtttataaactaagtttctcccaaagttagttcagcctacgcccaggaatgaacaagaacagcttggagcttagaag

SEQ ID NO: 12006 - DNA, 80 bp, synthetic construct
  source 1..80: mol_type = other DNA
caacatcaaaactcggtgttattccacttttcttgaactgtaatcctttttaaacaaggaatataccttttcttgtttag

SEQ ID NO: 12007 - DNA, 80 bp, synthetic construct
  source 1..80: mol_type = other DNA
tcagcataaaatccccttaatatcagtctctaggcaagcacattcttcacagtccttagaactggacctcctcttgttaa

SEQ ID NO: 12008 - DNA, 80 bp, synthetic construct
  source 1..80: mol_type = other DNA
cggagaaactcaagtcacagccccagaagtggaaagaacaggccttggctctcacccagttaacaagcgtttatccagcg

SEQ ID NO: 12009 - DNA, 80 bp, synthetic construct
  source 1..80: mol_type = other DNA
aagccgcgtcccagcgccccgcgactgcgtcaccggccccccgcacgtaaccacagctgcctccgcccgcctcgggcccg

SEQ ID NO: 12010 - DNA, 80 bp, synthetic construct
  source 1..80: mol_type = other DNA
ggatagttaaatcaacttacccatggctaaaagtatggatgttttaaggatggagtagggggccagccttgtgttttata

SEQ ID NO: 12011 - DNA, 80 bp, synthetic construct
  source 1..80: mol_type = other DNA
tctctttctaacaagagaaagcagaggtaagagacaagatagatcaattgggggttgtgtgtcagtttactaacaagaaa

SEQ ID NO: 12012 - DNA, 80 bp, synthetic construct
  source 1..80: mol_type = other DNA
aaaagagcaatggtgagaagtgccctaaaatttctctctgacttttgcaatacatgtgagtcttatgggtgaatattggt

SEQ ID NO: 12013 - DNA, 80 bp, synthetic construct
  source 1..80: mol_type = other DNA
tgtaggctgctctgaagggtatttgcctatgagggaattaactgtacactatttaatccaccagttccggttcattagaa

SEQ ID NO: 12014 - DNA, 80 bp, synthetic construct
  source 1..80: mol_type = other DNA
ggccaaattgggataagtgagacatagaaaagctacgagaaagagacagaaggaaatcctgaggccatctttagtaagat

SEQ ID NO: 12015 - DNA, 80 bp, synthetic construct
  source 1..80: mol_type = other DNA
gtagctggttatatgcttgcccctatatgtgtcattatcagcaacgccataaatacaaattcagactgagatggatgtgt

SEQ ID NO: 12016 - DNA, 80 bp, synthetic construct
  source 1..80: mol_type = other DNA
ggctgtgttttattgagggcaaatgtgagaatatattttgttcagatgtacactgagaaggcagtggtggaaagtgaagc

SEQ ID NO: 12017 - DNA, 80 bp, synthetic construct
  source 1..80: mol_type = other DNA
atttttttttctttttagttgaaacaaggtctcactatgtttcctaggttggtcttggcctcaagtgatcctctcacctg

SEQ ID NO: 12018 - DNA, 80 bp, synthetic construct
  source 1..80: mol_type = other DNA
gacattctgcagcgactccgagaaaatgctgctcaccttggggacaagcgccgggacctggcccacttggctgccgaggt

SEQ ID NO: 12019 - DNA, 80 bp, synthetic construct
  source 1..80: mol_type = other DNA
ggcatctagaatggtgaatccttaccagaaagccttcaatttactttgcctagatctatcagaaaaatcactatttatag

SEQ ID NO: 12020 - DNA, 80 bp, synthetic construct
  source 1..80: mol_type = other DNA
ccaggcattgacttctctcgaactgtgaaagccctggatagcaccttcttcaatagaaggctgtttgttgacattgaaaa

SEQ ID NO: 12021 - DNA, 80 bp, synthetic construct
  source 1..80: mol_type = other DNA
ccagtagacttgctcaacacaggttgccacaaaccatctatctgaaaaacatacaatgtcaacaaaacacaataaagcga

SEQ ID NO: 12022 - DNA, 80 bp, synthetic construct
  source 1..80: mol_type = other DNA
gacaagcataaaagaaatcattgggaagtgatataaatgaccaagcttcatgatgaccagaagttgaaagtagggattag

SEQ ID NO: 12023 - DNA, 80 bp, synthetic construct
  source 1..80: mol_type = other DNA
cccgacagtactttgccctaaggaaaatccttaaacagctaattggtgagttgttcccaaaaggaaactagaagaaacca

SEQ ID NO: 12024 - DNA, 80 bp, synthetic construct
  source 1..80: mol_type = other DNA
attattatctgtttactttagggtcagggtgagaagtgagccattgctttctccccttccttaggtgacaccatggattg

SEQ ID NO: 12025 - DNA, 80 bp, synthetic construct
  source 1..80: mol_type = other DNA
aaatctgtgagggtctgacttgctcaaaccagaggaggaaacagaaacccctgcacatctttttagggggttctttgacc

SEQ ID NO: 12026 - DNA, 80 bp, synthetic construct
  source 1..80: mol_type = other DNA
tgcatgccaaaccaaactaaaccaatttggattatctgctattcgggtaatcttcacagaaatgactgagagaagaatct

SEQ ID NO: 12027 - DNA, 80 bp, synthetic construct
  source 1..80: mol_type = other DNA
gaaagtgaggatcacctactgtgtgtccagcactgcataacaggaagtgtgtttctttggtaggtggaatagtaggagta

SEQ ID NO: 12028 - DNA, 80 bp, synthetic construct
  source 1..80: mol_type = other DNA
cctcggtgaagaggactctctgtcgaggctgctcttccctcctcgtcccgggcctcacctgcacccagcgccagagacgt

SEQ ID NO: 12029 - DNA, 80 bp, synthetic construct
  source 1..80: mol_type = other DNA
tacagacctgcctaacatgccagcgcagccaacgcttcctcaatgatcccgggcatttactctggggagacaggcctgag

SEQ ID NO: 12030 - DNA, 80 bp, synthetic construct
  source 1..80: mol_type = other DNA
tccctagaaagcctactgaagtacagaattcttagactgacctttttgctaaatgccagctaataaggttataccaaaag

SEQ ID NO: 12031 - DNA, 80 bp, synthetic construct
  source 1..80: mol_type = other DNA
agcattagattcacataggagcatgaaccctactgtgaactgcgcatgcaagggatctgggttgcatgctccttatcata

SEQ ID NO: 12032 - DNA, 80 bp, synthetic construct
  source 1..80: mol_type = other DNA
aatggatttcctagatgaaagatgaaaataaactgaatccctggaatgcagtagctttctcaagtgtttctagaagttca

SEQ ID NO: 12033 - DNA, 80 bp, synthetic construct
  source 1..80: mol_type = other DNA
ttgtttatccattcagccatcaatggacacttccgttatttctgctttttggctattgtgaacagtgctgctatgaacat

SEQ ID NO: 12034 - DNA, 80 bp, synthetic construct
  source 1..80: mol_type = other DNA
aaatcctttccttcttagagcgatcaatgagccctgttgaatggcctatggaagggaaatgaatgttctaaatttcctct

SEQ ID NO: 12035 - DNA, 80 bp, synthetic construct
  source 1..80: mol_type = other DNA
ttttctctttctttgaactgcctattcaaatgtttccccctatttttccactagatttcatggtgttcttttctttttgc

SEQ ID NO: 12036 - DNA, 80 bp, synthetic construct
  source 1..80: mol_type = other DNA
tgggtcattctgaaattacccgtttcagcccagtggaatttaaccagaactgtgggattgaaactgtctcttgaagagga

SEQ ID NO: 12037 - DNA, 80 bp, synthetic construct
  source 1..80: mol_type = other DNA
tacatacagacatataatttattatttagtgatttcttcttaggtgggaaaactttgaaaataaagcaagaaaacatcgc

SEQ ID NO: 12038 - DNA, 80 bp, synthetic construct
  source 1..80: mol_type = other DNA
tgtgcagtgagtgagccaatcatgttttaggaagattaaagctcctgagacagaggactcctaggcagagatggcagcga

SEQ ID NO: 12039 - DNA, 80 bp, synthetic construct
  source 1..80: mol_type = other DNA
atcccgtctttaaaaataagaaaaactaatctgtcattctgccaaataaagatgcctctgggaaatccaactctgagtga

SEQ ID NO: 12040 - DNA, 80 bp, synthetic construct
  source 1..80: mol_type = other DNA
agttacctgagaggctgaggtgggagaatcgcttgaacccgggaggcagagattgcagtgagccgagatggcgccactgc

SEQ ID NO: 12041 - DNA, 80 bp, synthetic construct
  source 1..80: mol_type = other DNA
aatgaagcttgcgtgacactttccgtgaaagcaatagtaccgaactacaaatcaaactgcatcttagccgatctcctgaa

SEQ ID NO: 12042 - DNA, 80 bp, synthetic construct
  source 1..80: mol_type = other DNA
tacttagatacgtcaccctgtagagccttcactgcttcccaatccacccctcactcccacctaatctctgaccaggagta

SEQ ID NO: 12043 - DNA, 80 bp, synthetic construct
  source 1..80: mol_type = other DNA
ccaagccgggagacccacagctcctttccctctggacctctaactgacctgcagcagcgggcttagtactcagctcagca

SEQ ID NO: 12044 - DNA, 80 bp, synthetic construct
  source 1..80: mol_type = other DNA
ttctgctcagatactgttactgtgtatgtttctagaaaacacagccccaaatgtgcatagtcttgaatacaaaagaatca

SEQ ID NO: 12045 - DNA, 80 bp, synthetic construct
  source 1..80: mol_type = other DNA
acatgtatttttataaaagacaaggagagggaatttttaaaaacttttattttaggtttgagggtacacgttgaaggttt

SEQ ID NO: 12046 - DNA, 80 bp, synthetic construct
  source 1..80: mol_type = other DNA
gcagtatgtgtgggcaaaatcagattctatgatgcctggtatggaacttctgtttccttcagggtgacagagggtcatat

SEQ ID NO: 12047 - DNA, 80 bp, synthetic construct
  source 1..80: mol_type = other DNA
acttcccagggtctgcgtttgctgaagtcactgattatgaagtcattttctctgtgggtttgggtgttaggaagaatcca

SEQ ID NO: 12048 - DNA, 80 bp, synthetic construct
  source 1..80: mol_type = other DNA
ttcccattttcctgttcttctcagggtgtttctgggaccttcagtagaaattctcaactccaggttttcagctgtttctg

SEQ ID NO: 12049 - DNA, 80 bp, synthetic construct
  source 1..80: mol_type = other DNA
ataacacccaaattcttaaccaattttcccaaccctgtgtgaacaggaccttgcacacttttccaattttctctctctct

SEQ ID NO: 12050 - DNA, 80 bp, synthetic construct
  source 1..80: mol_type = other DNA
ctaatttgttattgcttaaaaaggaaaaaatggaaagtgagctgatggagaatgaaatatggacagaggaagatgatggg

SEQ ID NO: 12051 - DNA, 80 bp, synthetic construct
  source 1..80: mol_type = other DNA
aaataaaattacccaggtgtggtgacacatgcctgtaatctcagctacttgggaggctgaggcataagaattgcttgaac

SEQ ID NO: 12052 - DNA, 80 bp, synthetic construct
  source 1..80: mol_type = other DNA
cacagcaaagaaaactagcaacagagtaaatagacaacctacccaatgggagaaaagttttgcaaactatgcatctgaca

SEQ ID NO: 12053 - DNA, 80 bp, synthetic construct
  source 1..80: mol_type = other DNA
aaaaaaacataaaggtctagctggatcagtgggcttctaggatccttcttcagtaatactgaggtaaatagcacaaacca

SEQ ID NO: 12054 - DNA, 80 bp, synthetic construct
  source 1..80: mol_type = other DNA
cttttgtcatattaggtgacattttcacaagttccaggggttaggacataggcatcttgggagacctttattttgcctac

SEQ ID NO: 12055 - DNA, 80 bp, synthetic construct
  source 1..80: mol_type = other DNA
cacctactgctatagtcctgccttgattcttcagccattgtcctctttttaccttgtgtatgcttaagccaattctccaa

SEQ ID NO: 12056 - DNA, 80 bp, synthetic construct
  source 1..80: mol_type = other DNA
atgctgtatacctaggaggggatagctgggtcatatgctaacttagtgtttgacattttgaggaagtgctggcctgtttt

SEQ ID NO: 12057 - DNA, 80 bp, synthetic construct
  source 1..80: mol_type = other DNA
ctgtggggtttttttttttcactttcttgatggcatctgtaaacatacaaaagtttttaaatgcgatgacgtccagttta

SEQ ID NO: 12058 - DNA, 80 bp, synthetic construct
  source 1..80: mol_type = other DNA
caatttcatagagaaagcttgagctcatcattttaaaccctaattccatagtattttgcatgcaactgcttctctagtgt

SEQ ID NO: 12059 - DNA, 80 bp, synthetic construct
  source 1..80: mol_type = other DNA
gtaactatttctggccctctcctaggcctacagaatcaatctccggaagcagaacacttcactcttaaaaattcttgggg

SEQ ID NO: 12060 - DNA, 80 bp, synthetic construct
  source 1..80: mol_type = other DNA
atgagttctaaggattcctttcagggcaaaaattgaggctaccccattgcagttgtccagtctttccacaggatggcaaa

SEQ ID NO: 12061 - DNA, 80 bp, synthetic construct
  source 1..80: mol_type = other DNA
gatagcaacaactataataataatagtggctgcatttaaagggcacttgctgtattccaggcattggcttaagtacctac

SEQ ID NO: 12062 - DNA, 80 bp, synthetic construct
  source 1..80: mol_type = other DNA
aaactagcaggtcccaccacctttacaaatggcaatcttactgtggaaaactgcactagtgaaaactctacatatgactt

SEQ ID NO: 12063 - DNA, 80 bp, synthetic construct
  source 1..80: mol_type = other DNA
ttttgacaggttccttggagcctggcccactataaactgaattcacaacttgatgattgccagacaatccaggtagtgag

SEQ ID NO: 12064 - DNA, 80 bp, synthetic construct
  source 1..80: mol_type = other DNA
taccagggctcagtagcaagccaggaactgttatttagtagaagaataaagaataaagcttttcttcgaagccctggaac

SEQ ID NO: 12065 - DNA, 80 bp, synthetic construct
  source 1..80: mol_type = other DNA
caaaagtctcttttaggacagaacttctggtaatggcaacatgaacaggtagatcagcaagtcttcctctaaatagcaat

SEQ ID NO: 12066 - DNA, 80 bp, synthetic construct
  source 1..80: mol_type = other DNA
caaaataatagagcaggggccggatgtggtggctcatgcctgtaatcccagcactttgggaggccgaggcgggtggatca

SEQ ID NO: 12067 - DNA, 80 bp, synthetic construct
  source 1..80: mol_type = other DNA
tagaaaaataatgacagtgctctggatgaggtcaacagaagttttgagatggcagaataaagaatcagtcagtgtccttg

SEQ ID NO: 12068 - DNA, 80 bp, synthetic construct
  source 1..80: mol_type = other DNA
aacaaaaacagactttaaagcaacaacagtaaaaaaaaaaaaaaagacaaagaaggacattatataatgatagaatgata

SEQ ID NO: 12069 - DNA, 80 bp, synthetic construct
  source 1..80: mol_type = other DNA
cctgggcaacagagtgagacttcatctgggaaggaaaaaaaaaatctgaataagcacaaattgaaaacctaatgtcacac

SEQ ID NO: 12070 - DNA, 80 bp, synthetic construct
  source 1..80: mol_type = other DNA
caaaataggcatagaagggacttacctcaaagtcatgaaagtcatatatgacaaactcacagccaacatcatagtgaatg

SEQ ID NO: 12071 - DNA, 80 bp, synthetic construct
  source 1..80: mol_type = other DNA
atggaatagacaatccagaaataaagccagatgccaacagctaactgatctttgacaaagcatacaaaaacataaattgg

SEQ ID NO: 12072 - DNA, 80 bp, synthetic construct
  source 1..80: mol_type = other DNA
agtggacaaagaaaatgtggtatatgtacaccatggagtattacttagccataacaaggaacaaaataatgtgttttgca

SEQ ID NO: 12073 - DNA, 80 bp, synthetic construct
  source 1..80: mol_type = other DNA
tcccatctcagtctcttgagtagctgagactacaggcatgttatcatagtcagtacaatttaagtaatttctaaaaagat

SEQ ID NO: 12074 - DNA, 80 bp, synthetic construct
  source 1..80: mol_type = other DNA
tcaagtaaccacatctccaatgaaatttgatagtgcataccagagtatcttagtttttaatctccctaaaagtataccat

SEQ ID NO: 12075 - DNA, 80 bp, synthetic construct
  source 1..80: mol_type = other DNA
ctaccgagtatcttggtaagtgccttttagatagagcctattataatatttgggcttcagctggtatttcaagtttccct

SEQ ID NO: 12076 - DNA, 80 bp, synthetic construct
  source 1..80: mol_type = other DNA
gcaaaaaataagaatgtagactacaaaatgggaaccagaattaaaatccatcagcttggcaaagacagaagtaaatgatg

SEQ ID NO: 12077 - DNA, 80 bp, synthetic construct
  source 1..80: mol_type = other DNA
gatgatagttatcaataatggagcatttagtatgactcagaaaataatgccatggctttacatagagagtcagatttaat

SEQ ID NO: 12078 - DNA, 80 bp, synthetic construct
  source 1..80: mol_type = other DNA
tggctgcaacaaagttctcaatacaggagatggaaacagacccacaccaagactcatgacaacaaaatttcagagagtga

SEQ ID NO: 12079 - DNA, 80 bp, synthetic construct
  source 1..80: mol_type = other DNA
tgaattgtctgttttcctgcagggcacacagaggaactggctgtcccacaccactctgacatttccagagaagcaccgtc

SEQ ID NO: 12080 - DNA, 80 bp, synthetic construct
  source 1..80: mol_type = other DNA
ctctgtctgtatctgccattgtcccttcacaaccatgccttcactattatcagtaacatcttttacctggtcttatagga

SEQ ID NO: 12081 - DNA, 80 bp, synthetic construct
  source 1..80: mol_type = other DNA
cccgtgtggccacagggacgaggacagaggaccggaccccgctcccctttctcaccaaccaggacctccgaggctctccc

SEQ ID NO: 12082 - DNA, 80 bp, synthetic construct
  source 1..80: mol_type = other DNA
ctcagcggtgagcctggcccaagcttctgacccctttctttggatctcaagggctgaccatggattctcaatggatctca

SEQ ID NO: 12083 - DNA, 80 bp, synthetic construct
  source 1..80: mol_type = other DNA
agagggtgtcctttccccaaatgtatgttcttggcacctttgtcaagaatcagttggctgtaaatatatggatttatttc

SEQ ID NO: 12084 - DNA, 80 bp, synthetic construct
  source 1..80: mol_type = other DNA
agtggtgagtgaactgaaggcctaggccattactgtgcactactgtagattttataaatgctgtacacttaggttacact

SEQ ID NO: 12085 - DNA, 80 bp, synthetic construct
  source 1..80: mol_type = other DNA
accgcactgaactagactcatgttaacaaaggctaaaatcaagcctaagcagaatcaaagtgggtctgatttttatgata

SEQ ID NO: 12086 - DNA, 80 bp, synthetic construct
  source 1..80: mol_type = other DNA
accactgtcagtaggcctaactacagagtacacaacagcagcaacataacatttccaatcctcaggtagttgaattcaca

SEQ ID NO: 12087 - DNA, 80 bp, synthetic construct
  source 1..80: mol_type = other DNA
gttcaatgcccctcagaataaccctcctccaggtttggaaggtgattgaaatcaacaagcatttatttctaagtgatttc

SEQ ID NO: 12088 - DNA, 80 bp, synthetic construct
  source 1..80: mol_type = other DNA
ttagaacaaagagtcacagtcagcattgagtcctcattttccccttatctgaggtctccctatcagtggctctgtttggt

SEQ ID NO: 12089 - DNA, 80 bp, synthetic construct
  source 1..80: mol_type = other DNA
atgtttcttccaaaactgttaatgtttggtataaatgaagtagaaggaggaatagtagctgagggtaaatgaatgaataa

SEQ ID NO: 12090 - DNA, 80 bp, synthetic construct
  source 1..80: mol_type = other DNA
ccaaatatgttgaggtaagctatgattaccgctgatttaagctatgacaataataaactgcaatactgagtgtgaaagaa

SEQ ID NO: 12091 - DNA, 80 bp, synthetic construct
  source 1..80: mol_type = other DNA
gattaagcgtcctcttgtaaaaagggaagggggagatatgtaagaagcattcaaaccacagcaactctattttgaataag

SEQ ID NO: 12092 - DNA, 80 bp, synthetic construct
  source 1..80: mol_type = other DNA
gttccagaccccaaaatggtagatccaccaacagtttgcactgtgcatctggaaaagtcacagacactcagcgccagact

SEQ ID NO: 12093 - DNA, 80 bp, synthetic construct
  source 1..80: mol_type = other DNA
attatatgtttgatacaattcatcagtgaagccttctggacctagactttcctatattagaaggattttgattacaaatt

SEQ ID NO: 12094 - DNA, 80 bp, synthetic construct
  source 1..80: mol_type = other DNA
gaaagcagggaacaaagagccaggatgctgagcaagttaacccttaaagaggaactctttttatatctaacactacttca

SEQ ID NO: 12095 - DNA, 80 bp, synthetic construct
  source 1..80: mol_type = other DNA
tcttcatgaactctaaagatttgctattggatccatttctggttgcatgtctttctgttgattttacccttttgttatta

SEQ ID NO: 12096 - DNA, 80 bp, synthetic construct
  source 1..80: mol_type = other DNA
ggctccttggtctggcggtaacgccagtgcctgagaaggcacccatcactcagcagatcgggaaagggagtctccctttg

SEQ ID NO: 12097 - DNA, 80 bp, synthetic construct
  source 1..80: mol_type = other DNA
ttctggaagaaataaaaggtcaactaagaattctatatccagtacagatgtccttcaagataaatgcaaaataaggagat

SEQ ID NO: 12098 - DNA, 80 bp, synthetic construct
  source 1..80: mol_type = other DNA
gacgaagaagagctggtaccattcctactgaaactattccaaaaaattgtaaaggaggaactcctccccaactcattcta

SEQ ID NO: 12099 - DNA, 80 bp, synthetic construct
  source 1..80: mol_type = other DNA
tctcatgagactcattcgctatcacaagaacagtgcaggaaagacccatccaaaaattcaatcacctcccactaggttcc

SEQ ID NO: 12100 - DNA, 80 bp, synthetic construct
  source 1..80: mol_type = other DNA
gagctcagaccttagctatgaatatcagaaatttctgggatgaagatgccacacaggccaagacactttcaccctgtgat

SEQ ID NO: 12101 - DNA, 80 bp, synthetic construct
  source 1..80: mol_type = other DNA
gggtggccactaagattccccaagaagaggagcagagggctacctgctatgtgggacacagcaggaatcacagcacttac

SEQ ID NO: 12102 - DNA, 80 bp, synthetic construct
  source 1..80: mol_type = other DNA
ccttgtaacagggagggttctgagtgcacacagccatctttgtccactttgtagctccccacgcgcctcctccaggagct

SEQ ID NO: 12103 - DNA, 80 bp, synthetic construct
  source 1..80: mol_type = other DNA
taatattgatgttgtaaagcatgtacaatcaaatgagaagtcaagcttggagcttcctctccaggagggtccatgttgga

SEQ ID NO: 12104 - DNA, 80 bp, synthetic construct
  source 1..80: mol_type = other DNA
atcctcagggaatgaaaagcagcactctgcacccagtggagcatttactgtttctctcttttctccagagcacatgagcc

SEQ ID NO: 12105 - DNA, 80 bp, synthetic construct
  source 1..80: mol_type = other DNA
ttgaagaataggagtcagactgcttctggggtgaagcgactgctgggaacatgtgaaccaaattgatgaagaataagtga

SEQ ID NO: 12106 - DNA, 80 bp, synthetic construct
  source 1..80: mol_type = other DNA
tttagatggaattttggtggctgtgttcatcagttcattcagatggtggatatcttttttgtaatgtcattgtcatgttt

SEQ ID NO: 12107 - DNA, 80 bp, synthetic construct
  source 1..80: mol_type = other DNA
tccctctattttccttaacatattaatcataaatactttgagaatgttcttgcttgcctgcttcaatatccacatcaact

SEQ ID NO: 12108 - DNA, 80 bp, synthetic construct
  source 1..80: mol_type = other DNA
tggaatacttagtctgattttatctctacttgttgcattttctctgctgcttggcatgccacatattctggatgatgtgt

SEQ ID NO: 12109 - DNA, 80 bp, synthetic construct
  source 1..80: mol_type = other DNA
gttcaattcccacctatgagtgagaatatgcggtgtttggttttttgttcttgcgttagtttactgagaatgatgatttc

SEQ ID NO: 12110 - DNA, 80 bp, synthetic construct
  source 1..80: mol_type = other DNA
ggctgggctaaattaattccaatatctcctcacactatgaagcctttggcatttctacatagcatgcaatccccaagcag

SEQ ID NO: 12111 - DNA, 80 bp, synthetic construct
  source 1..80: mol_type = other DNA
ataacagtgggacaagatgtgaaggctgaagttggtgatattgttgatcctgaccctgtgtcagcctaggctaatgtatg

SEQ ID NO: 12112 - DNA, 80 bp, synthetic construct
  source 1..80: mol_type = other DNA
aaagtacaaaggagagctggtaccattttcactaaaactattccaaacaattgaaaaggggggactcttccctaactcat

SEQ ID NO: 12113 - DNA, 80 bp, synthetic construct
  source 1..80: mol_type = other DNA
cctcccaaagtgctgggattataggcgtgggccactgcgcctagcctgaaaaaaaaaacaaaactatttttaaattcata

SEQ ID NO: 12114 - DNA, 80 bp, synthetic construct
  source 1..80: mol_type = other DNA
attcgttcaaccattgtggaagacagtgtggtgattcctcaaaaacctagaggcagaaattgacctagcaatctcattac

SEQ ID NO: 12115 - DNA, 80 bp, synthetic construct
  source 1..80: mol_type = other DNA
tttctccccaaaaacaagcaaacaattggttctgttatggacgccagctgggtatcctctaactcaattctgacactatc

SEQ ID NO: 12116 - DNA, 80 bp, synthetic construct
  source 1..80: mol_type = other DNA
tgaggtaccagggtcatctcactggggcttgtcggacagtgggtgcagaacagtgggtgcagtgcaccgagcataagctg

SEQ ID NO: 12117 - DNA, 80 bp, synthetic construct
  source 1..80: mol_type = other DNA
ggctaactagaataaccaatgcagagaagtccttaaaggacctgatggagctgaaaaccatggcaggagaactacgtgat

SEQ ID NO: 12118 - DNA, 80 bp, synthetic construct
  source 1..80: mol_type = other DNA
ccatcagtgtgctgtattcaggaaacccatctcatgtgcagagacacacataggctcaaaataaagggatggaggaagat

SEQ ID NO: 12119 - DNA, 80 bp, synthetic construct
  source 1..80: mol_type = other DNA
acccttcaaaaaatcaatgaatccaggaggtggttttttgaaaagatcaacaaaattgatagaccgctagcaagactaat

SEQ ID NO: 12120 - DNA, 80 bp, synthetic construct
  source 1..80: mol_type = other DNA
ttctgataccaaagcctggcagagacacaacaacaaaaaaaagaattttagaccaatatccctgatgaacatcaatgcga

SEQ ID NO: 12121 - DNA, 80 bp, synthetic construct
  source 1..80: mol_type = other DNA
gactttcttcacagaattggaaaaagctactttaaagttcatatggaaccaaaaaaaaagcctgcattgccaatacaatc

SEQ ID NO: 12122 - DNA, 80 bp, synthetic construct
  source 1..80: mol_type = other DNA
aggatataaacagacacttctcaaaagaagacatttatgcagccaatagacacatgaaaaaatgctcatcatcactggtc

SEQ ID NO: 12123 - DNA, 80 bp, synthetic construct
  source 1..80: mol_type = other DNA
aatgggtgcagcaaaccaacatgtatacctatgtaacaaacctgcacattgtgcacttgtactctagaacttaaagtata

SEQ ID NO: 12124 - DNA, 80 bp, synthetic construct
  source 1..80: mol_type = other DNA
attgttgcaaaaatcctcaacaaaatactagcaaataaaaatcgacaacacattaaaaagatcattcctcatgaccaagt

SEQ ID NO: 12125 - DNA, 80 bp, synthetic construct
  source 1..80: mol_type = other DNA
gcagcggtgagctgtgttcataccactgcactccagactgggcgacagagcaagaccctgtctcagaaaaaagggaaacc

SEQ ID NO: 12126 - DNA, 80 bp, synthetic construct
  source 1..80: mol_type = other DNA
atgatatgaaataatgaatgcaaaacaccagcacaggaagcggaatatggcacatgtgcaaaacactgcccattccttgt

SEQ ID NO: 12127 - DNA, 80 bp, synthetic construct
  source 1..80: mol_type = other DNA
cacatccctccactccttccacactccctatttttaggttatacatttatttctctttcacgcaggaaaaaaaggaggac

SEQ ID NO: 12128 - DNA, 80 bp, synthetic construct
  source 1..80: mol_type = other DNA
caccttgaaatatacaccggatgatggactttagtgtggtgtgggcagtgaagtcacacatgcccttttgtcctcccgag

SEQ ID NO: 12129 - DNA, 80 bp, synthetic construct
  source 1..80: mol_type = other DNA
tattatctttgactttcatctttgccaagctaagatatattaaacttccatcccatttcctaatccacattttaattttg

SEQ ID NO: 12130 - DNA, 80 bp, synthetic construct
  source 1..80: mol_type = other DNA
gttccagctaggttgtgacaatgaggaaagaggagtccaagggtgaagaaaacaaaattgttggaatacaaggggaggag

SEQ ID NO: 12131 - DNA, 80 bp, synthetic construct
  source 1..80: mol_type = other DNA
ttatttcagagagagagagagagagggagggagggagggagagagagagagagagagatggggtgaaggaacaggctggg

SEQ ID NO: 12132 - DNA, 80 bp, synthetic construct
  source 1..80: mol_type = other DNA
aaaacacatgacaaatatttcttttaaaatgatatgtagatgggaagtgaggacacaaaaatgtggtccatatgcggagc

SEQ ID NO: 12133 - DNA, 80 bp, synthetic construct
  source 1..80: mol_type = other DNA
atgggtagatcatactgtcataaaatagaatctgtttcttgtgatacaacatgagggaccccacctcaccccccaaaata

SEQ ID NO: 12134 - DNA, 80 bp, synthetic construct
  source 1..80: mol_type = other DNA
ccaagtgctctgtaaatgttagccttacaaatgtaaggtggtgttttagatttacagaacacagtatatcctaaggtatc

SEQ ID NO: 12135 - DNA, 80 bp, synthetic construct
  source 1..80: mol_type = other DNA
acctggtagagttatatgggaagaatggagcaatgggtttggcagttggggtggggaaacagggaggaagggaatgaaaa

SEQ ID NO: 12136 - DNA, 80 bp, synthetic construct
  source 1..80: mol_type = other DNA
attttctcccaatagcaaaggtgaaggatgtactcggagaggagggaacataccaagaagagaaggaaggaatatatatt

SEQ ID NO: 12137 - DNA, 80 bp, synthetic construct
  source 1..80: mol_type = other DNA
aacatgttctcggatttgtttttatcagtggagaaagagaggatagaagagcactcacccagcagagccagagggaggca

SEQ ID NO: 12138 - DNA, 80 bp, synthetic construct
  source 1..80: mol_type = other DNA
ggggaacacttttgatccagacgctttgacaacctcgttcagtctcctctggagagagccgccaaaccctttgctgatga

SEQ ID NO: 12139 - DNA, 80 bp, synthetic construct
  source 1..80: mol_type = other DNA
tcttcccctgcgaggccgagagggtgcagagctggtggcttcaggaggtggctgtgagcgcgggtctggggccaagagca

SEQ ID NO: 12140 - DNA, 80 bp, synthetic construct
  source 1..80: mol_type = other DNA
tgcaggtccttacaaggcccactactgagcaggaagaatgtccccaggagaggcaaagggtggggcaaaggcgggtatgg

SEQ ID NO: 12141 - DNA, 80 bp, synthetic construct
  source 1..80: mol_type = other DNA
aaatttcagggactcgggagtccaaggcctcattccaaaaacactgagagattgggtactgggcgcacagtatgtctgtg

SEQ ID NO: 12142 - DNA, 80 bp, synthetic construct
  source 1..80: mol_type = other DNA
agttcctgagattttcctaatttttgatgcccttcacaatattgggaagtactgaccagatatattgtaaaatgtccctc

SEQ ID NO: 12143 - DNA, 80 bp, synthetic construct
  source 1..80: mol_type = other DNA
ttgagagcaaaatttactttctaaaatggtaaggatgagtcaactccttaaaagctgtttgggctgttgtcaccattcta

SEQ ID NO: 12144 - DNA, 80 bp, synthetic construct
  source 1..80: mol_type = other DNA
atagagtatagcaaagttaatttggatcttcaatggccatccttggggtcttttgagttccccaaacttgtctttcttaa

SEQ ID NO: 12145 - DNA, 80 bp, synthetic construct
  source 1..80: mol_type = other DNA
atacatgagactgggtaatttataaagaaaaatgagtttaattggctcacagttctgcaggctttatgggaagcacggtg

SEQ ID NO: 12146 - DNA, 80 bp, synthetic construct
  source 1..80: mol_type = other DNA
ttttactgaaaacccttcctgtgtttttcaaatattaaaggaacacttggaggagatagtttctccttaaggttccacct

SEQ ID NO: 12147 - DNA, 80 bp, synthetic construct
  source 1..80: mol_type = other DNA
ttaaatcatatcaccagagaatcaccttcactaaaaggaagacataaaggaaggaaagaaggaagagaaaacaagcaaaa

SEQ ID NO: 12148 - DNA, 80 bp, synthetic construct
  source 1..80: mol_type = other DNA
actaaccgtccccctgcaacaaagataccaatctaacaactatctacatttaaaaaaagacaaaatcaccttcactagaa

SEQ ID NO: 12149 - DNA, 80 bp, synthetic construct
  source 1..80: mol_type = other DNA
ctgattttggcagaacaggatcttccaagggccttaagagtcagagaagaccgcagccccttgtgttgtattctgctgca

SEQ ID NO: 12150 - DNA, 80 bp, synthetic construct
  source 1..80: mol_type = other DNA
agagacataaagataaagaacaaaatatgaagtaaaaggcttccatgtggttgcttgccaggaagctggtggctaggaag

SEQ ID NO: 12151 - DNA, 80 bp, synthetic construct
  source 1..80: mol_type = other DNA
aaaagaaaagaaacttcataaataaaaacaggctgcatgtggtaaaatcaataatcagccctgggacttgtgttttcaaa

SEQ ID NO: 12152 - DNA, 80 bp, synthetic construct
  source 1..80: mol_type = other DNA
tagtgtggagcggccactggtttccgcggctcgtagtcgcgcccgcgaggaaacgccagggaggcttcctgccccgccca

SEQ ID NO: 12153 - DNA, 80 bp, synthetic construct
  source 1..80: mol_type = other DNA
aggtgactaagtgaggggcacaggtgcaacagaaagaaagactgatttgcaattgacttgtaggtgtaatcggttttagt

SEQ ID NO: 12154 - DNA, 80 bp, synthetic construct
  source 1..80: mol_type = other DNA
gactgtgggacactctctgcactcttattcttgtaattctcttctctccggatggcctcctttcccttggagtgcagcag

SEQ ID NO: 12155 - DNA, 80 bp, synthetic construct
  source 1..80: mol_type = other DNA
gcccggagcagcgcagagaccaggacgcgcagcctcgcctgcagcactcggccctacctctaccccgccgctacctctac

SEQ ID NO: 12156 - DNA, 80 bp, synthetic construct
  source 1..80: mol_type = other DNA
aactctaatggcttcaggacacaaaaccttcgttgtcagtaggatgactggaaatttcaagcatgcagctcctattctgc

SEQ ID NO: 12157 - DNA, 80 bp, synthetic construct
  source 1..80: mol_type = other DNA
ttaaaattttttcttctcattgtccaaacccatgcagggtttctttaaaatgtggacacctggtttcctttttgaaaaat

SEQ ID NO: 12158 - DNA, 80 bp, synthetic construct
  source 1..80: mol_type = other DNA
gaggagtgaagatggttttctctccagaagaagcaaaagctgttccttcacaaatgattaggaaacagttgtttaccaag

SEQ ID NO: 12159 - DNA, 80 bp, synthetic construct
  source 1..80: mol_type = other DNA
cttaaaatacttgcttgtgatgatttggtggaagctgctagagtgcttgtaaagctctctgaaatagtgaagcaaagcaa

SEQ ID NO: 12160 - DNA, 80 bp, synthetic construct
  source 1..80: mol_type = other DNA
ctttagagaactgttggctggctgtacatgtttttaaaagctgttagctagctatgaggctacagctgaaaattacactt

SEQ ID NO: 12161 - DNA, 80 bp, synthetic construct
  source 1..80: mol_type = other DNA
catcacctagacacatagtcatcaggttatctagggtcaagatgaaggaaagaatcttaagagttgtgaggcaaaggcat

SEQ ID NO: 12162 - DNA, 80 bp, synthetic construct
  source 1..80: mol_type = other DNA
ccaaaagcaaacaggagtagctattcttctatcagaaaaaatagactttaaagcaacaacagtttaaaaagacaaagagg

SEQ ID NO: 12163 - DNA, 80 bp, synthetic construct
  source 1..80: mol_type = other DNA
gctggttgtttgaaaagataaatcaaattgatagacaattagtaagattaaccaagaaaagaaggaagaagattcaaata

SEQ ID NO: 12164 - DNA, 80 bp, synthetic construct
  source 1..80: mol_type = other DNA
ccgccccatccaggagggaggtgggggtgtcagccccccgcccggccagccgccccctccgggagggaggtgaggggctc

SEQ ID NO: 12165 - DNA, 80 bp, synthetic construct
  source 1..80: mol_type = other DNA
ctccacctcaaagaaaaaaaaaaaggtaccaacaacaaaaaaaagcccagaaccagatggatgcacagcggaattctatc

SEQ ID NO: 12166 - DNA, 80 bp, synthetic construct
  source 1..80: mol_type = other DNA
cagctacttgggaggctgaggcaggagaatggcgtgaacccaggaggcgggtgagcggagatcgtgccactgcatccagc

SEQ ID NO: 12167 - DNA, 80 bp, synthetic construct
  source 1..80: mol_type = other DNA
cctatagaccaatggaacagaatagaggacccagaaataaaaccaagtacttatagtcaaccgaacttcaacaaagcaaa

SEQ ID NO: 12168 - DNA, 80 bp, synthetic construct
  source 1..80: mol_type = other DNA
aaatcatcgaaaggataaagaaaatgatgtatatgtataccgtggaatactattgagccataaaaaggaatgaaataatg

SEQ ID NO: 12169 - DNA, 80 bp, synthetic construct
  source 1..80: mol_type = other DNA
aacagtgctacgcaataggctataatatgagtcacaaatgtgagccacatcggtaatctttaattttctggtagccacat

SEQ ID NO: 12170 - DNA, 80 bp, synthetic construct
  source 1..80: mol_type = other DNA
ctgaataaatctagagaccagaacctcttaaagttgagtctggggctgacaggtcggtattttcccaatatatgattttt

SEQ ID NO: 12171 - DNA, 80 bp, synthetic construct
  source 1..80: mol_type = other DNA
ctgtggggtccacccagacctgggaaccaggtcttagggcctgcagacctccctctgccttgaggtcagagtccactgcc

SEQ ID NO: 12172 - DNA, 80 bp, synthetic construct
  source 1..80: mol_type = other DNA
gtagatcatggttagactatggttatggatgtttagatgaggtgaagtgctgttctccaaacacattatcaagattatat

SEQ ID NO: 12173 - DNA, 80 bp, synthetic construct
  source 1..80: mol_type = other DNA
gaggcagaacaggatgccaaaattccaaagcatccaatataggccgtcttctgggactcctgtcagctatatggtcaaaa

SEQ ID NO: 12174 - DNA, 80 bp, synthetic construct
  source 1..80: mol_type = other DNA
aatggaatactacacagtcataaaaagaaaggaaataatggcattcaaagcaacctggatggagctggagaccattattc

SEQ ID NO: 12175 - DNA, 80 bp, synthetic construct
  source 1..80: mol_type = other DNA
gagtggcaacaaagtggatattaaggacaggaaagtgaaggcgaaatccattgtcttccaccgaaagaagaatcttcagt

SEQ ID NO: 12176 - DNA, 80 bp, synthetic construct
  source 1..80: mol_type = other DNA
gtgggtactatgttcactacctgagtgacaggatccataccccaaacctcagcatcagacaacatacccatgtaacaaac

SEQ ID NO: 12177 - DNA, 80 bp, synthetic construct
  source 1..80: mol_type = other DNA
cttggttgtaacgagtctcagctggtttgactacaaaggcaacttcttgaagcagatcctgtttttttgtttttgttttt

SEQ ID NO: 12178 - DNA, 80 bp, synthetic construct
  source 1..80: mol_type = other DNA
catgtgtccttcttcctggatactcatgacgcagactcagttctcattcccaatgggtgtcgggtttctagagaagccaa

SEQ ID NO: 12179 - DNA, 80 bp, synthetic construct
  source 1..80: mol_type = other DNA
atctcaccctgaatgaggacctgcgctcctggaccgcggtggacacggcggctcagatctccgagcaaaagtcaaatgat

SEQ ID NO: 12180 - DNA, 80 bp, synthetic construct
  source 1..80: mol_type = other DNA
caggggatggaaccttccagaagtgggcagctgtggtggtgccttctggagaggagcagagatacacgtgccatgtgcag

SEQ ID NO: 12181 - DNA, 80 bp, synthetic construct
  source 1..80: mol_type = other DNA
acctgctttcttcacgtttcctgatcctgccctgggtctgcagtcacagttcaggaaacttctctgggatccaaaactag

SEQ ID NO: 12182 - DNA, 80 bp, synthetic construct
  source 1..80: mol_type = other DNA
cccagctactcaggaggcggaggcaggagaatggcgtcaacccgggaggcggaggttgcagtgagccaggattgtgcgac

SEQ ID NO: 12183 - DNA, 80 bp, synthetic construct
  source 1..80: mol_type = other DNA
tcccatgaccctttaacagcatctgcttcattcccctcaccttcccaggctgatctgaggtaaactttgaagtaaaataa

SEQ ID NO: 12184 - DNA, 80 bp, synthetic construct
  source 1..80: mol_type = other DNA
tggtagatatttttatttcaagcattcctactggagtattagtttcttcataagcccagaatctttgcattttagcaaca

SEQ ID NO: 12185 - DNA, 80 bp, synthetic construct
  source 1..80: mol_type = other DNA
ctatgagaatctaaccccactgctgatctgacaggaggcagagctcaggcgctaatgcttggtcacctgccactcacctc

SEQ ID NO: 12186 - DNA, 80 bp, synthetic construct
  source 1..80: mol_type = other DNA
aatgatgtaaccttgtcttcatgatgaccttaaatatatcttgatgaacagtataagaaagcaaatgaagcctgggcgcg

SEQ ID NO: 12187 - DNA, 80 bp, synthetic construct
  source 1..80: mol_type = other DNA
tgctttctatgggggaacaaatatcccatgggacactgaaagactatggaacattgtagaacatgtatttaccaaactgt

SEQ ID NO: 12188 - DNA, 80 bp, synthetic construct
  source 1..80: mol_type = other DNA
ttttctattcgacaaaaccgccatcgtcatcatggcccgttctcaatgagctgttgggtacacctcccagacggggtgac

SEQ ID NO: 12189 - DNA, 80 bp, synthetic construct
  source 1..80: mol_type = other DNA
aaaaaaccaaaaaaaaaaccaagtgattctttctgcagaggacatcttggctcttggcactccaccacagacttggtatg

SEQ ID NO: 12190 - DNA, 80 bp, synthetic construct
  source 1..80: mol_type = other DNA
aagaaaaacctcacctgtaatcccactacttggtacaataatcatacttatttttctttatttccttccagtgtgagcaa

SEQ ID NO: 12191 - DNA, 80 bp, synthetic construct
  source 1..80: mol_type = other DNA
ctgtttctaaatatttcagctaaaagacaataaatactgcaacccttacattccttcagccctgctttcacttgtcctgg

SEQ ID NO: 12192 - DNA, 80 bp, synthetic construct
  source 1..80: mol_type = other DNA
attatttaatatctccgttcactccaccacaaaaatcaattaataaaagccatctttaataagtaggcttaattgtattg

SEQ ID NO: 12193 - DNA, 80 bp, synthetic construct
  source 1..80: mol_type = other DNA
cttgagcactgatgagtaagtaagcttgatacatcatttcagttcctcagatgagcaaaaatcattagttttatatcatc

SEQ ID NO: 12194 - DNA, 80 bp, synthetic construct
  source 1..80: mol_type = other DNA
gccaatacacctggccaattatcaggtttttaattaaattttagaaatgtgaattattgtttcctttgaactgaatctta

SEQ ID NO: 12195 - DNA, 80 bp, synthetic construct
  source 1..80: mol_type = other DNA
gtaagactcttatctcagaaaataagtaaatagataaataaataaaatgtatttaaactttgtcacttcactcttactgt

SEQ ID NO: 12196 - DNA, 80 bp, synthetic construct
  source 1..80: mol_type = other DNA
caccacacctcgctaattttgtatttttagtagagacgggttttctttttttctttttttttttgggggggatggagtct

SEQ ID NO: 12197 - DNA, 80 bp, synthetic construct
  source 1..80: mol_type = other DNA
gtaaccaatgaagactgctcggaatatccattaagcacaaattcctgcgaaaatacataagaccacaggcaccagattcc

SEQ ID NO: 12198 - DNA, 80 bp, synthetic construct
  source 1..80: mol_type = other DNA
tcctaccaacaactaagttagtgagcttggaagctcatcctttcctagttgagtcttcagggaagaccccaactatgatt

SEQ ID NO: 12199 - DNA, 80 bp, synthetic construct
  source 1..80: mol_type = other DNA
agcctccccagtagctgggactacaggtgcacgccaccatgccctgctttatttttattattattattattattattatt

SEQ ID NO: 12200 - DNA, 80 bp, synthetic construct
  source 1..80: mol_type = other DNA
ggggcatcctatgatgtcagaaagtatttacatgctcgattaaaaggtgagaaccatatcaaagggacacaggagccaac

SEQ ID NO: 12201 - DNA, 80 bp, synthetic construct
  source 1..80: mol_type = other DNA
atattgtctaaaattttcagttttccaaaaaagttacaaaagggcaaagaaataggaaaatgcaatccatttgcagggag

SEQ ID NO: 12202 - DNA, 80 bp, synthetic construct
  source 1..80: mol_type = other DNA
ctagcaatcaagaattttacatcaagaaaaattatccttcaaaactgaagaccggtacagggacagtggtttgcacccat

SEQ ID NO: 12203 - DNA, 80 bp, synthetic construct
  source 1..80: mol_type = other DNA
cctggactcaagtgatcccctcacctcagcctcctcctgagtagctgggactacagatgcacaccgccatgcctggctcc

SEQ ID NO: 12204 - DNA, 80 bp, synthetic construct
  source 1..80: mol_type = other DNA
tggaagccccctcgccacttggagttgtcccaccattgcttcaagttgtcccgcctttccagaccgaaccaatgttaatc

SEQ ID NO: 12205 - DNA, 80 bp, synthetic construct
  source 1..80: mol_type = other DNA
ggtgatccgcctgtcttggcctctcaagtgctgggattacaggggtgagccaccgcgcccagccgggagcccctatttta

SEQ ID NO: 12206 - DNA, 80 bp, synthetic construct
  source 1..80: mol_type = other DNA
tctttttattttatttatttataattttttggctaattttggctattttgtgtctgtgtgtgtatttttagtagacatgg

SEQ ID NO: 12207 - DNA, 80 bp, synthetic construct
  source 1..80: mol_type = other DNA
ctgctctggccgggctcgaggagcccttcagcccactgctgtgctgtgggggcccctctctggggctggctgaggccgga

SEQ ID NO: 12208 - DNA, 80 bp, synthetic construct
  source 1..80: mol_type = other DNA
aaacccactgggagggataaacaactccagacgggaggaacaaacaacttcgggtgcaccacctttatgaactgtagcac

SEQ ID NO: 12209 - DNA, 80 bp, synthetic construct
  source 1..80: mol_type = other DNA
agccactgaacctggcccagatcatccttttaagtgttctttttcatttgtaggtttaacattggctttggggtgagaaa

SEQ ID NO: 12210 - DNA, 80 bp, synthetic construct
  source 1..80: mol_type = other DNA
cagtgcagcagtcttaagattggcctggcatgctgcagcttgttgggggggtgggagggcgtccgccattcctgaggctt

SEQ ID NO: 12211 - DNA, 80 bp, synthetic construct
  source 1..80: mol_type = other DNA
tactcttcaggatgttatccaggaggacttccctaacctagcaaggcaggaaaacattcaaatttaggaaatacaaagaa

SEQ ID NO: 12212 - DNA, 80 bp, synthetic construct
  source 1..80: mol_type = other DNA
aataaagggatggaggaagatctaccgagcaaatggaaagcaaaaaaaaaatcaggggttgcaatcctcgtttctgacta

SEQ ID NO: 12213 - DNA, 80 bp, synthetic construct
  source 1..80: mol_type = other DNA
aacactcctcagcaaatataaaagaacagaaatcacaacaaactgtctgtcagaccacagtgcaatcaaattagaactca

SEQ ID NO: 12214 - DNA, 80 bp, synthetic construct
  source 1..80: mol_type = other DNA
ccctaactcatttcatgagaacagcatcatcctgataccaaagcctggcagagacacaacaaaaaaagaaaatttaagcc

SEQ ID NO: 12215 - DNA, 80 bp, synthetic construct
  source 1..80: mol_type = other DNA
ataacaccacacatctacaaccatctgatctttgacaaacctgacaaaaacaagcatggggaaaggatttcctgtttaat

SEQ ID NO: 12216 - DNA, 80 bp, synthetic construct
  source 1..80: mol_type = other DNA
gtggaatactatgcagccataaaaaaggatgagttcatgtcctttgcagggacatggatgaagctggaaaccatcattct

SEQ ID NO: 12217 - DNA, 80 bp, synthetic construct
  source 1..80: mol_type = other DNA
caatttttattcaaaatacaaataatagggctgggcgcggtggctgacgcctgtaatcctagcactttggcaggccgagg

SEQ ID NO: 12218 - DNA, 80 bp, synthetic construct
  source 1..80: mol_type = other DNA
cctcagctactatttctgttctaccttatgcaaactaatgagaaaccattgtcccaagactggtggcctcctggcatggt

SEQ ID NO: 12219 - DNA, 80 bp, synthetic construct
  source 1..80: mol_type = other DNA
catcatcatagtggtgacaatttttaggaaactttttttgtttttttctgtgtgaacctaactcatctaataagggagtg

SEQ ID NO: 12220 - DNA, 80 bp, synthetic construct
  source 1..80: mol_type = other DNA
gtcaatatagctttaacaaaggaaaaaaaaatgaaaacaccgaaaccacccttgcaaaaattgtaacagtgagaaaatta

SEQ ID NO: 12221 - DNA, 80 bp, synthetic construct
  source 1..80: mol_type = other DNA
tagtgcagtggtgcaatcatggctcacagcagcttcaacctccctggcccagcctcccaagtcactgggactacaggtgt

SEQ ID NO: 12222 - DNA, 80 bp, synthetic construct
  source 1..80: mol_type = other DNA
actgcacccagcttaaaacaatgttttaacctcttgttgataagagtgtaaacttatcacctttgggggaagtaatttag

SEQ ID NO: 12223 - DNA, 80 bp, synthetic construct
  source 1..80: mol_type = other DNA
gggactacaaacattccattcatggcaactaggaatttatagaaacactccctctagtgtgcaaaaaagtaagtacaaga

SEQ ID NO: 12224 - DNA, 80 bp, synthetic construct
  source 1..80: mol_type = other DNA
aacaggaaaaagttgggggagagaatacaggaacacggaacaaacagtaaacaatggttatctcatagacgtgattggcg

SEQ ID NO: 12225 - DNA, 80 bp, synthetic construct
  source 1..80: mol_type = other DNA
ccatggtattcagatatttggtcaaacattgtggatggttttgtgagggtattttggatgtttcaaattggtgcattttg

SEQ ID NO: 12226 - DNA, 80 bp, synthetic construct
  source 1..80: mol_type = other DNA
ggcccaatgcaattttaagatgattttatgtatattgtaggagagaaaaataggtaaatatattaagagtattaagagcc

SEQ ID NO: 12227 - DNA, 80 bp, synthetic construct
  source 1..80: mol_type = other DNA
gctgattccacatctggagctgggaaagtaaaaaaaaattgtgcctgggacatctagttgtgtcaaaagcaagcaagtgc

SEQ ID NO: 12228 - DNA, 80 bp, synthetic construct
  source 1..80: mol_type = other DNA
agaaaagcaccttttgtaatttctgatgaaataaccaattcaagcaagaatcactgtagatggcgataagagaaagtttt

SEQ ID NO: 12229 - DNA, 80 bp, synthetic construct
  source 1..80: mol_type = other DNA
ctattatgattgtgtaagagatgtatatgaagtatttaggggtgaatggtcatgatgtctgcaagtttctttttttttga

SEQ ID NO: 12230 - DNA, 80 bp, synthetic construct
  source 1..80: mol_type = other DNA
gtctgggtatttactaaagagatttgaaatcagtatgtcgaggagatacctgcactctcatgttcgctgcagcactatta

SEQ ID NO: 12231 - DNA, 80 bp, synthetic construct
  source 1..80: mol_type = other DNA
aaacattctcaccacaaaaaaagtaagtatttaaaagtgatagatgttgggccgggtgcagtggctcacgtctgtaatcc

SEQ ID NO: 12232 - DNA, 80 bp, synthetic construct
  source 1..80: mol_type = other DNA
tcaaagtagaagctaaactattcagaagcagtagcaactccatgattccaaggtaatttaaacaggcaatttcagagtgc

SEQ ID NO: 12233 - DNA, 80 bp, synthetic construct
  source 1..80: mol_type = other DNA
gttgccaagtcagaaacaggatgtatactcttgacttgtctctctcccctacacagcaaaacaatcccaagacatgtcaa

SEQ ID NO: 12234 - DNA, 80 bp, synthetic construct
  source 1..80: mol_type = other DNA
ctctattgcttgagagtaggatattgccttattcaattttggttattgtcccagaactcagggatatatgtctggcatat

SEQ ID NO: 12235 - DNA, 80 bp, synthetic construct
  source 1..80: mol_type = other DNA
agacaggtggatttttctctcagctgggaccttttctctttcttgtctagcacattttgggaaaccttcaagtacattct

SEQ ID NO: 12236 - DNA, 80 bp, synthetic construct
  source 1..80: mol_type = other DNA
acaattcctgtaaaaatctcattaagagacatcagcttgggacacagttcctctcttactgttccttctcccagaagctc

SEQ ID NO: 12237 - DNA, 80 bp, synthetic construct
  source 1..80: mol_type = other DNA
ttaccctcagtttgcagatcaggaaaatatcacagatgttaagtaacagagctagccaacaggtacagaatccaggtttg

SEQ ID NO: 12238 - DNA, 80 bp, synthetic construct
  source 1..80: mol_type = other DNA
attgatcagcgaggactttcccacattagggaaacctgaggaaggcaaggaaaattaacgtttaacaggtttctactctg

SEQ ID NO: 12239 - DNA, 80 bp, synthetic construct
  source 1..80: mol_type = other DNA
ccctgacaactcatctttccagctcacttactctggttactccatgccagtaagtctttgacccctgaccttaacacagt

SEQ ID NO: 12240 - DNA, 80 bp, synthetic construct
  source 1..80: mol_type = other DNA
caatgttatgtgaagttgttgcaccttctctcatgggcctactccagtttggctttctccaccccactgaaaccacggat

SEQ ID NO: 12241 - DNA, 80 bp, synthetic construct
  source 1..80: mol_type = other DNA
acaaaaacctggaagtccttctttatcctcactttccttcacgtgccaactgcaagccatcagcgatctcattttctcta

SEQ ID NO: 12242 - DNA, 80 bp, synthetic construct
  source 1..80: mol_type = other DNA
agcaatcactcagcagtaaggcaggttcttccaaagacaaaaaggacacagagataagtcagggcacttccaaggaaccc

SEQ ID NO: 12243 - DNA, 80 bp, synthetic construct
  source 1..80: mol_type = other DNA
ctcacagctgagaagaggtggaatttaactcaggctgtcatgatccttccactgcagcagacgcctcttctgccttgccc

SEQ ID NO: 12244 - DNA, 80 bp, synthetic construct
  source 1..80: mol_type = other DNA
cttaggcctctcatctctcccaccacccttaggcccaagaccaggtgcccccttgtcaataagcctctctgttctcccct

SEQ ID NO: 12245 - DNA, 80 bp, synthetic construct
  source 1..80: mol_type = other DNA
tactactctagcattccaggtgggttctgtagcaactgatgtggcagtgctagagaaatgagataaggaagaaagggcat

SEQ ID NO: 12246 - DNA, 80 bp, synthetic construct
  source 1..80: mol_type = other DNA
ctctctttctcctctctacctcctccctgctgtctctctcaaaatgcagtcggtatctaagggaacagggaccgagacat

SEQ ID NO: 12247 - DNA, 80 bp, synthetic construct
  source 1..80: mol_type = other DNA
cgagccccgccccctcctcccgctcccgcactgacctctcttccgctcccgtttgtcctgcaactgcttcttcttctgct

SEQ ID NO: 12248 - DNA, 80 bp, synthetic construct
  source 1..80: mol_type = other DNA
ctggttgtggtgttttccagcgagggaagaaaagagtaattttttcaaagcatttatagaaacgcagcaaagggaaggtg

SEQ ID NO: 12249 - DNA, 80 bp, synthetic construct
  source 1..80: mol_type = other DNA
cagctttgcagaaaaaagggcagatagatggggtgagaactcccaagactgctgaaaatatacctgactttactggttga

SEQ ID NO: 12250 - DNA, 80 bp, synthetic construct
  source 1..80: mol_type = other DNA
cactcataatcatatacaaagatctatttcaaatggactgtagatctaagtataaaaggtaagagaataattattctaga

SEQ ID NO: 12251 - DNA, 80 bp, synthetic construct
  source 1..80: mol_type = other DNA
attaccccagaactcctgcttccaggtatatatcaaaaaaaaaaaaatggaaagcagggtcttgagatatttgcagactc

SEQ ID NO: 12252 - DNA, 80 bp, synthetic construct
  source 1..80: mol_type = other DNA
acaataaaaaccgaacaaaacaaggcatgatgattcatgcctgtaatcccagcactttaggagaccaaggtgggaggatc

SEQ ID NO: 12253 - DNA, 80 bp, synthetic construct
  source 1..80: mol_type = other DNA
atcaaggggaccactgattccaccactgctgagtctcccacctcctccttggggtagaggcccaattcggagagggcttg

SEQ ID NO: 12254 - DNA, 80 bp, synthetic construct
  source 1..80: mol_type = other DNA
tgcatctgtccacctgttccccagtattgccctcaattcctgagagccctggagcggtttcctaccattcccttctttta

SEQ ID NO: 12255 - DNA, 80 bp, synthetic construct
  source 1..80: mol_type = other DNA
atgcagtggaaaccagcattttatttaatccctgtgttctagtcatctctggagttgcagatgaagctgttctcacctgg

SEQ ID NO: 12256 - DNA, 80 bp, synthetic construct
  source 1..80: mol_type = other DNA
cagatttctccaggtagttctggcttatgtaactgccatttaaaaagaagtcttaagatagaagtttatggctgggcgcg

SEQ ID NO: 12257 - DNA, 80 bp, synthetic construct
  source 1..80: mol_type = other DNA
ttaacttataactcctcaacttatgggcaagcatttaagttgagtttattaattctacagaggttatctccctaaaaggg

SEQ ID NO: 12258 - DNA, 80 bp, synthetic construct
  source 1..80: mol_type = other DNA
aagggcccagaacttagccttgaggaactctgacattgaattgctaagtgaagaaggacaaggataagccagacaaggag

SEQ ID NO: 12259 - DNA, 80 bp, synthetic construct
  source 1..80: mol_type = other DNA
agtttgagaccagcctgggcaacatggtgagaccctgtgtctgcaaaaatgtttaaaaagtacccaggcctggtggcgtg

SEQ ID NO: 12260 - DNA, 80 bp, synthetic construct
  source 1..80: mol_type = other DNA
gccccctcccacctcccgcccaggttgttctcagcacagcctccagagtcatcctttttatttaacaatttaaaaaatgt

SEQ ID NO: 12261 - DNA, 80 bp, synthetic construct
  source 1..80: mol_type = other DNA
aaatcaacagaagaagccaaaatccttaagataatttaaaagacctttcccaatccagaccctgctttacttctcttttc

SEQ ID NO: 12262 - DNA, 80 bp, synthetic construct
  source 1..80: mol_type = other DNA
gcccattagatgcaaaggaaacctatagagagtagtgtccctgaagaaaacaaaggagggagggagcgaccaagtctatc

SEQ ID NO: 12263 - DNA, 80 bp, synthetic construct
  source 1..80: mol_type = other DNA
gctccgtcattgcaggccacgcctccactgaaccagggccacgcccccgagatgacggcgaagctcgcacgtgcgcagcc

SEQ ID NO: 12264 - DNA, 80 bp, synthetic construct
  source 1..80: mol_type = other DNA
cacaactaaccccagtaggtacacagtaactaattttaaaagcacttattggatgcctactgtataccaggtactgtgtg

SEQ ID NO: 12265 - DNA, 80 bp, synthetic construct
  source 1..80: mol_type = other DNA
aggcctgaagaataaagagttactaaggaggcggcattgatcggaactgagaactgattaaatgaagggagaagtaaggt

SEQ ID NO: 12266 - DNA, 80 bp, synthetic construct
  source 1..80: mol_type = other DNA
tctcacaatgaaactcttcggaggcttttcctgtccctataatgaagtggataagagtgattaaagtacaaaagattttt

SEQ ID NO: 12267 - DNA, 80 bp, synthetic construct
  source 1..80: mol_type = other DNA
aaactttcctgaataaatgattactttgaaatacatggaattctagtctgagaatattttaatgtagtagatggcggata

SEQ ID NO: 12268 - DNA, 80 bp, synthetic construct
  source 1..80: mol_type = other DNA
ggccagaggttcaggattagcctgagcaacatagtgagacctcctctctaaaaattattatttttttaattaggcaggca

SEQ ID NO: 12269 - DNA, 80 bp, synthetic construct
  source 1..80: mol_type = other DNA
gccttaccttgcaccattctcccctcagtctgtaagcttagccataccaaacctttccctgtctctcagtgtgtgtgctt

SEQ ID NO: 12270 - DNA, 80 bp, synthetic construct
  source 1..80: mol_type = other DNA
ctcttggaaacatgtttacctgtagcttaactccctttatagttctttgaagagctggcagtagaagataaacaggctgg

SEQ ID NO: 12271 - DNA, 80 bp, synthetic construct
  source 1..80: mol_type = other DNA
aactagctcttctcggtctgtcttacttatactgttaaaatcatctttttagaatacatgcccaggctgggcacagtggg

SEQ ID NO: 12272 - DNA, 80 bp, synthetic construct
  source 1..80: mol_type = other DNA
taagtttctggtgggtttatcgggatgcaacctgtcgtaaatggaggagcatgtgtatggttaacacagtagactctcta

SEQ ID NO: 12273 - DNA, 80 bp, synthetic construct
  source 1..80: mol_type = other DNA
tatagagatgaggtctcactatgttgctcaggctggtcttgaatttctgggctcaagcagtcctcctgcctcagcctccc

SEQ ID NO: 12274 - DNA, 80 bp, synthetic construct
  source 1..80: mol_type = other DNA
aatccatttactccaccttcagttacattgtattgggagttacatttatagggacataacgcgttgtcacatttcataaa

SEQ ID NO: 12275 - DNA, 80 bp, synthetic construct
  source 1..80: mol_type = other DNA
aacaatcggagtaagaaaataattgtgttctgtgaaccttatctcaatgtctgatgacatgggctgtttcactttggggt

SEQ ID NO: 12276 - DNA, 80 bp, synthetic construct
  source 1..80: mol_type = other DNA
gctcctgtcccaaagggagaattttcatgtgatcatcccttccctctgccacctctttcctgatggctgcagctggagaa

SEQ ID NO: 12277 - DNA, 80 bp, synthetic construct
  source 1..80: mol_type = other DNA
agaggccaaagcacggcggatcctggctggcctgggctttgaccctgaaatgcagaatcgacccacacagaagttctcag

SEQ ID NO: 12278 - DNA, 80 bp, synthetic construct
  source 1..80: mol_type = other DNA
ttctgcactttcttccccttccctccctgccctgttttcctttagcccttctccactgtgcctgtgagtggagctctatt

SEQ ID NO: 12279 - DNA, 80 bp, synthetic construct
  source 1..80: mol_type = other DNA
ggaagcaccggaagcatgtatgtgcaccctaaattctccaccaaggctgagattgctcctgttctccaaggccagcacat

SEQ ID NO: 12280 - DNA, 80 bp, synthetic construct
  source 1..80: mol_type = other DNA
aaaaaaaaaaattggcctggcgtggtggcccacgcctataatcccaactctttgggggaggctgaggcaggcagatcact

SEQ ID NO: 12281 - DNA, 80 bp, synthetic construct
  source 1..80: mol_type = other DNA
aatgttttagtggatatctttctccttttttctttgcaaatgtgcatataatttttaacaaaaatgggctgtcatatgag

SEQ ID NO: 12282 - DNA, 80 bp, synthetic construct
  source 1..80: mol_type = other DNA
gtgtatggacgaggtcaggagatcgagaccatcctggctaacatggtgaaatcccgtctctactaaaaatacaaaaaatt

SEQ ID NO: 12283 - DNA, 80 bp, synthetic construct
  source 1..80: mol_type = other DNA
aatggaagacgggagttgcagtgctcagtcatggaattcctcctatgtaggacgagccaaccaataacctggacatagag

SEQ ID NO: 12284 - DNA, 80 bp, synthetic construct
  source 1..80: mol_type = other DNA
tcttgtctggttgaggacttggggcaggaaaggaatgctgctgaacttgaatttccctttacaaggggaagaaataaagg

SEQ ID NO: 12285 - DNA, 80 bp, synthetic construct
  source 1..80: mol_type = other DNA
aatctcatgaatgaggaggtgctctgccctgtggccagggaccagggtattgattctctcaaaaattattaaatcatcta

SEQ ID NO: 12286 - DNA, 80 bp, synthetic construct
  source 1..80: mol_type = other DNA
gcactttgggaggcgggcagatcatgaggtcaggagttcgagagcaccctgaccaacatattgaaaccccatctccacta

SEQ ID NO: 12287 - DNA, 80 bp, synthetic construct
  source 1..80: mol_type = other DNA
acataagtgagaaaagtactttaagtactccaaaataactttccgccacaggcataaatttcatttctctctctgttctt

SEQ ID NO: 12288 - DNA, 80 bp, synthetic construct
  source 1..80: mol_type = other DNA
ggagaggctgagcaatgggaggccattggttctgtttagccaggagtgcaaactgattcagttttcatttttacaaaatt

SEQ ID NO: 12289 - DNA, 80 bp, synthetic construct
  source 1..80: mol_type = other DNA
cagggagggcttggtgaagaaacatcattgtagtgaaatgaatgaaatgttcaacctctctccccctgcaaaaaaacaaa

SEQ ID NO: 12290 - DNA, 80 bp, synthetic construct
  source 1..80: mol_type = other DNA
gagccaccacgcctggccgaattttcataaatgatttgaaagaaaatgagctcattctttctttttttttcagacggagt

SEQ ID NO: 12291 - DNA, 80 bp, synthetic construct
  source 1..80: mol_type = other DNA
ccactttgggcctacatgcagtgaggcctttcagatactgataaaacattgttgccccctcatgtggccaatgctggaaa

SEQ ID NO: 12292 - DNA, 80 bp, synthetic construct
  source 1..80: mol_type = other DNA
tcagatgatcctgatgaatgctaacagacttgaaaaccgccattctcaacccacatgttaaaacatgttaatatcttcaa

SEQ ID NO: 12293 - DNA, 80 bp, synthetic construct
  source 1..80: mol_type = other DNA
ccaactcctgacctcaggtgatccacccacctcgccttcccaaagtgatgggattacaggcatgacccaatatgcctggc

SEQ ID NO: 12294 - DNA, 80 bp, synthetic construct
  source 1..80: mol_type = other DNA
ccaaaaaaaaaaatactcatcctcaaatccattttggctctaacccaagaccctgcacaaaacccaaccaatccactgtt

SEQ ID NO: 12295 - DNA, 80 bp, synthetic construct
  source 1..80: mol_type = other DNA
gtctctctcctccccagactggaggaaaatatgtacatcaatgcgcaccagtgatcagaaaacccccaggaacccaagca

SEQ ID NO: 12296 - DNA, 80 bp, synthetic construct
  source 1..80: mol_type = other DNA
catgggggcgatgcccacttcccatgccaccgccagggccttcgtggggacgatgtccactgctgttgcccatgccccca

SEQ ID NO: 12297 - DNA, 80 bp, synthetic construct
  source 1..80: mol_type = other DNA
tctgcttgatcttgtccgaatagtctggttgtttcagtagttcctctgaaggatgactgtttgggctaccctgtgaggat

SEQ ID NO: 12298 - DNA, 80 bp, synthetic construct
  source 1..80: mol_type = other DNA
accaagtcctttcaaaatcccttaaacacacctattacgtaggaaatgacctcttacctcgttcagtttcatccaattca

SEQ ID NO: 12299 - DNA, 80 bp, synthetic construct
  source 1..80: mol_type = other DNA
aggatattcttgttgttattctaggtttctcatggcaggcaagccatagctttggatgtgaattatagctcaggtagctg

SEQ ID NO: 12300 - DNA, 80 bp, synthetic construct
  source 1..80: mol_type = other DNA
tgtaaccaaagcttcctctgctagtcttccctcttccttacgattaacataccacacatcaaatgattcccccataaggc

SEQ ID NO: 12301 - DNA, 80 bp, synthetic construct
  source 1..80: mol_type = other DNA
aaactgacatttttttaaaaagctacgttagttgctttatgtataacacacctaattgttacaacaatctgaagactttt

SEQ ID NO: 12302 - DNA, 80 bp, synthetic construct
  source 1..80: mol_type = other DNA
gcaccaccacatctgggtaaattttttgtattttttgtagagacagagttttatcatttttgcccacgctggtcttgaac

SEQ ID NO: 12303 - DNA, 80 bp, synthetic construct
  source 1..80: mol_type = other DNA
accatccagatccccacttacttgaccaatatttctggtgaacgggtctgcaggagaatgttcaagtaagtgcatcgact

SEQ ID NO: 12304 - DNA, 80 bp, synthetic construct
  source 1..80: mol_type = other DNA
aaacaaacccacagaataaatgggtggcaaggactacccgagtaggccctctaataaaccacatctctatatttgacaaa

SEQ ID NO: 12305 - DNA, 80 bp, synthetic construct
  source 1..80: mol_type = other DNA
gctaagctccttttatggaagggacaagccagaactgaagttccagaaaggtaatttaggatcaatatggttctgattgg

SEQ ID NO: 12306 - DNA, 80 bp, synthetic construct
  source 1..80: mol_type = other DNA
ggaacctgaggtcagagaaaaaacattcaaggagaatactggaaaagattagatgtccgtgggccaaatccactcaagtg

SEQ ID NO: 12307 - DNA, 80 bp, synthetic construct
  source 1..80: mol_type = other DNA
tggagtctagaatgaaagcttaagaaagctttctggaaccacaagtaatccacggcatgattatgtcttcttttaatgag

SEQ ID NO: 12308 - DNA, 80 bp, synthetic construct
  source 1..80: mol_type = other DNA
agcttaagtaataatttgagaatctgtacccagtaggaagttagccctaagtctcacccaggtcaccagagggcagttat

SEQ ID NO: 12309 - DNA, 80 bp, synthetic construct
  source 1..80: mol_type = other DNA
gctcctatccctttaagatattttatataatgaaaataaggaaaatgtcttctccctagcagcaacgagcacaggcagtg

SEQ ID NO: 12310 - DNA, 80 bp, synthetic construct
  source 1..80: mol_type = other DNA
tcctagattgccacctattttaaccacacaaatataccccaagcaaattacattaaaattgagaggatttaacagtcatt

SEQ ID NO: 12311 - DNA, 80 bp, synthetic construct
  source 1..80: mol_type = other DNA
tggtttgggaagggagggtggttgattatttttgaagttatgtagtgacggtccttcggccacagatttcaagtcccaag

SEQ ID NO: 12312 - DNA, 80 bp, synthetic construct
  source 1..80: mol_type = other DNA
ccaaaaaaaaccgcaattttggggtctaattcgattgtgacgcagttgaaattagcttctcccccatgccttccctttca

SEQ ID NO: 12313 - DNA, 80 bp, synthetic construct
  source 1..80: mol_type = other DNA
ccctaaagtgggactgaagagtggtgacagaggtcaacacagaaataataacagccttggtagctttaaaactagcgtta

SEQ ID NO: 12314 - DNA, 80 bp, synthetic construct
  source 1..80: mol_type = other DNA
agccacccactacactcccacccaggaataacttgtatgatctttcatttcagaataccaggagcgatatggttctcgcc

SEQ ID NO: 12315 - DNA, 80 bp, synthetic construct
  source 1..80: mol_type = other DNA
ccacacccagccagcgaaatggctatttctagtgggagagccaatatccaaagattcgtttgtattcattacagttatta

SEQ ID NO: 12316 - DNA, 80 bp, synthetic construct
  source 1..80: mol_type = other DNA
aattacataactgagagagagaaatgttacaaatttagtagcatgggtgattctgcttgcattctactctacaatgtacc

SEQ ID NO: 12317 - DNA, 80 bp, synthetic construct
  source 1..80: mol_type = other DNA
gaaccttttggaaatcttggcttgctgggggctaaagtaattaaatgtggacaaaagaaaacaacaaatacagccaggcg

SEQ ID NO: 12318 - DNA, 80 bp, synthetic construct
  source 1..80: mol_type = other DNA
cggcaaatagagatggggtttctccatgttggtcaggctggtctcgaactccggatctcaggtgatccagctgccttggc

SEQ ID NO: 12319 - DNA, 80 bp, synthetic construct
  source 1..80: mol_type = other DNA
ttaggtataaggaagatgacttagggctagaaaatggatataaatgctcacacctgttcaagatggtagcacccagcatg

SEQ ID NO: 12320 - DNA, 80 bp, synthetic construct
  source 1..80: mol_type = other DNA
tttgggaagccaaggtgggctgatcacttgatcccaggagtttgagaccagcctgggcaccatggtgaaacctcgtcttt

SEQ ID NO: 12321 - DNA, 80 bp, synthetic construct
  source 1..80: mol_type = other DNA
caaggtctacaggcggggctcctggaaataaagactccgagaggcggtgcggcgagaggaggggcggaagtgacgtcgtg

SEQ ID NO: 12322 - DNA, 80 bp, synthetic construct
  source 1..80: mol_type = other DNA
gtttatattctcaaagacagttcagcccgaccgtgagtgccacatgctcttccatcccatacttaattccttccttcctc

SEQ ID NO: 12323 - DNA, 80 bp, synthetic construct
  source 1..80: mol_type = other DNA
tctgactttttttttttttttttcaaagcagagtctcctgctgttgcccaagctggagtgctatggcaggatcttggctc

SEQ ID NO: 12324 - DNA, 80 bp, synthetic construct
  source 1..80: mol_type = other DNA
ttttcaacccaaacatagccagctcattttcacctccttgttttcacatagttcattactcatctggtcagtcagtattt

SEQ ID NO: 12325 - DNA, 80 bp, synthetic construct
  source 1..80: mol_type = other DNA
ggagagacaaacaaacataataaacaatatggttaataagtgctctggaaaaatgagagcaagtaagggtttgggagtac

SEQ ID NO: 12326 - DNA, 80 bp, synthetic construct
  source 1..80: mol_type = other DNA
gtaggagatgagaccagagaggtaatgcggaggaggggccttataggctactgcaaagactggcttttattttaagtaaa

SEQ ID NO: 12327 - DNA, 80 bp, synthetic construct
  source 1..80: mol_type = other DNA
cactgcactgcactctagcctggtgacagagtaagaccccatatcaaaaaaaaaaaaaaaatggaaacggcaataaggga

SEQ ID NO: 12328 - DNA, 80 bp, synthetic construct
  source 1..80: mol_type = other DNA
tgatgatgatgaagatgacgatgttgataccaagcagcagaaggccagtgaggatgattagacagcaaaaaaagaaaagt

SEQ ID NO: 12329 - DNA, 80 bp, synthetic construct
  source 1..80: mol_type = other DNA
gttctgagcattccagtagcttctttagtgtatgtagttagttgtaccataagtagttggtttgtgtgagatggttaaaa

SEQ ID NO: 12330 - DNA, 80 bp, synthetic construct
  source 1..80: mol_type = other DNA
ctggagagtgaagtggatcaaaagagttgatcttttgcagatgggagaacaaatagcattagaatgattcagtagagaga

SEQ ID NO: 12331 - DNA, 80 bp, synthetic construct
  source 1..80: mol_type = other DNA
cggtcctggagcacagtattcgatatgaaacacattacccagttaacatgtaaggccagagcagtatagagtgtaaataa

SEQ ID NO: 12332 - DNA, 80 bp, synthetic construct
  source 1..80: mol_type = other DNA
ccacgcctggctaatttttaaaaatatttttgtagagatgaggtcttgctatattgcccaggctggtcttgaactcctgg

SEQ ID NO: 12333 - DNA, 80 bp, synthetic construct
  source 1..80: mol_type = other DNA
ttgttctgagagtttttcatatattctagatagaacgcacttatcagatgtatgacttgcaaacattttctcccattctg

SEQ ID NO: 12334 - DNA, 80 bp, synthetic construct
  source 1..80: mol_type = other DNA
taagtgatgcatgattgtattttgtttgtttcatcttccaggtgaacaactttgtgatctttgaaggcttctttgcccat

SEQ ID NO: 12335 - DNA, 80 bp, synthetic construct
  source 1..80: mol_type = other DNA
ctctgtggccaggaaaggatgtaaccaccatccaaacagcagtctgtaaccagctatgagcatcacagtgtcaggcactg

SEQ ID NO: 12336 - DNA, 80 bp, synthetic construct
  source 1..80: mol_type = other DNA
agggaagagaatgctcaggggacccagggaaaggattcgttctctctaaagactcagatttcttgggctgggcatggtgg

SEQ ID NO: 12337 - DNA, 80 bp, synthetic construct
  source 1..80: mol_type = other DNA
gtaggaagaacaccgagatccatcgagttgggggaacagagccttctaagattgggaaaatcttcgcttaatacttgctg

SEQ ID NO: 12338 - DNA, 80 bp, synthetic construct
  source 1..80: mol_type = other DNA
ggaaccccaaactggtgttgctttggggtctctaaaggagattggctgacaccaccatttcccccagatccagattctct

SEQ ID NO: 12339 - DNA, 80 bp, synthetic construct
  source 1..80: mol_type = other DNA
ctatttacagaggcccccttccttttcctcctaaattcaaaattcagccttgtcacttcctatttccctctggtctaagg

SEQ ID NO: 12340 - DNA, 80 bp, synthetic construct
  source 1..80: mol_type = other DNA
cagtcacttcctactcttaaatcttattgtatgaactggacaccagctcctcccacaattccttctaccttacatcctgc

SEQ ID NO: 12341 - DNA, 80 bp, synthetic construct
  source 1..80: mol_type = other DNA
ctttccccttcacgaagccggctctggggcgcgctcacccctgtgaggaggccggaggtcggactcaggaggctccttct

SEQ ID NO: 12342 - DNA, 80 bp, synthetic construct
  source 1..80: mol_type = other DNA
tcattatttcatataggcctcataacccagtgaggctttattgttctcatttataggacatttgtaggaagcggaggcat

SEQ ID NO: 12343 - DNA, 80 bp, synthetic construct
  source 1..80: mol_type = other DNA
aaaaaagtaaaatgtctgctaggttttgggaggtgccggtatttatgtcacataaaacagtttgctcggctgggcgcggt

SEQ ID NO: 12344 - DNA, 80 bp, synthetic construct
  source 1..80: mol_type = other DNA
gtggccttcgtctacagtgggaaggatgtgggtaatccttggacgtacagggatagtcaactggattcttttttggaacc

SEQ ID NO: 12345 - DNA, 80 bp, synthetic construct
  source 1..80: mol_type = other DNA
tgaaaaataggattatcttttctttcccactgggttgatgccatcttcttccacctagcttcccaagctcttccttcagt

SEQ ID NO: 12346 - DNA, 80 bp, synthetic construct
  source 1..80: mol_type = other DNA
cctcacttgactgtttaaggacagggatcctgtttagtttatgttaatgttaaaaaaaaaatagagactgggtatattag

SEQ ID NO: 12347 - DNA, 80 bp, synthetic construct
  source 1..80: mol_type = other DNA
actggcattaacctttctccctgcagctgatgccttcacactcacctccaacgcctgtgaagaagctgctagtgggagcc

SEQ ID NO: 12348 - DNA, 80 bp, synthetic construct
  source 1..80: mol_type = other DNA
gtcaaaagttatctttcctctttgactgcagggctaggtgtaaaggtgcctggctctattattatatacccaaagggcag

SEQ ID NO: 12349 - DNA, 80 bp, synthetic construct
  source 1..80: mol_type = other DNA
catctctctacatagtctccacctgcgtgggcacaggatgttctcctcacctgtctcatgaactctttggtggtcaagac

SEQ ID NO: 12350 - DNA, 80 bp, synthetic construct
  source 1..80: mol_type = other DNA
agcatgagttcaaagcaagacacataggaacagatatggtggagtggggagtgatcactgtgtgatggatgtttcctcat

SEQ ID NO: 12351 - DNA, 80 bp, synthetic construct
  source 1..80: mol_type = other DNA
agagtcccttcaaaggacagtgactccagcccctccctcctctctcaggtagcccaatcacctaagctcttgagcagcaa

SEQ ID NO: 12352 - DNA, 80 bp, synthetic construct
  source 1..80: mol_type = other DNA
ctagcctctgtcacatggcatccaggatggtccttttaaaatacaaacctgtcacatcactccccatccttcagtggctt

SEQ ID NO: 12353 - DNA, 80 bp, synthetic construct
  source 1..80: mol_type = other DNA
ccatctcaaaaaaaaaaaaaaaaaaattagcttggggtggtggtacacacctgtaatcccagctacttgggaagctgagg

SEQ ID NO: 12354 - DNA, 80 bp, synthetic construct
  source 1..80: mol_type = other DNA
ctggaagatacgggcctgcatgtcagagggcagattggcataaatgggcagcaccaggagctcccggattttggagccca

SEQ ID NO: 12355 - DNA, 80 bp, synthetic construct
  source 1..80: mol_type = other DNA
tcagagaaggccagggccccatgatctgcaacctatcccagcctcagcagataataggagacaagatgtagaggctgcac

SEQ ID NO: 12356 - DNA, 80 bp, synthetic construct
  source 1..80: mol_type = other DNA
cccggctgatacgttttaaaggaaaaaaaaagtggaaggcagggtccctttcaataagggtgggccagcaaggctgactg

SEQ ID NO: 12357 - DNA, 80 bp, synthetic construct
  source 1..80: mol_type = other DNA
cacataaaacaatctgatccttctttccatgtaacagccttcacatatttagagggaaccaggatgcttcctgtttctcc

SEQ ID NO: 12358 - DNA, 80 bp, synthetic construct
  source 1..80: mol_type = other DNA
tctgggtaattaagttcatgactctgctagacttgagctggaaaagaacagattagctgagacagagccagctaaggtaa

SEQ ID NO: 12359 - DNA, 80 bp, synthetic construct
  source 1..80: mol_type = other DNA
gctggatcacttgaggtcaggagttcgagagcagcctggccaacatggtgaaaccccatctctactaaaaaattagccag

SEQ ID NO: 12360 - DNA, 80 bp, synthetic construct
  source 1..80: mol_type = other DNA
cgctgctcctccccaggggctcctgattcctcctccactagatccacagctcgggctggctacagagagaggggatatgt

SEQ ID NO: 12361 - DNA, 80 bp, synthetic construct
  source 1..80: mol_type = other DNA
ttcagccccagttagatgttctttggtcttaaacggaatgactgtagtttgaggaagggagaaaaactgattataaaaag

SEQ ID NO: 12362 - DNA, 80 bp, synthetic construct
  source 1..80: mol_type = other DNA
caaacgccttactctaaaaattcgtatttaaaaggaaacaaacatttaccctttttaagaaggaactgtagcttgttcct

SEQ ID NO: 12363 - DNA, 80 bp, synthetic construct
  source 1..80: mol_type = other DNA
gagatcttagtcgatacataagaattactgttcaacttcctgactgtgacaagagcattctgattttagaggacaatatc

SEQ ID NO: 12364 - DNA, 80 bp, synthetic construct
  source 1..80: mol_type = other DNA
aaaaacggccaggcgtagtggctcatgcctataatcccaacactttgggaggccaaggcgggcagatcacaaggtcaaga

SEQ ID NO: 12365 - DNA, 80 bp, synthetic construct
  source 1..80: mol_type = other DNA
tgccctccagcaaccttcttgacaacattccagctgcctcatatctcattaggactcaggaatagggaaagctcacaatt

SEQ ID NO: 12366 - DNA, 80 bp, synthetic construct
  source 1..80: mol_type = other DNA
ataagggcatagagaacacttcagcctgccccatcctctctcaccctgcttctgacttaccctgttttcttcttcccttt

SEQ ID NO: 12367 - DNA, 80 bp, synthetic construct
  source 1..80: mol_type = other DNA
tcatctctaaaaataaaaataaaaataaaagatattagccgggggtggtggcgcgcgcccgtagtcccagctaccgggga

SEQ ID NO: 12368 - DNA, 80 bp, synthetic construct
  source 1..80: mol_type = other DNA
ggggtaattcttttttcttcatttcgcctctgtccagtttctctgacgccccctgatggtcagtctgtgagtgcttcgct

SEQ ID NO: 12369 - DNA, 80 bp, synthetic construct
  source 1..80: mol_type = other DNA
ctacaaaaaattagccaggtgtggaggtgtgcacctgtagtcccagctactctggagactgagacaggagaatttttttt

SEQ ID NO: 12370 - DNA, 80 bp, synthetic construct
  source 1..80: mol_type = other DNA
ttgaatgcattgttttctgtttctgagatggactgtgagcacccctggcacctcggagcttcctaactctgttttcctgg

SEQ ID NO: 12371 - DNA, 80 bp, synthetic construct
  source 1..80: mol_type = other DNA
tcattcattctagaaataattccgtgtctactagttgacaggtacaggatattgcagtgaatccagctgatgtagtcagc

SEQ ID NO: 12372 - DNA, 80 bp, synthetic construct
  source 1..80: mol_type = other DNA
cttggcgctcactcttggatgacctaggatgcaccagcacgtttaaccccacccacaccagggactttggattagggtag

SEQ ID NO: 12373 - DNA, 80 bp, synthetic construct
  source 1..80: mol_type = other DNA
gtttcttttgagacaggtcttcctttgttgcccaggctggagtgcagtgggtggtgcaatattggttcactgcagcctcc

SEQ ID NO: 12374 - DNA, 80 bp, synthetic construct
  source 1..80: mol_type = other DNA
tgacagcagggggcgccctcgggccggcggagcctccgcttacccacaatcagggccttggtgcgcagcccgccctggag

SEQ ID NO: 12375 - DNA, 80 bp, synthetic construct
  source 1..80: mol_type = other DNA
tggtaatcacactgtcccaagagcaggcgagtcccagctgttctcactgcctttctacccttcccctttgccctattaag

SEQ ID NO: 12376 - DNA, 80 bp, synthetic construct
  source 1..80: mol_type = other DNA
ccccttgcctctctggcctcttcctccactccagccacactggccttggttccctccacgcactcctacctcaggaccag

SEQ ID NO: 12377 - DNA, 80 bp, synthetic construct
  source 1..80: mol_type = other DNA
ttttctactctgaaaatgacttattttatttgctctcggtctatgtttatatctccccccctaccctgcctgtctcctca

SEQ ID NO: 12378 - DNA, 80 bp, synthetic construct
  source 1..80: mol_type = other DNA
gtgggagcttacgcttcatgtgaagatgaattgggggatcaaatgaacccccctccacccaaggcttaacccgtatcttt

SEQ ID NO: 12379 - DNA, 80 bp, synthetic construct
  source 1..80: mol_type = other DNA
tccctatcccttctccccagaaaaactgcaagtgctctcaccctggtgaccctgccctcactgattcaagctcgtcactt

SEQ ID NO: 12380 - DNA, 80 bp, synthetic construct
  source 1..80: mol_type = other DNA
tgactctggaggttctggtttctgagtttgagcctctatgtccctgggtgtccattctcgagccttcccggagttcaggg

SEQ ID NO: 12381 - DNA, 80 bp, synthetic construct
  source 1..80: mol_type = other DNA
tcgtttccaggctggcatctgggacaggcgctcccgttctgctttctctcggcctcgaacggacgcctcctcctgccggc

SEQ ID NO: 12382 - DNA, 80 bp, synthetic construct
  source 1..80: mol_type = other DNA
cgtccacccccaccctgtcctgtcaccaccgcctgcctcccccaccgactgccccacgcgaccccagagtgccaagggcc

SEQ ID NO: 12383 - DNA, 80 bp, synthetic construct
  source 1..80: mol_type = other DNA
cagagctgctgccccgactctttctagcttcaacctgtctcccttgggtctacaggtcggctgccgggaaaaaggggatt

SEQ ID NO: 12384 - DNA, 80 bp, synthetic construct
  source 1..80: mol_type = other DNA
ggtggagttttctttgtagctgggcccggaggtagcggaggtcttgctgatcaagcccgtgagccaggcccaggtagagg

SEQ ID NO: 12385 - DNA, 80 bp, synthetic construct
  source 1..80: mol_type = other DNA
agaacttatagaatagatggggtgacctgatagctacgcaaagtagtagcctgtgccaaccacccagtgaaaagacagac

SEQ ID NO: 12386 - DNA, 80 bp, synthetic construct
  source 1..80: mol_type = other DNA
cctctcttggacttcccctgtcatttgtttccaagccccgccctcaatccctctcctacggctccaccttcctcctccca

SEQ ID NO: 12387 - DNA, 80 bp, synthetic construct
  source 1..80: mol_type = other DNA
gaattcagtctccaccctgctttctgcttcagtaagttgtcccaaatggacggtatcaatgaaagtcacagtttttattg

SEQ ID NO: 12388 - DNA, 80 bp, synthetic construct
  source 1..80: mol_type = other DNA
atacaaggaagtgtaagaaaagatccctaatctctagatgtttaacctgaggcatttaaatagtaccactcatgaagagg

SEQ ID NO: 12389 - DNA, 80 bp, synthetic construct
  source 1..80: mol_type = other DNA
atagccagcaaaatgcttggcaaatctcatgctatttctactacaccaaagttttccaaacttaagtattacttacatgc

SEQ ID NO: 12390 - DNA, 80 bp, synthetic construct
  source 1..80: mol_type = other DNA
aagttactccccattttctcatctcccccaccccacagccactggcaaccacaaatctgctcttgttctctatgggttta

SEQ ID NO: 12391 - DNA, 80 bp, synthetic construct
  source 1..80: mol_type = other DNA
gtgttgggattacaggcgtgagccaccaggcccagttaatttttttttttttttagacggagttttgctcttgttgcaac

SEQ ID NO: 12392 - DNA, 80 bp, synthetic construct
  source 1..80: mol_type = other DNA
aagagataaagcaatcaaagtgtcatctgtcaaagcaatttgcttcttattgatttttgccataaccatgctggtagatt

SEQ ID NO: 12393 - DNA, 80 bp, synthetic construct
  source 1..80: mol_type = other DNA
ggtgagccaccacgcctggcctttttttttttagatggagtcttgttctgttgcccaggctggagtgcagtggcacgatc

SEQ ID NO: 12394 - DNA, 80 bp, synthetic construct
  source 1..80: mol_type = other DNA
aagccgacatcgagccactgcacttcagcctgggcaacagagtgacaccttgactcaaaaagataaaaggccagtcatgg

SEQ ID NO: 12395 - DNA, 80 bp, synthetic construct
  source 1..80: mol_type = other DNA
gagcaataactgcaacagtctggctaaagatagctgccacttatgacatctgagcatgaaactagctaattttaaaatgg

SEQ ID NO: 12396 - DNA, 80 bp, synthetic construct
  source 1..80: mol_type = other DNA
gctgacgggtgcctgtcgtcccagctactcgggaggctggggcaggagaatggcgtgaaaacccaggaggcggagcttgc

SEQ ID NO: 12397 - DNA, 80 bp, synthetic construct
  source 1..80: mol_type = other DNA
tgtacgtatttcttagagatatatatttaagtatgtaggaagaaataatataatattggcagtttgctttaaaatatttc

SEQ ID NO: 12398 - DNA, 80 bp, synthetic construct
  source 1..80: mol_type = other DNA
agcatcaaagctcagcccagcccctcaatcagctctgctgcctagcatttagagagagctcacaaaatgtcttttaaatc

SEQ ID NO: 12399 - DNA, 80 bp, synthetic construct
  source 1..80: mol_type = other DNA
gctccggggtgaacctagatctacctgctggttccaccttttggatctgggaggcatgaattggtgtctcaagaagctgg

SEQ ID NO: 12400 - DNA, 80 bp, synthetic construct
  source 1..80: mol_type = other DNA
agctcaggggctgtggggacaactgtttcaggagtcttgacagaggatctatctgttcttcccctagtagcctgagacgt

SEQ ID NO: 12401 - DNA, 80 bp, synthetic construct
  source 1..80: mol_type = other DNA
tggtctgtggaggtggaaggctggagctcaggggctgtggggacaactggttcaggggtcttgacagaggacctatttgt

SEQ ID NO: 12402 - DNA, 80 bp, synthetic construct
  source 1..80: mol_type = other DNA
tgtctaaaaaaaaaaaaaaaaaaaaaaaaaattagctaggtgtgttggcaggcgcctagtagtcccagctacctgggagg

SEQ ID NO: 12403 - DNA, 80 bp, synthetic construct
  source 1..80: mol_type = other DNA
cctcctggggctcactggggatccccttccacctgactggctcccagaaggtacgggggctgaggtaggtcccggaaggt

SEQ ID NO: 12404 - DNA, 80 bp, synthetic construct
  source 1..80: mol_type = other DNA
aggttattaaaggtaagctgggaataagggtggtagttataacatttaacgtttgtctcaaaaaggtcatagccttaggc

SEQ ID NO: 12405 - DNA, 80 bp, synthetic construct
  source 1..80: mol_type = other DNA
ggggtacctgtgctattttgactcatgcatacaatgtacaatgataaaaccaagataattgggatatccactatctcaaa

SEQ ID NO: 12406 - DNA, 80 bp, synthetic construct
  source 1..80: mol_type = other DNA
actgtgcccggcctacattttcttttctttcgtttttttgagacagagtttcactcttgttgcccaggccagagtgcgat

SEQ ID NO: 12407 - DNA, 80 bp, synthetic construct
  source 1..80: mol_type = other DNA
aatccagcctgagtgacagaggaaaaaaaagagaatgcagaattggggacacagaggagggaagagtttcttatacctgt

SEQ ID NO: 12408 - DNA, 80 bp, synthetic construct
  source 1..80: mol_type = other DNA
cagctttgctggtcccccaactgctttcacatctgtttgatttgtcccctccacagacacctgatgcttctttatatgta

SEQ ID NO: 12409 - DNA, 80 bp, synthetic construct
  source 1..80: mol_type = other DNA
ggaatgcccctcttcatcactgtgaagggaagaaaagagagtctatagaatttatttccctggaagggataccccaactc

SEQ ID NO: 12410 - DNA, 80 bp, synthetic construct
  source 1..80: mol_type = other DNA
attttaagtgtatagttcagtggcattaagtgcattcacactgttgtgcaatcatcactaccatccatctccagagcaca

SEQ ID NO: 12411 - DNA, 80 bp, synthetic construct
  source 1..80: mol_type = other DNA
ccccaggctggcatgcagtggtaagatcttgggcccacggcaacctctgcctcccgggtttcaagcaattctctcacctc

SEQ ID NO: 12412 - DNA, 80 bp, synthetic construct
  source 1..80: mol_type = other DNA
tatcctgcctgttccacagtggtcaatggatttgtgcttactctaagatctctcgctatattgtaaccattactttccat

SEQ ID NO: 12413 - DNA, 80 bp, synthetic construct
  source 1..80: mol_type = other DNA
attgggcagctccaagggacaacccactaccgcttgcccgcccaccacccacttcccgcgcagttccaaaccgcgaccag

SEQ ID NO: 12414 - DNA, 80 bp, synthetic construct
  source 1..80: mol_type = other DNA
acttgcataattcataaagtcctttctgttggttatctcaattctgtgcacaacagtcaaataagcagattttacaaacg

SEQ ID NO: 12415 - DNA, 80 bp, synthetic construct
  source 1..80: mol_type = other DNA
aaaatttccaaggaaatagcaagagggcgattcccttcttgaagtatttgagggagcagaagcttactgaagttcatgcc

SEQ ID NO: 12416 - DNA, 80 bp, synthetic construct
  source 1..80: mol_type = other DNA
atatataacaattgtagctagcatttgcctttggaaagctgggaatcatttttcttggcaggcacattttggagaaacta

SEQ ID NO: 12417 - DNA, 80 bp, synthetic construct
  source 1..80: mol_type = other DNA
gcgccgcgcggtggggcggtgcccagcttgggggaaggagagcggcgcttatcgaagtgtggtcgacctccatccgccca

SEQ ID NO: 12418 - DNA, 80 bp, synthetic construct
  source 1..80: mol_type = other DNA
gcatctctgtgtactacaatgaagccacaggtaagggcaggagcccgggcagctcaggttcccttccctgtctcccactt

SEQ ID NO: 12419 - DNA, 80 bp, synthetic construct
  source 1..80: mol_type = other DNA
ctggaatgggcactctccttatcagcaagatccgagaagaataccctgatcgcatcatgaataccttcagtgtggtgcct

SEQ ID NO: 12420 - DNA, 80 bp, synthetic construct
  source 1..80: mol_type = other DNA
cctttcctctccctcagaatttgtgtttgctgcctctatcttgttttttgttttttcttctggggggggtctagaacagt

SEQ ID NO: 12421 - DNA, 80 bp, synthetic construct
  source 1..80: mol_type = other DNA
gctctccttaaattgacacttaatattgagtccctgtcctacggattcaaccaactggatattgggaaaagagttgtact

SEQ ID NO: 12422 - DNA, 80 bp, synthetic construct
  source 1..80: mol_type = other DNA
ggggtagaggggggtggtggttgttgggggtaggggggtggggattggatgggaggattgcctgagcctgggaggtagag

SEQ ID NO: 12423 - DNA, 80 bp, synthetic construct
  source 1..80: mol_type = other DNA
caccttagcctcccaagtagctaggactataggcaagagtcaccatacctgagtctagcattcattttttttctcttttt

SEQ ID NO: 12424 - DNA, 80 bp, synthetic construct
  source 1..80: mol_type = other DNA
cagggttctttctggtgccctaccacctgtttccccaaacaaagacatcaggacccacatacaataaatcactgaagaga

SEQ ID NO: 12425 - DNA, 80 bp, synthetic construct
  source 1..80: mol_type = other DNA
caggcactattctaaacactgcaaatatttgctcgagcccctcaacaattcaacagggtagtttctaattattaacccaa

SEQ ID NO: 12426 - DNA, 80 bp, synthetic construct
  source 1..80: mol_type = other DNA
taggctgtttctccctaagcccctcactacaccccaccccttagtccctggttctatttcctcctttcttggtgcccaca

SEQ ID NO: 12427 - DNA, 80 bp, synthetic construct
  source 1..80: mol_type = other DNA
ctgtctgcttggccagtccagtggagtccagtgtttctctgatgagcccccgtttaatctatttttcccacgtgtgcccc

SEQ ID NO: 12428 - DNA, 80 bp, synthetic construct
  source 1..80: mol_type = other DNA
gatcctcccgcctccccctctagagtagctgggactacaggtgtgaaccagcacacccggctattttttgtactttttgt

SEQ ID NO: 12429 - DNA, 80 bp, synthetic construct
  source 1..80: mol_type = other DNA
ctgctatgttgggattaactttccatcagaattctgaaggcattcctccatggttttctagctttttaagaaatctgggc

SEQ ID NO: 12430 - DNA, 80 bp, synthetic construct
  source 1..80: mol_type = other DNA
ggattacaggcatgagccaacacccctggccctgcttgactcttattagtccctttcccttacttccctgcttctttctg

SEQ ID NO: 12431 - DNA, 80 bp, synthetic construct
  source 1..80: mol_type = other DNA
atagataaataagataataaacctccagatgtctgttggagcagggcaggaaccattacccagaggcagtgaggggctct

SEQ ID NO: 12432 - DNA, 80 bp, synthetic construct
  source 1..80: mol_type = other DNA
gtgttgggattacaggtgtgaaccaccgcacccggccttgcttcctctctttgcccgttctccacaaggcaaccagactg

SEQ ID NO: 12433 - DNA, 80 bp, synthetic construct
  source 1..80: mol_type = other DNA
ggaaggtcatttacttgcttactagctgtttcctgtgtcataatgtaagctgcataagggcaggaatcttttctgcctca

SEQ ID NO: 12434 - DNA, 80 bp, synthetic construct
  source 1..80: mol_type = other DNA
taaaaagcacaaaaatgcaaaaaacacggcagtaaatatactgtgaaaataacacggcttacggtatgagagctgaaaca

SEQ ID NO: 12435 - DNA, 80 bp, synthetic construct
  source 1..80: mol_type = other DNA
cctcataccccaagtagctgtgactacaggcccgagctgccatgcctggctaatgtttgtatttttcgcatagacacggt

SEQ ID NO: 12436 - DNA, 80 bp, synthetic construct
  source 1..80: mol_type = other DNA
caggtctgaggaggccactttgaaaacctgttctgagaatttctgcctgtccttatagatctcctgtgataacaggatgg

SEQ ID NO: 12437 - DNA, 80 bp, synthetic construct
  source 1..80: mol_type = other DNA
gtaaaccttttcactcttgacattgagggtcagtgtgttgagagagatcctaggggaaaaagaagggacagacagtaaga

SEQ ID NO: 12438 - DNA, 80 bp, synthetic construct
  source 1..80: mol_type = other DNA
tcgcgcagggacctgggagccgggcaggggccgctcgcagaccagctttcctgggagctggccccgctcccgcgttcccc

SEQ ID NO: 12439 - DNA, 80 bp, synthetic construct
  source 1..80: mol_type = other DNA
aaatacatataaatattaattaggagcaataagaaataaattaacgacgctctccttcccaccgggcctagccccagctg

SEQ ID NO: 12440 - DNA, 80 bp, synthetic construct
  source 1..80: mol_type = other DNA
atgtgctcctgaaaattgggcgggtccttctaactcctcctcccgcagctggggagcggttggcagcagcgggctggaaa

SEQ ID NO: 12441 - DNA, 80 bp, synthetic construct
  source 1..80: mol_type = other DNA
ctaagcggattaactcaggaacagaaaaccaaataccacacattctcacttataagtgggaaccaaacattgggaactca

SEQ ID NO: 12442 - DNA, 80 bp, synthetic construct
  source 1..80: mol_type = other DNA
aacctctgcctcttggctcaagccatactcctacctcagcctcctgagtagctgggaccacaggtgagcaccaccatgcc

SEQ ID NO: 12443 - DNA, 80 bp, synthetic construct
  source 1..80: mol_type = other DNA
aagagtggcactgaaggtgaccttgaacagtgggtgggatatgacaaattcagatgtggaggatgactgtaagaatggaa

SEQ ID NO: 12444 - DNA, 80 bp, synthetic construct
  source 1..80: mol_type = other DNA
ctcactactcttatctaaatacacaagatcccttccacattacacacttcttcctggctggcataaaacacacctcctct

SEQ ID NO: 12445 - DNA, 80 bp, synthetic construct
  source 1..80: mol_type = other DNA
agtacttggctgtcacctagtaggaacttaataaatattcttaaatctgtctcctccgaggagctaaacctcatctgcag

SEQ ID NO: 12446 - DNA, 80 bp, synthetic construct
  source 1..80: mol_type = other DNA
ctctttattttccagagaagcaaagacttctgcattcctagttcctgttcaactaatgtgagtgattttatttttttatg

SEQ ID NO: 12447 - DNA, 80 bp, synthetic construct
  source 1..80: mol_type = other DNA
agcaaaaaaaaaaatttgtttttactcaccactatactgacaaggaacaggtgattttaaacatcccctcccacctacat

SEQ ID NO: 12448 - DNA, 80 bp, synthetic construct
  source 1..80: mol_type = other DNA
gttttctgggaaggatagatgccatgtgtgactcagaaccaagttagggaaaaaacaagctcactcaatctctagcaccc

SEQ ID NO: 12449 - DNA, 80 bp, synthetic construct
  source 1..80: mol_type = other DNA
tagtcatttgtctatctttttgattgccaggagaggcacgtgccattgagatgcagccgtcttaatactggtaacctctt

SEQ ID NO: 12450 - DNA, 80 bp, synthetic construct
  source 1..80: mol_type = other DNA
ggagttcaagaccagcctgaccaacatggtgaaaccccgtctctactaaaaattagccaggtgtggtggcaggtggctat

SEQ ID NO: 12451 - DNA, 80 bp, synthetic construct
  source 1..80: mol_type = other DNA
agcgagaccccattctaaaaaaagaaaaaataagggctgggctcggtggctcatgcctgtaatcccagcactttgggaag

SEQ ID NO: 12452 - DNA, 80 bp, synthetic construct
  source 1..80: mol_type = other DNA
aatgaggcaattcactttcttaaggttgtgtaaccaagaagtaatgggagttagatgtgaacctaggtctatttcattcc

SEQ ID NO: 12453 - DNA, 80 bp, synthetic construct
  source 1..80: mol_type = other DNA
cctcattattaatgttattattcaacccactgacctagctctttttgtctttggggttttacactgctctgatgttcatg

SEQ ID NO: 12454 - DNA, 80 bp, synthetic construct
  source 1..80: mol_type = other DNA
tgacatcaggtcatctgcccaccttggcctcccaaagtgctaggattacaggcgtgagccactgcgcccagctgcatgtg

SEQ ID NO: 12455 - DNA, 80 bp, synthetic construct
  source 1..80: mol_type = other DNA
gcttaacaagtacttttcctcatatgaagactcagcagatccccatgatgaatgtcaaacaaatggaatgttggtacaga

SEQ ID NO: 12456 - DNA, 80 bp, synthetic construct
  source 1..80: mol_type = other DNA
ttacaactcaggcttatataacatcggctctgccccaaattcctgccgtgtagaacacataaaaatccaaccctgcagtc

SEQ ID NO: 12457 - DNA, 80 bp, synthetic construct
  source 1..80: mol_type = other DNA
gaagagaatgcatgcaggatggtcaaacctcagaaaatatccaccacattcgcattttctcttacctccattttctactt

SEQ ID NO: 12458 - DNA, 80 bp, synthetic construct
  source 1..80: mol_type = other DNA
gaaatgaagaccccagaaatgctcagagaaaacaatttttttgattagtttcgatgaagaatggacagccaaggctgggt

SEQ ID NO: 12459 - DNA, 80 bp, synthetic construct
  source 1..80: mol_type = other DNA
gtcagaggcagactttacttctcaggtccttcccatgttcttctcaacttgccaaaacaccaaactctggggtatcattt

SEQ ID NO: 12460 - DNA, 80 bp, synthetic construct
  source 1..80: mol_type = other DNA
gctagacagattggaggcaggaggaaaaacaggaagcagcagggaggttggaaaggagaattatttcataagccaggtgt

SEQ ID NO: 12461 - DNA, 80 bp, synthetic construct
  source 1..80: mol_type = other DNA
gagaggcatttgctagaaaatgtattcaaactgatggctggtctgaaagggagttgtaggctggggtgatgagagacagg

SEQ ID NO: 12462 - DNA, 80 bp, synthetic construct
  source 1..80: mol_type = other DNA
gcatgggggctggcgttttgtagatctgctttaaggtcaggcagccactgggagtctgtccagagtgtgtgcaagggagg

SEQ ID NO: 12463 - DNA, 80 bp, synthetic construct
  source 1..80: mol_type = other DNA
tattttttgttgtccaacaaattgcctcaaaattttgtggcatgagacaaccctttattacgttcacggattctgtgggc

SEQ ID NO: 12464 - DNA, 80 bp, synthetic construct
  source 1..80: mol_type = other DNA
ggtctctctcagatgactcaggtcttctgggttgatgtggcttttattaagaacttgttgtctccaacagcaaatagcat

SEQ ID NO: 12465 - DNA, 80 bp, synthetic construct
  source 1..80: mol_type = other DNA
agctttttctctctggttcctcatcctctcctctactcaggtgtaggctgtccctgcctagttggtctgacagtagctcc

SEQ ID NO: 12466 - DNA, 80 bp, synthetic construct
  source 1..80: mol_type = other DNA
tcccagcacttacaataatcaatttaacaaatataattaatcaattactatgtgcctggcttggtttcaggtacaggata

SEQ ID NO: 12467 - DNA, 80 bp, synthetic construct
  source 1..80: mol_type = other DNA
attttatttttttattttttttgagacagcatcctgctctgttgcccaggctggagtgcaatggcgtgatctcgggttca

SEQ ID NO: 12468 - DNA, 80 bp, synthetic construct
  source 1..80: mol_type = other DNA
atcctgtgttaggtcctctggctatacatgcctatggtaccctgaactccaccttgtgtaagagtcaccacctcagtcct

SEQ ID NO: 12469 - DNA, 80 bp, synthetic construct
  source 1..80: mol_type = other DNA
attgactgcaagggaaacaagggagactcctgggttgaagctatcttgtctagatggtggttaaatgggtaaatataaat

SEQ ID NO: 12470 - DNA, 80 bp, synthetic construct
  source 1..80: mol_type = other DNA
tctaagtctcggggtctaggaagccagtgtgctttgctcactcctacgtccccggtccctgagacacaggtacgaggtgg

SEQ ID NO: 12471 - DNA, 80 bp, synthetic construct
  source 1..80: mol_type = other DNA
attgtggtgcaagttttataacccacctggttttgtcttgggaattagaagtctctcaatgttttggagagagattctga

SEQ ID NO: 12472 - DNA, 80 bp, synthetic construct
  source 1..80: mol_type = other DNA
gaacagtaacatccactgtgattatcagacctatttttaaatacttgaggccctctttccttcaaagggtgtaagaaaat

SEQ ID NO: 12473 - DNA, 80 bp, synthetic construct
  source 1..80: mol_type = other DNA
tggctaaagggcaatagaacagagagccactcaaccacaaaagaaaaaggaagaagaaaggatataaagcaacaaaggta

SEQ ID NO: 12474 - DNA, 80 bp, synthetic construct
  source 1..80: mol_type = other DNA
gcaggccctgcaaaggggctttctggaaaatttgagcctgagtgtcttgaaggataactaggagttagcaatggcaaggt

SEQ ID NO: 12475 - DNA, 80 bp, synthetic construct
  source 1..80: mol_type = other DNA
tgtcagctgggatgtctggaaagttgaagtgtttgatggtaagcaggaagtttgtgagttctgctatctgagtaggagct

SEQ ID NO: 12476 - DNA, 80 bp, synthetic construct
  source 1..80: mol_type = other DNA
ctggccagttacctttgattgccagagagatactagaagctggttgctgaaagactgaaaaaagaaaaaaagtcaggtca

SEQ ID NO: 12477 - DNA, 80 bp, synthetic construct
  source 1..80: mol_type = other DNA
ccagacatgggcattcttatcctcattttgactgagtaactgggcacagagaggctgttatgcatcccaattgcagagct

SEQ ID NO: 12478 - DNA, 80 bp, synthetic construct
  source 1..80: mol_type = other DNA
tcaagtcaattgggggtagatgaggagtaaggtaagcaaagctaaagaaatctggggaaagatacacataaagatacaaa

SEQ ID NO: 12479 - DNA, 80 bp, synthetic construct
  source 1..80: mol_type = other DNA
agtggaatcggccaggcatggtggctcacgagtgtaatcccagcactttgggaggccgaagtgggcggatcacctgaggt

SEQ ID NO: 12480 - DNA, 80 bp, synthetic construct
  source 1..80: mol_type = other DNA
caggctggtctcgaactcctaggttcaagcaatcctcccacctcagcctcccaaagtgcttggattacaggtgtgagcta

SEQ ID NO: 12481 - DNA, 80 bp, synthetic construct
  source 1..80: mol_type = other DNA
tcagtgttgtagcatgaatcagtactttctttttattgttgaatactatttcattgtatggatataccatattttattta

SEQ ID NO: 12482 - DNA, 80 bp, synthetic construct
  source 1..80: mol_type = other DNA
cttttttttttttttttttaatagcgacagggtctcgctttgttgcctaggctgatctcgaactcttgggctcaagcaat

SEQ ID NO: 12483 - DNA, 80 bp, synthetic construct
  source 1..80: mol_type = other DNA
taattaagagtttttgtataatacttcaaagtttctgaaaatttcctgagttaccaaaagctctttgtcacaagaaacca

SEQ ID NO: 12484 - DNA, 80 bp, synthetic construct
  source 1..80: mol_type = other DNA
attctttgaactactagaaaattaggacagggtgggggcaaaagaaaacgtatattgagagcttgctccatgtatttgtt

SEQ ID NO: 12485 - DNA, 80 bp, synthetic construct
  source 1..80: mol_type = other DNA
tagtatctatgggaaagtgtgtgcacaaaagagacagaaaagaggctggagaatattgattattcacacatgaacaaagt

SEQ ID NO: 12486 - DNA, 80 bp, synthetic construct
  source 1..80: mol_type = other DNA
ccaaaaagatgctgcaaagaaacagcagcctcctgtaacaaaataagtggtacatcttttgtgatgggagcatctccctg

SEQ ID NO: 12487 - DNA, 80 bp, synthetic construct
  source 1..80: mol_type = other DNA
agcagcgaacaggacagcccgtctcatcctcatggaggtcacaggacaatgagaagaaagacttttttatttttattttt

SEQ ID NO: 12488 - DNA, 80 bp, synthetic construct
  source 1..80: mol_type = other DNA
tcatgaggataaaagacaatgtatatacgttgtttggcatattacagtcaatgcttggtaactactattgttatttttta

SEQ ID NO: 12489 - DNA, 80 bp, synthetic construct
  source 1..80: mol_type = other DNA
aaagtgctgggattacaggcgtgagccactgcgcccggccccagagtctttatttattatttagagagggtctcactctg

SEQ ID NO: 12490 - DNA, 80 bp, synthetic construct
  source 1..80: mol_type = other DNA
tttcacaaagaaacaaggttttttaaaaaaggtgtttcccgtaggtttctgcctgtgagaccacctgctgagaaatgcag

SEQ ID NO: 12491 - DNA, 80 bp, synthetic construct
  source 1..80: mol_type = other DNA
ataatcaccccttacattgtgacttcttgcaaataaatacaccccactttcagcctcactcatttattataaaattgtaa

SEQ ID NO: 12492 - DNA, 80 bp, synthetic construct
  source 1..80: mol_type = other DNA
gctaattcttagttcttctgacttaggagcatctaggtcgtggacacagagtgtcccttttttcaaagtggagtcccaca

SEQ ID NO: 12493 - DNA, 80 bp, synthetic construct
  source 1..80: mol_type = other DNA
tcctgagtagctgggactacaggtgcatgccaccacacctagctaatttttgtagttttggtagagatcttcctgtcttg

SEQ ID NO: 12494 - DNA, 80 bp, synthetic construct
  source 1..80: mol_type = other DNA
tagactgcttgtgtaagagaaattgcttcatcaaccatggggttcagttatggtttctataggaaaggcagaataaagga

SEQ ID NO: 12495 - DNA, 80 bp, synthetic construct
  source 1..80: mol_type = other DNA
ctgcaagacaggtggatctcacactgttatctcagacccaaggcttatttatataccatagggaaagagtatatgtgctt

SEQ ID NO: 12496 - DNA, 80 bp, synthetic construct
  source 1..80: mol_type = other DNA
gctggaaatgcatatgtaattttgctagatacagccagtcaaattcccttccatagagattgcctcattttgcattccta

SEQ ID NO: 12497 - DNA, 80 bp, synthetic construct
  source 1..80: mol_type = other DNA
gaagagtgcattaaaggcctgtccagagaatgattcaagctggagtggatcctgtagacgtccaggagggcccagctcta

SEQ ID NO: 12498 - DNA, 80 bp, synthetic construct
  source 1..80: mol_type = other DNA
agtttgtggcctccgcaaaaaaggctcataacagtctgtatttctgtttgcttttccatctaaagactaactttactcca

SEQ ID NO: 12499 - DNA, 80 bp, synthetic construct
  source 1..80: mol_type = other DNA
caaaaacctgactgccttctacagacaagccaatgtgaaggtattcagctcacacaggttgcaaaagacagagaaacacc

SEQ ID NO: 12500 - DNA, 80 bp, synthetic construct
  source 1..80: mol_type = other DNA
gtcaggagttcgagaccagcctggtcaacatggtgaaaccctgtctgtattaaaaatataaaaaaaattagccaggcctg

SEQ ID NO: 12501 - DNA, 80 bp, synthetic construct
  source 1..80: mol_type = other DNA
gacactgtctacctagaggtagcatcagatcccacaggttgagggctcagtccccaagactgccccccgacccacactgg

SEQ ID NO: 12502 - DNA, 80 bp, synthetic construct
  source 1..80: mol_type = other DNA
cctctctcttcaaatctcctttttctcactttcttctccatcttccttgcccttttagaagcagaaaagggcataccttt

SEQ ID NO: 12503 - DNA, 80 bp, synthetic construct
  source 1..80: mol_type = other DNA
agctgcagatcttcgcagtaagtgttacaacttataaaagcagcatggacccaaaaaagtgaacagcagcaagacttatt

SEQ ID NO: 12504 - DNA, 80 bp, synthetic construct
  source 1..80: mol_type = other DNA
ggctggctttggggaacaggggttctggtttctatgaccttagggaggactaattctggcttctgtggctcacttcagga

SEQ ID NO: 12505 - DNA, 80 bp, synthetic construct
  source 1..80: mol_type = other DNA
tgggcaacacagtaggaccccgtctttataaaaaatacaaaaattagccaggcatgatgctacacacctgtagtctgtag

SEQ ID NO: 12506 - DNA, 80 bp, synthetic construct
  source 1..80: mol_type = other DNA
gacggagtgagactccatctcaaaaaaaaaaaaaagttaatatttaatgcattgatgtaaagctaacttcaggaccactt

SEQ ID NO: 12507 - DNA, 80 bp, synthetic construct
  source 1..80: mol_type = other DNA
gattcctgtgtctgcacgtcttgccacacctgattaaaacaaaccctggctacctttacaacccccaggtccatccagcc

SEQ ID NO: 12508 - DNA, 80 bp, synthetic construct
  source 1..80: mol_type = other DNA
tagaactgaaaacagggcctggcatgtatttactgaaaaagtgattaagtgctctccagttgatggctggagttcagacc

SEQ ID NO: 12509 - DNA, 80 bp, synthetic construct
  source 1..80: mol_type = other DNA
gatgcaattgcatataattccaggaactgtgagtagtaagaacccccttatcagctgtcctatttttagatatcatgatt

SEQ ID NO: 12510 - DNA, 80 bp, synthetic construct
  source 1..80: mol_type = other DNA
tcttctccttcaaccatggaaacttgattttgtctgtggcatccatgtgcctctttgaaacactcacctcctcagactgc

SEQ ID NO: 12511 - DNA, 80 bp, synthetic construct
  source 1..80: mol_type = other DNA
cagtagcaagatttattgcaaagagcaaaagaacaaagcttacacactgtggaaggggaccggagcaagttgccactgtt

SEQ ID NO: 12512 - DNA, 80 bp, synthetic construct
  source 1..80: mol_type = other DNA
cacccggaactccagctggcccgcaagcactgcacgcagccccggttccgctcgcgcctctccctccacacctccctgca

SEQ ID NO: 12513 - DNA, 80 bp, synthetic construct
  source 1..80: mol_type = other DNA
tgtagttttgtttggagctgcagtaaatagtgtctaatcttttccttccttacaggctatttctccatattgcttcccag

SEQ ID NO: 12514 - DNA, 80 bp, synthetic construct
  source 1..80: mol_type = other DNA
ctgaactggggcctaggaaaagttaatggggcagtgattttggccttttctacccacctccttgtaataatattatttta

SEQ ID NO: 12515 - DNA, 80 bp, synthetic construct
  source 1..80: mol_type = other DNA
cctcctatttaagcctttgccacacaggtataggcctggaaataaaaggtgtggctaaaagctacctgctcagagaactc

SEQ ID NO: 12516 - DNA, 80 bp, synthetic construct
  source 1..80: mol_type = other DNA
ggtgggatcgcctgggagagtacggaggaagaggaggatggattcagaatggagtcccagtgcttgggtagtgcatggag

SEQ ID NO: 12517 - DNA, 80 bp, synthetic construct
  source 1..80: mol_type = other DNA
actttacaaaacatctttctgtatctcatttgagggtttttgcctacagtcattgccaaggccacttatctgtagttttc

SEQ ID NO: 12518 - DNA, 80 bp, synthetic construct
  source 1..80: mol_type = other DNA
attccatgctgcttactgataagctgggggcactggcttctgctcttgctctttcttctggaaacattattctgttcctt

SEQ ID NO: 12519 - DNA, 80 bp, synthetic construct
  source 1..80: mol_type = other DNA
tctgggagattttaaaggtctatttctaatatttgttctaggtgcatagatttgtttattcaacaagcattccaggcacc

SEQ ID NO: 12520 - DNA, 80 bp, synthetic construct
  source 1..80: mol_type = other DNA
ttgatgatctaataaaatgactggcatatgaggtggggaaaatgtaccctcctgtgatcagccagaggtttcagcagcag

SEQ ID NO: 12521 - DNA, 80 bp, synthetic construct
  source 1..80: mol_type = other DNA
ttacagtgaaaggagaagattaaaacccagaaaatggaaaccctcatttatgttaaagctgagaaatcaagtgtcccttc

SEQ ID NO: 12522 - DNA, 80 bp, synthetic construct
  source 1..80: mol_type = other DNA
tcttaatcacaatgttttcatccaaggaggcttttaggaacaggaccccagggttagggcaggaatacactattgttatt

SEQ ID NO: 12523 - DNA, 80 bp, synthetic construct
  source 1..80: mol_type = other DNA
atgtttctcaggcgggtctcgaatttctgggcataagcgatcttcctgcctcagcctctcaagtagctgggaattacgcc

SEQ ID NO: 12524 - DNA, 80 bp, synthetic construct
  source 1..80: mol_type = other DNA
cccaacaggccacagctgtagccctgttcatcttttgcatttatattcagtttctgggaatatctttggggatattctcc

SEQ ID NO: 12525 - DNA, 80 bp, synthetic construct
  source 1..80: mol_type = other DNA
gggagtcataaattggccctgaagcaaacgaaagtcttccaatcctgcatgacatagcagattgttttgcttggggcttt

SEQ ID NO: 12526 - DNA, 80 bp, synthetic construct
  source 1..80: mol_type = other DNA
gcccaggacaatctcatgaggtggaccgagcagtatttggggagggaggatagaaaagagactgggatatctttaattaa

SEQ ID NO: 12527 - DNA, 80 bp, synthetic construct
  source 1..80: mol_type = other DNA
ggggttctatgtgggagcagggcttctcctcactactccaaggacccccaaaccacatcccttccacagcatctgggaat

SEQ ID NO: 12528 - DNA, 80 bp, synthetic construct
  source 1..80: mol_type = other DNA
aaatttcaaacatgagacctcatgggaactgaaaggatttatgacataggccaggtatttaggagaaatggacactaaga

SEQ ID NO: 12529 - DNA, 80 bp, synthetic construct
  source 1..80: mol_type = other DNA
atggcttcctgaactgatctcatggattttttatctgcatcaaaaatggaaatggattagatgttgcgatttttagggta

SEQ ID NO: 12530 - DNA, 80 bp, synthetic construct
  source 1..80: mol_type = other DNA
ggtttgtgttattgagagccctatttgctgcctccttcacaagatgctagctgaactcttgagcatgggcatcagcattg

SEQ ID NO: 12531 - DNA, 80 bp, synthetic construct
  source 1..80: mol_type = other DNA
tagtcagctatgaccatgccattgcacaccagcctaggcaacagagcgagaccctgtacccctcttccccccaaaagaag

SEQ ID NO: 12532 - DNA, 80 bp, synthetic construct
  source 1..80: mol_type = other DNA
aggacatcactccaggacttgactgtagcctctgaaagtagaggcagctagagaaacaatagtggcttctatgggctaaa

SEQ ID NO: 12533 - DNA, 80 bp, synthetic construct
  source 1..80: mol_type = other DNA
cattgcaacactgccctccagcctgagtgatacagtgagaccctgtctcaaaaacaaacaaaaacatatttgtcatttaa

SEQ ID NO: 12534 - DNA, 80 bp, synthetic construct
  source 1..80: mol_type = other DNA
tatgtagttcaaataaaaatgacatcaataagtacatgagaaatatcactcctaccccacacttaccctctctttttccc

SEQ ID NO: 12535 - DNA, 80 bp, synthetic construct
  source 1..80: mol_type = other DNA
ttgcaatcaaaccaacagctacaggtggcttggattgttttagatggaattggtctcaaatttaaaaggtcactttgtca

SEQ ID NO: 12536 - DNA, 80 bp, synthetic construct
  source 1..80: mol_type = other DNA
gctcctgtcttctgttcctgtcatcttagtgtgcttccttctacccttagggtggcctcatggtctgagatggcttcagg

SEQ ID NO: 12537 - DNA, 80 bp, synthetic construct
  source 1..80: mol_type = other DNA
ctgggcagacagtggctcttgcctgtgatccctgcactttggtaggtggaggtgggaggactgcttgagggtaagagttc

SEQ ID NO: 12538 - DNA, 80 bp, synthetic construct
  source 1..80: mol_type = other DNA
agctatgatcatgacaatgcactccatcctgggcaacacagcaaaaccttgtctcaaaacaaacaaacaaaaaacaaaac

SEQ ID NO: 12539 - DNA, 80 bp, synthetic construct
  source 1..80: mol_type = other DNA
taaaatcctaagccccccagttgacttaatggaccccctcttggccaaggggaccccagagaaaccttaaaaactgagtt

SEQ ID NO: 12540 - DNA, 80 bp, synthetic construct
  source 1..80: mol_type = other DNA
tatgtatacttggccaacccagtcagattaaattcctttcttattcctcctcgtccctcaaagttcattctctaggctct

SEQ ID NO: 12541 - DNA, 80 bp, synthetic construct
  source 1..80: mol_type = other DNA
gtgggcccgagagggaagaaagagacaaagagatgggaagaagatggaagtaggacacttagagtgggaaggaaaaagag

SEQ ID NO: 12542 - DNA, 80 bp, synthetic construct
  source 1..80: mol_type = other DNA
cagaggagtttttttttttttttttttgagacagtcaccctctgttgatatggctctgatgagtggaggaacaccagggc

SEQ ID NO: 12543 - DNA, 80 bp, synthetic construct
  source 1..80: mol_type = other DNA
caccaacctggtgatcatgaaccagccatctataaccttgttgatctagctcaacccattatataaaactgtgcttggat

SEQ ID NO: 12544 - DNA, 80 bp, synthetic construct
  source 1..80: mol_type = other DNA
tcaattcagagattataaacaatgtatacttgactttgtggcagtgatcactattgtacaatagttacttaaactcagga

SEQ ID NO: 12545 - DNA, 80 bp, synthetic construct
  source 1..80: mol_type = other DNA
actcaccaaactcaggagaatgttatacttacgattacaggcttgttacaaaggatacaaatcaggaggaccagactaat

SEQ ID NO: 12546 - DNA, 80 bp, synthetic construct
  source 1..80: mol_type = other DNA
tccacatttatattcatatggaattgattttgagtatagagagataattctaattattattgtttttcaaatgttagcca

SEQ ID NO: 12547 - DNA, 80 bp, synthetic construct
  source 1..80: mol_type = other DNA
ataaattattttgcattacatcccattcttattgagtccctgcaagctgagagccgactgccaaagcacaattcactgta

SEQ ID NO: 12548 - DNA, 80 bp, synthetic construct
  source 1..80: mol_type = other DNA
tctctactaaacaaacaaacaaaaaaaattagccatgcatggcggttggcgcctataatcccagctacttagaaggctga

SEQ ID NO: 12549 - DNA, 80 bp, synthetic construct
  source 1..80: mol_type = other DNA
gggccaacctacagctcaggccattgcttcagaggttccaagccccaagccttgatagcttacaaatgtgctgggcctgt

SEQ ID NO: 12550 - DNA, 80 bp, synthetic construct
  source 1..80: mol_type = other DNA
gtcatgatagtgaataagtcttatgagatctgatggttttataaagggctgttcccctgagcatgctcttgcctgctgcc

SEQ ID NO: 12551 - DNA, 80 bp, synthetic construct
  source 1..80: mol_type = other DNA
aaaaaataaaaataaaaaaataaagaatagccaagtggtagaaagcctgcagatgctgttccagagctgtgcccacagct

SEQ ID NO: 12552 - DNA, 80 bp, synthetic construct
  source 1..80: mol_type = other DNA
gcgaggtctttgtggcctgtatcttgtgctgacctcctatatcatcctgtgactaagaattcccaacctcctgggaatgc

SEQ ID NO: 12553 - DNA, 80 bp, synthetic construct
  source 1..80: mol_type = other DNA
gactcctgatgttggaactgttaatgagaaacacactttgtcttttgacatacagtttttctctcagctgctgaacctgg

SEQ ID NO: 12554 - DNA, 80 bp, synthetic construct
  source 1..80: mol_type = other DNA
aggagattcaacctttttagaagctcactgttttgagtaagagccactgtttgccagatcccagccccctctgcctctac

SEQ ID NO: 12555 - DNA, 80 bp, synthetic construct
  source 1..80: mol_type = other DNA
gcagttatgatttaatgtccaagactttgttattggttcaagtttatcatgcatggatgcttcttctgcttggatgagtt

SEQ ID NO: 12556 - DNA, 80 bp, synthetic construct
  source 1..80: mol_type = other DNA
gactagcttttggccaacatgatctgaatcaaatgatgtgagcaaccttttgttctgccctcaaatggcaggggtgatgg

SEQ ID NO: 12557 - DNA, 80 bp, synthetic construct
  source 1..80: mol_type = other DNA
acagcccctcttctggctgctttcatgggctggtgttgagtgtctgttgtttttccaggcacacagtgcaagctgtgggc

SEQ ID NO: 12558 - DNA, 80 bp, synthetic construct
  source 1..80: mol_type = other DNA
cgagacgagcctgggcaaaaccccatctctacaaaaaatacaaaaattagctgggcacggtggctcacgcctgtaatccc

SEQ ID NO: 12559 - DNA, 80 bp, synthetic construct
  source 1..80: mol_type = other DNA
tcacaatcacaattgaaggcaaaagccatgtcttacatggtggcagacaagaacagaatgagagactaagtgaaaggggt

SEQ ID NO: 12560 - DNA, 80 bp, synthetic construct
  source 1..80: mol_type = other DNA
cctccccaaacactgtttagattttggccttgaaaaccatgactactaacgttccttgggttttctgtgagtgtgaccag

SEQ ID NO: 12561 - DNA, 80 bp, synthetic construct
  source 1..80: mol_type = other DNA
gtgtgtagtagagccgggcgtggtggctcacgcctgtaatcccagcatgttgggaggctgaggtaggcggatcacctgag

SEQ ID NO: 12562 - DNA, 80 bp, synthetic construct
  source 1..80: mol_type = other DNA
gagggtgatctggctatgacatctgtcaccccagtgattgccactgttgattctgctgatctagctggctaggtggtgtc

SEQ ID NO: 12563 - DNA, 80 bp, synthetic construct
  source 1..80: mol_type = other DNA
catggcgggagcaggagtgagagagagtgatggtaaaggtgctacacctttttaaatgaccatatatcacaggaactcac

SEQ ID NO: 12564 - DNA, 80 bp, synthetic construct
  source 1..80: mol_type = other DNA
ttatgcttacactatattatggtctattacgtgtgcaatagcattatgtcttaaagaagtacataccttaattttaaaat

SEQ ID NO: 12565 - DNA, 80 bp, synthetic construct
  source 1..80: mol_type = other DNA
ctcaggtgatccacctgcctcggcctcccaaagtgctaggattataggagtgtgtcaccatgcctggctaattttatatt

SEQ ID NO: 12566 - DNA, 80 bp, synthetic construct
  source 1..80: mol_type = other DNA
gggtggcaaggagagaaggttggggtttgtttttgacatacaaatcactttttaaaacttcaacaataacaaattaatac

SEQ ID NO: 12567 - DNA, 80 bp, synthetic construct
  source 1..80: mol_type = other DNA
agaaaagataaccataaagtctgactgcttgcagggttgggcagaatagagccatatttttcttcttgcagaaagcctat

SEQ ID NO: 12568 - DNA, 80 bp, synthetic construct
  source 1..80: mol_type = other DNA
aatgtgaggttttggcaacacaaaagaactatacagatgtatcactgtgattatatatcaatcaagaaaggtcagccagg

SEQ ID NO: 12569 - DNA, 80 bp, synthetic construct
  source 1..80: mol_type = other DNA
tttgattggccacagaaggtcacatagccaaacctgatgccaaggagtgaaataatgtaatcttcccatatttttgcatt

SEQ ID NO: 12570 - DNA, 80 bp, synthetic construct
  source 1..80: mol_type = other DNA
tttctctgtcctctccattctgctgttgtgcccattcggtgaattttaaatttttattatggcatttttcagttctaaaa

SEQ ID NO: 12571 - DNA, 80 bp, synthetic construct
  source 1..80: mol_type = other DNA
actagccatgtggttgccactgataacctgggggtaaggtggagggacagaggctttatcaccactggatgatggtacaa

SEQ ID NO: 12572 - DNA, 80 bp, synthetic construct
  source 1..80: mol_type = other DNA
ggagtacagtggtatggctcactgcaacctccatctctcaggctcaaatgatcctctcacctcagatgcctgagtagctg

SEQ ID NO: 12573 - DNA, 80 bp, synthetic construct
  source 1..80: mol_type = other DNA
cagccgttcttgtaatcctttactttcttaataaacttgcttttactttgcactgaggactcacccagaattctttcttg

SEQ ID NO: 12574 - DNA, 80 bp, synthetic construct
  source 1..80: mol_type = other DNA
cgccgcctcctcaagctggactataaattcggctcatctgcctccagctgccccttttctctcggaagtcccctctctca

SEQ ID NO: 12575 - DNA, 80 bp, synthetic construct
  source 1..80: mol_type = other DNA
aacttaatagttttcacaggtattcacgagtcctcaggagtccagagacctcagtttgagaacactatcctagcactgac

SEQ ID NO: 12576 - DNA, 80 bp, synthetic construct
  source 1..80: mol_type = other DNA
ttactgtgtgtgtatgggggatggggatggagagcaacttttctaactctcagtttctaccctaagtgggcatgtttcaa

SEQ ID NO: 12577 - DNA, 80 bp, synthetic construct
  source 1..80: mol_type = other DNA
tctttttatgagagccctgccccactcatgtcagagggccctgaggaggcaaacacaggatggttgaaaatgctagtaaa

SEQ ID NO: 12578 - DNA, 80 bp, synthetic construct
  source 1..80: mol_type = other DNA
gctcactgcaacctccacctctcaggtgcaaacaattctcctgcttcagcctcccaagtagctggggttacagacgcgca

SEQ ID NO: 12579 - DNA, 80 bp, synthetic construct
  source 1..80: mol_type = other DNA
ctcgccatatataatatttttgagacagccaactaagaaactgggattctggttctctccagggtgcaaaatcctgggag

SEQ ID NO: 12580 - DNA, 80 bp, synthetic construct
  source 1..80: mol_type = other DNA
ctctttccctccactctctgtttcactccagccccttcttcccttgtccttgcttcttgtccccttgatctgtctgccca

SEQ ID NO: 12581 - DNA, 80 bp, synthetic construct
  source 1..80: mol_type = other DNA
ctttggtgctgctctctgggccccaggatggctgggatttccctctcaggcccctgggaatctcggctccgagtcccgca

SEQ ID NO: 12582 - DNA, 80 bp, synthetic construct
  source 1..80: mol_type = other DNA
ccgctccatcctctgcccagtagctctctcagttgctttgcctactcagtctcactgtttcatcttccctgggtctcttg

SEQ ID NO: 12583 - DNA, 80 bp, synthetic construct
  source 1..80: mol_type = other DNA
ccgggagggggaagggagggctgcgagcccgaacgcgcggcgagaaggccgaggggagggaggggagcgaggagcgggag

SEQ ID NO: 12584 - DNA, 80 bp, synthetic construct
  source 1..80: mol_type = other DNA
tgttgctgagggcctgtaggtgtgtccaggactgagtggtgtggtggagacaggtgaaaggggagtgagtggaaaggcag

SEQ ID NO: 12585 - DNA, 80 bp, synthetic construct
  source 1..80: mol_type = other DNA
ctcatctgggataggcatgaaggttacttaggggaacaagagccccgctgttcccgagagaggtggggttggagagcggc

SEQ ID NO: 12586 - DNA, 80 bp, synthetic construct
  source 1..80: mol_type = other DNA
gtttaattctatcatatcctcaacaaggaattgcccaacctttcctgggacatatttattttttaaaagtcaaaatgatt

SEQ ID NO: 12587 - DNA, 80 bp, synthetic construct
  source 1..80: mol_type = other DNA
atcttgtcagtctgcttggtatttccctgaggctggtgaatttgaccattaaaaaaaatgtttgttggcaatttggcttt

SEQ ID NO: 12588 - DNA, 80 bp, synthetic construct
  source 1..80: mol_type = other DNA
tggcacacctggcacacttgtagctgccccgagaggagctcctgggacctctacttcccctccaacccctctgcccatgc

SEQ ID NO: 12589 - DNA, 80 bp, synthetic construct
  source 1..80: mol_type = other DNA
agtcactcctcaccactccacctctactgccctaggccacctgcccgccatctccagcttagatgagtgcagtagatgcc

SEQ ID NO: 12590 - DNA, 80 bp, synthetic construct
  source 1..80: mol_type = other DNA
actccatcccacccaccccctgtttcctggcccacaggtgatctcaggcaatgaggaccctgagggagtggtgctgaagg

SEQ ID NO: 12591 - DNA, 80 bp, synthetic construct
  source 1..80: mol_type = other DNA
gccaggctggccatgccactgtgccggagggtggcggagcagaatgcctggatgtcaagaccctcttcccttccaacctc

SEQ ID NO: 12592 - DNA, 80 bp, synthetic construct
  source 1..80: mol_type = other DNA
gttgagaaatagcctcttctctaagcctccagatacctgtcctccacctccccacaatccagcaactatagggttaacac

SEQ ID NO: 12593 - DNA, 80 bp, synthetic construct
  source 1..80: mol_type = other DNA
tcctgctgggctcctctctggctaacccaaaccaggcctgttggtgcagtgtacactggtcagccttggggcagaagcag

SEQ ID NO: 12594 - DNA, 80 bp, synthetic construct
  source 1..80: mol_type = other DNA
cccattctctttttttcctgtcttccccagtttccacttgttttcttctttctgtgcccctggttactgtctatatcact

SEQ ID NO: 12595 - DNA, 80 bp, synthetic construct
  source 1..80: mol_type = other DNA
tattctgctctcctgagctcccaaggaggaagctcttgtgcccttagctcatctctgctgctgcttgctcttttttaagg

SEQ ID NO: 12596 - DNA, 80 bp, synthetic construct
  source 1..80: mol_type = other DNA
tgttcctgatgcctcgtcctgtcttctttcccctcacccctgcagcctacagtggggactatatggagcctgagaagcca

SEQ ID NO: 12597 - DNA, 80 bp, synthetic construct
  source 1..80: mol_type = other DNA
gaacggcgacctcaaccagttcctcagtgcccaccagctggaggacaaggcagccgagggggcccctggggacgggcagg

SEQ ID NO: 12598 - DNA, 80 bp, synthetic construct
  source 1..80: mol_type = other DNA
gagatagaaggggttgggtagggagaccgaaggtcaggaccagaaagtgggggtggatggagaggaaggaggagcagaag

SEQ ID NO: 12599 - DNA, 80 bp, synthetic construct
  source 1..80: mol_type = other DNA
cccagctggtcctgtggatgggatcctctccaccctcctctagccatcccttggggaagggtggggagaaatataggata

SEQ ID NO: 12600 - DNA, 80 bp, synthetic construct
  source 1..80: mol_type = other DNA
gcctttggcagtctgtagaggtctactgagtcctcctcagaattaggttttaaaacctataaaatggaccaggcatagtg

SEQ ID NO: 12601 - DNA, 80 bp, synthetic construct
  source 1..80: mol_type = other DNA
aaggatgagctgcaaccaccaagagaacaattaaagggttcaaatttggttggaaagaaaaaatcggccagtggggtggc

SEQ ID NO: 12602 - DNA, 80 bp, synthetic construct
  source 1..80: mol_type = other DNA
ttaccttccacctctcaagtccagtccagcacaaaacgctgttgattttgcctcccaaatctccctggaacttgtcatct

SEQ ID NO: 12603 - DNA, 80 bp, synthetic construct
  source 1..80: mol_type = other DNA
gcacagagaagaaaattctgttaggttaagcagcttgcccaaagtagcagtcagtcaacagtaaagcctgtgggaagtgg

SEQ ID NO: 12604 - DNA, 80 bp, synthetic construct
  source 1..80: mol_type = other DNA
gcaaaagtgtatgagtatgctcctataccctggtcaacattgaggttgtcaatccttaatttcttttttgctgaactttt

SEQ ID NO: 12605 - DNA, 80 bp, synthetic construct
  source 1..80: mol_type = other DNA
cagtggcatgatcacagctcagtgtagccttgacctcctgggtccaaacaatcctcctgcctcagcctcctgagtagctg

SEQ ID NO: 12606 - DNA, 80 bp, synthetic construct
  source 1..80: mol_type = other DNA
agctgctccttgctgagcagggctaactagtaagcagtggtctgtcccaatctttctattatgtttctttttcttattgc

SEQ ID NO: 12607 - DNA, 80 bp, synthetic construct
  source 1..80: mol_type = other DNA
gtgaagacctccacttttgtagtaggttcataaatcaaatcagagcaaatagttggtgtcttaaaaactgtatttatctg

SEQ ID NO: 12608 - DNA, 80 bp, synthetic construct
  source 1..80: mol_type = other DNA
tgcctgtgaaatctttctttgctttccccatcttttcctcgcattttttcaccatctttccctcaatctccaggagccaa

SEQ ID NO: 12609 - DNA, 80 bp, synthetic construct
  source 1..80: mol_type = other DNA
gagaagccccttcatggcagggaaatgtaatggggtctgcggagtggaataaaatatcataggtaaaagtgtagcagcct

SEQ ID NO: 12610 - DNA, 80 bp, synthetic construct
  source 1..80: mol_type = other DNA
ctgaggataagggtggaaagatggcagagggcagcaaggaacacagacagggttccttactctttttttgttgttctgtt

SEQ ID NO: 12611 - DNA, 80 bp, synthetic construct
  source 1..80: mol_type = other DNA
gacaccccggctcagctctggtactttatgttgcagtatttgcagacagcccaggtgaggaggcagggccacttaaccag

SEQ ID NO: 12612 - DNA, 80 bp, synthetic construct
  source 1..80: mol_type = other DNA
ggaggttgggggtgagggaatgccagtttatgttcgtgtttacctggcagtctacagagctctctgacatttctcatgac

SEQ ID NO: 12613 - DNA, 80 bp, synthetic construct
  source 1..80: mol_type = other DNA
gtctgttttcctagataatccatttcctaaggacaagagcccacccagtgatgctcaaacaggtatagacaggctccaag

SEQ ID NO: 12614 - DNA, 80 bp, synthetic construct
  source 1..80: mol_type = other DNA
cgggactgggcggggcggggcatcagaactcaggtgttttttatttacgcgtcagggcttttcttgtttaataaagttat

SEQ ID NO: 12615 - DNA, 80 bp, synthetic construct
  source 1..80: mol_type = other DNA
ccccatggatctcccatctcccggaggaaccgtgaagccaaacagaagcgcctgcgagagaagcaggcgactctggaggc

SEQ ID NO: 12616 - DNA, 80 bp, synthetic construct
  source 1..80: mol_type = other DNA
tcttggaagggaaataggaagggcaggaatgagtgaggataaacatttaagctcaggggctcacaggagggcatttttgt

SEQ ID NO: 12617 - DNA, 80 bp, synthetic construct
  source 1..80: mol_type = other DNA
cgagagtgttttaccatggatgttgtgagtgttctgtgccttggtccctgtgagtgatgggcgatgtttagggatctgtg

SEQ ID NO: 12618 - DNA, 80 bp, synthetic construct
  source 1..80: mol_type = other DNA
catctctcacatgtaccttggtagtgttcacctcagcgtgggcacttacccagggtcttctgggggatgtacaaaaagtg

SEQ ID NO: 12619 - DNA, 80 bp, synthetic construct
  source 1..80: mol_type = other DNA
tgagaggtgaggatgatgaccagctgtaagtgtttaaatgtttatcttcagatgcagaggttgtggtaggaaccacaagg

SEQ ID NO: 12620 - DNA, 80 bp, synthetic construct
  source 1..80: mol_type = other DNA
gatccctctcccttcccttcagcatctacacgggcgacagcttcgtcaccccttgatggggcagcctcttcccctcatca

SEQ ID NO: 12621 - DNA, 80 bp, synthetic construct
  source 1..80: mol_type = other DNA
ctgaagaaccagtggtttgtccgctgccaggaaatgggggcccgagctgccaaggtgaggctgcagtgtaggaaggactg

SEQ ID NO: 12622 - DNA, 80 bp, synthetic construct
  source 1..80: mol_type = other DNA
cagggaggccaggggcagagctgaccctggagaggggtgagtgcctgagctggggagggatgtacaggggagcgggggcc

SEQ ID NO: 12623 - DNA, 80 bp, synthetic construct
  source 1..80: mol_type = other DNA
ccatccccaggtgctgcaggaaaagctgagaagcggaaatttggaccctgcagagctggccattgtggctgcagcacagg

SEQ ID NO: 12624 - DNA, 80 bp, synthetic construct
  source 1..80: mol_type = other DNA
taggagaggagaggagacgagggagtctcagttcccctcttcctgggactggttttggcagtgcagcccaggcactgttg

SEQ ID NO: 12625 - DNA, 80 bp, synthetic construct
  source 1..80: mol_type = other DNA
cttggagtgggtctgtgggtgaatgggggggagcaccttctgaaggggtttgctgcagggggctcatctgcaggaatggt

SEQ ID NO: 12626 - DNA, 80 bp, synthetic construct
  source 1..80: mol_type = other DNA
ctttccagtgctgctgcagagctcagagcctggggaccagggcctcttcgaggccttcttggagcccctgggcaccctgg

SEQ ID NO: 12627 - DNA, 80 bp, synthetic construct
  source 1..80: mol_type = other DNA
cagtggtgacttttgtgcttctgagttgtcccctgagagcttggtctgggaaaagaggaggaggggtcctcgctggagga

SEQ ID NO: 12628 - DNA, 80 bp, synthetic construct
  source 1..80: mol_type = other DNA
tgaagacgtgtgctcagagaaaagtctccactgggacctaacccaataaattaggtgcaggctctttctggctgctgtaa

SEQ ID NO: 12629 - DNA, 80 bp, synthetic construct
  source 1..80: mol_type = other DNA
gcactgatctaagaccttataggctgtttcaagaactttgcttttcctcctctgaaatggaagctcctttcttttcaagg

SEQ ID NO: 12630 - DNA, 80 bp, synthetic construct
  source 1..80: mol_type = other DNA
aggctggtcttgaactcctgacctcaggtgatccacctgacttggcctcccaaagtgctgggattacaggcgtgagtgag

SEQ ID NO: 12631 - DNA, 80 bp, synthetic construct
  source 1..80: mol_type = other DNA
ccaccccaattacctgtgtggatccatgggccaggggaaccatgtcctgggggtgttctgcctatgtctctttctttggt

SEQ ID NO: 12632 - DNA, 80 bp, synthetic construct
  source 1..80: mol_type = other DNA
caaagaactaccttttcaagcaattccaggaagctggactcataggaggaatttgtcagaaaagactccttcagcttcag

SEQ ID NO: 12633 - DNA, 80 bp, synthetic construct
  source 1..80: mol_type = other DNA
gagtagaacaaggagttgggtctataatggactgtgaacactgcttccccagccttggtggctttctagatgagaaatct

SEQ ID NO: 12634 - DNA, 80 bp, synthetic construct
  source 1..80: mol_type = other DNA
cccaggctggggtgcagtggtgcaatcttctcctggctcagcctcccgagtagctgggattacaggcacccgccaccaca

SEQ ID NO: 12635 - DNA, 80 bp, synthetic construct
  source 1..80: mol_type = other DNA
ctggggatggagattctggtgttggtggaggccccggcacaactggctctcccgggactcataataggccccagagcctt

SEQ ID NO: 12636 - DNA, 80 bp, synthetic construct
  source 1..80: mol_type = other DNA
tgtcatgattagttcctgttgtatcctaagacttttttggctacttcaaggtcatgaaaatattctcctctgcattcttc

SEQ ID NO: 12637 - DNA, 80 bp, synthetic construct
  source 1..80: mol_type = other DNA
cctctgggctcagcatcctggccagttaagtcactcttctaggcactgggtcacttacagtaaaatgttggtgggcctat

SEQ ID NO: 12638 - DNA, 80 bp, synthetic construct
  source 1..80: mol_type = other DNA
aagaaggtgagcaatgccatggtccaatgtgtgggatccctgtgccagtggggctgggacctggtgccccaggattcaga

SEQ ID NO: 12639 - DNA, 80 bp, synthetic construct
  source 1..80: mol_type = other DNA
ctcccctatcccattcaccttagctgggaccatttcctgcaggtagattcctggggtcactggcccccccaggtctcttc

SEQ ID NO: 12640 - DNA, 80 bp, synthetic construct
  source 1..80: mol_type = other DNA
gttcattcacaaacactggttagtgcttattctaaagcagagatcctccacttcagcacaattggtgtcctgggctggat

SEQ ID NO: 12641 - DNA, 80 bp, synthetic construct
  source 1..80: mol_type = other DNA
agggaagggggagctctggggtgctcctaaaaatgagatgtctgcatttctgtataggagtgaatggggacttcgagaca

SEQ ID NO: 12642 - DNA, 80 bp, synthetic construct
  source 1..80: mol_type = other DNA
ggggatacagaagacagaaacagcttgtttcttagtgttcatagcgttggacaacaaatagaaatgaatgaagggggcgg

SEQ ID NO: 12643 - DNA, 80 bp, synthetic construct
  source 1..80: mol_type = other DNA
gatgcctacagagcatttacactgcaccaggtgttgctctagggacttcatccacatttactcatttaatccacatggag

SEQ ID NO: 12644 - DNA, 80 bp, synthetic construct
  source 1..80: mol_type = other DNA
gctggctgctcccattctgcagattttgaagacaagagtgagtgggttacaggtggggagggcttgaggctgggctcggg

SEQ ID NO: 12645 - DNA, 80 bp, synthetic construct
  source 1..80: mol_type = other DNA
tccttttttttttttgtagagacaggtctcgctatgttgcccagactggtctcaaactggtgatcctcctgcctcagact

SEQ ID NO: 12646 - DNA, 80 bp, synthetic construct
  source 1..80: mol_type = other DNA
gatggttgtacgtggaatgaatatctcctggtgaaaacttactagggaaataagtcactaccaaagtagatcgtctgggg

SEQ ID NO: 12647 - DNA, 80 bp, synthetic construct
  source 1..80: mol_type = other DNA
gccttgccattgtggaaatttaattgtatttatcacatatcagaaagtgatgagtgctgtgttattaaaacacagcagag

SEQ ID NO: 12648 - DNA, 80 bp, synthetic construct
  source 1..80: mol_type = other DNA
tttcctccgtgaaatgtaaatttctcagatgtaaaataggggaagttgaccgcttctaaagagccttatggagcattggg

SEQ ID NO: 12649 - DNA, 80 bp, synthetic construct
  source 1..80: mol_type = other DNA
ctaacgtttactcctggtcttctcagctatgccatagaaagaagactccattccataagttacagaccctaaaggggcac

SEQ ID NO: 12650 - DNA, 80 bp, synthetic construct
  source 1..80: mol_type = other DNA
ccacaacaggcaaatcaacggtaacaagaaaatcagataaaactggaagacctttggaaaagtccatgagtactttggat

SEQ ID NO: 12651 - DNA, 80 bp, synthetic construct
  source 1..80: mol_type = other DNA
gagcctacagaaaatagagaaacaacagccaatgagaagaccacaccatccccagcagagcctacagaaaatggacaaag

SEQ ID NO: 12652 - DNA, 80 bp, synthetic construct
  source 1..80: mol_type = other DNA
tcagcagagcctacagaacacgcagaaaggactccactggccaatgagaacaccacatcatccccagcagagcctacaga

SEQ ID NO: 12653 - DNA, 80 bp, synthetic construct
  source 1..80: mol_type = other DNA
tacagaacatggagaaaggaccacatcacccaatgacaagatcacctcatctgcagcagagtctacagaacatagagata

SEQ ID NO: 12654 - DNA, 80 bp, synthetic construct
  source 1..80: mol_type = other DNA
gaataaacatcaaggtttggatggaatcttgagaatagaatcaagacctgaggtgagtgttgtggaaaacaaatcgcaga

SEQ ID NO: 12655 - DNA, 80 bp, synthetic construct
  source 1..80: mol_type = other DNA
aatcataaatatctctcatctacatggttgcttcctcttcctcccaaatcccttagttttcctaaatgtctacagtggac

SEQ ID NO: 12656 - DNA, 80 bp, synthetic construct
  source 1..80: mol_type = other DNA
tttgctgccaggctcctaaacgtaactccatccagaatcaaacagcagggccacaggtcactcgctatctgctcctttgg

SEQ ID NO: 12657 - DNA, 80 bp, synthetic construct
  source 1..80: mol_type = other DNA
ctccctcgttcctccaggttccgctttgcgggcggcttctgatctcttgcggacagctcagattagtggctcgaggccgc

SEQ ID NO: 12658 - DNA, 80 bp, synthetic construct
  source 1..80: mol_type = other DNA
ttgttctctcccgctccctccttcttccctcatattgtcatggccttaagatacccctccctggagagggagcgtccaga

SEQ ID NO: 12659 - DNA, 80 bp, synthetic construct
  source 1..80: mol_type = other DNA
agccaagtgaaatgaaaatatcacttccagaaatactgcctaaattaaaatcctcagtagggctttcataatccccggat

SEQ ID NO: 12660 - DNA, 80 bp, synthetic construct
  source 1..80: mol_type = other DNA
acctcctgccttcttcatgggcttcttccccttccagtttttccttctccttctacagggtccttcccaacaccagccaa

SEQ ID NO: 12661 - DNA, 80 bp, synthetic construct
  source 1..80: mol_type = other DNA
tcctgttctccagaggagacgacttttaacttttagctttttatcccagtatttgcaagtgcagatttaaacatcatgcc

SEQ ID NO: 12662 - DNA, 80 bp, synthetic construct
  source 1..80: mol_type = other DNA
caaggtgattaagacagtatccaatatcatggagggataaattttcttttcaaaacaaaactaaaaatattttttaattc

SEQ ID NO: 12663 - DNA, 80 bp, synthetic construct
  source 1..80: mol_type = other DNA
ctctctccctctctgctttctcctccgccttcttattttcttaaccatgataaaatatacataacttacaatacatcatt

SEQ ID NO: 12664 - DNA, 80 bp, synthetic construct
  source 1..80: mol_type = other DNA
cactgtcacagtacggcttccattttgaaaaaccagtctgcaggtatttctttgctttgggcctctcatttcttttttgg

SEQ ID NO: 12665 - DNA, 80 bp, synthetic construct
  source 1..80: mol_type = other DNA
cagagtgtctctgctcaagctgccctcctatgacctccttgtcacttccacccagacaaggggattcttctgatcagtcc

SEQ ID NO: 12666 - DNA, 80 bp, synthetic construct
  source 1..80: mol_type = other DNA
aacctctgagatcatcgccatctccaccatggactctgagacctccataggctcagaagccaccacaactattgttgcag

SEQ ID NO: 12667 - DNA, 80 bp, synthetic construct
  source 1..80: mol_type = other DNA
acagtcttcgctacagcctctgaaagcagcacaggctctgagaccaccagagcttccacctctgccactgaagtgactac

SEQ ID NO: 12668 - DNA, 80 bp, synthetic construct
  source 1..80: mol_type = other DNA
caatatccacgagcaacatggctgtgagcacagcctctgaggtcacttcagggtctggaagcagcatggcttccaccaca

SEQ ID NO: 12669 - DNA, 80 bp, synthetic construct
  source 1..80: mol_type = other DNA
tgaagagccctataattgctcttctctgtatgtcagatctaacagtgggaaccgccgtcagtcaactgcaaaatttaaat

SEQ ID NO: 12670 - DNA, 80 bp, synthetic construct
  source 1..80: mol_type = other DNA
cgtttatagaagtcaggtaattaatggagttttagcccaggtctgacttatagtgggtcccgtgggtccctggactcatc

SEQ ID NO: 12671 - DNA, 80 bp, synthetic construct
  source 1..80: mol_type = other DNA
ggaagcaacacattccacatttgagtgtgttactccagctcatttattgagtcacccgaaaggctgacagttttgagtgg

SEQ ID NO: 12672 - DNA, 80 bp, synthetic construct
  source 1..80: mol_type = other DNA
cctggctatggccactgctgaatgcccaatttgccagcagcagagaccaacactgagccctcagtatagcaccattcctc

SEQ ID NO: 12673 - DNA, 80 bp, synthetic construct
  source 1..80: mol_type = other DNA
ggactacaaatgacccagacccttcagaaatggaagtttgggtcactccaccaggaaaaaaccatgacctgctgagatgc

SEQ ID NO: 12674 - DNA, 80 bp, synthetic construct
  source 1..80: mol_type = other DNA
atcatatcaccttgctccagtctaagaccaaacaattatgttcattctctggcactttccatcagcaagccggttgcatc

SEQ ID NO: 12675 - DNA, 80 bp, synthetic construct
  source 1..80: mol_type = other DNA
cctgggtacatccactatgggagcatcatctaccacctcagcccccagcttcaggaccactacaggatccacccgtgagc

SEQ ID NO: 12676 - DNA, 80 bp, synthetic construct
  source 1..80: mol_type = other DNA
ttttactgtctcacatagtgtagtataaagaccagggagaaggagaaagacagaaaatataaacgatagatatagcagga

SEQ ID NO: 12677 - DNA, 80 bp, synthetic construct
  source 1..80: mol_type = other DNA
attcacacaagccacaaacagttaacataatttacaatcaacttacctgagtttcttatttcagagtctctgacccctcc

SEQ ID NO: 12678 - DNA, 80 bp, synthetic construct
  source 1..80: mol_type = other DNA
cacaccaccaccaacacaaaacacttctggtgaccaaattaagaggggaagttcttcccacactaagcaagcaatcagtt

SEQ ID NO: 12679 - DNA, 80 bp, synthetic construct
  source 1..80: mol_type = other DNA
accattacccaacttaaaatgtagaatatttctaccatctgagtagtttattttgtggcccttcccagataatacccact

SEQ ID NO: 12680 - DNA, 80 bp, synthetic construct
  source 1..80: mol_type = other DNA
ccatggagatggctgtggagtgaatcatggtgggcgttatggacttggaggaggctacagcaataatcatgaaatgcatc

SEQ ID NO: 12681 - DNA, 80 bp, synthetic construct
  source 1..80: mol_type = other DNA
ggaatgctaaaattaaagactaaataggacccaggaggtaagggaagtactgaagccaacttttgcaaaacccaaagaac

SEQ ID NO: 12682 - DNA, 80 bp, synthetic construct
  source 1..80: mol_type = other DNA
cctcccccagtcctccccactacctttcccagcctctggtaaccattcttctagactctatgtccatgagttcagttgtt

SEQ ID NO: 12683 - DNA, 80 bp, synthetic construct
  source 1..80: mol_type = other DNA
agctattgcaaacagtgctgcaacaaacgttggagtgcggatatttctttgatacactgatttcttttcttttggctacc

SEQ ID NO: 12684 - DNA, 80 bp, synthetic construct
  source 1..80: mol_type = other DNA
ttgttgggggaaatgcagacaactcactttggtcattgcaatggtttggatgtggttgttaaaccctgccaagtctcatg

SEQ ID NO: 12685 - DNA, 80 bp, synthetic construct
  source 1..80: mol_type = other DNA
ccagagaccccaaacatgttttcattatctctcttcattatgtcttctggatctctcttcccctgttccttcaatgtgca

SEQ ID NO: 12686 - DNA, 80 bp, synthetic construct
  source 1..80: mol_type = other DNA
aagcagtcagacacagtggttaaaattgggctctggtctcacattgcctacatttgaattatggctccatctattaactg

SEQ ID NO: 12687 - DNA, 80 bp, synthetic construct
  source 1..80: mol_type = other DNA
ttcatccttctgggaaatcaagggcaaaaatttgacataaccttaactccagccaagcctccaagaagttaaaagccttc

SEQ ID NO: 12688 - DNA, 80 bp, synthetic construct
  source 1..80: mol_type = other DNA
tgcccagcccagtatcaacattttgaagcctcaatttcttcatctcagctggtgataataatagcatctatgttatagca

SEQ ID NO: 12689 - DNA, 80 bp, synthetic construct
  source 1..80: mol_type = other DNA
gggatcagcacagtcaccaattctgagtccagcacaccctccagtggggccaacacagccaccaactctgagtccagtac

SEQ ID NO: 12690 - DNA, 80 bp, synthetic construct
  source 1..80: mol_type = other DNA
aactattgactcttctttttttagagaaacagcctgtccctgagaaacacctttaacacagctgtctaccaccctcatgg

SEQ ID NO: 12691 - DNA, 80 bp, synthetic construct
  source 1..80: mol_type = other DNA
ttctggcctgctgaggtcgaatcttccaagaggctcttgcaaagacccgagattctcataaatccccgcccagaagagct

SEQ ID NO: 12692 - DNA, 80 bp, synthetic construct
  source 1..80: mol_type = other DNA
agaacaaggaatgggtaaggagaatgaagcatctgtaaggaaaccccagggcggcagccacgtctgtgtagggttggatg

SEQ ID NO: 12693 - DNA, 80 bp, synthetic construct
  source 1..80: mol_type = other DNA
tccaagaattaggaatgagtcaagtcatctatgtttgggttctcacaggacttaaaacagttttttcctgcagggatgaa

SEQ ID NO: 12694 - DNA, 80 bp, synthetic construct
  source 1..80: mol_type = other DNA
cgaccaactagagtcaagaacaggcaaatgtggcatgacttattgggagcagaaaaattctgagaaaaaaatatgtaaaa

SEQ ID NO: 12695 - DNA, 80 bp, synthetic construct
  source 1..80: mol_type = other DNA
cactcgtttcagagagcacagggttgggggtaaggtcacagatcaacaggatcccaaggcagaagaatttttcttagtac

SEQ ID NO: 12696 - DNA, 80 bp, synthetic construct
  source 1..80: mol_type = other DNA
tggcgttgtcaacattaaatgattcatattgtccagggggtatgctgaaataagtgcaattattatcctcccaataagtg

SEQ ID NO: 12697 - DNA, 80 bp, synthetic construct
  source 1..80: mol_type = other DNA
tgggattacaggcatgagccaccgtgcctggccacgtccatgtgcttttataacagaatgatttatattcctttgggtat

SEQ ID NO: 12698 - DNA, 80 bp, synthetic construct
  source 1..80: mol_type = other DNA
atggtattgggtgctcatctatggaatggagatgggccatcaatcctcagaagatgcaaggcccagagcccacagtgaag

SEQ ID NO: 12699 - DNA, 80 bp, synthetic construct
  source 1..80: mol_type = other DNA
agaatgctagcaatgagtcccttaagcccagaattacatactgcattaggctctgttatgacgtgaacaaacaaaggata

SEQ ID NO: 12700 - DNA, 80 bp, synthetic construct
  source 1..80: mol_type = other DNA
cccaacagctcttacaaattgtttaccatgttctctattgtagatcatattgagcaggacacattcagatattcagaagg

SEQ ID NO: 12701 - DNA, 80 bp, synthetic construct
  source 1..80: mol_type = other DNA
atatactatgctataatataataaaatactcattgggcatgttacagaacggacactgtgtgcaggaatcttttggttgg

SEQ ID NO: 12702 - DNA, 80 bp, synthetic construct
  source 1..80: mol_type = other DNA
gctgcttcttggtttaggtgctgtactcgtacgttccttactgtcttgtttgagcctttactgctgctgtgttatctgcc

SEQ ID NO: 12703 - DNA, 80 bp, synthetic construct
  source 1..80: mol_type = other DNA
tggagggagaggtgcggagggagaggtgcgagcgggaaccggggctgcacgcggcgcttgcgggccagctggagttccgg

SEQ ID NO: 12704 - DNA, 80 bp, synthetic construct
  source 1..80: mol_type = other DNA
cttcattcctgagccagcgagaccacaaacccaccagaaggaagaaactgtgaacacatgcgaacatcggaaagaacaag

SEQ ID NO: 12705 - DNA, 80 bp, synthetic construct
  source 1..80: mol_type = other DNA
acctcatctctacaaaaaagaaaaccaaaattagttgggagtggtagcatgtgcctgtggtcccagctacttgggaggct

SEQ ID NO: 12706 - DNA, 80 bp, synthetic construct
  source 1..80: mol_type = other DNA
caactctgtaaatatactaaaaaacactggtttatttatttatttattttagacggagtcttgctctgtcgcccaggctg

SEQ ID NO: 12707 - DNA, 80 bp, synthetic construct
  source 1..80: mol_type = other DNA
gtgagtatctcattactcccagcaactggggtgtgcaggtagagtttggaagcatcattacccagctttcgtcatggaat

SEQ ID NO: 12708 - DNA, 80 bp, synthetic construct
  source 1..80: mol_type = other DNA
tgaattgtacaccattttctgtaaggggaaagagcttcctgttcactagtttcttggtttaggtaacaattgtgtatttg

SEQ ID NO: 12709 - DNA, 80 bp, synthetic construct
  source 1..80: mol_type = other DNA
accatatgacatcccagaaaagacaaaactataaaggcagtcaagagtcaatggttgccaggggttacgagggtggggtg

SEQ ID NO: 12710 - DNA, 80 bp, synthetic construct
  source 1..80: mol_type = other DNA
aaatttgaagatgggcactcaagcacataggacatttctacacaaatggtggctccagatagctgaagaagcttaagcag

SEQ ID NO: 12711 - DNA, 80 bp, synthetic construct
  source 1..80: mol_type = other DNA
gcacaggctctgcagctggactgatagtttaattcctgactccatcacttactaactttgtgagtttggccaaattactt

SEQ ID NO: 12712 - DNA, 80 bp, synthetic construct
  source 1..80: mol_type = other DNA
agtttgtacccttgactgttgtttttaatctttaaattgaggcttaaaatatatgcagtaaaatgtgcagagtggacaca

SEQ ID NO: 12713 - DNA, 80 bp, synthetic construct
  source 1..80: mol_type = other DNA
cccagcttcccctagatagactgctattgacctttaccatccatttgtttccttttcttctcttcttccttctttcttct

SEQ ID NO: 12714 - DNA, 80 bp, synthetic construct
  source 1..80: mol_type = other DNA
ggaaaactctagttccaatagcattcttaattccaaattaaaaccaggatctcagtctaaagtcaagtaaaaatccttca

SEQ ID NO: 12715 - DNA, 80 bp, synthetic construct
  source 1..80: mol_type = other DNA
ctccgtgtgactccaatgggctgtctgagatagtactgttcactccagtctttgatttcttacatcaacatatcttccct

SEQ ID NO: 12716 - DNA, 80 bp, synthetic construct
  source 1..80: mol_type = other DNA
tcctcctcacccccattcttttttttttttttggagatggagtgtggctctgtcgcccaggctagagtgcagtgctgcaa

SEQ ID NO: 12717 - DNA, 80 bp, synthetic construct
  source 1..80: mol_type = other DNA
taacatttataactgggtcatataattgcattgtgatgacattataataagtataaatgacctctagtaacatttataac

SEQ ID NO: 12718 - DNA, 80 bp, synthetic construct
  source 1..80: mol_type = other DNA
gcctagtacttgactttggaatgactaaggcagataaatattgtttcctggagtatatgggccagatagaggagctatgg

SEQ ID NO: 12719 - DNA, 80 bp, synthetic construct
  source 1..80: mol_type = other DNA
ggttttgctgtttgcattgtctcagttctctctggctttgcttcatagggatatttgttttggtctctatatttcaagct

SEQ ID NO: 12720 - DNA, 80 bp, synthetic construct
  source 1..80: mol_type = other DNA
ctgaggggcacggcttgggacctgcagcccgccatgcctgagcctcccccacgccgccatgggctcctgtgcagccagaa

SEQ ID NO: 12721 - DNA, 80 bp, synthetic construct
  source 1..80: mol_type = other DNA
tcacgaacccaccagaagaaacgccgaacacatctgaacatcagaaggaacaaactcaggacacaccacttgtaagaact

SEQ ID NO: 12722 - DNA, 80 bp, synthetic construct
  source 1..80: mol_type = other DNA
caacatactctcccagacaagcgatctcagtcagcttcatggctttaaatacaatgtatatttaaatgacttccagtttc

SEQ ID NO: 12723 - DNA, 80 bp, synthetic construct
  source 1..80: mol_type = other DNA
agggtgagagggagtatggggtggagggagtatgggctgaaaatgaatgaatagaataccagtgattttgtgagacaatg

SEQ ID NO: 12724 - DNA, 80 bp, synthetic construct
  source 1..80: mol_type = other DNA
caggccccgggcagtgaggggcttagcacccgggccagtggctgcggagggtgtactaggtcccccagcagtgccggccc

SEQ ID NO: 12725 - DNA, 80 bp, synthetic construct
  source 1..80: mol_type = other DNA
gtagggccttggagaacctttatgtctagctcagggattgtaaatacaccaatcggcactctgtatctagctcaaggttt

SEQ ID NO: 12726 - DNA, 80 bp, synthetic construct
  source 1..80: mol_type = other DNA
ctcagcttctcgagtagctgggattacaggcatgtaattagccacaccatgcctggctaattttgtatttttagtacaga

SEQ ID NO: 12727 - DNA, 80 bp, synthetic construct
  source 1..80: mol_type = other DNA
ggaaaaggtaagaagatcagacgagaaaaatagaaaacaaatatgaagactattaaattcagggccagctacagtggttc

SEQ ID NO: 12728 - DNA, 80 bp, synthetic construct
  source 1..80: mol_type = other DNA
agatcaaaggaagactgaagaactgcaccagactgaagaagactaaagagacagaacaacgaaaaacaacacacgattct

SEQ ID NO: 12729 - DNA, 80 bp, synthetic construct
  source 1..80: mol_type = other DNA
gttcctcagagagaccttttctgactccagtatctaaagcagcaccactgctttctttaacagcacttaagccaatgtgt

SEQ ID NO: 12730 - DNA, 80 bp, synthetic construct
  source 1..80: mol_type = other DNA
tacctccacctccatggcaggctctgaggccaccacaacctcaactgcagactccaaggtgatcacggcatccagcatga

SEQ ID NO: 12731 - DNA, 80 bp, synthetic construct
  source 1..80: mol_type = other DNA
ggcatccaccatgggctctgagaccactatggcctctaccataggccctgagaccaccaaggtctccactgcaagctctg

SEQ ID NO: 12732 - DNA, 80 bp, synthetic construct
  source 1..80: mol_type = other DNA
agcctctactacaggctctgagaccaccacagcctctactacaagctctgagaccaccacagcctctactgaaggctctg

SEQ ID NO: 12733 - DNA, 80 bp, synthetic construct
  source 1..80: mol_type = other DNA
agcctctactgaaggctctgagctcactacagtttctaccacaggctctgagaccatcacagtctctgctgaaggctctg

SEQ ID NO: 12734 - DNA, 80 bp, synthetic construct
  source 1..80: mol_type = other DNA
agagcaccatagcttccactgcaagcttggagcccactgcaacttccctcacaggctctgagaccaccacagtctctatc

SEQ ID NO: 12735 - DNA, 80 bp, synthetic construct
  source 1..80: mol_type = other DNA
aaaatttggcaacctttgctccagtctgagaccaaacaattttgttcattctctggcacttgccatcagcaagccggtta

SEQ ID NO: 12736 - DNA, 80 bp, synthetic construct
  source 1..80: mol_type = other DNA
ctatttgggtggccacttctgaagtcaaatagatcttccacttctgaacccatcgcgataacgtttcctcaaacttctgc

SEQ ID NO: 12737 - DNA, 80 bp, synthetic construct
  source 1..80: mol_type = other DNA
aaagtgagaagcaaagtagaaaaagaggagggaaaagatggagttggggccaaagtgaagggaaatactgacagaacaag

SEQ ID NO: 12738 - DNA, 80 bp, synthetic construct
  source 1..80: mol_type = other DNA
ccaattctgagctgagtgatgtgacactggtagcttaaaatatgctgggttggaaatacttacaccacagcaattgtcaa

SEQ ID NO: 12739 - DNA, 80 bp, synthetic construct
  source 1..80: mol_type = other DNA
gaagagaacatgggcagtttggaaaagtgaaaatctgacattggtgaaacaggcatgtatggtgattagggagaggagac

SEQ ID NO: 12740 - DNA, 80 bp, synthetic construct
  source 1..80: mol_type = other DNA
ttgtgccactgcactccagcctgggcgacagaggaagactctgtctcaaaaaaaaaaaaaaggtcatcatttaatcctca

SEQ ID NO: 12741 - DNA, 80 bp, synthetic construct
  source 1..80: mol_type = other DNA
cattcacatgcagttcaaggccatgtgacattaacctgttgtaataaaggtcagagttgaggatgccttgggggaaaagg

SEQ ID NO: 12742 - DNA, 80 bp, synthetic construct
  source 1..80: mol_type = other DNA
gggttaactgtaactggtcatctctttgcccaggcaaagtaaacaaagcagatgcattctttacaattcggatcactggg

SEQ ID NO: 12743 - DNA, 80 bp, synthetic construct
  source 1..80: mol_type = other DNA
gacttgtagatcgcaatgatgtcttgtatgttaccctaaaggtttgggtgttttcatttccccattgcactgtcacgatg

SEQ ID NO: 12744 - DNA, 80 bp, synthetic construct
  source 1..80: mol_type = other DNA
atgactgactcctttgctcagtctcacaggttaaaatgaaggtgttagttgagctgcatcctcatctggaggctggcatc

SEQ ID NO: 12745 - DNA, 80 bp, synthetic construct
  source 1..80: mol_type = other DNA
tttgtgctatcttcagcctgaatttgtggtaatttgtcacgcagcaataagaaactaatacagggcctgaggaaaatctg

SEQ ID NO: 12746 - DNA, 80 bp, synthetic construct
  source 1..80: mol_type = other DNA
atagaggcgctccccttttgtttttgaagaatttatagaagcttttccaccggggagcttcagctaggtcttctcatcag

SEQ ID NO: 12747 - DNA, 80 bp, synthetic construct
  source 1..80: mol_type = other DNA
cttctttgaaagagaaaaagaagaggtggcattctgtgaaggaacatcaaggaccagacatccagcttcccctgcagccc

SEQ ID NO: 12748 - DNA, 80 bp, synthetic construct
  source 1..80: mol_type = other DNA
taacctaaggcatcgacacacagttttgggattcttccctcaaatctaaattggcaatccttatgttagtccagacaaca

SEQ ID NO: 12749 - DNA, 80 bp, synthetic construct
  source 1..80: mol_type = other DNA
taagggctttaggggctggctctggggtcagactgccttgatttaaatcgttgttccactacctactaactgtctgacct

SEQ ID NO: 12750 - DNA, 80 bp, synthetic construct
  source 1..80: mol_type = other DNA
cagagacagcaggtgagaaccagcaagagagagggctagaaaagctggtacatgttcagaggaaattgatgaggagagaa

SEQ ID NO: 12751 - DNA, 80 bp, synthetic construct
  source 1..80: mol_type = other DNA
ggcaggactggcttgccctgctacggtctagatcctcagcagctcccccaaaaccaggcctcagagggcacacatgccag

SEQ ID NO: 12752 - DNA, 80 bp, synthetic construct
  source 1..80: mol_type = other DNA
gcaagacctcatctctacaaaacatacaaatattagtcgggtatagtaatgcacacctgtagttctagctacttgggagg

SEQ ID NO: 12753 - DNA, 80 bp, synthetic construct
  source 1..80: mol_type = other DNA
tcactttaaggtgtagtgggacacaattttttccccaataagaacacttcaatcagctgagtgagtagaaaatagaggct

SEQ ID NO: 12754 - DNA, 80 bp, synthetic construct
  source 1..80: mol_type = other DNA
cattctgaaaatggcaaaattatagggaaagaaacaagatccatgttgccagggtttgggaagtgggagaagggttggct

SEQ ID NO: 12755 - DNA, 80 bp, synthetic construct
  source 1..80: mol_type = other DNA
tgagcaaccctcatctgaaaatccaaaatgctccaaaatccaaaacttgctgagcaccaacatgacaccacaagtcaaca

SEQ ID NO: 12756 - DNA, 80 bp, synthetic construct
  source 1..80: mol_type = other DNA
cagcactttgggaggccaagacaagtggattgcttgagcccaggagtttaagaccagcctgagcaatatgacaaaacttt

SEQ ID NO: 12757 - DNA, 80 bp, synthetic construct
  source 1..80: mol_type = other DNA
attgacatgaggaaaagctaggggaaaaatatacgggaactctgttaattatttttgtaattctctgtaagtctaaaatt

SEQ ID NO: 12758 - DNA, 80 bp, synthetic construct
  source 1..80: mol_type = other DNA
gtcagagaaggaggaaaagatgtgggtattctcattcaggcctgacctcaccacaagtggactaattttgtgcagtgata

SEQ ID NO: 12759 - DNA, 80 bp, synthetic construct
  source 1..80: mol_type = other DNA
gctgctcctccctccaggaaggaagacccggagctctggcttccctcggcaaagcacatataaacccacagccactgcgg

SEQ ID NO: 12760 - DNA, 80 bp, synthetic construct
  source 1..80: mol_type = other DNA
tattagaaaaatgtggagcgtcagcagtagggagggatgactagatttgggcagagtaccaaaagttcaaaatttatgcc

SEQ ID NO: 12761 - DNA, 80 bp, synthetic construct
  source 1..80: mol_type = other DNA
agcatttccactaagcacccagagaccagccctaaagactcaagaataagagaaaatgatgtaactgcagatggaaggac

SEQ ID NO: 12762 - DNA, 80 bp, synthetic construct
  source 1..80: mol_type = other DNA
cacaaacatggtaagacacagcgggagtcagggcaaagcatgaaccgttaggtacagatggatgtaaaagaggaaatttt

SEQ ID NO: 12763 - DNA, 80 bp, synthetic construct
  source 1..80: mol_type = other DNA
cctgctccaagatgcaaatccacagctttggatcagtttgtaagtgtgagtaaagccgaaagtaatgcatgatacagatg

SEQ ID NO: 12764 - DNA, 80 bp, synthetic construct
  source 1..80: mol_type = other DNA
cacatttttggcaagtattgatctctagtagtcagtgtcaggatctgaagaaaacagtgacatctagcagactcccagag

SEQ ID NO: 12765 - DNA, 80 bp, synthetic construct
  source 1..80: mol_type = other DNA
atatttattcagtgcctagcatgagctcaacactctacgtctcccagtctgtctatctcagtctacctgtaagctgaagg

SEQ ID NO: 12766 - DNA, 80 bp, synthetic construct
  source 1..80: mol_type = other DNA
aagagattttttgagaactcgccatgttggcttaaacgtaaatatatatgaaacagaaaatgaagtataaactccttatg

SEQ ID NO: 12767 - DNA, 80 bp, synthetic construct
  source 1..80: mol_type = other DNA
atgagatgagcagtgtgccggagctcagtgaggtgagcttcttgtgattccagctaaatgggatcctaaatgatatgaca

SEQ ID NO: 12768 - DNA, 80 bp, synthetic construct
  source 1..80: mol_type = other DNA
acttgggaggctaaggcaagaggctcgcttgagcccaggaggtggaggctgcagtgagccatgactgtgccactgtactc

SEQ ID NO: 12769 - DNA, 80 bp, synthetic construct
  source 1..80: mol_type = other DNA
gacacttataagttgtcgcacatatctgtgcattccatgcctttggtaaatgcatacagttaatcatacagctaatcctc

SEQ ID NO: 12770 - DNA, 80 bp, synthetic construct
  source 1..80: mol_type = other DNA
gagatgctgtcttaaaaaaataataataaaaataaaatggagatgtccactggctgcagtggttcaggcctgtaatccca

SEQ ID NO: 12771 - DNA, 80 bp, synthetic construct
  source 1..80: mol_type = other DNA
gggcactttgagctgctgtcacatatgtggattcttttgatcttcacatcacctctgtgaggtaggagaaccatcctgtc

SEQ ID NO: 12772 - DNA, 80 bp, synthetic construct
  source 1..80: mol_type = other DNA
cctgtctacttccctctacacagacacagcaacaatctgatttctctatcttttccccacatttccccctttctattcga

SEQ ID NO: 12773 - DNA, 80 bp, synthetic construct
  source 1..80: mol_type = other DNA
gagggagagggaggggagggagagggaggagagggaggagagggagagggaggagagggagagggaggagagggagaggg

SEQ ID NO: 12774 - DNA, 80 bp, synthetic construct
  source 1..80: mol_type = other DNA
tctgagggcctggagaagttgacttgttttgcatcccacggggtcacccccacctccccctttccttgcactcactgaca

SEQ ID NO: 12775 - DNA, 80 bp, synthetic construct
  source 1..80: mol_type = other DNA
aatgacaatcaaaatagcaaagtagctgtggaaacagtgtccatggcgaccaatggtcccatcttttctttctttctttt

SEQ ID NO: 12776 - DNA, 80 bp, synthetic construct
  source 1..80: mol_type = other DNA
attctactcaaccttggagggttagaaaccaccattagcaagacaggagaagaaggatagatgcataatgttgaggacct

SEQ ID NO: 12777 - DNA, 80 bp, synthetic construct
  source 1..80: mol_type = other DNA
ttttgatgtgactactagaactttgtaaattacacggagctcgctttctgtggacatgtagtctctctcacagagaaata

SEQ ID NO: 12778 - DNA, 80 bp, synthetic construct
  source 1..80: mol_type = other DNA
acaatagtgtcataataatttatttaaaaagaattaaaggccaggcacagtggctcatgctgtaatcccagcactttggg

SEQ ID NO: 12779 - DNA, 80 bp, synthetic construct
  source 1..80: mol_type = other DNA
aggagttcaagaccagcctggggaatatagtgagactctgtccctacaaaaaacaacgagaaaaaattagctaggcatgg

SEQ ID NO: 12780 - DNA, 80 bp, synthetic construct
  source 1..80: mol_type = other DNA
acacagtaatggtgacatgtgaaacccatgtatacaaaggcccaactttacatatatttgggacccaaagggctgactgt

SEQ ID NO: 12781 - DNA, 80 bp, synthetic construct
  source 1..80: mol_type = other DNA
caacaaaaaaaaaacagaagaagaaaatataccaaaatgttaacaatgtcttctatctttatttattggggttagaaatt

SEQ ID NO: 12782 - DNA, 80 bp, synthetic construct
  source 1..80: mol_type = other DNA
atgagcattaatagcagggaatgtaaattagcctatttgttttggctctgctttgcttctgatcattagaggccagcaaa

SEQ ID NO: 12783 - DNA, 80 bp, synthetic construct
  source 1..80: mol_type = other DNA
gaaatttaaaggtaaaatgtcagtgggagaatcccagaagcaggctgatttcacatagcagaaccccagtaaggaatgga

SEQ ID NO: 12784 - DNA, 80 bp, synthetic construct
  source 1..80: mol_type = other DNA
gctggtccagcagcagtagcaagtcccaaactgtggttcttcctcactcccggcaaaggcctcttcccgtggcctcagtg

SEQ ID NO: 12785 - DNA, 80 bp, synthetic construct
  source 1..80: mol_type = other DNA
gatgcccaggccaaagcctgtgaacagtcatgagcaagcaggaaactgggggggtcgcggcatcgggagcccactcactg

SEQ ID NO: 12786 - DNA, 80 bp, synthetic construct
  source 1..80: mol_type = other DNA
aacacattattaaataaaaaatttaaagttgaagaaatcttctaaaaagaagcaaagggtaaagaaatgtagatgggacc

SEQ ID NO: 12787 - DNA, 80 bp, synthetic construct
  source 1..80: mol_type = other DNA
aagcaatcctcccactttggcttcccaaagtgctggtattacaggtgcgcaccataacacctagctgaggacttttcaac

SEQ ID NO: 12788 - DNA, 80 bp, synthetic construct
  source 1..80: mol_type = other DNA
gcatcgaagtgcttttacttctaggaagagagaattaggggttggtaccggactatagcttttgttctgtctttggcttt

SEQ ID NO: 12789 - DNA, 80 bp, synthetic construct
  source 1..80: mol_type = other DNA
atacctctcataaatgtataagcctctcagtttttccttccaatgcattgcagattgtccttatttagccctttcccctg

SEQ ID NO: 12790 - DNA, 80 bp, synthetic construct
  source 1..80: mol_type = other DNA
ttgttttgtttttgagacagagtttcactcttttgcccaggccggagtgaagtggcaagatctctgctcactgcagcctc

SEQ ID NO: 12791 - DNA, 80 bp, synthetic construct
  source 1..80: mol_type = other DNA
ccttttagagagatacactgttctcttttaggaagatgggcatagaagtgcaggaagtcaactagacgtgttaaaatata

SEQ ID NO: 12792 - DNA, 80 bp, synthetic construct
  source 1..80: mol_type = other DNA
ctccagctcgggcaacaagagcgaaagtccatctcaaacaaacaaacaaacaaacaaacaaaaaggtggccaaacttgaa

SEQ ID NO: 12793 - DNA, 80 bp, synthetic construct
  source 1..80: mol_type = other DNA
tccaagactttcctaatgtagagtgattttattgagcctagaccatggatttcccatctgataactctttaagagggatg

SEQ ID NO: 12794 - DNA, 80 bp, synthetic construct
  source 1..80: mol_type = other DNA
tgtattttttttagtagagacggggtttcaccatgctggccaggcgggtctccaactcctgacctcaggtgatctgccag

SEQ ID NO: 12795 - DNA, 80 bp, synthetic construct
  source 1..80: mol_type = other DNA
aaaataaaataaaataaaatggttaaatgggaaatcttaccttatatacattttcatatatataacatacacacacacac

SEQ ID NO: 12796 - DNA, 80 bp, synthetic construct
  source 1..80: mol_type = other DNA
gaaatgacaaaataactaaataaactagtagcaagatacctgaaaggaaaagttgactgccaatcaaaatacgttgctgg

SEQ ID NO: 12797 - DNA, 80 bp, synthetic construct
  source 1..80: mol_type = other DNA
tggcctagcgacagtccctgtttctccgttttcttccttttcatccaataaaacccatctcattcaccattcagattgtc

SEQ ID NO: 12798 - DNA, 80 bp, synthetic construct
  source 1..80: mol_type = other DNA
atacttccccttggctccctttgattggatttatttactccccaatttccttagcaccatctacagtgtcttttccagtt

SEQ ID NO: 12799 - DNA, 80 bp, synthetic construct
  source 1..80: mol_type = other DNA
cttagtgctgggcccattagttacagtagttataattattcaatgtccttcaatgtcatgagaaagtcaccatcagcctg

SEQ ID NO: 12800 - DNA, 80 bp, synthetic construct
  source 1..80: mol_type = other DNA
cctctttccattcctcttactgtacccttctaggattccctgggttttgttaaaagcttctggaactggaatgtagcaaa

SEQ ID NO: 12801 - DNA, 80 bp, synthetic construct
  source 1..80: mol_type = other DNA
acatcctgaatgactatagctcaaacaggtctttgttaggtgaaaataacaggtggaaaaatcactgagcacttcacctt

SEQ ID NO: 12802 - DNA, 80 bp, synthetic construct
  source 1..80: mol_type = other DNA
gtagtcccagctatgtgggaggctgaaatgggaggatcatctgatgctgggaaggtcaagactgcagtgagctgtgactg

SEQ ID NO: 12803 - DNA, 80 bp, synthetic construct
  source 1..80: mol_type = other DNA
ggcaagggaagaacgcctcaagtgagcatgcgtacaactccagtaaacacactgtgcatgccgccctttccaagggctag

SEQ ID NO: 12804 - DNA, 80 bp, synthetic construct
  source 1..80: mol_type = other DNA
tactgctaacagatcaagtcagtatatcataatgagagaaaaattcattatgtaataatggtcaagagattattgaagtg

SEQ ID NO: 12805 - DNA, 80 bp, synthetic construct
  source 1..80: mol_type = other DNA
gagggttaggagattgggagtgactgctcatgggtttgggctttcttttggggttgatgaaaatgttctgaaattgatta

SEQ ID NO: 12806 - DNA, 80 bp, synthetic construct
  source 1..80: mol_type = other DNA
cagagggagattccatccgaaaaaaaagaaaaaaaaagttattattgactgtagtcctcctgttgtgctatcaaatacca

SEQ ID NO: 12807 - DNA, 80 bp, synthetic construct
  source 1..80: mol_type = other DNA
gtttgggaaattctgttatttctctgaataaactttctatctctatgtcttctgtacctcctctttaaagccaataactc

SEQ ID NO: 12808 - DNA, 80 bp, synthetic construct
  source 1..80: mol_type = other DNA
ggcgtttgtcggtatctgggcattgaagagttaggtatttattgtagccttcacagccctgggcttgtttgtgcctgtcc

SEQ ID NO: 12809 - DNA, 80 bp, synthetic construct
  source 1..80: mol_type = other DNA
aagcctgggacttacctttcagggcagcaggctcccctctggacctgccatgagccagaggggcaggtccaggacagaat

SEQ ID NO: 12810 - DNA, 80 bp, synthetic construct
  source 1..80: mol_type = other DNA
accactgggacaggtgatttccctctggctagggctggcccagatgcccccctccacatgcaggtgccggtcgatcccag

SEQ ID NO: 12811 - DNA, 80 bp, synthetic construct
  source 1..80: mol_type = other DNA
atccatctcaaaaaaaaaaacgcatttgcttcttagggggtttcagacatttaagagaatcctatgtattaaatgcaaga

SEQ ID NO: 12812 - DNA, 80 bp, synthetic construct
  source 1..80: mol_type = other DNA
agaggggcacctgaacttgaaggctggtgacagatgtttaaggggccactaacataccagatagattttatcttcctaga

SEQ ID NO: 12813 - DNA, 80 bp, synthetic construct
  source 1..80: mol_type = other DNA
aaatgagaagccaactcaactcttcctcttgatcttagagtcattctctcaagtgtaactcccagtgcaaagcatcacat

SEQ ID NO: 12814 - DNA, 80 bp, synthetic construct
  source 1..80: mol_type = other DNA
agtcttgccctgtcacccaggctagagtgcagtggaatgatcatggctcactgcagcctcaacctcccaggctcgggtga

SEQ ID NO: 12815 - DNA, 80 bp, synthetic construct
  source 1..80: mol_type = other DNA
attgcatattgtacttgaatactccctggacagataatgagaaaaatgaggtttgagtcaccacccctgtcacttgtaac

SEQ ID NO: 12816 - DNA, 80 bp, synthetic construct
  source 1..80: mol_type = other DNA
ggcagggagaaaccaagagagtccaagctgggaaaagaatcaggtgaggaggttgaggtgttgacgaagggagtgtgctt

SEQ ID NO: 12817 - DNA, 80 bp, synthetic construct
  source 1..80: mol_type = other DNA
gcacaattctggaacagctctcccacctggccggggtgagactgaggctccaccctcaagcacttgggcactgatccttt

SEQ ID NO: 12818 - DNA, 80 bp, synthetic construct
  source 1..80: mol_type = other DNA
gccactgcccggagcgagggccgcagcactggagaggtaagagagttcttcaggcagcgcttcccccaggcggtcctcag

SEQ ID NO: 12819 - DNA, 80 bp, synthetic construct
  source 1..80: mol_type = other DNA
tggggtcccactctcttaattgcctctctcagcaacagaaacacttgtttctttttgggagctggattgtttcctcccag

SEQ ID NO: 12820 - DNA, 80 bp, synthetic construct
  source 1..80: mol_type = other DNA
gcaaattttattataaaaatgcaatggctttgttctctccatggcttccgggaggccccaggagtaggcttccctggctg

SEQ ID NO: 12821 - DNA, 80 bp, synthetic construct
  source 1..80: mol_type = other DNA
gtgtcccagaaacccaggaaatcgagactcatgactcccagagaggatggcatctagaaggtgaggaatgctaatggtgg

SEQ ID NO: 12822 - DNA, 80 bp, synthetic construct
  source 1..80: mol_type = other DNA
tctggctgaggggcactgtggtggaatgggaatttaaacagtaggagagaatcaagagaggagctttgaatctaccattt

SEQ ID NO: 12823 - DNA, 80 bp, synthetic construct
  source 1..80: mol_type = other DNA
accgtgctggtccaccaccaccaccacaggcctctgaccccctgacacagagtgggagctggggatgtaggggccggagt

SEQ ID NO: 12824 - DNA, 80 bp, synthetic construct
  source 1..80: mol_type = other DNA
aaggcatttctttgtttgggaagggtgggcaaacaccaaccagaaaaatagaaaattaggtgccaaagtgagtggcctca

SEQ ID NO: 12825 - DNA, 80 bp, synthetic construct
  source 1..80: mol_type = other DNA
ctccatgactctttcacctgcgttccttctgccttccctagcccctccaggtcccacgtgttacaaacagagccacatac

SEQ ID NO: 12826 - DNA, 80 bp, synthetic construct
  source 1..80: mol_type = other DNA
tgtaatgatcaaaagtgctaatataggccgggtgtggtggctcatgcctgtaatcccagcaccttgggaggctgaggcga

SEQ ID NO: 12827 - DNA, 80 bp, synthetic construct
  source 1..80: mol_type = other DNA
gaagttggtgtggccgggaggagcgtggtaatcagcccggtgcatctgcctactcagcagcagcagtggctgcagtgtgg

SEQ ID NO: 12828 - DNA, 80 bp, synthetic construct
  source 1..80: mol_type = other DNA
attgcgttggcctccctcctgctctggcccctgccccgccccagccaattaattgctcactagtattgcgggagtatcag

SEQ ID NO: 12829 - DNA, 80 bp, synthetic construct
  source 1..80: mol_type = other DNA
gccttgtatagaggtgcaggcacaaatgtgagacagagataccatttaaagtgatgctgctcggctgggcacggtggctc

SEQ ID NO: 12830 - DNA, 80 bp, synthetic construct
  source 1..80: mol_type = other DNA
taaagctaatggggcttaggagggaagaaaagggcatcagctgagtgcccacacaggccagggtcaccttcagtgaagct

SEQ ID NO: 12831 - DNA, 80 bp, synthetic construct
  source 1..80: mol_type = other DNA
ctgggtatttaacatgagttgtcttgttcaatcttcacaacagccctacagggtaagtgctttttccccctgtttcacag

SEQ ID NO: 12832 - DNA, 80 bp, synthetic construct
  source 1..80: mol_type = other DNA
acaacaacaccctcctctccttggcgtggaagccagcgctcctggcccactcccagtaggggatgtcctctgagttgttt

SEQ ID NO: 12833 - DNA, 80 bp, synthetic construct
  source 1..80: mol_type = other DNA
catggcattcatctgatgccagtggtgggcaggaccgtgctgtatactttaaaaaaaccctagggggttctgttaggtgc

SEQ ID NO: 12834 - DNA, 80 bp, synthetic construct
  source 1..80: mol_type = other DNA
ggctgtctgagtgcctctgggtgagagtcctcacaggagggagcttctcctactgcccagtgtctccctggcacctgagg

SEQ ID NO: 12835 - DNA, 80 bp, synthetic construct
  source 1..80: mol_type = other DNA
tgtgtgccttgatggtggacccagggagtggatgacattagtgagggaaagagcaaaggctctggaggaaaacacctgag

SEQ ID NO: 12836 - DNA, 80 bp, synthetic construct
  source 1..80: mol_type = other DNA
tattgttctgtaaatctgtgatcctattctgttatttaattccgtgactctgtgttgacatagacgtgacggtgtccctg

SEQ ID NO: 12837 - DNA, 80 bp, synthetic construct
  source 1..80: mol_type = other DNA
attaattaattttttttcctcctaactaattccacgttattggcttgagggtcagtttgaggggtccagacctccttctt

SEQ ID NO: 12838 - DNA, 80 bp, synthetic construct
  source 1..80: mol_type = other DNA
ttcagatatgagctcctgcacttggcaccaagatcttccctaattttcccccgacctgtctctccaacatgtctctctct

SEQ ID NO: 12839 - DNA, 80 bp, synthetic construct
  source 1..80: mol_type = other DNA
aaactaatgagaagttgggcagggtggctcacgcctataatcccaacactttgagaggcggaggcaggagggtttcttga

SEQ ID NO: 12840 - DNA, 80 bp, synthetic construct
  source 1..80: mol_type = other DNA
gcacatgagtggaaccaagctaagtctcatggagggctggggtactgacaccttcatatttgtccaccgttggttaaggt

SEQ ID NO: 12841 - DNA, 80 bp, synthetic construct
  source 1..80: mol_type = other DNA
ggggcctatttaattctactaggctcaacctacaattcttatgtgttctcagattattcctaaaccctaagcttagtttt

SEQ ID NO: 12842 - DNA, 80 bp, synthetic construct
  source 1..80: mol_type = other DNA
gactacaggtgcgggccaccacatctggctaatttcttaaattttctgtagaaacagttttgccatgttgcctaggctgg

SEQ ID NO: 12843 - DNA, 80 bp, synthetic construct
  source 1..80: mol_type = other DNA
aaaaacaaaacaaaactaaactaaacaaatacaaaaaattagtcaggggtggtgcacctgtagtctcagctacgccagag

SEQ ID NO: 12844 - DNA, 80 bp, synthetic construct
  source 1..80: mol_type = other DNA
gaactcaagttacttccaggtctccgtaagtttaggactgtgaagagggcatcctaatagtcaaaaacataagtgttggc

SEQ ID NO: 12845 - DNA, 80 bp, synthetic construct
  source 1..80: mol_type = other DNA
tgtgaggactaagtatggatctcaggaggggacaggaaatattgagaacaccaccttacgggttcagaataaaaccgagg

SEQ ID NO: 12846 - DNA, 80 bp, synthetic construct
  source 1..80: mol_type = other DNA
tttacaaggaccccagctccttaacacagatcccagctccgaggaaactcgtcccccccacgttaatcctgaccgacttt

SEQ ID NO: 12847 - DNA, 80 bp, synthetic construct
  source 1..80: mol_type = other DNA
cttcttcaggcatgcaggggacctccaagcaatgatatccaaggaattccatctggcagccacccaggatgactgcagaa

SEQ ID NO: 12848 - DNA, 80 bp, synthetic construct
  source 1..80: mol_type = other DNA
gtccaagtacgctgatggggacgccctgggcctgaagcgccacagccgctgcctgccgcatgctgctggcccacgtggac

SEQ ID NO: 12849 - DNA, 80 bp, synthetic construct
  source 1..80: mol_type = other DNA
agctcaggtgatccgcgtgcctcagcctcccaaagtgtcaggattacaggcgtgagccaccacacctggctttcttcccc

SEQ ID NO: 12850 - DNA, 80 bp, synthetic construct
  source 1..80: mol_type = other DNA
aggttgtctccttgacaaacagcttcctctttggaaatggcttcactcaggtcctgcaggtcatcgagcaggacagagag

SEQ ID NO: 12851 - DNA, 80 bp, synthetic construct
  source 1..80: mol_type = other DNA
ggaatctgaacctaagtatcttcctcatccctgaaccatcctggagttcctcaggggaaatctgaacatgaactgggtta

SEQ ID NO: 12852 - DNA, 80 bp, synthetic construct
  source 1..80: mol_type = other DNA
catctgtgctactcctggataccttcattacttcctgtaatgaagctttgaacacactttgaggggaaaataataacctt

SEQ ID NO: 12853 - DNA, 80 bp, synthetic construct
  source 1..80: mol_type = other DNA
ggagaaaaagagatgaagtttgcatgggagaaagtggggacagggagtaagggaaaaagagatgcaaggactggtgaaag

SEQ ID NO: 12854 - DNA, 80 bp, synthetic construct
  source 1..80: mol_type = other DNA
cgatctagcaccaatgacgggcaggtccacatgctttaccagctggctgtgccagaagtaggaccaacctggctcatgaa

SEQ ID NO: 12855 - DNA, 80 bp, synthetic construct
  source 1..80: mol_type = other DNA
tctgaaggtcatacaacaattgtaggtaatgaaacaactaggaagttggtaggagagacaaaggctggcaattgatttag

SEQ ID NO: 12856 - DNA, 80 bp, synthetic construct
  source 1..80: mol_type = other DNA
ccatccctgatacctgctgacagcattgaccacaagcctcagctgctcctcggctgaggctgtctgctgctgccaccgac

SEQ ID NO: 12857 - DNA, 80 bp, synthetic construct
  source 1..80: mol_type = other DNA
tcctcagagaggctgtctctgagcatcctacctgaggctgactcaccccacagtctctccgtcacattatcttttgaatt

SEQ ID NO: 12858 - DNA, 80 bp, synthetic construct
  source 1..80: mol_type = other DNA
gtggcatctttgtttctcctctgtcctgcctgggcaacatgagctacagcaagaggagttcacaggaaggagatctaagc

SEQ ID NO: 12859 - DNA, 80 bp, synthetic construct
  source 1..80: mol_type = other DNA
caactgtgcacagcaaatggagagctggcaactcactctccgcagctgccccacaacccatcaggagttcttgtccgatc

SEQ ID NO: 12860 - DNA, 80 bp, synthetic construct
  source 1..80: mol_type = other DNA
aaattttttagacataaaatacaaatctaatcatgttatttccctgcttaaaacctttcaacaggccgggcgcagtggct

SEQ ID NO: 12861 - DNA, 80 bp, synthetic construct
  source 1..80: mol_type = other DNA
ctgttgtcccaccaagtgtcttccagctaccactggacttcacacgcctcttcactggccaactcctattcagcacaaac

SEQ ID NO: 12862 - DNA, 80 bp, synthetic construct
  source 1..80: mol_type = other DNA
tagtccttctccttcaaggcattcctcctgattgcaattaattatgattaaattaaatgtggatgtgtatatcccccacg

SEQ ID NO: 12863 - DNA, 80 bp, synthetic construct
  source 1..80: mol_type = other DNA
ctgagatcgtggaacatgatctccctagagagagctacatacaggaggattcaacatcaaatgtgtatatcattaggcca

SEQ ID NO: 12864 - DNA, 80 bp, synthetic construct
  source 1..80: mol_type = other DNA
ttttctgtggagacggagtctcgctttgttgcccacgctggtcatgaactcctgggctcaagtgatcctcctgcctcagc

SEQ ID NO: 12865 - DNA, 80 bp, synthetic construct
  source 1..80: mol_type = other DNA
gtgggagccattcttggcagagttgaaaggggccgagcttgaaagtgggaggggggaatcagcccagtggaacctgaaga

SEQ ID NO: 12866 - DNA, 80 bp, synthetic construct
  source 1..80: mol_type = other DNA
ttttacccgaatctgggatccctactcccgtccctttttacaacctaatctacctttttctgaaggaattattctggtcc

SEQ ID NO: 12867 - DNA, 80 bp, synthetic construct
  source 1..80: mol_type = other DNA
ccttcctgtttttatcccacctagagaagccgggaagtaggggtttaggtccaatttgttggagtacttaaggactcgtt

SEQ ID NO: 12868 - DNA, 80 bp, synthetic construct
  source 1..80: mol_type = other DNA
gcattaagcagggcagctttgcccctgggtggttgaagcgccaggctggaatgagtaaggtctccacaagaccctgctgc

SEQ ID NO: 12869 - DNA, 80 bp, synthetic construct
  source 1..80: mol_type = other DNA
tgagctcaggagttcgagaccagcctgggcaacatggtgaaaacctgtctctaccaaaaaattaattaatttttttaaaa

SEQ ID NO: 12870 - DNA, 80 bp, synthetic construct
  source 1..80: mol_type = other DNA
attcttccccagaaatcatacagatttctccactcctgactctggtcatttctgtttttgtcctccatatttgcctggtg

SEQ ID NO: 12871 - DNA, 80 bp, synthetic construct
  source 1..80: mol_type = other DNA
tgctttttacattcatatggctttaaccccattcttctagtgcctaaggatggggaactttcaggctcatactagaggtt

SEQ ID NO: 12872 - DNA, 80 bp, synthetic construct
  source 1..80: mol_type = other DNA
tcacagctttgcttttatttccaagtcaaggacaagccgcttcattcactcctgggcatttactcttcttgtgggtctgt

SEQ ID NO: 12873 - DNA, 80 bp, synthetic construct
  source 1..80: mol_type = other DNA
ggtcacttgggtatgagcattggatattcccatccctacctcagtaactgaaggacaaaccaagataagtgtgtctatct

SEQ ID NO: 12874 - DNA, 80 bp, synthetic construct
  source 1..80: mol_type = other DNA
gtctgtgactagatgtgtcagcagagccaggtggtggtgtgaaaaggcaggatcctggaagggttggctctggaccttat

SEQ ID NO: 12875 - DNA, 80 bp, synthetic construct
  source 1..80: mol_type = other DNA
tgaaaggacagaaagagagaccctggcctcgagaacacctgtcaggttatgaaggttagaagttctttgctgggcgcggt

SEQ ID NO: 12876 - DNA, 80 bp, synthetic construct
  source 1..80: mol_type = other DNA
aaaataaaaaatggccaggcacagtggctcatgtctgtaaatcctagcactttgggaggccaaggtgggcagactgcttg

SEQ ID NO: 12877 - DNA, 80 bp, synthetic construct
  source 1..80: mol_type = other DNA
tggtctggtggctaggtagatcctgttgcagacatagtgactttgttttagtccaagcgaaatgatctctcacccttttt

SEQ ID NO: 12878 - DNA, 80 bp, synthetic construct
  source 1..80: mol_type = other DNA
cttttaaaacactgactctagttgacgtgttggccacagacagtagggaggaagcagtataatttgagaagctactgcgg

SEQ ID NO: 12879 - DNA, 80 bp, synthetic construct
  source 1..80: mol_type = other DNA
tgccttcaatcccgcagcagctctatatttgcaaatggcctggagaaatctctcaccatttttcttgtttacaactttgg

SEQ ID NO: 12880 - DNA, 80 bp, synthetic construct
  source 1..80: mol_type = other DNA
cacagtacgccatccccccacagaactcatacggcggggggcatgggggaatcccccacacctcagagcctggcccaacc

SEQ ID NO: 12881 - DNA, 80 bp, synthetic construct
  source 1..80: mol_type = other DNA
cctcaaatttattgaatgtgtgtgtggcgctatccctcaatgcatcaacagccataagcacaatggccagctgctccctt

SEQ ID NO: 12882 - DNA, 80 bp, synthetic construct
  source 1..80: mol_type = other DNA
ggcagattgagggatgtgctttgtttagtggggctggctggcagaaagacgcagaggaggtggagagtgatttgtggagg

SEQ ID NO: 12883 - DNA, 80 bp, synthetic construct
  source 1..80: mol_type = other DNA
tgcccattttcctagtggctcctaaaacaccttccccaatttccccactcaacaccaccctcttgtttttagattataat

SEQ ID NO: 12884 - DNA, 80 bp, synthetic construct
  source 1..80: mol_type = other DNA
gccctgcaaactgaggtcaccttatcccaaatccagacactcttacctcaaatagaggagtcaactctctagctgtagcc

SEQ ID NO: 12885 - DNA, 80 bp, synthetic construct
  source 1..80: mol_type = other DNA
agacaggagagcctatgctcacgtcaaagggatcacagcagactgctggctctgggcatctgagcagcgccatgcaaggg

SEQ ID NO: 12886 - DNA, 80 bp, synthetic construct
  source 1..80: mol_type = other DNA
cctcccaaaatgcatgaaattcccttcctctgactgataaaccctcactcattctccaagacatatcttctctgtcaacc

SEQ ID NO: 12887 - DNA, 80 bp, synthetic construct
  source 1..80: mol_type = other DNA
ttcacctgaagggaaggcttgggagcttaaggacaatggcttctttcttagagacctagtccttgactgagggaaagggt

SEQ ID NO: 12888 - DNA, 80 bp, synthetic construct
  source 1..80: mol_type = other DNA
atgaagtcatagcacagagagtgggttgctgaggaaaagagaatgatgggaaagggttattttccaacaggagtcttacc

SEQ ID NO: 12889 - DNA, 80 bp, synthetic construct
  source 1..80: mol_type = other DNA
tattcccaaacaatcggcaagtctggtgtttatcctagagtgctgcctcccttcacaccccctagtttcaaacagtcagc

SEQ ID NO: 12890 - DNA, 80 bp, synthetic construct
  source 1..80: mol_type = other DNA
aagtgcagtggcacaatcatgaggcccaccccaacctctgcctcccaggctcaagcgatcctcccacctcagcctccaga

SEQ ID NO: 12891 - DNA, 80 bp, synthetic construct
  source 1..80: mol_type = other DNA
gtccagtccgagacaagcgtctctcctcagcagtgggaggggtgatttggctcatccatacttaggaatttggggtttga

SEQ ID NO: 12892 - DNA, 80 bp, synthetic construct
  source 1..80: mol_type = other DNA
accataccccactaattttttgtatttttagtagagatggggtgtgtgtatacatatatatatatatatatatatagcaa

SEQ ID NO: 12893 - DNA, 80 bp, synthetic construct
  source 1..80: mol_type = other DNA
taacacacatcaggttggttattccctgggctacataccttggatagcattatacaaacaagtttcttttagagtcctgg

SEQ ID NO: 12894 - DNA, 80 bp, synthetic construct
  source 1..80: mol_type = other DNA
aaatattgacttaaatcctgtaactatttgatttcaagctttaaattgatctggtattccttgtggggctccaattgcat

SEQ ID NO: 12895 - DNA, 80 bp, synthetic construct
  source 1..80: mol_type = other DNA
accttttataatttttgttaaagagcaggttgatgctttaagaaaaacctgtcacatttttactttaatgtccagttcac

SEQ ID NO: 12896 - DNA, 80 bp, synthetic construct
  source 1..80: mol_type = other DNA
cttccttctgatggccaacccacctctaatgctggccagtctatttcacaagttctaagttttcctggtgtcacagtaac

SEQ ID NO: 12897 - DNA, 80 bp, synthetic construct
  source 1..80: mol_type = other DNA
ggtggtcagagagaaacagaacagggcagggagtgtcacaatgttcttctatacaatgtctggaatctaggaataacatc

SEQ ID NO: 12898 - DNA, 80 bp, synthetic construct
  source 1..80: mol_type = other DNA
acggagtctcactctgtcacccaggctggagtgagatctcagctcactgcaacctccacctcccgggttcaagtgattct

SEQ ID NO: 12899 - DNA, 80 bp, synthetic construct
  source 1..80: mol_type = other DNA
ggtccacctgccttggcctcccaaagtacaggaattacaagcgtgagtcaccacacccagccaattttttgtatttttaa

SEQ ID NO: 12900 - DNA, 80 bp, synthetic construct
  source 1..80: mol_type = other DNA
tcctgacctcaagtgatccacccactttggcctcccaaaatgctgggattacaggcgtgagacaccgtgcccagcaaaaa

SEQ ID NO: 12901 - DNA, 80 bp, synthetic construct
  source 1..80: mol_type = other DNA
aacaagatgaaggaaagcatatgtagtttgctaaaatttatgtggaaagagggaaattatatgtatatacacacacactt

SEQ ID NO: 12902 - DNA, 80 bp, synthetic construct
  source 1..80: mol_type = other DNA
tctcaaaaaaaaaaaaaaattgtctaaaaattatatcactcctttttttttttttttttttgagatggagtcttgctgtg

SEQ ID NO: 12903 - DNA, 80 bp, synthetic construct
  source 1..80: mol_type = other DNA
tgatctctgctcactgtaacctccacctcccgggctccagcgatcctcccacctcagcctcccaagtggctgggattaca

SEQ ID NO: 12904 - DNA, 80 bp, synthetic construct
  source 1..80: mol_type = other DNA
catattatatcagaaactgcagtttaacctccccccacccctggagaattctgcttttcgaatcaggcctttctcttttt

SEQ ID NO: 12905 - DNA, 80 bp, synthetic construct
  source 1..80: mol_type = other DNA
aaagagaagactgctccacaaggaatgtacagttttgatatgtgcagggctcaggtcttcaggggataaataagttccta

SEQ ID NO: 12906 - DNA, 80 bp, synthetic construct
  source 1..80: mol_type = other DNA
actctatctagctgctctggtggggccttggagaacctttatgtctagctcagggattgtaaatacaccaatcggcactc

SEQ ID NO: 12907 - DNA, 80 bp, synthetic construct
  source 1..80: mol_type = other DNA
tcctgcctcgcctccgaaaactctagttttacagatatgaaccatagcgctagctcttactgtctttcttcaacacgtcc

SEQ ID NO: 12908 - DNA, 80 bp, synthetic construct
  source 1..80: mol_type = other DNA
cctgaaggcagctccgcccaccccagcccacagcgccgttattccgtttctatatcagtaaacacttgtcattttccgta

SEQ ID NO: 12909 - DNA, 80 bp, synthetic construct
  source 1..80: mol_type = other DNA
gagcctaggagtttaagaccagcctgggcaaaatggtgaaaccccttctccaccagaaatacaaaaaattagccgggtga

SEQ ID NO: 12910 - DNA, 80 bp, synthetic construct
  source 1..80: mol_type = other DNA
tgtgaagtttatctcagcctcaaagaagtaattcagcaaggatcagtggtttcacttaacagtctggctctgaggctggc

SEQ ID NO: 12911 - DNA, 80 bp, synthetic construct
  source 1..80: mol_type = other DNA
tctaggcctggtgatcatttaatcaaaagagactaacacctgctccctgatgcttacaatctgaaagacaataaagaaaa

SEQ ID NO: 12912 - DNA, 80 bp, synthetic construct
  source 1..80: mol_type = other DNA
tattgttgaggccatctttggaaaaggacttttatgtttacaaagtgataggtgataaaaagaaaaaataggccaggtgc

SEQ ID NO: 12913 - DNA, 80 bp, synthetic construct
  source 1..80: mol_type = other DNA
accagaaccagggagatgagacataccagggctgggcagctgtgggggtccttccagagaggagctgagatacgcctacc

SEQ ID NO: 12914 - DNA, 80 bp, synthetic construct
  source 1..80: mol_type = other DNA
taccctgtacagaacacgtgcatttccacctgttctcagactgaccctttgctcatcacaatagtgaaaaaaaacacagc

SEQ ID NO: 12915 - DNA, 80 bp, synthetic construct
  source 1..80: mol_type = other DNA
atctcttcaaagatttttgttcaccttgagggacacattagatctacttttgccaacagtccccattcctccaggctctg

SEQ ID NO: 12916 - DNA, 80 bp, synthetic construct
  source 1..80: mol_type = other DNA
aatcctcaccactttaaggcttaaggttttcttttccatcactgagtctctccctttcctctcattcttccacttacaaa

SEQ ID NO: 12917 - DNA, 80 bp, synthetic construct
  source 1..80: mol_type = other DNA
attgctgggtgaaatatattttctaccaaattccccttacgagacctagaaagcctaatgaacatagctacttacatgtc

SEQ ID NO: 12918 - DNA, 80 bp, synthetic construct
  source 1..80: mol_type = other DNA
agacagctctatactaagaccagtcccttagagactgataccaaatctattatgctcatgttattcaaaagaatttggga

SEQ ID NO: 12919 - DNA, 80 bp, synthetic construct
  source 1..80: mol_type = other DNA
aaagcaacctactctcactctctatctgtatctccctctctcaggtaacacacagaaaaacaaccaaatcctcttagaga

SEQ ID NO: 12920 - DNA, 80 bp, synthetic construct
  source 1..80: mol_type = other DNA
attaactcagtcttgctggctttgcatgactaccaaaatttaaaaatgtgcaaaacctgtttctcgggaagaatgggcca

SEQ ID NO: 12921 - DNA, 80 bp, synthetic construct
  source 1..80: mol_type = other DNA
ctctccctttccccatgtaccaacatcacaagatccaccgctgagcaggattccttgttcccttgggattaatgctatcc

SEQ ID NO: 12922 - DNA, 80 bp, synthetic construct
  source 1..80: mol_type = other DNA
tctcatcctcccgtatgattatgggtcctaagatcttttagggaggaattgaggcaggatagggagtcaaggaagtaact

SEQ ID NO: 12923 - DNA, 80 bp, synthetic construct
  source 1..80: mol_type = other DNA
caagctgatttaaaaatttatatggagaggccgggcacagtggctcatgcctgtaatcccagcactttgggaggccgagg

SEQ ID NO: 12924 - DNA, 80 bp, synthetic construct
  source 1..80: mol_type = other DNA
tacatggtgagtaaaccggtagttgtcagaggctgggaggtgggaggattggggaggggtaagcaaatgacacaaaattt

SEQ ID NO: 12925 - DNA, 80 bp, synthetic construct
  source 1..80: mol_type = other DNA
aatttaatttaaaaaagacagtgttgtattggcaaaagaatagacaaatagatcaatgaaacagaatagagaaccaagaa

SEQ ID NO: 12926 - DNA, 80 bp, synthetic construct
  source 1..80: mol_type = other DNA
tgagtaaaataaggctgaaccctactgggccacattcccagacggttaaggcattctaagtcataggatgagacagaagg

SEQ ID NO: 12927 - DNA, 80 bp, synthetic construct
  source 1..80: mol_type = other DNA
tattcacagattctatttatttatggcttaggactacctactgtaaattactgggggccagtccattttggagttcataa

SEQ ID NO: 12928 - DNA, 80 bp, synthetic construct
  source 1..80: mol_type = other DNA
tgtttgagtgcttgtcttctttgcgactccaagctcttgtttttttttttctaaatagctgctatctttttgtttttgtt

SEQ ID NO: 12929 - DNA, 80 bp, synthetic construct
  source 1..80: mol_type = other DNA
acatgtgaaaagaagggagggaggaagaagtcagttatgcattcacatcatgttcagtaaatctatattttacataagct

SEQ ID NO: 12930 - DNA, 80 bp, synthetic construct
  source 1..80: mol_type = other DNA
accaacgtatctgcaaaataagttttagtcttattatacttggtctgattatttgcataaagcgcagcaagaataattat

SEQ ID NO: 12931 - DNA, 80 bp, synthetic construct
  source 1..80: mol_type = other DNA
gcctcaaattttgcttacaagagtacgcttcattgtgaaaagctgtaaatgttcaaaagaaaagttttcttgactctgaa

SEQ ID NO: 12932 - DNA, 80 bp, synthetic construct
  source 1..80: mol_type = other DNA
aactgcatttagataggtgcttttaatttggcctgtatcttttaactggaccattgaactcagggtagagcccacactga

SEQ ID NO: 12933 - DNA, 80 bp, synthetic construct
  source 1..80: mol_type = other DNA
tttagccaggaggaacagttgatattcctggcttttcaccttctttaccaaaaggtatcctcccaagtgccttaaccaaa

SEQ ID NO: 12934 - DNA, 80 bp, synthetic construct
  source 1..80: mol_type = other DNA
ggtcaagatccagaacctgaagaaacagataaggaaggaggcaccaagagagcctgggaggagacacccaagcttcccac

SEQ ID NO: 12935 - DNA, 80 bp, synthetic construct
  source 1..80: mol_type = other DNA
ctcctgggttcaagcgattcttgagcctcagcctctcgagtagctgggattacaggcgctcgtcatcacgcccggttatt

SEQ ID NO: 12936 - DNA, 80 bp, synthetic construct
  source 1..80: mol_type = other DNA
tgaaaggaggcagagggtagaaacagaagacccaaagagggaagacacccagagggagggaagaggatgtaaggtgtgaa

SEQ ID NO: 12937 - DNA, 80 bp, synthetic construct
  source 1..80: mol_type = other DNA
ggcatcggtttggggaaagagtcagttggagtaaagttatcttgaggcattaacttttttgcttcttaaggccattggtc

SEQ ID NO: 12938 - DNA, 80 bp, synthetic construct
  source 1..80: mol_type = other DNA
tatgtgtacagtggggacacttttctgtcagtgtttcttctagtatggttaagggggtaacaacatcaaaacaatgtaca

SEQ ID NO: 12939 - DNA, 80 bp, synthetic construct
  source 1..80: mol_type = other DNA
ttttccttcaactttgctctagaaaaaagaagtgtccaaggcctatttttttagccctagctattcagacagtgttatct

SEQ ID NO: 12940 - DNA, 80 bp, synthetic construct
  source 1..80: mol_type = other DNA
cttgggttctggaaactgctcccttcgttgctctttcaagcttcaagatgaaaacagtttcctgccaggaataatcccag

SEQ ID NO: 12941 - DNA, 80 bp, synthetic construct
  source 1..80: mol_type = other DNA
ccaggcacaaatcccagcacacggggggatccagacaaatacacaagaaatgaccacagcaggaactttattgagcacgg

SEQ ID NO: 12942 - DNA, 80 bp, synthetic construct
  source 1..80: mol_type = other DNA
aattaaaatcactgactattccaaatgttggtgcgaatatggaccatcaagagctgtcacacactttgtctagcagtgtg

SEQ ID NO: 12943 - DNA, 80 bp, synthetic construct
  source 1..80: mol_type = other DNA
tggcttttaaaatccatttaattttaattaattaaagtgtaaatagtgccatgtggacaaggcagaattacagtgccgag

SEQ ID NO: 12944 - DNA, 80 bp, synthetic construct
  source 1..80: mol_type = other DNA
cacaggaattgtaaatgcaaaccgttcactgtcttgcttagctaagggtatagtaaagaaagagtccttcctggctgtaa

SEQ ID NO: 12945 - DNA, 80 bp, synthetic construct
  source 1..80: mol_type = other DNA
caatttgaatttccccattgtaatctgaatcaatgacccctgtatgtatttgtactccttttaaacttaaactaggcctt

SEQ ID NO: 12946 - DNA, 80 bp, synthetic construct
  source 1..80: mol_type = other DNA
gagtttcggcctgggcattgcaagcagcctgaatggaagcttcatctgcccaccaagttttaaattgtaagaattgagca

SEQ ID NO: 12947 - DNA, 80 bp, synthetic construct
  source 1..80: mol_type = other DNA
tgataagcattgtttctatagattatagattaactaaaagtattccttacaggaaacaaagggatgggctgaaatgaagg

SEQ ID NO: 12948 - DNA, 80 bp, synthetic construct
  source 1..80: mol_type = other DNA
ctcgaactcttgacctcattcctagagcattttttccattcatcttttattagtattcagatacacctagcagctggtat

SEQ ID NO: 12949 - DNA, 80 bp, synthetic construct
  source 1..80: mol_type = other DNA
ctcataggtttagctgtggtcctgctatagagtttgttaagaaaacttccctgagttgttttaaatggtcttatcaaagc

SEQ ID NO: 12950 - DNA, 80 bp, synthetic construct
  source 1..80: mol_type = other DNA
tgttcaaggcaactctctgtgttctgttacttatattggccgcgtcttcaggaatttagcgaaatggccatgttgtctct

SEQ ID NO: 12951 - DNA, 80 bp, synthetic construct
  source 1..80: mol_type = other DNA
cccccatcccagtaaatctaaggcaagggcctagggctcttgcactttattttcaccatgcattttccttctctggttaa

SEQ ID NO: 12952 - DNA, 80 bp, synthetic construct
  source 1..80: mol_type = other DNA
catgatccttaaaagtaggaagaaagcacataatacctgcaaagccctgggcaaaaatcctcttttacttcagtaatgat

SEQ ID NO: 12953 - DNA, 80 bp, synthetic construct
  source 1..80: mol_type = other DNA
gccagctaccgctcctggccgagattgcgttttctaaagagtaaaacagagtaaatctcttcggcttaactctgtctctt

SEQ ID NO: 12954 - DNA, 80 bp, synthetic construct
  source 1..80: mol_type = other DNA
gcaaaagtatcttccatcacactttgttttctttagtttgatccaccattccctcatcaagaggtaagttctctccatcc

SEQ ID NO: 12955 - DNA, 80 bp, synthetic construct
  source 1..80: mol_type = other DNA
gtgtttgattaaataactagacactatggtttagtaaaattgacacataatacccaccacccgggggtcagcccccccgc

SEQ ID NO: 12956 - DNA, 80 bp, synthetic construct
  source 1..80: mol_type = other DNA
ctgggaagtgaggagcccctctgcccggccaccaccccgtctgggaggtgtgcccaacagctcattgagaacgggccagg

SEQ ID NO: 12957 - DNA, 80 bp, synthetic construct
  source 1..80: mol_type = other DNA
gtcatacttttgctaaagatgatacagctatcttgcatccatctaaaaacactaaccatttcctcagaaaaaaattcaaa

SEQ ID NO: 12958 - DNA, 80 bp, synthetic construct
  source 1..80: mol_type = other DNA
tgggtgtcttagcttccagctcaatggaataatttctgtgtctcctgagggagtattcctccctttggtaaacctctaga

SEQ ID NO: 12959 - DNA, 80 bp, synthetic construct
  source 1..80: mol_type = other DNA
aagatatcatccatgagaactttcccaacctagctagacagaccaacattcaaattcagaaatgcagaggacactagtaa

SEQ ID NO: 12960 - DNA, 80 bp, synthetic construct
  source 1..80: mol_type = other DNA
cagtagaagtggtggactttaataccccactgacaatattagacagatcatcaagacagaaaattaacaaagatattcag

SEQ ID NO: 12961 - DNA, 80 bp, synthetic construct
  source 1..80: mol_type = other DNA
gcagtaatgaagagcctaccaaaaaaaaaaaaaaaaagtgcaggaccagatgattgacaggtgaattctactggatgtac

SEQ ID NO: 12962 - DNA, 80 bp, synthetic construct
  source 1..80: mol_type = other DNA
ggaataatgctaatttgggaggtaaaagatgtctgcaaagagaactactggtcccaaaaagtgtgcattaatgttagcag

SEQ ID NO: 12963 - DNA, 80 bp, synthetic construct
  source 1..80: mol_type = other DNA
attctggatgatttgtgagaatgtttcttggataacattaatgcaaaataactagactttgagtaaagtagattgatctc

SEQ ID NO: 12964 - DNA, 80 bp, synthetic construct
  source 1..80: mol_type = other DNA
aatgcagagagaggtggaatcaaggcatattcctcttgcattccccacgtcacaggcataaaatacatataagtgttttc

SEQ ID NO: 12965 - DNA, 80 bp, synthetic construct
  source 1..80: mol_type = other DNA
aggtactgcaaccatgtggaccactgagtcacatttctttacaccagaaaatgcgcttgctcaaaatgtcagaaagacat

SEQ ID NO: 12966 - DNA, 80 bp, synthetic construct
  source 1..80: mol_type = other DNA
caacgggacaattttttttattatactttaagttctagggtacatgtgcacaacatgcaggttggttacctatgtgtaca

SEQ ID NO: 12967 - DNA, 80 bp, synthetic construct
  source 1..80: mol_type = other DNA
atttctccatatcctctccagcacctgtggtttcctgactttttaatgattgccattctaactggtgtgagatagtatct

SEQ ID NO: 12968 - DNA, 80 bp, synthetic construct
  source 1..80: mol_type = other DNA
tggccattttcacaacattgattcttcctattcatgagcatggaatgttcttccatttgtttatgtcctcttttatttcg

SEQ ID NO: 12969 - DNA, 80 bp, synthetic construct
  source 1..80: mol_type = other DNA
atatttacagtattctctgatggtagtttgtatttctgtgggatcggtggtgatatcccctttatcattttttattgtgt

SEQ ID NO: 12970 - DNA, 80 bp, synthetic construct
  source 1..80: mol_type = other DNA
ccatttacatttaaggttaatattgttatgtgtgaatttgaccctatcgttatgatgttagctggttattttgcctgtta

SEQ ID NO: 12971 - DNA, 80 bp, synthetic construct
  source 1..80: mol_type = other DNA
agatgtcctttttgttgatgttattctttctgtttgttagttttccttctaacagtcaggaccctcagctgcaggtctat

SEQ ID NO: 12972 - DNA, 80 bp, synthetic construct
  source 1..80: mol_type = other DNA
atgatctcccctgggataattgttcatgaccaaaaaggattctggtaatgtaccaggatcttctcactgttatgattctt

SEQ ID NO: 12973 - DNA, 80 bp, synthetic construct
  source 1..80: mol_type = other DNA
actgctatggtttgaatgtttccctagaaaagcatctgttggataattcatcctgaatgcaacatttttaagaggtggga

SEQ ID NO: 12974 - DNA, 80 bp, synthetic construct
  source 1..80: mol_type = other DNA
acaagaccagaaatcatccctccactcgcctggagacaaatgtgtatttgacttctctacccaacatttactttgtctta

SEQ ID NO: 12975 - DNA, 80 bp, synthetic construct
  source 1..80: mol_type = other DNA
cagagaagtggtctgaccacaagtttaccagggcagagtttttccccaccctagtaagcctgagggttctgcaagagacc

SEQ ID NO: 12976 - DNA, 80 bp, synthetic construct
  source 1..80: mol_type = other DNA
agatcttacaaacctgggtgttttaatcctagtaagagacaatgccaagcacacaatgccactccaataatctggagtat

SEQ ID NO: 12977 - DNA, 80 bp, synthetic construct
  source 1..80: mol_type = other DNA
gtaaatactcagggttcattgtatcttgccaagaagattaaggacagtgacacacaaggagtgagtttattggccggtgc

SEQ ID NO: 12978 - DNA, 80 bp, synthetic construct
  source 1..80: mol_type = other DNA
gcttagaaaatactcaggccactcctcagaacccctgtctcacaatattatgcacaagaccaaggaatcatttacataac

SEQ ID NO: 12979 - DNA, 80 bp, synthetic construct
  source 1..80: mol_type = other DNA
atcagagatccttttaagaaagaagtcatatcatggccctcttctgctcaaaactgtcctctaactccccatcccactca

SEQ ID NO: 12980 - DNA, 80 bp, synthetic construct
  source 1..80: mol_type = other DNA
aatgggtctgaaaatttgtctcagaaagcacagggactcccgtgtgcaggggctgccctgggcgatgggtgagcctctgt

SEQ ID NO: 12981 - DNA, 80 bp, synthetic construct
  source 1..80: mol_type = other DNA
tagaacaaaaaaaaagacctggtcagagcccgcaggagatgtgggacaagaggaattatggagtaggtgagctcctccac

SEQ ID NO: 12982 - DNA, 80 bp, synthetic construct
  source 1..80: mol_type = other DNA
gtcctgggtctggtcctccccatcccgctgccaggtcagtgtgatctccgcagggtagaagcccagggcccagcacctca

SEQ ID NO: 12983 - DNA, 80 bp, synthetic construct
  source 1..80: mol_type = other DNA
aggtcgcagccagacatcctctggagggtgtgagaccctggccccgcccccgcggtcagcccagtcccccgagccccgcc

SEQ ID NO: 12984 - DNA, 80 bp, synthetic construct
  source 1..80: mol_type = other DNA
gcgcctccccaatgcagacacggcccttggagcctgagaccctgagagccccgcccgggacctgggacttcgtcctgatc

SEQ ID NO: 12985 - DNA, 80 bp, synthetic construct
  source 1..80: mol_type = other DNA
ttaaggcagtcacacaaaatgtattaaataccgaatgcaaagaaccccctgccaggctcttctactgctttagaattctt

SEQ ID NO: 12986 - DNA, 80 bp, synthetic construct
  source 1..80: mol_type = other DNA
tgtaaaaaaattcaccagttttagctgcactttttggtggatattggtaattatttatagtgtaactaccacactgccca

SEQ ID NO: 12987 - DNA, 80 bp, synthetic construct
  source 1..80: mol_type = other DNA
ttgcaaattcaatgattaattccagagactttttcagaattccctagtgttttctacatatacaatgaagctggtgacaa

SEQ ID NO: 12988 - DNA, 80 bp, synthetic construct
  source 1..80: mol_type = other DNA
tcactgctagctggattgaagcacacctcccagatgattctatagacacatggaagaagagggggaatgtggagtatatg

SEQ ID NO: 12989 - DNA, 80 bp, synthetic construct
  source 1..80: mol_type = other DNA
agaagcaacaaaaagcaaaagaagaaatggagaagaaagaacgtgaacaggccaagaaagaggataaagaaatctcagca

SEQ ID NO: 12990 - DNA, 80 bp, synthetic construct
  source 1..80: mol_type = other DNA
aaaggtgaagtggcagaagaatttggtataatcatgaaagccccgtggacaggacagtatagatatatcagtccaaaaga

SEQ ID NO: 12991 - DNA, 80 bp, synthetic construct
  source 1..80: mol_type = other DNA
ctcagcaacacaattcttgaaatgcttatcaagataatggtagcaatagctggccatttagaggaattctaggacagtgg

SEQ ID NO: 12992 - DNA, 80 bp, synthetic construct
  source 1..80: mol_type = other DNA
atgcacacgtatgtttactgcagcactatttacaatagcaaagacttggaaccaacccaaatgtccatcagtgatagatg

SEQ ID NO: 12993 - DNA, 80 bp, synthetic construct
  source 1..80: mol_type = other DNA
cacatcagtgatgaatgcaagagacatttctataagaactggcataaatctaagaagaaggcctttaccaagtactgcaa

SEQ ID NO: 12994 - DNA, 80 bp, synthetic construct
  source 1..80: mol_type = other DNA
gagaggatcaggaaaaatagctaatgggtactaaggcttaatacttgggtgggtactaatgggtacagaaataatctgta

SEQ ID NO: 12995 - DNA, 80 bp, synthetic construct
  source 1..80: mol_type = other DNA
tttcagaactattgtgaatacaaaagtaatcaaagaacagtcctgcccagaaagaggagttatccctaaatatggtgtcc

SEQ ID NO: 12996 - DNA, 80 bp, synthetic construct
  source 1..80: mol_type = other DNA
aaagcaaaagaagcgtgaggttgctaaaggaggaatggtgtgatctccacctttggcgagatccctgtcaccgtgttcag

SEQ ID NO: 12997 - DNA, 80 bp, synthetic construct
  source 1..80: mol_type = other DNA
tgttaattgccattgctattcaatggctaaatctgttaattcatgatgggttgcaaaagagttattatagtctcagtctc

SEQ ID NO: 12998 - DNA, 80 bp, synthetic construct
  source 1..80: mol_type = other DNA
agacacagagctgtgacttgcaggggctggttgattttctcagaactcattaacctaaatccattagttaccatcctgtt

SEQ ID NO: 12999 - DNA, 80 bp, synthetic construct
  source 1..80: mol_type = other DNA
acacagaggataccacgccaagaaaatgaaagcagaaatattggattctccttatttgttaaacctttccctctagaacc

SEQ ID NO: 13000 - DNA, 80 bp, synthetic construct
  source 1..80: mol_type = other DNA
gaggatttgcagaaggcaacaaaggcagtttgtactgtaaaagggggaagagaaggaggtcttgacgggttgtaatatgc

SEQ ID NO: 13001 - DNA, 80 bp, synthetic construct
  source 1..80: mol_type = other DNA
tcacgggaggcatggcttataatgttctaattgactaatggcttcagaaatttcctcaggaagcatcaccactttgattc

SEQ ID NO: 13002 - DNA, 80 bp, synthetic construct
  source 1..80: mol_type = other DNA
gattcccaagtggcccacacccatgcagagtttagtgttcaactagggatgagcataatttgcattcacattgttgatct

SEQ ID NO: 13003 - DNA, 80 bp, synthetic construct
  source 1..80: mol_type = other DNA
taaagaaggacaccctacatatatatgactggcctctttagtattggagagagcacattccatagctcataactttccga

SEQ ID NO: 13004 - DNA, 80 bp, synthetic construct
  source 1..80: mol_type = other DNA
ctaaggacaactgactgtagaaggaaaaaaatttgagtatgcttggataccccagagttaactgtcagggcattagagtc

SEQ ID NO: 13005 - DNA, 80 bp, synthetic construct
  source 1..80: mol_type = other DNA
aaatacaacagacagcagaatcatacaatcatataactgagaaatcagaataattgtataggatataaaattgctaaatg

SEQ ID NO: 13006 - DNA, 80 bp, synthetic construct
  source 1..80: mol_type = other DNA
aagcatagtaagcatagtctgaaataccacattctttccaacccctctctgcacccaatacgtcattagccctgtatttt

SEQ ID NO: 13007 - DNA, 80 bp, synthetic construct
  source 1..80: mol_type = other DNA
ttgctaccaccatcctctcagtcaagtgggaataatctggtgagcatagcagatgccaatcagttcataaaaagctcaat

SEQ ID NO: 13008 - DNA, 80 bp, synthetic construct
  source 1..80: mol_type = other DNA
agcacattggtaggctacaagatcaaaatacaaaaattgagtgtgcttctatagagtatcaatgcattaatacaaatgtt

SEQ ID NO: 13009 - DNA, 80 bp, synthetic construct
  source 1..80: mol_type = other DNA
tagaaagcaggctagcagtagctcaaatttgtgaacattaagttattacatgacccagcaatcccctcctatgatacagt

SEQ ID NO: 13010 - DNA, 80 bp, synthetic construct
  source 1..80: mol_type = other DNA
tgataatgagctgtctggaatgtcttcctagagaactggctgaagcacatgcatgcaaaaggaaggcaatggctgaagaa

SEQ ID NO: 13011 - DNA, 80 bp, synthetic construct
  source 1..80: mol_type = other DNA
cagattttcctttagagcctcagaagaaatgcagctctgacgacatgttaattttagcccatagtgacacatttttgact

SEQ ID NO: 13012 - DNA, 80 bp, synthetic construct
  source 1..80: mol_type = other DNA
ggactggctgacctcagtttgacaagcaaatgtgccattagatgatgcaaaccattggtatatctatgagatttagtagt

SEQ ID NO: 13013 - DNA, 80 bp, synthetic construct
  source 1..80: mol_type = other DNA
gctggctacagcaactcctagttaagccagaagtttggaatgagttcaattttgggggattaaattctaatgagaggcag

SEQ ID NO: 13014 - DNA, 80 bp, synthetic construct
  source 1..80: mol_type = other DNA
ggaagatcaggaacaggaatatctggaaagaggcatacagtagatacaaagtgcttggatcttttgtatcagatgttaat

SEQ ID NO: 13015 - DNA, 80 bp, synthetic construct
  source 1..80: mol_type = other DNA
tgggatcccagagaaggaagttcctaccatggaacagagtacaagttacattacgtttaggggtatgtttgttacctgtt

SEQ ID NO: 13016 - DNA, 80 bp, synthetic construct
  source 1..80: mol_type = other DNA
gatagatctagttttagttctttaaggaatctccatactgttttccatagtagttgtactaatttacattctcacaacca

SEQ ID NO: 13017 - DNA, 80 bp, synthetic construct
  source 1..80: mol_type = other DNA
caggaagaaccttgatcagatctgcattccagaatatcactttggtgaagtgtgaagaatgaactgagagatgctagact

SEQ ID NO: 13018 - DNA, 80 bp, synthetic construct
  source 1..80: mol_type = other DNA
gtctcttgatttttgtttccagggattcgatttcataaacacagctcagctctgcagatcatctggcccagtccaggacc

SEQ ID NO: 13019 - DNA, 80 bp, synthetic construct
  source 1..80: mol_type = other DNA
acaccattgactccctccagggcagatataaatctccctttcccccgcatccagcaagcacactccatcagcctatgggt

SEQ ID NO: 13020 - DNA, 80 bp, synthetic construct
  source 1..80: mol_type = other DNA
gtggccctgctcctggaagctcatggaggagcgggaaaatctgacttaacatcaaggttctgaagtccagaggcagccct

SEQ ID NO: 13021 - DNA, 80 bp, synthetic construct
  source 1..80: mol_type = other DNA
ctcctctttcctcaaatatggatgcctccaaggaacataattccagctccaagaggtcctgacgtggggcctggaggacc

SEQ ID NO: 13022 - DNA, 80 bp, synthetic construct
  source 1..80: mol_type = other DNA
ggggtgcgggcctgggctccgggaacccgcacattgcgggcgggagaggcgcagggtgcctgggacgccgccccgctcgc

SEQ ID NO: 13023 - DNA, 80 bp, synthetic construct
  source 1..80: mol_type = other DNA
ggctccatccctacttttgtgtgatcttcattcctatggcattaactatgaaagggaaaaataacaggcacaagccatgg

SEQ ID NO: 13024 - DNA, 80 bp, synthetic construct
  source 1..80: mol_type = other DNA
gaaggcagaaatctagaagagcaagttgagctgcagggttgcttttgtcctgggtgatgttggctgctctgggcagtgtc

SEQ ID NO: 13025 - DNA, 80 bp, synthetic construct
  source 1..80: mol_type = other DNA
atcctggcttggatggttcaatataataatgacattaatttcctacaggactcttaagaactcaaacacatctcaatcaa

SEQ ID NO: 13026 - DNA, 80 bp, synthetic construct
  source 1..80: mol_type = other DNA
acactttcctctgcagtatgcctgtgatagggattctgttgatataggctagtggttttcacaaactgttgcatatagca

SEQ ID NO: 13027 - DNA, 80 bp, synthetic construct
  source 1..80: mol_type = other DNA
aaccaacactgaaattcaacaaagaaagagatactgtgaacactagcaccatatttcaagatctttggaataaatctact

SEQ ID NO: 13028 - DNA, 80 bp, synthetic construct
  source 1..80: mol_type = other DNA
acagacacctataaaaacttagcaaacatacatttgatctaaaatgaggtcttgtaagaatatacacagcatgattccat

SEQ ID NO: 13029 - DNA, 80 bp, synthetic construct
  source 1..80: mol_type = other DNA
aataaaatacccaaaccacacgaaaggaccctgtttatctctgttctctctgggtatagaaaaacatgctgaattcttat

SEQ ID NO: 13030 - DNA, 80 bp, synthetic construct
  source 1..80: mol_type = other DNA
catttacttcttgttgatattccccaaacttcattgtacacaacagcttctctcaaataggatctcacagaatcagttca

SEQ ID NO: 13031 - DNA, 80 bp, synthetic construct
  source 1..80: mol_type = other DNA
ttcattacttgatccatttattcattctaaacccatgtcaaataccattctttaaacctcatcgtgtattaaagttgctt

SEQ ID NO: 13032 - DNA, 80 bp, synthetic construct
  source 1..80: mol_type = other DNA
tccttggcttgtagatatgttctctctatgtcttcacatggtcattcctccgtatctgtctgtgtctaatcttctctttt

SEQ ID NO: 13033 - DNA, 80 bp, synthetic construct
  source 1..80: mol_type = other DNA
tgttttaaataattgaaactgagatctagttccacttatctataaagtagaactgtggagagggaagtgtaccatccccg

SEQ ID NO: 13034 - DNA, 80 bp, synthetic construct
  source 1..80: mol_type = other DNA
tgatgttggttttatgcatgtcttatagctgttttgtccctcatctccttcattcaaaccttcttttgtttttagtcatt

SEQ ID NO: 13035 - DNA, 80 bp, synthetic construct
  source 1..80: mol_type = other DNA
tacatgtaaggatacatacacacagacataaatatcattataaaaacataaagaagtaatgctgataacgtttactgtct

SEQ ID NO: 13036 - DNA, 80 bp, synthetic construct
  source 1..80: mol_type = other DNA
gttcaggctagcaacaggtctgtacttttcctggaacagacctcccagaagaaggggcagactgccatctttcctgttac

SEQ ID NO: 13037 - DNA, 80 bp, synthetic construct
  source 1..80: mol_type = other DNA
actaccagacctgcattacaagaactcctgaaggaagcactaaacatggaaagacagttaccagtcactacaaaaacaca

SEQ ID NO: 13038 - DNA, 80 bp, synthetic construct
  source 1..80: mol_type = other DNA
agttctttgaagataataagaacaaagatacaacgtaccagaatctctgggaaacagtgaaggcagtgttaagagagaaa

SEQ ID NO: 13039 - DNA, 80 bp, synthetic construct
  source 1..80: mol_type = other DNA
aaaaaaacccagaaccagatgattgacaggcaaattctattagatgtacaaagaagagctggtaccattgctactgaaac

SEQ ID NO: 13040 - DNA, 80 bp, synthetic construct
  source 1..80: mol_type = other DNA
cacagctaacttgggaggtaaaaggtctctataagaagaactataaaccactgttcaaagaaatcagagatgatgcaaac

SEQ ID NO: 13041 - DNA, 80 bp, synthetic construct
  source 1..80: mol_type = other DNA
acttaaatgtaagatccaaaactgtaaaaaccctaacacaacctaggcaataccattcaggacataggcatgggcaacga

SEQ ID NO: 13042 - DNA, 80 bp, synthetic construct
  source 1..80: mol_type = other DNA
agaaagaagaggatcaggaaaaataagtaacgggtactaggcttaaaacctgggtgattaaataatctgtgtaccaaaca

SEQ ID NO: 13043 - DNA, 80 bp, synthetic construct
  source 1..80: mol_type = other DNA
tttacagcttccccctcttgattttacagttcttcctcttcaaatctccttaacatatctttagtttgttactcttctta

SEQ ID NO: 13044 - DNA, 80 bp, synthetic construct
  source 1..80: mol_type = other DNA
actccaatagcatctatataaacgctgggatcaaaagactcacaagaacacttcttgtactacgatgcctggttgttaat

SEQ ID NO: 13045 - DNA, 80 bp, synthetic construct
  source 1..80: mol_type = other DNA
tccaagacggacgaagatatttaaatgaggcagtaagctctttggtcctgtaaatttccacaaggcatgactagacaagc

SEQ ID NO: 13046 - DNA, 80 bp, synthetic construct
  source 1..80: mol_type = other DNA
ccagtgggtaagatgatctactattactggtaaatacttaaggcggcctattgggggcatttcagtagagtcaacttgga

SEQ ID NO: 13047 - DNA, 80 bp, synthetic construct
  source 1..80: mol_type = other DNA
taaaacaggtctaacttctgtttgataactaattaaatctaaacatctgtgctctgggcaaagatcaggggtctgtgggt

SEQ ID NO: 13048 - DNA, 80 bp, synthetic construct
  source 1..80: mol_type = other DNA
acttttctatgatctgttctagtatttgaccaaacaaatttggagattctgtaaatccctggggcaaaactgtccatcga

SEQ ID NO: 13049 - DNA, 80 bp, synthetic construct
  source 1..80: mol_type = other DNA
ggcattctctttaaagtgaccttccttcccacacttgaagcatttattctgccctattcctctttttattcccttgttcc

SEQ ID NO: 13050 - DNA, 80 bp, synthetic construct
  source 1..80: mol_type = other DNA
agaagggagaaaatggaagttttggatatcatttttacattgttctaactcacgttgaagtcttcctgagggagggcatt

SEQ ID NO: 13051 - DNA, 80 bp, synthetic construct
  source 1..80: mol_type = other DNA
gtgcttgttacctttcacaccctttaacctccagaatatcccgaccaccaaggaaatactgttgcccttgtgactttttt

SEQ ID NO: 13052 - DNA, 80 bp, synthetic construct
  source 1..80: mol_type = other DNA
ttgtttagctagtggtttatcaattttgtttatgtttttgaagaacaaacttttcactttgttgatcatttacatggttt

SEQ ID NO: 13053 - DNA, 80 bp, synthetic construct
  source 1..80: mol_type = other DNA
cacttttggtttccatagataacctcttgccattcttttaccttctgtctctatggattgtggtgaggtggtattaccgg

SEQ ID NO: 13054 - DNA, 80 bp, synthetic construct
  source 1..80: mol_type = other DNA
acttgtgtatgttttcatggtgataatgtggaaatgttgaaaatgtcgtttcaattccaggtttaggactttcttgagca

SEQ ID NO: 13055 - DNA, 80 bp, synthetic construct
  source 1..80: mol_type = other DNA
ttatttcactatgtatatcttcaagttttggaattcttccttctgcctgacctagtatgttgttgaagctttcaaatgta

SEQ ID NO: 13056 - DNA, 80 bp, synthetic construct
  source 1..80: mol_type = other DNA
atccaacctcaggtacccaggaggagtgcacaggtgcccaaggtggtggattgggttgaggaattcccaggccctggggc

SEQ ID NO: 13057 - DNA, 80 bp, synthetic construct
  source 1..80: mol_type = other DNA
gagtgaacgtgagaaacaatctctagggagggctttttgactattgcttgtaaatttttagaaacagttgtttgctcctt

SEQ ID NO: 13058 - DNA, 80 bp, synthetic construct
  source 1..80: mol_type = other DNA
gcaattcctcaaggacctagaactagaaataccatttgacccagtggtcccattacttggtatatacccaaaggattata

SEQ ID NO: 13059 - DNA, 80 bp, synthetic construct
  source 1..80: mol_type = other DNA
cattcaattcactgaaggtgtaaattaaacaaaacactgacctcccttgagcaagatggaactctatagcagacagccct

SEQ ID NO: 13060 - DNA, 80 bp, synthetic construct
  source 1..80: mol_type = other DNA
caatgcagagataggtggaatcaagacatagtcctcttgcattccacacatcacaggcacaaaatacatataagaagtcc

SEQ ID NO: 13061 - DNA, 80 bp, synthetic construct
  source 1..80: mol_type = other DNA
ctcttgaagggactgaaggtttttctttatttctagattgggaggccccagcaggcttctaaaagaggtccctgctttat

SEQ ID NO: 13062 - DNA, 80 bp, synthetic construct
  source 1..80: mol_type = other DNA
tgaaagcgttcagtcatatgttgccgaaactattcctgtttatggattgcactgggataattgttaatgaccaaagagga

SEQ ID NO: 13063 - DNA, 80 bp, synthetic construct
  source 1..80: mol_type = other DNA
gaatgtttcccccaaaaagcacctgttggatatttcatcccgaatgcaacatttttaagaaataggacttttgagaggtg

SEQ ID NO: 13064 - DNA, 80 bp, synthetic construct
  source 1..80: mol_type = other DNA
aattttcccctgacaatgtaaattaacagcttatcttcacaggtacaggacaaagacaagactagaaatcatccctccac

SEQ ID NO: 13065 - DNA, 80 bp, synthetic construct
  source 1..80: mol_type = other DNA
aatattaatagaaaacatcgtgtggacccagaacctctgagatcttacaaacctgggagttttaatcctagtaagagtca

SEQ ID NO: 13066 - DNA, 80 bp, synthetic construct
  source 1..80: mol_type = other DNA
ttgagcaccctggctgagggtgtccattaaaatgattgggaaggggtggctttgatgtttatttttggtttacaacatgt

SEQ ID NO: 13067 - DNA, 80 bp, synthetic construct
  source 1..80: mol_type = other DNA
agtttccagcctgcttctgtagccttccccacaataaaactagcccccaataccagatatacgactttctgtgtacatta

SEQ ID NO: 13068 - DNA, 80 bp, synthetic construct
  source 1..80: mol_type = other DNA
ctcactcattttacaactatgggtgtccttgattcgtctttctcacaccacagatacaatccattggcaaatgctgtgag

SEQ ID NO: 13069 - DNA, 80 bp, synthetic construct
  source 1..80: mol_type = other DNA
cacaatcaggttctctcttcaggaaagaacagtccttgatgacgggtccaatttcacagacaaatgtaagtctaaattag

SEQ ID NO: 13070 - DNA, 80 bp, synthetic construct
  source 1..80: mol_type = other DNA
atctcaccttttcaagctgtgagagacacatcagagccctgggcactgtcgctgcctggagtagaacaaaaacaggacct

SEQ ID NO: 13071 - DNA, 80 bp, synthetic construct
  source 1..80: mol_type = other DNA
tgctgtacatggcatgtgtatctctgctcttctccagaaggcaccaccacagctgcccacttctggaaggttctatctcc

SEQ ID NO: 13072 - DNA, 80 bp, synthetic construct
  source 1..80: mol_type = other DNA
ggtccaggagcgcaggtcctcgttcagggcgatgtaatccttgccgtcgtaggcgtactggtcatgcccgcggaggaggc

SEQ ID NO: 13073 - DNA, 80 bp, synthetic construct
  source 1..80: mol_type = other DNA
gtggggacgcgtcacgagtatcctggaagaaggacccgacacaagttgggagaagaagtgaaactcaggggagtggggaa

SEQ ID NO: 13074 - DNA, 80 bp, synthetic construct
  source 1..80: mol_type = other DNA
tccaacaaaatgtattaaataccgaatgcaaagaaccctctgccaggctcttccactgctttagaattctttctcctgct

SEQ ID NO: 13075 - DNA, 80 bp, synthetic construct
  source 1..80: mol_type = other DNA
aattcaccagttttagctgcgcttttttggcgaatattggtaattatttatagtcatgtaactaccacactgcccagtag

SEQ ID NO: 13076 - DNA, 80 bp, synthetic construct
  source 1..80: mol_type = other DNA
aattcagtgattaattccagagactttttcagaattccctagtgttttctacatatgcaatgaagttggtgacaaagact

SEQ ID NO: 13077 - DNA, 80 bp, synthetic construct
  source 1..80: mol_type = other DNA
gatgggtgaataggtgcagcaaaccactatggcagactatacgtatgtaacaaacctgcacgttctgcacatgtatctgg

SEQ ID NO: 13078 - DNA, 80 bp, synthetic construct
  source 1..80: mol_type = other DNA
agatgtccttcaaggataggcaaatgagatatttcaggtaaaagaaaattaaaagaatttgtcaccagcagatctgtaca

SEQ ID NO: 13079 - DNA, 80 bp, synthetic construct
  source 1..80: mol_type = other DNA
ccaggtattggggaggctgagatgggaagatcccttgggcttatggattcaagtctgtagtgagctgtgatcgcatcact

SEQ ID NO: 13080 - DNA, 80 bp, synthetic construct
  source 1..80: mol_type = other DNA
tattatgctcttgcttcctgccttgtgcttccttctgccctagaattaatgattgcctaaccacccttcccccttgtttt

SEQ ID NO: 13081 - DNA, 80 bp, synthetic construct
  source 1..80: mol_type = other DNA
tacttctgactttaaaatatatcttaaatcacagtttcttactacatgcaaccctttggttcaaactaccatcatccctc

SEQ ID NO: 13082 - DNA, 80 bp, synthetic construct
  source 1..80: mol_type = other DNA
ggtatacacgtaaggagctttcggtatttcccactagtgaaacttctcagttggagggtatgtgcatcttcatctttaag

SEQ ID NO: 13083 - DNA, 80 bp, synthetic construct
  source 1..80: mol_type = other DNA
agctcctccaagcccgctcgctacaccaggacgcgcggccaagattggccggaaggtttttacttggaaactggaggatg

SEQ ID NO: 13084 - DNA, 80 bp, synthetic construct
  source 1..80: mol_type = other DNA
tgcttttgttctcttttattctatagattctttcttgaaatttatattgtgtggtagaacttcccatagtgtgcattttg

SEQ ID NO: 13085 - DNA, 80 bp, synthetic construct
  source 1..80: mol_type = other DNA
aaagaggaaaatctacaacaagagcagtaggtttgggagctgacaccagaacagctttggaaatggctctcgagccagga

SEQ ID NO: 13086 - DNA, 80 bp, synthetic construct
  source 1..80: mol_type = other DNA
ggtaaaaatactgagaaaaataatactagattgtgtccaccaatgagctataaataaattaaatatcctgcccaggttat

SEQ ID NO: 13087 - DNA, 80 bp, synthetic construct
  source 1..80: mol_type = other DNA
aagctcatgtcctcaagaaaaatgttttactctgctgtttttaagggtgcttctatagaaagagtttgagaatcattaat

SEQ ID NO: 13088 - DNA, 80 bp, synthetic construct
  source 1..80: mol_type = other DNA
ttttcacagttaccacattataatattgaaaatgtctagttttcaacttcaaaaaacatggttatgcatgtatgaaagta

SEQ ID NO: 13089 - DNA, 80 bp, synthetic construct
  source 1..80: mol_type = other DNA
gtctctggtaaacctattctacaattaatgctaaaaggagtgcttcacactgaaataaaaggacattagatggcaacttg

SEQ ID NO: 13090 - DNA, 80 bp, synthetic construct
  source 1..80: mol_type = other DNA
cacaaatgcgcggagaccagtagtggccccgaatgtctggctgctctgttatttattggatacaaagcaaaaagggcagg

SEQ ID NO: 13091 - DNA, 80 bp, synthetic construct
  source 1..80: mol_type = other DNA
agttaggagattatccaaataagatggttcactgggagaaagaatgtttggctttaatgttagggaagttatgtttgcat

SEQ ID NO: 13092 - DNA, 80 bp, synthetic construct
  source 1..80: mol_type = other DNA
aggtgcatgccaccatgtctggcctcatttcattgttattttacttcaaatgctttattttaaatgttaaaatatatgtt

SEQ ID NO: 13093 - DNA, 80 bp, synthetic construct
  source 1..80: mol_type = other DNA
tcagtgtctttagcttcattaggatctgcccagatgtccccattctgattttcaggatcccatttattcccaatcaatgc

SEQ ID NO: 13094 - DNA, 80 bp, synthetic construct
  source 1..80: mol_type = other DNA
ggatgtctatggaaggctgcttcatgctacaagggcagagttaagtctttggtatagagactggttggcaaagttgaaaa

SEQ ID NO: 13095 - DNA, 80 bp, synthetic construct
  source 1..80: mol_type = other DNA
aaaacagtggagatgtcacccatcggggctagagagaatttgggaaatcctgatctgcttctggtttcaggtggggaatc

SEQ ID NO: 13096 - DNA, 80 bp, synthetic construct
  source 1..80: mol_type = other DNA
agattgccatgaggagcaacttagccagaaagacttatttgcctcctcaaaaagcgtaaaattatgtaacataatacttt

SEQ ID NO: 13097 - DNA, 80 bp, synthetic construct
  source 1..80: mol_type = other DNA
ggttctagtggagtaggatgaactgacagatacacagcaaagctccacatacttttccttttctttgtgcctgcaaagtt

SEQ ID NO: 13098 - DNA, 80 bp, synthetic construct
  source 1..80: mol_type = other DNA
aaggacacctagggcaaatggtggctgaaagtgaggaagatccaaattactgttgcttgtactgtattaggaaaagaaaa

SEQ ID NO: 13099 - DNA, 80 bp, synthetic construct
  source 1..80: mol_type = other DNA
ccggtcagagcctgcaggagatgtgggagaggaggaattatggcataggtgagctcctccacatccgtctcccatagtta

SEQ ID NO: 13100 - DNA, 80 bp, synthetic construct
  source 1..80: mol_type = other DNA
atcctcgcatagccaggatcttccttttgtgtttaattgggtcgtggtaggaaactgaagttcaaataaataggttgttg

SEQ ID NO: 13101 - DNA, 80 bp, synthetic construct
  source 1..80: mol_type = other DNA
tctaggcccatacagtcctgtgggcaactgtaatgtgtagctcaatgggctcttgtttgtccccttgtctgagtgcctcc

SEQ ID NO: 13102 - DNA, 80 bp, synthetic construct
  source 1..80: mol_type = other DNA
agtgccacctcaggggcaggtattttctgggcagatggggtgttaacttggggtttgggctcattccacatggaccattt

SEQ ID NO: 13103 - DNA, 80 bp, synthetic construct
  source 1..80: mol_type = other DNA
gcatggcagctgcaatcaagaccactacttggtcaagtctgaagtaatcctgttcattctttaggtcctattgggcttct

SEQ ID NO: 13104 - DNA, 80 bp, synthetic construct
  source 1..80: mol_type = other DNA
accacttgatctagctgaagtagttctagctggaagaatagagaattaaaagaaatctttgtgaagccaccactcaggtt

SEQ ID NO: 13105 - DNA, 80 bp, synthetic construct
  source 1..80: mol_type = other DNA
aaataatggtaccaaaacaggtactctgatatactgcagatgggcctgcaaactggaaatgttttcaggaaaggcagtat

SEQ ID NO: 13106 - DNA, 80 bp, synthetic construct
  source 1..80: mol_type = other DNA
cagtttgtttggtgaaggaaattttgttcaaatcttggtctaagtgggaaagggattctaggggatccagtgcagcagtt

SEQ ID NO: 13107 - DNA, 80 bp, synthetic construct
  source 1..80: mol_type = other DNA
tattgagtagctgtgacttctggatagtcaggtgtcagacaccctttcttgccaggaggcaccaggctcctcaatcagct

SEQ ID NO: 13108 - DNA, 80 bp, synthetic construct
  source 1..80: mol_type = other DNA
aaagtggctgggaaaagattttccaaatcctagtgatgggcacagggccccctaaagttcacttttggaaccttcccatc

SEQ ID NO: 13109 - DNA, 80 bp, synthetic construct
  source 1..80: mol_type = other DNA
gttcctttcttaccttctgaaggtgccatcaacaggaatttctaccctgtggagtctagaggagactttccttgaagctg

SEQ ID NO: 13110 - DNA, 80 bp, synthetic construct
  source 1..80: mol_type = other DNA
ttacaaaatcttcttacacacagctttcaccagctgtaggctgtttccaaacagaggacctagccactcttcttttgcat

SEQ ID NO: 13111 - DNA, 80 bp, synthetic construct
  source 1..80: mol_type = other DNA
ggtaggagatatagtctgttgatcaagatgttcctgggaatttgaacactggacgtctgagcagagacctgaatggtgtg

SEQ ID NO: 13112 - DNA, 80 bp, synthetic construct
  source 1..80: mol_type = other DNA
agtcaaagtccacagagtcagcaagcaagtgtaaaaacctcaggagtctaaggacagtctacatttctccccagaaatgg

SEQ ID NO: 13113 - DNA, 80 bp, synthetic construct
  source 1..80: mol_type = other DNA
caggtccttctcgtggtctttgtctctttttcctggaggtgggggactctgtacttcatgaggagaagttgtctgaagaa

SEQ ID NO: 13114 - DNA, 80 bp, synthetic construct
  source 1..80: mol_type = other DNA
tctcaaaaggccactctgaggttcacaatagtgatgttaccttcaagagtaactggagaagttgcaaatcttatgacctc

SEQ ID NO: 13115 - DNA, 80 bp, synthetic construct
  source 1..80: mol_type = other DNA
tagtcatgaaccactgcaatccacccaaatccaagtttacactaaaagataaaattccaacattgtaggggattggtcag

SEQ ID NO: 13116 - DNA, 80 bp, synthetic construct
  source 1..80: mol_type = other DNA
ttgggagacgattaaaatcttctttatcttcactgtggtagtggagatgtgggtgtgtacaacagctaaaattcaacaag

SEQ ID NO: 13117 - DNA, 80 bp, synthetic construct
  source 1..80: mol_type = other DNA
tcagtgaaggtcactccagtctttcatggaggccaaactaagggtgtaaattaggatcctcactgaagtggcgggaccct

SEQ ID NO: 13118 - DNA, 80 bp, synthetic construct
  source 1..80: mol_type = other DNA
ggaccctgcagtggcgcctaaagtctgagagagggaagtcgcctctgtgctcgtgagtgcatggggtataaggcaagtgc

SEQ ID NO: 13119 - DNA, 80 bp, synthetic construct
  source 1..80: mol_type = other DNA
aaaaattcatggcagggcacaatgagtactatcaggaaggttcaaaccacgggctaaatcagtagttctaaaacttgact

SEQ ID NO: 13120 - DNA, 80 bp, synthetic construct
  source 1..80: mol_type = other DNA
ttaagagaaactgaggaggaagagaggatgatatggtggcagacgtatagagagtctttgtagatctctcacattggagg

SEQ ID NO: 13121 - DNA, 80 bp, synthetic construct
  source 1..80: mol_type = other DNA
ttcccttttgcacctccgggagctgctgctggtgagtggcgttcctggcggtcctcggcggagcgggagcagtgggacgt

SEQ ID NO: 13122 - DNA, 80 bp, synthetic construct
  source 1..80: mol_type = other DNA
tgactctaactttctggtgctgccttttatccgggggggtcttccctccatcccactcccctccagacccccaaggggaa

SEQ ID NO: 13123 - DNA, 80 bp, synthetic construct
  source 1..80: mol_type = other DNA
ttctttgtgctacaaacaatcccattatgctctttcagttatttttaaatgtacaataaattattgttgactgtactcac

SEQ ID NO: 13124 - DNA, 80 bp, synthetic construct
  source 1..80: mol_type = other DNA
atagtttgaaaatattttctcccattcttggatggtctcttcattttgtttattgtttcctttgctgtgcagaagccttt

SEQ ID NO: 13125 - DNA, 80 bp, synthetic construct
  source 1..80: mol_type = other DNA
ggattcgtttcttgatttctttttcagattatttgctgttagcactgatttttgcatgttgattttgtatcctgcaactt

SEQ ID NO: 13126 - DNA, 80 bp, synthetic construct
  source 1..80: mol_type = other DNA
gcccctggtaaccaccattctactttttgtttctatgaatttgaccactctaggtacctcatttaagcagaatcatgtaa

SEQ ID NO: 13127 - DNA, 80 bp, synthetic construct
  source 1..80: mol_type = other DNA
ttcggggttgattgctttttcactctgattgtgccctttgatgcatagatgttttgaattttcatcagtctactttgtca

SEQ ID NO: 13128 - DNA, 80 bp, synthetic construct
  source 1..80: mol_type = other DNA
gaagtttcacctgtgatttcctcttccccagagccccacagtcttcgttataacctcacggtgctgtcctgggatggatc

SEQ ID NO: 13129 - DNA, 80 bp, synthetic construct
  source 1..80: mol_type = other DNA
ttggcacatcgtgtcctgattttcctctattgttagagccactggataaagacagagggtcagggactggaccatccagt

SEQ ID NO: 13130 - DNA, 80 bp, synthetic construct
  source 1..80: mol_type = other DNA
ctatttttgttattattattttctatgtccgttgttgtaagaagaaaacatcagctgcagagggtccaggtgagaaaagc

SEQ ID NO: 13131 - DNA, 80 bp, synthetic construct
  source 1..80: mol_type = other DNA
gatttaatctgtgctctgtggcctcaccttgccctccctgagccaatttccctttctaaaggtggtcactgcctggtaag

SEQ ID NO: 13132 - DNA, 80 bp, synthetic construct
  source 1..80: mol_type = other DNA
cagagcaggaaggcctcgcagcctcaccaagcagcagccctggggtggagctgcgtttccagggttaagcggaccaggca

SEQ ID NO: 13133 - DNA, 80 bp, synthetic construct
  source 1..80: mol_type = other DNA
ctttccctcttggtgcctcagtttcctgacctatgaaacagagaaaataaaagcacttatttattgttgttggaggctgc

SEQ ID NO: 13134 - DNA, 80 bp, synthetic construct
  source 1..80: mol_type = other DNA
taaacagacacttctagtctgttttatttcatgtgtctgggagcggataaagtgtgaggttcagggagaaagagaggtct

SEQ ID NO: 13135 - DNA, 80 bp, synthetic construct
  source 1..80: mol_type = other DNA
attttaaaagtcaaatatttgcataggatttctctagagaaatgagtcctctctgcatcttctcaatttctgccttccta

SEQ ID NO: 13136 - DNA, 80 bp, synthetic construct
  source 1..80: mol_type = other DNA
cccagccgtattactcttttaagaaattacagactttggatattccactttaccttcttggaaatgtccctcctgggccc

SEQ ID NO: 13137 - DNA, 80 bp, synthetic construct
  source 1..80: mol_type = other DNA
attatgcagtacttggagttttttttttttttttgattggcatatttcacttagcaatgactttaaggttcatatacgtt

SEQ ID NO: 13138 - DNA, 80 bp, synthetic construct
  source 1..80: mol_type = other DNA
gtggcagaaatagggcagagcagtgacaagaggctggtgtgagtggagacaagtgagctgggctgagaggagtgggatga

SEQ ID NO: 13139 - DNA, 80 bp, synthetic construct
  source 1..80: mol_type = other DNA
cattactagacaagctgaaacatagactgaaatggagggtttacggttttccttgctacaaattttgttggcccacaatc

SEQ ID NO: 13140 - DNA, 80 bp, synthetic construct
  source 1..80: mol_type = other DNA
gccagaaaatcgtacttgtacccactgcattcccagccctggtgtatgcatctctaggaaatcagaatgaatttggctat

SEQ ID NO: 13141 - DNA, 80 bp, synthetic construct
  source 1..80: mol_type = other DNA
cctaacaggattacttccctgaactgtaaaattcctgcagcattgtatacagagaaagaataggagacatggcaatcatg

SEQ ID NO: 13142 - DNA, 80 bp, synthetic construct
  source 1..80: mol_type = other DNA
gtcccaggtagccttttcctattggcacaactgctggcattcactcaggcaagcttccagcttgcttgtctatgtctgca

SEQ ID NO: 13143 - DNA, 80 bp, synthetic construct
  source 1..80: mol_type = other DNA
gagaaatgtcatacattctttacccattattcttcaatgacatgttacaaactacagcataatatcacaagggacactga

SEQ ID NO: 13144 - DNA, 80 bp, synthetic construct
  source 1..80: mol_type = other DNA
tttctatagtgattgtactagtttacattcctgccagctgtgtaaaagtgttccctttttaccacatccacaccaacacc

SEQ ID NO: 13145 - DNA, 80 bp, synthetic construct
  source 1..80: mol_type = other DNA
atcgggggaatgatttctaatttccctcattcaatataatgttgcctgtaggtttgtcataaatggcttttactaccttc

SEQ ID NO: 13146 - DNA, 80 bp, synthetic construct
  source 1..80: mol_type = other DNA
tctatatgtattctatatattctatatatattctatatatattctatatattctatatatattctatatatattctatat

SEQ ID NO: 13147 - DNA, 80 bp, synthetic construct
  source 1..80: mol_type = other DNA
tatatcctatgtatatatcctatgtatatatcctatatatatatcctatatatatatcctatatatatatatcctatata

SEQ ID NO: 13148 - DNA, 80 bp, synthetic construct
  source 1..80: mol_type = other DNA
acctgactaatacagattttggtaacaggagtggttctagaggaacagaatattaaggatggagttcttttgttagttta

SEQ ID NO: 13149 - DNA, 80 bp, synthetic construct
  source 1..80: mol_type = other DNA
gtgacccatgaggaggtgcactacactcaaaaagagctgtttcagttttctaatttatatcaatagaaatgtggagaaca

SEQ ID NO: 13150 - DNA, 80 bp, synthetic construct
  source 1..80: mol_type = other DNA
ggagacctccagccttttaccagggtaactgtgcactggggagaggaaaatgattagatatttcaggaatacaggacact

SEQ ID NO: 13151 - DNA, 80 bp, synthetic construct
  source 1..80: mol_type = other DNA
gttactccggcccatttatcaagtgacctgaaaggctgccagttttgggtagggtacagaacaggagaaggctctgcaac

SEQ ID NO: 13152 - DNA, 80 bp, synthetic construct
  source 1..80: mol_type = other DNA
cccaccaatgggtgatctaagcagaggaggattttaataatcaaataggatgacccgttctgtggacaccactcagtctg

SEQ ID NO: 13153 - DNA, 80 bp, synthetic construct
  source 1..80: mol_type = other DNA
atagccagaattctcgagtacaggaatcaaggattggaagtggcagcactcaccatcacccctagtgacccactagcaaa

SEQ ID NO: 13154 - DNA, 80 bp, synthetic construct
  source 1..80: mol_type = other DNA
gatacaaagtattgatcctgggtgtgtctatgagggtattgccaaaagagattaacatttgagacagtggaccagggaag

SEQ ID NO: 13155 - DNA, 80 bp, synthetic construct
  source 1..80: mol_type = other DNA
gccttgaatttctgtggtatcagttgtaatatatcctgtttcatttctacttcagctcgtttgggtcttttcttctcttg

SEQ ID NO: 13156 - DNA, 80 bp, synthetic construct
  source 1..80: mol_type = other DNA
aaggctgttttgtctgatataacaatagctactcctgctcacttttggcttccatttgcatgaaatatttccaccccttt

SEQ ID NO: 13157 - DNA, 80 bp, synthetic construct
  source 1..80: mol_type = other DNA
cctcaggtatttcttcatagcagtgtgagaatggactaatacagtaaattagtaccaggagtggggtgctactataaaga

SEQ ID NO: 13158 - DNA, 80 bp, synthetic construct
  source 1..80: mol_type = other DNA
cacatgcagaaaatgtagtctcatagcttccctattgggtgctggactgttggcatttcattattttttttaaatcaaag

SEQ ID NO: 13159 - DNA, 80 bp, synthetic construct
  source 1..80: mol_type = other DNA
gcttctaaatgagaaaatcatcaaaagggtatttagtactcaagtggtggacacaggataaatgctgaaaatcagtgctc

SEQ ID NO: 13160 - DNA, 80 bp, synthetic construct
  source 1..80: mol_type = other DNA
gccacaggacagaaaaaggaaaggagtcgtgaaaaacaagataaggaaaaagatgctcctgacatggggcatcgggagga

SEQ ID NO: 13161 - DNA, 80 bp, synthetic construct
  source 1..80: mol_type = other DNA
tcctgccactgctcctgcaggtggaggctgctcatcccaggaatcagtctgtgagctccaaccttggggcctcggtccag

SEQ ID NO: 13162 - DNA, 80 bp, synthetic construct
  source 1..80: mol_type = other DNA
ttgctggataatatagtggttctatttttagattttttaaaactctccatactgtcttctatagtggctgtactaattta

SEQ ID NO: 13163 - DNA, 80 bp, synthetic construct
  source 1..80: mol_type = other DNA
ctttggctatttggactttttaaaaatgttttgggtccatagaaatattagaattattttttctaattctgtggaaaaat

SEQ ID NO: 13164 - DNA, 80 bp, synthetic construct
  source 1..80: mol_type = other DNA
aaacacgggcaaaatggcttgagactggcatcaggagtgggaggcttgagactggcatcaggagtgggagggggacagtc

SEQ ID NO: 13165 - DNA, 80 bp, synthetic construct
  source 1..80: mol_type = other DNA
cattgctcactgcagcctcgacctccctgtctgaagcaatcctccagcctcagcctcatgagtagctgaaactacaggaa

SEQ ID NO: 13166 - DNA, 80 bp, synthetic construct
  source 1..80: mol_type = other DNA
ctacttcacacttaggctacgtgataagcccattgcttctaggctacaaattatatagcatgttaccgtatggaacattg

SEQ ID NO: 13167 - DNA, 80 bp, synthetic construct
  source 1..80: mol_type = other DNA
tgggtatatacccagtaatgggatggctgggtcaaatggtatttctagttctagacccctgaggaatcgccacactgact

SEQ ID NO: 13168 - DNA, 80 bp, synthetic construct
  source 1..80: mol_type = other DNA
aaaataaagacatacattagcataggctgacacagggtcaagaccaacaatatcaaccatcttcagccttcacatcttgt

SEQ ID NO: 13169 - DNA, 80 bp, synthetic construct
  source 1..80: mol_type = other DNA
ccagaagcatttgccaaaatacaatgaagagaaatggaacccaagcagagaaaatcagtctcatcggcaaaggaaacaga

SEQ ID NO: 13170 - DNA, 80 bp, synthetic construct
  source 1..80: mol_type = other DNA
acattccttcccaccagagaaactccatgcccagacttcttcacctgtcaattctttcaaaaactttttaaaaggcatgt

SEQ ID NO: 13171 - DNA, 80 bp, synthetic construct
  source 1..80: mol_type = other DNA
taacttcaaaatgtcagaataatctaccccaagaatagagaaaagtaggacaacatgtggttatatcaatagatgcagga

SEQ ID NO: 13172 - DNA, 80 bp, synthetic construct
  source 1..80: mol_type = other DNA
tgcaatcagagctcatggtaaccttgaactcctgggtccaagcaattctcctgtctcagcccctcaaaatgctgagattg

SEQ ID NO: 13173 - DNA, 80 bp, synthetic construct
  source 1..80: mol_type = other DNA
tattttttgttccttttttcatttctattcctcaaagtctatgatttaagatgacttggcttcgagtttgctgattcttt

SEQ ID NO: 13174 - DNA, 80 bp, synthetic construct
  source 1..80: mol_type = other DNA
gacggggcggctggccgggcggggggctgaccccccccacctccctcccggacgtggggctgacccccccacctccctcc

SEQ ID NO: 13175 - DNA, 80 bp, synthetic construct
  source 1..80: mol_type = other DNA
gggaagaggcgctcctcacttcctagatgggatggcggccgggcagagacgctcctcactttccagactgggcagccagg

SEQ ID NO: 13176 - DNA, 80 bp, synthetic construct
  source 1..80: mol_type = other DNA
catatatatatacacacacatacacatatatgtgtatatatatacatatatatatacacacacatacacatatatgtgta

SEQ ID NO: 13177 - DNA, 80 bp, synthetic construct
  source 1..80: mol_type = other DNA
gaaaagaaagttcattttgccttttctggcatcaggaaactacaccaggaatgtgggacaccgtccccatggctgcctca

SEQ ID NO: 13178 - DNA, 80 bp, synthetic construct
  source 1..80: mol_type = other DNA
ggagagtttgttgatgattggttatacattttcagaaacagttgtttattccttcctttacaaaggctaatttccttaga

SEQ ID NO: 13179 - DNA, 80 bp, synthetic construct
  source 1..80: mol_type = other DNA
gtgattgaaatcaacaagcatttatctctaagtgcttgccaggtgcacctgtagtcccagctatgagagtgtctgaggca

SEQ ID NO: 13180 - DNA, 80 bp, synthetic construct
  source 1..80: mol_type = other DNA
gacaaaggaatgtccccactagagagtgtcctctttttccctgctggatcagggaaaggtgctggtgtgattctacatac

SEQ ID NO: 13181 - DNA, 80 bp, synthetic construct
  source 1..80: mol_type = other DNA
tttctacaaaatatttaaaaattagtcagccatggtggtgtgcacctatagtgccagctgctcaggagacttgaggcgga

SEQ ID NO: 13182 - DNA, 80 bp, synthetic construct
  source 1..80: mol_type = other DNA
accgagggactcagaagagctggaatcagacccccacacacactgagtatgagtcagagaacaaggcctgagagaaaaag

SEQ ID NO: 13183 - DNA, 80 bp, synthetic construct
  source 1..80: mol_type = other DNA
gcgggaaggagcgaggggcccgcccggaggagtaaatctgcacatatatttaattacagattacaattacaatcaaggca

SEQ ID NO: 13184 - DNA, 80 bp, synthetic construct
  source 1..80: mol_type = other DNA
cgtgttcttcctactgagattacagaactgtagagatgtctttgatttttaaaatgcaccatgtcctgaaagatggcacc

SEQ ID NO: 13185 - DNA, 80 bp, synthetic construct
  source 1..80: mol_type = other DNA
tgcttccaacatatttctctgctttggatggggcatatttctgtgctgtggatgacatggccttactccagaatcccagg

SEQ ID NO: 13186 - DNA, 80 bp, synthetic construct
  source 1..80: mol_type = other DNA
gatctcagctcaccgcaatgtccgcctcccaggttcaagttattctccttcctcagtctcccaagtagctgagattagag

SEQ ID NO: 13187 - DNA, 80 bp, synthetic construct
  source 1..80: mol_type = other DNA
cccccaagttctccctatttccctttcccagggtacagtctctaaagtaaatggctgtaggtccctttgcacaatggctc

SEQ ID NO: 13188 - DNA, 80 bp, synthetic construct
  source 1..80: mol_type = other DNA
aataagtctcatgagatctgatggttttaaaaggagaaatccctttcgcttggttctcattcttctcttatctgctgcca

SEQ ID NO: 13189 - DNA, 80 bp, synthetic construct
  source 1..80: mol_type = other DNA
gcaccttgtgccatggactttctctgtccccaaccaacgtggatggcattcttggcctgccaggcagtgggcaagctcag

SEQ ID NO: 13190 - DNA, 80 bp, synthetic construct
  source 1..80: mol_type = other DNA
agagaaaaaaaggtatgaactgatgaactgatacctttaagtagatgagaaggatgatgtttgggacaccagtagaggga

SEQ ID NO: 13191 - DNA, 80 bp, synthetic construct
  source 1..80: mol_type = other DNA
ggatgatagcagctctcctacaaaataatgcttatatgacaagggcatgagattcaggcagagggaggagaaggtcatgg

SEQ ID NO: 13192 - DNA, 80 bp, synthetic construct
  source 1..80: mol_type = other DNA
gatgtggaggttttgctgatcatgggctgagaattccaaggggcacagcgggaagacttctggatttgggaatggggtat

SEQ ID NO: 13193 - DNA, 80 bp, synthetic construct
  source 1..80: mol_type = other DNA
ggcagttttgccttctaagacattggtttttctctgaggacctccctgttttcagatgatcaaaactggggccatccact

SEQ ID NO: 13194 - DNA, 80 bp, synthetic construct
  source 1..80: mol_type = other DNA
atggtgtcccaaaacagttacgagagtaacttcaaagatcactgaccacaggtcaccatacaggtgtaataatgaacaag

SEQ ID NO: 13195 - DNA, 80 bp, synthetic construct
  source 1..80: mol_type = other DNA
gtctgcaagttgaggtgcaagaaagccagtgatggatcagtccaagtcccaaaacctcaaaagtagggaagctgacagtg

SEQ ID NO: 13196 - DNA, 80 bp, synthetic construct
  source 1..80: mol_type = other DNA
acgctgctgataaagacatactgggaagaaaaagaggtttaattggacttacaattccacatggctgaggaggcctcaga

SEQ ID NO: 13197 - DNA, 80 bp, synthetic construct
  source 1..80: mol_type = other DNA
ctggtatatttaagtaaattccctgaagaatgtgaacaccgtaagcaggtgagtgcattattctctgcttcccctccaca

SEQ ID NO: 13198 - DNA, 80 bp, synthetic construct
  source 1..80: mol_type = other DNA
acggcgggatggtagtggctctcctatgaaataatgctcataaacatcccttgtgagaaggatcagatcaacatataaaa

SEQ ID NO: 13199 - DNA, 80 bp, synthetic construct
  source 1..80: mol_type = other DNA
tatcaggccccaaggaagctgtgagcacgtctgcctgggaccctgtcaccatctggagaatgacaataaagaggacccag

SEQ ID NO: 13200 - DNA, 80 bp, synthetic construct
  source 1..80: mol_type = other DNA
gccttcctggctgctaatattccagttcccagcagcctcctctctcacccttcacctcttctgactgggtgcgaatggta

SEQ ID NO: 13201 - DNA, 80 bp, synthetic construct
  source 1..80: mol_type = other DNA
ggttgagcaaatggatgggctaacaaagcagtgaagatttgcctggccaggaaccaggagaggggagaaatccagaagag

SEQ ID NO: 13202 - DNA, 80 bp, synthetic construct
  source 1..80: mol_type = other DNA
gtgataactggtgcttgaagggaggacatatagttacatgttgcgggaaaacacatgtcattagaaaacttggcatgatt

SEQ ID NO: 13203 - DNA, 80 bp, synthetic construct
  source 1..80: mol_type = other DNA
gccagcaacaccctgcctaaaagcccctttagtgatgataattatcattcatctttctataaaagtacagcaagactttc

SEQ ID NO: 13204 - DNA, 80 bp, synthetic construct
  source 1..80: mol_type = other DNA
ccaaagtcctatttactttagtgattctgattctgtatttttaactgggaaaaggattctctttcaggaaagcaaccact

SEQ ID NO: 13205 - DNA, 80 bp, synthetic construct
  source 1..80: mol_type = other DNA
ctactgtactgagtactggactgccagtggggagtggcggatgtcttgaatttggtgaatgcctttatattgctacaaag

SEQ ID NO: 13206 - DNA, 80 bp, synthetic construct
  source 1..80: mol_type = other DNA
ggttttactgcctcccaatcactctagtgtcctccactcccaggattttaaatatcgtctagacacagatggctcccaaa

SEQ ID NO: 13207 - DNA, 80 bp, synthetic construct
  source 1..80: mol_type = other DNA
tttttttacctttattaaaataaattttaaaaattttctaaatattatattattcctttaacaaggaggtttactgccat

SEQ ID NO: 13208 - DNA, 80 bp, synthetic construct
  source 1..80: mol_type = other DNA
gcctggacctactgtatcagaaactctgcatttaacaagcccccagcagaattctgcttttcaaatcagatctctctctc

SEQ ID NO: 13209 - DNA, 80 bp, synthetic construct
  source 1..80: mol_type = other DNA
cagtttcttccttttttctctctcaatttgtgttatgatttccttactgatctctgcctgagcaagactgggcacgcctt

SEQ ID NO: 13210 - DNA, 80 bp, synthetic construct
  source 1..80: mol_type = other DNA
tctatcccactctctcaggtgtggtgagattcctattatatgactatcggtcatctatacatggattgtactctcagagt

SEQ ID NO: 13211 - DNA, 80 bp, synthetic construct
  source 1..80: mol_type = other DNA
tttttcagcatcgctttgtgtaagaaggatcaggagacctggagtcaggggctcctccaatctcactctccttcataaaa

SEQ ID NO: 13212 - DNA, 80 bp, synthetic construct
  source 1..80: mol_type = other DNA
atttggctcttggtttttctgctttatcaggatggatttgggaaaccagccggagcgggagataaggagtctactttgca

SEQ ID NO: 13213 - DNA, 80 bp, synthetic construct
  source 1..80: mol_type = other DNA
tctcatcctaacttaatggctggcggcctttcattcgttttaaaagaacactttccctttaaactataaattccttccca

SEQ ID NO: 13214 - DNA, 80 bp, synthetic construct
  source 1..80: mol_type = other DNA
catgaaccactgcaactcacccaaatccaagtttatactaaaagataaaattccaacatttcagagaaaatgaaagtcac

SEQ ID NO: 13215 - DNA, 80 bp, synthetic construct
  source 1..80: mol_type = other DNA
cccttttcttcctatctcttccctcctttcttaacacgtccccctatccttccctcctttcaccactctctgcacttgat

SEQ ID NO: 13216 - DNA, 80 bp, synthetic construct
  source 1..80: mol_type = other DNA
taaggcaagtgctgagggagaaaacatagttgatggggcagagcagagggggctggaggtggggtggagggggagggctt

SEQ ID NO: 13217 - DNA, 80 bp, synthetic construct
  source 1..80: mol_type = other DNA
ctaaggtttaggtccaacctaggtttactgatttaactggttgtggctgtggcctgggaacatggatattaaaaactctc

SEQ ID NO: 13218 - DNA, 80 bp, synthetic construct
  source 1..80: mol_type = other DNA
agagaaatgggggtggtgccagacaatagattgtgggagctatggtttccatggtagagtagaagcatccaccatgtgtg

SEQ ID NO: 13219 - DNA, 80 bp, synthetic construct
  source 1..80: mol_type = other DNA
cgtgctcataagtttggagctgtactctcagctactcggggctggtccttgattttggctgcgctcgcgcacgctccccc

SEQ ID NO: 13220 - DNA, 80 bp, synthetic construct
  source 1..80: mol_type = other DNA
tgctctcctcgcctctcctccgtctcctctcacttttcggacaaaccagtccttctgaggcccctgggttcccgggctgc

SEQ ID NO: 13221 - DNA, 80 bp, synthetic construct
  source 1..80: mol_type = other DNA
gcccctctccaccttgggaccttgtgctgctcctatctcttgcccagctgcctggggccctcagcaagttctcatctttc

SEQ ID NO: 13222 - DNA, 80 bp, synthetic construct
  source 1..80: mol_type = other DNA
tctttgcaaatgacatgatggctgaatagtactccacatacacgtgtgcaccacattttctttctccattcgtctgttga

SEQ ID NO: 13223 - DNA, 80 bp, synthetic construct
  source 1..80: mol_type = other DNA
tggtaactttgttagaaataacttcactgtagatatatggatttgtttctgggttctctattctgtttcattggtccgtg

SEQ ID NO: 13224 - DNA, 80 bp, synthetic construct
  source 1..80: mol_type = other DNA
accacatgatgtgcaaacaaggataatttgacttcttcttttccaattttgatgccctttatttccttctcctgtcagat

SEQ ID NO: 13225 - DNA, 80 bp, synthetic construct
  source 1..80: mol_type = other DNA
attccttttaatgatgaataatactcattatatgtatgtaccacatcttggttatccattcctcagacaatggacacttg

SEQ ID NO: 13226 - DNA, 80 bp, synthetic construct
  source 1..80: mol_type = other DNA
ttgcaatatttatttcatttcaggggttgattgctttctcactctgattgtgccctttgatgcacagatattttgaattt

SEQ ID NO: 13227 - DNA, 80 bp, synthetic construct
  source 1..80: mol_type = other DNA
gtgttaaacatcaatgtgaagttatttccaggaagaagtttcacctgtgatttcctcttccccagagccccacagtcttc

SEQ ID NO: 13228 - DNA, 80 bp, synthetic construct
  source 1..80: mol_type = other DNA
ctccctgtgctatggatgcaggcgtttcctgttggcatattgtgtcctgatttgcctctcctgttagagccattggataa

SEQ ID NO: 13229 - DNA, 80 bp, synthetic construct
  source 1..80: mol_type = other DNA
ttattattattctctgtgtcccttgttgcaagaagaaaacatcagcggcagagggtccaggtgagaaaaggggacagttt

SEQ ID NO: 13230 - DNA, 80 bp, synthetic construct
  source 1..80: mol_type = other DNA
aagagggccccatccaggaggcacccacagcaggggcagtgcaggtctgtggtcactcctgctctcacctgcggcgtctc

SEQ ID NO: 13231 - DNA, 80 bp, synthetic construct
  source 1..80: mol_type = other DNA
tcttgggtcttgtccttttgtcttggggccctttcactccctgcacggtgagtggtgggcacaggacaggggctgatgtt

SEQ ID NO: 13232 - DNA, 80 bp, synthetic construct
  source 1..80: mol_type = other DNA
ttttgtctttctctttattcccacgttcgccctttgttcagtccaatacagggttgtggggcccttaacagtgccatatt

SEQ ID NO: 13233 - DNA, 80 bp, synthetic construct
  source 1..80: mol_type = other DNA
gtgagggaacatctgccctgaagagttggagccttcatgtgatgacacagagatctctgtcactgtattcagggaaagga

SEQ ID NO: 13234 - DNA, 80 bp, synthetic construct
  source 1..80: mol_type = other DNA
tccttgaaattttattgtctggctgagttttccatagtttgcattttgctggctccaccccaaggcatagtttaatatgg

SEQ ID NO: 13235 - DNA, 80 bp, synthetic construct
  source 1..80: mol_type = other DNA
gatttgtccacctttctccatgcatgttgtccttcattcaagtttacatttctggtgttttgaaacaattctctctaagc

SEQ ID NO: 13236 - DNA, 80 bp, synthetic construct
  source 1..80: mol_type = other DNA
atcactattagtaattagatgtaaaatagatgagaaaaatagtagactgtgtccatcagtgtgctataaacaaattaaat

SEQ ID NO: 13237 - DNA, 80 bp, synthetic construct
  source 1..80: mol_type = other DNA
aaaaactacctattgggtattgtgctgattacctgagtaacaaaattatctgcacaccaaacacccgtgatacacaattt

SEQ ID NO: 13238 - DNA, 80 bp, synthetic construct
  source 1..80: mol_type = other DNA
tcctctatggagatgctggggatgtcctcattctccctctgagcactcacatctcacccctcatctgtctctctaacctc

SEQ ID NO: 13239 - DNA, 80 bp, synthetic construct
  source 1..80: mol_type = other DNA
ttgtgctaagtcattctctgataaaaggattcagggctccatagaaaaacagctgattctagggctggcataggaaaaat

SEQ ID NO: 13240 - DNA, 80 bp, synthetic construct
  source 1..80: mol_type = other DNA
gttaacattaaggaaagctggggtttatggaaactctgtgttctagctttgcaactctttaaatctattattgttattgt

SEQ ID NO: 13241 - DNA, 80 bp, synthetic construct
  source 1..80: mol_type = other DNA
agtcaaacttagtcaagttgtgtacagtcagcgatggtgatcttcttgatggtcttgccattcccagacccaaagtgctc

SEQ ID NO: 13242 - DNA, 80 bp, synthetic construct
  source 1..80: mol_type = other DNA
taactaattccatgaggccagcattagccaaataccaaaatcagatgaagacttcacaaaaaaagaaaaccacagaccaa

SEQ ID NO: 13243 - DNA, 80 bp, synthetic construct
  source 1..80: mol_type = other DNA
ttccatgttcatagtcaggaaggctcaatactgttaatatatctgttctttccaacttgatctgtggaatgaatgcaatc

SEQ ID NO: 13244 - DNA, 80 bp, synthetic construct
  source 1..80: mol_type = other DNA
agcattctcatcacatacacacaaaatatgtatgtgaggtaatgtacatattattaaattgtttggtttatccattccac

SEQ ID NO: 13245 - DNA, 80 bp, synthetic construct
  source 1..80: mol_type = other DNA
acccgcacgaccacaccagctaatttttgtgtttttttgtagagatgggttttgccatgttgcccaggctggtctcaaac

SEQ ID NO: 13246 - DNA, 80 bp, synthetic construct
  source 1..80: mol_type = other DNA
aaccgacccaaaggccagtgctttcttaattaagttcccacaggtgaacaaagccaaaattcagattctattttatttat

SEQ ID NO: 13247 - DNA, 80 bp, synthetic construct
  source 1..80: mol_type = other DNA
aattagttgtggtttgtttaaccatatactgcatagtttcgcttatctataataacagtagtttggggctcttatattct

SEQ ID NO: 13248 - DNA, 80 bp, synthetic construct
  source 1..80: mol_type = other DNA
catagcaacaaagtgagtcacacaaactttttagtttcctattgtgcataaaagttatgtttgtactatattgtagtctg

SEQ ID NO: 13249 - DNA, 80 bp, synthetic construct
  source 1..80: mol_type = other DNA
ccaatctctaaataaaaaacagcatctgcaaagagcaataaagggaagcacaataaaaggtacatctgcaaaggggaatc

SEQ ID NO: 13250 - DNA, 80 bp, synthetic construct
  source 1..80: mol_type = other DNA
caaagtttttgaggctatcctagttgatccattccataacactatcagaaggaaacctgacacccagtggtccacaacaa

SEQ ID NO: 13251 - DNA, 80 bp, synthetic construct
  source 1..80: mol_type = other DNA
acctaacagttaattatttcttagcggggaggagcagctgatcctctttccagtgaccccatatccttgttcaaggaagc

SEQ ID NO: 13252 - DNA, 80 bp, synthetic construct
  source 1..80: mol_type = other DNA
tcctgaaggacagacggtcacattccaaaatgggcgagtcttctaccgtgtctgttcaactgagaagaaaacgtagcatg

SEQ ID NO: 13253 - DNA, 80 bp, synthetic construct
  source 1..80: mol_type = other DNA
tacgtgggagaggggagtttctagtaattacgttctcaggaattcctcttcatttctcttattcccccactatatattta

SEQ ID NO: 13254 - DNA, 80 bp, synthetic construct
  source 1..80: mol_type = other DNA
ccacacctggctaatttttttcttctttggtagtgatgaagtttcgccatgttgccccgactggtctcaaactcctggac

SEQ ID NO: 13255 - DNA, 80 bp, synthetic construct
  source 1..80: mol_type = other DNA
tcagaataactccatcagaggtgcttctaagaacatggggtggggggaggacaactgctccatttgattctcctacttca

SEQ ID NO: 13256 - DNA, 80 bp, synthetic construct
  source 1..80: mol_type = other DNA
cccaaatacagctaaagagtgatcatcccacgggaaggaacactgcagggaggggaagaacacactccactgcttatgca

SEQ ID NO: 13257 - DNA, 80 bp, synthetic construct
  source 1..80: mol_type = other DNA
aggggaggaggcagcgggcggggagtggagggagagaaggtagaagggtatttacatcttgcatgaacttgcggcagact

SEQ ID NO: 13258 - DNA, 80 bp, synthetic construct
  source 1..80: mol_type = other DNA
atagataagagtcgtccttgcactgaggtgctcctgtttcaaataaacatcatttggctccaaagaacaactccccagca

SEQ ID NO: 13259 - DNA, 80 bp, synthetic construct
  source 1..80: mol_type = other DNA
tcatgttaaaaccattaggtgaatagttgtttggggatctgggccttggtacagtatcaaataacaccagaaactacttt

SEQ ID NO: 13260 - DNA, 80 bp, synthetic construct
  source 1..80: mol_type = other DNA
tctccaaaattaaagagactattggcctacaagtttcttatccctccaacttgccacaccctcactctcaggtctcttta

SEQ ID NO: 13261 - DNA, 80 bp, synthetic construct
  source 1..80: mol_type = other DNA
gttggcctggcccaacagagggagactacaggtccaagcaggacctttctggaaatttaaaattagaagtcaagtgacaa

SEQ ID NO: 13262 - DNA, 80 bp, synthetic construct
  source 1..80: mol_type = other DNA
cataaaaacgaaaagcaaatataacagaacagaaaaagcagtaccagggaaagtggttaggacagaggttcccaacaaga

SEQ ID NO: 13263 - DNA, 80 bp, synthetic construct
  source 1..80: mol_type = other DNA
ctgaggcctccaatatgagaagaacccattggaagaagggagcaaaacgaacacaatggcgccgaggacaccatcttgga

SEQ ID NO: 13264 - DNA, 80 bp, synthetic construct
  source 1..80: mol_type = other DNA
ggtgttctgaatccgagcgggaagacggggtctggattcggccccaagtgttaatagtagggcttgagggttatactaca

SEQ ID NO: 13265 - DNA, 80 bp, synthetic construct
  source 1..80: mol_type = other DNA
gaaaacacataaacacaaatataatgtcaagtatcgataagtggtcagggtgcagtggctcaggcctgtaacccaaccct

SEQ ID NO: 13266 - DNA, 80 bp, synthetic construct
  source 1..80: mol_type = other DNA
gaaagtaaggtgtcaaggatatagaaaggaagggcatgcatatgagggaacacagtatcattttagatcttagaaagcaa

SEQ ID NO: 13267 - DNA, 80 bp, synthetic construct
  source 1..80: mol_type = other DNA
agcagacaggttcccctgggagcccatggcctggggggtagggagaggggtggaagagagaaagggaaaagcagaaacag

SEQ ID NO: 13268 - DNA, 80 bp, synthetic construct
  source 1..80: mol_type = other DNA
cttctcagcttgcagaagctgctggataccttgggactgactggccatttctgttgttatggccgatgctgttttgaatg

SEQ ID NO: 13269 - DNA, 80 bp, synthetic construct
  source 1..80: mol_type = other DNA
cgtcctccacctgcgtctctgcttgcgccatttcctccagcctggagtgtctccgcccttcccgcctcccgtctccgagc

SEQ ID NO: 13270 - DNA, 80 bp, synthetic construct
  source 1..80: mol_type = other DNA
gcagctgaccagacctgaaatgaaagccaaccaatagttgagaaataagctggttatttggtcatcaggacctagggaag

SEQ ID NO: 13271 - DNA, 80 bp, synthetic construct
  source 1..80: mol_type = other DNA
accacaattctaaactcaaaaacactctgagaaccaacatttttcatcaggctgccaccaaaattcatttggtgacagaa

SEQ ID NO: 13272 - DNA, 80 bp, synthetic construct
  source 1..80: mol_type = other DNA
tgggagttttgttttttgttttgttttgtttttttgagatggagtttccctgttgttgcccaggctagagtgcaatggcg

SEQ ID NO: 13273 - DNA, 80 bp, synthetic construct
  source 1..80: mol_type = other DNA
taactccttggttgaaaggcccatctcattcagcttccagcttcctttttcttttccttttgagacggagtcttgctttg

SEQ ID NO: 13274 - DNA, 80 bp, synthetic construct
  source 1..80: mol_type = other DNA
gatgatccacctgcctcggcctcccaaagtgctgggattacaggcatgagccaccatgcccgacctaatttttgtgtttt

SEQ ID NO: 13275 - DNA, 80 bp, synthetic construct
  source 1..80: mol_type = other DNA
ccgcgccaggcctaaagggggcatttctaatactggagaaaggtgaacttttttttttttttttttccgagacagagtct

SEQ ID NO: 13276 - DNA, 80 bp, synthetic construct
  source 1..80: mol_type = other DNA
cgcctggccgagttttttaatttctaaaaataaaaatgagtatacatctaaagtagtagaagaaaatgcagagaatgttt

SEQ ID NO: 13277 - DNA, 80 bp, synthetic construct
  source 1..80: mol_type = other DNA
ctgtatatattcctgtggaaaaatataaatgagatgttaaatgaaagaagcaagttgccaagcaatatttgtagtatggt

SEQ ID NO: 13278 - DNA, 80 bp, synthetic construct
  source 1..80: mol_type = other DNA
ttgaactcctgaccttgtgatccattgtcccccccccccagcctcccaaagtgctgggattacaggcgtgagccaccgtg

SEQ ID NO: 13279 - DNA, 80 bp, synthetic construct
  source 1..80: mol_type = other DNA
gatttatatagtgacaatatttttaagtgaaaagtggaatacatagtcaaagaatttgggcactgccttggtggctggag

SEQ ID NO: 13280 - DNA, 80 bp, synthetic construct
  source 1..80: mol_type = other DNA
cagctgcccttccccactggctgctttccatctgcatgaatgcgtcacactaggctcctctgccccctcctctgtgcttc

SEQ ID NO: 13281 - DNA, 80 bp, synthetic construct
  source 1..80: mol_type = other DNA
cccagtgtctcctctgtctttttccattgctgtggttttcatcacccatgacatctcctttcccgccccgcctgctgaaa

SEQ ID NO: 13282 - DNA, 80 bp, synthetic construct
  source 1..80: mol_type = other DNA
ctgtctgcatagttacaccagagcatcttatcaatcagaaacttatctttcaggttttgagcccagttctctacaggaga

SEQ ID NO: 13283 - DNA, 80 bp, synthetic construct
  source 1..80: mol_type = other DNA
cttcaagcttacaatctagtggggaggcagacccatacctagttaactgattcaaggcatgatgagtaaactttaagatg

SEQ ID NO: 13284 - DNA, 80 bp, synthetic construct
  source 1..80: mol_type = other DNA
aggaacagatttgggcatcattcccttcccagtagaggttgagcctttgagtggacaggatcttcaagggagggggcgga

SEQ ID NO: 13285 - DNA, 80 bp, synthetic construct
  source 1..80: mol_type = other DNA
gcgctttgggaggctgaggtgggcagactatagatatcaggagttcaaaaccaacctagccaacatagtgaaatgctgtc

SEQ ID NO: 13286 - DNA, 80 bp, synthetic construct
  source 1..80: mol_type = other DNA
accatgcagtacatgttaaatcaacaagcaaaaccaggaaagcagaagcagccggaagtcttggtaagaataaagaactg

SEQ ID NO: 13287 - DNA, 80 bp, synthetic construct
  source 1..80: mol_type = other DNA
tcaaaaaacaaacaaacaaggatgatggtagggataagatgtggagaaagactgagctagttatacaagttgttaagagc

SEQ ID NO: 13288 - DNA, 80 bp, synthetic construct
  source 1..80: mol_type = other DNA
gaatgtataatatatcccaaacttgtctacttctctccatctccatggctgccactattttctcttcaccatcaatgcca

SEQ ID NO: 13289 - DNA, 80 bp, synthetic construct
  source 1..80: mol_type = other DNA
agaaaaaaaatccagggccagtgtggtgactcatgcctgtaatcccaaaactttgggaggctggcccagcatggtggctc

SEQ ID NO: 13290 - DNA, 80 bp, synthetic construct
  source 1..80: mol_type = other DNA
tccctttacctgaaatgctttgctcccaaacttttacctggtcactattttttgtcatttgggtctcagctccagtgcca

SEQ ID NO: 13291 - DNA, 80 bp, synthetic construct
  source 1..80: mol_type = other DNA
atgtctccccatcacccttcttgccttcccttttttgtctttcaatgtcccattcttcctctttaatttaaatttctctc

SEQ ID NO: 13292 - DNA, 80 bp, synthetic construct
  source 1..80: mol_type = other DNA
cccagtcccagtctgtgaccattagatgatactccttttgttcaattacatttctgcacagctgttcattcttcatcaaa

SEQ ID NO: 13293 - DNA, 80 bp, synthetic construct
  source 1..80: mol_type = other DNA
ccccaaaccaggaggaaataatctatggtgataaaagtgagagagtggttggttatctttggagggtatcagcagggagg

SEQ ID NO: 13294 - DNA, 80 bp, synthetic construct
  source 1..80: mol_type = other DNA
agaatgtccccgatgaaggggatatataatggaccttcttgatgtgaaacctgccagatgggctggaaagtccgtatact

SEQ ID NO: 13295 - DNA, 80 bp, synthetic construct
  source 1..80: mol_type = other DNA
ctctctctctctttctctgcaggttctccccatgacaccacctgaacgtctcttcctcccaagggtgtgtggcaccaccc

SEQ ID NO: 13296 - DNA, 80 bp, synthetic construct
  source 1..80: mol_type = other DNA
ctttggagccttcgctctgtagaacttggaaaaatccagaaagaaaaaataattgatttcaagaccttctccccattctg

SEQ ID NO: 13297 - DNA, 80 bp, synthetic construct
  source 1..80: mol_type = other DNA
gaggggcgggggtcagggagctcctgggagatatggccacatgtagcggctctgaggaatgggttacaggagacctctgg

SEQ ID NO: 13298 - DNA, 80 bp, synthetic construct
  source 1..80: mol_type = other DNA
cgccctcctctcgccccagggacatataaaggcagttgttggcacacccagccagcagacgctccctcagcaaggacagc

SEQ ID NO: 13299 - DNA, 80 bp, synthetic construct
  source 1..80: mol_type = other DNA
ccagctgttcctcctttaagggtgactccctcgatgttaaccattctccttctccccaacagttccccagggacctctct

SEQ ID NO: 13300 - DNA, 80 bp, synthetic construct
  source 1..80: mol_type = other DNA
aggccaagccctggtatgagcccatctatctgggaggggtcttccagctggagaagggtgaccgactcagcgctgagatc

SEQ ID NO: 13301 - DNA, 80 bp, synthetic construct
  source 1..80: mol_type = other DNA
aaataaagtttgcttagaaaagaaacatggtctccttcttggaattaattctgcatctgcctcttcttgtgggtgggaag

SEQ ID NO: 13302 - DNA, 80 bp, synthetic construct
  source 1..80: mol_type = other DNA
agcccactagttcaagaccagcctgtgcaacatagcaagaccttgtttctagaaaaaaaattaaagattagtcaggtgta

SEQ ID NO: 13303 - DNA, 80 bp, synthetic construct
  source 1..80: mol_type = other DNA
ggatgcctagagaagcttcggagtttgagaagtcccccttcctcccaccctccaactgggctaatggtggggcctggcca

SEQ ID NO: 13304 - DNA, 80 bp, synthetic construct
  source 1..80: mol_type = other DNA
aggagggatggtgctgtttctgggatgagtgcgagttgggggccgagggaacacggatgtggggtgcagaacgctgtagt

SEQ ID NO: 13305 - DNA, 80 bp, synthetic construct
  source 1..80: mol_type = other DNA
ccagggcctgttgcagccactcaccagtcctccctgatcctggggcactaaggccagcacagccaggacagtgataggca

SEQ ID NO: 13306 - DNA, 80 bp, synthetic construct
  source 1..80: mol_type = other DNA
tgaataaaaggacaaataaatgcaggaataaccaaaacaaagcagcaaggaccacatgaatggtagatgtaggcagcatg

SEQ ID NO: 13307 - DNA, 80 bp, synthetic construct
  source 1..80: mol_type = other DNA
gaatttgaacccaggcatctggctccagagccttgataacaagacagtttaaaaactgaatactggggctgggcgcagtg

SEQ ID NO: 13308 - DNA, 80 bp, synthetic construct
  source 1..80: mol_type = other DNA
aggctaaggtggaaagattgcttgagaccaggagttcaaaatcagcctgggcaacatagtaagaccccatttctacaaag

SEQ ID NO: 13309 - DNA, 80 bp, synthetic construct
  source 1..80: mol_type = other DNA
cagacatatgccaagatcaagaggtctcaacagatgcagtgtaagaggtaatagagaagagttaatcaaggaagacacct

SEQ ID NO: 13310 - DNA, 80 bp, synthetic construct
  source 1..80: mol_type = other DNA
taaagtccaggcttgaatctcgggtctttacttgggcaacgggcaccatgataccctatgttctggggattagcagtgag

SEQ ID NO: 13311 - DNA, 80 bp, synthetic construct
  source 1..80: mol_type = other DNA
tgggctgtgttgagcttcttcttttcttccagtaaagaggctggagaggagctgggtgagtctggggacagggaaggggg

SEQ ID NO: 13312 - DNA, 80 bp, synthetic construct
  source 1..80: mol_type = other DNA
ttaaaataaaaaaaacacatggctcacccttccacccactctggggtcaaatagtaatttattgggtgaatgacagtgtt

SEQ ID NO: 13313 - DNA, 80 bp, synthetic construct
  source 1..80: mol_type = other DNA
aggaggagacaccacctcccagcatctcacctttctccaccaccagccgagtcccattccctgtcccgacaccaaggccc

SEQ ID NO: 13314 - DNA, 80 bp, synthetic construct
  source 1..80: mol_type = other DNA
gtaaaccatcatggtgaaattaagctcattaatgaatgcagctgcctagttaactaatatcactcattatattatccagg

SEQ ID NO: 13315 - DNA, 80 bp, synthetic construct
  source 1..80: mol_type = other DNA
aggctgagacaggagaatcatttttacccaggaggtggaggctgcagtgagctgagataccgccactgtactctagactg

SEQ ID NO: 13316 - DNA, 80 bp, synthetic construct
  source 1..80: mol_type = other DNA
ctcctcccacccacactccttggggtcctgagcgcacgccctgtcacctggatggaccatgatcaagatgagcaacagca

SEQ ID NO: 13317 - DNA, 80 bp, synthetic construct
  source 1..80: mol_type = other DNA
caggctggagttcagtggcgccatcacggctcactgcagcctcaacctccagggctcagttgatcctcccacttcagtct

SEQ ID NO: 13318 - DNA, 80 bp, synthetic construct
  source 1..80: mol_type = other DNA
gctactcaggaagttgaggaaggaggattccttgagcccaggagtttcaaggatgcagtgagctatgattttgccactgc

SEQ ID NO: 13319 - DNA, 80 bp, synthetic construct
  source 1..80: mol_type = other DNA
agcgtggcagagtaaatttagctaattcttgccaagtgcagtggtatgtgcctatgtctctgctactcagaaggctgagg

SEQ ID NO: 13320 - DNA, 80 bp, synthetic construct
  source 1..80: mol_type = other DNA
aaaaatcactactgacagatcataacagataaaataatcaagaaaaagtttgaaatattgcaagaattaccaaaatgtgc

SEQ ID NO: 13321 - DNA, 80 bp, synthetic construct
  source 1..80: mol_type = other DNA
cgtgtgccaccacactcggctaatttttgtgtttttagtactgacggagttttgccatgttggccaggctggtcttaaac

SEQ ID NO: 13322 - DNA, 80 bp, synthetic construct
  source 1..80: mol_type = other DNA
ccgatcccctaccttgcttgcctccttctatcaacaccccattcacaccccaaaggatcaatataggaaaaattgtctct

SEQ ID NO: 13323 - DNA, 80 bp, synthetic construct
  source 1..80: mol_type = other DNA
gacagtatgtggggtttttttttcagtccatctagaataaatcctgatatgtgtgtacattcaagggaccccttttaata

SEQ ID NO: 13324 - DNA, 80 bp, synthetic construct
  source 1..80: mol_type = other DNA
gatgtagttgaggccaataaactcccaactcagaccatgaaaacaggtgaaaacacaaaagtccacaatccagcacaggt

SEQ ID NO: 13325 - DNA, 80 bp, synthetic construct
  source 1..80: mol_type = other DNA
tatcctggaaaattcctccatgcccctttttggtaaatccctttcccctcctagatgcaaccattttaccatttttaacc

SEQ ID NO: 13326 - DNA, 80 bp, synthetic construct
  source 1..80: mol_type = other DNA
gaaacttcttgtacccatctcgcaaatgccttttcaataccctaagtgtgcaacttcacagttatttcaccttgtccact

SEQ ID NO: 13327 - DNA, 80 bp, synthetic construct
  source 1..80: mol_type = other DNA
ccctgaatactccacaggcatttcaaagtcatcagtgtccactcagaccaggtcagcctcctgtcatccctgtcccagtg

SEQ ID NO: 13328 - DNA, 80 bp, synthetic construct
  source 1..80: mol_type = other DNA
catcgctttctgcctccccatcattctccatgttttcccttcccatctctccccatctacataccttattcttttactcc

SEQ ID NO: 13329 - DNA, 80 bp, synthetic construct
  source 1..80: mol_type = other DNA
ggtgggagtgttatgtaagagaactgcaggggatatttccactcccaggctcaaaggggtgaggggagagagaggttaca

SEQ ID NO: 13330 - DNA, 80 bp, synthetic construct
  source 1..80: mol_type = other DNA
gtaagctgagatcctgtcactgcacaccagcctgggcgacagagcgagactccgtctcaaaaaaaaaaaaaaattgctgg

SEQ ID NO: 13331 - DNA, 80 bp, synthetic construct
  source 1..80: mol_type = other DNA
cccagcatcttcttgcatgtctattcttttcccctcatctctgtttccttctcagaaggccctgagtttccttctccacc

SEQ ID NO: 13332 - DNA, 80 bp, synthetic construct
  source 1..80: mol_type = other DNA
ctttgaacttgctgttccctccacctgaaatgttcttctcccattgtgatattgttataataaaaatatatatttttggg

SEQ ID NO: 13333 - DNA, 80 bp, synthetic construct
  source 1..80: mol_type = other DNA
ctcaaaaaaaaaaaaataaaaaaaaaaaaaaggtcaggcacggtggctcaggcctgtaatcccagcactttgggaggcca

SEQ ID NO: 13334 - DNA, 80 bp, synthetic construct
  source 1..80: mol_type = other DNA
actgagcccttcaacttggggattagataactggtaattatgggtagagtgtcagaactgaattaaactgcaggactccc

SEQ ID NO: 13335 - DNA, 80 bp, synthetic construct
  source 1..80: mol_type = other DNA
cttcagctgcacgcactgctctctcgcttttgttaggaattgactaattcctcctcttcctcttcctcctcctccttgcc

SEQ ID NO: 13336 - DNA, 80 bp, synthetic construct
  source 1..80: mol_type = other DNA
ctatttattttattattttattgtattttttgagacagggtctcactctgttgcccagactggagtgtaatggcacggtc

SEQ ID NO: 13337 - DNA, 80 bp, synthetic construct
  source 1..80: mol_type = other DNA
tttatttgtattgtctgccttccccaattagatcaaccatgaagacaagagttttcatttgttgggttctctgggcctag

SEQ ID NO: 13338 - DNA, 80 bp, synthetic construct
  source 1..80: mol_type = other DNA
ctgtccacaaacgctgtttctttaagtaccactttcagttcctccaaagaatctacttaaactcttaaattcctgatctc

SEQ ID NO: 13339 - DNA, 80 bp, synthetic construct
  source 1..80: mol_type = other DNA
aggagaggaagggagggatgagggctgattaatttttttcaccccacaggaggaaaagctttcggactgctgaaggccca

SEQ ID NO: 13340 - DNA, 80 bp, synthetic construct
  source 1..80: mol_type = other DNA
tccctgaaacgaatgctggagaaacttggagtccccaagactcacctagagctaaagaaattaattggagaggtgtccag

SEQ ID NO: 13341 - DNA, 80 bp, synthetic construct
  source 1..80: mol_type = other DNA
gaagagcaaggaataccatgaaccaacattctccaccactataagctttgtcactttgacaaatcactcagcctctgtga

SEQ ID NO: 13342 - DNA, 80 bp, synthetic construct
  source 1..80: mol_type = other DNA
ggagaagagaatcattttggaagtttgaaaacagaagtcatcttaaatcttactgagcctctgactaaaattctcatctg

SEQ ID NO: 13343 - DNA, 80 bp, synthetic construct
  source 1..80: mol_type = other DNA
tgccaggactacaggcataagccaccacgcccggcctcatatctcttaataagagtttttctagaaacatttctcaatca

SEQ ID NO: 13344 - DNA, 80 bp, synthetic construct
  source 1..80: mol_type = other DNA
cgatggttgcccatattttgatgaacgagtcattcctagcctatctttgttcaaatgatttgcatacattatgcaaatag

SEQ ID NO: 13345 - DNA, 80 bp, synthetic construct
  source 1..80: mol_type = other DNA
aaccgtgcgctgacgcccttttccggcgcgggagaggtggtggcggtggcggtggcggcggcggcggcggtggtgggccg

SEQ ID NO: 13346 - DNA, 80 bp, synthetic construct
  source 1..80: mol_type = other DNA
ggagctggaggtatcgagtaaagaaacactggtgatggacatttttaatgaggataggaaaacgaagatggctctggcct

SEQ ID NO: 13347 - DNA, 80 bp, synthetic construct
  source 1..80: mol_type = other DNA
gcaagtccttagagatccagaaacccgctggtgagagtcctgcaaagatgcttctgatggttgaaagctaggcatgcatg

SEQ ID NO: 13348 - DNA, 80 bp, synthetic construct
  source 1..80: mol_type = other DNA
ctccagccaaccttccaagcctgaaagccgagaacaaaggcaatgaccccaatgtctcactagtgccaaaagacggaaca

SEQ ID NO: 13349 - DNA, 80 bp, synthetic construct
  source 1..80: mol_type = other DNA
ccacccatattcagtttcatggaggcacatgagcaagtttaagtctcagtcttatatgatggagtgtagtggtgccagaa

SEQ ID NO: 13350 - DNA, 80 bp, synthetic construct
  source 1..80: mol_type = other DNA
gcggaatgatgccgcctttcgtgagtcttggtgtcttgtcttggaacgattacactggaagctggagagctaggaatcag

SEQ ID NO: 13351 - DNA, 80 bp, synthetic construct
  source 1..80: mol_type = other DNA
atattggcattggtagtccatcttgttacatagttccagactacctcccaagattggagggcagaatgcttgggttacta

SEQ ID NO: 13352 - DNA, 80 bp, synthetic construct
  source 1..80: mol_type = other DNA
cacccagagagatcaaccccaaagcctgggtcgttgcatcctgcaagtagcgacagttgatttgttgtaaaagagatgat

SEQ ID NO: 13353 - DNA, 80 bp, synthetic construct
  source 1..80: mol_type = other DNA
agaccctgtcggccaggcatggtggctcacacttgtaatcccagcactctgggaggccgaggcgggcagaacatgaggtc

SEQ ID NO: 13354 - DNA, 80 bp, synthetic construct
  source 1..80: mol_type = other DNA
caagttttttctttgctgattcctttgtccatgtgtgctttgagcctctctcatcttgtctttcctcctttcctaggagc

SEQ ID NO: 13355 - DNA, 80 bp, synthetic construct
  source 1..80: mol_type = other DNA
atgaataggattatttttctttttctttggtttcttcaggcctagttccccgagagcgttcagacagtgggggctcaagc

SEQ ID NO: 13356 - DNA, 80 bp, synthetic construct
  source 1..80: mol_type = other DNA
cgccgggctgggcctataaagaaacctccaccacctacaaaagtagaagagctgcctcccaagcccctcgaacaggggga

SEQ ID NO: 13357 - DNA, 80 bp, synthetic construct
  source 1..80: mol_type = other DNA
gccgcaagggggtctgagggcaagccctccctaacccttccagcctccgctcctggacctgaggaggccctcacaacagt

SEQ ID NO: 13358 - DNA, 80 bp, synthetic construct
  source 1..80: mol_type = other DNA
ggcacaagcctgggcttccccaagcccctcagggcccctctcctaggcccccaacccgatacgagccccagagggtcaac

SEQ ID NO: 13359 - DNA, 80 bp, synthetic construct
  source 1..80: mol_type = other DNA
atctcctcacttctcttctggttggtgctcccttctccagccactagccgaaagagttaccggcccagctccatggagcc

SEQ ID NO: 13360 - DNA, 80 bp, synthetic construct
  source 1..80: mol_type = other DNA
aggactcagacttacgcctagtggtaggagacagcttgaaagcagagaaggagctaacagcatcagtcactgaggtaagt

SEQ ID NO: 13361 - DNA, 80 bp, synthetic construct
  source 1..80: mol_type = other DNA
ctccaccttccttcctctactctccggctttctgccccagtcctttgcctgacacatcgttgcttcaggtaagagggggg

SEQ ID NO: 13362 - DNA, 80 bp, synthetic construct
  source 1..80: mol_type = other DNA
cctttaccagcaggtgaaggagaaacccttgtggccccaactctaaattcgagttgccacctgatttcctgtccttccgt

SEQ ID NO: 13363 - DNA, 80 bp, synthetic construct
  source 1..80: mol_type = other DNA
agcaaagaatttgcagccatgggacttcagttctttatgatgaactaaggggaaatctctgttaaggcctcaatgttgga

SEQ ID NO: 13364 - DNA, 80 bp, synthetic construct
  source 1..80: mol_type = other DNA
tcttcctgcagtcgtttttgtatatcagaccggagctaaagagaaaaagtaagcaggttggagaaacgctggccaagtcc

SEQ ID NO: 13365 - DNA, 80 bp, synthetic construct
  source 1..80: mol_type = other DNA
ctctgaatgtcctgctggataatagggacccattcctggggaggaaaagagaaaatagtaatgtccttgactttcagctg

SEQ ID NO: 13366 - DNA, 80 bp, synthetic construct
  source 1..80: mol_type = other DNA
ttacacaactccagcaaccgggccccaaatccactatctgtgggcaaaatacaaggagggaatgctggcacgtggcagcc

SEQ ID NO: 13367 - DNA, 80 bp, synthetic construct
  source 1..80: mol_type = other DNA
tccactgaggcgttgtatgaaggcagcaatactttcactgctgccagcccgagcccccagggagcccagcagggagctga

SEQ ID NO: 13368 - DNA, 80 bp, synthetic construct
  source 1..80: mol_type = other DNA
agtggcaggggctggcggtggagccatacctggggtcccctgagctgtaagaaaccaaaaaaagaaagctgggctgagca

SEQ ID NO: 13369 - DNA, 80 bp, synthetic construct
  source 1..80: mol_type = other DNA
agggagaatttcagacctgcccttccatgcaccaccacaggagtctctccctagactgttacgcactagaactccccgac

SEQ ID NO: 13370 - DNA, 80 bp, synthetic construct
  source 1..80: mol_type = other DNA
tgttcatgtgcatcatgaccacgggttccacactctggtgggaaatccggatgaccctcgggtggctggtggctggcggg

SEQ ID NO: 13371 - DNA, 80 bp, synthetic construct
  source 1..80: mol_type = other DNA
tctcctgtactttacattttctaaattcattcaggggcacaaggggtacgatacgaggacagtgcttacagcaaagatta

SEQ ID NO: 13372 - DNA, 80 bp, synthetic construct
  source 1..80: mol_type = other DNA
caaagtgctgggattacaggcgtgagccactgtgcccggcctgtattttttagtagagacagggtttcaccatgttggcc

SEQ ID NO: 13373 - DNA, 80 bp, synthetic construct
  source 1..80: mol_type = other DNA
ttcaagaaattctcttgcctcagccttctaagtagccaggcctacaggcgcgtgccaccacacccaactaatttttgtac

SEQ ID NO: 13374 - DNA, 80 bp, synthetic construct
  source 1..80: mol_type = other DNA
aaccaaagctacccacaaaagccctcccctgtggaacataagcttacaggaagattgaaggttccaaccatgacatagct

SEQ ID NO: 13375 - DNA, 80 bp, synthetic construct
  source 1..80: mol_type = other DNA
gacatcagtgacccctttccaaacacaagatgataccagtttatttaccagactctcctgtgatttccaagattaaaaaa

SEQ ID NO: 13376 - DNA, 80 bp, synthetic construct
  source 1..80: mol_type = other DNA
agttctatccatgtggaggacagaacaaaatcagcctcactcacaaaacatcagaaaacgttctactggaatacgaacaa

SEQ ID NO: 13377 - DNA, 80 bp, synthetic construct
  source 1..80: mol_type = other DNA
ccagtcagattaggaaggaagcacgagaccagagactagtgtcatcaccggtcacggcaggacaagcgccccagaggtcg

SEQ ID NO: 13378 - DNA, 80 bp, synthetic construct
  source 1..80: mol_type = other DNA
aagttactctttcagtaggcgtttgggggcggcactggtcaattttgttctcggttgcttggttgggctagatttcggtt

SEQ ID NO: 13379 - DNA, 80 bp, synthetic construct
  source 1..80: mol_type = other DNA
ccacacctggctaattttatttttatagagatggggtcttgctatgttgcccagcctggtcttgcagacttggcctccca

SEQ ID NO: 13380 - DNA, 80 bp, synthetic construct
  source 1..80: mol_type = other DNA
aacattactattaattatagcaaatatatactttggacttaccatgtgcaagtctttgctaagggctttatgtgcattat

SEQ ID NO: 13381 - DNA, 80 bp, synthetic construct
  source 1..80: mol_type = other DNA
gtgtactatggagtggttgcatccggaagagggggaggaagtcccaaacactaagtaatccaggtttgggttggaaaaca

SEQ ID NO: 13382 - DNA, 80 bp, synthetic construct
  source 1..80: mol_type = other DNA
tgtattaattgccctctggagaaagatgtgcctaaccaatgcttggtagcttgaaacccaaggagagctgggcttcaata

SEQ ID NO: 13383 - DNA, 80 bp, synthetic construct
  source 1..80: mol_type = other DNA
ctaggaatcaaggtaaggggttaaaatctcataaaacaggattaggactcaccaagtcttctggtgttacagggtgaaag

SEQ ID NO: 13384 - DNA, 80 bp, synthetic construct
  source 1..80: mol_type = other DNA
gcctagcagccccactcttccctcgatggctcagatcctgagatccaaggaacaccctgggtttcccaaccactctctta

SEQ ID NO: 13385 - DNA, 80 bp, synthetic construct
  source 1..80: mol_type = other DNA
aggggacacccctggtctcctggtgccacctgaatccacatgatcccatctgagtttgggactggcccctccagcctcca

SEQ ID NO: 13386 - DNA, 80 bp, synthetic construct
  source 1..80: mol_type = other DNA
agcagcgttcgtcccttgatttagagggctatgatttctacaaagtggcccgactggcccgcgaacacgcagcagagacg

SEQ ID NO: 13387 - DNA, 80 bp, synthetic construct
  source 1..80: mol_type = other DNA
aaaaaaattgataacatggcactttccctctccagctgtgaactctttgagggttgggaatgtctttacctgtattcttg

SEQ ID NO: 13388 - DNA, 80 bp, synthetic construct
  source 1..80: mol_type = other DNA
aaaggggaagagttgaggcctcagagggggctggcagggtagaataggatcttttcagcttttctgctaaggaacaaatt

SEQ ID NO: 13389 - DNA, 80 bp, synthetic construct
  source 1..80: mol_type = other DNA
cacttgactatactaccctgtcaacctacacatgaggataaggaaagaactcttcagcactgtgctggggcgtctggtgt

SEQ ID NO: 13390 - DNA, 80 bp, synthetic construct
  source 1..80: mol_type = other DNA
tgcgtaaaaacatggaaccctacaataccgactttgctccttagtaaagattaataaaactccatgagactgttgtccag

SEQ ID NO: 13391 - DNA, 80 bp, synthetic construct
  source 1..80: mol_type = other DNA
cgggactgattcgcactaggggcccaacaggcaataaggacccagcggattggccgaggataggccagtcccctgggcag

SEQ ID NO: 13392 - DNA, 80 bp, synthetic construct
  source 1..80: mol_type = other DNA
tctgttggcttctttcaagtggtgggaccccaaagaatgtttaacttcaaagaaaaggggctgagatgtaaattagagga

SEQ ID NO: 13393 - DNA, 80 bp, synthetic construct
  source 1..80: mol_type = other DNA
cttagccagctgagaggacaaaactggttcctagagacgggatacaggagtggagtagggacaaagatcttgaaaagaat

SEQ ID NO: 13394 - DNA, 80 bp, synthetic construct
  source 1..80: mol_type = other DNA
ggatatgggcagggcacctaggaaagctgaaaaacaagtagttgcatttggccgggctgtgtttcagatgaagaactgga

SEQ ID NO: 13395 - DNA, 80 bp, synthetic construct
  source 1..80: mol_type = other DNA
agctctactgccccaagtgcatggatgtgtacacacccaagtcatcaagacaccatcacacggatggcgcctacttcggc

SEQ ID NO: 13396 - DNA, 80 bp, synthetic construct
  source 1..80: mol_type = other DNA
gctccatcttttagttttagttctaaaggaaaagtagcctaaagtcagtataactaaagggtggaacgaggtgggacaag

SEQ ID NO: 13397 - DNA, 80 bp, synthetic construct
  source 1..80: mol_type = other DNA
gaagtgtaccatcagcagctcatccctgtgcatggtgatcaccatctattatggtaaataaggtcccaggaaggggctgc

SEQ ID NO: 13398 - DNA, 80 bp, synthetic construct
  source 1..80: mol_type = other DNA
accccatggtcacactgtccctgaacctgggcttgtcttttgctgagctgcgccgcatgtacttgttcctcaatagttca

SEQ ID NO: 13399 - DNA, 80 bp, synthetic construct
  source 1..80: mol_type = other DNA
cctggccaacatggtaaaacccgctctctattaaaaatagaaaaatcagctgggtgtggtggcacacctctgtaatccca

SEQ ID NO: 13400 - DNA, 80 bp, synthetic construct
  source 1..80: mol_type = other DNA
tagctggagatcaaagcatggggactgtgattcttcccagccttaaacataccctacaaaacctggaaagttagaccctg

SEQ ID NO: 13401 - DNA, 80 bp, synthetic construct
  source 1..80: mol_type = other DNA
gatacaacagccttttccatacactggataaacatgctggacataacgctgctctgagtcaggcttggtattgagcagca

SEQ ID NO: 13402 - DNA, 80 bp, synthetic construct
  source 1..80: mol_type = other DNA
tcagaggctgaagaacttggcccagaattgaagagaccaggactccaataaggtctaacatctctttgagagtggccttc

SEQ ID NO: 13403 - DNA, 80 bp, synthetic construct
  source 1..80: mol_type = other DNA
gctggaaactggtggaattttacaccaaagtttgctgcagtcacactaaggagtatagagccctctgttttgagggtcat

SEQ ID NO: 13404 - DNA, 80 bp, synthetic construct
  source 1..80: mol_type = other DNA
gcatatttgtgcagggtggaatgtgcataaaagattgcaggagggatcatccagaaagtaaaaaaagtggtcacatgtgc

SEQ ID NO: 13405 - DNA, 80 bp, synthetic construct
  source 1..80: mol_type = other DNA
cctgggtgacagagcagcaaaaaaaaaaagacaggattggagcaatgtcttatgggattatgggaacaagacttggggtg

SEQ ID NO: 13406 - DNA, 80 bp, synthetic construct
  source 1..80: mol_type = other DNA
taaaaatcttcagattgcacatcagtccatgagcaggcattccctaccaaacccatctgtcccatctctcctcctgcatg

SEQ ID NO: 13407 - DNA, 80 bp, synthetic construct
  source 1..80: mol_type = other DNA
aggggtgagggaacaggggtaggcttgcacaaggaagtggtaccattttccaagataggaaacatgtggtctgtctcaaa

SEQ ID NO: 13408 - DNA, 80 bp, synthetic construct
  source 1..80: mol_type = other DNA
aagccttggaatgaatgaatttaaaaactatattagggccggactgcggtggctcacgcctgtaatcccagcactttggg

SEQ ID NO: 13409 - DNA, 80 bp, synthetic construct
  source 1..80: mol_type = other DNA
cgcggcgccctctgaagctccctctcgaatataatcgcaacgaaaaggccaacgactagaggctttgcgaggctgaggct

SEQ ID NO: 13410 - DNA, 80 bp, synthetic construct
  source 1..80: mol_type = other DNA
ctgggaaccacttctttccagatttcccgtccagagtctaactttcctttctcccagcgccatcttttctgctagtttgc

SEQ ID NO: 13411 - DNA, 80 bp, synthetic construct
  source 1..80: mol_type = other DNA
agcttcccttagctgaacaaaaatttagttttcaggggattaactcttctgttggatctgggaggatgggattcagaact

SEQ ID NO: 13412 - DNA, 80 bp, synthetic construct
  source 1..80: mol_type = other DNA
atgagctgagatcgtgccactgcactccagcctaggcgacagagtgagaatccatctcaaaaaacaaacaaaaaaccatc

SEQ ID NO: 13413 - DNA, 80 bp, synthetic construct
  source 1..80: mol_type = other DNA
gttgtatgcaggaagaactgaagaaggaggcgggaggggccagggaggctgcacagttgtgataacagtaggcacatcag

SEQ ID NO: 13414 - DNA, 80 bp, synthetic construct
  source 1..80: mol_type = other DNA
agctccttacccacgctccaggggaagtcgggcccgtgttctgcctggtaggagcggaggacagacagacaccagtcctc

SEQ ID NO: 13415 - DNA, 80 bp, synthetic construct
  source 1..80: mol_type = other DNA
gcagggtcactcaggatgtgagccagtggccttttaccaacttgcactttagtactagtttcagggtttgagcgcccagc

SEQ ID NO: 13416 - DNA, 80 bp, synthetic construct
  source 1..80: mol_type = other DNA
acagtgggggatgggagggaggctggtaccagtgaagccgccgatggaccaggcgtagatgatgatgtcctggggctgga

SEQ ID NO: 13417 - DNA, 80 bp, synthetic construct
  source 1..80: mol_type = other DNA
tcagtgtgggaggcagggacattccctttcaaagggcggagataaggaggctgagtcaccgtcctaccttccaggggcgt

SEQ ID NO: 13418 - DNA, 80 bp, synthetic construct
  source 1..80: mol_type = other DNA
ctctcctacttcatctgtttctctatcacagggtttcactacatcacaaggtctttagcgtggagctaggacatgagatt

SEQ ID NO: 13419 - DNA, 80 bp, synthetic construct
  source 1..80: mol_type = other DNA
tcaaaacctcaaatatggcttgcctccctgactaattagcacactgtcaacaaccaaccactaagtccaccctgttcctt

SEQ ID NO: 13420 - DNA, 80 bp, synthetic construct
  source 1..80: mol_type = other DNA
gagagggcatggaggtgggagggcagagcagagattttctggaatggttctaaggggagagatacagcaaaagaactggg

SEQ ID NO: 13421 - DNA, 80 bp, synthetic construct
  source 1..80: mol_type = other DNA
ttttctttagagacaaggtcttactatgttgcccaggctggtctccaactcctgggctgaagcgatcctcctgccttggc

SEQ ID NO: 13422 - DNA, 80 bp, synthetic construct
  source 1..80: mol_type = other DNA
agccaggaatgtgatgatggtggtcatagctgtttgatcctagaaacctcccataacagaaaagagctctatggggcccc

SEQ ID NO: 13423 - DNA, 80 bp, synthetic construct
  source 1..80: mol_type = other DNA
gacaatggcatgaacccgggaggccgagcttgcagtaagctgagatggcgccactgcactccagcctgggcgacagagtg

SEQ ID NO: 13424 - DNA, 80 bp, synthetic construct
  source 1..80: mol_type = other DNA
gcctggtagaaaaaggacaggaaacagtgctaggaaaactgggaagcagaaagcctaggttttaggaaaagaattggaga

SEQ ID NO: 13425 - DNA, 80 bp, synthetic construct
  source 1..80: mol_type = other DNA
ataagtgctacagagaaaatacaacaagaatgaaccagaactttatgtgtcatcaatggtattcccccaaaacgatatga

SEQ ID NO: 13426 - DNA, 80 bp, synthetic construct
  source 1..80: mol_type = other DNA
gcccatcacctggttgtcatcttatgtacccactaggggtaggtgatctgtcctctttatttttttaaattgcgagatac

SEQ ID NO: 13427 - DNA, 80 bp, synthetic construct
  source 1..80: mol_type = other DNA
acagtttgttcatttgcattgctatatagtgttctcttgcatggctattgcatggaacttttttttttttttgagacgga

SEQ ID NO: 13428 - DNA, 80 bp, synthetic construct
  source 1..80: mol_type = other DNA
tgagaaaacggcaccactttggacaaactcaagtaacctgggaagggagagggacaatgtgagaccctctccgcaatgtc

SEQ ID NO: 13429 - DNA, 80 bp, synthetic construct
  source 1..80: mol_type = other DNA
accagtgccaggatgctgtcagcatgtttctccagggcacggggctgatagtacgtatcctgccaaaacagatggcctcc

SEQ ID NO: 13430 - DNA, 80 bp, synthetic construct
  source 1..80: mol_type = other DNA
gactttaactcaggaagcacacagagcgcagattttgcggataactggcttgacaagcaggctccccttatttcccatta

SEQ ID NO: 13431 - DNA, 80 bp, synthetic construct
  source 1..80: mol_type = other DNA
actgcacttcagccttggtgacagagcaagactctgtctctaaataaataaataaaggtaaactggcccagcgcggtggc

SEQ ID NO: 13432 - DNA, 80 bp, synthetic construct
  source 1..80: mol_type = other DNA
taggcccacaccaccatactcggctaattttacaaggtctcaccatgttgcccaggctggtctcgaactcctgggctcaa

SEQ ID NO: 13433 - DNA, 80 bp, synthetic construct
  source 1..80: mol_type = other DNA
ttcttttactctcattatattgtgagattcaactttgttgcaaatcactaggtttgttcattctcattgctgtccagtct

SEQ ID NO: 13434 - DNA, 80 bp, synthetic construct
  source 1..80: mol_type = other DNA
tttctctccaggatagaaaagtggtggtcactttatccctagtagacatgctgctgggctttatcgccccagcattccca

SEQ ID NO: 13435 - DNA, 80 bp, synthetic construct
  source 1..80: mol_type = other DNA
aaccaggaagggaatccaggctcagactgctggggaactattctttgtggttggagggatccaaagaggaagatgccggg

SEQ ID NO: 13436 - DNA, 80 bp, synthetic construct
  source 1..80: mol_type = other DNA
ccatcacatctggctattttttcttgaaagaaagggtgaattactataaagggtgtgaggggaaagtgtggttatggctg

SEQ ID NO: 13437 - DNA, 80 bp, synthetic construct
  source 1..80: mol_type = other DNA
gatccacccacctcggcctcccaaagtgctgggattacaggtgtgaaccactgcgcctggcctcaatttttatactttca

SEQ ID NO: 13438 - DNA, 80 bp, synthetic construct
  source 1..80: mol_type = other DNA
tgaggatgtgaaaagtagaggtatccttaatctgtctctctggaaaaccccacagcccacctgcccacaagcccaggtga

SEQ ID NO: 13439 - DNA, 80 bp, synthetic construct
  source 1..80: mol_type = other DNA
ggccatgctgggatgtctgtgaaccatgggcgagtctgggctggtgaagcgagggaggatattgatgctcccaacttggc

SEQ ID NO: 13440 - DNA, 80 bp, synthetic construct
  source 1..80: mol_type = other DNA
ggaggcgaggaggctggtgagctgctgtggggaagcggctatgttgcacaggtcctgctcgcagcagtggtgccacagag

SEQ ID NO: 13441 - DNA, 80 bp, synthetic construct
  source 1..80: mol_type = other DNA
atgaacagaagccacaagaatcagagaccaacataaaaagagtgagacaaaaagccagacccagcagcagggaagttgag

SEQ ID NO: 13442 - DNA, 80 bp, synthetic construct
  source 1..80: mol_type = other DNA
ttatccctgccagctttactaccttggaggaaagaaataaccacgggtggggctggagggcctgctgatgtgcttgcact

SEQ ID NO: 13443 - DNA, 80 bp, synthetic construct
  source 1..80: mol_type = other DNA
tgcgatgaaaccccagtttgttgggatcttgctcagctccctgctaggggctgccttgggtaaggaggcggccagctagc

SEQ ID NO: 13444 - DNA, 80 bp, synthetic construct
  source 1..80: mol_type = other DNA
caaacaaacaaacaaacaaacagattaaaaaattagttgggtgtggtggcacatgcttgtagtcctagctactcaggggg

SEQ ID NO: 13445 - DNA, 80 bp, synthetic construct
  source 1..80: mol_type = other DNA
atccttcttgctgcatcacatcaggagtttacaaggtcaatgcattaactttgatcacttggtttcagggaggtgttttt

SEQ ID NO: 13446 - DNA, 80 bp, synthetic construct
  source 1..80: mol_type = other DNA
ggtgtggcctaaatttaggatatgagttgttgtgtgccacctggagacactggaagggaggatgaagacctgaaaaacct

SEQ ID NO: 13447 - DNA, 80 bp, synthetic construct
  source 1..80: mol_type = other DNA
ctaggcttccttccttcccaactctgtccctggccctccccttctcttttcttagtctgatcttccttctgcacatcctt

SEQ ID NO: 13448 - DNA, 80 bp, synthetic construct
  source 1..80: mol_type = other DNA
tccaacctgtttggctgtttggtctagcaagcacagagcaggtgagtgatgcagggaaaatggaaagtgggcggcaggta

SEQ ID NO: 13449 - DNA, 80 bp, synthetic construct
  source 1..80: mol_type = other DNA
gaggacaccttactgagcacagcagatagaggagaaggcaggtaagctagactctggagagttgcatattgaagtggggc

SEQ ID NO: 13450 - DNA, 80 bp, synthetic construct
  source 1..80: mol_type = other DNA
caaattaatctccattcagcccccactcggtctttccaatgcctgctcagcaataagtgactcactgatggcttctgtga

SEQ ID NO: 13451 - DNA, 80 bp, synthetic construct
  source 1..80: mol_type = other DNA
aagcatttgtgtaaatggcccgagcacacattttaagtgagaaccatttgaagactccgagtttgcctgcgaggattccc

SEQ ID NO: 13452 - DNA, 80 bp, synthetic construct
  source 1..80: mol_type = other DNA
gcatccctccccgccacgcctttcccccagggtccgtgtatccccagctcctgatcccgctgctgggcgctgggttggtg

SEQ ID NO: 13453 - DNA, 80 bp, synthetic construct
  source 1..80: mol_type = other DNA
ggaccctgctgatgcctccaccatctatgcagttgtagtttgaagggaagcccttactccaaacctcccaagctagggga

SEQ ID NO: 13454 - DNA, 80 bp, synthetic construct
  source 1..80: mol_type = other DNA
ctcacttccttcctggattacccatagccccacctcatcctcctacccttgctttcctccctgaagtcagagagatccta

SEQ ID NO: 13455 - DNA, 80 bp, synthetic construct
  source 1..80: mol_type = other DNA
gcccagtctaaaaggtcaattctattttattggttctgagagggaggattcacccagtggatccttttccctacactctc

SEQ ID NO: 13456 - DNA, 80 bp, synthetic construct
  source 1..80: mol_type = other DNA
aaattaatcacccctgttcccagtcctgctgttgtaacttcttattttctcctgtgttctttcatgtaagatggacagcc

SEQ ID NO: 13457 - DNA, 80 bp, synthetic construct
  source 1..80: mol_type = other DNA
cggcaatgactcctcaggtggcagttctagcagctgtagccccagtcgttgcctcagtttacctcccagcaccccgtgct

SEQ ID NO: 13458 - DNA, 80 bp, synthetic construct
  source 1..80: mol_type = other DNA
gtctatgtcccaaagtccaccccgcctagctccgcgcccaaataccggctccccatactctctgtctggtgcaggcatgg

SEQ ID NO: 13459 - DNA, 80 bp, synthetic construct
  source 1..80: mol_type = other DNA
ggcgagctcgatctcctcatcatctggacaggtggaagcgaattcttcccgggcgtaggcattgctcaagtaccgatgca

SEQ ID NO: 13460 - DNA, 80 bp, synthetic construct
  source 1..80: mol_type = other DNA
ttgagactatgacaaaaacatgggaaccagcagttttgatcttccacaagaggaagtgaagactgaagttataaagaaag

SEQ ID NO: 13461 - DNA, 80 bp, synthetic construct
  source 1..80: mol_type = other DNA
agtagctgggattacaggtgcctgccaccacaactggctaatttttgtatttttttcagtagagaccagtcatgttggcc

SEQ ID NO: 13462 - DNA, 80 bp, synthetic construct
  source 1..80: mol_type = other DNA
ctgtgttggactcagggttcagagctgccagcttggggtacctgaaagccaatgggaaaaatgaggtaagatgtcttcct

SEQ ID NO: 13463 - DNA, 80 bp, synthetic construct
  source 1..80: mol_type = other DNA
gaagggtgtggaacttcagtgaggccagagttgtaggctagaagcctggatttctgggttcctgaagggagtagagtctg

SEQ ID NO: 13464 - DNA, 80 bp, synthetic construct
  source 1..80: mol_type = other DNA
cttctccaacccccaaatcccaaaatgccctaaccgagctcttctcctccgtctgatctctctcccacccatccttgtgg

SEQ ID NO: 13465 - DNA, 80 bp, synthetic construct
  source 1..80: mol_type = other DNA
gcccaacgcaccccacacccagctcctccagctcggtcctctcccgggctggatcagagagccgctgactcaccgaccgg

SEQ ID NO: 13466 - DNA, 80 bp, synthetic construct
  source 1..80: mol_type = other DNA
gggtctgttcctgtagcttggtcagctttgtgcttccacttatgtttcctattggggccccttcctgtgccctttgtcct

SEQ ID NO: 13467 - DNA, 80 bp, synthetic construct
  source 1..80: mol_type = other DNA
tggcagcctctcccggcctctcttttctctcctacagctttatagctacagctgccttgatatcaatattgactttggct

SEQ ID NO: 13468 - DNA, 80 bp, synthetic construct
  source 1..80: mol_type = other DNA
tctgccagaatttgatgtaattcgaatgcttccacctctgcttgaagggtttaaataataaattaggccctgtcgtgcca

SEQ ID NO: 13469 - DNA, 80 bp, synthetic construct
  source 1..80: mol_type = other DNA
tccacagctctccacgcccctcagccctgccccgcagccctgtagcagaagtacttagtgctttgcattctgcgcgccac

SEQ ID NO: 13470 - DNA, 80 bp, synthetic construct
  source 1..80: mol_type = other DNA
agcttctccagagaggtggggatggaaccatgaattcctctgctctctgggattgcagatgtgttacacacacacacaca

SEQ ID NO: 13471 - DNA, 80 bp, synthetic construct
  source 1..80: mol_type = other DNA
gattcaagcaattctcctgcctcagtctcccgagtagctgggattacaagaatctgccatcacgcctggctaatttttat

SEQ ID NO: 13472 - DNA, 80 bp, synthetic construct
  source 1..80: mol_type = other DNA
gttttattgttggaattctccccattaagttaaagccttttatcaccaaaccaaaaggcactgcctcagtgacccttatt

SEQ ID NO: 13473 - DNA, 80 bp, synthetic construct
  source 1..80: mol_type = other DNA
gactgcttcctgcttttttgttttctgtcctcaggactcatctggtgaacatagatcaagacacttacaggtaaagaggt

SEQ ID NO: 13474 - DNA, 80 bp, synthetic construct
  source 1..80: mol_type = other DNA
ctttcatgccaatccaaatttcttacctatttgtaccccccgccccccaagcttgagcatcttcccatactttgtggctg

SEQ ID NO: 13475 - DNA, 80 bp, synthetic construct
  source 1..80: mol_type = other DNA
cggccgtccagttttttacatatgtgtgttgggctcttgagttttttgtttgtttgtttgttttttagatggaatcttgc

SEQ ID NO: 13476 - DNA, 80 bp, synthetic construct
  source 1..80: mol_type = other DNA
gcttagacacataaacacattccattccctgtccctgccttgtaacaagttcactccctgccttatccctcacaggaatc

SEQ ID NO: 13477 - DNA, 80 bp, synthetic construct
  source 1..80: mol_type = other DNA
tttgctggttaatggcattgctggcagtacaccttctcaagccatgaaccttggattgatgctagaaacaaaaaacctgt

SEQ ID NO: 13478 - DNA, 80 bp, synthetic construct
  source 1..80: mol_type = other DNA
gcataagccactgtgcccggcctggaaagtcttttccttgttctgtacctatcaaaatcttacatccaggtcaggcgcgg

SEQ ID NO: 13479 - DNA, 80 bp, synthetic construct
  source 1..80: mol_type = other DNA
gcgtattccccaaatggaatcagacagggcatgagatcatataacttgaagaatcatcatataatctaatgaactaagga

SEQ ID NO: 13480 - DNA, 80 bp, synthetic construct
  source 1..80: mol_type = other DNA
cattgcaagctccacctcccgggtttacaccattctgcctcaccctcccgagtagctgggactataggtgcccgccaaca

SEQ ID NO: 13481 - DNA, 80 bp, synthetic construct
  source 1..80: mol_type = other DNA
gaggttgcagtgacccgagatcccgccactgtaccctagcctgggcgacagagcaagactccatctcaaaaataataata

SEQ ID NO: 13482 - DNA, 80 bp, synthetic construct
  source 1..80: mol_type = other DNA
acctcaacacactgctctccttctaaaatattgacaagctccgttacttatatacatggaatgacacacggtcttatccg

SEQ ID NO: 13483 - DNA, 80 bp, synthetic construct
  source 1..80: mol_type = other DNA
ctgacttcaggtgatccacctgcctcagcctcccaaggtgctgggattacaggtgtgaaccaccaggcccggcctccctc

SEQ ID NO: 13484 - DNA, 80 bp, synthetic construct
  source 1..80: mol_type = other DNA
caagttttttttttgtatttttagtagagacagggtttcaccatgttggccaggatggtcttgatctcctgacctcgtga

SEQ ID NO: 13485 - DNA, 80 bp, synthetic construct
  source 1..80: mol_type = other DNA
ctttttcttctcctggcaatttgttgaagaaactagattattatttgtcttatagtgttttccattagcctggattttgc

SEQ ID NO: 13486 - DNA, 80 bp, synthetic construct
  source 1..80: mol_type = other DNA
tatgtgctgcagaaatgagcaccccccacctttatttactagctatcaatatggtaaattagttccctaacattctccaa

SEQ ID NO: 13487 - DNA, 80 bp, synthetic construct
  source 1..80: mol_type = other DNA
tgtagtttcagtgtttggtacagtgcctctcactgtttctttttgcctttgagatcttccctctttgttactgtgatctt

SEQ ID NO: 13488 - DNA, 80 bp, synthetic construct
  source 1..80: mol_type = other DNA
ttttgggggagatattaggcttatgaaagacatactggtagataagaaaacttgtggggcagcctgaagaacatgaacac

SEQ ID NO: 13489 - DNA, 80 bp, synthetic construct
  source 1..80: mol_type = other DNA
cgcctggacgtcctgctggctcttgccagtgctgcccgggactatggctactcaaggccgcgttactccccacaagtcct

SEQ ID NO: 13490 - DNA, 80 bp, synthetic construct
  source 1..80: mol_type = other DNA
gaatccatctcccttggcctctccaccttcatgatcgacctcaaccaggtcaaagggaacaaagggaggtgggattgagg

SEQ ID NO: 13491 - DNA, 80 bp, synthetic construct
  source 1..80: mol_type = other DNA
ttggccaagggtttcaggacaggaaggaggtgattgatgatacactgtcttttattctcttttaagaccatggagacctg

SEQ ID NO: 13492 - DNA, 80 bp, synthetic construct
  source 1..80: mol_type = other DNA
agaaagatattgtttctttagtctcaaaacaagagactaggaaagatccaaaacacagagcaggagtccacaggggaacc

SEQ ID NO: 13493 - DNA, 80 bp, synthetic construct
  source 1..80: mol_type = other DNA
agaccactctggagaggggagagttaatggtcagggatcatgagttggaggcagcatcgtaatgacaggatgccaccaag

SEQ ID NO: 13494 - DNA, 80 bp, synthetic construct
  source 1..80: mol_type = other DNA
gtttcttaactcaacagctaaaaaatggctccaggtagtgagtcaatgaagttcagacatgttggtgtaaagtttctcct

SEQ ID NO: 13495 - DNA, 80 bp, synthetic construct
  source 1..80: mol_type = other DNA
tgacaaatgtgtcccaggtcttcttaccaatggggcaggttgaaaatagtgctggagacccatccctttagagcccgttg

SEQ ID NO: 13496 - DNA, 80 bp, synthetic construct
  source 1..80: mol_type = other DNA
ggctgcgaggagacctcgctccggaggtcccacgggctccaagggcacctggcctagttcggcaccctctgggacccctc

SEQ ID NO: 13497 - DNA, 80 bp, synthetic construct
  source 1..80: mol_type = other DNA
cccctggggtcagggaagagattgtcacatgaagcacttgctctccttgagtacatcccctcgattgtctattccccggt

SEQ ID NO: 13498 - DNA, 80 bp, synthetic construct
  source 1..80: mol_type = other DNA
atggtaggacttcctgtggtaaccctggaggcagaatactggaagccaagtggggagaggtttactgatataaaaggaca

SEQ ID NO: 13499 - DNA, 80 bp, synthetic construct
  source 1..80: mol_type = other DNA
ttcagcgttattaagggtagggcctcttacgtatatcattaaaggtatcaggaaatgttccactcattgtctgcttctcc

SEQ ID NO: 13500 - DNA, 80 bp, synthetic construct
  source 1..80: mol_type = other DNA
agcctccccagaggctccccagtagcctccccagctactggggaggctgaggcaggagaatcacttgaacccgggaggca

SEQ ID NO: 13501 - DNA, 80 bp, synthetic construct
  source 1..80: mol_type = other DNA
tgaaatcgaggcaaagaaagtttacatgaccagcctaaagacacacagtcagactcaagccagagagtctaacttctaat

SEQ ID NO: 13502 - DNA, 80 bp, synthetic construct
  source 1..80: mol_type = other DNA
tttttatcttttcttttttttttctttcttttcttttttttttttttttttttttttttttgtgacagagctttttgctc

SEQ ID NO: 13503 - DNA, 80 bp, synthetic construct
  source 1..80: mol_type = other DNA
gcctggcctgaccctctcacccctcagcaagggttcagcaagaaatgatgacggggttggcgcggtggctcacgcctgga

SEQ ID NO: 13504 - DNA, 80 bp, synthetic construct
  source 1..80: mol_type = other DNA
atgactttctccccttacttctggggaactttcttgtctggtacctggaggtttcgggggatgagttccaaagtagccag

SEQ ID NO: 13505 - DNA, 80 bp, synthetic construct
  source 1..80: mol_type = other DNA
ggtccggaggacaggagaaggggagtgaggcactagtctggcctttctcaccatctccagcactaatatgccactccttt

SEQ ID NO: 13506 - DNA, 80 bp, synthetic construct
  source 1..80: mol_type = other DNA
actcctaatttcaggaccaagactactgggtattattgctgcaggggtggggccatgggtgtctcttctcttggcaacca

SEQ ID NO: 13507 - DNA, 80 bp, synthetic construct
  source 1..80: mol_type = other DNA
gtaagcagcgtgactcaggcctggcacagtgccagggacagacccagatagacgcacccctctgccctccagaaccaggg

SEQ ID NO: 13508 - DNA, 80 bp, synthetic construct
  source 1..80: mol_type = other DNA
ggatgcctggttctaggtcagcctccgtctcccacctgttgtgtgaccctgggttgtgcccagcccccagctgctcccca

SEQ ID NO: 13509 - DNA, 80 bp, synthetic construct
  source 1..80: mol_type = other DNA
catccgccacttccaggaaacctgccagggagggagaaaggtgaggcctagctccatggagacaggaaaccaagcagtca

SEQ ID NO: 13510 - DNA, 80 bp, synthetic construct
  source 1..80: mol_type = other DNA
tcttcatccagagtctgatgagtccaaagcaaccacctatgtgccaggatctgggaagaagtgacaggccccagccccca

SEQ ID NO: 13511 - DNA, 80 bp, synthetic construct
  source 1..80: mol_type = other DNA
gactgtgtctggtctaccccactgtgaacctcaggtcccactgagtgtccccaagagctcgttgagcgcctttatgtgaa

SEQ ID NO: 13512 - DNA, 80 bp, synthetic construct
  source 1..80: mol_type = other DNA
ctgacagtgacaaagtaggctgggatgcgatggccccaccacagctgcctggaaatgcaccactccctgcaaatgtcggg

SEQ ID NO: 13513 - DNA, 80 bp, synthetic construct
  source 1..80: mol_type = other DNA
gtctatttggctgaagcttattttctttttctctgagagaagatggacagctagggtgcagctccagtcttttcctctcc

SEQ ID NO: 13514 - DNA, 80 bp, synthetic construct
  source 1..80: mol_type = other DNA
tgcctggctatttaactttttaaaaatgcacgaagggctgggcccaagtccttcctttccagggccctgactatcccaac

SEQ ID NO: 13515 - DNA, 80 bp, synthetic construct
  source 1..80: mol_type = other DNA
gagaggactaagggaacacaagagcaggcaacaagccttgtaatgctgcagatggcgaggaagacaatcagctggggaca

SEQ ID NO: 13516 - DNA, 80 bp, synthetic construct
  source 1..80: mol_type = other DNA
gaaagcagaggcttcaggcaaggagtcagtggactaaataaagaagcagggaggccggacgcggtggctcacgcctgtaa

SEQ ID NO: 13517 - DNA, 80 bp, synthetic construct
  source 1..80: mol_type = other DNA
tactaaacaggaacaaaatagtacctggaaacagatacaagcaaatttagtgtttgtgaaagttggcacttcctatcagt

SEQ ID NO: 13518 - DNA, 80 bp, synthetic construct
  source 1..80: mol_type = other DNA
gttttcatgtaaacaaacttggaggccaggtatggtggttcatgcctgtagtcccagcactttgggagactgaggcagga

SEQ ID NO: 13519 - DNA, 80 bp, synthetic construct
  source 1..80: mol_type = other DNA
gttacttgcaaaatgcacaatcaaacattatattcccagtgctcagagcagaggtggcacatagttgggcccagtaaata

SEQ ID NO: 13520 - DNA, 80 bp, synthetic construct
  source 1..80: mol_type = other DNA
ctgcactccagcctgggtgacagtgcaagacccgtctcaaaaaataaataaataaataaataataaaaataaatttaaaa

SEQ ID NO: 13521 - DNA, 80 bp, synthetic construct
  source 1..80: mol_type = other DNA
tggctaaatcttaggaggaagtaggtgtggagggggatggtcaaggagatttgaaactttaaatttcttacaagaatata

SEQ ID NO: 13522 - DNA, 80 bp, synthetic construct
  source 1..80: mol_type = other DNA
ccatactctggcttgaagaagccctgctgctcccaccaagggtaccaggcagcctccacataccgagggctgtaggagtc

SEQ ID NO: 13523 - DNA, 80 bp, synthetic construct
  source 1..80: mol_type = other DNA
ggacacacgtgacaaaccagcgagtcacattattccagatccggcgggcaggtgggtctaggacctggaacaggaaataa

SEQ ID NO: 13524 - DNA, 80 bp, synthetic construct
  source 1..80: mol_type = other DNA
atataaaatgaagtgccctatttttcttaactcctatgaagaaaaataaagcagaatgaggggaacaggggccaggcgtg

SEQ ID NO: 13525 - DNA, 80 bp, synthetic construct
  source 1..80: mol_type = other DNA
ggatttgatcactcttttcccacatctgatgtactaccttcttgtctcattgtccattccagtcctcgcttccctcctct

SEQ ID NO: 13526 - DNA, 80 bp, synthetic construct
  source 1..80: mol_type = other DNA
accctagttccctaagatcgccgccccggcagccggcgcccacgtgttcccccctttgtgacagggagcgtttccgggcc

SEQ ID NO: 13527 - DNA, 80 bp, synthetic construct
  source 1..80: mol_type = other DNA
agactcccgtctcaaaaacaaaaaggagggtcacactagatggtctctaagggtcccttaaggctgagaagtctcatctg

SEQ ID NO: 13528 - DNA, 80 bp, synthetic construct
  source 1..80: mol_type = other DNA
ctgcacgtatcggaccactgagccccgaatgaagcagttcttcactgataactagacaaagatggacaaatatgaaaaca

SEQ ID NO: 13529 - DNA, 80 bp, synthetic construct
  source 1..80: mol_type = other DNA
tagaaccaaaagggggcattcctaagccctggagtaggaaagacaactaacagagtagtttattttcaaccccacatctc

SEQ ID NO: 13530 - DNA, 80 bp, synthetic construct
  source 1..80: mol_type = other DNA
tattttcaaacatttattgctttggaaccagagcccatatgtggataaaggtaggtagcattactcttgatgatgcaggc

SEQ ID NO: 13531 - DNA, 80 bp, synthetic construct
  source 1..80: mol_type = other DNA
caagactccgtctcaaaaaaaaaaaaatacaaaaattagctgggcattgtggtgtgcacctgtaatcccagctactcagg

SEQ ID NO: 13532 - DNA, 80 bp, synthetic construct
  source 1..80: mol_type = other DNA
tctcaaggaaaaaaaaggagaaagatcttctttctcatcccaacagaaaagtcactttaaagccacacacatattggctc

SEQ ID NO: 13533 - DNA, 80 bp, synthetic construct
  source 1..80: mol_type = other DNA
aggcccaggaaggagaaaagaggagaatcaaaaacaagtcatcacaccaaattgcctaagactgatagtgattaccgtac

SEQ ID NO: 13534 - DNA, 80 bp, synthetic construct
  source 1..80: mol_type = other DNA
ccagcactttgggaagctgaagcaagaggactgcttgaactcaaagaatttgaaaccagcctgagcaacaaagtgaggca

SEQ ID NO: 13535 - DNA, 80 bp, synthetic construct
  source 1..80: mol_type = other DNA
gtcaatacgtcttcggatattatttttctttctttaagcacctatcatataactggcctatgctaggtattagatacact

SEQ ID NO: 13536 - DNA, 80 bp, synthetic construct
  source 1..80: mol_type = other DNA
tttttatagaaatagaggtctcatcactatgttgcccagactagtctcgacatcctggactcaagtgatcctcctgcctc

SEQ ID NO: 13537 - DNA, 80 bp, synthetic construct
  source 1..80: mol_type = other DNA
gaggagtgtcctttgacagtattaccaaatactggtattgtgaaccccactgcatccctgacagttctcaaaatttcaca

SEQ ID NO: 13538 - DNA, 80 bp, synthetic construct
  source 1..80: mol_type = other DNA
tccagaatcctgccatctacagcgtgatgtgtttgtgccctacacacacttcctatcgagaattgtggggagtttgttaa

SEQ ID NO: 13539 - DNA, 80 bp, synthetic construct
  source 1..80: mol_type = other DNA
gttaccaataaatacatttctccaaaggagccaacctcaatctccgcatttcttacacacttttgccaagactgtcctgt

SEQ ID NO: 13540 - DNA, 80 bp, synthetic construct
  source 1..80: mol_type = other DNA
atgtaatggatgtaaacaatgaactctgtgagtgcatagatgctgaatctcctggaccttacctataagtgacatcagga

SEQ ID NO: 13541 - DNA, 80 bp, synthetic construct
  source 1..80: mol_type = other DNA
caggcccagtgcatcctccttggtagagttttgtgatgatagggttacacatctgctccaattcctttctcttatgatca

SEQ ID NO: 13542 - DNA, 80 bp, synthetic construct
  source 1..80: mol_type = other DNA
tggtgatggatgtatagaagtcaatgccttcataaagtgaatcaatttctaggttggcctgggtgctggacgacagggtc

SEQ ID NO: 13543 - DNA, 80 bp, synthetic construct
  source 1..80: mol_type = other DNA
gattcccttggcagtagccatggttctctgaggcctatggagaaagaataagatactgttttgggagagtgcttttcaat

SEQ ID NO: 13544 - DNA, 80 bp, synthetic construct
  source 1..80: mol_type = other DNA
actgcagtggtgtaatcatggctcactgcagtcttgacctcccaggctcataggatccttttgtctcagcctcccaagta

SEQ ID NO: 13545 - DNA, 80 bp, synthetic construct
  source 1..80: mol_type = other DNA
ttcctatatattttactgtgggattctgtctctttatgacccaagagtagtgtacattctggtctcttcaagagacatca

SEQ ID NO: 13546 - DNA, 80 bp, synthetic construct
  source 1..80: mol_type = other DNA
caggcttaaaccaactagggaactttccagtactttcccaaacaaggacctactgagcctttcaggttcacaatcaatca

SEQ ID NO: 13547 - DNA, 80 bp, synthetic construct
  source 1..80: mol_type = other DNA
ccggcatggccaaagccgcggcgatcggcatcgacctgggcaccacctactcctgcgtgggggtgttccaacacggcaag

SEQ ID NO: 13548 - DNA, 80 bp, synthetic construct
  source 1..80: mol_type = other DNA
aggctctgcgcgacgccaagctggacaaggcccagattcacgacctggtcctggtcgggggctccacccgcatccccaag

SEQ ID NO: 13549 - DNA, 80 bp, synthetic construct
  source 1..80: mol_type = other DNA
aggtagattaggggcctttccaagattgctgtttttgttttggagcttcaagactttgcatttcctagtatttctgtttg

SEQ ID NO: 13550 - DNA, 80 bp, synthetic construct
  source 1..80: mol_type = other DNA
gtgtcctaaatttcaaagtgaaaaaacgggtacattcactggcttgctgagttatacacatgtgctttagttgtcatctt

SEQ ID NO: 13551 - DNA, 80 bp, synthetic construct
  source 1..80: mol_type = other DNA
aaataaataaatagtatctaagggcgatgaaaatgttttggaaccagagttgacggttgcataacattgtaaaggtcaag

SEQ ID NO: 13552 - DNA, 80 bp, synthetic construct
  source 1..80: mol_type = other DNA
accttgaaatattcactttgtaacctcaagaaaagacgttgagggagctgtggaattagcaaagagaatgcagtgccacc

SEQ ID NO: 13553 - DNA, 80 bp, synthetic construct
  source 1..80: mol_type = other DNA
gggcaccagaggagggctggagcaggttcacaggctgggactacggaggagcccagcaaccgagaatcactcctgagggt

SEQ ID NO: 13554 - DNA, 80 bp, synthetic construct
  source 1..80: mol_type = other DNA
cccttaatgctcgcagaggccaacactgtattcatttgttttcctctttagagaataaaacaattaggtctaaccacaaa

SEQ ID NO: 13555 - DNA, 80 bp, synthetic construct
  source 1..80: mol_type = other DNA
tttctttccatgctgctagaaatggccagggttctctttgtcattgaagcatttgtcattcattcagttaagaatgcctg

SEQ ID NO: 13556 - DNA, 80 bp, synthetic construct
  source 1..80: mol_type = other DNA
gaccctctccttgtcaggaaatggacaaggaatatgtatgtgtgggtttccagtctagtccacagaggcttcacttaaaa

SEQ ID NO: 13557 - DNA, 80 bp, synthetic construct
  source 1..80: mol_type = other DNA
ttagatcagtgaattataaacaaatgaatacccttaaattccaggaagaggtgttttgatagtggacaggtgtgtgtgtg

SEQ ID NO: 13558 - DNA, 80 bp, synthetic construct
  source 1..80: mol_type = other DNA
gactgtctcaaaacgaaaacaacaaacttaagacacataacctgaggtgttaagaggagctagtaactagaacctgggtc

SEQ ID NO: 13559 - DNA, 80 bp, synthetic construct
  source 1..80: mol_type = other DNA
gagttctgagcagagggcggcaccctgccctctgattggtccaaggaaggctggggggcaggacgggaggcgaaacccct

SEQ ID NO: 13560 - DNA, 80 bp, synthetic construct
  source 1..80: mol_type = other DNA
acgggcaagggggagcgcaacgtgctcatctttgacctgggcgggggcaccttcgacgtgtccatcctgacgatcgacga

SEQ ID NO: 13561 - DNA, 80 bp, synthetic construct
  source 1..80: mol_type = other DNA
atgccaacggcatcctgaacgtcacggccacggacaagagcaccggcaaggccaacaagatcaccatcaccaacgacaag

SEQ ID NO: 13562 - DNA, 80 bp, synthetic construct
  source 1..80: mol_type = other DNA
accatctatctttatagtctgaaaagaacagtactgctgaagagttatacgtgtaggagttagagctacacatatttttg

SEQ ID NO: 13563 - DNA, 80 bp, synthetic construct
  source 1..80: mol_type = other DNA
tgccctgccagtttttgtgtttttttttgggggggtggtgggtggagggtatatattgcatggcatggtgaaaatagtta

SEQ ID NO: 13564 - DNA, 80 bp, synthetic construct
  source 1..80: mol_type = other DNA
tgctgggattataggcgtgagccactatgcccggcccttgggccaattcttaaaggcctgttttattaatgaaagagatg

SEQ ID NO: 13565 - DNA, 80 bp, synthetic construct
  source 1..80: mol_type = other DNA
acagagcaagaccctatctcaaaaaaaaaaaaaaagaaaaagaaaaaaaaaaaaaggaagaggccaggctcggtggctca

SEQ ID NO: 13566 - DNA, 80 bp, synthetic construct
  source 1..80: mol_type = other DNA
tcgaactgggaggcaaattcagatttcgctgggggaacggagtgcgaagtgtcagggtagctggacgctaaactggcgca

SEQ ID NO: 13567 - DNA, 80 bp, synthetic construct
  source 1..80: mol_type = other DNA
cgtgttatccttgagtaaaggtgagtattaggtgcgagagccttttgaatgcctcttcggaaagctttgttcccaagcaa

SEQ ID NO: 13568 - DNA, 80 bp, synthetic construct
  source 1..80: mol_type = other DNA
ccacgcctggctaatttttagtttttttacagaagcgggcttttgccatgttgtccaggctggtctctactcctgggctc

SEQ ID NO: 13569 - DNA, 80 bp, synthetic construct
  source 1..80: mol_type = other DNA
tttggaatctccccctcatggagagaagctttgtatggctgtcatgcttagacagtgattcctgcaacttgaccttcagg

SEQ ID NO: 13570 - DNA, 80 bp, synthetic construct
  source 1..80: mol_type = other DNA
agtgctcagattacaggtattagccaccgagcccagcccgcaacatgtatttttatttattttttgtttgagatggagtt

SEQ ID NO: 13571 - DNA, 80 bp, synthetic construct
  source 1..80: mol_type = other DNA
tgtagatttagggggtatatgtgcagttttgttacttgggttcattgtatgatgctgaggtttggggtaggattatcccc

SEQ ID NO: 13572 - DNA, 80 bp, synthetic construct
  source 1..80: mol_type = other DNA
ccccgtgagctagttaatgctgagttaggcttaactcttaagcctaatattagagattcttggttgggtgacatagtatt

SEQ ID NO: 13573 - DNA, 80 bp, synthetic construct
  source 1..80: mol_type = other DNA
gtcgcccaggctagagtgcagtggcgtgatctcgactcatactgcaatctctgcctcccaggttcaccccattattctgc

SEQ ID NO: 13574 - DNA, 80 bp, synthetic construct
  source 1..80: mol_type = other DNA
actatcttggctcaccacaacctctgcctcctgggttcaagcgattctcctgccttatcctgccaagtagctgggattat

SEQ ID NO: 13575 - DNA, 80 bp, synthetic construct
  source 1..80: mol_type = other DNA
agatcatgccattatgctctagcctgggcaacaagaatgaaactacatctcaaaatacatacatacatacatacagttaa

SEQ ID NO: 13576 - DNA, 80 bp, synthetic construct
  source 1..80: mol_type = other DNA
ctgggattacaggtgagccaccgcgcccagccatgcccagctaatttttaaattttttatacagtgaagttttcactata

SEQ ID NO: 13577 - DNA, 80 bp, synthetic construct
  source 1..80: mol_type = other DNA
caggctgaactccccagcttgcagttactctaatagcggctagcctgctacttcagctactgtaggcagtgagcctccta

SEQ ID NO: 13578 - DNA, 80 bp, synthetic construct
  source 1..80: mol_type = other DNA
ccaacaactagtggtacgtaatgtttacatattagttgtatgtaacattaatatatgtttacatactggtagtatgtaag

SEQ ID NO: 13579 - DNA, 80 bp, synthetic construct
  source 1..80: mol_type = other DNA
ttagtttgttgattgtagtactttcttttcattagcattctactttcccatgactttttttgggggggagtggggtggac

SEQ ID NO: 13580 - DNA, 80 bp, synthetic construct
  source 1..80: mol_type = other DNA
catctccaaaaaataaggatgttcatctgcatattcacaatactattatacctgagaaaagcaaatttaattccctaata

SEQ ID NO: 13581 - DNA, 80 bp, synthetic construct
  source 1..80: mol_type = other DNA
tcgcccaggtttgagggcagtggtgcggtcttggtgcactacagcctctacctcctgggctcaagtgaccctctcacctc

SEQ ID NO: 13582 - DNA, 80 bp, synthetic construct
  source 1..80: mol_type = other DNA
ttggaaagatgtccaagccattgctttgatcttccttcccaatcctttcttgggcaaaaattattagatggctatgggtg

SEQ ID NO: 13583 - DNA, 80 bp, synthetic construct
  source 1..80: mol_type = other DNA
agaccccatgactattgcatcttcagtgtggaatgtaaaaaacaccttcccccaccccccaaaaaagaaaaaaaaaattg

SEQ ID NO: 13584 - DNA, 80 bp, synthetic construct
  source 1..80: mol_type = other DNA
caggggtatgcagtttcactcctgacgctagcgagagcacgaaccccccgggaggaacaaacaactccagaggcgccgca

SEQ ID NO: 13585 - DNA, 80 bp, synthetic construct
  source 1..80: mol_type = other DNA
catgtctacttctttctacacagacacggcaaccatccgatttctcaatcttttccccacctttcctgcctttctattcc

SEQ ID NO: 13586 - DNA, 80 bp, synthetic construct
  source 1..80: mol_type = other DNA
ggcacggctggccggtcgggggggctgaccccccacctccctcccagatggggcggctggccgggcggggggttgacccc

SEQ ID NO: 13587 - DNA, 80 bp, synthetic construct
  source 1..80: mol_type = other DNA
agggagacagagggagagggagggagagccggtggataaactctttaaactagattctaagcctggtacagtggtatgtg

SEQ ID NO: 13588 - DNA, 80 bp, synthetic construct
  source 1..80: mol_type = other DNA
aaaaaaaatttcctcacagagtagagctaactcataagcagtgtgcccagagtcggcccactttgtcccattagtacaaa

SEQ ID NO: 13589 - DNA, 80 bp, synthetic construct
  source 1..80: mol_type = other DNA
tcaagcctcccagcacttctgtttctaacaggtagtagttcatgggtcagacattcatagtgtcctttcctttttgtctt

SEQ ID NO: 13590 - DNA, 80 bp, synthetic construct
  source 1..80: mol_type = other DNA
tagctgtaacctcagcactttgggaagctgaggcatgaggattgcttaagcacaggagttccataccagcctgggcaaca

SEQ ID NO: 13591 - DNA, 80 bp, synthetic construct
  source 1..80: mol_type = other DNA
gcacagctcagagtgtcccatagacactgattttggccacggagatgctctctgtgtagtggttccggcctttctcatac

SEQ ID NO: 13592 - DNA, 80 bp, synthetic construct
  source 1..80: mol_type = other DNA
gggaactgggtgtcacagaaggagactctaggggctcagaggcagggacagagaacccaccacttcccaaatgcaatcac

SEQ ID NO: 13593 - DNA, 80 bp, synthetic construct
  source 1..80: mol_type = other DNA
tccgatggtcccagggtgcaatccaacacttgcactatctatacctcttgtcctgttttatttttctccattgcatttat

SEQ ID NO: 13594 - DNA, 80 bp, synthetic construct
  source 1..80: mol_type = other DNA
tcgaatgaggagaaggacggggacccggagagggagaggggctgggagcggtaggaggaaacggggtctgggagaaagaa

SEQ ID NO: 13595 - DNA, 80 bp, synthetic construct
  source 1..80: mol_type = other DNA
tcttcctcttcttgttgtccgggggcgcctcgttcttcttgcccagaatctttagaaggctcttggacatgtagtagggc

SEQ ID NO: 13596 - DNA, 80 bp, synthetic construct
  source 1..80: mol_type = other DNA
gcattgtttctagaagcaccaaatctccaaaaaaaaaaaaaaatgcttgaacggctcagtactttaaggttggggacagg

SEQ ID NO: 13597 - DNA, 80 bp, synthetic construct
  source 1..80: mol_type = other DNA
tgcggtttaggaacttgataaatttttccagacaccagaggcagcacttgaaacagcacatgatgcagcgggctacaggg

SEQ ID NO: 13598 - DNA, 80 bp, synthetic construct
  source 1..80: mol_type = other DNA
tttgtgagatgtgataatgatatagtggctatgcttttaaacagttcttatctgttgagatccatctcgatgcatgtaca

SEQ ID NO: 13599 - DNA, 80 bp, synthetic construct
  source 1..80: mol_type = other DNA
cttctgtcagtctttactgctagatcacaagcaagttgaaaacaacactcacgtcatacccagcacagttgctcatgtgt

SEQ ID NO: 13600 - DNA, 80 bp, synthetic construct
  source 1..80: mol_type = other DNA
ctacctagggctctgtgttccaagggagtaagacttaacaatataatacaattcaacctgttgttgagctcttatcaggt

SEQ ID NO: 13601 - DNA, 80 bp, synthetic construct
  source 1..80: mol_type = other DNA
ttcaactctgttcaggcacagtgctggtgtgtctgcccagagaaaggggcacctcttccagtgacaccaaggcactctac

SEQ ID NO: 13602 - DNA, 80 bp, synthetic construct
  source 1..80: mol_type = other DNA
aacccctctagaaggcctatgtcatattccaggcactcattgaatcctcaagacaaccctagaaggcaggaattattgtt

SEQ ID NO: 13603 - DNA, 80 bp, synthetic construct
  source 1..80: mol_type = other DNA
acacaagaatccaataccaggactgggcaaaatcttcaaagatcttaacactgatgtctcgggcattgaggctgtcaata

SEQ ID NO: 13604 - DNA, 80 bp, synthetic construct
  source 1..80: mol_type = other DNA
atttatttattttcttatttttgagtcaaggtcttgctctgtcacccaggctagagtgcagctgcatgatcatagcttac

SEQ ID NO: 13605 - DNA, 80 bp, synthetic construct
  source 1..80: mol_type = other DNA
acggagtctcgctctgtcagcaaggctagagtacagtggcacgatcttggctcactgcaaagctcactgcaacctctgcc

SEQ ID NO: 13606 - DNA, 80 bp, synthetic construct
  source 1..80: mol_type = other DNA
ttttcatgagattttcatacagtctctttgtgaacaactctaatctcttcacctagaatgtagctgaagcagggagcagt

SEQ ID NO: 13607 - DNA, 80 bp, synthetic construct
  source 1..80: mol_type = other DNA
atgcctagaagatctctcagagtaagtcaccattgcagcagctgacaaatagctcagagcatgaacttggagctccacaa

SEQ ID NO: 13608 - DNA, 80 bp, synthetic construct
  source 1..80: mol_type = other DNA
tggaggggttaagggttagagagttgggtgatgctgcagcatgggcatcagtaggctttatttttatttttttattgctt

SEQ ID NO: 13609 - DNA, 80 bp, synthetic construct
  source 1..80: mol_type = other DNA
tgagtctctctctgcatatcttgtcctgctgagtcctcctagccccaggatcctacccaggcctcaggtgtttggaggga

SEQ ID NO: 13610 - DNA, 80 bp, synthetic construct
  source 1..80: mol_type = other DNA
aggggttccttccccttcagaccagaagaccaggggggcctccgcaggtgagtccccagccttcactgctcgtggggatc

SEQ ID NO: 13611 - DNA, 80 bp, synthetic construct
  source 1..80: mol_type = other DNA
cggagtgattggagccctggagacctggcgtctcacctgctgcccgccccgccctcccacacgtcacagccccacccccg

SEQ ID NO: 13612 - DNA, 80 bp, synthetic construct
  source 1..80: mol_type = other DNA
tcaggaatgtgtgaaagggtggtggggagagaagatggcagcacccccaggcatgggctgcgagcagctggtggcagagg

SEQ ID NO: 13613 - DNA, 80 bp, synthetic construct
  source 1..80: mol_type = other DNA
gaggtaagaatcatcctctctcacatcagcctcagcatcagagatcagctccccgacatacctgtgggacaggaatccat

SEQ ID NO: 13614 - DNA, 80 bp, synthetic construct
  source 1..80: mol_type = other DNA
gagggacaggcccctgaggaggtggacagataggtagctgttatcacctccactctacagacaagaaaaataaggctcaa

SEQ ID NO: 13615 - DNA, 80 bp, synthetic construct
  source 1..80: mol_type = other DNA
ggagcatcatccctggtttgcatagacctgggcacacgcccatcgctgtcccagccacatcccaggattcccaggccttg

SEQ ID NO: 13616 - DNA, 80 bp, synthetic construct
  source 1..80: mol_type = other DNA
acaagaaatagctttttagtatgtcccaaaaattacacaggacattctcacactaaaaaagtatgcatctgtgcatctga

SEQ ID NO: 13617 - DNA, 80 bp, synthetic construct
  source 1..80: mol_type = other DNA
caaatggtcaagattggctgtgtgtgtgaatcccagctccaccattcacaagctgtgggaccctgggtaagtcacttaac

SEQ ID NO: 13618 - DNA, 80 bp, synthetic construct
  source 1..80: mol_type = other DNA
cctcttaaaggggcttcttctggacaatgatggaataattcaaagactgagaagaatgccaataaatgactaaaacacat

SEQ ID NO: 13619 - DNA, 80 bp, synthetic construct
  source 1..80: mol_type = other DNA
agctagggggcaggtggcacttctttcaggaaggcttctcagggccccaagctggatcagggcccctcctggcattctcc

SEQ ID NO: 13620 - DNA, 80 bp, synthetic construct
  source 1..80: mol_type = other DNA
ggccggtggggtcaccccgtcaccccgggggatggtcacctcttgagcttcagaagcatcctccccacagtggggacaga

SEQ ID NO: 13621 - DNA, 80 bp, synthetic construct
  source 1..80: mol_type = other DNA
tgacacagagacagagagagtgagagtgcgagctcacaggtgcctggacgcgtgggtacatgcaggtggacatgcgagag

SEQ ID NO: 13622 - DNA, 80 bp, synthetic construct
  source 1..80: mol_type = other DNA
gcagagaggatgtgtcaatctccacccaatcagccaactcctaaatgtgaaaaattctgtaggacaactgagctggtttc

SEQ ID NO: 13623 - DNA, 80 bp, synthetic construct
  source 1..80: mol_type = other DNA
actgtgcctggctgacctaagacaaatgttaatcaaatcaaggtgtgggcctcatttggatcttgacaaaaaccatttgt

SEQ ID NO: 13624 - DNA, 80 bp, synthetic construct
  source 1..80: mol_type = other DNA
atggggcaatgacttagtggatattcagaagataaaaaggacagaaagcagaaaaacagggaacaaggaggactggacag

SEQ ID NO: 13625 - DNA, 80 bp, synthetic construct
  source 1..80: mol_type = other DNA
aaaacaaagcttaataaagttaaaagaccttttatatgtggccatatacacagcaggactgtttacaacagctgaggtgc

SEQ ID NO: 13626 - DNA, 80 bp, synthetic construct
  source 1..80: mol_type = other DNA
ctacaggcacatgccaccacgcccggctaatttttgttttgtttttttttttgagacagagttttgctcttgttgtccag

SEQ ID NO: 13627 - DNA, 80 bp, synthetic construct
  source 1..80: mol_type = other DNA
tttatcatagtgagaaaggaaaggtagctcatagcaacctgtgctatgtgaagcaggcaaaattgatcaggctcagcgag

SEQ ID NO: 13628 - DNA, 80 bp, synthetic construct
  source 1..80: mol_type = other DNA
cccttgcttaaatatgtgaatgagtaaatggagtagaagccttaagtgaaactgtaaaagagctcaccaaaggtttatgg

SEQ ID NO: 13629 - DNA, 80 bp, synthetic construct
  source 1..80: mol_type = other DNA
gagagtaggctccggggcctacctcttcctctgtggggccccccccttccgcggcctcggctgcccggaggggccgcacg

SEQ ID NO: 13630 - DNA, 80 bp, synthetic construct
  source 1..80: mol_type = other DNA
ttctgcctttctagtttttgggttaccagatagaaggcttggcctcagttttggcctcgcctttttgctctttctaacga

SEQ ID NO: 13631 - DNA, 80 bp, synthetic construct
  source 1..80: mol_type = other DNA
agctcacttgtcacactcctctcccatgtttagggctgggctccttcaggcaagggatatgcagagttgtgacctctagg

SEQ ID NO: 13632 - DNA, 80 bp, synthetic construct
  source 1..80: mol_type = other DNA
atgtgtgcatctgctcagcctcccactcttacctttctgccccagaccccccaccccccaattctcctgggccaaagagc

SEQ ID NO: 13633 - DNA, 80 bp, synthetic construct
  source 1..80: mol_type = other DNA
gggaactccagcttcactggccgcaggagtggagggggtagaggaggtgggggtgggggcttcggggctggctttggggt

SEQ ID NO: 13634 - DNA, 80 bp, synthetic construct
  source 1..80: mol_type = other DNA
tttgcacgcgcttttcacgtcctcccccccgccgccagcacgcaccgtgcacgccctgcccccacgctcagagctccgtg

SEQ ID NO: 13635 - DNA, 80 bp, synthetic construct
  source 1..80: mol_type = other DNA
tatgatttcactttccacaaagccagacgatccagtgccctcaactttcctccactccatgtcagtcctttaaaatcaca

SEQ ID NO: 13636 - DNA, 80 bp, synthetic construct
  source 1..80: mol_type = other DNA
aacaaaacaccaaaaaaggtcatgcaacaaatgattgttgaagtaattcctctttggctcagccagcatccacccataaa

SEQ ID NO: 13637 - DNA, 80 bp, synthetic construct
  source 1..80: mol_type = other DNA
tctgtttttctatctcatctcttcttttccgcattgccaaacttctcagaagaatagttcacattccagtgagagcagaa

SEQ ID NO: 13638 - DNA, 80 bp, synthetic construct
  source 1..80: mol_type = other DNA
aggccgggagtttgagaccagcctgggcaacaaagcgagacacctgtctcaaaaataataaaataataaataaaagtaaa

SEQ ID NO: 13639 - DNA, 80 bp, synthetic construct
  source 1..80: mol_type = other DNA
cagatccaggtctatctggggaaatggaggcagattctcccagcaccttgtgaattccagacagaaaaagactcttccac

SEQ ID NO: 13640 - DNA, 80 bp, synthetic construct
  source 1..80: mol_type = other DNA
aaatagctgtgggaggtggtgttgcctgtggtcgcagctattcaacaggctgaagtgggaggattgattcagcccaggga

SEQ ID NO: 13641 - DNA, 80 bp, synthetic construct
  source 1..80: mol_type = other DNA
acagcatgagacttcatctcaaaaaaaaaaaaaagaaaaaaagaaattgtcaaagccatcccaaccttcagcaaccacca

SEQ ID NO: 13642 - DNA, 80 bp, synthetic construct
  source 1..80: mol_type = other DNA
cccgcccacctctttttttttttttgtagagatgaagtcttgctgtgtttcccaggctggtctcgaactgctaggctcaa

SEQ ID NO: 13643 - DNA, 80 bp, synthetic construct
  source 1..80: mol_type = other DNA
tttcaagcacaaaatgtattacattaggataatgtcttgggggtagaaatagaactatgaaaataagaattcagaagaaa

SEQ ID NO: 13644 - DNA, 80 bp, synthetic construct
  source 1..80: mol_type = other DNA
aaagggtttgaagattacatgcttcttgaaatcagcatgcacatgagtcatctggagttttaattcggagtctgagtcag

SEQ ID NO: 13645 - DNA, 80 bp, synthetic construct
  source 1..80: mol_type = other DNA
gtctgttctataaaccctcactcctttcctgtcttgaccttttcctctgttgatgcctttggccttctaggcctttatct

SEQ ID NO: 13646 - DNA, 80 bp, synthetic construct
  source 1..80: mol_type = other DNA
acgttaagtaaaggagtttactcttttttttttgagatggagtctcattctgtcaccctggctggagtgtagtggcgtga

SEQ ID NO: 13647 - DNA, 80 bp, synthetic construct
  source 1..80: mol_type = other DNA
aaaaaaaaaaagaagactatagttaatgaacaagcaatcggccgggcgcggtggttcacgcctgtaatcccagcactgtg

SEQ ID NO: 13648 - DNA, 80 bp, synthetic construct
  source 1..80: mol_type = other DNA
cctggaatctcagtagcttaacacaacagttttatttctcactattgctctctgttgggtcagtaggagtgttagagtct

SEQ ID NO: 13649 - DNA, 80 bp, synthetic construct
  source 1..80: mol_type = other DNA
ttgcaccattgcactccagcctgggcaacagagtgagactccgtctcaaaaaaaaaaaaaaaaaaaagagtgatgtcact

SEQ ID NO: 13650 - DNA, 80 bp, synthetic construct
  source 1..80: mol_type = other DNA
gactactagaaggggagagagggagggagtgtgggttaaaaaattacctaattggttctatgactacctagtgcaatata

SEQ ID NO: 13651 - DNA, 80 bp, synthetic construct
  source 1..80: mol_type = other DNA
aataaatgaataaattagctgggcatggtgatgcatgcttcttgtcccagcttcttggaaggctgaggtgggaggatcat

SEQ ID NO: 13652 - DNA, 80 bp, synthetic construct
  source 1..80: mol_type = other DNA
actgggcctggccttgaataggtatcatatgtacccagtgaaaactacaaggagtaataaaggggatttggtgaaaatta

SEQ ID NO: 13653 - DNA, 80 bp, synthetic construct
  source 1..80: mol_type = other DNA
tccccactccccaggataaaggaaaacattagagaggaattttcaatgaaagggcagaggaggctagtgaggcccccact

SEQ ID NO: 13654 - DNA, 80 bp, synthetic construct
  source 1..80: mol_type = other DNA
ggatagctcattgtttaaaaaaaaaactcctggatccttcctctggggagcttgagacaagtgcacaagtagctagaagg

SEQ ID NO: 13655 - DNA, 80 bp, synthetic construct
  source 1..80: mol_type = other DNA
cttgcagagcaatgctgaatccccatctaaagtcacacattaaggctgtgaaccaggccaagccagactagttttccaat

SEQ ID NO: 13656 - DNA, 80 bp, synthetic construct
  source 1..80: mol_type = other DNA
cagacttgatggagaccctgtttcaaccatgcagacaaggacaatttccaaaggcatgaaccacagatggaaggaagctg

SEQ ID NO: 13657 - DNA, 80 bp, synthetic construct
  source 1..80: mol_type = other DNA
ggctttgttataaccaagctagaataacagcagcttaaatggtctgagcataagtggtccaggtcaatcctattagctct

SEQ ID NO: 13658 - DNA, 80 bp, synthetic construct
  source 1..80: mol_type = other DNA
aataacaaaggtttattttttggtcatattacttatccactgagagtcagccgagtattgcgctttttttttcttttttg

SEQ ID NO: 13659 - DNA, 80 bp, synthetic construct
  source 1..80: mol_type = other DNA
caccaggatgtcctgattttcatgcacttagccctgtccaaggggagtctcaatttgtgtactcttttttttttttttga

SEQ ID NO: 13660 - DNA, 80 bp, synthetic construct
  source 1..80: mol_type = other DNA
aaaaattagtttcacccccctcggaagtttatcttcaagaagacagaactgttctaggctctcaggaagtaaaacccact

SEQ ID NO: 13661 - DNA, 80 bp, synthetic construct
  source 1..80: mol_type = other DNA
tgcttttgcagagggcttttcaaaatatccagaaaatgtcaattgccagtagcaaggaattgggaacaggtcttgatgga

SEQ ID NO: 13662 - DNA, 80 bp, synthetic construct
  source 1..80: mol_type = other DNA
atattcaggccccacagattgttgtagggaagatatgctgggagagagtcaagtactgtgctttaatgccttgcctttaa

SEQ ID NO: 13663 - DNA, 80 bp, synthetic construct
  source 1..80: mol_type = other DNA
atgccatgtacacttttttttttttttgagacggagtctagctcttgttgcccaggctggagtgcaatggcgcaatctca

SEQ ID NO: 13664 - DNA, 80 bp, synthetic construct
  source 1..80: mol_type = other DNA
gacctctgtctccatggactaggtaccttgtgcttacatttcctgtaaatggaatcatgcgggatgtggtctgttgcttc

SEQ ID NO: 13665 - DNA, 80 bp, synthetic construct
  source 1..80: mol_type = other DNA
ccgggcagaggcgcccctcacttcccggacggggcggctggccgggctgggggctgacccccccacctccctcccggacg

SEQ ID NO: 13666 - DNA, 80 bp, synthetic construct
  source 1..80: mol_type = other DNA
agctctaggaacattcttgcatgtgattttggtacatgtatgcacttgcttctcttgagtaaatgatctaaatgtggaat

SEQ ID NO: 13667 - DNA, 80 bp, synthetic construct
  source 1..80: mol_type = other DNA
cagcgctctggtcatctgaacctctacctgctcctggactgttcgcagagtgtgtcggaaaatgactttctcatcttcaa

SEQ ID NO: 13668 - DNA, 80 bp, synthetic construct
  source 1..80: mol_type = other DNA
ctcccagctacattttaaagagggcagtttctgtgctctcttgggactcaaaattaagtaactcattgcactgcgaggcg

SEQ ID NO: 13669 - DNA, 80 bp, synthetic construct
  source 1..80: mol_type = other DNA
tcagggcctgcaaacaaattctggatgagttaaaaagagagtgaggcctcttggtggcacctgagtcccacgagtctggg

SEQ ID NO: 13670 - DNA, 80 bp, synthetic construct
  source 1..80: mol_type = other DNA
attccagatcatgaaaatggaactgggactaacacctatgcggccttaaacagtgtctatctcatgatgaacaaccaaat

SEQ ID NO: 13671 - DNA, 80 bp, synthetic construct
  source 1..80: mol_type = other DNA
ttgtcatttgcctcttgctattgtccaaattacacagttcctccaggacttagtatataaaatgaggatacccactctac

SEQ ID NO: 13672 - DNA, 80 bp, synthetic construct
  source 1..80: mol_type = other DNA
ctaaatgctttcctactcttccagggcctggggaaatcctgatattacctagaagaattctttattctctttgttctagg

SEQ ID NO: 13673 - DNA, 80 bp, synthetic construct
  source 1..80: mol_type = other DNA
aacagctttagacagagaaccttggtttcatcttcagtgggctgtggccatgggcagtttcttcatctgcaaaaggggag

SEQ ID NO: 13674 - DNA, 80 bp, synthetic construct
  source 1..80: mol_type = other DNA
tttctattcattcagtcatttaaaagtacttaccaaactaccacaaacctgggtggcttagaacacagaatttctttttc

SEQ ID NO: 13675 - DNA, 80 bp, synthetic construct
  source 1..80: mol_type = other DNA
ggctcacctcttctttttttttttttgagacggggttttgctcttgttgcccaggctggagtgcaatggcgcgatcttgg

SEQ ID NO: 13676 - DNA, 80 bp, synthetic construct
  source 1..80: mol_type = other DNA
tggactggagagaactgaatgagctagggtccaagaaggatggtgagaggcatgccttcattctgcaggacacaaaggct

SEQ ID NO: 13677 - DNA, 80 bp, synthetic construct
  source 1..80: mol_type = other DNA
tggctctgcggagacctcaaggcagcacctgtagggaccatggtgagtgctgggacttatggtgcttgagagctggggcc

SEQ ID NO: 13678 - DNA, 80 bp, synthetic construct
  source 1..80: mol_type = other DNA
agcatgcatgccagaacaccagtccactgccctagatgacactgtctcctgtcaccctttgctggcaggagaatctgggg

SEQ ID NO: 13679 - DNA, 80 bp, synthetic construct
  source 1..80: mol_type = other DNA
actggggaggagctaaggccggagaggaggtactgaaggggagagtcctggacctttggcagcaaagggtgggacttctg

SEQ ID NO: 13680 - DNA, 80 bp, synthetic construct
  source 1..80: mol_type = other DNA
aaatggggagggagaagcagtggaaatccatatgggttgaggagtaggtaagatgctgcttctgcgggactgggaatgcg

SEQ ID NO: 13681 - DNA, 80 bp, synthetic construct
  source 1..80: mol_type = other DNA
gtacgacacccctcaagaggtggccgaagctttcctgtcttccctgacagagaccatagaaggagtcgatgctgaggatg

SEQ ID NO: 13682 - DNA, 80 bp, synthetic construct
  source 1..80: mol_type = other DNA
ggggctggaagggccactttgtggtcaaagggaagtccgtgtaatgatgattaacttaaaaagttgaaagatgtgggatt

SEQ ID NO: 13683 - DNA, 80 bp, synthetic construct
  source 1..80: mol_type = other DNA
ttcacttaaccttagaatcacagagctctgagcacttcagagatctttctatagtcctacatttgacacgtggaaacaga

SEQ ID NO: 13684 - DNA, 80 bp, synthetic construct
  source 1..80: mol_type = other DNA
aacattaatgggaaaaaagaagcaggaattcctgaattttatgactatgacgttgccctgatcaagctcaagaataagct

SEQ ID NO: 13685 - DNA, 80 bp, synthetic construct
  source 1..80: mol_type = other DNA
acgaggctgagctgggtccctagtctgattcctttaggtcagctaagacacaagcaggaacagccatgcttccaggatta

SEQ ID NO: 13686 - DNA, 80 bp, synthetic construct
  source 1..80: mol_type = other DNA
gattattcacactaagaaatgctactagctccaccagaactcattcagggtgtagctttggccctcaccattctctctca

SEQ ID NO: 13687 - DNA, 80 bp, synthetic construct
  source 1..80: mol_type = other DNA
aagaatcccattcttaccgagggagccccagacagacttgccagtagcggcatccagcatgggctgttttcgggctatgt

SEQ ID NO: 13688 - DNA, 80 bp, synthetic construct
  source 1..80: mol_type = other DNA
cgatcccgatccctgtcccgctctctgtctctgtctcgatcccggtctcgatcccgctcccgatctcggtctctgtcccg

SEQ ID NO: 13689 - DNA, 80 bp, synthetic construct
  source 1..80: mol_type = other DNA
aatcctcctacctcagcctccctagtagctgggactagagatgtgctctaccatgcttggctaatttctgtatttttttt

SEQ ID NO: 13690 - DNA, 80 bp, synthetic construct
  source 1..80: mol_type = other DNA
caacatattccaagagctccaatccaaggtggattagaaccacagaatttgtaaaatggagaattcaggagtcgtctagt

SEQ ID NO: 13691 - DNA, 80 bp, synthetic construct
  source 1..80: mol_type = other DNA
ccaggaggctaatgcattgttcctaccctcaagaagcttacagtctgagaaataaaatacattgagttagcaatacaatt

SEQ ID NO: 13692 - DNA, 80 bp, synthetic construct
  source 1..80: mol_type = other DNA
tatcttctcagagtgcagagtctgtgaaaggttaggccatgtccacacacagtccctcacctttttcttgagcttgttga

SEQ ID NO: 13693 - DNA, 80 bp, synthetic construct
  source 1..80: mol_type = other DNA
gaaatggaacggagtagccgatatggaatgaactttgacccctgacttttgacctttccccgtagtgctaccccctccag

SEQ ID NO: 13694 - DNA, 80 bp, synthetic construct
  source 1..80: mol_type = other DNA
atgggttcctgaaggaagctgggacagaggaagaaagaagacccaaaagttactatttttctctccagaaaatggcagag

SEQ ID NO: 13695 - DNA, 80 bp, synthetic construct
  source 1..80: mol_type = other DNA
gctgtatgttggagcctctggatttgggtgggggtgacgaggatgagaatgaggcagtgggacagccaggaggtcccaga

SEQ ID NO: 13696 - DNA, 80 bp, synthetic construct
  source 1..80: mol_type = other DNA
tcctttaagtgagaggttcagggctaagactgagacaagagcccagagagaaatgaaaagacatggtggggagaaagttt

SEQ ID NO: 13697 - DNA, 80 bp, synthetic construct
  source 1..80: mol_type = other DNA
ttctatcatccttctgagtgccaccgtccccaacgcccttgagtttgctgactggattgggtgagacgtgtgtcccgggt

SEQ ID NO: 13698 - DNA, 80 bp, synthetic construct
  source 1..80: mol_type = other DNA
ggggccgctgtgatgagcaggcctcaggcctcacctcccttgacctcaccaccagttcggagaagagcgagatccacctc

SEQ ID NO: 13699 - DNA, 80 bp, synthetic construct
  source 1..80: mol_type = other DNA
atatcatactctgagcttatatttcattcctgggtatatatcacaaagaaattctcaccctggtctgtgagagaacatgt

SEQ ID NO: 13700 - DNA, 80 bp, synthetic construct
  source 1..80: mol_type = other DNA
tcggcagggccccagctccaggaccttgctggattctgtcttcgattctcctctcttctttttcttcttccttttttttt

SEQ ID NO: 13701 - DNA, 80 bp, synthetic construct
  source 1..80: mol_type = other DNA
cagattgggcctggagactcccctttcacagcttcccctgctcccacccaaggcccatgaacaggccctggctgaactga

SEQ ID NO: 13702 - DNA, 80 bp, synthetic construct
  source 1..80: mol_type = other DNA
tggggagaagatcttggaggacttcagcaagaggcagcagccaaaattcaagtcagagatgctagggaggcccttctcct

SEQ ID NO: 13703 - DNA, 80 bp, synthetic construct
  source 1..80: mol_type = other DNA
gcaccctgcggcctgaggagattgctgccttgctctctggcctggtctgccagagccctggggacgctggggatcagctc

SEQ ID NO: 13704 - DNA, 80 bp, synthetic construct
  source 1..80: mol_type = other DNA
ggcgtaaggtgcatcttggtgtacagacacggtgactgggccgccaggctcccaagagaagagatgaacgagcctggggg

SEQ ID NO: 13705 - DNA, 80 bp, synthetic construct
  source 1..80: mol_type = other DNA
ctgcacacatgtactgctcaaatttgtatcccatgtacataagctcccggaggagcggtggccgagcaagcctctgggcc

SEQ ID NO: 13706 - DNA, 80 bp, synthetic construct
  source 1..80: mol_type = other DNA
ctccaaatgcagtgaggttaggaaggacgtctgcgctcagatcaagaatccagttacctcaaagctccccaacttccacc

SEQ ID NO: 13707 - DNA, 80 bp, synthetic construct
  source 1..80: mol_type = other DNA
ttcctaactcctggaattccctgtcactcagtcactccgccagccgttcagcaagcattaggcctttcaggcgagggcac

SEQ ID NO: 13708 - DNA, 80 bp, synthetic construct
  source 1..80: mol_type = other DNA
ttttgaactgcctcaagtgctttttaagtgtgccttaaaatttgagatccactgacataaagggaaagcagaagaagagg

SEQ ID NO: 13709 - DNA, 80 bp, synthetic construct
  source 1..80: mol_type = other DNA
tagtgatctttcaagaaaagaggaaagaaaaggaaggcagtctagcactcacttgaggtgagctagtctccctgactagg

SEQ ID NO: 13710 - DNA, 80 bp, synthetic construct
  source 1..80: mol_type = other DNA
ctcaaactcctgactcagatgatctgcctgcctcggcctcccaaagtgctgttttttttttttttaattgtctttttgat

SEQ ID NO: 13711 - DNA, 80 bp, synthetic construct
  source 1..80: mol_type = other DNA
tagcaagccgagatcccgccactgcactccagcctgggcaccattgagcactgagtgaaccagacaccgtctgcaatcgc

SEQ ID NO: 13712 - DNA, 80 bp, synthetic construct
  source 1..80: mol_type = other DNA
acccgtctcagcctgccaaagtgctgggattacaggcatgagccaccgcatctggcctatttttgtatttttaatggaga

SEQ ID NO: 13713 - DNA, 80 bp, synthetic construct
  source 1..80: mol_type = other DNA
aacattgaatcccatactcctccccaccttaccctacccagaatttagactgttaatgttttgaagccacagcctgcatc

SEQ ID NO: 13714 - DNA, 80 bp, synthetic construct
  source 1..80: mol_type = other DNA
ccaaatgacacagacctttggcttcagggactcagaaatcacgtgagacttgtggaaccaaccaaagtcaggcatctggt

SEQ ID NO: 13715 - DNA, 80 bp, synthetic construct
  source 1..80: mol_type = other DNA
tggctcctcaggcctctaggccttattcacctttcccctttcctgtgccacttctcctctagggcgccaggctgtcctta

SEQ ID NO: 13716 - DNA, 80 bp, synthetic construct
  source 1..80: mol_type = other DNA
tgttggaatgaaagtaagagacaagtgtcttagaagcctgtcattgttttgtgagggcctttaaatatcctgtactcgtg

SEQ ID NO: 13717 - DNA, 80 bp, synthetic construct
  source 1..80: mol_type = other DNA
cacgtttctcccttggtctctgtcctttttggtcagctgtctcttgctctgtgacccgctccctctccctctccctctcc

SEQ ID NO: 13718 - DNA, 80 bp, synthetic construct
  source 1..80: mol_type = other DNA
acctggaagatctcagcccgattctcagatggcctggaatccaacagcagcacccagtttgaggtgaagaaatatggtga

SEQ ID NO: 13719 - DNA, 80 bp, synthetic construct
  source 1..80: mol_type = other DNA
tctccaactctgtctctgtgactcggcccttttccctggctgagtttatttatttctttgctcgttctgctcattccttc

SEQ ID NO: 13720 - DNA, 80 bp, synthetic construct
  source 1..80: mol_type = other DNA
tgaaagtccgtcagtagctccaatgagaatgtcagtctcaggcaggagggttaaatgagcctgagatgctttaaaaacct

SEQ ID NO: 13721 - DNA, 80 bp, synthetic construct
  source 1..80: mol_type = other DNA
tgtaaaggtcccctcaggggaccaattaatgacaatttcataggaattattttgtagtaccatagtgtgatcagagatgt

SEQ ID NO: 13722 - DNA, 80 bp, synthetic construct
  source 1..80: mol_type = other DNA
agtataatgtctgaggcctgtgttgtttgtggaagtcgcattgttgaggctgtagttcctgtagggtcttttttaggctg

SEQ ID NO: 13723 - DNA, 80 bp, synthetic construct
  source 1..80: mol_type = other DNA
accacacagagtgggctccagagcaaacttaaggctgtaatagtttttaaataaatacacagaataaccttagctctctg

SEQ ID NO: 13724 - DNA, 80 bp, synthetic construct
  source 1..80: mol_type = other DNA
acataccctggggcaaaactttccaatgatatttggctgcaggttttttgttattaacggcaggaatggtaaaggcaaat

SEQ ID NO: 13725 - DNA, 80 bp, synthetic construct
  source 1..80: mol_type = other DNA
gtagaggttaaaacttttatgtccttgggagtcctttgttcgttggtcctctgtttcacatgcttgagcgtttcctcacc

SEQ ID NO: 13726 - DNA, 80 bp, synthetic construct
  source 1..80: mol_type = other DNA
aggagggctcagggtctgaccactctcttttgcctgccctcctttacctgcctaggccttggtccgtgagatgtcaggct

SEQ ID NO: 13727 - DNA, 80 bp, synthetic construct
  source 1..80: mol_type = other DNA
gttgaggacagggtgattgccaacagggcatggatttagcttgggggcagtgaggataccgggactgaaggaagctctcc

SEQ ID NO: 13728 - DNA, 80 bp, synthetic construct
  source 1..80: mol_type = other DNA
tctgcccctcggctccttgctgaacccacgtgtggtatttggggccagagatccgaattccgggattacgagtggaaggt

SEQ ID NO: 13729 - DNA, 80 bp, synthetic construct
  source 1..80: mol_type = other DNA
ctttgatggcccctctgatctctgcccctgtgcccacgcttcctttccctcaggcctatgtgtggccaccccagtccagc

SEQ ID NO: 13730 - DNA, 80 bp, synthetic construct
  source 1..80: mol_type = other DNA
aggccggaccttggaaatacctggcaactctgatcccaatatgatccctgatggggactttaacagctacgtcagggtta

SEQ ID NO: 13731 - DNA, 80 bp, synthetic construct
  source 1..80: mol_type = other DNA
gttccaggacccctgtccagtgttagacaggagcatgcaggtgcgggcatgctggggctggcccgagaagcgcctgtcgg

SEQ ID NO: 13732 - DNA, 80 bp, synthetic construct
  source 1..80: mol_type = other DNA
agcttccaagggggattccgcagtacccaagtaggggccgtccccgggctctggcgggggtgggtagtcctcagaccaag

SEQ ID NO: 13733 - DNA, 80 bp, synthetic construct
  source 1..80: mol_type = other DNA
ccactcctcagcccaggcctcttccctgaaccatgggccccactcgtcccactcccacagcacctcagacgaggcatgtc

SEQ ID NO: 13734 - DNA, 80 bp, synthetic construct
  source 1..80: mol_type = other DNA
cgcagggagccgggtggccatcccagccctcctcacaatgcttccctgtgcagtggaagcaaacgaggactatgaggact

SEQ ID NO: 13735 - DNA, 80 bp, synthetic construct
  source 1..80: mol_type = other DNA
aatattaaagcgtattttcctttacaaagtgatggtggccatagatgatagttgtatttgtcttttcacgaccttatttg

SEQ ID NO: 13736 - DNA, 80 bp, synthetic construct
  source 1..80: mol_type = other DNA
gcagtgaagactggggcaaggtcaccctctgggaagtgaagtcaccagagaccttgcggagcagctttgagagttctctg

SEQ ID NO: 13737 - DNA, 80 bp, synthetic construct
  source 1..80: mol_type = other DNA
ttctccgagaagacagcagagctgctttccgcctctttgagaccaagatcacccaagtcctgcacttcagtatgaagcaa

SEQ ID NO: 13738 - DNA, 80 bp, synthetic construct
  source 1..80: mol_type = other DNA
gttgacataaccttagactctctgagccctgatgacccttgggctgttcagctctgctagaacctcccagatgacccgct

SEQ ID NO: 13739 - DNA, 80 bp, synthetic construct
  source 1..80: mol_type = other DNA
gggctctgaagactgagaaggagccaggaaaagagcaggggtagatgagggcatctggggcagaaggagaatatacaaag

SEQ ID NO: 13740 - DNA, 80 bp, synthetic construct
  source 1..80: mol_type = other DNA
tgtggctatccagccccttcctggggactttggactttgagggggggcatgcccagttgtgctgggaatccatactttcc

SEQ ID NO: 13741 - DNA, 80 bp, synthetic construct
  source 1..80: mol_type = other DNA
atggctggggctcttgagctataagtggcacctcagggccctgacgggcgtcttgccatgctgctcctgggcctgctgct

SEQ ID NO: 13742 - DNA, 80 bp, synthetic construct
  source 1..80: mol_type = other DNA
ctgctgaactcacactgtttctccacagcgcatgagagcccagcccggcacccctgtggccattgaggaggaattctctc

SEQ ID NO: 13743 - DNA, 80 bp, synthetic construct
  source 1..80: mol_type = other DNA
tgcgtcctgcggacaagcaaaaggctccttcccagcaacctggccagggcggtgggcaccctcactcagctctgagcact

SEQ ID NO: 13744 - DNA, 80 bp, synthetic construct
  source 1..80: mol_type = other DNA
gtttctcctttattgctcccgtacgaacccctcccctcccccctgtaaacacagtgctgcgagatcgctggcagagaagg

SEQ ID NO: 13745 - DNA, 80 bp, synthetic construct
  source 1..80: mol_type = other DNA
catggagtagtcacctgcctgtgtcaggctgtgcagggcctcattgcctgggggtgggatacgtgccctcatcagggtcc

SEQ ID NO: 13746 - DNA, 80 bp, synthetic construct
  source 1..80: mol_type = other DNA
gagggaaagcaggaagaggagatggggatgaggcccaacctggctccctctacctcctctccctgtcccacacaccccac

SEQ ID NO: 13747 - DNA, 80 bp, synthetic construct
  source 1..80: mol_type = other DNA
gcagggaggctcctccctgcgagtccccccctcgcctctgctccagcacaggctcaccaccccttttcctctagtcccca

SEQ ID NO: 13748 - DNA, 80 bp, synthetic construct
  source 1..80: mol_type = other DNA
ccacgagcaaggcctggggctgcccattcgtgtcctcatactggaccacgaaggaatcaaaggggccctgggccacgctc

SEQ ID NO: 13749 - DNA, 80 bp, synthetic construct
  source 1..80: mol_type = other DNA
ccactcctgcagtcatctttgtcttcagaccaaatgcacaagtactttgttaaaggtatcccatctgcagctcaagcctg

SEQ ID NO: 13750 - DNA, 80 bp, synthetic construct
  source 1..80: mol_type = other DNA
taaaattgccaaataaagtacctctgcctgtgatattttctggatgtcctttatttactgtgacgtgtgtttgggtgcct

SEQ ID NO: 13751 - DNA, 80 bp, synthetic construct
  source 1..80: mol_type = other DNA
tgtgccccgaggacaggtagtgaaaggatcagtgttcctgagaaacccatctcgtaataatgtcccctgctccccaaagg

SEQ ID NO: 13752 - DNA, 80 bp, synthetic construct
  source 1..80: mol_type = other DNA
ccaggatgactttgtgatcccagacatctcagagtgagcgctcccaatgtgggggctgcccccaagctacaccaccccaa

SEQ ID NO: 13753 - DNA, 80 bp, synthetic construct
  source 1..80: mol_type = other DNA
cctgtttctttctatgccccagctggtgaatggacagagccacatttccctctcaaaggcagagttccaggacgccctgg

SEQ ID NO: 13754 - DNA, 80 bp, synthetic construct
  source 1..80: mol_type = other DNA
aggcaccccacaagtccttttcccaacatgcccccctccctttttttttttttaaccgctattgctattatggcttattt

SEQ ID NO: 13755 - DNA, 80 bp, synthetic construct
  source 1..80: mol_type = other DNA
taacataaaaggagggttgacacaactctgaatgggcactgttttgttggaagaaaactgatacgcaaattgaagttttt

SEQ ID NO: 13756 - DNA, 80 bp, synthetic construct
  source 1..80: mol_type = other DNA
gggtgtttgttaaagtaacagggcagaagaaaggcggatttaagatacgagcttaatacagtgtagcaggtataggtagt

SEQ ID NO: 13757 - DNA, 80 bp, synthetic construct
  source 1..80: mol_type = other DNA
cagtgatgtcataacctgaaggtctgcttgattattgccgtaagccaatgggccaggcagagagctgtgggctcgaatgt

SEQ ID NO: 13758 - DNA, 80 bp, synthetic construct
  source 1..80: mol_type = other DNA
gctctatcctgtacttgtattttcaaatactgaaaaggagtggttgtttgaattttgtcaggtgctataagtaattcagc

SEQ ID NO: 13759 - DNA, 80 bp, synthetic construct
  source 1..80: mol_type = other DNA
tgggaaccaagggcaaaattgttccatagcatgaaacaaatccataagattttccgtatcaacttttaccccaccatgca

SEQ ID NO: 13760 - DNA, 80 bp, synthetic construct
  source 1..80: mol_type = other DNA
ctgtcctttgtcttgcaggtggggagatggaggaggcagagctcacatcctggtattttgtgtcatctcccttctccttg

SEQ ID NO: 13761 - DNA, 80 bp, synthetic construct
  source 1..80: mol_type = other DNA
gcaccctccttctactttgtggccttctactaccatggagaccacccagtggccaactccctgcgagtggatgtccaggc

SEQ ID NO: 13762 - DNA, 80 bp, synthetic construct
  source 1..80: mol_type = other DNA
aagctgtcccaaggagaagacaacccggaaaaagagaaacgtgaacttccaaaaggcgattaatgagaaatgtgagttgc

SEQ ID NO: 13763 - DNA, 80 bp, synthetic construct
  source 1..80: mol_type = other DNA
cctcctgtggccctgaagctttgatggcccctctgatctctgcccctgtgcccacgcttcctttccctcaggcctatgtg

SEQ ID NO: 13764 - DNA, 80 bp, synthetic construct
  source 1..80: mol_type = other DNA
ggcaactctgatcccaatatgatccctgatggggactttaacagctacgtcagggttacaggtgggagtgccctttagtc

SEQ ID NO: 13765 - DNA, 80 bp, synthetic construct
  source 1..80: mol_type = other DNA
gcagcaggctgacggctcgttccaggacctctctccagtgatacataggagcatgcaggtgcgggcatgctggggctggc

SEQ ID NO: 13766 - DNA, 80 bp, synthetic construct
  source 1..80: mol_type = other DNA
ggctcacccgtcagggcagcttccaagggggattccgcagtacccaagtaggggccgtccccgggctctggcgggggtgg

SEQ ID NO: 13767 - DNA, 80 bp, synthetic construct
  source 1..80: mol_type = other DNA
gctggtggctccgaatcccactcctcagcccaggcctcttccctgaaccatgggccccactcgtcccactcccacagcac

SEQ ID NO: 13768 - DNA, 80 bp, synthetic construct
  source 1..80: mol_type = other DNA
ggccaggcaggggctggcgcagggagccgggtggccatcccagccctcctcacaatgcttccctgtgcagtggaagcaaa

SEQ ID NO: 13769 - DNA, 80 bp, synthetic construct
  source 1..80: mol_type = other DNA
acaaagtgatggtggccatagatgatagttgtatttgtcttttcacgaccttatttggctaaaatagttatcaaccctct

SEQ ID NO: 13770 - DNA, 80 bp, synthetic construct
  source 1..80: mol_type = other DNA
tctgctgagggcctggagcagtgaagactggggcaaggtcaccctctgggaagtgaagtcaccagagaccttgcggagca

SEQ ID NO: 13771 - DNA, 80 bp, synthetic construct
  source 1..80: mol_type = other DNA
caaagtaactcacctttcccccttctcctcaccccctcttaggcttccaggttaaggttctccgagaagacagcagagct

SEQ ID NO: 13772 - DNA, 80 bp, synthetic construct
  source 1..80: mol_type = other DNA
gtgtgttgctagggctgagagcagtgcccctgcccgatgcagttctgggcaggccaggttgacataaccttagactctct

SEQ ID NO: 13773 - DNA, 80 bp, synthetic construct
  source 1..80: mol_type = other DNA
aggggcattgccaggcagggacagggaaggcttcctggagcaggtggcctccaagtggggctctgaagactgagaaggag

SEQ ID NO: 13774 - DNA, 80 bp, synthetic construct
  source 1..80: mol_type = other DNA
gggactttggactttgaggggggcatgcccagttgtgctgggaatccatactttccctggctggagtagaacctgtggac

SEQ ID NO: 13775 - DNA, 80 bp, synthetic construct
  source 1..80: mol_type = other DNA
gcatttcccttccttgcttcttgatgggtgatcaatttttttgaaatacggacgtcccaaggccaatgagactggtgtca

SEQ ID NO: 13776 - DNA, 80 bp, synthetic construct
  source 1..80: mol_type = other DNA
gaaagcccacaagaagctcacccgctcagccctgctgctgggcatccgtgactccatggagccagtggtggagcagctga

SEQ ID NO: 13777 - DNA, 80 bp, synthetic construct
  source 1..80: mol_type = other DNA
gcacatggctgcagtggacctcctgatcggtggcactgagaccacagcaaacaccctctcctgggccgtggtttttttgc

SEQ ID NO: 13778 - DNA, 80 bp, synthetic construct
  source 1..80: mol_type = other DNA
cctttccaagtgcggctgcagccccgggggatgggggcccacagcccgggccagagccagtgatggggcaggaccgatgc

SEQ ID NO: 13779 - DNA, 80 bp, synthetic construct
  source 1..80: mol_type = other DNA
tccaagtggaggcggtagtactccgcagccgagtctacgtggaaggagtcgtactgggcgaacacagcctcgtccccagc

SEQ ID NO: 13780 - DNA, 80 bp, synthetic construct
  source 1..80: mol_type = other DNA
ctgcgggccggactgggggctcagtccaagtgagcagggcggtgcggggggtcacttccttggcctccaagtcccgaggg

SEQ ID NO: 13781 - DNA, 80 bp, synthetic construct
  source 1..80: mol_type = other DNA
agagtgcaggggggagaggaaatgcgaggcgatgagcacatggcaaaggcaccacctccgtccgccagctggtaggagac

SEQ ID NO: 13782 - DNA, 80 bp, synthetic construct
  source 1..80: mol_type = other DNA
ggccactcgcatccagcccatccatcctctctccctggtacccgcctcacgctctttccctgcgaccaccccttctgagc

SEQ ID NO: 13783 - DNA, 80 bp, synthetic construct
  source 1..80: mol_type = other DNA
acggcagggaggtttgccgctatctggacaaggccacccttcggggaggcgacagcagccccagcgagtaatgaggagca

SEQ ID NO: 13784 - DNA, 80 bp, synthetic construct
  source 1..80: mol_type = other DNA
tgagcaagaatgaggccagagctgagagagactccccggaggtctctgggttgtcacggagacaccccaaacatcgagag

SEQ ID NO: 13785 - DNA, 80 bp, synthetic construct
  source 1..80: mol_type = other DNA
agatggggcccagtcgtttcctgcctgacagaccatagagcaggaacctgtatttcctactgggctccaggccctggact

SEQ ID NO: 13786 - DNA, 80 bp, synthetic construct
  source 1..80: mol_type = other DNA
ctctcccaggactggagtgagcatttcttagcggcctcctctaaaacgcttgttttagaatctgtgccctgcattgctgt

SEQ ID NO: 13787 - DNA, 80 bp, synthetic construct
  source 1..80: mol_type = other DNA
ggtcctggggaaaaggagggagaagccaaggctatgactgggggacctgaggtcatttcagagaagtccattcttggggc

SEQ ID NO: 13788 - DNA, 80 bp, synthetic construct
  source 1..80: mol_type = other DNA
tggcctctgcacccttaccctccctgcactggggtctcctcgccatcttttgttcactgggcttctgtctttgctctgca

SEQ ID NO: 13789 - DNA, 80 bp, synthetic construct
  source 1..80: mol_type = other DNA
aaggatgagcaaagtgtggtctgtatgtgtaaaacgaaacattattcagcctgaaaaggaaggaagttctggccaggtgc

SEQ ID NO: 13790 - DNA, 80 bp, synthetic construct
  source 1..80: mol_type = other DNA
gcctgctgaatccaaatctgctttttaacaaaaatctccaggcatttggatacacaaaggaaggaatactcttcagagta

SEQ ID NO: 13791 - DNA, 80 bp, synthetic construct
  source 1..80: mol_type = other DNA
ccaggcctgagatggtgaccccgtcctcgtgccccggcacccgcaccaccttgggctgcccatccccattcctgtactgg

SEQ ID NO: 13792 - DNA, 80 bp, synthetic construct
  source 1..80: mol_type = other DNA
tccaccaactgcaaaggacaccccactcaatcctcagtgtctctcacacaccatgctctttctagcctcctggcctttgc

SEQ ID NO: 13793 - DNA, 80 bp, synthetic construct
  source 1..80: mol_type = other DNA
aaattacagtgtccggatcagggcaaggaattctttgctgaatgaacaaattggcccattggtgagaaaggtctgttcct

SEQ ID NO: 13794 - DNA, 80 bp, synthetic construct
  source 1..80: mol_type = other DNA
caagggaaggagggagaaaccatggccactactgggtatgtgaggtcatttcagaaaagcccattcttggggctgggtgg

SEQ ID NO: 13795 - DNA, 80 bp, synthetic construct
  source 1..80: mol_type = other DNA
ccctggcctcccagcactggggtctcttcgccatcttttgttcactgggcttctgtctttgctccgcaacaagctcagca

SEQ ID NO: 13796 - DNA, 80 bp, synthetic construct
  source 1..80: mol_type = other DNA
cacagtgaccttgctctcctggcccccaacacgcaccgcctggggccgcccgtccctgtccttgtactgcacggtgaagg

SEQ ID NO: 13797 - DNA, 80 bp, synthetic construct
  source 1..80: mol_type = other DNA
agctttccacataatgttgctgtattattttcactagaaaaacgtgggctaaaaaagaaattctgggctgggagcagtgg

SEQ ID NO: 13798 - DNA, 80 bp, synthetic construct
  source 1..80: mol_type = other DNA
ccatcggtaggaattctcgaaaaatactctaagccaggcataacaacctggctgaggatgacttagaaaaggcagcctga

SEQ ID NO: 13799 - DNA, 80 bp, synthetic construct
  source 1..80: mol_type = other DNA
atttcagtggcggcataatagctctttttatagatgttgcctaaattatttagtcatcccaacgtggtttgacgttggat

SEQ ID NO: 13800 - DNA, 80 bp, synthetic construct
  source 1..80: mol_type = other DNA
gtcccattccccaccagtcatcaccaaagagcaagagggtgaccctcccatggctcccaccctggggctcccatcgtcca

SEQ ID NO: 13801 - DNA, 80 bp, synthetic construct
  source 1..80: mol_type = other DNA
gagacagcgagactccttctcaagaaaaaaacaaacaaacaaaaacaaacaaacaaacaaaaaacagcaatcagggccag

SEQ ID NO: 13802 - DNA, 80 bp, synthetic construct
  source 1..80: mol_type = other DNA
atacaatttttcccactgaaatcagtgataattatgagaatttgccctaagcggttttcaggaactacctaccttcctca

SEQ ID NO: 13803 - DNA, 80 bp, synthetic construct
  source 1..80: mol_type = other DNA
gccttgggctgcccgtccccattcttaaactggaccaagaaatggtcaaactggccctcggggactgtccaggagaggct

SEQ ID NO: 13804 - DNA, 80 bp, synthetic construct
  source 1..80: mol_type = other DNA
tacctttaaatatttagtgatgaaagcataggatgtctgtggttcgtttttaaaatactgcagtagtataaccacacaat

SEQ ID NO: 13805 - DNA, 80 bp, synthetic construct
  source 1..80: mol_type = other DNA
atacaaaaaattagctgggcatggtggagtgcacttgtagtcccagctattcgggaggctgaagtgggaggatcccttaa

SEQ ID NO: 13806 - DNA, 80 bp, synthetic construct
  source 1..80: mol_type = other DNA
acctggggccgcccgtccctgtccttgtactgcacggtgaaggagtcgaagcggccctgggggacggtccaggagaggct

SEQ ID NO: 13807 - DNA, 80 bp, synthetic construct
  source 1..80: mol_type = other DNA
ccgcgggactctgctgtcctctggactctcccagccatctgaaaggaggcatagtgggcagagttctcacctgtcagggc

SEQ ID NO: 13808 - DNA, 80 bp, synthetic construct
  source 1..80: mol_type = other DNA
tccacgggcaccacctggggctgcccgtccctgtctttgtactggaccacaaaggagtcaaactggccctcagggactgt

SEQ ID NO: 13809 - DNA, 80 bp, synthetic construct
  source 1..80: mol_type = other DNA
agattccctagctccctgcctcatcttactcccctttctgtccagcctctttccgcctctcacagactgcttccccagca

SEQ ID NO: 13810 - DNA, 80 bp, synthetic construct
  source 1..80: mol_type = other DNA
ttggtcttttttgagacggagtctggctctatcacccaggctggagtgcagtggcgcaatctcagctccctgcagcctcc

SEQ ID NO: 13811 - DNA, 80 bp, synthetic construct
  source 1..80: mol_type = other DNA
aataccttttatatccatcactgcttctaaattttgtagtttagtaaacgcgccaccaagtcctgttatttaatgaacta

SEQ ID NO: 13812 - DNA, 80 bp, synthetic construct
  source 1..80: mol_type = other DNA
gaggagtaaaggggtcagggaacagaaagactggcagggtcaccgagccagggcctgaggggatctagcccctcagtgag

SEQ ID NO: 13813 - DNA, 80 bp, synthetic construct
  source 1..80: mol_type = other DNA
gatggttttgatgtaaaagcgcattgatctgaacatctgtctggtcaacagtccttcactaggtccctgctcggtgtctg

SEQ ID NO: 13814 - DNA, 80 bp, synthetic construct
  source 1..80: mol_type = other DNA
catattcatctcttagatcattccctattgcctgccctcctccaactccaccacaaaacatactgcattcctcactgtct

SEQ ID NO: 13815 - DNA, 80 bp, synthetic construct
  source 1..80: mol_type = other DNA
aaaggtacaattataacgattcatgactctggcagtccccatgctgcatgtgggacagtccttttccaatttagaagtgt

SEQ ID NO: 13816 - DNA, 80 bp, synthetic construct
  source 1..80: mol_type = other DNA
agccactcagggtggctttgccgtctccctcttctcagggctgactgaggcaaagaaaataaattgagggtggaaggttc

SEQ ID NO: 13817 - DNA, 80 bp, synthetic construct
  source 1..80: mol_type = other DNA
gagaaagctttgtggtcaggcgtggtggctcacgcctgtaataccagaactttgggaggccgaggcaggtggctcacttg

SEQ ID NO: 13818 - DNA, 80 bp, synthetic construct
  source 1..80: mol_type = other DNA
cctcgtggaggccgtacaggtgcatcttgtacttgtgcccgggctctaggcctcccacggtgacctcactctccttgccc

SEQ ID NO: 13819 - DNA, 80 bp, synthetic construct
  source 1..80: mol_type = other DNA
ctttgggatagcagattgaggaaagaattggcaagaatgacaacccagaggaagggagggaggtggggagcaaaaaagat

SEQ ID NO: 13820 - DNA, 80 bp, synthetic construct
  source 1..80: mol_type = other DNA
tgtttggaatgggggaaaataggacctgcccttggagatgaagaagtgaggctgaggaagagatgaggaggtggaggctg

SEQ ID NO: 13821 - DNA, 80 bp, synthetic construct
  source 1..80: mol_type = other DNA
tcttgttcgcaattccaaacagagtgaatctgtacttgtggtcagggtccagtgaggagacaacaaatgaacgctcgggc

SEQ ID NO: 13822 - DNA, 80 bp, synthetic construct
  source 1..80: mol_type = other DNA
gaaagtgatgtctacactgattgcagccatgtcctcacctccaccaccctcccgatccagctccacccctccaccaggca

SEQ ID NO: 13823 - DNA, 80 bp, synthetic construct
  source 1..80: mol_type = other DNA
ctgctagcctttaccagctcttaactcacttctccagctagtctcagcagccacccggttatttgcaagataaatatcta

SEQ ID NO: 13824 - DNA, 80 bp, synthetic construct
  source 1..80: mol_type = other DNA
atttccctctcaatctctgcttcttcccttgtgacagtttctccatccctcacaaggtcttggtctctctgcacaccagg

SEQ ID NO: 13825 - DNA, 80 bp, synthetic construct
  source 1..80: mol_type = other DNA
caggagggaccccatgaagtgacagctcatacggggttccaggagggggtggaggcaccagagcctggcggacgtcccct

SEQ ID NO: 13826 - DNA, 80 bp, synthetic construct
  source 1..80: mol_type = other DNA
tgggagagaccagcataaagtgagccagggggtctgaaaagccagcttaagaagcagtggtttcacctccccaatataca

SEQ ID NO: 13827 - DNA, 80 bp, synthetic construct
  source 1..80: mol_type = other DNA
ggggtgcgggggagccggctggggcggcggccaacagacgccgctgcaagtattcatggatgtggcgcgccaccgacgtg

SEQ ID NO: 13828 - DNA, 80 bp, synthetic construct
  source 1..80: mol_type = other DNA
attcctttcataggctaacctgtaataaccttcctacaggactccaggcatctgagggctctgtctccccagtggcctca

SEQ ID NO: 13829 - DNA, 80 bp, synthetic construct
  source 1..80: mol_type = other DNA
ctcaatcccccttatctcttctttctccaattctaaacagtgtcagcatggtactgtgtggaacttgaccctgtacaagc

SEQ ID NO: 13830 - DNA, 80 bp, synthetic construct
  source 1..80: mol_type = other DNA
agtgtacatttaaggaattatgattatgtgtggtgcctccaaagggaatctactggaccctgctccaggcagggtctcct

SEQ ID NO: 13831 - DNA, 80 bp, synthetic construct
  source 1..80: mol_type = other DNA
ttgtctcccaggctggagtgcaatggcacgatctcagctcactacaacctccgcctccaagattcaagggattcttcctt

SEQ ID NO: 13832 - DNA, 80 bp, synthetic construct
  source 1..80: mol_type = other DNA
ggatgacagcagcagccagaggacagacagctattgaatatactctgtacccacagaaatggacaaagggtagctgggca

SEQ ID NO: 13833 - DNA, 80 bp, synthetic construct
  source 1..80: mol_type = other DNA
aggcagaacatagtagggggctggcctgaggagcataatgacaagacaaagcaaagtggagtgaggatgacagttcctct

SEQ ID NO: 13834 - DNA, 80 bp, synthetic construct
  source 1..80: mol_type = other DNA
tatagttgaatgttgtcttctttccttccatcttttttccctgctaatctgtattttctaagttttctgcacggggccta

SEQ ID NO: 13835 - DNA, 80 bp, synthetic construct
  source 1..80: mol_type = other DNA
tcgaagaggcccatcctaactcccactcctctctgctagtggagaatagctgacagagggctgaacggggcttggatcgc

SEQ ID NO: 13836 - DNA, 80 bp, synthetic construct
  source 1..80: mol_type = other DNA
catcctcgcaaaggccgtgcccacggcagtccccgggacagcgacggctcccacagtcctcaccggtgaagcccgggttg

SEQ ID NO: 13837 - DNA, 80 bp, synthetic construct
  source 1..80: mol_type = other DNA
ccccgggacaggatggccagccacagctggggccagtgtagccgggaaagcacacgcaacgaccacggacacagcgaccc

SEQ ID NO: 13838 - DNA, 80 bp, synthetic construct
  source 1..80: mol_type = other DNA
accaggagaaccaggctggaggttagagcatactgggctggcatcattcaggaggctgcagggagaaagggtaggtatga

SEQ ID NO: 13839 - DNA, 80 bp, synthetic construct
  source 1..80: mol_type = other DNA
ctgctgtatacttgtgtctggcacataaatgttctatctgacacatcaatgttgaatgaattagtggatgagtacctagg

SEQ ID NO: 13840 - DNA, 80 bp, synthetic construct
  source 1..80: mol_type = other DNA
ctgatataccgaaattaatttgagatgaacccaggacctaaataagaaaagtaaagcaatatctttcatagcaatatctt

SEQ ID NO: 13841 - DNA, 80 bp, synthetic construct
  source 1..80: mol_type = other DNA
tgtcaaaagacaaacaggtactccagaaaagaatatagccaaagagccaataaacattttatttattttacctgggctca

SEQ ID NO: 13842 - DNA, 80 bp, synthetic construct
  source 1..80: mol_type = other DNA
tgtacgttaaaaccacaataagatgccactaaatatcctccagaatgcttgtccctcttcaaagaggctgtcattgcttg

SEQ ID NO: 13843 - DNA, 80 bp, synthetic construct
  source 1..80: mol_type = other DNA
agagttaatctttgcttttagaagataggatcagattacttgtagggattattgaccggaaggagtcatatttctggaaa

SEQ ID NO: 13844 - DNA, 80 bp, synthetic construct
  source 1..80: mol_type = other DNA
gtagccaggagggatatgaggctctgcaacacttgagatgtgaccagaacgaccaagtaagtgaattttactcagtattt

SEQ ID NO: 13845 - DNA, 80 bp, synthetic construct
  source 1..80: mol_type = other DNA
ggatgtccctatcctcaaaatgcttcagtgtctcccttccaaattctcttagaacactgacaaacagccctaccatcatg

SEQ ID NO: 13846 - DNA, 80 bp, synthetic construct
  source 1..80: mol_type = other DNA
tttattcacaccgtggaataaaataaagcaggaatgaactatagttatatgcagtagtgtgatggatcttactaagatga

SEQ ID NO: 13847 - DNA, 80 bp, synthetic construct
  source 1..80: mol_type = other DNA
cacaccctgggaatgcttgcacaaagatgtgtacacatgtacacttacaaatatattaatgtgtgctcatccacaagtac

SEQ ID NO: 13848 - DNA, 80 bp, synthetic construct
  source 1..80: mol_type = other DNA
ataaaagatgttccacagatgggggttctggtcctgcccccatgcctccctctgaccctcctgctacaccctcagttgaa

SEQ ID NO: 13849 - DNA, 80 bp, synthetic construct
  source 1..80: mol_type = other DNA
cccagagcctgggctcagctgctctagcccgacatttgggattccgcaagcactttccttccaaggttcagctggccacc

SEQ ID NO: 13850 - DNA, 80 bp, synthetic construct
  source 1..80: mol_type = other DNA
cagtggtttcctctcagcctatatccttcctcatggccagcccccttcccctccctcccccatgctcctctcccatctct

SEQ ID NO: 13851 - DNA, 80 bp, synthetic construct
  source 1..80: mol_type = other DNA
tacgtgagggagcccatatgtgcttgattctgccacatgggtgacggcccaggtgtctgcacaccaggtcagatccccat

SEQ ID NO: 13852 - DNA, 80 bp, synthetic construct
  source 1..80: mol_type = other DNA
gggggaaagggtaaggagcccaggcgtgaaggcagggaagcccagtggtcagagctggggttggcttcactgaggtgtct

SEQ ID NO: 13853 - DNA, 80 bp, synthetic construct
  source 1..80: mol_type = other DNA
gacatgggtgtggggagaagggaggaggaaggacatttctatctcgtgacaaaagaaagtcacacaattgttttgttctc

SEQ ID NO: 13854 - DNA, 80 bp, synthetic construct
  source 1..80: mol_type = other DNA
tcagccaagagaggtctgatgtctcatccacaccaaagtgccagctgtcccttgccaatcagcagaggagcaggatgtcc

SEQ ID NO: 13855 - DNA, 80 bp, synthetic construct
  source 1..80: mol_type = other DNA
cactcttgtctttgtctttcatctggactctcaagtctcagtcccctccagtttagggcttagaggatatcctgccacat

SEQ ID NO: 13856 - DNA, 80 bp, synthetic construct
  source 1..80: mol_type = other DNA
tgaaacagtcccacctggccacctggtaccccctccccccgttctaagtcagtgtgaatggcagaggtcagggatgattg

SEQ ID NO: 13857 - DNA, 80 bp, synthetic construct
  source 1..80: mol_type = other DNA
ctacatccccccactgaagacagactgctgggaacctggggtgacagagatggaagggcaggagaaactcacccttcgga

SEQ ID NO: 13858 - DNA, 80 bp, synthetic construct
  source 1..80: mol_type = other DNA
gggggagctggatgccccagcaatgaatcccacacctcagggactcagtgcggttgaagtgccggcaatcagaggagagg

SEQ ID NO: 13859 - DNA, 80 bp, synthetic construct
  source 1..80: mol_type = other DNA
ttgtatataagcagaaggaaatggcctgggccaaagcaggcagctaggaggctgtaacgtgggctccacctggaaggttc

SEQ ID NO: 13860 - DNA, 80 bp, synthetic construct
  source 1..80: mol_type = other DNA
aaaactacctggagttgatattcatatagaaacaggagtccattctgaccctcagaatgatctaatgggtccgtttcctc

SEQ ID NO: 13861 - DNA, 80 bp, synthetic construct
  source 1..80: mol_type = other DNA
tggcattgggacagtggttagcactacaggtttgggctgcagtggcggcttccgggtgggcagggctttgcctgaaggaa

SEQ ID NO: 13862 - DNA, 80 bp, synthetic construct
  source 1..80: mol_type = other DNA
tcaaagctgtctttgcccttctgcgtttccctctttcttgttcacagaacttgtctattcacatagaataggcctgagca

SEQ ID NO: 13863 - DNA, 80 bp, synthetic construct
  source 1..80: mol_type = other DNA
ttcccggtcctccagtcactcagattccctacacagagataaccactatcagaactatttaaccatggctgggcatggtg

SEQ ID NO: 13864 - DNA, 80 bp, synthetic construct
  source 1..80: mol_type = other DNA
cccagcactttgggagccaaagtgggtggatcacctgaggtcgggaattcaagaccagcctaacatgaaagaagccctgt

SEQ ID NO: 13865 - DNA, 80 bp, synthetic construct
  source 1..80: mol_type = other DNA
gaatgaccacacctgtattgactggtacttgtctttctcccattaccaaatcacagggtttgaaagtcagcatggtggtc

SEQ ID NO: 13866 - DNA, 80 bp, synthetic construct
  source 1..80: mol_type = other DNA
attacctgaggaatcatcagaggtggggataacgttgatctggacggtttcaaatgaggatgttgggtcatctcccagga

SEQ ID NO: 13867 - DNA, 80 bp, synthetic construct
  source 1..80: mol_type = other DNA
gatctggaggaaagggagttagaaattatcaggaagcagagcttaagaagagtccaaaaagtacccaaggacatgtcggt

SEQ ID NO: 13868 - DNA, 80 bp, synthetic construct
  source 1..80: mol_type = other DNA
atcagttgactctttcaaaaaagggggcgtcccggaagctctaccgaccagtaagagacctgggtgctgagcacgtgaat

SEQ ID NO: 13869 - DNA, 80 bp, synthetic construct
  source 1..80: mol_type = other DNA
ccttgacacatggactccaagcatttctctatgagctccccccaagtttcctccctccatggccctacgcccatagttag

SEQ ID NO: 13870 - DNA, 80 bp, synthetic construct
  source 1..80: mol_type = other DNA
tctccttccaaagctaaatggctactgaatgctgccctcggagccttgccccacgcggagagggcagccggagaggggcg

SEQ ID NO: 13871 - DNA, 80 bp, synthetic construct
  source 1..80: mol_type = other DNA
gacgttgcagtgagccgagatcacaccattgcactccagcctgggcgacagagcgagactagagactccgtctcaaacaa

SEQ ID NO: 13872 - DNA, 80 bp, synthetic construct
  source 1..80: mol_type = other DNA
acaaacaaaaagtcaaagtgtagagaagtcctggaatggagactgggggcggatgacaatagagtggagaatggcagagg

SEQ ID NO: 13873 - DNA, 80 bp, synthetic construct
  source 1..80: mol_type = other DNA
ttgtgcctcagactataaaaaccatgccaggacagccaggaagggagacggtttcatcattagccaaagacttgtgtcaa

SEQ ID NO: 13874 - DNA, 80 bp, synthetic construct
  source 1..80: mol_type = other DNA
aacttaaagttttagaagagttccccagagaagatagccatggacctgtagattccccctagtcttaacttgagaaacac

SEQ ID NO: 13875 - DNA, 80 bp, synthetic construct
  source 1..80: mol_type = other DNA
gaatgcaaatgggacatacttaccccgtcttgctacacagaaacctctcgaaaagtgagactctgggttaagaaggtcaa

SEQ ID NO: 13876 - DNA, 80 bp, synthetic construct
  source 1..80: mol_type = other DNA
ctggcttgaggtagtttgccagctagtggttgtttcatcttgttcctgcacacagagcatatgatgcttgccctctaaat

SEQ ID NO: 13877 - DNA, 80 bp, synthetic construct
  source 1..80: mol_type = other DNA
ctcttccatttattatctgcatgagagacaaaaattctagctttccaaaagctaaataaatttccccttctgtttagctt

SEQ ID NO: 13878 - DNA, 80 bp, synthetic construct
  source 1..80: mol_type = other DNA
gactgcaggttcatgccaccatgtctggctaatttttttttttttttttagagacgaggtttcactatgttgcctgggct

SEQ ID NO: 13879 - DNA, 80 bp, synthetic construct
  source 1..80: mol_type = other DNA
tctttcttttcttttttttcccccacaattttaaacccaagcagtacacctggttggttgttacatgattacattgcatc

SEQ ID NO: 13880 - DNA, 80 bp, synthetic construct
  source 1..80: mol_type = other DNA
gaccggccaatttcattctttactatggctgtgaaataattatttattgtgtcctccagttgcaaggagtttaacagcat

SEQ ID NO: 13881 - DNA, 80 bp, synthetic construct
  source 1..80: mol_type = other DNA
tcagatatcgtcgacccgagacgagtcctggcactaggaatgtaaggctgtctctgttattttgacttgctccagcaagg

SEQ ID NO: 13882 - DNA, 80 bp, synthetic construct
  source 1..80: mol_type = other DNA
taatgatgggagtgttgcagtacagaggggtaaactgattaagtgagagagagagagataggggataatttcaggaataa

SEQ ID NO: 13883 - DNA, 80 bp, synthetic construct
  source 1..80: mol_type = other DNA
aattccgtccaaaaaaaaacaaaaacaaacgaacaaaaaaacaggccaggggcggtgcctcaagcctgtaatcctagcac

SEQ ID NO: 13884 - DNA, 80 bp, synthetic construct
  source 1..80: mol_type = other DNA
ataataaaaagaagaaaatgaaatgagcggtggaagtagagtgatcaggtgctgaatcttccattgtagagggggaatga

SEQ ID NO: 13885 - DNA, 80 bp, synthetic construct
  source 1..80: mol_type = other DNA
ctgtgattcccaaccttagctgccctttggaatcacctggttatgtcttaaatactgatgccagagttccacccccagag

SEQ ID NO: 13886 - DNA, 80 bp, synthetic construct
  source 1..80: mol_type = other DNA
acatgggctttcagatttttcagtgctccccagtggattctaatgtgtaacctggggtaagaaccgttgctccaaggaat

SEQ ID NO: 13887 - DNA, 80 bp, synthetic construct
  source 1..80: mol_type = other DNA
agctgagttgagtgaatgagcttttcaaaggaaagtctcagagaaggaaaaaaaatcagagatggacacttaggggaagg

SEQ ID NO: 13888 - DNA, 80 bp, synthetic construct
  source 1..80: mol_type = other DNA
tgggtggatgtctcaccagcatccagcatggagtctgcatgttgcataaatgcataaattaggttaggaccctgtcctgt

SEQ ID NO: 13889 - DNA, 80 bp, synthetic construct
  source 1..80: mol_type = other DNA
tcccaaatgtccttaaaaaaagcaaaaggaaaggttctgggattagcaagaaaataggcagatacctgggtggaggaggg

SEQ ID NO: 13890 - DNA, 80 bp, synthetic construct
  source 1..80: mol_type = other DNA
gatggcaatgatgccagtaggccagaagcaacagatggtggtcagcaccgcgatgggcatgtagtcgtgtggcgggcgcc

SEQ ID NO: 13891 - DNA, 80 bp, synthetic construct
  source 1..80: mol_type = other DNA
ggctggcgccggcgggggcggggcggcggcagcgggcggcggcgggggaagtgggccctcgaagcgagtctcctgcaggt

SEQ ID NO: 13892 - DNA, 80 bp, synthetic construct
  source 1..80: mol_type = other DNA
tatttcctcacaggatgtctccatgccagccagtgattgtccatctgtcactcccaatgatgccatccctgcaaaacctg

SEQ ID NO: 13893 - DNA, 80 bp, synthetic construct
  source 1..80: mol_type = other DNA
tctgaaaagttcccagggtttggtgaacctaccaacctagcagtaaagagggaggcccaggtctgtaaatcagggggagc

SEQ ID NO: 13894 - DNA, 80 bp, synthetic construct
  source 1..80: mol_type = other DNA
cccacagataactcagacagccagattctgggggtcgttcaggttgaaagactggtcgaaattacgcgggcatgagtcag

SEQ ID NO: 13895 - DNA, 80 bp, synthetic construct
  source 1..80: mol_type = other DNA
cctgggctgctgctcacgggtattaaagaactccgcgttgttcatggctgaggcgatgcattaggaagatcctggaccta

SEQ ID NO: 13896 - DNA, 80 bp, synthetic construct
  source 1..80: mol_type = other DNA
tccttatctgagggacacttcctagcgtccctttttctgaaccacattgctccaggcacaaccctggtacctgagccctt

SEQ ID NO: 13897 - DNA, 80 bp, synthetic construct
  source 1..80: mol_type = other DNA
cattgcacctggcccagaatgttttaagtgtgtcaccttattgccttagaaggtttagtctgatgtgggagtcagcaaac

SEQ ID NO: 13898 - DNA, 80 bp, synthetic construct
  source 1..80: mol_type = other DNA
ctgggttcaagtgattccagcgccccgagtaactgggattacaggcatgcaccaccacgcctggctaacttttgtatttt

SEQ ID NO: 13899 - DNA, 80 bp, synthetic construct
  source 1..80: mol_type = other DNA
gtgtgtgtgtagttttataccattttatcacatttcctaccacctctttacttacctggactattataacagcctccagc

SEQ ID NO: 13900 - DNA, 80 bp, synthetic construct
  source 1..80: mol_type = other DNA
tggtagcaggggaccaggcatgtcaaaccttagcaggtcaaggtaaggcccttgatatttttttttcttttttttgtgat

SEQ ID NO: 13901 - DNA, 80 bp, synthetic construct
  source 1..80: mol_type = other DNA
tcatgtcatttcacatctaccacaaccctatgaatgacagtgatagctcatggttatataacatttttcatgttccaagt

SEQ ID NO: 13902 - DNA, 80 bp, synthetic construct
  source 1..80: mol_type = other DNA
gccaatattttttaattaaaagattttaactccatctggctgggtgcggtggctcacgcctataatcccagcactttggg

SEQ ID NO: 13903 - DNA, 80 bp, synthetic construct
  source 1..80: mol_type = other DNA
gtgctgggattacaggcatgagccaccacacctggcctcttttttttttttttttgagacaaagtctcactctgtcgcca

SEQ ID NO: 13904 - DNA, 80 bp, synthetic construct
  source 1..80: mol_type = other DNA
gcccggccagattttctccagctcttctgataacctccccccaaatctctttgtagcttctttggtttctatgatgcaaa

SEQ ID NO: 13905 - DNA, 80 bp, synthetic construct
  source 1..80: mol_type = other DNA
ttctttgaggccccaggccctcttttaactacctttgaataggtgttatccctgtatttatggaaataaagttccatttc

SEQ ID NO: 13906 - DNA, 80 bp, synthetic construct
  source 1..80: mol_type = other DNA
tgggacttgaccctactgagctgaccctgctggagctaaggaggaggcttgtgggagggggcaggaatgggaggactctc

SEQ ID NO: 13907 - DNA, 80 bp, synthetic construct
  source 1..80: mol_type = other DNA
tatttgggaggctgaggcaggagaatcacttgaacctggggggcggaggtcgtgcggtgaggcaagaacatgccattgca

SEQ ID NO: 13908 - DNA, 80 bp, synthetic construct
  source 1..80: mol_type = other DNA
gctgggaggcgcatctgcagcacttacaggtgagggatggggagatgggaccccaagaaccccaactaggacccgtactc

SEQ ID NO: 13909 - DNA, 80 bp, synthetic construct
  source 1..80: mol_type = other DNA
ctgaagagctgcagccagaacaggtggctgagctgtggggccggggtgaccggatcgaatctctcagcgaccaggtgctg

SEQ ID NO: 13910 - DNA, 80 bp, synthetic construct
  source 1..80: mol_type = other DNA
actgtactatggggacagaaaaccagaaatgtggagactgaactggtatcccagagagtgcacgaccctgggcatctggg

SEQ ID NO: 13911 - DNA, 80 bp, synthetic construct
  source 1..80: mol_type = other DNA
cccccaaccctggacaaccatccctgggcttgccagctgccacttctgaggcccttctcctatacaaagccttctccaat

SEQ ID NO: 13912 - DNA, 80 bp, synthetic construct
  source 1..80: mol_type = other DNA
cagccagcaggccagcccggcagagccagcccacagtagctcgcgcttggcaatgggcacacagcggcctggcagtacct

SEQ ID NO: 13913 - DNA, 80 bp, synthetic construct
  source 1..80: mol_type = other DNA
tccatgcccctggccacaaatccattctggccacctgcaggggatggggcaagggacaatcagcctggtttctggaggag

SEQ ID NO: 13914 - DNA, 80 bp, synthetic construct
  source 1..80: mol_type = other DNA
tttgccttgtaaaaatgtggctaccataaaaaaattacattgtggcttgcattatatttctgtagaacagtactggtcta

SEQ ID NO: 13915 - DNA, 80 bp, synthetic construct
  source 1..80: mol_type = other DNA
ccaagcgagaaggtaacaggcaatagaggaaacaggagaccctgccagttggaataccgtaggctttctgagctgctcca

SEQ ID NO: 13916 - DNA, 80 bp, synthetic construct
  source 1..80: mol_type = other DNA
ggttctgatcacaaattagatagttatcctcttgagtagaagtgactactaaaagaagtcactgagaaagtaacgaacac

SEQ ID NO: 13917 - DNA, 80 bp, synthetic construct
  source 1..80: mol_type = other DNA
agaaaataacacaccatttctacacagcctatggatagcattgggacaacctagttgcacacaagccattaaacatgtca

SEQ ID NO: 13918 - DNA, 80 bp, synthetic construct
  source 1..80: mol_type = other DNA
catctcctccccacatctaccagtgtcctcttgcgagccccgccccagggctctccctcggtctttgcccccatctctgg

SEQ ID NO: 13919 - DNA, 80 bp, synthetic construct
  source 1..80: mol_type = other DNA
tgtaggaaaagcccaaactccccggggtccaacctgggaagaagaccctatttctgatgggcaaattataaagaggaaag

SEQ ID NO: 13920 - DNA, 80 bp, synthetic construct
  source 1..80: mol_type = other DNA
gttattaccaatcccttggcattgcacattgacttagaccgtatcagccaatagccattgtgcgaaggcaggactgcact

SEQ ID NO: 13921 - DNA, 80 bp, synthetic construct
  source 1..80: mol_type = other DNA
aaggagagggttgagtgtgttgaggatggacagagctttaggtgttggaagatcagacaagcaggaaggctaactaagtt

SEQ ID NO: 13922 - DNA, 80 bp, synthetic construct
  source 1..80: mol_type = other DNA
ttccctcttcctgtttctcgccatcttcttctttttttggctgctcagtatttgagctatgtctgcttcctgcccacctc

SEQ ID NO: 13923 - DNA, 80 bp, synthetic construct
  source 1..80: mol_type = other DNA
ttcagttctgcacgctcctcctcttcctcctggttttctggggccttcctgaggagaaagattggggggaatgcggcacg

SEQ ID NO: 13924 - DNA, 80 bp, synthetic construct
  source 1..80: mol_type = other DNA
tgttagggataaggccagaatggggcaggaaattagagcctgtgctgtcctgcaccctagtcccagggtctgtagggctt

SEQ ID NO: 13925 - DNA, 80 bp, synthetic construct
  source 1..80: mol_type = other DNA
acccttctcattaggcaccaggggcttcccatccaagtgccagctaagagtccctgcagggtagcttccctctgacacac

SEQ ID NO: 13926 - DNA, 80 bp, synthetic construct
  source 1..80: mol_type = other DNA
gcacttcctcgggttctgggaaaagttctaggacgactggggtgtggggttaaagtgctttctgcagggagggtcagtgg

SEQ ID NO: 13927 - DNA, 80 bp, synthetic construct
  source 1..80: mol_type = other DNA
gatgttacttttcccccacatctggctttttgcaacctcctccctctccctaccccttgattttggtgtgacaaaaagat

SEQ ID NO: 13928 - DNA, 80 bp, synthetic construct
  source 1..80: mol_type = other DNA
gacagaggagaaaaaggggtctgagaaataggtttctcggtatgtgtatgtttctgtgtaagaaagaaagcgagagagga

SEQ ID NO: 13929 - DNA, 80 bp, synthetic construct
  source 1..80: mol_type = other DNA
atgaaccacaactctcaactcttgtggggacatgctactatactccaattatccacaaaataacattccaacacacagaa

SEQ ID NO: 13930 - DNA, 80 bp, synthetic construct
  source 1..80: mol_type = other DNA
gaggaatgggaaggagcccagtgctgggggccagcctggggtccctgggcccacctggcatccaggaaacgggagcgcag

SEQ ID NO: 13931 - DNA, 80 bp, synthetic construct
  source 1..80: mol_type = other DNA
agggaggagggtcagtctgcggagggaggaagcggattgggggtggaatgagttgggggtggaatgaggagttcttggga

SEQ ID NO: 13932 - DNA, 80 bp, synthetic construct
  source 1..80: mol_type = other DNA
cgctacccccaccggggtctccgccaccgggaggctcgccagggcccccaggctccccactcaccaatcccaggcccccc

SEQ ID NO: 13933 - DNA, 80 bp, synthetic construct
  source 1..80: mol_type = other DNA
ataccagtctgcagtccagaggggaattatatttattcacacaaccaaaacatcagacagactcagcagcagtggggagg

SEQ ID NO: 13934 - DNA, 80 bp, synthetic construct
  source 1..80: mol_type = other DNA
aggaggcctgggtttgcctcctggggggatgtcttacctggtgactgaggatagtgctgtaaagctgttctctgtcctcg

SEQ ID NO: 13935 - DNA, 80 bp, synthetic construct
  source 1..80: mol_type = other DNA
tgcctgggtactgagcaggaagctgggttcctggtcagcccccccacgggccccgcccatccctgtcaacttcctccatt

SEQ ID NO: 13936 - DNA, 80 bp, synthetic construct
  source 1..80: mol_type = other DNA
caaatagagtacgggaagggttcattttggaaacttatagtttagtgcagacaaggggcaggggaaattttattttgggc

SEQ ID NO: 13937 - DNA, 80 bp, synthetic construct
  source 1..80: mol_type = other DNA
gtgtgcggtttctcccttggctactagattcttgctttcagataataccctaaattatcatagggcccctaaatatactt

SEQ ID NO: 13938 - DNA, 80 bp, synthetic construct
  source 1..80: mol_type = other DNA
ggaatgttggaggcagaaccgcaagctcccagggccacccaatcacagggccagtcatccgttgagaccctgcctccgcg

SEQ ID NO: 13939 - DNA, 80 bp, synthetic construct
  source 1..80: mol_type = other DNA
tattcgggccggctggtccctcaaaggcgggaagcgttgcccaggagaccaccggcctgcaggaagtgttgccctggtga

SEQ ID NO: 13940 - DNA, 80 bp, synthetic construct
  source 1..80: mol_type = other DNA
aggtgcaggggggtctccccagtgcccacggtgtgagcctggggacaggcccctccatccagcagaggttcccagggctc

SEQ ID NO: 13941 - DNA, 80 bp, synthetic construct
  source 1..80: mol_type = other DNA
aggactctctgattctaatagggtcaaaggactttttttttttttcttggtctgggttgactcacataccaggtccacgg

SEQ ID NO: 13942 - DNA, 80 bp, synthetic construct
  source 1..80: mol_type = other DNA
ccccctctctactaaaaatataaaaattagtggctgggtgtagtggcttactcctataatctcagcactttgggaggctg

SEQ ID NO: 13943 - DNA, 80 bp, synthetic construct
  source 1..80: mol_type = other DNA
ttaggtattctcagtctggtagagaagataaaccatccctttgttggagggctatgacagaggttaggataatgtgctta

SEQ ID NO: 13944 - DNA, 80 bp, synthetic construct
  source 1..80: mol_type = other DNA
ggagagggggactcaggacctccctaaaacctgactcttttcttcaccctagaaagaattccccatattttgtgccctct

SEQ ID NO: 13945 - DNA, 80 bp, synthetic construct
  source 1..80: mol_type = other DNA
tagccactgaggcaggcacagcgtggtgggaagcctggcttaggggagggcagacacaggcctccgtggtggcagtgatg

SEQ ID NO: 13946 - DNA, 80 bp, synthetic construct
  source 1..80: mol_type = other DNA
aattccatgcatctgaggtccataaatacatatacaaacacacacagagttaaaataacctatctgaggccacccaccac

SEQ ID NO: 13947 - DNA, 80 bp, synthetic construct
  source 1..80: mol_type = other DNA
accatccatcatggccatgtgtcacaatccttctatctcaactccccatgagacacaattgttggcgacacacaactcaa

SEQ ID NO: 13948 - DNA, 80 bp, synthetic construct
  source 1..80: mol_type = other DNA
ataaaataaaaaagtgaaaaaagagggtaggttagggtatctgtcttgagccttctatcaaaagttgtggttctggccgg

SEQ ID NO: 13949 - DNA, 80 bp, synthetic construct
  source 1..80: mol_type = other DNA
agaatgaatactgctaaaatgtctgtgcttaccaaagtgatctacagagtcatgcaacccctatgaaaataccaataata

SEQ ID NO: 13950 - DNA, 80 bp, synthetic construct
  source 1..80: mol_type = other DNA
aggtggaggttgcagtgagctgagatcataccactgcactccagactgggcaacagggcaacagagcaagactctatccc

SEQ ID NO: 13951 - DNA, 80 bp, synthetic construct
  source 1..80: mol_type = other DNA
caacacagcaagactctgtctcagaaaaggaaaaaaaatgcaaaaaatagcagatgctggcaaggatgcagagaaagggg

SEQ ID NO: 13952 - DNA, 80 bp, synthetic construct
  source 1..80: mol_type = other DNA
aaaaaactcacatgtaccccatagatacgtatgactaccgtttgtcaataacaaaagaaaataaaatggcaaccacacac

SEQ ID NO: 13953 - DNA, 80 bp, synthetic construct
  source 1..80: mol_type = other DNA
cctggcacaggctgccttggaatccaggggggcagtggcagaaataggaggggccgctgtcgacacagaggcctccattg

SEQ ID NO: 13954 - DNA, 80 bp, synthetic construct
  source 1..80: mol_type = other DNA
agttttacctctctcctcaccctttctgccagaatattggagacatacccctaaagcttatcataatgttaaagcaactg

SEQ ID NO: 13955 - DNA, 80 bp, synthetic construct
  source 1..80: mol_type = other DNA
ctcagcccagagatggtcctctgcccactccagctcctcgaaatcccttacttcaaaaaccttctcctgaatggcctggg

SEQ ID NO: 13956 - DNA, 80 bp, synthetic construct
  source 1..80: mol_type = other DNA
gttcaattaaattttaaaaaatatgacacaagcataccctccttagttcttccattctcctgtggaccccagccccatga

SEQ ID NO: 13957 - DNA, 80 bp, synthetic construct
  source 1..80: mol_type = other DNA
tacttattttctgtctttctttagaatgaaagctctacgagagcagttgctttatctcttttgctttgtgtttcccccag

SEQ ID NO: 13958 - DNA, 80 bp, synthetic construct
  source 1..80: mol_type = other DNA
acttcttatgcttgccttactcactccctatgaacccatgaacctgtccttcaatgggtccctattgcctttaagatatt

SEQ ID NO: 13959 - DNA, 80 bp, synthetic construct
  source 1..80: mol_type = other DNA
cttatctttcaagactcatctcagccatcacctcctccatttttagtctgggttggctggtcctctgtgctcttgtaata

SEQ ID NO: 13960 - DNA, 80 bp, synthetic construct
  source 1..80: mol_type = other DNA
gggaggcacagcatggcgccttcccttgccaggaaaggtgaacttgcagagcttcccagagaagacacctggggcaggtg

SEQ ID NO: 13961 - DNA, 80 bp, synthetic construct
  source 1..80: mol_type = other DNA
cgcagtgtgtggccctgctccttgaggtgtgaaaggccagggaacagggtgcttgctggggacctgcgggaggactacaa

SEQ ID NO: 13962 - DNA, 80 bp, synthetic construct
  source 1..80: mol_type = other DNA
agcattctgggttgacctgagcaaaggctgcagcacagaaagtttatgaactgctcttctaccctctcttgctgggctgc

SEQ ID NO: 13963 - DNA, 80 bp, synthetic construct
  source 1..80: mol_type = other DNA
agagtgtggagcctgtgagggggttggtgctgcattgggcatccccatggcacggctggctcagacacatgtcttccaag

SEQ ID NO: 13964 - DNA, 80 bp, synthetic construct
  source 1..80: mol_type = other DNA
tgcctttggggcagggtcctgggtcctggaagcactcgttgacatcacgttcacaggcatggccctcgaagcccggtggg

SEQ ID NO: 13965 - DNA, 80 bp, synthetic construct
  source 1..80: mol_type = other DNA
cccaggtgatataatggctccctccactcagaatgggagccattcagatgctcagaatgcaaaagtctggaggacccctg

SEQ ID NO: 13966 - DNA, 80 bp, synthetic construct
  source 1..80: mol_type = other DNA
tcccacacagcagccctgagggtggagaggcaggcgcaatggaagccctgggtgctgtgcctccacctttcctcttctag

SEQ ID NO: 13967 - DNA, 80 bp, synthetic construct
  source 1..80: mol_type = other DNA
cttcttcctcctcggcctgctgcaagcctcacgtctgagctgtttcctgagtcacacaatgtcctggacaccctagtaat

SEQ ID NO: 13968 - DNA, 80 bp, synthetic construct
  source 1..80: mol_type = other DNA
agccttcccctaccggggaatatacttcaccagcaccactttcttcctttttttagctttttattttaaaatacttttaa

SEQ ID NO: 13969 - DNA, 80 bp, synthetic construct
  source 1..80: mol_type = other DNA
tatcacattaggaagcccgtgagccagcatcatttataatggtcacccagtattctactagttcatttaaaccaatttcc

SEQ ID NO: 13970 - DNA, 80 bp, synthetic construct
  source 1..80: mol_type = other DNA
atgtcaacattctttttaactgtttaatggctattcgtgtttcctgtccatgcttttgtgagtttcctgtccatgctttt

SEQ ID NO: 13971 - DNA, 80 bp, synthetic construct
  source 1..80: mol_type = other DNA
aggttggccctgataatgtgtccaaacacaaagaaggcaataggccactgtagccatagagataagcaagagtgccaggt

SEQ ID NO: 13972 - DNA, 80 bp, synthetic construct
  source 1..80: mol_type = other DNA
aaaaaaaatatgtatatccagaatctgagcacttctcatctcttctcatccctattgccaatatcctagtccaagcctat

SEQ ID NO: 13973 - DNA, 80 bp, synthetic construct
  source 1..80: mol_type = other DNA
gaggaggataccattacctccacccacagtgagatgtggagctcagagaagttgagtcacttgtacaagttcatatagct

SEQ ID NO: 13974 - DNA, 80 bp, synthetic construct
  source 1..80: mol_type = other DNA
ggtcaataagagatggcacctgtagtttcaaaaataagtaccaaattaaactgctcatcaccacacccctaccatctcta

SEQ ID NO: 13975 - DNA, 80 bp, synthetic construct
  source 1..80: mol_type = other DNA
ctataaaactattagaaaaaggcctaaaagtagatattcatgatgttgggctaggcaatgatttcttacatatgatactt

SEQ ID NO: 13976 - DNA, 80 bp, synthetic construct
  source 1..80: mol_type = other DNA
aatacatgaaaacatactgtttggggttcacttagcttcttgcatcaatcagttaatatcttttgccaaatttgggagtt

SEQ ID NO: 13977 - DNA, 80 bp, synthetic construct
  source 1..80: mol_type = other DNA
agccttcaagtagctggtaccacaagtacacaccaccatgtctggctaattaaaaacattttttttttccaaggggctgg

SEQ ID NO: 13978 - DNA, 80 bp, synthetic construct
  source 1..80: mol_type = other DNA
taattgtcttttcttattcaagattttcccgattcttggtatgacaagtgattttcgcttgcatcctgcacattttggat

SEQ ID NO: 13979 - DNA, 80 bp, synthetic construct
  source 1..80: mol_type = other DNA
tgaaggcagctggttaagtccttaaaacattcaacacagattttccatatgactcagcaattgggttcctaggtatctac

SEQ ID NO: 13980 - DNA, 80 bp, synthetic construct
  source 1..80: mol_type = other DNA
aaaggctgcaggaatccacttacatgaaatgtctaaaataggcaaatctatagagacagaaagattagtgattgtctagg

SEQ ID NO: 13981 - DNA, 80 bp, synthetic construct
  source 1..80: mol_type = other DNA
actctggttccatctctactcccaacctccataccagattattttagaacaaatcccagatatgatatgatatgatatga

SEQ ID NO: 13982 - DNA, 80 bp, synthetic construct
  source 1..80: mol_type = other DNA
gtccatacttcattcattcagattgtcttagttttcacctggtgtctttttgtctgttccaggattccatatttcttttc

SEQ ID NO: 13983 - DNA, 80 bp, synthetic construct
  source 1..80: mol_type = other DNA
ggaaaggcagattgatgccattctttcccctttatttagcagctttcagaataatgagtttgttctctagcatctgccaa

SEQ ID NO: 13984 - DNA, 80 bp, synthetic construct
  source 1..80: mol_type = other DNA
tgagtggccaggaaaatgccgtatacttctttttcttttctttactctaattccatcacaggttatctgctgggtgtttc

SEQ ID NO: 13985 - DNA, 80 bp, synthetic construct
  source 1..80: mol_type = other DNA
cctccctgccctcacagaatgtatatgtattcattacaaaattgtccttataaagtcaggacatcttcaggacacttcca

SEQ ID NO: 13986 - DNA, 80 bp, synthetic construct
  source 1..80: mol_type = other DNA
gggaacacagcctggaactgttcacttggtcccatttcttcttttactgaggcccagaggggagacgcgacctgcccaag

SEQ ID NO: 13987 - DNA, 80 bp, synthetic construct
  source 1..80: mol_type = other DNA
tgctggggtctagtatggggaaagaatctattaaaatatatttaaaaaggtaaatccaaaaatttataattacaagagtg

SEQ ID NO: 13988 - DNA, 80 bp, synthetic construct
  source 1..80: mol_type = other DNA
ccctccaaggctcccagtctaggtgggagagacatacagaacaaatagcatcgtgggggtggtgggaggtggtgtgaaca

SEQ ID NO: 13989 - DNA, 80 bp, synthetic construct
  source 1..80: mol_type = other DNA
cgcctcgttttgctattcttcaacttcgcatgtttggattgctacagcttgaggtctttagtgtctggtttccttcgctc

SEQ ID NO: 13990 - DNA, 80 bp, synthetic construct
  source 1..80: mol_type = other DNA
tcagggttggacagggcagggcctcttctgcctccagcaccccaggcctctctcctctgattctatcagggacggaggcc

SEQ ID NO: 13991 - DNA, 80 bp, synthetic construct
  source 1..80: mol_type = other DNA
tgcactggaaggaatactgcaagacatagcagagaaaacagcttcattctagttctggtacttttttttgagatggagtc

SEQ ID NO: 13992 - DNA, 80 bp, synthetic construct
  source 1..80: mol_type = other DNA
tgtattgtttggccccttctcagaaatcaccttttttgccatcttcctttgtctttgcctttttgtgtcgttctgtcatg

SEQ ID NO: 13993 - DNA, 80 bp, synthetic construct
  source 1..80: mol_type = other DNA
tacctttggggtgattctagatcttgtaaaaaactgcttggcatctctttggagataccttgtgcatctgtggttaagtc

SEQ ID NO: 13994 - DNA, 80 bp, synthetic construct
  source 1..80: mol_type = other DNA
tcctcccagctcagcctccccagcagctgagaccactacgcccagctaatttttgtatgtttttgtagagatggggtctt

SEQ ID NO: 13995 - DNA, 80 bp, synthetic construct
  source 1..80: mol_type = other DNA
tatgcatttggtctaaattagtcaaaggttttgcaaggctacatcaaggatgcagttatattattgggcctaagccatag

SEQ ID NO: 13996 - DNA, 80 bp, synthetic construct
  source 1..80: mol_type = other DNA
tcttgactgcattcatatgtgtttgaggggtaaggtatgggcatgggaaataggaaagaggttgaagatgaagtatggac

SEQ ID NO: 13997 - DNA, 80 bp, synthetic construct
  source 1..80: mol_type = other DNA
catgcagactttttaatcttctgacaactgagagggcagagttaatttgatctagtaagcggatgtttgaattgtgggtg

SEQ ID NO: 13998 - DNA, 80 bp, synthetic construct
  source 1..80: mol_type = other DNA
tgatagtagtctccttgtcttcataattttaatgagaatgcatcccaactttctctttttggaagatgtgtttcagaata

SEQ ID NO: 13999 - DNA, 80 bp, synthetic construct
  source 1..80: mol_type = other DNA
aggtccatctttttcaggtttaccctcttaccctagactttcttagtttttagctttccatttctagagatttagggctc

SEQ ID NO: 14000 - DNA, 80 bp, synthetic construct
  source 1..80: mol_type = other DNA
actcaacaccgcaagatttcaaaagggaaattcctccagggctgagtcacagggaagaaagcgatttcctccgcctcttc

SEQ ID NO: 14001 - DNA, 80 bp, synthetic construct
  source 1..80: mol_type = other DNA
attactattctgtaacattgctaaaaatgtgtttgaagtttcctcggagtattatctctggatataagcttctgggctga

SEQ ID NO: 14002 - DNA, 80 bp, synthetic construct
  source 1..80: mol_type = other DNA
aggcaggaggatcacctaagcctgggagtttgaggctgcagtgagctgtgatcatgccaccgcactccagcctgtgtaac

SEQ ID NO: 14003 - DNA, 80 bp, synthetic construct
  source 1..80: mol_type = other DNA
ctctttagtttaattagatcccgtttgtcaattttggcttttgttgccattgcttttagtgttttggacatgaagtcttt

SEQ ID NO: 14004 - DNA, 80 bp, synthetic construct
  source 1..80: mol_type = other DNA
agagtttttggcatgaaggggtgttgaattttatcaaaggccttttccgtatctattgagataatcatgtggtttttgtt

SEQ ID NO: 14005 - DNA, 80 bp, synthetic construct
  source 1..80: mol_type = other DNA
ctagtggtctattttgttgattttttcaaaaaatcagctcctggattcattgatatttttgaagggttttttgtgtctct

SEQ ID NO: 14006 - DNA, 80 bp, synthetic construct
  source 1..80: mol_type = other DNA
gggtgttaaagtctcccactattattgtttgggagtctgggtctctaagaacttgctttatgaatctgggtgctcctgta

SEQ ID NO: 14007 - DNA, 80 bp, synthetic construct
  source 1..80: mol_type = other DNA
ttgtgtcaatgttctttacaatttggtatgtttttgcagtggctggtaccagttgttcctttccatgtttagtgcttccc

SEQ ID NO: 14008 - DNA, 80 bp, synthetic construct
  source 1..80: mol_type = other DNA
tcattaagttgatcattaagttgatcttcaatcactgcttcatcagtttggctattgatacttgtgtattcttcatgaag

SEQ ID NO: 14009 - DNA, 80 bp, synthetic construct
  source 1..80: mol_type = other DNA
tgtggccataaaaccatctactcaagcctcagcaatggtggacgtctcttccaccaccaagctcaatcatcccaggtgaa

SEQ ID NO: 14010 - DNA, 80 bp, synthetic construct
  source 1..80: mol_type = other DNA
gtgttcatctatagctctatcaatgcttcttgtctttaagtctaccttgtttgagagctatgtcagcattcttttttttt

SEQ ID NO: 14011 - DNA, 80 bp, synthetic construct
  source 1..80: mol_type = other DNA
tttaggtctaacatttaagaggatacaaacaaatggaagaacattccatgctcatgggtaggaagaatcaatatcgtgaa

SEQ ID NO: 14012 - DNA, 80 bp, synthetic construct
  source 1..80: mol_type = other DNA
tgtgtgctacttagaggtcaatctgaagcctggtgatgtttcacatcactgttaagttctcaggttttgtggatgtcatt

SEQ ID NO: 14013 - DNA, 80 bp, synthetic construct
  source 1..80: mol_type = other DNA
gtgaaaagatgcaggtatgtaagtttgaaatctacttggaaaaatgaagtatctatctgtatgtatactcaggcattgaa

SEQ ID NO: 14014 - DNA, 80 bp, synthetic construct
  source 1..80: mol_type = other DNA
tctagtaaagcgggtaaacgtataaacagagaataattgaggtatataaaagtggtttgggaactgtgtggagggcagtc

SEQ ID NO: 14015 - DNA, 80 bp, synthetic construct
  source 1..80: mol_type = other DNA
attttgctattcaggggtgttttctttttttaaaaaaatagacttaatagacttaaatagatagttattatttggaatgg

SEQ ID NO: 14016 - DNA, 80 bp, synthetic construct
  source 1..80: mol_type = other DNA
gagtagctggaattacaggtgtgtggcgccatgccttactatttatttctaaacacattgcagaacatggaatttaggga

SEQ ID NO: 14017 - DNA, 80 bp, synthetic construct
  source 1..80: mol_type = other DNA
agacagaaagccaacaaaaaaacaatgaatttaaactatgccctggaacaaatagacttaacagatatatacagaacatt

SEQ ID NO: 14018 - DNA, 80 bp, synthetic construct
  source 1..80: mol_type = other DNA
accacagaaatacaaaagatcatttgaggctactatgaacacctttatgtgcataaactagaaaacctggaggagatcga

SEQ ID NO: 14019 - DNA, 80 bp, synthetic construct
  source 1..80: mol_type = other DNA
aataattcagcaaatttcctggatacaaaattaatgtacacaaatcagtagctctcctgtacaccaacagtgaccaagct

SEQ ID NO: 14020 - DNA, 80 bp, synthetic construct
  source 1..80: mol_type = other DNA
aaatcttcacaatctatacatctgacaaaggactaatatccagaatctacaacaaactcaagcaaattagcaagaaagaa

SEQ ID NO: 14021 - DNA, 80 bp, synthetic construct
  source 1..80: mol_type = other DNA
actagtgggtatctacccagagcaaaataagtcattatacaaaaaagatacttgcacatgcatgtttatagcagcacaag

SEQ ID NO: 14022 - DNA, 80 bp, synthetic construct
  source 1..80: mol_type = other DNA
cctcttggcctccttttggaatgatttttataaattattctatgatcagcctttgttagttttgtattatgcattttaaa

SEQ ID NO: 14023 - DNA, 80 bp, synthetic construct
  source 1..80: mol_type = other DNA
ttggcaactctatacccacttatacccactttcaatcatatgccaatcagtggtgggttaatgcaaattgaggagtagtt

SEQ ID NO: 14024 - DNA, 80 bp, synthetic construct
  source 1..80: mol_type = other DNA
gctaaaactcaataggctaatcaggacattagacactgaaaagaaaatcagtgaattggaaggtaaacttgaggaagttg

SEQ ID NO: 14025 - DNA, 80 bp, synthetic construct
  source 1..80: mol_type = other DNA
tcaaaccacaaagcaaggattaagatacaaagagaaatagtgagcaatattggtaaatatatgaatatatctgaaaaaca

SEQ ID NO: 14026 - DNA, 80 bp, synthetic construct
  source 1..80: mol_type = other DNA
aagtggtctcgctcagtgggtcccactcccccagcgcccagcaagctaataaccactggcttgaaattctcactgccagc

SEQ ID NO: 14027 - DNA, 80 bp, synthetic construct
  source 1..80: mol_type = other DNA
tgcctcttctccttcaaatgattgcaatgcctctccagcaagagcacaaaactggacagagaatgagtttgacgaactga

SEQ ID NO: 14028 - DNA, 80 bp, synthetic construct
  source 1..80: mol_type = other DNA
aaaacacaccaaaatataaagaccaacgacactatgaagaaactgcaccaactaatatgcaaaataaccaactagcacca

SEQ ID NO: 14029 - DNA, 80 bp, synthetic construct
  source 1..80: mol_type = other DNA
aaacataatccatcacatgaacagaaccaatgacaaaacccacatgattatctcaatagatacagaaaaggccttcgatt

SEQ ID NO: 14030 - DNA, 80 bp, synthetic construct
  source 1..80: mol_type = other DNA
ctatataccaataatagacaaagagagccaaatcatgagtgagctcacaattgctacaaagagaataaaacacctagaaa

SEQ ID NO: 14031 - DNA, 80 bp, synthetic construct
  source 1..80: mol_type = other DNA
cttcagaaataacaccacatgtctacaaccatctgatctttgacaaacctgacacacacaagcaatggggaaaggattcc

SEQ ID NO: 14032 - DNA, 80 bp, synthetic construct
  source 1..80: mol_type = other DNA
tgcaggtggggcttaaaacctagatgacaaattgatgggtgcagcaaaccaccatggcacgtgaatacttatgtaacaaa

SEQ ID NO: 14033 - DNA, 80 bp, synthetic construct
  source 1..80: mol_type = other DNA
aagaataaatcgcaataaatcattggatttcttgatccacccagaactcgtttttgacccttggagggcaatgtggcccc

SEQ ID NO: 14034 - DNA, 80 bp, synthetic construct
  source 1..80: mol_type = other DNA
gctgaactaacttacattctcattaatcatgtatatgcattccaaagagaccctttagaaagcccagaagtttccgagga

SEQ ID NO: 14035 - DNA, 80 bp, synthetic construct
  source 1..80: mol_type = other DNA
aaactaacaaacaaggaacaaaaaaacaactttgcaatttttacgctgatgggggttggtctttggagagttttgagtag

SEQ ID NO: 14036 - DNA, 80 bp, synthetic construct
  source 1..80: mol_type = other DNA
aaattcctacatatactcatatttgcatatatttttatataaacatggattaagatgtggagagattcatagaaacttaa

SEQ ID NO: 14037 - DNA, 80 bp, synthetic construct
  source 1..80: mol_type = other DNA
gtttctcattcagcttcattatctctaaactcacctttctgcttttctttcctatgttctgctcctaaatgaaaaatgac

SEQ ID NO: 14038 - DNA, 80 bp, synthetic construct
  source 1..80: mol_type = other DNA
ataatgtatgtaaaagacatgccaacaaaggctggtaaaatctctaaatgtgtattttccacagatgacaaaagcaactt

SEQ ID NO: 14039 - DNA, 80 bp, synthetic construct
  source 1..80: mol_type = other DNA
cacatcccacaactacttacttgtatctctatattcttcctgcttaccttccttctcctagcttcctttctttggaaagt

SEQ ID NO: 14040 - DNA, 80 bp, synthetic construct
  source 1..80: mol_type = other DNA
actcagcatatcaacaccttatccatctgctgtgacatattgtataccactactcccttccccatgaagttaccacctct

SEQ ID NO: 14041 - DNA, 80 bp, synthetic construct
  source 1..80: mol_type = other DNA
tcagtgttctttacttgggattctggtcctttcagtacacctgcctcactcttcttttcttggacctcttgttcctttgg

SEQ ID NO: 14042 - DNA, 80 bp, synthetic construct
  source 1..80: mol_type = other DNA
atgagagaaaaggtaaaatgtactgtaaatgaactgacatttgttcagtggattatggctaatgaataatgcttagtggc

SEQ ID NO: 14043 - DNA, 80 bp, synthetic construct
  source 1..80: mol_type = other DNA
atgggtttattaaggtaaatcagttaatcctcaaagattcactgtttttatatttagtttgatctgctcactttgtagag

SEQ ID NO: 14044 - DNA, 80 bp, synthetic construct
  source 1..80: mol_type = other DNA
taacattaggaaaattacagtaatgttttctgaacctttttgtatatgtccccacctagagttcttcattaaaatatggt

SEQ ID NO: 14045 - DNA, 80 bp, synthetic construct
  source 1..80: mol_type = other DNA
ttggaagccctggctgcaagtacatttattgcaggcagtagcccatactacaaaattttaatacaatcaaaagatttaat

SEQ ID NO: 14046 - DNA, 80 bp, synthetic construct
  source 1..80: mol_type = other DNA
caacatcaatcatcagagcccaccttttttttttgtaagagaaactcacaagatcacagtcctatcactttttctatgtg

SEQ ID NO: 14047 - DNA, 80 bp, synthetic construct
  source 1..80: mol_type = other DNA
caatgtgttagtatgggaagagtgggaagagtgtgtattttggagataggacatcctgggtttaaatcctgacaccaatg

SEQ ID NO: 14048 - DNA, 80 bp, synthetic construct
  source 1..80: mol_type = other DNA
aggattttctaactcaagagaaacccaccttccaatagtatccttcctaggtgaacttagaaacaggacttggagggagc

SEQ ID NO: 14049 - DNA, 80 bp, synthetic construct
  source 1..80: mol_type = other DNA
ctactttaaatcacctttacttatcattgatcattatcaattttgtctagaatgtcaagattacaatttataaaatatag

SEQ ID NO: 14050 - DNA, 80 bp, synthetic construct
  source 1..80: mol_type = other DNA
caggattgtttaccagagatacatatgtggagttagggtatttaaaaatgggagttggcaaaatacagcccatggaataa

SEQ ID NO: 14051 - DNA, 80 bp, synthetic construct
  source 1..80: mol_type = other DNA
tctttcctactcccaattccctagttgttttttctagggtaccataaagacttctagcagaatacaatgaaatatgatga

SEQ ID NO: 14052 - DNA, 80 bp, synthetic construct
  source 1..80: mol_type = other DNA
cctacacaaaataaatttctgtgatttgcctgattgttatgagaggcaagtcccaattctttcaaggaggggaagtcaga

SEQ ID NO: 14053 - DNA, 80 bp, synthetic construct
  source 1..80: mol_type = other DNA
atgttttctcttcctttcaaatctctaccattataccagctctcactgtattttttttacagtacagaaagtttatttgt

SEQ ID NO: 14054 - DNA, 80 bp, synthetic construct
  source 1..80: mol_type = other DNA
tggaactgagaaacatttttcttttcttttttaagttgcagtgcttgcaagcaagtcctgtcttcagaagaactggctca

SEQ ID NO: 14055 - DNA, 80 bp, synthetic construct
  source 1..80: mol_type = other DNA
tccttcttttttcacctcctgccatcctcagtttatctcatgatacaaggtttttctgactgtcatgtttaatgtcaagt

SEQ ID NO: 14056 - DNA, 80 bp, synthetic construct
  source 1..80: mol_type = other DNA
aaggctatgctataagctcacaactttcacttatattttatctgatatttgcacaattatatcaagttttgttttgttgt

SEQ ID NO: 14057 - DNA, 80 bp, synthetic construct
  source 1..80: mol_type = other DNA
ttttcttgctttcttgtggactaatatagttttctttcttctttttattttccctatgggttcagaagatgtatgtcaca

SEQ ID NO: 14058 - DNA, 80 bp, synthetic construct
  source 1..80: mol_type = other DNA
taatttttatgggtatatagtaggtgcaagtaggtacatgaaatattttggtacactcatacaatgtgtaataatgtgta

SEQ ID NO: 14059 - DNA, 80 bp, synthetic construct
  source 1..80: mol_type = other DNA
tttcaattctaataactttcttattttcaaggtttcagcttggttcttttttaaatctgcctgttctttcttcaaactat

SEQ ID NO: 14060 - DNA, 80 bp, synthetic construct
  source 1..80: mol_type = other DNA
gccttgacatgatggccaaattagctctcctatctcaagtgtcaccctttttccaagacaacataagcaaacaactgtaa

SEQ ID NO: 14061 - DNA, 80 bp, synthetic construct
  source 1..80: mol_type = other DNA
ctcttctccactacctaaatcaataaatagtttcattcgtcaagtttcttagaccccaaatctaggagtaacccttggtg

SEQ ID NO: 14062 - DNA, 80 bp, synthetic construct
  source 1..80: mol_type = other DNA
gtgaggtatcactcatatggtgctggattttctcatagatttcataacttttagtagtttcttattccttgggggctatc

SEQ ID NO: 14063 - DNA, 80 bp, synthetic construct
  source 1..80: mol_type = other DNA
cttcatttctgggtctcaaccactgagtatgtattttcatctgtgcagtgagaatacttagctgatcagcctctttgctc

SEQ ID NO: 14064 - DNA, 80 bp, synthetic construct
  source 1..80: mol_type = other DNA
aataattagctgggcatggtggcttgcacctgtattgctagccacttgggaggctcaggcaggagaattgcttggactcg

SEQ ID NO: 14065 - DNA, 80 bp, synthetic construct
  source 1..80: mol_type = other DNA
ggggagaatcttggtagtcacacagctctggatgacaatggctaattctctgttaaaagctccaattctttatgactgca

SEQ ID NO: 14066 - DNA, 80 bp, synthetic construct
  source 1..80: mol_type = other DNA
catgatgaagacaacaaaagcaactgtaacaaaagcaaaaattgacagatgggatctaattgagctaaagagcttctgcc

SEQ ID NO: 14067 - DNA, 80 bp, synthetic construct
  source 1..80: mol_type = other DNA
agccaaccaaagacataatgaaatattatttggccataaaaagaactgaagtactgctgcatattaccatgtggatgaac

SEQ ID NO: 14068 - DNA, 80 bp, synthetic construct
  source 1..80: mol_type = other DNA
ctccacaataatagagtgatcttttaaaattataaagtgggccctatcatttccctgttcaagcccttcagttgcctctc

SEQ ID NO: 14069 - DNA, 80 bp, synthetic construct
  source 1..80: mol_type = other DNA
atattttggcttctgtgcatggggaggcagtatattttctgctactggctttactcagaggggcctaatttcagttttcc

SEQ ID NO: 14070 - DNA, 80 bp, synthetic construct
  source 1..80: mol_type = other DNA
ctattgggtcttggatttttacatctttttcctgcccatactctctgatgacttctctgaaaaggacactatgccttcaa

SEQ ID NO: 14071 - DNA, 80 bp, synthetic construct
  source 1..80: mol_type = other DNA
acctggtttaaatattgagtcactgttggtatgtgttaccttggaagctgagtttagaactaaaataatgggaaatacta

SEQ ID NO: 14072 - DNA, 80 bp, synthetic construct
  source 1..80: mol_type = other DNA
atgggtggacctaaaaaccaaagtagatattggtgaagatttctttgaaagaaacaaggttccctctagggaggtatatt

SEQ ID NO: 14073 - DNA, 80 bp, synthetic construct
  source 1..80: mol_type = other DNA
gtctctaaaaggtgatacaaatttttcttagatgttttggaatttaaatgtggaaaaaagagaccagatatggcaggagg

SEQ ID NO: 14074 - DNA, 80 bp, synthetic construct
  source 1..80: mol_type = other DNA
ttctagaaacttattaataatttatttatgcctttctgcccatggatgccatggaagaagcatcattaaagtctctcttc

SEQ ID NO: 14075 - DNA, 80 bp, synthetic construct
  source 1..80: mol_type = other DNA
gaggaaactttggaggcagaagctgtggcctctatggtggtggaggccaatactttgccaaaccatgaaaccaaagtggc

SEQ ID NO: 14076 - DNA, 80 bp, synthetic construct
  source 1..80: mol_type = other DNA
ataggagtggagcagcagctaaatagaggaataagcaaaagaaatgaagaaatgtgagtttctacacacacaagacagaa

SEQ ID NO: 14077 - DNA, 80 bp, synthetic construct
  source 1..80: mol_type = other DNA
cccaggctgaagggcagtgacacgatctcggctcactgcaacctccacctcctgggttcaagcgattctcctgcctctgc

SEQ ID NO: 14078 - DNA, 80 bp, synthetic construct
  source 1..80: mol_type = other DNA
ttgtttacacataagggagagggagtcaagcaggggagaaaagggaaagggaattcatgtatccatgtagattctctggc

SEQ ID NO: 14079 - DNA, 80 bp, synthetic construct
  source 1..80: mol_type = other DNA
cacttcagaactggaaagctgcccttattattctctctctgctactttagaaaattcttgtatattgttatagaagacat

SEQ ID NO: 14080 - DNA, 80 bp, synthetic construct
  source 1..80: mol_type = other DNA
cctatctattatgaattttaaggtaatggaatttccattttctaaaatataattggttgcccagagagatggttagtgtt

SEQ ID NO: 14081 - DNA, 80 bp, synthetic construct
  source 1..80: mol_type = other DNA
ttgccaacctaagggatactagggaaaggcaaaactttgttattaggtattaacattactgatggtagggaaaggtgaaa

SEQ ID NO: 14082 - DNA, 80 bp, synthetic construct
  source 1..80: mol_type = other DNA
cacccagccgaaagcctgttatgttatttagcaacactgcttacataagaatgatccttgatgttagactgcatctgaac

SEQ ID NO: 14083 - DNA, 80 bp, synthetic construct
  source 1..80: mol_type = other DNA
attctctttctcaacatactcatttcccttctttattctcttatgtgccaattcacttactctttctgcttccaattttc

SEQ ID NO: 14084 - DNA, 80 bp, synthetic construct
  source 1..80: mol_type = other DNA
aggaagtttaggtgctgggttctaagtctttattaagtattggctctacagagctagattatatgctgaagtggaaacag

SEQ ID NO: 14085 - DNA, 80 bp, synthetic construct
  source 1..80: mol_type = other DNA
aaagactcactccatattaatctgttatgcctctatttttcttcttacattttcttgccccttgcccctagtttccttag

SEQ ID NO: 14086 - DNA, 80 bp, synthetic construct
  source 1..80: mol_type = other DNA
gtagacaccaggagcaaaatttccacttcagtggaggaacaaattaagtttataaatgcttctttcttcatcttggagga

SEQ ID NO: 14087 - DNA, 80 bp, synthetic construct
  source 1..80: mol_type = other DNA
ccaagtgcattcatctttttatttcctctctcagggcagagaattaaaatcctgtagagcaatggttcttaaacgttggt

SEQ ID NO: 14088 - DNA, 80 bp, synthetic construct
  source 1..80: mol_type = other DNA
cctgctgtcaaatccttctaaagttatagataattttccctggccccagaatctttttcacaatttcattaattaatcta

SEQ ID NO: 14089 - DNA, 80 bp, synthetic construct
  source 1..80: mol_type = other DNA
atcttcttgtgtaccttagtaccttaattatgtcattttaatctctgttgcttctgtcttgagaaataaccaatcatatt

SEQ ID NO: 14090 - DNA, 80 bp, synthetic construct
  source 1..80: mol_type = other DNA
ggcgtttcccagctgaagacaaataagcagggcagtggaaggtatttacttgttgccttacagagtaaagaagaagataa

SEQ ID NO: 14091 - DNA, 80 bp, synthetic construct
  source 1..80: mol_type = other DNA
cagaaggtttatttaaactttacctctttggttttcctcccttctccattcattttttccagcttccctcacttctctgt

SEQ ID NO: 14092 - DNA, 80 bp, synthetic construct
  source 1..80: mol_type = other DNA
ggggaaatgtgagaaaggtgggcatgatccagttaagatggctaatgaaggacaaggtggagaattatgagtcttaagcc

SEQ ID NO: 14093 - DNA, 80 bp, synthetic construct
  source 1..80: mol_type = other DNA
ccctcactatattcagtggagaaagtctgggcattagtcttatttgtcttacattgactgttaaatgactatgcaaagtt

SEQ ID NO: 14094 - DNA, 80 bp, synthetic construct
  source 1..80: mol_type = other DNA
tcactataacctctcactactgggctcaagtgatcctcccaactcagcctcccatgtagctaggactacaggcatgccac

SEQ ID NO: 14095 - DNA, 80 bp, synthetic construct
  source 1..80: mol_type = other DNA
ttgagcttcagggatgaatagcttcctgtggccctatgcatctttcagctaaatactctacataactaattactcatcat

SEQ ID NO: 14096 - DNA, 80 bp, synthetic construct
  source 1..80: mol_type = other DNA
tttgctaagagagtagattttaagtgttcttaccacaaaaagtatgtgaggaaatggatatgttaacagcttgatttagt

SEQ ID NO: 14097 - DNA, 80 bp, synthetic construct
  source 1..80: mol_type = other DNA
ttcagagtcagttcagatatctcctcagggaaatttcttctaatctcctagctaaaggcccttacttcttggtcttgctc

SEQ ID NO: 14098 - DNA, 80 bp, synthetic construct
  source 1..80: mol_type = other DNA
aagcctctctcttcttccctcctattcctaagttaatgaatttattactgttttgctgaaactatgattgccagctaaaa

SEQ ID NO: 14099 - DNA, 80 bp, synthetic construct
  source 1..80: mol_type = other DNA
gagaacttagatgccatagacactatattgcagaaaggttgtggaaaagaggatagaaatgagtcacaacttatttcctg

SEQ ID NO: 14100 - DNA, 80 bp, synthetic construct
  source 1..80: mol_type = other DNA
gatgatgattttggtatatctgagtgggcctaatataatcacaaagatttttaagagtgggagagggagataaaagagag

SEQ ID NO: 14101 - DNA, 80 bp, synthetic construct
  source 1..80: mol_type = other DNA
cttgaatgtttatgagtgtgagattaacttcatttatcctgctcagagtaaatggaagcattcaggattttccattgtgg

SEQ ID NO: 14102 - DNA, 80 bp, synthetic construct
  source 1..80: mol_type = other DNA
gagtgtagaattgaagtaaaaaaatagtcatgaggatatgagtggatatgaggatatgagtttcagcagcatttagaagt

SEQ ID NO: 14103 - DNA, 80 bp, synthetic construct
  source 1..80: mol_type = other DNA
ggttcagtaaaagacaaaagatcactggaacagaaaataaaatccacggaaaaacgaaatatataagatgaagatggcat

SEQ ID NO: 14104 - DNA, 80 bp, synthetic construct
  source 1..80: mol_type = other DNA
acttcagggtatgtaccccggataaactcttttccatctacttaaggactgtctttgcagcattatttgtgatagcagaa

SEQ ID NO: 14105 - DNA, 80 bp, synthetic construct
  source 1..80: mol_type = other DNA
gccagatcattctaaaccagcactagaaaactttatctattgcttagtattcatatgacttgacatatgacaggatttct

SEQ ID NO: 14106 - DNA, 80 bp, synthetic construct
  source 1..80: mol_type = other DNA
atgtgaagacaatagtatttttttttcagcttcttttctgaaaatgagtgctctccttccatacttggcagtcattgtga

SEQ ID NO: 14107 - DNA, 80 bp, synthetic construct
  source 1..80: mol_type = other DNA
cttaagaatgcaagggagcccagattagaaagatactaagattgtaggcttgtacactaaagatctgtaaacaggaaatt

SEQ ID NO: 14108 - DNA, 80 bp, synthetic construct
  source 1..80: mol_type = other DNA
gttaaatctggtattctggtggactgttactggagaggttttttcccaagaaatatgagatgtaaatgacaacagtagac

SEQ ID NO: 14109 - DNA, 80 bp, synthetic construct
  source 1..80: mol_type = other DNA
ttagaagtctctgttcatatccttcacccacttgttgatggggttgtttgtttttttcttgtgaatttgtttgagttctt

SEQ ID NO: 14110 - DNA, 80 bp, synthetic construct
  source 1..80: mol_type = other DNA
tgtataatatttcattgtgtgtgtgtgtgtgtgtatgtgtgtgtgtctgtgtatcacattttctttatccattcatccac

SEQ ID NO: 14111 - DNA, 80 bp, synthetic construct
  source 1..80: mol_type = other DNA
attagtgatattgtgcacctttatttattagttggctgtaagtcttctctgaaaaaatgtctatttaggtccttagtcca

SEQ ID NO: 14112 - DNA, 80 bp, synthetic construct
  source 1..80: mol_type = other DNA
tctgttcatggactaaggttcatgaacagatatgaaccttagtccattttaaaatcagcttatttgtttcagctgtattt

SEQ ID NO: 14113 - DNA, 80 bp, synthetic construct
  source 1..80: mol_type = other DNA
tttgacgagataccacttatttttgcttttgttactgtgtttttggtgtcatctaaaacaacttgcaaagaccaatgtca

SEQ ID NO: 14114 - DNA, 80 bp, synthetic construct
  source 1..80: mol_type = other DNA
attattaaaatagattacatacaaaaactctacatattattctccctactttttacattctcagtgtcaaaatttacatt

SEQ ID NO: 14115 - DNA, 80 bp, synthetic construct
  source 1..80: mol_type = other DNA
attgttttggatttttttgtcaggcaactggtggattgatttttaggcaaaccttcatttttgggggttagttactgaaa

SEQ ID NO: 14116 - DNA, 80 bp, synthetic construct
  source 1..80: mol_type = other DNA
tgtgggtaaagtgaaactgttcttcttaccctctttaatacatctgttctaggattttataacctgacagcgtgctggaa

SEQ ID NO: 14117 - DNA, 80 bp, synthetic construct
  source 1..80: mol_type = other DNA
cactgctcagaaggctgagagaggagaatggcgtgaacccgggaggcggagcttgcagtgagccgagattgcgccactgc

SEQ ID NO: 14118 - DNA, 80 bp, synthetic construct
  source 1..80: mol_type = other DNA
atttcatattcattttatccacattttaaacatccaggaaattgtttcggagcggttccttaacctttctaatatcttgg

SEQ ID NO: 14119 - DNA, 80 bp, synthetic construct
  source 1..80: mol_type = other DNA
attaattaattctccccaactccagtttggcattcagtactgctcagaaatctctggtagatttctcccactcacttaga

SEQ ID NO: 14120 - DNA, 80 bp, synthetic construct
  source 1..80: mol_type = other DNA
agtctcccgagcggctaggcttacagttacctgccaccatgcccagctaatttttgtatttttagaagagacagggtttc

SEQ ID NO: 14121 - DNA, 80 bp, synthetic construct
  source 1..80: mol_type = other DNA
cagcaccttgactgaagggtgctgactgaaggtggttttattaatgaaagccacagcaaaggacagaaatttcttgtcac

SEQ ID NO: 14122 - DNA, 80 bp, synthetic construct
  source 1..80: mol_type = other DNA
gcactatcagcctagagcttagttaactgtgggttgtttcccccaggcttccagaggaatcaataagagtgaaagaaaaa

SEQ ID NO: 14123 - DNA, 80 bp, synthetic construct
  source 1..80: mol_type = other DNA
ttgtaactcttgaggcagagaaccttccacagaataagcattttataaatgtttgataattaaaaatgagaaaaatgact

SEQ ID NO: 14124 - DNA, 80 bp, synthetic construct
  source 1..80: mol_type = other DNA
gaatattatctgaaaattttccaaatcttgagagggatatgaacatccggattgaagacgatcaaagcatcccaagcaag

SEQ ID NO: 14125 - DNA, 80 bp, synthetic construct
  source 1..80: mol_type = other DNA
gatcttggcaagctttcagatgacccttatagatatatagaggttttccagactttcacccatatatttaaactctcctg

SEQ ID NO: 14126 - DNA, 80 bp, synthetic construct
  source 1..80: mol_type = other DNA
atttattatagtatgtatagtatgtatgtatgtagttacagtgtgtataacttgggtatacatacccaagtatatataat

SEQ ID NO: 14127 - DNA, 80 bp, synthetic construct
  source 1..80: mol_type = other DNA
aaaagagcacacagtaacacatgcccactggggcttcaggaactgtaaacatacacccctagatgctgccgtgaggccag

SEQ ID NO: 14128 - DNA, 80 bp, synthetic construct
  source 1..80: mol_type = other DNA
tgtctgcataaagacataaaacaattttgctgctgtgttaagaaaagacagtagtgggaggaaaagaagaagcaaggaga

SEQ ID NO: 14129 - DNA, 80 bp, synthetic construct
  source 1..80: mol_type = other DNA
aatgaagagaacatacaatttgaaaagaaaatacaattcacattatcatcaaaattacacactacctaggaatacatctt

SEQ ID NO: 14130 - DNA, 80 bp, synthetic construct
  source 1..80: mol_type = other DNA
atgattatgttaatcagtttaattcaatcattcactatatagcttaatttaataattccactatatataatatatagatt

SEQ ID NO: 14131 - DNA, 80 bp, synthetic construct
  source 1..80: mol_type = other DNA
ctcttaaaagagaacaagggaaaaatcttcatgactttggattaggtaatggcttctttaaaatgacaccaaaagcacag

SEQ ID NO: 14132 - DNA, 80 bp, synthetic construct
  source 1..80: mol_type = other DNA
aaaatttaaaaatacctacataaaggaagagacctaacaaaagtgttgtatctagactatttgaagaatttcttcaactt

SEQ ID NO: 14133 - DNA, 80 bp, synthetic construct
  source 1..80: mol_type = other DNA
tggaagagaaagctataccctcccctctaggaatcagaggttgtcctaacgtcctctttcacatcattctcttctataaa

SEQ ID NO: 14134 - DNA, 80 bp, synthetic construct
  source 1..80: mol_type = other DNA
aggattcagatggctgcagccccagccaatggcttcactgcaacctatgagagactgagccagagctacccagctaagct

SEQ ID NO: 14135 - DNA, 80 bp, synthetic construct
  source 1..80: mol_type = other DNA
tgttactagaattgtgatctgaagcctggagcagaacttacctatgctactcatctcaatccttttaggcagtggcacta

SEQ ID NO: 14136 - DNA, 80 bp, synthetic construct
  source 1..80: mol_type = other DNA
agagcacagggttgggggtaaggtcacagatcaacaggatcccaaggcagaatttttcttagtacagaacaaaatgaaaa

SEQ ID NO: 14137 - DNA, 80 bp, synthetic construct
  source 1..80: mol_type = other DNA
ggtagcggccgggcagaggctgcaatctcggcactttggggggccaaggcaggcggctgggaggtggaggttgtagccag

SEQ ID NO: 14138 - DNA, 80 bp, synthetic construct
  source 1..80: mol_type = other DNA
ggaaatactataggacttaattttaagaacaagcaataacgtaacaggcgtttgaagaataggcaggaccccatcctgaa

SEQ ID NO: 14139 - DNA, 80 bp, synthetic construct
  source 1..80: mol_type = other DNA
agtaggtcagtttcactaggtgtgatttcactttctgtcaaagaggaagaggcagaaagtgaagtgagagaactggaaaa

SEQ ID NO: 14140 - DNA, 80 bp, synthetic construct
  source 1..80: mol_type = other DNA
tgggactataggcatgtaccaccacgcccagctaatttttgtattttttttaatactttaagttctagggtacatgtgca

SEQ ID NO: 14141 - DNA, 80 bp, synthetic construct
  source 1..80: mol_type = other DNA
gtaacaggttcagccttagacattttacttttttatacacttaggacattcagcatgaggttcaagaggagtttttacta

SEQ ID NO: 14142 - DNA, 80 bp, synthetic construct
  source 1..80: mol_type = other DNA
tgactggggcatcatcctcaatgccaccaacccctctccttcctgtggcttttctaactggaactggaactcagaaagta

SEQ ID NO: 14143 - DNA, 80 bp, synthetic construct
  source 1..80: mol_type = other DNA
aaaaaatgtttattaaaattaatgtgtaaacatttgtggaagaataatgtgtagtttctaacatttatgtgtttaaattt

SEQ ID NO: 14144 - DNA, 80 bp, synthetic construct
  source 1..80: mol_type = other DNA
aggataggtctctgaaaagatcagtctccagcagattttcctgagtagaattaaaacaccttgagttagtacttcaatga

SEQ ID NO: 14145 - DNA, 80 bp, synthetic construct
  source 1..80: mol_type = other DNA
caagtaggtcaccacatttttaaagatcataggaaattgttcacgccaacaaatctcagtgaacctcagctctcagcctt

SEQ ID NO: 14146 - DNA, 80 bp, synthetic construct
  source 1..80: mol_type = other DNA
agggtcaattacgagaatttagtgtgtatccaatgataaaaataattgcagggcgctagttgagggtgtcagagagaaac

SEQ ID NO: 14147 - DNA, 80 bp, synthetic construct
  source 1..80: mol_type = other DNA
atcgaaaccttataaatatctacgtccaatggcagaaaatacgaggctcatgaaacttctcaacatgcgctcccatggct

SEQ ID NO: 14148 - DNA, 80 bp, synthetic construct
  source 1..80: mol_type = other DNA
tatatcttctcccactctgacgaggatgggctgggaaggtccattcacttttaaagaagctgttaaatagagtggacaaa

SEQ ID NO: 14149 - DNA, 80 bp, synthetic construct
  source 1..80: mol_type = other DNA
tttctgtccataaatgctgtctgaccaaattgctgctttgaattctctgaaaccgttctgattctgagggatggcttgtt

SEQ ID NO: 14150 - DNA, 80 bp, synthetic construct
  source 1..80: mol_type = other DNA
tttgaattttcagattattaccttccattccaggtaacagttgactcccagttatttccagcattttgtttgctttgtcc

SEQ ID NO: 14151 - DNA, 80 bp, synthetic construct
  source 1..80: mol_type = other DNA
gaagtacactgaattatacactgattccttgaaacctgataatctcatcatcataccacataatcctctttcaatcagca

SEQ ID NO: 14152 - DNA, 80 bp, synthetic construct
  source 1..80: mol_type = other DNA
tgattttcctcaaaaactcttttgtgggctgaaaggtgtgcttaagctcacctaaagcacacacatggatacacattcct

SEQ ID NO: 14153 - DNA, 80 bp, synthetic construct
  source 1..80: mol_type = other DNA
ctacactcacagtatcccaggttgcactcagaaagtaacagctccctcccaatagtgattagcttaggggtgtactgggg

SEQ ID NO: 14154 - DNA, 80 bp, synthetic construct
  source 1..80: mol_type = other DNA
aattaaaatgtaacattaactttaaagtttttttaatctatccatttatatgaataactgtatacttatatccaaatgtg

SEQ ID NO: 14155 - DNA, 80 bp, synthetic construct
  source 1..80: mol_type = other DNA
ctctgggaaccagccccttgcagtgcacacaagctggactccactctccccaggtccctccatgtggatgctaggggcag

SEQ ID NO: 14156 - DNA, 80 bp, synthetic construct
  source 1..80: mol_type = other DNA
cagtaacagtaatggatgttaagaaaaaaaaaggtattaggaaacagcctcccagggaagtaaagaaggaagcagtatca

SEQ ID NO: 14157 - DNA, 80 bp, synthetic construct
  source 1..80: mol_type = other DNA
cattgtcggagggctggatgttgtgtatcttcagtgccacatttccctttgcaatgccattctctatccactctacccag

SEQ ID NO: 14158 - DNA, 80 bp, synthetic construct
  source 1..80: mol_type = other DNA
agacatgtctgatctcttccttgttatctgcaaattgaagagatgtttaacagttatgtatgttattatgtttgatcatt

SEQ ID NO: 14159 - DNA, 80 bp, synthetic construct
  source 1..80: mol_type = other DNA
actgcttcattgtcagcaggatgaataggaaggaggcgactgcaccagacagattgtagcctggaaaatccaccatcctc

SEQ ID NO: 14160 - DNA, 80 bp, synthetic construct
  source 1..80: mol_type = other DNA
gcttgcaaaacttatagagcaagattcaaatattttttcctgtcctcctcccaactcctcctgcaaagcctttctttacc

SEQ ID NO: 14161 - DNA, 80 bp, synthetic construct
  source 1..80: mol_type = other DNA
accaagtaagagtaaagaaagccccacaacatccataccaagcatgatttctcagccttgtgaactaaaatgaactcaca

SEQ ID NO: 14162 - DNA, 80 bp, synthetic construct
  source 1..80: mol_type = other DNA
catagtaactgactggtaagaataaattaacttagttcacgaagttgaaagcttatgtatcttagttcacgaagttgaaa

SEQ ID NO: 14163 - DNA, 80 bp, synthetic construct
  source 1..80: mol_type = other DNA
tttgtgtgtgtgtgtgtgaccttggacatctttctttacttttttgagcctgtattttctctgctgtgtggtggagacaa

SEQ ID NO: 14164 - DNA, 80 bp, synthetic construct
  source 1..80: mol_type = other DNA
cacacatcagcgggtgctatccacccttccctccaccttgccacacatcaaagattcccaactagtgccaagtctccacc

SEQ ID NO: 14165 - DNA, 80 bp, synthetic construct
  source 1..80: mol_type = other DNA
ccaacagtgggatgaaagtttgctgcctaaaatgctgggatggaatgttccagcaagaggagagtggcatcaaggacata

SEQ ID NO: 14166 - DNA, 80 bp, synthetic construct
  source 1..80: mol_type = other DNA
cattcataactccctcagccactagacgacaaaagaagccctgagtttaggctgactgagattttcattctagctttgct

SEQ ID NO: 14167 - DNA, 80 bp, synthetic construct
  source 1..80: mol_type = other DNA
gctgacctacagtctaagttgagctctttacatacatggctgtcatatactttacaaaaagtgtctgacaaaccagttcc

SEQ ID NO: 14168 - DNA, 80 bp, synthetic construct
  source 1..80: mol_type = other DNA
gcctccaagattttactactgcaccgcgatttcagagtggcgggaaggactgagagtcccatttagaaacttcccaaatc

SEQ ID NO: 14169 - DNA, 80 bp, synthetic construct
  source 1..80: mol_type = other DNA
ctcaaacacctctgacatttgtggacacgtagaaaaggataattaatgggttagcaggatgaaaggaaaactatacccca

SEQ ID NO: 14170 - DNA, 80 bp, synthetic construct
  source 1..80: mol_type = other DNA
tgtgcttagttgtgggaatccatgggagattctggaatgaagatgcataggaaacaaatgcaagagatgagtcctgggcc

SEQ ID NO: 14171 - DNA, 80 bp, synthetic construct
  source 1..80: mol_type = other DNA
ttactactacaatgctactctagaacatacatcaagaactattgcaagttcattacaacttcattcctaatagcaaaaca

SEQ ID NO: 14172 - DNA, 80 bp, synthetic construct
  source 1..80: mol_type = other DNA
tggtaattttcactcttccttggactatcacataggttgaaactctgatatatgtcaaggttgtaaaccaaaaagtgtct

SEQ ID NO: 14173 - DNA, 80 bp, synthetic construct
  source 1..80: mol_type = other DNA
ccttttcatttggctcaacttccattaagcacaaaaaccccacaaaatgttcaaagggctagagggacaaatttggattt

SEQ ID NO: 14174 - DNA, 80 bp, synthetic construct
  source 1..80: mol_type = other DNA
gttttcacatgtgcctgctcctgaagccacctgagaaggaggccagggagctgggccagcaagtactgaagttcagggct

SEQ ID NO: 14175 - DNA, 80 bp, synthetic construct
  source 1..80: mol_type = other DNA
tgctggtttaaagtctgttctatcagaggtgtttatagtattctctgatggtagtttgtatttctgtgggatcagtggtg

SEQ ID NO: 14176 - DNA, 80 bp, synthetic construct
  source 1..80: mol_type = other DNA
aagtatatcctgccagtacactacaggtgtaataaaacatcatggatgacccatctcctcttccatgattacatcctaaa

SEQ ID NO: 14177 - DNA, 80 bp, synthetic construct
  source 1..80: mol_type = other DNA
ggcctctccatgtgtgctatggcccctgaagacattttggtaggacaagatgtggaagtgggaaacagtgatattgatga

SEQ ID NO: 14178 - DNA, 80 bp, synthetic construct
  source 1..80: mol_type = other DNA
agtgcttgaagtcatcaactctcaaatcttgtcattgcagcaccacgtcaaatgacaaaacacttgctattttcttagtc

SEQ ID NO: 14179 - DNA, 80 bp, synthetic construct
  source 1..80: mol_type = other DNA
tacagcagcctgcctggggaaccaattcccttatcttcaataaacaatacagcaaggtagtctgcttaagtccgacttgc

SEQ ID NO: 14180 - DNA, 80 bp, synthetic construct
  source 1..80: mol_type = other DNA
ctttggaagcacaattttgctttttctgtccttacaaaacttttgcaatgcacttcactgtattacatctctctgggctt

SEQ ID NO: 14181 - DNA, 80 bp, synthetic construct
  source 1..80: mol_type = other DNA
gtgctccagagcagttgtactaacaggatatgtatatatagaaagatacttcttttaaagaatttgctcacatgattgtg

SEQ ID NO: 14182 - DNA, 80 bp, synthetic construct
  source 1..80: mol_type = other DNA
cagtggtggtgggttacattaaggaacaaatgtttgtaaaatgaaaatggtaaggagcacctcctgccaccacacagctc

SEQ ID NO: 14183 - DNA, 80 bp, synthetic construct
  source 1..80: mol_type = other DNA
aggctcttcacatgggcttcactaacaccacagtgtggaggtggctgattactgataggcaggggcaaaagtcctaggtc

SEQ ID NO: 14184 - DNA, 80 bp, synthetic construct
  source 1..80: mol_type = other DNA
ggagctgaatttacacctgtggaagttgtgtccaccctagcttagaatcctcatgtcatctacgagctagtacctcttat

SEQ ID NO: 14185 - DNA, 80 bp, synthetic construct
  source 1..80: mol_type = other DNA
atattattggctacagagatagagacttgatttagaaaatcacagttgccactttctaagtaagcccttgaccaaaagac

SEQ ID NO: 14186 - DNA, 80 bp, synthetic construct
  source 1..80: mol_type = other DNA
cagatcatgcttaatgaaaaaagatttccaaacaatgctgcatatgtccagagaaaaggtggcagaaatgactgtcgttt

SEQ ID NO: 14187 - DNA, 80 bp, synthetic construct
  source 1..80: mol_type = other DNA
cactcataagtgggagttgaacaatgagaacacatggacacaggggcctgttgggggggtggggggcaaggggaggagag

SEQ ID NO: 14188 - DNA, 80 bp, synthetic construct
  source 1..80: mol_type = other DNA
taaagaggcaagagcaggcacaatgagtttttgtttgattaaagattccatttagtgcttatccaacctagcaattacat

SEQ ID NO: 14189 - DNA, 80 bp, synthetic construct
  source 1..80: mol_type = other DNA
tataaagataactctggtctttaaagcatcaggtttcaggtagaggtgaagagagaatgaatcaaactcaaactgccatc

SEQ ID NO: 14190 - DNA, 80 bp, synthetic construct
  source 1..80: mol_type = other DNA
tgcagtgacttgtgctcctccagaccccctaacagttttaagggctaattccctgtaatatattcagttctgcttagact

SEQ ID NO: 14191 - DNA, 80 bp, synthetic construct
  source 1..80: mol_type = other DNA
aaccccgtctctactgaaaatacaaaaaaaaaaaaaaaaaaaaaaaaaaaaaaattggccgggcatggtggcgggcgcct

SEQ ID NO: 14192 - DNA, 80 bp, synthetic construct
  source 1..80: mol_type = other DNA
ctccaatctcttgtcatatataagatggtagagatgagaagaaggtagctcctttacagcccactatttccactaactac

SEQ ID NO: 14193 - DNA, 80 bp, synthetic construct
  source 1..80: mol_type = other DNA
tgaagtaagtcaaatttggtttagagggtcaaaactgagttgtgtattgatgaatagcaaggtcctgctacaagccaaac

SEQ ID NO: 14194 - DNA, 80 bp, synthetic construct
  source 1..80: mol_type = other DNA
aaggaaaaaaaaaatctcccactcatcgatacactccacagaggcagcatactctcccagtgtagctttctcttttcatg

SEQ ID NO: 14195 - DNA, 80 bp, synthetic construct
  source 1..80: mol_type = other DNA
ctttcattcctcttggcccaatctctctccactacttcctgcctacatgtatgtaggttattcatttccctctcttgatt

SEQ ID NO: 14196 - DNA, 80 bp, synthetic construct
  source 1..80: mol_type = other DNA
acaaacagccctgtggaactgagagagcccaacgtcctcatctgtttcatagacaagttcaccccaccagtggtcaatgt

SEQ ID NO: 14197 - DNA, 80 bp, synthetic construct
  source 1..80: mol_type = other DNA
ttgatcacggctccagtcttagaaatcatctccagtacctaaaaccattgtttcacattagaatactgagtctagggatc

SEQ ID NO: 14198 - DNA, 80 bp, synthetic construct
  source 1..80: mol_type = other DNA
tctgaacacaataaactattttgatgatcttgggtggaatttttggtgtttaagccagttctttgggtggcggtgggggg

SEQ ID NO: 14199 - DNA, 80 bp, synthetic construct
  source 1..80: mol_type = other DNA
atagagtgatgataaaaatctaagagaagctaaacaaaacaaggataaaccaaagcatcatgaccttctaagccttacta

SEQ ID NO: 14200 - DNA, 80 bp, synthetic construct
  source 1..80: mol_type = other DNA
aagctaacagaaaaattgcagaaattgtatacagagctcccccacccccagtttctacaatgcttaacatcctgtattaa

SEQ ID NO: 14201 - DNA, 80 bp, synthetic construct
  source 1..80: mol_type = other DNA
attctgcatacgccttcacccagtttctccaaatgtttatattttaagtaattatagcacagtagcaaaaccaagaaaat

SEQ ID NO: 14202 - DNA, 80 bp, synthetic construct
  source 1..80: mol_type = other DNA
agagcaagatcctgtctccaaaaggaaggaagggagggaagaagcaaggaaggaaggaaggaaggaaggaaggaaggaag

SEQ ID NO: 14203 - DNA, 80 bp, synthetic construct
  source 1..80: mol_type = other DNA
gttctttgagcagtggtttgtagttttccttgtagagatctttctcctccctagttagctgtattcctaggtatttcgtg

SEQ ID NO: 14204 - DNA, 80 bp, synthetic construct
  source 1..80: mol_type = other DNA
ggggttttttttgtttggtagtctacttattactgatttaatttctgagatcattatcagtctgttcagggattgaattt

SEQ ID NO: 14205 - DNA, 80 bp, synthetic construct
  source 1..80: mol_type = other DNA
attatcagtgagttgttaacatctccaagtattattgtgttggagtctaagtctctttgaaggtccctaagaacttgctt

SEQ ID NO: 14206 - DNA, 80 bp, synthetic construct
  source 1..80: mol_type = other DNA
aaattcaagctggctgcagaaatttcatgggtaacgaggagctgaatgttaattattaagacaatggggaaaatgtctcc

SEQ ID NO: 14207 - DNA, 80 bp, synthetic construct
  source 1..80: mol_type = other DNA
ccacaggggcggagctgctcaagaccaggggaacccacctcttgtatcagtgtgacctggatgtgagatatggaatcaaa

SEQ ID NO: 14208 - DNA, 80 bp, synthetic construct
  source 1..80: mol_type = other DNA
acctggtcctattcctattaaaattattccaaaaaaattgaggagaagggattactccccaattcattctgaggccagca

SEQ ID NO: 14209 - DNA, 80 bp, synthetic construct
  source 1..80: mol_type = other DNA
caggcacatgccaccacgcctggcctttttttttttttttagtagagaccaggtttcatcatgttagccaggatggtgtt

SEQ ID NO: 14210 - DNA, 80 bp, synthetic construct
  source 1..80: mol_type = other DNA
aaaggactcctcattcaataaacagtgctgtactaactggctagccatatgcagaagactgaagctggactcctacctta

SEQ ID NO: 14211 - DNA, 80 bp, synthetic construct
  source 1..80: mol_type = other DNA
agagatatgcaagtcaaaatcacaataagataccatctcataccagtgtgaatggctactattaaaaagtcaaaaaataa

SEQ ID NO: 14212 - DNA, 80 bp, synthetic construct
  source 1..80: mol_type = other DNA
gcttttattcccttatttggccctgtccacatcctgctgattggtccattttacagagtgctgattggcacgtttacaaa

SEQ ID NO: 14213 - DNA, 80 bp, synthetic construct
  source 1..80: mol_type = other DNA
cctcccacagcagacacacagacaaatccccactctacactcacctacctgagccctcctaattccttctggctcacaat

SEQ ID NO: 14214 - DNA, 80 bp, synthetic construct
  source 1..80: mol_type = other DNA
gagaagtgaaattgatggcaaaaaaccaaacacgcaacaccttatacaggaacgaaaaatgttaagagaagtgtggagtt

SEQ ID NO: 14215 - DNA, 80 bp, synthetic construct
  source 1..80: mol_type = other DNA
ggtttgctgcagctatcaacccattacctaggtattaagcccagcacgcattagctcttttccctaatgttctccccagc

SEQ ID NO: 14216 - DNA, 80 bp, synthetic construct
  source 1..80: mol_type = other DNA
cgctattaattatggaatatttgagatttacactgaaaactctgccaatattctatctatttaaaatcttggtcctacat

SEQ ID NO: 14217 - DNA, 80 bp, synthetic construct
  source 1..80: mol_type = other DNA
aaaaataaaaatatgtgaagttgccgtcactgtagcttgcatagttagcactgcagtctatgctcatgtgccaagcttag

SEQ ID NO: 14218 - DNA, 80 bp, synthetic construct
  source 1..80: mol_type = other DNA
ctggtaattagtcactgcaaaatattacaatactccacgctaatacagaccagatttgctttgtttattactccattctc

SEQ ID NO: 14219 - DNA, 80 bp, synthetic construct
  source 1..80: mol_type = other DNA
agtctgttcactttatctggatctgtctttgtcactactacactacatgaagccaaaaatttgtcttccctggagaattc

SEQ ID NO: 14220 - DNA, 80 bp, synthetic construct
  source 1..80: mol_type = other DNA
ctgacttcccgcaacataatattaatggactctccttgtaacctcccaggagcttccaatatgtttaaataaaacttaat

SEQ ID NO: 14221 - DNA, 80 bp, synthetic construct
  source 1..80: mol_type = other DNA
gcctggccaacatggtgaaaccccgtctctactaaaaatacaaaaattacctgggaggtggaggttgcagtgagctgaga

SEQ ID NO: 14222 - DNA, 80 bp, synthetic construct
  source 1..80: mol_type = other DNA
gtctgttcatatccttcacccacatgttgcttcggttgtttgtttttttcttgtaaatttgtttgagttttttgtagttt

SEQ ID NO: 14223 - DNA, 80 bp, synthetic construct
  source 1..80: mol_type = other DNA
ctgtgaagaaagtcattggtagcttgatgaggatggcattgaatctataaattaccttgggcagtatggccattttcatg

SEQ ID NO: 14224 - DNA, 80 bp, synthetic construct
  source 1..80: mol_type = other DNA
gataatcatgtggtttttgtcgttggttctgtttatgtgctggattacctttattgattagcatttgttgaaccagcctt

SEQ ID NO: 14225 - DNA, 80 bp, synthetic construct
  source 1..80: mol_type = other DNA
aaccatccagtagtgtctcacatctatttaaataaaattcaggctgggtacggagactaatgactgtaatcccagcagtt

SEQ ID NO: 14226 - DNA, 80 bp, synthetic construct
  source 1..80: mol_type = other DNA
tagaccccttctcctcccggtgtgaaatacaggcaaagttcttctttctcctccttctagttgtaagaattcacagataa

SEQ ID NO: 14227 - DNA, 80 bp, synthetic construct
  source 1..80: mol_type = other DNA
gtcagagaacctacatacactacagggatataggctttataaacattggagttagaaagaaaaagaaaggagataatggg

SEQ ID NO: 14228 - DNA, 80 bp, synthetic construct
  source 1..80: mol_type = other DNA
ttaaattagtacttgaaagatttgatccagttgcatgtaaaacactttaattgggtccgattgtgagccagctctgtgct

SEQ ID NO: 14229 - DNA, 80 bp, synthetic construct
  source 1..80: mol_type = other DNA
tcttggttcccattatgatttcctcatttgattgaggctatagcactttatattatgtttctcttgttttatcataaggg

SEQ ID NO: 14230 - DNA, 80 bp, synthetic construct
  source 1..80: mol_type = other DNA
gctgacataacgtaggactgttaagcatgccttgggataaaactctccattgatagcaagaaacaggttctttttgatta

SEQ ID NO: 14231 - DNA, 80 bp, synthetic construct
  source 1..80: mol_type = other DNA
agttgtgctctcaaaccctttatttcctcgtttctcctttcgtggagaaggatttaatttgcagggaataagcaacgacc

SEQ ID NO: 14232 - DNA, 80 bp, synthetic construct
  source 1..80: mol_type = other DNA
ttataacattttcccattttagggtttgacccttggttccttttagatttgtcaactgctaaattagccattgcctgcac

SEQ ID NO: 14233 - DNA, 80 bp, synthetic construct
  source 1..80: mol_type = other DNA
aactccaagtggagaaaatggaaggatcaactttgagacctttttactgagcccgttttaatccttctgctctgtcccaa

SEQ ID NO: 14234 - DNA, 80 bp, synthetic construct
  source 1..80: mol_type = other DNA
gtcatgattctccagcctctggctctctacactgaatggattcaacaagaaagtggttgaatttatgcaactgtctagtt

SEQ ID NO: 14235 - DNA, 80 bp, synthetic construct
  source 1..80: mol_type = other DNA
atatcatttatcttccatagcatcttctttcttaatttctgtgccactggtccactaattatctgtagtaatgaatcaca

SEQ ID NO: 14236 - DNA, 80 bp, synthetic construct
  source 1..80: mol_type = other DNA
catttaataatagcatcatcttcacaggattatttttaagtgtaaaattaaataatgacttcttagcactgatcacataa

SEQ ID NO: 14237 - DNA, 80 bp, synthetic construct
  source 1..80: mol_type = other DNA
ctcacattctcacttcacccactttgtgatactcattggcttctcccttcttcttgaaaaaaatctattttccttgactt

SEQ ID NO: 14238 - DNA, 80 bp, synthetic construct
  source 1..80: mol_type = other DNA
cttatgtgccttagtgtttccaggagcaggattctcaccatgctgcaataaaaatgcgcatttgactttgtactcagaat

SEQ ID NO: 14239 - DNA, 80 bp, synthetic construct
  source 1..80: mol_type = other DNA
tcccggccctccccgcaggcaacaggatccaggcctctctacactccactccctcaaggctgagaaggccctcctgtcca

SEQ ID NO: 14240 - DNA, 80 bp, synthetic construct
  source 1..80: mol_type = other DNA
ttagccaggcgtggtggtgtgtgtctgtaattccatctactcaggaggctgaggtgtgaggatcacatgagcctgggacg

SEQ ID NO: 14241 - DNA, 80 bp, synthetic construct
  source 1..80: mol_type = other DNA
tctgtgtaaactttacatcaagacctgaagggaactctacaacaaataggaattaagagaccaataactcttatgaggta

SEQ ID NO: 14242 - DNA, 80 bp, synthetic construct
  source 1..80: mol_type = other DNA
tgaatatactataccattttgatggttctttggtgaattttctggtgtttgagctggttatttgcagtgaggggagcagg

SEQ ID NO: 14243 - DNA, 80 bp, synthetic construct
  source 1..80: mol_type = other DNA
attgggttggtctctttctgatcatgtgcaagcagttctgttgctgtgttctcatcctctggaggaaaaagctaaagcag

SEQ ID NO: 14244 - DNA, 80 bp, synthetic construct
  source 1..80: mol_type = other DNA
gacttactaataaataacaaatttctgtacctatggtttacagaatccaagcagaatttctagaatattacagatagaat

SEQ ID NO: 14245 - DNA, 80 bp, synthetic construct
  source 1..80: mol_type = other DNA
actgaagcccttgtgtgcaagacctagactgaacctggtgttttagtaacaaaagtatcctatgaagtagtttcactgac

SEQ ID NO: 14246 - DNA, 80 bp, synthetic construct
  source 1..80: mol_type = other DNA
tttcacactgacttctgaatagaattaaattcaaaagaaatccctaaatttctatgcctaagtaacaaaataaccagaga

SEQ ID NO: 14247 - DNA, 80 bp, synthetic construct
  source 1..80: mol_type = other DNA
gagctggaactcagcagatcgtcacttccagaccatgagatgccagtccccatcattgattatgattgtttccttattgt

SEQ ID NO: 14248 - DNA, 80 bp, synthetic construct
  source 1..80: mol_type = other DNA
tttaaaaactttttacttggaaatcattatagagtcacaggaaattgcaaagacagtacagagaacatatgcttaccctt

SEQ ID NO: 14249 - DNA, 80 bp, synthetic construct
  source 1..80: mol_type = other DNA
gtgagtgtaacggttcttttttttttttttcatacagagtctccctctgtcacccaggctggagtgcagtggtgccatct

SEQ ID NO: 14250 - DNA, 80 bp, synthetic construct
  source 1..80: mol_type = other DNA
agccctggcactccagcagcccagagggagctcatccctcaatcatgcccagcagacgccggctggccgctctgagtgca

SEQ ID NO: 14251 - DNA, 80 bp, synthetic construct
  source 1..80: mol_type = other DNA
gctgcgttggtgagtgcaactattccgatcagcagggtccagggaccattgtgggttcttgtgcaagaggtgtttctgct

SEQ ID NO: 14252 - DNA, 80 bp, synthetic construct
  source 1..80: mol_type = other DNA
ggtcagcaagcagtccccagtatggatccccactgcaacctcaactcagatcattgggactggagtcgcaaacatctgtt

SEQ ID NO: 14253 - DNA, 80 bp, synthetic construct
  source 1..80: mol_type = other DNA
tggaaagaaagagagttcctaacctctgggggaacccccattaaatatcacaaggaaaccgtggagttattgcacgcagt

SEQ ID NO: 14254 - DNA, 80 bp, synthetic construct
  source 1..80: mol_type = other DNA
ccaaccagatctagggggaactcccctcaggacaggaccatagatggttcctcccaggcaattaagtataaagacacaat

SEQ ID NO: 14255 - DNA, 80 bp, synthetic construct
  source 1..80: mol_type = other DNA
aacttctactgaggacccctggaccaacccactggccctttcactggcctaaagagttcctctctggaggacactacaac

SEQ ID NO: 14256 - DNA, 80 bp, synthetic construct
  source 1..80: mol_type = other DNA
tgtccttgagatccatccaagatgttgcgtgtatcaacaatttgctcttttttattgctaaggaatactctatcagacgg

SEQ ID NO: 14257 - DNA, 80 bp, synthetic construct
  source 1..80: mol_type = other DNA
acatgtagacatgatttaattggggtaagtgttttcacaagatgagagaatttgttaagtttctttcttgcttctttttc

SEQ ID NO: 14258 - DNA, 80 bp, synthetic construct
  source 1..80: mol_type = other DNA
ggattacaggtgtgagccaccaagcccagcctcatgttgtatttttaatatttgttttgatttctttgttactgtatatt

SEQ ID NO: 14259 - DNA, 80 bp, synthetic construct
  source 1..80: mol_type = other DNA
ttgcgttaattctaccgaaatgtttggtagatttctcccatgaaactattctggcctagagatttctccttcagcagtct

SEQ ID NO: 14260 - DNA, 80 bp, synthetic construct
  source 1..80: mol_type = other DNA
tctatatgtttggagttgtaccaattttcttcatgttattgatttctgcttcaactccattgcttccacagaactcagtc

SEQ ID NO: 14261 - DNA, 80 bp, synthetic construct
  source 1..80: mol_type = other DNA
ccctttctattccttcatttataatgtatatcttttattttctctacctgcatcaaaaaccacatctgacaatgttgtaa

SEQ ID NO: 14262 - DNA, 80 bp, synthetic construct
  source 1..80: mol_type = other DNA
tcttccttcaaactctctttgggcttcacccatttgtcatctctctctaagatgccagtgacacaaatttcatatctttc

SEQ ID NO: 14263 - DNA, 80 bp, synthetic construct
  source 1..80: mol_type = other DNA
cttgtgatagttcgctgagaatgatggtttccagcttcatccatgtccctgcaaagaggagctggtaccattccttctga

SEQ ID NO: 14264 - DNA, 80 bp, synthetic construct
  source 1..80: mol_type = other DNA
aaaaataataagaactatttatgacaaacccactgcgaatatcgtactgaatgggcaaaaactggaagcattccctttga

SEQ ID NO: 14265 - DNA, 80 bp, synthetic construct
  source 1..80: mol_type = other DNA
aactggatcccttcattacaccttatacaaaaattaattcaagatggattaaaggcttaaatgttagacttaaaaccata

SEQ ID NO: 14266 - DNA, 80 bp, synthetic construct
  source 1..80: mol_type = other DNA
ttaattaataaaataaacactaaaaatgctgtctccttcatatctggagtagtagaggagttaggcaatgaaaatggcaa

SEQ ID NO: 14267 - DNA, 80 bp, synthetic construct
  source 1..80: mol_type = other DNA
tgacatattatccttttataaaataagtatttaaaactaaatatttttctttaaggactcctgtggttgcatatcaaaaa

SEQ ID NO: 14268 - DNA, 80 bp, synthetic construct
  source 1..80: mol_type = other DNA
gtaacagtgacaattcttgcaattttctacctcctaactggcattatggtttatgattttttccaatccatgttgatagt

SEQ ID NO: 14269 - DNA, 80 bp, synthetic construct
  source 1..80: mol_type = other DNA
ccctcctttgaagcattggaatgtggacagatgtacagactcctagttaagcctgctcctgctagctactctctgataag

SEQ ID NO: 14270 - DNA, 80 bp, synthetic construct
  source 1..80: mol_type = other DNA
ctttcttttcttttcatttattttcttttttcatttgtgtaaatttataaggtacaagtgtatttttgttaatatgcgta

SEQ ID NO: 14271 - DNA, 80 bp, synthetic construct
  source 1..80: mol_type = other DNA
aatgtatagtatgttttaccatcttacagagctagtcattccttactctactttttttcaaaaatttccctggaaaatga

SEQ ID NO: 14272 - DNA, 80 bp, synthetic construct
  source 1..80: mol_type = other DNA
ggctatgtgagatcatgggttaaaaaaaaataaagcctgctagatgggatttcctgctattagcagcagaaggcattttc

SEQ ID NO: 14273 - DNA, 80 bp, synthetic construct
  source 1..80: mol_type = other DNA
tatggatacgcagtatttagaataggttaaggaagagttctgattgacttgctagctggtttctcatctcatgttggcca

SEQ ID NO: 14274 - DNA, 80 bp, synthetic construct
  source 1..80: mol_type = other DNA
ctaggaaaactgaatctgtttctaaaagaggattaaaaggtattacctgttgggtgaagtccagagtgccctgggaaaaa

SEQ ID NO: 14275 - DNA, 80 bp, synthetic construct
  source 1..80: mol_type = other DNA
gaggttaaatagtttgtctagagtgacagagctaataaaaggcagagctgatattggactcccctcatgtcaggaaggcc

SEQ ID NO: 14276 - DNA, 80 bp, synthetic construct
  source 1..80: mol_type = other DNA
gcattgtcaaagtgtttacaagtctttgaaagtacagagtgtagtaattaaaactgatacctgagccaggttgcctggct

SEQ ID NO: 14277 - DNA, 80 bp, synthetic construct
  source 1..80: mol_type = other DNA
aaatgtggaatcaaatatcaataaagtgttaataatcttacagtacaaagaacccacaaaatcactgagaaaaatactaa

SEQ ID NO: 14278 - DNA, 80 bp, synthetic construct
  source 1..80: mol_type = other DNA
tcaccaaccccgtagttgtgtctgcagtaggtgtccaccgcggcgcgcctgtcttccaggaagtccttctggctgttcca

SEQ ID NO: 14279 - DNA, 80 bp, synthetic construct
  source 1..80: mol_type = other DNA
ctgtgtctgtttgggcaaaacgggggaagcacatttcaggtttaggaaataccatgcacaaaagcttgaattgatgaact

SEQ ID NO: 14280 - DNA, 80 bp, synthetic construct
  source 1..80: mol_type = other DNA
ggttctctagcagtgtccctggcttctactcattaaatatcagaagaaacccctgtggtgacaaccaaaaattgctcaaa

SEQ ID NO: 14281 - DNA, 80 bp, synthetic construct
  source 1..80: mol_type = other DNA
ggatttccaataaattgtggtcgtgtgtctgaaattcagatttaactaggaacctgtttgttatctgacaaccctagcca

SEQ ID NO: 14282 - DNA, 80 bp, synthetic construct
  source 1..80: mol_type = other DNA
taggcctggtacacagtcactgcaaaatgttacatggcatatactgatggagaccagattcattttattcatcactccat

SEQ ID NO: 14283 - DNA, 80 bp, synthetic construct
  source 1..80: mol_type = other DNA
cttaaacaaaacttttatttccaaccacccacttcaaatcatttcctcccacagttttccctatctcaataaacaccacc

SEQ ID NO: 14284 - DNA, 80 bp, synthetic construct
  source 1..80: mol_type = other DNA
cagcctgggcaacaagaatgaaactccctctcaaaaataaataagataaataaataaattaataaaataaaataaaattc

SEQ ID NO: 14285 - DNA, 80 bp, synthetic construct
  source 1..80: mol_type = other DNA
gccaaggcaggaggattgtttgagtccaggagtttaagaccaccctgggcaacatggcagaaatctcatctccaacaaaa

SEQ ID NO: 14286 - DNA, 80 bp, synthetic construct
  source 1..80: mol_type = other DNA
gtgctgtatggggaatttattttagcatccttatttctaaatcctctaaagaccctgaggacatgtgatgaaaaggtttc

SEQ ID NO: 14287 - DNA, 80 bp, synthetic construct
  source 1..80: mol_type = other DNA
ttgtagatttgggaaaattatttcatgtctcacagttgaaatgaaggcactgcaatctttcaggtctttcaatactggac

SEQ ID NO: 14288 - DNA, 80 bp, synthetic construct
  source 1..80: mol_type = other DNA
ctgcctgccttggcctccccaactgctggggctacaggcatgagccatcgtgcctggccacaattctgttttaaaataat

SEQ ID NO: 14289 - DNA, 80 bp, synthetic construct
  source 1..80: mol_type = other DNA
tcttctgccttgggatgctgttaatctataaccttactcccaaccccgtgctctctgaaacatgtgctgtgtccactaag

SEQ ID NO: 14290 - DNA, 80 bp, synthetic construct
  source 1..80: mol_type = other DNA
acgatggagatgaaacaacttttgcaaagatacaaagctagtaaatggcatactatagattgaaccaaattacatgcccc

SEQ ID NO: 14291 - DNA, 80 bp, synthetic construct
  source 1..80: mol_type = other DNA
gagctgtccagagtggccggctgcagcgggaaattgcaagcggtggtggcaggaacgactgcgggaaccgtggccatggt

SEQ ID NO: 14292 - DNA, 80 bp, synthetic construct
  source 1..80: mol_type = other DNA
tgagcagcctaggtgccatggacggggttgggaggcagacagtctcctgggcagaagggggcaggtccctggtgaagccc

SEQ ID NO: 14293 - DNA, 80 bp, synthetic construct
  source 1..80: mol_type = other DNA
tatccaccatttagtggaactgacccaagagtcccataggcagttttttttttttttaaataaacatagaaatggacact

SEQ ID NO: 14294 - DNA, 80 bp, synthetic construct
  source 1..80: mol_type = other DNA
gtgtggacagaagttttccacgtatttgggcaaatacttaggattgcaattgctgaatcttatggtagagtatgtttcgc

SEQ ID NO: 14295 - DNA, 80 bp, synthetic construct
  source 1..80: mol_type = other DNA
gttcctacatacctccttccctaaaatggccctctgttcagtttattttactattaacatccatacaactaataccccta

SEQ ID NO: 14296 - DNA, 80 bp, synthetic construct
  source 1..80: mol_type = other DNA
cctaaagagttcccctctggaggacactacaactgcatggccccttcttcgcccctatccatcaggaagtagctagagtg

SEQ ID NO: 14297 - DNA, 80 bp, synthetic construct
  source 1..80: mol_type = other DNA
tttagctttattagaagttgtgtagtgctattagaccaagttcttaatttgcatttccctgatggctgctgatttgcatg

SEQ ID NO: 14298 - DNA, 80 bp, synthetic construct
  source 1..80: mol_type = other DNA
gaatttccactttctcctggaccattgtttgaaaagactgtagcctatattacctccattgaattattttgcatctttgt

SEQ ID NO: 14299 - DNA, 80 bp, synthetic construct
  source 1..80: mol_type = other DNA
tgtcttcccttctcttctgctttctggaggaaattttgcagacttgtgttaattctactgaaatgtttggtagatttctc

SEQ ID NO: 14300 - DNA, 80 bp, synthetic construct
  source 1..80: mol_type = other DNA
ctttttattttccttaagacatctttttttttgagatggagtcttgcactgtcgcccaggctggagtgcagtggcatgat

SEQ ID NO: 14301 - DNA, 80 bp, synthetic construct
  source 1..80: mol_type = other DNA
gtttccatgtgtttggaattatactgattttcttcatgttactgatttctggttcagctccgttgcttccagggagcaca

SEQ ID NO: 14302 - DNA, 80 bp, synthetic construct
  source 1..80: mol_type = other DNA
aaagaaaagtctgttgtcaaagaaagcagaaatggctataatatcagataacaaaatgcacagagcaaagaatattctga

SEQ ID NO: 14303 - DNA, 80 bp, synthetic construct
  source 1..80: mol_type = other DNA
ttaacattactttcagccattaaaatatctggtggcacttctctctggtctgcatgatttctaatgaggaatacactgtc

SEQ ID NO: 14304 - DNA, 80 bp, synthetic construct
  source 1..80: mol_type = other DNA
gtctccttcatatctggagtactagaggagttaggcaaagaaaacggcaagaaaaataaataaaagataattgcatccag

SEQ ID NO: 14305 - DNA, 80 bp, synthetic construct
  source 1..80: mol_type = other DNA
gcttccacagtatggaaacggaccagagcaggttgccaaggctggcttgggcagcctgcttttattctcttgtgtggccc

SEQ ID NO: 14306 - DNA, 80 bp, synthetic construct
  source 1..80: mol_type = other DNA
catcttagctgtaatccatgggttctcactcagttcacaggagatctggttgtttaaaggagtgcgactcttccccactt

SEQ ID NO: 14307 - DNA, 80 bp, synthetic construct
  source 1..80: mol_type = other DNA
aggtgtgagccaccacacctagcgacgatgtcttattttttaaaaaaagaattattttaacaggtttattgaagcataat

SEQ ID NO: 14308 - DNA, 80 bp, synthetic construct
  source 1..80: mol_type = other DNA
ctcccagcagcactacgtaagagttaagtctgtttgtcttcaaacataattgtaatgttgatgatactattagaaataac

SEQ ID NO: 14309 - DNA, 80 bp, synthetic construct
  source 1..80: mol_type = other DNA
tgaattgaggatgcctgtcaggaatctctaggccttcatgtgaaatttaactacaaatactaacaacctaataataccac

SEQ ID NO: 14310 - DNA, 80 bp, synthetic construct
  source 1..80: mol_type = other DNA
actttgaagtaaacttttgaattgattatgtactttcagatttgacatatttgatgctgactctcagatagaatacaatg

SEQ ID NO: 14311 - DNA, 80 bp, synthetic construct
  source 1..80: mol_type = other DNA
aaattgttttcagacctggctttactaaaagcttcttttccctgctttcaacgactcagatgagagcactgcaggaagaa

SEQ ID NO: 14312 - DNA, 80 bp, synthetic construct
  source 1..80: mol_type = other DNA
taacctctttaattgagactctaagattcagagctttcaaaatggggaagaaggctacctcctgtaagaactaaaataac

SEQ ID NO: 14313 - DNA, 80 bp, synthetic construct
  source 1..80: mol_type = other DNA
tggactaggagaaaaaaaggtagagagaatgaatcaggaagttagagtctcgttgttcagctgtttgtatgcttctctgt

SEQ ID NO: 14314 - DNA, 80 bp, synthetic construct
  source 1..80: mol_type = other DNA
tttaagctcctagaaaggcatgagtcctaaagcagtgagaaggattaaggaaggccattttaatattgaaagttcttata

SEQ ID NO: 14315 - DNA, 80 bp, synthetic construct
  source 1..80: mol_type = other DNA
catacattttcaacttttggtgaatgtcataataaaggtcaacaaaagggaaagtgaggtaagttgtgtcacaactatca

SEQ ID NO: 14316 - DNA, 80 bp, synthetic construct
  source 1..80: mol_type = other DNA
ggttctcctcccgtttatggatgtatctgttcaggtactgcacccgcttcatcccattgaagatatgacactcacactta

SEQ ID NO: 14317 - DNA, 80 bp, synthetic construct
  source 1..80: mol_type = other DNA
cactaaagcagagagactgaagggaaagagggtaaaatattagcctggagacatcataagaagccaggtgtttaaaagcc

SEQ ID NO: 14318 - DNA, 80 bp, synthetic construct
  source 1..80: mol_type = other DNA
tgaattggtgacaattctccagcctctggctctctatatttccctctttctgtttatgtattaattgaaagaatgtaagg

SEQ ID NO: 14319 - DNA, 80 bp, synthetic construct
  source 1..80: mol_type = other DNA
gtggtgatattccttacaaatgtaacattaaaactgtgtcacttactattgctattattggatgatatcccaacccagat

SEQ ID NO: 14320 - DNA, 80 bp, synthetic construct
  source 1..80: mol_type = other DNA
gttgtccgcagtttatgaggtttgatattgccatgactctgattgtccttctctccatcttttcactcaggctcagctgg

SEQ ID NO: 14321 - DNA, 80 bp, synthetic construct
  source 1..80: mol_type = other DNA
taactagttttggttctagggtgcttttaattggagcagtttctacgtgactggctacatttacaacataagctcaatca

SEQ ID NO: 14322 - DNA, 80 bp, synthetic construct
  source 1..80: mol_type = other DNA
tcaaatcatgcagcagtcaccatcttctggacttttttggaataaaaaacattggtgaattccaggggctaactgactcc

SEQ ID NO: 14323 - DNA, 80 bp, synthetic construct
  source 1..80: mol_type = other DNA
tgcctaaaattagtcctatgtatcctgttggtaaaggtccccaaatgccagtgggaactttggtaggtttgtctcctcca

SEQ ID NO: 14324 - DNA, 80 bp, synthetic construct
  source 1..80: mol_type = other DNA
ccaatttaaattccatgtcaggtatgcactaggagacaaacaagtgtgagacaaattctttacatcgaagggtagaaggt

SEQ ID NO: 14325 - DNA, 80 bp, synthetic construct
  source 1..80: mol_type = other DNA
cattcatcttgtcaatttcaattcctctgctccagcagaccttctttgttcacattctcatgtccctgtgtttagaaacc

SEQ ID NO: 14326 - DNA, 80 bp, synthetic construct
  source 1..80: mol_type = other DNA
aacaaaacaaaaagaggtaagtctacacttttcagaaagagcacagtgtgaaccagtgctctcagcctcagcactactga

SEQ ID NO: 14327 - DNA, 80 bp, synthetic construct
  source 1..80: mol_type = other DNA
ggtttggcaaacaaaccagaggatgcccacttaaatttggatttccagtaaattacggtgtgtatctgaaattcagattt

SEQ ID NO: 14328 - DNA, 80 bp, synthetic construct
  source 1..80: mol_type = other DNA
gaaaatgataggcctggtacacagtcactgcaaaatgttatatggcatgtactgatggagaccagattcattttattcat

SEQ ID NO: 14329 - DNA, 80 bp, synthetic construct
  source 1..80: mol_type = other DNA
tcccctttacagtaatccattaacaagctgagcaaaatacatgccgagtctgtccacttcatctttttcactgtctttat

SEQ ID NO: 14330 - DNA, 80 bp, synthetic construct
  source 1..80: mol_type = other DNA
gccaaaaatacaaaaaattagccaggcgttggggtgtgtgtctgtaattccagctactcaggaggctgaggtgtgatgat

SEQ ID NO: 14331 - DNA, 80 bp, synthetic construct
  source 1..80: mol_type = other DNA
ttgatgagacctgtgtaaactttacttcaagacctgaagggaactctacaacaaataggaattaagagaccaataactct

SEQ ID NO: 14332 - DNA, 80 bp, synthetic construct
  source 1..80: mol_type = other DNA
aggaccccctttccttcccccatgattgttattttcctgaggccctcaccagaagcaattgccagcaccacacctcctgt

SEQ ID NO: 14333 - DNA, 80 bp, synthetic construct
  source 1..80: mol_type = other DNA
gacaactcagctggtttatccttactccctcacaatctccctttctcagccaggctcaatcttcttcccatgttaagatt

SEQ ID NO: 14334 - DNA, 80 bp, synthetic construct
  source 1..80: mol_type = other DNA
tgggagagtctattcccttagaatcttctaaatccttgaggttaaaacaaactattgtacttgccaattttggagtagga

SEQ ID NO: 14335 - DNA, 80 bp, synthetic construct
  source 1..80: mol_type = other DNA
tttgccttgggaaaactaccctcatgtttatggtatctcccctgccagataagtctatttttgtccccttttattgttga

SEQ ID NO: 14336 - DNA, 80 bp, synthetic construct
  source 1..80: mol_type = other DNA
catgtggaagttaactcaaatacttacaacctgatagtaccacaatctatcatttccctacccggaaatcaatctctgct

SEQ ID NO: 14337 - DNA, 80 bp, synthetic construct
  source 1..80: mol_type = other DNA
aacggagaactctccatcttctaaatgtgtctttctctgaaatctgtacaagtcctttgataacactgtattattgaagt

SEQ ID NO: 14338 - DNA, 80 bp, synthetic construct
  source 1..80: mol_type = other DNA
gcacaccttttctaagtggagaggaggaattttggtgtaaattgcctgatcagaaatttggatccaaagtctttcctatt

SEQ ID NO: 14339 - DNA, 80 bp, synthetic construct
  source 1..80: mol_type = other DNA
aactgtgtctgtttctaaaagaggattaaaaggtattacctgttggctgaagtccagagtgtcctgggaaaaagaggaaa

SEQ ID NO: 14340 - DNA, 80 bp, synthetic construct
  source 1..80: mol_type = other DNA
tgatccacagaaagcctgagactcaatgaggataagtagtttgtctagagtgacaaagctaataaaaagcagggctgaga

SEQ ID NO: 14341 - DNA, 80 bp, synthetic construct
  source 1..80: mol_type = other DNA
gtctgccttttactggttgatcctggaagagttttttgattcttctgtgtctcaactttgtcacctacaatgaaggataa

SEQ ID NO: 14342 - DNA, 80 bp, synthetic construct
  source 1..80: mol_type = other DNA
caaagaacgcagaaagtcactgagaaaaatactaagccctcaagatattagaccgtagatcattgtccattacctaccaa

SEQ ID NO: 14343 - DNA, 80 bp, synthetic construct
  source 1..80: mol_type = other DNA
cacacacacactcagattcccagctcacggggactcaggccccgcccgcggccatgctcacctcgccgctgcactgtgaa

SEQ ID NO: 14344 - DNA, 80 bp, synthetic construct
  source 1..80: mol_type = other DNA
aattatggttgtgtatctgaaattcagatttcactaggaacctgtattttatttgtaactctagcccaacttgctagtca

SEQ ID NO: 14345 - DNA, 80 bp, synthetic construct
  source 1..80: mol_type = other DNA
ggcgactggattcattttatttatcactccattctcatgacctagagtaataactggtatatgctatgtcactaataaat

SEQ ID NO: 14346 - DNA, 80 bp, synthetic construct
  source 1..80: mol_type = other DNA
gtccactttatctttttcaccatctttatcactaatgcactccatgaagccacaaacctgttttccctgaagaattccct

SEQ ID NO: 14347 - DNA, 80 bp, synthetic construct
  source 1..80: mol_type = other DNA
gtagggacgctctctaacttaatcaaatagaatgatttgaacctagaatggagcccagtaaagagtagctgctgagaaaa

SEQ ID NO: 14348 - DNA, 80 bp, synthetic construct
  source 1..80: mol_type = other DNA
ttaaaaaagattcataatgaacacgaacctgggctagtttttcagaggatgccttaagttctttaggcaccaaagaatac

SEQ ID NO: 14349 - DNA, 80 bp, synthetic construct
  source 1..80: mol_type = other DNA
gccagagaagcaggcaagtctcactcagggagaactatgaacccctccacccacattccaagttatagggaggaagttac

SEQ ID NO: 14350 - DNA, 80 bp, synthetic construct
  source 1..80: mol_type = other DNA
aggactcaaagtcagctgttgacagaacaactctgttttaccataattaatattttatgtcgagtgttcaatccctcatt

SEQ ID NO: 14351 - DNA, 80 bp, synthetic construct
  source 1..80: mol_type = other DNA
taaagggccatagcctcaaacaaatgaggaaatcataattggagccaggaatgagggattgaacactcttcacataaaat

SEQ ID NO: 14352 - DNA, 80 bp, synthetic construct
  source 1..80: mol_type = other DNA
atttgtgctgtgataaaatacggtagactgggtaatttataaagaacacatggaggctgaaaagtccaagattaaggcac

SEQ ID NO: 14353 - DNA, 80 bp, synthetic construct
  source 1..80: mol_type = other DNA
aaacaggaccagtttcttcttagcatggaagatacgtttcctgaacagaaaactgtgccatttaaaggccttattagtat

SEQ ID NO: 14354 - DNA, 80 bp, synthetic construct
  source 1..80: mol_type = other DNA
atgtttcagagagcacagggttgggggtaaggatcccaaggcagaggaatttttcttagcgcagaacaaaatgaaaagtc

SEQ ID NO: 14355 - DNA, 80 bp, synthetic construct
  source 1..80: mol_type = other DNA
ggctgaccccccctacctccctcccggacggggaggctggccgggcggggggctgacccccccacctccctcccggacgg

SEQ ID NO: 14356 - DNA, 80 bp, synthetic construct
  source 1..80: mol_type = other DNA
acggggcggctggccgggcggggggctgacccccccacctccctcccggacggggcggctggccgggcggggggctggcc

SEQ ID NO: 14357 - DNA, 80 bp, synthetic construct
  source 1..80: mol_type = other DNA
gtgtggacagtgaagaaattgatgaacctgttgaactgtaccaacttctcaatctgtcctataaagtgtgtgcctggttt

SEQ ID NO: 14358 - DNA, 80 bp, synthetic construct
  source 1..80: mol_type = other DNA
tttttcacttgtagacttacagccatgacctagatagtgccatggtgcaaagactggctccacccaaagttcctcgatgg

SEQ ID NO: 14359 - DNA, 80 bp, synthetic construct
  source 1..80: mol_type = other DNA
gaagaatgtgtattatatctaaaacatgctaaaaaaattcaccaaagtgctattagaataaatgaatacagtaaagttgc

SEQ ID NO: 14360 - DNA, 80 bp, synthetic construct
  source 1..80: mol_type = other DNA
aagacctgaaactgtaaaaatactagaagaaaacagagagaacctatacaacgttggtctggacaatgatttttatttta

SEQ ID NO: 14361 - DNA, 80 bp, synthetic construct
  source 1..80: mol_type = other DNA
tagctgggcatggcagcatgcacctgtaagccccagctatttgggagtctgaggcaggagaatagcttgaacctgggagg

SEQ ID NO: 14362 - DNA, 80 bp, synthetic construct
  source 1..80: mol_type = other DNA
cagaggctgcagattgggaggaataggaagacattagtcaaagagtataaagtagcagacagacaggaggaataaatgaa

SEQ ID NO: 14363 - DNA, 80 bp, synthetic construct
  source 1..80: mol_type = other DNA
gaagaaacgagaaatgaatctcaagaggtcccgaagcaagtaattgtatgaagtatcaggatccagttttgacaagactg

SEQ ID NO: 14364 - DNA, 80 bp, synthetic construct
  source 1..80: mol_type = other DNA
ttacaacaagaaggaagcatttgtatggatgtgagttccagaggcagtgaaactcaaaacacagaggaagggttatgatt

SEQ ID NO: 14365 - DNA, 80 bp, synthetic construct
  source 1..80: mol_type = other DNA
gagacataatgcctggttttccattcctgtgcctggatagtattaaaagcacaaataaaaagctatcctgctgctatctg

SEQ ID NO: 14366 - DNA, 80 bp, synthetic construct
  source 1..80: mol_type = other DNA
cccagaaagtatcagcctgtcaataaatgctgctgaatcagttgtatatccttactgaaaaaaaaaagaaagaaatttga

SEQ ID NO: 14367 - DNA, 80 bp, synthetic construct
  source 1..80: mol_type = other DNA
acacatatacaacatacactccatacaccagaaactttgtgcactattctctcctcagttcctagaaaaatgcctggttc

SEQ ID NO: 14368 - DNA, 80 bp, synthetic construct
  source 1..80: mol_type = other DNA
tttatgagaggccttagaagctgagcagtctcttcttagaaaggtgatgaactgaaatgtgcaaatgtaaaacaccaaaa

SEQ ID NO: 14369 - DNA, 80 bp, synthetic construct
  source 1..80: mol_type = other DNA
cttttggaggtgatggtagaaacatgggaattatatcctgacttgaaaaagataacgtttattcctttggggtaacatta

SEQ ID NO: 14370 - DNA, 80 bp, synthetic construct
  source 1..80: mol_type = other DNA
cccagtgtagttacaagtctaggaagtaatagttagaatgaagagtttgtatttactgagcactaatattctcataatca

SEQ ID NO: 14371 - DNA, 80 bp, synthetic construct
  source 1..80: mol_type = other DNA
gattttaagaaattgtagtgatttaagagataattatgaggattaaaatcccgttctgcctaaattcaaagcccaggaat

SEQ ID NO: 14372 - DNA, 80 bp, synthetic construct
  source 1..80: mol_type = other DNA
gcgtgagccaccacgcctggcccatctggcacctttttaagtttgataagaaacatttacaatctagtctgtctgaagcc

SEQ ID NO: 14373 - DNA, 80 bp, synthetic construct
  source 1..80: mol_type = other DNA
aaacataagagatcactttttactgcaatacacaatttatgatgattagcatcaggaggcattttacgcacatacttgca

SEQ ID NO: 14374 - DNA, 80 bp, synthetic construct
  source 1..80: mol_type = other DNA
gtagttggaaaagtgtgtcacacctcatgcaggaagttatagacctaagtagggtttattgaagcgtcctataaatctcc

SEQ ID NO: 14375 - DNA, 80 bp, synthetic construct
  source 1..80: mol_type = other DNA
ttgctgagactatgtcccagacaagtgcagttgagaagtgagaggacccttcttctgcccaactcccagttgtggaatgg

SEQ ID NO: 14376 - DNA, 80 bp, synthetic construct
  source 1..80: mol_type = other DNA
ataagaataacaagcacaatgtgggggtagtacccagagtttctataatatagttcctaaaatgttcatttttcaacaaa

SEQ ID NO: 14377 - DNA, 80 bp, synthetic construct
  source 1..80: mol_type = other DNA
ccggatttgtatatgtgttttcttccccaagaaagctataaacagcgaaaattttgctgtaagtttccctgtgtctttct

SEQ ID NO: 14378 - DNA, 80 bp, synthetic construct
  source 1..80: mol_type = other DNA
ctgttttcatacagtggaagtggtgaataagctccctcagcttcttttacaagagtactaattccattaatgaggactct

SEQ ID NO: 14379 - DNA, 80 bp, synthetic construct
  source 1..80: mol_type = other DNA
aggaattgcatctggaaatttagaagctggaattctctaatgatagagactgcctcttaattcttgtgtggccaagacta

SEQ ID NO: 14380 - DNA, 80 bp, synthetic construct
  source 1..80: mol_type = other DNA
atccaaaatataaacacaatttttctctgagttaatctatagaaccaatgcagttctactcaaaatcccaacataatatt

SEQ ID NO: 14381 - DNA, 80 bp, synthetic construct
  source 1..80: mol_type = other DNA
aagcatagcaggtcaatacataatgtgaaaagatttccacccttattagtaatcagataaacacatttcaaatcactagg

SEQ ID NO: 14382 - DNA, 80 bp, synthetic construct
  source 1..80: mol_type = other DNA
caccccttaatttatagatggtaactccaattaccacttcaatgaccccagtgggtcattattgccatagaaagaagtgg

SEQ ID NO: 14383 - DNA, 80 bp, synthetic construct
  source 1..80: mol_type = other DNA
tcattcacagtcagctggattccaatctctgctcaagtgtgagcaatgtagatccagccccctggttaatgtattcatca

SEQ ID NO: 14384 - DNA, 80 bp, synthetic construct
  source 1..80: mol_type = other DNA
tttaaagagtagtagagtgtattatatagcatattatataaagacatgggcctgagttaggcagtctttttgtttgttga

SEQ ID NO: 14385 - DNA, 80 bp, synthetic construct
  source 1..80: mol_type = other DNA
cagccacctatgtggcagaggtcagagtggaagagaggtgcggttaactattccccatataatctttcaattaatctctt

SEQ ID NO: 14386 - DNA, 80 bp, synthetic construct
  source 1..80: mol_type = other DNA
ctgaagaaggaaaaactcagaaaaaaactccagtctgtagttttagagcaacttttgtgtgggaccctcccagactggaa

SEQ ID NO: 14387 - DNA, 80 bp, synthetic construct
  source 1..80: mol_type = other DNA
agaaacacctctagatgaagacagttggatgtgtaagtggccagatccatgtgcaattacttctttagaagaattaagtt

SEQ ID NO: 14388 - DNA, 80 bp, synthetic construct
  source 1..80: mol_type = other DNA
accttttcacaagtgcaaacacattaagatgctgctatttacagttactctttccctgtagacctgtgggcatgagccat

SEQ ID NO: 14389 - DNA, 80 bp, synthetic construct
  source 1..80: mol_type = other DNA
acagtttcaaattatgtactttcctgctgttgggtggagtgttctgtaaatgtaacttagtcaagttacttgatagcatt

SEQ ID NO: 14390 - DNA, 80 bp, synthetic construct
  source 1..80: mol_type = other DNA
taacacacatgacagcctcccacaaaaaaaaaacattatcctctggctcaaaatattaatagttctcaggttgagaaacc

SEQ ID NO: 14391 - DNA, 80 bp, synthetic construct
  source 1..80: mol_type = other DNA
acactgtcttccacaatggttgaactaatttacactcccgccaacagtgtataaacgttcctttttctccacaacctcat

SEQ ID NO: 14392 - DNA, 80 bp, synthetic construct
  source 1..80: mol_type = other DNA
gggcagcacttgcttttaaagcttttattaaaaattatttgtcatttgtttaatgatgaatgctaaggaaaggtatctgt

SEQ ID NO: 14393 - DNA, 80 bp, synthetic construct
  source 1..80: mol_type = other DNA
tatgattgtgagaggccatgtgactggatatcagcatacaggactttgtatcagaatatgagcttggcagtcataagaga

SEQ ID NO: 14394 - DNA, 80 bp, synthetic construct
  source 1..80: mol_type = other DNA
atgcctggagtgctacagggagaaggttaaatgaatgaggaaaaattgataggctttcccagcccaaagcatgatgttat

SEQ ID NO: 14395 - DNA, 80 bp, synthetic construct
  source 1..80: mol_type = other DNA
aaattatgacctgaagacataagcaactggaacaacgttcactgtgttatggccggatgaagcaggaagaggaaagagac

SEQ ID NO: 14396 - DNA, 80 bp, synthetic construct
  source 1..80: mol_type = other DNA
tccttcaactctctgggctttaatgtcctcctcggaaaatgagaacgatattaaaatatgacaagtatatgtaaagagtc

SEQ ID NO: 14397 - DNA, 80 bp, synthetic construct
  source 1..80: mol_type = other DNA
agacatgatgactgagcattcaggtgttctgtctcaatccactgtgctcacagagtacctgtctgattctgatgttctat

SEQ ID NO: 14398 - DNA, 80 bp, synthetic construct
  source 1..80: mol_type = other DNA
gactgccagggagggaaatcaactcagggaaaaattcctggaggttgtaagccagaacatcctgaaggatgccgtataac

SEQ ID NO: 14399 - DNA, 80 bp, synthetic construct
  source 1..80: mol_type = other DNA
tcagtattaagacaattaaaaattatagctgttcctccttcaggaaaccagagccccaacctactctttttgttatctat

SEQ ID NO: 14400 - DNA, 80 bp, synthetic construct
  source 1..80: mol_type = other DNA
tcagaaggctgccgtgggaggaccacttgagtccatgaggcggaagctgcagtgagccatggtggcaccactacactcca

SEQ ID NO: 14401 - DNA, 80 bp, synthetic construct
  source 1..80: mol_type = other DNA
aatctatgtggtcctcgaatatagcaactgtcattcaatacacatgtttgagcacacagtgagctaagttttaaggattc

SEQ ID NO: 14402 - DNA, 80 bp, synthetic construct
  source 1..80: mol_type = other DNA
gatacgatggtaaaaggcttacacatgtcttgacaaaaaagtccagtttggctcatttggctggagtcgtactgcatggc

SEQ ID NO: 14403 - DNA, 80 bp, synthetic construct
  source 1..80: mol_type = other DNA
gtggtgtaaacttgtaccagttttacggtccctctggccagtacacccatgaatttgatggagatgagcagttctacgtg

SEQ ID NO: 14404 - DNA, 80 bp, synthetic construct
  source 1..80: mol_type = other DNA
ttgtctgtcaagttcagaacttcctgccttttactcctatatccaaaaacttgttttccacacttcatgggtttcttttc

SEQ ID NO: 14405 - DNA, 80 bp, synthetic construct
  source 1..80: mol_type = other DNA
ttccttttatgagatctatgtcaaatttttccatctttcatccagggctgactgaaactatggctaataattggggtact

SEQ ID NO: 14406 - DNA, 80 bp, synthetic construct
  source 1..80: mol_type = other DNA
gaggaaatgggtcagcagcgacctcatggctctaaacagctatgaaatccatgaggatatttctaaccatgctacctgca

SEQ ID NO: 14407 - DNA, 80 bp, synthetic construct
  source 1..80: mol_type = other DNA
tgtaagttcataaattatagcaaatgtaccactcagatgggagatgttgctaatgggggaggctatgcatgtgtgggagc

SEQ ID NO: 14408 - DNA, 80 bp, synthetic construct
  source 1..80: mol_type = other DNA
cctactatcaatagggttacagatctacctgcctgatttaaaatcatgcaattcttaaacaattatttgagctatttgaa

SEQ ID NO: 14409 - DNA, 80 bp, synthetic construct
  source 1..80: mol_type = other DNA
aaaataagccagtgtgcacgtatgattaattgggtgggtttacaaaattgcccatgaattgagtattgttaaagctggcc

SEQ ID NO: 14410 - DNA, 80 bp, synthetic construct
  source 1..80: mol_type = other DNA
aaaagaatgaggtaaaacgagaaagtgtcacgcaggaaccaggtataatttgggggcgtttagagatggcttgaagaaat

SEQ ID NO: 14411 - DNA, 80 bp, synthetic construct
  source 1..80: mol_type = other DNA
agcattcctatacagcaataatagacaaaaagagaaccaaatcatgagtgaactcccattctcaattactacaaagagaa

SEQ ID NO: 14412 - DNA, 80 bp, synthetic construct
  source 1..80: mol_type = other DNA
aatctacccatctgacaaagggctaatatccagaacctacaaagaacttaaacaaatttacaagaaaaaacaaacatcat

SEQ ID NO: 14413 - DNA, 80 bp, synthetic construct
  source 1..80: mol_type = other DNA
taaagaattcttttttttttttttgagacagagtctcgctttgttgcccaggctgtagtgcagtggtgcgatcttggctc

SEQ ID NO: 14414 - DNA, 80 bp, synthetic construct
  source 1..80: mol_type = other DNA
ctcaagggttaaagaaacatcataaaatattccagtaagggaaaccaaaatgaaactgacaacagacagaaagtcggact

SEQ ID NO: 14415 - DNA, 80 bp, synthetic construct
  source 1..80: mol_type = other DNA
taacaatgtcaataactttcatcttctaagacggaggaaagagacattgcccatagttaaggaagaagtcacaaagatca

SEQ ID NO: 14416 - DNA, 80 bp, synthetic construct
  source 1..80: mol_type = other DNA
tgcactcccatgttcatcgcagcactactcacaatgggcaagagatggaatcaacctaagtgtccatcagcagatgagtg

SEQ ID NO: 14417 - DNA, 80 bp, synthetic construct
  source 1..80: mol_type = other DNA
atgtattttcaatccacagttgaatgaatcagaggatgtggaacccacagatacagagagccaactgtattgcctatttg

SEQ ID NO: 14418 - DNA, 80 bp, synthetic construct
  source 1..80: mol_type = other DNA
tccaaaagatatactgttattatctaaggtaaggacaaatgctcaggactggtaggtttttctctagaacacctacacac

SEQ ID NO: 14419 - DNA, 80 bp, synthetic construct
  source 1..80: mol_type = other DNA
ccgcaacaatttatacaggatgtacttgtaattctaatgaaattatccattaaagatcatattatccagtgaaatttggg

SEQ ID NO: 14420 - DNA, 80 bp, synthetic construct
  source 1..80: mol_type = other DNA
ttcagactatcacatggggagaaaccttggacaatatccggctttcctaggcagaggtccctgtggacttccgcagtgtt

SEQ ID NO: 14421 - DNA, 80 bp, synthetic construct
  source 1..80: mol_type = other DNA
ctccctcataaccgggaaaagagtgtcatcaggaatcaacaggttacaacgtcaatgacaaagggagctcagacaaggag

SEQ ID NO: 14422 - DNA, 80 bp, synthetic construct
  source 1..80: mol_type = other DNA
ttgatcgatgtgactttccagaatgtttgaaacaccagtgaccaaggatcactatatatgtctccaaacaattctaccat

SEQ ID NO: 14423 - DNA, 80 bp, synthetic construct
  source 1..80: mol_type = other DNA
gctcatgaggacacagaacttcagcttgatgcagatgtgtgggaggtggggaacagctgttattcttctggggaatatga

SEQ ID NO: 14424 - DNA, 80 bp, synthetic construct
  source 1..80: mol_type = other DNA
tgataaggcccagcccaaggaagatcagccccagcacgaagcctccaacgccactcagcatcttgctctgggcagattca

SEQ ID NO: 14425 - DNA, 80 bp, synthetic construct
  source 1..80: mol_type = other DNA
ctccttggaccagagtggaaagatacctggagtcgaagtcttggattaaggttcattcaacaaatataaatttgacaatc

SEQ ID NO: 14426 - DNA, 80 bp, synthetic construct
  source 1..80: mol_type = other DNA
cttgctggcattaggatgtgagtcaaaagaaggcaagggagtgtaaagcaaactaaaagttttgtgaacctgcatagata

SEQ ID NO: 14427 - DNA, 80 bp, synthetic construct
  source 1..80: mol_type = other DNA
cgcctcaaagatctccgccattagtggtagccatttaagaaaacagaattacgatgaataatgatttgaagccaaaaagt

SEQ ID NO: 14428 - DNA, 80 bp, synthetic construct
  source 1..80: mol_type = other DNA
ccagttcccgcccgcccgtgcctggcgctccagacctgggatcctcccggcggctctgcccagctctgcccgccttcttt

SEQ ID NO: 14429 - DNA, 80 bp, synthetic construct
  source 1..80: mol_type = other DNA
tcctaagtccaggcagtcttggggcacgcctaaatgacaaatcctgctgtgtctttggagaaattcatatcttcaaaaat

SEQ ID NO: 14430 - DNA, 80 bp, synthetic construct
  source 1..80: mol_type = other DNA
gctgaagagccttaagtcctggggagaagagcaaagttcttagaaggaaataatggtaagttgcagttccaccactaatg

SEQ ID NO: 14431 - DNA, 80 bp, synthetic construct
  source 1..80: mol_type = other DNA
atctaaaatcagaatataagtttatcagataaaaagaagcagggaagaggcaacagcaagacgtttgcaatagtggcaca

SEQ ID NO: 14432 - DNA, 80 bp, synthetic construct
  source 1..80: mol_type = other DNA
cataggagccattctgtcaccagaaggaccatccaggaccctaccctgcatttacttcaggaatcaagaatcactgtata

SEQ ID NO: 14433 - DNA, 80 bp, synthetic construct
  source 1..80: mol_type = other DNA
gtgtccaagaactcagctcaaggccatggttcatgcaaaacagcaacatcagcagtaatattttggggagagtactctta

SEQ ID NO: 14434 - DNA, 80 bp, synthetic construct
  source 1..80: mol_type = other DNA
ttatctgtttgggaacaaaaggaagacagtattggtgcttcagtcctcaagattaactttcccttggcataatgagtttg

SEQ ID NO: 14435 - DNA, 80 bp, synthetic construct
  source 1..80: mol_type = other DNA
atgtatctttataatagaatgatttatattcctttgggtatatacccaatgatatggtttggctgtgtccccacccaaat

SEQ ID NO: 14436 - DNA, 80 bp, synthetic construct
  source 1..80: mol_type = other DNA
aatccccaagaccatgggaaaatgtctccaggccatgtcagagaccttcacagcagcccctcccatcacggaaccagagg

SEQ ID NO: 14437 - DNA, 80 bp, synthetic construct
  source 1..80: mol_type = other DNA
actgcactccagcctggacgacagagcgagattctgtctcaaaaaataaataaataaaaataaaaataaataaaataata

SEQ ID NO: 14438 - DNA, 80 bp, synthetic construct
  source 1..80: mol_type = other DNA
tgtgattttaatttgcatttctctaatgatcagtgatgttaggcttttttcatatgtttgggtgctacataaatgtcttc

SEQ ID NO: 14439 - DNA, 80 bp, synthetic construct
  source 1..80: mol_type = other DNA
ctctttgaagagggttttccctttccttgttggctgtattcctaggcatttactctttgtagcaattgtgaatgggagtt

SEQ ID NO: 14440 - DNA, 80 bp, synthetic construct
  source 1..80: mol_type = other DNA
tttattatgcctcaattccagaactcgttattcgtctattgagggattcaacttcctggttcaatcttgggaaggtgtat

SEQ ID NO: 14441 - DNA, 80 bp, synthetic construct
  source 1..80: mol_type = other DNA
cccactattattgtgtgagaatctgagtgtctctataggtctctaagaatttgtttcatgaatctgggtgctcttgtgtt

SEQ ID NO: 14442 - DNA, 80 bp, synthetic construct
  source 1..80: mol_type = other DNA
gtatgtttctcaacttaggtaattttccccgtctctttcaggcaccccaatcagtcatagcttcagtctcttttacataa

SEQ ID NO: 14443 - DNA, 80 bp, synthetic construct
  source 1..80: mol_type = other DNA
attggtggagcaggtgcaccgtgctggggggaatccccctcctctggattgccaggctcttcagagccaacaggcaggaa

SEQ ID NO: 14444 - DNA, 80 bp, synthetic construct
  source 1..80: mol_type = other DNA
cttatgagatatactatttgtcaacatcttctttcattctgttgattaccatgtttactctattggcactgtcctgtcgt

SEQ ID NO: 14445 - DNA, 80 bp, synthetic construct
  source 1..80: mol_type = other DNA
tttttctaatggtttggtagttttaagttttacatttaggtttttgattcattttgagttcatattgtctacgatctaag

SEQ ID NO: 14446 - DNA, 80 bp, synthetic construct
  source 1..80: mol_type = other DNA
tatattaatcatagtttatgaagcaggtttactaattaccaaccccaaaggaggacccccactgtgtggagaatagcaaa

SEQ ID NO: 14447 - DNA, 80 bp, synthetic construct
  source 1..80: mol_type = other DNA
gctctgtctgggaaagaagttaaatttgaaggtgtcaggtaagatagaaagaagacaattcaacaaaccacatgactcaa

SEQ ID NO: 14448 - DNA, 80 bp, synthetic construct
  source 1..80: mol_type = other DNA
gttgtctctgtcactcaaacagaaaaacaaactatactaaattcagaggatgaggggaatcaggagcggcttgtgatgga

SEQ ID NO: 14449 - DNA, 80 bp, synthetic construct
  source 1..80: mol_type = other DNA
cactcaaagcaagaagaataataactaagtgaccacaaaggaaatttttttaatcacatgcctggctcttgcaggtggag

SEQ ID NO: 14450 - DNA, 80 bp, synthetic construct
  source 1..80: mol_type = other DNA
atatacggtaataaaacttaagtaaatggggtcccctctctttctcaaaatgtcttactgtactatacacccctattttc

SEQ ID NO: 14451 - DNA, 80 bp, synthetic construct
  source 1..80: mol_type = other DNA
ttatagtgcagtacgtgaaccttaaatgagcaaaatatattgtattagttttctagccactgtcacagaaaattagtaca

SEQ ID NO: 14452 - DNA, 80 bp, synthetic construct
  source 1..80: mol_type = other DNA
cacatagatgagaacatagacaataactttataatatattcaagtctattaggtcaagcttactaattgtgttgtttaga

SEQ ID NO: 14453 - DNA, 80 bp, synthetic construct
  source 1..80: mol_type = other DNA
ctgggtatgctgcctggaaggtggatgtattttgcctcctactttgggatgtgttttcagtctctgttaaggttttggtt

SEQ ID NO: 14454 - DNA, 80 bp, synthetic construct
  source 1..80: mol_type = other DNA
gagatgggagtgtaattttgggcttgtattttcaaacaaaattcatatgacaatgagaattcaaacagtttagattatta

SEQ ID NO: 14455 - DNA, 80 bp, synthetic construct
  source 1..80: mol_type = other DNA
atgacaaaatagagttgtttaccatatgttaaatttaaaaggagttacaaattagcacattcactgtgatctaaaacctc

SEQ ID NO: 14456 - DNA, 80 bp, synthetic construct
  source 1..80: mol_type = other DNA
tttttgaaaagttaaacaaaattgacaaacctttagcaagacaaactaagaaaaaaagagagaagatccagataaataaa

SEQ ID NO: 14457 - DNA, 80 bp, synthetic construct
  source 1..80: mol_type = other DNA
gaaagatataaatggcatccaaatttaaaaggaagaagtcaaattatccttgtttgcagaggatatgctcctatatttat

SEQ ID NO: 14458 - DNA, 80 bp, synthetic construct
  source 1..80: mol_type = other DNA
ctactacaagaaaacattagggaaaatctccaggacattggtctaggcaaaaatttcctgagtgatactctacaaacaca

SEQ ID NO: 14459 - DNA, 80 bp, synthetic construct
  source 1..80: mol_type = other DNA
actatttgatagcacaacagggtgactatagtaaatagtaactatacatttaaaataacttcaagagtgtaactggattg

SEQ ID NO: 14460 - DNA, 80 bp, synthetic construct
  source 1..80: mol_type = other DNA
caaaggatctgctggtctgcacatcagactcaatattctctactacaaggagacaggatataagcccagtccatctgctt

SEQ ID NO: 14461 - DNA, 80 bp, synthetic construct
  source 1..80: mol_type = other DNA
gagttcttctgtgaattgccggttcacctactttccaacattgctattaggttatttaactctttcttattgatttgagt

SEQ ID NO: 14462 - DNA, 80 bp, synthetic construct
  source 1..80: mol_type = other DNA
gcagaggaccgtagaaggactagactagcggtcttccacccttcatttttctcccttgccaggggctctgagaccttcaa

SEQ ID NO: 14463 - DNA, 80 bp, synthetic construct
  source 1..80: mol_type = other DNA
acaaaggaaatatattctcaataatgagcacatacgtgtttaaaaaatacctggttacaaacaaaccataaatactatcg

SEQ ID NO: 14464 - DNA, 80 bp, synthetic construct
  source 1..80: mol_type = other DNA
cttactgaaatatcaagaatgctgcagatggtggcggaatgttcaatgtgaaaaaggatagtggcttgcactagaatgac

SEQ ID NO: 14465 - DNA, 80 bp, synthetic construct
  source 1..80: mol_type = other DNA
tatcctatattttttctatttttccggcacacctattatacagcagttggagatggctgtatagatagaactttctcaac

SEQ ID NO: 14466 - DNA, 80 bp, synthetic construct
  source 1..80: mol_type = other DNA
gacttcaagctagttgagatgttagccttccataattatttgccctgaggtctatgctgttttctacaaaatgccaagac

SEQ ID NO: 14467 - DNA, 80 bp, synthetic construct
  source 1..80: mol_type = other DNA
gagtggaaaatcctaaataagaataccacagaggagagcccaaaattctgcatttgaaagaaatttgcatgcagaatagg

SEQ ID NO: 14468 - DNA, 80 bp, synthetic construct
  source 1..80: mol_type = other DNA
aaaaaaaaaaaagaatgatggatatgtgtcaggtgtcagagataagaatatgttcaaagaatggtagatacatgctcttt

SEQ ID NO: 14469 - DNA, 80 bp, synthetic construct
  source 1..80: mol_type = other DNA
gaaaaaggaaagcaaactaaatctaaagaagatagaaggtagaaagaaggaattaaaaagcaaagatgtggaaccaaccc

SEQ ID NO: 14470 - DNA, 80 bp, synthetic construct
  source 1..80: mol_type = other DNA
tgatccaataataacatgaagtccatgaaagcctgtggctacaaagaatgttgagccatagattccatcagagataataa

SEQ ID NO: 14471 - DNA, 80 bp, synthetic construct
  source 1..80: mol_type = other DNA
cagactaaccaagctgattaccaagttatcacctgaagcaaatggaacgtttctgcatctggcttgttttacagcctatc

SEQ ID NO: 14472 - DNA, 80 bp, synthetic construct
  source 1..80: mol_type = other DNA
tcctgggccctctcctaatgatatgcctaggactaactttcttaccctgcctaattaatcttttccaaagatttttaacc

SEQ ID NO: 14473 - DNA, 80 bp, synthetic construct
  source 1..80: mol_type = other DNA
gctgcataacactgtgtgtatcactatttggattaacataaatgagaaaggagagatagagaccgtgaactaggtaaatg

SEQ ID NO: 14474 - DNA, 80 bp, synthetic construct
  source 1..80: mol_type = other DNA
tttgtttgtttcaccttttggctaccattaacgtttgtgctatgaacatgggtatactaatgtatgttcaagtctctcct

SEQ ID NO: 14475 - DNA, 80 bp, synthetic construct
  source 1..80: mol_type = other DNA
tatcaaagttagtaaagattggaaattgaatgtggtaggcctcttgtgtatgacacaaagcaagacaatgaggaagaagt

SEQ ID NO: 14476 - DNA, 80 bp, synthetic construct
  source 1..80: mol_type = other DNA
tcacttcctatgataacgatgttttcttcaggaatacctccttagggatctacctgaggctgttttatggttaattttct

SEQ ID NO: 14477 - DNA, 80 bp, synthetic construct
  source 1..80: mol_type = other DNA
agtattgtcatgtgattctgcacaactggggcttcccttgaggcaaagtgggaagagaaaattgagcaaaaatataaagg

SEQ ID NO: 14478 - DNA, 80 bp, synthetic construct
  source 1..80: mol_type = other DNA
tcttgtatctgtgttttgacatcgttaatcagttttggaaaattttctgccattatctttttgttttctctgctgcactc

SEQ ID NO: 14479 - DNA, 80 bp, synthetic construct
  source 1..80: mol_type = other DNA
acccagtttcagcactgtgtattgagtgctgatggaaagacaactttgtttctattgttgtggcttgtatgtcttagaat

SEQ ID NO: 14480 - DNA, 80 bp, synthetic construct
  source 1..80: mol_type = other DNA
tttgtccgagatgacagggctccagctctatcagtatgtttctggattaaggagaactgcattctgacctgcatcctgat

SEQ ID NO: 14481 - DNA, 80 bp, synthetic construct
  source 1..80: mol_type = other DNA
ccttcttatgaaaagacctcttggagagtttaatgtacatacatattccagagtttggacaattcagtagattggtacct

SEQ ID NO: 14482 - DNA, 80 bp, synthetic construct
  source 1..80: mol_type = other DNA
tctgcaacactcttgaataggcaagagtgtgaggcctccgttttgaataaaatatagaaatttgactattgaatgggact

SEQ ID NO: 14483 - DNA, 80 bp, synthetic construct
  source 1..80: mol_type = other DNA
atctgtaccccatttcatattcataaggaaaagattcttttattggctaattgttcatgtttaaataaaaatcttatgat

SEQ ID NO: 14484 - DNA, 80 bp, synthetic construct
  source 1..80: mol_type = other DNA
ctctgaggagaaaaacaaaagtaattgggagtgatttgagggaacttctttaggttgagtgactagaaatggttattcta

SEQ ID NO: 14485 - DNA, 80 bp, synthetic construct
  source 1..80: mol_type = other DNA
ggggtgccttattttctgtgccagaattaggagagattttcatgtctgataactgacttcatggatataaagaggcagca

SEQ ID NO: 14486 - DNA, 80 bp, synthetic construct
  source 1..80: mol_type = other DNA
aggaaatacacaaaataatttcaaaggtagactatgcaattgataagagtgtgtagcgagattgttgatttgaaggtctt

SEQ ID NO: 14487 - DNA, 80 bp, synthetic construct
  source 1..80: mol_type = other DNA
gaaattttaagttcttaaataaatgctttggaaataataaagataagttgtttaataaaattattaaattagaaattggt

SEQ ID NO: 14488 - DNA, 80 bp, synthetic construct
  source 1..80: mol_type = other DNA
cagtaaaagagcagaatcacaacatgtgaagggcctgggtccctgagtcactatatggagaaaaatacctagactattag

SEQ ID NO: 14489 - DNA, 80 bp, synthetic construct
  source 1..80: mol_type = other DNA
tgatatctgccctaattttgccaaccatattttccttgatgactccctccaaagtagtcagtagtagcagacacatgttg

SEQ ID NO: 14490 - DNA, 80 bp, synthetic construct
  source 1..80: mol_type = other DNA
gacaaagaaaaagacaatggacggaaggaatgacagggaaaaaatggcagtgaggcacacaggccagtagagagatggca

SEQ ID NO: 14491 - DNA, 80 bp, synthetic construct
  source 1..80: mol_type = other DNA
tagaccaagtatggcgactcatgatttttgagtgtccttgcctggacattgtcttctttgggggtcataactgaactaaa

SEQ ID NO: 14492 - DNA, 80 bp, synthetic construct
  source 1..80: mol_type = other DNA
gatgttactgttgtaattgttttggggcaccatgagctgaacccatataagacaatgaactttattgttagatgttgtat

SEQ ID NO: 14493 - DNA, 80 bp, synthetic construct
  source 1..80: mol_type = other DNA
acaacgaagccagataagagcacagctgtttaaaatatggttggctgaatattttaagcctattgttgggacccattgcc

SEQ ID NO: 14494 - DNA, 80 bp, synthetic construct
  source 1..80: mol_type = other DNA
acctcaaactgcagcagcagccatcaacatcaaggaaagaaccttctatcagcaaaaagattataactcactaaaggctc

SEQ ID NO: 14495 - DNA, 80 bp, synthetic construct
  source 1..80: mol_type = other DNA
caccagtctctccatcttcttcaaaggtgccttacctttcttattccaaaaatggctgggccacaaggcccaaaccaaga

SEQ ID NO: 14496 - DNA, 80 bp, synthetic construct
  source 1..80: mol_type = other DNA
ctgctcctgttttttctggaaccatctgagtttcacttggcaaggaaagaaatttgtcaccaaacagaccagcaaattgt

SEQ ID NO: 14497 - DNA, 80 bp, synthetic construct
  source 1..80: mol_type = other DNA
tgttttgtgtctttggagaaataaccccttatcattaaataatatccctctttatccctggtaatattccttgttctgac

SEQ ID NO: 14498 - DNA, 80 bp, synthetic construct
  source 1..80: mol_type = other DNA
attggtctatatatctgttttggtgccagtaccatgctgttttggttattgcagccttgtaatatagttcaaattcagat

SEQ ID NO: 14499 - DNA, 80 bp, synthetic construct
  source 1..80: mol_type = other DNA
tacaccatggaatattatgcagccataaaggagaatgagttcatgtcctttgcagggaaatgaatgaagctggaaacgat

SEQ ID NO: 14500 - DNA, 80 bp, synthetic construct
  source 1..80: mol_type = other DNA
actacacaataacaaaaaaatagtacggggaaaatactgctgcctaatagtcttctgtgggaaaacacgcaaaattactc

SEQ ID NO: 14501 - DNA, 80 bp, synthetic construct
  source 1..80: mol_type = other DNA
atgtatatgtaaagcattttacctagaaattttaagttgtgattttgccagaacattaaaaacagaaataataacacaag

SEQ ID NO: 14502 - DNA, 80 bp, synthetic construct
  source 1..80: mol_type = other DNA
agcagctcccacttgggaatagttgctaggtgccagaaactggcctgtatttaactgcataatttgtacttatctatcgt

SEQ ID NO: 14503 - DNA, 80 bp, synthetic construct
  source 1..80: mol_type = other DNA
agtctaatttactgattattctatcttgcattaaaattatgacctgaaaacagaagcaaatagaacaaggttcgctgtat

SEQ ID NO: 14504 - DNA, 80 bp, synthetic construct
  source 1..80: mol_type = other DNA
catggggaatcatgcagcagttcagtaagagattgttggaaccaaagaagtagaactaggagaacacatatattaagaga

SEQ ID NO: 14505 - DNA, 80 bp, synthetic construct
  source 1..80: mol_type = other DNA
aggcaagacaacatgctgagaatctcagaaggccattcaacaaggacagagtgattctaaatgaaacctccattactaac

SEQ ID NO: 14506 - DNA, 80 bp, synthetic construct
  source 1..80: mol_type = other DNA
accatatacactatggaagcaaaaagaaaaatagctaacccacatacagaagccagagaaaggggagggaatggggactg

SEQ ID NO: 14507 - DNA, 80 bp, synthetic construct
  source 1..80: mol_type = other DNA
aacttttgaagcttttcatatgcctcctatagcatatgttggggtagatagttccatgaagtatgtacactctatagata

SEQ ID NO: 14508 - DNA, 80 bp, synthetic construct
  source 1..80: mol_type = other DNA
gtgaaggggaccctccaaactgtaaagctacaagagaacgttttaactccttttaaaattagaagaaaaatgaagtttta

SEQ ID NO: 14509 - DNA, 80 bp, synthetic construct
  source 1..80: mol_type = other DNA
gtcacaacgcggtcaaaaacatgttgagaggacttagctgcaaagttgttaactaagtagaaacctcaaggatgaatttt

SEQ ID NO: 14510 - DNA, 80 bp, synthetic construct
  source 1..80: mol_type = other DNA
gtgacgttctgcctttgtggagcatatgttatagtgagaaagacagaatcagttctaacctgatgactaccaacgttagg

SEQ ID NO: 14511 - DNA, 80 bp, synthetic construct
  source 1..80: mol_type = other DNA
caacatcacctggctgagcaatgggcactcagtcacagaaggtgtttctgagaccagcttcctctccaagagtgatcatt

SEQ ID NO: 14512 - DNA, 80 bp, synthetic construct
  source 1..80: mol_type = other DNA
cctttatctaaaatctccatggaagcaataaattcccttttgatgcctctattgaatttttcccatctttcatctcaggg

SEQ ID NO: 14513 - DNA, 80 bp, synthetic construct
  source 1..80: mol_type = other DNA
aacaaatgcttgttccttacttagggttagtgacaatggaaaacagatagaagtagaagctacagacccatttaggggcc

SEQ ID NO: 14514 - DNA, 80 bp, synthetic construct
  source 1..80: mol_type = other DNA
attataaatgcagactgggaattagtaagtgcagggaatctgaaccagtggtgatcatgaaaacgtccatcacagaacac

SEQ ID NO: 14515 - DNA, 80 bp, synthetic construct
  source 1..80: mol_type = other DNA
ttataaacagttataaatcaggctgcatgattttaaattaaatgattcttaaaaattgttatctgaattatttcagatta

SEQ ID NO: 14516 - DNA, 80 bp, synthetic construct
  source 1..80: mol_type = other DNA
cagtatgtgcctgtatgataactgggtgggtttacaaaattgctcatgaattgattattgttaaagcaaggctgttgata

SEQ ID NO: 14517 - DNA, 80 bp, synthetic construct
  source 1..80: mol_type = other DNA
aagatggagaacagaccaaggaagtcaaacatcaagtgacaaagctagagagaccaacagggaagatgaagggagaaaat

SEQ ID NO: 14518 - DNA, 80 bp, synthetic construct
  source 1..80: mol_type = other DNA
acaaaaaaaatggactgttattcttcggcctaagctattcagaagctgcaagagcccctcagagtcggcccaaattagag

SEQ ID NO: 14519 - DNA, 80 bp, synthetic construct
  source 1..80: mol_type = other DNA
taagaatgctcaagtctcttattaaaaatggcttagtttttgtacatcacctaagtatgttttcccatatactttaaatc

SEQ ID NO: 14520 - DNA, 80 bp, synthetic construct
  source 1..80: mol_type = other DNA
tgaaagatatgctgatatttcctaaggtaaggacaaatgctcacaactggcaggttgttctctagaacacccacatactt

SEQ ID NO: 14521 - DNA, 80 bp, synthetic construct
  source 1..80: mol_type = other DNA
gagagatgagataaggtgtgaggtgataagagagatgcagaaaataaagagatgcaaaaagaaaaagagaaagaaatgca

SEQ ID NO: 14522 - DNA, 80 bp, synthetic construct
  source 1..80: mol_type = other DNA
attacagaagagtgatgaccaatcccagacaaaagtcctcaggagtcagtgcaggagtcctggagaagagagacgaggca

SEQ ID NO: 14523 - DNA, 80 bp, synthetic construct
  source 1..80: mol_type = other DNA
ggaaaatgacacatgtagtttaattggggttatatcctcttccctcccatgttctttaagtccttaagcaccctaagtta

SEQ ID NO: 14524 - DNA, 80 bp, synthetic construct
  source 1..80: mol_type = other DNA
tggttatgtaaaactgcgtagcaccaaccccctctctctcatgctcctgcccctgccctgtgagacacctcactccctct

SEQ ID NO: 14525 - DNA, 80 bp, synthetic construct
  source 1..80: mol_type = other DNA
aagtaggcaggccttgaaaaaaactaacactgatcaaacatcatgtttgcccataactcaattcctttatcttctcagag

SEQ ID NO: 14526 - DNA, 80 bp, synthetic construct
  source 1..80: mol_type = other DNA
aaagaatgctgtgtatttgggggaggcttcaggtcctggtgcataactgtgggttgattacttaaagtgtttatcatgta

SEQ ID NO: 14527 - DNA, 80 bp, synthetic construct
  source 1..80: mol_type = other DNA
gcaagaacatgcagagcagaggacaaggccgatggacggggaggctggggacacactgggcagcctaacccaaccctgca

SEQ ID NO: 14528 - DNA, 80 bp, synthetic construct
  source 1..80: mol_type = other DNA
taaatttgagagttcaagggaataacgagaaaggttcaggaattaagcttgttctcatcctgatgtaagtattctcttgg

SEQ ID NO: 14529 - DNA, 80 bp, synthetic construct
  source 1..80: mol_type = other DNA
aaaaagaataaatggtgataaaagactgtgttctgagatcatggagatcaccatcccccatactccaacccaaggagagc

SEQ ID NO: 14530 - DNA, 80 bp, synthetic construct
  source 1..80: mol_type = other DNA
tatgtgtaactatcaggctaataggaggaacaagaaaaaaaaaagttgacacccagccctactggcaagtgattctttat

SEQ ID NO: 14531 - DNA, 80 bp, synthetic construct
  source 1..80: mol_type = other DNA
ttttttcttttcttttcctttttttttattttccttttttcttttcttttcttttttagggacagggtctggctctatca

SEQ ID NO: 14532 - DNA, 80 bp, synthetic construct
  source 1..80: mol_type = other DNA
acgcaccccatgtgggaagatgggataaagacactgctgttattatgggtcaaggttacactagggagactctccccagg

SEQ ID NO: 14533 - DNA, 80 bp, synthetic construct
  source 1..80: mol_type = other DNA
cttctagatttgtagtcatcatgtgccttcattcccagacaaaccttaaatatctctctatgagatctttataatgtctt

SEQ ID NO: 14534 - DNA, 80 bp, synthetic construct
  source 1..80: mol_type = other DNA
acatgtgaaaagagggagtagaggaaaaagtcacttatgcaaaaacaataacattgtagaatcttcccaaaagattcatt

SEQ ID NO: 14535 - DNA, 80 bp, synthetic construct
  source 1..80: mol_type = other DNA
gtcaggataatttcctggttttgatattgcactttagttatgtaagatgttacaattggggaaaactggatgaaggctat

SEQ ID NO: 14536 - DNA, 80 bp, synthetic construct
  source 1..80: mol_type = other DNA
aacagaacacactcacacacaaattatgtgaagcagttttattacttacagatcagtagcaagggacagaagaagcctca

SEQ ID NO: 14537 - DNA, 80 bp, synthetic construct
  source 1..80: mol_type = other DNA
cacctgtaaagataagctaccaatttacattgccatggtaaaattttaacagaaacaccttagagtaaagatcttgcagc

SEQ ID NO: 14538 - DNA, 80 bp, synthetic construct
  source 1..80: mol_type = other DNA
ctgaatcaccacctggagaaaagtgactcacaaatcttcaatatcctccttctgctacattagtgagttataaacttcta

SEQ ID NO: 14539 - DNA, 80 bp, synthetic construct
  source 1..80: mol_type = other DNA
caatgataccactttcttggacagggcaatttgtgtcacttttccagacaaaatacatggatttggtgatgctttaatct

SEQ ID NO: 14540 - DNA, 80 bp, synthetic construct
  source 1..80: mol_type = other DNA
agtgggatgtaaggggtccggaaacaagttttttgaaatatacttgattgtcatgacaccaatatggaatgaaagagaaa

SEQ ID NO: 14541 - DNA, 80 bp, synthetic construct
  source 1..80: mol_type = other DNA
acaacacccatttattatctcagttttctaggtcagaagtctaggcaaagctcaactgggctctctgcttaggatctcac

SEQ ID NO: 14542 - DNA, 80 bp, synthetic construct
  source 1..80: mol_type = other DNA
ctggtctcggtaggttccacccacatttaaaggaaaataattttataaggtatgtacaacagggggtgatagatattcct

SEQ ID NO: 14543 - DNA, 80 bp, synthetic construct
  source 1..80: mol_type = other DNA
aaagtgctgggattattttgtattctagatgtcgattttgctgtgttaattaatttcctgatgattgcaatagaatacct

SEQ ID NO: 14544 - DNA, 80 bp, synthetic construct
  source 1..80: mol_type = other DNA
tggtagctctacagttttggagtcttggtggcagtcccactgtcacagcaccactagatatttccctggggaggactccc

SEQ ID NO: 14545 - DNA, 80 bp, synthetic construct
  source 1..80: mol_type = other DNA
ccactagtcttgcattctgaagacctgcagaaatagcaccacatgcatgtggacattgccaaggcttactgcttgtgcct

SEQ ID NO: 14546 - DNA, 80 bp, synthetic construct
  source 1..80: mol_type = other DNA
cagctgcttccacattttcagatatttgttattagcaacagcccaactttttagtaccaattttctgccttagtctgttt

SEQ ID NO: 14547 - DNA, 80 bp, synthetic construct
  source 1..80: mol_type = other DNA
tttaccactttgagtgaaggatacagtccgtatctctagtaccattagcatattttaccctctctactttttaaatgcaa

SEQ ID NO: 14548 - DNA, 80 bp, synthetic construct
  source 1..80: mol_type = other DNA
gtctttgaagaatctccacactgtcttccccaatgatgaacaaaacctctgagaaatatggggttatgtaaagagaccaa

SEQ ID NO: 14549 - DNA, 80 bp, synthetic construct
  source 1..80: mol_type = other DNA
catgatatatcctttctgtcttttacactcaatctctgaaatgacttttatgctttagacatatgtcttgtaaacagtat

SEQ ID NO: 14550 - DNA, 80 bp, synthetic construct
  source 1..80: mol_type = other DNA
gattacaaaagagaggacttacatacacttagttcttgcaggaggaaaggaactatctagacgttgttattttgttcaaa

SEQ ID NO: 14551 - DNA, 80 bp, synthetic construct
  source 1..80: mol_type = other DNA
cttttcccatcccactttgcttttctaagcagtatttatgtatttcaactttttttacagtttaaatacaatatacttag

SEQ ID NO: 14552 - DNA, 80 bp, synthetic construct
  source 1..80: mol_type = other DNA
cttcagctcagttttacaccagaagataaacaaaatataaatccaagatttttgcagtgcagtggaggtctctgagggtg

SEQ ID NO: 14553 - DNA, 80 bp, synthetic construct
  source 1..80: mol_type = other DNA
agacctactaattgcgtattctgacagagagctacaacaccaaagctaagccctgttatgtgcttccacaggggacaaaa

SEQ ID NO: 14554 - DNA, 80 bp, synthetic construct
  source 1..80: mol_type = other DNA
cttctacacagcaaaagaaactaccaacacagtaaaaagacaacccacagaatgggagaaaatttttcaatctatgcgtc

SEQ ID NO: 14555 - DNA, 80 bp, synthetic construct
  source 1..80: mol_type = other DNA
tacctatgtaacaaacctgcacatcctgcacatgtacccctgaacttaaaataaatgttggaaaaaatatatttaaatta

SEQ ID NO: 14556 - DNA, 80 bp, synthetic construct
  source 1..80: mol_type = other DNA
tttgtataaggagaatcttcccatgtctgcctttggttttgctctctccccattacccttagttttatgattttctcctt

SEQ ID NO: 14557 - DNA, 80 bp, synthetic construct
  source 1..80: mol_type = other DNA
ttagccgggccggtggaatgtgcctgtcgtcccagctactaaggaggctgaggcgggaggaccatctgaacccaagaggt

SEQ ID NO: 14558 - DNA, 80 bp, synthetic construct
  source 1..80: mol_type = other DNA
acaccaacttcttttatcagcatctctcagaatccatgccctgtgggtagttatatgtgaatatcagaatcgccctccac

SEQ ID NO: 14559 - DNA, 80 bp, synthetic construct
  source 1..80: mol_type = other DNA
aatggaggctttgttatgtcagcatggtgagttgattaaaccattggccattggcagtcaactcaaccttcagcccctcc

SEQ ID NO: 14560 - DNA, 80 bp, synthetic construct
  source 1..80: mol_type = other DNA
aataagaatacgagtaggtactctcattggtacttcttccttatctgtaggtacctgagatgactgtgtcctctaaagct

SEQ ID NO: 14561 - DNA, 80 bp, synthetic construct
  source 1..80: mol_type = other DNA
gtgatgtggccatgcagagctcttgtccctcatgttctttccacctcgatctttcacttttctctatttctgcttctcct

SEQ ID NO: 14562 - DNA, 80 bp, synthetic construct
  source 1..80: mol_type = other DNA
acaccttcttgcaagcttcgtatccgggaatgccagtgggtgttcacaaataaaaaatgggagagtcctgagaaggcatt

SEQ ID NO: 14563 - DNA, 80 bp, synthetic construct
  source 1..80: mol_type = other DNA
gcatagagatgcatatgcacacaacgattacatcgtagggctgtttaaattactcattctggctgggggtctgtgctcta

SEQ ID NO: 14564 - DNA, 80 bp, synthetic construct
  source 1..80: mol_type = other DNA
ggagaaggtgcataaacttaacaactttgttattgccctgaggatgtgatgtggcaaaggggacaaggattggatagatt

SEQ ID NO: 14565 - DNA, 80 bp, synthetic construct
  source 1..80: mol_type = other DNA
ttagacattttgtatttgtagggcctgtgggtcatccagatgaaactttactctgtgtggtagatggaataatgccccca

SEQ ID NO: 14566 - DNA, 80 bp, synthetic construct
  source 1..80: mol_type = other DNA
aagcaatatagctcaaacctcaggcttggggaccatatggatttgagttcttatcatagctccatcgcttcctacccata

SEQ ID NO: 14567 - DNA, 80 bp, synthetic construct
  source 1..80: mol_type = other DNA
agcctcccaaagtgctgggattataggcgtgagccacattttttattttctaaaatgaaaatgttgatatttaattttta

SEQ ID NO: 14568 - DNA, 80 bp, synthetic construct
  source 1..80: mol_type = other DNA
agagtccatatttaaaaacttcatgtaggcattaaatagaaaggatacagctcatttgacaaccagtagaacaggcagct

SEQ ID NO: 14569 - DNA, 80 bp, synthetic construct
  source 1..80: mol_type = other DNA
ccagtttttgtctgaataaagctgctatgagcatacatgtgcagatttttctctgaacataagtcttcatttctctggga

SEQ ID NO: 14570 - DNA, 80 bp, synthetic construct
  source 1..80: mol_type = other DNA
atgttgaacaaacctcatatcccagggataaagcctacttgatcatggtagattggcttttggatgtgctgctggattcg

SEQ ID NO: 14571 - DNA, 80 bp, synthetic construct
  source 1..80: mol_type = other DNA
ccaaaagtcattcaggagcaggttatttaatttccatgtaattgtacggttttgagtgaacttttttgtcttggtttcta

SEQ ID NO: 14572 - DNA, 80 bp, synthetic construct
  source 1..80: mol_type = other DNA
ccttctctgaaaaggttcttatttctccttcacttttgaagattagtttggccagatatgaaattctgggttgaaattat

SEQ ID NO: 14573 - DNA, 80 bp, synthetic construct
  source 1..80: mol_type = other DNA
aatctttgagactgctgacctttggacagcaaagatcatccaaccttttttatttatcctatttatcctatttgatgact

SEQ ID NO: 14574 - DNA, 80 bp, synthetic construct
  source 1..80: mol_type = other DNA
ctccacttactggtcagtcatggtctgccagtgtagaagctatggtgcaggcccacagagcacctgaggctgctttgcaa

SEQ ID NO: 14575 - DNA, 80 bp, synthetic construct
  source 1..80: mol_type = other DNA
tcttagtgagaagatgctgccagcaggccttcaccagaaccctaccaggctgacacactgatctcagacctccagcctcc

SEQ ID NO: 14576 - DNA, 80 bp, synthetic construct
  source 1..80: mol_type = other DNA
gttttccaaaattttaattttctcttgaaattccaatttccactgtcaatattattttctttgatgggataggctcattt

SEQ ID NO: 14577 - DNA, 80 bp, synthetic construct
  source 1..80: mol_type = other DNA
tcaaccgttttcagtagccattttggtggttgtgtatgagtgttattatccttagactgctgtctatgttaactcaggaa

SEQ ID NO: 14578 - DNA, 80 bp, synthetic construct
  source 1..80: mol_type = other DNA
cttctttctttgaatcctaacccacaccatctcagaatggtttcaggaacttccttgtggtaactcccttgacgccactt

SEQ ID NO: 14579 - DNA, 80 bp, synthetic construct
  source 1..80: mol_type = other DNA
gggaaactctacaggtcaaatggattgagcttttcaacagattaatcataagggggaaaaaaaggctgatgggggagaaa

SEQ ID NO: 14580 - DNA, 80 bp, synthetic construct
  source 1..80: mol_type = other DNA
atgtcatctccctctggccaaagaaccgggagaatgatctgccactcaaagacaaggaaaaagagacattacctcattac

SEQ ID NO: 14581 - DNA, 80 bp, synthetic construct
  source 1..80: mol_type = other DNA
ccagtggacatgaccccagctctctcctcctgcccattcaggaaccacttgatcttgatatcccctggatagaagcctgt

SEQ ID NO: 14582 - DNA, 80 bp, synthetic construct
  source 1..80: mol_type = other DNA
gcctttgacctcagtatgctcaaaaagcacagtgtcaagtgagaaaagaaacagaatgggattcaacagagaatgacatt

SEQ ID NO: 14583 - DNA, 80 bp, synthetic construct
  source 1..80: mol_type = other DNA
actgtttagtacaattctgacaatataatagtggcttaataaatgacagaaggagcaacctttgtttccagtttcatttg

SEQ ID NO: 14584 - DNA, 80 bp, synthetic construct
  source 1..80: mol_type = other DNA
agggattatcagagaagaaatagaagacatagagaacatttggagagtacgatttcctataagccaaaatgaccacaaaa

SEQ ID NO: 14585 - DNA, 80 bp, synthetic construct
  source 1..80: mol_type = other DNA
ggacattttctccaaaatgctgtggtctgaatgtcactcaaaattcaagtgttgcaatttaatcaccaatgtgatagtat

SEQ ID NO: 14586 - DNA, 80 bp, synthetic construct
  source 1..80: mol_type = other DNA
atcttgttacactaacacaaatggactaagacagagagcataaggcttgggggaagaagggtacacttcttcagataaaa

SEQ ID NO: 14587 - DNA, 80 bp, synthetic construct
  source 1..80: mol_type = other DNA
gctcacactggcgagggcttgtgtggagccgaggataaggaggcatcagagggcactcaagccactgggtctaacttcct

SEQ ID NO: 14588 - DNA, 80 bp, synthetic construct
  source 1..80: mol_type = other DNA
aagcaaggaatggcatagagcctggcatgggaactaagaagagaaagcaataagcttcagttagcaagctatggatctcc

SEQ ID NO: 14589 - DNA, 80 bp, synthetic construct
  source 1..80: mol_type = other DNA
tccaatctgcagccacttctttgatacgactttgggataggtggactcacccgaagtattgttttacatgtactatttgc

SEQ ID NO: 14590 - DNA, 80 bp, synthetic construct
  source 1..80: mol_type = other DNA
ccaggcccagcctatttttttgtccacttaactggtctagtccagggaaagggaattaaagtgttctattggtagtacat

SEQ ID NO: 14591 - DNA, 80 bp, synthetic construct
  source 1..80: mol_type = other DNA
ctataattctcctatatttcttacatattttgtagttttattgctaggtgcaaactgattcagttttagtataatgttct

SEQ ID NO: 14592 - DNA, 80 bp, synthetic construct
  source 1..80: mol_type = other DNA
agcaaatgataactacaatacaatgctactttcacccagaagattgtcaaaattttaaaaattaacactgtctgttggtt

SEQ ID NO: 14593 - DNA, 80 bp, synthetic construct
  source 1..80: mol_type = other DNA
accagtgaatgcttagtagtagtagtagtctaattcctaagagtccatggaactctaggttcaaaacccagtttcttctg

SEQ ID NO: 14594 - DNA, 80 bp, synthetic construct
  source 1..80: mol_type = other DNA
tacaggaattattattcctgttttatgaataaaggacatttgtgggagagaaaggaatcaggccagagttctttctctcc

SEQ ID NO: 14595 - DNA, 80 bp, synthetic construct
  source 1..80: mol_type = other DNA
gctaagagcagcagagcttttcttgatgggattatggattagggtttatggacccaagatgcaatataattgattgggtc

SEQ ID NO: 14596 - DNA, 80 bp, synthetic construct
  source 1..80: mol_type = other DNA
tggggcctcagtccatcagccgctgctgcaccaggcgggaatagaggtcctgtccctcctagagctgggcaagcttctgc

SEQ ID NO: 14597 - DNA, 80 bp, synthetic construct
  source 1..80: mol_type = other DNA
gaggctgaagaattcagtgtgtggggaaggagacgtaggaatggaggaaagggcagaggaacagcaaacatcaagctaca

SEQ ID NO: 14598 - DNA, 80 bp, synthetic construct
  source 1..80: mol_type = other DNA
gctgtcggtccatgtaggagaaaaccttctctgcagctcccacgttgctgagcatatccccatatatgtataccagggtc

SEQ ID NO: 14599 - DNA, 80 bp, synthetic construct
  source 1..80: mol_type = other DNA
agtcacaatatgtggaccatttctggatcctgatttaagcaaagtataataaacacactcatacacatatactacatgga

SEQ ID NO: 14600 - DNA, 80 bp, synthetic construct
  source 1..80: mol_type = other DNA
ctccagccagtgagatgctccctagtctacctaaaaataccaaactgtttctctccctcttccttactcttctttccaga

SEQ ID NO: 14601 - DNA, 80 bp, synthetic construct
  source 1..80: mol_type = other DNA
ctttatcagcagcgtaaaaatggactaatacatggttcctcaaaaattgttaaatagaattgccatatgatccagcagct

SEQ ID NO: 14602 - DNA, 80 bp, synthetic construct
  source 1..80: mol_type = other DNA
atgtagtatatactacaatataccttctcccctaatggctgagaagagaacatctctctctaggggatcctctagccaca

SEQ ID NO: 14603 - DNA, 80 bp, synthetic construct
  source 1..80: mol_type = other DNA
agagagagaagaggtaaggaatacacagaggaagaagaaagaggagacatggtgagctagatgtgagaacaaaatcataa

SEQ ID NO: 14604 - DNA, 80 bp, synthetic construct
  source 1..80: mol_type = other DNA
gtatgtctagaaagagaaaggaaagcaagtgaagggaaaagagtaatgattctggaaagaaaggtgataagcctcagagt

SEQ ID NO: 14605 - DNA, 80 bp, synthetic construct
  source 1..80: mol_type = other DNA
agccctcccagccgcagggtcccctccagccatagtcctggcagcccttgaggaagcaaagtccccagagggccctgaag

SEQ ID NO: 14606 - DNA, 80 bp, synthetic construct
  source 1..80: mol_type = other DNA
taattggagaatcactgaattttctcaaagttactacttcaagctctgagcctactattaagaagtgccttctttctggt

SEQ ID NO: 14607 - DNA, 80 bp, synthetic construct
  source 1..80: mol_type = other DNA
gctaaagttttacaactctattcattctggcattttaagaatctctctctaatgaaaaaagctccatgctcaagctcatg

SEQ ID NO: 14608 - DNA, 80 bp, synthetic construct
  source 1..80: mol_type = other DNA
gaggagacctgcccagctgccaccaccaccattattgattggcttcccggtactggtgcagcaggtcactgacatctgta

SEQ ID NO: 14609 - DNA, 80 bp, synthetic construct
  source 1..80: mol_type = other DNA
ttggaattaggaaaccactttggtaaagtcatcgaactttagaaatgaaaaaggaaaaacaaacttgaaatcaactgttt

SEQ ID NO: 14610 - DNA, 80 bp, synthetic construct
  source 1..80: mol_type = other DNA
gcgtatacactcactaatgtaggacccagctgaggcccgagaatccactgctgcaatcactccatgctggaacttgaagg

SEQ ID NO: 14611 - DNA, 80 bp, synthetic construct
  source 1..80: mol_type = other DNA
acctgcattccccggggtaaagcgagctctggagatcgcatagagaaactgtagtgtcctgggtccgagcgacgcccgct

SEQ ID NO: 14612 - DNA, 80 bp, synthetic construct
  source 1..80: mol_type = other DNA
aggtttcccctccaggtgcagcttcagagccaggcgagccaggaaggaccagcgggcgaggtggtgagttgtgaggcgcg

SEQ ID NO: 14613 - DNA, 80 bp, synthetic construct
  source 1..80: mol_type = other DNA
tgatgagaagcactgagcgggagtaccgctcagggctttcgtacaggagctgctccacctgaggaaagacatcggaccgt

SEQ ID NO: 14614 - DNA, 80 bp, synthetic construct
  source 1..80: mol_type = other DNA
gtacacctgtagtcccagctactcgggaggctgaggggagaatcgcttgagcccagcaggttgaagctgcagtgagccaa

SEQ ID NO: 14615 - DNA, 80 bp, synthetic construct
  source 1..80: mol_type = other DNA
cctgtggctcttgtcccactgcagccacctgagatgaaatatgatgaagagtcatagaacaaggcacatgggagtatggt

SEQ ID NO: 14616 - DNA, 80 bp, synthetic construct
  source 1..80: mol_type = other DNA
attgcagttggggccagtggaatacagggagtggtaggttgtacctgtagcactaagacatctgggcggtttgggtaggc

SEQ ID NO: 14617 - DNA, 80 bp, synthetic construct
  source 1..80: mol_type = other DNA
aggaaacagtctcagagaaggtaaatttgttgtcatgatcacaagacaagtaaattgcatcatcaagccaggatcttcgg

SEQ ID NO: 14618 - DNA, 80 bp, synthetic construct
  source 1..80: mol_type = other DNA
aatgactcagaacgggttggggatcaaattcttaaagacagattgtggggagaagctagaaaagaagacccagagagtat

SEQ ID NO: 14619 - DNA, 80 bp, synthetic construct
  source 1..80: mol_type = other DNA
ctagccatatgtaactgtacagcttctagtgctgctagaaagcatgccgaagtctgtggagcactcaagagaccagggtt

SEQ ID NO: 14620 - DNA, 80 bp, synthetic construct
  source 1..80: mol_type = other DNA
gaatggccatctcccctggagaaagagaagagaggtcacgcacaaatattaagtctaagtaggtcagttccagtcagact

SEQ ID NO: 14621 - DNA, 80 bp, synthetic construct
  source 1..80: mol_type = other DNA
tgggcacctgcgttttcgctcttggagccaaccgttgccctgaggaccccgcaggcccccagccagagcacggcccagcg

SEQ ID NO: 14622 - DNA, 80 bp, synthetic construct
  source 1..80: mol_type = other DNA
ggagatgcagcggccaggggaccctggaagcgcgcgcggagaagtgaatgcagagaccaacgggagcgcagggaggtcgc

SEQ ID NO: 14623 - DNA, 80 bp, synthetic construct
  source 1..80: mol_type = other DNA
acctgaattttagtcccaggtctactattaactctgtgtgactttgcataagtcgtttgcattttctgtgacttggtttc

SEQ ID NO: 14624 - DNA, 80 bp, synthetic construct
  source 1..80: mol_type = other DNA
gagtaaaagtgaagatgtatgcatttggaaagaagctaatggcctcaaatacacactttccttacccattcatgaaaaga

SEQ ID NO: 14625 - DNA, 80 bp, synthetic construct
  source 1..80: mol_type = other DNA
tattcgggaggctgaggcaggagaatcacttgaaccagggaggcgaagtttgcagtgagcccaagattgatccactgcac

SEQ ID NO: 14626 - DNA, 80 bp, synthetic construct
  source 1..80: mol_type = other DNA
aaattctatcaacctttattcctaatatttccctcaggatagaactggaggaacctccacttgttttggctgctgcaaat

SEQ ID NO: 14627 - DNA, 80 bp, synthetic construct
  source 1..80: mol_type = other DNA
aagtaaaaaaaaaaatgaactgggcatagtggtgcacacctgtagtcccagctactcaggaggctgaggtggaaagatca

SEQ ID NO: 14628 - DNA, 80 bp, synthetic construct
  source 1..80: mol_type = other DNA
acgtactgaatgattttgaagtagtacaaacaataaaaattctcattccgcatcatcatgcggtccatgatgatgaggcc

SEQ ID NO: 14629 - DNA, 80 bp, synthetic construct
  source 1..80: mol_type = other DNA
tgcttctatctttgccttgcacttcctgagtgacaggagtgaactctcatatccttttctgtcaaaagatggtgctgaat

SEQ ID NO: 14630 - DNA, 80 bp, synthetic construct
  source 1..80: mol_type = other DNA
actgggtcagagagaaaatatggttaagaaaagtaagtgaagccaaggagtgaaactaatggaaactaatggacaacgtg

SEQ ID NO: 14631 - DNA, 80 bp, synthetic construct
  source 1..80: mol_type = other DNA
atatatttatcagtaacatggatttaaaaggcagtcgtggatgggagcatcgctggagtccagaagatggaggctgcagt

SEQ ID NO: 14632 - DNA, 80 bp, synthetic construct
  source 1..80: mol_type = other DNA
gatcctgtgagatcctgtctctacaaaaaattaaaaaattagccaggtgtgatggtgagcacctgtagtctcagctacta

SEQ ID NO: 14633 - DNA, 80 bp, synthetic construct
  source 1..80: mol_type = other DNA
aataaaataaacaggaaatataattaaagagttcaattgaggattgggatttagaaaggaaggcaggaattaagaataat

SEQ ID NO: 14634 - DNA, 80 bp, synthetic construct
  source 1..80: mol_type = other DNA
ataaaattaactatcacttggctcaaggtgaaacttccagatcaatgtggcaggagtgttgaggaaggaagtgaactcgg

SEQ ID NO: 14635 - DNA, 80 bp, synthetic construct
  source 1..80: mol_type = other DNA
gtaacaacatggacgaatctcatagaaacaatattaagtgaagaagccagacttgcagaaatacatactgtatgtttcca

SEQ ID NO: 14636 - DNA, 80 bp, synthetic construct
  source 1..80: mol_type = other DNA
ttacaatccctgaaacactctggttttgatcaggcagaattatgagcaaaggttcaagtgtgatataaaataatcaagca

SEQ ID NO: 14637 - DNA, 80 bp, synthetic construct
  source 1..80: mol_type = other DNA
aaaagttatcaaggtattaagtgagagcattctgataagaaaccaccgctagctgggcagattatgctaaagggaaagaa

SEQ ID NO: 14638 - DNA, 80 bp, synthetic construct
  source 1..80: mol_type = other DNA
gaccagccctgggcaacataatgagaccctgtctctatgaataataataataaaattagtcaggcatagttcgatgtgtc

SEQ ID NO: 14639 - DNA, 80 bp, synthetic construct
  source 1..80: mol_type = other DNA
ctcaaattgaatttttaaaagacaataaaatagatgccaaaacggaaagaaaagcctgatgaagattttaaagccaccat

SEQ ID NO: 14640 - DNA, 80 bp, synthetic construct
  source 1..80: mol_type = other DNA
gaaggaagaaagaacatggcaagaaaaaatatgggttaaaaaatggactttacttcttctcttgagttatttaaattata

SEQ ID NO: 14641 - DNA, 80 bp, synthetic construct
  source 1..80: mol_type = other DNA
aacaaagaaaattactagaaatggataggaacactatgtaataataaaagggtaaatctaccaaaaagacatagcaatct

SEQ ID NO: 14642 - DNA, 80 bp, synthetic construct
  source 1..80: mol_type = other DNA
accagaaatcaacaacaggaaaatatctaaacatttggagacaaaacaacacacttagaaatacatgggtcaaggaggaa

SEQ ID NO: 14643 - DNA, 80 bp, synthetic construct
  source 1..80: mol_type = other DNA
agaagtaaatttaaagcactaactgcatacattggaaaagaggaaaagtctcaaaccaataatctaaactctcacctcaa

SEQ ID NO: 14644 - DNA, 80 bp, synthetic construct
  source 1..80: mol_type = other DNA
gtctacaaaaatcctatggtgaacatacttgattctgaaagactgaatagtttctacctaaaatcaggaacaaggcaaga

SEQ ID NO: 14645 - DNA, 80 bp, synthetic construct
  source 1..80: mol_type = other DNA
ttataggtaggattactctaaaatttacatggaaaggcaaagggactagaatatctaaaatattcttttttcatattatt

SEQ ID NO: 14646 - DNA, 80 bp, synthetic construct
  source 1..80: mol_type = other DNA
cctatagttcagcagtactttgattatgtaccatttaagaaatcaaaataataagcacattcttctaacagcaaagaatt

SEQ ID NO: 14647 - DNA, 80 bp, synthetic construct
  source 1..80: mol_type = other DNA
tgcccagagtaccaaaaacattaaaaaaaaagagcagacattggtgcaagtttaacctgtgagaaaaaagctagttttga

SEQ ID NO: 14648 - DNA, 80 bp, synthetic construct
  source 1..80: mol_type = other DNA
agtcatgacttgtggagaacgagaagcaatgtattatagcaacggggttcatatctaacaaacaataagagtgttgaaca

SEQ ID NO: 14649 - DNA, 80 bp, synthetic construct
  source 1..80: mol_type = other DNA
cagggcgggagcgacgccgacgcctaaaacattcttgaaaaagaagaataaagtgagttgaaaatcagtctgccctattt

SEQ ID NO: 14650 - DNA, 80 bp, synthetic construct
  source 1..80: mol_type = other DNA
aggactagtatctagagtatataaagaactctcaaaactcaacaaagaaaacacattaaaaatccaattagaaaataggc

SEQ ID NO: 14651 - DNA, 80 bp, synthetic construct
  source 1..80: mol_type = other DNA
actcagcaataaaaaagaatgactgatacacacaacaacctggatgaatctccagagagttatactgagtgaaaaatgcc

SEQ ID NO: 14652 - DNA, 80 bp, synthetic construct
  source 1..80: mol_type = other DNA
atgagtggaaagtttgagtgaataaaaattatatctggaattctggtttgcaaattagcctgggaaatgtagcctgactc

SEQ ID NO: 14653 - DNA, 80 bp, synthetic construct
  source 1..80: mol_type = other DNA
caatgggaattgatgtacaattgcccaactccctccttccgtggctgggttaactctgaggcaagtgctttcccagaatt

SEQ ID NO: 14654 - DNA, 80 bp, synthetic construct
  source 1..80: mol_type = other DNA
ctgtgcccaagcaatcctcctgcttcagcctcctgagtagctgaaaccacaagtgagcgccaccatgcccagctaatttt

SEQ ID NO: 14655 - DNA, 80 bp, synthetic construct
  source 1..80: mol_type = other DNA
tgaatgaatttccactagggggtggtagagaatcataatccatatcatagtctgaaactgaagggcaaaaggaaatagtc

SEQ ID NO: 14656 - DNA, 80 bp, synthetic construct
  source 1..80: mol_type = other DNA
cctcccaccagctgtgctttatttttctttgattctaactattacagaaaagacaagtcagactccttcatcgctgggca

SEQ ID NO: 14657 - DNA, 80 bp, synthetic construct
  source 1..80: mol_type = other DNA
catctgggcctcactgtagctcaggccaactgccaacagctccaacctaggctggcttctactcttagagagagaatatt

SEQ ID NO: 14658 - DNA, 80 bp, synthetic construct
  source 1..80: mol_type = other DNA
atattcaatgcaacagtgttagtaggtgaggcttaatgatgagaggtgtttaggtcatgacgactccatcctcataaatg

SEQ ID NO: 14659 - DNA, 80 bp, synthetic construct
  source 1..80: mol_type = other DNA
ctcaataaatttcatcaaattgcctttgttacttctgtctctatgcaaatgatttcttatacatctttttccttttttct

SEQ ID NO: 14660 - DNA, 80 bp, synthetic construct
  source 1..80: mol_type = other DNA
tctcttaacatttttgtttttaaaatgtgtatgtgtgtctttttaataaatatttttctaccttgaagtcatacaaatat

SEQ ID NO: 14661 - DNA, 80 bp, synthetic construct
  source 1..80: mol_type = other DNA
gaaaagaaaatgttggccaggtgcggtggcccatggctgtaattccagcagtttgggaggctgaggcagaagtgcttgag

SEQ ID NO: 14662 - DNA, 80 bp, synthetic construct
  source 1..80: mol_type = other DNA
aagaaggaaaaaaatgttctcccctgctcctgaagctggagagaacaataaatgaaaactgttgtcataaatggttattt

SEQ ID NO: 14663 - DNA, 80 bp, synthetic construct
  source 1..80: mol_type = other DNA
ccaatacgttacagtaagagtaaatgtagggtttctcccagttttatctggcagtcccaaagtcaggatcagagtaaccg

SEQ ID NO: 14664 - DNA, 80 bp, synthetic construct
  source 1..80: mol_type = other DNA
tggtccaaccctcttctgcgcctaacactggcacctccttttcttccggctgatgaataattgtccgcaaaccagcctct

SEQ ID NO: 14665 - DNA, 80 bp, synthetic construct
  source 1..80: mol_type = other DNA
tggggaacagcagtgacagtagttctcatccctgagcctcctccgggccggcccgtggaggagagagaaggggagggaga

SEQ ID NO: 14666 - DNA, 80 bp, synthetic construct
  source 1..80: mol_type = other DNA
agagacatgaatctataggaatatcacacatagtgagcacaactgtgagtgaaatcccatgtttcatgcatcccagcagt

SEQ ID NO: 14667 - DNA, 80 bp, synthetic construct
  source 1..80: mol_type = other DNA
cgagaagcagtcaagatggagaactgcaaaattaacagcttaagttttccaggagtctcagtgcccaatgtcaggtctac

SEQ ID NO: 14668 - DNA, 80 bp, synthetic construct
  source 1..80: mol_type = other DNA
atgggcttcaagactagtgtgtctctcccttagtatgttcctcctcagtttgaaaggacttcctggtaaaggactgaaag

SEQ ID NO: 14669 - DNA, 80 bp, synthetic construct
  source 1..80: mol_type = other DNA
cgtgccactgcatgcactctaccctggatgacagagtaagatgctgtctcaaaaaaaagttatatggattaagataggat

SEQ ID NO: 14670 - DNA, 80 bp, synthetic construct
  source 1..80: mol_type = other DNA
tcaaattagataaaactagggttaaagaaaaacaaccccccacacacaaaattggagatcaaaaatcaataggttcttaa

SEQ ID NO: 14671 - DNA, 80 bp, synthetic construct
  source 1..80: mol_type = other DNA
tgtatatatatatatatttgcaactgaagcacagatgggacacaggtaagtgggagaactcaccaagctctttgttagta

SEQ ID NO: 14672 - DNA, 80 bp, synthetic construct
  source 1..80: mol_type = other DNA
ccagtggtccatgggaagggttggatgaataggtggagcacagaggatttttaaggcagtgaaactattctgaatgatac

SEQ ID NO: 14673 - DNA, 80 bp, synthetic construct
  source 1..80: mol_type = other DNA
cttgaaaacaggtgacagtggaaccctgttaggttcacaaatcctagactttgattatatagcccaggctcaaatttttc

SEQ ID NO: 14674 - DNA, 80 bp, synthetic construct
  source 1..80: mol_type = other DNA
agtagcacaaaatggactatgacaccatgtgtttacacagaaagaaaaaaatatcatacggtaattgctcctaaatatgc

SEQ ID NO: 14675 - DNA, 80 bp, synthetic construct
  source 1..80: mol_type = other DNA
ttaaataatctctcaacaatattgttttaggaaacccaatagagagtttcacaggcctgtttcttatgggattgctcaat

SEQ ID NO: 14676 - DNA, 80 bp, synthetic construct
  source 1..80: mol_type = other DNA
gtgtaaatcttctggttcaggggataaacaacaggaagtcattgaaatctattggcctatccgcattttgaaattatttt

SEQ ID NO: 14677 - DNA, 80 bp, synthetic construct
  source 1..80: mol_type = other DNA
atgtgtggtggtgaagaatacaatgactactaataaaatttggtgccattgccttaattcgtgctaagacaccagtcatt

SEQ ID NO: 14678 - DNA, 80 bp, synthetic construct
  source 1..80: mol_type = other DNA
tataacaggtataactgaagatagctggtaagagcatggtagaaaagaaataatttctgaaaactacatacttataccgt

SEQ ID NO: 14679 - DNA, 80 bp, synthetic construct
  source 1..80: mol_type = other DNA
tggtgagggaaaagaaaggtggacctgaagtcaggtgcaaacagcacaactgtatttgagtagtggttgcatgactgttg

SEQ ID NO: 14680 - DNA, 80 bp, synthetic construct
  source 1..80: mol_type = other DNA
gttcattcattttaacttttttaagtggtttgtcacagaattcctttcaatgctgagattttcaaatatattgcaaccat

SEQ ID NO: 14681 - DNA, 80 bp, synthetic construct
  source 1..80: mol_type = other DNA
ctagtacatgggataatgtataaataaacatgtaagtgtcgataagtactcaactcttttttactgagagggctttaggc

SEQ ID NO: 14682 - DNA, 80 bp, synthetic construct
  source 1..80: mol_type = other DNA
cagcccagggatcctaattcagcagttctagaggttattcagaaatctgcattttcatgaagtaccctggatgattctaa

SEQ ID NO: 14683 - DNA, 80 bp, synthetic construct
  source 1..80: mol_type = other DNA
tggagttttgggaattttaaggctttgagcaaggaacattttatgatcctctgcttaccacttgtttatttacaacagaa

SEQ ID NO: 14684 - DNA, 80 bp, synthetic construct
  source 1..80: mol_type = other DNA
tagcaactactgagcattgcaaggagaagaaattgggatgggtgcctataaagagaaaaactctctttttaaccttcaaa

SEQ ID NO: 14685 - DNA, 80 bp, synthetic construct
  source 1..80: mol_type = other DNA
cccaaaattaatttttgtaaaggtagagaagcaaaaggaagcaaggatctggggagctggcaacaccagaaataagtata

SEQ ID NO: 14686 - DNA, 80 bp, synthetic construct
  source 1..80: mol_type = other DNA
tataaaagaaagttcagcaaaatgtatgctagaaatagaagtatcaacatctgaatcataagagaactcacagtgagagg

SEQ ID NO: 14687 - DNA, 80 bp, synthetic construct
  source 1..80: mol_type = other DNA
tgtgtgtaatatctacttggtaggagaattggcattagagggagggaagtagaaaatcaaaagaacataagagtatgcta

SEQ ID NO: 14688 - DNA, 80 bp, synthetic construct
  source 1..80: mol_type = other DNA
cactgtcttccacaatggttgaactaatttacactcccaccaacggtgtaaaaacgttcatttttctccataacctagcc

SEQ ID NO: 14689 - DNA, 80 bp, synthetic construct
  source 1..80: mol_type = other DNA
gcaaaaactccgtctcaaaaaaataataataataataatagtttttctagctctgtgaagtatctcaatggtagtttaat

SEQ ID NO: 14690 - DNA, 80 bp, synthetic construct
  source 1..80: mol_type = other DNA
agtttttaatatgaatgcatatggcaaatcctcttaaagcagaaagatatgtaaagattgaaatttaaaaacagggaaaa

SEQ ID NO: 14691 - DNA, 80 bp, synthetic construct
  source 1..80: mol_type = other DNA
atataaactcaacaatacagcctcacaatttataaagcaacaagtgaaagaactacagttagaagttgagttttttaaaa

SEQ ID NO: 14692 - DNA, 80 bp, synthetic construct
  source 1..80: mol_type = other DNA
cacaaaaaaagaccaaaatcaataagctgagtgttcaactcaaacgctaggtaaagaggaagagaatacacccaaaggag

SEQ ID NO: 14693 - DNA, 80 bp, synthetic construct
  source 1..80: mol_type = other DNA
gttcagttctaggcaaataccatagcaataactgtgactctactgccattcacaccagaaagaccaagtgggagacctaa

SEQ ID NO: 14694 - DNA, 80 bp, synthetic construct
  source 1..80: mol_type = other DNA
tcataagggtagggccatgattcaataggattaattcaataggaagagaaaccagggtatgctctcttgctctttctccc

SEQ ID NO: 14695 - DNA, 80 bp, synthetic construct
  source 1..80: mol_type = other DNA
aggttaaaagtaaaaggatggaaaaagacacaacatgttttccttaattagaggaatacaggagtgagtgtactactctc

SEQ ID NO: 14696 - DNA, 80 bp, synthetic construct
  source 1..80: mol_type = other DNA
acggaaagacagcagaggaaaaatcatcagcataatacccgataggtgctttttcaatcatcactgtcctcccaccctcc

SEQ ID NO: 14697 - DNA, 80 bp, synthetic construct
  source 1..80: mol_type = other DNA
aatttaaaaatacactgaattgaaagaaaataagaatacaacatatcaaaaatttctaggagagacaacccacagaatga

SEQ ID NO: 14698 - DNA, 80 bp, synthetic construct
  source 1..80: mol_type = other DNA
tactatttagctagaaaaaagaatgatatccagttatttgcaacaacatagatggaactggagatcattatgttaagtga

SEQ ID NO: 14699 - DNA, 80 bp, synthetic construct
  source 1..80: mol_type = other DNA
ggaacaattgaacattcaagggccataggaggagagaaagacaacaaggaggaaaagaaggaggagcagcagtttaatct

SEQ ID NO: 14700 - DNA, 80 bp, synthetic construct
  source 1..80: mol_type = other DNA
aaaaatagtgacaataccaaatgcctgtgaggatgcagtaaaacaatcactcgcacattgctggtgcaaccactctggaa

SEQ ID NO: 14701 - DNA, 80 bp, synthetic construct
  source 1..80: mol_type = other DNA
aacttacaaaaattattaatttctaatatttgaaaatcatatatcagtatttgaatatcatatatccaataaagggttaa

SEQ ID NO: 14702 - DNA, 80 bp, synthetic construct
  source 1..80: mol_type = other DNA
taatgggtgtagagttctggttttgcaaggtgaaaaggagttctggagattggttgcacaaaaatgtgaatatacttaac

SEQ ID NO: 14703 - DNA, 80 bp, synthetic construct
  source 1..80: mol_type = other DNA
tggaccttggggtagtaacagctatcctccacccagttctttgtaaatactttgctaataaataaactttccttgaaatg

SEQ ID NO: 14704 - DNA, 80 bp, synthetic construct
  source 1..80: mol_type = other DNA
ctcccactccacttctctcctctcacccttttgctccctctctcttactctcttccactccttctctttttttcctctct

SEQ ID NO: 14705 - DNA, 80 bp, synthetic construct
  source 1..80: mol_type = other DNA
aactgcccagatatagacaaggcccaaagccccccattcctagactaaactagaatttcaaaaggaatttgctttgtcaa

SEQ ID NO: 14706 - DNA, 80 bp, synthetic construct
  source 1..80: mol_type = other DNA
acggccccaaattctgtcatgtctaagtgggaaaatggaagaaggcattgatttctcccctactcaagcagaagagaatt

SEQ ID NO: 14707 - DNA, 80 bp, synthetic construct
  source 1..80: mol_type = other DNA
tctttgtggatgaaaatatctagcagtattcatagcaaatgcagtaggaaggagagagttaatcacaaacagaaagtaag

SEQ ID NO: 14708 - DNA, 80 bp, synthetic construct
  source 1..80: mol_type = other DNA
gtgaggagacgttccccaggaaagttcaagtgagcatgtgatttccactctcttctctgttctccattcccttcccaact

SEQ ID NO: 14709 - DNA, 80 bp, synthetic construct
  source 1..80: mol_type = other DNA
gctctaccacacaggtgtaagtgtccccgtaagagggggttaaggctaaatgggagagggtctggtatgtccagtctcca

SEQ ID NO: 14710 - DNA, 80 bp, synthetic construct
  source 1..80: mol_type = other DNA
aatgcagatttcctaggctgtatccccagatactttctttcaacagatctggagtggtactaaggggcttgcatctttaa

SEQ ID NO: 14711 - DNA, 80 bp, synthetic construct
  source 1..80: mol_type = other DNA
agaggagccagggaagggagaacaggtcaatgtcttctactggcctggcaataaataaataaatatataaataataaata

SEQ ID NO: 14712 - DNA, 80 bp, synthetic construct
  source 1..80: mol_type = other DNA
cagtcttatgggactgagtctttaacctttggtgtctatgttaactctagttaatgtcacaatggaattgaattatagga

SEQ ID NO: 14713 - DNA, 80 bp, synthetic construct
  source 1..80: mol_type = other DNA
agccccagcctgggtagatgatctccagacactgagcagaatactatattgcccgggtcccttgaccccccaaatgagtg

SEQ ID NO: 14714 - DNA, 80 bp, synthetic construct
  source 1..80: mol_type = other DNA
cctgcattatgaagccactaggaaaatgagataaagctttcctacttttcttcccctgaaaagacagattttgtttttta

SEQ ID NO: 14715 - DNA, 80 bp, synthetic construct
  source 1..80: mol_type = other DNA
tgtgtgtcttgaaaaggcagattttatgtatttgcgtatttatttttttcacaggttttttttttgaaagtctcactctg

SEQ ID NO: 14716 - DNA, 80 bp, synthetic construct
  source 1..80: mol_type = other DNA
aaaacttgttaattgtcctcatttcccaggttggaaaacaggtccaaagattcacacccaaggtctaaaggctgtaactc

SEQ ID NO: 14717 - DNA, 80 bp, synthetic construct
  source 1..80: mol_type = other DNA
tgggaaaatacagagtgagaagatatggattctgcccccatatcgctttgcttgtacgtcaattggggagtgagaacaaa

SEQ ID NO: 14718 - DNA, 80 bp, synthetic construct
  source 1..80: mol_type = other DNA
acccagatactaagtaataaaaccattacttgaactcaggatttattactttaaatcctgtattgccaataatcaattgg

SEQ ID NO: 14719 - DNA, 80 bp, synthetic construct
  source 1..80: mol_type = other DNA
gcattcctgctgggaatagtgagtaatattttttattagaaaaggggcaccagactagagaggatactgagtgcttctag

SEQ ID NO: 14720 - DNA, 80 bp, synthetic construct
  source 1..80: mol_type = other DNA
ctctagtacaatgccaagaacagaaactccctcaccaaataattgccctctcaactttattgccaccctgtcatccaaag

SEQ ID NO: 14721 - DNA, 80 bp, synthetic construct
  source 1..80: mol_type = other DNA
taccctaagaggagatcctgggcaggatgtgagaaatctgagcatcctctgtttggatggccgaagctgctggcatcaaa

SEQ ID NO: 14722 - DNA, 80 bp, synthetic construct
  source 1..80: mol_type = other DNA
agtcacaatgcaggagaaaatgtcagaaggttctggtgtgaagtttaagtaagaaaaggcctggaagctgagtccatcga

SEQ ID NO: 14723 - DNA, 80 bp, synthetic construct
  source 1..80: mol_type = other DNA
ccgggattttcccatcaagttttggccctatttgctggatcatccactcgcagaactctttgtcaaataaaatggcagga

SEQ ID NO: 14724 - DNA, 80 bp, synthetic construct
  source 1..80: mol_type = other DNA
aggtgtggtggcaaacacctgtggtctcagctactctggaggctgaggcaggaggattgcttgtgcctaggaagttgggg

SEQ ID NO: 14725 - DNA, 80 bp, synthetic construct
  source 1..80: mol_type = other DNA
tctgccccatcctctacagagaaggaaactaagacacttttcaagaatcacaagataagttaatgatagaaagcagagta

SEQ ID NO: 14726 - DNA, 80 bp, synthetic construct
  source 1..80: mol_type = other DNA
tctaattcatttggcagacatatattgaaaatacaagaaattctgggtgttgggcccagggctagaaatacaaagatgaa

SEQ ID NO: 14727 - DNA, 80 bp, synthetic construct
  source 1..80: mol_type = other DNA
ttgaagcagaaaagaatgccatgggagcaggtttacagagagaaagagcttgattttgtacatgttgaatttgaaatgcc

SEQ ID NO: 14728 - DNA, 80 bp, synthetic construct
  source 1..80: mol_type = other DNA
tagaagcagatcagagaaataaaaaagaggtgtgccatgaaggagggcaaggtcagcatttttaaatgctactcaaaagt

SEQ ID NO: 14729 - DNA, 80 bp, synthetic construct
  source 1..80: mol_type = other DNA
gccagatggcaaatattttagacattgtgggctatcagatctctgtcatgagtactcaactgtggcacgaaagcctccat

SEQ ID NO: 14730 - DNA, 80 bp, synthetic construct
  source 1..80: mol_type = other DNA
tcactgtctactttgtcattagctatgaatgcctctgaaaataatggcacagcaccggtaaatccaggaggctctggctt

SEQ ID NO: 14731 - DNA, 80 bp, synthetic construct
  source 1..80: mol_type = other DNA
tgcaatagcagttttttgtttttgttttttttttaaatatggaacgcttcatgaatttgcatgttcttaaactgtattct

SEQ ID NO: 14732 - DNA, 80 bp, synthetic construct
  source 1..80: mol_type = other DNA
gtactctcatgaatgtcaacaattttcaacatttaacattcttccattcttgtttcatctattgttctgcattttttgga

SEQ ID NO: 14733 - DNA, 80 bp, synthetic construct
  source 1..80: mol_type = other DNA
gcctcttcagtacgtttccaaagcaccctgtgttggccattatcactgttttaattgtattattatcttccatttatatg

SEQ ID NO: 14734 - DNA, 80 bp, synthetic construct
  source 1..80: mol_type = other DNA
tatttattggccaccttctgtgtctagcagtatgctctgtatcagatacctgccatcatcacacttaaagtctaatgaaa

SEQ ID NO: 14735 - DNA, 80 bp, synthetic construct
  source 1..80: mol_type = other DNA
gaaactataaaagttactgtaagaaaatactggggaaatgctcaagactttgagcaaacattttttggtttaagacttca

SEQ ID NO: 14736 - DNA, 80 bp, synthetic construct
  source 1..80: mol_type = other DNA
ggggtggaggggggatgaagagagattcattaatggttacaaaaatatagttaaattgaaggaataaattctatagtgtt

SEQ ID NO: 14737 - DNA, 80 bp, synthetic construct
  source 1..80: mol_type = other DNA
caaaggcttcaccaaactgccaaaaaagctaatggcacataaaaagcttaaggagtcctgatttaatcagtcattcaatg

SEQ ID NO: 14738 - DNA, 80 bp, synthetic construct
  source 1..80: mol_type = other DNA
aaacaaacaaacaaagggtacattctggcctctattctctctccatctcatgtgcttgtttgcctttctgccgtgggatg

SEQ ID NO: 14739 - DNA, 80 bp, synthetic construct
  source 1..80: mol_type = other DNA
gtaatcacataaatgccattcactgtggaaagtaaaatcataaggggaagggacaccaaagaatgagcagttagctcaac

SEQ ID NO: 14740 - DNA, 80 bp, synthetic construct
  source 1..80: mol_type = other DNA
agactgttggtatagctcaggtgatagaattaggacagaagggtgagttgatggatagttaagaggcaaaattatgagtc

SEQ ID NO: 14741 - DNA, 80 bp, synthetic construct
  source 1..80: mol_type = other DNA
aatgagaaaggaatacacaattgacccagtttgcaggtgggaaatgggaagccagttctgcaaattggcctttctgttct

SEQ ID NO: 14742 - DNA, 80 bp, synthetic construct
  source 1..80: mol_type = other DNA
cggcagccatgctgaactcgtatggagaggcgagtgggggggacagagtccaggactgcgggataggaagctggggatat

SEQ ID NO: 14743 - DNA, 80 bp, synthetic construct
  source 1..80: mol_type = other DNA
gtcgtcacaccgcaggctggaggttacgcttcgagtcgcttaccgaatttgtgtgcattcacgtggacacggcctgtggg

SEQ ID NO: 14744 - DNA, 80 bp, synthetic construct
  source 1..80: mol_type = other DNA
tcttaccgtatatttgttcacctacgttgattatttttcccagatacgtacacaagtttgttttctccctggtagcgaag

SEQ ID NO: 14745 - DNA, 80 bp, synthetic construct
  source 1..80: mol_type = other DNA
ggagtattataagactctggcaacactgttttagactgtggggcatgggaacgttagatcccctcatcgccgttctgaag

SEQ ID NO: 14746 - DNA, 80 bp, synthetic construct
  source 1..80: mol_type = other DNA
ctcggagtctgtccaccccctctactccgccctcaagaggatttcaaagatggaggcggcggctccctaaaccacttttc

SEQ ID NO: 14747 - DNA, 80 bp, synthetic construct
  source 1..80: mol_type = other DNA
gtaaagggatcactctcccgtgtgtgcaggttcctaatgcccagggtatgtcattaaatcttttgctttctttgggtggg

SEQ ID NO: 14748 - DNA, 80 bp, synthetic construct
  source 1..80: mol_type = other DNA
gcactttttcctcatttggacgatattgccctaattttgttcccatctttacaggctccctggggaagggaatgcagggt

SEQ ID NO: 14749 - DNA, 80 bp, synthetic construct
  source 1..80: mol_type = other DNA
acatttttttatttaggattatcacaaaattataaaacagcctatggacatgggtactattaagaggagacttgaaaaca

SEQ ID NO: 14750 - DNA, 80 bp, synthetic construct
  source 1..80: mol_type = other DNA
gccgtctcttctgtgtcacacacagccctgtatactcctccacctgagatacctaccactgtcctcaacattccccaccc

SEQ ID NO: 14751 - DNA, 80 bp, synthetic construct
  source 1..80: mol_type = other DNA
ttctttttctagacataaatatttcttcaacccacccaaattcctttgacttcaaacttgaaccccagggcacagatcct

SEQ ID NO: 14752 - DNA, 80 bp, synthetic construct
  source 1..80: mol_type = other DNA
aaaagaagaaacggaaggcagagaagcatcgaggccgagctggggccgatgaagatgacaaggggcctagggcaccccgc

SEQ ID NO: 14753 - DNA, 80 bp, synthetic construct
  source 1..80: mol_type = other DNA
gcagctggcccatggtgtagtttggtagtgtttaagggagcagaaagacccatgtcagtatacctaaacaggtatacctt

SEQ ID NO: 14754 - DNA, 80 bp, synthetic construct
  source 1..80: mol_type = other DNA
aaagccccccaagaaaggtgagtatatactttcatgccactacagattgactccatcctgccttcttgactgtcttttat

SEQ ID NO: 14755 - DNA, 80 bp, synthetic construct
  source 1..80: mol_type = other DNA
ttgtcttgataattttgagggaaatattactgcagtgagaaaaggcaatagctaacctataattggattgtcttaatttt

SEQ ID NO: 14756 - DNA, 80 bp, synthetic construct
  source 1..80: mol_type = other DNA
acaccacaaactaagtgtagggcaacaccacaaactaaatgtaggaagcaataaattttactagtgatgctcagccctct

SEQ ID NO: 14757 - DNA, 80 bp, synthetic construct
  source 1..80: mol_type = other DNA
ttgttgggttgtgggggaaggtgagagtcggtcttatttactcagtcacacatttattgagttcccttgattgccttttc

SEQ ID NO: 14758 - DNA, 80 bp, synthetic construct
  source 1..80: mol_type = other DNA
catttaacagataaagaaatgaggcacagagagattagtcaatttgcccaacatcaccacattgtcagtgagcactggag

SEQ ID NO: 14759 - DNA, 80 bp, synthetic construct
  source 1..80: mol_type = other DNA
catagctcactgtagcttcgaccttctgggctcaagtaatgctcttgcctcagcctcctgagtagctgggattacaggca

SEQ ID NO: 14760 - DNA, 80 bp, synthetic construct
  source 1..80: mol_type = other DNA
gctgatctgacaagaggcagagcttgctcgctgctcacctcctgctgtgcaccccagttcctaccaggccacggactggt

SEQ ID NO: 14761 - DNA, 80 bp, synthetic construct
  source 1..80: mol_type = other DNA
tatgaaggcaggttgtagagacaatgacagttcttccaagaaagacagttattaccttgtcttcctgcatggttttgttt

SEQ ID NO: 14762 - DNA, 80 bp, synthetic construct
  source 1..80: mol_type = other DNA
attgagggaaggagagaatgatgagcaactgagggagcagcttggggttgaaaagctacctcagaaagcagttctgtgat

SEQ ID NO: 14763 - DNA, 80 bp, synthetic construct
  source 1..80: mol_type = other DNA
ttacaggcatgacccaccaggccgagcctagaattttatttttattatttttatttcgatagctttaggagtacaggtgg

SEQ ID NO: 14764 - DNA, 80 bp, synthetic construct
  source 1..80: mol_type = other DNA
ctacttttagttctttgagaaatctccatagtgttttccacagaggttgtactaatttacattcccaccagcaatgtata

SEQ ID NO: 14765 - DNA, 80 bp, synthetic construct
  source 1..80: mol_type = other DNA
tctgctgtgcagaagctttttagtttaattaggtaggtcctatttatttatttttgcttctgttggatttgtttttgagg

SEQ ID NO: 14766 - DNA, 80 bp, synthetic construct
  source 1..80: mol_type = other DNA
cctgtagattgctttgggcagtatggtcatttttcatattgattcttccaatctatgagcatggcatggttttccatttg

SEQ ID NO: 14767 - DNA, 80 bp, synthetic construct
  source 1..80: mol_type = other DNA
ttattataaagggatactggattttaccaaatgctttttatgcattgattgaaatgatcatatgacttcgttttaaattc

SEQ ID NO: 14768 - DNA, 80 bp, synthetic construct
  source 1..80: mol_type = other DNA
tagactgcgtaatttctaaatggtaactattcatacctaccattcatcctaaccataccttcaggcttggcttagacact

SEQ ID NO: 14769 - DNA, 80 bp, synthetic construct
  source 1..80: mol_type = other DNA
gagaaatctgctggggaaatggtcaaattttatgtctgtatttaatagccatgtagtggaacaaaaatttaaaggcatta

SEQ ID NO: 14770 - DNA, 80 bp, synthetic construct
  source 1..80: mol_type = other DNA
tttaaaatacgattaggtcatctcttaaagagatgggcagagccctcataaagggcttaatgccatcatctctagagtgg

SEQ ID NO: 14771 - DNA, 80 bp, synthetic construct
  source 1..80: mol_type = other DNA
taaacttgatcactcagtcgaggtgatgacagccatcacctctgtaaaggtatttctcccatttgacaatagcaaataat

SEQ ID NO: 14772 - DNA, 80 bp, synthetic construct
  source 1..80: mol_type = other DNA
tctccctgttgcccaggctggagtgcaatggtgcaatctccgctgacctcaacctctgcctcccaggttcaaacaattct

SEQ ID NO: 14773 - DNA, 80 bp, synthetic construct
  source 1..80: mol_type = other DNA
ttaggactacagggggtaccaccatgcctggctaatttttttattttatgtagagacagagtcttgctatgttggccagg

SEQ ID NO: 14774 - DNA, 80 bp, synthetic construct
  source 1..80: mol_type = other DNA
tatctggtgtgcttcttagtgaatgtggagatactggatttgacaaatatcagttggttagactagtgtttggcacattg

SEQ ID NO: 14775 - DNA, 80 bp, synthetic construct
  source 1..80: mol_type = other DNA
gtctgaactgggggagtgcttcgactgatccaggagggagaagaaaatctcttcagtaattccatccccagtcattcttc

SEQ ID NO: 14776 - DNA, 80 bp, synthetic construct
  source 1..80: mol_type = other DNA
cagcactgtgtcagggcgcagacccttggaacaactgtaagagaccagaagccccaataaagacagattgaacttaaaac

SEQ ID NO: 14777 - DNA, 80 bp, synthetic construct
  source 1..80: mol_type = other DNA
ggggggtgcctgtaattccagctactcaggagggtgaggcaggagaattgcttgaacctgggagacagaggttgcagtga

SEQ ID NO: 14778 - DNA, 80 bp, synthetic construct
  source 1..80: mol_type = other DNA
tagtaaacacagtaacttttactatattgtaaaaattacaatatagtcacattaaaagaaagggcatgggaaagggggca

SEQ ID NO: 14779 - DNA, 80 bp, synthetic construct
  source 1..80: mol_type = other DNA
atttttccagtaatttaaagctgtgactaggagacacagcctctgtgggttgtgagggttgagatgatataaactcagga

SEQ ID NO: 14780 - DNA, 80 bp, synthetic construct
  source 1..80: mol_type = other DNA
tgccatggcactccagcctggtgacagagtgagaccccatctcagaaaagacagcctccctgttgctgccccctgcactc

SEQ ID NO: 14781 - DNA, 80 bp, synthetic construct
  source 1..80: mol_type = other DNA
tccctttcagggtaaacctgaactcaggaggcaaatttcatgaagtccatgtgaaatggctcattcacaaagtaacacac

SEQ ID NO: 14782 - DNA, 80 bp, synthetic construct
  source 1..80: mol_type = other DNA
tgcatggggagggggctccgtaccccaatgcctgaggagtggcgcatccaggccccagtgctccacctggcagtcataga

SEQ ID NO: 14783 - DNA, 80 bp, synthetic construct
  source 1..80: mol_type = other DNA
gcccatgtggtcagctgtgtttggcgagttcagggtcaaggagagagaaaaaaatgtgtctgtctcatccacaatatgtg

SEQ ID NO: 14784 - DNA, 80 bp, synthetic construct
  source 1..80: mol_type = other DNA
gcatctgttgggtggaggtttgggtctcaggaaggaggaaggaatgaggagaaatctgaacgtcagcaaaggctgactgg

SEQ ID NO: 14785 - DNA, 80 bp, synthetic construct
  source 1..80: mol_type = other DNA
gtaagaaaaaatgtgtaattgttggagttgtttggtctaaagcaaagtgtaaagagctcccgtggactccccgaggaggg

SEQ ID NO: 14786 - DNA, 80 bp, synthetic construct
  source 1..80: mol_type = other DNA
atgtacatgtttattggatcaagcatgtggattttgtcattctaatttattacggttttctttatctttggactggccta

SEQ ID NO: 14787 - DNA, 80 bp, synthetic construct
  source 1..80: mol_type = other DNA
tgcaggaagatataatggtttggtgagcacatggcactgtctttgctgcattctgattgtgtttattgtgaatattgatg

SEQ ID NO: 14788 - DNA, 80 bp, synthetic construct
  source 1..80: mol_type = other DNA
attttgctagtgtgtctagagtgggtttttccttctctctgtaagacattatggatcttctctatcttttaattctggga

SEQ ID NO: 14789 - DNA, 80 bp, synthetic construct
  source 1..80: mol_type = other DNA
cattatttgttttcttggaatgtatatgtatggtccacattccctcctagatggaaagggcctgtaagaagggatcatgg

SEQ ID NO: 14790 - DNA, 80 bp, synthetic construct
  source 1..80: mol_type = other DNA
tcgctctgttttaatctattttgctttaagtgccgtgctaggctttgggaccacaattatggttcctgccaacaagaatg

SEQ ID NO: 14791 - DNA, 80 bp, synthetic construct
  source 1..80: mol_type = other DNA
ttctcttttctgatggttctctgcccccagttccttggcctgtccccatcgctcgccaacatttccgtggctggtctaat

SEQ ID NO: 14792 - DNA, 80 bp, synthetic construct
  source 1..80: mol_type = other DNA
aaattaatgtttttataataacatatatctccatatgcttcacagaaacatgtaacttctgtctatacaagctttgggta

SEQ ID NO: 14793 - DNA, 80 bp, synthetic construct
  source 1..80: mol_type = other DNA
ctcccttctatctctctgttaactctaatcagccccctgctgccagatccttcccttcagtttagaatttaggctcaaat

SEQ ID NO: 14794 - DNA, 80 bp, synthetic construct
  source 1..80: mol_type = other DNA
cacaaatgaacactcttagttcacactgcccattggcacacgagggcatggagagtgttctctatggagaagtaggtgct

SEQ ID NO: 14795 - DNA, 80 bp, synthetic construct
  source 1..80: mol_type = other DNA
tgacttgacttagtgccataggaaagtgaaggcaggaaactgatgctaattgattctgggcctcttgttttctgcctcaa

SEQ ID NO: 14796 - DNA, 80 bp, synthetic construct
  source 1..80: mol_type = other DNA
cataccaaggctaacaaacctatgggaacctgttagtcccaaaagtgaaatgtgtaaattctcaaaacatgtacatatat

SEQ ID NO: 14797 - DNA, 80 bp, synthetic construct
  source 1..80: mol_type = other DNA
ctgtggtatcttgttatggtggccctggctaactaatcaccctttctcacttacctttagctcttccttactcaataagt

SEQ ID NO: 14798 - DNA, 80 bp, synthetic construct
  source 1..80: mol_type = other DNA
ggccaccatggagagattgcactgcgcaatgcccagtgaagcagtagggtaaggccacccctgaggccctagaccaattg

SEQ ID NO: 14799 - DNA, 80 bp, synthetic construct
  source 1..80: mol_type = other DNA
aaactttttaggaaatctcatactgttttccatggtggctgcaccatttacattcctaccaacagtgcaccaggattcca

SEQ ID NO: 14800 - DNA, 80 bp, synthetic construct
  source 1..80: mol_type = other DNA
gggtgtatgctcagaaatgagattgctggatcacatggtagttctatttttaattttttaaggagcctccatactgtttt

SEQ ID NO: 14801 - DNA, 80 bp, synthetic construct
  source 1..80: mol_type = other DNA
tccatatgaatttaaggatttttttttctgtttctgtgaaaaatgtaaggaaattttgatagggattgcatcaaatctgc

SEQ ID NO: 14802 - DNA, 80 bp, synthetic construct
  source 1..80: mol_type = other DNA
tttataggctatttgtcattgttgctgctgttgagttgtagaagctccttatatattctggatattaacttcttactgaa

SEQ ID NO: 14803 - DNA, 80 bp, synthetic construct
  source 1..80: mol_type = other DNA
aagggatattgtgttttaagaagttataacaatgaacaaattccattcgcccagagcaactttctaatggattatatata

SEQ ID NO: 14804 - DNA, 80 bp, synthetic construct
  source 1..80: mol_type = other DNA
aattccttatacagaggctagtttcaactgcagaagtaacatggggtcctttgtctatcaaacactccccttgtaacatt

SEQ ID NO: 14805 - DNA, 80 bp, synthetic construct
  source 1..80: mol_type = other DNA
ttaattctcattattctgacaacagactctagaatccagccatattctactgtttggagccagccagggactttccaagt

SEQ ID NO: 14806 - DNA, 80 bp, synthetic construct
  source 1..80: mol_type = other DNA
tagccctacatctagtcttactgtttggagccttataaaaagatctcatgagcagccccctgggaatagcatgtctttgt

SEQ ID NO: 14807 - DNA, 80 bp, synthetic construct
  source 1..80: mol_type = other DNA
ttaaacttaccctatgttcatagaataaactcaacttggtcattattttacctagtgttatatttaattgactaatagat

SEQ ID NO: 14808 - DNA, 80 bp, synthetic construct
  source 1..80: mol_type = other DNA
tctgttgccctggctggagtgcagtggtgctgtcatatctcactgcagccttggactcctgggctcaagtgatcctccca

SEQ ID NO: 14809 - DNA, 80 bp, synthetic construct
  source 1..80: mol_type = other DNA
cacactgcaacctccccatcccgggttcaaacgattctcctgtctcagcctcccgagtggctggggttataggtgcctgc

SEQ ID NO: 14810 - DNA, 80 bp, synthetic construct
  source 1..80: mol_type = other DNA
cactatattctagtgtcctttcacttcagcctgaaagtattttagtacagctgtcttgctaatgatgaaatctctgtttc

SEQ ID NO: 14811 - DNA, 80 bp, synthetic construct
  source 1..80: mol_type = other DNA
tggttcttttcttatataattcctgttgctgtagtctctattgggtggtgagacatcattcatatgcttgcctttagtaa

SEQ ID NO: 14812 - DNA, 80 bp, synthetic construct
  source 1..80: mol_type = other DNA
tcctaagtatgcaccccatcctacatatgtacatggccttctagatttccaggaatatgatggaaataatcaaagcccct

SEQ ID NO: 14813 - DNA, 80 bp, synthetic construct
  source 1..80: mol_type = other DNA
ttaggcatatagagtagaaaatgatccttattttaatctggaatggatctgacttgaagcagagtttaagctttttctgg

SEQ ID NO: 14814 - DNA, 80 bp, synthetic construct
  source 1..80: mol_type = other DNA
gttatgactaccataatctaccactttgaccagcaaaccatagtcactccttgttgggagaatacaatggatcaaacata

SEQ ID NO: 14815 - DNA, 80 bp, synthetic construct
  source 1..80: mol_type = other DNA
aagtcagcctctgtataaggacaatttcattcctatacttgctcttattttctttcctttttctctggatttggctctct

SEQ ID NO: 14816 - DNA, 80 bp, synthetic construct
  source 1..80: mol_type = other DNA
tacattactttcttttccatttggataaatactaattagtgagattgcttgattgtgtagtagttctatttttagttttt

SEQ ID NO: 14817 - DNA, 80 bp, synthetic construct
  source 1..80: mol_type = other DNA
tggatattcatcccctgttggatgagtagcttgcatatattttctcccatttaagaggttttctcttcaccctgtagatt

SEQ ID NO: 14818 - DNA, 80 bp, synthetic construct
  source 1..80: mol_type = other DNA
tatatattccatcatatatatatatattccatcatatatatatatattccatcatatatatatatatatatattccatca

SEQ ID NO: 14819 - DNA, 80 bp, synthetic construct
  source 1..80: mol_type = other DNA
gttttattctcctacatgtggcttgccaattatcccagctcaatttgttaaatagggtgtttttttaccactttatgttt

SEQ ID NO: 14820 - DNA, 80 bp, synthetic construct
  source 1..80: mol_type = other DNA
tttgaagtatatgatcatatcattagtgaacagtgatggtttgactttctctttacctatttgtatgtcctttatttctt

SEQ ID NO: 14821 - DNA, 80 bp, synthetic construct
  source 1..80: mol_type = other DNA
ataaatgtcttcttttgagaaggggtgaaagtcagcattcttgtctccttccagttctcaaggggaatgctttcaacttc

SEQ ID NO: 14822 - DNA, 80 bp, synthetic construct
  source 1..80: mol_type = other DNA
aatttcatttatttctgctctgaaatttatttcaatttcatttatttctttgctatttattttattctgatgggtttggg

SEQ ID NO: 14823 - DNA, 80 bp, synthetic construct
  source 1..80: mol_type = other DNA
aggcaccctgtgggagattactgaattatgggggtgggtctttccagtgctgttcttgtgacagtgaatgggtctcagtt

SEQ ID NO: 14824 - DNA, 80 bp, synthetic construct
  source 1..80: mol_type = other DNA
gtatgcattcaagggtggaagatccccctttcccacctccacagtttgggcactcacagtatttgggatgtctcccaggt

SEQ ID NO: 14825 - DNA, 80 bp, synthetic construct
  source 1..80: mol_type = other DNA
taggaggggtgaacatgtgtatacttgtcttttcccagttcctaaagaaaaagctttcaacttttcaccattctgtatga

SEQ ID NO: 14826 - DNA, 80 bp, synthetic construct
  source 1..80: mol_type = other DNA
agatagggttatggctgaaagcagcgtaatccttaccttgagttaattgcttggggcacagatacaaaggaacatttatc

SEQ ID NO: 14827 - DNA, 80 bp, synthetic construct
  source 1..80: mol_type = other DNA
agaccgacaaggcaatcaggtacatgaacccatttcttttaatgcttataaggagctaagaaaaagcattaaagaaaaca

SEQ ID NO: 14828 - DNA, 80 bp, synthetic construct
  source 1..80: mol_type = other DNA
aaactggggcaatcccagcagctttcctcggtctgatggagagctcacagtcctctctctcagagcagccaccactggga

SEQ ID NO: 14829 - DNA, 80 bp, synthetic construct
  source 1..80: mol_type = other DNA
cgattcctcgagattggcctataatcattattgacttaaaggactgcttttatatgattcccctagcagaacaggacaga

SEQ ID NO: 14830 - DNA, 80 bp, synthetic construct
  source 1..80: mol_type = other DNA
cagttttgtccctattgttagatctgcaaatagctctctctgattacacaggacaaatagagcatgttcttcctgctgat

SEQ ID NO: 14831 - DNA, 80 bp, synthetic construct
  source 1..80: mol_type = other DNA
ccagctcacaatttcaacaattttgtcacacgtggaatatccaacgttccataggcatcccgtataacccccaaggacag

SEQ ID NO: 14832 - DNA, 80 bp, synthetic construct
  source 1..80: mol_type = other DNA
aatgcctttaaagtcttagctgcaggtagcttcaaatcaggtaatgcaatcaatgactctttcccaaacattccttcctg

SEQ ID NO: 14833 - DNA, 80 bp, synthetic construct
  source 1..80: mol_type = other DNA
aacaagatgcactggtattctaacagcaactaaactgcgactgggcgcataaacatatctgcgtcacttctctatcatag

SEQ ID NO: 14834 - DNA, 80 bp, synthetic construct
  source 1..80: mol_type = other DNA
cttctctaactcgtttctgtgcactatttctatgttttctccttagttttaccttgcctgggtttgcccatttgttattc

SEQ ID NO: 14835 - DNA, 80 bp, synthetic construct
  source 1..80: mol_type = other DNA
acgctgctaggagcagatcatcctactcaagacaataaaaaaggaatcatcatgtaccttacatatttagagatacgtgc

SEQ ID NO: 14836 - DNA, 80 bp, synthetic construct
  source 1..80: mol_type = other DNA
ctggccatgatttgatttttgtatgaaaaaaatctttgttgtagaaatcagcatactattttttttttattattattatt

SEQ ID NO: 14837 - DNA, 80 bp, synthetic construct
  source 1..80: mol_type = other DNA
gcagagacgctcctcacatcccggacggggcggcagggcagaggtgctccccacatctcagacgatgggcggccaggcag

SEQ ID NO: 14838 - DNA, 80 bp, synthetic construct
  source 1..80: mol_type = other DNA
agggagagggagagacactattttttaaaatatggagagaagatattctggtggctgaaagtgtggtctggtgtcagata

SEQ ID NO: 14839 - DNA, 80 bp, synthetic construct
  source 1..80: mol_type = other DNA
gacagaatactatggattaatcaatgaagccatctgacctggaaaccatttggccttctctgtgagaaggatttttaaaa

SEQ ID NO: 14840 - DNA, 80 bp, synthetic construct
  source 1..80: mol_type = other DNA
cttaagatgggaacatagatggttgattttagagtttccctcctttccaattatgtaaagttataaattattctctaatt

SEQ ID NO: 14841 - DNA, 80 bp, synthetic construct
  source 1..80: mol_type = other DNA
ttgctccccatgccctgacagaccctggtgtgaggtgttcccctccctgtgtccatgtgttctaattgttgaactcccac

SEQ ID NO: 14842 - DNA, 80 bp, synthetic construct
  source 1..80: mol_type = other DNA
tcccacatggagtgactatggctggtaaaaattgcaatgaattagggcattttaaaaattttatttcttggctcttagtt

SEQ ID NO: 14843 - DNA, 80 bp, synthetic construct
  source 1..80: mol_type = other DNA
atgccctggtcctccaggtgaagagcacataggagccaaggagttcacgaaagtcattgaatttcaccctcaaaccccag

SEQ ID NO: 14844 - DNA, 80 bp, synthetic construct
  source 1..80: mol_type = other DNA
taaaacatgatccccatcaaacacaaagatgaatcccagatgaattaaagtagtaaatgtgaaatttaaaactgtaggag

SEQ ID NO: 14845 - DNA, 80 bp, synthetic construct
  source 1..80: mol_type = other DNA
ttgttaaaaagaggctggcacctctttctatgtctctttctccctctatgaccatgtgatgcactggctccacttgcctt

SEQ ID NO: 14846 - DNA, 80 bp, synthetic construct
  source 1..80: mol_type = other DNA
ctgtgggaacttgatcaaagtgcttaaagtctctgtgtatgtaaaaagatgtaagtatctctcatgtgaaatagtgaaaa

SEQ ID NO: 14847 - DNA, 80 bp, synthetic construct
  source 1..80: mol_type = other DNA
acctcagggggatctggaaggagacagcaccaggttaggcccctcttctgggatgaatcacaaaggctccacctcttagg

SEQ ID NO: 14848 - DNA, 80 bp, synthetic construct
  source 1..80: mol_type = other DNA
tttcactcgctgaattgtcacaataaccctatgaagcaaatacatatcatacattttacaggtaaggaaatgcagggaag

SEQ ID NO: 14849 - DNA, 80 bp, synthetic construct
  source 1..80: mol_type = other DNA
tcttatttttcactgagaatgactccctgacacagtaagtggccaagcaaagagtggtatttgaaactaaacaaaacaaa

SEQ ID NO: 14850 - DNA, 80 bp, synthetic construct
  source 1..80: mol_type = other DNA
ttcatcagaaagaagtggattatagtgcaaatgttattagtaactcaagtcagaggcactgagaagaacccactgaattt

SEQ ID NO: 14851 - DNA, 80 bp, synthetic construct
  source 1..80: mol_type = other DNA
gaaggcagtgtatgaccctcagagctgggtctggacttcaaacttggctcgttgatctgctgtgtaaccttggaaaactt

SEQ ID NO: 14852 - DNA, 80 bp, synthetic construct
  source 1..80: mol_type = other DNA
gtgctatctaataaaatatataattaatctttctttcaggtccacctccctgagatacctcctttttatttaatcatttc

SEQ ID NO: 14853 - DNA, 80 bp, synthetic construct
  source 1..80: mol_type = other DNA
ttagaattggtggtccaacaggatcacatttataagtgtctaaagtaagaagtaatgttctttgaaagtttgtaaaaata

SEQ ID NO: 14854 - DNA, 80 bp, synthetic construct
  source 1..80: mol_type = other DNA
tccattggttcttttctcagactctgtccaatcccagggtcacagaagactacttgggttcatggtctctaatatttcaa

SEQ ID NO: 14855 - DNA, 80 bp, synthetic construct
  source 1..80: mol_type = other DNA
tccctgtggctggtgtaatattatggcatctatgatccattgtttttctctcaggatactctcaggatatttctttttat

SEQ ID NO: 14856 - DNA, 80 bp, synthetic construct
  source 1..80: mol_type = other DNA
catctttcagggtagcaaggttggaatctcctgaatacagcccctcaagccctaaaacctcttatctattaccttgggtt

SEQ ID NO: 14857 - DNA, 80 bp, synthetic construct
  source 1..80: mol_type = other DNA
aagaaaaaattcaaaattcttattcttgaatgaaaaacgttctcttactggtgattgaggaggagaaacaaagactaaca

SEQ ID NO: 14858 - DNA, 80 bp, synthetic construct
  source 1..80: mol_type = other DNA
acaaatcttactgtgctgagatcgctcacaaaatttcctccagaactgcaaagtcatcatggaaagagtcacccagccgg

SEQ ID NO: 14859 - DNA, 80 bp, synthetic construct
  source 1..80: mol_type = other DNA
gcttcgacagcgacgtgggggagttccgggcggtgacggagctggggcggcctgctgcggagtactggaacagccagaag

SEQ ID NO: 14860 - DNA, 80 bp, synthetic construct
  source 1..80: mol_type = other DNA
cggggctgagatggattttacttgtcttgggttccccacggctgtcacagggcagtgtctcagttcattcgtctttttcc

SEQ ID NO: 14861 - DNA, 80 bp, synthetic construct
  source 1..80: mol_type = other DNA
aacaaacaggaatccttgccttggtgaaatgtatttgaactgggtcagaaatgaggccattgggtatcaggccttaactc

SEQ ID NO: 14862 - DNA, 80 bp, synthetic construct
  source 1..80: mol_type = other DNA
cttttctgctttctgaggaggaaaaaggtactggtggcagagatccaaaagaaaagttgccagtggcagtgtggaaattc

SEQ ID NO: 14863 - DNA, 80 bp, synthetic construct
  source 1..80: mol_type = other DNA
aattagccaggtgaagtggcaggcacctataatcccagctattcgggaggctgaggaaggagaattggttgaagcccgga

SEQ ID NO: 14864 - DNA, 80 bp, synthetic construct
  source 1..80: mol_type = other DNA
tatgctgcatcaggctccagaatctcagacaggacatgagtagggatgcagctggtggaggtgacactaaacctgggtct

SEQ ID NO: 14865 - DNA, 80 bp, synthetic construct
  source 1..80: mol_type = other DNA
gccaagaagttgctctgaagtcagtttctatcattctgctctttgattcaaagcactgtttctctcactgggcctccaac

SEQ ID NO: 14866 - DNA, 80 bp, synthetic construct
  source 1..80: mol_type = other DNA
ttatacatccagttgatgccttcagtctccctggcttcttacaagcatcttctgggccttgtgtgtccctgggcacctgt

SEQ ID NO: 14867 - DNA, 80 bp, synthetic construct
  source 1..80: mol_type = other DNA
cacagaaagaaggtatcagatgtgtctcactctgacatatgcaggtgtttatgaaactctgggatttctaaggaaggatg

SEQ ID NO: 14868 - DNA, 80 bp, synthetic construct
  source 1..80: mol_type = other DNA
caggaagtcaggctgacagtctttctcctgcacatctgctcccagaacctccccagcagaatgaagggaacctaagaatt

SEQ ID NO: 14869 - DNA, 80 bp, synthetic construct
  source 1..80: mol_type = other DNA
tgtaaacaaatgagctaattatgtgaattaagaggatggaaaagcagaaaaacagcaaaaagaaaatacatgtaaataat

SEQ ID NO: 14870 - DNA, 80 bp, synthetic construct
  source 1..80: mol_type = other DNA
ataggatgtccttcgttgctggaaatgtttaacatagcattggaagttctgaacatcactctgcgggcagaagaaaatta

SEQ ID NO: 14871 - DNA, 80 bp, synthetic construct
  source 1..80: mol_type = other DNA
tggaacctgtgtaatctgagtttcttgctgggcaggaagatggtctctgcaataccctcaatgactggctccccattgcg

SEQ ID NO: 14872 - DNA, 80 bp, synthetic construct
  source 1..80: mol_type = other DNA
aatacgtaggatgctacacagaatgcaggaagcaaacaggtaacaggaaggttattgggaacatgaaggaataacacaga

SEQ ID NO: 14873 - DNA, 80 bp, synthetic construct
  source 1..80: mol_type = other DNA
ccccactgagtttagggtctagaggattactcacctacagaaatgaatcccaaaggaaaaagaaaaatacatggtgtata

SEQ ID NO: 14874 - DNA, 80 bp, synthetic construct
  source 1..80: mol_type = other DNA
ccagaagtagggatatgaagaagtcgagaataaccacgcaacgtggagaattgtggcatccgtgcctgcaaaggtgataa

SEQ ID NO: 14875 - DNA, 80 bp, synthetic construct
  source 1..80: mol_type = other DNA
actgttcacctgacaagaaatatcttgaggaactcacttcacagatccctcaagaaaggaaccactgcaggagaataccc

SEQ ID NO: 14876 - DNA, 80 bp, synthetic construct
  source 1..80: mol_type = other DNA
agcctggagtgaggtctgagtccatcctgaaggctgcagggagataaattcaatgctgttagtgtggcacagcaggagca

SEQ ID NO: 14877 - DNA, 80 bp, synthetic construct
  source 1..80: mol_type = other DNA
aggatccaacaagtagaagaaagaacttcatagctcaaacaacaagcctttcgaattaacccagtcagacaaagacaaag

SEQ ID NO: 14878 - DNA, 80 bp, synthetic construct
  source 1..80: mol_type = other DNA
attttaaagcaacaacagttaaaaaagacaaagagggacattatacaatgataaaaggataactccaacaggaaaatatc

SEQ ID NO: 14879 - DNA, 80 bp, synthetic construct
  source 1..80: mol_type = other DNA
attcaaggctaatatgaacacattcacaggcacaaactagaaaacctagagaagacagattcctggaaatatacaaccct

SEQ ID NO: 14880 - DNA, 80 bp, synthetic construct
  source 1..80: mol_type = other DNA
cactgccatatactaacagtgaccaagctgagaattaaatcaagaactcaaccccttttatagtagctgcaaaaaaataa

SEQ ID NO: 14881 - DNA, 80 bp, synthetic construct
  source 1..80: mol_type = other DNA
aagttataagagtattgattggggaagtgataaatgtccatgaaatcttcacaatttatgttcttccactgtggcttcag

SEQ ID NO: 14882 - DNA, 80 bp, synthetic construct
  source 1..80: mol_type = other DNA
taaacaaatactcccatcaaaaagtgggctaagcagaggaacagacaattctcaaaagaaaatatacaaatggttgacaa

SEQ ID NO: 14883 - DNA, 80 bp, synthetic construct
  source 1..80: mol_type = other DNA
aaatgattttttaaaaaacttttattggaaggaccctccggagttctgaggaggaggcctgagcatatgtggggaaggca

SEQ ID NO: 14884 - DNA, 80 bp, synthetic construct
  source 1..80: mol_type = other DNA
cagatgcctgttcccaaatccaggccatagccaagataagggtggggagaaggtgaaacattcaccaccaccccaactcc

SEQ ID NO: 14885 - DNA, 80 bp, synthetic construct
  source 1..80: mol_type = other DNA
agaggacagatgaacaaaagcatagtcgaatagatgtgtgtaaagaaggggagagtcattaagcagggggaggatggaca

SEQ ID NO: 14886 - DNA, 80 bp, synthetic construct
  source 1..80: mol_type = other DNA
aactttgggcagtgcgtaggtgtgttgtggccaaaagaaggaacagggtttcacagtttagagcgtacaggttctagggc

SEQ ID NO: 14887 - DNA, 80 bp, synthetic construct
  source 1..80: mol_type = other DNA
aacagctggaattcagatctctcctaagtcctcttcctttcacatattttgtcacctgcctcgagacacacacagttact

SEQ ID NO: 14888 - DNA, 80 bp, synthetic construct
  source 1..80: mol_type = other DNA
gttagatgctaaatattcaaataaaagtaagacataggtcttgtcctcctgatgtttacagttcacagaagagaacacaa

SEQ ID NO: 14889 - DNA, 80 bp, synthetic construct
  source 1..80: mol_type = other DNA
ctttgaccaacatctccccaacccaatgcaaacatcttgattccattcattaaaaagggtaatgagagaagacagcctga

SEQ ID NO: 14890 - DNA, 80 bp, synthetic construct
  source 1..80: mol_type = other DNA
ttggatcaaattatagttccacttttagttctttaaggaatctcctcactgttttccacagtggctgtactagtttacat

SEQ ID NO: 14891 - DNA, 80 bp, synthetic construct
  source 1..80: mol_type = other DNA
attttaacatttatataaacaaatgatgccacttttacattttctttattagattaggaggtcgtacaggatcacattta

SEQ ID NO: 14892 - DNA, 80 bp, synthetic construct
  source 1..80: mol_type = other DNA
agactgcttgggttcatggtctctaatatttcagacaggagctccctttaatgagttcttgttttcctgactgcagctct

SEQ ID NO: 14893 - DNA, 80 bp, synthetic construct
  source 1..80: mol_type = other DNA
ttgtggctggtgtaatattatggcttctatgacccattgtttttctctcaggatgttcttacttttctggtccaaattta

SEQ ID NO: 14894 - DNA, 80 bp, synthetic construct
  source 1..80: mol_type = other DNA
aggagatgacacggcaggtgaaaaaaccagactcctggaggcaacacccttttgtctctgacaagctttaaaatgggctt

SEQ ID NO: 14895 - DNA, 80 bp, synthetic construct
  source 1..80: mol_type = other DNA
gaggaagaggaacaaagactaacaaattaaaatgagaggatacacactcagagtggggcacttgaatagggaggggcaga

SEQ ID NO: 14896 - DNA, 80 bp, synthetic construct
  source 1..80: mol_type = other DNA
gaatgcatggaaatgcatttctgcatttccagcatgcagagatgtccagcatgcagaacagcaagagcaacttgaggtat

SEQ ID NO: 14897 - DNA, 80 bp, synthetic construct
  source 1..80: mol_type = other DNA
ggccggcctaagggaccttagtgccaggagggaaggggactttgagctggggattgatgggaggagcccaaccggagctt

SEQ ID NO: 14898 - DNA, 80 bp, synthetic construct
  source 1..80: mol_type = other DNA
ctgagttttcaggctgcttcctgttagagaagaaatggtttggggctgctttttattaaaggaaaattccactgagaatt

SEQ ID NO: 14899 - DNA, 80 bp, synthetic construct
  source 1..80: mol_type = other DNA
catgcttacttcttgtctgtaactattactcctgctataagcaaaacaaacttgaccaaatccttcctgcaattattaat

SEQ ID NO: 14900 - DNA, 80 bp, synthetic construct
  source 1..80: mol_type = other DNA
tggaatacccttaagaagtggcttattttatttctgcaggggaatactgaggtttaatttcttttatggaggcttccgag

SEQ ID NO: 14901 - DNA, 80 bp, synthetic construct
  source 1..80: mol_type = other DNA
tgcacctcagaaatcttggactttgcaagcttgcaaagctgctactagagcctctgtctttctcctgagctttctctctt

SEQ ID NO: 14902 - DNA, 80 bp, synthetic construct
  source 1..80: mol_type = other DNA
tctggtctctgagttccctcagtatttattgatcactatctctatcatctcagtgagggggatgtggcaggactataggg

SEQ ID NO: 14903 - DNA, 80 bp, synthetic construct
  source 1..80: mol_type = other DNA
gttcccttggaaattgcctttctaattctgggggattattttctataggcctacctgatatgcctatttaaaaagctggg

SEQ ID NO: 14904 - DNA, 80 bp, synthetic construct
  source 1..80: mol_type = other DNA
taaaacttcccgcaaattgcacacacagagagagaggacaggagacatagtgaccacggatacaaaggaaaggaaaattt

SEQ ID NO: 14905 - DNA, 80 bp, synthetic construct
  source 1..80: mol_type = other DNA
ctgcctaaaaataatctcttaataactcgtgtattaatttggccaagagagaaatcccgtgaaggagaccaaaaagcacc

SEQ ID NO: 14906 - DNA, 80 bp, synthetic construct
  source 1..80: mol_type = other DNA
ttggagagagcaggaaccagaggcagggagatgagataagaaactgctattattgtccagggaaatcataataagggcat

SEQ ID NO: 14907 - DNA, 80 bp, synthetic construct
  source 1..80: mol_type = other DNA
taggcgaggccaaaaaatccataggttacttgcagaataagtcacgtcaagctcactttattttcttgatatatttatga

SEQ ID NO: 14908 - DNA, 80 bp, synthetic construct
  source 1..80: mol_type = other DNA
caacctgatccgtaatggagactggaccttccagatcctggagatgctggaaatgaccccccagcagggaaacatctaca

SEQ ID NO: 14909 - DNA, 80 bp, synthetic construct
  source 1..80: mol_type = other DNA
tcttcctttcatttcagttcaacaaggatctgcataaacaggcaatattcctgctttgatttccttgttgggggagttac

SEQ ID NO: 14910 - DNA, 80 bp, synthetic construct
  source 1..80: mol_type = other DNA
tgttgcttggccttttgaatgcatcaagtagacgacatttatcctctaagtctgcattcattcaccagcctagacctcct

SEQ ID NO: 14911 - DNA, 80 bp, synthetic construct
  source 1..80: mol_type = other DNA
agagattcaaaagaaagttaggcctggagatttaaaggagaccgaagctggtgacttccttatgtcaacttctgactgag

SEQ ID NO: 14912 - DNA, 80 bp, synthetic construct
  source 1..80: mol_type = other DNA
agcgagactccttccccaaaaaaaaaaagtgttcaaagaaaaacttctggccaggcacggtggctcatgcctgtaatccc

SEQ ID NO: 14913 - DNA, 80 bp, synthetic construct
  source 1..80: mol_type = other DNA
ggaacgttctgtttataggagaaaaaaacaaaacctggtctgttttaggatctatgtgtttccttaaagtcttagtttaa

SEQ ID NO: 14914 - DNA, 80 bp, synthetic construct
  source 1..80: mol_type = other DNA
aggcaacctatgtaccattaaaatttctcacctacactgggccttcatctttcatctatcaaggtgtgaggttatccatg

SEQ ID NO: 14915 - DNA, 80 bp, synthetic construct
  source 1..80: mol_type = other DNA
cataggtaatttgagttagaccacagagtttcttcaaattgtgtatctaaacaatttcagtattgggtgatttagcatga

SEQ ID NO: 14916 - DNA, 80 bp, synthetic construct
  source 1..80: mol_type = other DNA
aaaagaaaaaaataattaaaaaaaaacaaagatccaagaagagaaaaaaccaaaaggccctttaaacatacctatagctt

SEQ ID NO: 14917 - DNA, 80 bp, synthetic construct
  source 1..80: mol_type = other DNA
tggagaccaaaagaaagtaccatcatgtgattataaggtcaagctcccaatgacataaaacaagatgacagggaaacctt

SEQ ID NO: 14918 - DNA, 80 bp, synthetic construct
  source 1..80: mol_type = other DNA
gtgcccaatattgaactggtaaggcttaaacttgcccctggtggggctctgctatctttaatctattcaaagtggggtgg

SEQ ID NO: 14919 - DNA, 80 bp, synthetic construct
  source 1..80: mol_type = other DNA
gccatctcatcagctctcaagtttcctgctttggggagaaaaaagttccccatgtcccatgatcctgtacatgcctaatc

SEQ ID NO: 14920 - DNA, 80 bp, synthetic construct
  source 1..80: mol_type = other DNA
tggagccaatccgatcctggactcagttcaatttctttcgcgactttcaaacccaatcaggatcagaaatttactcaaag

SEQ ID NO: 14921 - DNA, 80 bp, synthetic construct
  source 1..80: mol_type = other DNA
ctatttatagacttcaagttatgttcttacttttagaataaaaatggtaccttatataattttatcaaaacactttcatt

SEQ ID NO: 14922 - DNA, 80 bp, synthetic construct
  source 1..80: mol_type = other DNA
tacactggagccactcaggagcataaagagggcatttttgaaaaatgagatttaggaaaggttcctagggatagtgttta

SEQ ID NO: 14923 - DNA, 80 bp, synthetic construct
  source 1..80: mol_type = other DNA
ttcataaaagacaacagacaggagaaaacatccaggaaagaggagcggacgcatcacaaacacactcatgacacacaaga

SEQ ID NO: 14924 - DNA, 80 bp, synthetic construct
  source 1..80: mol_type = other DNA
agaatgagagaaagcaaaagagagcctcaggcaaaacagtaaagaacagagaaaacagaacaggaaagaaaacagcatct

SEQ ID NO: 14925 - DNA, 80 bp, synthetic construct
  source 1..80: mol_type = other DNA
taagaacaatttctttttctcctttattttctgtgtgtgtgtgtgtgtgtgtgtgtgtgtgtgtgtgtgagagagagaga

SEQ ID NO: 14926 - DNA, 80 bp, synthetic construct
  source 1..80: mol_type = other DNA
tccacccacctcagcctcccaaaatgctgggattgcagaagtgagccaccatgcccagccgcataatacattatcgttct

SEQ ID NO: 14927 - DNA, 80 bp, synthetic construct
  source 1..80: mol_type = other DNA
ggtcctactcagggctctgattcattacagtaaaaggatgcaaagcaaactcagcagagggaaaggcacactgggcaaag

SEQ ID NO: 14928 - DNA, 80 bp, synthetic construct
  source 1..80: mol_type = other DNA
agaacaccatgagaaattacacattttctattctatatttcttgtaggaaatagaggctgcccatctctcagtgccacat

SEQ ID NO: 14929 - DNA, 80 bp, synthetic construct
  source 1..80: mol_type = other DNA
aaattcaaaatcatgttaaggctatagagaaataggatcctatccccacctagtggccaacactgaaatctgggcttaga

SEQ ID NO: 14930 - DNA, 80 bp, synthetic construct
  source 1..80: mol_type = other DNA
ttgagcacttaaaatgctagcagctggtgagacgaaggggctgaagttctcatttaatttcaaattaaggcagaaccgcc

SEQ ID NO: 14931 - DNA, 80 bp, synthetic construct
  source 1..80: mol_type = other DNA
aattatgataacattgttggagaaatctgagataaagagtaggactctttaacaactcattttggccagtcaaaagggag

SEQ ID NO: 14932 - DNA, 80 bp, synthetic construct
  source 1..80: mol_type = other DNA
ccactgtgcctggcctgaacctggttttttttaaagcaactgcatcaaaaacctctgtcttccattattaattttatgag

SEQ ID NO: 14933 - DNA, 80 bp, synthetic construct
  source 1..80: mol_type = other DNA
ccacaaaaccagcagctttttattaaggacttcaaaaggggagggggtgtacaaacagggagtaggtcacaaagatcaca

SEQ ID NO: 14934 - DNA, 80 bp, synthetic construct
  source 1..80: mol_type = other DNA
gacatatatgcagaggtaactaatggtggcctcacgaggaaagggggcagctactccatgagcacaagctctagatactt

SEQ ID NO: 14935 - DNA, 80 bp, synthetic construct
  source 1..80: mol_type = other DNA
aacatcatgcccctccgtggagctcattagtaaggagcaagtgagattctttttatttatctaatcagtgaattccaaaa

SEQ ID NO: 14936 - DNA, 80 bp, synthetic construct
  source 1..80: mol_type = other DNA
gaggccctttcagacctagggcatttggttgcctttcccactctgtgcctttgcttatttcttttttttttttttttttt

SEQ ID NO: 14937 - DNA, 80 bp, synthetic construct
  source 1..80: mol_type = other DNA
tgaaaacactgaaaagctttacttacaatattgttattgatatttactgtattcaaaattagaactgaaaaagattttta

SEQ ID NO: 14938 - DNA, 80 bp, synthetic construct
  source 1..80: mol_type = other DNA
cagaagtcacaatgcagccctggatataacggccatgaaagtttatgtgctgaatcacaaagtggcaaaatatgaactgg

SEQ ID NO: 14939 - DNA, 80 bp, synthetic construct
  source 1..80: mol_type = other DNA
attatcccactttgcaggtgaagaaactgatgctgaggttaagtgtgcaactcagaagcaaagcatccctgacaagctaa

SEQ ID NO: 14940 - DNA, 80 bp, synthetic construct
  source 1..80: mol_type = other DNA
tctgttgtactttgggaaatcatccatgcctcaggaaccaaaagtccttcaacctagagtaaggcgtttttaatagaaag

SEQ ID NO: 14941 - DNA, 80 bp, synthetic construct
  source 1..80: mol_type = other DNA
agttataagcacttaaggtgacttctgcttactctaggtttgagttgagaaacatagctatggcctacacatgtacagtc

SEQ ID NO: 14942 - DNA, 80 bp, synthetic construct
  source 1..80: mol_type = other DNA
cacaagttattttttaaccataagttacagatgctaaaaatataagcccaaagctgaaaagcagctccaagggtgtgaca

SEQ ID NO: 14943 - DNA, 80 bp, synthetic construct
  source 1..80: mol_type = other DNA
attaaataggcttttgtggattggcctggggacttagccgccgtatataaatgttattcgagtgactgtacagcattgtt

SEQ ID NO: 14944 - DNA, 80 bp, synthetic construct
  source 1..80: mol_type = other DNA
cccatgggcaccagctagggggtcccggctgcgcggccagccttggaagagaggacttcttggacacctaacccggaggg

SEQ ID NO: 14945 - DNA, 80 bp, synthetic construct
  source 1..80: mol_type = other DNA
acccagaccaagtggaagagacagtgggcacatgggccaggcagccaacacctgtgggttagagagccccaccctggcag

SEQ ID NO: 14946 - DNA, 80 bp, synthetic construct
  source 1..80: mol_type = other DNA
cgtgtgtgtttgcttctcccccaccgtgtgcctctgctgggcagccatgtgccagtctgtgtacacgtctgcattaacct

SEQ ID NO: 14947 - DNA, 80 bp, synthetic construct
  source 1..80: mol_type = other DNA
tcacctgcgtgacgtcatccctaggcgtcacacaggtctcaccccctgctgtgaagttgcagaaaactcggaaggcatcc

SEQ ID NO: 14948 - DNA, 80 bp, synthetic construct
  source 1..80: mol_type = other DNA
tgggggaccctgggtgcagggacagatggagagggcaagagacaaggttggtgtgagggtgaagtgtggcagcagtggag

SEQ ID NO: 14949 - DNA, 80 bp, synthetic construct
  source 1..80: mol_type = other DNA
atctcccttctctccctgctcacccgggggcccaatcagtccaatgagacctgggtggccctagagaagggtgcaggcag

SEQ ID NO: 14950 - DNA, 80 bp, synthetic construct
  source 1..80: mol_type = other DNA
ctggagacggaggcatctgaggggtgggaggcggaggggatgctccagcactagggcagcctgtccctcaccttggctcc

SEQ ID NO: 14951 - DNA, 80 bp, synthetic construct
  source 1..80: mol_type = other DNA
gggtcaccaggcactcacaggctgtcctggctcaccatcctcgcctcggtcacccttagcaccatcctggccctgcagaa

SEQ ID NO: 14952 - DNA, 80 bp, synthetic construct
  source 1..80: mol_type = other DNA
ttcccttcaagaaaggggaagaagggctcactcagaccagggatcaggcctcatagaggatggcagggagcagagactct

SEQ ID NO: 14953 - DNA, 80 bp, synthetic construct
  source 1..80: mol_type = other DNA
accctgtgcaagtatacaaaacatgggcccaggtgacgaccccacccaaagcacagccctaggcagataggccccacagt

SEQ ID NO: 14954 - DNA, 80 bp, synthetic construct
  source 1..80: mol_type = other DNA
tctcaccctgtgggacaggaggaaggagtcatggcctggaggtgaccctcaccctcaaacaccccacaggaaacttgtca

SEQ ID NO: 14955 - DNA, 80 bp, synthetic construct
  source 1..80: mol_type = other DNA
acctttgttccttcttttccagctgtcccaggtagtccctgctctccagggggccccggggggcctgggtgacctctctc

SEQ ID NO: 14956 - DNA, 80 bp, synthetic construct
  source 1..80: mol_type = other DNA
cggggtcaacttaccgggggtcctttcggtccaggaaacccgttgggaccctgaggtccagggaggccctagagacagag

SEQ ID NO: 14957 - DNA, 80 bp, synthetic construct
  source 1..80: mol_type = other DNA
agctaaattccctctggggtcccccactgccctgcatctgtgctttctggaatcagggatcagggaagcgaagaggagga

SEQ ID NO: 14958 - DNA, 80 bp, synthetic construct
  source 1..80: mol_type = other DNA
ttcgtgtcagggacttttccctgacttcttatatatcccctctgcccatcagcagctgagagatgccatttacacagaca

SEQ ID NO: 14959 - DNA, 80 bp, synthetic construct
  source 1..80: mol_type = other DNA
tagactgatcaggggatggaggtgggttggaaggaccaagctcctaagaccccatatagctcccctgaccacagcccttt

SEQ ID NO: 14960 - DNA, 80 bp, synthetic construct
  source 1..80: mol_type = other DNA
attcaaagcatgagcaacaagggcctgaaacccttaatttcctgtatccttccagggtctcacccattgtggaagcccaa

SEQ ID NO: 14961 - DNA, 80 bp, synthetic construct
  source 1..80: mol_type = other DNA
agacggcatgaatggataaaactgtgtccctttagtgctcatgtccccctcctggcttccccagagccccctcccccagc

SEQ ID NO: 14962 - DNA, 80 bp, synthetic construct
  source 1..80: mol_type = other DNA
aggggagtgagggagactgagctggtgaacagatatgggggtgcagtggaggaaagtggtcacctgaggtcctaagtctc

SEQ ID NO: 14963 - DNA, 80 bp, synthetic construct
  source 1..80: mol_type = other DNA
tttggagtgatgatctttgatgatctttagagactcctccatatctttcctgcccatctggttcttggtaacatgacaca

SEQ ID NO: 14964 - DNA, 80 bp, synthetic construct
  source 1..80: mol_type = other DNA
tgagcagccaggacactaggcctttctccatctcaactccaaccttgattcttagatcctctcgagaccacttcagccct

SEQ ID NO: 14965 - DNA, 80 bp, synthetic construct
  source 1..80: mol_type = other DNA
aagggttcacaagtttaaatatgccccaaaggttaagcatccatactctaagtaaatttggaggccaggcacggtggcgc

SEQ ID NO: 14966 - DNA, 80 bp, synthetic construct
  source 1..80: mol_type = other DNA
agagaaaagaaaggcacaaaacaggtagaatgtgactcctgcaaagggaatcatgacagtgaagggtaattcttccagaa

SEQ ID NO: 14967 - DNA, 80 bp, synthetic construct
  source 1..80: mol_type = other DNA
gggtctgtgccaccctccccatattcctctgcctggaacctgtcggctgtgggggggacctggagatctgtctgctcctt

SEQ ID NO: 14968 - DNA, 80 bp, synthetic construct
  source 1..80: mol_type = other DNA
gggggatagtttggggagagtgaacctccaaggtcatagaggtttgggggcagagatctggatgccccggctctacctgc

SEQ ID NO: 14969 - DNA, 80 bp, synthetic construct
  source 1..80: mol_type = other DNA
agagactgggttccccactcccacacttctgcagacccacccctcctttgatattccctccatccctactccttcccatt

SEQ ID NO: 14970 - DNA, 80 bp, synthetic construct
  source 1..80: mol_type = other DNA
agatacgttccattcagaaaagcccaaaaaggcaatgactgccccaaggtcacccagagtggcagaatcaggaccagatc

SEQ ID NO: 14971 - DNA, 80 bp, synthetic construct
  source 1..80: mol_type = other DNA
gatataagccttcatgcatgactaggtgggcgtgtgatgcatagatgagtaaatagatgggggagtgggtggtggatgtg

SEQ ID NO: 14972 - DNA, 80 bp, synthetic construct
  source 1..80: mol_type = other DNA
actggctgagagggaggttgaggccgcccagtctggtcttcatacaggaagcggacaggtcggcccagctccaggcccag

SEQ ID NO: 14973 - DNA, 80 bp, synthetic construct
  source 1..80: mol_type = other DNA
ccgtctccagcacaaacaacatctgggcaatcgatcatcctggacacaggaggtgcaggggggccacgaggaagagatca

SEQ ID NO: 14974 - DNA, 80 bp, synthetic construct
  source 1..80: mol_type = other DNA
ggtagccccattaccctccaccactctacctctggccccccaaatgccttattctctaaccttaggaattctacagtaac

SEQ ID NO: 14975 - DNA, 80 bp, synthetic construct
  source 1..80: mol_type = other DNA
tcctccacctttcagccctatctgccctcccccagtcacttcaaggacaaagagattcctaccctgatgccaaggaacac

SEQ ID NO: 14976 - DNA, 80 bp, synthetic construct
  source 1..80: mol_type = other DNA
accccgccccgtgtaattacagagccgggccggggcgggggtatttatagacaaggctatagatagcgacgaactggggc

SEQ ID NO: 14977 - DNA, 80 bp, synthetic construct
  source 1..80: mol_type = other DNA
cactcgtgaaaccatcccctgtgggggccctgtcctcacagcccaggccccttccccaagttagacaggaagagataggg

SEQ ID NO: 14978 - DNA, 80 bp, synthetic construct
  source 1..80: mol_type = other DNA
cagttgatggggagcctcaagcatctccatgaggaaggtgtcgatgggggtgtcaccaatgagcttgaagaaaaacagat

SEQ ID NO: 14979 - DNA, 80 bp, synthetic construct
  source 1..80: mol_type = other DNA
gttgcggtgcacgtgaagacctgtggcaaggaggatgccatctcgaacatcaatggatcggtgtgagaaggaggcaatga

SEQ ID NO: 14980 - DNA, 80 bp, synthetic construct
  source 1..80: mol_type = other DNA
ggcatctcctcgggggctcccccagccccctccccatccccatccttgtcctttccccgctgacgctcctcctgtaccgc

SEQ ID NO: 14981 - DNA, 80 bp, synthetic construct
  source 1..80: mol_type = other DNA
gagacagcccatcatggctaaggaaaagttatcctatcctaggatcagtctagggaggggtcatatgtgcaggccacaga

SEQ ID NO: 14982 - DNA, 80 bp, synthetic construct
  source 1..80: mol_type = other DNA
gacactgttgagttaatctgggatgggggaaatagggaagtcacaggaagacttattgggaagcagaatgtcacagaagt

SEQ ID NO: 14983 - DNA, 80 bp, synthetic construct
  source 1..80: mol_type = other DNA
ttcgggagtctgagggaggggtatgtacaggcacacagacacacaagagacagaagagacaaaaaaagaaaatgagtctt

SEQ ID NO: 14984 - DNA, 80 bp, synthetic construct
  source 1..80: mol_type = other DNA
gccaccgggacgcgaccccacaatgcatttcttttcgcacccccaccggcccacactgccctgcggcatgccgctgaggg

SEQ ID NO: 14985 - DNA, 80 bp, synthetic construct
  source 1..80: mol_type = other DNA
ctgctgacctgggcgaccttggggcttctggtggctggactcgggggtcatgacgacctgcacgacgatctgcaagagga

SEQ ID NO: 14986 - DNA, 80 bp, synthetic construct
  source 1..80: mol_type = other DNA
gaggaggagtctggaatgcacatctcccttaatgtctcaatgcctccattcccaggccagggccccattctgtctgtggg

SEQ ID NO: 14987 - DNA, 80 bp, synthetic construct
  source 1..80: mol_type = other DNA
acccaaacagcctcttattagttccaaacaattcatactgtcattgacaagtcctctagaaatgagggggaagaagttct

SEQ ID NO: 14988 - DNA, 80 bp, synthetic construct
  source 1..80: mol_type = other DNA
tgttctcggagaaccaagttgctacacaggaagttctccaaggtccagtttcctttctcccaccagttggtggaggcttc

SEQ ID NO: 14989 - DNA, 80 bp, synthetic construct
  source 1..80: mol_type = other DNA
gggaaccatgctgccttccaggctgacgtgtctgaggccagggccgccaggtgcctgctggaacaagtgcaggtgaacgc

SEQ ID NO: 14990 - DNA, 80 bp, synthetic construct
  source 1..80: mol_type = other DNA
acagttcctggcaaacattaaatattcaatgaatgtatgagaaatgaagacaaaaaagggtcacagactcagtcttcaaa

SEQ ID NO: 14991 - DNA, 80 bp, synthetic construct
  source 1..80: mol_type = other DNA
tgtgtcactgtgtatgcgtgacactccgggtctttttgaagggaggggttcgtgcgtcacccctttccactggttctgca

SEQ ID NO: 14992 - DNA, 80 bp, synthetic construct
  source 1..80: mol_type = other DNA
cccaaacctcgagcgggagagcgggtcggagggtctagggagagccaaagcagagggtggagggagtccccagggtggta

SEQ ID NO: 14993 - DNA, 80 bp, synthetic construct
  source 1..80: mol_type = other DNA
ccggaccccgcaggtgacaggcattctccctttcaggcttaccccctcccccaaacccttatatccacagaccgcatcac

SEQ ID NO: 14994 - DNA, 80 bp, synthetic construct
  source 1..80: mol_type = other DNA
tcacagccctacggagcgggtaataggagagacatgtttgagatgagatgaaggggtacaaagttagggccctctcactg

SEQ ID NO: 14995 - DNA, 80 bp, synthetic construct
  source 1..80: mol_type = other DNA
ctaggccagcatctctcagtctttcatgtgtatccagattacctgtagatcttcagatgcaaactgtgattcagtaggtc

SEQ ID NO: 14996 - DNA, 80 bp, synthetic construct
  source 1..80: mol_type = other DNA
caacagcaggaagcaggggagccaggagggcctggagggggcgcctctgacaccggaggacctgatgggtgtggcgggga

SEQ ID NO: 14997 - DNA, 80 bp, synthetic construct
  source 1..80: mol_type = other DNA
aaatagattggggagggaggcctagaaataatgtaaaatcagccttggaaatggggagaaaatgtcgggttattcgagat

SEQ ID NO: 14998 - DNA, 80 bp, synthetic construct
  source 1..80: mol_type = other DNA
tctccggtaccctcaatcccgtagatgcaggtgggcatcctccagccccagcaagtactgcggaccagttgggctggctg

SEQ ID NO: 14999 - DNA, 80 bp, synthetic construct
  source 1..80: mol_type = other DNA
ggagagtaacaggttgccctgagaattgagagataatacaagtaaagttacacgcctaacagatcagtggctctcccagt

SEQ ID NO: 15000 - DNA, 80 bp, synthetic construct
  source 1..80: mol_type = other DNA
cttccccaactcccctacccgggacccccatctccacccacaaatccactcaaatttcctgcctggaatgtggagtctct

SEQ ID NO: 15001 - DNA, 80 bp, synthetic construct
  source 1..80: mol_type = other DNA
ccaagtcctaagggagctcccaagccaggaacttttctctggagaagaatccatacttctcagggtcttaaaaaattttg

SEQ ID NO: 15002 - DNA, 80 bp, synthetic construct
  source 1..80: mol_type = other DNA
aaatacgcttagtggtcaaaggattacttgagagactgctaatcatttccaccctttcgggaaatgtgtattgagtctac

SEQ ID NO: 15003 - DNA, 80 bp, synthetic construct
  source 1..80: mol_type = other DNA
cttgccactccctggacctaacactggatactttataaatagtggttgaatagatgcattcatggcaggatctgggcagg

SEQ ID NO: 15004 - DNA, 80 bp, synthetic construct
  source 1..80: mol_type = other DNA
tcgttcagctcccacttataagtgagaacatgtggtgtttggttttctgttcctgtgttagtttgctgaagatagtggct

SEQ ID NO: 15005 - DNA, 80 bp, synthetic construct
  source 1..80: mol_type = other DNA
tagtgctctatgattgaggctgtgaataaccactgtatagtgagaacctgtctatttcttttttaatctttttaatctag

SEQ ID NO: 15006 - DNA, 80 bp, synthetic construct
  source 1..80: mol_type = other DNA
aagttttattagagaacataaagaagatataaaagaataggaagagatcccctactcacaaagacggaagtttgatataa

SEQ ID NO: 15007 - DNA, 80 bp, synthetic construct
  source 1..80: mol_type = other DNA
atacaaaaatagtagccgagcatggtgatgcatgcctgtggtcccagctactcaggaggctgaggtgggaggatcgcttg

SEQ ID NO: 15008 - DNA, 80 bp, synthetic construct
  source 1..80: mol_type = other DNA
ggtcaatgttgaccaggttggcctcgaactcatagcctcgcctccctgtgcaccaggacagctggcttgagccactgatg

SEQ ID NO: 15009 - DNA, 80 bp, synthetic construct
  source 1..80: mol_type = other DNA
ccaggagttcgaaaccagcctggccaacatggtgaaacctaccaaaaacacaaaaattagccaggggtggtggcacacac

SEQ ID NO: 15010 - DNA, 80 bp, synthetic construct
  source 1..80: mol_type = other DNA
tgcccagatttatcttgaactcctaggctcaagtgatcctcctgccttggcctcccaaagtgctggaattacaaacataa

SEQ ID NO: 15011 - DNA, 80 bp, synthetic construct
  source 1..80: mol_type = other DNA
gggctagggggcggggggcgggtgtgggcagggattggagagctttagtcaaaggatacaaaatttcagttaggtagaat

SEQ ID NO: 15012 - DNA, 80 bp, synthetic construct
  source 1..80: mol_type = other DNA
ggattatatccaggattcataaagaagttgcagatccatatgaaaaggacaacgcaagagaatatgagcaaaagctgtga

SEQ ID NO: 15013 - DNA, 80 bp, synthetic construct
  source 1..80: mol_type = other DNA
cagtgctgaatgaaagttgttgccagtctctttagaagggtacaatgatggtggctgtgcaggtggagagatgtgatttc

SEQ ID NO: 15014 - DNA, 80 bp, synthetic construct
  source 1..80: mol_type = other DNA
cagcctcccaaatagctgggactacaggtgtgtgctgccacacctggctaattttgtatcatatacatatatatataaac

SEQ ID NO: 15015 - DNA, 80 bp, synthetic construct
  source 1..80: mol_type = other DNA
aggtcatgaggggcctgtcctcatgaatgggattaatgccgttataaaagaagcccaggctgggtgcggtggctcatgcc

SEQ ID NO: 15016 - DNA, 80 bp, synthetic construct
  source 1..80: mol_type = other DNA
aggaaggaaggaaggaaggaaggaaggaagggaagggaaggaaggaaggaaagaaagaaaaaataatacaaataaaaaat

SEQ ID NO: 15017 - DNA, 80 bp, synthetic construct
  source 1..80: mol_type = other DNA
tgacagaggtgcccaggtgtcatgtaataaatgtgtgtgataagttgtttgtgataggtgaatccccctaaagtatgtgg

SEQ ID NO: 15018 - DNA, 80 bp, synthetic construct
  source 1..80: mol_type = other DNA
gataaacaccagcctgaaagggtcgagcagtgagtggaagtgagagaattttgcccagtttttttattatgaaaaatttc

SEQ ID NO: 15019 - DNA, 80 bp, synthetic construct
  source 1..80: mol_type = other DNA
tgcatctcccaaaaataaggagattccataaccacaatacgtaatcacagctaagaaaataatgatcatggccaggcacg

SEQ ID NO: 15020 - DNA, 80 bp, synthetic construct
  source 1..80: mol_type = other DNA
tgcatatatttcaaatcaggatcaaatcaaggtacatgcgctgcatgcattgtgttcctcttggaggggtgtggatctgg

SEQ ID NO: 15021 - DNA, 80 bp, synthetic construct
  source 1..80: mol_type = other DNA
agagttaaatttcacttaacgccaggaagtggagggaatgctccaaggagaagctaagggtatgaggggggctacagttt

SEQ ID NO: 15022 - DNA, 80 bp, synthetic construct
  source 1..80: mol_type = other DNA
gaaataaagaaagaaaggcaggcaagaaagtggcttctaaagcagaactggctgcattccaattccagctttgtcatgca

SEQ ID NO: 15023 - DNA, 80 bp, synthetic construct
  source 1..80: mol_type = other DNA
gagaagggactaatgcaaatgtttacaacagtgcgcaaatatttataacagtgcttgggctgtcacctcagacacacttg

SEQ ID NO: 15024 - DNA, 80 bp, synthetic construct
  source 1..80: mol_type = other DNA
gctgttggtctggggatctgcaagggagctgggccatccagaaggtaccataagcaagttgtcataatcaaacatatgtt

SEQ ID NO: 15025 - DNA, 80 bp, synthetic construct
  source 1..80: mol_type = other DNA
aggtggtttgttgacccagacatggaataaggttacagactattaggttcaggggacctcaggaaaaaggaggaaaatct

SEQ ID NO: 15026 - DNA, 80 bp, synthetic construct
  source 1..80: mol_type = other DNA
atcctaccctgagtagagtgacatgagaactgggctgggggagttgaggagaaaaggaagtctcaaaggctctgtgtgtt

SEQ ID NO: 15027 - DNA, 80 bp, synthetic construct
  source 1..80: mol_type = other DNA
agcatggttttgtacaagagaagtgttttctaaatatttggcaaataaatgaataattgaatttgagtaataatgaagaa

SEQ ID NO: 15028 - DNA, 80 bp, synthetic construct
  source 1..80: mol_type = other DNA
agtgaaaatgaaatgtaattttctcctatttttgtttgccctttgggatcctggatgaagagccctgcattacactgggc

SEQ ID NO: 15029 - DNA, 80 bp, synthetic construct
  source 1..80: mol_type = other DNA
caactctccacatgcctgcatgcttccatctgaaccaatgttgaaggctcttctactattcaaagcccctaaggatgtaa

SEQ ID NO: 15030 - DNA, 80 bp, synthetic construct
  source 1..80: mol_type = other DNA
accacgcctggctagtgcctgtatgtgtgtatgtgtgtgtgtatgtatgtatatatatatatatatatatatatatatat

SEQ ID NO: 15031 - DNA, 80 bp, synthetic construct
  source 1..80: mol_type = other DNA
ttttaactaaattaataaaacagctggggcagtggctcatgcctgtaattccaacactttgggaggccgaggtaggagat

SEQ ID NO: 15032 - DNA, 80 bp, synthetic construct
  source 1..80: mol_type = other DNA
agtggctctgtctggagtttatttaatgttactagtttgccaatgaatagactaagacaataagcaattttgcttttatt

SEQ ID NO: 15033 - DNA, 80 bp, synthetic construct
  source 1..80: mol_type = other DNA
ggtgaagtcagccaatttcgattctcctctccttaaagttttgtcttgctttctctttctttccttgaatcttcacacta

SEQ ID NO: 15034 - DNA, 80 bp, synthetic construct
  source 1..80: mol_type = other DNA
aagcccagtttaagaaacaattcagggcgaggtgagggcacaaaggtagagaaataaggggaaatgatatttctttaaag

SEQ ID NO: 15035 - DNA, 80 bp, synthetic construct
  source 1..80: mol_type = other DNA
gggtatctggggaccctttctttgggaatccacgctctttgtcagagtagccaatgcctctcctgtccaaaatctcatac

SEQ ID NO: 15036 - DNA, 80 bp, synthetic construct
  source 1..80: mol_type = other DNA
tgtctctccagtctagagcctaagttcaaacgaggcgtataggcgaggacagcaggaaggctccaagtcaaacaaacgga

SEQ ID NO: 15037 - DNA, 80 bp, synthetic construct
  source 1..80: mol_type = other DNA
tgaagaagggtatggaatggggtgcagaagtccatggagatgaccggcagatctcagggcggtttctggcacatcagaag

SEQ ID NO: 15038 - DNA, 80 bp, synthetic construct
  source 1..80: mol_type = other DNA
ccactaagttctccccaaggtatagccatccttatcatcaaaccctcttttctggtattctctcaatccagtctttcata

SEQ ID NO: 15039 - DNA, 80 bp, synthetic construct
  source 1..80: mol_type = other DNA
aaggatgtaaaaatgaccaattagtaagaactatgaggaatgaacagacttgaaaaaaggaaatttttttagatatgaaa

SEQ ID NO: 15040 - DNA, 80 bp, synthetic construct
  source 1..80: mol_type = other DNA
ttaagtgtgataatgtattgtagtttttaaaaccatctgttaccaggtgtggtggcacacacctgtagtcccagttactt

SEQ ID NO: 15041 - DNA, 80 bp, synthetic construct
  source 1..80: mol_type = other DNA
atatacaaacaataatgtagcagtgtacggtggggcacagggagtagacttgccaaagaaaagttgaactaacagtgatg

SEQ ID NO: 15042 - DNA, 80 bp, synthetic construct
  source 1..80: mol_type = other DNA
cgaggtcagatcaagaccatcctggctaacatggtgaaaccccccgtctctactaaaaatacaaaatacaaaaaaaatac

SEQ ID NO: 15043 - DNA, 80 bp, synthetic construct
  source 1..80: mol_type = other DNA
gagcaaaacctgtctcaaaaaaaaaaaaaaaaaaaaaaaaaaaaaaaaaaaaaaaaggatagggagcccatgatcatgat

SEQ ID NO: 15044 - DNA, 80 bp, synthetic construct
  source 1..80: mol_type = other DNA
ctcagcctcccaaagtactgggattacaggcgtgagccaccacacccagcccaggaatttcttaaacaggacaaaaatag

SEQ ID NO: 15045 - DNA, 80 bp, synthetic construct
  source 1..80: mol_type = other DNA
gtacaccctgcccagccacaagccgatttttaaaaggtcaaatgctatgacagccattttacaggaaaaaaaaaaattgt

SEQ ID NO: 15046 - DNA, 80 bp, synthetic construct
  source 1..80: mol_type = other DNA
taccacatgttggagaaaatgtggctcagtaggaattcttacatattgctggtgagaaggaactacttaggaaaacaatt

SEQ ID NO: 15047 - DNA, 80 bp, synthetic construct
  source 1..80: mol_type = other DNA
ctactcagaggctgaggcaggagaatcacttaacctgggaggcggacgttgcagtgagctgacatcgtatcgctgcactc

SEQ ID NO: 15048 - DNA, 80 bp, synthetic construct
  source 1..80: mol_type = other DNA
aataaagtgaagagacaaagaatatttgcacatcccatctgccaagggattaataaccagaatatataaggggctcaaac

SEQ ID NO: 15049 - DNA, 80 bp, synthetic construct
  source 1..80: mol_type = other DNA
acacaaaggataaatgcttgagaggatagataaagaaaaaaataaaattcattctaaaaataaaaaattagctaggcatg

SEQ ID NO: 15050 - DNA, 80 bp, synthetic construct
  source 1..80: mol_type = other DNA
ctgcagctgtcccagcaattgcatggtccgttcattaggaattgtctggttgatactgacaagagcggaggagaactctg

SEQ ID NO: 15051 - DNA, 80 bp, synthetic construct
  source 1..80: mol_type = other DNA
aatccaggtgtttctgtgtgattggggaacaaacagaggattaaaagagaatgtcagtttgttgtcctcagtgactatga

SEQ ID NO: 15052 - DNA, 80 bp, synthetic construct
  source 1..80: mol_type = other DNA
gtctcagggaccctacgcactgaggatttcatgggggagtaacactgtgacaagtctaagtaacaagttttttttttgag

SEQ ID NO: 15053 - DNA, 80 bp, synthetic construct
  source 1..80: mol_type = other DNA
taaagaagaaaaacagaagggatggaccccaacactgacttcccatggatatggctggaaaatcagtaaacctgagtaat

SEQ ID NO: 15054 - DNA, 80 bp, synthetic construct
  source 1..80: mol_type = other DNA
ttgctgtatcttccacacccattagatcatctttctcagcgacttcctcatactaaggaaagagaaaagagaactgataa

SEQ ID NO: 15055 - DNA, 80 bp, synthetic construct
  source 1..80: mol_type = other DNA
tatagtcaggacacatgtacaaagttttctattcctggacctccccactatacacctgatcttacatcattcttaatctt

SEQ ID NO: 15056 - DNA, 80 bp, synthetic construct
  source 1..80: mol_type = other DNA
ctctgctggaggatacaatcccgaatggatttctgttcaatctgctgtagctccagctcaacttgctttgaatagtgacg

SEQ ID NO: 15057 - DNA, 80 bp, synthetic construct
  source 1..80: mol_type = other DNA
aacacagggaaacccgtctaaagaaaacaaaaaaaggtaaaagacaagacagtgcagtggaggccggacgcagtggctca

SEQ ID NO: 15058 - DNA, 80 bp, synthetic construct
  source 1..80: mol_type = other DNA
gtctttctgaagctaggagcaccggaactacggaggagaaacagctccgcgctctcaccagcgggccctcttcctcctcc

SEQ ID NO: 15059 - DNA, 80 bp, synthetic construct
  source 1..80: mol_type = other DNA
aaacctaaggaatggggggcgggtgtcttgccacttgtgtgacaggcttaacctttttgtatgaagttcgtttgccttat

SEQ ID NO: 15060 - DNA, 80 bp, synthetic construct
  source 1..80: mol_type = other DNA
agatacataacgttctttttttttcccttaagtcagaatgtgtagttagttgtggaaatagcctaccagtatgtgtccat

SEQ ID NO: 15061 - DNA, 80 bp, synthetic construct
  source 1..80: mol_type = other DNA
agggctcaagtcaatcctcctacctcaactttccaagtagttggggctacaggtgtgcaccaccacatctggctaatctg

SEQ ID NO: 15062 - DNA, 80 bp, synthetic construct
  source 1..80: mol_type = other DNA
ccccttgttctcctaaatgcaagaatcagaaggcacttagtgacaactacatatgctgagcaatgggggaaaaaaaagat

SEQ ID NO: 15063 - DNA, 80 bp, synthetic construct
  source 1..80: mol_type = other DNA
taggaggtcaggggataaaacatcccttgccccctcctctgaatccaggtcctagccaatggtctggacaacaagctccg

SEQ ID NO: 15064 - DNA, 80 bp, synthetic construct
  source 1..80: mol_type = other DNA
cggggatgggagcgcgcaacgcggaagcgggcggcagaccggccgccggggcgaggcgggggaggggccgtgagtgccgc

SEQ ID NO: 15065 - DNA, 80 bp, synthetic construct
  source 1..80: mol_type = other DNA
gggcaatgggagagaagcacggaaccccagagagaggctgagcaggaaggaggccaggttttgcacagcgaggaagtgcc

SEQ ID NO: 15066 - DNA, 80 bp, synthetic construct
  source 1..80: mol_type = other DNA
aaaaggcaaagctaaggccacagcagccacaaggtatggggtgggggtagaggcaggacactgacccctccgatcctaga

SEQ ID NO: 15067 - DNA, 80 bp, synthetic construct
  source 1..80: mol_type = other DNA
agggaggctgctgaacccctctacccaagacccccagcatgagacatcaggagagctttctctacctccaaccccaaacc

SEQ ID NO: 15068 - DNA, 80 bp, synthetic construct
  source 1..80: mol_type = other DNA
ttcccgccaccagcagtcccctctgggagaaggccaggtgccctgctccatggggcagggtccgagtgctcagaggctgg

SEQ ID NO: 15069 - DNA, 80 bp, synthetic construct
  source 1..80: mol_type = other DNA
ggaaggttggtgaccaaatcctctccaggaatcatgtactgcataagttgtttactttcagaagttggagttccttttct

SEQ ID NO: 15070 - DNA, 80 bp, synthetic construct
  source 1..80: mol_type = other DNA
agcgaactagtgattaagccctaagcacaggagtggctgacccaggtagcccacggagggcaagctacagctttggccca

SEQ ID NO: 15071 - DNA, 80 bp, synthetic construct
  source 1..80: mol_type = other DNA
actccgtctcgaaaaatagtaataaaataaataaatgcatcacctggccaatcattctcaaaaaccatagccatggccgg

SEQ ID NO: 15072 - DNA, 80 bp, synthetic construct
  source 1..80: mol_type = other DNA
taatactgtggctgcttttgctctacaacacacagccgagtggtcacgacagcgactacagcatcctgatttgcactgct

SEQ ID NO: 15073 - DNA, 80 bp, synthetic construct
  source 1..80: mol_type = other DNA
catgagccactgtgtccagtctcatattatgttttgtttgtttgtttgtttttgagacggagttttgctcttgttgccca

SEQ ID NO: 15074 - DNA, 80 bp, synthetic construct
  source 1..80: mol_type = other DNA
aaaaaaaaagttgtgataatttgttttctcttggtatttaaatgcctacatggtaccctttgattttacctcttatcagc

SEQ ID NO: 15075 - DNA, 80 bp, synthetic construct
  source 1..80: mol_type = other DNA
cacagcggcggatacagtggagctcaatgccctgattgtcatagatgtggagccagcggttctgagcaacagcaagcagt

SEQ ID NO: 15076 - DNA, 80 bp, synthetic construct
  source 1..80: mol_type = other DNA
cagcaagcagcagctcagaacgagcagctttgatacttgtttcctcttcctcagcttcagccacctcaagtcggcttcga

SEQ ID NO: 15077 - DNA, 80 bp, synthetic construct
  source 1..80: mol_type = other DNA
agaggggcggaacagtttttggcaccttatcgcgagcggcagcttatgcaagagtgatttaaaaaagaaaggcaggtccg

SEQ ID NO: 15078 - DNA, 80 bp, synthetic construct
  source 1..80: mol_type = other DNA
gggccacagtagggaagaggctggactatatcacagctgaaatgtgagtttttattccaccaccgtgtgctgcaccctgt

SEQ ID NO: 15079 - DNA, 80 bp, synthetic construct
  source 1..80: mol_type = other DNA
atggtattataagtcctcccaagtttatatgttgtccataaagttgttctgccatttccttgtcctaaaattgttttata

SEQ ID NO: 15080 - DNA, 80 bp, synthetic construct
  source 1..80: mol_type = other DNA
ggaggaaatcgtgtgaagctccatccatggcgtagaatacattagccgaggctgggatagtcagctctgaaggttcaggg

SEQ ID NO: 15081 - DNA, 80 bp, synthetic construct
  source 1..80: mol_type = other DNA
cagatggccacttcatgtgctaggaacaaacaacatgggactggcatgaaggcagggaggtttaaggaagaaacatttac

SEQ ID NO: 15082 - DNA, 80 bp, synthetic construct
  source 1..80: mol_type = other DNA
cctgccttcctcctcaatctatcatggcctaagcactccacttgaccctttaaattgaatttctcaggtagacaacgagt

SEQ ID NO: 15083 - DNA, 80 bp, synthetic construct
  source 1..80: mol_type = other DNA
tgcacgagcagctcccgactctgggaataattatcctcctcggagaaaatctggcagaggctggaaaagactctgaggct

SEQ ID NO: 15084 - DNA, 80 bp, synthetic construct
  source 1..80: mol_type = other DNA
ggggtcagcagggggatcgccggggagggccaggggcttaggaaggtcgggggcctgggggtccacccgggaccggagat

SEQ ID NO: 15085 - DNA, 80 bp, synthetic construct
  source 1..80: mol_type = other DNA
cgatattggcggcttgtgacggtaaacacggcaccatcctcctcctcatcccagacggacacaggggcctggaggagcaa

SEQ ID NO: 15086 - DNA, 80 bp, synthetic construct
  source 1..80: mol_type = other DNA
ggggaagggggagagagggaaggaggggtcacgaaatctgagggttccctccccaatcccagagtcagaggagctggtta

SEQ ID NO: 15087 - DNA, 80 bp, synthetic construct
  source 1..80: mol_type = other DNA
ttgaacccccccgccgggctcctgggccctcccgccctttccgctcccccccgcgtccgcccgctccgagagcaggagcc

SEQ ID NO: 15088 - DNA, 80 bp, synthetic construct
  source 1..80: mol_type = other DNA
acaggccagtccctgtcctcgaggagcccatgatccgcggggagacaggcatttaacgacgactcacacgatcacttaaa

SEQ ID NO: 15089 - DNA, 80 bp, synthetic construct
  source 1..80: mol_type = other DNA
agtgtacagtggagtttttcagaagctacatgatatgtattgacaccatggttcccacgatgaatagaatgtgtgcctat

SEQ ID NO: 15090 - DNA, 80 bp, synthetic construct
  source 1..80: mol_type = other DNA
gctagtccgaattgagatgtgctgactatttaaaataaacacctgtgtttgaatacttaaggtgagaaaagggctgcaat

SEQ ID NO: 15091 - DNA, 80 bp, synthetic construct
  source 1..80: mol_type = other DNA
ccatcgcacccggcctgtaatttcttatattgtttacatgttgcaataatattttggatgtacaggttgagcatcgccga

SEQ ID NO: 15092 - DNA, 80 bp, synthetic construct
  source 1..80: mol_type = other DNA
tgggttttgagataggatgaggagataaagtgacaagggaaagatacagagaggtggagcactgtaccttctttgaatcc

SEQ ID NO: 15093 - DNA, 80 bp, synthetic construct
  source 1..80: mol_type = other DNA
aaagcccctcaaatttccaggaaacttctagcctcccattacccctctaactcccaggaacctctttctatctctactta

SEQ ID NO: 15094 - DNA, 80 bp, synthetic construct
  source 1..80: mol_type = other DNA
cttgattacaggcgaagacaatgattgagccatgactgtcagtcttgtggtgctgtacagaatatttactgactctagaa

SEQ ID NO: 15095 - DNA, 80 bp, synthetic construct
  source 1..80: mol_type = other DNA
tctccttcaactccttcttcacactgtagccaaacaaagtgactacaagtctgatcccatcacctacctgtttaaaaatc

SEQ ID NO: 15096 - DNA, 80 bp, synthetic construct
  source 1..80: mol_type = other DNA
tgtccttgggcaaattatttaactggtttgtgtcctatatttatccatatgcaatacagggataatattaaaacctacaa

SEQ ID NO: 15097 - DNA, 80 bp, synthetic construct
  source 1..80: mol_type = other DNA
tttctcccaaacatctatcaagcttgtccaacctccagcccagggaccacatgcagccaaggacggcttggaatacagcc

SEQ ID NO: 15098 - DNA, 80 bp, synthetic construct
  source 1..80: mol_type = other DNA
gaacccagcagtttgagaccagcctgggcaacatagcaagaccccatctctatttaaaagaaaaaatttaaaaaaataat

SEQ ID NO: 15099 - DNA, 80 bp, synthetic construct
  source 1..80: mol_type = other DNA
acatgcctgtggtctcagctactcaggagactgaggcacgaggatcacttgagccacggaggtggaggttgcagtgagct

SEQ ID NO: 15100 - DNA, 80 bp, synthetic construct
  source 1..80: mol_type = other DNA
aaaataaaaataaataaatagcacagcaccttgctttgaccccagttgtttgtgaaatacagacaatcttaccacccggg

SEQ ID NO: 15101 - DNA, 80 bp, synthetic construct
  source 1..80: mol_type = other DNA
ctgcaatgcacctttcagtgcaataggagctatccaatctccagccgcgtccatccgcccactcgagcccacctgtttgc

SEQ ID NO: 15102 - DNA, 80 bp, synthetic construct
  source 1..80: mol_type = other DNA
gctggaagggcagcgttcggggaacttcaaatgcacagactaccccgtagtgagactcactttacaaaggggaagctgag

SEQ ID NO: 15103 - DNA, 80 bp, synthetic construct
  source 1..80: mol_type = other DNA
taaaaaaaataaaaaccttgtactcctacgacttactccctccttgtctccacccactcctccatgagaaccgagttggg

SEQ ID NO: 15104 - DNA, 80 bp, synthetic construct
  source 1..80: mol_type = other DNA
gctccccaccgacgtgccccccacggtcactgccccgtgttctgcttggttccctggtggttggccaggagcctgtgagg

SEQ ID NO: 15105 - DNA, 80 bp, synthetic construct
  source 1..80: mol_type = other DNA
gcacttgtccacaatgtgccacatttggagcacagaccccactgtaaggaagttgacaatgtcagcagcagccatgctga

SEQ ID NO: 15106 - DNA, 80 bp, synthetic construct
  source 1..80: mol_type = other DNA
cgccccctttcgccccagcttctctagccccgcccctttccaggcccacccccccgtgccccgcccactatcgggccttt

SEQ ID NO: 15107 - DNA, 80 bp, synthetic construct
  source 1..80: mol_type = other DNA
cgacacagcgagacaaaaaaaaaaaaaaaaaaaaaaaggccaggctagaaaggacagagcgggactaccccggggatact

SEQ ID NO: 15108 - DNA, 80 bp, synthetic construct
  source 1..80: mol_type = other DNA
gtcccctgcaatccctccttggcttccctcttcctcctcctcttgttattacctgtttcctaatggccctgatcctgttt

SEQ ID NO: 15109 - DNA, 80 bp, synthetic construct
  source 1..80: mol_type = other DNA
gccattccactagggccctgggagacaaagaagtttctctaaggaatcccttgccccagagggtttggttcttgctttcc

SEQ ID NO: 15110 - DNA, 80 bp, synthetic construct
  source 1..80: mol_type = other DNA
cttcaaccgtgcctcctgcaggtatgcggagtctgggtcatccaattctgagagatccaactccttttcctgcagccgcc

SEQ ID NO: 15111 - DNA, 80 bp, synthetic construct
  source 1..80: mol_type = other DNA
gaactccttgggtttcagtaacatccagccctgaccaacactgtcttcaccacctgatttcaataaccattagttctata

SEQ ID NO: 15112 - DNA, 80 bp, synthetic construct
  source 1..80: mol_type = other DNA
agtcacagagtttccgccttcatgcaactaagcgccgccatattgtcgtacggaacacaggcttcctgtggccggaggtg

SEQ ID NO: 15113 - DNA, 80 bp, synthetic construct
  source 1..80: mol_type = other DNA
aaaatactttgggtctcctcctcctcctcttcggggagaggggaaaaaagaatgaaggatgaagaaacagatttgatacc

SEQ ID NO: 15114 - DNA, 80 bp, synthetic construct
  source 1..80: mol_type = other DNA
tcccacctcaagtagctaggactacaggcgcacaccacctcacctggctaatttttttaaaaaaagttttttgtggaggc

SEQ ID NO: 15115 - DNA, 80 bp, synthetic construct
  source 1..80: mol_type = other DNA
tcacaagaaagatatttttcatctcaattaatatacatgtatatgcaggaagatgtaaaagattggtcaataaaggactt

SEQ ID NO: 15116 - DNA, 80 bp, synthetic construct
  source 1..80: mol_type = other DNA
ggtcgtgggcgcctgtaatcccagctatttgggagctgaggcaggggaatcccttgaatttgggaggcaaaagttgcagt

SEQ ID NO: 15117 - DNA, 80 bp, synthetic construct
  source 1..80: mol_type = other DNA
ggagactctgtcacaaaaaaaaaaaaaaaaaaagagttcaagaccagcgtggccaacatggtgaaatccccatctctact

SEQ ID NO: 15118 - DNA, 80 bp, synthetic construct
  source 1..80: mol_type = other DNA
tgtttataggaaaggtggtcacaattccagctcctcctccttctgaggtgtccccaggagccagtcccctaactttgccc

SEQ ID NO: 15119 - DNA, 80 bp, synthetic construct
  source 1..80: mol_type = other DNA
gtgatggatcagcagggcaagggtatgtgattgggacttggctgttgggttggggttattttactttactttacttattt

SEQ ID NO: 15120 - DNA, 80 bp, synthetic construct
  source 1..80: mol_type = other DNA
tggaggaagcagtgtgtgtagtagtgaaccttatactgggaacctttggagcctcctacctaaactatttcattttcatt

SEQ ID NO: 15121 - DNA, 80 bp, synthetic construct
  source 1..80: mol_type = other DNA
tccagattgggcgatacagtgagactccgtctcaaaaaaaaaaaaaaaatacaaaaaattagccggctgtggtggcggga

SEQ ID NO: 15122 - DNA, 80 bp, synthetic construct
  source 1..80: mol_type = other DNA
acttggctgtatttgttccatctcgctctcaaccccagtataaccatgtgttacaggttgaattgtgtctcctaaaaatt

SEQ ID NO: 15123 - DNA, 80 bp, synthetic construct
  source 1..80: mol_type = other DNA
gcacacgtttacctatgtaacaaacctacacatcgcacacatgtacccctgaacttaaaataaaagtcgaaggaaaaaaa

SEQ ID NO: 15124 - DNA, 80 bp, synthetic construct
  source 1..80: mol_type = other DNA
agaaaggcctggaacagattctcccttacacccctcagaaagaaccaaccctgcctacaccttgatctcagacttccagc

SEQ ID NO: 15125 - DNA, 80 bp, synthetic construct
  source 1..80: mol_type = other DNA
tgtcgcccaggctagagtgcagtagcaggatcatagctcactgcagcctcaaattcctcggctcaagcaatcctcccacc

SEQ ID NO: 15126 - DNA, 80 bp, synthetic construct
  source 1..80: mol_type = other DNA
atgagccactgagcccggccctgagctttcagatgagatcacaggcaactcatagactgcagtcttatgagagcctccga

SEQ ID NO: 15127 - DNA, 80 bp, synthetic construct
  source 1..80: mol_type = other DNA
ttttatttggcatctaatttttttccttgttgatttaaataactgcaaagagtataacaaatcggcttggtgcaatggct

SEQ ID NO: 15128 - DNA, 80 bp, synthetic construct
  source 1..80: mol_type = other DNA
tgggcaacagagccaggctccatctcaaaaaaacaaacaaaacaaaaacaacaaaaaaaaacaaaaaactgtctggctgg

SEQ ID NO: 15129 - DNA, 80 bp, synthetic construct
  source 1..80: mol_type = other DNA
gacttcagacatgagcaaaaacccaaaattaaaagtaaaaacgacacagcattgtgctcttcgccttccctcatcgtctg

SEQ ID NO: 15130 - DNA, 80 bp, synthetic construct
  source 1..80: mol_type = other DNA
agtggctcacgcctgtaatcccagcaacttgggaggccgaggcgggtggataacctgaggtcaggcgttcaagaccacgc

SEQ ID NO: 15131 - DNA, 80 bp, synthetic construct
  source 1..80: mol_type = other DNA
taggaggattgcttgagcccagacatttgagaccaacctgggtaacatagggagacttgtctctacaaataatttaaaaa

SEQ ID NO: 15132 - DNA, 80 bp, synthetic construct
  source 1..80: mol_type = other DNA
ggagagactctgtcaaaaaaaaaaaaaaaaaaagaaatctcaaaaaagaaagaaaaatggccaggcacagtggctcatgc

SEQ ID NO: 15133 - DNA, 80 bp, synthetic construct
  source 1..80: mol_type = other DNA
ctgcccacctcggcctcccaaagtgctgggatacttttggtattctttctcttaaaacaggtatccaaaattgtacacgt

SEQ ID NO: 15134 - DNA, 80 bp, synthetic construct
  source 1..80: mol_type = other DNA
tcccagctactcaggaggctgactgaggcaggaagactgcttgaacctgggaggcagaggcggaggttgtagtgagctga

SEQ ID NO: 15135 - DNA, 80 bp, synthetic construct
  source 1..80: mol_type = other DNA
ataagtgagagatattcagctactgggagtttataaaagacacacaaacatcgcacaagagcaaaagtcaatttgaacat

SEQ ID NO: 15136 - DNA, 80 bp, synthetic construct
  source 1..80: mol_type = other DNA
gccttgaagttatgcgtgaaaggaggagagctcatcaattttaagaaaatcccggtaagggacagtcctgactaccatca

SEQ ID NO: 15137 - DNA, 80 bp, synthetic construct
  source 1..80: mol_type = other DNA
tgcccagctcccttattaggtcgagacattttaactaaattatctgcttccctgactaatcctaggctacagccacattt

SEQ ID NO: 15138 - DNA, 80 bp, synthetic construct
  source 1..80: mol_type = other DNA
aactcgagccctcacttttgcaaagggactacatgtcaatatttatacaactctaaatatgccttccatatcctgcacca

SEQ ID NO: 15139 - DNA, 80 bp, synthetic construct
  source 1..80: mol_type = other DNA
ccatcctcaatcttcagaaaaagtaaaacagactaatagtcttttaaagacacacctcaccaagctcagcctccaactta

SEQ ID NO: 15140 - DNA, 80 bp, synthetic construct
  source 1..80: mol_type = other DNA
accttctcgatgttcctttactcttcatctccgaagcccaactacacacatcactgaaacaattggagcctcccagctct

SEQ ID NO: 15141 - DNA, 80 bp, synthetic construct
  source 1..80: mol_type = other DNA
ctcgccaaccaagcaagtaattactctgaacccccttgggcactctctaattggatgtcctgggtgctcccaattcttag

SEQ ID NO: 15142 - DNA, 80 bp, synthetic construct
  source 1..80: mol_type = other DNA
cctaactgataaatatattctcccccacccttacgaaggtactttgtaatattctcccctgcccttaagaatgtagtttg

SEQ ID NO: 15143 - DNA, 80 bp, synthetic construct
  source 1..80: mol_type = other DNA
ctggcctgccatgtgcacaagcataacaattgcttttgtttaatgtggacggaatatttgatccattccaaccaggcatt

SEQ ID NO: 15144 - DNA, 80 bp, synthetic construct
  source 1..80: mol_type = other DNA
agtttttttagaccaaagaacgccaaacaccattttatatttgacagtgcttcctgtatgatttttataccagataagct

SEQ ID NO: 15145 - DNA, 80 bp, synthetic construct
  source 1..80: mol_type = other DNA
ctttaagaaaaacccgttgtgtttttattttaatgctcagttcacagaaaaactgggtgatacccttttaaccttagcca

SEQ ID NO: 15146 - DNA, 80 bp, synthetic construct
  source 1..80: mol_type = other DNA
ttttcctgcattgctgagagcttgggttattccttgcactgggtaggtcttgatttttcacgcctgaggccgccacaata

SEQ ID NO: 15147 - DNA, 80 bp, synthetic construct
  source 1..80: mol_type = other DNA
ccttccctgccacccctcacatgtctcagttgacaagcaattccttgtctcccctggccccctagggaaagggctaagaa

SEQ ID NO: 15148 - DNA, 80 bp, synthetic construct
  source 1..80: mol_type = other DNA
taggcagaagtccctgcggccctcggcagtgtttgtgtccctgggtatttgagattagggagtggtgatgactcttaagc

SEQ ID NO: 15149 - DNA, 80 bp, synthetic construct
  source 1..80: mol_type = other DNA
acatcacatatcgcttagcatgtggctgagactcagaaaaaatcctggctttgttttcctgcattgggagtttattgttg

SEQ ID NO: 15150 - DNA, 80 bp, synthetic construct
  source 1..80: mol_type = other DNA
ccttttatactcttttgccttcagcaagtaaatgacctctttcttatttggttgtggcatcaaactgcttgtgaggagat

SEQ ID NO: 15151 - DNA, 80 bp, synthetic construct
  source 1..80: mol_type = other DNA
catgggtttgtgagttgtctgtggtttgtctaatcaggctgggcttgacagggcttggtaggactcctttagtcctggtc

SEQ ID NO: 15152 - DNA, 80 bp, synthetic construct
  source 1..80: mol_type = other DNA
ccaccacgcccagccttgttgcaggactcttattaaccctatttgtccatgagacccagagacataaaggcgggagtttg

SEQ ID NO: 15153 - DNA, 80 bp, synthetic construct
  source 1..80: mol_type = other DNA
ctagaatacctgggacattgatttttccagtgagtagtgaattcttgttcctcagcctaaggcacttcctggtactaagg

SEQ ID NO: 15154 - DNA, 80 bp, synthetic construct
  source 1..80: mol_type = other DNA
cagtttgccgtgtttctttcactcattccgccaaacatatttattggtggccaattttgtgacatcaatgtgctaagcac

SEQ ID NO: 15155 - DNA, 80 bp, synthetic construct
  source 1..80: mol_type = other DNA
tctctactaaaaatttaaaaacatttttttaaaaaattaggcgaccatggtggcacatgcctgtaatcccagctattcgg

SEQ ID NO: 15156 - DNA, 80 bp, synthetic construct
  source 1..80: mol_type = other DNA
cccagtgtggggaaacagctgagggaaggcccccctcaaaaggctccacctcctcaccagcactcctgcccagggacagg

SEQ ID NO: 15157 - DNA, 80 bp, synthetic construct
  source 1..80: mol_type = other DNA
cccaggatgatttgattggcagggatcccgttcttcatttcatgctcaatcaaggccttgatgttctctgctgccttctt

SEQ ID NO: 15158 - DNA, 80 bp, synthetic construct
  source 1..80: mol_type = other DNA
aattgctggatcatctcatagataaacaaagccagacactagctaaagtggtaaggacaggacaggcacagaggctcacg

SEQ ID NO: 15159 - DNA, 80 bp, synthetic construct
  source 1..80: mol_type = other DNA
cactttaaagggcattagggtcatcctagagatgtggccttgaactgttagaaactatgttagtgttcatgaaagtcttt

SEQ ID NO: 15160 - DNA, 80 bp, synthetic construct
  source 1..80: mol_type = other DNA
atccctcaaagagaaaatagaaaatgcaaattaatactgacattttgggcttcaaaaaaaagcaaattaaaataacgaca

SEQ ID NO: 15161 - DNA, 80 bp, synthetic construct
  source 1..80: mol_type = other DNA
tataattgaatattaaagagctgcgttatcccacatggtagcaatgagccacatgaggctatttaaacttaaatttaaat

SEQ ID NO: 15162 - DNA, 80 bp, synthetic construct
  source 1..80: mol_type = other DNA
atcacaccattgtacctcagcctgggcgtcatagcaagactccctctcaaaacaaacaaagcaaaacaggccaggcatgg

SEQ ID NO: 15163 - DNA, 80 bp, synthetic construct
  source 1..80: mol_type = other DNA
ggagctcaggaacagtctggacaacaaggagaaaccccatctctatcaaaaaatacaaaaattaactggacatggtggtg

SEQ ID NO: 15164 - DNA, 80 bp, synthetic construct
  source 1..80: mol_type = other DNA
ccctttgctgaggttggcaaatcacttgaggtcaggagttggagaccagcctggccaacatagcaaaacactgtctctac

SEQ ID NO: 15165 - DNA, 80 bp, synthetic construct
  source 1..80: mol_type = other DNA
cttcattctcatagcatgtgacctgtgtgcgggcgtgaggattcactgtgtttccaaaactgggacccctcctctacatg

SEQ ID NO: 15166 - DNA, 80 bp, synthetic construct
  source 1..80: mol_type = other DNA
gagatcgtgccaatgcactccagcctgggtgacagggtgggactctgtctcaaaaaaaaaaaaaaaaaaaaaagtttgtg

SEQ ID NO: 15167 - DNA, 80 bp, synthetic construct
  source 1..80: mol_type = other DNA
ttggcccatacaggttcattatagctattctatgtagttttctacttaagtatgtcataatttcaaaagagaaaaagaga

SEQ ID NO: 15168 - DNA, 80 bp, synthetic construct
  source 1..80: mol_type = other DNA
gattagaggcacgagccacctcgcccagcctggggagcagagtttttaaggacaacttggtgggtcaggggaagccagtg

SEQ ID NO: 15169 - DNA, 80 bp, synthetic construct
  source 1..80: mol_type = other DNA
ttgggattacaggcatgagcaaccatgcccaacctgtaaggcctttttaaaaaaatataaaatcagatatgaagttttct

SEQ ID NO: 15170 - DNA, 80 bp, synthetic construct
  source 1..80: mol_type = other DNA
agtcccctttctatttgtttgttttaaaaaataaagtcaggccgggcgcggtggctcatgcctgtaatcccagcactttg

SEQ ID NO: 15171 - DNA, 80 bp, synthetic construct
  source 1..80: mol_type = other DNA
ccagcctgggtgacagagcaagactttatctcaaaaatttaaaaataggccgggagcagtggctcacacgtgtaatccca

SEQ ID NO: 15172 - DNA, 80 bp, synthetic construct
  source 1..80: mol_type = other DNA
catgatagtgggtgcctgtaatcccagctatttgggaggctgaggcaggaaaatcgcttgaacccgggaggcggaggctg

SEQ ID NO: 15173 - DNA, 80 bp, synthetic construct
  source 1..80: mol_type = other DNA
tctgcctgttaagaaccttccacatctctgacctctctgcatcttcacaactacacttttgttcaggtcctcttgcctct

SEQ ID NO: 15174 - DNA, 80 bp, synthetic construct
  source 1..80: mol_type = other DNA
ccagtagggtggataggtgagcggcctgtaggtggaatgagaagggcagtccctttcttttccttctttttttagtagag

SEQ ID NO: 15175 - DNA, 80 bp, synthetic construct
  source 1..80: mol_type = other DNA
aataacagtggcttaaacaagagacaagtgaatttttcctgtaagcaaattctgagataaccagtccaggactggtgcag

SEQ ID NO: 15176 - DNA, 80 bp, synthetic construct
  source 1..80: mol_type = other DNA
gggctcactccagcacagactttgcccctgtaaaccttcacccttccccatcctggaagtagggaatcccgaccaactga

SEQ ID NO: 15177 - DNA, 80 bp, synthetic construct
  source 1..80: mol_type = other DNA
ttccctagaactcctctagagggcatatcttccctggatctttgacattgattttcggagcggtaatggatcttacacaa

SEQ ID NO: 15178 - DNA, 80 bp, synthetic construct
  source 1..80: mol_type = other DNA
atatagaaaagcacaattctttattttaaccccacctctcgctcacttaaatgaccagttatttccaagtctggatctga

SEQ ID NO: 15179 - DNA, 80 bp, synthetic construct
  source 1..80: mol_type = other DNA
gtgaggacacagcattcatctcctccggaggatgcaacaacaaggctctatgtgaagaaggaaccaggtccctcaccaga

SEQ ID NO: 15180 - DNA, 80 bp, synthetic construct
  source 1..80: mol_type = other DNA
atctcagaggctacgcgactttattacagttttaaaaatggaatggtaggccaggtgcggtggctcacacctataatccc

SEQ ID NO: 15181 - DNA, 80 bp, synthetic construct
  source 1..80: mol_type = other DNA
ttttttttttttgagatggagtattgccctcgttgcccaggctggagtgtggtggcacaatctcggctcaccaaaacatc

SEQ ID NO: 15182 - DNA, 80 bp, synthetic construct
  source 1..80: mol_type = other DNA
ggccaccaaatagtgtaatttttacagttacactttgtaactagtgttgctgaagacggaaatgcaattgattttgaaaa

SEQ ID NO: 15183 - DNA, 80 bp, synthetic construct
  source 1..80: mol_type = other DNA
atgagtaaatatggtagaacgactttgcaaactagcaccctattcacacgtaaggggttgctcttgtcaccgagactgtt

SEQ ID NO: 15184 - DNA, 80 bp, synthetic construct
  source 1..80: mol_type = other DNA
gcggggctggtagcggccggagccgtgcgagttctctaccctgcttcgcgagcgggcgagagaacgcgagtcccaggatc

SEQ ID NO: 15185 - DNA, 80 bp, synthetic construct
  source 1..80: mol_type = other DNA
tcgtggagctgccattctatggggatacagacaataaatgtaataaatgaattatataactgccagaaggccgtaagtgc

SEQ ID NO: 15186 - DNA, 80 bp, synthetic construct
  source 1..80: mol_type = other DNA
catctagtgggtagagggcagggatgctgctaggcatctgacagtgtacaggactgcattggacattgtcaaatgtcacc

SEQ ID NO: 15187 - DNA, 80 bp, synthetic construct
  source 1..80: mol_type = other DNA
gaaaagggagtaatcagttgtatcagatgctgtttgatgggtcaagaaaatgaagataaagaattgacttagcaacatga

SEQ ID NO: 15188 - DNA, 80 bp, synthetic construct
  source 1..80: mol_type = other DNA
tatcacagtttaagtattgccccactgatgaacattcaatttcattccttcaaaaactgtagagtcctaccatgtagcag

SEQ ID NO: 15189 - DNA, 80 bp, synthetic construct
  source 1..80: mol_type = other DNA
agcgattctcctccttggcctcccaagtagctggattacaggcacatgccaccatgcctgggtaatttttgtagaaacag

SEQ ID NO: 15190 - DNA, 80 bp, synthetic construct
  source 1..80: mol_type = other DNA
aagggtctcttttcccaacagaggtcccccctattggaagtaaaggggaacatagaactgaagagacctctgattaaggc

SEQ ID NO: 15191 - DNA, 80 bp, synthetic construct
  source 1..80: mol_type = other DNA
agtaagactatactcccccaccttttttacataaatggtggcatactttagacatggtcctgcttttacttatcttaatc

SEQ ID NO: 15192 - DNA, 80 bp, synthetic construct
  source 1..80: mol_type = other DNA
aatagttcttttataataaattaaccttagtttactataactattttactttataaacttaacattttttttcccacttg

SEQ ID NO: 15193 - DNA, 80 bp, synthetic construct
  source 1..80: mol_type = other DNA
tttctatctaaattttgttttgggcggggagcatatattcagggcaatatgaatctctgtctcctggcttgaaaataaaa

SEQ ID NO: 15194 - DNA, 80 bp, synthetic construct
  source 1..80: mol_type = other DNA
aatgccttttgaatgacatgcctgaggctgttttatagttaactgtttttgcaaatagaaggagtataccctaaaataac

SEQ ID NO: 15195 - DNA, 80 bp, synthetic construct
  source 1..80: mol_type = other DNA
caagtgaaactctgtctcagtcaatcaataaataaagtatatgggagcgtgtgcatagactatatttaatactatatacc

SEQ ID NO: 15196 - DNA, 80 bp, synthetic construct
  source 1..80: mol_type = other DNA
acgttggaccaagagaaccagcagcttcaggaccagctcagagatgcccagcagcaggtcaaggccctggggacagagcg

SEQ ID NO: 15197 - DNA, 80 bp, synthetic construct
  source 1..80: mol_type = other DNA
ccacccactccatacgccccacagtttgttcttcttcttggttgcatcttaccctctgtgtatgttgtgttctcttctgg

SEQ ID NO: 15198 - DNA, 80 bp, synthetic construct
  source 1..80: mol_type = other DNA
gagatggaggtagagggagaaaggagcaagagagaattgaaggatgaagtgcaagttatcaggctgggttaccacatccg

SEQ ID NO: 15199 - DNA, 80 bp, synthetic construct
  source 1..80: mol_type = other DNA
atgctggggttgggcacattgtcttttcataggctcatgtttgtgaacatttctccactggaagagaacgtctccgagtc

SEQ ID NO: 15200 - DNA, 80 bp, synthetic construct
  source 1..80: mol_type = other DNA
ttccttccactagaatctccttccactagtgttaagcaagtcagaaagtttccttactgtctgcctccacagtaattttt

SEQ ID NO: 15201 - DNA, 80 bp, synthetic construct
  source 1..80: mol_type = other DNA
tttatctgagggttatttttatttttattttttttgagacagggacttgctctgttgcccagactggaattcagtggctc

SEQ ID NO: 15202 - DNA, 80 bp, synthetic construct
  source 1..80: mol_type = other DNA
gaaccagtgtgttattggtactgctcaggccaacaggaagtgaagacggatccagatctgtgtgtgtgtgtgtgtgtgtg

SEQ ID NO: 15203 - DNA, 80 bp, synthetic construct
  source 1..80: mol_type = other DNA
ggcatcgagaagggtgaatggagggcggggctgtgaactggggccggggggcgggacttggagtgaccatggggggtggg

SEQ ID NO: 15204 - DNA, 80 bp, synthetic construct
  source 1..80: mol_type = other DNA
ggacaccctaattatgatacctctaaactgagtagcctttgcttctacaaccataatttctcctaaaatttcaaggccag

SEQ ID NO: 15205 - DNA, 80 bp, synthetic construct
  source 1..80: mol_type = other DNA
gtgtctggtccagtttgaggatgattcgcagtttctggttctatggaaagacattagccctggtaagactctagagacct

SEQ ID NO: 15206 - DNA, 80 bp, synthetic construct
  source 1..80: mol_type = other DNA
ggctggactgggatgctggacatctgagcaaccgacagcagagttactgttactgtggtggccctggggagtgagtaatg

SEQ ID NO: 15207 - DNA, 80 bp, synthetic construct
  source 1..80: mol_type = other DNA
agatgtagcggaaaggggaagagaagaaatcactgctcccctggccccatttttcttcatttctcccagctttcagacac

SEQ ID NO: 15208 - DNA, 80 bp, synthetic construct
  source 1..80: mol_type = other DNA
ccaattattcacatcttctggactttatcacccagaattcttttccctctcccccttggctacccacttcttggcctaga

SEQ ID NO: 15209 - DNA, 80 bp, synthetic construct
  source 1..80: mol_type = other DNA
aagaggccctcttctctaccctccttcatgattcctgacccctcccatccttcccatttcctttgatgttattttgttac

SEQ ID NO: 15210 - DNA, 80 bp, synthetic construct
  source 1..80: mol_type = other DNA
tcccattcagagtaccccataaccccagtttttgtactggcagcccagagacaggcttccagagctggagaaaggagaaa

SEQ ID NO: 15211 - DNA, 80 bp, synthetic construct
  source 1..80: mol_type = other DNA
tgtgaacccgaaactgccacttgctggctgaggagagccgctgcggcgttccactgtcacgtgagggggccggtcctctt

SEQ ID NO: 15212 - DNA, 80 bp, synthetic construct
  source 1..80: mol_type = other DNA
tggggaggggaggttccctgagatctctgtctttgagtttggagtttgtctctgagacagatttcggaggggtctttcag

SEQ ID NO: 15213 - DNA, 80 bp, synthetic construct
  source 1..80: mol_type = other DNA
ctctctgcttctctctgctcctctctcctcctctctcctcctcctcctcctccacctcctcctccttctccccctctttc

SEQ ID NO: 15214 - DNA, 80 bp, synthetic construct
  source 1..80: mol_type = other DNA
aaaggctcttgaccagtaaaatgtaacctctggggtcttaatgctgtcttcacttcatcacttttacccccttcccccac

SEQ ID NO: 15215 - DNA, 80 bp, synthetic construct
  source 1..80: mol_type = other DNA
tgttgcctgcaatgtctgtagtttcagaggctaggtattggtgatctctgtatctagagaacattagttagtctctgaga

SEQ ID NO: 15216 - DNA, 80 bp, synthetic construct
  source 1..80: mol_type = other DNA
ctgtgaacaggtaagctccccgacttcttcttttctagatatttagccctcagaatctcatgatcccaatgttcctacac

SEQ ID NO: 15217 - DNA, 80 bp, synthetic construct
  source 1..80: mol_type = other DNA
tctcatcttgggcagggagtctttgagggttatgagctgtgttggggaggagatgtggttctgaagatttcgggggtggg

SEQ ID NO: 15218 - DNA, 80 bp, synthetic construct
  source 1..80: mol_type = other DNA
ggagaggtggcttggggagtctaagttttggacaccattgggagacatttgagtgactgtggtcaaacccctagatcaag

SEQ ID NO: 15219 - DNA, 80 bp, synthetic construct
  source 1..80: mol_type = other DNA
tcaccaagtgtggaggggccggggcagaaaaagtgggcaggcttagggggaaaaggaggcccgcccttcctgggaggagg

SEQ ID NO: 15220 - DNA, 80 bp, synthetic construct
  source 1..80: mol_type = other DNA
tctgcccccccaaccccctctttagtcatttaaaaaaagatttttgtcttcctgagaagttcgcttaaaaggtttccatg

SEQ ID NO: 15221 - DNA, 80 bp, synthetic construct
  source 1..80: mol_type = other DNA
ggcagacatggaatgtgtaaagggcatggaggatgtgcagtggacataggggtcgttgggaccttggggacttggcaatg

SEQ ID NO: 15222 - DNA, 80 bp, synthetic construct
  source 1..80: mol_type = other DNA
gtgccatgtgcacacgggggcccagttcctcgtgcacacatgtgcagccatccttgtgcaagtgtgtcctgtcttatctt

SEQ ID NO: 15223 - DNA, 80 bp, synthetic construct
  source 1..80: mol_type = other DNA
acagagctctgtctcccatttctctgctctgtgtccaaccctgttcttcgcccttctctggcaacctccctcctctggct

SEQ ID NO: 15224 - DNA, 80 bp, synthetic construct
  source 1..80: mol_type = other DNA
agaaggataattaacacatttgctcctggtttttctttactctggtggcaatctcggatgcctgtgttagagtgagagaa

SEQ ID NO: 15225 - DNA, 80 bp, synthetic construct
  source 1..80: mol_type = other DNA
ttggcatccccccacttacattctcttccagcccctcggcccctctaaattcccttgcagccgagcctcagcttcctttt

SEQ ID NO: 15226 - DNA, 80 bp, synthetic construct
  source 1..80: mol_type = other DNA
cagtacagcatggagggtgcccctgctgcgcccttccggccctcggtgagtggtgcctaccagatgtggctcagttgggc

SEQ ID NO: 15227 - DNA, 80 bp, synthetic construct
  source 1..80: mol_type = other DNA
agagtgaccctggaggaatgtttaaggaatgcagggaaggggttggtaggtgagtgagcaataggctgtaggtggaaggg

SEQ ID NO: 15228 - DNA, 80 bp, synthetic construct
  source 1..80: mol_type = other DNA
ctagtccgtgtattctgtcttttatcctctttgagctcttttctgcccacagctttctcctatttcttatgcttttccct

SEQ ID NO: 15229 - DNA, 80 bp, synthetic construct
  source 1..80: mol_type = other DNA
tctcctgaacctcctgcctgccagggcccggctgatgcaaagctttaaggagtcacactctcatgagtccttgctgagtc

SEQ ID NO: 15230 - DNA, 80 bp, synthetic construct
  source 1..80: mol_type = other DNA
ggttggattaaatgatctctaaggtccctttggcacataaattctatgagtctgttcttcccaaaacttcatgcttccag

SEQ ID NO: 15231 - DNA, 80 bp, synthetic construct
  source 1..80: mol_type = other DNA
cagcagtccttggcattcctgggcttataactgcatccgtctaatttctgcctccatcttcatgtagctggcttccttct

SEQ ID NO: 15232 - DNA, 80 bp, synthetic construct
  source 1..80: mol_type = other DNA
gggagggggctcggggggtggctcagggggcaagggcaaaggaggttgcccggctgtgcggctgaaagcacgttaccaga

SEQ ID NO: 15233 - DNA, 80 bp, synthetic construct
  source 1..80: mol_type = other DNA
tgagcaccatttatgggcaaagcattgttctaggcgctatagagcaaacaggtgaaagaggcctggtccctgccctcaga

SEQ ID NO: 15234 - DNA, 80 bp, synthetic construct
  source 1..80: mol_type = other DNA
aatcagaacagtgacagaagttaggaaggagctactggaaggaccctctcgggaaaggatcagtaggaattgtcagctta

SEQ ID NO: 15235 - DNA, 80 bp, synthetic construct
  source 1..80: mol_type = other DNA
ggagtacccagatgagcagacctcacgaaccctcaccctcattgccaaggtcatccagaacctggccaacttttccaagt

SEQ ID NO: 15236 - DNA, 80 bp, synthetic construct
  source 1..80: mol_type = other DNA
agggcttgaaagaagggaggaaaaagcaccaagttctcaggggagacgataaggagacaggtacagtcagtggtaggctg

SEQ ID NO: 15237 - DNA, 80 bp, synthetic construct
  source 1..80: mol_type = other DNA
ctgtgccagaccacagcaaggttcaattgctaggagccctgaccttaccttctgcttgtgtgcccccttcccttctgaca

SEQ ID NO: 15238 - DNA, 80 bp, synthetic construct
  source 1..80: mol_type = other DNA
gtctcagcagttgacagtcagcgcagcccagaaaccccggccatccagcgggaatctattgcagtccccagagccaagtt

SEQ ID NO: 15239 - DNA, 80 bp, synthetic construct
  source 1..80: mol_type = other DNA
ggcaaagacctgatcacctcttgagaagccttccgtccatctggggagaccagatacacacagttgttaaaagtcacttt

SEQ ID NO: 15240 - DNA, 80 bp, synthetic construct
  source 1..80: mol_type = other DNA
agctaggactacagggtcgtgctaccatgcctggctagttttttttcttttcttttttttttttttttttttttgtagag

SEQ ID NO: 15241 - DNA, 80 bp, synthetic construct
  source 1..80: mol_type = other DNA
aagaggctaaggcagcagcaggcagagaaggattcccagatcaagagcatcattggcaggtgaggggcggcctggggagg

SEQ ID NO: 15242 - DNA, 80 bp, synthetic construct
  source 1..80: mol_type = other DNA
atcctgaggaacagggagtcttgcatcacggcaatggagggactctgattctaagggataaggatgcctgaggtttttcc

SEQ ID NO: 15243 - DNA, 80 bp, synthetic construct
  source 1..80: mol_type = other DNA
tgcacccttaccccttgctttcccaaaattctgctcattttcctacccatactcctctttgctctgactgctaggctccc

SEQ ID NO: 15244 - DNA, 80 bp, synthetic construct
  source 1..80: mol_type = other DNA
tggaacaagaaggagcaagaaaggaacctcaggcagatgttaggacatggacttgatcatgtggcctgggagtttagaaa

SEQ ID NO: 15245 - DNA, 80 bp, synthetic construct
  source 1..80: mol_type = other DNA
acacacggacatgtacagtacaaaccccagataattacaacagccaaagagagaaggaagtgaatttcccaaccagaagc

SEQ ID NO: 15246 - DNA, 80 bp, synthetic construct
  source 1..80: mol_type = other DNA
tttcctggtgtgacactctgggttaaaggcttgaaggcccctgttaggagtctaggggtgagattctcttctctctgatc

SEQ ID NO: 15247 - DNA, 80 bp, synthetic construct
  source 1..80: mol_type = other DNA
attaccccttgatttctcaggagcgtctgggggggctcagcacgcacaaactccttctccttctaccactcttaaattta

SEQ ID NO: 15248 - DNA, 80 bp, synthetic construct
  source 1..80: mol_type = other DNA
tgttgtaattatctggggtttgtactgtacatatccggggtgtgtgtgtgtgggctgggggcaacccttctgtacagagc

SEQ ID NO: 15249 - DNA, 80 bp, synthetic construct
  source 1..80: mol_type = other DNA
tctcgcccctctcaggacctaccgggggcgggtgctacacttaatcaccgggaaacgcagctttccggggcggctgacgg

SEQ ID NO: 15250 - DNA, 80 bp, synthetic construct
  source 1..80: mol_type = other DNA
atctctgaaccgccacaggctagagggaaagttctgtgatgtgtccctcctggtgcagggccgggaacttagggctcata

SEQ ID NO: 15251 - DNA, 80 bp, synthetic construct
  source 1..80: mol_type = other DNA
ggaaaccagtggatcttcatgggaatgaaatcctgtcagggggtggaggacctgggggagcaggccaggccgtgcatggg

SEQ ID NO: 15252 - DNA, 80 bp, synthetic construct
  source 1..80: mol_type = other DNA
gtctacctttgaccaccactgataactaatatattggtcacaatgactggaatgtgactagtgatctcaggagatggcac

SEQ ID NO: 15253 - DNA, 80 bp, synthetic construct
  source 1..80: mol_type = other DNA
tactttttttggtagagtggtgtggaacacctaactggttctgttttcctttttaaaagaggttggttcacttatctttt

SEQ ID NO: 15254 - DNA, 80 bp, synthetic construct
  source 1..80: mol_type = other DNA
gctataatcccatccatcagctattcttgacacatattctatgggtggctatatccattggccaagatcctttggcttca

SEQ ID NO: 15255 - DNA, 80 bp, synthetic construct
  source 1..80: mol_type = other DNA
tgagtgagaccagtagtcatcggttccccacccctttactgcgatcagttctcccagagagagatcacactcataataaa

SEQ ID NO: 15256 - DNA, 80 bp, synthetic construct
  source 1..80: mol_type = other DNA
gggggaaataagagctatcagagcacatagcagaggtcttagcctggcctaataattgggagatttctagatgaaatgga

SEQ ID NO: 15257 - DNA, 80 bp, synthetic construct
  source 1..80: mol_type = other DNA
tgaaacctgggagggttccttgccagcagctctctcacctcccatacctgtcctaccaaagctatctcctaaatatttca

SEQ ID NO: 15258 - DNA, 80 bp, synthetic construct
  source 1..80: mol_type = other DNA
tcaggcaatctgcctgctttggcatcccaaagtgctgggattataaacgtgagccactatgcctgggcagtgcctattct

SEQ ID NO: 15259 - DNA, 80 bp, synthetic construct
  source 1..80: mol_type = other DNA
aaattaaggatattatataagtactttaaaaataaaacaaatttgcataaattgtcattgacaaatttgttttataaaga

SEQ ID NO: 15260 - DNA, 80 bp, synthetic construct
  source 1..80: mol_type = other DNA
ggtattgccaaatactgatatcaatccaagaccatctggttttgattgggtatattcattacttggaaggctttatataa

SEQ ID NO: 15261 - DNA, 80 bp, synthetic construct
  source 1..80: mol_type = other DNA
atgtacagcttgggctgtggcttcagagggtggaagccccaagccttggtagcttccatgtggtgttgagcctgcagata

SEQ ID NO: 15262 - DNA, 80 bp, synthetic construct
  source 1..80: mol_type = other DNA
tttagcatgtcattacattgtaggttaatcacctccaattgaaggttaggtagaagttcctcaattgcacagttaaatga

SEQ ID NO: 15263 - DNA, 80 bp, synthetic construct
  source 1..80: mol_type = other DNA
catggatggatttggaggctattatcctaagcaagctaatgcaggaacagaaaaccaaataccacatgttctcacttgta

SEQ ID NO: 15264 - DNA, 80 bp, synthetic construct
  source 1..80: mol_type = other DNA
ggagactggaaagcccaagatgtagatggctatcttctcatattttcacatggcagagagcagagagaagcaagctttct

SEQ ID NO: 15265 - DNA, 80 bp, synthetic construct
  source 1..80: mol_type = other DNA
cttttttttaaaaaactttctaatttttctgactgttgctttcttgtgaattgggaatattgcaatgactactcagtctg

SEQ ID NO: 15266 - DNA, 80 bp, synthetic construct
  source 1..80: mol_type = other DNA
aagtgaaaggattacctgagcccaggaggtggaggctgcagtgagttgtgatcaggccactgcactgcagcctgggcaga

SEQ ID NO: 15267 - DNA, 80 bp, synthetic construct
  source 1..80: mol_type = other DNA
acttggatcatagtgttaaaaaaaaatggtctcgatctctttttaacatgacatttatgagacaactgtagactcaacca

SEQ ID NO: 15268 - DNA, 80 bp, synthetic construct
  source 1..80: mol_type = other DNA
aaaaaggcggggggtgggcttgtcttttgacggcattggctatttatagataataaaaaattcatggttatgggttgaat

SEQ ID NO: 15269 - DNA, 80 bp, synthetic construct
  source 1..80: mol_type = other DNA
caataggatgcattttaaggataaaaaagctgaaactaaaattttaaactttagacccttacatattaaactctcctaaa

SEQ ID NO: 15270 - DNA, 80 bp, synthetic construct
  source 1..80: mol_type = other DNA
aatatatatatatattttttctggccaggagctgtggctcacgcctataattccagcactttgggaggctaagcgaggca

SEQ ID NO: 15271 - DNA, 80 bp, synthetic construct
  source 1..80: mol_type = other DNA
ataatgtcacgtcaaaacgactcaggagcatatgtgaaggtgtccccactgaacaatgttgtgacaattggacaactaaa

SEQ ID NO: 15272 - DNA, 80 bp, synthetic construct
  source 1..80: mol_type = other DNA
ttttttacttttttaaacttaagtggatgtgtacacatctagttaatacatgtgaatgaaataaaagaaatataatttta

SEQ ID NO: 15273 - DNA, 80 bp, synthetic construct
  source 1..80: mol_type = other DNA
tgtgtcatgcagcttctgataaccctagactgtgccataatgcatttttgaatgtgatttttgtcctcttgctgtgatca

SEQ ID NO: 15274 - DNA, 80 bp, synthetic construct
  source 1..80: mol_type = other DNA
ttagggtctgtctcatccttatgtcctcatttaacctgagtcacctttttaaaggttgtacctctaaaatcagtcacatt

SEQ ID NO: 15275 - DNA, 80 bp, synthetic construct
  source 1..80: mol_type = other DNA
cctgagtagctgggattacaggcacgtgccaccatgcgtggctaatagcaattatttttaaaaataaattttattgtgta

SEQ ID NO: 15276 - DNA, 120 bp, synthetic construct; identical to SEQ ID NO: 4968
  source 1..120: mol_type = other DNA

SEQ ID NO: 15277 - DNA, 120 bp, synthetic construct
  source 1..120: mol_type = other DNA
agaacttcaattccttgaactcgtctccaaatcacgtaacaaaagttcagattctatagtaagtcctttctaatactttcttattaagaaaccccatggttctctatagaacatgttctc

SEQ ID NO: 15278 - DNA, 120 bp, synthetic construct
  source 1..120: mol_type = other DNA
gagcagagcaggagcagcatttagggaggtagagtcacctgatcagttctcccatcgcatcctccaataacacattggtaaaaccttctggaattagaatatggctatctggcaatgctg

SEQ ID NO: 15279 - DNA, 120 bp, synthetic construct
  source 1..120: mol_type = other DNA
tcgccgttgagggtgagggctccatactcatagatggtgcctgttacccctttgttgcaatccacctggaattttacaaaaataaccataacgatataagataaaaaataattcccaaca

SEQ ID NO: 15280 - DNA, 120 bp, synthetic construct; identical to SEQ ID NO: 4969
  source 1..120: mol_type = other DNA

SEQ ID NO: 15281 - DNA, 120 bp, synthetic construct
  source 1..120: mol_type = other DNA
agttttgcacaaacttctcatctacatgttcttatattgtaattcctgtcccccaaaatcaggcccataacttctccagatgccactgaagggcctttccaggcttgccaatggggtaat

SEQ ID NO: 15282 - DNA, 120 bp, synthetic construct
  source 1..120: mol_type = other DNA
ctcactcaaatgggtctgtgcctataaaaactctgagaccctagcagccagaggcactggcgctggatgtggagagaagcacatcagcggaggaacacactcaactggctggacgtggag

SEQ ID NO: 15283 - DNA, 120 bp, synthetic construct
  source 1..120: mol_type = other DNA
ccgcggctgcactgtgggagcccccttctgggctggccaaggccggagccggccccctcagcttccgaggagttgtggagggagaggcgctggagggaaccagggctgcgcgtggcactt

SEQ ID NO: 15284 - DNA, 120 bp, synthetic construct; identical to SEQ ID NO: 4970
  source 1..120: mol_type = other DNA

SEQ ID NO: 15285 - DNA, 120 bp, synthetic construct
  source 1..120: mol_type = other DNA
agctgggctcctgagtctggtggggactgggagaacctttatgtctagctaagggattgtaaatacaccaatcggcactctgtatctagctcaaggtttgtaaacacaccaatcagcacc

SEQ ID NO: 15286 - DNA, 120 bp, synthetic construct
  source 1..120: mol_type = other DNA
gagcacttttgtgtctagctcagggattgtaaaggcaccaatccgcaccctgtcaaaacagaccactcggctctctgtaaaatggaccaatcagcaggatgtgggtgtggccagataaga

SEQ ID NO: 15287 - DNA, 120 bp, synthetic construct
  source 1..120: mol_type = other DNA
actgcctttacaagctgtaacactcaccgtgaaggtctacagcttcactcctgaagccagcgagaccacgaacccaccgggaggaatgaacaactccagacgcgctgccttaagagctgt

SEQ ID NO: 15288 - DNA, 120 bp, synthetic construct; identical to SEQ ID NO: 4971
  source 1..120: mol_type = other DNA

SEQ ID NO: 15289 - DNA, 120 bp, synthetic construct
  source 1..120: mol_type = other DNA
ttcttctcgtaaaccaaggcaagatccctgggatacagaaagtcctctgtctttgtgataaggcaggggtctaatggagctaacacaagctgcctatgggtggctgaactaagagcaccc

SEQ ID NO: 15290 - DNA, 120 bp, synthetic construct
  source 1..120: mol_type = other DNA
cggcggggaactgaagcagcgagccacacgccccgtcgcatgccttgtgagagggacaagggaacttttccggtttcgctggtaccttgaaaactcatccttggcacccacttctttata

SEQ ID NO: 15291 - DNA, 120 bp, synthetic construct
  source 1..120: mol_type = other DNA
gctaacatgttatgtggtaagagaggctataagtcctggccatatgaagaaaaatcatagaattttagagtaatttaaactgggcttcacaggatctcagtccataaaagcataccccat

SEQ ID NO: 15292 - DNA, 120 bp, synthetic construct; identical to SEQ ID NO: 4972
  source 1..120: mol_type = other DNA

SEQ ID NO: 15293 - DNA, 120 bp, synthetic construct
  source 1..120: mol_type = other DNA
ttgctactataataaaaagtcacacggaaatcaccatgtgagctgtcatttgtatgcctccattttcttgcctttgtgctaccttagctctgggtgcaacaacttccaaagatttggttc

SEQ ID NO: 15294 - DNA, 120 bp, synthetic construct
  source 1..120: mol_type = other DNA
agttttcagttctgctctagtttgcttacatctgtttgaagaagacagaataccctagaacacagcttttaattcacaagatgctattttacatcgagaattccacacccaaccaggcag

SEQ ID NO: 15295 - DNA, 120 bp, synthetic construct
  source 1..120: mol_type = other DNA
atatgaatccagtaacagagattaaagctcaaagcttcaggtgtggagacctgcatgagtatcaaccggaagcattttagaaatgcaaattcctgggctccccctaaaacttactgaatc

SEQ ID NO: 15296 - DNA, 120 bp, synthetic construct
  source 1..120: mol_type = other DNA
aaaggaactaacaaaagatatataattggcatatggccaccactgaggctgcttttgaataaattcatctgattttaaagttaaaatttgcgggtgcctcaggtgatctgctcagtccgc

SEQ ID NO: 15297 - DNA, 120 bp, synthetic construct; identical to SEQ ID NO: 4973
  source 1..120: mol_type = other DNA

SEQ ID NO: 15298 - DNA, 120 bp, synthetic construct
  source 1..120: mol_type = other DNA
ctctccaggagtaaccagggcagcctccctgtcaatccatttgcgacttcatgcctcatttgttgggatccacagcgctactccaagttatggaccagcatgaaggggacaggctctagg

SEQ ID NO: 15299 - DNA, 120 bp, synthetic construct
  source 1..120: mol_type = other DNA
ttcaaagagctactaggtgcagaggaaaagatgcaagtaagagacagtggatttagggagagcctgctaaggatagcaatgtcaggatttgtgaagaagggctgggaatgcagatcttgt

SEQ ID NO: 15300 - DNA, 120 bp, synthetic construct
  source 1..120: mol_type = other DNA
tctgctgagcaaagccaaccaggaaaaacaggacaagacaggaggcctggaactgctggaacatggctaggagttttagacgactctgaggtccccaggatttcagccccttttgagccc

SEQ ID NO: 15301 - DNA, 120 bp, synthetic construct; identical to SEQ ID NO: 4974
  source 1..120: mol_type = other DNA

SEQ ID NO: 15302 - DNA, 120 bp, synthetic construct
  source 1..120: mol_type = other DNA
cacacattcccaagttctttacccttctcctgcttttagctcaaaaaaatggctgaaactttgactacgaggctataaagaccattgaattcaatacctgtcagtgccactgactagctc

SEQ ID NO: 15303 - DNA, 120 bp, synthetic construct
  source 1..120: mol_type = other DNA
gtagggctgctgtaacaattaaatgtgataataactataaagcacttaccacatggcctgacaatggtaaacaactagaactgtattcacatagtttcatgtatgagaaaactgaagctc

SEQ ID NO: 15304 - DNA, 120 bp, synthetic construct
  source 1..120: mol_type = other DNA
cagtgaaatgaaggcaacttctgcgtcctactccagagctcttgctctggttccatttggatcataattactgtgatgaaatctttactatctgggacaatttacatttgctcaccttgt

SEQ ID NO: 15305 - DNA, 120 bp, synthetic construct
  source 1..120: mol_type = other DNA
ataggttttggtgttcccacattcttgatagacttttgagtaccttgggtccttgcctccagcaatgagaagtgaaggtacaggagcacacatggaacaggaggaaacaaggaacatttc

SEQ ID NO: 15306 - DNA, 120 bp, synthetic construct; identical to SEQ ID NO: 4975
  source 1..120: mol_type = other DNA

SEQ ID NO: 15307 - DNA, 120 bp, synthetic construct
  source 1..120: mol_type = other DNA
ccttccctccagaaatgttctgattctggtagatagaactgtcttcatcaccagagtccacctatctggggttgactctagatcaaatcttggcaagtactttgggatcattcctgagat

SEQ ID NO: 15308 - DNA, 120 bp, synthetic construct
  source 1..120: mol_type = other DNA
ccacgccttaatatatattaggagccagttcacatcctcaccctcctccttagaatttggcttgatttattaatttacattttaaaacctattctgtccacagatagaaacattatttca

SEQ ID NO: 15309 - DNA, 120 bp, synthetic construct
  source 1..120: mol_type = other DNA
ttattggttcacttttaacttaaggtcaaataaacatcaaagtttatatgaattgcccctgcaatgctggtgcctattattgtctatccacccaagcaattgatcttttaaatctgaatt

SEQ ID NO: 15310 - DNA, 120 bp, synthetic construct; identical to SEQ ID NO: 4976
  source 1..120: mol_type = other DNA

SEQ ID NO: 15311 - DNA, 120 bp, synthetic construct
  source 1..120: mol_type = other DNA
ccctgctttggaaagtcaaaacatttgcatgtctaccaagacatctagcattcatgcttgcaggcagggatggtcctcagtgtgtatacacaggaatatgcacggcagttgttggagccc

SEQ ID NO: 15312 - DNA, 120 bp, synthetic construct
  source 1..120: mol_type = other DNA
taacttgtaacctttgactccaaggctcaagccatcctcccacctcagccccctgagtagctgggactacagtcgcatgccaccaaacccagctaatttttgtatttttggtagagatgg

SEQ ID NO: 15313 - DNA, 120 bp, synthetic construct
  source 1..120: mol_type = other DNA
tttaatatcagctttgattgcagaaccaatacaggcaatgtaaggttttaattttttatcttgagatctgcttgtctgtgctgtgtcaacaaattcacatagaacaagtaggtgactttt

SEQ ID NO: 15314 - DNA, 120 bp, synthetic construct; identical to SEQ ID NO: 4977
  source 1..120: mol_type = other DNA

SEQ ID NO: 15315 - DNA, 120 bp, synthetic construct
  source 1..120: mol_type = other DNA
ggttgttgccactgtttgaagactataaaatttcttgtttcccagtagcaagtgcagcagaaggcaggtaatgaattttctgctaacttgcctaaaatgaaagattaatcatccctcaga

SEQ ID NO: 15316 - DNA, 120 bp, synthetic construct
  source 1..120: mol_type = other DNA
tttttttctcttctacactttttaccctttgccacctctcattactttctccttttctctctcctcattgtgtacgagaaaaagagtttggattcaggatttaaacaatcctggctttaa

SEQ ID NO: 15317 - DNA, 120 bp, synthetic construct
  source 1..120: mol_type = other DNA
gaaatgcctggcatacacagtaacaactcaataaatgctgatataagttcccattatttctttttcttctttcttttttcattttccttcctgctccatttatctcttatatatattctt

SEQ ID NO: 15318 - DNA, 120 bp, synthetic construct; identical to SEQ ID NO: 4978
  source 1..120: mol_type = other DNA

SEQ ID NO: 15319 - DNA, 120 bp, synthetic construct
  source 1..120: mol_type = other DNA
cttctgatcatagccaggaagacagccaacatttgtccctgggatatttctgggatgtctacagggtgtttctatatcaaaacctggtgttttattactggctttgatgcctttcacaag

SEQ ID NO: 15320 - DNA, 120 bp, synthetic construct
  source 1..120: mol_type = other DNA
cctaggccttgtgacttggatgagacaatctctaaactttactgagcatgtgcttcttatgtatattgttgtggcctgaaaaacatgacctataaggcgaatgtttgaattcaaaatgta

SEQ ID NO: 15321 - DNA, 120 bp, synthetic construct
  source 1..120: mol_type = other DNA
atttttctgatccaactcccgctttgtgcaaataggtaaattcaggcctgtagaggagcggcattctccatgttccacagttctattgagttgttggtgatggtctgcagtgtgtgctgg

SEQ ID NO: 15322 - DNA, 120 bp, synthetic construct; identical to SEQ ID NO: 4979
  source 1..120: mol_type = other DNA

SEQ ID NO: 15323 - DNA, 120 bp, synthetic construct
  source 1..120: mol_type = other DNA
cagagccagcttcaaccataggtgagtcccaaacttcatcatgtttggggaagatcagaaagttaagaacacgtgagaatgaaaattaaatgccaaaggacatttagtgatctctctaga

SEQ ID NO: 15324 - DNA, 120 bp, synthetic construct
  source 1..120: mol_type = other DNA
ctcaagtttatggtctacatttacactattgtgaatctttggccaagtcgcctttcctttctgaacttacttttccattgcgaatttgagctgaagatgcccatgctacctctgtaactg

SEQ ID NO: 15325 - DNA, 120 bp, synthetic construct
  source 1..120: mol_type = other DNA
tgcttacaaaactagagtaagaaaaatcctggaggcctgaatggagatgccagatgccaagggagattttctaattcacggaaaatagtcaagtaaaaccaaagggtggacagagttctc

SEQ ID NO: 15326 - DNA, 120 bp, synthetic construct; identical to SEQ ID NO: 4980
  source 1..120: mol_type = other DNA

SEQ ID NO: 15327 - DNA, 120 bp, synthetic construct
  source 1..120: mol_type = other DNA
tgtaattataggatttttaaagtcaggaagtgacagaccttatagcttaatttaggcctggattggcttttcagccttaatctatggctcaggctacaaacattttcacctaaaatcttg

SEQ ID NO: 15328 - DNA, 120 bp, synthetic construct
  source 1..120: mol_type = other DNA
ctctactaaaaatacaaaaaattagccaggcatggtggtggacacctgtaattccagctactcaggaggctgaggcaggagaatctcttgaacccgggaggcagaggttgcagtgagccg

SEQ ID NO: 15329 - DNA, 120 bp, synthetic construct
  source 1..120: mol_type = other DNA
ttctcctgtcaaattacttatatgtatgtataatttgcgtaatgtatataatttggaccaggggaggtgggatctcaatgttctcagcaccattgacctccaaggtcaaaaatctaaatc

SEQ ID NO: 15330 - DNA, 120 bp, synthetic construct; identical to SEQ ID NO: 4981
  source 1..120: mol_type = other DNA

SEQ ID NO: 15331 - DNA, 120 bp, synthetic construct
  source 1..120: mol_type = other DNA
atgatttcagcattccagaaaagaggcaacagggatttgatatgtggctctggctgggaggcagctactatgtgagacaatcaggggatgatgacaagaagtccctccatgtggcctcct

SEQ ID NO: 15332 - DNA, 120 bp, synthetic construct
  source 1..120: mol_type = other DNA
cttctgctctagaagttagttattgtgtgacaagcaaagataaagtggtgaggaaagtaaggaatttataatagcaagggaggagcagccatctctaaacacaggctttgggtaaatcag

SEQ ID NO: 15333 - DNA, 120 bp, synthetic construct
  source 1..120: mol_type = other DNA
agttcatattattctagcagttttacagatgagggccagaggcacagagagcagcttgcccaaagtcacataacttgggaaggaatgaggtttgatattttgatctccacagttctttga

SEQ ID NO: 15334 - DNA, 120 bp, synthetic construct; identical to SEQ ID NO: 4982
  source 1..120: mol_type = other DNA

SEQ ID NO: 15335 - DNA, 120 bp, synthetic construct
  source 1..120: mol_type = other DNA
ggaaacaaacttagaactggagaggaagaatttatcatttcctaaacatgaaagttcagcaaagctgggctggcagtgccaatcttatgggaggaggggagatgtgtgggaagagcagtg

SEQ ID NO: 15336 - DNA, 120 bp, synthetic construct
  source 1..120: mol_type = other DNA
gccaacgcaccaacactttccagtctgtaatatctgttcctttgccactccttctctctaaaaggtaggaaaatgccagtggattggggacaaaaaaatttttttaattaatgtgagaga

SEQ ID NO: 15337 - DNA, 120 bp, synthetic construct
  source 1..120: mol_type = other DNA
ctaataatctaatgaggaatatataaattgttcaagaatacaaataatatgcatattaaacatattaaatacacttatgatagtgaggggaaggaaagtggagtttgggaagcaaaggat

SEQ ID NO: 15338 - DNA, 120 bp, synthetic construct; identical to SEQ ID NO: 4983
  source 1..120: mol_type = other DNA

SEQ ID NO: 15339 - DNA, 120 bp, synthetic construct
  source 1..120: mol_type = other DNA
gctgaatgaatggggcttgtataccagttgaaaggcaaagcaactttatttttagagggacttgtgtctcatttccatgattcttcttgggctctgggcttccaggctattaagagtagt

SEQ ID NO: 15340 - DNA, 120 bp, synthetic construct
  source 1..120: mol_type = other DNA
acaagatcatgtcctttgcagggacatggatggagctagagggcattatccttagcaaactaatgaaggaacagaaaaccaaataccacatgttctcacttataagtggaggataaatga

SEQ ID NO: 15341 - DNA, 120 bp, synthetic construct
  source 1..120: mol_type = other DNA
tgatgaaataatttgtagaacaaacccctatgacacaagtttacctatataacacacctgcacatgtacccctgaacttaaaataaaagttaaaaaaaatagaaaaaaaagaggaatgct

SEQ ID NO: 15342 - DNA, 120 bp, synthetic construct; identical to SEQ ID NO: 4984
  source 1..120: mol_type = other DNA

SEQ ID NO: 15343 - DNA, 120 bp, synthetic construct
  source 1..120: mol_type = other DNA
aaggatttgtattaatttgctgtccttcgcatacattgtgactatttcccctcctcgagccagtttcctcctaactctttttgagagatcctagatggccggcccattctttgatttatt

SEQ ID NO: 15344 - DNA, 120 bp, synthetic construct
  source 1..120: mol_type = other DNA
agccgtgtttaaggacctcagagggcttgctatcacccatttataattttcccagaacttatgagtcccaggtcctcattgcagtggtaagcgctgagtgctcacgggggtgtgtgtggg

SEQ ID NO: 15345 - DNA, 120 bp, synthetic construct
  source 1..120: mol_type = other DNA
cagaggtgggcaaagacctcaggcccccagactagcaatctacaaacactagtcatgactacacagttaagggtcgtccatctgcttccccttctcctagcctgctttgtgcaaacaagt

SEQ ID NO: 15346 - DNA, 120 bp, synthetic construct; identical to SEQ ID NO: 4985
  source 1..120: mol_type = other DNA

SEQ ID NO: 15347 - DNA, 120 bp, synthetic construct
  source 1..120: mol_type = other DNA
gggactggggtttggaggagaagctgagtggacttgtctcagacacagctcagcaacaaccccttgaagaggaggaaaaaacgaatgtggaagttttaaggatggataaaatcagagagt

SEQ ID NO: 15348 - DNA, 120 bp, synthetic construct
  source 1..120: mol_type = other DNA
gataagacacatgtgtctggcagcagaaggggcagtttaggaaaggataataatgaatgcgataacttggaggcagaaaataatcatgaagttaggtaaaggcaaactttcatttacata

SEQ ID NO: 15349 - DNA, 120 bp, synthetic construct
  source 1..120: mol_type = other DNA
acaaaatgcagttctaataacatctccccatccctcgcctctaaaattaactagataacatcctgggtgaacttctattttgagaattgatatggtttttatgttacctgtggtgcttaa

SEQ ID NO: 15350 - DNA, 120 bp, synthetic construct; identical to SEQ ID NO: 4986
  source 1..120: mol_type = other DNA

SEQ ID NO: 15351 - DNA, 120 bp, synthetic construct
  source 1..120: mol_type = other DNA
taaaaacctgcatagaaaaatatctttttcctcaagagtaagaagtgagtagctacaacctagtatgctggtgataaaatcagtgggataacaggactagaaaaaagttgtgttttgttt

SEQ ID NO: 15352 - DNA, 120 bp, synthetic construct
  source 1..120: mol_type = other DNA
tatcaaataatgcccttctctcttttctccagccagttcctttccacctttttctcaccggatggtttggacatagagcttccttttcatattcctgtcatatatattctgtattccatg

SEQ ID NO: 15353 - DNA, 120 bp, synthetic construct
  source 1..120: mol_type = other DNA
gtactgcatgaacactgtaagggtagagacagaggaggagtaagatgagacctgccttgtagaggaatttaataaaagaacatgcaatgagaatttcaggcagggctaatttatattaag

SEQ ID NO: 15354 - DNA, 120 bp, synthetic construct; identical to SEQ ID NO: 4987
  source 1..120: mol_type = other DNA

SEQ ID NO: 15355 - DNA, 120 bp, synthetic construct
  source 1..120: mol_type = other DNA
aaacatggaagcccacttggagttctagtaagaatctagataaatatcttcattttactcatggggaaactgaaggccagggatgggaattgcccaggttcacaaaggaatttaacaatg

SEQ ID NO: 15356 - DNA, 120 bp, synthetic construct
  source 1..120: mol_type = other DNA
gaaagataagcaactaagatatcctaaaaatagttcagcaatttaaaaccctcccttctcagagagtccagacaggaggccttcaatccagagccaaggagtagcctgttttttacagaa

SEQ ID NO: 15357 - DNA, 120 bp, synthetic construct
  source 1..120: mol_type = other DNA
tttccattatccgtgtatttcctggtatctcacagctttcaaaataataggaaacttgattcttatgtgtgtgtgtggaggggggagtgtacatagtaagtgtgtatatatatgtgtata

SEQ ID NO: 15358 - DNA, 120 bp, synthetic construct
  source 1..120: mol_type = other DNA
tggtacaagagatgttttgatacagacatgcaatgtgttataatcacattatggaaaatggggtatccatcccctcaaggatttctcctttgtgctacaaacaatccaattatatgcttt

SEQ ID NO: 15359 - DNA, 120 bp, synthetic construct; identical to SEQ ID NO: 4988
  source 1..120: mol_type = other DNA

SEQ ID NO: 15360 - DNA, 120 bp, synthetic construct
  source 1..120: mol_type = other DNA
agaacataactattctttgacttctttgaaagattacacagatgccaggaattattgttaccagtattatcacttaaaaaaaatcttccagatggattgccacaaagacgagaaaggcac

SEQ ID NO: 15361 - DNA, 120 bp, synthetic construct
  source 1..120: mol_type = other DNA
tcgtcaacgtggccacctactgtggtctgacagcgcaatatcctggtaagagaattcatagttacttctctttgggactaaattttccagctgatcatattctaaattatacttggaatt

SEQ ID NO: 15362 - DNA, 120 bp, synthetic construct
  source 1..120: mol_type = other DNA
caaagttttattggaatgcagccgtccccgttcatttacacatcacctatggctgctttcatgctgtaaaatagaggttagtagttgtaggagtagtgatgatggaaaccatgtggccca

SEQ ID NO: 15363 - DNA, 120 bp, synthetic construct; identical to SEQ ID NO: 4989
  source 1..120: mol_type = other DNA

SEQ ID NO: 15364 - DNA, 120 bp, synthetic construct
  source 1..120: mol_type = other DNA
cctttttaggatgtagtttttcctccctttttgtacattattcagggaagaattttctcatattttagggcatgtggtttaaaaatcagtgaataacaatcaggatggattataccagag

SEQ ID NO: 15365 - DNA, 120 bp, synthetic construct
  source 1..120: mol_type = other DNA
ggtttccaccttcttcccctcccttcagtagaccaatattatcttgtttacagaatacatagatattcttgtttctgctcccccctccccagctgataacacacaataaatactatttgc

SEQ ID NO: 15366 - DNA, 120 bp, synthetic construct
  source 1..120: mol_type = other DNA
aatcgatttattcagtttccaccctgcaaataacagataacagaaggacatagggaggggtactgaggaaccctgtgaaaacaggaaggcaatctctgttttttaaaaaggcctagagga

SEQ ID NO: 15367 - DNA, 120 bp, synthetic construct; identical to SEQ ID NO: 4990
  source 1..120: mol_type = other DNA

SEQ ID NO: 15368 - DNA, 120 bp, synthetic construct
  source 1..120: mol_type = other DNA
ctctactaaaaatacagaaatattagctgggcatggtagcaagtgcctgtagtcccagctactcgggagtctaaggcaggagaatcacttggatctgggagacggaggttgcagtgagcc

SEQ ID NO: 15369 - DNA, 120 bp, synthetic construct
  source 1..120: mol_type = other DNA
aacttttgaataataaagaagactaagccccatttcagaggaacagaaaactctctgaaatgggacctgggcatccctatttttaggaaagggccttcagctgattctgatgtgctgcag

SEQ ID NO: 15370 - DNA, 120 bp, synthetic construct
  source 1..120: mol_type = other DNA
aacagcccttctgatgcagagctgtttccctccctgggcctctgtttccttctctgtaaaatgggtaaccccagggaatcatccttgcacaaggcagaacctctacctagaccaaaattg

SEQ ID NO: 15371 - DNA, 120 bp, synthetic construct; identical to SEQ ID NO: 4991
  source 1..120: mol_type = other DNA

SEQ ID NO: 15372 - DNA, 120 bp, synthetic construct
  source 1..120: mol_type = other DNA
ctggctgagacttggatggactatggaggacagaagggatggaggaaaagagacaagtcatgggatagagagaaataaagtgagtcagagagcccaaagtcaaaacatggccatattcct

SEQ ID NO: 15373 - DNA, 120 bp, synthetic construct
  source 1..120: mol_type = other DNA
ggtatgtccgtccagggggaggatttgtacctagtttccagctttttgagaaaggggatgtgaatggtgaaaaagaacagaaagtcttcagtttcttgaaggtgagtaaattcctggcat

SEQ ID NO: 15374 - DNA, 120 bp, synthetic construct
  source 1..120: mol_type = other DNA
ggattggtctttgtggagaaaaatctccagatcagcattccacattgcacatgctgatctggagattaatctgtgagtatctatggggctctaactctgtgtggtgaagaaagttgtgtg

SEQ ID NO: 15375 - DNA, 120 bp, synthetic construct
  source 1..120: mol_type = other DNA
tgcccgctacttataaagcaatctaaataataaggatataaagatgaataaggcatagtctgtactcttgatgagtttataatggagagagagttagaaaccattagctatgtagctggg

SEQ ID NO: 15376 - DNA, 120 bp, synthetic construct; identical to SEQ ID NO: 4992
  source 1..120: mol_type = other DNA

SEQ ID NO: 15377 - DNA, 120 bp, synthetic construct
  source 1..120: mol_type = other DNA
tgatacagtgtagtaggtaccttttatgaaacactgatttttagacatagagaatgccagagctgaaacaaccctaaagattaccaaagtgaattgttcctaaatgctggactgtgaacc

SEQ ID NO: 15378 - DNA, 120 bp, synthetic construct
  source 1..120: mol_type = other DNA
caaaaaagaacagtgtgggaagttttttataaactcaactcgtctaacttataggacttccctttattcacaaattatgacccacacgcagtttattcttccaatggtctttttaaatta

SEQ ID NO: 15379 - DNA, 120 bp, synthetic construct
  source 1..120: mol_type = other DNA
aaaccacattccaatccaagctatttactttgaagaaaaggaaaccaaaagcataaaaggtaacatgtcttatccatggcagcaaaattttgttatggggctatggggagaaaccgaaag

SEQ ID NO: 15380 - DNA, 120 bp, synthetic construct; identical to SEQ ID NO: 4993
  source 1..120: mol_type = other DNA

SEQ ID NO: 15381 - DNA, 120 bp, synthetic construct
  source 1..120: mol_type = other DNA
gtcaagacagacatcctggcgtacttgaagcaattcaaaaccaaataggaaggtggagttaagggcaggagcaaccctacttctcacctaatgacttgctctccccacccctccaaaaaa

SEQ ID NO: 15382 - DNA, 120 bp, synthetic construct
  source 1..120: mol_type = other DNA
tcccactctccacaaactagatttatatttggaaggctactgctcttttgcctctcaagagtatgtgggtgaagactgaaacaaatggaaacctaaaatccccagacctctgttacaggt

SEQ ID NO: 15383 - DNA, 120 bp, synthetic construct
  source 1..120: mol_type = other DNA
ctagacattctgactcttccatctctctctaccctggaggtgtagaaatagcaatggggtcacagtcacacaatttaggttccacttcataacattttttgtctcctaggacaaacgtgt

SEQ ID NO: 15384 - DNA, 120 bp, synthetic construct
  source 1..120: mol_type = other DNA
acattgcttcaaaagaagagagggcatctccatgcttgtgggacccaaaacctatctctggccctacaaaagttttcctaattgtctgatctttagtgcattcaggttatggcacctgga

SEQ ID NO: 15385 - DNA, 120 bp, synthetic construct; identical to SEQ ID NO: 4994
  source 1..120: mol_type = other DNA

SEQ ID NO: 15386 - DNA, 120 bp, synthetic construct
  source 1..120: mol_type = other DNA
ctcttcaggaattgcctcagcctaagtttttcccctttccagggcagcctgtatccagttactcatccctgagaggcatagaggccaaaccctgactgctcaacttagcacaactttgaa

SEQ ID NO: 15387 - DNA, 120 bp, synthetic construct
  source 1..120: mol_type = other DNA
tccacactgattgtcagttaatgccctagtaaactttctgaatgcaaatatccatcttagagtctactgtctagagaatccaaccagtaattattggtaccaaatatgatctgagaaaga

SEQ ID NO: 15388 - DNA, 120 bp, synthetic construct
  source 1..120: mol_type = other DNA
aacctgaactggcatggtaaactggtggaagaatatgcactagcagacatgaagttttaggtgcttgagaaacatgaggggaatggtaattataacgtaatagaattggatggtcgttgc

SEQ ID NO: 15389 - DNA, 120 bp, synthetic construct
  source 1..120: mol_type = other DNA
gtttctccatgggatgtataaaggacctctcctatctgcaacttaacagcagcaaaaccgaaagttcaggctcaagacttaatcataggaatagtatgtacaactctaaaagaagttagc

SEQ ID NO: 15390 - DNA, 120 bp, synthetic construct; identical to SEQ ID NO: 4995
  source 1..120: mol_type = other DNA

SEQ ID NO: 15391 - DNA, 120 bp, synthetic construct
  source 1..120: mol_type = other DNA
caaatctccaaattttccaggacccccaaaacttttagaagtggcccatcccttcttattgagggttagcatatccttcttgcttgaaaacaatgcagatgactctgtctggccaaatat

SEQ ID NO: 15392 - DNA, 120 bp, synthetic construct
  source 1..120: mol_type = other DNA
aaagttagataaggagacttcactgatatgggagcgctctccctgaatacagaatttttacactctgtcaagaaaccaacacactgttcggatggctcctattcggaaaaaaagaaaaat

SEQ ID NO: 15393 - DNA, 120 bp, synthetic construct
  source 1..120: mol_type = other DNA
actagataactgtacatcacaggaaggccaaaggacattcagtttgaaaaaacaaaaaaggaatgtgctggtgagaggggccattttgttatgttgttcaattactttaacaaaaatttt

SEQ ID NO: 15394 - DNA, 120 bp, synthetic construct
  source 1..120: mol_type = other DNA
tactgtttttctgcatttacttagcctgcgttgcatctatacgtcgaaaacagtgatttttgtaaaggaaatattcgctctctgagtgtttccgagtagcaaagtattttaacattatta

SEQ ID NO: 15395 - DNA, 120 bp, synthetic construct; identical to SEQ ID NO: 4996
  source 1..120: mol_type = other DNA

SEQ ID NO: 15396 - DNA, 120 bp, synthetic construct
  source 1..120: mol_type = other DNA
ttcaaatgtttttaaattattgtctgactttagagaagccgtgggaaaatctgagcagaaattcaaggtaccggtgacgtcaaccctgagtccctagggcatctctgagttggaaggaaa

SEQ ID NO: 15397 - DNA, 120 bp, synthetic construct
  source 1..120: mol_type = other DNA
ttaaagagttcatcgtcaatctgtaagagcatcttctcttatacctttccaaatccttattatttctgtggctccagtggcgcaatcggttagcgcgcggtacttataagacagtgcacc

SEQ ID NO: 15398 - DNA, 120 bp, synthetic construct
  source 1..120: mol_type = other DNA
atgtactcagatttagactgcactcagaaccctcgcgtgatttgacttaaaattccctggttaaggtcatgggtgataaacgtcgtcacacggtcctttttgatgcttgcctttgtccaa

SEQ ID NO: 15399 - DNA, 120 bp, synthetic construct; identical to SEQ ID NO: 4997
  source 1..120: mol_type = other DNA

SEQ ID NO: 15400 - DNA, 120 bp, synthetic construct
  source 1..120: mol_type = other DNA
acaaggacgatcttaggtttttaaaatcactgtattagtgggaattttcttgtctctgaatctgctttccctacctcagtttcttcattcctctgggattcttaatgagcctatgatgtc

SEQ ID NO: 15401 - DNA, 120 bp, synthetic construct
  source 1..120: mol_type = other DNA
tctgtgacatcctggagacacaatacagctctccctcttcacagatttatgactgcccatgtgcaaatgctcagcactacctgttcttttctagctgctgctgcattttgaaatgtttac

SEQ ID NO: 15402 - DNA, 120 bp, synthetic construct
  source 1..120: mol_type = other DNA
aacaagatgtacaatgaacatatcaataggagggctattcaccgtgttgtttgataataaattaacaattgattaacagctgcaagttcctcccatccctgtatgcatatccctctgtaa

SEQ ID NO: 15403 - DNA, 120 bp, synthetic construct; identical to SEQ ID NO: 4998
  source 1..120: mol_type = other DNA

SEQ ID NO: 15404 - DNA, 120 bp, synthetic construct
  source 1..120: mol_type = other DNA
gccaagtctgtttccctccctgttgtatgtgagttgactttgtgatttgctttgaccaacagaattctgtgaaatgatgtagaaatggtggtgtaggagttctaaaattaggcctcaaga

SEQ ID NO: 15405 - DNA, 120 bp, synthetic construct
  source 1..120: mol_type = other DNA
caggcagtccagctgacaccccacacatgttagtgggaccatcttggaccatccaatctcagtcaagctgccagatgactacagtcatatgagtgacccaagacaaaatcaacaaaagaa

SEQ ID NO: 15406 - DNA, 120 bp, synthetic construct
  source 1..120: mol_type = other DNA
tttgagtaaggtttgttacacagatataaatgatggatataagcactaagcacagttctgagcacaaagtaagagcctagggtaagttaggagtttatgacttttggggatcttctcatt

SEQ ID NO: 15407 - DNA, 120 bp, synthetic construct
  source 1..120: mol_type = other DNA
gaaactccagaattgtttggaatcctgggttgttcaaattgatccttggagtaagcttctgactccttgtgtccttgcaccaagctcagagttcctgctctgaaagacctagagcttcca

SEQ ID NO: 15408 - DNA, 120 bp, synthetic construct; identical to SEQ ID NO: 4999
  source 1..120: mol_type = other DNA

SEQ ID NO: 15409 - DNA, 120 bp, synthetic construct
  source 1..120: mol_type = other DNA
tgtcacatacttgtcatcatggtggctagaagcagagtatacagttctgttttccagaaattcctgagtagcttcccaccaggcaagataccagaatcaggcaaaaaaaattttcttttt

SEQ ID NO: 15410 - DNA, 120 bp, synthetic construct
  source 1..120: mol_type = other DNA
cagaaagaatttcctgtctaatttattagtcaaactatcaatcaaaactgagtatgttataaagccatttgtagacagagtcaccctctcagaaaattcctagaggttattctccatcaa

SEQ ID NO: 15411 - DNA, 120 bp, synthetic construct
  source 1..120: mol_type = other DNA
aaccagtccagattgaagcagggatacaaaggctccagagaggagaccactaaggaaaatattaaaattgataggttctttgaggtatttcactatattgagagttgcttaaattcaagg

SEQ ID NO: 15412 - DNA, 120 bp, synthetic construct; identical to SEQ ID NO: 5000
  source 1..120: mol_type = other DNA

SEQ ID NO: 15413 - DNA, 120 bp, synthetic construct
  source 1..120: mol_type = other DNA
gccgtagtagctcacgcctgtaatcccagcactttgggaggctgaggcgggtggatcacgaggtcaggagttcgaagcgagcctggccagcatggtgaaaccctgtctctactaaaaata

SEQ ID NO: 15414 - DNA, 120 bp, synthetic construct
  source 1..120: mol_type = other DNA
atactgtatgatcccactcacatgaaattctgaaaactatgaacatgtaatgatggaaagcatatctggttgtaagaggggaacagggcttacaagagggcaggaggaagcttttggggg

SEQ ID NO: 15415 - DNA, 120 bp, synthetic construct
  source 1..120: mol_type = other DNA
tgggaattatgcctcaataaaactgtttagagtacattgtctggaaaaatatcatgaagccattctgcaagtatagttgtgggtcttttccctcttttttcttttttctatactatggag

SEQ ID NO: 15416 - DNA, 120 bp, synthetic construct; identical to SEQ ID NO: 5001
  source 1..120: mol_type = other DNA

SEQ ID NO: 15417 - DNA, 120 bp, synthetic construct
  source 1..120: mol_type = other DNA
gctattccttcttgaatcgtacttaatagtcatgtcgtcctaataatttctccatttcataaaagtattcaaatgtatttggccagattctttccccttttgttttgttttaacgtttac

SEQ ID NO: 15418 - DNA, 120 bp, synthetic construct
  source 1..120: mol_type = other DNA
agggcattacaaaggctctctttcgccttttggagaaactgcttcctcttcttcaagatcttttcctggctcgcctcttctcctgttttcaggtctctgttaacaccttggttcctcaga

SEQ ID NO: 15419 - DNA, 120 bp, synthetic construct
  source 1..120: mol_type = other DNA
aacgaccacatccacctgaatcatgagcaggttttaaggcgtgtgtttcttcagctcctctaaattttagaaagggggcgatatttaaactgacctcaaaaagacaaggctctcaagtta

SEQ ID NO: 15420 - DNA, 120 bp, synthetic construct
  source 1..120: mol_type = other DNA
ccaggtgaataaagctccttaagatgcattcaactgagttccctgagcccattcaacaggcgggaagaggatactcccggaccagggctcacgctttctccatcccaccccggactccag

SEQ ID NO: 15421 - DNA, 120 bp, synthetic construct; identical to SEQ ID NO: 5002
  source 1..120: mol_type = other DNA

SEQ ID NO: 15422 - DNA, 120 bp, synthetic construct
  source 1..120: mol_type = other DNA
acgccttatccattaggccacgtggtcccatggcttagcaactgcaaaaaatatgagaaatgttgtaagattggctattaacctggattttatatatatattgtatggttctacttatat

SEQ ID NO: 15423 - DNA, 120 bp, synthetic construct
  source 1..120: mol_type = other DNA
actcctacccttaacttgacaccaaatgttacaccaaattttgcacatgcaccacgttgcttctctcagctggtgacaaaaagttgtaaagaaagggaaaaagaaaagcattgaatgtct

SEQ ID NO: 15424 - DNA, 120 bp, synthetic construct
  source 1..120: mol_type = other DNA
caattcagctgcaacagctgcaattagcattaaatagaggcatcttcctaggcctggctccgcttggtaaccaaaactaggccctgctgaatagtctctagtgagacgtttgttaaaagc

SEQ ID NO: 15425 - DNA, 120 bp, synthetic construct; identical to SEQ ID NO: 5003
  source 1..120: mol_type = other DNA

SEQ ID NO: 15426 - DNA, 120 bp, synthetic construct
  source 1..120: mol_type = other DNA
tgggaactctttgagagcctgatttgagtctttatgggacctccctcttcatcctggcttccggctctctcaaagtctgttacacagatttttcatattccagaagggctggagaaacat

SEQ ID NO: 15427 - DNA, 120 bp, synthetic construct
  source 1..120: mol_type = other DNA
ttgcagggatctgttcttaacccagcctgaaggggttcagtgaacacctaggaaccaaacttactcttgagacctaaaagataagaaagaattagtttcaaaagaaaaaaagtgcagaaa

SEQ ID NO: 15428 - DNA, 120 bp, synthetic construct
  source 1..120: mol_type = other DNA
ggggaattggcggggggcggggggggattgcctaaggccaggagtttgagaccatcctgggcaacatagcgaaacttctctctctcttctctcttaaaaaaaaaaaagccaaatagatga

SEQ ID NO: 15429 - DNA, 120 bp, synthetic construct; identical to SEQ ID NO: 5004
  source 1..120: mol_type = other DNA

SEQ ID NO: 15430 - DNA, 120 bp, synthetic construct
  source 1..120: mol_type = other DNA
aaacttttccaaacgtagtgacagagggaagacttttcacctcattttcaccttcatcctaataccaaaccagaaaaagacaatgagagaaagaaaaatcacaggtcaatctcattaacg

SEQ ID NO: 15431 - DNA, 120 bp, synthetic construct
  source 1..120: mol_type = other DNA
ccaaaagcaggatgtcaatttaacgtgagaagaacagtgttatgattcagtacattaagaaattaaaggaaaaaaataagttcacctcaaaagaggcagaaaaacattggataaatttca

SEQ ID NO: 15432 - DNA, 120 bp, synthetic construct
  source 1..120: mol_type = other DNA
actttacttgagattgggactacaagtggtataccaggaattgcgacttccattccttcccagacaaaaggaaagttaaaaagttataattcttagaaaggaagaaacagaactatcttt

SEQ ID NO: 15433 - DNA, 120 bp, synthetic construct
  source 1..120: mol_type = other DNA
ttaacacattttcccttgatagctgtaacaatttatgaaagcaatgacatgcaatgcagaaaaacctagaagtcacaggaaatgagatattttgatatttcaattaaaaaaacacaaaaa

SEQ ID NO: 15434 - DNA, 120 bp, synthetic construct; identical to SEQ ID NO: 5005
  source 1..120: mol_type = other DNA

SEQ ID NO: 15435 - DNA, 120 bp, synthetic construct
  source 1..120: mol_type = other DNA
agaatgtatctttgaactcccacccagatcttctgtttcaatgtattgccactgtttccatcaaataagatcccagaactaagttttgtcacttgagctgtgtcaagagatagaaaatta

SEQ ID NO: 15436 - DNA, 120 bp, synthetic construct
  source 1..120: mol_type = other DNA
tcatctttgaattttgcatattttcatactccatataaataggattatataataaatactctcttatgcctggcttcttttatgcaggaatatgtgaaattcatccatgttgttgcattt

SEQ ID NO: 15437 - DNA, 120 bp, synthetic construct
  source 1..120: mol_type = other DNA
tataaaccgtacctgtaggaaaactcttggacttgctttttttttttggcatatatgtgcacaagttttactgggtattaaaataaagagaataaatcgatttttaatgtttgctgacag

SEQ ID NO: 15438 - DNA, 120 bp, synthetic construct; identical to SEQ ID NO: 5006
  source 1..120: mol_type = other DNA

SEQ ID NO: 15439 - DNA, 120 bp, synthetic construct
  source 1..120: mol_type = other DNA
tggggtatttagggttttctatatataagatcatgtatacaaaaatcaactcaagatgaatcaaaagcttaactctaagactggaaaccatgaaaatgctacaagacagcatcggagaaa

SEQ ID NO: 15440 - DNA, 120 bp, synthetic construct
  source 1..120: mol_type = other DNA
ctaaaaagcttctgcacagcaagataagtaatcagcagagtaaaataaactaaaaagcttctgcacagcaagataagtaatcagcagagtaaaccaacaacccatagagtgggagaaaat

SEQ ID NO: 15441 - DNA, 120 bp, synthetic construct
  source 1..120: mol_type = other DNA
attttcaaaagaagatatacaaatggccaacaaatgtgaaaaatgctcagcatcactggtaatcagggaaatgcaaatcaaaaccacaatgtgataccaccttactgctacaagaatggc

SEQ ID NO: 15442 - DNA, 120 bp, synthetic construct; identical to SEQ ID NO: 5007
  source 1..120: mol_type = other DNA

SEQ ID NO: 15443 - DNA, 120 bp, synthetic construct
  source 1..120: mol_type = other DNA
atgaaataatggcatttgcagcaacctggattaagttggagaccattattctaagtgaagtaactcaggaatggaaaaccaaacatcatgtgttgtcacttataagtgggagctaagtgg

SEQ ID NO: 15444 - DNA, 120 bp, synthetic construct
  source 1..120: mol_type = other DNA
acattgggtacagtgtacactgcttgagttatggatgcaccaaaatctcagaaatcatcactaaagaacttatccatgtaaccaaagaccatctgttccccaaaaacctattgaaataaa

SEQ ID NO: 15445 - DNA, 120 bp, synthetic construct
  source 1..120: mol_type = other DNA
tagaaatggtgagagtgggcctcctcagcttgttcctgatgttagaggaaaatcaggttttcactattgagtttgttagctctgggcttatcttatatagcctttgttattgtgaggtac

SEQ ID NO: 15446 - DNA, 120 bp, synthetic construct; identical to SEQ ID NO: 5008
  source 1..120: mol_type = other DNA

SEQ ID NO: 15447 - DNA, 120 bp, synthetic construct
  source 1..120: mol_type = other DNA
ccccctccttgagtttttggaagagtttgagaaggattgttaccagttctttaaatgtttggtaggattcagcagtgcagccataaggtcttgggattttctgtgttgggaggttttgat

SEQ ID NO: 15448 - DNA, 120 bp, synthetic construct
  source 1..120: mol_type = other DNA
ttggcatataattattgaaagtgtattacaatccttcatatttgtcagtggaaaaaaaacacactcaaagtgttgtttttttctattctctcacccagcagcctcaacaccaaccaacgt

SEQ ID NO: 15449 - DNA, 120 bp, synthetic construct
  source 1..120: mol_type = other DNA
tcagcatcctccaacccagttcaattctgacattatccacctggaaatagtttcacatcccacaggttgagagctcagtttcacaaaactgcccccacttcagacacaagccacaagtct

SEQ ID NO: 15450 - DNA, 120 bp, synthetic construct; identical to SEQ ID NO: 5009
  source 1..120: mol_type = other DNA

SEQ ID NO: 15451 - DNA, 120 bp, synthetic construct
  source 1..120: mol_type = other DNA
gaagctgcttgccacactctggcacagagctccttggatgctccagccatggctctggagggcacaatggtaaacctcggtgatgtctacatgttgctgattctgcagacatgcatagta

SEQ ID NO: 15452 - DNA, 120 bp, synthetic construct
  source 1..120: mol_type = other DNA
accaaagagagttcccactagatcaaacctagtggagctgtgggatcaggactgcctccaaaaccctagaggtgtagagcaaccagcatgtaactccagcctgggagagcttcaagcatg

SEQ ID NO: 15453 - DNA, 120 bp, synthetic construct
  source 1..120: mol_type = other DNA
tcaaggaaaagaattctggagctttaatacttaatgtgctcttcctgttgggttttaggcttacttggcattagttattcttttatttttgcctatttctcccttttggaatgggaacat

SEQ ID NO: 15454 - DNA, 120 bp, synthetic construct; identical to SEQ ID NO: 5010
  source 1..120: mol_type = other DNA

SEQ ID NO: 15455 - DNA, 120 bp, synthetic construct
  source 1..120: mol_type = other DNA
ctcatgaatgaatgagtgtcattatcacaggagtaggctcattattccaagagtgggctcattatggtgagagtaaatttgttataaaagtgagtttgactctctgtcattcacgtgcat

SEQ ID NO: 15456 - DNA, 120 bp, synthetic construct
  source 1..120: mol_type = other DNA
ctttataaaatactcagtctgtgatattctgttatagcaacacaaaatggattaagacattcctctagttggcaaatttcaaataatctgtctttgagttcactgattctttcttctgca

SEQ ID NO: 15457 - DNA, 120 bp, synthetic construct
  source 1..120: mol_type = other DNA
gttccttttcatggtttctagttattaaacttctccttttgttcatgcattgttttcctcatttttatttagttgtctatatacattcttttatagcttattgagcttatttcagatgat

SEQ ID NO: 15458 - DNA, 120 bp, synthetic construct; identical to SEQ ID NO: 5011
  source 1..120: mol_type = other DNA

SEQ ID NO: 15459 - DNA, 120 bp, synthetic construct
  source 1..120: mol_type = other DNA
tgcgatgcattttctcttaccataatgtaatggaattataaatcaatggcagggaaaaaatgtgcaaaacacaaaaatatgtggaaattaagcaacactcttgtataaccagtgggtcaa

SEQ ID NO: 15460 - DNA, 120 bp, synthetic construct
  source 1..120: mol_type = other DNA
cagataaggcagtgcttggaagaaaatttatagctgtaaatgcctgtatcaaaaaagaagaaagatgtcaaatcagtgacctaactttctacctgtagctttatgataatttttgaagtc

SEQ ID NO: 15461 - DNA, 120 bp, synthetic construct
  source 1..120: mol_type = other DNA
tttaatatataaattaaaaatctcagaaaagaaaaccaaggaactgctgaatatggttgcctttaaaagagtggccctagagagacatgctgtggatttagggaagaataagcaagtgtt

SEQ ID NO: 15462 - DNA, 120 bp, synthetic construct
  source 1..120: mol_type = other DNA
tgcaatgatgatattaaaataactgatttataagtcaccttcccgctctagcaataaatatattgattataagcaaacaaagttataaagatgaatctgggtttatgagaaaagagatga

SEQ ID NO: 15463 - DNA, 120 bp, synthetic construct; identical to SEQ ID NO: 5012
  source 1..120: mol_type = other DNA

SEQ ID NO: 15464 - DNA, 120 bp, synthetic construct
  source 1..120: mol_type = other DNA
tccacacctcctattgctgagttgggtaaacaccaggaagtcacctatgtggattcctgtctcatctttgggagctttacagaaactccaatgttcaaaagtgaaattgaaaataagtga

SEQ ID NO: 15465 - DNA, 120 bp, synthetic construct
  source 1..120: mol_type = other DNA
taatcaagacagtgtggtattggtaaaagaatagacacgtagaacaatagaatagagactccagaaatagacccccacaaatatagccacgtgatcattgacaaaggagcaaatataatt

SEQ ID NO: 15466 - DNA, 120 bp, synthetic construct
  source 1..120: mol_type = other DNA
cttcaaaaactggaagcatataagatgtccttcaatgggcaaatatatttacaagatgtagtacattcatacattggaattttatacagaaatttaaaatgtgccataaaaccatgaaaa

SEQ ID NO: 15467 - DNA, 120 bp, synthetic construct; identical to SEQ ID NO: 5013
  source 1..120: mol_type = other DNA

SEQ ID NO: 15468 - DNA, 120 bp, synthetic construct
  source 1..120: mol_type = other DNA
ccagagtgcaagggagagaagaaggagaaggcggggagctagagagagaaggagggaaagggagaacaaagtgagggcgagagggatgagacagaaagaaaagggaggaaagaggaacaa

SEQ ID NO: 15469 - DNA, 120 bp, synthetic construct
  source 1..120: mol_type = other DNA
taatgtttaagctgtgctaggggagtacactgcaagaggaaggggcctctggaccccatgatttttctgcttgttcctgctgaaaccaagatgttaatctgagcgggtatgccaaactta

SEQ ID NO: 15470 - DNA, 120 bp, synthetic construct
  source 1..120: mol_type = other DNA
agaacttaaccctcaccggcgaccttgtagataacgtctataagtcaccatggtaacggtcgcttcagttgtttttcaggaacctggggcaactcctgtccagtttaaaccggttgagac

SEQ ID NO: 15471 - DNA, 120 bp, synthetic construct; identical to SEQ ID NO: 5014
  source 1..120: mol_type = other DNA

SEQ ID NO: 15472 - DNA, 120 bp, synthetic construct
  source 1..120: mol_type = other DNA
taacactgctgtgtgcggtggggctgtgggacacccaggatgatcatccccagcgagtttgtgaaactcccggctgacgactttccaacgaaccttacacaagccctagcaggcggctcc

SEQ ID NO: 15473 - DNA, 120 bp, synthetic construct
  source 1..120: mol_type = other DNA
cttggatgctctgcctcaggcctagaggcagtggctgctctggagagttctctactcttactagacagtatcctgctactagttaataattctttaagttgaacatttcttgttcaaatt

SEQ ID NO: 15474 - DNA, 120 bp, synthetic construct
  source 1..120: mol_type = other DNA
gttgaagtgattagtgtgggtccatacagcttgatggaaaatgttctgactttggatcagaatcaagtccgtagaaggaatctttcagcctccttctgagaatacagccacagtgtgtga

SEQ ID NO: 15475 - DNA, 120 bp, synthetic construct; identical to SEQ ID NO: 5015
  source 1..120: mol_type = other DNA

SEQ ID NO: 15476 - DNA, 120 bp, synthetic construct
  source 1..120: mol_type = other DNA
tcaggaaccgaggcttacctgagacatagaaagtgaggtgatgtggttgcttagatttatcttttcatttgtgctgctcctggcactcttattgctatgagattactaaaaagtttcctg

SEQ ID NO: 15477 - DNA, 120 bp, synthetic construct
  source 1..120: mol_type = other DNA
aaattcaaagggaaataatctattacaatctcttcctctcttacatatcaaagggtactatattgagtccaaagggaaattactttctttcttttttttctttttttttttttgagacag

SEQ ID NO: 15478 - DNA, 120 bp, synthetic construct
  source 1..120: mol_type = other DNA
tttttttttctttgagatggagtctcgctctgtcatccaggctagagtgtagtggcacgataccagctcactgcaatctccgcctcccgggttcaagcgattctcctgcctcagcctcca

SEQ ID NO: 15479 - DNA, 120 bp, synthetic construct; identical to SEQ ID NO: 5016
  source 1..120: mol_type = other DNA

SEQ ID NO: 15480 - DNA, 120 bp, synthetic construct
  source 1..120: mol_type = other DNA
atagtttacaatttttttaaatgtaaaacaatattcagtaacatgtcttcctctcacccccatcccaatgcccttgccagtcctgggttcttaagacctcagttgactagtatcaggttc

SEQ ID NO: 15481 - DNA, 120 bp, synthetic construct
  source 1..120: mol_type = other DNA
atatattcattcagtagtaaatgttattgagcaccaactatgtgctggacatttttctagacattaaagatacaatagtagggtgaagtgaatgatatatttcctgccttcgtggagctg

SEQ ID NO: 15482 - DNA, 120 bp, synthetic construct
  source 1..120: mol_type = other DNA
gaaaaggcagaaaagagggacaagatatgttgagaggtttgaaattttatctagtgtggttttatctaaatgaggaaattttatctaaatgaggaaaagcctcatttagatgattttttg

SEQ ID NO: 15483 - DNA, 120 bp, synthetic construct; identical to SEQ ID NO: 5017
  source 1..120: mol_type = other DNA

SEQ ID NO: 15484 - DNA, 120 bp, synthetic construct
  source 1..120: mol_type = other DNA
gaaaatgctaaaatctggttggacaacagccacctggatacccaaatgaggtacaggatatgactgaatattatcaatggcctatcttagaagacaatttttaaaatactgctggctagg

SEQ ID NO: 15485 - DNA, 120 bp, synthetic construct
  source 1..120: mol_type = other DNA
aaaaaattagccaggcatggtggcacccacctgtaatcccggctactcaggaggctgaggcaggagaatcactttaatcctggaagaggaggttgcagtgatccgagatcgcgccactgc

SEQ ID NO: 15486 - DNA, 120 bp, synthetic construct
  source 1..120: mol_type = other DNA
caggagatcaagaccatcctggctaacacagtgaaaccccgtctctactaaaaaaaaaaaaaaaaaaaaaaaaaaaaaaaaaaaaattagccgcgcttggtggcgggcgtttgtagtccc

SEQ ID NO: 15487 - DNA, 120 bp, synthetic construct; identical to SEQ ID NO: 5018
  source 1..120: mol_type = other DNA

SEQ ID NO: 15488 - DNA, 120 bp, synthetic construct
  source 1..120: mol_type = other DNA
aaatttctccactggcagttctcaaagtaattaattcttaccaacatactccaggggaaaaatgtttgaaaagaaatcatggcattttagttaatgagtggagccttggttacaggcatg

SEQ ID NO: 15489 - DNA, 120 bp, synthetic construct
  source 1..120: mol_type = other DNA
actgggctagtgcagtcactgtggaaattcagtcaacaaaatctattgttgatatgtgtcttggatgaggagtagaagaaaggataaaaaatggaattgcagttaactaagaggaataaa

SEQ ID NO: 15490 - DNA, 120 bp, synthetic construct
  source 1..120: mol_type = other DNA
cactactcctggctttgaactgccctccccacttccgggtcctcatgtcttgctactcaatgcatggtttgcggaaaataaatgttgacaccatttgagaacgttagaaatgcaaaatat

SEQ ID NO: 15491 - DNA, 120 bp, synthetic construct
  source 1..120: mol_type = other DNA
aacaactcccaggtgattcatacacccattacagttaagaatcactgcccaaaaacagtggttctcacattttgatgtgtgctatggtttgaatgttggcattcccacaaaattcatata

SEQ ID NO: 15492 - DNA, 120 bp, synthetic construct; identical to SEQ ID NO: 5019
  source 1..120: mol_type = other DNA

SEQ ID NO: 15493 - DNA, 120 bp, synthetic construct
  source 1..120: mol_type = other DNA
agaattacctggagggcttttaaaaacaaatattgcagtttctgattcattaggtcctggggtggggcccaagaatttgtatctgtgacaaatttccaagtgctactgatctgggatcac

SEQ ID NO: 15494 - DNA, 120 bp, synthetic construct
  source 1..120: mol_type = other DNA
gcaaagacaaggatttctgagaaggggcattcattccaccagtattacttaaatttttttaatccacaggatatcactagattaaatttttgttgagtgcttactgaatggtattgctac

SEQ ID NO: 15495 - DNA, 120 bp, synthetic construct
  source 1..120: mol_type = other DNA
tttctgctctctccttccctttgcacataacgaggcaagctacctgggtagaagtgctcacaggattgaggacagtttatttaggaagaggaacagccatttcataagacataaaagtag

SEQ ID NO: 15496 - DNA, 120 bp, synthetic construct; identical to SEQ ID NO: 5020
  source 1..120: mol_type = other DNA

SEQ ID NO: 15497 - DNA, 120 bp, synthetic construct
  source 1..120: mol_type = other DNA
ccccttcctctctgagccatactcttatacactgcattgaaaataccttcttatcagcttccttcaaaaggctgagagtttcttgaatagaagactatatcatactcatcttttgattca

SEQ ID NO: 15498 - DNA, 120 bp, synthetic construct
  source 1..120: mol_type = other DNA
actagctgttacctctttcttacttcttaataattcgattcactgtaatgttttcatttctactactccactgaaaccactttgaattgaacagagtaatcaatgacctctgtttttacc

SEQ ID NO: 15499 - DNA, 120 bp, synthetic construct
  source 1..120: mol_type = other DNA
attgaactttggaaagaacaagaatatagctgattcttggtgacaattgaaacctggaactctagtgatgtcaagggctttctattatatctacttccttctgcaagttggctttactct

SEQ ID NO: 15500 - DNA, 120 bp, synthetic construct
  source 1..120: mol_type = other DNA
atttgccctcacatccaaaatccttggaagtccatcgcaagcctagcttatatcagctgtgcaacatgaaacaatcaattctggtcaggtcggtggatttgtgtaagatcaaggtacttg

SEQ ID NO: 15501 - DNA, 120 bp, synthetic construct; identical to SEQ ID NO: 5021
  source 1..120: mol_type = other DNA

SEQ ID NO: 15502 - DNA, 120 bp, synthetic construct
  source 1..120: mol_type = other DNA
tattcagtttcatgctaaccaaaaattttcaccctagctccaaactcatgatgtagactgattggagacctgaatttcccagcaaacgctccaaactcatcaagtcagaaaaaggttacc

SEQ ID NO: 15503 - DNA, 120 bp, synthetic construct
  source 1..120: mol_type = other DNA
ccgggttcaagcaattccagtcctctgcctcaacctcccgagtagctaggattataggcgcccaccaaacacgcctggctaatttttgtatttttagtagagacagggtttcaccacctt

SEQ ID NO: 15504 - DNA, 120 bp, synthetic construct
  source 1..120: mol_type = other DNA
ccttgttctctgatcccaaatcagtgaaatagcaactataactgcactgaggtaaaatataggccatcataaggacgaggcaaaattcttatgctggtatgatggaagtatccatgttaa

SEQ ID NO: 15505 - DNA, 120 bp, synthetic construct; identical to SEQ ID NO: 5022
  source 1..120: mol_type = other DNA

SEQ ID NO: 15506 - DNA, 120 bp, synthetic construct
  source 1..120: mol_type = other DNA
tttaaggaaaaatctcaaaattctttaacatgtatccttaacaaacagtttcctgtgataaaacattttactaacaaatactgaaggcaattaatattaaaatctttaaattttacataa

SEQ ID NO: 15507 - DNA, 120 bp, synthetic construct
  source 1..120: mol_type = other DNA
attaggatataaatatttccctaacttctcccctttctttataacaaagagtgtttttataaatgactgttttttcaaaagcacttgagtcaacaatcatctttcactttcaagattttt

SEQ ID NO: 15508 - DNA, 120 bp, synthetic construct
  source 1..120: mol_type = other DNA
gcagtggtgtgatctggactcacagcagcctcctcctcccaggttcaagcaattctcctgcctcagcctcctaagtagctggaactacaggcatacaacaccacacccagctaaatattg

SEQ ID NO: 15509 - DNA, 120 bp, synthetic construct; identical to SEQ ID NO: 5023
  source 1..120: mol_type = other DNA

SEQ ID NO: 15510 - DNA, 120 bp, synthetic construct
  source 1..120: mol_type = other DNA
atctaaatctttattattaggattgcttagtatttaaatatatgaaagaaacactacttgagtaagcagttcctctaaagttggcctgtctagatggtttccttctctgtcttagactaa

SEQ ID NO: 15511 - DNA, 120 bp, synthetic construct
  source 1..120: mol_type = other DNA
ctgaaaggctgtaaaaatttactctttccagcaagtatccagaaaatgtttgccctcatatttatcaatgttgacagacactgagggttgccaacccgagagctattttctactcttctt

SEQ ID NO: 15512 - DNA, 120 bp, synthetic construct
  source 1..120: mol_type = other DNA
tgtgaggcaattaaggctacttagctgaagggggaatctgctagagatttttaaaaaagacttttcctaattgatggaagagagttccaagaaaaagctcttttgcctcatgacactccc

SEQ ID NO: 15513 - DNA, 120 bp, synthetic construct; identical to SEQ ID NO: 5024
  source 1..120: mol_type = other DNA

SEQ ID NO: 15514 - DNA, 120 bp, synthetic construct
  source 1..120: mol_type = other DNA
ataactttacttctttcattattttttattctttctattctgctttcagcataattttgtcagatttatatttaactaattcttttatattttaaacttcaaaaacatataaaataatat

SEQ ID NO: 15515 - DNA, 120 bp, synthetic construct
  source 1..120: mol_type = other DNA
ttctgtcacccaagagagataatccctatccaaaattctctctttgtattttgtgggctttctcttgctttatagttttaccacgtagcatctctaatttatgctgtttagtttcttcac

SEQ ID NO: 15516 - DNA, 120 bp, synthetic construct
  source 1..120: mol_type = other DNA
atgtaggtcatttatttttaaagttgactttattgaggtataatttacacagaataaatgcacccattttatatactttgatgatttttaacatatatgcatttacatatatatataccc

SEQ ID NO: 15517 - DNA, 120 bp, synthetic construct; identical to SEQ ID NO: 5025
  source 1..120: mol_type = other DNA

SEQ ID NO: 15518 - DNA, 120 bp, synthetic construct
  source 1..120: mol_type = other DNA
caacacttgatactttaatttgggtcagtctggtgagtgtaattgtaatttaaatatgtatttctatgattacaaattattttgaatatctttttattttttgagatagagtcttactct

SEQ ID NO: 15519 - DNA, 120 bp, synthetic construct
  source 1..120: mol_type = other DNA
atggggtttcgtcatgttggccacgctggtctcaaactcctgacctcaggtgatctaccctcctcggcttcccaaagtgctgggattataggcatgtgccgccacacccaacctggtttc

SEQ ID NO: 15520 - DNA, 120 bp, synthetic construct
  source 1..120: mol_type = other DNA
tctcaataataatcctttgtcaagcatatgtgttgcagatatacactccagttttgattaatggtttcacatttgatggtgtcttatggtaggcagaagttaatcattttaatacagcta

SEQ ID NO: 15521 - DNA, 120 bp, synthetic construct; identical to SEQ ID NO: 5026
  source 1..120: mol_type = other DNA

SEQ ID NO: 15522 - DNA, 120 bp, synthetic construct
  source 1..120: mol_type = other DNA
gtttttgtttttaaatgtctctaagcaagtattgacttttgctcttattctagacacagttgtagcatagtatgaaacctctattggtgtatttgaggaaagagagcattttccttggat

SEQ ID NO: 15523 - DNA, 120 bp, synthetic construct
  source 1..120: mol_type = other DNA
acccccaccctaaccgcatgtgcggttaagctctggtcgattccagacattgtatggagaagcattgtgaaactttctgttctgttctgctagccctcaccactgatgcatatagccctc

SEQ ID NO: 15524 - DNA, 120 bp, synthetic construct
  source 1..120: mol_type = other DNA
gtctgctgatgcttccggccgaataaagcctcttacttcctaaatccggtgtctgagaggttttgtctgcgacccatcctactacatatttattttatctttaaaatatttttaatttaa

SEQ ID NO: 15525 - DNA, 120 bp, synthetic construct; identical to SEQ ID NO: 5027
  source 1..120: mol_type = other DNA

SEQ ID NO: 15526 - DNA, 120 bp, synthetic construct
  source 1..120: mol_type = other DNA
tcaagggctcacagctctaagggggtgcgtgtgagagggtcatgatcgattgagcaagcagagggtacgtgactgggggctgcctgcaccggtaattagaacagaacagaacagcacagg

SEQ ID NO: 15527 - DNA, 120 bp, synthetic construct
  source 1..120: mol_type = other DNA
tttcatttctgccttttagtttttacttctttctttggaggcagaaattgggcataggacaatatgaggggtggtctcctcccttacatccactttcttgaatccctactcccatttatt

SEQ ID NO: 15528 - DNA, 120 bp, synthetic construct
  source 1..120: mol_type = other DNA
tcaagtcatcttctacttatcaatcttttattgacttcccagtgcccccaagattatggctaaactcctcaacttggttcatctttatgaaccagcttctgttctggccatctttttcca

SEQ ID NO: 15529 - DNA, 120 bp, synthetic construct; identical to SEQ ID NO: 5028
  source 1..120: mol_type = other DNA

SEQ ID NO: 15530 - DNA, 120 bp, synthetic construct
  source 1..120: mol_type = other DNA
cctgtttggtggcgcatgcctgtagtcccagctactctagaggctgaggcaagagaatcacttgaacccgggagatggaggttgcagtgagccgagaacatgccattgcactccagcctg

SEQ ID NO: 15531 - DNA, 120 bp, synthetic construct
  source 1..120: mol_type = other DNA
ttaaaacaactataactcctattactctctcaatcataacaaattgatcataaattcaatttaacacacatatgtcagaatacaaagcacacagtatgttctttgaaccagtaaataaat

SEQ ID NO: 15532 - DNA, 120 bp, synthetic construct
  source 1..120: mol_type = other DNA
aaagtacacagccatatatcagagaagggacactttctaacagggatccttttagaacctgactcaagattcttttgtctttgaaatatctaagcagccagccaaaccagaacagccaaa

SEQ ID NO: 15533 - DNA, 120 bp, synthetic construct; identical to SEQ ID NO: 5029
  source 1..120: mol_type = other DNA

SEQ ID NO: 15534 - DNA, 120 bp, synthetic construct
  source 1..120: mol_type = other DNA
tgtaatttgccctctaagccccagaattcaagctttctcattctttcatggggaccatgtgagaattctccaagatatttgtgggggccttacccacaaatatataaatagatagataat

SEQ ID NO: 15535 - DNA, 120 bp, synthetic construct
  source 1..120: mol_type = other DNA
ttcctgaatgtgacactagccgagaggtcagaattaattacattccttggtgtcacctgacccacaggaaacttgcgtatctttgccaccccaaattgtgagactacagactgaactact

SEQ ID NO: 15536 - DNA, 120 bp, synthetic construct
  source 1..120: mol_type = other DNA
tttgctgcctaaattaacacccaatctggaaataaaatacaagtctttccttcctgaaggcatcttcaatcactaccagtgattcctttggcagaaagcacaattttgggagctagttct

SEQ ID NO: 15537 - DNA, 120 bp, synthetic construct
  source 1..120: mol_type = other DNA
attgtcagatttctttaaaaagtgaagtacttagcgttcccttgacccatctttgactcctccctagttgctgttctttgagtaataggaaaagcccaacacaacctcctgttatacata

SEQ ID NO: 15538 - DNA, 120 bp, synthetic construct; identical to SEQ ID NO: 5030
  source 1..120: mol_type = other DNA

SEQ ID NO: 15539 - DNA, 120 bp, synthetic construct
  source 1..120: mol_type = other DNA
ctcctggcactgaatcatttgcagaaaaaaataaaaatagttgttcaagtatatgagaaggctttgtaccaatctcagacatccaatactttatatttcttagagagaaagtgaaggctt

SEQ ID NO: 15540 - DNA, 120 bp, synthetic construct
  source 1..120: mol_type = other DNA
ttaattccctcttaatttcttccagactactttaagtttttatagaaataaatataaaatcaccacattgccttttgaaattaaaaatgggaaacacaatactttattcaatcaataaaa

SEQ ID NO: 15541 - DNA, 120 bp, synthetic construct
  source 1..120: mol_type = other DNA
aggttttttgtttttgaaaagctgtaagattaaaacaaacacacaataaaacataatccaattaaggtttcaggactaaatatgaacctttcctctactttcaaaggtttggaggatcct

SEQ ID NO: 15542 - DNA, 120 bp, synthetic construct; identical to SEQ ID NO: 5031
  source 1..120: mol_type = other DNA

SEQ ID NO: 15543 - DNA, 120 bp, synthetic construct
  source 1..120: mol_type = other DNA
ctttgtcccagagcaccttaaaggcaatcagttctagcaaaatctagaaaccacctaacataaacttgtcagtatggcccaatcgcccatccttatgaaatcagaatttatcggccgggc

SEQ ID NO: 15544 - DNA, 120 bp, synthetic construct
  source 1..120: mol_type = other DNA
aaaaattagccaggcatggtggtgggtgcctgtaatctcagttactcggaagactgaggcaagagaatcacttgaacccaggaggtacaggttgcagtgagcagagattgcaccaatgca

SEQ ID NO: 15545 - DNA, 120 bp, synthetic construct
  source 1..120: mol_type = other DNA
aaacatgcacctacaaaacaaacaacatcaacttccaacctaaccactctggatcagtttaacaaacttcataccctactgacctgtcccctgcatttgaattctaagcctacccctttg

SEQ ID NO: 15546 - DNA, 120 bp, synthetic construct; identical to SEQ ID NO: 5032
  source 1..120: mol_type = other DNA

SEQ ID NO: 15547 - DNA, 120 bp, synthetic construct
  source 1..120: mol_type = other DNA
ccaataccttacatatcaatatttaaagcttttaatgtgataagtgagcttgcttcttgcttgttaatttgtctaatctaggttggattgatgacaatgctaccctcaggggataatgta

SEQ ID NO: 15548 - DNA, 120 bp, synthetic construct
  source 1..120: mol_type = other DNA
agtcatttttagcttttatccaaaatgaaggaagtgatgctgtattttcaaaactgattttcaatccttcgtcggtagccagcttcaacaacttatcctgtagagttacagttaaattta

SEQ ID NO: 15549 - DNA, 120 bp, synthetic construct
  source 1..120: mol_type = other DNA
cttttcgcagatgtgcaatatcaagatcattacctacttcattgataattgttgttaaattatgaaacatgtcataacaatctgtagaaattctgtttttccaagcttctaacttctgtt

SEQ ID NO: 15550 - DNA, 120 bp, synthetic construct; identical to SEQ ID NO: 5033
  source 1..120: mol_type = other DNA

SEQ ID NO: 15551 - DNA, 120 bp, synthetic construct
  source 1..120: mol_type = other DNA
tatttagttcagctgatatttttttcatggcaagactttctcgatgaatgaagcaatgtgttgttttacattctggcgcaagttccttaatctgggttaccacttcagaatgttttcctg

SEQ ID NO: 15552 - DNA, 120 bp, synthetic construct
  source 1..120: mol_type = other DNA
acagcttcatacagttctgagctagttgtgtttgtaggcaaagaggctgaaaaaaagaactcttcctttatatcatcatcatgttcaaacctcacatagactaaaagaattatcatgtta

SEQ ID NO: 15553 - DNA, 120 bp, synthetic construct
  source 1..120: mol_type = other DNA
gaaagtggtacctgagctaccttctttgctgcagattcacccaacatttccaagcaaacttctttgatgcagtctttcactagtgtctcagcaattgtgtatggtgttttagacttggca

SEQ ID NO: 15554 - DNA, 120 bp, synthetic construct; identical to SEQ ID NO: 5034
  source 1..120: mol_type = other DNA

SEQ ID NO: 15555 - DNA, 120 bp, synthetic construct
  source 1..120: mol_type = other DNA
ctactactgtgttcagaaaaggcatgtcttttcttgacaaaaaagtccagtgaagcttgtttcgccatctgaaattaggaataaaagtaaataatatgaattttactttcctccttcagc

SEQ ID NO: 15556 - DNA, 120 bp, synthetic construct
  source 1..120: mol_type = other DNA
tatggctgataaacgaaacataaagtatcacaggttgtaatggggacctattgtgtttgactagtgtgtaactgccaccacatgtgactcaccttgagagtttaacaatacctaaattgg

SEQ ID NO: 15557 - DNA, 120 bp, synthetic construct
  source 1..120: mol_type = other DNA
ctggagtttttataccagtactgctctactgatcacatgttgcgtaccactagtttaagtcataagtaacctccatatttcaaaacattaaccctacttcataaagcctattgattttaa

SEQ ID NO: 15558 - DNA, 120 bp, synthetic construct; identical to SEQ ID NO: 5035
  source 1..120: mol_type = other DNA

SEQ ID NO: 15559 - DNA, 120 bp, synthetic construct
  source 1..120: mol_type = other DNA
tgatggctttagcattttggaaggtttaacaggcaaacttctttgaatctcatcatgtttcctcttcattgtgctggtttcatagcaaaggctacaagttatttgccgaccacagccctc

SEQ ID NO: 15560 - DNA, 120 bp, synthetic construct
  source 1..120: mol_type = other DNA
ctcaggagggcttttttcagccaccttaggagtgacagaaagattctcttcaatatcactactgtctgttccagtctcaatgttttcttcatactgggctcttaaagtattttctaactc

SEQ ID NO: 15561 - DNA, 120 bp, synthetic construct
  source 1..120: mol_type = other DNA
ttgcatgcttctgtgatagggctgattttgggacatctgaatgaaccacaaaaattcagtccagtgtgatgagttgttagtttgcatccaggagaaaatcctctttcggatatcctcagt

SEQ ID NO: 15562 - DNA, 120 bp, synthetic construct; identical to SEQ ID NO: 5036
  source 1..120: mol_type = other DNA

SEQ ID NO: 15563 - DNA, 120 bp, synthetic construct
  source 1..120: mol_type = other DNA
tttctgttggcatggtttacagagggtcagatacagcattataacttcttttgtgatgttcttgtatttcgcttgtaactctttctccatgcgagtacgtccaccatgtccaatgctgag

SEQ ID NO: 15564 - DNA, 120 bp, synthetic construct
  source 1..120: mol_type = other DNA
tctagccaagcgacggtagtcaactgattcctttttcgccttagctttagcttctttcacttcctttatcaactgacagtactttgctttagaaaatatcttagtattattacttttgtt

SEQ ID NO: 15565 - DNA, 120 bp, synthetic construct
  source 1..120: mol_type = other DNA
aaaccacaaaaatgaccctaaaaacaaaggaaaaaaatcaattagaatattcaggaatataatttaaaagacatatattgccaaaggagccagtagtgcttgaggtagaagtagggaata

SEQ ID NO: 15566 - DNA, 120 bp, synthetic construct; identical to SEQ ID NO: 5037
  source 1..120: mol_type = other DNA

SEQ ID NO: 15567 - DNA, 120 bp, synthetic construct
  source 1..120: mol_type = other DNA
gtggaatgaagagcgtaaatgaaactccagccaataacaaaaagtttcaaacaataaagagcagaaagccaggacatgaatttccagagcagttttcaggattgaagcactgttttatgt

SEQ ID NO: 15568 - DNA, 120 bp, synthetic construct
  source 1..120: mol_type = other DNA
gacctcatgatccacctgccttggcctcctaaaatgctgggattacaggcgtgagccaccacacccggtctcagacttttttttttggaggaacctcagcaagacaataatagattttta

SEQ ID NO: 15569 - DNA, 120 bp, synthetic construct
  source 1..120: mol_type = other DNA
tacaaactcaatacaaatagcttcattactaattttaataagagtactggatgagtcaaaatcagtgaaaaatttctgacttaataaagcttattaaaagaaatttctagaatactcata

SEQ ID NO: 15570 - DNA, 120 bp, synthetic construct; identical to SEQ ID NO: 5038
  source 1..120: mol_type = other DNA

SEQ ID NO: 15571 - DNA, 120 bp, synthetic construct
  source 1..120: mol_type = other DNA
gttagtcatgagatgttccctatattaactaaagatagcatcttaacatatatccctaagttgtttttcagaaacccatacctccaccaaatggatccactggtctgaagacctcagata

SEQ ID NO: 15572 - DNA, 120 bp, synthetic construct
  source 1..120: mol_type = other DNA
cagacaaagctttgcctccttaaccaattgcaaatcaaaaaatctttgaatctacctatgacctgtaagccccttctctgagatgtccatcctacctttttaggtcaaaataatgtacag

SEQ ID NO: 15573 - DNA, 120 bp, synthetic construct
  source 1..120: mol_type = other DNA
ttgacactctgcaaataaatgccctcttttctcctgttgatgtggatgtttggctttcctgtgccaggcaagtgaacccgtttggttctgtagcagtaatgaactactaaatttaaatca

SEQ ID NO: 15574 - DNA, 120 bp, synthetic construct; identical to SEQ ID NO: 5039
  source 1..120: mol_type = other DNA

SEQ ID NO: 15575 - DNA, 120 bp, synthetic construct
  source 1..120: mol_type = other DNA
atgtgactgaaaaagaccatcctatggatagcatttctttccatactgatccattttgtgccatgctatagaactagaagcagagaaggaaaataaataagaatgaattagaagaagaaa

SEQ ID NO: 15576 - DNA, 120 bp, synthetic construct
  source 1..120: mol_type = other DNA
tagggctataagaggagaaaaacattgtatccattttacctaatcctttttaaatggaaaagatagctgttccagaaccaggccagactccacctctactatacattataccaataacag

SEQ ID NO: 15577 - DNA, 120 bp, synthetic construct
  source 1..120: mol_type = other DNA
gcaatgggacccatgactacactgacaagtgctcagtatttacatacagaggtatctgatttatccacaggtacttactaacttcattacaaagtatccatgaaaaatcttgtgttcaag

SEQ ID NO: 15578 - DNA, 120 bp, synthetic construct; identical to SEQ ID NO: 5040
  source 1..120: mol_type = other DNA

SEQ ID NO: 15579 - DNA, 120 bp, synthetic construct
  source 1..120: mol_type = other DNA
ccatatgtgccctgtgagacctgtggacaagtaggtgcatttggtaaacaatacaaataattgtagtttgtcatagctaaacttgtattcttccactaaaatagaatgtaagaagaaaat

SEQ ID NO: 15580 - DNA, 120 bp, synthetic construct
  source 1..120: mol_type = other DNA
gcatccctttggtttctgtttctgggaataacaatgaaagcacgttaaagaaatatctcctaaaccgtgatgactgaaaaaaattgtaaatgagttccagtgtggttaattaaaagtaaa

SEQ ID NO: 15581 - DNA, 120 bp, synthetic construct
  source 1..120: mol_type = other DNA
ctactattaataatgcagattcaccaggcctaagaaaatgtacaaattgttaaaggattacagagttattaatggttacacttacgctacatcgagttggaaaatgtccatggatagtga

SEQ ID NO: 15582 - DNA, 120 bp, synthetic construct; identical to SEQ ID NO: 5041
  source 1..120: mol_type = other DNA

SEQ ID NO: 15583 - DNA, 120 bp, synthetic construct
  source 1..120: mol_type = other DNA
cccatctctactaaaaacacaaaaattagccagacgaggtggtgcacgcctgtagtcccagctactcaggaggctgaggcaggaggatcatttgaactcaggaggcagaggttgcagtga

SEQ ID NO: 15584 - DNA, 120 bp, synthetic construct
  source 1..120: mol_type = other DNA
gccagttccctttggtatgtttttcccttctctgagcttaataaggtatcttatgtaaattgctttgtataatataatagcatgcatttcaatttgtctaaatctttgcataactgccag

SEQ ID NO: 15585 - DNA, 120 bp, synthetic construct
  source 1..120: mol_type = other DNA
ccagcttttggagcaactaagaaacaaaatatggatatggttcattgtgctgaattattcactgactctcccccacccccccacccccccaagcacaaacacaaatctagtctcttgatt

SEQ ID NO: 15586 - DNA, 120 bp, synthetic construct; identical to SEQ ID NO: 5042
  source 1..120: mol_type = other DNA

SEQ ID NO: 15587 - DNA, 120 bp, synthetic construct
  source 1..120: mol_type = other DNA
tggtagcacatatctgtggtcccagctactcaggaggctgaggaaggcagattgcttgagcctgggaggtggaggttgcagtgagccaagatcgtgccactgccctccagcctgggtgac

SEQ ID NO: 15588 - DNA, 120 bp, synthetic construct
  source 1..120: mol_type = other DNA
acatctaacttacagtggcacaaacaaataggggtttatttttgttacataacaagaagcctagaagaaggtagttgctggcaccaactcatttatctaacagtttttcagggaccctag

SEQ ID NO: 15589 - DNA, 120 bp, synthetic construct
  source 1..120: mol_type = other DNA
gccagatatcatattagtgttcaagactggaagtgagaaaaggtgaaactaaagtaatctcccctatcctatcaggaaaataaaagcttccccaggaacctcctccccgaaatatgctta

SEQ ID NO: 15590 - DNA, 120 bp, synthetic construct
  source 1..120: mol_type = other DNA
cagtatgaacaaaaccaacattttgtcgggaggaaagaagggtagaatagacactgggttggcagctaaaagtgtctgccagtggtatttcccctgtgggggaaatcacacaaaaacaag

SEQ ID NO: 15591 - DNA, 120 bp, synthetic construct; identical to SEQ ID NO: 5043
  source 1..120: mol_type = other DNA

SEQ ID NO: 15592 - DNA, 120 bp, synthetic construct
  source 1..120: mol_type = other DNA
aatcgttagtgttagtgtattttagtgtggcccaagacaattattcttccaatatggcccagggaagccaaaagattggatacccctattctaaagtaacaggcatatcttaagggggaa

SEQ ID NO: 15593 - DNA, 120 bp, synthetic construct
  source 1..120: mol_type = other DNA
ctttctgcaaaactgcagaaaagtgacaggatttatggggaaaatacggttaaagggtggactattttaacacctacacaactttgtcactagagcattattaaaactataacaactccc

SEQ ID NO: 15594 - DNA, 120 bp, synthetic construct
  source 1..120: mol_type = other DNA
aaaatacaaaaattagctgggcgtggtggcgcttgcctgtaaatcccagctacttaggaggctgaggcaggagaatcgcttgtaccagggaggcagaggttgcagtgagccaagatcctg

SEQ ID NO: 15595 - DNA, 120 bp, synthetic construct; identical to SEQ ID NO: 5044
  source 1..120: mol_type = other DNA

SEQ ID NO: 15596 - DNA, 120 bp, synthetic construct
  source 1..120: mol_type = other DNA
gggcgtggtggcgggcgcctgtagtcccagctactcgggaggctgaggcaggagaatgactgaaccccggaggcagagcttgcagtgagccgagatcgtgccactacactgcagcccagg

SEQ ID NO: 15597 - DNA, 120 bp, synthetic construct
  source 1..120: mol_type = other DNA
tattcttccacccttggatatagtgatactacaagaaacatgatgtgggttcccgtttatcatcttgtttttatttatttgacactggcttataaaaagatacccagtgtttgctgtttt

SEQ ID NO: 15598 - DNA, 120 bp, synthetic construct
  source 1..120: mol_type = other DNA
ttctctatcatacttgaagcagaagataactgagaagtgaaaagctcttgggaggcagcttgtagcttgtggaactgcatgttcttcttcctccacaccttccatttgtgcctcagcaac

SEQ ID NO: 15599 - DNA, 120 bp, synthetic construct; identical to SEQ ID NO: 5045
  source 1..120: mol_type = other DNA

SEQ ID NO: 15600 - DNA, 120 bp, synthetic construct
  source 1..120: mol_type = other DNA
ttgcaatcacaccatgattaaggggctgcagtaaagaagttgtattgggaggtaaaatgagaactgtgatatttgaggaaagctcagtgactactggagggtggcttggtgtatcactga

SEQ ID NO: 15601 - DNA, 120 bp, synthetic construct
  source 1..120: mol_type = other DNA
agatcagaaaatatctgccctgtcatctagtctctcttgctagacctgtagtaggcaccaaggctagtctttacaattcattttaaagcttatagattggcagaatgataatcacaggct

SEQ ID NO: 15602 - DNA, 120 bp, synthetic construct
  source 1..120: mol_type = other DNA
ttctagagtacttccagtcctgcttactccattctggatcaatgcatccaaattctccacatatccccttgagggcatctgcttccaatagagactggtttcataaaaagtaaaaatctg

SEQ ID NO: 15603 - DNA, 120 bp, synthetic construct
  source 1..120: mol_type = other DNA
agcctcgtctgcacagacagtttaacactgtggaaagtacagtagttcttgaagatactaaaccagccactacttccactaaatgaaggcacttctgcgggacttccatctttttttctt

SEQ ID NO: 15604 - DNA, 120 bp, synthetic construct; identical to SEQ ID NO: 5046
  source 1..120: mol_type = other DNA

SEQ ID NO: 15605 - DNA, 120 bp, synthetic construct
  source 1..120: mol_type = other DNA
cactagcagaaattttatcacaagcacacttctatggcacttgcaaaaccctctgcttgctccttttctggaatacaaaaaactttagcaaaaaatacacaaagatgggagggaacaatg

SEQ ID NO: 15606 - DNA, 120 bp, synthetic construct
  source 1..120: mol_type = other DNA
actcccacctggtggccccaaacatcaacttgctgggaaaactcatacatgagcttacacaatttcagcattatactgactcatttctggcatactgacctcattttaaaagattttgca

SEQ ID NO: 15607 - DNA, 120 bp, synthetic construct
  source 1..120: mol_type = other DNA
aatagtatcactaaaaaatataagaatgtctggcaatatccacaatgttctaaaattactgtcaaagaaggcaaatatactcctttagaaacaactccactgtaatggcaaaaagctttt

SEQ ID NO: 15608 - DNA, 120 bp, synthetic construct; identical to SEQ ID NO: 5047
  source 1..120: mol_type = other DNA

SEQ ID NO: 15609 - DNA, 120 bp, synthetic construct
  source 1..120: mol_type = other DNA
tcatacacaaaaactgttatctcatatgcacgcatctattcatctacaccagtgatcaaataagaaataatgccccaaaccagggtttccaaccaccagcgcgaaattactcccattact

SEQ ID NO: 15610 - DNA, 120 bp, synthetic construct
  source 1..120: mol_type = other DNA
tccctctccaaatcttccagcaaagtcaccacctcttctccactctcaggattatgctcccgcacccaagactggagctcctcaggcaggatggtcaggaactgctccagcaccaacaat

SEQ ID NO: 15611 - DNA, 120 bp, synthetic construct
  source 1..120: mol_type = other DNA
tgacgagagagttccctggtataagacaaattcctacgtagggctgattcctgatcccaagtgtggtcttcttctttaacctttactttgataatctccccttgttcttctggagcctgg

SEQ ID NO: 15612 - DNA, 120 bp, synthetic construct
  source 1..120: mol_type = other DNA
gtctaggcaaatgggtgattttacttgagctccttttttgttcttggtcaggaaagtttttgatataagaaaacactcaacacaggacaactacagactcagtttaaaaggacttgttta

SEQ ID NO: 15613 - DNA, 120 bp, synthetic construct; identical to SEQ ID NO: 5048
  source 1..120: mol_type = other DNA

SEQ ID NO: 15614 - DNA, 120 bp, synthetic construct
  source 1..120: mol_type = other DNA
cacctctgaggagctcagaccctgtggaacccagactagtgggtcgagggaaacactctacagctcaggtggaggttccgcagacacacccgcagctgtgcccgtaggttccggccgggc

SEQ ID NO: 15615 - DNA, 120 bp, synthetic construct
  source 1..120: mol_type = other DNA
ggagaattaactccggaattacctagttatctggcatcacggtgaaaagagttccacagtgtgagtagtgctggagtagatgctgctggtctgtgttttcctgtcaccgtgataaaccat

SEQ ID NO: 15616 - DNA, 120 bp, synthetic construct
  source 1..120: mol_type = other DNA
ttcgggccactttcacctttccctttcaccctaaatcagacttaaaaagaaatgtaagagttagtccattgtttccattttacggattagaaaaccaagaccaccgagaatgagcctcag

SEQ ID NO: 15617 - DNA, 120 bp, synthetic construct
  source 1..120: mol_type = other DNA
cttaaaaagaaatgtaagagttagtccattgtttccattttacggattagaaaaccaagaccaccgagaatgagcctcagttgtttagtcacggagcacagagccgtgactaaacaactg

SEQ ID NO: 15618 - DNA, 120 bp, synthetic construct; identical to SEQ ID NO: 5049
  source 1..120: mol_type = other DNA

SEQ ID NO: 15619 - DNA, 120 bp, synthetic construct
  source 1..120: mol_type = other DNA
ctgtgtcatccaaccctgaaaagatcattttcccagtcacttttaacgtgctgaacttatcttttgtttccccccctaactatcctttgcaatcagggattctactacctttttctcatt

SEQ ID NO: 15620 - DNA, 120 bp, synthetic construct
  source 1..120: mol_type = other DNA
catttgttaattactacaacagtgatagacacttataaaaaaagtcaaatatttaaaaagtcaacgtggcaagaagtgaagtttcttcatcctcagttccattcctcagaaaaattgatg

SEQ ID NO: 15621 - DNA, 120 bp, synthetic construct
  source 1..120: mol_type = other DNA
taaatcatactagactacaattcaccaagttactgggcttttttggtttgttttaaacttaaatcctcccccagaaactgccaagccaacatgtgttacatgtctatcccattcttttta

SEQ ID NO: 15622 - DNA, 120 bp, synthetic construct; identical to SEQ ID NO: 5050
  source 1..120: mol_type = other DNA

SEQ ID NO: 15623 - DNA, 120 bp, synthetic construct
  source 1..120: mol_type = other DNA
agctaatttatgctcccaacaaaagcgcaggaaagagtgaagagatctccctgaattttattttgacagttactccttcttcagcagcaaagcgtcagctttcctgtcagcgtgagtctc

SEQ ID NO: 15624 - DNA, 120 bp, synthetic construct
  source 1..120: mol_type = other DNA
gcactctggactttgaatccagcaatccgagttcgaatctcggtgggacctttcaaaggtgaacgttttacagttcctggcttggcctctgaatgtgggaaaaattcgttcctccgcttc

SEQ ID NO: 15625 - DNA, 120 bp, synthetic construct
  source 1..120: mol_type = other DNA
aaattcacgggtttggagacaaagagaaagatgctgctcttatcgacttacgaaaagctccagcagcaacgtggaaacccaattcctgtgatggagacaaacgcttcctcaaaatttcct

SEQ ID NO: 15626 - DNA, 120 bp, synthetic construct; identical to SEQ ID NO: 5051
  source 1..120: mol_type = other DNA

SEQ ID NO: 15627 - DNA, 120 bp, synthetic construct
  source 1..120: mol_type = other DNA
gccgcgctgggagctggcattcccaattcaggaccagacacggtggaggggccctacaacttgtgtgggagacaagggagatgggggtaaaaagacctctgccttcagccgttcgcctgg

SEQ ID NO: 15628 - DNA, 120 bp, synthetic construct
  source 1..120: mol_type = other DNA
aggtcaagaacagaaaatgtagccgctatcttgcctcccctgaactgtgtgtgtagacgaggattgaattggagatagagttgatgaaacccggaaggtctggaaaattccttatagaca

SEQ ID NO: 15629 - DNA, 120 bp, synthetic construct
  source 1..120: mol_type = other DNA
ttaatctcttctatgatgtaagagacaacctttaaatccaattatttattttcagatttcttactttgacattttgattttcgcatacataccaaaaaaccaaatcgaatcctactttca

SEQ ID NO: 15630 - DNA, 120 bp, synthetic construct; identical to SEQ ID NO: 5052
  source 1..120: mol_type = other DNA

SEQ ID NO: 15631 - DNA, 120 bp, synthetic construct
  source 1..120: mol_type = other DNA
ttactgtaagtaatcattatgatcacatccatcgtcaagcatccacttatcctagctcaaaccagtaactcagactttatcccaagcctctaaattaaggtaatggacaagacctgattg

SEQ ID NO: 15632 - DNA, 120 bp, synthetic construct
  source 1..120: mol_type = other DNA
ctgatgccttacatgttctgtgggtctaccaattcctttaggaagctgaggaaattcccgtgggtatttataaaaactccacccttgaacaaactttagttaggttcctctgagccctcc

SEQ ID NO: 15633 - DNA, 120 bp, synthetic construct
  source 1..120: mol_type = other DNA
tatcaagtttctctttttccacccttgatatctaatcaagttcctcgtagtcactttctatcaaatggttgtcttacccttactattagctatagatccccagctgtccctgatgtattt

SEQ ID NO: 15634 - DNA, 120 bp, synthetic construct
  source 1..120: mol_type = other DNA
atatcctgggaaaacttcttttccaaagaagatatccagctaaggattgagaatatgatcagctgccgagagaagatgtgttcagaatagaggaccaagcaaattaatggtagctgattt

SEQ ID NO: 15635 - DNA, 120 bp, synthetic construct; identical to SEQ ID NO: 5053
  source 1..120: mol_type = other DNA

SEQ ID NO: 15636 - DNA, 120 bp, synthetic construct
  source 1..120: mol_type = other DNA
gattagttttatagagccagagcaattagataagagaaagacataaaagtcatcctaataggaaaggaattgaaattaactccatttgctgatgacatgatcagcaaatagaaatcctaa

SEQ ID NO: 15637 - DNA, 120 bp, synthetic construct
  source 1..120: mol_type = other DNA
acaatcccatttacaatagcaacaaaaacaaaataaaatacttgggtataaatttaacaaaagagatgaaagacctgtacactgaaaactataaaactctgataaaatgacaaaaacaca

SEQ ID NO: 15638 - DNA, 120 bp, synthetic construct
  source 1..120: mol_type = other DNA
tgaatagaaaaaacaattcttaaatttgtatggaaccacaaaagacctcaaatagacaaaaaaatcttgagcaaaatgaacaaagctggaagcatcacattcactatttatatctattat

SEQ ID NO: 15639 - DNA, 120 bp, synthetic construct; identical to SEQ ID NO: 5054
  source 1..120: mol_type = other DNA

SEQ ID NO: 15640 - DNA, 120 bp, synthetic construct
  source 1..120: mol_type = other DNA
agcaacagaagctaaagcagacagatgggattgcatcaaactaacaagtttctgcactgcaaaggaaacaaagtgaagaggcaaaccacagaatgggaaaacatttgcaaaccttatatc

SEQ ID NO: 15641 - DNA, 120 bp, synthetic construct
  source 1..120: mol_type = other DNA
acaaatggcaatacatataaaaaaaagatgctcagcatcactaagcatggaggaaatgaaaattaaagccacagtatcacttcacaaccattagaatgagttttttttttttttgctggg

SEQ ID NO: 15642 - DNA, 120 bp, synthetic construct
  source 1..120: mol_type = other DNA
caaaaattagccgggcatggtggtacgcacctctaatcccagctactcaggaggctgaggcaggaaaatcgcttgaaaccgggaggcggagattgcagtgagccgagatctcgccattgc

SEQ ID NO: 15643 - DNA, 120 bp, synthetic construct; identical to SEQ ID NO: 5055
  source 1..120: mol_type = other DNA

SEQ ID NO: 15644 - DNA, 120 bp, synthetic construct
  source 1..120: mol_type = other DNA
gtgacccaccacacccgtaacaatctttcacctttttgacaaaatcttttttataaaagccgggttttatcaaaaagatgaaagatggtaacaagcgttgacaaggccatggagaacaga

SEQ ID NO: 15645 - DNA, 120 bp, synthetic construct
  source 1..120: mol_type = other DNA
aatatatcctaaggaattgaaatcaatatatcaaagaaatgtctgtactctcatgttcattgcagttaatagccaagacatggaatcaacctaagtgtccatcatcagatggatatataa

SEQ ID NO: 15646 - DNA, 120 bp, synthetic construct
  source 1..120: mol_type = other DNA
ccccgtttctactaaaaatgcaaaaattaactgggcatgatggcacatgcttgtaatcccagctatttgggaggctgaggcagaagaatcgcttgaacctgggaggtggacgttgcagtg

SEQ ID NO: 15647 - DNA, 120 bp, synthetic construct; identical to SEQ ID NO: 5056
  source 1..120: mol_type = other DNA

SEQ ID NO: 15648 - DNA, 120 bp, synthetic construct
  source 1..120: mol_type = other DNA
tgagatctattgcacagtagggtggctatcgacaataatttaaaaagtgaaattaaattaaaaaagaaaacctgtccaagttatgaaatgtgtacctgggaacatcgaagatagaaactg

SEQ ID NO: 15649 - DNA, 120 bp, synthetic construct
  source 1..120: mol_type = other DNA
aaaaaaaaaaaaaaaaaaaaaaaagcagtcccagccactaaggaggctgagttgggaggattgcttgagtctgggaggtggaggatcagccactgcacttcagcctcggtgttagagcaa

SEQ ID NO: 15650 - DNA, 120 bp, synthetic construct
  source 1..120: mol_type = other DNA
aggccaggtgcagtggctcacgcctgtaatcccagcactttgggaggccgaaacgggcagatcacctgaggtcaggaattcagaccagccaggccaacatggcgagaccccgtctctact

SEQ ID NO: 15651 - DNA, 120 bp, synthetic construct; identical to SEQ ID NO: 5057
  source 1..120: mol_type = other DNA

SEQ ID NO: 15652 - DNA, 120 bp, synthetic construct
  source 1..120: mol_type = other DNA
ttcattcataacacacactttgggtcattctgatgtaacagtccagaggagggtgagaggaacaagaattttagtcattactggttaagagtgtaaactaataaaatccttttggagggc

SEQ ID NO: 15653 - DNA, 120 bp, synthetic construct
  source 1..120: mol_type = other DNA
ataaagttatttgtgcagcatagtttataatagcaaaagatacagaaaacccaaattgtccaacagagaactggttaaataatatatggtaaagtatgcattgggatacaatgcatcctt

SEQ ID NO: 15654 - DNA, 120 bp, synthetic construct
  source 1..120: mol_type = other DNA
tgagataaaaatagaaatatatatgttatgtaatatatattcatatgtgcttagtgtaatcctggaaagaattaacaacagtggttatcagtaaagaatgtaattaggtggttggggaat

SEQ ID NO: 15655 - DNA, 120 bp, synthetic construct; identical to SEQ ID NO: 5058
  source 1..120: mol_type = other DNA

SEQ ID NO: 15656 - DNA, 120 bp, synthetic construct
  source 1..120: mol_type = other DNA
gtcacatctctaagcagagacaaatcctcctcaaagctagagaccagcagacaataatggttaagtattttgttgggggagggcagtttaaagttagcaaagagtaaaaatttcagtaag

SEQ ID NO: 15657 - DNA, 120 bp, synthetic construct
  source 1..120: mol_type = other DNA
attaattattcagttgctccttcagaagagctggaaactcaatggagaacacatatatttcttgcccttaagaaggttaccatctggagggaaaagtaaacactacccaaatgtttcaac

SEQ ID NO: 15658 - DNA, 120 bp, synthetic construct
  source 1..120: mol_type = other DNA
tttacttggtttcttggcaaattaatctaccaaagataaacgctaactaggcagcactcagacccatcctttcagagggttaaataaaaacctccagaaacgacgaggatgggattcgaa

SEQ ID NO: 15659 - DNA, 120 bp, synthetic construct
  source 1..120: mol_type = other DNA
tatttttaatcgctctttttctggcttaatcctgattcagtccttacaaccacacccagaatcgggtatttttaggtacatttcgcagcaaccacaaaagtgataaatgacacctagagt

SEQ ID NO: 15660 - DNA, 120 bp, synthetic construct; identical to SEQ ID NO: 5059
  source 1..120: mol_type = other DNA

SEQ ID NO: 15661 - DNA, 120 bp, synthetic construct
  source 1..120: mol_type = other DNA
attgcattgctgagatatgcagcaatgggtcaaaacggggttggaaaaaaggtagaaagactccccgatgtgagcattttcgttctagagtagtttggaatgttactgcgtaagatgatt

SEQ ID NO: 15662 - DNA, 120 bp, synthetic construct
  source 1..120: mol_type = other DNA
ccaactccatcccataatttttatctatccaggaagaagcggactttggcaatttcaaataaacccagcaccaaggaacccatctactcactagagcttctcggcttttctatatttggt

SEQ ID NO: 15663 - DNA, 120 bp, synthetic construct
  source 1..120: mol_type = other DNA
ttctctccccatcatgttcctttaccaaatttcatatatccatcctcaccatacaactacccagcatggaaaactgacctgggttagaggactaaagatttgtttatttaatgattcaaa

SEQ ID NO: 15664 - DNA, 120 bp, synthetic construct; identical to SEQ ID NO: 5060
  source 1..120: mol_type = other DNA

SEQ ID NO: 15665 - DNA, 120 bp, synthetic construct
  source 1..120: mol_type = other DNA
caaggttgcaagacacaaggttactacataaaagtcaattccttttctacatactagcaatactcatttggaatttgaaattaagaaagcaacactatttatattagcaccaaaaaaaga

SEQ ID NO: 15666 - DNA, 120 bp, synthetic construct
  source 1..120: mol_type = other DNA
atgtgaggaaagctacaaaactctgactgaagcaatcaaagagaatccaaataaatggagagatattccatgttcatggatagaaaaactcaatattgtcaagacatcagttctttccat

SEQ ID NO: 15667 - DNA, 120 bp, synthetic construct
  source 1..120: mol_type = other DNA
gcaaaagaactatgctgaaaaactaacattacccaatgtcaaagttatagtaatcaggacagtgtggtggtggtgtgatatggtttgggtgtgtccccgctcaaatctcgtcttgaattt

SEQ ID NO: 15668 - DNA, 120 bp, synthetic construct
  source 1..120: mol_type = other DNA
ataagtctcatgagatatgatggttttaaaaaggggagtttccctgcacaaactcttctcttgtctgccaccatgtgagacatgtctttcaccttctgccatgattgtgaggcctcccca

SEQ ID NO: 15669 - DNA, 120 bp, synthetic construct; identical to SEQ ID NO: 5061
  source 1..120: mol_type = other DNA

SEQ ID NO: 15670 - DNA, 120 bp, synthetic construct
  source 1..120: mol_type = other DNA
acacctaaatgtaaaacacaaaactatagaatttctagcaaataacataggagaaaatctaggtagcgttggctttggcaattagtttataaaaacaacaccaaaagcaaaacatctgga

SEQ ID NO: 15671 - DNA, 120 bp, synthetic construct
  source 1..120: mol_type = other DNA
gttaaaatgtaggcaaaagatctggacacttcactaaagaaggtggcggctaagcttatttatagattctcaacatcatacgtcactagggaattaaaagtcaaaacagcaggtggggag

SEQ ID NO: 15672 - DNA, 120 bp, synthetic construct
  source 1..120: mol_type = other DNA
aaaattaggcgggcatggtggtgcgtgactgtagtcgcagctacttgggaggctgaggtgagaggcctgtttgagcccaggagattgcagtgagctgagattgcaccactgtactccagc

SEQ ID NO: 15673 - DNA, 120 bp, synthetic construct; identical to SEQ ID NO: 5062
  source 1..120: mol_type = other DNA

SEQ ID NO: 15674 - DNA, 120 bp, synthetic construct
  source 1..120: mol_type = other DNA
ggcgcgatctcggctcaccgcaagctccatctcccagggttcacgccattctcctgcctcagcctccggagtagctgggactacaggcgcccgccaccacgcccagctaatttcttttcg

SEQ ID NO: 15675 - DNA, 120 bp, synthetic construct
  source 1..120: mol_type = other DNA
cggccacatgtgcccattttttaaaatgttcttttctcttagacatatactgaagtatttaaacatcaaattacataatgcttagaagtagcttaaaatacttcagtggagaaaaggaga

SEQ ID NO: 15676 - DNA, 120 bp, synthetic construct
  source 1..120: mol_type = other DNA
ctagaagagcttttttcgatgcaagcgttagctgtcaactacctgtttttgtcaatgatattcaaaattactctcactcttgttttgaggggagaagggggacagggtcttgctctgtcg

SEQ ID NO: 15677 - DNA, 120 bp, synthetic construct; identical to SEQ ID NO: 5063
  source 1..120: mol_type = other DNA

SEQ ID NO: 15678 - DNA, 120 bp, synthetic construct
  source 1..120: mol_type = other DNA
cctagctctttcctacccacccacccctctatgccctccatttccctctctcttctgacataatgaagcatgcaggcctgagtgaaggagtaccttctggcagctatgggaactatggct

SEQ ID NO: 15679 - DNA, 120 bp, synthetic construct
  source 1..120: mol_type = other DNA
ttttttaatttattttatttttatttattttttctgatgggttatcttttctcacatatgatgatgataattcatgacacttaaatagtgatgttttgttttgtttttgacacggaatct

SEQ ID NO: 15680 - DNA, 120 bp, synthetic construct
  source 1..120: mol_type = other DNA
tgccttagcctcctgagtaactgggactacaggtgctcaccactacacccacctagttttgtgtttttagtagagacagggtttcactaggttggccaggctggtctcaaactcctgagt

SEQ ID NO: 15681 - DNA, 120 bp, synthetic construct
  source 1..120: mol_type = other DNA
aatcttcctaataatttttgatgataatgacctctctttcttctctgccccaatacctcattctttaaataaagcttatgattttggcatgtttctagtagggcccaattcatatgtgta

SEQ ID NO: 15682 - DNA, 120 bp, synthetic construct; identical to SEQ ID NO: 5064
  source 1..120: mol_type = other DNA

SEQ ID NO: 15683 - DNA, 120 bp, synthetic construct
  source 1..120: mol_type = other DNA
tcgcccaggctggagtgcagtggcgcgatctcggctcactgcaaactccgcctcccggattcaagccattctcctgcctcagcctcccgagtagctgggactacaggtgcccccaccacg

SEQ ID NO: 15684 - DNA, 120 bp, synthetic construct
  source 1..120: mol_type = other DNA
gagccaccgtgcccgcccaaaataaatttttaaataaaattttaaacactttctcattcttaaagtttactttgatgggtacacaagtctagattggcaattgttttatttcaacacttc

SEQ ID NO: 15685 - DNA, 120 bp, synthetic construct
  source 1..120: mol_type = other DNA
tatacattctctctggctgatttgagacatcctcttatgtttgttataacacagtttcagtatgaggtgtgtagttatagttgtttctctttaacgtgcttgtgacacatttgctttctg

SEQ ID NO: 15686 - DNA, 120 bp, synthetic construct; identical to SEQ ID NO: 5065
  source 1..120: mol_type = other DNA

SEQ ID NO: 15687 - DNA, 120 bp, synthetic construct
  source 1..120: mol_type = other DNA
agggctattttctggagttcatcagttttccttcatgtgatctccccaacaggactgcccagatttcttatacagtgatagtgttccaagatgttgagaactgaagctgcaagctttctt

SEQ ID NO: 15688 - DNA, 120 bp, synthetic construct
  source 1..120: mol_type = other DNA
gggaggagatgcaaagaattcgcagttgtgtttatctatctcagcttgcttcacatgttccatgttcttaactatttttgttgtattctgggttaaggttttggctttatctttcagctt

SEQ ID NO: 15689 - DNA, 120 bp, synthetic construct
  source 1..120: mol_type = other DNA
taaggtcaggagttcaagaccagcctggccaacaaggtgaaacccgtctctattaaaaatacaaaaattagctgggcgtggtggcacacccctgtaatcccagctattcgggaggctgag

SEQ ID NO: 15690 - DNA, 120 bp, synthetic construct; identical to SEQ ID NO: 5066
  source 1..120: mol_type = other DNA

SEQ ID NO: 15691 - DNA, 120 bp, synthetic construct
  source 1..120: mol_type = other DNA
tattgtgtgatcttaacataagagagttctgcaggcctaactcggggaagttttctttcagagaggatatatttctacttctgccaggagctaggtgacaaatttgaccctgaaccactt

SEQ ID NO: 15692 - DNA, 120 bp, synthetic construct
  source 1..120: mol_type = other DNA
ctcagctcctccaactctctgcttttctgatattaaatattcatcctcacagttgtttttcgattggtatctgacttcaggttaaacccactcctctgttggtccaagttggcttccagc

SEQ ID NO: 15693 - DNA, 120 bp, synthetic construct
  source 1..120: mol_type = other DNA
tgacctgggctccaggtgtttctaagtcactttagcgcccagaaaatattcatttatttttgttttgagtgacctctaaagaattccttaatcctttgtgagaccagaaatgtcacaaaa

SEQ ID NO: 15694 - DNA, 120 bp, synthetic construct; identical to SEQ ID NO: 5067
  source 1..120: mol_type = other DNA

SEQ ID NO: 15695 - DNA, 120 bp, synthetic construct
  source 1..120: mol_type = other DNA
aaaaaaaaaaaaaaaaattagccaggcatagtggcaggcacctgtaatcccagctactcaggaggctgaggcaagagaatcatttgaacccgggaggcggaggttgcagtgagccgagat

SEQ ID NO: 15696 - DNA, 120 bp, synthetic construct
  source 1..120: mol_type = other DNA
ctatgcaaatatttttcattaaagaagactaaaaaagacaggacaactaaatgcaacgcctgaccctagactagatcctatatgagaggaaaacatcaggtcaattggtcaacttgaaat

SEQ ID NO: 15697 - DNA, 120 bp, synthetic construct
  source 1..120: mol_type = other DNA
acaggagagagaagaagcaactcataaggcaaatggggtaaaatattaataatatctaaatctgagtaaaggatagaagggtatttttgtattatttttattttttcaactttttagtga

SEQ ID NO: 15698 - DNA, 120 bp, synthetic construct; identical to SEQ ID NO: 5068
  source 1..120: mol_type = other DNA

SEQ ID NO: 15699 - DNA, 120 bp, synthetic construct
  source 1..120: mol_type = other DNA
cagatttccagtttgtccttgtgattgattcatgacatcttgagctcacaagaacgttccctgccatcaccactaagtgttcagtggacgttttgggcttttggaaacggaagtgatttg

SEQ ID NO: 15700 - DNA, 120 bp, synthetic construct
  source 1..120: mol_type = other DNA
ggctgcgctactggctttggcctcctggggccttatggttgaaaacagcaggaaatgaagctggaaaaagcgagagacaacagattgtctgctttcaggctccttcctttgtaatttcac

SEQ ID NO: 15701 - DNA, 120 bp, synthetic construct
  source 1..120: mol_type = other DNA
cattgcaatttaccgaatctttgagaaatactgattataaatcatgaaagaaatgcaaagcaacctgtctgtggttgggggtgtagctcagtggtagagcgcgtgcttagcatgtacgag

SEQ ID NO: 15702 - DNA, 120 bp, synthetic construct; identical to SEQ ID NO: 5069
  source 1..120: mol_type = other DNA

SEQ ID NO: 15703 - DNA, 120 bp, synthetic construct
  source 1..120: mol_type = other DNA
agagcaaagaacagcatggaggtggaatagcagaaacatatcttattgatgtctttcttctgagcttccaaccaccctataccttaccttttcttgaatcaccagatatggaagcagtgg

SEQ ID NO: 15704 - DNA, 120 bp, synthetic construct
  source 1..120: mol_type = other DNA
aaccagaactactgtccttttgctgaaatagcttagtgggagtgtgagagaccaggcatccaaatatctcttgttcaagaaaatttcagtaaaaataaatgacatgtttttgggaaaagg

SEQ ID NO: 15705 - DNA, 120 bp, synthetic construct
  source 1..120: mol_type = other DNA
gagacccgctctcttatctgtaaacactgcgttcaaggagaaagacactcctttgaaatactggaatgtggacagactccaagttaagcccgctcccactagctactctccgataagtta

SEQ ID NO: 15706 - DNA, 120 bp, synthetic construct; identical to SEQ ID NO: 5070
  source 1..120: mol_type = other DNA

SEQ ID NO: 15707 - DNA, 120 bp, synthetic construct
  source 1..120: mol_type = other DNA
acgacacctacacatgttaatcaatccaaatcaaaggtgatttgcctacgccagagctagtatgaaatattgattaaatacataatatgagaggaaagaaaccagtttttccctttttaa

SEQ ID NO: 15708 - DNA, 120 bp, synthetic construct
  source 1..120: mol_type = other DNA
aagctgaggcaggagaattgcttgagcccaggagttctagaccagcctgggcaacatagagagatgatgtctcttttaaattagcagggcatggtggtgcatgcctgtattcccagctag

SEQ ID NO: 15709 - DNA, 120 bp, synthetic construct
  source 1..120: mol_type = other DNA
aagcgggggttggggggagggcgctgttcatggtatgtattcccatttaagtctatttatggtattttgggatcaaatacatttaaattgtttttcatgacaagacaaggatattcatta

SEQ ID NO: 15710 - DNA, 120 bp, synthetic construct; identical to SEQ ID NO: 5071
  source 1..120: mol_type = other DNA

SEQ ID NO: 15711 - DNA, 120 bp, synthetic construct
  source 1..120: mol_type = other DNA
ttgaaagctaacacatgaaggaaaagaatcaagcatttatcctatctctcctgtatggaatgtatttcaggataaacatatagttgatgagggaaagatttttcttctcaggaaataaca

SEQ ID NO: 15712 - DNA, 120 bp, synthetic construct
  source 1..120: mol_type = other DNA
aatggctgctataaccatgaggtgaaattggatgaaggactctagaatggttggattaggctgatgtcacctaaaaccaaagctaaattttatatcatcaaatgtgagacaaccacatat

SEQ ID NO: 15713 - DNA, 120 bp, synthetic construct
  source 1..120: mol_type = other DNA
atacagcaatgtgtttaataacattataatgatgcaatcagctaaatccagaatgtggaaaattctcctggacaaactgaccttcaagaaataaatggcatggagtccaggcaagttggc

SEQ ID NO: 15714 - DNA, 120 bp, synthetic construct; identical to SEQ ID NO: 5072
  source 1..120: mol_type = other DNA

SEQ ID NO: 15715 - DNA, 120 bp, synthetic construct
  source 1..120: mol_type = other DNA
gagaccagcctggccaacatgatgaaactccgtctctactaaaaatacaacaaattagctgggtgtggtggcgtgtgcctgtaatcccagctactcaggaggctgaggcaggagaattgc

SEQ ID NO: 15716 - DNA, 120 bp, synthetic construct
  source 1..120: mol_type = other DNA
aggaaggagaaaaaagtaaaacacaagaaacaaagaacaaagtcatccacaatcacaagtagtttatactttgatgtgtccttctaggtcctgtgtgtgtagacataacatccagttata

SEQ ID NO: 15717 - DNA, 120 bp, synthetic construct
  source 1..120: mol_type = other DNA
actcagtctgttagaaaaacaatgtaatcttgctttttttgggacaaaaattttatagaaggcaaaaatggagacatgcctctagataaaagcattagcagagttctgattaaaatactg

SEQ ID NO: 15718 - DNA, 120 bp, synthetic construct; identical to SEQ ID NO: 5073
  source 1..120: mol_type = other DNA

SEQ ID NO: 15719 - DNA, 120 bp, synthetic construct
  source 1..120: mol_type = other DNA
tctgcctctctactgctaacctgatgaacaagtcctggtatacactacccagtggtggtttcacaattccatgtccaagatacatcttttctaaagatgtttactgaaaagtaaagtgct

SEQ ID NO: 15720 - DNA, 120 bp, synthetic construct
  source 1..120: mol_type = other DNA
tccaagaggtggattaacaaaggtcactcctggaagacaggccttcctaaaaactaacaaaaggatataaatggattgttttactacctctacttccaacacactttgagcaaaaggact

SEQ ID NO: 15721 - DNA, 120 bp, synthetic construct
  source 1..120: mol_type = other DNA
ttgccactacccagtgaaaagtcagtgtactctccaaaacctcaagtttaacaattccattcccaaatacaaccactcctagacaattttggtgaaaggtgttactttagtatctacttt

SEQ ID NO: 15722 - DNA, 120 bp, synthetic construct
  source 1..120: mol_type = other DNA
tttaaaagtgtcttctaaataggaacattacggcctagaatcgtttcccttctcacctctaaattaaccctatggacaggtatgagcatccagaagaggaataagcatccagttagagat

SEQ ID NO: 15723 - DNA, 120 bp, synthetic construct; identical to SEQ ID NO: 5074
  source 1..120: mol_type = other DNA

SEQ ID NO: 15724 - DNA, 120 bp, synthetic construct
  source 1..120: mol_type = other DNA
gagccactgggccctgatcacttctgtgtttttaagaacactctgtgaattttaacataaggtgtactcaatgtatcagtttactaactctacttttgtcatacactagcaacctcctta

SEQ ID NO: 15725 - DNA, 120 bp, synthetic construct
  source 1..120: mol_type = other DNA
cataaacacactggtataaaaccctttgcactttcttctccttcctccctgaaccagcacaaatataataatgtgtactgctcagggaattagtttgatcagttttcaaaagacaatatt

SEQ ID NO: 15726 - DNA, 120 bp, synthetic construct
  source 1..120: mol_type = other DNA
ccacacacatgtaacagtggttatatctgaaagtgtcttctaaattgaaacattctattctagaatccttaatttcttcccactcctctccaccacaaactcagtggatataggcacttg

SEQ ID NO: 15727 - DNA, 120 bp, synthetic construct
  source 1..120: mol_type = other DNA
gtacaaaatgggttagtttattaacactacttttgtcatacactggcaatctctttaatatctagagactagatgttacaaaattgactagatattataaaatttaatatatagagactg

SEQ ID NO: 15728 - DNA, 120 bp, synthetic construct; identical to SEQ ID NO: 5075
  source 1..120: mol_type = other DNA

SEQ ID NO: 15729 - DNA, 120 bp, synthetic construct
  source 1..120: mol_type = other DNA
tgtatacagcactgttaaataaaattgcatacatgtaacaatggttataatctgaggtatcttccaaatatgatcattttagtcttgaaccattccctcctcacttccttctctctgcct

SEQ ID NO: 15730 - DNA, 120 bp, synthetic construct
  source 1..120: mol_type = other DNA
gacaagctttcctatgaatttcaacacaaagtgtacaaaatgagctaattttactgagtactttgtcatacactggcaacctctaacatctaagggactagatgttgcaaaattatgact

SEQ ID NO: 15731 - DNA, 120 bp, synthetic construct
  source 1..120: mol_type = other DNA
tataagcacactagcatattaccttttgcaatatcttccctcccacttccactaaaccattaaacaagtatagacactactataccactcacaggggcggtttaacaattccactttctt

SEQ ID NO: 15732 - DNA, 120 bp, synthetic construct
  source 1..120: mol_type = other DNA
cagcctcccaagaagctgggaatacaggcatgtaccaccacgcccagctgattttgtatttttagtagagacagagtttcaccatgttgaccatggctggtttcaaactcctgacctcag

SEQ ID NO: 15733 - DNA, 120 bp, synthetic construct; identical to SEQ ID NO: 5076
  source 1..120: mol_type = other DNA

SEQ ID NO: 15734 - DNA, 120 bp, synthetic construct
  source 1..120: mol_type = other DNA
gttcaagtgattctcctgtctcagcctcccaagtagctgggattacaggcatgcatcaccacacccagctaatttttgtatttttagtagagatggggtttcaccatgttggccaggctg

SEQ ID NO: 15735 - DNA, 120 bp, synthetic construct
  source 1..120: mol_type = other DNA
ggtcctgcaaagcagtcttgaataaactgtacacatgtaacaatagttaaaatctgaaagaatcttccaaataaaaatattccagcctagaacccttcccatctcagtcaacccagtggc

SEQ ID NO: 15736 - DNA, 120 bp, synthetic construct
  source 1..120: mol_type = other DNA
aaagtctagatgtaaattaggacttgttttcctctataaacactgtatacacagataaggaaaacaaagtgcacagacatgagagacaatagttaatcttgcctcaccgtaagcacactg

SEQ ID NO: 15737 - DNA, 120 bp, synthetic construct; identical to SEQ ID NO: 5077
  source 1..120: mol_type = other DNA

SEQ ID NO: 15738 - DNA, 120 bp, synthetic construct
  source 1..120: mol_type = other DNA
tcgtttctactaaaaatacaaaaattagtagggcatggtggtgcgcgcctgtaatctcagctacttgggagactgaggcaggagaatcacttgtacgtgggaagtgagccatgatcgcgc

SEQ ID NO: 15739 - DNA, 120 bp, synthetic construct
  source 1..120: mol_type = other DNA
tgcacacggaagacaacgattataatatgtaaacgtcttctaaatatgaccagtctggcataggaccttcttctcgtccttctcagatcttctccatgtcctagtctaacccactgaaca

SEQ ID NO: 15740 - DNA, 120 bp, synthetic construct
  source 1..120: mol_type = other DNA
tcttagtctatcatacatcggcagcttctttacatctggaggggctagatgtggcaaatgttttcttgtaaaagttttcggggaagctgagagtagctttctcaccttatacactcgggc

SEQ ID NO: 15741 - DNA, 120 bp, synthetic construct; identical to SEQ ID NO: 5078
  source 1..120: mol_type = other DNA

SEQ ID NO: 15742 - DNA, 120 bp, synthetic construct
  source 1..120: mol_type = other DNA
gcgccctagtggcctctgcgcggttcttcccgacccgcaaacacgccgccacccaaagcctctgtgtcccggcggccacccggtcaccgaggtgtgaggagaggttccccgctgcttcaa

SEQ ID NO: 15743 - DNA, 120 bp, synthetic construct
  source 1..120: mol_type = other DNA
gcgtgcagggcggcatacttagttactctggttatcttgagttaatgagccaccctgtcgtctggccggaggcaagagactgtaaatcgattgattgttcaacattccttcccaaagtgg

SEQ ID NO: 15744 - DNA, 120 bp, synthetic construct
  source 1..120: mol_type = other DNA
tgaaggaatgccctagtgggggtagcctgcagccaagccccctttctactctgcctcattttattctatttttatttcaggtagatttaaggtaatcatggtcttcccttctcttccaca

SEQ ID NO: 15745 - DNA, 120 bp, synthetic construct; identical to SEQ ID NO: 5079
  source 1..120: mol_type = other DNA

SEQ ID NO: 15746 - DNA, 120 bp, synthetic construct
  source 1..120: mol_type = other DNA
ctatctatctatttatttatttatttatctcggctcactggtgcccgacctcttaggcgcaggtgattctcccacctcagccttctgaatagctgggactatagacgtgcaccaccatgc

SEQ ID NO: 15747 - DNA, 120 bp, synthetic construct
  source 1..120: mol_type = other DNA
cgctccgcctatttgttccttttaaaaaatctaattttccctttcttgtctcagatttctcccataatttgaatgtatttaatgtgcctttttatttgtatgtcttattgtaacttgtgt

SEQ ID NO: 15748 - DNA, 120 bp, synthetic construct
  source 1..120: mol_type = other DNA
tttatagagttcagtattatttcttactctttaaacatgatgttttgtatgttactacatgtatattttcttcattgtttctaattgtttctggccaaactaagggtctggctgctgttt

SEQ ID NO: 15749 - DNA, 120 bp, synthetic construct; identical to SEQ ID NO: 5080
  source 1..120: mol_type = other DNA

SEQ ID NO: 15750 - DNA, 120 bp, synthetic construct
  source 1..120: mol_type = other DNA
gtggaggcctggtgagtttcttcagactcccaataaaacttgtttaatcctaaatgcgtcctgttaagaactccttcgttattttgtcatgctataaggcccacgaaagtcctaggcaaa

SEQ ID NO: 15751 - DNA, 120 bp, synthetic construct
  source 1..120: mol_type = other DNA
gtcagtcagtactgaaacagttgtgatacaggcctgagttggtgaaacctggcctgccacatagtggatgcagagtagttcacgtgtaggtctaccactatgatattttgaaataagaaa

SEQ ID NO: 15752 - DNA, 120 bp, synthetic construct
  source 1..120: mol_type = other DNA
aatttctttaaaaattagccgtggctggctgtgcgcacctgtagtcccagctatttggggggctgcagtgggacatcgcttcagcctgggagatcaaggctgcagtgagttacagtcata

SEQ ID NO: 15753 - DNA, 120 bp, synthetic construct; identical to SEQ ID NO: 5081
  source 1..120: mol_type = other DNA

SEQ ID NO: 15754 - DNA, 120 bp, synthetic construct
  source 1..120: mol_type = other DNA
gtgatcagagggatagaactttcagctccaaccccaaacctccagggagaagagaggcattaaaggctgagttgatcaccaatgaccaatgatttaaccagtcatgcctatgtaatgaag

SEQ ID NO: 15755 - DNA, 120 bp, synthetic construct
  source 1..120: mol_type = other DNA
ataaaaatatttcctcatgtccctgtacatgtatgtgtaagaattttcttacaattttccacatatacacaggagcatagtggcttggtgtcacaggttagattatctgtgaagtagacc

SEQ ID NO: 15756 - DNA, 120 bp, synthetic construct
  source 1..120: mol_type = other DNA
ccagattcaagcgattctcgtgcctcagcctcctgagtaggtaggattacaggctcaccccaccatgcccagctaatttttttttttttttgtattttttttggtagagacggagtttca

SEQ ID NO: 15757 - DNA, 120 bp, synthetic construct; identical to SEQ ID NO: 5082
  source 1..120: mol_type = other DNA

SEQ ID NO: 15758 - DNA, 120 bp, synthetic construct
  source 1..120: mol_type = other DNA
acatcacctgaggtggggagttcgagaccagcctgaccaacatggagaaaccctgtgtctacaaaattagccaggcgtggtggtgcatgcctgtaatcccagctacttgggaagctgagg

SEQ ID NO: 15759 - DNA, 120 bp, synthetic construct
  source 1..120: mol_type = other DNA
ccccttcactcatttgatatgaacagcctcaaaaaggatgtgatcttgggcaggcagctctgcagctgaaacaatccctgaaagtcctgacagttgtggatcgtctgctgaatgcacttg

SEQ ID NO: 15760 - DNA, 120 bp, synthetic construct
  source 1..120: mol_type = other DNA
ctaaggatggctgtgtattattctgcactttacccagaagtgcaaaccaaaaacaaacaaatagaaagtcaaataaggacataaacaggcatttacaaaaagaaaagatacaagaggcta

SEQ ID NO: 15761 - DNA, 120 bp, synthetic construct; identical to SEQ ID NO: 5083
  source 1..120: mol_type = other DNA

SEQ ID NO: 15762 - DNA, 120 bp, synthetic construct
  source 1..120: mol_type = other DNA
ggaaaatgcaaatcaaaactacaaagacatgtcacttcatacttgtagagatggctattataaaaaacaacaaagataacaagtgttggcaaggatgtggagaaattgaaacccctgtac

SEQ ID NO: 15763 - DNA, 120 bp, synthetic construct
  source 1..120: mol_type = other DNA
cagcgtgagcgacgcagaagacgggtgatttctgcatttcaatctgaggtaccgggttcatctcactagggagtgccagacagtgggcgcaggacagtgggtgcagcgcaccgtgtgcaa

SEQ ID NO: 15764 - DNA, 120 bp, synthetic construct
  source 1..120: mol_type = other DNA
tactgcgcttttccgacgggcttaaaaaacggcacaccaggagactatatcccgcacctggctcggagggtcctacgcccacggagtctcgctgattgctagcacagcagtctgagatca

SEQ ID NO: 15765 - DNA, 120 bp, synthetic construct
  source 1..120: mol_type = other DNA
gcctccctctgtaggctccacctctgggggcaggacacagacaaacaaaaagacagcagtaacctctgccgacttaaatgtccctgtctgacagctttgaagagagcagtggttctccca

SEQ ID NO: 15766 - DNA, 120 bp, synthetic construct; identical to SEQ ID NO: 5084
  source 1..120: mol_type = other DNA

SEQ ID NO: 15767 - DNA, 120 bp, synthetic construct
  source 1..120: mol_type = other DNA
gaccaaaagtagataaaaccacaaagatggggaaaaaacagagcagaaaaactggaaactctaaaaagcagagcgcctctcctcctccaaaggaacgcagttcctcaccagcaatggaac

SEQ ID NO: 15768 - DNA, 120 bp, synthetic construct; identical to SEQ ID NO: 5085
  source 1..120: mol_type = other DNA

SEQ ID NO: 15769 - DNA, 120 bp, synthetic construct
  source 1..120: mol_type = other DNA
atgtgaaaagaccaaatctacgtctgattggtgcacctgaaagtgactgggagaatggaaccaagttggaaaacactcttcaggatattatccaggagaacttccccaatctagcaaggc

SEQ ID NO: 15770 - DNA, 120 bp, synthetic construct
  source 1..120: mol_type = other DNA
tgttaagggcagccagagagaaaggtcaggttacccacaaagggaagcccatcagactaacagtggatctctcggcagaaactctacaagccagaagagagtgggggccaatattcaaca

SEQ ID NO: 15771 - DNA, 120 bp, synthetic construct
  source 1..120: mol_type = other DNA
gcctgccctaaaagagctcctgtaggaagcactaaacatggaaaggaacaaccagtaccagccactgcaaaatcatgccaaattgtaaagaccatcgaggctaggaagaaacggcatcaa

SEQ ID NO: 15772 - DNA, 120 bp, synthetic construct
  source 1..120: mol_type = other DNA
gataaagaatcaagacccatcagtgtgctgtattcaggaaacccatctcacgtgcagagacacacataggctcaaaataaaaggatggaggaagatctaccaagcaagtggaaaacaaaa

SEQ ID NO: 15773 - DNA, 120 bp, synthetic construct; identical to SEQ ID NO: 5086
  source 1..120: mol_type = other DNA

SEQ ID NO: 15774 - DNA, 120 bp, synthetic construct
  source 1..120: mol_type = other DNA
atatacattttttccagcaccacaccacacctattccaaaattgactgcatagttggaagtaaagctctcgtcagcaattgtaaaatatcagaaattataacaaactgtctctcagacca

SEQ ID NO: 15775 - DNA, 120 bp, synthetic construct
  source 1..120: mol_type = other DNA
aaagatgttctttaaaaccaacaagaacaaagacacaacataccagaatctctgggacacattcaaagcagtgtgtagagggaaatttatagcactaaatgcccacaagagaaagcagga

SEQ ID NO: 15776 - DNA, 120 bp, synthetic construct
  source 1..120: mol_type = other DNA
agagatacaaaaaacccttcaaaaaattaataaatccaggagctggttttttgaaaggatcaacaaaattgatagactgctagcaagactaataaagaagaaaagagagaagaatcaaat

SEQ ID NO: 15777 - DNA, 120 bp, synthetic construct
  source 1..120: mol_type = other DNA
taaattcctcgacacatacaccctcccaagactaaaccaggaagaagttgaatctctgaatagaccaataacaggagctgaaattgtggcaataatcaatagcttaccaaccaaaaagag

SEQ ID NO: 15778 - DNA, 120 bp, synthetic construct; identical to SEQ ID NO: 5087
  source 1..120: mol_type = other DNA

SEQ ID NO: 15779 - DNA, 120 bp, synthetic construct
  source 1..120: mol_type = other DNA
agacaaaaaccacatgattatctcaatagatgcagaaaaggcctttgacgaaattcaacaaccttcatgctaaaaactcccaataaattaggtattgatgggacgtatctcaaaataatg

SEQ ID NO: 15780 - DNA, 120 bp, synthetic construct
  source 1..120: mol_type = other DNA
gtgttggaagttctggccagggcaattaagcaggagaaggaaataaagggtattcaattaggaaaaggggaagtcaaattgtccctgtttgcagatgacatgattgtatatctagaaaac

SEQ ID NO: 15781 - DNA, 120 bp, synthetic construct
  source 1..120: mol_type = other DNA
agccaaatcatgagtgaactcccattcacaattgcttcaaagagaatcaaatacctaggaatccaacttacaagggatgtgaaggacctcttcaagtagaactacaaaccactgctcaat

SEQ ID NO: 15782 - DNA, 120 bp, synthetic construct
  source 1..120: mol_type = other DNA
aagctaccaatgactttcttcacagaattggaaaaaactactttaaagttcatatggaaccaaaaaagagcctgcatcgccaagtcaatcgtaagccaaaagaacaaagctggaggcatc

SEQ ID NO: 15783 - DNA, 120 bp, synthetic construct; identical to SEQ ID NO: 5088
  source 1..120: mol_type = other DNA

SEQ ID NO: 15784 - DNA, 120 bp, synthetic construct
  source 1..120: mol_type = other DNA
ggcaaggacttcatgtctaaaacaccaaaagcaatggcaacaaaagccaaaattgacaaatgggatctaattaaactaaagagcttctgcacagcaaaagaaaataccatcagagtgaac

SEQ ID NO: 15785 - DNA, 120 bp, synthetic construct; identical to SEQ ID NO: 5089
  source 1..120: mol_type = other DNA

SEQ ID NO: 15786 - DNA, 120 bp, synthetic construct
  source 1..120: mol_type = other DNA
accattgtggaagtcagtgtggcaattcctcagggatctaaaactagaaataccatttgacccagccatcccattactgggtatatacccaaaggactataaatcatgctgctataaaga

SEQ ID NO: 15787 - DNA, 120 bp, synthetic construct
  source 1..120: mol_type = other DNA
ctatgcagccataaaaaatgatgagttcatgtcctttgtagggacatggatgaaattggaaatcatcattctcagtaaactatcgcaagaacaaaaaaccaaacaccgcatgttctcact

SEQ ID NO: 15788 - DNA, 120 bp, synthetic construct
  source 1..120: mol_type = other DNA
aaatgacgagttaatgggtgcagcacaccagcatggcacatgtatacatatgtaactaacatgcacattgtgcacatgtaccctaaaacttaaagtataataataataaaataaaataaa

SEQ ID NO: 15789 - DNA, 120 bp, synthetic construct; identical to SEQ ID NO: 5090
  source 1..120: mol_type = other DNA

SEQ ID NO: 15790 - DNA, 120 bp, synthetic construct
  source 1..120: mol_type = other DNA
tggttgccaggggctgggaggctgaagaagatggggaattgttgctcaatggatatatttcagttatgctacatgaataagttctagagatctgctgtacaacatagcacctacagttaa

SEQ ID NO: 15791 - DNA, 120 bp, synthetic construct
  source 1..120: mol_type = other DNA
actttggttggtggatatgtctattaccttgattgtggtgatggatcatgggtatttccttgtgcccgaattcatcatattgtacacattgtgtgcagttctttgtatatcagttatacc

SEQ ID NO: 15792 - DNA, 120 bp, synthetic construct
  source 1..120: mol_type = other DNA
tcctgggttcgagtgattctcctgtttcagcctcctgagtagctgggattacaggcgcctgccactgcgcccggctaatttttgtacttttagtagaaatggggtttcaccatcttggcc

SEQ ID NO: 15793 - DNA, 120 bp, synthetic construct; identical to SEQ ID NO: 5091
  source 1..120: mol_type = other DNA

SEQ ID NO: 15794 - DNA, 120 bp, synthetic construct
  source 1..120: mol_type = other DNA
ataatacttattatgttactataataaatattatgcatatttactatatatataaagagacttattataaggttttgctttacgcaattctggaggctgagaggttccatgatctaccat

SEQ ID NO: 15795 - DNA, 120 bp, synthetic construct
  source 1..120: mol_type = other DNA
gtgtgagtgttcctgcacaacctgtcaagcagagagaaggtgaatccaaccttcccctccttctgttctattcagaccctcaatggattggattatgtccacccacattgaggaaagcca

SEQ ID NO: 15796 - DNA, 120 bp, synthetic construct
  source 1..120: mol_type = other DNA
cataaaattatcagattcatcaatgtgttaattttgttctaaggtattctttgtctctaaggtatttgaaatctttaacaatctccaatttctttcaaactaaaggcttggccagccgtg

SEQ ID NO: 15797 - DNA, 120 bp, synthetic construct
  source 1..120: mol_type = other DNA
attagccgggcacggtggcgggcgcctgtagtcccagttactcgggaggctgaggcaggagaatggcgtgaacccaggaggcgaagcttgcagtgagctgagattgcgccactgcactcc

SEQ ID NO: 15798 - DNA, 120 bp, synthetic construct; identical to SEQ ID NO: 5092
  source 1..120: mol_type = other DNA

SEQ ID NO: 15799 - DNA, 120 bp, synthetic construct
  source 1..120: mol_type = other DNA
tggctcacacctgtaatcccagcactttgggaggccgaggtgtgtggatcacttgagatcaggagttcaagatcagcctggccaacaaggtgaagccccatctctactaaaaatacaaaa

SEQ ID NO: 15800 - DNA, 120 bp, synthetic construct
  source 1..120: mol_type = other DNA
agcctgggtgaaagagtgagactctgtctcaaaagtaaaaagtaaaataaaaatgaaaacaaaactgggtcattattagaagttattatgaagaaacagaacaaaaccattaatcacaac

SEQ ID NO: 15801 - DNA, 120 bp, synthetic construct
  source 1..120: mol_type = other DNA
aaggccacatctctaaaatttaaaaaacaaaaatgacaaaaagcaatgtaataactcctttgcctactgatagggcaaccagagtggagtgaatatggaaagctagtttacatattgata

SEQ ID NO: 15802 - DNA, 120 bp, synthetic construct; identical to SEQ ID NO: 5093
  source 1..120: mol_type = other DNA

SEQ ID NO: 15803 - DNA, 120 bp, synthetic construct
  source 1..120: mol_type = other DNA
tcagttacctttctcatgagaaactttttgtttccttcagaaccattaaagtcctgttctaatctatcatgagaatccattctacttcagcttatgtgtgttccatggtacatatatttt

SEQ ID NO: 15804 - DNA, 120 bp, synthetic construct
  source 1..120: mol_type = other DNA
attctcccctatcctgctccctccaccaccaagaagttgatggagccagaggtcctagcattgaaaacaatgtggctttatttcaccatctgcatgcactcctatttaaaactaagataa

SEQ ID NO: 15805 - DNA, 120 bp, synthetic construct
  source 1..120: mol_type = other DNA
actcacaggcatacagcgtcagtgtgataccagtaatttgacaagttctcatcccttaggtcatcagccggtacaccagagcaagtgtgctatattgaaaataaaataataggacaggct

SEQ ID NO: 15806 - DNA, 120 bp, synthetic construct
  source 1..120: mol_type = other DNA
ccaccctggccaatatggtaaaaccctgtctcaactaaaaatacaaaaaaattagctgggcgtggtggcgggcacctgtaatctcagctagttgggaggctgaggcaggagaattgcttg

SEQ ID NO: 15807 - DNA, 120 bp, synthetic construct; identical to SEQ ID NO: 5094
  source 1..120: mol_type = other DNA

SEQ ID NO: 15808 - DNA, 120 bp, synthetic construct
  source 1..120: mol_type = other DNA
tcctggctaacacggtgaaaccccatctctactaaaagtacaaaaaattagccaggagtggtggcctgcgcctgtagtcctagctactcaggaggctgagtcaggagaatcgctagaacc

SEQ ID NO: 15809 - DNA, 120 bp, synthetic construct
  source 1..120: mol_type = other DNA
aaaaaaaggtccttgcaaagatcaaaaatccactcagtatcagcatctaatctactaagccagccagcacatggaatgatacatcaataaaaaactaaataaacatttatgtctgtattt

SEQ ID NO: 15810 - DNA, 120 bp, synthetic construct
  source 1..120: mol_type = other DNA
agaggaagttctgcggaacaaatgtgggtcctccaatctttaccacggaaccacatccccactgtaggtattactgactattctgattattgaccaaaattgccacaaaaatggtgtctt

SEQ ID NO: 15811 - DNA, 120 bp, synthetic construct
  source 1..120: mol_type = other DNA
aatgaaataacctatgaacaaacagaataggtcttgcttcattttgctccttgtggggaagacaaattggagataccaaggatcgaactgggaaccctaggcatgcaaattgtaagctct

SEQ ID NO: 15812 - DNA, 120 bp, synthetic construct; identical to SEQ ID NO: 5095
  source 1..120: mol_type = other DNA

SEQ ID NO: 15813 - DNA, 120 bp, synthetic construct
  source 1..120: mol_type = other DNA
cggcagaaaaggtatcttaaggcaaatagttcagacagttcctgatataaagctcaaagctaattttttaaagtgtttcagttatatttaatacttaagcaaaacatttttgactataca

SEQ ID NO: 15814 - DNA, 120 bp, synthetic construct
  source 1..120: mol_type = other DNA
gtttttttttttttcttaaagttttttggacgttaacaggcgctcaacatcttcttccatttactcctttctgaactggctcagactgcttagcacatacgcagacggtgttaagaaggt

SEQ ID NO: 15815 - DNA, 120 bp, synthetic construct
  source 1..120: mol_type = other DNA
gcagagttgaggacagagcccgggtaggcgaggcatggcgcgtcaggtgagataaagccaggcaagccaatgggagggaccgcgtgagtgggttgaggccaagcggcgcgagctccagag

SEQ ID NO: 15816 - DNA, 120 bp, synthetic construct; identical to SEQ ID NO: 5096
  source 1..120: mol_type = other DNA

SEQ ID NO: 15817 - DNA, 120 bp, synthetic construct
  source 1..120: mol_type = other DNA
aagtgtgccgtgttaaatacatctgacctttaaagccaccgacctatttccaagtatttgaagacgtcaggaagttctacccaagcctaaacaaagaggagtaaccaaccagtatgctaa

SEQ ID NO: 15818 - DNA, 120 bp, synthetic construct
  source 1..120: mol_type = other DNA
taacaatatagagtagcactacccaattccgtcggctttttcaatttatattcatagaaaatcaagtcggttcaacaaattgttatcaatgccatacataacttccttgtactttcccta

SEQ ID NO: 15819 - DNA, 120 bp, synthetic construct
  source 1..120: mol_type = other DNA
tagtatagaggtggagtacagcagccactcacagagcagtgagaaataaattacaggtgccctctgttcaggatatatttcacagtacagagacttgcaatgaagtgtgaaggtggagga

SEQ ID NO: 15820 - DNA, 120 bp, synthetic construct; identical to SEQ ID NO: 5097
  source 1..120: mol_type = other DNA

SEQ ID NO: 15821 - DNA, 120 bp, synthetic construct
  source 1..120: mol_type = other DNA
caggagcttgcgggcctaaaatgcattagctggtttttactgaatttacgcttagcagagacctacagaaaaatgagatccagctcgccgctggagggaacagctctggcctcccagtga

SEQ ID NO: 15822 - DNA, 120 bp, synthetic construct
  source 1..120: mol_type = other DNA
gtctccccggtaggatgctcactgcgctagcgggaggggaccgttaagtattttccggaaccgtttatcagctcggccttggacatatgtccttttacccttcagcaataaaaacatggc

SEQ ID NO: 15823 - DNA, 120 bp, synthetic construct
  source 1..120: mol_type = other DNA
ttgacttctccagggagctcctagcgtttgcggccgcgtcacatctccaacctttgcctcgccctgcctgtcatcccggttttctttcttgcccgcctaagtgtggcggacagggatact

SEQ ID NO: 15824 - DNA, 120 bp, synthetic construct; identical to SEQ ID NO: 5098
  source 1..120: mol_type = other DNA

SEQ ID NO: 15825 - DNA, 120 bp, synthetic construct
  source 1..120: mol_type = other DNA
ataaataaatataaatctctagaaataagcaaagagagcctaactggaggataaaacctttggctctttgcttatttctcttgctgcgcttctctgcatcccagactaactcctttccac

SEQ ID NO: 15826 - DNA, 120 bp, synthetic construct
  source 1..120: mol_type = other DNA
ggtaaccaacaggccaatgcaggttctagggatgtcaatccctgtctactgcttagccctgcgtgtttagttaaagcggtgcatttgttaaaattgatgacctaaattgacacatcagta

SEQ ID NO: 15827 - DNA, 120 bp, synthetic construct
  source 1..120: mol_type = other DNA
taaaaatcctttgtgctccaccaattaatcagtccctccctctccctctaacccttggcaacttctgatcttttactatctccacagctttgccttttccagaataccatatagttggaa

SEQ ID NO: 15828 - DNA, 120 bp, synthetic construct; identical to SEQ ID NO: 5099
  source 1..120: mol_type = other DNA

SEQ ID NO: 15829 - DNA, 120 bp, synthetic construct
  source 1..120: mol_type = other DNA
aagaaactgctaaagtcttccaaagacatcataccattttgtatttccatcaacaatgaattagagttcctattttttgacatcctcaacagtatttggtgttgtaagggttccggagtt

SEQ ID NO: 15830 - DNA, 120 bp, synthetic construct
  source 1..120: mol_type = other DNA
caggcttagttgctacttgttctgggtttgtttcttttcagtctttcttctctttgcttttcggttttggaaatttctactgatatatccttaagttcaaagcttctttcttcagccatg

SEQ ID NO: 15831 - DNA, 120 bp, synthetic construct
  source 1..120: mol_type = other DNA
ttcttgcatgctgtctaatttatccattagagtccttagcatattaatcatagttgttttgaattccccatctggtaatcccaaaatccctgcccatgtctgtttctgatgcttgctttc

SEQ ID NO: 15832 - DNA, 120 bp, synthetic construct; identical to SEQ ID NO: 5100
  source 1..120: mol_type = other DNA

SEQ ID NO: 15833 - DNA, 120 bp, synthetic construct
  source 1..120: mol_type = other DNA
ggttaggctctgattagtttctcctgagggcagaatttattaagacaaacaggtgctattcaaaatagtcccttttcctctccccatgtggaagcacaaggggatttttctctaatattt

SEQ ID NO: 15834 - DNA, 120 bp, synthetic construct
  source 1..120: mol_type = other DNA
tcattgattagaattcaggttttcttatctatgcaatggttcccacagatatttctgctcgtgtgctgtgattttcaatgtctatctgtctgtctctccaatttggggggggggtgggca

SEQ ID NO: 15835 - DNA, 120 bp, synthetic construct
  source 1..120: mol_type = other DNA
agcaaagtggcaacatccaagctacttacacgcaaaaccctaaactggaaatccagactgtttttactgtcttattttccttttttaatcccaattaattgtatctctattatatgtact

SEQ ID NO: 15836 - DNA, 120 bp, synthetic construct; identical to SEQ ID NO: 5101
  source 1..120: mol_type = other DNA

SEQ ID NO: 15837 - DNA, 120 bp, synthetic construct
  source 1..120: mol_type = other DNA
aaagggctaaagggctatggggaaatagtggtatttgtatatattcagaaatgtggttaagagaataaatctgacagcccctgaaaatttcagcataacactgggtccggaattggcggg

SEQ ID NO: 15838 - DNA, 120 bp, synthetic construct
  source 1..120: mol_type = other DNA
tctgatggattcgtggtctccctggctgaggagtgaagccgtaaaccttcgcggtgagttttacagctcttaaggcagggcgtctggagttgttccctccttccagtgggctcatcatct

SEQ ID NO: 15839 - DNA, 120 bp, synthetic construct
  source 1..120: mol_type = other DNA
gactacagatcttcccggtgagtgttacaatgtataaacgcagtatagaccaaagagtcagccatgacaaaatttattgcaaacagcaacaaaaacaaagcttcaacactgtgggaggag

SEQ ID NO: 15840 - DNA, 120 bp, synthetic construct; identical to SEQ ID NO: 5102
  source 1..120: mol_type = other DNA

SEQ ID NO: 15841 - DNA, 120 bp, synthetic construct
  source 1..120: mol_type = other DNA
tctccaaggccccaccagagtagctagatacagagtgtcgattggtgcattcacaaaccctgagctagacacagggtgctgattggtgtgtttacaaagcttgagctcgatacagagtgc

SEQ ID NO: 15842 - DNA, 120 bp, synthetic construct
  source 1..120: mol_type = other DNA
tgccagtcccgcgccctgcgcccgcactcctcagcccttgggtggtcgataggactggctgctgtggagcagggggcggctctagtctgggaggctggggccgcacaggagcccacgggg

SEQ ID NO: 15843 - DNA, 120 bp, synthetic construct
  source 1..120: mol_type = other DNA
tgcccggggccggtggggtcggccggccgctttgatcgcggggtccgccgagcccacgcccacccggaactcaccctggcccgcaagcaccgcgcgcagccccggttcatgtccgcgcat

SEQ ID NO: 15844 - DNA, 120 bp, synthetic construct; identical to SEQ ID NO: 5103
  source 1..120: mol_type = other DNA

SEQ ID NO: 15845 - DNA, 120 bp, synthetic construct
  source 1..120: mol_type = other DNA
gtcaggagttcgagataagcctggccaacgtggtgaaacctcctctctactaaaaatacaaaaattagccaggcgcggtggtgggtgcccgtaatcccggctactcaggaggctgagaca

SEQ ID NO: 15846 - DNA, 120 bp, synthetic construct
  source 1..120: mol_type = other DNA
aaaaaaaaaaaaaaaaaaaaaagatttacagttctagttatagcaagctttctgtaacactgattgggttaggcaaagatcgtgtcagtcattttgcaaatgtgttaatcttcaaaaata

SEQ ID NO: 15847 - DNA, 120 bp, synthetic construct
  source 1..120: mol_type = other DNA
tagtgtacagtttgctgatacaaagcacttcattgcagtgccagcagactgatctcaaatgaggtgtcccttgtaacacaagagcgaagattaattagtctgttcacatactggaacaaa

SEQ ID NO: 15848 - DNA, 120 bp, synthetic construct
  source 1..120: mol_type = other DNA
gcaagctccgcctcccgggttcacgccgttctcctgcctcagcctcccgcgtagctgggactacaggcgcctgccaccacgcccggctaaatttttttgtatttttagtagagacggtgt

SEQ ID NO: 15849 - DNA, 120 bp, synthetic construct; identical to SEQ ID NO: 5104
  source 1..120: mol_type = other DNA

SEQ ID NO: 15850 - DNA, 120 bp, synthetic construct
  source 1..120: mol_type = other DNA
ctaatatcactatcaggagaacaggaaggtggaaactgcacccatgatccaatcacctcccacccaggaccctgctccaattagacgtgagatttgggctgggacacagatcaaaccata

SEQ ID NO: 15851 - DNA, 120 bp, synthetic construct
  source 1..120: mol_type = other DNA
tatggagaagagcagggccaaactgtttattttttaaacagtttcttagtaaaatattttgtggttgctaaacccatgtactactgcataaactcagccatggacagcacattaaagaaa

SEQ ID NO: 15852 - DNA, 120 bp, synthetic construct
  source 1..120: mol_type = other DNA
tgctgcttcaaaacaaccaaaattgggaaaataactgaggtccagaaacaaattttctctctcctgactcctcctcttctcttaatatggtggatagattctttaatgctcaaaggcttt

SEQ ID NO: 15853 - DNA, 120 bp, synthetic construct; identical to SEQ ID NO: 5105
  source 1..120: mol_type = other DNA

SEQ ID NO: 15854 - DNA, 120 bp, synthetic construct
  source 1..120: mol_type = other DNA
agccgggcatggtggcagtcgcctgtaatcctagctactcgggaggctgagacaggagaattgcttaaaccctggaggcggaggttgcagagagccaagatcgtgccattgcactacagc

SEQ ID NO: 15855 - DNA, 120 bp, synthetic construct
  source 1..120: mol_type = other DNA
accctcagggcttactaaaacacagattattgagccctacttccacagtccctgactcataggtctggagtagtcctagagaatttgtatttttagtaagatcctaggtgatgctgatgc

SEQ ID NO: 15856 - DNA, 120 bp, synthetic construct
  source 1..120: mol_type = other DNA
gatacagatttactcacccaatctactgagtgggatttttcttcttagacgaggcggagggttggtttgtggataattccaagcccaaaacctaagactgggtatgccttacaagatcaa

SEQ ID NO: 15857 - DNA, 120 bp, synthetic construct; identical to SEQ ID NO: 5106
  source 1..120: mol_type = other DNA

SEQ ID NO: 15858 - DNA, 120 bp, synthetic construct
  source 1..120: mol_type = other DNA
aaactaattttggggggaaaaaaaaaattgatcgaatacagtatatttttaaaaactttttttggaacaacaagggtctatgtgtggggatgtagctcagtggtagagcgcatgctttgc

SEQ ID NO: 15859 - DNA, 120 bp, synthetic construct
  source 1..120: mol_type = other DNA
ctctcaggccctggagccttttctggaaagtgggaggggtaagaaaggaggttaggcagaaaaaaggatttgtttgtttccacctctgccctttgttttttcaacatctctttcatcttt

SEQ ID NO: 15860 - DNA, 120 bp, synthetic construct
  source 1..120: mol_type = other DNA
atatatgatatatatatgatataatatataccatatatatatatatatttttttttttttttttgagatggagtctagctccgtcacccaggctggagtgcagtggcgcaatctcggctc

SEQ ID NO: 15861 - DNA, 120 bp, synthetic construct
  source 1..120: mol_type = other DNA
aattttttgtatttttagtagagacagggtttcaccgtgttagccaggatggtctcgatctcctgacctcgtgatccacccgcctcggcctcccaaaatgctgggattacaggcgtgaaa

SEQ ID NO: 15862 - DNA, 120 bp, synthetic construct; identical to SEQ ID NO: 5107
  source 1..120: mol_type = other DNA

SEQ ID NO: 15863 - DNA, 120 bp, synthetic construct
  source 1..120: mol_type = other DNA
ccaggtgaccaaaattaataccactggtaatgggacaactgccattaaatatctcctggtaaaatgcactgaaaagggcacaatgtcagctctctggtattcctacccaaaatacataaa

SEQ ID NO: 15864 - DNA, 120 bp, synthetic construct
  source 1..120: mol_type = other DNA
aaataccaatgttataaaagaaaaagaaaggctacagaacatgacaattcaacatatgctcaaagattttcttttgctaaaaaggacattttagggacaattagcacagtctgaataagg

SEQ ID NO: 15865 - DNA, 120 bp, synthetic construct
  source 1..120: mol_type = other DNA
ggatcattatatctacaacttattcttctttatttttatttattattattatttttttgagacagagtgtcactctgtcgcccaggctggagtgcagtggcgctatcttggctcactgca

SEQ ID NO: 15866 - DNA, 120 bp, synthetic construct
  source 1..120: mol_type = other DNA
cgactaatttttgtatttttagtagagatggggttcctccatattgaccaggctggtctcaaacttctgacctcgtgatccacccaccttggcctcccaaagtgctgggattacaggcat

SEQ ID NO: 15867 - DNA, 120 bp, synthetic construct; identical to SEQ ID NO: 5108
  source 1..120: mol_type = other DNA

SEQ ID NO: 15868 - DNA, 120 bp, synthetic construct
  source 1..120: mol_type = other DNA
gtaaaaattaaaataaaaagaaaagaatgagatagaccttaggctagtcaagttgcttaccaaaggtccacatttggtagtgaaggatccaggacatgcatacagactttgtcactgaca

SEQ ID NO: 15869 - DNA, 120 bp, synthetic construct
  source 1..120: mol_type = other DNA
tttctctggtgtgacttgatccattgaatgagcattgctctcactagagggaggaaagcatctttggattgagttgagagccacttcacttttcaatctgtggtccagtacataaactta

SEQ ID NO: 15870 - DNA, 120 bp, synthetic construct
  source 1..120: mol_type = other DNA
acttgactccagcctctcttattctggcagctcggaactttatataagaaacagaatagaaagctaaactttcgagagaactcccagtaagcacaactaaattctcattgaaaccttagt

SEQ ID NO: 15871 - DNA, 120 bp, synthetic construct; identical to SEQ ID NO: 5109
  source 1..120: mol_type = other DNA

SEQ ID NO: 15872 - DNA, 120 bp, synthetic construct
  source 1..120: mol_type = other DNA
taatttttgaaatgtgtttatgttcaattacacatggattttggttgctcttaatataaaattaaaactccttggcatggcctctaaaattctgacacagtttcgtcctatccttctgca

SEQ ID NO: 15873 - DNA, 120 bp, synthetic construct
  source 1..120: mol_type = other DNA
cctatgctgtcctctttctttgcaactgaagactctcttcttatctccctgatgaaaccaaatcccatcggtgtgttctaaatcacagtcattctttttttgcagcacttatcatagcca

SEQ ID NO: 15874 - DNA, 120 bp, synthetic construct
  source 1..120: mol_type = other DNA
agaccaggcctgttcagtttacctttccacaccttggtgtgagtaggcatagaattaataattttgggaatgaatgaggggatgactagagttccgtaattatcacataaaacagatgaa

SEQ ID NO: 15875 - DNA, 120 bp, synthetic construct
  source 1..120: mol_type = other DNA
gatctcacatccagaaatataactttttgaaactggcatgctggctcagagtcataacactcctgttgggaaatctgcttctaataacccactttaaatcaaccaagggaagggagtgat

SEQ ID NO: 15876 - DNA, 120 bp, synthetic construct; identical to SEQ ID NO: 5110
  source 1..120: mol_type = other DNA

SEQ ID NO: 15877 - DNA, 120 bp, synthetic construct
  source 1..120: mol_type = other DNA
tataaataatattatttgttacttaagactttgacttaaataactttgacttaagtaactgagaaatattggatttaaatattagcttgattatcagctgtaagatttgggcaagtttat

SEQ ID NO: 15878 - DNA, 120 bp, synthetic construct
  source 1..120: mol_type = other DNA
atgtgagaaaatacacaaagtgcaacttagtaaatgttccataaattgcaaccatttttcatccatgtggactttaagcaaggttaacatggagtttgagaaaccagaagaatatatttt

SEQ ID NO: 15879 - DNA, 120 bp, synthetic construct
  source 1..120: mol_type = other DNA
gaaattccaatataactgtctgggagatcatcagaaactaatagtctttgaggatgcaggtgtaatgaagagagattggagagattaaagctctatgcagtggacttgatattgtgatta

SEQ ID NO: 15880 - DNA, 120 bp, synthetic construct
  source 1..120: mol_type = other DNA
gtttacgagacaggcgctttagccaactaagccacagagccagccgtgctgattctgtggcttcttttatgaccgaattgcacttaattaggtgacaaattctgttgccattaagagtta

SEQ ID NO: 15881 - DNA, 120 bp, synthetic construct; identical to SEQ ID NO: 5111
  source 1..120: mol_type = other DNA

SEQ ID NO: 15882 - DNA, 120 bp, synthetic construct
  source 1..120: mol_type = other DNA
caaaacagatcattcagaattttcatcacattaatggcttttctggccaattagaagatagcacacggatgcgctgaaaaacaaaaactgttaacgcgttcagactctccaaacagctgc

SEQ ID NO: 15883 - DNA, 120 bp, synthetic construct
  source 1..120: mol_type = other DNA
gctcctgagagggggcacagatggaaaccagaaggggaggcgtcaccggacagggtctttcctaattctgccttcctcattttggttcttcaagcttcaattagatgtttcctaatatct

SEQ ID NO: 15884 - DNA, 120 bp, synthetic construct
  source 1..120: mol_type = other DNA
aattgattgaaaaatccccaaattaagatccattctgaaactgttaacgattgtatcctagttttctgcctttgcttagtactgaggctggtgccaaagtgagggagtgagttcaccaaa

SEQ ID NO: 15885 - DNA, 120 bp, synthetic construct; identical to SEQ ID NO: 5112
  source 1..120: mol_type = other DNA

SEQ ID NO: 15886 - DNA, 120 bp, synthetic construct
  source 1..120: mol_type = other DNA
atcataaggaccaggaatcatagcctttctgaatttgaatcagctgaattgtttatgatcaggattgtactaacttcagttactaaaatataactgggatggcatcatgtccagggaaat

SEQ ID NO: 15887 - DNA, 120 bp, synthetic construct
  source 1..120: mol_type = other DNA
aaacagtatcacaataaaagaagtacaatgtgatagttgagtgcctagcaggtcccagtaatcaagttcaaagcataatactttgttttaggtatatttctgacattgcccagttcaact

SEQ ID NO: 15888 - DNA, 120 bp, synthetic construct
  source 1..120: mol_type = other DNA
acaaaataaagaatatggctgggcgcagtggctcatgcctataatcctagcactttgggaggctgaggcaggcagatcacctgaggtcaggagctggagaccagcctgtccaacatggtg

SEQ ID NO: 15889 - DNA, 120 bp, synthetic construct; identical to SEQ ID NO: 5113
  source 1..120: mol_type = other DNA

SEQ ID NO: 15890 - DNA, 120 bp, synthetic construct
  source 1..120: mol_type = other DNA
ctagcccagtgggatcctcctccaaatagagttgcactcaaaaagaaaaaaaaaatatgtgagtgaattgaaaggctaaataattcacatgagatctccagccaatttgatgcaaaagtg

SEQ ID NO: 15891 - DNA, 120 bp, synthetic construct
  source 1..120: mol_type = other DNA
cagtgacttcatattaccctcagttatgctttctttgttgagaatagggtgatttactatactactagttagtagctgttagtcccctgaaaattcatgtttaaatcctaccctcagtac

SEQ ID NO: 15892 - DNA, 120 bp, synthetic construct
  source 1..120: mol_type = other DNA
atttgtctgggtgcagtggtggctcacgcctgtaatcccaggactttgggaggcggaggtgggtggatcacctgaggtcaggagttcaagaccagcctggccaatatggtgaaaccccat

SEQ ID NO: 15893 - DNA, 120 bp, synthetic construct; identical to SEQ ID NO: 5114
  source 1..120: mol_type = other DNA

SEQ ID NO: 15894 - DNA, 120 bp, synthetic construct
  source 1..120: mol_type = other DNA
tgacacctcgatcttggacttcttgcctctagaactgtgagattataaagttctgttgtttgagctgcctagtttgtgttattttgttatagcagcccgaggaaactattgcagtaagca

SEQ ID NO: 15895 - DNA, 120 bp, synthetic construct
  source 1..120: mol_type = other DNA
atatgcctaattaaaaagctgaacaaaaatttgagttcaaagatagaagaaaataaaaggcacaaggaaaagtatgtgtcagcttagctatcccagtccatagtttctgagaacaaccag

SEQ ID NO: 15896 - DNA, 120 bp, synthetic construct
  source 1..120: mol_type = other DNA
aaagttaagctaagaataggaattagaaaggatggaaaccgaaggatagaatagggatggtagaggaagaggccatcgtaggaggtggtaaaagcaaagactgtgagctaggagaacaaa

SEQ ID NO: 15897 - DNA, 120 bp, synthetic construct; identical to SEQ ID NO: 5115
  source 1..120: mol_type = other DNA

SEQ ID NO: 15898 - DNA, 120 bp, synthetic construct
  source 1..120: mol_type = other DNA
ggcaattggcaggtatctatgctaaagtgttgggcattttgccctaataaaacttcgtcatgagattgaagtgccattcagtgtctagtgaataaggttgatataccatgtgtacaccat

SEQ ID NO: 15899 - DNA, 120 bp, synthetic construct
  source 1..120: mol_type = other DNA
ttttccagcctgaaaaggctatgtttgagtgtggatttcaccacaatgaggcaagagaaagtaaaagtacttactaacagttaagcacagtagaattgctagtcctatatcaaatggatt

SEQ ID NO: 15900 - DNA, 120 bp, synthetic construct
  source 1..120: mol_type = other DNA
cttgatgaacaaccagatataactgaaggaaagatgaagtacttgacatttaaaggtagaaacacagttacatgccacataaggacattgtagtcgacaatgagccacatagatgacagt

SEQ ID NO: 15901 - DNA, 120 bp, synthetic construct; identical to SEQ ID NO: 5116
  source 1..120: mol_type = other DNA

SEQ ID NO: 15902 - DNA, 120 bp, synthetic construct
  source 1..120: mol_type = other DNA
ctacttggtattgcctctgaagaacttgcagtggaacaagatttggaggtggaagatggtgatattgataatcctgaccctgtctaggcctaacctaatgtgtgtgtttgtgtcttcatt

SEQ ID NO: 15903 - DNA, 120 bp, synthetic construct
  source 1..120: mol_type = other DNA
tcttttggattttttgtctgtttgtttttgttttttgagacggagtcttgctctgtcacccaggctggagcgcagtggcgagatcttggctcactgcaacctccgcctcccgtgttcaag

SEQ ID NO: 15904 - DNA, 120 bp, synthetic construct
  source 1..120: mol_type = other DNA
ctggtctcaaactcttgacctccagtgatcagcatgcctcagcctcccaaagtgctgggattacaggcataaaccaccatgccaagccaggtgtttgtgttttaagctaagtgttattac

SEQ ID NO: 15905 - DNA, 120 bp, synthetic construct; identical to SEQ ID NO: 5117
  source 1..120: mol_type = other DNA

SEQ ID NO: 15906 - DNA, 120 bp, synthetic construct
  source 1..120: mol_type = other DNA
aggcgtgtgccaccacacccagctaatttttgtattttgtagagatgcggtttcaccatgttgcccaggttggtctacaactcctgggctcgagcgatcaacccgccttagcctcccaaa

SEQ ID NO: 15907 - DNA, 120 bp, synthetic construct
  source 1..120: mol_type = other DNA
ggtattcagttcagcaacatgctgtacagctttgtagcctaggagcaataggctataccatacagcctaggtgtatagtcggctatatcatctaggtttgcataagtacactctgtgacg

SEQ ID NO: 15908 - DNA, 120 bp, synthetic construct
  source 1..120: mol_type = other DNA
gcactttgggaggccgaagctggcggatcacaaggtcaggagattgagaccatcctggctaatacggtgaaaccctgtctctactaaaaatacaaaaaattagccgggcgtggtggtgtg

SEQ ID NO: 15909 - DNA, 120 bp, synthetic construct; identical to SEQ ID NO: 5118
  source 1..120: mol_type = other DNA

SEQ ID NO: 15910 - DNA, 120 bp, synthetic construct
  source 1..120: mol_type = other DNA
aaacacaaccaaacaaaaacccaccagtaattcaagtccagcatagtaagtgcatgaagtaaaaccatttaacccagaggcacagacagaagccttagtcaaagatggcagctctacctt

SEQ ID NO: 15911 - DNA, 120 bp, synthetic construct
  source 1..120: mol_type = other DNA
ctcttagggaaaataagagtcaaagcagtatctcggtatccactggccctttagtcatagacatatgagcagttcgcagacattttaaaagtcaagggccggtggaggtgatgtaactta

SEQ ID NO: 15912 - DNA, 120 bp, synthetic construct
  source 1..120: mol_type = other DNA
agctaggtattggggaaaaaagccgatcccttaagaattcagggccttctgggatagaagaaatagacccttaaactctgttcccccataaaatttgaggttatttgccagtggtctgag

SEQ ID NO: 15913 - DNA, 120 bp, synthetic construct; identical to SEQ ID NO: 5119
  source 1..120: mol_type = other DNA

SEQ ID NO: 15914 - DNA, 120 bp, synthetic construct
  source 1..120: mol_type = other DNA
cttttatttgctggtcctattccttagcattgaaaagctaaaaagactcctttttgttaccagaatgaaactgctctgagcctccatttagtggttgctacagtcttgtgctagagaaaa

SEQ ID NO: 15915 - DNA, 120 bp, synthetic construct
  source 1..120: mol_type = other DNA
ggctgtgatcaataacctcagtaatttgaaataaaatacatcatggtgggtagacagaaatttaacagtgattctctcttctttcttgtctgtattgggcaaacctgggaaagtttaaac

SEQ ID NO: 15916 - DNA, 120 bp, synthetic construct
  source 1..120: mol_type = other DNA
gaaaggcagactttgggtaccgccctaccctgcgacaatataaaggacctaagagaaagatggtagatgggaaggggaagacagttacatgttacgcactgaaaattcaaataaataaat

SEQ ID NO: 15917 - DNA, 120 bp, synthetic construct; identical to SEQ ID NO: 5120
  source 1..120: mol_type = other DNA

SEQ ID NO: 15918 - DNA, 120 bp, synthetic construct
  source 1..120: mol_type = other DNA
ttctcatttgtaaaaagattttcaggacaaaggaaagatccttccagaaaagatagaaaatgttttgccaacgactgtttttacttagggaaactactgaactgccccccgattccttac

SEQ ID NO: 15919 - DNA, 120 bp, synthetic construct
  source 1..120: mol_type = other DNA
tttgtgtattctgcgaaatacacaaaagggctagccaaagaaagtcctcacacacgtgcatggtataaaagcaccagctttaaaaagagaagtgtttttgtttttttgtttgagaagcat

SEQ ID NO: 15920 - DNA, 120 bp, synthetic construct
  source 1..120: mol_type = other DNA
gtcactgaaggaaaaacgtcagtgtcaaaatgctactatttcacctctttgtgtacgatttctgagagaactgccacgtttggagatgctaaatttacccaatgccttcgtagcctccgg

SEQ ID NO: 15921 - DNA, 120 bp, synthetic construct; identical to SEQ ID NO: 5121
  source 1..120: mol_type = other DNA

SEQ ID NO: 15922 - DNA, 120 bp, synthetic construct
  source 1..120: mol_type = other DNA
aatggcgcgatctcggctcactgcaacctccgcctcgcagattcaagcgattcttctgcctcagcctcccaagtagctgggattacaggcgcctgccaccacgcctggctaatttatgta

SEQ ID NO: 15923 - DNA, 120 bp, synthetic construct
  source 1..120: mol_type = other DNA
ttttccgattctacagaaataggctgtgactgtatctgtaaaagaaagacggttccggagcataaatacaaaaacactggagatgctggggatcgaacccgggacctcatgcatgctaag

SEQ ID NO: 15924 - DNA, 120 bp, synthetic construct
  source 1..120: mol_type = other DNA
ttcatgaacgaacgttaaaattttcatttcccctttttgtagccctctatcaccaagaaattttgattaaccagcatcttgcagacatttggtaaggattaagaacagactagaggagga

SEQ ID NO: 15925 - DNA, 120 bp, synthetic construct; identical to SEQ ID NO: 5122
  source 1..120: mol_type = other DNA

SEQ ID NO: 15926 - DNA, 120 bp, synthetic construct
  source 1..120: mol_type = other DNA
tagcaactgggacggttaaaggctaaagatgttggattgcctcccgcggccccctgatccgcattttatccagagaatacaaataaaatccagagagtaggaatcctcagatcctactct

SEQ ID NO: 15927 - DNA, 120 bp, synthetic construct
  source 1..120: mol_type = other DNA
cgcattattttctgtagagggaatggttctctctacagaaaatgtagagatggttcagactcctgtctcaccaagggaacagagaaggctttatacctgcgtagagagtgcagaagtcct

SEQ ID NO: 15928 - DNA, 120 bp, synthetic construct
  source 1..120: mol_type = other DNA
ggaggaggctctaaaaggtagcttggcaagatgacaccagcaattctcaccctaccttgcacttacagcatccagaactaaatgcttttccagagccgccagaactaaatgcttgtccag

SEQ ID NO: 15929 - DNA, 120 bp, synthetic construct
  source 1..120: mol_type = other DNA
ggaagtgactaaaaggtggagtttgttaaaggaatggacatgtgtcaatgaatattataaaattcattaatctcatgcaacatattagaggattaaaagagggaaaaacatgtaataatc

SEQ ID NO: 15930 - DNA, 120 bp, synthetic construct; identical to SEQ ID NO: 5123
  source 1..120: mol_type = other DNA

SEQ ID NO: 15931 - DNA, 120 bp, synthetic construct
  source 1..120: mol_type = other DNA
acctgaatcaaccaaaaatttctaaaatggcaaaatgtgaaacaatgaacattaggcaatgaaggacagtgatctctgagaaatgcgaaacaagatgagcacaacgaatgcctcagctta

SEQ ID NO: 15932 - DNA, 120 bp, synthetic construct
  source 1..120: mol_type = other DNA
cttggtcagagttgcttggtcaaacatcagtctagaagtttctgtgaaggtgttagatgtgattaagatttaaatcagtagactttgcctaggttgggcactatggctcaggcctgtaat

SEQ ID NO: 15933 - DNA, 120 bp, synthetic construct
  source 1..120: mol_type = other DNA
tgtaattccagctactcaggaggctgaggcataaaaatcgcttgaacccgggaggcggaggttgcagctagctgagattgcatctgttccagcctgggcaacagagagagactttgtttc

SEQ ID NO: 15934 - DNA, 120 bp, synthetic construct; identical to SEQ ID NO: 5124
  source 1..120: mol_type = other DNA

SEQ ID NO: 15935 - DNA, 120 bp, synthetic construct
  source 1..120: mol_type = other DNA
cctatctcagagagcaaaaagcaggaccttagagtgcactgagaatactgatgatgtgagttgtttcaagaatcaagaagggaatttctggtggatatattttgaggtgtattcattcca

SEQ ID NO: 15936 - DNA, 120 bp, synthetic construct
  source 1..120: mol_type = other DNA
catgtctggaaaaccgtcttagctactgaaaagaatgttcccctgaactggaagggcaagggagagaaggacgccactaggagtagattgaaaaaatatctgaacaataaggagtcaatc

SEQ ID NO: 15937 - DNA, 120 bp, synthetic construct
  source 1..120: mol_type = other DNA
tgataaatgattctagaggctagacactgtagaactttgtaaaggcaaataagagttggaattttatgctaaaggtagtgaaatggagggtgctactttggttgtttacctaacattcag

SEQ ID NO: 15938 - DNA, 120 bp, synthetic construct; identical to SEQ ID NO: 5125
  source 1..120: mol_type = other DNA

SEQ ID NO: 15939 - DNA, 120 bp, synthetic construct
  source 1..120: mol_type = other DNA
agaaaacattatacagtcaagttcttgtacctttcaaaagaattagtttgaatgaaacagtaatgaaggcacaggtatgtagtgttggatgtttaaagccaagagccatgcttgccttgc

SEQ ID NO: 15940 - DNA, 120 bp, synthetic construct
  source 1..120: mol_type = other DNA
gttcaagtgattctcctgcctcagcctcccgagtagctgggtgccatcatacccggcgaatttttgtagagacggggtttcacgatgttgtccaggctggtctcgaactcctgacctcgt

SEQ ID NO: 15941 - DNA, 120 bp, synthetic construct
  source 1..120: mol_type = other DNA
aaagtagttacattcctggattatttgctgtatgtgaaaagtgtggccgggcgcggtggctcacgtctgtaagcccagcactttgggaagccgaggcaggtggatcacctgatgtcagga

SEQ ID NO: 15942 - DNA, 120 bp, synthetic construct; identical to SEQ ID NO: 5126
  source 1..120: mol_type = other DNA

SEQ ID NO: 15943 - DNA, 120 bp, synthetic construct
  source 1..120: mol_type = other DNA
tttgttatgaggaattgctgtgtttatttgtaagatactcttacccctttccattagatgtctgtagcagccactagtctctgtgaaaatcaacccctctaaaaatgtccaagtggaact

SEQ ID NO: 15944 - DNA, 120 bp, synthetic construct
  source 1..120: mol_type = other DNA
ttctgggacaagtatttctcttgttagaagacaaatgtgctaaggaagaatgttctttgcttttgcctttactttcttgcttcagaaacactactttgaagacaaaacacagtgtttgga

SEQ ID NO: 15945 - DNA, 120 bp, synthetic construct
  source 1..120: mol_type = other DNA
acgacttcaagatgagtcttggagctactccattaccaagtagggtgtcagaaagcaggaggaggaacgtactatcctttgttagtttctttacttataagaaactctgaggggccgggc

SEQ ID NO: 15946 - DNA, 120 bp, synthetic construct
  source 1..120: mol_type = other DNA
aaaaattagccaggtgtggtggtctgcgcctgtatcccagctactcaggaggctgagacaggagaattgcttcaacttgggaggcggaggttgcagtgagcagagatcatgccactgcac

SEQ ID NO: 15947 - DNA, 120 bp, synthetic construct; identical to SEQ ID NO: 5127
  source 1..120: mol_type = other DNA

SEQ ID NO: 15948 - DNA, 120 bp, synthetic construct
  source 1..120: mol_type = other DNA
ccttatatgtaacttttaagtgcctcgctatttcattctggtcatgttttattaaaccagaggcctagtaagcaggggttcctctaacagaaagattcgagaagtctgggtccttgatga

SEQ ID NO: 15949 - DNA, 120 bp, synthetic construct
  source 1..120: mol_type = other DNA
tgttatgtgggaccaataaaccattctcatttaaacgactgatggtcaggttttccgttaatggaagcaaaacatatgctagctgaagcagaatttgaggtaggaaatgatacaatgtaa

SEQ ID NO: 15950 - DNA, 120 bp, synthetic construct
  source 1..120: mol_type = other DNA
gcctcagcctcccgagtaggcccgcgccaccatgcctggctaatttttttttttttttttttttttttgagactgagtttcgttcttgttgcccagcctggagtgcaatggcggaatctc

SEQ ID NO: 15951 - DNA, 120 bp, synthetic construct
  source 1..120: mol_type = other DNA
cggggtttcaccatgttggccaggctcaaactcctgacctcaggtgatccacccgccttggcctcccaaagtgctgggattacaggcgtgagccaccacacccagtctaatttttgtatt

SEQ ID NO: 15952 - DNA, 120 bp, synthetic construct; identical to SEQ ID NO: 5128
  source 1..120: mol_type = other DNA

SEQ ID NO: 15953 - DNA, 120 bp, synthetic construct
  source 1..120: mol_type = other DNA
agtgaatgtttttggcttaggcagtttaaagtggaagagaggtgtgggtggattccagacacacttttgacacaaaatagatatggtgttctgttggacagcagagaaaagataacagcc

SEQ ID NO: 15954 - DNA, 120 bp, synthetic construct
  source 1..120: mol_type = other DNA
atgtactctgggttctcagaaaacatgacccatgacaaacatctgctttgcaaccctagaccagagtagttcttgtaaccagggccaagataaactctagcaagaaatcaggagatcgag

SEQ ID NO: 15955 - DNA, 120 bp, synthetic construct
  source 1..120: mol_type = other DNA
gaacctgggaagcggagcttgcagtgagccgagattgcgccactgcactccagcctgggagacagagcgagactccctttcaaaaaaataaaataaaataaaaagaaatccccagtcgac

SEQ ID NO: 15956 - DNA, 120 bp, synthetic construct; identical to SEQ ID NO: 5129
  source 1..120: mol_type = other DNA

SEQ ID NO: 15957 - DNA, 120 bp, synthetic construct
  source 1..120: mol_type = other DNA
cctttacctccaaatttcttcccttcactctttcttatcttggtaaataagcactcctctcaacttagttgctaaactcttaacctgtattaactgaagactatgagatctgcagaggcc

SEQ ID NO: 15958 - DNA, 120 bp, synthetic construct
  source 1..120: mol_type = other DNA
cgcctcccggattcaagcgattctcctgcctcagcctcccgagtagccgggattacaggcttgtgccaccacgccctgctaattttttgtatttttagtggagacggggtttcaccgtgt

SEQ ID NO: 15959 - DNA, 120 bp, synthetic construct
  source 1..120: mol_type = other DNA
caccgctccaggcctgcatcattagttttaaccaggattgaggtccttaccggaaaaggccatcacaaggacagaagggaaattgacttatgaatatgtacaataagttagaagaatttc

SEQ ID NO: 15960 - DNA, 120 bp, synthetic construct; identical to SEQ ID NO: 5130
  source 1..120: mol_type = other DNA

SEQ ID NO: 15961 - DNA, 120 bp, synthetic construct
  source 1..120: mol_type = other DNA
tacgtgaaatcaatgcaatatattgtaatggaaagacaaggctgtttcaaagcaagaatcatttgtgtcaaatgataaaatgagtttagtaaagtgaaggctaataagttcattagattt

SEQ ID NO: 15962 - DNA, 120 bp, synthetic construct
  source 1..120: mol_type = other DNA
gagaaatgagagtaagatgaggaatggagacacagagtaaaaatatccatttcaagaaatgtggctggaattggaaggaaagagaaattgtgctggctgcagaagaacgtggagctaggg

SEQ ID NO: 15963 - DNA, 120 bp, synthetic construct
  source 1..120: mol_type = other DNA
acaacaggaataattaacagcacaaattccctgtgaatgcaggacaagatggcctgaggacctttgaagaactagctgtggacactttaagctctccccaataaaagtatagcatagaga

SEQ ID NO: 15964 - DNA, 120 bp, synthetic construct; identical to SEQ ID NO: 5131
  source 1..120: mol_type = other DNA

SEQ ID NO: 15965 - DNA, 120 bp, synthetic construct
  source 1..120: mol_type = other DNA
gaatctcaggggttaccccagacatatggaattttcgtcttaaaaaaattcacaggtgatgctatataaacattaaagcttgtgtagcactgatacaagggatatttattccattttagc

SEQ ID NO: 15966 - DNA, 120 bp, synthetic construct
  source 1..120: mol_type = other DNA
agctgaaggtacagaaagtaggattagatatcttgaggaagtcaagccttcttgaagtagctactatgaatcctattagggaaatgcaagtgagtgggatagcattgaagggaacaagta

SEQ ID NO: 15967 - DNA, 120 bp, synthetic construct
  source 1..120: mol_type = other DNA
gacccaaggtaacaaaggccgtaattatttcactaatcttgctctttctctcctctttgaagatgataccaagttgaatccttatgcaggaggagatggtgagtacagaactgccccttg

SEQ ID NO: 15968 - DNA, 120 bp, synthetic construct; identical to SEQ ID NO: 5132
  source 1..120: mol_type = other DNA

SEQ ID NO: 15969 - DNA, 120 bp, synthetic construct
  source 1..120: mol_type = other DNA
aaatgtggctgaagggaaagaacaaggaatctaagctggaaatggaagaaagaaaaggtaggaacagaaagatccatggagagaaaaaaatgttaaggaaatagaagttgcatttcagta

SEQ ID NO: 15970 - DNA, 120 bp, synthetic construct
  source 1..120: mol_type = other DNA
atgccctgccaccctccacaaagatgaccatatcctaattcctaaacttgtgaacatgataccttacatgacaaaggggacgttgcagtttgattaatttaagggccttgagatggagca

SEQ ID NO: 15971 - DNA, 120 bp, synthetic construct
  source 1..120: mol_type = other DNA
gaggaaggagccacaatccaagcaatccaggcaaacgctaaagctagaaaagacaaaggaactgattattccctagagtctccacaagaaacatagccctgttgacacccttatattagc

SEQ ID NO: 15972 - DNA, 120 bp, synthetic construct; identical to SEQ ID NO: 5133
  source 1..120: mol_type = other DNA

SEQ ID NO: 15973 - DNA, 120 bp, synthetic construct
  source 1..120: mol_type = other DNA
ttctgcctgggcctccctgagtagctgggattacaggtgcctgccaccacgactggctaattttgtatttttagtagagacagggtttcaccatgttggccaggctggtctagaacttct

SEQ ID NO: 15974 - DNA, 120 bp, synthetic construct
  source 1..120: mol_type = other DNA
ctaggctggagtgcaatggtgcgatctcggctcaatgcaacctctgcctcccaggttcaagcgattctcctgcctcagcctcccaagtagctgggattacaggcatgcaccaccatgcct

SEQ ID NO: 15975 - DNA, 120 bp, synthetic construct
  source 1..120: mol_type = other DNA
gagccaccacacccagccaattgattcttatatatttaattttcattgagttcttaccatagtcagttattaataagtagaaactattaaatgtattattttatttaaaattcacaaagt

SEQ ID NO: 15976 - DNA, 120 bp, synthetic construct; identical to SEQ ID NO: 5134
  source 1..120: mol_type = other DNA

SEQ ID NO: 15977 - DNA, 120 bp, synthetic construct
  source 1..120: mol_type = other DNA
tgagaagctggggtgctggatgatctgtccacatggcccctgaagtcaccaagggtgagtggaagaaaagaggcaccaggtcttcattaaattaggaagagttttcttgctgagaaatgt

SEQ ID NO: 15978 - DNA, 120 bp, synthetic construct
  source 1..120: mol_type = other DNA
tctcctgcctcagcctccagagtagctgggattacaggcatgcaccgccatgcccagctaattttgtattttcagtagagataggatttctccatgttggtgaggctggtcttgaactcc

SEQ ID NO: 15979 - DNA, 120 bp, synthetic construct
  source 1..120: mol_type = other DNA
ttaggggagagtggttgttctaattttttttttagaaatgaggtctacctatattgcccaggctagtcttaaactcctgactccaagcaatcctcctgccttggcctcccaaagtgttgg

SEQ ID NO: 15980 - DNA, 120 bp, synthetic construct; identical to SEQ ID NO: 5135
  source 1..120: mol_type = other DNA

SEQ ID NO: 15981 - DNA, 120 bp, synthetic construct
  source 1..120: mol_type = other DNA
ttttaaaatgcagatagaagcctgggcacggtggctcacgcctgtaatcccagcactttgggaggtcgaggcagacggatcacaaagtcaggaggttgagaccagccttgccaatatggt

SEQ ID NO: 15982 - DNA, 120 bp, synthetic construct
  source 1..120: mol_type = other DNA
tgcagtgagccagaggttgcactctagcctggcaacagagtgagactcagtctcaaaaaataataaaataaaatgaaatgcaatgatttggaaattggaatgtggcctcagaaggtacta

SEQ ID NO: 15983 - DNA, 120 bp, synthetic construct
  source 1..120: mol_type = other DNA
ttgttaacatggaaatgtgagatacaaagagtggagttgaaatatgcagagagacaaattgcaagtctacattattgaaacagaagaacacaggggtatggagatgaaggtataggtgga

SEQ ID NO: 15984 - DNA, 120 bp, synthetic construct; identical to SEQ ID NO: 5136
  source 1..120: mol_type = other DNA

SEQ ID NO: 15985 - DNA, 120 bp, synthetic construct
  source 1..120: mol_type = other DNA
tctgacatttacttctcagtgaaagtccccaccaaaattcttctggactcttccagtaatatctgaactagtcttattttcatcttatttcaccaccattcccaatccattttccacatt

SEQ ID NO: 15986 - DNA, 120 bp, synthetic construct
  source 1..120: mol_type = other DNA
ctggctaatttttttgtaatgttttcttattattgtgatccttgcttttataatgtttcattatttcctcttataatgtttcgttgtaatatttcactattattgtgatcctctcttttt

SEQ ID NO: 15987 - DNA, 120 bp, synthetic construct
  source 1..120: mol_type = other DNA
caaatgaatcaaagcatgaacataagtgcaatgcagaaataacataaacctaaaaattcatttacttacagttgcccagaatgcaacctcagttgggttctcagtgctgtcaggaaatct

SEQ ID NO: 15988 - DNA, 120 bp, synthetic construct; identical to SEQ ID NO: 5137
  source 1..120: mol_type = other DNA

SEQ ID NO: 15989 - DNA, 120 bp, synthetic construct
  source 1..120: mol_type = other DNA
ttaaggtgatagagtggaccttaagttgaaagcaactcccacctgaatactaaaactaaaaaaagcatgctactttcctcttttccatcctattccactttccccaccccgcaaaaaaaa

SEQ ID NO: 15990 - DNA, 120 bp, synthetic construct
  source 1..120: mol_type = other DNA
cctggatgcattcataggaacagtacatttctgaattgtccctctgactttgtattactcaccacataataaaacaccttggaagtttccaggaaacaggaatatggagtgtggctagtc

SEQ ID NO: 15991 - DNA, 120 bp, synthetic construct
  source 1..120: mol_type = other DNA
actaaaatagttttttctttgtttttcttatattctgttccagaggctgaattaaacaaaatctacgtgatcgccttggagatgccggggatcgaacccggggcctcatacatgcgaagc

SEQ ID NO: 15992 - DNA, 120 bp, synthetic construct; identical to SEQ ID NO: 5138
  source 1..120: mol_type = other DNA

SEQ ID NO: 15993 - DNA, 120 bp, synthetic construct
  source 1..120: mol_type = other DNA
ctgcatctgagtacgttgaatgatgaaatgtaccttgggagctgtcgctcctctcgctctcgaccccgctcgaagaaggaactgtccaaatagatgaaaacgtgaaaatcctgcctgacc

SEQ ID NO: 15994 - DNA, 120 bp, synthetic construct
  source 1..120: mol_type = other DNA
ttcaccaagaattctagtttaagaaggtgcgtttgcttgtttccctcttttcttgatccacccgtcagctctttccccgcacctcgttctgagtctccgcaaggctgctgcgcggaagaa

SEQ ID NO: 15995 - DNA, 120 bp, synthetic construct
  source 1..120: mol_type = other DNA
cagcagccgcgggcacaaaggtttttgtctcttgcttcagatgttgtacagtgaagaacagcgactcttcaaaccgaaaatgacaacatcaaagacatgatccatggaagaagtaattga

SEQ ID NO: 15996 - DNA, 120 bp, synthetic construct; identical to SEQ ID NO: 5139
  source 1..120: mol_type = other DNA

SEQ ID NO: 15997 - DNA, 120 bp, synthetic construct
  source 1..120: mol_type = other DNA
tgaggatgtggagcaacaggaactctcattcattgctggtgggaatgcaaaatgatacaactgctttggaagacaatttggcagtttctcacaaaactaatcatactcttatcatacgac

SEQ ID NO: 15998 - DNA, 120 bp, synthetic construct
  source 1..120: mol_type = other DNA
gacgtcttcagtaggtgaatgcataaacaaactgtggtatattcaggcaatgggacattattcagtgctaaaaagaaatgaattgtcacaccattaaaagacatggaggaaacataacat

SEQ ID NO: 15999 - DNA, 120 bp, synthetic construct
  source 1..120: mol_type = other DNA
gacagtaaaaacagtagtggtttccaggggttaggggtaaaggtgaataggcagagcacgggatttttagggcagtgaaaatgctctgtataatactatagtggtggatatatgtcatca

SEQ ID NO: 16000 - DNA, 120 bp, synthetic construct; identical to SEQ ID NO: 5140
  source 1..120: mol_type = other DNA

SEQ ID NO: 16001 - DNA, 120 bp, synthetic construct
  source 1..120: mol_type = other DNA
ttagaggaaaaggcaaaaggaaactgtttcccattgtgtgctagtaagaacgattaggggccgagcgcggtggctcacgcctgtattttgcggtgctcccagcattttgggaggccgagg

SEQ ID NO: 16002 - DNA, 120 bp, synthetic construct
  source 1..120: mol_type = other DNA
cgggaggctgaggcaggagaatggcgtgaactcgggaggcggagcttgcagtgagccgagatcgtgccactgcactgcagcctgggagacggagcaagactccatctcaaaaaaaaaaaa

SEQ ID NO: 16003 - DNA, 120 bp, synthetic construct
  source 1..120: mol_type = other DNA
aaaatgctgccataaaacagggtcataatccaggtccaaatctcagctctggctacttgggagataactgagatattttaatgtcttttgctccctctgctttcacagcagcttccttga

SEQ ID NO: 16004 - DNA, 120 bp, synthetic construct; identical to SEQ ID NO: 5141
  source 1..120: mol_type = other DNA

SEQ ID NO: 16005 - DNA, 120 bp, synthetic construct
  source 1..120: mol_type = other DNA
aaaacgaaacaaaacaaaaaaatggtgaggatgcagagactatggaaaactacatgaccactgacatggaaacttcatgttgcggggtgctcccatgagggaaggatcttcttattactg

SEQ ID NO: 16006 - DNA, 120 bp, synthetic construct
  source 1..120: mol_type = other DNA
ttttaatactaatcttttttttaaaagagcagtttaaggttcacagcaaaacagaggaagtacagagttcccctaagccccctgacgccccaaccgacctccttttatactttatgcttt

SEQ ID NO: 16007 - DNA, 120 bp, synthetic construct
  source 1..120: mol_type = other DNA
agaatgagttggaaattattgtctctgcttctattttcactaaataatgaaagagttggtaaagtttcttcctaaaatatttgttagagttcaccaatgaacctacctgatcctaatcct

SEQ ID NO: 16008 - DNA, 120 bp, synthetic construct; identical to SEQ ID NO: 5142
  source 1..120: mol_type = other DNA

SEQ ID NO: 16009 - DNA, 120 bp, synthetic construct
  source 1..120: mol_type = other DNA
acaaaaattagccaggcatggaagcgcgtgcctgtggtctcagctactaggggatttgaggaaggagaatcgcttgaacccgggaggcggaggttgcagtgacccgagatggtgccactg

SEQ ID NO: 16010 - DNA, 120 bp, synthetic construct
  source 1..120: mol_type = other DNA
atagtcagtgttgttttaatgtgtaatactgttcttatgagtgattgattagaatgaggcaaatgagttgtataacttcagagactggctcacaaaagacagggtaatttattatgtagc

SEQ ID NO: 16011 - DNA, 120 bp, synthetic construct
  source 1..120: mol_type = other DNA
cataaatgtaattttgcacttttttaacaaaaaaattgtaatttttttctatattgattctgctttttttcctttattattgctgtttgtcctgactttgggtggacaaattattctttt

SEQ ID NO: 16012 - DNA, 120 bp, synthetic construct; identical to SEQ ID NO: 5143
  source 1..120: mol_type = other DNA

SEQ ID NO: 16013 - DNA, 120 bp, synthetic construct
  source 1..120: mol_type = other DNA
ctcccacctatgagtgagaatgttcgaaatttgtccttctgtgcctggcttatttcacttaacataatgtactccagttccatccatgttattgcaaatgacaggatttcattctttttt

SEQ ID NO: 16014 - DNA, 120 bp, synthetic construct
  source 1..120: mol_type = other DNA
gctgcaataaacatggaagtacagatatctttttgatatgctgatttcctttcttttggatatatacctagcagtgagattgccagatcatgtggtagttctgtttttagtttttcaaag

SEQ ID NO: 16015 - DNA, 120 bp, synthetic construct
  source 1..120: mol_type = other DNA
atcttcaccatcattcgatattgccagtcttttggataaaagccattttaattggggtgagatgatatctcattatagttttgatttgcatttctctgatgattaatgatgttgagcatt

SEQ ID NO: 16016 - DNA, 120 bp, synthetic construct; identical to SEQ ID NO: 5144
  source 1..120: mol_type = other DNA

SEQ ID NO: 16017 - DNA, 120 bp, synthetic construct
  source 1..120: mol_type = other DNA
taagataaaatctgatttcaatcttgagctcagtatttactcataacttgttagaattaaattagataatccatggaaaatgtatggatgaatgacacctcatgacgggtggttatgtgt

SEQ ID NO: 16018 - DNA, 120 bp, synthetic construct
  source 1..120: mol_type = other DNA
catattatctatatgaatgtgtgtatgtatataggagcatttggaaatatcaccacatttattttctctgattggtaaataagtaggagacaggttctgaaatattttcctaaacaagcc

SEQ ID NO: 16019 - DNA, 120 bp, synthetic construct
  source 1..120: mol_type = other DNA
gcctcaggtttttccaccccaactctcatcaccatgaccagtgatttcgggaagagtgaacttgaagaaccatattgccttctcttctttcccagttcattacttatagataatcgtttt

SEQ ID NO: 16020 - DNA, 120 bp, synthetic construct
  source 1..120: mol_type = other DNA
cactgtgtaaaagaagtgagagcaactctggcacaggacaaccatatgtcttaactgaaaagccatcatgttccttagatttggtcccttcatgattgctctgtttcttgtggtcctttt

SEQ ID NO: 16021 - DNA, 120 bp, synthetic construct; identical to SEQ ID NO: 5145
  source 1..120: mol_type = other DNA

SEQ ID NO: 16022 - DNA, 120 bp, synthetic construct
  source 1..120: mol_type = other DNA
gacccatgatttgcagtcttataatctgggtatgtaatctaatgccatttaaaagttggtgagatagggtaaattttggagcatatttcattattctttttatatctgtaaaacaggacc

SEQ ID NO: 16023 - DNA, 120 bp, synthetic construct
  source 1..120: mol_type = other DNA
ctactgaaaatacaaaaattagctgggcatgggggtgcacacctgtagtcccagctactcaggaggctgagtcaggagaatcacttgaacccaagagaaggaggtttcagtgagccaaga

SEQ ID NO: 16024 - DNA, 120 bp, synthetic construct
  source 1..120: mol_type = other DNA
tggtgtgtacaatgatatttcaacacactcaaattatattctaacatgctttctatgtgactccttccaaaacagcacccaatgggcttctattttctcttatgacacagatgggttaga

SEQ ID NO: 16025 - DNA, 120 bp, synthetic construct; identical to SEQ ID NO: 5146
  source 1..120: mol_type = other DNA

SEQ ID NO: 16026 - DNA, 120 bp, synthetic construct
  source 1..120: mol_type = other DNA
ctgctccatctccccaccctacacatagatacctgtacacctgtgggtgtgacaccaccttagttgtctcccttggtgagacctgtcctttctctattttctattcttacattctagcag

SEQ ID NO: 16027 - DNA, 120 bp, synthetic construct
  source 1..120: mol_type = other DNA
gtctctgaacgtgaagagtcttgtaagggctgcggagggcaaaatgcagatagcaataacctcacctgaatttctaatatttcctcggatttctaaataggttccaagaacattatgctg

SEQ ID NO: 16028 - DNA, 120 bp, synthetic construct
  source 1..120: mol_type = other DNA
caaatcacaattaaccctttcaattctcactctacctactgttcctctcctctgtggctacataattaataagaatcccagtcagggattcctgcagagttgcagtctcagagttgttag

SEQ ID NO: 16029 - DNA, 120 bp, synthetic construct
  source 1..120: mol_type = other DNA
cctccccccgttctggccccatccaatgcccacaaagcaaaaataaaacctaacaacaaacaggagagcattcgtttcctgtagtgtggtaaaagataccactacctacaccaggacaaa

SEQ ID NO: 16030 - DNA, 120 bp, synthetic construct; identical to SEQ ID NO: 5147
  source 1..120: mol_type = other DNA

SEQ ID NO: 16031 - DNA, 120 bp, synthetic construct
  source 1..120: mol_type = other DNA
atgttctatttactgagataggagaaaacagccttaaggctggaggtgagacatgctagcggcaatattgctctttaatgcactgaggtgtttgtgtacctgcatatcaaagcacagcac

SEQ ID NO: 16032 - DNA, 120 bp, synthetic construct
  source 1..120: mol_type = other DNA
atcaataaatactgagggaactcagagaccagtgcctgccctcctctctgagatggtagagataatgatcaataaatactgagggaactcagagaccagcacctgcgcgggtcctcccta

SEQ ID NO: 16033 - DNA, 120 bp, synthetic construct
  source 1..120: mol_type = other DNA
gccaccccttaatctggtgcccaacgtgggtgcttttctctagggtgaaggtacactagagcgtagtcattgaggacaagtcgatgagagattcccgagtacgtctacagtcagccttgc

SEQ ID NO: 16034 - DNA, 120 bp, synthetic construct; identical to SEQ ID NO: 5148
  source 1..120: mol_type = other DNA

SEQ ID NO: 16035 - DNA, 120 bp, synthetic construct
  source 1..120: mol_type = other DNA
atcgattgtgaagaagaggctgggatagaatctcagaaaggaacggaaagttcacattgtaaatatgtagcagagctggtaatgactcggtcaatgcaaaatgtagactataatcaatta

SEQ ID NO: 16036 - DNA, 120 bp, synthetic construct
  source 1..120: mol_type = other DNA
ttgcaacctcaaatgcaggttagacaagtacaaaccccagaagaatatcaaatagaaaaagataaagtctctgccatggcaatgccaatccagatacagtatccacaatatcagcaggta

SEQ ID NO: 16037 - DNA, 120 bp, synthetic construct
  source 1..120: mol_type = other DNA
gctctagatcctcagccgtccactgtgagacttaatcctacagcactacctagtggacagcatagtgcattacataaaattattgataaggcaagaaaacaaggagatactgaggcgtga

SEQ ID NO: 16038 - DNA, 120 bp, synthetic construct; identical to SEQ ID NO: 5149
  source 1..120: mol_type = other DNA

SEQ ID NO: 16039 - DNA, 120 bp, synthetic construct
  source 1..120: mol_type = other DNA
agttaacatagatgcagatcaactattaggaacaggtcaaaattggagcactaccaatcaacaagcaataatgcaaaatgaggccattaagcaagttagagctatatgccttagagcctg

SEQ ID NO: 16040 - DNA, 120 bp, synthetic construct
  source 1..120: mol_type = other DNA
tgtaaggtcatagtggagttgatggcataggaaaacgccaatcctgagtgtcaatcagccattaagccattaaaaggaaaggtcccagcaggatcagatgtaatctcatagtatgtaaaa

SEQ ID NO: 16041 - DNA, 120 bp, synthetic construct
  source 1..120: mol_type = other DNA
attgttcatctaaaaaaattgcccagcctcaaacaaaatattcaagctactacaacaacagatagagccacctgacttatgtccaagatgtaaaaaaggaaaacattgggataatccatg

SEQ ID NO: 16042 - DNA, 120 bp, synthetic construct; identical to SEQ ID NO: 5150
  source 1..120: mol_type = other DNA

SEQ ID NO: 16043 - DNA, 120 bp, synthetic construct
  source 1..120: mol_type = other DNA
actggtgtggttgagtcaaactatgaaggtgaaattcaattggctattagctcctcaattccttggagtggcaatccaggagacaggattgttaaattattactcctgccttatattaaa

SEQ ID NO: 16044 - DNA, 120 bp, synthetic construct
  source 1..120: mol_type = other DNA
cactgatctggcaggaaaggctgcatattgggcaagtcaagtctcagagagcagacctgtgtgtaaggccattattcaaaaaaaacagtttgaagggttagtagacactggagcagatgt

SEQ ID NO: 16045 - DNA, 120 bp, synthetic construct
  source 1..120: mol_type = other DNA
cctcagaagtgtatcaaattactatgattttgcattgttcagggccgaataatcaagaaagtactgttcagccaatgattacttcatttcctgttaatccgtggggtcatttattacaac

SEQ ID NO: 16046 - DNA, 120 bp, synthetic construct
  source 1..120: mol_type = other DNA
cccaattcagagtgacaaaaatcgagaaagaaaaggaatagggtatcctttttaggggctaccactgtagagcctcctaaacgcattccattaacttggaaaacagaaaaaccggtatgg

SEQ ID NO: 16047 - DNA, 120 bp, synthetic construct; identical to SEQ ID NO: 5151
  source 1..120: mol_type = other DNA

SEQ ID NO: 16048 - DNA, 120 bp, synthetic construct
  source 1..120: mol_type = other DNA
ccaccaggtttcagtggaaagtgttacctcagggaatgcttaatagtccaacaatttgtcagactttcctagatcaagctcttcaaccagttagagataagttttcagactgttatatca

SEQ ID NO: 16049 - DNA, 120 bp, synthetic construct
  source 1..120: mol_type = other DNA
agacctctactccttttcattatttaggtatgcagatagaaaatagaaaaattaagccacaaaaaatagaaataagaaaagacacattaaaaacattaaatgactttcaaaaattgctag

SEQ ID NO: 16050 - DNA, 120 bp, synthetic construct
  source 1..120: mol_type = other DNA
caaaagaaattaaataagtggaagaaaaaattcagtcagcgcaaataaatagaatagatccctgtggggaaaagagagatcagactgtgactgtatctatgtaaaaagaagtagacataa

SEQ ID NO: 16051 - DNA, 120 bp, synthetic construct; identical to SEQ ID NO: 5152
  source 1..120: mol_type = other DNA

SEQ ID NO: 16052 - DNA, 120 bp, synthetic construct
  source 1..120: mol_type = other DNA
ggaggattagtaaaagaggaagtcctctttgcagttgagataagaggaaggcatctgtctcctgctcctccctgggaatggaatgtctcggtgtaaaacccaatcgtacgttccagttac

SEQ ID NO: 16053 - DNA, 120 bp, synthetic construct
  source 1..120: mol_type = other DNA
gcacagcacttttccttaaacttatttatgacacagagatctttgttcacattttttcctgctgaccctctccccaccattaccctatagtcccgccacatccccttctccgagatggta

SEQ ID NO: 16054 - DNA, 120 bp, synthetic construct
  source 1..120: mol_type = other DNA
tcttatttcttttcttagcttctcatcccacctgatgagaaacacccacaggtgtggaggggcaggccaccccttcagatcccttagccccactccaacttttgatttttgctcctgcac

SEQ ID NO: 16055 - DNA, 120 bp, synthetic construct; identical to SEQ ID NO: 5153
  source 1..120: mol_type = other DNA

SEQ ID NO: 16056 - DNA, 120 bp, synthetic construct
  source 1..120: mol_type = other DNA
tgtttactgatggttccagcaatgggaaagcggcttacacagggccaaaagagcaagtaatcaaaattcaatatcaatcggctcaaagagcagagttggctgcagtcattatagtgctat

SEQ ID NO: 16057 - DNA, 120 bp, synthetic construct
  source 1..120: mol_type = other DNA
atttattacaacaaactgtaagaaaaagaaatttcccattttatattactcatattcgagcacacactaatttaccagggcctttaactaaagcaaatgaacaagctgacttactggtat

SEQ ID NO: 16058 - DNA, 120 bp, synthetic construct
  source 1..120: mol_type = other DNA
agtgtcaaatcctacacctgcccactcaagaggtaggagttaatcccagaggtctgtgtcccaatgcgttatggcaaatgggtgtcacgcatgtaccttcatttggaagattatcatgtg

SEQ ID NO: 16059 - DNA, 120 bp, synthetic construct; identical to SEQ ID NO: 5154
  source 1..120: mol_type = other DNA

SEQ ID NO: 16060 - DNA, 120 bp, synthetic construct
  source 1..120: mol_type = other DNA
aatgttttaaacatttatagatatcagactactacttctgcagaacaacatcttactgataaaaagaacagcccacatgaaggaaaactgatttggtggaaagacaacaaaaattagacg

SEQ ID NO: 16061 - DNA, 120 bp, synthetic construct
  source 1..120: mol_type = other DNA
gatgcaaagaaaagcgcctccacggagatggaaacacagcaatcgagcaccatcgactcacaagatgaacagaatggtgatgtcagaagaatagatgaagttgccatccaccaagaagac

SEQ ID NO: 16062 - DNA, 120 bp, synthetic construct
  source 1..120: mol_type = other DNA
aacggtggtgtctccccatgcctgcaggagtagctgcagctaattatacctactgggcctatgtgcctttcctgcccttaattcaggagtcacatggatggataatcctattgaattata

SEQ ID NO: 16063 - DNA, 120 bp, synthetic construct; identical to SEQ ID NO: 5155
  source 1..120: mol_type = other DNA

SEQ ID NO: 16064 - DNA, 120 bp, synthetic construct
  source 1..120: mol_type = other DNA
tgtggccaatagagcagtgatattacaaaacgatgaatttggaactgttatagatagggcacctcgaggtcaattctaccacaattgcacaggacaaactcaatcatgtcccagtgcaca

SEQ ID NO: 16065 - DNA, 120 bp, synthetic construct
  source 1..120: mol_type = other DNA
aataataagtcctgtttctggtcctgaacatccagaattatggaggcttaatgtggcctcattaccatattagaatttggtctagaaatcaagctataaaaacaagagatcataagccgt

SEQ ID NO: 16066 - DNA, 120 bp, synthetic construct
  source 1..120: mol_type = other DNA
aaaattgcagactgtttacttgcattgattcgacttttaattggcagcactgtattctgctagtgagagcaagagaaggcgtgtggatccccgtgtccatgcaccgaccgtgggaggcct

SEQ ID NO: 16067 - DNA, 120 bp, synthetic construct; identical to SEQ ID NO: 5156
  source 1..120: mol_type = other DNA

SEQ ID NO: 16068 - DNA, 120 bp, synthetic construct
  source 1..120: mol_type = other DNA
tgagtctgagcatcactgggacatggttagatgccatctacagggaagagaagataacctcactttagacatttccaaattaaaagaacaaatttttgaagcatcaaaagcccatttaaa

SEQ ID NO: 16069 - DNA, 120 bp, synthetic construct
  source 1..120: mol_type = other DNA
gtgcctgttctgtctgttgttagtctgcaggtgtacccaacagctccaaagagacagcgaccatcgagaacaggccatgatgaacgggccatgatgacgatggcggttttgttgaaaaga

SEQ ID NO: 16070 - DNA, 120 bp, synthetic construct
  source 1..120: mol_type = other DNA
gttaatctgtaaccctatccccaaccctgtgctttgcagagacatgtgctgtgttgactcaaggtttagtggatttagggctgtgcaggatatgctttgttaaaaaagtacttgaaggca

SEQ ID NO: 16071 - DNA, 120 bp, synthetic construct; identical to SEQ ID NO: 5157
  source 1..120: mol_type = other DNA

SEQ ID NO: 16072 - DNA, 120 bp, synthetic construct
  source 1..120: mol_type = other DNA
gctctttaatgcacccagagatgtttgtgtacgagatgtttttgtacatgcacatcaaagcacaacacgttttcttaaacttatttatgacacagagacctttgttcacatgttttcctg

SEQ ID NO: 16073 - DNA, 120 bp, synthetic construct
  source 1..120: mol_type = other DNA
tctcctgggcccacttttctttctctatactttgtttctgtctcttatttcttttttcagtctctcatcccacctgacaagaaacgcccacaggtgtggaggggcaggccaccccttcac

SEQ ID NO: 16074 - DNA, 120 bp, synthetic construct
  source 1..120: mol_type = other DNA
tctgattgatggcttcagccattatttttctggcctaacagctcaaattcaaatgtccagaatagagcaaggtgaattaaaatccttgcttggtatataaaacactcatcaacagaaggc

SEQ ID NO: 16075 - DNA, 120 bp, synthetic construct; identical to SEQ ID NO: 5158
  source 1..120: mol_type = other DNA

SEQ ID NO: 16076 - DNA, 120 bp, synthetic construct
  source 1..120: mol_type = other DNA
tggaaacagcccaacgacgctctcaaaagccgacagttgtttgcgtaaaaaggaatggtatcttactaggggacgaaaggttttggcctacttcctttcaaacatacaagactgtaatat

SEQ ID NO: 16077 - DNA, 120 bp, synthetic construct
  source 1..120: mol_type = other DNA
ttttggcctacttcctttcaaacatacaagactgtaatattttttcgtacctagaggactcagagaaaacgtgcagagcttggacacgtcctacttattcatccatccaaatcctgtacg

SEQ ID NO: 16078 - DNA, 120 bp, synthetic construct
  source 1..120: mol_type = other DNA
ccactccatccagcttgaattcttgattttccaggccaggatttcccaaatctgccggatttcgaatttagggagctttctaaatgatgtaacttaactgcccggccccgcctggaccgt

SEQ ID NO: 16079 - DNA, 120 bp, synthetic construct
  source 1..120: mol_type = other DNA
tacaaagtgttagttccttgcatagatcgtgccccagtccacacaccttctcccttgccctctcctgattccagagagaatcccatctgaaagaggctatgtatccgactgcagcattct

SEQ ID NO: 16080 - DNA, 120 bp, synthetic construct; identical to SEQ ID NO: 5159
  source 1..120: mol_type = other DNA

SEQ ID NO: 16081 - DNA, 120 bp, synthetic construct
  source 1..120: mol_type = other DNA
gagcaagctgacaggtaggaagatgtgtgaagcagaaacaatgaatcccagggtccaaaatcggtctaaggccaagttttattttgttttctagaaatctatatgaatgcatttccagtc

SEQ ID NO: 16082 - DNA, 120 bp, synthetic construct
  source 1..120: mol_type = other DNA
atgaatcccagggtccaaaatcggtctaaggccaagttttattttgttttctagaaatctatatgaatgcatttccagtcttcctgctaccctcacttcaaaggccttctccctagacac

SEQ ID NO: 16083 - DNA, 120 bp, synthetic construct
  source 1..120: mol_type = other DNA
tacattcctccagtgtaggactatgcttagaaacagaggagttcttcgtcttatcatttttactggccccttgtttataccgtcagtgtttatttcaggaaactcaataacttaggcatc

SEQ ID NO: 16084 - DNA, 120 bp, synthetic construct
  source 1..120: mol_type = other DNA
gcagggatctttggtgtgctgttaactcatgaattctactttctggttgtacaactgtaaacacaagcaacttgatttttcagaaggcaagtgtaagagaagaaattttaacccatcgcc

SEQ ID NO: 16085 - DNA, 120 bp, synthetic construct; identical to SEQ ID NO: 5160
  source 1..120: mol_type = other DNA

SEQ ID NO: 16086 - DNA, 120 bp, synthetic construct
  source 1..120: mol_type = other DNA
cgggttcatgccattctcctgcctcagcctcccgagtagctgggactacaggcgccctccaccacacccggctaatttttttgtatttttagtaaagacggggtttcaccgtgttagcca

SEQ ID NO: 16087 - DNA, 120 bp, synthetic construct
  source 1..120: mol_type = other DNA
ctccgcattccttaagaaacgcggtttgggttatccaagttcttccaatcactcacccaaacagacatgagatctgcttctcccaaatcaatggaggtccataatgagaggatggattgg

SEQ ID NO: 16088 - DNA, 120 bp, synthetic construct
  source 1..120: mol_type = other DNA
cccctgactctcaaacttcctgggttcttttataaaatgttgttgctatttttcttgttggttttgttttgttatagttttttaacttaagagttaggtagagaaagtccactggattaa

SEQ ID NO: 16089 - DNA, 120 bp, synthetic construct; identical to SEQ ID NO: 5161
  source 1..120: mol_type = other DNA

SEQ ID NO: 16090 - DNA, 120 bp, synthetic construct
  source 1..120: mol_type = other DNA
ctgattccacaccccatctctatttctcgcttgacgattattatatccacaaacgggttttaaaacagcgacttcaaaactccatcaactttaaatggagtgacatattccctcccaccc

SEQ ID NO: 16091 - DNA, 120 bp, synthetic construct
  source 1..120: mol_type = other DNA
aagaaaaagtcaaagaggcccggaaaccttcaagcagtgccaccgggggattggaaaatgcgagcaggtcctggatatggcaaagcaaatagaattgaattgtctgggaacgagcagagc

SEQ ID NO: 16092 - DNA, 120 bp, synthetic construct
  source 1..120: mol_type = other DNA
caagcaagttttcctttaaagcctcaaaacactgaaaaaaaaagtgttcactggcaaaggcaaggaacatttaagccacccaattttgattctcctcgccttagccctctagaagatttc

SEQ ID NO: 16093 - DNA, 120 bp, synthetic construct; identical to SEQ ID NO: 5162
  source 1..120: mol_type = other DNA

SEQ ID NO: 16094 - DNA, 120 bp, synthetic construct
  source 1..120: mol_type = other DNA
gaaaaatcagtgggtgagttttggctcctcaggcttcacacaggaacaaccacaaaaagagttgttaacaaagattgcttaagggcctctttttcttttccttgatcattctttttcatc

SEQ ID NO: 16095 - DNA, 120 bp, synthetic construct
  source 1..120: mol_type = other DNA
ttcttcttgtcttatgcttatgcaacagggttgtgttatttaagtacagctttgaagaagtaagagaaaagcagtatgaaggaataaacctggactcacctgcatgcttagccggtgctc

SEQ ID NO: 16096 - DNA, 120 bp, synthetic construct
  source 1..120: mol_type = other DNA
tccagtggttggtaggacagtttactgtattcaacctcactatttcagaaaatcctagaccagtccctttttgcagctatgccatgaaaagtaatggaatgctagaccaaaaaacagttt

SEQ ID NO: 16097 - DNA, 120 bp, synthetic construct
  source 1..120: mol_type = other DNA
catcagcttcaactcatcgaggagaatcccaagttgagatatttacttcttttcaatattattttctttcaacttccatgttgtctacaaagtatcaaaaaagacaaaagagtgcaggcc

SEQ ID NO: 16098 - DNA, 120 bp, synthetic construct; identical to SEQ ID NO: 5163
  source 1..120: mol_type = other DNA

SEQ ID NO: 16099 - DNA, 120 bp, synthetic construct
  source 1..120: mol_type = other DNA
gtgttacctcaggggatttagatccaggtaagtgggaaagatagaagtgaaataaattaataatacttgctgagaaatgaagtatgacaaaatgagagacatgagtgccaatctcaaaat

SEQ ID NO: 16100 - DNA, 120 bp, synthetic construct
  source 1..120: mol_type = other DNA
caattaatggatgcttcagctctagttaaggaggccccatagaaggaaagggaaagagtaaaagaagggaaaagctgcaatgtattataaagcctcatttggataaaattctgtccagaa

SEQ ID NO: 16101 - DNA, 120 bp, synthetic construct
  source 1..120: mol_type = other DNA
atctgctgggcacagtggttcacacctgtaatcccaggactttgggaggctgaggcaggtggattatgaggtcaggagttggagaccagcctagccaacatggtgaaacacgatctctac

SEQ ID NO: 16102 - DNA, 120 bp, synthetic construct; identical to SEQ ID NO: 5164
  source 1..120: mol_type = other DNA

SEQ ID NO: 16103 - DNA, 120 bp, synthetic construct
  source 1..120: mol_type = other DNA
attttaaagcttcccagatgattccagtaatcagtcagctttgagaaccaatagcctaggaagtcaagcacccagagcctgtattgaattaattttttaggaaaatttcatagaagagga

SEQ ID NO: 16104 - DNA, 120 bp, synthetic construct
  source 1..120: mol_type = other DNA
tatacaagttcccctttcttctggaagaaaaaacactaaagacatttgtcccacaggaagatctgacttgtttagtctaaaattgttatggctttgacaatgccttgctgcccttttctg

SEQ ID NO: 16105 - DNA, 120 bp, synthetic construct
  source 1..120: mol_type = other DNA
ttggtggcttccataagcaccacagtgtgcaaagtgtgagtggttacactgcaatcaatgttaattatagaagtggaatttatggctgattttggctttagcatctcaggtatgtgtgta

SEQ ID NO: 16106 - DNA, 120 bp, synthetic construct
  source 1..120: mol_type = other DNA
cacctgaggttgggagttcaagaccagcctgaccaacatggagaaaccccgtctctaccaaaaatacaaaatgagctgggtgtggtggcacatgcctgtaatcccagctactcaggaggc

SEQ ID NO: 16107 - DNA, 120 bp, synthetic construct; identical to SEQ ID NO: 5165
  source 1..120: mol_type = other DNA

SEQ ID NO: 16108 - DNA, 120 bp, synthetic construct
  source 1..120: mol_type = other DNA
ggaaactaagtgtttatagtgagcacatccttccatacatcctcctgtttgctcaactggattctaaaagtcgagagtttgagggagcaaaaccaaggttgcagtaaaataagaattcca

SEQ ID NO: 16109 - DNA, 120 bp, synthetic construct
  source 1..120: mol_type = other DNA
aattaaatgggttaccagaagagtgactataggcatgaaagtggaaaaacagatttaagagaatgaggaagaatgcagactgacgggggatttagagttatggatttagtgagtgaggga

SEQ ID NO: 16110 - DNA, 120 bp, synthetic construct
  source 1..120: mol_type = other DNA
aaaagtaagaaacaaaatccctcccactgttatgtggcattaggttttgtattggcattaaggaaaattgagcatgaagaacccatgaagttaaatggaaaaacacttaattcccaatca

SEQ ID NO: 16111 - DNA, 120 bp, synthetic construct; identical to SEQ ID NO: 5166
  source 1..120: mol_type = other DNA

SEQ ID NO: 16112 - DNA, 120 bp, synthetic construct
  source 1..120: mol_type = other DNA
aatgacagcaaagacagaaaggacagaggatcaggagagagtggcatattttctgcctgtgagcttctttttcctcatttcacagtctttctttctcttcagtactattgctaaatggta

SEQ ID NO: 16113 - DNA, 120 bp, synthetic construct
  source 1..120: mol_type = other DNA
ttcaagcaattctcccacctcagcctcccgagtagctgggattataagagtccaccaccatgcccagctaatttttgaatttttagtagagacaagatttcaccatgttggccaggctgg

SEQ ID NO: 16114 - DNA, 120 bp, synthetic construct
  source 1..120: mol_type = other DNA
tggctacttggtgctttgcactcatgcctttcttgtgttttcccaataactctgtgtagtggcaacccattacattttgttttactttgccagggagcagaaaataatgaggggaaaagg

SEQ ID NO: 16115 - DNA, 120 bp, synthetic construct; identical to SEQ ID NO: 5167
  source 1..120: mol_type = other DNA

SEQ ID NO: 16116 - DNA, 120 bp, synthetic construct
  source 1..120: mol_type = other DNA
gagtgcagtggcacaatctcagctcactgcaacctccactttactggctcaagcaattctcctgcctcagcctcccaagtagctgggactacggacatgagctaccacgcccagctaatt

SEQ ID NO: 16117 - DNA, 120 bp, synthetic construct
  source 1..120: mol_type = other DNA
tcaatcttacctgccaagtaagtcctctcccagatcctgtcactggtctaaagcttctttttatttttaattttgagccacctacacatgtgaaagtggaaatggaagacaataattttt

SEQ ID NO: 16118 - DNA, 120 bp, synthetic construct
  source 1..120: mol_type = other DNA
gaagggcatgatatagaaagcaaaggtggaaattatttctagatagataatatttttgaacacatgggtatggacaaaatggccaagaaggactggatagcttggtctataccgtaaaaa

SEQ ID NO: 16119 - DNA, 120 bp, synthetic construct; identical to SEQ ID NO: 5168
  source 1..120: mol_type = other DNA

SEQ ID NO: 16120 - DNA, 120 bp, synthetic construct
  source 1..120: mol_type = other DNA
gcagttgctaggcagatgtccttgtagacatattttttgtgtgtaagattgcaaggttgtggttttcacagtcttttgtgatagttttttttattaggcatacaagcatgagaatcctct

SEQ ID NO: 16121 - DNA, 120 bp, synthetic construct
  source 1..120: mol_type = other DNA
ctgcagctggtaggaccagagaatagtaagttatcaaatagtcttgtgggttttgatgtatttactttctgatcttctccagttctatctccttgaggtcagggattatttcattcacac

SEQ ID NO: 16122 - DNA, 120 bp, synthetic construct
  source 1..120: mol_type = other DNA
caatagttgcatgagattcctttcaagtaatgcaacaaaaacgtaattgcaactaatttctttggtctggatttataactctcctttagggactgaggaattagggtttcaaatctcaaa

SEQ ID NO: 16123 - DNA, 120 bp, synthetic construct; identical to SEQ ID NO: 5169
  source 1..120: mol_type = other DNA

SEQ ID NO: 16124 - DNA, 120 bp, synthetic construct
  source 1..120: mol_type = other DNA
aaccattgcctatgctgacaaaggcttatgtattgcaacttgctcagcaccccacacacatctttaaaccgtacttaccttccaaacaaaaacaaaatccatggaaccctcttttggtga

SEQ ID NO: 16125 - DNA, 120 bp, synthetic construct
  source 1..120: mol_type = other DNA
aaatcataaacttcttggaacctcagaatgtgaccttatttggaaatagagtctgtgcagatgtaatcaagttaagacaagattattaaggtggactctaatccaatatgactgatgtcc

SEQ ID NO: 16126 - DNA, 120 bp, synthetic construct
  source 1..120: mol_type = other DNA
agaagctaagacaaggcaaggaaggattctacccagagtctcagagaaaatatgaccctgttcacaccttgatttcacacttcttgcctccaaaactatgaaagaataaatttccattgt

SEQ ID NO: 16127 - DNA, 120 bp, synthetic construct; identical to SEQ ID NO: 5170
  source 1..120: mol_type = other DNA

SEQ ID NO: 16128 - DNA, 120 bp, synthetic construct
  source 1..120: mol_type = other DNA
atcacagtggatgatattactcactgaaaggcactgctaaaaacccccttaaattccagacatattccttcataaccccatttgtgtagtaacgtcccaatttaagttggtatcaggatc

SEQ ID NO: 16129 - DNA, 120 bp, synthetic construct
  source 1..120: mol_type = other DNA
gtggcctctggtgaaagcatttttcccttgggagctctaagaatcaagctcaacattttaagaactaaaagtaaaactttacaagcagaagattccaggttttctatgtttgcataatcc

SEQ ID NO: 16130 - DNA, 120 bp, synthetic construct
  source 1..120: mol_type = other DNA
aaaacttggaagggtgacccgcaaggaattaaagatgagtttttttatttttagtatttttctcacagctctttactgagagtgagccccaatcatgaagcagttgtgtaggcaacagaa

SEQ ID NO: 16131 - DNA, 120 bp, synthetic construct; identical to SEQ ID NO: 5171
  source 1..120: mol_type = other DNA

SEQ ID NO: 16132 - DNA, 120 bp, synthetic construct
  source 1..120: mol_type = other DNA
atctctgcttactgcaagctctgcctcccgggttcacgccattctcctgcctcagcctcccaagtagttgggcctacaggtgcccgccaccatgcccagctaattaattttggtattttt

SEQ ID NO: 16133 - DNA, 120 bp, synthetic construct
  source 1..120: mol_type = other DNA
cgtgagccaccatgcctggctgagacataaaactttcagtatgaactaatcaggtaagttatctgctaaaaacaagtaaataaatcaagcattctccacaaaatcatcacaataaaaaat

SEQ ID NO: 16134 - DNA, 120 bp, synthetic construct
  source 1..120: mol_type = other DNA
ctcagatcttgaaattatcagatgaggactttcagtgtctattttaactgtggtctatgccaagcatactttaacgaactaaaatgtaaaaatttttattaaaagaaatagaaactgttc

SEQ ID NO: 16135 - DNA, 120 bp, synthetic construct; identical to SEQ ID NO: 5172
  source 1..120: mol_type = other DNA

SEQ ID NO: 16136 - DNA, 120 bp, synthetic construct
  source 1..120: mol_type = other DNA
aaattaaaagttcaatggatagactcagtggagatgtagagaaaaaaaatcagttaacttaaagatagatcaatagaaaccattcaatttaatgggaagagagagaaaaaaaagactgaa

SEQ ID NO: 16137 - DNA, 120 bp, synthetic construct
  source 1..120: mol_type = other DNA
atgtaaatttacagattcaagaaacttccaatcaaaatttaaaaaactaattagacacattatcatccagctgctgaaaataaaagcttttttaaaaatcttggagctgggcatggtggc

SEQ ID NO: 16138 - DNA, 120 bp, synthetic construct
  source 1..120: mol_type = other DNA
ggaaagaagggagggaaaggaaggaaggaaggaaggaaggaaggaaggaaggaaggaaggaaggaaggaagctattttagccaggcacggtagtgcacatctgtagtcccagctacagaa

SEQ ID NO: 16139 - DNA, 120 bp, synthetic construct; identical to SEQ ID NO: 5173
  source 1..120: mol_type = other DNA

SEQ ID NO: 16140 - DNA, 120 bp, synthetic construct
  source 1..120: mol_type = other DNA
ggtattctcaaagaagggaagctacaagaatgcattaccatcaaatcttctgtgtaagaaatattgagaaaattattcaggctgaaaggaaatgataccagagggaaacttggatcttca

SEQ ID NO: 16141 - DNA, 120 bp, synthetic construct
  source 1..120: mol_type = other DNA
taatacatttgacaactataacaaagttggtgaaggggtaaaggatcctatattggtgctggactttcatgaagtctaagtggatggcgtgcatattgtaatcactaaatcacagagcaa

SEQ ID NO: 16142 - DNA, 120 bp, synthetic construct
  source 1..120: mol_type = other DNA
aaaaacaccagagagaacaaatggaaatcaaataagaaagtggcagacataaatccacacatttgataagggcctagtatcaatatataaagaactagaatacaacttccaatctcaaca

SEQ ID NO: 16143 - DNA, 120 bp, synthetic construct; identical to SEQ ID NO: 5174
  source 1..120: mol_type = other DNA

SEQ ID NO: 16144 - DNA, 120 bp, synthetic construct
  source 1..120: mol_type = other DNA
ctttccccacgcctataatcccagcacgatgggaggccgaggcgggaggattacgaggtcaggagttcgagaccagcctgaccaacatagtgaaacccgtctccgctaaaaaaaaaaaaa

SEQ ID NO: 16145 - DNA, 120 bp, synthetic construct
  source 1..120: mol_type = other DNA
atcgcgccactgcactccagcctgggcgatagagcgagactccgtctcaaaaaacaaaaacaaacaaacaaaaaaaaaactgccattcccagtacctattgcacaaaaattcagccacac

SEQ ID NO: 16146 - DNA, 120 bp, synthetic construct
  source 1..120: mol_type = other DNA
gcctactttgtttagaagagtgaaaccttctgtcttgccgtgggcctggtgaaaacgcgacagataggggaacttggatacgtccagtctccctccctatttaaatgctgatggtgtttc

SEQ ID NO: 16147 - DNA, 120 bp, synthetic construct; identical to SEQ ID NO: 5175
  source 1..120: mol_type = other DNA

SEQ ID NO: 16148 - DNA, 120 bp, synthetic construct
  source 1..120: mol_type = other DNA
gcgcagggaggtcttaaaaagagcgaattccttcctcttgctttctttgtgttcgcctcaccgtgaaaggattttgcctgaaagaggtgaaagtcgcctggagctgttttctttctggtc

SEQ ID NO: 16149 - DNA, 120 bp, synthetic construct
  source 1..120: mol_type = other DNA
catttcacgctgatattgtgaattaattcccctccagtcttatctcctctcttggacctccgttccctgagtagctctcctagtactggtcttagtattccctagtagtaccgtttatgt

SEQ ID NO: 16150 - DNA, 120 bp, synthetic construct
  source 1..120: mol_type = other DNA
tagtactggtcttagtattccctagtagtaccgtttatgtttttctgggagcactgcagacagaaaagtaggaagttgactgtttaagataatatttctacctgggattctccttggtgg

SEQ ID NO: 16151 - DNA, 120 bp, synthetic construct
  source 1..120: mol_type = other DNA
gaaatagtagagttggatagagtagactttgacctcggtttaaatcgtagaacactagcagataacagtgacagccagttataaaatatagcaaaaaagctagctttaagggggtgtagc

SEQ ID NO: 16152 - DNA, 120 bp, synthetic construct; identical to SEQ ID NO: 5176
  source 1..120: mol_type = other DNA

SEQ ID NO: 16153 - DNA, 120 bp, synthetic construct
  source 1..120: mol_type = other DNA
tgagcagcatgatgaaatgtcgcctcatgtgctccatcccgcctgggaagtaaaccatctatttgtccagcatatccacgctgtgtagtaagccacccactagttagtcagtcagtagcc

SEQ ID NO: 16154 - DNA, 120 bp, synthetic construct
  source 1..120: mol_type = other DNA
caagagtagtgatgctggcagtttgggtatgccaaagagaagccctaaagtgctacctttaagtgaaaaggggaaagttttctacttaataaggaaacagaaacaaattcatatcagagg

SEQ ID NO: 16155 - DNA, 120 bp, synthetic construct
  source 1..120: mol_type = other DNA
aaaagacagtaaatatgtgggtgaaacacgtgaacagaacacttaatctacttgagggcaacacgttataccagaaaacactgagcccatatgaagacttcatcaagggatcctctgaaa

SEQ ID NO: 16156 - DNA, 120 bp, synthetic construct; identical to SEQ ID NO: 5177
  source 1..120: mol_type = other DNA

SEQ ID NO: 16157 - DNA, 120 bp, synthetic construct
  source 1..120: mol_type = other DNA
caagaccaggctggccaacatggcgaaaccctgtccctactaaaaatacaaaaaaaataggcaggcatggggtgcacagctgtactcccagctactctagaggctgagtcaggagaatca

SEQ ID NO: 16158 - DNA, 120 bp, synthetic construct
  source 1..120: mol_type = other DNA
tcctacatactgtggatatgacttacatttgtggtcattattaacatagtcatagtaataaccttctaaagagaagttggaagccagcatttacaggtggaaagaaagctgatgcagctt

SEQ ID NO: 16159 - DNA, 120 bp, synthetic construct
  source 1..120: mol_type = other DNA
aaaagagttccaaagagccgcggtattgtgagtaataacaatgttgctaccttttactcatggtaggaaacatagaattagccagaaacagtgtgattaacaataaataacatgaacaga

SEQ ID NO: 16160 - DNA, 120 bp, synthetic construct
  source 1..120: mol_type = other DNA
atatgtaagtacccattattctaaatctctattaatacacaacaagatcctcacaggatcccctaaattttgtaaaacattttttaatcaaattatatactcgttagccagatgtggtgg

SEQ ID NO: 16161 - DNA, 120 bp, synthetic construct; identical to SEQ ID NO: 5178
  source 1..120: mol_type = other DNA

SEQ ID NO: 16162 - DNA, 120 bp, synthetic construct
  source 1..120: mol_type = other DNA
tttatatataatatattaatatatcatatatatttatatatatgatattaatatattatatataaatgtatgttattcacattatataaataaaaatatatatattaattattcacttta

SEQ ID NO: 16163 - DNA, 120 bp, synthetic construct
  source 1..120: mol_type = other DNA
ggtggctctgccccatttttattctgtgagtcttggcaccatccaaacaactgtcatcacgaaagaaggaggatagaaattagtaacagatctgatttacacaggttcttttgacatcaa

SEQ ID NO: 16164 - DNA, 120 bp, synthetic construct
  source 1..120: mol_type = other DNA
tctttttttttttgagatggaatttcgttcttgttgcccaggctggagtgcaatggcacgatctcagctcactgcaacctctacctctcgggttcaagtgattctcctgcctcagcctcc

SEQ ID NO: 16165 - DNA, 120 bp, synthetic construct; identical to SEQ ID NO: 5179
  source 1..120: mol_type = other DNA

SEQ ID NO: 16166 - DNA, 120 bp, synthetic construct
  source 1..120: mol_type = other DNA
ttcaccattttggccaggctggtctcgaactcctgaccttgtgatccgccctccttggcctcccaaagtgctgagcttacagtcatgagccaccacgcccggcttacttctcattatttc

SEQ ID NO: 16167 - DNA, 120 bp, synthetic construct
  source 1..120: mol_type = other DNA
tatacatagtggttatcttttatcgggcattaattatcaattagaatatgaaaggattaagcaaaaatcatgttcctcaaggagaggtgccaggttcctcaaggagaggcgccaggacaa

SEQ ID NO: 16168 - DNA, 120 bp, synthetic construct
  source 1..120: mol_type = other DNA
tcatgtttcatctcctcgtaagaatgagagaagctgaaaaacacgtaagctgccaccaccgtagaaaccccgtcaagtggaacacgtgttctgttcacgtatttcacccacaaatttagt

(The sequence listing continues in the following parts.)
